United States Patent Application Publication US 2006/0003322 A1 - sequence listing, part 7

SEQ ID NO: 239326 - RNA, 18 nt, Human
cggugugguggcacgggc

SEQ ID NO: 239327 - RNA, 18 nt, Human
cuccggcucuucuuuccc

SEQ ID NO: 239328 - RNA, 18 nt, Human
cucuucuuucccggcucc

SEQ ID NO: 239329 - RNA, 19 nt, Human
gcucagaggacggcccagg

SEQ ID NO: 239330 - RNA, 19 nt, Human
gcuccggcucuucuuuccc

SEQ ID NO: 239331 - RNA, 21 nt, Human
ggaagcgagcgccccuccccg

SEQ ID NO: 239332 - RNA, 18 nt, Human
uccggcucuucuuucccg

SEQ ID NO: 239333 - RNA, 18 nt, Human
uggaggcuccggcucuuc

SEQ ID NO: 239334 - RNA, 20 nt, Human
uggaggcuccggcucuucuu

SEQ ID NO: 239335 - RNA, 21 nt, Human
uuagccccgucugcugcucag

SEQ ID NO: 239336 - RNA, 24 nt, Human
aacacaccuggggagaagagcugg

SEQ ID NO: 239337 - RNA, 23 nt, Human
agacaccccuucccuccccacuc

SEQ ID NO: 239338 - RNA, 18 nt, Human
agccaaggccccaacaca

SEQ ID NO: 239339 - RNA, 24 nt, Human
caauagacaccccuucccucccca

SEQ ID NO: 239340 - RNA, 23 nt, Human
caccccuucccuccccacucccc

SEQ ID NO: 239341 - RNA, 21 nt, Human
cagcaggggagccaaggcccc

SEQ ID NO: 239342 - RNA, 21 nt, Human
caggacaggacuccacaccgc

SEQ ID NO: 239343 - RNA, 18 nt, Human
cagugaauggcugaggcu

SEQ ID NO: 239344 - RNA, 22 nt, Human
cccaccuucagcaggggagcca

SEQ ID NO: 239345 - RNA, 23 nt, Human
cccacuaggucugcaagccccua

SEQ ID NO: 239346 - RNA, 19 nt, Human
ccccuucccuccccacucc

SEQ ID NO: 239347 - RNA, 18 nt, Human
cccuccccacuccccgcg

SEQ ID NO: 239348 - RNA, 23 nt, Human
cccuguugcccaauagacacccc

SEQ ID NO: 239349 - RNA, 23 nt, Human
cgagaggaaagccagccugcacc

SEQ ID NO: 239350 - RNA, 28 nt, Human
cgagaggaaagccagccugcaccucacu

SEQ ID NO: 239351 - RNA, 22 nt, Human
cgcccuguugcccaauagacac

SEQ ID NO: 239352 - RNA, 19 nt, Human
cuccccacuccccgcggcu

SEQ ID NO: 239353 - RNA, 19 nt, Human
cugaggcaggacaggacuu

SEQ ID NO: 239354 - RNA, 21 nt, Human
ggagaagagcugggggcagug

SEQ ID NO: 239355 - RNA, 20 nt, Human
ggagcugggccaucuucuuc

SEQ ID NO: 239356 - RNA, 20 nt, Human
ggccccaacacaccugggga

SEQ ID NO: 239357 - RNA, 20 nt, Human
ggggagaagagcugggggca

SEQ ID NO: 239358 - RNA, 24 nt, Human
gggggcagugaauggcugaggcuu

SEQ ID NO: 239359 - RNA, 21 nt, Human
uccacaccgcgcugcgagagg

SEQ ID NO: 239360 - RNA, 19 nt, Human
uccccacuccccgcggcca

SEQ ID NO: 239361 - RNA, 21 nt, Human
uccccgcggccaggucuacuu

SEQ ID NO: 239362 - RNA, 18 nt, Human
ucuuggggagcugggcca

SEQ ID NO: 239363 - RNA, 20 nt, Human
ugccuggcugcugcgauguu

SEQ ID NO: 239364 - RNA, 21 nt, Human
ugcgauguucuuucucuccca

SEQ ID NO: 239365 - RNA, 23 nt, Human
uggcaaacgaaggcucugcacuu

SEQ ID NO: 239366 - RNA, 21 nt, Human
uucagcaggggagccaaggcc

SEQ ID NO: 239367 - RNA, 19 nt, Human
uucccuccccacuccccgc

SEQ ID NO: 239368 - RNA, 19 nt, Human
aacaggccacccaggagcc

SEQ ID NO: 239369 - RNA, 22 nt, Human
aacaggccacccaggagccuga

SEQ ID NO: 239370 - RNA, 19 nt, Human
aagcaauccagugcucccc

SEQ ID NO: 239371 - RNA, 23 nt, Human
acagcacagacugcagggaacag

SEQ ID NO: 239372 - RNA, 21 nt, Human
agcgcugccaggccagccccg

SEQ ID NO: 239373 - RNA, 19 nt, Human
aggggugugcugccgcugg

SEQ ID NO: 239374 - RNA, 19 nt, Human
aguggcugggcccuucccu

SEQ ID NO: 239375 - RNA, 22 nt, Human
auggacaccuggggugugugua

SEQ ID NO: 239376 - RNA, 22 nt, Human
cagaugaaggacgcucauaaug

SEQ ID NO: 239377 - RNA, 25 nt, Human
cagcauggcaagugcagcgcugcca

SEQ ID NO: 239378 - RNA, 21 nt, Human
cagccccgagacaggcccaga

SEQ ID NO: 239379 - RNA, 23 nt, Human
caggccagccccgagacaggccc

SEQ ID NO: 239380 - RNA, 23 nt, Human
cauaacaggccacccaggagccu

SEQ ID NO: 239381 - RNA, 24 nt, Human
ccaagaucaaaagcuggaaguggc

SEQ ID NO: 239382 - RNA, 27 nt, Human
ccacaccccugucaaccuaaaguugac

SEQ ID NO: 239383 - RNA, 22 nt, Human
ccagccccgagacaggcccaga

SEQ ID NO: 239384 - RNA, 21 nt, Human
ccagugcuccccauggacacc

SEQ ID NO: 239385 - RNA, 19 nt, Human
cccugggaggccugggcug

SEQ ID NO: 239386 - RNA, 18 nt, Human
cccuugcggucgcggcca

SEQ ID NO: 239387 - RNA, 21 nt, Human
ccugaggaguauagggaggga

SEQ ID NO: 239388 - RNA, 19 nt, Human
cuaaagcuggucuggccac

SEQ ID NO: 239389 - RNA, 26 nt, Human
cugcagggaacagaggccgcuggcau

SEQ ID NO: 239390 - RNA, 23 nt, Human
cuggaaguggcugggcccuuccc

SEQ ID NO: 239391 - RNA, 19 nt, Human
gcggucgcggccacacccc

SEQ ID NO: 239392 - RNA, 23 nt, Human
ggccacaccccugucaaccuaaa

SEQ ID NO: 239393 - RNA, 23 nt, Human
ggcugggcccuucccugggaggc

SEQ ID NO: 239394 - RNA, 23 nt, Human
ggcugguuuccagcauggcaagu

SEQ ID NO: 239395 - RNA, 19 nt, Human
uaacaggccacccaggagc

SEQ ID NO: 239396 - RNA, 19 nt, Human
uacaggggugugcugccgc

SEQ ID NO: 239397 - RNA, 20 nt, Human
uacaggggugugcugccgcu

SEQ ID NO: 239398 - RNA, 19 nt, Human
uccccauggacaccugggg

SEQ ID NO: 239399 - RNA, 19 nt, Human
ucccugggaggccugggcu

SEQ ID NO: 239400 - RNA, 20 nt, Human
ucccugggaggccugggcug

SEQ ID NO: 239401 - RNA, 24 nt, Human
ucccugggaggccugggcugguuu

SEQ ID NO: 239402 - RNA, 23 nt, Human
ugagaagagccuuuuauuagaag

SEQ ID NO: 239403 - RNA, 21 nt, Human
ugccacggcagcccuggccac

SEQ ID NO: 239404 - RNA, 19 nt, Human
ugccucaguccuuacccuc

SEQ ID NO: 239405 - RNA, 25 nt, Human
uggcugggcccuucccugggaggcc

SEQ ID NO: 239406 - RNA, 20 nt, Human
ugggguguguguaaggcggc

SEQ ID NO: 239407 - RNA, 23 nt, Human
aaacagcauuuauuccagacucc

SEQ ID NO: 239408 - RNA, 21 nt, Human
aaggcccccucccacccaccc

SEQ ID NO: 239409 - RNA, 23 nt, Human
accaggggcggggugaggggggg

SEQ ID NO: 239410 - RNA, 27 nt, Human
acccacccacccucccucuccuucccu

SEQ ID NO: 239411 - RNA, 23 nt, Human
acccucccucuccuucccucccg

SEQ ID NO: 239412 - RNA, 18 nt, Human
agaggaaggaagggaggg

SEQ ID NO: 239413 - RNA, 31 nt, Human
agaggaaggaagggagggcugggcagggagg

SEQ ID NO: 239414 - RNA, 18 nt, Human
agagggaagagggaaggc

SEQ ID NO: 239415 - RNA, 22 nt, Human
agagggaaggcgggggcgggcc

SEQ ID NO: 239416 - RNA, 22 nt, Human
agcuccagguccagggacagcc

SEQ ID NO: 239417 - RNA, 19 nt, Human
aggaaggaagggagggcug

SEQ ID NO: 239418 - RNA, 21 nt, Human
aggaagggagggcugggcagg

SEQ ID NO: 239419 - RNA, 22 nt, Human
aggagcuauucuggggccuggg

SEQ ID NO: 239420 - RNA, 20 nt, Human
aggcagccacuguggguccc

SEQ ID NO: 239421 - RNA, 27 nt, Human
aggcgggagguaaaaauaggggacccc

SEQ ID NO: 239422 - RNA, 21 nt, Human
aggcgggggcgggcauggcgu

SEQ ID NO: 239423 - RNA, 18 nt, Human
agggcgggggcaggagug

SEQ ID NO: 239424 - RNA, 26 nt, Human
aggggcggggugaggggggggaaucc

SEQ ID NO: 239425 - RNA, 19 nt, Human
agguggggggaccagcagg

SEQ ID NO: 239426 - RNA, 18 nt, Human
cagcaggggaggcgggag

SEQ ID NO: 239427 - RNA, 19 nt, Human
ccacccucccucuccuucc

SEQ ID NO: 239428 - RNA, 22 nt, Human
cccacccacccacccucccucu

SEQ ID NO: 239429 - RNA, 19 nt, Human
cccccucccacccacccac

SEQ ID NO: 239430 - RNA, 20 nt, Human
cccccucccacccacccacc

SEQ ID NO: 239431 - RNA, 20 nt, Human
ccccucccacccacccaccc

SEQ ID NO: 239432 - RNA, 21 nt, Human
cccucccucuccuucccuccc

SEQ ID NO: 239433 - RNA, 25 nt, Human
cccuggaggaaggcccccucccacc

SEQ ID NO: 239434 - RNA, 19 nt, Human
ccucccacccacccacccu

SEQ ID NO: 239435 - RNA, 21 nt, Human
ccucccacccacccacccucc

SEQ ID NO: 239436 - RNA, 20 nt, Human
ccucccggaggcaggcagcu

SEQ ID NO: 239437 - RNA, 22 nt, Human
cuccuucccucccggaggcagg

SEQ ID NO: 239438 - RNA, 18 nt, Human
gccggcagaggaaggaag

SEQ ID NO: 239439 - RNA, 19 nt, Human
ggaagggagggcugggcag

SEQ ID NO: 239440 - RNA, 21 nt, Human
ggagugggaccaggggcgggg

SEQ ID NO: 239441 - RNA, 18 nt, Human
ggcaggagugggaccagg

SEQ ID NO: 239442 - RNA, 19 nt, Human
ggcagggagagggaagagg

SEQ ID NO: 239443 - RNA, 18 nt, Human
ggcuuggguccaggagcu

SEQ ID NO: 239444 - RNA, 20 nt, Human
gggaccagcaggggaggcga

SEQ ID NO: 239445 - RNA, 18 nt, Human
gggcaggagugggaccag

SEQ ID NO: 239446 - RNA, 20 nt, Human
gggcagggagagggaagagg

SEQ ID NO: 239447 - RNA, 21 nt, Human
gggcggagguagggcgggggc

SEQ ID NO: 239448 - RNA, 18 nt, Human
gggcggggugaggggggg

SEQ ID NO: 239449 - RNA, 22 nt, Human
ggggaccagcaggggaggcggg

SEQ ID NO: 239450 - RNA, 23 nt, Human
ggggcaggagugggaccaggggc

SEQ ID NO: 239451 - RNA, 26 nt, Human
ggguggggcggagguagggcgggggc

SEQ ID NO: 239452 - RNA, 18 nt, Human
gugggaccaggggcgggg

SEQ ID NO: 239453 - RNA, 23 nt, Human
ucagguggggggaccagcagggg

SEQ ID NO: 239454 - RNA, 18 nt, Human
uccaguguccacagauga

SEQ ID NO: 239455 - RNA, 19 nt, Human
ucccacccacccacccucc

SEQ ID NO: 239456 - RNA, 22 nt, Human
ucccaggcugggccuugggcuu

SEQ ID NO: 239457 - RNA, 22 nt, Human
ucccggaggcaggcagccacug

SEQ ID NO: 239458 - RNA, 20 nt, Human
ucccugccuugccggcagag

SEQ ID NO: 239459 - RNA, 21 nt, Human
ucccuggaggaaggcccccuc

SEQ ID NO: 239460 - RNA, 22 nt, Human
uggggggaccagcaggggaggc

SEQ ID NO: 239461 - RNA, 18 nt, Human
uucucugaugccugcagc

SEQ ID NO: 239462 - RNA, 22 nt, Human
aaaauauuguuccaggauacag

SEQ ID NO: 239463 - RNA, 21 nt, Human
acagaaaaacauaaccauaaa

SEQ ID NO: 239464 - RNA, 21 nt, Human
acaguaauaaaauauggauac

SEQ ID NO: 239465 - RNA, 18 nt, Human
agaaaaacauaaccauaa

SEQ ID NO: 239466 - RNA, 23 nt, Human
aguagaaauaaaaaaacacuaaa

SEQ ID NO: 239467 - RNA, 24 nt, Human
auuaaacauaacaugcaaauaauc

SEQ ID NO: 239468 - RNA, 21 nt, Human
cacacagaaaaacauaaccau

SEQ ID NO: 239469 - RNA, 20 nt, Human
caggacggaacuggcugcca

SEQ ID NO: 239470 - RNA, 24 nt, Human
cauggaaguaauaaacaguaauaa

SEQ ID NO: 239471 - RNA, 20 nt, Human
cugacacacagaaaaacaua

SEQ ID NO: 239472 - RNA, 26 nt, Human
cuuugaggaacauuaagauuuaagga

SEQ ID NO: 239473 - RNA, 18 nt, Human
gcaagagaguaacaucca

SEQ ID NO: 239474 - RNA, 21 nt, Human
guguucuugugaugaaauagg

SEQ ID NO: 239475 - RNA, 21 nt, Human
uaaagcagaugcacuauggac

SEQ ID NO: 239476 - RNA, 24 nt, Human
uaacaugcaaauaaucaaagagaa

SEQ ID NO: 239477 - RNA, 20 nt, Human
uaauuuggugcaagagagua

SEQ ID NO: 239478 - RNA, 18 nt, Human
uacaaauaaagcauugag

SEQ ID NO: 239479 - RNA, 24 nt, Human
uaucaagauaauuuggugcaagag

SEQ ID NO: 239480 - RNA, 21 nt, Human
uauucguguauaugugugugu

SEQ ID NO: 239481 - RNA, 18 nt, Human
ucugucaggacggaacug

SEQ ID NO: 239482 - RNA, 19 nt, Human
ugaaauaggccugccuuuc

SEQ ID NO: 239483 - RNA, 23 nt, Human
ugaauccuuacugucuugacacu

SEQ ID NO: 239484 - RNA, 22 nt, Human
ugacacacagaaaaacauaacc

SEQ ID NO: 239485 - RNA, 23 nt, Human
ugacacacagaaaaacauaacca

SEQ ID NO: 239486 - RNA, 19 nt, Human
ugcugugaacucugucagg

SEQ ID NO: 239487 - RNA, 24 nt, Human
uggcugccagauucugagugauac

SEQ ID NO: 239488 - RNA, 21 nt, Human
uguuuacaaaacauuucccuc

SEQ ID NO: 239489 - RNA, 19 nt, Human
uuaauucuuaaagcagaug

SEQ ID NO: 239490 - RNA, 24 nt, Human
uucacuagguaaguaugcaaauuc

SEQ ID NO: 239491 - RNA, 24 nt, Human
uucuuggccucaauaucuaccacc

SEQ ID NO: 239492 - RNA, 22 nt, Human
uugcuauguuuuauuuugcuag

SEQ ID NO: 239493 - RNA, 21 nt, Human
uuuggcaaaugguuugaaucc

SEQ ID NO: 239494 - RNA, 22 nt, Human
uuuuuuuuuuuuuuuuucauuu

SEQ ID NO: 239495 - RNA, 22 nt, Human
aaaaaccuucuuuaggagaaag

SEQ ID NO: 239496 - RNA, 21 nt, Human
aaaaagacacucccaggggcu

SEQ ID NO: 239497 - RNA, 19 nt, Human
aaagagcauuggauuuaga

SEQ ID NO: 239498 - RNA, 24 nt, Human
aaagugcugggauuacagguguga

SEQ ID NO: 239499 - RNA, 23 nt, Human
aacccaguucuacucaguucuca

SEQ ID NO: 239500 - RNA, 22 nt, Human
aagcaaaugcagaucaaagaau

SEQ ID NO: 239501 - RNA, 18 nt, Human
aagugcugggauuacagg

SEQ ID NO: 239502 - RNA, 19 nt, Human
aagugcugggauuacaggu

SEQ ID NO: 239503 - RNA, 26 nt, Human
aagugcugggauuacaggugugagcc

SEQ ID NO: 239504 - RNA, 24 nt, Human
accuugugauccgccugccuuggc

SEQ ID NO: 239505 - RNA, 20 nt, Human
accuuucucuuggcaaccac

SEQ ID NO: 239506 - RNA, 19 nt, Human
acgggguuucacuauauug

SEQ ID NO: 239507 - RNA, 24 nt, Human
acgggguuucacuauauuguccag

SEQ ID NO: 239508 - RNA, 24 nt, Human
acuauauuguccaggcuggucuug

SEQ ID NO: 239509 - RNA, 26 nt, Human
agcuaauuuuguauuuuuaguagaga

SEQ ID NO: 239510 - RNA, 20 nt, Human
agcugcucuggcaaaccaag

SEQ ID NO: 239511 - RNA, 18 nt, Human
agggcaccgggccuccuc

SEQ ID NO: 239512 - RNA, 23 nt, Human
aguagcugcgauuacaggcaugu

SEQ ID NO: 239513 - RNA, 22 nt, Human
agucaucugcuuuuuuaaagaa

SEQ ID NO: 239514 - RNA, 24 nt, Human
agugauucuccugccucagccucc

SEQ ID NO: 239515 - RNA, 19 nt, Human
auccgccugccuuggccuc

SEQ ID NO: 239516 - RNA, 18 nt, Human
auguccccucugcggccc

SEQ ID NO: 239517 - RNA, 19 nt, Human
augugccaccacacccagc

SEQ ID NO: 239518 - RNA, 23 nt, Human
auucuaccuuuuuaauauucucc

SEQ ID NO: 239519 - RNA, 18 nt, Human
auucuccugccucagccu

SEQ ID NO: 239520 - RNA, 24 nt, Human
caaagugcugggauuacaggugug

SEQ ID NO: 239521 - RNA, 20 nt, Human
caagugauucuccugccuca

SEQ ID NO: 239522 - RNA, 22 nt, Human
caagugauucuccugccucagc

SEQ ID NO: 239523 - RNA, 19 nt, Human
caccgggccuccuccuguu

SEQ ID NO: 239524 - RNA, 24 nt, Human
cacuauauuguccaggcuggucuu

SEQ ID NO: 239525 - RNA, 24 nt, Human
cacucuuguugcccaggcuggagu

SEQ ID NO: 239526 - RNA, 21 nt, Human
cacugcaaccuccgccuccug

SEQ ID NO: 239527 - RNA, 23 nt, Human
cacugcaaccuccgccuccuggg

SEQ ID NO: 239528 - RNA, 20 nt, Human
cagaaagggcaccgggccuc

SEQ ID NO: 239529 - RNA, 21 nt, Human
cagacagcugucuggggggca

SEQ ID NO: 239530 - RNA, 18 nt, Human
cagccuccugaguagcug

SEQ ID NO: 239531 - RNA, 29 nt, Human
cagcuaauuuuguauuuuuaguagagacg

SEQ ID NO: 239532 - RNA, 19 nt, Human
caggcacacaauacucagg

SEQ ID NO: 239533 - RNA, 21 nt, Human
caucccugagaggccagcagc

SEQ ID NO: 239534 - RNA, 21 nt, Human
ccaaagugcugggauuacagg

SEQ ID NO: 239535 - RNA, 21 nt, Human
ccaaagugcugggauuacagg

SEQ ID NO: 239536 - RNA, 24 nt, Human
ccaaagugcugggauuacaggugu

SEQ ID NO: 239537 - RNA, 20 nt, Human
ccaccacacccagcuaauuu

SEQ ID NO: 239538 - RNA, 22 nt, Human
cccaagcaaaugcagaucaaag

SEQ ID NO: 239539 - RNA, 18 nt, Human
cccaggcagauauucaag

SEQ ID NO: 239540 - RNA, 19 nt, Human
cccaggcuggaguacaaug

SEQ ID NO: 239541 - RNA, 21 nt, Human
cccaucagcugcagcugcuuc

SEQ ID NO: 239542 - RNA, 24 nt, Human
ccccaucagcugcagcugcuucuu

SEQ ID NO: 239543 - RNA, 24 nt, Human
ccgccuccuggguucaagugauuc

SEQ ID NO: 239544 - RNA, 22 nt, Human
ccuccgccuccuggguucaagu

SEQ ID NO: 239545 - RNA, 24 nt, Human
ccuccuggguucaagugauucucc

SEQ ID NO: 239546 - RNA, 19 nt, Human
ccugaguagcugcgauuac

SEQ ID NO: 239547 - RNA, 23 nt, Human
ccugaguagcugcgauuacaggc

SEQ ID NO: 239548 - RNA, 24 nt, Human
ccugaguagcugcgauuacaggca

SEQ ID NO: 239549 - RNA, 23 nt, Human
ccugccucagccuccugaguagc

SEQ ID NO: 239550 - RNA, 22 nt, Human
ccugccuuggccucccaaagug

SEQ ID NO: 239551 - RNA, 23 nt, Human
ccuggguucaagugauucuccuc

SEQ ID NO: 239552 - RNA, 23 nt, Human
ccuggguucaagugauucuccug

SEQ ID NO: 239553 - RNA, 24 nt, Human
cucacugcaaccuccgccuccugg

SEQ ID NO: 239554 - RNA, 24 nt, Human
cuccugaccuugugauccgccugc

SEQ ID NO: 239555 - RNA, 20 nt, Human
cuccuggguucaagugauuc

SEQ ID NO: 239556 - RNA, 21 nt, Human
cuccuggguucaagugauucu

SEQ ID NO: 239557 - RNA, 18 nt, Human
cucuuguugcccaggcug

SEQ ID NO: 239558 - RNA, 18 nt, Human
cugagccucacacucaca

SEQ ID NO: 239559 - RNA, 24 nt, Human
cugaguagcugcgauuacaggcau

SEQ ID NO: 239560 - RNA, 23 nt, Human
cugauaauaugagacagacagcu

SEQ ID NO: 239561 - RNA, 23 nt, Human
cugcaaccuccgccuccuggguu

SEQ ID NO: 239562 - RNA, 24 nt, Human
cugcaaccuccgccuccuggguuc

SEQ ID NO: 239563 - RNA, 23 nt, Human
cugccucagccuccugaguagcu

SEQ ID NO: 239564 - RNA, 23 nt, Human
cugccuuggccucccaaagugcu

SEQ ID NO: 239565 - RNA, 22 nt, Human
cuguucugagggccuacgggga

SEQ ID NO: 239566 - RNA, 22 nt, Human
cuuggcaaccacaaucuucuuu

SEQ ID NO: 239567 - RNA, 21 nt, Human
gaccuugugauccgccugccu

SEQ ID NO: 239568 - RNA, 24 nt, Human
gaccuugugauccgccugccuugg

SEQ ID NO: 239569 - RNA, 18 nt, Human
gagcuccuuuagcugcuc

SEQ ID NO: 239570 - RNA, 22 nt, Human
gaguagcugcgauuacaggcau

SEQ ID NO: 239571 - RNA, 18 nt, Human
gauuacaggcaugugcca

SEQ ID NO: 239572 - RNA, 18 nt, Human
gauuacaggugugagcca

SEQ ID NO: 239573 - RNA, 21 nt, Human
gauuacaggugugagccacca

SEQ ID NO: 239574 - RNA, 22 nt, Human
gauuacaggugugagccaccac

SEQ ID NO: 239575 - RNA, 18 nt, Human
gcagcugcuucuugugcu

SEQ ID NO: 239576 - RNA, 20 nt, Human
gcccagagcuccccaucagc

SEQ ID NO: 239577 - RNA, 19 nt, Human
gcccaggcuggaguacaau

SEQ ID NO: 239578 - RNA, 20 nt, Human
gccgcucagcugccagcgac

SEQ ID NO: 239579 - RNA, 22 nt, Human
gccuuggccucccaaagugcug

SEQ ID NO: 239580 - RNA, 18 nt, Human
gcggccccgaaccgcgcu

SEQ ID NO: 239581 - RNA, 19 nt, Human
gcuccuuuagcugcucugg

SEQ ID NO: 239582 - RNA, 24 nt, Human
gcugcuucuugugcuuuucaugcu

SEQ ID NO: 239583 - RNA, 19 nt, Human
ggagaaaggucaaaccccc

SEQ ID NO: 239584 - RNA, 18 nt, Human
ggagcuccuuuagcugcu

SEQ ID NO: 239585 - RNA, 23 nt, Human
ggcuggucuugaacuccugaccu

SEQ ID NO: 239586 - RNA, 21 nt, Human
gggccuccuccuguugcccag

SEQ ID NO: 239587 - RNA, 20 nt, Human
ggggaugagaaaugguuacc

SEQ ID NO: 239588 - RNA, 23 nt, Human
gggguuucacuauauuguccagg

SEQ ID NO: 239589 - RNA, 22 nt, Human
ggguuucacuauauuguccagg

SEQ ID NO: 239590 - RNA, 20 nt, Human
ggucuugaacuccugaccuu

SEQ ID NO: 239591 - RNA, 20 nt, Human
guagcugcgauuacaggcau

SEQ ID NO: 239592 - RNA, 24 nt, Human
gugauucuccugccucagccuccu

SEQ ID NO: 239593 - RNA, 23 nt, Human
guuucacuauauuguccaggcug

SEQ ID NO: 239594 - RNA, 22 nt, Human
uaaaauaggcccaguguaagcc

SEQ ID NO: 239595 - RNA, 23 nt, Human
uaagaaagguuagcagaguagaa

SEQ ID NO: 239596 - RNA, 19 nt, Human
uaauaucugcccccaggcc

SEQ ID NO: 239597 - RNA, 23 nt, Human
uacaauggugcgaucuuggcucc

SEQ ID NO: 239598 - RNA, 24 nt, Human
uacaggcaugugccaccacaccca

SEQ ID NO: 239599 - RNA, 22 nt, Human
uacaggugugagccaccacgcc

SEQ ID NO: 239600 - RNA, 22 nt, Human
uacaggugugagccaccacgcc

SEQ ID NO: 239601 - RNA, 23 nt, Human
uacaggugugagccaccacgccu

SEQ ID NO: 239602 - RNA, 24 nt, Human
uagaaagagcauuggauuuagaga

SEQ ID NO: 239603 - RNA, 20 nt, Human
uagagacaggaaucuuggau

SEQ ID NO: 239604 - RNA, 26 nt, Human
uagcagaguagaaagagcauuggauu

SEQ ID NO: 239605 - RNA, 19 nt, Human
uaggcccaguguaagcccc

SEQ ID NO: 239606 - RNA, 23 nt, Human
uaguagagacgggguuucacuau

SEQ ID NO: 239607 - RNA, 24 nt, Human
uaguagagacgggguuucacuaua

SEQ ID NO: 239608 - RNA, 22 nt, Human
uaguggguagugaaguacuuuu

SEQ ID NO: 239609 - RNA, 21 nt, Human
uauacugaaccagcccugccc

SEQ ID NO: 239610 - RNA, 24 nt, Human
uauauuguccaggcuggucuugaa

SEQ ID NO: 239611 - RNA, 24 nt, Human
uauuuuguguuucugacccuuagc

SEQ ID NO: 239612 - RNA, 18 nt, Human
ucaaaaagacacucccag

SEQ ID NO: 239613 - RNA, 22 nt, Human
ucaaagaauaacauaggcauga

SEQ ID NO: 239614 - RNA, 19 nt, Human
ucaagugauucuccugccu

SEQ ID NO: 239615 - RNA, 24 nt, Human
ucaauacuuccggcggcucucccu

SEQ ID NO: 239616 - RNA, 20 nt, Human
ucaccuucauauacgagagc

SEQ ID NO: 239617 - RNA, 21 nt, Human
ucacuauauuguccaggcugg

SEQ ID NO: 239618 - RNA, 23 nt, Human
ucacucuuguugcccaggcugga

SEQ ID NO: 239619 - RNA, 23 nt, Human
ucacugcaaccuccgccuccugg

SEQ ID NO: 239620 - RNA, 24 nt, Human
ucacugcaaccuccgccuccuggg

SEQ ID NO: 239621 - RNA, 25 nt, Human
ucacugcaaccuccgccuccugggu

SEQ ID NO: 239622 - RNA, 27 nt, Human
ucacugcaaccuccgccuccuggguuc

SEQ ID NO: 239623 - RNA, 23 nt, Human
ucccaaagugcugggauuacagg

SEQ ID NO: 239624 - RNA, 23 nt, Human
ucccaggggcuucuccagaugcu

SEQ ID NO: 239625 - RNA, 18 nt, Human
ucccugagaggccagcag

SEQ ID NO: 239626 - RNA, 24 nt, Human
uccugaguagcugcgauuacaggc

SEQ ID NO: 239627 - RNA, 21 nt, Human
uccuggguucaagugauucuc

SEQ ID NO: 239628 - RNA, 24 nt, Human
uccuggguucaagugauucuccug

SEQ ID NO: 239629 - RNA, 23 nt, Human
ucgcagucaaaauacaggcacac

SEQ ID NO: 239630 - RNA, 24 nt, Human
ucuccugccucagccuccugagua

SEQ ID NO: 239631 - RNA, 21 nt, Human
ucuccuugguucucccaagca

SEQ ID NO: 239632 - RNA, 30 nt, Human
ucucuaaggaacccaguucuacucaguucu

SEQ ID NO: 239633 - RNA, 23 nt, Human
ucuucgcucuuccaguaauucug

SEQ ID NO: 239634 - RNA, 19 nt, Human
ucuugaacuccugaccuug

SEQ ID NO: 239635 - RNA, 23 nt, Human
ugagaggccagcagccugugaag

SEQ ID NO: 239636 - RNA, 24 nt, Human
ugagaggccagcagccugugaaga

SEQ ID NO: 239637 - RNA, 19 nt, Human
ugaggcggccgagaacuug

SEQ ID NO: 239638 - RNA, 23 nt, Human
ugagggccuacggggagcuccuu

SEQ ID NO: 239639 - RNA, 21 nt, Human
ugcccaggcuggaguacaaug

SEQ ID NO: 239640 - RNA, 24 nt, Human
ugcccaggcuggaguacaauggug

SEQ ID NO: 239641 - RNA, 25 nt, Human
ugccucagccuccugaguagcugcg

SEQ ID NO: 239642 - RNA, 18 nt, Human
ugcgauuacaggcaugug

SEQ ID NO: 239643 - RNA, 22 nt, Human
ugcgauuacaggcaugugccac

SEQ ID NO: 239644 - RNA, 24 nt, Human
ugcgauuacaggcaugugccacca

SEQ ID NO: 239645 - RNA, 22 nt, Human
ugcugaccuggcucccccucac

SEQ ID NO: 239646 - RNA, 24 nt, Human
ugcugccaaaaaccuucuuuagga

SEQ ID NO: 239647 - RNA, 24 nt, Human
ugcugggauuacaggugugagcca

SEQ ID NO: 239648 - RNA, 18 nt, Human
ugcugggugaccuuaggu

SEQ ID NO: 239649 - RNA, 26 nt, Human
ugcuguucugagggccuacggggagc

SEQ ID NO: 239650 - RNA, 18 nt, Human
uggaaaagggauuuugga

SEQ ID NO: 239651 - RNA, 19 nt, Human
uggaaaagggauuuuggaa

SEQ ID NO: 239652 - RNA, 22 nt, Human
uggaaacagucacucacucucu

SEQ ID NO: 239653 - RNA, 24 nt, Human
uggaguacaauggugcgaucuugg

SEQ ID NO: 239654 - RNA, 21 nt, Human
uggcaaaccaagggaagagaa

SEQ ID NO: 239655 - RNA, 19 nt, Human
uggcaaccacaaucuucuu

SEQ ID NO: 239656 - RNA, 18 nt, Human
ugggauuacaggugugag

SEQ ID NO: 239657 - RNA, 19 nt, Human
ugggauuacaggugugagc

SEQ ID NO: 239658 - RNA, 22 nt, Human
ugggauuacaggugugagccac

SEQ ID NO: 239659 - RNA, 23 nt, Human
ugggauuacaggugugagccacc

SEQ ID NO: 239660 - RNA, 24 nt, Human
ugggauuacaggugugagccacca

SEQ ID NO: 239661 - RNA, 24 nt, Human
ugggcuccuagaggcauccaauuc

SEQ ID NO: 239662 - RNA, 18 nt, Human
uggguagugaaguacuuu

SEQ ID NO: 239663 - RNA, 23 nt, Human
uggguucaagugauucuccugcc

SEQ ID NO: 239664 - RNA, 24 nt, Human
uggguucaagugauucuccugccu

SEQ ID NO: 239665 - RNA, 21 nt, Human
uguaaugagcuauacugaacc

SEQ ID NO: 239666 - RNA, 21 nt, Human
uguauuuuuaguagagacggg

SEQ ID NO: 239667 - RNA, 24 nt, Human
uguccaggcuggucuugaacuccu

SEQ ID NO: 239668 - RNA, 18 nt, Human
uguccccucugcggcccc

SEQ ID NO: 239669 - RNA, 19 nt, Human
uguugcccagagcucccca

SEQ ID NO: 239670 - RNA, 22 nt, Human
uuaauauucuccuugguucucc

SEQ ID NO: 239671 - RNA, 18 nt, Human
uuaguagagacgggguuu

SEQ ID NO: 239672 - RNA, 21 nt, Human
uuaguagagacgggguuucac

SEQ ID NO: 239673 - RNA, 21 nt, Human
uuaguagagacgggguuucac

SEQ ID NO: 239674 - RNA, 24 nt, Human
uuaguagagacgggguuucacuau

SEQ ID NO: 239675 - RNA, 21 nt, Human
uucaagugauucuccugccuc

SEQ ID NO: 239676 - RNA, 23 nt, Human
uucaagugauucuccugccucag

SEQ ID NO: 239677 - RNA, 24 nt, Human
uucaagugauucuccugccucagc

SEQ ID NO: 239678 - RNA, 19 nt, Human
uucaauguccccucugcgg

SEQ ID NO: 239679 - RNA, 24 nt, Human
uucacucuuguugcccaggcugga

SEQ ID NO: 239680 - RNA, 19 nt, Human
uuggaaacagucacucacu

SEQ ID NO: 239681 - RNA, 19 nt, Human
uuggaaagugaugcugcca

SEQ ID NO: 239682 - RNA, 18 nt, Human
uuggccucccaaagugcu

SEQ ID NO: 239683 - RNA, 24 nt, Human
uuucacucuuguugcccaggcugg

SEQ ID NO: 239684 - RNA, 20 nt, Human
uuucaucaucacagguuucu

SEQ ID NO: 239685 - RNA, 23 nt, Human
uuucugacccuuagcuucuacau

SEQ ID NO: 239686 - RNA, 19 nt, Human
uuuuguauuuuuaguagag

SEQ ID NO: 239687 - RNA, 20 nt, Human
uuuuguauuuuuaguagaga

SEQ ID NO: 239688 - RNA, 24 nt, Human
uuuuuaguagagacgggguuucac

SEQ ID NO: 239689 - RNA, 18 nt, Human
aaaugcuguugacugcuc

SEQ ID NO: 239690 - RNA, 19 nt, Human
acagugagucccugcccag

SEQ ID NO: 239691 - RNA, 19 nt, Human
caagaaaugcuguugacug

SEQ ID NO: 239692 - RNA, 21 nt, Human
cagacccaagcacaaugcugg

SEQ ID NO: 239693 - RNA, 18 nt, Human
cagcagaugacaguuccu

SEQ ID NO: 239694 - RNA, 18 nt, Human
cagucccucccucugcuu

SEQ ID NO: 239695 - RNA, 23 nt, Human
cagucccucccucugcuuccucc

SEQ ID NO: 239696 - RNA, 21 nt, Human
cagugagucccugcccaguuc

SEQ ID NO: 239697 - RNA, 25 nt, Human
cccagucccucccucugcuuccucc

SEQ ID NO: 239698 - RNA, 22 nt, Human
cccucugcuuccucccacucuu

SEQ ID NO: 239699 - RNA, 24 nt, Human
ccucugcuuccucccacucuucca

SEQ ID NO: 239700 - RNA, 23 nt, Human
cucccugugggagacuccggggc

SEQ ID NO: 239701 - RNA, 20 nt, Human
cugugccucucacagcagca

SEQ ID NO: 239702 - RNA, 21 nt, Human
gcuguaguggggguggguagu

SEQ ID NO: 239703 - RNA, 22 nt, Human
ggaaagggcucugugccucuca

SEQ ID NO: 239704 - RNA, 19 nt, Human
gggcgggguguguggugcu

SEQ ID NO: 239705 - RNA, 20 nt, Human
gguguguggugcugggaggg

SEQ ID NO: 239706 - RNA, 21 nt, Human
gguguguggugcugggaggga

SEQ ID NO: 239707 - RNA, 21 nt, Human
guggguuuaccuaaugcuugg

SEQ ID NO: 239708 - RNA, 19 nt, Human
uaaguuucucaaauggcua

SEQ ID NO: 239709 - RNA, 22 nt, Human
uagugggcuggcuucagcucug

SEQ ID NO: 239710 - RNA, 22 nt, Human
uaguggggguggguagugggcu

SEQ ID NO: 239711 - RNA, 20 nt, Human
uaugcuuuucuuuucuuuuu

SEQ ID NO: 239712 - RNA, 23 nt, Human
uauuaugcuuuucuuuucuuuuu

SEQ ID NO: 239713 - RNA, 22 nt, Human
ucacaggaguaagaagcucaga

SEQ ID NO: 239714 - RNA, 21 nt, Human
ucccacucuuccacaugcgga

SEQ ID NO: 239715 - RNA, 21 nt, Human
ucccugcccagucccucccuc

SEQ ID NO: 239716 - RNA, 18 nt, Human
ucucuggaaaccuucagc

SEQ ID NO: 239717 - RNA, 21 nt, Human
ucugcuuccucccacucuucc

SEQ ID NO: 239718 - RNA, 21 nt, Human
ugcugggagggaugucgguag

SEQ ID NO: 239719 - RNA, 21 nt, Human
ugcugggagggaugucgguag

SEQ ID NO: 239720 - RNA, 19 nt, Human
ugcuuccucccacucuucc

SEQ ID NO: 239721 - RNA, 20 nt, Human
ugggagggaugucgguagua

SEQ ID NO: 239722 - RNA, 20 nt, Human
uggguuuaccuaaugcuugg

SEQ ID NO: 239723 - RNA, 22 nt, Human
ugugaaggcccuggcaauuugg

SEQ ID NO: 239724 - RNA, 18 nt, Human
uuaaaauaaggauugaga

SEQ ID NO: 239725 - RNA, 18 nt, Human
uuacugagaacccagacc

SEQ ID NO: 239726 - RNA, 21 nt, Human
uuuacugagaacccagaccca

SEQ ID NO: 239727 - RNA, 23 nt, Human
aaaccccaacccccaaaggcugc

SEQ ID NO: 239728 - RNA, 19 nt, Human
aaccaaagcagccuguccu

SEQ ID NO: 239729 - RNA, 19 nt, Human
aacccccaaaggcugcccu

SEQ ID NO: 239730 - RNA, 19 nt, Human
aaguggcagaaaccccaac

SEQ ID NO: 239731 - RNA, 22 nt, Human
acagccaggcacacaucccuac

SEQ ID NO: 239732 - RNA, 24 nt, Human
accaaagcagcaggagggcuccag

SEQ ID NO: 239733 - RNA, 28 nt, Human
agaaaccccaacccccaaaggcugcccu

SEQ ID NO: 239734 - RNA, 22 nt, Human
agacccggaaguggcagaaacc

SEQ ID NO: 239735 - RNA, 18 nt, Human
agaggcaggggcuggggc

SEQ ID NO: 239736 - RNA, 19 nt, Human
aggcaggggcuggggcagg

SEQ ID NO: 239737 - RNA, 20 nt, Human
aggcaggggcuggggcaggu

SEQ ID NO: 239738 - RNA, 24 nt, Human
agguaccagcagccuggcggagcu

SEQ ID NO: 239739 - RNA, 20 nt, Human
augcagcugugccagggcag

SEQ ID NO: 239740 - RNA, 26 nt, Human
caaagcagcaggagggcuccaaugug

SEQ ID NO: 239741 - RNA, 21 nt, Human
cacaucccuacugacacgguc

SEQ ID NO: 239742 - RNA, 18 nt, Human
caccucccuccccaaaca

SEQ ID NO: 239743 - RNA, 30 nt, Human
cagaaaccccaacccccaaaggcugcccuu

SEQ ID NO: 239744 - RNA, 21 nt, Human
cagaggcaggggcuggggcag

SEQ ID NO: 239745 - RNA, 18 nt, Human
cagcagccuggcggagcu

SEQ ID NO: 239746 - RNA, 22 nt, Human
caggcacgugaggagucagggg

SEQ ID NO: 239747 - RNA, 21 nt, Human
cagggggugggccugaccugg

SEQ ID NO: 239748 - RNA, 19 nt, Human
cagguaccagcagccuggc

SEQ ID NO: 239749 - RNA, 20 nt, Human
ccaacccccaaaggcugccc

SEQ ID NO: 239750 - RNA, 26 nt, Human
ccaggcacacaucccuacugacacgg

SEQ ID NO: 239751 - RNA, 19 nt, Human
cccacguacacagccaggc

SEQ ID NO: 239752 - RNA, 21 nt, Human
cccacguacacagccaggcac

SEQ ID NO: 239753 - RNA, 23 nt, Human
cccacuugggcagaggcaggggc

SEQ ID NO: 239754 - RNA, 21 nt, Human
ccccaaaggcugcccuugaag

SEQ ID NO: 239755 - RNA, 21 nt, Human
ccccaacccccaaaggcugcc

SEQ ID NO: 239756 - RNA, 22 nt, Human
ccccaacccccaaaggcugccc

SEQ ID NO: 239757 - RNA, 18 nt, Human
ccccagaagccgccacgu

SEQ ID NO: 239758 - RNA, 23 nt, Human
ccccagaagccgccacgugcucu

SEQ ID NO: 239759 - RNA, 23 nt, Human
cccccagaagccgccacgugcuu

SEQ ID NO: 239760 - RNA, 22 nt, Human
cccuacugacacggucucccug

SEQ ID NO: 239761 - RNA, 22 nt, Human
ccuuccgcagucccccaaggaa

SEQ ID NO: 239762 - RNA, 23 nt, Human
cguacacagccaggcacacaucc

SEQ ID NO: 239763 - RNA, 21 nt, Human
cgugcacugcacacccacgua

SEQ ID NO: 239764 - RNA, 21 nt, Human
cuacagggacugaggcucucc

SEQ ID NO: 239765 - RNA, 18 nt, Human
cucgcgcgcucuggaccu

SEQ ID NO: 239766 - RNA, 18 nt, Human
cugacacggucucccugg

SEQ ID NO: 239767 - RNA, 19 nt, Human
gaucgggggacagggucug

SEQ ID NO: 239768 - RNA, 20 nt, Human
gcagguaccagcagccuggc

SEQ ID NO: 239769 - RNA, 19 nt, Human
gcccccagaagccgccacg

SEQ ID NO: 239770 - RNA, 20 nt, Human
ggagggcuccaauguggggg

SEQ ID NO: 239771 - RNA, 20 nt, Human
ggcagaggcaggggcugggg

SEQ ID NO: 239772 - RNA, 21 nt, Human
ggcagaggcaggggcuggggc

SEQ ID NO: 239773 - RNA, 24 nt, Human
ggccugaccugggaccaagggcac

SEQ ID NO: 239774 - RNA, 20 nt, Human
ggcuggauuugggcagggcc

SEQ ID NO: 239775 - RNA, 21 nt, Human
ggcuggggcaggacuggcugg

SEQ ID NO: 239776 - RNA, 18 nt, Human
ggcuggggcagguggagg

SEQ ID NO: 239777 - RNA, 19 nt, Human
gggcaggacuggcuggauu

SEQ ID NO: 239778 - RNA, 22 nt, Human
gggcagggccuagacccggaag

SEQ ID NO: 239779 - RNA, 23 nt, Human
gggcagguggaggugcagggggu

SEQ ID NO: 239780 - RNA, 19 nt, Human
ggggugggcuggggcagga

SEQ ID NO: 239781 - RNA, 18 nt, Human
gggugggcuggggcagga

SEQ ID NO: 239782 - RNA, 21 nt, Human
uacacagccaggcacacaucc

SEQ ID NO: 239783 - RNA, 19 nt, Human
uacacugugggauccagaa

SEQ ID NO: 239784 - RNA, 20 nt, Human
uacugacacggucucccugg

SEQ ID NO: 239785 - RNA, 26 nt, Human
ucagcauguccaugggacuuggucug

SEQ ID NO: 239786 - RNA, 24 nt, Human
uccccaaacauggcccccagaagc

SEQ ID NO: 239787 - RNA, 20 nt, Human
ucccuggggacccugucagg

SEQ ID NO: 239788 - RNA, 22 nt, Human
ugagggcagcuggcccacuugg

SEQ ID NO: 239789 - RNA, 23 nt, Human
ugcagcugugccagggcaggggg

SEQ ID NO: 239790 - RNA, 21 nt, Human
ugcagggggugggccugaccu

SEQ ID NO: 239791 - RNA, 18 nt, Human
ugggaccaagggcacaga

SEQ ID NO: 239792 - RNA, 21 nt, Human
ugggaccaagggcacagauca

SEQ ID NO: 239793 - RNA, 21 nt, Human
ugggauccagaaagggcuggg

SEQ ID NO: 239794 - RNA, 24 nt, Human
ugugggggugggcuggggcaggac

SEQ ID NO: 239795 - RNA, 26 nt, Human
cccuuguucccuugcucccuuguucc

SEQ ID NO: 239796 - RNA, 23 nt, Human
ccuugcucccuuguucccuucuc

SEQ ID NO: 239797 - RNA, 20 nt, Human
cuucucuacuccuacucccc

SEQ ID NO: 239798 - RNA, 27 nt, Human
ucccuuguucccuugcucccuuguucc

SEQ ID NO: 239799 - RNA, 22 nt, Human
ugacucacagaaggauguuucu

SEQ ID NO: 239800 - RNA, 19 nt, Human
ugucccuuguucccuugcu

SEQ ID NO: 239801 - RNA, 26 nt, Human
aaagacaucugaagcccauaggcucc

SEQ ID NO: 239802 - RNA, 18 nt, Human
agaaggagggggaggggc

SEQ ID NO: 239803 - RNA, 18 nt, Human
caaagacaucugaagccc

SEQ ID NO: 239804 - RNA, 23 nt, Human
caagaaggagccugugucugaac

SEQ ID NO: 239805 - RNA, 24 nt, Human
cagcaacauuugaccagucuuggu

SEQ ID NO: 239806 - RNA, 20 nt, Human
caucugaagcccauaggcuc

SEQ ID NO: 239807 - RNA, 24 nt, Human
cccacggucccaggagagaggcag

SEQ ID NO: 239808 - RNA, 24 nt, Human
cgagccccaggccccaugaggucc

SEQ ID NO: 239809 - RNA, 22 nt, Human
cuugugucaugugugacaauuc

SEQ ID NO: 239810 - RNA, 26 nt, Human
gagccccaggccccaugagguccagg

SEQ ID NO: 239811 - RNA, 18 nt, Human
gcuccaagaaggagccug

SEQ ID NO: 239812 - RNA, 23 nt, Human
ggagggggaggggccacauccag

SEQ ID NO: 239813 - RNA, 19 nt, Human
guaaaggacagcuggucca

SEQ ID NO: 239814 - RNA, 22 nt, Human
uaaauaacacugcagugagcau

SEQ ID NO: 239815 - RNA, 24 nt, Human
uagaauuucgaggaggaaacgcua

SEQ ID NO: 239816 - RNA, 24 nt, Human
uauguacaucuugugucaugugug

SEQ ID NO: 239817 - RNA, 19 nt, Human
ugagaaggagggggagggg

SEQ ID NO: 239818 - RNA, 20 nt, Human
ugagaaggugguguaaagga

SEQ ID NO: 239819 - RNA, 18 nt, Human
uuaagggugagaaggagg

SEQ ID NO: 239820 - RNA, 23 nt, Human
uugugucaugugugacaauucuc

SEQ ID NO: 239821 - RNA, 26 nt, Human
aaaguuguguuuccugggguucguaa

SEQ ID NO: 239822 - RNA, 21 nt, Human
agauacugaaaagacugagcc

SEQ ID NO: 239823 - RNA, 18 nt, Human
aggaauauacaaccauuu

SEQ ID NO: 239824 - RNA, 20 nt, Human
auggaaugccagugucccuc

SEQ ID NO: 239825 - RNA, 22 nt, Human
cacccauggccacugugucuca

SEQ ID NO: 239826 - RNA, 19 nt, Human
cacgccgcccaggcucaac

SEQ ID NO: 239827 - RNA, 18 nt, Human
cagcuuucagauccaccc

SEQ ID NO: 239828 - RNA, 25 nt, Human
cagugacucccuccuccgugggucc

SEQ ID NO: 239829 - RNA, 27 nt, Human
ccaggcucaaaaaaaaaaaaaaagaaa

SEQ ID NO: 239830 - RNA, 24 nt, Human
cccaggcucaaaaaaaaaaaaaaa

SEQ ID NO: 239831 - RNA, 19 nt, Human
cgcucugucgcccaggcuc

SEQ ID NO: 239832 - RNA, 23 nt, Human
cucacgccgcccaggcucaacac

SEQ ID NO: 239833 - RNA, 21 nt, Human
cucccacccucugcaucgucc

SEQ ID NO: 239834 - RNA, 19 nt, Human
cucugucgcccaggcucaa

SEQ ID NO: 239835 - RNA, 20 nt, Human
cugaaaagacugagccuaug

SEQ ID NO: 239836 - RNA, 21 nt, Human
cugaaccaguaaagcagauac

SEQ ID NO: 239837 - RNA, 22 nt, Human
cugagccuaugugguuuuuuuu

SEQ ID NO: 239838 - RNA, 20 nt, Human
cugcagugacucccuccucc

SEQ ID NO: 239839 - RNA, 20 nt, Human
cugcagugacucccuccucc

SEQ ID NO: 239840 - RNA, 18 nt, Human
cuuucagauccacccaug

SEQ ID NO: 239841 - RNA, 19 nt, Human
gcccaggcucaacaccagc

SEQ ID NO: 239842 - RNA, 21 nt, Human
guccaacacagagcucacgcc

SEQ ID NO: 239843 - RNA, 21 nt, Human
uaaagcagauacugaaaagac

SEQ ID NO: 239844 - RNA, 22 nt, Human
uaaagugaacaaaauacaguuc

SEQ ID NO: 239845 - RNA, 24 nt, Human
uagcauguaguucucccacccucu

SEQ ID NO: 239846 - RNA, 21 nt, Human
ucaaaaaaaaaaaaaaagaaa

SEQ ID NO: 239847 - RNA, 22 nt, Human
ucaaaaaaaaaaaaaaagaaau

SEQ ID NO: 239848 - RNA, 18 nt, Human
ucucgcucugucgcccag

SEQ ID NO: 239849 - RNA, 19 nt, Human
ucucgcucugucgcccagg

SEQ ID NO: 239850 - RNA, 24 nt, Human
ucucgcucugucgcccaggcucaa

SEQ ID NO: 239851 - RNA, 24 nt, Human
ucucgcucugucgcccaggcucaa

SEQ ID NO: 239852 - RNA, 25 nt, Human
ucucgcucugucgcccaggcucaaa

SEQ ID NO: 239853 - RNA, 18 nt, Human
ucugacaaauggaaugcc

SEQ ID NO: 239854 - RNA, 22 nt, Human
ugagauggagucucgcucuguc

SEQ ID NO: 239855 - RNA, 20 nt, Human
uggaaugccagugucccucu

SEQ ID NO: 239856 - RNA, 24 nt, Human
uggagucucgcucugucgcccagg

SEQ ID NO: 239857 - RNA, 24 nt, Human
ugucgcccaggcucaaaaaaaaaa

SEQ ID NO: 239858 - RNA, 25 nt, Human
uuuuuuuuuuuugagauggagucuc

SEQ ID NO: 239859 - RNA, 22 nt, Human
uuuuuuuuuuuuuugagaugga

SEQ ID NO: 239860 - RNA, 27 nt, Human
uuuuuuuuuuuuuuuuuuuuuuugggg

SEQ ID NO: 239861 - RNA, 24 nt, Human
aaaaaaaaagauaucugcccacgc

SEQ ID NO: 239862 - RNA, 19 nt, Human
aaacaccgugggaaggcug

SEQ ID NO: 239863 - RNA, 19 nt, Human
acccugccacaucccccuc

SEQ ID NO: 239864 - RNA, 24 nt, Human
accucugccuaggaaaaccagaga

SEQ ID NO: 239865 - RNA, 25 nt, Human
accuggagaagacuggggagaggga

SEQ ID NO: 239866 - RNA, 18 nt, Human
agggaccucugccuagga

SEQ ID NO: 239867 - RNA, 33 nt, Human
aucaauaaauacuaaaaaaaaaaaaaaaaaaaa

SEQ ID NO: 239868 - RNA, 21 nt, Human
ccccucuccgagaaacaccca

SEQ ID NO: 239869 - RNA, 20 nt, Human
cccugccacaucccccucuc

SEQ ID NO: 239870 - RNA, 23 nt, Human
ccucuccgagaaacacccaagaa

SEQ ID NO: 239871 - RNA, 23 nt, Human
cuaaaaaaaaaaaaaaaaaagau

SEQ ID NO: 239872 - RNA, 20 nt, Human
cuccgagaaacacccaagaa

SEQ ID NO: 239873 - RNA, 25 nt, Human
cuucucuccacuauuauccuaugac

SEQ ID NO: 239874 - RNA, 19 nt, Human
ggagaagacuggggagagg

SEQ ID NO: 239875 - RNA, 20 nt, Human
ggaggggacaccuggagaag

SEQ ID NO: 239876 - RNA, 18 nt, Human
uccgagaaacacccaaga

SEQ ID NO: 239877 - RNA, 21 nt, Human
ugacccugccacaucccccuc

SEQ ID NO: 239878 - RNA, 20 nt, Human
uggggagagggaauugggag

SEQ ID NO: 239879 - RNA, 24 nt, Human
aaagaagcccagcuuuauaaagag

SEQ ID NO: 239880 - RNA, 21 nt, Human
aagaaaagacaccauugaaag

SEQ ID NO: 239881 - RNA, 23 nt, Human
aagaaaagacaccauugaaagga

SEQ ID NO: 239882 - RNA, 21 nt, Human
acaaggcaagaaaagacacca

SEQ ID NO: 239883 - RNA, 24 nt, Human
accccaccucuccccugcccucag

SEQ ID NO: 239884 - RNA, 21 nt, Human
accugaggcucugaggacagg

SEQ ID NO: 239885 - RNA, 23 nt, Human
aggaaggaggaggcaugaugagg

SEQ ID NO: 239886 - RNA, 26 nt, Human
aggaaggaggaggcaugaugaggggg

SEQ ID NO: 239887 - RNA, 20 nt, Human
aggcagcugcagagacgaac

SEQ ID NO: 239888 - RNA, 22 nt, Human
aggcaugaugagggggagcugg

SEQ ID NO: 239889 - RNA, 19 nt, Human
agggggcguucccaguuac

SEQ ID NO: 239890 - RNA, 19 nt, Human
agggugggcagaccucagg

SEQ ID NO: 239891 - RNA, 21 nt, Human
auaguuccaggguugggccca

SEQ ID NO: 239892 - RNA, 21 nt, Human
caaacccccaaagccccaucu

SEQ ID NO: 239893 - RNA, 24 nt, Human
caaggcaagaaaagacaccauuga

SEQ ID NO: 239894 - RNA, 23 nt, Human
caccauugaaaggaauaguucca

SEQ ID NO: 239895 - RNA, 19 nt, Human
caccccaccucuccccugc

SEQ ID NO: 239896 - RNA, 20 nt, Human
caccucuccccugcccucaa

SEQ ID NO: 239897 - RNA, 24 nt, Human
cagcagcuuccuugcugucagucu

SEQ ID NO: 239898 - RNA, 21 nt, Human
cagcuuuauaaagagggggcg

SEQ ID NO: 239899 - RNA, 20 nt, Human
ccacacagcaacccugacuu

SEQ ID NO: 239900 - RNA, 20 nt, Human
ccagcuuuauaaagaggggg

SEQ ID NO: 239901 - RNA, 21 nt, Human
ccaggcagagggguucccaca

SEQ ID NO: 239902 - RNA, 20 nt, Human
ccaguuacuuaaucuaugcc

SEQ ID NO: 239903 - RNA, 27 nt, Human
ccccaaagccccaucuguagggugggg

SEQ ID NO: 239904 - RNA, 20 nt, Human
ccccaucuguagggugggca

SEQ ID NO: 239905 - RNA, 19 nt, Human
ccuucugaaacaaggcaag

SEQ ID NO: 239906 - RNA, 20 nt, Human
cgggggacacauggggcagg

SEQ ID NO: 239907 - RNA, 19 nt, Human
cugaaacaaggcaagaaaa

SEQ ID NO: 239908 - RNA, 22 nt, Human
cugcagagacgaacccagaucc

SEQ ID NO: 239909 - RNA, 18 nt, Human
cugcgugucugccacccc

SEQ ID NO: 239910 - RNA, 20 nt, Human
gaacugugcaguaagaauga

SEQ ID NO: 239911 - RNA, 20 nt, Human
gagcaaacccccaaagcccc

SEQ ID NO: 239912 - RNA, 21 nt, Human
gagcaaacccccaaagcccca

SEQ ID NO: 239913 - RNA, 20 nt, Human
gcaaacccccaaagccccau

SEQ ID NO: 239914 - RNA, 21 nt, Human
gcaagaaaagacaccauugaa

SEQ ID NO: 239915 - RNA, 23 nt, Human
gcagggguaggcagcugcagaga

SEQ ID NO: 239916 - RNA, 24 nt, Human
gcugucagucuuggcacaagauag

SEQ ID NO: 239917 - RNA, 22 nt, Human
ggagcaaacccccaaagcccca

SEQ ID NO: 239918 - RNA, 21 nt, Human
ggagcuggaaaguucugggug

SEQ ID NO: 239919 - RNA, 18 nt, Human
gggcagggguaggcagcu

SEQ ID NO: 239920 - RNA, 19 nt, Human
ggguucccacacagcaacc

SEQ ID NO: 239921 - RNA, 25 nt, Human
guucuggguguaaauagguacaggu

SEQ ID NO: 239922 - RNA, 21 nt, Human
uaagaaugaguugggcgaggu

SEQ ID NO: 239923 - RNA, 21 nt, Human
uaccugaggcucugaggacag

SEQ ID NO: 239924 - RNA, 22 nt, Human
uagguacaggugagcgauggca

SEQ ID NO: 239925 - RNA, 18 nt, Human
uccaggguugggcccagg

SEQ ID NO: 239926 - RNA, 21 nt, Human
uccaggugccaggcagagggg

SEQ ID NO: 239927 - RNA, 18 nt, Human
uccucagagccuggacca

SEQ ID NO: 239928 - RNA, 26 nt, Human
ucugccaccccaccucuccccugccc

SEQ ID NO: 239929 - RNA, 23 nt, Human
ugaaaacaugaggugggggacau

SEQ ID NO: 239930 - RNA, 21 nt, Human
ugcccucagguuaccuggccc

SEQ ID NO: 239931 - RNA, 22 nt, Human
uggaccauaccugaggcucuga

SEQ ID NO: 239932 - RNA, 22 nt, Human
uggagcaaacccccaaagcccc

SEQ ID NO: 239933 - RNA, 18 nt, Human
uguagggugggcagaccu

SEQ ID NO: 239934 - RNA, 22 nt, Human
acuguucuugcagccuggugag

SEQ ID NO: 239935 - RNA, 23 nt, Human
agaggguugugggugauuuuuuu

SEQ ID NO: 239936 - RNA, 19 nt, Human
cacugcccuuuccuugacg

SEQ ID NO: 239937 - RNA, 20 nt, Human
cagggcuggcagucugggcc

SEQ ID NO: 239938 - RNA, 24 nt, Human
ccaggccccggcguugggccgcgc

SEQ ID NO: 239939 - RNA, 18 nt, Human
cccaccucugccugugcc

SEQ ID NO: 239940 - RNA, 20 nt, Human
cccagugcagauaagggcca

SEQ ID NO: 239941 - RNA, 20 nt, Human
cccccgagaccuugccccug

SEQ ID NO: 239942 - RNA, 25 nt, Human
cccccgagaccuugccccugacguc

SEQ ID NO: 239943 - RNA, 19 nt, Human
ccccgcccccggcggcccg

SEQ ID NO: 239944 - RNA, 19 nt, Human
ccccugggaaggggaccgg

SEQ ID NO: 239945 - RNA, 19 nt, Human
cccgcccccggcggcccgg

SEQ ID NO: 239946 - RNA, 21 nt, Human
cccggcggcccgguuuccucc

SEQ ID NO: 239947 - RNA, 18 nt, Human
ccggcucagaggugcugc

SEQ ID NO: 239948 - RNA, 22 nt, Human
ccuugggggucgaugaucaccc

SEQ ID NO: 239949 - RNA, 20 nt, Human
cgcgccuccucgugggccuc

SEQ ID NO: 239950 - RNA, 19 nt, Human
cggcccugggccgaguccc

SEQ ID NO: 239951 - RNA, 19 nt, Human
cggccggaggaugcuggcc

SEQ ID NO: 239952 - RNA, 20 nt, Human
cucugccauguugcuuugcc

SEQ ID NO: 239953 - RNA, 24 nt, Human
cugacgucuucacugguccuucuu

SEQ ID NO: 239954 - RNA, 23 nt, Human
cuggcggcgcagcggccggagga

SEQ ID NO: 239955 - RNA, 22 nt, Human
cuugcagccuggugagugcccu

SEQ ID NO: 239956 - RNA, 19 nt, Human
cuugccccugacgucuuca

SEQ ID NO: 239957 - RNA, 23 nt, Human
gacccccgagaccuugccccuga

SEQ ID NO: 239958 - RNA, 22 nt, Human
gaggaugcuggcccagugcaga

SEQ ID NO: 239959 - RNA, 18 nt, Human
gagucccuggugcccucc

SEQ ID NO: 239960 - RNA, 18 nt, Human
gcccugggccgagucccu

SEQ ID NO: 239961 - RNA, 19 nt, Human
gggccagggugugguuucc

SEQ ID NO: 239962 - RNA, 21 nt, Human
gugagcggcucccgggccggc

SEQ ID NO: 239963 - RNA, 18 nt, Human
ucagggcuggcagucugg

SEQ ID NO: 239964 - RNA, 19 nt, Human
uccgcguagguccccccca

SEQ ID NO: 239965 - RNA, 21 nt, Human
uccgcguaggucccccccagg

SEQ ID NO: 239966 - RNA, 26 nt, Human
uccuaugacugcucugccauguugcu

SEQ ID NO: 239967 - RNA, 20 nt, Human
uccucgugggccucggaagg

SEQ ID NO: 239968 - RNA, 25 nt, Human
ugacugcucugccauguugcuuugg

SEQ ID NO: 239969 - RNA, 20 nt, Human
ugaggcgggcacauggaccc

SEQ ID NO: 239970 - RNA, 23 nt, Human
ugcagccuggugagugcccuggc

SEQ ID NO: 239971 - RNA, 24 nt, Human
ugccccugacgucuucacuggucc

SEQ ID NO: 239972 - RNA, 21 nt, Human
ugccugugccugaggcgggca

SEQ ID NO: 239973 - RNA, 20 nt, Human
ugcuccaggccccggcguug

SEQ ID NO: 239974 - RNA, 19 nt, Human
ugggccgagucccuggugc

SEQ ID NO: 239975 - RNA, 19 nt, Human
uucuccccgcccccggcgg

SEQ ID NO: 239976 - RNA, 23 nt, Human
uuuccuaugacugcucugccaug

SEQ ID NO: 239977 - RNA, 23 nt, Human
aagccaaagcacaaagaaauguc

SEQ ID NO: 239978 - RNA, 22 nt, Human
accagugaugguuacuuuuccu

SEQ ID NO: 239979 - RNA, 20 nt, Human
agaggaacuggcugucucug

SEQ ID NO: 239980 - RNA, 19 nt, Human
agaguacagaauacuuucc

SEQ ID NO: 239981 - RNA, 30 nt, Human
agaguacagaauacuuucccauuuagaggg

SEQ ID NO: 239982 - RNA, 21 nt, Human
agcggcacgcggcccggcgcg

SEQ ID NO: 239983 - RNA, 21 nt, Human
aggcugcagcgcgucuggccc

SEQ ID NO: 239984 - RNA, 23 nt, Human
ccagugaugguuacuuuuccucu

SEQ ID NO: 239985 - RNA, 23 nt, Human
cgcgacggggcgguccagcagga

SEQ ID NO: 239986 - RNA, 23 nt, Human
cggcgcggcgggagaggaacugg

SEQ ID NO: 239987 - RNA, 25 nt, Human
cucuaaaugaggcagccaccccugc

SEQ ID NO: 239988 - RNA, 19 nt, Human
cugcguauggggaggcugc

SEQ ID NO: 239989 - RNA, 22 nt, Human
gaaaucauaagugcaaccagug

SEQ ID NO: 239990 - RNA, 19 nt, Human
gcaauuauuggggauucau

SEQ ID NO: 239991 - RNA, 22 nt, Human
gcacggcagaugauccccgcac

SEQ ID NO: 239992 - RNA, 24 nt, Human
gccccgcccgcuugccgcgggcug

SEQ ID NO: 239993 - RNA, 25 nt, Human
gcgcggcgaggggcugcuggcgcgg

SEQ ID NO: 239994 - RNA, 19 nt, Human
gcugcagcgcgucuggccc

SEQ ID NO: 239995 - RNA, 20 nt, Human
ggcccggaggcgccacggcc

SEQ ID NO: 239996 - RNA, 18 nt, Human
ggcccggcgcggcgggag

SEQ ID NO: 239997 - RNA, 22 nt, Human
ggccgccccgcccgcuugccgc

SEQ ID NO: 239998 - RNA, 22 nt, Human
ggcugcuggccgggaacgcugg

SEQ ID NO: 239999 - RNA, 19 nt, Human
ggggagcgagcggcacgcg

SEQ ID NO: 240000 - RNA, 18 nt, Human
ggggauucauugcaaugg

SEQ ID NO: 240001 - RNA, 22 nt, Human
uaguugggugcauuuuuggaga

SEQ ID NO: 240002 - RNA, 22 nt, Human
uccacggugacuugaguucaga

SEQ ID NO: 240003 - RNA, 18 nt, Human
ugaaaguuucggggcggc

SEQ ID NO: 240004 - RNA, 20 nt, Human
ugaaaucauaagugcaacca

SEQ ID NO: 240005 - RNA, 20 nt, Human
ugaaaucauaagugcaacca

SEQ ID NO: 240006 - RNA, 20 nt, Human
ugaaaucauaagugcaacca

SEQ ID NO: 240007 - RNA, 22 nt, Human
ugccaaauggacgggucucccu

SEQ ID NO: 240008 - RNA, 19 nt, Human
uggcccggaggcgccacgg

SEQ ID NO: 240009 - RNA, 29 nt, Human
uguaaacauagagcuaguugggugcauuc

SEQ ID NO: 240010 - RNA, 20 nt, Human
uguccauuuguaaacauaga

SEQ ID NO: 240011 - RNA, 21 nt, Human
uuaccagcugcugaggacaag

SEQ ID NO: 240012 - RNA, 20 nt, Human
uuuguaaacauagagcuagu

SEQ ID NO: 240013 - RNA, 23 nt, Human
aaacauuuuaacacugcaaaaca

SEQ ID NO: 240014 - RNA, 20 nt, Human
aacacauauauaaaaauaca

SEQ ID NO: 240015 - RNA, 22 nt, Human
aacauacuagaauaugaucuaa

SEQ ID NO: 240016 - RNA, 26 nt, Human
aacuuuuuuuuuuuucuuggggggcc

SEQ ID NO: 240017 - RNA, 23 nt, Human
aagaaaaaugacauaguaaauga

SEQ ID NO: 240018 - RNA, 20 nt, Human
acaauagauuccucaucuuc

SEQ ID NO: 240019 - RNA, 20 nt, Human
acacuuuaugguauaggguu

SEQ ID NO: 240020 - RNA, 20 nt, Human
acagcauuaucccuauuauu

SEQ ID NO: 240021 - RNA, 19 nt, Human
acaguaguugguuucaaac

SEQ ID NO: 240022 - RNA, 23 nt, Human
acuaaauuauuuccauuaucaau

SEQ ID NO: 240023 - RNA, 22 nt, Human
auaaaaauacagacacugcaug

SEQ ID NO: 240024 - RNA, 25 nt, Human
auagaaaccaugaaaaacauuuaca

SEQ ID NO: 240025 - RNA, 18 nt, Human
caaaacauuuuaacacug

SEQ ID NO: 240026 - RNA, 20 nt, Human
caacgcggccccgcgcuacc

SEQ ID NO: 240027 - RNA, 25 nt, Human
cacaguugagaaauaucaagcauac

SEQ ID NO: 240028 - RNA, 22 nt, Human
cacgcucaggcgcgugcgcgcc

SEQ ID NO: 240029 - RNA, 19 nt, Human
cagcagaaaaauuaacaca

SEQ ID NO: 240030 - RNA, 24 nt, Human
cagcagaaaaauuaacacaguuga

SEQ ID NO: 240031 - RNA, 19 nt, Human
caguaaucuggaaauuuug

SEQ ID NO: 240032 - RNA, 18 nt, Human
ccaggguccgcccugccc

SEQ ID NO: 240033 - RNA, 18 nt, Human
cccauaaguuuguuuuca

SEQ ID NO: 240034 - RNA, 26 nt, Human
cccgcgcuaccuuccgcgcgcgcccg

SEQ ID NO: 240035 - RNA, 19 nt, Human
cgcccggccgcggcccaag

SEQ ID NO: 240036 - RNA, 22 nt, Human
cgcccggccgcggcccaagggc

SEQ ID NO: 240037 - RNA, 20 nt, Human
cgcucaggcgcgugcgcgcc

SEQ ID NO: 240038 - RNA, 26 nt, Human
cggcccaagggcgugcgagcggcgag

SEQ ID NO: 240039 - RNA, 26 nt, Human
cgggcgcacgcucaggcgcgugcgcg

SEQ ID NO: 240040 - RNA, 21 nt, Human
cguccaggguccgcccugccc

SEQ ID NO: 240041 - RNA, 22 nt, Human
gaaggaagagcgggcgcccggc

SEQ ID NO: 240042 - RNA, 19 nt, Human
gccccgcgcuaccuuccgc

SEQ ID NO: 240043 - RNA, 24 nt, Human
gcggccccgcgcuaccuuccgcgc

SEQ ID NO: 240044 - RNA, 24 nt, Human
ggacaauaaagaaaaaacaaacuu

SEQ ID NO: 240045 - RNA, 22 nt, Human
gggcgcacgcucaggcgcgugc

SEQ ID NO: 240046 - RNA, 24 nt, Human
gguaaagaaaaaugacauaguaaa

SEQ ID NO: 240047 - RNA, 18 nt, Human
uaaaaauacagacacugc

SEQ ID NO: 240048 - RNA, 27 nt, Human
uaaaagaucauaaauuucucaugagga

SEQ ID NO: 240049 - RNA, 22 nt, Human
uacagcacaauauuucaaugga

SEQ ID NO: 240050 - RNA, 24 nt, Human
uacagcacaauauuucaauggaau

SEQ ID NO: 240051 - RNA, 19 nt, Human
uauauaugaacacauauau

SEQ ID NO: 240052 - RNA, 18 nt, Human
uauaucugugacccagaa

SEQ ID NO: 240053 - RNA, 22 nt, Human
uauaucugugacccagaauguc

SEQ ID NO: 240054 - RNA, 19 nt, Human
uauaugaacacauauauaa

SEQ ID NO: 240055 - RNA, 22 nt, Human
uauguauauaugaacacauaua

SEQ ID NO: 240056 - RNA, 24 nt, Human
uauguauauaugaacacauauaua

SEQ ID NO: 240057 - RNA, 24 nt, Human
uauuaaucuguaugguaacuacac

SEQ ID NO: 240058 - RNA, 23 nt, Human
ucagucuuaaagauauuucagaa

SEQ ID NO: 240059 - RNA, 18 nt, Human
uccgcgcgcgcccgcgcg

SEQ ID NO: 240060 - RNA, 22 nt, Human
uccgcgcgcgcccgcgcgucca

SEQ ID NO: 240061 - RNA, 23 nt, Human
uccgcgcgcgcccgcgcguccag

SEQ ID NO: 240062 - RNA, 22 nt, Human
uccucaucuucuacaguaguug

SEQ ID NO: 240063 - RNA, 19 nt, Human
ucuguguuauuggcaugua

SEQ ID NO: 240064 - RNA, 24 nt, Human
ugaaaauaaagcaaaaaauuacaa

SEQ ID NO: 240065 - RNA, 24 nt, Human
ugaaggacaauaaagaaaaaacaa

SEQ ID NO: 240066 - RNA, 23 nt, Human
ugacaguagcugucuauugcaga

SEQ ID NO: 240067 - RNA, 18 nt, Human
ugagaaauaucaagcaua

SEQ ID NO: 240068 - RNA, 24 nt, Human
ugaucuaauuauucuuucaguugu

SEQ ID NO: 240069 - RNA, 21 nt, Human
ugcuacauauuaaucuguaug

SEQ ID NO: 240070 - RNA, 20 nt, Human
ugcuauuuuuaugucugcau

SEQ ID NO: 240071 - RNA, 24 nt, Human
uggcuucauuauuaacauccugua

SEQ ID NO: 240072 - RNA, 20 nt, Human
uguagaagugaaauaacagu

SEQ ID NO: 240073 - RNA, 23 nt, Human
uguuauuggcauguauuugcaaa

SEQ ID NO: 240074 - RNA, 21 nt, Human
uuacuaaauuauuuccauuau

SEQ ID NO: 240075 - RNA, 21 nt, Human
uucaaauaauuuuuaccagua

SEQ ID NO: 240076 - RNA, 18 nt, Human
uugcuacauauuaaucug

SEQ ID NO: 240077 - RNA, 24 nt, Human
uuuaacacugcaaaacauuagaaa

SEQ ID NO: 240078 - RNA, 18 nt, Human
uuucuugacaauaaacag

SEQ ID NO: 240079 - RNA, 26 nt, Human
uuuuuuuuucuugagagaaaagaguc

SEQ ID NO: 240080 - RNA, 19 nt, Human
uuuuuuuuuucuugagaga

SEQ ID NO: 240081 - RNA, 25 nt, Human
aaaaaagaacggaauguacuggaga

SEQ ID NO: 240082 - RNA, 19 nt, Human
aaaauaaccacauuaguga

SEQ ID NO: 240083 - RNA, 19 nt, Human
aacacggugaaacccuguc

SEQ ID NO: 240084 - RNA, 20 nt, Human
aacacggugaaacccugucu

SEQ ID NO: 240085 - RNA, 21 nt, Human
aacacggugaaacccugucuc

SEQ ID NO: 240086 - RNA, 21 nt, Human
aaggaacagcaauuuagaaag

SEQ ID NO: 240087 - RNA, 24 nt, Human
aauggcgugaacccgggaggugga

SEQ ID NO: 240088 - RNA, 22 nt, Human
acagagcgagacugucucaaaa

SEQ ID NO: 240089 - RNA, 24 nt, Human
acccugucucuacuaaaaauacaa

SEQ ID NO: 240090 - RNA, 24 nt, Human
acugcacuccagccugggcgacag

SEQ ID NO: 240091 - RNA, 26 nt, Human
acugcacuccagccugggcgacagag

SEQ ID NO: 240092 - RNA, 22 nt, Human
agaaagaaacacacuuuaagaa

SEQ ID NO: 240093 - RNA, 24 nt, Human
agcacuuugggaggccgagguggg

SEQ ID NO: 240094 - RNA, 21 nt, Human
aggcaggagaauggcgugaac

SEQ ID NO: 240095 - RNA, 24 nt, Human
aggcaggagaauggcgugaacccg

SEQ ID NO: 240096 - RNA, 21 nt, Human
aggccgagguggguggaucac

SEQ ID NO: 240097 - RNA, 19 nt, Human
aggcugaggcaggagaaug

SEQ ID NO: 240098 - RNA, 21 nt, Human
agguggagguugcagugagcc

SEQ ID NO: 240099 - RNA, 24 nt, Human
agguggagguugcagugagccgag

SEQ ID NO: 240100 - RNA, 24 nt, Human
agguggguggaucacaaggucagg

SEQ ID NO: 240101 - RNA, 24 nt, Human
aguggcucacgccuguaaucccag

SEQ ID NO: 240102 - RNA, 24 nt, Human
caacaaaaagugguuauuuuuacu

SEQ ID NO: 240103 - RNA, 24 nt, Human
cacgccuguaaucccagcacuuug

SEQ ID NO: 240104 - RNA, 24 nt, Human
cacuccagccugggcgacagagcg

SEQ ID NO: 240105 - RNA, 19 nt, Human
cacugcacuccagccuggg

SEQ ID NO: 240106 - RNA, 20 nt, Human
cacugcacuccagccugggc

SEQ ID NO: 240107 - RNA, 22 nt, Human
cacugcacuccagccugggcga

SEQ ID NO: 240108 - RNA, 23 nt, Human
cacugcacuccagccugggcgac

SEQ ID NO: 240109 - RNA, 24 nt, Human
cacugcacuccagccugggcgaca

SEQ ID NO: 240110 - RNA, 23 nt, Human
cagcaauuuagaaagaaacacac

SEQ ID NO: 240111 - RNA, 21 nt, Human
cagcacuuugggaggccgagg

SEQ ID NO: 240112 - RNA, 24 nt, Human
cagcacuuugggaggccgaggugg

SEQ ID NO: 240113 - RNA, 24 nt, Human
cagcuacucgggaggcugaggcag

SEQ ID NO: 240114 - RNA, 20 nt, Human
ccacugcacuccagccuggg

SEQ ID NO: 240115 - RNA, 21 nt, Human
ccacugcacuccagccugggc

SEQ ID NO: 240116 - RNA, 21 nt, Human
ccacugcacuccagccugggc

SEQ ID NO: 240117 - RNA, 23 nt, Human
ccacugcacuccagccugggcga

SEQ ID NO: 240118 - RNA, 23 nt, Human
ccacugcacuccagccugggcga

SEQ ID NO: 240119 - RNA, 24 nt, Human
ccacugcacuccagccugggcgac

SEQ ID NO: 240120 - RNA, 21 nt, Human
cccgggagguggagguugcag

SEQ ID NO: 240121 - RNA, 22 nt, Human
cccguaaucccagcuacucggg

SEQ ID NO: 240122 - RNA, 23 nt, Human
ccuacucccuuaaugugagagag

SEQ ID NO: 240123 - RNA, 22 nt, Human
ccuggcuaacacggugaaaccc

SEQ ID NO: 240124 - RNA, 24 nt, Human
ccuggcuaacacggugaaacccug

SEQ ID NO: 240125 - RNA, 22 nt, Human
ccuguaaucccagcacuuuggg

SEQ ID NO: 240126 - RNA, 20 nt, Human
ccuucaucagcugguauuuu

SEQ ID NO: 240127 - RNA, 24 nt, Human
cgagaccauccuggcuaacacggu

SEQ ID NO: 240128 - RNA, 26 nt, Human
cgagguggguggaucacaaggucagg

SEQ ID NO: 240129 - RNA, 20 nt, Human
cgccacugcacuccagccug

SEQ ID NO: 240130 - RNA, 23 nt, Human
cgcccguaaucccagcuacucgg

SEQ ID NO: 240131 - RNA, 23 nt, Human
cgcccguaaucccagcuacucgg

SEQ ID NO: 240132 - RNA, 24 nt, Human
cgcccguaaucccagcuacucggg

SEQ ID NO: 240133 - RNA, 29 nt, Human
cgggagguggagguugcagugacaacggu

SEQ ID NO: 240134 - RNA, 24 nt, Human
cgggagguggagguugcagugagc

SEQ ID NO: 240135 - RNA, 26 nt, Human
cuauuugcaaacugaaaaauguugua

SEQ ID NO: 240136 - RNA, 22 nt, Human
cucacgccuguaaucccagcac

SEQ ID NO: 240137 - RNA, 24 nt, Human
cucacgccuguaaucccagcacuu

SEQ ID NO: 240138 - RNA, 30 nt, Human
cugaauguggccgggcgcaguggcucacgg

SEQ ID NO: 240139 - RNA, 18 nt, Human
cuggcuaacacggugaaa

SEQ ID NO: 240140 - RNA, 24 nt, Human
cuggcuaacacggugaaacccugu

SEQ ID NO: 240141 - RNA, 19 nt, Human
cugucucaaaaaaaaaaaa

SEQ ID NO: 240142 - RNA, 19 nt, Human
gaaacccugucucuacuaa

SEQ ID NO: 240143 - RNA, 20 nt, Human
gaauguggccgggcgcagug

SEQ ID NO: 240144 - RNA, 23 nt, Human
gagauugcgccacugcacuccag

SEQ ID NO: 240145 - RNA, 22 nt, Human
gagguggguggaucacaagguc

SEQ ID NO: 240146 - RNA, 23 nt, Human
gagguugcagugagccgagauug

SEQ ID NO: 240147 - RNA, 24 nt, Human
gcacuccagccugggcgacagagc

SEQ ID NO: 240148 - RNA, 22 nt, Human
gccacugcacuccagccugggc

SEQ ID NO: 240149 - RNA, 24 nt, Human
gccacugcacuccagccugggcga

SEQ ID NO: 240150 - RNA, 20 nt, Human
gcgcaguggcucacgccugu

SEQ ID NO: 240151 - RNA, 24 nt, Human
gcuaacacggugaaacccugucuc

SEQ ID NO: 240152 - RNA, 22 nt, Human
gcugaggcaggagaauggcgug

SEQ ID NO: 240153 - RNA, 22 nt, Human
ggagguugcagugagccgagau

SEQ ID NO: 240154 - RNA, 24 nt, Human
ggagguugcagugagccgagauug

SEQ ID NO: 240155 - RNA, 20 nt, Human
ggcgugguggcgggcgcccg

SEQ ID NO: 240156 - RNA, 24 nt, Human
gggcgcaguggcucacgccuguaa

SEQ ID NO: 240157 - RNA, 21 nt, Human
gguggaucacaaggucaggag

SEQ ID NO: 240158 - RNA, 21 nt, Human
gguuauuucuuugauaagaac

SEQ ID NO: 240159 - RNA, 21 nt, Human
guugcagugagccgagauugc

SEQ ID NO: 240160 - RNA, 24 nt, Human
guuugaaggggaaauaaugguagu

SEQ ID NO: 240161 - RNA, 22 nt, Human
uaaaauaaccacauuagugaac

SEQ ID NO: 240162 - RNA, 22 nt, Human
uaacacggugaaacccugucuc

SEQ ID NO: 240163 - RNA, 24 nt, Human
uaacacggugaaacccugucucua

SEQ ID NO: 240164 - RNA, 24 nt, Human
uaagaaaucaaaauucucaauuca

SEQ ID NO: 240165 - RNA, 23 nt, Human
uagaaagaaacacacuuuaagaa

SEQ ID NO: 240166 - RNA, 24 nt, Human
uauucuacuccuuuaaaaauuuca

SEQ ID NO: 240167 - RNA, 23 nt, Human
ucaaaaaaaaaaaagaacggaau

SEQ ID NO: 240168 - RNA, 18 nt, Human
ucacaaggucaggagauc

SEQ ID NO: 240169 - RNA, 24 nt, Human
ucacaaggucaggagaucgagacc

SEQ ID NO: 240170 - RNA, 22 nt, Human
ucagaugccuucaucagcuggu

SEQ ID NO: 240171 - RNA, 23 nt, Human
uccagccugggcgacagagcgag

SEQ ID NO: 240172 - RNA, 24 nt, Human
uccagccugggcgacagagcgaga

SEQ ID NO: 240173 - RNA, 22 nt, Human
ucccuuaaugugagagagacaa

SEQ ID NO: 240174 - RNA, 22 nt, Human
ucucuacuaaaaauacaaaaaa

SEQ ID NO: 240175 - RNA, 23 nt, Human
ugaacccgggagguggagguugc

SEQ ID NO: 240176 - RNA, 19 nt, Human
ugagagagacaaaaugagc

SEQ ID NO: 240177 - RNA, 22 nt, Human
ugagccgagauugcgccacugc

SEQ ID NO: 240178 - RNA, 24 nt, Human
ugaggcaggagaauggcgugaacc

SEQ ID NO: 240179 - RNA, 25 nt, Human
ugaggcaggagaauggcgugaaccc

SEQ ID NO: 240180 - RNA, 24 nt, Human
ugauaagaacugaauguggccggg

SEQ ID NO: 240181 - RNA, 24 nt, Human
ugcaaacugaaaaauguuguaggc

SEQ ID NO: 240182 - RNA, 24 nt, Human
uggcgugaacccgggagguggagg

SEQ ID NO: 240183 - RNA, 22 nt, Human
uggcucacgccuguaaucccag

SEQ ID NO: 240184 - RNA, 24 nt, Human
uggcucacgccuguaaucccagca

SEQ ID NO: 240185 - RNA, 23 nt, Human
ugggaggccgagguggguggauc

SEQ ID NO: 240186 - RNA, 24 nt, Human
ugggaggccgagguggguggauca

SEQ ID NO: 240187 - RNA, 18 nt, Human
uuagccgggcgugguggc

SEQ ID NO: 240188 - RNA, 24 nt, Human
uuagccgggcgugguggcgggcgc

SEQ ID NO: 240189 - RNA, 20 nt, Human
uugaaggggaaauaauggua

SEQ ID NO: 240190 - RNA, 19 nt, Human
uugcagugagccgagauug

SEQ ID NO: 240191 - RNA, 22 nt, Human
uugcagugagccgagauugcgc

SEQ ID NO: 240192 - RNA, 23 nt, Human
uugcgccacugcacuccagccug

SEQ ID NO: 240193 - RNA, 25 nt, Human
uugggaggccgagguggguggauca

SEQ ID NO: 240194 - RNA, 18 nt, Human
uuguauuuuuuacaucau

SEQ ID NO: 240195 - RNA, 26 nt, Human
uuuagaaagaaacacacuuuaagaaa

SEQ ID NO: 240196 - RNA, 23 nt, Human
aaaaaugacaaaccagaaacacu

SEQ ID NO: 240197 - RNA, 24 nt, Human
aaaaggcuacccauaauagaauuc

SEQ ID NO: 240198 - RNA, 22 nt, Human
aaacaaguauaaauauuacauu

SEQ ID NO: 240199 - RNA, 18 nt, Human
aaauaacaacaacaacaa

SEQ ID NO: 240200 - RNA, 19 nt, Human
aauacaugccugaggugag

SEQ ID NO: 240201 - RNA, 20 nt, Human
aaugucaaacagaagaaaac

SEQ ID NO: 240202 - RNA, 23 nt, Human
acaaaaaugacaaaccagaaaca

SEQ ID NO: 240203 - RNA, 22 nt, Human
acaaaagcuccaaaagggcaca

SEQ ID NO: 240204 - RNA, 25 nt, Human
acaacaacaacaaaaaugacaaacc

SEQ ID NO: 240205 - RNA, 19 nt, Human
acaacaacaacaacaacaa

SEQ ID NO: 240206 - RNA, 19 nt, Human
acaacaacaacaacaacaa

SEQ ID NO: 240207 - RNA, 27 nt, Human
acaacaacaacaacaacaaaaaugaca

SEQ ID NO: 240208 - RNA, 22 nt, Human
acaacaacaacaacaacaacaa

SEQ ID NO: 240209 - RNA, 24 nt, Human
acaacaacaacaacaacaacaaaa

SEQ ID NO: 240210 - RNA, 24 nt, Human
acauuguuagcuuauuuaacauuu

SEQ ID NO: 240211 - RNA, 20 nt, Human
acgggagaggccaggcggug

SEQ ID NO: 240212 - RNA, 20 nt, Human
acuaaaaacaauaaaaauuu

SEQ ID NO: 240213 - RNA, 24 nt, Human
agaaacugguaagugaccuaaaua

SEQ ID NO: 240214 - RNA, 19 nt, Human
agaacaucuugguccacag

SEQ ID NO: 240215 - RNA, 19 nt, Human
agagacaggugaggagaaa

SEQ ID NO: 240216 - RNA, 24 nt, Human
aggagaggggauaugacaaaaugc

SEQ ID NO: 240217 - RNA, 18 nt, Human
aggcuuucuuucucaguu

SEQ ID NO: 240218 - RNA, 23 nt, Human
agguuuucucuguuuucaacuag

SEQ ID NO: 240219 - RNA, 18 nt, Human
aguuuaucaucaaauaga

SEQ ID NO: 240220 - RNA, 22 nt, Human
auaacaacaacaacaacaaaac

SEQ ID NO: 240221 - RNA, 27 nt, Human
auaacaacaacaacaacaacaacaaaa

SEQ ID NO: 240222 - RNA, 23 nt, Human
auuuuauucucucccuucucuca

SEQ ID NO: 240223 - RNA, 19 nt, Human
caaaaaaugcugaaccucc

SEQ ID NO: 240224 - RNA, 23 nt, Human
caaaaagucugugcauaacucag

SEQ ID NO: 240225 - RNA, 24 nt, Human
caaaaaugacaaaccagaaacacu

SEQ ID NO: 240226 - RNA, 23 nt, Human
caaaagcuccaaaagggcacaga

SEQ ID NO: 240227 - RNA, 22 nt, Human
caaaagggcacagaaacuggua

SEQ ID NO: 240228 - RNA, 21 nt, Human
caacaaaaaugacaaaccaga

SEQ ID NO: 240229 - RNA, 23 nt, Human
caacaacaaaaaugacaaaccag

SEQ ID NO: 240230 - RNA, 30 nt, Human
caacaacaaaaaugacaaaccagaaacacc

SEQ ID NO: 240231 - RNA, 25 nt, Human
caacaacaacaacaaaaaugacaaa

SEQ ID NO: 240232 - RNA, 20 nt, Human
caacaacaacaacaacaaaa

SEQ ID NO: 240233 - RNA, 23 nt, Human
caaugaauuuauaguuuaucauc

SEQ ID NO: 240234 - RNA, 27 nt, Human
cagaaggauaagccucuucuucccacu

SEQ ID NO: 240235 - RNA, 19 nt, Human
cagcagcaggccugaauua

SEQ ID NO: 240236 - RNA, 24 nt, Human
ccucuucuucccacucuaaaaauc

SEQ ID NO: 240237 - RNA, 23 nt, Human
ccuuauaauugguaaaaaggcua

SEQ ID NO: 240238 - RNA, 23 nt, Human
cggcagccuaaaggaacgggaga

SEQ ID NO: 240239 - RNA, 19 nt, Human
cuaaauauuagaaaaauaa

SEQ ID NO: 240240 - RNA, 24 nt, Human
cuaagacucuggagcacucaguag

SEQ ID NO: 240241 - RNA, 19 nt, Human
cucuguuuucaacuagcug

SEQ ID NO: 240242 - RNA, 21 nt, Human
cuggagcacucaguagagagg

SEQ ID NO: 240243 - RNA, 24 nt, Human
cuuauaauugguaaaaaggcuacc

SEQ ID NO: 240244 - RNA, 18 nt, Human
cuuggaauaaaaucuuca

SEQ ID NO: 240245 - RNA, 19 nt, Human
cuugguccacagacaaugg

SEQ ID NO: 240246 - RNA, 24 nt, Human
gagaaaaccaggccaauacaaaua

SEQ ID NO: 240247 - RNA, 19 nt, Human
gcuccaaaagggcacagaa

SEQ ID NO: 240248 - RNA, 20 nt, Human
ggcuaaagaaauacagggug

SEQ ID NO: 240249 - RNA, 27 nt, Human
gguauagaguaaauaacaacaacaacu

SEQ ID NO: 240250 - RNA, 24 nt, Human
ggugaggagaaaauacauaguaaa

SEQ ID NO: 240251 - RNA, 18 nt, Human
guacagacugccugucug

SEQ ID NO: 240252 - RNA, 18 nt, Human
uaaaaauaacaacaagcc

SEQ ID NO: 240253 - RNA, 19 nt, Human
uaaaaauaacaacaagccc

SEQ ID NO: 240254 - RNA, 24 nt, Human
uaaaauaacauucuggaaacaagu

SEQ ID NO: 240255 - RNA, 30 nt, Human
uaaauuuuccuuauaauugguaaaaaggcc

SEQ ID NO: 240256 - RNA, 21 nt, Human
uaagugaauguucauguucac

SEQ ID NO: 240257 - RNA, 18 nt, Human
uacagggugagaaugaag

SEQ ID NO: 240258 - RNA, 21 nt, Human
uaccaagaaaacaaguacaaa

SEQ ID NO: 240259 - RNA, 21 nt, Human
uagcccuuuagccaagaguuc

SEQ ID NO: 240260 - RNA, 24 nt, Human
uaguauaucacugccuuacauaac

SEQ ID NO: 240261 - RNA, 20 nt, Human
uaugcugcaaaaaaugcuga

SEQ ID NO: 240262 - RNA, 23 nt, Human
ucaaaauacaugccugaggugag

SEQ ID NO: 240263 - RNA, 18 nt, Human
ucacugccuuacauaacu

SEQ ID NO: 240264 - RNA, 23 nt, Human
ucacugccuuacauaacugugga

SEQ ID NO: 240265 - RNA, 20 nt, Human
uccaaaagggcacagaaacu

SEQ ID NO: 240266 - RNA, 21 nt, Human
ucugugcauaacucagcagca

SEQ ID NO: 240267 - RNA, 19 nt, Human
ugaggugagacugcuuggg

SEQ ID NO: 240268 - RNA, 18 nt, Human
ugcugaguuuuauaagac

SEQ ID NO: 240269 - RNA, 24 nt, Human
uggaauaaaaucuucauuugugga

SEQ ID NO: 240270 - RNA, 23 nt, Human
ugguccacagacaauggaaugga

SEQ ID NO: 240271 - RNA, 20 nt, Human
ugucaaacagaagaaaaccc

SEQ ID NO: 240272 - RNA, 25 nt, Human
uuaacauuuguuccuucacuauuuu

SEQ ID NO: 240273 - RNA, 24 nt, Human
uuagaaaaauaaggagaggggaua

SEQ ID NO: 240274 - RNA, 20 nt, Human
uucauuuguggaaauggaau

SEQ ID NO: 240275 - RNA, 23 nt, Human
uugaauaaaaauaacaacaagcc

SEQ ID NO: 240276 - RNA, 24 nt, Human
uuuacaugugaaagaaucaucacg

SEQ ID NO: 240277 - RNA, 22 nt, Human
uuucucuguuuucaacuagcug

SEQ ID NO: 240278 - RNA, 20 nt, Human
aacacgcccaggccacagaa

SEQ ID NO: 240279 - RNA, 24 nt, Human
aacacgcccaggccacagaagcca

SEQ ID NO: 240280 - RNA, 23 nt, Human
aacuugccacucagggcccccca

SEQ ID NO: 240281 - RNA, 19 nt, Human
aagauggggggaucucgcc

SEQ ID NO: 240282 - RNA, 22 nt, Human
aaggggcugaagccagcagugg

SEQ ID NO: 240283 - RNA, 19 nt, Human
acacaccugcauacaccca

SEQ ID NO: 240284 - RNA, 18 nt, Human
acaccguggccccauggg

SEQ ID NO: 240285 - RNA, 23 nt, Human
acacgcccaggccacagaagcca

SEQ ID NO: 240286 - RNA, 18 nt, Human
acaucuuguggaaacugg

SEQ ID NO: 240287 - RNA, 21 nt, Human
accgaccugggagcugaccuc

SEQ ID NO: 240288 - RNA, 20 nt, Human
acucugggccaccuccuccc

SEQ ID NO: 240289 - RNA, 23 nt, Human
acucugggccaccuccucccagc

SEQ ID NO: 240290 - RNA, 24 nt, Human
acugaccuacaucugggguucugc

SEQ ID NO: 240291 - RNA, 21 nt, Human
agagaauacaaacaucuuguc

SEQ ID NO: 240292 - RNA, 22 nt, Human
agagggcagcccuccuuccaca

SEQ ID NO: 240293 - RNA, 19 nt, Human
agcaggucacuuccccaag

SEQ ID NO: 240294 - RNA, 26 nt, Human
agccagcagugguggccgggccagca

SEQ ID NO: 240295 - RNA, 23 nt, Human
agccccugugaaaaccaggccug

SEQ ID NO: 240296 - RNA, 21 nt, Human
agccgguagucuucucaguag

SEQ ID NO: 240297 - RNA, 24 nt, Human
agcgaugcacuguuucgaagggcc

SEQ ID NO: 240298 - RNA, 18 nt, Human
aggagccuugggugacag

SEQ ID NO: 240299 - RNA, 20 nt, Human
aggagccuugggugacaggc

SEQ ID NO: 240300 - RNA, 23 nt, Human
aggaggucauugagcauggucuu

SEQ ID NO: 240301 - RNA, 18 nt, Human
aggcaggaguugacagca

SEQ ID NO: 240302 - RNA, 22 nt, Human
aggcagggcaggcaggcacggc

SEQ ID NO: 240303 - RNA, 20 nt, Human
aggcuucuggguaggccccu

SEQ ID NO: 240304 - RNA, 20 nt, Human
agggagggagggacaggagc

SEQ ID NO: 240305 - RNA, 23 nt, Human
agggcccuuggcauguaauuuca

SEQ ID NO: 240306 - RNA, 18 nt, Human
aggggcaaggcagggcag

SEQ ID NO: 240307 - RNA, 19 nt, Human
agguacucgacacuguccg

SEQ ID NO: 240308 - RNA, 22 nt, Human
aggucguuuuuauucuucaagu

SEQ ID NO: 240309 - RNA, 22 nt, Human
agguuguugguuauuuuggcuc

SEQ ID NO: 240310 - RNA, 21 nt, Human
agugacaagggucagcauaga

SEQ ID NO: 240311 - RNA, 23 nt, Human
auagagacagguaaggccacuga

SEQ ID NO: 240312 - RNA, 18 nt, Human
caagagggcagcccuccu

SEQ ID NO: 240313 - RNA, 20 nt, Human
caagggccucccggcucagc

SEQ ID NO: 240314 - RNA, 19 nt, Human
cacuacaccaggagagggu

SEQ ID NO: 240315 - RNA, 22 nt, Human
cacuccaaaauucaccucaagu

SEQ ID NO: 240316 - RNA, 19 nt, Human
cacuggccaguugcaaacu

SEQ ID NO: 240317 - RNA, 20 nt, Human
cacuguacaccguggcccca

SEQ ID NO: 240318 - RNA, 22 nt, Human
cagcaggugagcucucgguccu

SEQ ID NO: 240319 - RNA, 19 nt, Human
cagccacaacaagaaaggg

SEQ ID NO: 240320 - RNA, 18 nt, Human
cagccccgaucugccccc

SEQ ID NO: 240321 - RNA, 19 nt, Human
cagccccgaucugcccccc

SEQ ID NO: 240322 - RNA, 20 nt, Human
cagccccgaucugccccccc

SEQ ID NO: 240323 - RNA, 23 nt, Human
cagccucugccccagcuccugcu

SEQ ID NO: 240324 - RNA, 22 nt, Human
caggagccaagagcauagugca

SEQ ID NO: 240325 - RNA, 18 nt, Human
caggagggauuuggagga

SEQ ID NO: 240326 - RNA, 19 nt, Human
caggcagauucgcuggugc

SEQ ID NO: 240327 - RNA, 22 nt, Human
caggccacagaagccaggccaa

SEQ ID NO: 240328 - RNA, 18 nt, Human
caggucacuuccccaagg

SEQ ID NO: 240329 - RNA, 23 nt, Human
caggugcugacauauccucccca

SEQ ID NO: 240330 - RNA, 18 nt, Human
caguaggcagggcaggca

SEQ ID NO: 240331 - RNA, 22 nt, Human
caucauggguccccaccacaag

SEQ ID NO: 240332 - RNA, 20 nt, Human
cauccccucagcucucuuug

SEQ ID NO: 240333 - RNA, 22 nt, Human
caucgaaccgcaggaggucauu

SEQ ID NO: 240334 - RNA, 21 nt, Human
ccaaaauucaccucaagucag

SEQ ID NO: 240335 - RNA, 21 nt, Human
ccaaagacaaacaugcugcuc

SEQ ID NO: 240336 - RNA, 22 nt, Human
ccaaagacaaacaugcugcucc

SEQ ID NO: 240337 - RNA, 19 nt, Human
ccacaacacgcccaggcca

SEQ ID NO: 240338 - RNA, 21 nt, Human
ccacaacacgcccaggccaca

SEQ ID NO: 240339 - RNA, 23 nt, Human
ccacacuacaccaggagagggug

SEQ ID NO: 240340 - RNA, 22 nt, Human
ccacagaagccaggccaagccc

SEQ ID NO: 240341 - RNA, 20 nt, Human
ccacauccccucagcucucc

SEQ ID NO: 240342 - RNA, 23 nt, Human
ccacucagggccccccacacacc

SEQ ID NO: 240343 - RNA, 18 nt, Human
ccagcaaagauccacagc

SEQ ID NO: 240344 - RNA, 19 nt, Human
ccaggugcugacauauccu

SEQ ID NO: 240345 - RNA, 21 nt, Human
cccaaagucucuccccacuuc

SEQ ID NO: 240346 - RNA, 22 nt, Human
cccacacaccugcauacaccca

SEQ ID NO: 240347 - RNA, 18 nt, Human
cccacauccccucagcuc

SEQ ID NO: 240348 - RNA, 18 nt, Human
cccagagaauacaaacau

SEQ ID NO: 240349 - RNA, 27 nt, Human
cccagugcugaguccacaagguacccc

SEQ ID NO: 240350 - RNA, 19 nt, Human
cccauacaucauggguccc

SEQ ID NO: 240351 - RNA, 21 nt, Human
cccauacaucaugggucccca

SEQ ID NO: 240352 - RNA, 18 nt, Human
ccccaaagacaaacaugc

SEQ ID NO: 240353 - RNA, 20 nt, Human
ccccaaggagcuguggcuuc

SEQ ID NO: 240354 - RNA, 21 nt, Human
ccccacacaccugcauacacc

SEQ ID NO: 240355 - RNA, 23 nt, Human
ccccacacaccugcauacaccca

SEQ ID NO: 240356 - RNA, 18 nt, Human
ccccagccaugguccugg

SEQ ID NO: 240357 - RNA, 21 nt, Human
ccccagccaugguccugggcc

SEQ ID NO: 240358 - RNA, 20 nt, Human
ccccaggccucaggauuccc

SEQ ID NO: 240359 - RNA, 24 nt, Human
ccccaguguaacccccaaagacaa

SEQ ID NO: 240360 - RNA, 18 nt, Human
cccccgugcugcccgguc

SEQ ID NO: 240361 - RNA, 20 nt, Human
ccccgugcugcccgguccag

SEQ ID NO: 240362 - RNA, 19 nt, Human
cccggcccgagccacuuga

SEQ ID NO: 240363 - RNA, 23 nt, Human
cccggcucagccucugccccagc

SEQ ID NO: 240364 - RNA, 18 nt, Human
cccguagcgccgcugcgg

SEQ ID NO: 240365 - RNA, 23 nt, Human
cccguagcgccgcugcgggggug

SEQ ID NO: 240366 - RNA, 22 nt, Human
cccgugcugcccgguccaggaa

SEQ ID NO: 240367 - RNA, 27 nt, Human
cccuuggccuggcaggugccacccacu

SEQ ID NO: 240368 - RNA, 24 nt, Human
ccgccugccaggccgcagccccga

SEQ ID NO: 240369 - RNA, 19 nt, Human
ccgcgcgccgccugccagg

SEQ ID NO: 240370 - RNA, 20 nt, Human
ccuccccagccaugguccug

SEQ ID NO: 240371 - RNA, 20 nt, Human
ccucccggcucagccucugc

SEQ ID NO: 240372 - RNA, 26 nt, Human
ccucccggcucagccucugccccagc

SEQ ID NO: 240373 - RNA, 21 nt, Human
ccugacccuuggccuggcagg

SEQ ID NO: 240374 - RNA, 22 nt, Human
ccugacccuuggccuggcaggu

SEQ ID NO: 240375 - RNA, 24 nt, Human
ccugccaggccgcagccccgaucu

SEQ ID NO: 240376 - RNA, 19 nt, Human
ccugcuguguccucaccuc

SEQ ID NO: 240377 - RNA, 26 nt, Human
ccuggcccagcacgaccgaccuggga

SEQ ID NO: 240378 - RNA, 25 nt, Human
cgacuggcaaccguccuucaauuuu

SEQ ID NO: 240379 - RNA, 23 nt, Human
cgcccacucugggccaccuccuc

SEQ ID NO: 240380 - RNA, 23 nt, Human
cgguggggucccagugguaaagg

SEQ ID NO: 240381 - RNA, 24 nt, Human
cucagccucugccccagcuccugc

SEQ ID NO: 240382 - RNA, 20 nt, Human
cuccccagccaugguccugg

SEQ ID NO: 240383 - RNA, 19 nt, Human
cucgcauccacacuacacc

SEQ ID NO: 240384 - RNA, 23 nt, Human
cucugagugaaugcaccuggccc

SEQ ID NO: 240385 - RNA, 18 nt, Human
cucugggcacccugaccc

SEQ ID NO: 240386 - RNA, 19 nt, Human
cugcccccccgugcugccc

SEQ ID NO: 240387 - RNA, 18 nt, Human
cuggaggccuucacagcc

SEQ ID NO: 240388 - RNA, 21 nt, Human
cugugugcuucugcgccgggc

SEQ ID NO: 240389 - RNA, 18 nt, Human
cuucacaaugggcaggcg

SEQ ID NO: 240390 - RNA, 19 nt, Human
gaauacaaacaucuugucc

SEQ ID NO: 240391 - RNA, 18 nt, Human
gaccuagcgacuggcaac

SEQ ID NO: 240392 - RNA, 23 nt, Human
gagccacaucuuguggaaacugg

SEQ ID NO: 240393 - RNA, 19 nt, Human
gaggagccuugggugacag

SEQ ID NO: 240394 - RNA, 21 nt, Human
gaggagccuugggugacaggc

SEQ ID NO: 240395 - RNA, 23 nt, Human
gaggcucugggcacccugacccu

SEQ ID NO: 240396 - RNA, 21 nt, Human
gaggcuucuggguaggccccu

SEQ ID NO: 240397 - RNA, 18 nt, Human
gagggggucugcuucauc

SEQ ID NO: 240398 - RNA, 22 nt, Human
gaucucgcccacucugggccac

SEQ ID NO: 240399 - RNA, 19 nt, Human
gcacuccacuuccaggugc

SEQ ID NO: 240400 - RNA, 19 nt, Human
gcagcccaggcagauucgc

SEQ ID NO: 240401 - RNA, 19 nt, Human
gcgcugcagccugcacucc

SEQ ID NO: 240402 - RNA, 20 nt, Human
ggaaggccagccuggaggcc

SEQ ID NO: 240403 - RNA, 23 nt, Human
ggagagggugaugacagggaggg

SEQ ID NO: 240404 - RNA, 22 nt, Human
ggaucucagggagggagggaca

SEQ ID NO: 240405 - RNA, 20 nt, Human
ggauuuggaggaggcugccc

SEQ ID NO: 240406 - RNA, 22 nt, Human
ggcacacaauuuuguaaaauuu

SEQ ID NO: 240407 - RNA, 21 nt, Human
ggccucccggcucagccucug

SEQ ID NO: 240408 - RNA, 22 nt, Human
gggaucucgcccacucugggcc

SEQ ID NO: 240409 - RNA, 18 nt, Human
ggggcaaggcagggcaga

SEQ ID NO: 240410 - RNA, 24 nt, Human
gggggaucucgcccacucugggcc

SEQ ID NO: 240411 - RNA, 24 nt, Human
gggggugguggggagccccggagc

SEQ ID NO: 240412 - RNA, 21 nt, Human
ggugguggggagccccggagc

SEQ ID NO: 240413 - RNA, 24 nt, Human
guccacaacacgcccaggccacag

SEQ ID NO: 240414 - RNA, 23 nt, Human
gugugugguggguagcacugcug

SEQ ID NO: 240415 - RNA, 18 nt, Human
guuuggggcccccacauc

SEQ ID NO: 240416 - RNA, 21 nt, Human
uaaaggcccugcaccaggagc

SEQ ID NO: 240417 - RNA, 23 nt, Human
uaacccccaaagacaaacaugcu

SEQ ID NO: 240418 - RNA, 21 nt, Human
ucaagucaggugagacccaua

SEQ ID NO: 240419 - RNA, 22 nt, Human
ucacugagccguggccucgcau

SEQ ID NO: 240420 - RNA, 19 nt, Human
ucagcucucuuuggaggcu

SEQ ID NO: 240421 - RNA, 18 nt, Human
ucagggagggagggacag

SEQ ID NO: 240422 - RNA, 21 nt, Human
ucagggagggagggacaggag

SEQ ID NO: 240423 - RNA, 23 nt, Human
ucagugacaagggucagcauaga

SEQ ID NO: 240424 - RNA, 18 nt, Human
ucaucauccgcucccugu

SEQ ID NO: 240425 - RNA, 18 nt, Human
uccacaacacgcccaggc

SEQ ID NO: 240426 - RNA, 26 nt, Human
uccacaacacgcccaggccacagaag

SEQ ID NO: 240427 - RNA, 22 nt, Human
uccaggagggauuuggaggagg

SEQ ID NO: 240428 - RNA, 19 nt, Human
uccaggugcugacauaucc

SEQ ID NO: 240429 - RNA, 20 nt, Human
ucccauagacgacggccgag

SEQ ID NO: 240430 - RNA, 19 nt, Human
uccccaaggagcuguggcu

SEQ ID NO: 240431 - RNA, 18 nt, Human
ucccuggaaggccagccu

SEQ ID NO: 240432 - RNA, 18 nt, Human
ucccuguggaccuguguc

SEQ ID NO: 240433 - RNA, 21 nt, Human
uccgagcagcuauggucgaag

SEQ ID NO: 240434 - RNA, 21 nt, Human
uccgcucccuguggaccugug

SEQ ID NO: 240435 - RNA, 26 nt, Human
uccuguucccaguaagggagcgcugg

SEQ ID NO: 240436 - RNA, 19 nt, Human
ucgaaccgcaggaggucau

SEQ ID NO: 240437 - RNA, 18 nt, Human
ucucgcccacucugggcc

SEQ ID NO: 240438 - RNA, 18 nt, Human
ucucucuucccuuguucc

SEQ ID NO: 240439 - RNA, 21 nt, Human
ucugcuaagccuccucccgca

SEQ ID NO: 240440 - RNA, 24 nt, Human
ucuucucaguaggcagggcaggca

SEQ ID NO: 240441 - RNA, 21 nt, Human
ugacagaauacucagcaaggg

SEQ ID NO: 240442 - RNA, 24 nt, Human
ugaccuagcgacuggcaaccgucc

SEQ ID NO: 240443 - RNA, 21 nt, Human
ugagccguggccucgcaucca

SEQ ID NO: 240444 - RNA, 24 nt, Human
ugcagccugcacuccacuuccagg

SEQ ID NO: 240445 - RNA, 18 nt, Human
uggaaacuggguagaugg

SEQ ID NO: 240446 - RNA, 18 nt, Human
uggaauaaauguccccag

SEQ ID NO: 240447 - RNA, 21 nt, Human
uggaggaggcugcccuguggg

SEQ ID NO: 240448 - RNA, 19 nt, Human
uggaggccaauuguccaca

SEQ ID NO: 240449 - RNA, 21 nt, Human
ugggcgcugcagccugcacuc

SEQ ID NO: 240450 - RNA, 23 nt, Human
uggggggaucucgcccacucugg

SEQ ID NO: 240451 - RNA, 21 nt, Human
ugggguucugcuaagccaugg

SEQ ID NO: 240452 - RNA, 19 nt, Human
uggguccccaccacaaguu

SEQ ID NO: 240453 - RNA, 20 nt, Human
uguggaaacuggguagaugg

SEQ ID NO: 240454 - RNA, 19 nt, Human
uuccaggugcugacauauc

SEQ ID NO: 240455 - RNA, 25 nt, Human
uugcagacugguucaaggaggcuuc

SEQ ID NO: 240456 - RNA, 18 nt, Human
uuggaggagccuugggug

SEQ ID NO: 240457 - RNA, 21 nt, Human
uuguccuugaauucaaacugg

SEQ ID NO: 240458 - RNA, 28 nt, Human
aaaagaaaaagaaagaagaauaaaagaa

SEQ ID NO: 240459 - RNA, 19 nt, Human
aaaagacaagaaagcaaaa

SEQ ID NO: 240460 - RNA, 18 nt, Human
aaacaacagagaaacucc

SEQ ID NO: 240461 - RNA, 23 nt, Human
aaacaagaaaccacaaagagaaa

SEQ ID NO: 240462 - RNA, 22 nt, Human
aaacaggggcugggccccaggg

SEQ ID NO: 240463 - RNA, 23 nt, Human
aaaccaaacaagaaaccacaaag

SEQ ID NO: 240464 - RNA, 20 nt, Human
aaaccaaaccaaacaagaaa

SEQ ID NO: 240465 - RNA, 21 nt, Human
aaagguuugccgcuaaaccug

SEQ ID NO: 240466 - RNA, 19 nt, Human
aacacccacaggaagguga

SEQ ID NO: 240467 - RNA, 21 nt, Human
aaccaaagcagacagaccccu

SEQ ID NO: 240468 - RNA, 19 nt, Human
aacccucccuucccagcac

SEQ ID NO: 240469 - RNA, 18 nt, Human
aacccuuggauucucccu

SEQ ID NO: 240470 - RNA, 20 nt, Human
aagaaccaguaaacaggggc

SEQ ID NO: 240471 - RNA, 26 nt, Human
aagaagaauaaaagaaaaaucuggaa

SEQ ID NO: 240472 - RNA, 18 nt, Human
aaguucccagacgcuccc

SEQ ID NO: 240473 - RNA, 19 nt, Human
aauugcugagcagggggga

SEQ ID NO: 240474 - RNA, 20 nt, Human
acaacagagaaacuccaccu

SEQ ID NO: 240475 - RNA, 25 nt, Human
acagagcaagacccugucucauaaa

SEQ ID NO: 240476 - RNA, 22 nt, Human
acagucaaaaauagaacaugga

SEQ ID NO: 240477 - RNA, 20 nt, Human
acaucugggccggccuggga

SEQ ID NO: 240478 - RNA, 24 nt, Human
acauuccagaguagccgccggcca

SEQ ID NO: 240479 - RNA, 22 nt, Human
accaaacaagaaaccacaaaga

SEQ ID NO: 240480 - RNA, 25 nt, Human
accaaaccaaacaagaaaccacaaa

SEQ ID NO: 240481 - RNA, 20 nt, Human
accacaaagagaaaaauaac

SEQ ID NO: 240482 - RNA, 18 nt, Human
accauggcggagcacagc

SEQ ID NO: 240483 - RNA, 18 nt, Human
accccgugacaguccagu

SEQ ID NO: 240484 - RNA, 23 nt, Human
accucggggucucuaagggccag

SEQ ID NO: 240485 - RNA, 23 nt, Human
acuccagccugggggacagagca

SEQ ID NO: 240486 - RNA, 19 nt, Human
acucuggggcgggggcugg

SEQ ID NO: 240487 - RNA, 18 nt, Human
acugcacuccagccuggg

SEQ ID NO: 240488 - RNA, 24 nt, Human
acugcacuccagccugggggacag

SEQ ID NO: 240489 - RNA, 21 nt, Human
acugcccaagcuccugagaaa

SEQ ID NO: 240490 - RNA, 19 nt, Human
acugggaggaaaaacucaa

SEQ ID NO: 240491 - RNA, 19 nt, Human
agaaacccagaacucagcc

SEQ ID NO: 240492 - RNA, 22 nt, Human
agaaccaguaaacaggggcugg

SEQ ID NO: 240493 - RNA, 29 nt, Human
agacaagaaagcaaaaaagaagggacccc

SEQ ID NO: 240494 - RNA, 20 nt, Human
agagagggaaggaaaggcca

SEQ ID NO: 240495 - RNA, 20 nt, Human
agagggaagggcaggaagcc

SEQ ID NO: 240496 - RNA, 22 nt, Human
agauauggagaaggcugcacuc

SEQ ID NO: 240497 - RNA, 21 nt, Human
agcagacagaccccuggaccc

SEQ ID NO: 240498 - RNA, 23 nt, Human
agcagguagggacucccagccuc

SEQ ID NO: 240499 - RNA, 18 nt, Human
agcaucuccccaccccua

SEQ ID NO: 240500 - RNA, 21 nt, Human
agccacuucuucucaggcaac

SEQ ID NO: 240501 - RNA, 24 nt, Human
agccacuucuucucaggcaacguu

SEQ ID NO: 240502 - RNA, 20 nt, Human
aggaaaauagcucagguucu

SEQ ID NO: 240503 - RNA, 22 nt, Human
aggaaagaacacccacaggaag

SEQ ID NO: 240504 - RNA, 22 nt, Human
aggauggcaggaugggcaccgu

SEQ ID NO: 240505 - RNA, 24 nt, Human
aggcacgguggcgcgcaccuguag

SEQ ID NO: 240506 - RNA, 24 nt, Human
aggcacgguggcucacaucugcaa

SEQ ID NO: 240507 - RNA, 21 nt, Human
aggcagaaucuggcauggucc

SEQ ID NO: 240508 - RNA, 24 nt, Human
aggcagaaucuggcaugguccaag

SEQ ID NO: 240509 - RNA, 23 nt, Human
aggcaggaggauugcuugagccc

SEQ ID NO: 240510 - RNA, 26 nt, Human
aggcagggagggacuuuuggcuugua

SEQ ID NO: 240511 - RNA, 23 nt, Human
aggcagguggauugcuugaggcc

SEQ ID NO: 240512 - RNA, 22 nt, Human
aggccugggggggacacaucug

SEQ ID NO: 240513 - RNA, 19 nt, Human
aggcucugugcuuggaggc

SEQ ID NO: 240514 - RNA, 21 nt, Human
aggcugaggcaggaggauugc

SEQ ID NO: 240515 - RNA, 24 nt, Human
aggcugaggcaggaggauugcuug

SEQ ID NO: 240516 - RNA, 21 nt, Human
aggggcagaguccgauccuug

SEQ ID NO: 240517 - RNA, 21 nt, Human
aggguacugcccucaggcagg

SEQ ID NO: 240518 - RNA, 21 nt, Human
aggugacucuggccucagccc

SEQ ID NO: 240519 - RNA, 24 nt, Human
aucaugccacugcacuccagccug

SEQ ID NO: 240520 - RNA, 18 nt, Human
caaaacgagaccccgucc

SEQ ID NO: 240521 - RNA, 22 nt, Human
caaaacgagaccccgucccuac

SEQ ID NO: 240522 - RNA, 23 nt, Human
caaagcagacagaccccuggacc

SEQ ID NO: 240523 - RNA, 20 nt, Human
caacagagaaacuccaccuu

SEQ ID NO: 240524 - RNA, 22 nt, Human
caacccucccuucccagcaccc

SEQ ID NO: 240525 - RNA, 23 nt, Human
caacccucccuucccagcaccca

SEQ ID NO: 240526 - RNA, 19 nt, Human
caagaaagcaaaaaagaaa

SEQ ID NO: 240527 - RNA, 24 nt, Human
caagaaagcaaaaaagaaaaagaa

SEQ ID NO: 240528 - RNA, 26 nt, Human
caaggcagguggauugcuugaggcca

SEQ ID NO: 240529 - RNA, 24 nt, Human
cacaucugcaaucucagcacuuug

SEQ ID NO: 240530 - RNA, 22 nt, Human
cacccucugguucacggugguu

SEQ ID NO: 240531 - RNA, 18 nt, Human
caccuguagucccagcua

SEQ ID NO: 240532 - RNA, 23 nt, Human
caccuguagucccagcuaguugg

SEQ ID NO: 240533 - RNA, 23 nt, Human
cacuccagccugggggacagagc

SEQ ID NO: 240534 - RNA, 18 nt, Human
cacugcacuccagccugg

SEQ ID NO: 240535 - RNA, 19 nt, Human
cacugcacuccagccuggg

SEQ ID NO: 240536 - RNA, 22 nt, Human
cacugcacuccagccuggggga

SEQ ID NO: 240537 - RNA, 24 nt, Human
cacugcacuccagccugggggaca

SEQ ID NO: 240538 - RNA, 25 nt, Human
cacugcacuccagccugggggacag

SEQ ID NO: 240539 - RNA, 26 nt, Human
cacugcuguguguaugccucuuuuuc

SEQ ID NO: 240540 - RNA, 18 nt, Human
cacuggacucugacugcc

SEQ ID NO: 240541 - RNA, 24 nt, Human
cagcacuuugggaggccaaggcag

SEQ ID NO: 240542 - RNA, 25 nt, Human
cagcacuuugggaggccaaggcagg

SEQ ID NO: 240543 - RNA, 24 nt, Human
cagccacuucuucucaggcaacgu

SEQ ID NO: 240544 - RNA, 25 nt, Human
caggcgcagcacaaaggccaccuug

SEQ ID NO: 240545 - RNA, 22 nt, Human
cagguccccagacucgccuucc

SEQ ID NO: 240546 - RNA, 24 nt, Human
caucugcaaucucagcacuuuggg

SEQ ID NO: 240547 - RNA, 21 nt, Human
cauggcggagcacagccuccg

SEQ ID NO: 240548 - RNA, 22 nt, Human
cauuccaccccuacaccucugc

SEQ ID NO: 240549 - RNA, 21 nt, Human
ccaaaccaaacaagaaaccac

SEQ ID NO: 240550 - RNA, 22 nt, Human
ccacagaaaaggugacucuggc

SEQ ID NO: 240551 - RNA, 21 nt, Human
ccacggugggccacucugggg

SEQ ID NO: 240552 - RNA, 19 nt, Human
ccacugcacuccagccugg

SEQ ID NO: 240553 - RNA, 20 nt, Human
ccacugcacuccagccuggg

SEQ ID NO: 240554 - RNA, 20 nt, Human
ccacugcacuccagccuggg

SEQ ID NO: 240555 - RNA, 22 nt, Human
ccacugcacuccagccuggggg

SEQ ID NO: 240556 - RNA, 24 nt, Human
ccacugcacuccagccugggggac

SEQ ID NO: 240557 - RNA, 23 nt, Human
ccagaacucagcccugaaggugc

SEQ ID NO: 240558 - RNA, 22 nt, Human
ccaggaguaugaggcugcagug

SEQ ID NO: 240559 - RNA, 21 nt, Human
ccauggagauauggagaaggc

SEQ ID NO: 240560 - RNA, 18 nt, Human
cccaccccuaccucgggg

SEQ ID NO: 240561 - RNA, 23 nt, Human
cccagcacccagcccagggccuc

SEQ ID NO: 240562 - RNA, 23 nt, Human
cccagccucuggccccagcugga

SEQ ID NO: 240563 - RNA, 19 nt, Human
cccagggccucagggucua

SEQ ID NO: 240564 - RNA, 22 nt, Human
cccagguccaggggcagagucc

SEQ ID NO: 240565 - RNA, 22 nt, Human
ccccaggggcuggccaucaccc

SEQ ID NO: 240566 - RNA, 19 nt, Human
ccccuacaccucugcggcc

SEQ ID NO: 240567 - RNA, 20 nt, Human
ccccuacaccucugcggcca

SEQ ID NO: 240568 - RNA, 21 nt, Human
ccccuggacccaucuccuggg

SEQ ID NO: 240569 - RNA, 20 nt, Human
cccgcggcucauuccacccc

SEQ ID NO: 240570 - RNA, 22 nt, Human
cccgcggcucauuccaccccua

SEQ ID NO: 240571 - RNA, 23 nt, Human
cccgcuggcccaggggugcagcc

SEQ ID NO: 240572 - RNA, 18 nt, Human
cccgucccuacaaaaaaa

SEQ ID NO: 240573 - RNA, 21 nt, Human
cccugaaggugcuaaggggga

SEQ ID NO: 240574 - RNA, 22 nt, Human
cccuuaaccaaagcagacagac

SEQ ID NO: 240575 - RNA, 23 nt, Human
ccgccucccgcuccgcacaucug

SEQ ID NO: 240576 - RNA, 25 nt, Human
ccuacaaaaaaaaugaaaaguuagc

SEQ ID NO: 240577 - RNA, 21 nt, Human
ccucagggccuuccccugggu

SEQ ID NO: 240578 - RNA, 24 nt, Human
ccucagggccuuccccugggugug

SEQ ID NO: 240579 - RNA, 19 nt, Human
ccuccagccaggccuggcu

SEQ ID NO: 240580 - RNA, 22 nt, Human
ccuccuuccuguggcuugccgg

SEQ ID NO: 240581 - RNA, 23 nt, Human
ccuccuuccuguggcuugccggg

SEQ ID NO: 240582 - RNA, 25 nt, Human
ccucuagaaacccagaacucagccc

SEQ ID NO: 240583 - RNA, 18 nt, Human
ccucugcccuccucuggc

SEQ ID NO: 240584 - RNA, 19 nt, Human
ccucugucuccguggggca

SEQ ID NO: 240585 - RNA, 24 nt, Human
ccucugucuccguggggcagucuc

SEQ ID NO: 240586 - RNA, 21 nt, Human
ccugaaccaaacaacagagaa

SEQ ID NO: 240587 - RNA, 22 nt, Human
ccugaccucuagaaacccagaa

SEQ ID NO: 240588 - RNA, 21 nt, Human
ccuguagucccagcuaguugg

SEQ ID NO: 240589 - RNA, 20 nt, Human
ccugucucuccccuccuucc

SEQ ID NO: 240590 - RNA, 20 nt, Human
ccugucucuccccuccuucc

SEQ ID NO: 240591 - RNA, 24 nt, Human
ccuuaaccaaagcagacagacccc

SEQ ID NO: 240592 - RNA, 24 nt, Human
cgcaccuguagucccagcuaguug

SEQ ID NO: 240593 - RNA, 19 nt, Human
cggggcugaggauggggca

SEQ ID NO: 240594 - RNA, 23 nt, Human
cuaaaccuggcuguaggcagagg

SEQ ID NO: 240595 - RNA, 19 nt, Human
cuaggacccaugagggcgg

SEQ ID NO: 240596 - RNA, 24 nt, Human
cucacaucugcaaucucagcacuu

SEQ ID NO: 240597 - RNA, 23 nt, Human
cuccacacugcugggcugccugu

SEQ ID NO: 240598 - RNA, 19 nt, Human
cucccucugcccuccucug

SEQ ID NO: 240599 - RNA, 24 nt, Human
cuccuuccuguggcuugccggggc

SEQ ID NO: 240600 - RNA, 19 nt, Human
cucgcaaguucccagacgc

SEQ ID NO: 240601 - RNA, 23 nt, Human
cucucucuaccaccgccucccgc

SEQ ID NO: 240602 - RNA, 21 nt, Human
cucugcugggggcuccagcuc

SEQ ID NO: 240603 - RNA, 22 nt, Human
cucuuuccuggaguuggggggg

SEQ ID NO: 240604 - RNA, 20 nt, Human
cugccucugcugggggcucc

SEQ ID NO: 240605 - RNA, 18 nt, Human
cugcuccuccagccaggc

SEQ ID NO: 240606 - RNA, 22 nt, Human
cugcugcuccuccagccaggcc

SEQ ID NO: 240607 - RNA, 20 nt, Human
cuggggccaggcacaggagg

SEQ ID NO: 240608 - RNA, 22 nt, Human
cugggggggacacaucugggcc

SEQ ID NO: 240609 - RNA, 19 nt, Human
cugugcuuggaggcuucug

SEQ ID NO: 240610 - RNA, 19 nt, Human
cuugaggccacaaguuuga

SEQ ID NO: 240611 - RNA, 23 nt, Human
cuuggauucucccucugcccucc

SEQ ID NO: 240612 - RNA, 21 nt, Human
cuugggucuggacugugccca

SEQ ID NO: 240613 - RNA, 23 nt, Human
gaagcaucuccccaccccuaccu

SEQ ID NO: 240614 - RNA, 26 nt, Human
gaagcccacccugucuggggccuggg

SEQ ID NO: 240615 - RNA, 24 nt, Human
gacagaccccuggacccaucuccu

SEQ ID NO: 240616 - RNA, 21 nt, Human
gacagagcaagacccugucuc

SEQ ID NO: 240617 - RNA, 18 nt, Human
gaccccuggacccaucuc

SEQ ID NO: 240618 - RNA, 20 nt, Human
gaccccuggacccaucuccu

SEQ ID NO: 240619 - RNA, 20 nt, Human
gaggcagagcacuggacucu

SEQ ID NO: 240620 - RNA, 22 nt, Human
gaggguacugcccucaggcagg

SEQ ID NO: 240621 - RNA, 18 nt, Human
gagggugccuggaaagcc

SEQ ID NO: 240622 - RNA, 21 nt, Human
gaucaugccacugcacuccag

SEQ ID NO: 240623 - RNA, 22 nt, Human
gauugcuugaggccacaaguuu

SEQ ID NO: 240624 - RNA, 24 nt, Human
gauugcuugaggccacaaguuuga

SEQ ID NO: 240625 - RNA, 21 nt, Human
gcaaaaaagaaaaagaaagaa

SEQ ID NO: 240626 - RNA, 24 nt, Human
gcacuccagccugggggacagagc

SEQ ID NO: 240627 - RNA, 19 nt, Human
gcagcaaggggcagucgug

SEQ ID NO: 240628 - RNA, 26 nt, Human
gcagcacaaaggccaccuugcacaag

SEQ ID NO: 240629 - RNA, 22 nt, Human
gccacggugggccacucugggg

SEQ ID NO: 240630 - RNA, 22 nt, Human
gcccaggggugcagccucuguc

SEQ ID NO: 240631 - RNA, 19 nt, Human
gcccugagguuucaaagcc

SEQ ID NO: 240632 - RNA, 18 nt, Human
gccuggggccaggcucug

SEQ ID NO: 240633 - RNA, 24 nt, Human
gcugcucucuccugcaggcguccu

SEQ ID NO: 240634 - RNA, 21 nt, Human
gcugguggcagcccagggaag

SEQ ID NO: 240635 - RNA, 19 nt, Human
ggaaagccagaggagucag

SEQ ID NO: 240636 - RNA, 19 nt, Human
ggaagggaugcuguccuga

SEQ ID NO: 240637 - RNA, 18 nt, Human
ggaauggggcaucuuuga

SEQ ID NO: 240638 - RNA, 22 nt, Human
ggagagcuaggagggaaccccg

SEQ ID NO: 240639 - RNA, 18 nt, Human
ggagaggauaucuauuuc

SEQ ID NO: 240640 - RNA, 18 nt, Human
ggaggcuucugcugucca

SEQ ID NO: 240641 - RNA, 21 nt, Human
ggaguuggggggggucuccag

SEQ ID NO: 240642 - RNA, 18 nt, Human
ggcagggucuuggaaagg

SEQ ID NO: 240643 - RNA, 18 nt, Human
ggccaccuugcacaagag

SEQ ID NO: 240644 - RNA, 20 nt, Human
ggccauggagauauggagaa

SEQ ID NO: 240645 - RNA, 22 nt, Human
ggccauggagauauggagaagg

SEQ ID NO: 240646 - RNA, 22 nt, Human
ggcgcagcacaaaggccaccuu

SEQ ID NO: 240647 - RNA, 22 nt, Human
ggcugugugugccuggcaggag

SEQ ID NO: 240648 - RNA, 22 nt, Human
gggcgugagaaauggcauucuu

SEQ ID NO: 240649 - RNA, 20 nt, Human
gggcugggacagcccugagg

SEQ ID NO: 240650 - RNA, 20 nt, Human
ggggacuggccuuggacucg

SEQ ID NO: 240651 - RNA, 28 nt, Human
ggggcagggccgggcagggucuuggaaa

SEQ ID NO: 240652 - RNA, 19 nt, Human
ggggucuugagguggaggg

SEQ ID NO: 240653 - RNA, 23 nt, Human
gguggcgcgcaccuguaguccca

SEQ ID NO: 240654 - RNA, 24 nt, Human
gguggcgcgcaccuguagucccag

SEQ ID NO: 240655 - RNA, 24 nt, Human
gguggcucacaucugcaaucucag

SEQ ID NO: 240656 - RNA, 19 nt, Human
guacugcccucaggcaggg

SEQ ID NO: 240657 - RNA, 22 nt, Human
gucccuacaaaaaaaaugaaaa

SEQ ID NO: 240658 - RNA, 18 nt, Human
guggggcagucucacugg

SEQ ID NO: 240659 - RNA, 25 nt, Human
gugguuucaacccucccuucccagc

SEQ ID NO: 240660 - RNA, 20 nt, Human
uaaaaauaaaaucccugaac

SEQ ID NO: 240661 - RNA, 19 nt, Human
uaaaaucccugaaccaaac

SEQ ID NO: 240662 - RNA, 24 nt, Human
uaaaaucccugaaccaaacaacag

SEQ ID NO: 240663 - RNA, 22 nt, Human
uaaacaggggcugggccccagg

SEQ ID NO: 240664 - RNA, 24 nt, Human
uaaauaaaaacauaaaauugccaa

SEQ ID NO: 240665 - RNA, 19 nt, Human
uaagccuagcuugggacua

SEQ ID NO: 240666 - RNA, 22 nt, Human
uacaaaaaaaaugaaaaguuag

SEQ ID NO: 240667 - RNA, 21 nt, Human
uaccucggggucucuaagggc

SEQ ID NO: 240668 - RNA, 27 nt, Human
uagaaacccagaacucagcccugaagg

SEQ ID NO: 240669 - RNA, 19 nt, Human
uaggcagaggaggaaaaug

SEQ ID NO: 240670 - RNA, 22 nt, Human
ucaaaagcaaaccaaaccaaac

SEQ ID NO: 240671 - RNA, 19 nt, Human
ucaaagccagcuuccccgc

SEQ ID NO: 240672 - RNA, 23 nt, Human
ucaacccucccuucccagcaccc

SEQ ID NO: 240673 - RNA, 19 nt, Human
ucacugggagagcuaggag

SEQ ID NO: 240674 - RNA, 21 nt, Human
ucagggccuuccccugggugu

SEQ ID NO: 240675 - RNA, 23 nt, Human
ucaugccacugcacuccagccug

SEQ ID NO: 240676 - RNA, 25 nt, Human
uccaccuuuuaucucucucuaccac

SEQ ID NO: 240677 - RNA, 19 nt, Human
uccagaggcugcucagcuc

SEQ ID NO: 240678 - RNA, 20 nt, Human
uccagaggcugcucagcucc

SEQ ID NO: 240679 - RNA, 23 nt, Human
uccagguuuaagccuagcuuggg

SEQ ID NO: 240680 - RNA, 21 nt, Human
ucccagcacccagcccagggc

SEQ ID NO: 240681 - RNA, 21 nt, Human
ucccagccugccucugcuggg

SEQ ID NO: 240682 - RNA, 19 nt, Human
ucccaugugagcucagugc

SEQ ID NO: 240683 - RNA, 18 nt, Human
uccccaagcugcugcucc

SEQ ID NO: 240684 - RNA, 21 nt, Human
uccccaagcugcugcuccucc

SEQ ID NO: 240685 - RNA, 19 nt, Human
uccccagacucgccuuccc

SEQ ID NO: 240686 - RNA, 22 nt, Human
uccccagacucgccuucccagg

SEQ ID NO: 240687 - RNA, 18 nt, Human
uccccuccuuccuguggc

SEQ ID NO: 240688 - RNA, 22 nt, Human
ucccgcuccgcacaucugcaga

SEQ ID NO: 240689 - RNA, 23 nt, Human
uccugcuuggggcucuggcuucc

SEQ ID NO: 240690 - RNA, 20 nt, Human
uccugggucugugucccagg

SEQ ID NO: 240691 - RNA, 23 nt, Human
uccuuggugaggugaugcggagu

SEQ ID NO: 240692 - RNA, 24 nt, Human
uccuuuggggacagagcagguugg

SEQ ID NO: 240693 - RNA, 24 nt, Human
ucggccagcaggcgugcccagagg

SEQ ID NO: 240694 - RNA, 18 nt, Human
ucuaccaccgccucccgc

SEQ ID NO: 240695 - RNA, 21 nt, Human
ucuagaaacccagaacucagc

SEQ ID NO: 240696 - RNA, 22 nt, Human
ucuagaaacccagaacucagcc

SEQ ID NO: 240697 - RNA, 21 nt, Human
ucucacugggaggaaaaacuc

SEQ ID NO: 240698 - RNA, 19 nt, Human
ucucucuaccaccgccucc

SEQ ID NO: 240699 - RNA, 24 nt, Human
ucuggccaggcacgguggcucaca

SEQ ID NO: 240700 - RNA, 24 nt, Human
ucuuuccagagaggcagaaucugg

SEQ ID NO: 240701 - RNA, 25 nt, Human
ugaaaaguuagccaggcacgguggc

SEQ ID NO: 240702 - RNA, 26 nt, Human
ugacucggggcugaggauggggcagg

SEQ ID NO: 240703 - RNA, 21 nt, Human
ugacugcucuuuccuggaguu

SEQ ID NO: 240704 - RNA, 18 nt, Human
ugacuugggucuggacug

SEQ ID NO: 240705 - RNA, 18 nt, Human
ugagaacagcagcugugg

SEQ ID NO: 240706 - RNA, 19 nt, Human
ugagcagccccgcuggccc

SEQ ID NO: 240707 - RNA, 19 nt, Human
ugagcagccccgcuggccc

SEQ ID NO: 240708 - RNA, 18 nt, Human
ugagcccaggaguaugag

SEQ ID NO: 240709 - RNA, 20 nt, Human
ugaggcagagcacuggacuc

SEQ ID NO: 240710 - RNA, 24 nt, Human
ugaggcaggaggauugcuugagcc

SEQ ID NO: 240711 - RNA, 25 nt, Human
ugaggcaggaggauugcuugagccc

SEQ ID NO: 240712 - RNA, 23 nt, Human
ugaggcugcagugagcuaugauc

SEQ ID NO: 240713 - RNA, 18 nt, Human
ugagguggagggaggaug

SEQ ID NO: 240714 - RNA, 23 nt, Human
ugcacgggagagcccugccuccc

SEQ ID NO: 240715 - RNA, 18 nt, Human
ugcccagagggaagggca

SEQ ID NO: 240716 - RNA, 21 nt, Human
ugccggggcugggacagcccu

SEQ ID NO: 240717 - RNA, 18 nt, Human
ugccugcaggcgcagcac

SEQ ID NO: 240718 - RNA, 23 nt, Human
ugccuggaaagccacacccucug

SEQ ID NO: 240719 - RNA, 20 nt, Human
ugcugggggcuccagcucug

SEQ ID NO: 240720 - RNA, 23 nt, Human
ugcugggggcuccagcucugccu

SEQ ID NO: 240721 - RNA, 22 nt, Human
ugcuguggccaccuucccugga

SEQ ID NO: 240722 - RNA, 19 nt, Human
ugcuuggaggcuucugcug

SEQ ID NO: 240723 - RNA, 22 nt, Human
uggaaggcugaggcaggaggau

SEQ ID NO: 240724 - RNA, 18 nt, Human
uggaggagggggagagga

SEQ ID NO: 240725 - RNA, 23 nt, Human
uggauugcuugaggccacaaguu

SEQ ID NO: 240726 - RNA, 24 nt, Human
uggauugcuugaggccacaaguuu

SEQ ID NO: 240727 - RNA, 20 nt, Human
uggcaacaaaacgagacccc

SEQ ID NO: 240728 - RNA, 20 nt, Human
uggcagcacccaccgcauga

SEQ ID NO: 240729 - RNA, 21 nt, Human
uggcagcacccaccgcaugau

SEQ ID NO: 240730 - RNA, 23 nt, Human
uggcagcccagggaagacaucug

SEQ ID NO: 240731 - RNA, 21 nt, Human
uggccaaaaagugacgucaaa

SEQ ID NO: 240732 - RNA, 18 nt, Human
uggccucagcccgcacuc

SEQ ID NO: 240733 - RNA, 24 nt, Human
uggcucacaucugcaaucucagca

SEQ ID NO: 240734 - RNA, 24 nt, Human
uggcuccgugaggggacugagguc

SEQ ID NO: 240735 - RNA, 25 nt, Human
uggcuguggcagggucuccacacug

SEQ ID NO: 240736 - RNA, 19 nt, Human
uggcuuguagauuccaggu

SEQ ID NO: 240737 - RNA, 21 nt, Human
ugggacaaaugggggucuuga

SEQ ID NO: 240738 - RNA, 24 nt, Human
ugggaggccaaggcagguggauug

SEQ ID NO: 240739 - RNA, 21 nt, Human
ugggcugcagggcuggugagc

SEQ ID NO: 240740 - RNA, 18 nt, Human
uggggagggggagccagc

SEQ ID NO: 240741 - RNA, 21 nt, Human
uggggcagggccgggcagggu

SEQ ID NO: 240742 - RNA, 18 nt, Human
uggggcaucuuugacuug

SEQ ID NO: 240743 - RNA, 20 nt, Human
uggggcucuggcuuccuggc

SEQ ID NO: 240744 - RNA, 23 nt, Human
uggggcugguuccaaggcuucug

SEQ ID NO: 240745 - RNA, 19 nt, Human
ugggucuggacugugccca

SEQ ID NO: 240746 - RNA, 22 nt, Human
ugucaaaagcaaaccaaaccaa

SEQ ID NO: 240747 - RNA, 18 nt, Human
ugucuggggccuggggcc

SEQ ID NO: 240748 - RNA, 19 nt, Human
uguggcagggucuccacac

SEQ ID NO: 240749 - RNA, 21 nt, Human
uuaaccaaagcagacagaccc

SEQ ID NO: 240750 - RNA, 25 nt, Human
uuacauggccaaaaagugacgucaa

SEQ ID NO: 240751 - RNA, 23 nt, Human
uuagagggcgugagaaauggcau

SEQ ID NO: 240752 - RNA, 18 nt, Human
uucccagacgcuccccuc

SEQ ID NO: 240753 - RNA, 24 nt, Human
uugcuugagcccaggaguaugagg

SEQ ID NO: 240754 - RNA, 20 nt, Human
uuggaaggcugaggcaggag

SEQ ID NO: 240755 - RNA, 21 nt, Human
uuugccgcuaaaccuggcugu

SEQ ID NO: 240756 - RNA, 19 nt, Human
aaacagggaaaucaaucua

SEQ ID NO: 240757 - RNA, 24 nt, Human
aaaucaaucuaaaacacauacugg

SEQ ID NO: 240758 - RNA, 23 nt, Human
aagaugacgcuuaggacagaaca

SEQ ID NO: 240759 - RNA, 22 nt, Human
aaucuugccuuuuucaagccac

SEQ ID NO: 240760 - RNA, 23 nt, Human
acagugcugugucaaagcuggua

SEQ ID NO: 240761 - RNA, 21 nt, Human
acuccuuucaucuuccuuucu

SEQ ID NO: 240762 - RNA, 21 nt, Human
agcugagggggcaaggguggc

SEQ ID NO: 240763 - RNA, 24 nt, Human
aggcgagagccgggagcgggaggg

SEQ ID NO: 240764 - RNA, 18 nt, Human
aguccugucuuuauggga

SEQ ID NO: 240765 - RNA, 25 nt, Human
auacuggugccuuucaaaagauagc

SEQ ID NO: 240766 - RNA, 18 nt, Human
caagcugaaggaaaaaca

SEQ ID NO: 240767 - RNA, 23 nt, Human
caauccuuacaaaagucauuguc

SEQ ID NO: 240768 - RNA, 19 nt, Human
cacuccacuccuuucaucu

SEQ ID NO: 240769 - RNA, 22 nt, Human
cagaacaugcagaguaaaaaua

SEQ ID NO: 240770 - RNA, 27 nt, Human
ccaaaccacacuccacuccuuucaucu

SEQ ID NO: 240771 - RNA, 28 nt, Human
cccgacggcgguggcgguccggacgacu

SEQ ID NO: 240772 - RNA, 19 nt, Human
ccggaggaacccgacggcg

SEQ ID NO: 240773 - RNA, 18 nt, Human
ccgggcagugucgcgcgc

SEQ ID NO: 240774 - RNA, 21 nt, Human
ccugucccgcugcaccgagag

SEQ ID NO: 240775 - RNA, 23 nt, Human
ccuuucaucuuccuuucuaggga

SEQ ID NO: 240776 - RNA, 25 nt, Human
cggcucccgcggccgccucacuccc

SEQ ID NO: 240777 - RNA, 21 nt, Human
cgggagcgggagggacuuagc

SEQ ID NO: 240778 - RNA, 19 nt, Human
cgugcgcgcgcggaggccg

SEQ ID NO: 240779 - RNA, 24 nt, Human
cucccgcuguggcugguggccgag

SEQ ID NO: 240780 - RNA, 19 nt, Human
cuccuagugaggcgagagc

SEQ ID NO: 240781 - RNA, 21 nt, Human
cugcaccgagagccgcuccua

SEQ ID NO: 240782 - RNA, 19 nt, Human
gagggggcaaggguggcgg

SEQ ID NO: 240783 - RNA, 21 nt, Human
gcaaggguggcggucccuucc

SEQ ID NO: 240784 - RNA, 23 nt, Human
gcagaguaaaaauaguuuccuuc

SEQ ID NO: 240785 - RNA, 19 nt, Human
gcagcugagggggcaaggg

SEQ ID NO: 240786 - RNA, 18 nt, Human
gcggcggccccggcuccc

SEQ ID NO: 240787 - RNA, 18 nt, Human
ggugguagcagcaggcau

SEQ ID NO: 240788 - RNA, 23 nt, Human
gugguagcagcaggcauuuggua

SEQ ID NO: 240789 - RNA, 22 nt, Human
uaaaguauauuguuuuacuccu

SEQ ID NO: 240790 - RNA, 21 nt, Human
uaaccacaguuguuuggccag

SEQ ID NO: 240791 - RNA, 21 nt, Human
uacaaaagucauugucucaaa

SEQ ID NO: 240792 - RNA, 22 nt, Human
uagaaagcugacaauuguaguc

SEQ ID NO: 240793 - RNA, 23 nt, Human
uaggugacaauacagcaaaaucc

SEQ ID NO: 240794 - RNA, 21 nt, Human
uaguaccaauccuuacaaaag

SEQ ID NO: 240795 - RNA, 21 nt, Human
uauuaugguacacuggccagu

SEQ ID NO: 240796 - RNA, 22 nt, Human
ucaaaaagugccaaucaaagcc

SEQ ID NO: 240797 - RNA, 20 nt, Human
uccacuccuuucaucuuccu

SEQ ID NO: 240798 - RNA, 22 nt, Human
uccuuacaaaagucauugucuc

SEQ ID NO: 240799 - RNA, 22 nt, Human
ugaaaagggugguagcagcagg

SEQ ID NO: 240800 - RNA, 25 nt, Human
ugaaacagggaaaucaaucuaaaac

SEQ ID NO: 240801 - RNA, 19 nt, Human
ugaaggaaaaacaugugac

SEQ ID NO: 240802 - RNA, 24 nt, Human
ugaaggaaaaacaugugaccgaga

SEQ ID NO: 240803 - RNA, 19 nt, Human
ugaauaacucgagggcuga

SEQ ID NO: 240804 - RNA, 24 nt, Human
ugacaauacagcaaaauccaagga

SEQ ID NO: 240805 - RNA, 18 nt, Human
ugagaagccggcgcggcg

SEQ ID NO: 240806 - RNA, 21 nt, Human
ugcaaggcucaagaugacgcu

SEQ ID NO: 240807 - RNA, 21 nt, Human
ugccgguugcggggugcugag

SEQ ID NO: 240808 - RNA, 18 nt, Human
uggccaguguguuuuugg

SEQ ID NO: 240809 - RNA, 18 nt, Human
uguuuugcuuauaccauc

SEQ ID NO: 240810 - RNA, 18 nt, Human
uuagccagccagcagccc

SEQ ID NO: 240811 - RNA, 22 nt, Human
uuccuuucuagggaaauaauuu

SEQ ID NO: 240812 - RNA, 26 nt, Human
uugcugccgcucccgcuguggcuggu

SEQ ID NO: 240813 - RNA, 24 nt, Human
uugucucaaagaaacuguuaagug

SEQ ID NO: 240814 - RNA, 19 nt, Human
uuuacaauaaguuuccuga

SEQ ID NO: 240815 - RNA, 20 nt, Human
uuuuccuuuuaaaaaaaagc

SEQ ID NO: 240816 - RNA, 25 nt, Human
aaaauaguuuuauccaaaucaacug

SEQ ID NO: 240817 - RNA, 21 nt, Human
aacauaacaacacuccaaucc

SEQ ID NO: 240818 - RNA, 18 nt, Human
aagcagaaagaaaaaugg

SEQ ID NO: 240819 - RNA, 23 nt, Human
aagcagaaagaaaaaugggggac

SEQ ID NO: 240820 - RNA, 23 nt, Human
aagcagaaagaaaaaugguucua

SEQ ID NO: 240821 - RNA, 19 nt, Human
aaggaccguccgcuaccgg

SEQ ID NO: 240822 - RNA, 24 nt, Human
aagggcuucuaucccauaccccag

SEQ ID NO: 240823 - RNA, 22 nt, Human
acauaacaacacuccaauccau

SEQ ID NO: 240824 - RNA, 20 nt, Human
acauguauaagcccgcggag

SEQ ID NO: 240825 - RNA, 20 nt, Human
acauuaagaaaaaaggcaac

SEQ ID NO: 240826 - RNA, 22 nt, Human
acuucuguaaacagagugagaa

SEQ ID NO: 240827 - RNA, 22 nt, Human
agaguaacaacauuucuaucau

SEQ ID NO: 240828 - RNA, 21 nt, Human
aggcagcuucccgcccccggg

SEQ ID NO: 240829 - RNA, 21 nt, Human
aguaguucuuucccuccaccu

SEQ ID NO: 240830 - RNA, 24 nt, Human
aguuucaauaaaagcagaaagaaa

SEQ ID NO: 240831 - RNA, 21 nt, Human
auaauacuauuaacuaucuuu

SEQ ID NO: 240832 - RNA, 22 nt, Human
aucaacccaauuacacccugcc

SEQ ID NO: 240833 - RNA, 18 nt, Human
augcaaaauuacuauaau

SEQ ID NO: 240834 - RNA, 18 nt, Human
augcauguuggaaauagu

SEQ ID NO: 240835 - RNA, 20 nt, Human
auuacacccugccgcuccac

SEQ ID NO: 240836 - RNA, 22 nt, Human
caaagaaaaauacucaguuuca

SEQ ID NO: 240837 - RNA, 19 nt, Human
caacccaauuacacccugc

SEQ ID NO: 240838 - RNA, 22 nt, Human
caacugaaaaacugucuucaua

SEQ ID NO: 240839 - RNA, 22 nt, Human
caagacaggucccacccaucaa

SEQ ID NO: 240840 - RNA, 19 nt, Human
caaugccaaauaacuauga

SEQ ID NO: 240841 - RNA, 21 nt, Human
caccaacuguacucaacacac

SEQ ID NO: 240842 - RNA, 21 nt, Human
cacccaucaacccaauuacac

SEQ ID NO: 240843 - RNA, 18 nt, Human
cacccugccgcuccaccu

SEQ ID NO: 240844 - RNA, 21 nt, Human
cacccugccgcuccaccuucu

SEQ ID NO: 240845 - RNA, 19 nt, Human
cagcuucccgcccccgggg

SEQ ID NO: 240846 - RNA, 22 nt, Human
caggagagcaacccgggcccuc

SEQ ID NO: 240847 - RNA, 21 nt, Human
cagguggcgauucugaccuug

SEQ ID NO: 240848 - RNA, 21 nt, Human
cagguggcgauucugaccuug

SEQ ID NO: 240849 - RNA, 24 nt, Human
cauaaaaaauccacauuagccaaa

SEQ ID NO: 240850 - RNA, 20 nt, Human
cauaacaacacuccaaucca

SEQ ID NO: 240851 - RNA, 23 nt, Human
ccaaagaaaaauacucaguuuca

SEQ ID NO: 240852 - RNA, 23 nt, Human
ccaccucccaacaauccuuuuau

SEQ ID NO: 240853 - RNA, 21 nt, Human
ccagcugccucuuccuguucu

SEQ ID NO: 240854 - RNA, 20 nt, Human
cccauaccccaaugacagaa

SEQ ID NO: 240855 - RNA, 19 nt, Human
cccccggggggcgccugcc

SEQ ID NO: 240856 - RNA, 21 nt, Human
cccccggggggcgccugccgg

SEQ ID NO: 240857 - RNA, 24 nt, Human
cccgcggaggucuccaaucuaucc

SEQ ID NO: 240858 - RNA, 23 nt, Human
ccgauggucaagacaggucccac

SEQ ID NO: 240859 - RNA, 22 nt, Human
ccucagguggcgauucugaccu

SEQ ID NO: 240860 - RNA, 22 nt, Human
ccucagguggcgauucugaccu

SEQ ID NO: 240861 - RNA, 28 nt, Human
ccucuuccuguucuaggcauucuagggg

SEQ ID NO: 240862 - RNA, 21 nt, Human
ccuuuugccuuucacauguuu

SEQ ID NO: 240863 - RNA, 19 nt, Human
cggaaagagugggguaaug

SEQ ID NO: 240864 - RNA, 20 nt, Human
cguccgcuaccggcucugcc

SEQ ID NO: 240865 - RNA, 22 nt, Human
cucaacacacuucuguaaacag

SEQ ID NO: 240866 - RNA, 19 nt, Human
cuguucuaggcauucuagg

SEQ ID NO: 240867 - RNA, 21 nt, Human
cuucuguaaacagagugagaa

SEQ ID NO: 240868 - RNA, 20 nt, Human
gaaaauuaacagauaucccc

SEQ ID NO: 240869 - RNA, 21 nt, Human
gacauuaagaaaaaaggcaac

SEQ ID NO: 240870 - RNA, 19 nt, Human
gcagaacaccagcugccuc

SEQ ID NO: 240871 - RNA, 21 nt, Human
gcagaacaccagcugccucuu

SEQ ID NO: 240872 - RNA, 23 nt, Human
gcuggaugggaaucguagucuuc

SEQ ID NO: 240873 - RNA, 18 nt, Human
ggaaagagugggguaaug

SEQ ID NO: 240874 - RNA, 18 nt, Human
guacuguaaaauaagauc

SEQ ID NO: 240875 - RNA, 22 nt, Human
guuggaaauaguaguucuuucc

SEQ ID NO: 240876 - RNA, 22 nt, Human
uaacaacacuccaauccauuac

SEQ ID NO: 240877 - RNA, 21 nt, Human
uaagacugcuuuggacacuau

SEQ ID NO: 240878 - RNA, 21 nt, Human
uaagacugcuuuggacacuau

SEQ ID NO: 240879 - RNA, 23 nt, Human
uacaaguacauacauaaccagga

SEQ ID NO: 240880 - RNA, 18 nt, Human
uacacuugucaaugcacu

SEQ ID NO: 240881 - RNA, 28 nt, Human
uaccuaaacuggagaccuccauuagggc

SEQ ID NO: 240882 - RNA, 24 nt, Human
uacucaacacacuucuguaaacag

SEQ ID NO: 240883 - RNA, 21 nt, Human
uagccaaagaaaaauacucag

SEQ ID NO: 240884 - RNA, 21 nt, Human
uaggaguuguagguaucuuuu

SEQ ID NO: 240885 - RNA, 18 nt, Human
uauguacaaguacauaca

SEQ ID NO: 240886 - RNA, 19 nt, Human
uauuucaccauucuuaagg

SEQ ID NO: 240887 - RNA, 21 nt, Human
uauuucaccauucuuaaggug

SEQ ID NO: 240888 - RNA, 18 nt, Human
ucaggccucagguggcga

SEQ ID NO: 240889 - RNA, 18 nt, Human
ucaggccucagguggcga

SEQ ID NO: 240890 - RNA, 22 nt, Human
ucauuugcccacccugaacuuc

SEQ ID NO: 240891 - RNA, 23 nt, Human
ucauuugcccacccugaacuuca

SEQ ID NO: 240892 - RNA, 22 nt, Human
uccaauccauuacuguugacau

SEQ ID NO: 240893 - RNA, 18 nt, Human
ucccauaccccaaugaca

SEQ ID NO: 240894 - RNA, 19 nt, Human
ucccauaccccaaugacag

SEQ ID NO: 240895 - RNA, 20 nt, Human
ucccuugaaguuggauacuc

SEQ ID NO: 240896 - RNA, 24 nt, Human
ucuccaaucuauccacuggauuuc

SEQ ID NO: 240897 - RNA, 22 nt, Human
ucuuccuccuuucauugaaaug

SEQ ID NO: 240898 - RNA, 21 nt, Human
ugaaaauuaacagauaucccc

SEQ ID NO: 240899 - RNA, 20 nt, Human
ugaaugcaccauggagucuu

SEQ ID NO: 240900 - RNA, 18 nt, Human
ugcccgagacucgugggg

SEQ ID NO: 240901 - RNA, 30 nt, Human
ugccucuuccuguucuaggcauucuagggg

SEQ ID NO: 240902 - RNA, 19 nt, Human
ugcggagauucccuugaag

SEQ ID NO: 240903 - RNA, 20 nt, Human
ugcggagauucccuugaagu

SEQ ID NO: 240904 - RNA, 19 nt, Human
uggccuagucucugcucuc

SEQ ID NO: 240905 - RNA, 18 nt, Human
uggcgauucugaccuugg

SEQ ID NO: 240906 - RNA, 21 nt, Human
uggcuugcaguuugaauccug

SEQ ID NO: 240907 - RNA, 22 nt, Human
uguaaaauaagaucugcccuga

SEQ ID NO: 240908 - RNA, 23 nt, Human
uucaaaaccugaaaauuaacaga

SEQ ID NO: 240909 - RNA, 23 nt, Human
uucauauucuuccuuuucuggaa

SEQ ID NO: 240910 - RNA, 21 nt, Human
uucccuugaaguuggauacuc

SEQ ID NO: 240911 - RNA, 19 nt, Human
uugcccacccugaacuuca

SEQ ID NO: 240912 - RNA, 20 nt, Human
uugcuccccaaaauacugua

SEQ ID NO: 240913 - RNA, 21 nt, Human
uugguauuggauguuccucuc

SEQ ID NO: 240914 - RNA, 22 nt, Human
uuugcagaacaccagcugccuc

SEQ ID NO: 240915 - RNA, 23 nt, Human
uuugcccacccugaacuucacug

SEQ ID NO: 240916 - RNA, 22 nt, Human
uuuuuuuuuuuuuugcaguuug

SEQ ID NO: 240917 - RNA, 21 nt, Human
cucccagcccugacaccucuc

SEQ ID NO: 240918 - RNA, 18 nt, Human
ucucccagcccugacacc

SEQ ID NO: 240919 - RNA, 21 nt, Human
uggcuauggauucuuagcucu

SEQ ID NO: 240920 - RNA, 24 nt, Human
uguuuauuuaaauaaagaagaaag

SEQ ID NO: 240921 - RNA, 24 nt, Human
uucuuagcucuguaaggaagugcu

SEQ ID NO: 240922 - RNA, 25 nt, Human
uucuuagcucuguaaggaagugcuu

SEQ ID NO: 240923 - RNA, 23 nt, Human
uuuauuuaaauaaagaagaaagc

SEQ ID NO: 240924 - RNA, 26 nt, Human
aaaaacagaaaauaaggaacaaaggg

SEQ ID NO: 240925 - RNA, 24 nt, Human
aaaaacuugugaaaauguguuuaa

SEQ ID NO: 240926 - RNA, 18 nt, Human
aaaaccacaugccugugg

SEQ ID NO: 240927 - RNA, 19 nt, Human
aaacaaacggccagugagc

SEQ ID NO: 240928 - RNA, 25 nt, Human
aaacaggaagauggaagcaucagag

SEQ ID NO: 240929 - RNA, 22 nt, Human
aaacgagaguacuuggacugca

SEQ ID NO: 240930 - RNA, 25 nt, Human
aaaucaaaagcaaacuggaaagcaa

SEQ ID NO: 240931 - RNA, 21 nt, Human
aagaagacacuucccugagcc

SEQ ID NO: 240932 - RNA, 22 nt, Human
aagcaucagaggauuaaaaacc

SEQ ID NO: 240933 - RNA, 20 nt, Human
acaacaugaaagcaaucaac

SEQ ID NO: 240934 - RNA, 20 nt, Human
accccuguggcacaggaguu

SEQ ID NO: 240935 - RNA, 20 nt, Human
acuggaaagcaagagcaaua

SEQ ID NO: 240936 - RNA, 28 nt, Human
agaaaaaacagaaaauaaggaacaaagg

SEQ ID NO: 240937 - RNA, 20 nt, Human
agcagcauuccacacccagc

SEQ ID NO: 240938 - RNA, 22 nt, Human
aggcauuuuggcuguaugugga

SEQ ID NO: 240939 - RNA, 25 nt, Human
aggguacagaauaacaacaugaaag

SEQ ID NO: 240940 - RNA, 19 nt, Human
agguuucugggcacauggc

SEQ ID NO: 240941 - RNA, 22 nt, Human
aguaguuccaagcagcaagaaa

SEQ ID NO: 240942 - RNA, 28 nt, Human
auugaaaaaaaggucaaaaccacaugcc

SEQ ID NO: 240943 - RNA, 21 nt, Human
caaaagcaaacuggaaagcaa

SEQ ID NO: 240944 - RNA, 24 nt, Human
caaacaaauaacaaaaaggaguuc

SEQ ID NO: 240945 - RNA, 19 nt, Human
caaacuggaaagcaagagc

SEQ ID NO: 240946 - RNA, 30 nt, Human
caacuguaccucucuagagaaaaaacagag

SEQ ID NO: 240947 - RNA, 27 nt, Human
cacaguccuuagcccaaucccagcuau

SEQ ID NO: 240948 - RNA, 20 nt, Human
cagaauaacaacaugaaagc

SEQ ID NO: 240949 - RNA, 24 nt, Human
cagaauccccagugaauacccuuc

SEQ ID NO: 240950 - RNA, 18 nt, Human
cagagcccucgauguccc

SEQ ID NO: 240951 - RNA, 20 nt, Human
cagaggacagcagagcccuc

SEQ ID NO: 240952 - RNA, 19 nt, Human
cagcgcagaggacagcaga

SEQ ID NO: 240953 - RNA, 20 nt, Human
cagcguucccccuagcgccu

SEQ ID NO: 240954 - RNA, 19 nt, Human
cagcuauacagucacccca

SEQ ID NO: 240955 - RNA, 21 nt, Human
cagcuauacagucaccccaau

SEQ ID NO: 240956 - RNA, 26 nt, Human
caguccagguuucugggcacauggcc

SEQ ID NO: 240957 - RNA, 18 nt, Human
ccaaagcucagaaucccc

SEQ ID NO: 240958 - RNA, 23 nt, Human
ccaaagcucagaauccccaguga

SEQ ID NO: 240959 - RNA, 19 nt, Human
ccacacccagcgcagagga

SEQ ID NO: 240960 - RNA, 24 nt, Human
cccacagaaaugugggcaagaaga

SEQ ID NO: 240961 - RNA, 19 nt, Human
cccaccaccgcaagguaaa

SEQ ID NO: 240962 - RNA, 20 nt, Human
ccgcaagguaaagugacuuc

SEQ ID NO: 240963 - RNA, 21 nt, Human
ccuaaggcuuauaaaaggccc

SEQ ID NO: 240964 - RNA, 28 nt, Human
cuauacagucaccccaauuuccacaaaa

SEQ ID NO: 240965 - RNA, 20 nt, Human
cuuauaaaaggcccccugcc

SEQ ID NO: 240966 - RNA, 24 nt, Human
cuuuccaacgaacuggauuucugg

SEQ ID NO: 240967 - RNA, 23 nt, Human
gaaaaaacagaaaauaaggaaca

SEQ ID NO: 240968 - RNA, 20 nt, Human
gaaauaccagauucucaugg

SEQ ID NO: 240969 - RNA, 20 nt, Human
gaauccccagugaauacccu

SEQ ID NO: 240970 - RNA, 23 nt, Human
gacuuacaacuguaccucucuag

SEQ ID NO: 240971 - RNA, 22 nt, Human
gagccugcuacaccauuuugcc

SEQ ID NO: 240972 - RNA, 18 nt, Human
gagcuaguuucagaggcc

SEQ ID NO: 240973 - RNA, 22 nt, Human
gcaagguaaagugacuucccuu

SEQ ID NO: 240974 - RNA, 20 nt, Human
gccaaagcucagaaucccca

SEQ ID NO: 240975 - RNA, 28 nt, Human
ggagaagcaagucuagaacaucuccagg

SEQ ID NO: 240976 - RNA, 18 nt, Human
ggaguagccaaagcucag

SEQ ID NO: 240977 - RNA, 24 nt, Human
gggcaagaagacacuucccugagc

SEQ ID NO: 240978 - RNA, 19 nt, Human
guauaauccuguaauuggg

SEQ ID NO: 240979 - RNA, 23 nt, Human
gugaauacccuucuggggauggg

SEQ ID NO: 240980 - RNA, 23 nt, Human
gugcagcagcauuccacacccag

SEQ ID NO: 240981 - RNA, 20 nt, Human
uaaaaaacaaacggccagug

SEQ ID NO: 240982 - RNA, 26 nt, Human
uaaaaaacaaacggccagugagccug

SEQ ID NO: 240983 - RNA, 25 nt, Human
uaaucacugcaaaguaguuccaagc

SEQ ID NO: 240984 - RNA, 25 nt, Human
uacccuucuggggaugggagacggg

SEQ ID NO: 240985 - RNA, 18 nt, Human
uagaaagaaaaaaaucac

SEQ ID NO: 240986 - RNA, 19 nt, Human
uagcgccucgcugugcccc

SEQ ID NO: 240987 - RNA, 21 nt, Human
ucaaaagcaaacuggaaagcu

SEQ ID NO: 240988 - RNA, 21 nt, Human
uccagguuucugggcacaugg

SEQ ID NO: 240989 - RNA, 20 nt, Human
uccagugucucaaaaacuug

SEQ ID NO: 240990 - RNA, 26 nt, Human
uccccacagaaaugugggcaagaaga

SEQ ID NO: 240991 - RNA, 24 nt, Human
uccuuagcccaaucccagcuauac

SEQ ID NO: 240992 - RNA, 20 nt, Human
ucuagagaaaaaacagaaaa

SEQ ID NO: 240993 - RNA, 28 nt, Human
ucuagagaaaaaacagaaaauaaggaac

SEQ ID NO: 240994 - RNA, 21 nt, Human
ugaaagacaucaggaucccac

SEQ ID NO: 240995 - RNA, 18 nt, Human
ugaaagcaaucaacccug

SEQ ID NO: 240996 - RNA, 20 nt, Human
ugacuuacaacuguaccucu

SEQ ID NO: 240997 - RNA, 21 nt, Human
ugagggacuggaguugagacu

SEQ ID NO: 240998 - RNA, 23 nt, Human
ugaugguuuuuuuucuucauuuu

SEQ ID NO: 240999 - RNA, 26 nt, Human
ugaugguuuuuuuucuucauuuuaaa

SEQ ID NO: 241000 - RNA, 24 nt, Human
ugcaaacaaauaacaaaaaagaug

SEQ ID NO: 241001 - RNA, 25 nt, Human
uggaaccccuguggcacaggaguac

SEQ ID NO: 241002 - RNA, 24 nt, Human
uggacugcaaccaaguaaucacug

SEQ ID NO: 241003 - RNA, 18 nt, Human
uggauuucuggauaggca

SEQ ID NO: 241004 - RNA, 19 nt, Human
ugggaaacuggaguagcca

SEQ ID NO: 241005 - RNA, 20 nt, Human
ugggagacggggccagcuaa

SEQ ID NO: 241006 - RNA, 18 nt, Human
uggggaugggagacgggg

SEQ ID NO: 241007 - RNA, 20 nt, Human
uggggaugggagacggggcc

SEQ ID NO: 241008 - RNA, 21 nt, Human
uguauguggacagauaagacc

SEQ ID NO: 241009 - RNA, 21 nt, Human
uuaacucugacuuacaacugu

SEQ ID NO: 241010 - RNA, 19 nt, Human
uuacaacuguaccucucua

SEQ ID NO: 241011 - RNA, 22 nt, Human
uucagaggccagcguucccccu

SEQ ID NO: 241012 - RNA, 24 nt, Human
uuguacaaaaggugaugguuuuuu

SEQ ID NO: 241013 - RNA, 19 nt, Human
aaaauaagcaccccuuucc

SEQ ID NO: 241014 - RNA, 22 nt, Human
aaacaaaaguugcgcugagacc

SEQ ID NO: 241015 - RNA, 18 nt, Human
aaaguucagacacuuuca

SEQ ID NO: 241016 - RNA, 25 nt, Human
aacacucagaaauggaucaaaaaug

SEQ ID NO: 241017 - RNA, 23 nt, Human
accaaaucacaaaacaccaacau

SEQ ID NO: 241018 - RNA, 18 nt, Human
agaaauggaucaaaaaug

SEQ ID NO: 241019 - RNA, 20 nt, Human
agacagaugcaccuaaauca

SEQ ID NO: 241020 - RNA, 18 nt, Human
aguagucaaaauaagcac

SEQ ID NO: 241021 - RNA, 18 nt, Human
aguggaaaaugucuggaa

SEQ ID NO: 241022 - RNA, 20 nt, Human
augcggcugcuagagcugga

SEQ ID NO: 241023 - RNA, 19 nt, Human
caaaacaccaacauccaca

SEQ ID NO: 241024 - RNA, 27 nt, Human
caaauuaaaaucuaaaucacaaaagua

SEQ ID NO: 241025 - RNA, 21 nt, Human
caccaaaucacaaaacaccaa

SEQ ID NO: 241026 - RNA, 23 nt, Human
caccaacauccacacuuucaaag

SEQ ID NO: 241027 - RNA, 18 nt, Human
caccggagucucgcagua

SEQ ID NO: 241028 - RNA, 19 nt, Human
caguagucaaaauaagcac

SEQ ID NO: 241029 - RNA, 20 nt, Human
cauugugugugcagcacugu

SEQ ID NO: 241030 - RNA, 22 nt, Human
ccuuccuuuuaucuuugagccc

SEQ ID NO: 241031 - RNA, 18 nt, Human
cgguguacuuuucaaggg

SEQ ID NO: 241032 - RNA, 21 nt, Human
cuaguggcuuuggguuuuucu

SEQ ID NO: 241033 - RNA, 23 nt, Human
cucacagacagaugcaccuaaau

SEQ ID NO: 241034 - RNA, 20 nt, Human
cucaggaauaaaaaacaaaa

SEQ ID NO: 241035 - RNA, 18 nt, Human
cucucuuccucuuuuaaa

SEQ ID NO: 241036 - RNA, 19 nt, Human
cugcugcugcugcugcugc

SEQ ID NO: 241037 - RNA, 23 nt, Human
cuguucaccaaaucacaaaacac

SEQ ID NO: 241038 - RNA, 22 nt, Human
cuuuucccuuccuuuuaucuuu

SEQ ID NO: 241039 - RNA, 24 nt, Human
gaauugaacagaaguuuacacuua

SEQ ID NO: 241040 - RNA, 24 nt, Human
gacagauaaaaguaccaggaagaa

SEQ ID NO: 241041 - RNA, 23 nt, Human
gacuuugagaaggguaauaauuu

SEQ ID NO: 241042 - RNA, 24 nt, Human
gcaaagcucuuccaguagucaaaa

SEQ ID NO: 241043 - RNA, 23 nt, Human
gcaacaaauuaaaaucuaaauca

SEQ ID NO: 241044 - RNA, 26 nt, Human
gccuuucggaagugcugcagcguugg

SEQ ID NO: 241045 - RNA, 19 nt, Human
ggaaagaagucuucuaaua

SEQ ID NO: 241046 - RNA, 20 nt, Human
guuacagcugggcuguuuac

SEQ ID NO: 241047 - RNA, 21 nt, Human
uaaagaauccuugugugagag

SEQ ID NO: 241048 - RNA, 22 nt, Human
uacuuuuucuccccuugugggg

SEQ ID NO: 241049 - RNA, 24 nt, Human
uccaaaucguguuuacucacagac

SEQ ID NO: 241050 - RNA, 24 nt, Human
uccgcuuccccuacuuuuucuccc

SEQ ID NO: 241051 - RNA, 24 nt, Human
uccuuuuaucuuugagcccagccg

SEQ ID NO: 241052 - RNA, 18 nt, Human
ucucgcaguaagcugugg

SEQ ID NO: 241053 - RNA, 23 nt, Human
ucucucuuccucuuuuaaagaau

SEQ ID NO: 241054 - RNA, 22 nt, Human
ugaaagacuguccuccccccuc

SEQ ID NO: 241055 - RNA, 21 nt, Human
ugcggaguggaauauuaggaa

SEQ ID NO: 241056 - RNA, 19 nt, Human
ugcugaguguguguccggg

SEQ ID NO: 241057 - RNA, 21 nt, Human
ugcugcugcugcugcugcugc

SEQ ID NO: 241058 - RNA, 21 nt, Human
ugcugcugcugcugcugcugc

SEQ ID NO: 241059 - RNA, 21 nt, Human
ugcugcugcugcugcugcugc

SEQ ID NO: 241060 - RNA, 21 nt, Human
ugcugcugcugcugcugcugc

SEQ ID NO: 241061 - RNA, 21 nt, Human
ugcugcugcugcugcugcugc

SEQ ID NO: 241062 - RNA, 21 nt, Human
ugcugcugcugcugcugcugc

SEQ ID NO: 241063 - RNA, 21 nt, Human
ugcugcugcugcugcugcugc

SEQ ID NO: 241064 - RNA, 21 nt, Human
ugcugcugcugcugcugcugc

SEQ ID NO: 241065 - RNA, 21 nt, Human
ugcugcugcugcugcugcugc

SEQ ID NO: 241066 - RNA, 21 nt, Human
ugcugcugcugcugcugcugc

SEQ ID NO: 241067 - RNA, 21 nt, Human
ugcugcugcugcugcugcugc

SEQ ID NO: 241068 - RNA, 21 nt, Human
ugcugcugcugcugcugcugc

SEQ ID NO: 241069 - RNA, 21 nt, Human
ugcugcugcugcugcugcugc

SEQ ID NO: 241070 - RNA, 21 nt, Human
ugcugcugcugcugcugcugc

SEQ ID NO: 241071 - RNA, 24 nt, Human
ugcugcugcugcugcugcugcuuu

SEQ ID NO: 241072 - RNA, 26 nt, Human
ugcugcugcugcugcugcugcuuuuc

SEQ ID NO: 241073 - RNA, 23 nt, Human
uggaauguuagaaauagaacaac

SEQ ID NO: 241074 - RNA, 20 nt, Human
ugggggugggugagaugaug

SEQ ID NO: 241075 - RNA, 21 nt, Human
ugugcagcacuguuaaucaaa

SEQ ID NO: 241076 - RNA, 19 nt, Human
uguguccggggugagugug

SEQ ID NO: 241077 - RNA, 19 nt, Human
uuaaaggaagagauuguuu

SEQ ID NO: 241078 - RNA, 21 nt, Human
uuaucuuugagcccagccguu

SEQ ID NO: 241079 - RNA, 18 nt, Human
uuccccuacuuuuucucc

SEQ ID NO: 241080 - RNA, 23 nt, Human
uucccugcugcugcugcugcugc

SEQ ID NO: 241081 - RNA, 22 nt, Human
uuccucuuuuaaagaauccuug

SEQ ID NO: 241082 - RNA, 22 nt, Human
uugcgcugagacccagcaaagc

SEQ ID NO: 241083 - RNA, 30 nt, Human
uugguuucccugcugcugcugcugcugccg

SEQ ID NO: 241084 - RNA, 21 nt, Human
uuucccugcugcugcugcugc

SEQ ID NO: 241085 - RNA, 21 nt, Human
uuucuccccuugugggggugg

SEQ ID NO: 241086 - RNA, 22 nt, Human
aacccacaauccuaagcaccuc

SEQ ID NO: 241087 - RNA, 25 nt, Human
aagcugauuuuggucaaggugggac

SEQ ID NO: 241088 - RNA, 23 nt, Human
acccacaauccuaagcaccuccu

SEQ ID NO: 241089 - RNA, 25 nt, Human
agaaccaacagggagaaccgguacc

SEQ ID NO: 241090 - RNA, 24 nt, Human
caaucagaaacccacaauccuaag

SEQ ID NO: 241091 - RNA, 23 nt, Human
cagaaacccacaauccuaagcac

SEQ ID NO: 241092 - RNA, 22 nt, Human
ccaacccccacugcccacgggc

SEQ ID NO: 241093 - RNA, 22 nt, Human
cccacaauccuaagcaccuccu

SEQ ID NO: 241094 - RNA, 25 nt, Human
ccgccgccggaccgcuguggagccc

SEQ ID NO: 241095 - RNA, 21 nt, Human
ccuaagcaccuccuugaaaac

SEQ ID NO: 241096 - RNA, 22 nt, Human
cgcuauggagcccgcuguggag

SEQ ID NO: 241097 - RNA, 21 nt, Human
gagcagggcugagggagccuc

SEQ ID NO: 241098 - RNA, 21 nt, Human
gaugcaaucagaaacccacaa

SEQ ID NO: 241099 - RNA, 19 nt, Human
gcccgcuguggaccccgcg

SEQ ID NO: 241100 - RNA, 20 nt, Human
gccggaccgcuguggagccc

SEQ ID NO: 241101 - RNA, 21 nt, Human
gcuguggagcccgcuauggag

SEQ ID NO: 241102 - RNA, 24 nt, Human
uaagcaccuccuugaaaacaguua

SEQ ID NO: 241103 - RNA, 21 nt, Human
ucgcugccgccgccggaccgc

SEQ ID NO: 241104 - RNA, 21 nt, Human
ucgcugccgccgccggaccgc

SEQ ID NO: 241105 - RNA, 21 nt, Human
ugggacacugaaguuuacgug

SEQ ID NO: 241106 - RNA, 18 nt, Human
ugugggcagguccaauac

SEQ ID NO: 241107 - RNA, 19 nt, Human
uugaaaacaguuacaaagc

SEQ ID NO: 241108 - RNA, 21 nt, Human
aaguccuggagaccaaaggcc

SEQ ID NO: 241109 - RNA, 21 nt, Human
aagucugaaggccucagagcc

SEQ ID NO: 241110 - RNA, 22 nt, Human
acacaguccaagucugaaggcc

SEQ ID NO: 241111 - RNA, 21 nt, Human
agccuggcagugugacacagu

SEQ ID NO: 241112 - RNA, 23 nt, Human
aguggcuccggcuaugcccccga

SEQ ID NO: 241113 - RNA, 24 nt, Human
caaguccuggagaccaaaggccgg

SEQ ID NO: 241114 - RNA, 31 nt, Human
cacaguccaagucugaaggccucagagccuc

SEQ ID NO: 241115 - RNA, 18 nt, Human
ccagcuugccgccgccgc

SEQ ID NO: 241116 - RNA, 20 nt, Human
cccuguggggcuggagaggc

SEQ ID NO: 241117 - RNA, 24 nt, Human
ccgucugcaaguuggagcccugga

SEQ ID NO: 241118 - RNA, 18 nt, Human
ccuggagaccaaaggccg

SEQ ID NO: 241119 - RNA, 18 nt, Human
cugcaaguuggagcccug

SEQ ID NO: 241120 - RNA, 20 nt, Human
cugcugcccuguggggcugg

SEQ ID NO: 241121 - RNA, 19 nt, Human
cuugccgccgccgcucgga

SEQ ID NO: 241122 - RNA, 25 nt, Human
gcagaguggcuccggcuaugccccc

SEQ ID NO: 241123 - RNA, 19 nt, Human
ucacaaggugaggaaccca

SEQ ID NO: 241124 - RNA, 23 nt, Human
ucacaaggugaggaacccaggcu

SEQ ID NO: 241125 - RNA, 27 nt, Human
ucaggccaagcagaguggcuccggcua

SEQ ID NO: 241126 - RNA, 23 nt, Human
ucgcagccagcuugccgccgccg

SEQ ID NO: 241127 - RNA, 18 nt, Human
ucucaguucgaggggcug

SEQ ID NO: 241128 - RNA, 24 nt, Human
ucugcaaguuggagcccuggaagc

SEQ ID NO: 241129 - RNA, 22 nt, Human
ugcugcccuguggggcuggaga

SEQ ID NO: 241130 - RNA, 22 nt, Human
ugcugggacaaguccuggagac

SEQ ID NO: 241131 - RNA, 18 nt, Human
uggagcccuggaagccug

SEQ ID NO: 241132 - RNA, 19 nt, Human
uggcagugugacacagucc

SEQ ID NO: 241133 - RNA, 18 nt, Human
uggcuccggcuaugcccc

SEQ ID NO: 241134 - RNA, 18 nt, Human
aaaagcacgcgcuuccac

SEQ ID NO: 241135 - RNA, 22 nt, Human
aaacaaaagcacgcgcuuccac

SEQ ID NO: 241136 - RNA, 22 nt, Human
aaacacaugaaaaaacauuuuu

SEQ ID NO: 241137 - RNA, 23 nt, Human
aacuacuugaccaaaacaucuga

SEQ ID NO: 241138 - RNA, 18 nt, Human
aagcaucuagcuuuauag

SEQ ID NO: 241139 - RNA, 22 nt, Human
acagcaaccacagcggcuccaa

SEQ ID NO: 241140 - RNA, 18 nt, Human
accacauuucaaaauuac

SEQ ID NO: 241141 - RNA, 18 nt, Human
acuccaugguaagucaaa

SEQ ID NO: 241142 - RNA, 25 nt, Human
agguaccaaaaaaauaaaggaacaa

SEQ ID NO: 241143 - RNA, 22 nt, Human
auaaaacacaugaaaaaacauu

SEQ ID NO: 241144 - RNA, 20 nt, Human
augguaagucaaauagguac

SEQ ID NO: 241145 - RNA, 20 nt, Human
auuacaauuacauuauuuuc

SEQ ID NO: 241146 - RNA, 20 nt, Human
auuacauuauuuuccucaug

SEQ ID NO: 241147 - RNA, 20 nt, Human
caaaaaaaccuccugguucc

SEQ ID NO: 241148 - RNA, 19 nt, Human
caaaaggagcuauacagca

SEQ ID NO: 241149 - RNA, 22 nt, Human
caaaaggagcuauacagcaaua

SEQ ID NO: 241150 - RNA, 23 nt, Human
caaaaggagcuauacagcaauau

SEQ ID NO: 241151 - RNA, 23 nt, Human
cacagaacauuaaacaguacaaa

SEQ ID NO: 241152 - RNA, 21 nt, Human
cacagcggcuccaacagcacu

SEQ ID NO: 241153 - RNA, 21 nt, Human
cagaacauuaaacaguacaaa

SEQ ID NO: 241154 - RNA, 24 nt, Human
caucacaauguugacaaaaaaacc

SEQ ID NO: 241155 - RNA, 19 nt, Human
cauuuuuaagaguucugua

SEQ ID NO: 241156 - RNA, 18 nt, Human
ccuccugguuccuuuuga

SEQ ID NO: 241157 - RNA, 22 nt, Human
cucacuuucacuuaaaacuuga

SEQ ID NO: 241158 - RNA, 18 nt, Human
cuuaaauaucucccuacc

SEQ ID NO: 241159 - RNA, 24 nt, Human
cuuccacuccgcggacagcaacca

SEQ ID NO: 241160 - RNA, 23 nt, Human
cuuuauuuccucacuuucacuua

SEQ ID NO: 241161 - RNA, 19 nt, Human
gaaaugaaggucaaaagga

SEQ ID NO: 241162 - RNA, 19 nt, Human
gaccaaaacaucugauuua

SEQ ID NO: 241163 - RNA, 23 nt, Human
gccagggacacaaacaaaagcac

SEQ ID NO: 241164 - RNA, 20 nt, Human
gggacacaaacaaaagcacg

SEQ ID NO: 241165 - RNA, 21 nt, Human
uacaaauauccauugcuucau

SEQ ID NO: 241166 - RNA, 21 nt, Human
uacaugaaaugaaggucaaaa

SEQ ID NO: 241167 - RNA, 23 nt, Human
uaccaaaaaaauaaaggaacaau

SEQ ID NO: 241168 - RNA, 19 nt, Human
uauaaaacacaugaaaaaa

SEQ ID NO: 241169 - RNA, 22 nt, Human
uaucucccuaccuauacugagu

SEQ ID NO: 241170 - RNA, 22 nt, Human
uaugaguuacuuucaggaccuu

SEQ ID NO: 241171 - RNA, 24 nt, Human
ucacaauguugacaaaaaaaccuc

SEQ ID NO: 241172 - RNA, 23 nt, Human
ucccuaccuauacugagucaaac

SEQ ID NO: 241173 - RNA, 24 nt, Human
uuaaccaaugaaauaaaacauauc

SEQ ID NO: 241174 - RNA, 24 nt, Human
acagacaguguuggccggcggaac

SEQ ID NO: 241175 - RNA, 19 nt, Human
accccaggaggcugagaag

SEQ ID NO: 241176 - RNA, 18 nt, Human
acugcccuccugggggag

SEQ ID NO: 241177 - RNA, 21 nt, Human
agcacugcccuaggcggggau

SEQ ID NO: 241178 - RNA, 20 nt, Human
agcacuuggaaucagggcag

SEQ ID NO: 241179 - RNA, 18 nt, Human
agccaugcagcacugccc

SEQ ID NO: 241180 - RNA, 23 nt, Human
cacagcacaguauuugagacaga

SEQ ID NO: 241181 - RNA, 21 nt, Human
cacaguauuugagacagacag

SEQ ID NO: 241182 - RNA, 22 nt, Human
cagcccagcccuugggccccuu

SEQ ID NO: 241183 - RNA, 22 nt, Human
ccaccgaccggaccgaucgcgc

SEQ ID NO: 241184 - RNA, 21 nt, Human
ccccaaagucugacaguuugg

SEQ ID NO: 241185 - RNA, 24 nt, Human
ccccaggaggcugagaagucgagg

SEQ ID NO: 241186 - RNA, 24 nt, Human
ccuccaagcagaccugagcggccc

SEQ ID NO: 241187 - RNA, 22 nt, Human
ccugggggaggcauccuccaag

SEQ ID NO: 241188 - RNA, 24 nt, Human
cuccugggggaggcauccuccaag

SEQ ID NO: 241189 - RNA, 23 nt, Human
gcccuccugggggaggcauccuc

SEQ ID NO: 241190 - RNA, 18 nt, Human
gccggcggaaccccagga

SEQ ID NO: 241191 - RNA, 23 nt, Human
gcggccccgggcuggggcgggcg

SEQ ID NO: 241192 - RNA, 18 nt, Human
ggaggcugagaagucgag

SEQ ID NO: 241193 - RNA, 20 nt, Human
ggcgauaagagcacuuggaa

SEQ ID NO: 241194 - RNA, 18 nt, Human
ggggagccaccgaccgga

SEQ ID NO: 241195 - RNA, 22 nt, Human
uccaagcagaccugagcggccc

SEQ ID NO: 241196 - RNA, 18 nt, Human
ugagaagucgagguugcg

SEQ ID NO: 241197 - RNA, 21 nt, Human
ugagacagacaguguuggccc

SEQ ID NO: 241198 - RNA, 23 nt, Human
aaaaucgaagucucccaagcucu

SEQ ID NO: 241199 - RNA, 18 nt, Human
aaaugucucaaggacaca

SEQ ID NO: 241200 - RNA, 18 nt, Human
aaaugucucaaggacaca

SEQ ID NO: 241201 - RNA, 21 nt, Human
aacacaaaugucucaaggaca

SEQ ID NO: 241202 - RNA, 21 nt, Human
aacacaaaugucucaaggaca

SEQ ID NO: 241203 - RNA, 18 nt, Human
aagcaucagggcaccaag

SEQ ID NO: 241204 - RNA, 18 nt, Human
aagcaucagggcaccaag

SEQ ID NO: 241205 - RNA, 18 nt, Human
aagcaucagggcaccaag

SEQ ID NO: 241206 - RNA, 20 nt, Human
aaggaagcagggaggcugcc

SEQ ID NO: 241207 - RNA, 20 nt, Human
aaggaagcagggaggcugcc

SEQ ID NO: 241208 - RNA, 23 nt, Human
aaggagucagcauucccaggagg

SEQ ID NO: 241209 - RNA, 23 nt, Human
aaggagucagcauucccaggagg

SEQ ID NO: 241210 - RNA, 23 nt, Human
aaggagucagcauucccaggagg

SEQ ID NO: 241211 - RNA, 19 nt, Human
acaaggaaccacaacacaa

SEQ ID NO: 241212 - RNA, 19 nt, Human
acaaggaaccacaacacaa

SEQ ID NO: 241213 - RNA, 24 nt, Human
acacauaaccgguaaccaaccaag

SEQ ID NO: 241214 - RNA, 24 nt, Human
acacauaaccgguaaccaaccaag

SEQ ID NO: 241215 - RNA, 18 nt, Human
acacggcucuucucuucc

SEQ ID NO: 241216 - RNA, 20 nt, Human
acacugcgggcccugggcag

SEQ ID NO: 241217 - RNA, 20 nt, Human
acacugcgggcccugggcag

SEQ ID NO: 241218 - RNA, 18 nt, Human
acagcagcaucgugcacu

SEQ ID NO: 241219 - RNA, 21 nt, Human
acagcagcaucgugcacuugg

SEQ ID NO: 241220 - RNA, 21 nt, Human
acagcagcaucgugcacuugg

SEQ ID NO: 241221 - RNA, 25 nt, Human
acagcagcaucgugcacuugggaac

SEQ ID NO: 241222 - RNA, 25 nt, Human
acagcagcaucgugcacuugggaac

SEQ ID NO: 241223 - RNA, 21 nt, Human
acccaggcugucucucccucc

SEQ ID NO: 241224 - RNA, 21 nt, Human
acccaggcugucucucccucc

SEQ ID NO: 241225 - RNA, 21 nt, Human
accccgugccuggagagacag

SEQ ID NO: 241226 - RNA, 21 nt, Human
accccgugccuggagagacag

SEQ ID NO: 241227 - RNA, 24 nt, Human
accccgugccuggagagacagccu

SEQ ID NO: 241228 - RNA, 24 nt, Human
accccgugccuggagagacagccu

SEQ ID NO: 241229 - RNA, 22 nt, Human
accggccccacagacuguacac

SEQ ID NO: 241230 - RNA, 22 nt, Human
accggccccacagacuguacac

SEQ ID NO: 241231 - RNA, 20 nt, Human
acucacuccggcugcccccc

SEQ ID NO: 241232 - RNA, 20 nt, Human
acucacuccggcugcccccc

SEQ ID NO: 241233 - RNA, 21 nt, Human
acuccggcugccccccaauuc

SEQ ID NO: 241234 - RNA, 21 nt, Human
acuccggcugccccccaauuc

SEQ ID NO: 241235 - RNA, 23 nt, Human
agacagaugugcaaacccagcuu

SEQ ID NO: 241236 - RNA, 23 nt, Human
agacagaugugcaaacccagcuu

SEQ ID NO: 241237 - RNA, 18 nt, Human
agagggagaagguggaca

SEQ ID NO: 241238 - RNA, 18 nt, Human
agagggagaagguggaca

SEQ ID NO: 241239 - RNA, 18 nt, Human
agaggggggcgcgcggcc

SEQ ID NO: 241240 - RNA, 22 nt, Human
agagggugagccccaggguucc

SEQ ID NO: 241241 - RNA, 22 nt, Human
agagggugagccccaggguucc

SEQ ID NO: 241242 - RNA, 21 nt, Human
agcagcaucgugcacuuggga

SEQ ID NO: 241243 - RNA, 21 nt, Human
agcagcaucgugcacuuggga

SEQ ID NO: 241244 - RNA, 23 nt, Human
agcaucauccacuccucagucac

SEQ ID NO: 241245 - RNA, 23 nt, Human
agcaucauccacuccucagucac

SEQ ID NO: 241246 - RNA, 20 nt, Human
agcccgacgucccccggcag

SEQ ID NO: 241247 - RNA, 18 nt, Human
agcccugaggggaaggca

SEQ ID NO: 241248 - RNA, 18 nt, Human
agcccugaggggaaggca

SEQ ID NO: 241249 - RNA, 19 nt, Human
agccuaccaauccugggca

SEQ ID NO: 241250 - RNA, 19 nt, Human
aggacauuuauuucacauu

SEQ ID NO: 241251 - RNA, 19 nt, Human
aggacauuuauuucacauu

SEQ ID NO: 241252 - RNA, 22 nt, Human
aggccggggcgggguucugaga

SEQ ID NO: 241253 - RNA, 22 nt, Human
aucauccacuccucagucacag

SEQ ID NO: 241254 - RNA, 22 nt, Human
aucauccacuccucagucacag

SEQ ID NO: 241255 - RNA, 18 nt, Human
augccaaaggaaaaacca

SEQ ID NO: 241256 - RNA, 23 nt, Human
caacacaaaugucucaaggacac

SEQ ID NO: 241257 - RNA, 23 nt, Human
caacacaaaugucucaaggacac

SEQ ID NO: 241258 - RNA, 19 nt, Human
caaggaaccacaacacaaa

SEQ ID NO: 241259 - RNA, 19 nt, Human
caaggaaccacaacacaaa

SEQ ID NO: 241260 - RNA, 20 nt, Human
caaggacacaaaauaguggg

SEQ ID NO: 241261 - RNA, 20 nt, Human
caaggacacaaaauaguggg

SEQ ID NO: 241262 - RNA, 22 nt, Human
caccccgugccuggagagacag

SEQ ID NO: 241263 - RNA, 25 nt, Human
caccccgugccuggagagacagccu

SEQ ID NO: 241264 - RNA, 23 nt, Human
caccggccccacagacuguacac

SEQ ID NO: 241265 - RNA, 23 nt, Human
caccggccccacagacuguacac

SEQ ID NO: 241266 - RNA, 26 nt, Human
cacuagccucgaccacuccauccucu

SEQ ID NO: 241267 - RNA, 26 nt, Human
cacuagccucgaccacuccauccucu

SEQ ID NO: 241268 - RNA, 19 nt, Human
cacuccauccucugaugcc

SEQ ID NO: 241269 - RNA, 19 nt, Human
cacuccauccucugaugcc

SEQ ID NO: 241270 - RNA, 24 nt, Human
cacuccauccucugaugccgaagg

SEQ ID NO: 241271 - RNA, 18 nt, Human
cacuccggcugcccccca

SEQ ID NO: 241272 - RNA, 18 nt, Human
cacuccggcugcccccca

SEQ ID NO: 241273 - RNA, 18 nt, Human
cacugcgggcccugggca

SEQ ID NO: 241274 - RNA, 19 nt, Human
cacugcgggcccugggcag

SEQ ID NO: 241275 - RNA, 19 nt, Human
cacugcgggcccugggcag

SEQ ID NO: 241276 - RNA, 20 nt, Human
cacugcgggcccugggcagu

SEQ ID NO: 241277 - RNA, 20 nt, Human
cacugcgggcccugggcagu

SEQ ID NO: 241278 - RNA, 23 nt, Human
cagcagcaucgugcacuugggaa

SEQ ID NO: 241279 - RNA, 21 nt, Human
cagcagccaacacugcgggcc

SEQ ID NO: 241280 - RNA, 24 nt, Human
cagcagccaacacugcgggcccug

SEQ ID NO: 241281 - RNA, 24 nt, Human
cagcagccaacacugcgggcccug

SEQ ID NO: 241282 - RNA, 19 nt, Human
cagcagggggcuugcagag

SEQ ID NO: 241283 - RNA, 19 nt, Human
cagcagggggcuugcagag

SEQ ID NO: 241284 - RNA, 21 nt, Human
cagcccgacgucccccggcag

SEQ ID NO: 241285 - RNA, 23 nt, Human
cagcuuggucuuuccugcccccu

SEQ ID NO: 241286 - RNA, 23 nt, Human
cagcuuggucuuuccugcccccu

SEQ ID NO: 241287 - RNA, 20 nt, Human
caggcugucucucccuccuc

SEQ ID NO: 241288 - RNA, 20 nt, Human
caggcugucucucccuccuc

SEQ ID NO: 241289 - RNA, 19 nt, Human
caggguucccucacuccuc

SEQ ID NO: 241290 - RNA, 19 nt, Human
caggguucccucacuccuc

SEQ ID NO: 241291 - RNA, 24 nt, Human
caguagcugccggcuugggaaugc

SEQ ID NO: 241292 - RNA, 24 nt, Human
caguagcugccggcuugggaaugc

SEQ ID NO: 241293 - RNA, 19 nt, Human
caucaguuuaucucagaga

SEQ ID NO: 241294 - RNA, 19 nt, Human
caucaguuuaucucagaga

SEQ ID NO: 241295 - RNA, 19 nt, Human
caucaguuuaucucagaga

SEQ ID NO: 241296 - RNA, 20 nt, Human
ccacacggcucuucucuucc

SEQ ID NO: 241297 - RNA, 23 nt, Human
ccacuagccucgaccacuccauc

SEQ ID NO: 241298 - RNA, 23 nt, Human
ccacuagccucgaccacuccauc

SEQ ID NO: 241299 - RNA, 21 nt, Human
cccagcccgacgucccccggc

SEQ ID NO: 241300 - RNA, 20 nt, Human
cccaggcugucucucccucc

SEQ ID NO: 241301 - RNA, 20 nt, Human
cccaggcugucucucccucc

SEQ ID NO: 241302 - RNA, 22 nt, Human
ccccaggguucccucacuccuc

SEQ ID NO: 241303 - RNA, 22 nt, Human
ccccaggguucccucacuccuc

SEQ ID NO: 241304 - RNA, 23 nt, Human
ccccgccgcaggacauccucccc

SEQ ID NO: 241305 - RNA, 23 nt, Human
cccgcggccacacggcucuucuc

SEQ ID NO: 241306 - RNA, 18 nt, Human
cccugggacuccacuagc

SEQ ID NO: 241307 - RNA, 18 nt, Human
cccugggacuccacuagc

SEQ ID NO: 241308 - RNA, 22 nt, Human
cccugggcuggggcagcugcgu

SEQ ID NO: 241309 - RNA, 22 nt, Human
cccugggcuggggcagcugcgu

SEQ ID NO: 241310 - RNA, 18 nt, Human
cccuuccucucugugccc

SEQ ID NO: 241311 - RNA, 18 nt, Human
cccuuccucucugugccc

SEQ ID NO: 241312 - RNA, 18 nt, Human
ccgcaggacauccucccc

SEQ ID NO: 241313 - RNA, 20 nt, Human
ccgcggcgcccgcugggaga

SEQ ID NO: 241314 - RNA, 19 nt, Human
ccucucugugcccuuccuc

SEQ ID NO: 241315 - RNA, 23 nt, Human
ccugcagacagaugugcaaaccc

SEQ ID NO: 241316 - RNA, 23 nt, Human
ccugcagacagaugugcaaaccc

SEQ ID NO: 241317 - RNA, 24 nt, Human
ccugggcuggggcagcugcguagc

SEQ ID NO: 241318 - RNA, 24 nt, Human
ccugggcuggggcagcugcguagc

SEQ ID NO: 241319 - RNA, 19 nt, Human
ccugucccaaagggccugg

SEQ ID NO: 241320 - RNA, 20 nt, Human
ccugucccaaagggccuggg

SEQ ID NO: 241321 - RNA, 18 nt, Human
cgagcaucauccacuccu

SEQ ID NO: 241322 - RNA, 18 nt, Human
cgagcaucauccacuccu

SEQ ID NO: 241323 - RNA, 20 nt, Human
cgagcaucauccacuccuca

SEQ ID NO: 241324 - RNA, 22 nt, Human
cgcggggagugggggggcgugg

SEQ ID NO: 241325 - RNA, 18 nt, Human
cgcucaagacacacucag

SEQ ID NO: 241326 - RNA, 18 nt, Human
cgcucaagacacacucag

SEQ ID NO: 241327 - RNA, 20 nt, Human
cggcucuucucuuccugucc

SEQ ID NO: 241328 - RNA, 22 nt, Human
cggcucuucucuuccuguccca

SEQ ID NO: 241329 - RNA, 18 nt, Human
cgugggccauuggugucu

SEQ ID NO: 241330 - RNA, 19 nt, Human
cuagagacaggccggggcg

SEQ ID NO: 241331 - RNA, 20 nt, Human
cuagccucgaccacuccauc

SEQ ID NO: 241332 - RNA, 22 nt, Human
cuccauccucugaugccgaagg

SEQ ID NO: 241333 - RNA, 22 nt, Human
cuccauccucugaugccgaagg

SEQ ID NO: 241334 - RNA, 20 nt, Human
cuccgagcgggcgccaguuc

SEQ ID NO: 241335 - RNA, 19 nt, Human
cucugugcccuuccucuga

SEQ ID NO: 241336 - RNA, 19 nt, Human
cucugugcccuuccucuga

SEQ ID NO: 241337 - RNA, 18 nt, Human
cugcccccucccugaugc

SEQ ID NO: 241338 - RNA, 18 nt, Human
cugcccccucccugaugc

SEQ ID NO: 241339 - RNA, 20 nt, Human
cugcccccucccugaugcuc

SEQ ID NO: 241340 - RNA, 20 nt, Human
cugcccccucccugaugcuc

SEQ ID NO: 241341 - RNA, 20 nt, Human
cugggcaguagcugccggcu

SEQ ID NO: 241342 - RNA, 20 nt, Human
cugggcuggggcagcugcgu

SEQ ID NO: 241343 - RNA, 21 nt, Human
cuucccuuccucucugugccc

SEQ ID NO: 241344 - RNA, 21 nt, Human
cuucccuuccucucugugccc

SEQ ID NO: 241345 - RNA, 25 nt, Human
cuuccugucccaaagggccugggga

SEQ ID NO: 241346 - RNA, 21 nt, Human
cuugcagaggacacacgagca

SEQ ID NO: 241347 - RNA, 21 nt, Human
cuugcagaggacacacgagca

SEQ ID NO: 241348 - RNA, 18 nt, Human
cuugcccauacccaggcu

SEQ ID NO: 241349 - RNA, 19 nt, Human
gaagucucccaagcucugg

SEQ ID NO: 241350 - RNA, 24 nt, Human
gagcgguggagccuaccaauccug

SEQ ID NO: 241351 - RNA, 18 nt, Human
gcagauuucgugggccau

SEQ ID NO: 241352 - RNA, 20 nt, Human
gcagcgggggcagagggggg

SEQ ID NO: 241353 - RNA, 20 nt, Human
gcaugcuacacaugcacgug

SEQ ID NO: 241354 - RNA, 21 nt, Human
gccacacggcucuucucuucc

SEQ ID NO: 241355 - RNA, 21 nt, Human
gccacacggcucuucucuucc

SEQ ID NO: 241356 - RNA, 18 nt, Human
gccccaggguucccucac

SEQ ID NO: 241357 - RNA, 18 nt, Human
gccccaggguucccucac

SEQ ID NO: 241358 - RNA, 22 nt, Human
gccccaggguucccucacuccu

SEQ ID NO: 241359 - RNA, 22 nt, Human
gccccaggguucccucacuccu

SEQ ID NO: 241360 - RNA, 19 nt, Human
gcccugggcuggggcagcu

SEQ ID NO: 241361 - RNA, 19 nt, Human
gcccugggcuggggcagcu

SEQ ID NO: 241362 - RNA, 21 nt, Human
gcccugggcuggggcagcugc

SEQ ID NO: 241363 - RNA, 21 nt, Human
gcccugggcuggggcagcugc

SEQ ID NO: 241364 - RNA, 23 nt, Human
gcuuggucuuuccugcccccucc

SEQ ID NO: 241365 - RNA, 23 nt, Human
gcuuggucuuuccugcccccucc

SEQ ID NO: 241366 - RNA, 18 nt, Human
ggaaggcaguuuggucuu

SEQ ID NO: 241367 - RNA, 18 nt, Human
ggaaggcaguuuggucuu

SEQ ID NO: 241368 - RNA, 23 nt, Human
ggacaguuauaacgccagggaca

SEQ ID NO: 241369 - RNA, 23 nt, Human
ggacaguuauaacgccagggaca

SEQ ID NO: 241370 - RNA, 21 nt, Human
ggagauggaguccagucaguc

SEQ ID NO: 241371 - RNA, 19 nt, Human
ggcagaggggggcgcgcgg

SEQ ID NO: 241372 - RNA, 22 nt, Human
ggcagcgggggcagaggggggc

SEQ ID NO: 241373 - RNA, 21 nt, Human
gggaacagcaaggggccaggg

SEQ ID NO: 241374 - RNA, 21 nt, Human
gggaacagcaaggggccaggg

SEQ ID NO: 241375 - RNA, 23 nt, Human
gggaacagcaaggggccaggggc

SEQ ID NO: 241376 - RNA, 23 nt, Human
gggaacagcaaggggccaggggc

SEQ ID NO: 241377 - RNA, 24 nt, Human
gggaaugcagaaggaagccgguac

SEQ ID NO: 241378 - RNA, 25 nt, Human
gggaaugcagaaggaagccgguacc

SEQ ID NO: 241379 - RNA, 25 nt, Human
gggaaugcagaaggaagccgguacc

SEQ ID NO: 241380 - RNA, 20 nt, Human
gggaguggagagggagaagg

SEQ ID NO: 241381 - RNA, 21 nt, Human
gggcagaggggggcgcgcggc

SEQ ID NO: 241382 - RNA, 21 nt, Human
gggcagcgggggcagaggggg

SEQ ID NO: 241383 - RNA, 23 nt, Human
gggcagcgggggcagaggggggc

SEQ ID NO: 241384 - RNA, 23 nt, Human
gggccuggggaccgacacugggu

SEQ ID NO: 241385 - RNA, 21 nt, Human
gggcgggguucugagaucuuc

SEQ ID NO: 241386 - RNA, 20 nt, Human
gggcguggccgcgccgcggc

SEQ ID NO: 241387 - RNA, 20 nt, Human
ggggagugggggggcguggc

SEQ ID NO: 241388 - RNA, 22 nt, Human
ggggcgggguucugagaucuuc

SEQ ID NO: 241389 - RNA, 19 nt, Human
ggucuuuccugcccccucc

SEQ ID NO: 241390 - RNA, 23 nt, Human
guagccccucuccaucagcuaga

SEQ ID NO: 241391 - RNA, 23 nt, Human
guggagagggagaagguggacac

SEQ ID NO: 241392 - RNA, 23 nt, Human
guggagagggagaagguggacac

SEQ ID NO: 241393 - RNA, 19 nt, Human
uaauguggggcugaaauau

SEQ ID NO: 241394 - RNA, 19 nt, Human
uaauguggggcugaaauau

SEQ ID NO: 241395 - RNA, 20 nt, Human
uaauguggggcugaaauauu

SEQ ID NO: 241396 - RNA, 18 nt, Human
ucacagaggcuguggcag

SEQ ID NO: 241397 - RNA, 18 nt, Human
ucacagaggcuguggcag

SEQ ID NO: 241398 - RNA, 24 nt, Human
ucaguccgcgaggacagccccgcc

SEQ ID NO: 241399 - RNA, 21 nt, Human
ucauccacuccucagucacag

SEQ ID NO: 241400 - RNA, 24 nt, Human
uccacuccucagucacagcagcau

SEQ ID NO: 241401 - RNA, 24 nt, Human
uccacuccucagucacagcagcau

SEQ ID NO: 241402 - RNA, 21 nt, Human
uccacugcagucacagaggcu

SEQ ID NO: 241403 - RNA, 21 nt, Human
uccacugcagucacagaggcu

SEQ ID NO: 241404 - RNA, 19 nt, Human
uccccgcggccacacggcu

SEQ ID NO: 241405 - RNA, 22 nt, Human
ucccucacuccucacagaguga

SEQ ID NO: 241406 - RNA, 23 nt, Human
ucccucacuccucacagagugaa

SEQ ID NO: 241407 - RNA, 23 nt, Human
ucccucacuccucacagagugaa

SEQ ID NO: 241408 - RNA, 19 nt, Human
ucccugaugcucaggcaga

SEQ ID NO: 241409 - RNA, 19 nt, Human
ucccugaugcucaggcaga

SEQ ID NO: 241410 - RNA, 20 nt, Human
uccucucugugcccuuccuc

SEQ ID NO: 241411 - RNA, 20 nt, Human
uccucucugugcccuuccuc

SEQ ID NO: 241412 - RNA, 19 nt, Human
uccugggcagcgggggcag

SEQ ID NO: 241413 - RNA, 19 nt, Human
ucuugcccauacccaggcu

SEQ ID NO: 241414 - RNA, 19 nt, Human
ucuugcccauacccaggcu

SEQ ID NO: 241415 - RNA, 21 nt, Human
ugaaaaucgaagucucccaag

SEQ ID NO: 241416 - RNA, 20 nt, Human
ugcaaacccagcuuggucuu

SEQ ID NO: 241417 - RNA, 20 nt, Human
ugcaaacccagcuuggucuu

SEQ ID NO: 241418 - RNA, 22 nt, Human
ugcaguggacaguuauaacgcc

SEQ ID NO: 241419 - RNA, 22 nt, Human
ugcaguggacaguuauaacgcc

SEQ ID NO: 241420 - RNA, 20 nt, Human
ugccaaaggaaaaaccaagg

SEQ ID NO: 241421 - RNA, 19 nt, Human
ugcccugggcuggggcagc

SEQ ID NO: 241422 - RNA, 19 nt, Human
ugcccugggcuggggcagc

SEQ ID NO: 241423 - RNA, 19 nt, Human
ugcccugggcuggggcagc

SEQ ID NO: 241424 - RNA, 19 nt, Human
ugcccugggcuggggcagc

SEQ ID NO: 241425 - RNA, 20 nt, Human
ugcccugggcuggggcagcu

SEQ ID NO: 241426 - RNA, 18 nt, Human
ugccuggagagacagccu

SEQ ID NO: 241427 - RNA, 18 nt, Human
ugccuggagagacagccu

SEQ ID NO: 241428 - RNA, 18 nt, Human
ugccuggagagacagccu

SEQ ID NO: 241429 - RNA, 18 nt, Human
ugccuggagagacagccu

SEQ ID NO: 241430 - RNA, 21 nt, Human
uggagccuaccaauccugggc

SEQ ID NO: 241431 - RNA, 24 nt, Human
uggcaggccacagggaauucgccg

SEQ ID NO: 241432 - RNA, 24 nt, Human
uggcaggccacagggaauucgccg

SEQ ID NO: 241433 - RNA, 21 nt, Human
ugggaacagcaaggggccagg

SEQ ID NO: 241434 - RNA, 21 nt, Human
ugggaacagcaaggggccagg

SEQ ID NO: 241435 - RNA, 25 nt, Human
ugggagauggaguccagucaguccg

SEQ ID NO: 241436 - RNA, 23 nt, Human
ugggaguggagagggagaaggug

SEQ ID NO: 241437 - RNA, 21 nt, Human
uucacauucacacaacuguac

SEQ ID NO: 241438 - RNA, 21 nt, Human
uucacauucacacaacuguac

SEQ ID NO: 241439 - RNA, 19 nt, Human
uucccuuccucucugugcc

SEQ ID NO: 241440 - RNA, 19 nt, Human
uucccuuccucucugugcc

SEQ ID NO: 241441 - RNA, 22 nt, Human
uuccucugagagggugagcccc

SEQ ID NO: 241442 - RNA, 22 nt, Human
uuccucugagagggugagcccc

SEQ ID NO: 241443 - RNA, 19 nt, Human
uugggaaugcagaaggaag

SEQ ID NO: 241444 - RNA, 19 nt, Human
uugggaaugcagaaggaag

SEQ ID NO: 241445 - RNA, 18 nt, Human
agcugcccagccuccacu

SEQ ID NO: 241446 - RNA, 19 nt, Human
agggagucggagcugccca

SEQ ID NO: 241447 - RNA, 24 nt, Human
agucagcaccggguuggcggcgcg

SEQ ID NO: 241448 - RNA, 19 nt, Human
agucggagcugcccagccu

SEQ ID NO: 241449 - RNA, 24 nt, Human
auaaagcugucuccaaaugcaaaa

SEQ ID NO: 241450 - RNA, 24 nt, Human
augcaaggcucaauaguuuuccag

SEQ ID NO: 241451 - RNA, 22 nt, Human
caaggcucaauaguuuuccaga

SEQ ID NO: 241452 - RNA, 19 nt, Human
cacucuccgcuccccgagc

SEQ ID NO: 241453 - RNA, 24 nt, Human
cagucagcaccggguuggcggcgc

SEQ ID NO: 241454 - RNA, 21 nt, Human
cauccauccuucaaguacaug

SEQ ID NO: 241455 - RNA, 21 nt, Human
ccagaggcagaugcuggggcc

SEQ ID NO: 241456 - RNA, 25 nt, Human
ccucuccuuucuccgcccgcccgcc

SEQ ID NO: 241457 - RNA, 23 nt, Human
cgcccgcccgccugcuuucuccu

SEQ ID NO: 241458 - RNA, 24 nt, Human
cggcccggguccggacggccgggc

SEQ ID NO: 241459 - RNA, 25 nt, Human
cuggagccuggauugaucuggucgc

SEQ ID NO: 241460 - RNA, 20 nt, Human
gccucggcccggguugagcc

SEQ ID NO: 241461 - RNA, 19 nt, Human
gccugcuuucuccuggagc

SEQ ID NO: 241462 - RNA, 21 nt, Human
gcggcgcgcccguccgugcgg

SEQ ID NO: 241463 - RNA, 21 nt, Human
ggagcugcccagccuccacuc

SEQ ID NO: 241464 - RNA, 20 nt, Human
ggcggcgcgcccguccgugc

SEQ ID NO: 241465 - RNA, 19 nt, Human
gguccggacggccgggcgg

SEQ ID NO: 241466 - RNA, 22 nt, Human
ggugaaauaaagcugucuccaa

SEQ ID NO: 241467 - RNA, 23 nt, Human
uaaaaaaguaacccagucagcac

SEQ ID NO: 241468 - RNA, 18 nt, Human
ucagcaccggguuggcgg

SEQ ID NO: 241469 - RNA, 22 nt, Human
uccagaagaguagaaauuacca

SEQ ID NO: 241470 - RNA, 21 nt, Human
uccccgagccucggcccgggu

SEQ ID NO: 241471 - RNA, 19 nt, Human
uccucagcugccaauaccc

SEQ ID NO: 241472 - RNA, 20 nt, Human
uccucagcugccaauacccc

SEQ ID NO: 241473 - RNA, 22 nt, Human
ugcaaggcucaauaguuuucca

SEQ ID NO: 241474 - RNA, 22 nt, Human
ugucugacucauccauccuuca

SEQ ID NO: 241475 - RNA, 20 nt, Human
uuuuuuuuuuuuuuuuguuu

SEQ ID NO: 241476 - RNA, 20 nt, Human
aaaaucuucucuuccucuuu

SEQ ID NO: 241477 - RNA, 20 nt, Human
aaagacacacaaaaauaaca

SEQ ID NO: 241478 - RNA, 24 nt, Human
aaccuuugggacacucaguuuuau

SEQ ID NO: 241479 - RNA, 18 nt, Human
aauaacagagaaguggga

SEQ ID NO: 241480 - RNA, 18 nt, Human
agcacaauacugugauac

SEQ ID NO: 241481 - RNA, 23 nt, Human
agccacgcuaggaaaacagccuc

SEQ ID NO: 241482 - RNA, 26 nt, Human
aggcagcaagccacgcuaggaaaaca

SEQ ID NO: 241483 - RNA, 21 nt, Human
augauacauuaccuguacaca

SEQ ID NO: 241484 - RNA, 22 nt, Human
auuaaaaaagacacacaaaaau

SEQ ID NO: 241485 - RNA, 22 nt, Human
caagguggcgccaggucccgcc

SEQ ID NO: 241486 - RNA, 18 nt, Human
cacacaaugcuaugacag

SEQ ID NO: 241487 - RNA, 18 nt, Human
cagcgcacacacacaccu

SEQ ID NO: 241488 - RNA, 28 nt, Human
cagcgcacacacacaccucaucuaugca

SEQ ID NO: 241489 - RNA, 21 nt, Human
ccccgcccccaggcccgggcc

SEQ ID NO: 241490 - RNA, 18 nt, Human
cccgcccccaggcccggg

SEQ ID NO: 241491 - RNA, 18 nt, Human
cccgccccgcccccaggc

SEQ ID NO: 241492 - RNA, 23 nt, Human
cccgccccgucagauccgggggg

SEQ ID NO: 241493 - RNA, 18 nt, Human
ccgccccgcccccaggcc

SEQ ID NO: 241494 - RNA, 23 nt, Human
ccgccccgcccccaggcccgggc

SEQ ID NO: 241495 - RNA, 22 nt, Human
ccgggggguccgggaccuuuug

SEQ ID NO: 241496 - RNA, 18 nt, Human
ccuagaucaagaagcagc

SEQ ID NO: 241497 - RNA, 19 nt, Human
ccucaucuaugcaaacuaa

SEQ ID NO: 241498 - RNA, 20 nt, Human
ccuguacacauaacuacuac

SEQ ID NO: 241499 - RNA, 18 nt, Human
ccuuugggacacucaguu

SEQ ID NO: 241500 - RNA, 20 nt, Human
gaccuuuuguuccuuccucu

SEQ ID NO: 241501 - RNA, 20 nt, Human
gaucaugauacauuaccugg

SEQ ID NO: 241502 - RNA, 18 nt, Human
gcagcgcacacacacacc

SEQ ID NO: 241503 - RNA, 26 nt, Human
gcgcacacacacaccucaucuaugca

SEQ ID NO: 241504 - RNA, 20 nt, Human
gcugggaggggaagagggga

SEQ ID NO: 241505 - RNA, 24 nt, Human
ggaacugaaaacacucccggccgc

SEQ ID NO: 241506 - RNA, 21 nt, Human
ggaggggaagaggggaauggg

SEQ ID NO: 241507 - RNA, 18 nt, Human
gggaaugggcgauuggag

SEQ ID NO: 241508 - RNA, 23 nt, Human
gggauggagggggcugggagggg

SEQ ID NO: 241509 - RNA, 20 nt, Human
gggcccggccggcggcccgg

SEQ ID NO: 241510 - RNA, 30 nt, Human
ggggaagaggggaaugggcgauuggaggcc

SEQ ID NO: 241511 - RNA, 22 nt, Human
ggggcugggaggggaagagggg

SEQ ID NO: 241512 - RNA, 23 nt, Human
gggggcugggaggggaagagggg

SEQ ID NO: 241513 - RNA, 23 nt, Human
gggggguccgggaccuuuuguuc

SEQ ID NO: 241514 - RNA, 25 nt, Human
ggugcuuuaauugaugagaccucaa

SEQ ID NO: 241515 - RNA, 25 nt, Human
uaaaaaagacacacaaaaauaacag

SEQ ID NO: 241516 - RNA, 19 nt, Human
uaaaaucuucucuuccucu

SEQ ID NO: 241517 - RNA, 20 nt, Human
uaaaaucuucucuuccucuu

SEQ ID NO: 241518 - RNA, 23 nt, Human
uaaaccuuugggacacucaguuu

SEQ ID NO: 241519 - RNA, 21 nt, Human
uaauaaaccuuugggacacuc

SEQ ID NO: 241520 - RNA, 23 nt, Human
uaauauucaaauauaggaaacag

SEQ ID NO: 241521 - RNA, 22 nt, Human
uaaugggagaguauuucuagac

SEQ ID NO: 241522 - RNA, 19 nt, Human
ucccgccccgcccccaggc

SEQ ID NO: 241523 - RNA, 20 nt, Human
ucccgccccgcccccaggcc

SEQ ID NO: 241524 - RNA, 21 nt, Human
ucccgccccgcccccaggccc

SEQ ID NO: 241525 - RNA, 24 nt, Human
ucccggccgccgucuucccgcccc

SEQ ID NO: 241526 - RNA, 18 nt, Human
uccgggaccuuuuguucc

SEQ ID NO: 241527 - RNA, 23 nt, Human
ucucuugaacuuuuggauaguaa

SEQ ID NO: 241528 - RNA, 22 nt, Human
ugaaaacacucccggccgccgu

SEQ ID NO: 241529 - RNA, 25 nt, Human
ugaacuuuuggauaguaaacagucc

SEQ ID NO: 241530 - RNA, 20 nt, Human
ugccuagaucaagaagcagc

SEQ ID NO: 241531 - RNA, 21 nt, Human
uggaggcggaacugaaaacac

SEQ ID NO: 241532 - RNA, 21 nt, Human
ugggaggggaagaggggaaug

SEQ ID NO: 241533 - RNA, 23 nt, Human
ugggaggggaagaggggaauggg

SEQ ID NO: 241534 - RNA, 23 nt, Human
ugggauggagggggcugggaggg

SEQ ID NO: 241535 - RNA, 23 nt, Human
uucaaauauaggaaacagauucc

SEQ ID NO: 241536 - RNA, 21 nt, Human
uucccgccccgcccccaggcc

SEQ ID NO: 241537 - RNA, 19 nt, Human
uuggaggcggaacugaaaa

SEQ ID NO: 241538 - RNA, 27 nt, Human
uuuuuuuuuuuuuucuuccccccccac

SEQ ID NO: 241539 - RNA, 24 nt, Human
aaaacucccucccuccccauccca

SEQ ID NO: 241540 - RNA, 19 nt, Human
aaaaggacaacguaaguga

SEQ ID NO: 241541 - RNA, 20 nt, Human
aacucccucccuccccaucc

SEQ ID NO: 241542 - RNA, 24 nt, Human
aagggccuccugcuucaugagaac

SEQ ID NO: 241543 - RNA, 22 nt, Human
acauaaaccaauauagccguau

SEQ ID NO: 241544 - RNA, 19 nt, Human
acugacuacauaaaccaau

SEQ ID NO: 241545 - RNA, 19 nt, Human
agacaaaacucccucccuc

SEQ ID NO: 241546 - RNA, 20 nt, Human
agaccaaaugccaucccacg

SEQ ID NO: 241547 - RNA, 18 nt, Human
agagucuggggggagggu

SEQ ID NO: 241548 - RNA, 18 nt, Human
agagucuggggggagggu

SEQ ID NO: 241549 - RNA, 21 nt, Human
agcagacgccauuucuugccc

SEQ ID NO: 241550 - RNA, 24 nt, Human
agucuggggggagggugccggugg

SEQ ID NO: 241551 - RNA, 20 nt, Human
cagagcagacgccauuucuu

SEQ ID NO: 241552 - RNA, 19 nt, Human
caugaggucugcaucgugc

SEQ ID NO: 241553 - RNA, 21 nt, Human
ccaaggugaacuccacacugc

SEQ ID NO: 241554 - RNA, 19 nt, Human
ccacacugcaguccuagac

SEQ ID NO: 241555 - RNA, 20 nt, Human
ccccggcggggcugggcucg

SEQ ID NO: 241556 - RNA, 18 nt, Human
cccucccuccccauccca

SEQ ID NO: 241557 - RNA, 24 nt, Human
cuacauaaaccaauauagccguau

SEQ ID NO: 241558 - RNA, 18 nt, Human
cucccuccccaucccaag

SEQ ID NO: 241559 - RNA, 22 nt, Human
cucccucccuccccaucccaag

SEQ ID NO: 241560 - RNA, 20 nt, Human
cugaacacgcaccucccaau

SEQ ID NO: 241561 - RNA, 21 nt, Human
cuggagacgcacccagugugg

SEQ ID NO: 241562 - RNA, 18 nt, Human
gaacacgcaccucccaau

SEQ ID NO: 241563 - RNA, 26 nt, Human
gagcagacgccauuucuugcccuuca

SEQ ID NO: 241564 - RNA, 21 nt, Human
gagcgcccccggcggggcugg

SEQ ID NO: 241565 - RNA, 23 nt, Human
gagcgcccccggcggggcugggc

SEQ ID NO: 241566 - RNA, 27 nt, Human
gagggugccgguggugucgcccgcggg

SEQ ID NO: 241567 - RNA, 21 nt, Human
gccugagaccaaaugccaucc

SEQ ID NO: 241568 - RNA, 20 nt, Human
gcgugcgggcggcgaggagc

SEQ ID NO: 241569 - RNA, 21 nt, Human
gcugggcugggaauguucacu

SEQ ID NO: 241570 - RNA, 19 nt, Human
gcuguccugugugcagguu

SEQ ID NO: 241571 - RNA, 21 nt, Human
gggcgugcgggcggcgaggag

SEQ ID NO: 241572 - RNA, 19 nt, Human
ggggcugggcucgacggga

SEQ ID NO: 241573 - RNA, 18 nt, Human
gggggagggugccggugg

SEQ ID NO: 241574 - RNA, 25 nt, Human
guauguucugagaggggagggagac

SEQ ID NO: 241575 - RNA, 21 nt, Human
gucagagagcugggcaugagg

SEQ ID NO: 241576 - RNA, 22 nt, Human
uacuaccuguucugcucacuua

SEQ ID NO: 241577 - RNA, 23 nt, Human
uccaacuuuucaaagugaaaaag

SEQ ID NO: 241578 - RNA, 25 nt, Human
uccacacugcaguccuagacagagg

SEQ ID NO: 241579 - RNA, 21 nt, Human
uccagcucacaacggggcggg

SEQ ID NO: 241580 - RNA, 20 nt, Human
ucccaagucuauccagcucc

SEQ ID NO: 241581 - RNA, 21 nt, Human
ugaaaaaggacaacguaagug

SEQ ID NO: 241582 - RNA, 22 nt, Human
ugaaugcaacugacuacauaaa

SEQ ID NO: 241583 - RNA, 19 nt, Human
ugacuggagacgcacccag

SEQ ID NO: 241584 - RNA, 23 nt, Human
ugaggucugcaucgugcgggcuc

SEQ ID NO: 241585 - RNA, 20 nt, Human
ugcagguucugcugaacacg

SEQ ID NO: 241586 - RNA, 21 nt, Human
uggggggagggugccgguggu

SEQ ID NO: 241587 - RNA, 19 nt, Human
uguucugagaggggaggga

SEQ ID NO: 241588 - RNA, 19 nt, Human
uguucugagaggggaggga

SEQ ID NO: 241589 - RNA, 18 nt, Human
uguucugcucacuuaagc

SEQ ID NO: 241590 - RNA, 23 nt, Human
uucaugagaacacuuaccgucau

SEQ ID NO: 241591 - RNA, 20 nt, Human
aaacagugaaaaacaacagc

SEQ ID NO: 241592 - RNA, 23 nt, Human
aagucacaucaaaucaaguacaa

SEQ ID NO: 241593 - RNA, 24 nt, Human
aauaaccaaaagauauaaaaaagu

SEQ ID NO: 241594 - RNA, 21 nt, Human
aaugauauacauaucgauguu

SEQ ID NO: 241595 - RNA, 21 nt, Human
accaaaaaaagucacaucaaa

SEQ ID NO: 241596 - RNA, 21 nt, Human
aggggagugggaaggcgcgaa

SEQ ID NO: 241597 - RNA, 24 nt, Human
caaagucacugccaauugauauga

SEQ ID NO: 241598 - RNA, 19 nt, Human
caagcucugagccaugccu

SEQ ID NO: 241599 - RNA, 22 nt, Human
cauagaauuuagcaguuuccaa

SEQ ID NO: 241600 - RNA, 21 nt, Human
cauauugugucugugguacag

SEQ ID NO: 241601 - RNA, 22 nt, Human
ccacccaaaccgcuccguuacc

SEQ ID NO: 241602 - RNA, 19 nt, Human
cgcagcggcgacgacgacc

SEQ ID NO: 241603 - RNA, 23 nt, Human
cugacaaguucugaagaggaaaa

SEQ ID NO: 241604 - RNA, 24 nt, Human
cugcagauaaaaggcucuaagacg

SEQ ID NO: 241605 - RNA, 19 nt, Human
cugcuaggagcaaggcagc

SEQ ID NO: 241606 - RNA, 21 nt, Human
cuggauuauucuguagaauga

SEQ ID NO: 241607 - RNA, 24 nt, Human
cuucuuagcaaccaaccuugugcc

SEQ ID NO: 241608 - RNA, 19 nt, Human
cuuggcaaaaauaaaacug

SEQ ID NO: 241609 - RNA, 18 nt, Human
gaacuguaauguuuccau

SEQ ID NO: 241610 - RNA, 23 nt, Human
gaaguauguucaacaauaacaac

SEQ ID NO: 241611 - RNA, 18 nt, Human
gcaggcuccgccacccaa

SEQ ID NO: 241612 - RNA, 23 nt, Human
gcuccgccacccaaaccgcuccg

SEQ ID NO: 241613 - RNA, 22 nt, Human
ggaaacagugaaaaacaacagc

SEQ ID NO: 241614 - RNA, 23 nt, Human
ggaauaacaaacguaauuuuaaa

SEQ ID NO: 241615 - RNA, 18 nt, Human
ggcuucuuagcaaccaac

SEQ ID NO: 241616 - RNA, 21 nt, Human
gggaaggcgcgaacgcaggcu

SEQ ID NO: 241617 - RNA, 18 nt, Human
uaaagcagaacaaaagug

SEQ ID NO: 241618 - RNA, 18 nt, Human
uaacaggugaagaauuaa

SEQ ID NO: 241619 - RNA, 18 nt, Human
uaacucacccacauggca

SEQ ID NO: 241620 - RNA, 27 nt, Human
uaacuugcaaaaaauauucugccggua

SEQ ID NO: 241621 - RNA, 25 nt, Human
uacaugauuuaaacauuauaccaaa

SEQ ID NO: 241622 - RNA, 23 nt, Human
uaccagcuagguaaaaagcauac

SEQ ID NO: 241623 - RNA, 18 nt, Human
uaggagcaaggcagcaaa

SEQ ID NO: 241624 - RNA, 22 nt, Human
uauacacacagauuaagaguuu

SEQ ID NO: 241625 - RNA, 25 nt, Human
uaugucuccaauuucugaagcaauu

SEQ ID NO: 241626 - RNA, 21 nt, Human
uauucaggauaaccugggcuc

SEQ ID NO: 241627 - RNA, 25 nt, Human
ucaacaauaacaacuuguacacaaa

SEQ ID NO: 241628 - RNA, 22 nt, Human
uccaaacuaccuauuaugaacu

SEQ ID NO: 241629 - RNA, 25 nt, Human
ucugaagaggaaaaaaaaaauuguu

SEQ ID NO: 241630 - RNA, 19 nt, Human
ucugucugcuaggagcaag

SEQ ID NO: 241631 - RNA, 19 nt, Human
uggaaacagugaaaaacaa

SEQ ID NO: 241632 - RNA, 23 nt, Human
uggcaaagggcuuagaauaacca

SEQ ID NO: 241633 - RNA, 19 nt, Human
uggcgaggggagugggaag

SEQ ID NO: 241634 - RNA, 22 nt, Human
uggcgaggggagugggaaggcg

SEQ ID NO: 241635 - RNA, 21 nt, Human
ugggcucgggcgguggcgagg

SEQ ID NO: 241636 - RNA, 18 nt, Human
uuaaaaucagcaauacug

SEQ ID NO: 241637 - RNA, 20 nt, Human
uuaauccaguuucugucugc

SEQ ID NO: 241638 - RNA, 27 nt, Human
uuaguguuuuaaaaaauacaaaaccuu

SEQ ID NO: 241639 - RNA, 24 nt, Human
uuaugaaaagauaaagcagaacaa

SEQ ID NO: 241640 - RNA, 18 nt, Human
uucccuaugaaugaagga

SEQ ID NO: 241641 - RNA, 18 nt, Human
uucucaauauacacacag

SEQ ID NO: 241642 - RNA, 21 nt, Human
uuggcaaaaauaaaacugaag

SEQ ID NO: 241643 - RNA, 19 nt, Human
uuugagaacuucucugccu

SEQ ID NO: 241644 - RNA, 26 nt, Human
aaacaaauguagauucaucacaaaau

SEQ ID NO: 241645 - RNA, 22 nt, Human
acuuacucuucacuguauaugc

SEQ ID NO: 241646 - RNA, 18 nt, Human
agguccuaagcagaaguu

SEQ ID NO: 241647 - RNA, 22 nt, Human
caaauuucugaacuggggcaua

SEQ ID NO: 241648 - RNA, 27 nt, Human
cacagguccuaagcagaagggacauac

SEQ ID NO: 241649 - RNA, 24 nt, Human
cacaguaucuguacucaaaguuuc

SEQ ID NO: 241650 - RNA, 21 nt, Human
cgaaagaacagaucacaggug

SEQ ID NO: 241651 - RNA, 21 nt, Human
cgaaagaacagaucacaggug

SEQ ID NO: 241652 - RNA, 18 nt, Human
gaaaaaaauaagcuguaa

SEQ ID NO: 241653 - RNA, 18 nt, Human
gaaagaacagaucacagg

SEQ ID NO: 241654 - RNA, 22 nt, Human
gaucacaggugaaacgucauac

SEQ ID NO: 241655 - RNA, 23 nt, Human
gcuaccgaaagaacagaucacag

SEQ ID NO: 241656 - RNA, 23 nt, Human
gugggacaaagaaacugguaaaa

SEQ ID NO: 241657 - RNA, 18 nt, Human
uaaaaagggaggaguaac

SEQ ID NO: 241658 - RNA, 22 nt, Human
uaaaauuaaaacaaguccacua

SEQ ID NO: 241659 - RNA, 20 nt, Human
uaaaguaaaagcauguuccc

SEQ ID NO: 241660 - RNA, 23 nt, Human
uaagaucaaugccaaauuucuga

SEQ ID NO: 241661 - RNA, 19 nt, Human
uaggagggaaaacuuacuc

SEQ ID NO: 241662 - RNA, 20 nt, Human
uauguagaaaaaaauaagcu

SEQ ID NO: 241663 - RNA, 18 nt, Human
ucacuguauaugcccucu

SEQ ID NO: 241664 - RNA, 22 nt, Human
ucaguggcuaccgaaagaacag

SEQ ID NO: 241665 - RNA, 18 nt, Human
ucauugggucaagucucg

SEQ ID NO: 241666 - RNA, 20 nt, Human
uccacuaacaauauaauuga

SEQ ID NO: 241667 - RNA, 22 nt, Human
ucgagaguaggagggaaaacuu

SEQ ID NO: 241668 - RNA, 24 nt, Human
ucgagaguaggagggaaaacuuac

SEQ ID NO: 241669 - RNA, 23 nt, Human
ucggagaccuuccuguaacucaa

SEQ ID NO: 241670 - RNA, 20 nt, Human
ugaaacgucauacacagguc

SEQ ID NO: 241671 - RNA, 18 nt, Human
ugcaucuuuuacaacacu

SEQ ID NO: 241672 - RNA, 19 nt, Human
uguaagcucacaguaucug

SEQ ID NO: 241673 - RNA, 19 nt, Human
uguagaaaaaaauaagcug

SEQ ID NO: 241674 - RNA, 23 nt, Human
uguauuggucacaauuauguaga

SEQ ID NO: 241675 - RNA, 25 nt, Human
uuagggcaauaaaguaaaagcaugu

SEQ ID NO: 241676 - RNA, 22 nt, Human
uuggugggacaaagaaacuggu

SEQ ID NO: 241677 - RNA, 18 nt, Human
aaaaagaaaaaaaaaagg

SEQ ID NO: 241678 - RNA, 22 nt, Human
aaaaagaaaaaaaaaaggaaag

SEQ ID NO: 241679 - RNA, 22 nt, Human
aaaagaaaaaaaaaaggaaaga

SEQ ID NO: 241680 - RNA, 23 nt, Human
aaaagaaaaaaaaaaggaaagaa

SEQ ID NO: 241681 - RNA, 21 nt, Human
aagaaaaaaaaaaggaaagaa

SEQ ID NO: 241682 - RNA, 20 nt, Human
aagaaagaaaaggaaauccc

SEQ ID NO: 241683 - RNA, 21 nt, Human
aagaaagaaaaggaaauccca

SEQ ID NO: 241684 - RNA, 23 nt, Human
aagaaagaaaaggaaaucccaaa

SEQ ID NO: 241685 - RNA, 21 nt, Human
aagagaaagaaaauauaucug

SEQ ID NO: 241686 - RNA, 20 nt, Human
aagcucgcgcgaaccccuaa

SEQ ID NO: 241687 - RNA, 22 nt, Human
aaggaagaggaaggaggaagag

SEQ ID NO: 241688 - RNA, 22 nt, Human
aaggcgggacggccgggaacac

SEQ ID NO: 241689 - RNA, 21 nt, Human
aagugccucccgguggccccg

SEQ ID NO: 241690 - RNA, 22 nt, Human
acacacauugcaccauacauaa

SEQ ID NO: 241691 - RNA, 24 nt, Human
acaccaaacccaggcuuuuccacc

SEQ ID NO: 241692 - RNA, 23 nt, Human
accccuaaaugugucuggaaagc

SEQ ID NO: 241693 - RNA, 22 nt, Human
agaaaaaaaaaaggaaagaaag

SEQ ID NO: 241694 - RNA, 23 nt, Human
agaaaaggaaaucccaaacaaaa

SEQ ID NO: 241695 - RNA, 27 nt, Human
agaaagaaaaggaaaucccaaacaaaa

SEQ ID NO: 241696 - RNA, 19 nt, Human
agaaagaaaauauaucugu

SEQ ID NO: 241697 - RNA, 25 nt, Human
agaaagaaaauauaucuguauugaa

SEQ ID NO: 241698 - RNA, 24 nt, Human
aucucaaaaaccauacaccaaacc

SEQ ID NO: 241699 - RNA, 21 nt, Human
augggcuuuucccgcaggauc

SEQ ID NO: 241700 - RNA, 21 nt, Human
auuagcuuuuugucugggcau

SEQ ID NO: 241701 - RNA, 19 nt, Human
caaaaagaaaaaaaaaagg

SEQ ID NO: 241702 - RNA, 23 nt, Human
caaaaagaaaaaaaaaaggaaag

SEQ ID NO: 241703 - RNA, 24 nt, Human
caaacaaaaccuaaaucccuggau

SEQ ID NO: 241704 - RNA, 23 nt, Human
caaagcucgcgcgaaccccuaaa

SEQ ID NO: 241705 - RNA, 22 nt, Human
caccaaacccaggcuuuuccac

SEQ ID NO: 241706 - RNA, 22 nt, Human
cacccccacaugaaccuccgcc

SEQ ID NO: 241707 - RNA, 21 nt, Human
cacgcgcacgcgaagccgcag

SEQ ID NO: 241708 - RNA, 18 nt, Human
cagguggcgguggccgcg

SEQ ID NO: 241709 - RNA, 20 nt, Human
ccacagcggcggggcugcuc

SEQ ID NO: 241710 - RNA, 24 nt, Human
ccauacaccaaacccaggcuuuuc

SEQ ID NO: 241711 - RNA, 27 nt, Human
ccauauacacacauugcaccauacaua

SEQ ID NO: 241712 - RNA, 23 nt, Human
cccaaagagcugcugggaauccu

SEQ ID NO: 241713 - RNA, 21 nt, Human
ccccagcucccuucuuacucc

SEQ ID NO: 241714 - RNA, 18 nt, Human
cccccacaugaaccuccg

SEQ ID NO: 241715 - RNA, 23 nt, Human
cccccacaugaaccuccgccgcg

SEQ ID NO: 241716 - RNA, 23 nt, Human
ccccccuccccccuccacaaaag

SEQ ID NO: 241717 - RNA, 24 nt, Human
ccccuaaaugugucuggaaagccc

SEQ ID NO: 241718 - RNA, 19 nt, Human
ccccuccccccuccacaaa

SEQ ID NO: 241719 - RNA, 20 nt, Human
cccgccccucccgccggggc

SEQ ID NO: 241720 - RNA, 22 nt, Human
cccuccacaaaagugccucccg

SEQ ID NO: 241721 - RNA, 23 nt, Human
ccgcagggcaacaacaugaggga

SEQ ID NO: 241722 - RNA, 24 nt, Human
ccgcggccucccacccgccccucc

SEQ ID NO: 241723 - RNA, 18 nt, Human
ccgggaacacgcgcacgc

SEQ ID NO: 241724 - RNA, 19 nt, Human
ccucccacccgccccuccc

SEQ ID NO: 241725 - RNA, 23 nt, Human
ccucccacccgccccucccgccg

SEQ ID NO: 241726 - RNA, 18 nt, Human
ccucccgguggccccggg

SEQ ID NO: 241727 - RNA, 21 nt, Human
ccugcaaaaagaaaaaaaaaa

SEQ ID NO: 241728 - RNA, 18 nt, Human
cgcgcacgcgaagccgca

SEQ ID NO: 241729 - RNA, 18 nt, Human
cgcuccucgugccgaauu

SEQ ID NO: 241730 - RNA, 22 nt, Human
cucaacaacuccagccccccgc

SEQ ID NO: 241731 - RNA, 23 nt, Human
cucccugcaaaaagaaaaaaaaa

SEQ ID NO: 241732 - RNA, 20 nt, Human
cuccgccgcggaccgccgug

SEQ ID NO: 241733 - RNA, 23 nt, Human
cugcaaaaagaaaaaaaaaagga

SEQ ID NO: 241734 - RNA, 22 nt, Human
cugguccaugagcacaaagcuc

SEQ ID NO: 241735 - RNA, 25 nt, Human
cuucaaaaguugugcggcugguccc

SEQ ID NO: 241736 - RNA, 24 nt, Human
gagcgaguuucuccuggacgcggg

SEQ ID NO: 241737 - RNA, 22 nt, Human
gcacaaagcucgcgcgaacccc

SEQ ID NO: 241738 - RNA, 21 nt, Human
gcaucggccccucucgaggcc

SEQ ID NO: 241739 - RNA, 24 nt, Human
gccgaggucgcccccccucccccc

SEQ ID NO: 241740 - RNA, 20 nt, Human
gccggcugcgcgggucgcac

SEQ ID NO: 241741 - RNA, 22 nt, Human
gcgcggccagcggcuacaugga

SEQ ID NO: 241742 - RNA, 21 nt, Human
ggaaagcccugccuuuaccuu

SEQ ID NO: 241743 - RNA, 23 nt, Human
ggcugugucucugggcaucggcc

SEQ ID NO: 241744 - RNA, 18 nt, Human
gggugggggggaggcggu

SEQ ID NO: 241745 - RNA, 19 nt, Human
gguggccccggggucccag

SEQ ID NO: 241746 - RNA, 22 nt, Human
gucgcccccccuccccccucca

SEQ ID NO: 241747 - RNA, 19 nt, Human
gucucaggucccaggcgcu

SEQ ID NO: 241748 - RNA, 25 nt, Human
guggccccggggucccagcgagguc

SEQ ID NO: 241749 - RNA, 24 nt, Human
gugggggggaggcggucuccgguu

SEQ ID NO: 241750 - RNA, 19 nt, Human
uaaaaaguaaggaagagga

SEQ ID NO: 241751 - RNA, 25 nt, Human
uaaaaaguaaggaagaggaaggagg

SEQ ID NO: 241752 - RNA, 19 nt, Human
uaaaugugucuggaaagcc

SEQ ID NO: 241753 - RNA, 18 nt, Human
uacuuuauuaucgaguga

SEQ ID NO: 241754 - RNA, 25 nt, Human
uaucauuuucuuuauauauauauau

SEQ ID NO: 241755 - RNA, 25 nt, Human
uaucucaaaaaccauacaccaaacc

SEQ ID NO: 241756 - RNA, 23 nt, Human
ucauuuucuuuauauauauauau

SEQ ID NO: 241757 - RNA, 23 nt, Human
uccaugagcacaaagcucgcgcg

SEQ ID NO: 241758 - RNA, 24 nt, Human
ucccaaacaaaaccuaaaucccug

SEQ ID NO: 241759 - RNA, 18 nt, Human
ucccaaagagcugcuggg

SEQ ID NO: 241760 - RNA, 20 nt, Human
ucccacccgccccucccgcc

SEQ ID NO: 241761 - RNA, 20 nt, Human
ucccaggcgcuagaugcacu

SEQ ID NO: 241762 - RNA, 19 nt, Human
ucccgguggccccgggguc

SEQ ID NO: 241763 - RNA, 19 nt, Human
ucccucaacaaggcgccgg

SEQ ID NO: 241764 - RNA, 20 nt, Human
ucccucaacaaggcgccggc

SEQ ID NO: 241765 - RNA, 19 nt, Human
ucccuucuuacucccugca

SEQ ID NO: 241766 - RNA, 19 nt, Human
uccgcgcgcggccagcggc

SEQ ID NO: 241767 - RNA, 26 nt, Human
uccgcgcgcggccagcggcuacaugg

SEQ ID NO: 241768 - RNA, 22 nt, Human
uccgugggggcugugucucugg

SEQ ID NO: 241769 - RNA, 19 nt, Human
ucgcccccccuccccccuc

SEQ ID NO: 241770 - RNA, 19 nt, Human
ucuggaaagcccugccuuu

SEQ ID NO: 241771 - RNA, 22 nt, Human
ucuuucucucggcucagcuccc

SEQ ID NO: 241772 - RNA, 18 nt, Human
uggccccggggucccagc

SEQ ID NO: 241773 - RNA, 21 nt, Human
uguaaaaaucccaaagagcug

SEQ ID NO: 241774 - RNA, 21 nt, Human
uuuccaccuagcucugcugua

SEQ ID NO: 241775 - RNA, 21 nt, Human
aaaaaaaaaacgaccaaagag

SEQ ID NO: 241776 - RNA, 25 nt, Human
aaaaccaaccaacaaacaaaaaaaa

SEQ ID NO: 241777 - RNA, 21 nt, Human
aaaacccccaacaauucuuuu

SEQ ID NO: 241778 - RNA, 21 nt, Human
aaaacgucuuuauauuuacaa

SEQ ID NO: 241779 - RNA, 23 nt, Human
aaacaaaaaaaaaacgaccaaag

SEQ ID NO: 241780 - RNA, 24 nt, Human
aaacaaaaaaaaaacgaccaaaga

SEQ ID NO: 241781 - RNA, 22 nt, Human
aaacaaaacagaacacaaacga

SEQ ID NO: 241782 - RNA, 23 nt, Human
aaacagaacacaaacgaggacga

SEQ ID NO: 241783 - RNA, 21 nt, Human
aacaugcucauugagcuaaga

SEQ ID NO: 241784 - RNA, 21 nt, Human
aaccaacaaacaaaaaaaaaa

SEQ ID NO: 241785 - RNA, 22 nt, Human
aagaacagugucgaaguaucau

SEQ ID NO: 241786 - RNA, 22 nt, Human
aagagacacaaaacaaagagca

SEQ ID NO: 241787 - RNA, 19 nt, Human
aagagcgaaacaaaacaga

SEQ ID NO: 241788 - RNA, 23 nt, Human
aagucguuugccugcuaaggagc

SEQ ID NO: 241789 - RNA, 25 nt, Human
aauggcaggggcuggcaggaaggga

SEQ ID NO: 241790 - RNA, 21 nt, Human
acacaggaugggagcaggcag

SEQ ID NO: 241791 - RNA, 22 nt, Human
acagcagcagcagcaggggccc

SEQ ID NO: 241792 - RNA, 24 nt, Human
accaaccaacaaacaaaaaaaaaa

SEQ ID NO: 241793 - RNA, 27 nt, Human
agaagaaaaccaaccaacaaacaaaaa

SEQ ID NO: 241794 - RNA, 24 nt, Human
agacaaggaugaaaauaagggacc

SEQ ID NO: 241795 - RNA, 20 nt, Human
agauggccaaaaaagaaaga

SEQ ID NO: 241796 - RNA, 21 nt, Human
agcagcagcagcaggggcccg

SEQ ID NO: 241797 - RNA, 22 nt, Human
agcagcagcaggggcccgggca

SEQ ID NO: 241798 - RNA, 25 nt, Human
agcaggcgcaggcgacagcagcagc

SEQ ID NO: 241799 - RNA, 21 nt, Human
agcccuugggaagcccaucuc

SEQ ID NO: 241800 - RNA, 21 nt, Human
aggcaggggagaggcugaggg

SEQ ID NO: 241801 - RNA, 19 nt, Human
agggacauccccgcuugcu

SEQ ID NO: 241802 - RNA, 18 nt, Human
agggagaggaggggcagg

SEQ ID NO: 241803 - RNA, 20 nt, Human
agggagaggaggggcagggg

SEQ ID NO: 241804 - RNA, 21 nt, Human
agggagaggaggggcaggggc

SEQ ID NO: 241805 - RNA, 21 nt, Human
agggagaggaggggcaggggc

SEQ ID NO: 241806 - RNA, 23 nt, Human
agggagaggaggggcaggggcuu

SEQ ID NO: 241807 - RNA, 18 nt, Human
agugaaaugaugaccgcc

SEQ ID NO: 241808 - RNA, 19 nt, Human
aguuguagaagaaaugaaa

SEQ ID NO: 241809 - RNA, 24 nt, Human
caaaacaaagagcacguugucucc

SEQ ID NO: 241810 - RNA, 20 nt, Human
caaacaaaaaaaaaacgacc

SEQ ID NO: 241811 - RNA, 26 nt, Human
caagugaaaugaugaccgccccccuu

SEQ ID NO: 241812 - RNA, 23 nt, Human
cacacagccgcacacucacacuc

SEQ ID NO: 241813 - RNA, 22 nt, Human
cacacuccugacaagugaaaug

SEQ ID NO: 241814 - RNA, 19 nt, Human
caccaugaagaagucgggc

SEQ ID NO: 241815 - RNA, 22 nt, Human
cacccauaggaaaaaacaccaa

SEQ ID NO: 241816 - RNA, 18 nt, Human
cacguugucuccccaucu

SEQ ID NO: 241817 - RNA, 24 nt, Human
cacucacacacacuccugacaagu

SEQ ID NO: 241818 - RNA, 18 nt, Human
cagaacacaaacgaggac

SEQ ID NO: 241819 - RNA, 24 nt, Human
cagaagccuguggacaggcccgug

SEQ ID NO: 241820 - RNA, 19 nt, Human
cagcagcagcagcaggggc

SEQ ID NO: 241821 - RNA, 18 nt, Human
cagcagcagcaggggccc

SEQ ID NO: 241822 - RNA, 22 nt, Human
cagcagcagcaggggcccgggc

SEQ ID NO: 241823 - RNA, 21 nt, Human
cagcagcaggggcccgggcag

SEQ ID NO: 241824 - RNA, 18 nt, Human
cauaccugccccuucuuc

SEQ ID NO: 241825 - RNA, 23 nt, Human
cauaccugccccuucuuccaaaa

SEQ ID NO: 241826 - RNA, 18 nt, Human
ccagguacugccucugcc

SEQ ID NO: 241827 - RNA, 23 nt, Human
ccaugaagaagucgggcgccgag

SEQ ID NO: 241828 - RNA, 22 nt, Human
ccccacugagcguguccaaggg

SEQ ID NO: 241829 - RNA, 18 nt, Human
ccccuucuuccaaaaaaa

SEQ ID NO: 241830 - RNA, 21 nt, Human
ccccuucuuccaaaaaaaccc

SEQ ID NO: 241831 - RNA, 18 nt, Human
ccgccccccuucauacac

SEQ ID NO: 241832 - RNA, 22 nt, Human
ccgcgcccugcgcggcucuccg

SEQ ID NO: 241833 - RNA, 18 nt, Human
cgacagcagcagcagcag

SEQ ID NO: 241834 - RNA, 19 nt, Human
cgagaagaagaaaaccaac

SEQ ID NO: 241835 - RNA, 20 nt, Human
cgcccugcgcggcucuccgc

SEQ ID NO: 241836 - RNA, 18 nt, Human
cgcucuguccccuccgca

SEQ ID NO: 241837 - RNA, 21 nt, Human
cgggggcccgggggcgcccgc

SEQ ID NO: 241838 - RNA, 23 nt, Human
cucacgcucuguccccuccgcac

SEQ ID NO: 241839 - RNA, 22 nt, Human
cucagcucacgcucuguccccu

SEQ ID NO: 241840 - RNA, 23 nt, Human
cugccucugccccacugagcgug

SEQ ID NO: 241841 - RNA, 18 nt, Human
cugcuaagcaugucccuc

SEQ ID NO: 241842 - RNA, 24 nt, Human
cugcuaaggagcgaacaugaccuc

SEQ ID NO: 241843 - RNA, 24 nt, Human
cugcugggaccccagccgccagcu

SEQ ID NO: 241844 - RNA, 23 nt, Human
cuuuagaaaaacauucagcuagg

SEQ ID NO: 241845 - RNA, 19 nt, Human
cuuuucauaagcuauuucu

SEQ ID NO: 241846 - RNA, 22 nt, Human
gaaggggacugcuaagcauguc

SEQ ID NO: 241847 - RNA, 20 nt, Human
gaccaaagaguuugcaugaa

SEQ ID NO: 241848 - RNA, 24 nt, Human
gagcgaaacaaaacagaacacaaa

SEQ ID NO: 241849 - RNA, 23 nt, Human
gaggacgagaagaagaaaaccaa

SEQ ID NO: 241850 - RNA, 23 nt, Human
gcacacgcgugcacacacagccg

SEQ ID NO: 241851 - RNA, 25 nt, Human
gcacacgcgugcacacacagccgca

SEQ ID NO: 241852 - RNA, 19 nt, Human
gcacugggugagcaauacu

SEQ ID NO: 241853 - RNA, 21 nt, Human
gcagcaggcgcaggcgacagc

SEQ ID NO: 241854 - RNA, 21 nt, Human
gcgugcacacacagccgcaca

SEQ ID NO: 241855 - RNA, 22 nt, Human
gcugcugggaccccagccgcca

SEQ ID NO: 241856 - RNA, 19 nt, Human
gcuugggacugcaaaccuc

SEQ ID NO: 241857 - RNA, 21 nt, Human
ggagaggaggggcaggggcuu

SEQ ID NO: 241858 - RNA, 20 nt, Human
ggcacugggugagcaauacu

SEQ ID NO: 241859 - RNA, 19 nt, Human
ggcaggaagggaauaagac

SEQ ID NO: 241860 - RNA, 19 nt, Human
ggcaggagagacaccgcuu

SEQ ID NO: 241861 - RNA, 20 nt, Human
ggcaggagagacaccgcuug

SEQ ID NO: 241862 - RNA, 18 nt, Human
ggcgccgaguuggggcag

SEQ ID NO: 241863 - RNA, 21 nt, Human
gggagaggcugaggggagagg

SEQ ID NO: 241864 - RNA, 21 nt, Human
gggcccgggcaggagcggcgg

SEQ ID NO: 241865 - RNA, 22 nt, Human
gggcgcgcgcgggggcccgggg

SEQ ID NO: 241866 - RNA, 23 nt, Human
ggggagaggcugaggggagaggg

SEQ ID NO: 241867 - RNA, 20 nt, Human
ggugauaacacccauaggaa

SEQ ID NO: 241868 - RNA, 21 nt, Human
gucgggcgccgaguuggggca

SEQ ID NO: 241869 - RNA, 19 nt, Human
gugaaaugaugaccgcccc

SEQ ID NO: 241870 - RNA, 21 nt, Human
gugaaaugaugaccgcccccc

SEQ ID NO: 241871 - RNA, 18 nt, Human
gugcuuggauuucugcuu

SEQ ID NO: 241872 - RNA, 20 nt, Human
guggcaugcgccagucuccc

SEQ ID NO: 241873 - RNA, 24 nt, Human
uaacauaaaauacauuuuuuucuu

SEQ ID NO: 241874 - RNA, 18 nt, Human
uaagagacacaaaacaaa

SEQ ID NO: 241875 - RNA, 24 nt, Human
uauacacauugcacaauacauagu

SEQ ID NO: 241876 - RNA, 26 nt, Human
uauuucucaaagagcgaaacaaaaca

SEQ ID NO: 241877 - RNA, 22 nt, Human
ucaaagagcgaaacaaaacaga

SEQ ID NO: 241878 - RNA, 22 nt, Human
ucccaggcuggggacagagccg

SEQ ID NO: 241879 - RNA, 20 nt, Human
ucgggcgccgaguuggggca

SEQ ID NO: 241880 - RNA, 22 nt, Human
ucucuuguucauuuaaaccuuu

SEQ ID NO: 241881 - RNA, 21 nt, Human
ucuuggagggaaggggacugc

SEQ ID NO: 241882 - RNA, 18 nt, Human
ugacaagugaaaugauga

SEQ ID NO: 241883 - RNA, 24 nt, Human
ugagcaauacugugagggggcugc

SEQ ID NO: 241884 - RNA, 19 nt, Human
ugagggagaggaggggcag

SEQ ID NO: 241885 - RNA, 21 nt, Human
ugagggagaggaggggcaggg

SEQ ID NO: 241886 - RNA, 18 nt, Human
ugaugagggagaggaggg

SEQ ID NO: 241887 - RNA, 26 nt, Human
ugccgcuccugcacacgcgugcacag

SEQ ID NO: 241888 - RNA, 19 nt, Human
ugggaccccagccgccagc

SEQ ID NO: 241889 - RNA, 21 nt, Human
ugggaccccagccgccagcuu

SEQ ID NO: 241890 - RNA, 18 nt, Human
uggggacagagccgugcu

SEQ ID NO: 241891 - RNA, 20 nt, Human
uguggacaggcccguguccu

SEQ ID NO: 241892 - RNA, 23 nt, Human
uguguuuaucuuuuuuaauuugg

SEQ ID NO: 241893 - RNA, 22 nt, Human
uuauauuaaagcaaagugcauc

SEQ ID NO: 241894 - RNA, 21 nt, Human
uucuuccaaaaaaacccccaa

SEQ ID NO: 241895 - RNA, 24 nt, Human
uugcuggccuaauagcagagcuua

SEQ ID NO: 241896 - RNA, 20 nt, Human
uuguucauuuaaaccuuugu

SEQ ID NO: 241897 - RNA, 19 nt, Human
uuuguaguuagaaaaauag

SEQ ID NO: 241898 - RNA, 21 nt, Human
uuuuuuuuuuuuuuuuucaag

SEQ ID NO: 241899 - RNA, 21 nt, Human
aaaguccugcuuuuccaauug

SEQ ID NO: 241900 - RNA, 24 nt, Human
aagaggccacagcaggcuccggcg

SEQ ID NO: 241901 - RNA, 22 nt, Human
aaucugcugcuuauagcacagg

SEQ ID NO: 241902 - RNA, 18 nt, Human
agcacaggcaccaaaguc

SEQ ID NO: 241903 - RNA, 20 nt, Human
agguuaacuagaaagcacaa

SEQ ID NO: 241904 - RNA, 21 nt, Human
auacaagccacucccugcaau

SEQ ID NO: 241905 - RNA, 24 nt, Human
auagcacaggcaccaaaguccugc

SEQ ID NO: 241906 - RNA, 21 nt, Human
augauacaagccacucccugc

SEQ ID NO: 241907 - RNA, 19 nt, Human
caacagcacuaaaagugac

SEQ ID NO: 241908 - RNA, 20 nt, Human
caccaaaguccugcuuuucc

SEQ ID NO: 241909 - RNA, 19 nt, Human
cacuguacuggcaucaggu

SEQ ID NO: 241910 - RNA, 22 nt, Human
ccucccacaaaaucugcugcuu

SEQ ID NO: 241911 - RNA, 20 nt, Human
cgcccguucuucugggagca

SEQ ID NO: 241912 - RNA, 19 nt, Human
cucaaguguuuccucccac

SEQ ID NO: 241913 - RNA, 23 nt, Human
cucccacaaaaucugcugcuuau

SEQ ID NO: 241914 - RNA, 19 nt, Human
gacaucauuuaaacuguag

SEQ ID NO: 241915 - RNA, 20 nt, Human
gcacgggaaccgcacagccc

SEQ ID NO: 241916 - RNA, 19 nt, Human
uaacuagaaagcacaaaac

SEQ ID NO: 241917 - RNA, 19 nt, Human
uacacauguuuuuagaaac

SEQ ID NO: 241918 - RNA, 19 nt, Human
uauaaacaguuucaauguu

SEQ ID NO: 241919 - RNA, 19 nt, Human
uauucugcuaacacccuuc

SEQ ID NO: 241920 - RNA, 23 nt, Human
ucaauguuucugugaggccacac

SEQ ID NO: 241921 - RNA, 21 nt, Human
ucugaaaugauacaagccacu

SEQ ID NO: 241922 - RNA, 24 nt, Human
ugacacggcugacuaaagcugucu

SEQ ID NO: 241923 - RNA, 21 nt, Human
ugcaaaucugaaaugauacaa

SEQ ID NO: 241924 - RNA, 21 nt, Human
uggcauagggaccaacccgcc

SEQ ID NO: 241925 - RNA, 18 nt, Human
uuuuuuuuuuuuuucuug

SEQ ID NO: 241926 - RNA, 20 nt, Human
uuuuuuuuuuuuuuuuuugg

SEQ ID NO: 241927 - RNA, 25 nt, Human
uuuuuuuuuuuuuuuuuugguuuuu

SEQ ID NO: 241928 - RNA, 19 nt, Human
aaaaaggagacuaaacaga

SEQ ID NO: 241929 - RNA, 20 nt, Human
aaaccuccaagcgcgcucac

SEQ ID NO: 241930 - RNA, 23 nt, Human
aagccgacaagcagcccgagcua

SEQ ID NO: 241931 - RNA, 21 nt, Human
aagcgcgcucacacacacacc

SEQ ID NO: 241932 - RNA, 23 nt, Human
aauagcgaaguccuggggaaaga

SEQ ID NO: 241933 - RNA, 21 nt, Human
acacacacacccccccgcccu

SEQ ID NO: 241934 - RNA, 21 nt, Human
acacacacccccccgcccugc

SEQ ID NO: 241935 - RNA, 22 nt, Human
acacacacccccccgcccugcc

SEQ ID NO: 241936 - RNA, 20 nt, Human
agagcaaaggggggaggggg

SEQ ID NO: 241937 - RNA, 18 nt, Human
agcgaaguccuggggaaa

SEQ ID NO: 241938 - RNA, 19 nt, Human
agcgggugagccagcuugc

SEQ ID NO: 241939 - RNA, 23 nt, Human
aggagcccggcccggugcgcggc

SEQ ID NO: 241940 - RNA, 19 nt, Human
aggggggagggggagccaa

SEQ ID NO: 241941 - RNA, 22 nt, Human
caaagugcaaggcagaggugca

SEQ ID NO: 241942 - RNA, 20 nt, Human
cacacccccccgcccugccc

SEQ ID NO: 241943 - RNA, 20 nt, Human
ccccccgcgcccgcccuccc

SEQ ID NO: 241944 - RNA, 20 nt, Human
ccccgcccugcccgcgcccc

SEQ ID NO: 241945 - RNA, 22 nt, Human
cccgaaaccuccaagcgcgcuc

SEQ ID NO: 241946 - RNA, 21 nt, Human
cccgcccugcccgcgcccccc

SEQ ID NO: 241947 - RNA, 25 nt, Human
cccgcgccccccgcgcccgcccucc

SEQ ID NO: 241948 - RNA, 26 nt, Human
cccugcccgcgccccccgcgcccgcc

SEQ ID NO: 241949 - RNA, 22 nt, Human
ccgccgccgccgccgccgccgc

SEQ ID NO: 241950 - RNA, 23 nt, Human
ccgccgccgccgccgccgccgcu

SEQ ID NO: 241951 - RNA, 21 nt, Human
ccgccgccgccgccgcuccgc

SEQ ID NO: 241952 - RNA, 23 nt, Human
ccgcgccccccgcgcccgcccuc

SEQ ID NO: 241953 - RNA, 24 nt, Human
ccucgcucgccccggccccuccuu

SEQ ID NO: 241954 - RNA, 20 nt, Human
ccucucucucccucgcgcgc

SEQ ID NO: 241955 - RNA, 19 nt, Human
ccugccgccgccgccgccg

SEQ ID NO: 241956 - RNA, 24 nt, Human
cgaaaccuccaagcgcgcucacac

SEQ ID NO: 241957 - RNA, 26 nt, Human
cgaaaccuccaagcgcgcucacacac

SEQ ID NO: 241958 - RNA, 24 nt, Human
cgagcugcgguggcggcgguggug

SEQ ID NO: 241959 - RNA, 26 nt, Human
cgagcugcgguggcggcggugguggc

SEQ ID NO: 241960 - RNA, 19 nt, Human
cgcccucccuccccccugc

SEQ ID NO: 241961 - RNA, 22 nt, Human
cgccgccgccgccgccgcuccg

SEQ ID NO: 241962 - RNA, 18 nt, Human
cgcggcgggcgucugucc

SEQ ID NO: 241963 - RNA, 22 nt, Human
cgcucacacacacacccccccg

SEQ ID NO: 241964 - RNA, 22 nt, Human
cucccuccccccugcucacgcc

SEQ ID NO: 241965 - RNA, 18 nt, Human
cucgcucgccccggcccc

SEQ ID NO: 241966 - RNA, 19 nt, Human
cucuucugcuuggcucucu

SEQ ID NO: 241967 - RNA, 18 nt, Human
cugcaggagaggggccag

SEQ ID NO: 241968 - RNA, 27 nt, Human
cugccgccgccgccgccgccgccgcuc

SEQ ID NO: 241969 - RNA, 24 nt, Human
cuugcgcgccgagccggcggcuuc

SEQ ID NO: 241970 - RNA, 23 nt, Human
gaagcuggaggagcccggcccgg

SEQ ID NO: 241971 - RNA, 19 nt, Human
gacaagcagcccgagcuac

SEQ ID NO: 241972 - RNA, 21 nt, Human
gagcugcgguggcggcggugg

SEQ ID NO: 241973 - RNA, 19 nt, Human
gaggagcccggcccggugc

SEQ ID NO: 241974 - RNA, 23 nt, Human
gccagaugggcugcaggagaggg

SEQ ID NO: 241975 - RNA, 18 nt, Human
gccagcuugccgggcugg

SEQ ID NO: 241976 - RNA, 28 nt, Human
gccccccgcgcccgcccucccucccccc

SEQ ID NO: 241977 - RNA, 20 nt, Human
gcccgcccucccuccccccu

SEQ ID NO: 241978 - RNA, 22 nt, Human
gccgccgccgccgccgccgccg

SEQ ID NO: 241979 - RNA, 20 nt, Human
gcggcggugguggcugcggc

SEQ ID NO: 241980 - RNA, 18 nt, Human
gcgggcugugcugggugg

SEQ ID NO: 241981 - RNA, 22 nt, Human
gcgguggcggcggugguggcug

SEQ ID NO: 241982 - RNA, 23 nt, Human
ggaaagacgaggcagagagcaaa

SEQ ID NO: 241983 - RNA, 19 nt, Human
ggaggagagggagggggga

SEQ ID NO: 241984 - RNA, 20 nt, Human
ggaggagagggaggggggag

SEQ ID NO: 241985 - RNA, 24 nt, Human
ggccagcgggugagccagcuugcc

SEQ ID NO: 241986 - RNA, 19 nt, Human
ggcgguggcuggcccgaaa

SEQ ID NO: 241987 - RNA, 26 nt, Human
ggcucucuuuauuauuuuuuuucuuu

SEQ ID NO: 241988 - RNA, 20 nt, Human
ggcugcaggagaggggccag

SEQ ID NO: 241989 - RNA, 21 nt, Human
ggcugcaggagaggggccagc

SEQ ID NO: 241990 - RNA, 27 nt, Human
ggcugcggcggcgaagcuggaggagcc

SEQ ID NO: 241991 - RNA, 19 nt, Human
ggcugugcuggguggccag

SEQ ID NO: 241992 - RNA, 18 nt, Human
gggcggcgcgggccuugg

SEQ ID NO: 241993 - RNA, 28 nt, Human
gguggcggcggugguggcugcggcggcg

SEQ ID NO: 241994 - RNA, 22 nt, Human
gguggcugcggcggcgaagcug

SEQ ID NO: 241995 - RNA, 21 nt, Human
uacagcuagaagaugaaaaaa

SEQ ID NO: 241996 - RNA, 23 nt, Human
uacagcuagaagaugaaaaaaga

SEQ ID NO: 241997 - RNA, 18 nt, Human
uaccucugugcaaagugc

SEQ ID NO: 241998 - RNA, 22 nt, Human
uauuuuuuuucuuuccucucuc

SEQ ID NO: 241999 - RNA, 22 nt, Human
ucgcgcugcuggcgcgcuuugc

SEQ ID NO: 242000 - RNA, 23 nt, Human
ucuccugccgccgccgccgccgc

SEQ ID NO: 242001 - RNA, 19 nt, Human
ucucucccucgcgcgcucu

SEQ ID NO: 242002 - RNA, 18 nt, Human
ugcaggcagggcggcgcg

SEQ ID NO: 242003 - RNA, 22 nt, Human
ugcaggcagggcggcgcgcggc

SEQ ID NO: 242004 - RNA, 18 nt, Human
ugccgggcuggggcgcuu

SEQ ID NO: 242005 - RNA, 22 nt, Human
ugcgcucgccuccuugcgcgcc

SEQ ID NO: 242006 - RNA, 21 nt, Human
ugcgguggcggcggugguggc

SEQ ID NO: 242007 - RNA, 23 nt, Human
ugcgguggcggcggugguggcug

SEQ ID NO: 242008 - RNA, 19 nt, Human
ugcuggguggccagcgggu

SEQ ID NO: 242009 - RNA, 23 nt, Human
ugcuggguggccagcgggugagc

SEQ ID NO: 242010 - RNA, 22 nt, Human
uggaggagcccggcccggugcg

SEQ ID NO: 242011 - RNA, 24 nt, Human
uggcccgaaaccuccaagcgcgcu

SEQ ID NO: 242012 - RNA, 24 nt, Human
uggcggcggugguggcugcggccg

SEQ ID NO: 242013 - RNA, 20 nt, Human
uggggaaagacgaggcagag

SEQ ID NO: 242014 - RNA, 18 nt, Human
uuaguucuuucuugccuu

SEQ ID NO: 242015 - RNA, 22 nt, Human
uuuuuucuuuccucucucuccc

SEQ ID NO: 242016 - RNA, 19 nt, Human
aaagugcugggauuacaga

SEQ ID NO: 242017 - RNA, 24 nt, Human
aaagugcugggauuacagauguga

SEQ ID NO: 242018 - RNA, 30 nt, Human
aacacaaccacuaagugaaaugugaccucu

SEQ ID NO: 242019 - RNA, 22 nt, Human
aaccacuaagugaaaugugacc

SEQ ID NO: 242020 - RNA, 20 nt, Human
aaccauggcuggacucagca

SEQ ID NO: 242021 - RNA, 21 nt, Human
aacuuuuuuuuugagacagga

SEQ ID NO: 242022 - RNA, 21 nt, Human
aagcccagcucagggccauac

SEQ ID NO: 242023 - RNA, 24 nt, Human
aagggaaugugugugcaccaaggg

SEQ ID NO: 242024 - RNA, 20 nt, Human
aaguagcugggacuacaggc

SEQ ID NO: 242025 - RNA, 22 nt, Human
aaguagcugggacuacaggcau

SEQ ID NO: 242026 - RNA, 27 nt, Human
aaguagcugggacuacaggcaugagcc

SEQ ID NO: 242027 - RNA, 21 nt, Human
aagugauccuccugccucagc

SEQ ID NO: 242028 - RNA, 18 nt, Human
aagugcugggauuacaga

SEQ ID NO: 242029 - RNA, 26 nt, Human
aagugcugggauuacagaugugagcc

SEQ ID NO: 242030 - RNA, 20 nt, Human
acaauaagagcaguuuccaa

SEQ ID NO: 242031 - RNA, 22 nt, Human
acaauaagagcaguuuccaaga

SEQ ID NO: 242032 - RNA, 23 nt, Human
acacugacagggguugagguggg

SEQ ID NO: 242033 - RNA, 18 nt, Human
acagaugugagccaccgc

SEQ ID NO: 242034 - RNA, 20 nt, Human
acccaacuuccccuucccag

SEQ ID NO: 242035 - RNA, 22 nt, Human
accugggcacagaggcggcgcu

SEQ ID NO: 242036 - RNA, 18 nt, Human
acgggguuucaccauguu

SEQ ID NO: 242037 - RNA, 19 nt, Human
acgggguuucaccauguug

SEQ ID NO: 242038 - RNA, 24 nt, Human
acgggguuucaccauguuguccag

SEQ ID NO: 242039 - RNA, 19 nt, Human
agaaggugcccucugggcu

SEQ ID NO: 242040 - RNA, 18 nt, Human
agacaggauuuugcuaug

SEQ ID NO: 242041 - RNA, 21 nt, Human
agaccucugccccauccccaa

SEQ ID NO: 242042 - RNA, 24 nt, Human
agcaggagcucgggcucuggcugg

SEQ ID NO: 242043 - RNA, 25 nt, Human
aggcuggagugcaguggugcgaucu

SEQ ID NO: 242044 - RNA, 19 nt, Human
agggagcaggagcucgggc

SEQ ID NO: 242045 - RNA, 21 nt, Human
agugcaguggugcgaucucag

SEQ ID NO: 242046 - RNA, 23 nt, Human
agugcaguggugcgaucucagcu

SEQ ID NO: 242047 - RNA, 24 nt, Human
agugcaguggugcgaucucagcuc

SEQ ID NO: 242048 - RNA, 20 nt, Human
aguuucggaaggccaggcac

SEQ ID NO: 242049 - RNA, 24 nt, Human
auuuugcuauguugcccaggcugg

SEQ ID NO: 242050 - RNA, 19 nt, Human
caaaauacagaagacgaua

SEQ ID NO: 242051 - RNA, 25 nt, Human
caaacuccuggacucaagcgauccc

SEQ ID NO: 242052 - RNA, 24 nt, Human
caaagugcugggauuacagaugug

SEQ ID NO: 242053 - RNA, 23 nt, Human
caaccucugccuucugggcuuaa

SEQ ID NO: 242054 - RNA, 19 nt, Human
cacaguggacacugacagg

SEQ ID NO: 242055 - RNA, 24 nt, Human
caccaugcauggcuaauuuuugua

SEQ ID NO: 242056 - RNA, 24 nt, Human
caccauguuguccaggcuggucuc

SEQ ID NO: 242057 - RNA, 27 nt, Human
caccauguuguccaggcuggucucaaa

SEQ ID NO: 242058 - RNA, 27 nt, Human
cacccacucuuuuaguuucggaaggcc

SEQ ID NO: 242059 - RNA, 19 nt, Human
caccuucucucucccucug

SEQ ID NO: 242060 - RNA, 21 nt, Human
caccuucucucucccucugcu

SEQ ID NO: 242061 - RNA, 23 nt, Human
cacuacaaccucugccuucuggg

SEQ ID NO: 242062 - RNA, 22 nt, Human
cacugucccccugaaaaccaug

SEQ ID NO: 242063 - RNA, 23 nt, Human
cagagaaaugggaccugggcaca

SEQ ID NO: 242064 - RNA, 18 nt, Human
cagcagugaggacaccca

SEQ ID NO: 242065 - RNA, 24 nt, Human
caggauuuugcuauguugcccagg

SEQ ID NO: 242066 - RNA, 22 nt, Human
caggcacccccaggcccaacca

SEQ ID NO: 242067 - RNA, 24 nt, Human
caggccuguuuccccauccgugaa

SEQ ID NO: 242068 - RNA, 18 nt, Human
cagggcccacgaagggaa

SEQ ID NO: 242069 - RNA, 21 nt, Human
cagggguugaggugggacccu

SEQ ID NO: 242070 - RNA, 19 nt, Human
caguggacacugacagggg

SEQ ID NO: 242071 - RNA, 23 nt, Human
cauguuguccaggcuggucucaa

SEQ ID NO: 242072 - RNA, 24 nt, Human
cauguuguccaggcuggucucaaa

SEQ ID NO: 242073 - RNA, 21 nt, Human
ccaaagugcugggauuacaga

SEQ ID NO: 242074 - RNA, 22 nt, Human
ccaaagugcugggauuacagau

SEQ ID NO: 242075 - RNA, 24 nt, Human
ccaaagugcugggauuacagaugu

SEQ ID NO: 242076 - RNA, 23 nt, Human
ccaaccuacccaacuuccccuuc

SEQ ID NO: 242077 - RNA, 27 nt, Human
ccaagccagggaggcccucccaccaca

SEQ ID NO: 242078 - RNA, 21 nt, Human
ccacugucccccugaaaacca

SEQ ID NO: 242079 - RNA, 19 nt, Human
ccaggcacccccaggccca

SEQ ID NO: 242080 - RNA, 21 nt, Human
ccauacgccacuuuucccagg

SEQ ID NO: 242081 - RNA, 24 nt, Human
cccaagccagggaggcccucccac

SEQ ID NO: 242082 - RNA, 23 nt, Human
cccaaguagcugggacuacaggc

SEQ ID NO: 242083 - RNA, 24 nt, Human
cccaaguagcugggacuacaggca

SEQ ID NO: 242084 - RNA, 18 nt, Human
cccacaguggacacugac

SEQ ID NO: 242085 - RNA, 23 nt, Human
cccccaacagcuguucucuaagc

SEQ ID NO: 242086 - RNA, 19 nt, Human
cccccggacacccuggcug

SEQ ID NO: 242087 - RNA, 22 nt, Human
ccccugaaaaccauggcuggac

SEQ ID NO: 242088 - RNA, 24 nt, Human
cccguaagucacagacagccaaac

SEQ ID NO: 242089 - RNA, 23 nt, Human
cccucuucucccccaacagcugu

SEQ ID NO: 242090 - RNA, 26 nt, Human
cccucuucucccccaacagcuguucu

SEQ ID NO: 242091 - RNA, 23 nt, Human
ccguaagucacagacagccaaac

SEQ ID NO: 242092 - RNA, 21 nt, Human
ccuagggcugagccaggccag

SEQ ID NO: 242093 - RNA, 22 nt, Human
ccucccaccacauuucugaguc

SEQ ID NO: 242094 - RNA, 20 nt, Human
ccuggacucaagcgaucccc

SEQ ID NO: 242095 - RNA, 23 nt, Human
ccuguccacugucccccugaaaa

SEQ ID NO: 242096 - RNA, 23 nt, Human
cgcgcucacacacgcgcgucucg

SEQ ID NO: 242097 - RNA, 23 nt, Human
cggccgcugucccgauccgcgcu

SEQ ID NO: 242098 - RNA, 21 nt, Human
cggcgcgcucacacacgcgcg

SEQ ID NO: 242099 - RNA, 24 nt, Human
cgggguuucaccauguuguccagg

SEQ ID NO: 242100 - RNA, 21 nt, Human
cuacaaccucugccuucuggg

SEQ ID NO: 242101 - RNA, 19 nt, Human
cuauguugcccaggcugga

SEQ ID NO: 242102 - RNA, 23 nt, Human
cucaagcgaucccccuccuugga

SEQ ID NO: 242103 - RNA, 19 nt, Human
cucacuacaaccucugccu

SEQ ID NO: 242104 - RNA, 24 nt, Human
cucagccucccaaguagcugggac

SEQ ID NO: 242105 - RNA, 22 nt, Human
cuccggucagucuccccuccgc

SEQ ID NO: 242106 - RNA, 21 nt, Human
cucgccgcugucccggccgcu

SEQ ID NO: 242107 - RNA, 21 nt, Human
cucuccggcuuucccuaaaua

SEQ ID NO: 242108 - RNA, 18 nt, Human
cucugacuggccagcccc

SEQ ID NO: 242109 - RNA, 23 nt, Human
cugccucagccucccaaguagcu

SEQ ID NO: 242110 - RNA, 23 nt, Human
cugucuccuugucucccuauuug

SEQ ID NO: 242111 - RNA, 21 nt, Human
cuucccagggucauucggucc

SEQ ID NO: 242112 - RNA, 20 nt, Human
cuuuuaguuucggaaggcca

SEQ ID NO: 242113 - RNA, 18 nt, Human
cuuuuuuuuugagacagg

SEQ ID NO: 242114 - RNA, 25 nt, Human
gaagggaaugugugugcaccaaggg

SEQ ID NO: 242115 - RNA, 18 nt, Human
gacacugacagggguuga

SEQ ID NO: 242116 - RNA, 22 nt, Human
gacgggguuucaccauguuguc

SEQ ID NO: 242117 - RNA, 21 nt, Human
gacuacaggcaugagccacca

SEQ ID NO: 242118 - RNA, 24 nt, Human
gacuacaggcaugagccaccaugc

SEQ ID NO: 242119 - RNA, 21 nt, Human
gagaauaacuuagauccgugc

SEQ ID NO: 242120 - RNA, 20 nt, Human
gagacgggguuucaccaugu

SEQ ID NO: 242121 - RNA, 20 nt, Human
gaggggcaguguggacagug

SEQ ID NO: 242122 - RNA, 18 nt, Human
gauuacagaugugagcca

SEQ ID NO: 242123 - RNA, 22 nt, Human
gauuacagaugugagccaccgc

SEQ ID NO: 242124 - RNA, 20 nt, Human
gcacccccaggcccaaccag

SEQ ID NO: 242125 - RNA, 19 nt, Human
gcagacccgcuucugggcc

SEQ ID NO: 242126 - RNA, 19 nt, Human
gcccaggcuggagugcagu

SEQ ID NO: 242127 - RNA, 18 nt, Human
gccccauccccaaccuac

SEQ ID NO: 242128 - RNA, 20 nt, Human
gccucagccucccaaguagc

SEQ ID NO: 242129 - RNA, 25 nt, Human
gcgcucaggcacuuuggggagggag

SEQ ID NO: 242130 - RNA, 20 nt, Human
gcuauguugcccaggcugga

SEQ ID NO: 242131 - RNA, 22 nt, Human
gcucacacacgcgcgucucgcc

SEQ ID NO: 242132 - RNA, 21 nt, Human
gcugggauuacagaugugagc

SEQ ID NO: 242133 - RNA, 21 nt, Human
ggaagacagggcccacgaagg

SEQ ID NO: 242134 - RNA, 24 nt, Human
ggacuacaggcaugagccaccaug

SEQ ID NO: 242135 - RNA, 25 nt, Human
ggagcugaggccggaggggcguggc

SEQ ID NO: 242136 - RNA, 21 nt, Human
ggagggagcugaggccggagg

SEQ ID NO: 242137 - RNA, 18 nt, Human
ggccgaggccgcgcggag

SEQ ID NO: 242138 - RNA, 20 nt, Human
ggcgcgcucacacacgcgcg

SEQ ID NO: 242139 - RNA, 19 nt, Human
ggcuuaagugauccuccug

SEQ ID NO: 242140 - RNA, 22 nt, Human
gggcacagaggcggcgcucagg

SEQ ID NO: 242141 - RNA, 25 nt, Human
gggcaguguggacagugucgggccc

SEQ ID NO: 242142 - RNA, 24 nt, Human
gggcaguguggacaguguuggggg

SEQ ID NO: 242143 - RNA, 18 nt, Human
gggccagugcugcagaga

SEQ ID NO: 242144 - RNA, 18 nt, Human
gggccgaggccgcgcgga

SEQ ID NO: 242145 - RNA, 18 nt, Human
gggcugagccaggccagc

SEQ ID NO: 242146 - RNA, 22 nt, Human
gggcuuaagugauccuccugcc

SEQ ID NO: 242147 - RNA, 23 nt, Human
gggguuucaccauguuguccagg

SEQ ID NO: 242148 - RNA, 21 nt, Human
guagagacgggguuucaccau

SEQ ID NO: 242149 - RNA, 22 nt, Human
guagagacgggguuucaccaug

SEQ ID NO: 242150 - RNA, 19 nt, Human
guccauggcccccuuucuc

SEQ ID NO: 242151 - RNA, 20 nt, Human
gugaaaugugaccucaggcc

SEQ ID NO: 242152 - RNA, 24 nt, Human
gugauccuccugccucagccuccc

SEQ ID NO: 242153 - RNA, 23 nt, Human
guuucaccauguuguccaggcug

SEQ ID NO: 242154 - RNA, 21 nt, Human
uaaagcccagcucagggccau

SEQ ID NO: 242155 - RNA, 26 nt, Human
uaagugauccuccugccucagccucc

SEQ ID NO: 242156 - RNA, 27 nt, Human
uaagugauccuccugccucagccuccc

SEQ ID NO: 242157 - RNA, 24 nt, Human
uaauuuuuguauuuuuuguagaga

SEQ ID NO: 242158 - RNA, 23 nt, Human
uacagaugugagccaccgcgccc

SEQ ID NO: 242159 - RNA, 18 nt, Human
uacaggcaugagccacca

SEQ ID NO: 242160 - RNA, 25 nt, Human
uagaaagucuacaaaauacagaaga

SEQ ID NO: 242161 - RNA, 21 nt, Human
uagagacgggguuucaccaug

SEQ ID NO: 242162 - RNA, 22 nt, Human
uagagacgggguuucaccaugu

SEQ ID NO: 242163 - RNA, 18 nt, Human
uauguugcccaggcugga

SEQ ID NO: 242164 - RNA, 22 nt, Human
uauguugcccaggcuggagugc

SEQ ID NO: 242165 - RNA, 23 nt, Human
uauguugcccaggcuggagugca

SEQ ID NO: 242166 - RNA, 18 nt, Human
ucacuacaaccucugccu

SEQ ID NO: 242167 - RNA, 24 nt, Human
ucacuacaaccucugccuucuggg

SEQ ID NO: 242168 - RNA, 25 nt, Human
ucacuacaaccucugccuucugggc

SEQ ID NO: 242169 - RNA, 23 nt, Human
ucacuagucuucccacccacucu

SEQ ID NO: 242170 - RNA, 19 nt, Human
ucagcagugaggacaccca

SEQ ID NO: 242171 - RNA, 20 nt, Human
ucagccucccaaguagcugg

SEQ ID NO: 242172 - RNA, 22 nt, Human
ucaggcacuuuggggagggagc

SEQ ID NO: 242173 - RNA, 19 nt, Human
uccaagaugaggggugccc

SEQ ID NO: 242174 - RNA, 21 nt, Human
uccagaccucugccccauccc

SEQ ID NO: 242175 - RNA, 24 nt, Human
uccagacuguaguaggacugcagg

SEQ ID NO: 242176 - RNA, 18 nt, Human
ucccaaagugcugggauu

SEQ ID NO: 242177 - RNA, 23 nt, Human
ucccaaagugcugggauuacaga

SEQ ID NO: 242178 - RNA, 23 nt, Human
ucccaacacaaccacuaagugaa

SEQ ID NO: 242179 - RNA, 18 nt, Human
ucccaagccagggaggcc

SEQ ID NO: 242180 - RNA, 20 nt, Human
ucccaagccagggaggcccu

SEQ ID NO: 242181 - RNA, 24 nt, Human
ucccaaguagcugggacuacaggc

SEQ ID NO: 242182 - RNA, 22 nt, Human
ucccagauccagaccucugccc

SEQ ID NO: 242183 - RNA, 28 nt, Human
ucccagggucauucggucccagucguaa

SEQ ID NO: 242184 - RNA, 25 nt, Human
uccccaaccuacccaacuuccccuu

SEQ ID NO: 242185 - RNA, 24 nt, Human
ucccgauccgcgcuccggucaguc

SEQ ID NO: 242186 - RNA, 21 nt, Human
ucccucugcuucucucccccu

SEQ ID NO: 242187 - RNA, 27 nt, Human
uccuccugccucagccucccaaguagc

SEQ ID NO: 242188 - RNA, 21 nt, Human
uccuuggacucccaaagugcu

SEQ ID NO: 242189 - RNA, 21 nt, Human
ucucaaucuaaaaaggcuaaa

SEQ ID NO: 242190 - RNA, 22 nt, Human
ucugggcuuaagugauccuccu

SEQ ID NO: 242191 - RNA, 19 nt, Human
ucuuaggaccccacuccag

SEQ ID NO: 242192 - RNA, 21 nt, Human
ugacaaucaaaggcagggguc

SEQ ID NO: 242193 - RNA, 18 nt, Human
ugagacaggauuuugcua

SEQ ID NO: 242194 - RNA, 22 nt, Human
ugagacaggauuuugcuauguu

SEQ ID NO: 242195 - RNA, 19 nt, Human
ugaggacacccagguuuug

SEQ ID NO: 242196 - RNA, 18 nt, Human
ugcccaggcuggagugca

SEQ ID NO: 242197 - RNA, 21 nt, Human
ugcccaggcuggagugcagug

SEQ ID NO: 242198 - RNA, 24 nt, Human
ugcccaggcuggagugcaguggug

SEQ ID NO: 242199 - RNA, 21 nt, Human
ugcccucugggcugcagaccc

SEQ ID NO: 242200 - RNA, 22 nt, Human
ugcccucuucucccccaacagc

SEQ ID NO: 242201 - RNA, 24 nt, Human
ugccucagccucccaaguagcugg

SEQ ID NO: 242202 - RNA, 24 nt, Human
ugcuauguugcccaggcuggagug

SEQ ID NO: 242203 - RNA, 25 nt, Human
ugcuauguugcccaggcuggagugc

SEQ ID NO: 242204 - RNA, 18 nt, Human
ugcugggauuacagaugu

SEQ ID NO: 242205 - RNA, 24 nt, Human
ugcugggauuacagaugugagcca

SEQ ID NO: 242206 - RNA, 23 nt, Human
uggagugcaguggugcgaucuca

SEQ ID NO: 242207 - RNA, 24 nt, Human
uggagugcaguggugcgaucucag

SEQ ID NO: 242208 - RNA, 22 nt, Human
uggcugcagggacagccuaggg

SEQ ID NO: 242209 - RNA, 23 nt, Human
uggcugcagggacagccuagggc

SEQ ID NO: 242210 - RNA, 18 nt, Human
ugggacuacaggcaugag

SEQ ID NO: 242211 - RNA, 22 nt, Human
ugggacuacaggcaugagccac

SEQ ID NO: 242212 - RNA, 24 nt, Human
ugggacuacaggcaugagccacca

SEQ ID NO: 242213 - RNA, 25 nt, Human
ugggacuacaggcaugagccaccau

SEQ ID NO: 242214 - RNA, 18 nt, Human
ugggauuacagaugugag

SEQ ID NO: 242215 - RNA, 19 nt, Human
ugggauuacagaugugagc

SEQ ID NO: 242216 - RNA, 21 nt, Human
ugggauuacagaugugagcca

SEQ ID NO: 242217 - RNA, 22 nt, Human
ugggauuacagaugugagccac

SEQ ID NO: 242218 - RNA, 23 nt, Human
ugggauuacagaugugagccacc

SEQ ID NO: 242219 - RNA, 24 nt, Human
ugggauuacagaugugagccaccg

SEQ ID NO: 242220 - RNA, 20 nt, Human
ugggcuuaagugauccuccu

SEQ ID NO: 242221 - RNA, 24 nt, Human
ugggcuuaagugauccuccugccu

SEQ ID NO: 242222 - RNA, 18 nt, Human
uggggaggggcagugugg

SEQ ID NO: 242223 - RNA, 19 nt, Human
uggggggcugcaagaggaa

SEQ ID NO: 242224 - RNA, 22 nt, Human
uggguuucacuagucuucccac

SEQ ID NO: 242225 - RNA, 24 nt, Human
uggugcgaucucagcucacuacaa

SEQ ID NO: 242226 - RNA, 24 nt, Human
uguagagacgggguuucaccaugu

SEQ ID NO: 242227 - RNA, 24 nt, Human
uguccaggcuggucucaaacuccu

SEQ ID NO: 242228 - RNA, 18 nt, Human
uguugcccaggcuggagu

SEQ ID NO: 242229 - RNA, 20 nt, Human
uguugggggagggacugagg

SEQ ID NO: 242230 - RNA, 22 nt, Human
uugagacaggauuuugcuaugu

SEQ ID NO: 242231 - RNA, 24 nt, Human
uugcccaggcuggagugcaguggu

SEQ ID NO: 242232 - RNA, 21 nt, Human
uugcuauguugcccaggcugg

SEQ ID NO: 242233 - RNA, 22 nt, Human
uugcuauguugcccaggcugga

SEQ ID NO: 242234 - RNA, 19 nt, Human
uuggacucccaaagugcug

SEQ ID NO: 242235 - RNA, 24 nt, Human
uuguagagacgggguuucaccaug

SEQ ID NO: 242236 - RNA, 22 nt, Human
uuucaccauguuguccaggcug

SEQ ID NO: 242237 - RNA, 23 nt, Human
uuucaccauguuguccaggcugg

SEQ ID NO: 242238 - RNA, 24 nt, Human
uuucaccauguuguccaggcuggu

SEQ ID NO: 242239 - RNA, 22 nt, Human
uuugaauccugggaggguuugg

SEQ ID NO: 242240 - RNA, 18 nt, Human
uuugcagauauauaauau

SEQ ID NO: 242241 - RNA, 18 nt, Human
uuuguagagacgggguuu

SEQ ID NO: 242242 - RNA, 24 nt, Human
uuuguagagacgggguuucaccau

SEQ ID NO: 242243 - RNA, 18 nt, Human
uuuguuguugcucuccgg

SEQ ID NO: 242244 - RNA, 24 nt, Human
uuuuaguuucggaaggccaggcac

SEQ ID NO: 242245 - RNA, 23 nt, Human
uuuugcuauguugcccaggcugg

SEQ ID NO: 242246 - RNA, 24 nt, Human
uuuugcuauguugcccaggcugga

SEQ ID NO: 242247 - RNA, 22 nt, Human
uuuuggucccaacacaaccacu

SEQ ID NO: 242248 - RNA, 20 nt, Human
uuuuuguauuuuuuguagag

SEQ ID NO: 242249 - RNA, 23 nt, Human
uuuuuguauuuuuuguagagacg

SEQ ID NO: 242250 - RNA, 24 nt, Human
uuuuuucuguggaaaaagaaagaa

SEQ ID NO: 242251 - RNA, 22 nt, Human
uuuuuuguagagacgggguuuc

SEQ ID NO: 242252 - RNA, 24 nt, Human
uuuuuuguagagacgggguuucac

SEQ ID NO: 242253 - RNA, 22 nt, Human
aagggcucagcccggcgccccu

SEQ ID NO: 242254 - RNA, 19 nt, Human
agaaggguggggaagagag

SEQ ID NO: 242255 - RNA, 23 nt, Human
agagaagagaaggaaacagaggg

SEQ ID NO: 242256 - RNA, 21 nt, Human
aggaaagagaagagaaggaaa

SEQ ID NO: 242257 - RNA, 26 nt, Human
aggaaggcaggcgcaagacaaggggc

SEQ ID NO: 242258 - RNA, 19 nt, Human
agggaggaaagagaagaga

SEQ ID NO: 242259 - RNA, 21 nt, Human
agggcucagcccggcgccccu

SEQ ID NO: 242260 - RNA, 20 nt, Human
cacccugccccuagagaacc

SEQ ID NO: 242261 - RNA, 22 nt, Human
caggcgcaagacaaggggcagg

SEQ ID NO: 242262 - RNA, 20 nt, Human
ccaugugccuaguggccccg

SEQ ID NO: 242263 - RNA, 20 nt, Human
ccccuagagaaccagguggg

SEQ ID NO: 242264 - RNA, 19 nt, Human
ccccugggguacagguugu

SEQ ID NO: 242265 - RNA, 20 nt, Human
cccgcaaagacccgccuggg

SEQ ID NO: 242266 - RNA, 23 nt, Human
cgacgacaaugacgagaucagaa

SEQ ID NO: 242267 - RNA, 20 nt, Human
cgcaaagacccgccugggca

SEQ ID NO: 242268 - RNA, 22 nt, Human
cuccucauccgucagcuggugc

SEQ ID NO: 242269 - RNA, 24 nt, Human
gagcaggcgcucucugauaggagg

SEQ ID NO: 242270 - RNA, 20 nt, Human
gaggucaggaaggucugacg

SEQ ID NO: 242271 - RNA, 19 nt, Human
gauuagaaggaauaagacg

SEQ ID NO: 242272 - RNA, 20 nt, Human
ggaaacagagggacagugca

SEQ ID NO: 242273 - RNA, 21 nt, Human
ggaaggcaggcgcaagacaag

SEQ ID NO: 242274 - RNA, 21 nt, Human
gucauaacccgggggcacagc

SEQ ID NO: 242275 - RNA, 19 nt, Human
uaacccgggggcacagcga

SEQ ID NO: 242276 - RNA, 24 nt, Human
uacgaucgggcauccgucuuggac

SEQ ID NO: 242277 - RNA, 22 nt, Human
ucauccgucagcuggugccauu

SEQ ID NO: 242278 - RNA, 23 nt, Human
ugcagccaaauucgccaugugcc

SEQ ID NO: 242279 - RNA, 19 nt, Human
uggacuuuacuauugugau

SEQ ID NO: 242280 - RNA, 19 nt, Human
ugggaggucaggaaggucu

SEQ ID NO: 242281 - RNA, 20 nt, Human
uggugccauucucacccggc

SEQ ID NO: 242282 - RNA, 19 nt, Human
uugcagggaagagagaagg

SEQ ID NO: 242283 - RNA, 18 nt, Human
uuugcagggaagagagaa

SEQ ID NO: 242284 - RNA, 18 nt, Human
aagaacaacaagugcccc

SEQ ID NO: 242285 - RNA, 19 nt, Human
aagaacaacaagugccccc

SEQ ID NO: 242286 - RNA, 20 nt, Human
caagugcccccgcgccgccc

SEQ ID NO: 242287 - RNA, 20 nt, Human
ccccucggccgccgccgccg

SEQ ID NO: 242288 - RNA, 21 nt, Human
cccgcgccgcccgccgccacc

SEQ ID NO: 242289 - RNA, 18 nt, Human
cccucggccgccgccgcc

SEQ ID NO: 242290 - RNA, 23 nt, Human
ccgccgccuggcgcucgggcucc

SEQ ID NO: 242291 - RNA, 20 nt, Human
ccucggccgccgccgccgcc

SEQ ID NO: 242292 - RNA, 21 nt, Human
cucacugucgcgcuccccucg

SEQ ID NO: 242293 - RNA, 18 nt, Human
gccgccgccuggcgcucg

SEQ ID NO: 242294 - RNA, 18 nt, Human
gcgccggcgcucacuguc

SEQ ID NO: 242295 - RNA, 21 nt, Human
gcggcggcuccucgcgggcac

SEQ ID NO: 242296 - RNA, 19 nt, Human
gcucacugucgcgcucccc

SEQ ID NO: 242297 - RNA, 20 nt, Human
gggcgcgggcgcgcggcggc

SEQ ID NO: 242298 - RNA, 24 nt, Human
uccccucggccgccgccgccgccu

SEQ ID NO: 242299 - RNA, 24 nt, Human
ugcccccgcgccgcccgccgccac

SEQ ID NO: 242300 - RNA, 21 nt, Human
uggaacucguagcuggcgucg

SEQ ID NO: 242301 - RNA, 23 nt, Human
aaauaacacggacagacagagcu

SEQ ID NO: 242302 - RNA, 23 nt, Human
aaauaacacggacagacagagcu

SEQ ID NO: 242303 - RNA, 21 nt, Human
acagagcuccccuccagacag

SEQ ID NO: 242304 - RNA, 21 nt, Human
acagagcuccccuccagacag

SEQ ID NO: 242305 - RNA, 22 nt, Human
accccgaaggcccagcagccuc

SEQ ID NO: 242306 - RNA, 21 nt, Human
accugccucacuccccuccug

SEQ ID NO: 242307 - RNA, 18 nt, Human
agaucccaggcgccucuc

SEQ ID NO: 242308 - RNA, 23 nt, Human
agccagugggggccagcgagggu

SEQ ID NO: 242309 - RNA, 23 nt, Human
agccagugggggccagcgagggu

SEQ ID NO: 242310 - RNA, 26 nt, Human
aggcaggaaguagcaauaaagggacc

SEQ ID NO: 242311 - RNA, 27 nt, Human
aggcaggaaguagcaauaaagggaccc

SEQ ID NO: 242312 - RNA, 23 nt, Human
aggcccagcagccuccucucaga

SEQ ID NO: 242313 - RNA, 22 nt, Human
agguccagcucugggggcucac

SEQ ID NO: 242314 - RNA, 19 nt, Human
auuucagcauacucagcua

SEQ ID NO: 242315 - RNA, 22 nt, Human
caccugccucacuccccuccug

SEQ ID NO: 242316 - RNA, 21 nt, Human
cacuccccuccugccccagcc

SEQ ID NO: 242317 - RNA, 21 nt, Human
cacuccccuccugccccagcc

SEQ ID NO: 242318 - RNA, 18 nt, Human
cagagcuccccuccagac

SEQ ID NO: 242319 - RNA, 18 nt, Human
cagagcuccccuccagac

SEQ ID NO: 242320 - RNA, 21 nt, Human
cagcagccuccucucagaucc

SEQ ID NO: 242321 - RNA, 19 nt, Human
cagcuccuucacuugaccc

SEQ ID NO: 242322 - RNA, 21 nt, Human
cagcuccuucacuugacccgg

SEQ ID NO: 242323 - RNA, 22 nt, Human
cagguccagcucugggggcuca

SEQ ID NO: 242324 - RNA, 22 nt, Human
ccagcccagcucgcaguccccu

SEQ ID NO: 242325 - RNA, 20 nt, Human
ccagcucgcaguccccugcc

SEQ ID NO: 242326 - RNA, 19 nt, Human
ccccagggccagguguggg

SEQ ID NO: 242327 - RNA, 19 nt, Human
ccccagggccagguguggg

SEQ ID NO: 242328 - RNA, 22 nt, Human
cccccagcuccuucacuugacc

SEQ ID NO: 242329 - RNA, 23 nt, Human
cccccagcuccuucacuugaccc

SEQ ID NO: 242330 - RNA, 19 nt, Human
cccccaggaccucacuguc

SEQ ID NO: 242331 - RNA, 20 nt, Human
cccccaggaccucacuguca

SEQ ID NO: 242332 - RNA, 20 nt, Human
cccccaggaccucacuguca

SEQ ID NO: 242333 - RNA, 21 nt, Human
cccccaggaccucacugucac

SEQ ID NO: 242334 - RNA, 21 nt, Human
cccccaggaccucacugucac

SEQ ID NO: 242335 - RNA, 22 nt, Human
cccccaggaccucacugucacc

SEQ ID NO: 242336 - RNA, 22 nt, Human
cccccaggaccucacugucacc

SEQ ID NO: 242337 - RNA, 23 nt, Human
cccccaggaccucacugucaccu

SEQ ID NO: 242338 - RNA, 23 nt, Human
cccccaggaccucacugucaccu

SEQ ID NO: 242339 - RNA, 25 nt, Human
cccccaggaccucacugucaccugc

SEQ ID NO: 242340 - RNA, 25 nt, Human
cccccaggaccucacugucaccugc

SEQ ID NO: 242341 - RNA, 20 nt, Human
cccccaggaccucacugucc

SEQ ID NO: 242342 - RNA, 23 nt, Human
cccuccugccccagcccccgaua

SEQ ID NO: 242343 - RNA, 23 nt, Human
cccuccugccccagcccccgaua

SEQ ID NO: 242344 - RNA, 23 nt, Human
ccgaaggcccagcagccuccucu

SEQ ID NO: 242345 - RNA, 22 nt, Human
ccucacuccccuccugccccag

SEQ ID NO: 242346 - RNA, 22 nt, Human
ccucacuccccuccugccccag

SEQ ID NO: 242347 - RNA, 22 nt, Human
ccuccagacagaugaggguaaa

SEQ ID NO: 242348 - RNA, 22 nt, Human
ccuccagacagaugaggguaaa

SEQ ID NO: 242349 - RNA, 24 nt, Human
cggacagacagagcuccccuccag

SEQ ID NO: 242350 - RNA, 24 nt, Human
cggacagacagagcuccccuccag

SEQ ID NO: 242351 - RNA, 23 nt, Human
cuccugccccagcccccgauacu

SEQ ID NO: 242352 - RNA, 23 nt, Human
cuccugccccagcccccgauacu

SEQ ID NO: 242353 - RNA, 19 nt, Human
cuuuuguacaggccccagg

SEQ ID NO: 242354 - RNA, 19 nt, Human
cuuuuguacaggccccagg

SEQ ID NO: 242355 - RNA, 20 nt, Human
gaaggagggggaggucaggc

SEQ ID NO: 242356 - RNA, 20 nt, Human
gaaggagggggaggucaggc

SEQ ID NO: 242357 - RNA, 20 nt, Human
gcagcugggaaggaggggga

SEQ ID NO: 242358 - RNA, 20 nt, Human
gcagcugggaaggaggggga

SEQ ID NO: 242359 - RNA, 19 nt, Human
gcuggcagggaggggcagc

SEQ ID NO: 242360 - RNA, 19 nt, Human
gcuggcagggaggggcagc

SEQ ID NO: 242361 - RNA, 22 nt, Human
gcuggcagggaggggcagcugg

SEQ ID NO: 242362 - RNA, 22 nt, Human
gcuggcagggaggggcagcugg

SEQ ID NO: 242363 - RNA, 25 nt, Human
ggauuucagcauacucagcuagcuc

SEQ ID NO: 242364 - RNA, 21 nt, Human
ggcaggagaccaggcaggaag

SEQ ID NO: 242365 - RNA, 21 nt, Human
ggcaggagaccaggcaggaag

SEQ ID NO: 242366 - RNA, 22 nt, Human
gggcgugggggugcuggcaggg

SEQ ID NO: 242367 - RNA, 22 nt, Human
gggcgugggggugcuggcaggg

SEQ ID NO: 242368 - RNA, 21 nt, Human
guguagcuguccuuggugggc

SEQ ID NO: 242369 - RNA, 19 nt, Human
uaaaggagguuagagagga

SEQ ID NO: 242370 - RNA, 19 nt, Human
uaaaggagguuagagagga

SEQ ID NO: 242371 - RNA, 25 nt, Human
uaacacggacagacagagcuccccu

SEQ ID NO: 242372 - RNA, 25 nt, Human
uaacacggacagacagagcuccccu

SEQ ID NO: 242373 - RNA, 20 nt, Human
uacuuuugggaggaagggag

SEQ ID NO: 242374 - RNA, 20 nt, Human
uacuuuugggaggaagggag

SEQ ID NO: 242375 - RNA, 19 nt, Human
ucccaggcgccucucgcuc

SEQ ID NO: 242376 - RNA, 19 nt, Human
ucucagaucccaggcgccu

SEQ ID NO: 242377 - RNA, 18 nt, Human
ucugggggcucaccccga

SEQ ID NO: 242378 - RNA, 26 nt, Human
ucuucuggguccaccugaagccgcca

SEQ ID NO: 242379 - RNA, 19 nt, Human
ugagggcgugggggugcug

SEQ ID NO: 242380 - RNA, 19 nt, Human
ugagggcgugggggugcug

SEQ ID NO: 242381 - RNA, 20 nt, Human
ugccccagcccccgauacuu

SEQ ID NO: 242382 - RNA, 21 nt, Human
ugccccagcccccgauacuuu

SEQ ID NO: 242383 - RNA, 25 nt, Human
ugcccccagcuccuucacuugaccc

SEQ ID NO: 242384 - RNA, 23 nt, Human
ugccucacuccccuccugcccca

SEQ ID NO: 242385 - RNA, 23 nt, Human
ugccucacuccccuccugcccca

SEQ ID NO: 242386 - RNA, 25 nt, Human
ugccucacuccccuccugccccagc

SEQ ID NO: 242387 - RNA, 25 nt, Human
ugccucacuccccuccugccccagc

SEQ ID NO: 242388 - RNA, 19 nt, Human
uggcagggaggggcagcug

SEQ ID NO: 242389 - RNA, 20 nt, Human
uggcagggaggggcagcugg

SEQ ID NO: 242390 - RNA, 22 nt, Human
ugggaggaagggagcccacagc

SEQ ID NO: 242391 - RNA, 22 nt, Human
ugggaggaagggagcccacagc

SEQ ID NO: 242392 - RNA, 21 nt, Human
aacacagugaagaaucugucu

SEQ ID NO: 242393 - RNA, 21 nt, Human
aacacagugaagaaucugucu

SEQ ID NO: 242394 - RNA, 21 nt, Human
aaccucgcuucucccucgugc

SEQ ID NO: 242395 - RNA, 21 nt, Human
agcaagguucucaccucccuu

SEQ ID NO: 242396 - RNA, 18 nt, Human
cccacugugucuguagaa

SEQ ID NO: 242397 - RNA, 19 nt, Human
ccccugagaaccuggacuc

SEQ ID NO: 242398 - RNA, 21 nt, Human
ccgaucucaagccugucccuc

SEQ ID NO: 242399 - RNA, 22 nt, Human
ccuccucacagagccugggccc

SEQ ID NO: 242400 - RNA, 18 nt, Human
gagaaccuggacucuugu

SEQ ID NO: 242401 - RNA, 22 nt, Human
gggcaggacuugggcgaugggg

SEQ ID NO: 242402 - RNA, 19 nt, Human
ggugggagugugggcagga

SEQ ID NO: 242403 - RNA, 18 nt, Human
ucaggguagcagguggga

SEQ ID NO: 242404 - RNA, 19 nt, Human
ucccucagaacgagaaccu

SEQ ID NO: 242405 - RNA, 20 nt, Human
ucccucagaacgagaaccuc

SEQ ID NO: 242406 - RNA, 18 nt, Human
ucccuugccuccucacaa

SEQ ID NO: 242407 - RNA, 21 nt, Human
ucucaccucccuugccuccuc

SEQ ID NO: 242408 - RNA, 22 nt, Human
ucucccuguccccugagaaccu

SEQ ID NO: 242409 - RNA, 19 nt, Human
ucugagagcaagguucuca

SEQ ID NO: 242410 - RNA, 20 nt, Human
uggggacccacaggcagguc

SEQ ID NO: 242411 - RNA, 18 nt, Human
ugguauuugacuugccuu

SEQ ID NO: 242412 - RNA, 25 nt, Human
uggugucccacagcucuugaccucu

SEQ ID NO: 242413 - RNA, 18 nt, Human
uugggcgauggggaccca

SEQ ID NO: 242414 - RNA, 23 nt, Human
aaacucacuacuaacaauacuga

SEQ ID NO: 242415 - RNA, 19 nt, Human
aacacucuuacuccuaaac

SEQ ID NO: 242416 - RNA, 21 nt, Human
aaccauccguuaaaaggaaca

SEQ ID NO: 242417 - RNA, 25 nt, Human
aaccuugccuccucacggagccugg

SEQ ID NO: 242418 - RNA, 23 nt, Human
aagaagccaaggauauccaggua

SEQ ID NO: 242419 - RNA, 21 nt, Human
aagccaaggauauccagguau

SEQ ID NO: 242420 - RNA, 19 nt, Human
agacccccucccacuggcc

SEQ ID NO: 242421 - RNA, 18 nt, Human
agauaaaucucaaaguca

SEQ ID NO: 242422 - RNA, 18 nt, Human
agcacuaugugugacuac

SEQ ID NO: 242423 - RNA, 22 nt, Human
agccugcgccugcuucccucca

SEQ ID NO: 242424 - RNA, 23 nt, Human
cacaauucacaaaauggaaugga

SEQ ID NO: 242425 - RNA, 23 nt, Human
cacuggcccagacccccucccac

SEQ ID NO: 242426 - RNA, 22 nt, Human
caggaaacaaagauaaaucuca

SEQ ID NO: 242427 - RNA, 18 nt, Human
ccacuggcccuggcugca

SEQ ID NO: 242428 - RNA, 19 nt, Human
ccagacccccucccacugg

SEQ ID NO: 242429 - RNA, 21 nt, Human
cuaaacuauauaaacagcacu

SEQ ID NO: 242430 - RNA, 24 nt, Human
cuaacaauacugacugcucucuuc

SEQ ID NO: 242431 - RNA, 23 nt, Human
cugacugcucucuucaaagagug

SEQ ID NO: 242432 - RNA, 25 nt, Human
ggcaggagcuagugcugcuccgggg

SEQ ID NO: 242433 - RNA, 25 nt, Human
gggcagcagguaggagugugggcaa

SEQ ID NO: 242434 - RNA, 26 nt, Human
gggcaggagcuagugcugcuccgggg

SEQ ID NO: 242435 - RNA, 20 nt, Human
gggccugucuccucagaacc

SEQ ID NO: 242436 - RNA, 22 nt, Human
uaaggcaagaauuaaguaucuu

SEQ ID NO: 242437 - RNA, 23 nt, Human
uagaacagaaacucacuacuaac

SEQ ID NO: 242438 - RNA, 26 nt, Human
uagaacagaaacucacuacuaacaau

SEQ ID NO: 242439 - RNA, 20 nt, Human
uauaaacagcacuaugugug

SEQ ID NO: 242440 - RNA, 24 nt, Human
uauuuuacugcuaauucuuucaca

SEQ ID NO: 242441 - RNA, 21 nt, Human
ugugggcaggagcuagugcug

SEQ ID NO: 242442 - RNA, 22 nt, Human
uugaggucuuuaucucauguau

SEQ ID NO: 242443 - RNA, 24 nt, Human
uugccuccucacggagccugcgcc

SEQ ID NO: 242444 - RNA, 20 nt, Human
uuuuucaaauuuacagaaua

SEQ ID NO: 242445 - RNA, 27 nt, Human
uuuuuccacugcuguuauuugucacaa

SEQ ID NO: 242446 - RNA, 22 nt, Human
aaaacaggacucuuaccccuaa

SEQ ID NO: 242447 - RNA, 25 nt, Human
aaaacaggacucuuaccccuaaacc

SEQ ID NO: 242448 - RNA, 22 nt, Human
aacaggacucuuaccccuaaac

SEQ ID NO: 242449 - RNA, 21 nt, Human
aaccauuuguuaaaaggaaca

SEQ ID NO: 242450 - RNA, 23 nt, Human
accccuaaacuauauaaacagca

SEQ ID NO: 242451 - RNA, 22 nt, Human
acuggcccagacccccucccac

SEQ ID NO: 242452 - RNA, 25 nt, Human
agaacagaaacucacugcuaagaau

SEQ ID NO: 242453 - RNA, 18 nt, Human
agauaaaucucaaaguca

SEQ ID NO: 242454 - RNA, 18 nt, Human
agcacuaugugugacuac

SEQ ID NO: 242455 - RNA, 22 nt, Human
agccugcgccugcuucccuccg

SEQ ID NO: 242456 - RNA, 19 nt, Human
aggcaggagugcgggcagg

SEQ ID NO: 242457 - RNA, 18 nt, Human
auccaacagaacagaaac

SEQ ID NO: 242458 - RNA, 22 nt, Human
caggaaacaaagauaaaucuca

SEQ ID NO: 242459 - RNA, 19 nt, Human
caggcaggagugcgggcag

SEQ ID NO: 242460 - RNA, 18 nt, Human
ccacuggcccuggcugca

SEQ ID NO: 242461 - RNA, 19 nt, Human
ccagacccccucccacugg

SEQ ID NO: 242462 - RNA, 21 nt, Human
ccagacccccucccacuggcc

SEQ ID NO: 242463 - RNA, 20 nt, Human
ccuggcugcaacaugugcug

SEQ ID NO: 242464 - RNA, 23 nt, Human
ccuggcugcaacaugugcugaga

SEQ ID NO: 242465 - RNA, 21 nt, Human
cuaaacuauauaaacagcacu

SEQ ID NO: 242466 - RNA, 24 nt, Human
cucucuucaaagaggcaggaauug

SEQ ID NO: 242467 - RNA, 26 nt, Human
cugacugcucucuucaaagaggcagu

SEQ ID NO: 242468 - RNA, 20 nt, Human
cugcuaagaaugcugacugc

SEQ ID NO: 242469 - RNA, 19 nt, Human
gaagacccacaggccuugc

SEQ ID NO: 242470 - RNA, 19 nt, Human
gcaggagugcgggcaggag

SEQ ID NO: 242471 - RNA, 22 nt, Human
gccuccucacggagccugcgcc

SEQ ID NO: 242472 - RNA, 18 nt, Human
gcucucuucaaagaggca

SEQ ID NO: 242473 - RNA, 21 nt, Human
ggcagcaggcaggagugcggg

SEQ ID NO: 242474 - RNA, 25 nt, Human
gggcagcaggcaggagugcgggcaa

SEQ ID NO: 242475 - RNA, 19 nt, Human
uagacugagguauaaggca

SEQ ID NO: 242476 - RNA, 20 nt, Human
uauaaacagcacuaugugug

SEQ ID NO: 242477 - RNA, 25 nt, Human
uauuccacugcuguuauuaugugac

SEQ ID NO: 242478 - RNA, 24 nt, Human
uauuuuacugcuaauucguucaca

SEQ ID NO: 242479 - RNA, 24 nt, Human
ucucaaagucauccaacagaacag

SEQ ID NO: 242480 - RNA, 19 nt, Human
ugcuaagaaugcugacugc

SEQ ID NO: 242481 - RNA, 19 nt, Human
ugcuaagaaugcugacugc

SEQ ID NO: 242482 - RNA, 19 nt, Human
uggucagggcagcaggcag

SEQ ID NO: 242483 - RNA, 19 nt, Human
uuggaugcugaaguucauc

SEQ ID NO: 242484 - RNA, 22 nt, Human
aacaacuccaacaggaaacaaa

SEQ ID NO: 242485 - RNA, 21 nt, Human
aaccauccguuaaaaggaaca

SEQ ID NO: 242486 - RNA, 21 nt, Human
aaccuugccuccucaccgagc

SEQ ID NO: 242487 - RNA, 25 nt, Human
aaccuugccuccucaccgagccugg

SEQ ID NO: 242488 - RNA, 24 nt, Human
aauaaucucaaagucauccaacag

SEQ ID NO: 242489 - RNA, 27 nt, Human
agaacagaaacccacuacuaagaaugc

SEQ ID NO: 242490 - RNA, 21 nt, Human
agaagucaaggaaauccuggu

SEQ ID NO: 242491 - RNA, 23 nt, Human
agaauagauugagguacaaggca

SEQ ID NO: 242492 - RNA, 18 nt, Human
agcacuaugugugacuac

SEQ ID NO: 242493 - RNA, 19 nt, Human
aggaaauccugguuugcau

SEQ ID NO: 242494 - RNA, 24 nt, Human
caacaggaaacaaagaauaaucuc

SEQ ID NO: 242495 - RNA, 23 nt, Human
caacuccaacaggaaacaaagaa

SEQ ID NO: 242496 - RNA, 27 nt, Human
caacuccaacaggaaacaaagaauaau

SEQ ID NO: 242497 - RNA, 23 nt, Human
cacaauucacaaaauggaaugga

SEQ ID NO: 242498 - RNA, 23 nt, Human
cacuggcccagacccccucccac

SEQ ID NO: 242499 - RNA, 20 nt, Human
cagaauagauugagguacaa

SEQ ID NO: 242500 - RNA, 20 nt, Human
ccaacagaacagaaacccac

SEQ ID NO: 242501 - RNA, 18 nt, Human
ccacuggcccuggcugca

SEQ ID NO: 242502 - RNA, 19 nt, Human
ccagacccccucccacugg

SEQ ID NO: 242503 - RNA, 21 nt, Human
ccagacccccucccacuggcc

SEQ ID NO: 242504 - RNA, 19 nt, Human
ccccggaaggugcacuggc

SEQ ID NO: 242505 - RNA, 24 nt, Human
cccucagaaccuugccuccucacc

SEQ ID NO: 242506 - RNA, 19 nt, Human
ccuccgggggccucugguc

SEQ ID NO: 242507 - RNA, 21 nt, Human
cuaaacuauauaaacagcacu

SEQ ID NO: 242508 - RNA, 18 nt, Human
cuggcagaucuucuccuu

SEQ ID NO: 242509 - RNA, 18 nt, Human
cugggcaauggagaccca

SEQ ID NO: 242510 - RNA, 22 nt, Human
gcauucucaaagaagucaagga

SEQ ID NO: 242511 - RNA, 26 nt, Human
gcggccccggaaggugcacuggccca

SEQ ID NO: 242512 - RNA, 20 nt, Human
gcgggagugugggcaggagc

SEQ ID NO: 242513 - RNA, 21 nt, Human
ggcgggagugugggcaggagc

SEQ ID NO: 242514 - RNA, 20 nt, Human
gggcaauggagacccacugg

SEQ ID NO: 242515 - RNA, 22 nt, Human
gggcaggagcugggcaauggag

SEQ ID NO: 242516 - RNA, 19 nt, Human
ggggccucugguccuccag

SEQ ID NO: 242517 - RNA, 22 nt, Human
uaaaaaacaagacucuuacucc

SEQ ID NO: 242518 - RNA, 25 nt, Human
uaaaaaacaagacucuuacuccuaa

SEQ ID NO: 242519 - RNA, 19 nt, Human
uacuaagaaugcugacugc

SEQ ID NO: 242520 - RNA, 21 nt, Human
uacuaagaaugcugacugcuc

SEQ ID NO: 242521 - RNA, 20 nt, Human
uauaaacagcacuaugugug

SEQ ID NO: 242522 - RNA, 18 nt, Human
ucaaagaagucaaggaaa

SEQ ID NO: 242523 - RNA, 18 nt, Human
ucaccgagccugggccgg

SEQ ID NO: 242524 - RNA, 23 nt, Human
ucagugcuccuccgggggccucu

SEQ ID NO: 242525 - RNA, 23 nt, Human
uccccucagaaccuugccuccuc

SEQ ID NO: 242526 - RNA, 24 nt, Human
ucgcucguugcucagggcgagaau

SEQ ID NO: 242527 - RNA, 24 nt, Human
ucucaaagucauccaacagaacag

SEQ ID NO: 242528 - RNA, 21 nt, Human
ugggcaggagcugggcaaugg

SEQ ID NO: 242529 - RNA, 19 nt, Human
uggucagggcaacaggcgg

SEQ ID NO: 242530 - RNA, 24 nt, Human
ugguccuccaggucagccuguccc

SEQ ID NO: 242531 - RNA, 21 nt, Human
uucuccuucagugcuccuccg

SEQ ID NO: 242532 - RNA, 23 nt, Human
uuugaacaacuccaacaggaaac

SEQ ID NO: 242533 - RNA, 24 nt, Human
uuugauuucuugaguuaucucaug

SEQ ID NO: 242534 - RNA, 28 nt, Human
uuuuuuuuuuuuuuuuuuuuuuuggggg

SEQ ID NO: 242535 - RNA, 22 nt, Human
aaaacaagacucuuacuccuaa

SEQ ID NO: 242536 - RNA, 19 nt, Human
aaacccacuacuaagaaca

SEQ ID NO: 242537 - RNA, 21 nt, Human
aagccaaggaaauccagguau

SEQ ID NO: 242538 - RNA, 22 nt, Human
aggcagaucuucuccuuggugc

SEQ ID NO: 242539 - RNA, 19 nt, Human
augucccaaauucacaaaa

SEQ ID NO: 242540 - RNA, 21 nt, Human
caaucugaauaaaaaacaaga

SEQ ID NO: 242541 - RNA, 21 nt, Human
cacagggccuggccugcuucc

SEQ ID NO: 242542 - RNA, 21 nt, Human
cacuucuaaauacuuacuccu

SEQ ID NO: 242543 - RNA, 24 nt, Human
cagagauaaaucuccaagucaucc

SEQ ID NO: 242544 - RNA, 19 nt, Human
cagcaggcaagagugcagg

SEQ ID NO: 242545 - RNA, 25 nt, Human
caggcagaucuucuccuuggugcuc

SEQ ID NO: 242546 - RNA, 21 nt, Human
ccaaucccaagcugcugguca

SEQ ID NO: 242547 - RNA, 21 nt, Human
cccaaauucacaaaauagaac

SEQ ID NO: 242548 - RNA, 21 nt, Human
ccuuccccacagcccuggcug

SEQ ID NO: 242549 - RNA, 19 nt, Human
cuccaagucauccaacaaa

SEQ ID NO: 242550 - RNA, 18 nt, Human
cucugcucagggcagcag

SEQ ID NO: 242551 - RNA, 22 nt, Human
cucuguggccuccagggaaucc

SEQ ID NO: 242552 - RNA, 18 nt, Human
cugggcaauggggaccca

SEQ ID NO: 242553 - RNA, 20 nt, Human
cuuccaccaaucccaagcug

SEQ ID NO: 242554 - RNA, 23 nt, Human
cuuccccacagcccuggcugcaa

SEQ ID NO: 242555 - RNA, 22 nt, Human
gaauccuguccuccgguuggcc

SEQ ID NO: 242556 - RNA, 18 nt, Human
gcucagggcagcaggcaa

SEQ ID NO: 242557 - RNA, 21 nt, Human
gggacccacaggcagaucuuc

SEQ ID NO: 242558 - RNA, 23 nt, Human
gugcuccucuguggccuccaggg

SEQ ID NO: 242559 - RNA, 22 nt, Human
uaaaaaacaagacucuuacucc

SEQ ID NO: 242560 - RNA, 23 nt, Human
uaaaaggaacauuucaacaauug

SEQ ID NO: 242561 - RNA, 18 nt, Human
ucacagggccuggccugc

SEQ ID NO: 242562 - RNA, 18 nt, Human
ucagaaccuugacuccuc

SEQ ID NO: 242563 - RNA, 22 nt, Human
ucccaaauucacaaaauagaac

SEQ ID NO: 242564 - RNA, 20 nt, Human
uggcccagcccugccccuuc

SEQ ID NO: 242565 - RNA, 23 nt, Human
uuuuuuuuuuuuuuuuuuaacag

SEQ ID NO: 242566 - RNA, 21 nt, Human
aaaaaccuuaauccucugcuc

SEQ ID NO: 242567 - RNA, 18 nt, Human
aaaaccuuaauccucugc

SEQ ID NO: 242568 - RNA, 23 nt, Human
aagaagccaagcaaauucaggua

SEQ ID NO: 242569 - RNA, 20 nt, Human
aagccgaccccucagaaccg

SEQ ID NO: 242570 - RNA, 23 nt, Human
aaggaaacaaagauaaaccucca

SEQ ID NO: 242571 - RNA, 24 nt, Human
aagugguggauguggcccuggaac

SEQ ID NO: 242572 - RNA, 20 nt, Human
acaaagauaaaccuccaaau

SEQ ID NO: 242573 - RNA, 22 nt, Human
acagacccugagcccgcuuccc

SEQ ID NO: 242574 - RNA, 23 nt, Human
accuugccuccucacagacccug

SEQ ID NO: 242575 - RNA, 18 nt, Human
agagaugguccacacugu

SEQ ID NO: 242576 - RNA, 27 nt, Human
agagaugguccacacuguguucccuca

SEQ ID NO: 242577 - RNA, 23 nt, Human
agagugugggccggagcugggca

SEQ ID NO: 242578 - RNA, 22 nt, Human
agauaaaccuccaaaucgccca

SEQ ID NO: 242579 - RNA, 22 nt, Human
agcaagacucuuacuccuaaac

SEQ ID NO: 242580 - RNA, 21 nt, Human
agccgaucucaagccgacccc

SEQ ID NO: 242581 - RNA, 23 nt, Human
aggagagugugggccggagcugg

SEQ ID NO: 242582 - RNA, 21 nt, Human
aggcccucccacaaccugccc

SEQ ID NO: 242583 - RNA, 22 nt, Human
cacaaccugccccacuggcccu

SEQ ID NO: 242584 - RNA, 21 nt, Human
cacuggcccaggcccucccac

SEQ ID NO: 242585 - RNA, 21 nt, Human
cagacccugagcccgcuuccc

SEQ ID NO: 242586 - RNA, 21 nt, Human
caggagagugugggccggagc

SEQ ID NO: 242587 - RNA, 23 nt, Human
caggcaggucuucuucagugcuu

SEQ ID NO: 242588 - RNA, 18 nt, Human
cauucucaaagaagccaa

SEQ ID NO: 242589 - RNA, 23 nt, Human
cccaggcccucccacaaccugcc

SEQ ID NO: 242590 - RNA, 22 nt, Human
cccaguauaaaugaaaagcaag

SEQ ID NO: 242591 - RNA, 22 nt, Human
cccucccacaaccugccccacu

SEQ ID NO: 242592 - RNA, 25 nt, Human
ccgaucucaagccgaccccucagaa

SEQ ID NO: 242593 - RNA, 22 nt, Human
ccucacacccaacaugcucccc

SEQ ID NO: 242594 - RNA, 21 nt, Human
ccucacagacccugagcccgc

SEQ ID NO: 242595 - RNA, 22 nt, Human
ccucccacaaccugccccacug

SEQ ID NO: 242596 - RNA, 21 nt, Human
ccugccccacuggcccuagcc

SEQ ID NO: 242597 - RNA, 24 nt, Human
cgaucucaagccgaccccucagaa

SEQ ID NO: 242598 - RNA, 22 nt, Human
cucacacccaacaugcucccca

SEQ ID NO: 242599 - RNA, 21 nt, Human
cuccaaaucgcccaauagaac

SEQ ID NO: 242600 - RNA, 20 nt, Human
cucccacaaccugccccacu

SEQ ID NO: 242601 - RNA, 24 nt, Human
cuccugaccuccuggcuggccugu

SEQ ID NO: 242602 - RNA, 19 nt, Human
cuuuaugucuuuaucucau

SEQ ID NO: 242603 - RNA, 21 nt, Human
gaacaauuccaaaaggaaaca

SEQ ID NO: 242604 - RNA, 19 nt, Human
gacccugagcccgcuuccc

SEQ ID NO: 242605 - RNA, 18 nt, Human
gagagaugguccacacug

SEQ ID NO: 242606 - RNA, 20 nt, Human
gcaggucuucuucagugcuu

SEQ ID NO: 242607 - RNA, 18 nt, Human
gggcagcaggagagugug

SEQ ID NO: 242608 - RNA, 23 nt, Human
gggccggagcugggcaauugaga

SEQ ID NO: 242609 - RNA, 20 nt, Human
uaaaccuccaaaucgcccaa

SEQ ID NO: 242610 - RNA, 21 nt, Human
uaacagagcagggaaaguggu

SEQ ID NO: 242611 - RNA, 24 nt, Human
uaacagagcagggaaaguggugga

SEQ ID NO: 242612 - RNA, 20 nt, Human
uaacauggguuucccaguau

SEQ ID NO: 242613 - RNA, 20 nt, Human
uaaggcaagaauuaacuauu

SEQ ID NO: 242614 - RNA, 18 nt, Human
uccaaaaggaaacaaaga

SEQ ID NO: 242615 - RNA, 25 nt, Human
ucccaguauaaaugaaaagcaagac

SEQ ID NO: 242616 - RNA, 21 nt, Human
ucucaaagaagccaagcaaau

SEQ ID NO: 242617 - RNA, 22 nt, Human
ucucauguauuuuacugcuaug

SEQ ID NO: 242618 - RNA, 18 nt, Human
ucucuggggccuccugac

SEQ ID NO: 242619 - RNA, 18 nt, Human
ucucuucaaacacagagu

SEQ ID NO: 242620 - RNA, 20 nt, Human
ucuggggccuccugaccucc

SEQ ID NO: 242621 - RNA, 20 nt, Human
ugaaaagcaagacucuuacu

SEQ ID NO: 242622 - RNA, 21 nt, Human
ugacucaggucagggcagcag

SEQ ID NO: 242623 - RNA, 23 nt, Human
ugcuauguuguuucacauuucua

SEQ ID NO: 242624 - RNA, 18 nt, Human
uggaacgugcacuggccc

SEQ ID NO: 242625 - RNA, 19 nt, Human
uggaacgugcacuggccca

SEQ ID NO: 242626 - RNA, 22 nt, Human
uggcccaggcccucccacaacc

SEQ ID NO: 242627 - RNA, 23 nt, Human
ugguggauguggcccuggaacgu

SEQ ID NO: 242628 - RNA, 22 nt, Human
uucauucucaaagaagccaagc

SEQ ID NO: 242629 - RNA, 23 nt, Human
uuucuaaaaaaaccuuaauccuc

SEQ ID NO: 242630 - RNA, 21 nt, Human
uuuuuuuuuuucagggggacu

SEQ ID NO: 242631 - RNA, 30 nt, Human
uuuuuuuuuuuuuuuuuuuuuuuucagggg

SEQ ID NO: 242632 - RNA, 22 nt, Human
aaaaaauuauuaauuccucugc

SEQ ID NO: 242633 - RNA, 23 nt, Human
aagaagccaagcaaauccaggua

SEQ ID NO: 242634 - RNA, 24 nt, Human
accauuaaaagaacauuugaacaa

SEQ ID NO: 242635 - RNA, 20 nt, Human
acccaauagacaaggaaccc

SEQ ID NO: 242636 - RNA, 18 nt, Human
agaaccuucacugcugac

SEQ ID NO: 242637 - RNA, 22 nt, Human
agaaccuucacugcugacacug

SEQ ID NO: 242638 - RNA, 22 nt, Human
aggccugccugcuuccuggagc

SEQ ID NO: 242639 - RNA, 22 nt, Human
agggagcaaggauaaaucucca

SEQ ID NO: 242640 - RNA, 24 nt, Human
auaaaucuccaaaucacccaauag

SEQ ID NO: 242641 - RNA, 26 nt, Human
caaaucacccaauagacaaggaaccc

SEQ ID NO: 242642 - RNA, 23 nt, Human
caauagacaaggaacccagagau

SEQ ID NO: 242643 - RNA, 19 nt, Human
cagucaggagcgugggcag

SEQ ID NO: 242644 - RNA, 27 nt, Human
ccuccugguuagccugucccgagaacc

SEQ ID NO: 242645 - RNA, 22 nt, Human
ccucugcucugcgaccugagga

SEQ ID NO: 242646 - RNA, 27 nt, Human
ccugaccccacaaacuuuggccccggc

SEQ ID NO: 242647 - RNA, 24 nt, Human
cgagaaccuucacugcugacacug

SEQ ID NO: 242648 - RNA, 18 nt, Human
cgugggcaggagcugggc

SEQ ID NO: 242649 - RNA, 19 nt, Human
cucacuuccacccacugcc

SEQ ID NO: 242650 - RNA, 20 nt, Human
cuccaaaucacccaauagac

SEQ ID NO: 242651 - RNA, 21 nt, Human
cucccuucucucugaccccca

SEQ ID NO: 242652 - RNA, 18 nt, Human
cuccuguccuccugguua

SEQ ID NO: 242653 - RNA, 19 nt, Human
cugaccauuaaaagaacau

SEQ ID NO: 242654 - RNA, 19 nt, Human
cugagaacacugauugcuc

SEQ ID NO: 242655 - RNA, 22 nt, Human
cugauugcucucuucaaacaca

SEQ ID NO: 242656 - RNA, 26 nt, Human
cugcucuggggccucuuggggcuccu

SEQ ID NO: 242657 - RNA, 18 nt, Human
cuggagcuccuccaccgg

SEQ ID NO: 242658 - RNA, 18 nt, Human
cugggcgauggagaccca

SEQ ID NO: 242659 - RNA, 21 nt, Human
gaacaauuccaaaagggagca

SEQ ID NO: 242660 - RNA, 21 nt, Human
gaccauuaaaagaacauuuga

SEQ ID NO: 242661 - RNA, 20 nt, Human
gauaaaucuccaaaucaccc

SEQ ID NO: 242662 - RNA, 20 nt, Human
gggcagcagucaggagcgug

SEQ ID NO: 242663 - RNA, 25 nt, Human
gggcagcagucaggagcgugggcaa

SEQ ID NO: 242664 - RNA, 22 nt, Human
uaaauaacauaaacagcaauau

SEQ ID NO: 242665 - RNA, 22 nt, Human
uacaugcucaaagaagccaagc

SEQ ID NO: 242666 - RNA, 19 nt, Human
ucaggagcgugggcaggag

SEQ ID NO: 242667 - RNA, 23 nt, Human
ucagugcugcucuggggccucuu

SEQ ID NO: 242668 - RNA, 22 nt, Human
uccccaugugacucaaaagcaa

SEQ ID NO: 242669 - RNA, 25 nt, Human
uccucugcuauguuaucuuguccca

SEQ ID NO: 242670 - RNA, 18 nt, Human
ucucuucaaacacagagc

SEQ ID NO: 242671 - RNA, 24 nt, Human
ucuuggggcuccuguccuccuggg

SEQ ID NO: 242672 - RNA, 23 nt, Human
ugaccccacaaacuuuggccccg

SEQ ID NO: 242673 - RNA, 25 nt, Human
ugauugcucucuucaaacacagagc

SEQ ID NO: 242674 - RNA, 23 nt, Human
ugcucacuuccacccacugccac

SEQ ID NO: 242675 - RNA, 19 nt, Human
ugcuggauggggcccugac

SEQ ID NO: 242676 - RNA, 18 nt, Human
uggauggggcccugaccc

SEQ ID NO: 242677 - RNA, 21 nt, Human
uggauggggcccugaccccac

SEQ ID NO: 242678 - RNA, 23 nt, Human
uggauggggcccugaccccacaa

SEQ ID NO: 242679 - RNA, 24 nt, Human
ugucucagaccaaggccugccugc

SEQ ID NO: 242680 - RNA, 21 nt, Human
ugugacucaaaagcaagaauc

SEQ ID NO: 242681 - RNA, 21 nt, Human
uuacuccuaaauaacauaaaa

SEQ ID NO: 242682 - RNA, 27 nt, Human
uucacaaaauaacagggauuuccccau

SEQ ID NO: 242683 - RNA, 24 nt, Human
uuuuauucuuucaauuuuuauuuc

SEQ ID NO: 242684 - RNA, 20 nt, Human
uuuuuuuuuuuuuuauucuu

SEQ ID NO: 242685 - RNA, 25 nt, Human
aauaaaaggaacauuugaaaaauau

SEQ ID NO: 242686 - RNA, 25 nt, Human
aggaacagcaggcaggagugucagc

SEQ ID NO: 242687 - RNA, 20 nt, Human
caacaaaugugaccaguauc

SEQ ID NO: 242688 - RNA, 22 nt, Human
caggcaggagugucagcagaag

SEQ ID NO: 242689 - RNA, 18 nt, Human
ccauuuagaacagaaaca

SEQ ID NO: 242690 - RNA, 18 nt, Human
cccaaaauacagauaaaa

SEQ ID NO: 242691 - RNA, 20 nt, Human
ccuccaguaacacccagucc

SEQ ID NO: 242692 - RNA, 19 nt, Human
cuuggaacagugacugccc

SEQ ID NO: 242693 - RNA, 24 nt, Human
guaacacccaguccuucacuccuu

SEQ ID NO: 242694 - RNA, 18 nt, Human
uaaaacacagaguaaaag

SEQ ID NO: 242695 - RNA, 19 nt, Human
uaaaacacagaguaaaagc

SEQ ID NO: 242696 - RNA, 21 nt, Human
uaaaaggaacauuugaaaaau

SEQ ID NO: 242697 - RNA, 18 nt, Human
uacaguguguucccucca

SEQ ID NO: 242698 - RNA, 24 nt, Human
uagaacagaaacaaaagguauuau

SEQ ID NO: 242699 - RNA, 22 nt, Human
uaggaaaccaaauauugaccau

SEQ ID NO: 242700 - RNA, 23 nt, Human
uuggaacagugacugcccucuuu

SEQ ID NO: 242701 - RNA, 25 nt, Human
uuuacugcugacuuuuuuuuuuuaa

SEQ ID NO: 242702 - RNA, 21 nt, Human
uuuagaacagaaacaaaaggu

SEQ ID NO: 242703 - RNA, 19 nt, Human
acagcaauaaaugugugau

SEQ ID NO: 242704 - RNA, 26 nt, Human
acagcaauaaaugugugaugcaugcc

SEQ ID NO: 242705 - RNA, 19 nt, Human
acugaacugaguaagacaa

SEQ ID NO: 242706 - RNA, 21 nt, Human
agaaagcagcaggucuuucaa

SEQ ID NO: 242707 - RNA, 24 nt, Human
agcagcaggucuuucaaccacaaa

SEQ ID NO: 242708 - RNA, 23 nt, Human
aggagugggagacacugcuggga

SEQ ID NO: 242709 - RNA, 27 nt, Human
aggcaggaguguaggcagaagggaccc

SEQ ID NO: 242710 - RNA, 19 nt, Human
aguuauuuuaaauuucuaa

SEQ ID NO: 242711 - RNA, 22 nt, Human
caaaaaaagacugaacugagua

SEQ ID NO: 242712 - RNA, 25 nt, Human
caaaaacaaaauuauuaucacuaaa

SEQ ID NO: 242713 - RNA, 18 nt, Human
caaagugaacaauuugcc

SEQ ID NO: 242714 - RNA, 20 nt, Human
cacacugaaacaugccaggc

SEQ ID NO: 242715 - RNA, 21 nt, Human
cacagcaggcaggaguguagg

SEQ ID NO: 242716 - RNA, 23 nt, Human
cacaggaacagagaaagcagcag

SEQ ID NO: 242717 - RNA, 19 nt, Human
caccacacugaaacaugcc

SEQ ID NO: 242718 - RNA, 19 nt, Human
caggcaggaguguaggcag

SEQ ID NO: 242719 - RNA, 26 nt, Human
cucagacuucacaaggagugggagac

SEQ ID NO: 242720 - RNA, 23 nt, Human
cucucucucccucaucucuuaaa

SEQ ID NO: 242721 - RNA, 25 nt, Human
cugauaaacagcaauaaauguguga

SEQ ID NO: 242722 - RNA, 18 nt, Human
gcagaagggcaggugaug

SEQ ID NO: 242723 - RNA, 18 nt, Human
gcaggaguguaggcagaa

SEQ ID NO: 242724 - RNA, 19 nt, Human
gcaggaguguaggcagaag

SEQ ID NO: 242725 - RNA, 21 nt, Human
gcaggaguguaggcagaaggg

SEQ ID NO: 242726 - RNA, 19 nt, Human
ggcaggaguguaggcagaa

SEQ ID NO: 242727 - RNA, 23 nt, Human
gggaagacaauggagacacuguc

SEQ ID NO: 242728 - RNA, 22 nt, Human
gugaugcaugccauuucuaaau

SEQ ID NO: 242729 - RNA, 23 nt, Human
uaaaccaaccugauaaacagcaa

SEQ ID NO: 242730 - RNA, 23 nt, Human
uaucacaaaaauuauuucaggau

SEQ ID NO: 242731 - RNA, 21 nt, Human
uauuuugcucuguaucacaaa

SEQ ID NO: 242732 - RNA, 21 nt, Human
ucacaaggagugggagacacu

SEQ ID NO: 242733 - RNA, 22 nt, Human
ucuuucaaccacaaagugaaca

SEQ ID NO: 242734 - RNA, 21 nt, Human
uggacaccacacugaaacaug

SEQ ID NO: 242735 - RNA, 23 nt, Human
ugggagacacugcuggacaccac

SEQ ID NO: 242736 - RNA, 23 nt, Human
ugucucuggcucucucucccuca

SEQ ID NO: 242737 - RNA, 18 nt, Human
uucucuuaauggagggaa

SEQ ID NO: 242738 - RNA, 27 nt, Human
uuucuauuuuaagaaacaucauggaaa

SEQ ID NO: 242739 - RNA, 22 nt, Human
aacaauccuuuacccacuauuu

SEQ ID NO: 242740 - RNA, 18 nt, Human
aaccaggcccuccaccac

SEQ ID NO: 242741 - RNA, 19 nt, Human
acaugugcgacucaugugc

SEQ ID NO: 242742 - RNA, 18 nt, Human
acuccuggcacugccugg

SEQ ID NO: 242743 - RNA, 23 nt, Human
agaaaaacagcaauacaugugcg

SEQ ID NO: 242744 - RNA, 22 nt, Human
agaaaauuccuacaguaacacc

SEQ ID NO: 242745 - RNA, 23 nt, Human
agaaaauuccuacaguaacacca

SEQ ID NO: 242746 - RNA, 22 nt, Human
agaagguuuucccaauguggug

SEQ ID NO: 242747 - RNA, 21 nt, Human
agguaaaccccauaacuaccc

SEQ ID NO: 242748 - RNA, 24 nt, Human
augaggcagaagguuuucccaaug

SEQ ID NO: 242749 - RNA, 22 nt, Human
caaauagcacuguguucucucc

SEQ ID NO: 242750 - RNA, 28 nt, Human
caaccaggcccuccaccacguagaaacu

SEQ ID NO: 242751 - RNA, 23 nt, Human
caagaaaauuccuacaguaacac

SEQ ID NO: 242752 - RNA, 24 nt, Human
caagaaaauuccuacaguaacacc

SEQ ID NO: 242753 - RNA, 22 nt, Human
caauacaugugcgacucaugug

SEQ ID NO: 242754 - RNA, 25 nt, Human
cagaaaaacagcaauacaugugcga

SEQ ID NO: 242755 - RNA, 21 nt, Human
caugugcgacucaugugcaua

SEQ ID NO: 242756 - RNA, 25 nt, Human
ccacguagaaacucgacugcccccu

SEQ ID NO: 242757 - RNA, 28 nt, Human
cccacuauuuaacugcagaagguuuucc

SEQ ID NO: 242758 - RNA, 22 nt, Human
cucacacccaggucuucaacuc

SEQ ID NO: 242759 - RNA, 20 nt, Human
cuccucccuccgcugaccuu

SEQ ID NO: 242760 - RNA, 18 nt, Human
cugaagcuauuuaaaccu

SEQ ID NO: 242761 - RNA, 23 nt, Human
cuggcacugccugggccuccucu

SEQ ID NO: 242762 - RNA, 19 nt, Human
cuuaaaccagaaaaacagc

SEQ ID NO: 242763 - RNA, 22 nt, Human
gaaaaauacccaaaaguaaaac

SEQ ID NO: 242764 - RNA, 23 nt, Human
gcaaacauuaacaauccuuuacc

SEQ ID NO: 242765 - RNA, 22 nt, Human
gcacuguguucucuccagccuc

SEQ ID NO: 242766 - RNA, 22 nt, Human
gggccuccucugcuguggugcu

SEQ ID NO: 242767 - RNA, 20 nt, Human
guaugugucccucacaccca

SEQ ID NO: 242768 - RNA, 18 nt, Human
uaaaacagguaaacccca

SEQ ID NO: 242769 - RNA, 18 nt, Human
uacagcucuucuucucuu

SEQ ID NO: 242770 - RNA, 23 nt, Human
uacaugugcgacucaugugcaua

SEQ ID NO: 242771 - RNA, 25 nt, Human
uacuuucuucuacuuucuuacguaa

SEQ ID NO: 242772 - RNA, 24 nt, Human
uaugugucccucacacccaggucu

SEQ ID NO: 242773 - RNA, 20 nt, Human
ucccaaugugguguguuugg

SEQ ID NO: 242774 - RNA, 22 nt, Human
ucccaaugugguguguuugggg

SEQ ID NO: 242775 - RNA, 22 nt, Human
uccucugcuguggugcuuuuag

SEQ ID NO: 242776 - RNA, 23 nt, Human
ucuccagccucaaccaggcccuc

SEQ ID NO: 242777 - RNA, 27 nt, Human
ucuccagccucaaccaggcccuccacc

SEQ ID NO: 242778 - RNA, 24 nt, Human
ucuucugggaaccuugacuccugg

SEQ ID NO: 242779 - RNA, 22 nt, Human
ugaaaaauacccaaaaguaaaa

SEQ ID NO: 242780 - RNA, 24 nt, Human
ugaaaaauacccaaaaguaaaaca

SEQ ID NO: 242781 - RNA, 18 nt, Human
ugacuccuggcacugccu

SEQ ID NO: 242782 - RNA, 21 nt, Human
ugagacgauccucgucacaaa

SEQ ID NO: 242783 - RNA, 24 nt, Human
uggaacagaaaugcaaauagcacu

SEQ ID NO: 242784 - RNA, 22 nt, Human
uucaaacucagagggaagaauc

SEQ ID NO: 242785 - RNA, 19 nt, Human
uuugaaaaauacccaaaag

SEQ ID NO: 242786 - RNA, 18 nt, Human
aaagaacaaccgauuaca

SEQ ID NO: 242787 - RNA, 21 nt, Human
aacagagaaccacagaucuca

SEQ ID NO: 242788 - RNA, 25 nt, Human
aauguccccccacccugucaguggc

SEQ ID NO: 242789 - RNA, 18 nt, Human
acaaagccagcacaaagc

SEQ ID NO: 242790 - RNA, 23 nt, Human
acacagaugccaaaauacagaac

SEQ ID NO: 242791 - RNA, 20 nt, Human
accacauaaaaaauguacaa

SEQ ID NO: 242792 - RNA, 20 nt, Human
accaggaacaaaaauguccc

SEQ ID NO: 242793 - RNA, 20 nt, Human
acccgaugccugggccugcu

SEQ ID NO: 242794 - RNA, 23 nt, Human
acuucucuguagacaguuuuuac

SEQ ID NO: 242795 - RNA, 25 nt, Human
agaugccaaaauacagaacagaaca

SEQ ID NO: 242796 - RNA, 28 nt, Human
aguagccgauugaaaucaacaccacagu

SEQ ID NO: 242797 - RNA, 23 nt, Human
augccaaaauacagaacagaaca

SEQ ID NO: 242798 - RNA, 20 nt, Human
auuugccgcugcuaccgggg

SEQ ID NO: 242799 - RNA, 22 nt, Human
caaaacagagaaccacagaucu

SEQ ID NO: 242800 - RNA, 24 nt, Human
caaaacagagaaccacagaucuca

SEQ ID NO: 242801 - RNA, 22 nt, Human
caaaacauaacaauuauaacac

SEQ ID NO: 242802 - RNA, 24 nt, Human
caaagccagcacaaagcugauacc

SEQ ID NO: 242803 - RNA, 24 nt, Human
caacaccacauaaaaaauguacaa

SEQ ID NO: 242804 - RNA, 20 nt, Human
cacaaaacagagaaccacag

SEQ ID NO: 242805 - RNA, 20 nt, Human
cacaaacaccaggaacaaaa

SEQ ID NO: 242806 - RNA, 22 nt, Human
cacaaacaccaggaacaaaaau

SEQ ID NO: 242807 - RNA, 23 nt, Human
caccacauaaaaaauguacaaag

SEQ ID NO: 242808 - RNA, 21 nt, Human
caccaggaacaaaaauguccc

SEQ ID NO: 242809 - RNA, 26 nt, Human
cacccugucaguggccucuggccagg

SEQ ID NO: 242810 - RNA, 25 nt, Human
cagaacagaacaguagccgauugaa

SEQ ID NO: 242811 - RNA, 20 nt, Human
cagagaaccacagaucucac

SEQ ID NO: 242812 - RNA, 19 nt, Human
cagaugccaaaauacagaa

SEQ ID NO: 242813 - RNA, 21 nt, Human
cagcuggaccaaggggggagc

SEQ ID NO: 242814 - RNA, 19 nt, Human
caggaacaaaaaugucccc

SEQ ID NO: 242815 - RNA, 23 nt, Human
caggaacaaaaauguccccccac

SEQ ID NO: 242816 - RNA, 19 nt, Human
caggaaggcuggagcggca

SEQ ID NO: 242817 - RNA, 22 nt, Human
ccagcacaaagcugauaccaaa

SEQ ID NO: 242818 - RNA, 20 nt, Human
cuaccggggguccgggcugg

SEQ ID NO: 242819 - RNA, 18 nt, Human
cucccugaaagggcugcu

SEQ ID NO: 242820 - RNA, 19 nt, Human
gaacaaaaaugucccccca

SEQ ID NO: 242821 - RNA, 21 nt, Human
gcugaaaguauauuuauauau

SEQ ID NO: 242822 - RNA, 21 nt, Human
ggaacacaaacaccaggaaca

SEQ ID NO: 242823 - RNA, 19 nt, Human
ggacccgaugccugggccu

SEQ ID NO: 242824 - RNA, 18 nt, Human
ggagggcggggcucccug

SEQ ID NO: 242825 - RNA, 19 nt, Human
gggagccugccucugggcc

SEQ ID NO: 242826 - RNA, 21 nt, Human
gggggagccugccucugggcc

SEQ ID NO: 242827 - RNA, 20 nt, Human
gggguccgggcugggccugc

SEQ ID NO: 242828 - RNA, 22 nt, Human
guggaacuggaacacaaacacc

SEQ ID NO: 242829 - RNA, 30 nt, Human
uaaaaacacagaugccaaaauacagaacag

SEQ ID NO: 242830 - RNA, 22 nt, Human
uaacacaaaacagagaaccaca

SEQ ID NO: 242831 - RNA, 24 nt, Human
uaacacaaaacagagaaccacaga

SEQ ID NO: 242832 - RNA, 25 nt, Human
uaccagaaaugagauggauagcuuc

SEQ ID NO: 242833 - RNA, 19 nt, Human
ucucacuuaaaaacacaga

SEQ ID NO: 242834 - RNA, 18 nt, Human
ugaaaucaacaccacaua

SEQ ID NO: 242835 - RNA, 20 nt, Human
ugccaaaauacagaacagaa

SEQ ID NO: 242836 - RNA, 22 nt, Human
uggaacacaaacaccaggaaca

SEQ ID NO: 242837 - RNA, 18 nt, Human
uggcagauacgaaaccaa

SEQ ID NO: 242838 - RNA, 19 nt, Human
uggccagggaaacacagga

SEQ ID NO: 242839 - RNA, 25 nt, Human
uuuugggagggcggggcucccugaa

SEQ ID NO: 242840 - RNA, 21 nt, Human
aaagacaaccgagccugaagg

SEQ ID NO: 242841 - RNA, 18 nt, Human
acucccacccacccccca

SEQ ID NO: 242842 - RNA, 22 nt, Human
caaaagacaaccgagccugaac

SEQ ID NO: 242843 - RNA, 20 nt, Human
caaccgagccugaacuucca

SEQ ID NO: 242844 - RNA, 21 nt, Human
caaccgagccugaacuuccaa

SEQ ID NO: 242845 - RNA, 19 nt, Human
caccccccauguccacacc

SEQ ID NO: 242846 - RNA, 21 nt, Human
caccccccauguccacaccaa

SEQ ID NO: 242847 - RNA, 20 nt, Human
caccccccauguccacaccu

SEQ ID NO: 242848 - RNA, 25 nt, Human
ccacccaccccccauguccacacca

SEQ ID NO: 242849 - RNA, 25 nt, Human
ccacccaccccccauguccacacca

SEQ ID NO: 242850 - RNA, 18 nt, Human
cccaaaagacaaccgagc

SEQ ID NO: 242851 - RNA, 22 nt, Human
cccacccaccccccauguccac

SEQ ID NO: 242852 - RNA, 20 nt, Human
cccccauguccacaccaaua

SEQ ID NO: 242853 - RNA, 19 nt, Human
ccgcacugccgccgucugc

SEQ ID NO: 242854 - RNA, 23 nt, Human
cucccacccaccccccaugucca

SEQ ID NO: 242855 - RNA, 24 nt, Human
uaauaaaaauuggauuuuaucaca

SEQ ID NO: 242856 - RNA, 19 nt, Human
ucccaaaagacaaccgagc

SEQ ID NO: 242857 - RNA, 22 nt, Human
ucccacccaccccccaugucca

SEQ ID NO: 242858 - RNA, 21 nt, Human
uucuacucccacccacccccc

SEQ ID NO: 242859 - RNA, 22 nt, Human
uuuuuuuuuuuuuuuuucacau

SEQ ID NO: 242860 - RNA, 24 nt, Human
uuuuuuuuuuuuuuuuuucacaug

SEQ ID NO: 242861 - RNA, 24 nt, Human
acccuaagaucuauaucagacaga

SEQ ID NO: 242862 - RNA, 20 nt, Human
agaauguuuguauauaagcc

SEQ ID NO: 242863 - RNA, 23 nt, Human
auucacugugucuaugauauuga

SEQ ID NO: 242864 - RNA, 23 nt, Human
caauaguaaagauuauuagccua

SEQ ID NO: 242865 - RNA, 22 nt, Human
cagcaaaauuaugcaauaauau

SEQ ID NO: 242866 - RNA, 21 nt, Human
ccgcugaaacaaugagaugag

SEQ ID NO: 242867 - RNA, 20 nt, Human
ccuccuuccucucacccaua

SEQ ID NO: 242868 - RNA, 22 nt, Human
cucacccauacauuuuuucuuc

SEQ ID NO: 242869 - RNA, 25 nt, Human
gagaagaaggagauccuccuuccuc

SEQ ID NO: 242870 - RNA, 20 nt, Human
gcugcugaaugugucucucu

SEQ ID NO: 242871 - RNA, 18 nt, Human
ggagagcaagaaagccag

SEQ ID NO: 242872 - RNA, 20 nt, Human
ggagagcaagaaagccaggc

SEQ ID NO: 242873 - RNA, 19 nt, Human
guucugcucuuuccaccga

SEQ ID NO: 242874 - RNA, 21 nt, Human
uaagaugaacagagccacucc

SEQ ID NO: 242875 - RNA, 19 nt, Human
uaucaguuugggugaaaaa

SEQ ID NO: 242876 - RNA, 18 nt, Human
ucccuggaaaggacuuca

SEQ ID NO: 242877 - RNA, 22 nt, Human
ucccuggaaaggacuucagauu

SEQ ID NO: 242878 - RNA, 22 nt, Human
ucuaugguguucugcucuuucc

SEQ ID NO: 242879 - RNA, 18 nt, Human
ugaaaaaguagagaguag

SEQ ID NO: 242880 - RNA, 23 nt, Human
ugagaagcagcaaaauuaugcaa

SEQ ID NO: 242881 - RNA, 18 nt, Human
ugauauugagaagcagca

SEQ ID NO: 242882 - RNA, 21 nt, Human
uguuuguauauaagccauaua

SEQ ID NO: 242883 - RNA, 22 nt, Human
uuguacauagaauguuuguaua

SEQ ID NO: 242884 - RNA, 20 nt, Human
uuuaagaaauacugucuaag

SEQ ID NO: 242885 - RNA, 20 nt, Human
aaaaaaaaaaaaaaaagcug

SEQ ID NO: 242886 - RNA, 20 nt, Human
aaaacaaaagacaaaccucu

SEQ ID NO: 242887 - RNA, 20 nt, Human
aaaacacaagccguccacua

SEQ ID NO: 242888 - RNA, 22 nt, Human
aaagugaagaacuacuaaacca

SEQ ID NO: 242889 - RNA, 20 nt, Human
aacauggugaaacccugucu

SEQ ID NO: 242890 - RNA, 21 nt, Human
aacauggugaaacccugucuc

SEQ ID NO: 242891 - RNA, 21 nt, Human
aaccagcaucaaacaaacaca

SEQ ID NO: 242892 - RNA, 23 nt, Human
aaccauuaccacuaggauaaauu

SEQ ID NO: 242893 - RNA, 24 nt, Human
aaccauuugggcacauacaacaaa

SEQ ID NO: 242894 - RNA, 23 nt, Human
aagaucaaaacacaagccgucca

SEQ ID NO: 242895 - RNA, 18 nt, Human
aagauuacagagguucau

SEQ ID NO: 242896 - RNA, 24 nt, Human
aaucacuugaacccaggaggugga

SEQ ID NO: 242897 - RNA, 18 nt, Human
aauuagccaggcauggug

SEQ ID NO: 242898 - RNA, 21 nt, Human
acagccagcaaagguuggccc

SEQ ID NO: 242899 - RNA, 23 nt, Human
acauuuuucaacaucuuacaucu

SEQ ID NO: 242900 - RNA, 24 nt, Human
accaacauggugaaacccugucuc

SEQ ID NO: 242901 - RNA, 24 nt, Human
acccugucucuacuaauacuacaa

SEQ ID NO: 242902 - RNA, 24 nt, Human
accugaggucaggaguuugagacc

SEQ ID NO: 242903 - RNA, 19 nt, Human
acuaaaacacucuaaacau

SEQ ID NO: 242904 - RNA, 24 nt, Human
acuccagccuggacacaagaguga

SEQ ID NO: 242905 - RNA, 20 nt, Human
acugcacuccagccuggaca

SEQ ID NO: 242906 - RNA, 23 nt, Human
acugcacuccagccuggacacaa

SEQ ID NO: 242907 - RNA, 26 nt, Human
acugcacuccagccuggacacaagag

SEQ ID NO: 242908 - RNA, 23 nt, Human
agaaaguggcagauuuaaacaga

SEQ ID NO: 242909 - RNA, 22 nt, Human
agauagugccacugcacuccag

SEQ ID NO: 242910 - RNA, 19 nt, Human
agcaaaugugaaggucaga

SEQ ID NO: 242911 - RNA, 23 nt, Human
agccaggcaugguggcacacgcc

SEQ ID NO: 242912 - RNA, 24 nt, Human
agccguccacuaaaaucaaguggc

SEQ ID NO: 242913 - RNA, 24 nt, Human
agccugaccaacauggugaaaccc

SEQ ID NO: 242914 - RNA, 20 nt, Human
aggaguuugagaccagccug

SEQ ID NO: 242915 - RNA, 18 nt, Human
aggcaggagaaucacuug

SEQ ID NO: 242916 - RNA, 23 nt, Human
aggcaggagaaucacuugaaccc

SEQ ID NO: 242917 - RNA, 24 nt, Human
aggcaggagaaucacuugaaccca

SEQ ID NO: 242918 - RNA, 18 nt, Human
aggcagguggaucaccug

SEQ ID NO: 242919 - RNA, 22 nt, Human
aggcagguggaucaccugaggu

SEQ ID NO: 242920 - RNA, 26 nt, Human
aggcagguggaucaccugaggucagg

SEQ ID NO: 242921 - RNA, 21 nt, Human
aggccgaggcagguggaucac

SEQ ID NO: 242922 - RNA, 24 nt, Human
aggcugaggcaggagaaucacuug

SEQ ID NO: 242923 - RNA, 19 nt, Human
agguggagguugcaguaag

SEQ ID NO: 242924 - RNA, 24 nt, Human
agguggagguugcaguaagccaag

SEQ ID NO: 242925 - RNA, 22 nt, Human
agguggaucaccugaggucagg

SEQ ID NO: 242926 - RNA, 24 nt, Human
auagugccacugcacuccagccug

SEQ ID NO: 242927 - RNA, 23 nt, Human
caaaacacaagccguccacuaaa

SEQ ID NO: 242928 - RNA, 21 nt, Human
caaaauggcagcgcagagccc

SEQ ID NO: 242929 - RNA, 20 nt, Human
caaacacaguuuccagaacu

SEQ ID NO: 242930 - RNA, 24 nt, Human
caacauggugaaacccugucucua

SEQ ID NO: 242931 - RNA, 24 nt, Human
caacugcuguacaaaaacaaaaga

SEQ ID NO: 242932 - RNA, 29 nt, Human
caagaucaaaacacaagccguccacuaag

SEQ ID NO: 242933 - RNA, 23 nt, Human
caaugaaccagcaucaaacaaac

SEQ ID NO: 242934 - RNA, 24 nt, Human
cacaccuguaagcccugcacuuug

SEQ ID NO: 242935 - RNA, 20 nt, Human
cacauacaacaaaugaaaac

SEQ ID NO: 242936 - RNA, 23 nt, Human
caccugaggucaggaguuugaga

SEQ ID NO: 242937 - RNA, 23 nt, Human
caccuguaagcccugcacuuugg

SEQ ID NO: 242938 - RNA, 24 nt, Human
caccuguaagcccugcacuuuggg

SEQ ID NO: 242939 - RNA, 19 nt, Human
cacgccucuaaucccagcu

SEQ ID NO: 242940 - RNA, 22 nt, Human
cacuccagccuggacacaagag

SEQ ID NO: 242941 - RNA, 22 nt, Human
cacuccagccuggacacaagag

SEQ ID NO: 242942 - RNA, 22 nt, Human
cacuccagccuggacacaagag

SEQ ID NO: 242943 - RNA, 24 nt, Human
cacuccagccuggacacaagagug

SEQ ID NO: 242944 - RNA, 18 nt, Human
cacugcacuccagccugg

SEQ ID NO: 242945 - RNA, 19 nt, Human
cacugcacuccagccugga

SEQ ID NO: 242946 - RNA, 21 nt, Human
cacugcacuccagccuggaca

SEQ ID NO: 242947 - RNA, 24 nt, Human
cacugcacuccagccuggacacaa

SEQ ID NO: 242948 - RNA, 21 nt, Human
cacuggugacagguuugucau

SEQ ID NO: 242949 - RNA, 24 nt, Human
cagaaacaaaacaauuugaaaagu

SEQ ID NO: 242950 - RNA, 20 nt, Human
cagcaugagcuggcuugggg

SEQ ID NO: 242951 - RNA, 24 nt, Human
cagcuacucgggaggcugaggcag

SEQ ID NO: 242952 - RNA, 29 nt, Human
caggagguggagguugcaguaacaacggu

SEQ ID NO: 242953 - RNA, 24 nt, Human
cagguggaucaccugaggucagga

SEQ ID NO: 242954 - RNA, 19 nt, Human
cauuuucuggaaguuguuu

SEQ ID NO: 242955 - RNA, 19 nt, Human
ccacugcacuccagccugg

SEQ ID NO: 242956 - RNA, 19 nt, Human
ccacugcacuccagccugg

SEQ ID NO: 242957 - RNA, 20 nt, Human
ccacugcacuccagccugga

SEQ ID NO: 242958 - RNA, 21 nt, Human
ccacugcacuccagccuggac

SEQ ID NO: 242959 - RNA, 18 nt, Human
ccaguccagaaaguggca

SEQ ID NO: 242960 - RNA, 21 nt, Human
cccaggagguggagguugcag

SEQ ID NO: 242961 - RNA, 23 nt, Human
cccauauaucaacacugugggca

SEQ ID NO: 242962 - RNA, 24 nt, Human
cccccaagauuacagagguucaug

SEQ ID NO: 242963 - RNA, 18 nt, Human
ccucaaaaaaaaaaaaaa

SEQ ID NO: 242964 - RNA, 22 nt, Human
ccugaccaacauggugaaaccc

SEQ ID NO: 242965 - RNA, 24 nt, Human
ccugaccaacauggugaaacccug

SEQ ID NO: 242966 - RNA, 22 nt, Human
ccugaggucaggaguuugagac

SEQ ID NO: 242967 - RNA, 20 nt, Human
cgaggcagguggaucaccug

SEQ ID NO: 242968 - RNA, 24 nt, Human
cgaggcagguggaucaccugaggu

SEQ ID NO: 242969 - RNA, 23 nt, Human
cgccucuaaucccagcuacucgg

SEQ ID NO: 242970 - RNA, 24 nt, Human
cgccucuaaucccagcuacucggg

SEQ ID NO: 242971 - RNA, 24 nt, Human
cgggaggcugaggcaggagaauca

SEQ ID NO: 242972 - RNA, 19 nt, Human
cuaaaaaaaaaaaaaaaaa

SEQ ID NO: 242973 - RNA, 18 nt, Human
cucaaaaaaaaaaaaaaa

SEQ ID NO: 242974 - RNA, 24 nt, Human
cugaccaacauggugaaacccugu

SEQ ID NO: 242975 - RNA, 26 nt, Human
cugcacuuugggaggccgaggcaggu

SEQ ID NO: 242976 - RNA, 19 nt, Human
cuggcacacuucaucuuug

SEQ ID NO: 242977 - RNA, 21 nt, Human
cuuccagaacucaguagaaau

SEQ ID NO: 242978 - RNA, 21 nt, Human
cuugaacccaggagguggagg

SEQ ID NO: 242979 - RNA, 21 nt, Human
gaaaaguccaaugaaccagca

SEQ ID NO: 242980 - RNA, 19 nt, Human
gaaacccugucucuacuaa

SEQ ID NO: 242981 - RNA, 18 nt, Human
gaaccacagcugacagcc

SEQ ID NO: 242982 - RNA, 26 nt, Human
gacacagaaacaaaacagcagggacu

SEQ ID NO: 242983 - RNA, 22 nt, Human
gacagccagcaaagguuggccc

SEQ ID NO: 242984 - RNA, 23 nt, Human
gagaaucacuugaacccaggagg

SEQ ID NO: 242985 - RNA, 25 nt, Human
gaggcagguggaucaccugagguca

SEQ ID NO: 242986 - RNA, 18 nt, Human
gagguugcaguaagccaa

SEQ ID NO: 242987 - RNA, 21 nt, Human
gagguugcaguaagccaagau

SEQ ID NO: 242988 - RNA, 24 nt, Human
gaucaccugaggucaggaguuuga

SEQ ID NO: 242989 - RNA, 22 nt, Human
gcaaugcuguaggguuucacac

SEQ ID NO: 242990 - RNA, 19 nt, Human
gcacauacaacaaaugaaa

SEQ ID NO: 242991 - RNA, 24 nt, Human
gcacuccagccuggacacaagagu

SEQ ID NO: 242992 - RNA, 22 nt, Human
gcacuuugggaggccgaggcag

SEQ ID NO: 242993 - RNA, 22 nt, Human
gcaggagaaucacuugaaccca

SEQ ID NO: 242994 - RNA, 20 nt, Human
gccuggacacaagagugaaa

SEQ ID NO: 242995 - RNA, 18 nt, Human
ggagguugcaguaagcca

SEQ ID NO: 242996 - RNA, 20 nt, Human
ggagguugcaguaagccaag

SEQ ID NO: 242997 - RNA, 22 nt, Human
ggaucaccugaggucaggaguu

SEQ ID NO: 242998 - RNA, 23 nt, Human
ggcacuguggcucacaccuguaa

SEQ ID NO: 242999 - RNA, 19 nt, Human
ggcuugggggaaccagcug

SEQ ID NO: 243000 - RNA, 19 nt, Human
ggucaggaguuugagacca

SEQ ID NO: 243001 - RNA, 23 nt, Human
uaaaaaaaaaaaaaaaaagcugg

SEQ ID NO: 243002 - RNA, 25 nt, Human
uaaccauuaccacuaggauaaauua

SEQ ID NO: 243003 - RNA, 23 nt, Human
uaagaaaaugcauuucuuggaaa

SEQ ID NO: 243004 - RNA, 19 nt, Human
uacuaugugauaucacugc

SEQ ID NO: 243005 - RNA, 20 nt, Human
uacuaugugauaucacugcc

SEQ ID NO: 243006 - RNA, 21 nt, Human
uacuggucaagaucaaaacac

SEQ ID NO: 243007 - RNA, 21 nt, Human
uagaaaaacaaauaauugcaa

SEQ ID NO: 243008 - RNA, 19 nt, Human
uagcaugaaggaaucgggc

SEQ ID NO: 243009 - RNA, 19 nt, Human
uagcuucaaaguagaaaaa

SEQ ID NO: 243010 - RNA, 20 nt, Human
ucaaaaaaaaaaaaaaagau

SEQ ID NO: 243011 - RNA, 19 nt, Human
ucaaaacacaagccgucca

SEQ ID NO: 243012 - RNA, 23 nt, Human
ucaaacaaacacaguuuccagaa

SEQ ID NO: 243013 - RNA, 19 nt, Human
ucaccugaggucaggaguu

SEQ ID NO: 243014 - RNA, 18 nt, Human
ucagagcugagucagugg

SEQ ID NO: 243015 - RNA, 20 nt, Human
ucaguagaaauagacauuug

SEQ ID NO: 243016 - RNA, 24 nt, Human
ucccaguaacaaaagacugcacag

SEQ ID NO: 243017 - RNA, 21 nt, Human
uccucacacuguuguugcuac

SEQ ID NO: 243018 - RNA, 22 nt, Human
ucgccucaaaaaaaaaaaaaaa

SEQ ID NO: 243019 - RNA, 25 nt, Human
ucgggaggcugaggcaggagaauca

SEQ ID NO: 243020 - RNA, 24 nt, Human
ucuaaaaaaaaaaaaaaaaagcuu

SEQ ID NO: 243021 - RNA, 22 nt, Human
ucucccccaagauuacagaggu

SEQ ID NO: 243022 - RNA, 24 nt, Human
ugaaaacuaaaacacucuaaacau

SEQ ID NO: 243023 - RNA, 24 nt, Human
ugaccaacauggugaaacccuguc

SEQ ID NO: 243024 - RNA, 18 nt, Human
ugagccugaccaacaugg

SEQ ID NO: 243025 - RNA, 22 nt, Human
ugagcuggcuugggggaaccag

SEQ ID NO: 243026 - RNA, 20 nt, Human
ugaggcaggagaaucacuug

SEQ ID NO: 243027 - RNA, 24 nt, Human
ugaggcaggagaaucacuugaacc

SEQ ID NO: 243028 - RNA, 25 nt, Human
ugaggcaggagaaucacuugaaccc

SEQ ID NO: 243029 - RNA, 18 nt, Human
ugaggucaggaguuugag

SEQ ID NO: 243030 - RNA, 24 nt, Human
ugccacugcacuccagccuggaca

SEQ ID NO: 243031 - RNA, 21 nt, Human
ugccccagcagcugaacgcac

SEQ ID NO: 243032 - RNA, 21 nt, Human
ugccuuuguauaaugcccaca

SEQ ID NO: 243033 - RNA, 23 nt, Human
uggaucaccugaggucaggaguu

SEQ ID NO: 243034 - RNA, 24 nt, Human
uggaucaccugaggucaggaguuu

SEQ ID NO: 243035 - RNA, 27 nt, Human
uggaucaccugaggucaggaguuugag

SEQ ID NO: 243036 - RNA, 22 nt, Human
uggcacacgccucuaaucccag

SEQ ID NO: 243037 - RNA, 24 nt, Human
ugggaggccgaggcagguggauca

SEQ ID NO: 243038 - RNA, 18 nt, Human
ugggcacuguggcucaca

SEQ ID NO: 243039 - RNA, 23 nt, Human
uguacaaaaacaaaagacaaacc

SEQ ID NO: 243040 - RNA, 22 nt, Human
uguacaaauacauauaaccauu

SEQ ID NO: 243041 - RNA, 21 nt, Human
uguacuggucaagaucaaaac

SEQ ID NO: 243042 - RNA, 21 nt, Human
ugucauugacaaaauggcagc

SEQ ID NO: 243043 - RNA, 27 nt, Human
uguuacaaagucacaaaauacauaaaa

SEQ ID NO: 243044 - RNA, 18 nt, Human
uucaaaguagaaaaacaa

SEQ ID NO: 243045 - RNA, 21 nt, Human
uucaucuuugugucugguagg

SEQ ID NO: 243046 - RNA, 25 nt, Human
uucgaagugucuauuuaaaauacca

SEQ ID NO: 243047 - RNA, 22 nt, Human
uugaaaugacuuccuuguugaa

SEQ ID NO: 243048 - RNA, 24 nt, Human
uugaacccaggagguggagguugc

SEQ ID NO: 243049 - RNA, 20 nt, Human
uugaagucaucaagccauug

SEQ ID NO: 243050 - RNA, 25 nt, Human
uugggaggccgaggcagguggauca

SEQ ID NO: 243051 - RNA, 21 nt, Human
uuuacaguacuaagguccagu

SEQ ID NO: 243052 - RNA, 22 nt, Human
uuucuggaaguuguuuuuuuuu

SEQ ID NO: 243053 - RNA, 24 nt, Human
uuugaaaaguccaaugaaccagca

SEQ ID NO: 243054 - RNA, 18 nt, Human
uuuuuuuuuaaggguucu

SEQ ID NO: 243055 - RNA, 20 nt, Human
aaacacagcacccacgagca

SEQ ID NO: 243056 - RNA, 19 nt, Human
aacaggaggugacccuagc

SEQ ID NO: 243057 - RNA, 22 nt, Human
acaauaccaacagguaguucuc

SEQ ID NO: 243058 - RNA, 20 nt, Human
acgggagaguaaacacagca

SEQ ID NO: 243059 - RNA, 23 nt, Human
agaacauccaugaagacuuaaaa

SEQ ID NO: 243060 - RNA, 18 nt, Human
aucgucuuccaccaugga

SEQ ID NO: 243061 - RNA, 25 nt, Human
augccggaaaguggggcggccaguu

SEQ ID NO: 243062 - RNA, 21 nt, Human
caaacaggaggugacccuagc

SEQ ID NO: 243063 - RNA, 22 nt, Human
caacccggacgcgaaggcacac

SEQ ID NO: 243064 - RNA, 20 nt, Human
caauaccaacagguaguucu

SEQ ID NO: 243065 - RNA, 18 nt, Human
cacacgggagaguaaaca

SEQ ID NO: 243066 - RNA, 22 nt, Human
cacagcacccacgagcaacagg

SEQ ID NO: 243067 - RNA, 24 nt, Human
cagggcagggcuuuuuuuuuuggg

SEQ ID NO: 243068 - RNA, 22 nt, Human
ccaacccggacgcgaaggcaca

SEQ ID NO: 243069 - RNA, 22 nt, Human
cccccgaacaagaagguccccu

SEQ ID NO: 243070 - RNA, 22 nt, Human
ccggaaaguggggcggccaguu

SEQ ID NO: 243071 - RNA, 20 nt, Human
ccuucucaggucacgguggc

SEQ ID NO: 243072 - RNA, 22 nt, Human
ccuuucacaaacaggaggugac

SEQ ID NO: 243073 - RNA, 25 nt, Human
cgagcaacagggcagggcuuuuuuu

SEQ ID NO: 243074 - RNA, 19 nt, Human
cuagcagacagcacagcag

SEQ ID NO: 243075 - RNA, 20 nt, Human
cuugggacgggacgagcgcc

SEQ ID NO: 243076 - RNA, 21 nt, Human
cuuuccuucucaggucacggu

SEQ ID NO: 243077 - RNA, 19 nt, Human
gaagacuuaaaacauggca

SEQ ID NO: 243078 - RNA, 25 nt, Human
gcagaacauccaugaagacuuaaaa

SEQ ID NO: 243079 - RNA, 21 nt, Human
ggcacacgggagaguaaacac

SEQ ID NO: 243080 - RNA, 19 nt, Human
guggccacuucccaccccc

SEQ ID NO: 243081 - RNA, 23 nt, Human
uccaugaagacuuaaaacauggc

SEQ ID NO: 243082 - RNA, 24 nt, Human
uccgcaugacaugcagaacaucca

SEQ ID NO: 243083 - RNA, 22 nt, Human
ucuuucuuuccuucucagguca

SEQ ID NO: 243084 - RNA, 20 nt, Human
ugaagacuuaaaacauggca

SEQ ID NO: 243085 - RNA, 19 nt, Human
ugaguuuuaguccgcauga

SEQ ID NO: 243086 - RNA, 19 nt, Human
ugcuccaggggucagcaga

SEQ ID NO: 243087 - RNA, 19 nt, Human
uggaaagaucuguugggug

SEQ ID NO: 243088 - RNA, 18 nt, Human
uggccacuucccaccccc

SEQ ID NO: 243089 - RNA, 19 nt, Human
uggguuuucagcucaaguu

SEQ ID NO: 243090 - RNA, 19 nt, Human
uucacaaacaggaggugac

SEQ ID NO: 243091 - RNA, 22 nt, Human
uuucacaaacaggaggugaccc

SEQ ID NO: 243092 - RNA, 19 nt, Human
uuugggcagugggggggug

SEQ ID NO: 243093 - RNA, 22 nt, Human
uuuucagcucaaguucuacugc

SEQ ID NO: 243094 - RNA, 23 nt, Human
uuuuuuuugggcagugggggggu

SEQ ID NO: 243095 - RNA, 22 nt, Human
uuuuuuuuuugggcaguggggg

SEQ ID NO: 243096 - RNA, 27 nt, Human
uuuuuuuuuugggcagugggggggugg

SEQ ID NO: 243097 - RNA, 23 nt, Human
accccggacugccggggcucccg

SEQ ID NO: 243098 - RNA, 23 nt, Human
agaaagaggaagucuguaauuaa

SEQ ID NO: 243099 - RNA, 20 nt, Human
agccgcggaggcaggggcgg

SEQ ID NO: 243100 - RNA, 22 nt, Human
aggcaggggcggaagaagggac

SEQ ID NO: 243101 - RNA, 20 nt, Human
ccgccccgucacgggccucg

SEQ ID NO: 243102 - RNA, 20 nt, Human
cggaagaacaaaucuggcag

SEQ ID NO: 243103 - RNA, 20 nt, Human
cggcgaccccggacugccgg

SEQ ID NO: 243104 - RNA, 22 nt, Human
cggggcucccgcccgccccguc

SEQ ID NO: 243105 - RNA, 23 nt, Human
cgucacgggccucggccccgggg

SEQ ID NO: 243106 - RNA, 22 nt, Human
cuggcagcgcggcacggcccuc

SEQ ID NO: 243107 - RNA, 18 nt, Human
gccggggcucccgcccgc

SEQ ID NO: 243108 - RNA, 22 nt, Human
gccuccgagccgcggaggcagg

SEQ ID NO: 243109 - RNA, 26 nt, Human
uacauauacaaauuugccuuuucaca

SEQ ID NO: 243110 - RNA, 24 nt, Human
uaugaaacaguuacuacuauucuu

SEQ ID NO: 243111 - RNA, 19 nt, Human
ucccgcccgccccgucacg

SEQ ID NO: 243112 - RNA, 22 nt, Human
ucgccggcgaccccggacugcc

SEQ ID NO: 243113 - RNA, 21 nt, Human
aaacuuaucauagcuccccca

SEQ ID NO: 243114 - RNA, 23 nt, Human
aaagcugacaaagagcagaaaca

SEQ ID NO: 243115 - RNA, 19 nt, Human
aaauggcuauuagaaaaga

SEQ ID NO: 243116 - RNA, 22 nt, Human
aacacacauauaaaggaucaua

SEQ ID NO: 243117 - RNA, 18 nt, Human
aaccucucauccccucac

SEQ ID NO: 243118 - RNA, 26 nt, Human
aaccucucauccccucaccgcgacuc

SEQ ID NO: 243119 - RNA, 23 nt, Human
aagaagugcaagucaucugacau

SEQ ID NO: 243120 - RNA, 21 nt, Human
aaucaccaugauggcacagau

SEQ ID NO: 243121 - RNA, 19 nt, Human
acaaagagcagaaacaaaa

SEQ ID NO: 243122 - RNA, 21 nt, Human
acggccgcgccaugcccccga

SEQ ID NO: 243123 - RNA, 25 nt, Human
agaaaggaugucuuaguguuauaaa

SEQ ID NO: 243124 - RNA, 23 nt, Human
agacccugcccagggccaggccu

SEQ ID NO: 243125 - RNA, 24 nt, Human
aggcggagugcagggccagcgagc

SEQ ID NO: 243126 - RNA, 19 nt, Human
aggggugggagacggggca

SEQ ID NO: 243127 - RNA, 21 nt, Human
agugcagggccagcgagcccc

SEQ ID NO: 243128 - RNA, 25 nt, Human
agugcagggccagcgagccccgggg

SEQ ID NO: 243129 - RNA, 21 nt, Human
auaaaaguaaaaaauauacag

SEQ ID NO: 243130 - RNA, 21 nt, Human
auacauguucagagaaaacug

SEQ ID NO: 243131 - RNA, 20 nt, Human
aucugagccacuuuucagca

SEQ ID NO: 243132 - RNA, 21 nt, Human
augaacacuaaaaacacuaca

SEQ ID NO: 243133 - RNA, 20 nt, Human
cacaacugcacagugaccac

SEQ ID NO: 243134 - RNA, 19 nt, Human
caccgcgacucaggcuggu

SEQ ID NO: 243135 - RNA, 23 nt, Human
cacugugucgccggccccaggac

SEQ ID NO: 243136 - RNA, 19 nt, Human
cagaacacucugcaucuga

SEQ ID NO: 243137 - RNA, 24 nt, Human
cagcauucucuuuucucuccacca

SEQ ID NO: 243138 - RNA, 20 nt, Human
cagcucccuggggggacccc

SEQ ID NO: 243139 - RNA, 19 nt, Human
cagguacugaugccagcag

SEQ ID NO: 243140 - RNA, 19 nt, Human
cauuguuuuccgcgcuacc

SEQ ID NO: 243141 - RNA, 24 nt, Human
ccaaaacacacauauaaaggauca

SEQ ID NO: 243142 - RNA, 18 nt, Human
ccacagacccugcccagg

SEQ ID NO: 243143 - RNA, 24 nt, Human
ccagcacugggguaaguggagcag

SEQ ID NO: 243144 - RNA, 22 nt, Human
ccagggccaggccucaccugga

SEQ ID NO: 243145 - RNA, 24 nt, Human
ccagggccaggccucaccuggagc

SEQ ID NO: 243146 - RNA, 19 nt, Human
ccaguggccuccuucuccc

SEQ ID NO: 243147 - RNA, 20 nt, Human
ccauauguagccuggggucc

SEQ ID NO: 243148 - RNA, 18 nt, Human
cccacaucucuaccuucc

SEQ ID NO: 243149 - RNA, 22 nt, Human
cccagcuccccaggccaugggc

SEQ ID NO: 243150 - RNA, 23 nt, Human
ccccaaaacacacauauaaagga

SEQ ID NO: 243151 - RNA, 22 nt, Human
ccccauuguuuuccgcgcuacc

SEQ ID NO: 243152 - RNA, 22 nt, Human
cccccacaucucuaccuuccau

SEQ ID NO: 243153 - RNA, 23 nt, Human
cccccagccggcgcuugcugccu

SEQ ID NO: 243154 - RNA, 19 nt, Human
ccccgcucggcccgacccc

SEQ ID NO: 243155 - RNA, 20 nt, Human
ccgcugaggucacccucuuc

SEQ ID NO: 243156 - RNA, 28 nt, Human
ccggccuacggccuccuuccccaaaacc

SEQ ID NO: 243157 - RNA, 23 nt, Human
ccucaagccucggccucucccca

SEQ ID NO: 243158 - RNA, 22 nt, Human
ccucacggccgcgccaugcccc

SEQ ID NO: 243159 - RNA, 22 nt, Human
ccuccccugacucccgaaaacc

SEQ ID NO: 243160 - RNA, 21 nt, Human
ccucggccucuccccaccgcc

SEQ ID NO: 243161 - RNA, 21 nt, Human
ccucucauccccucaccgcga

SEQ ID NO: 243162 - RNA, 18 nt, Human
ccuggaagacggggcugu

SEQ ID NO: 243163 - RNA, 20 nt, Human
ccugggguccugcugccagg

SEQ ID NO: 243164 - RNA, 21 nt, Human
cgaaaaccagguucauaaaua

SEQ ID NO: 243165 - RNA, 19 nt, Human
cgcagccacagacccugcc

SEQ ID NO: 243166 - RNA, 23 nt, Human
cggccuacggccuccuuccccaa

SEQ ID NO: 243167 - RNA, 18 nt, Human
cggggccggcuggcacug

SEQ ID NO: 243168 - RNA, 24 nt, Human
cguuuuccaaaaacagcucacaug

SEQ ID NO: 243169 - RNA, 21 nt, Human
cucacggccgcgccaugcccc

SEQ ID NO: 243170 - RNA, 21 nt, Human
cucacggccgcgccaugccuu

SEQ ID NO: 243171 - RNA, 21 nt, Human
cuccaggauacaggaccccca

SEQ ID NO: 243172 - RNA, 21 nt, Human
cuccaggauacaggaccccca

SEQ ID NO: 243173 - RNA, 22 nt, Human
cuccccgcggcuaccccucucc

SEQ ID NO: 243174 - RNA, 24 nt, Human
cuccccgcggcuaccccucuccgc

SEQ ID NO: 243175 - RNA, 22 nt, Human
cucggcccgacccccagccggc

SEQ ID NO: 243176 - RNA, 20 nt, Human
cucuaccugcccagcucccc

SEQ ID NO: 243177 - RNA, 21 nt, Human
cucucauccccucaccgcgac

SEQ ID NO: 243178 - RNA, 18 nt, Human
cucuccccaccgccccgg

SEQ ID NO: 243179 - RNA, 24 nt, Human
cugcuaggaagacccuagcugugu

SEQ ID NO: 243180 - RNA, 18 nt, Human
cugugcuuaccacuuugc

SEQ ID NO: 243181 - RNA, 24 nt, Human
cuucgcuccccgcggcuaccccuc

SEQ ID NO: 243182 - RNA, 19 nt, Human
cuuugagagcuaaacugag

SEQ ID NO: 243183 - RNA, 18 nt, Human
gaaggagaggcagacaga

SEQ ID NO: 243184 - RNA, 20 nt, Human
gacaggggugggagacgggg

SEQ ID NO: 243185 - RNA, 22 nt, Human
gacccccagccggcgcuugcug

SEQ ID NO: 243186 - RNA, 21 nt, Human
gagcagaaacaaaaaaggcuc

SEQ ID NO: 243187 - RNA, 22 nt, Human
gagcagaaacaaaaaaggcucu

SEQ ID NO: 243188 - RNA, 25 nt, Human
gauaaaacaaggaaaguaaagauuu

SEQ ID NO: 243189 - RNA, 20 nt, Human
gaucauaguuuuaaaaucua

SEQ ID NO: 243190 - RNA, 23 nt, Human
gcaacauacauguucagagaaaa

SEQ ID NO: 243191 - RNA, 21 nt, Human
gcagacagaaaggccaacggu

SEQ ID NO: 243192 - RNA, 22 nt, Human
gcagggccagcgagccccgggg

SEQ ID NO: 243193 - RNA, 19 nt, Human
gccucaccuggagcuuggg

SEQ ID NO: 243194 - RNA, 20 nt, Human
gccuccuuccccaaaaccuu

SEQ ID NO: 243195 - RNA, 19 nt, Human
gcgcagccacagacccugc

SEQ ID NO: 243196 - RNA, 24 nt, Human
gcggguuuuccuccugccccgcuc

SEQ ID NO: 243197 - RNA, 26 nt, Human
gcucucuccaucuucguuuuccaaaa

SEQ ID NO: 243198 - RNA, 31 nt, Human
gcugcaguuucuccacagaacacucugaucc

SEQ ID NO: 243199 - RNA, 21 nt, Human
gcuugcugccuaccucaagcc

SEQ ID NO: 243200 - RNA, 21 nt, Human
ggcagaaguugucaaaccaag

SEQ ID NO: 243201 - RNA, 19 nt, Human
ggccuccuuccccaaaacc

SEQ ID NO: 243202 - RNA, 20 nt, Human
gggagacggggcagcagcca

SEQ ID NO: 243203 - RNA, 19 nt, Human
gggcgcagccacagacccu

SEQ ID NO: 243204 - RNA, 22 nt, Human
gggcugcacgggccgggcccgg

SEQ ID NO: 243205 - RNA, 22 nt, Human
gggcugcaguuucuccacaggu

SEQ ID NO: 243206 - RNA, 20 nt, Human
gggucaggagaggaacaagg

SEQ ID NO: 243207 - RNA, 18 nt, Human
ggguuucacugguguuac

SEQ ID NO: 243208 - RNA, 19 nt, Human
gucaucuccuccccugacu

SEQ ID NO: 243209 - RNA, 19 nt, Human
gucugagcacccuuuucuu

SEQ ID NO: 243210 - RNA, 30 nt, Human
gugggguuucacugguguuacuguugggac

SEQ ID NO: 243211 - RNA, 30 nt, Human
gugggguuucacugguguuacuguugggau

SEQ ID NO: 243212 - RNA, 23 nt, Human
guugcucuuucuuugaaucugag

SEQ ID NO: 243213 - RNA, 25 nt, Human
uaaaacuuaucauagcucccccaaa

SEQ ID NO: 243214 - RNA, 23 nt, Human
uaaaaguaaaaaauauacaguug

SEQ ID NO: 243215 - RNA, 19 nt, Human
uaaggcggagugcagggcc

SEQ ID NO: 243216 - RNA, 23 nt, Human
uaagggcaguagaagaauauggg

SEQ ID NO: 243217 - RNA, 20 nt, Human
uacacaaagcaaauguguau

SEQ ID NO: 243218 - RNA, 22 nt, Human
uaccccucuccgccucacggcc

SEQ ID NO: 243219 - RNA, 24 nt, Human
uacgcagucaacagccugcacuua

SEQ ID NO: 243220 - RNA, 18 nt, Human
uaggaagacccuagcugu

SEQ ID NO: 243221 - RNA, 24 nt, Human
uaucauagcucccccaaaacacac

SEQ ID NO: 243222 - RNA, 21 nt, Human
ucacaugucauauucuauuuc

SEQ ID NO: 243223 - RNA, 22 nt, Human
uccagggaaacagaaguggggc

SEQ ID NO: 243224 - RNA, 19 nt, Human
ucccccaaaacacacauau

SEQ ID NO: 243225 - RNA, 21 nt, Human
uccgcgcuaccgccgcggccg

SEQ ID NO: 243226 - RNA, 18 nt, Human
uccugcugucccaacacc

SEQ ID NO: 243227 - RNA, 23 nt, Human
uccugggggccuugggagggagg

SEQ ID NO: 243228 - RNA, 25 nt, Human
ucgcgcgcggcggcggguuuuccuc

SEQ ID NO: 243229 - RNA, 20 nt, Human
ucuaugcuacaaauugcaaa

SEQ ID NO: 243230 - RNA, 18 nt, Human
ucucacauaggacacucc

SEQ ID NO: 243231 - RNA, 22 nt, Human
ucucacccugugcuuaccacuu

SEQ ID NO: 243232 - RNA, 19 nt, Human
ucuccacagaacacucugc

SEQ ID NO: 243233 - RNA, 18 nt, Human
ucucuuuucucuccacca

SEQ ID NO: 243234 - RNA, 21 nt, Human
ugacaaagagcagaaacaaaa

SEQ ID NO: 243235 - RNA, 24 nt, Human
ugacaaagagcagaaacaaaaaag

SEQ ID NO: 243236 - RNA, 18 nt, Human
ugagaauaaaaauauagg

SEQ ID NO: 243237 - RNA, 21 nt, Human
ugagagcuaaacugaguacau

SEQ ID NO: 243238 - RNA, 19 nt, Human
ugcccagcuccccaggcca

SEQ ID NO: 243239 - RNA, 25 nt, Human
ugccccgcucggcccgacccccagc

SEQ ID NO: 243240 - RNA, 24 nt, Human
ugcucucuccaucuucguuuucca

SEQ ID NO: 243241 - RNA, 19 nt, Human
ugggaaagguagggaaggu

SEQ ID NO: 243242 - RNA, 24 nt, Human
ugggagaaaagccgcugaggucac

SEQ ID NO: 243243 - RNA, 18 nt, Human
ugggagggaggaggagga

SEQ ID NO: 243244 - RNA, 23 nt, Human
uggggccagcccgauggaccucc

SEQ ID NO: 243245 - RNA, 24 nt, Human
uguaaaaaaauuuaaaaaucuuuu

SEQ ID NO: 243246 - RNA, 20 nt, Human
uucaccccuucuuugagagc

SEQ ID NO: 243247 - RNA, 24 nt, Human
uucuccacagaacacucugcaucu

SEQ ID NO: 243248 - RNA, 21 nt, Human
uugcuuccuccgggccggccu

SEQ ID NO: 243249 - RNA, 19 nt, Human
uuggggaacucccucagag

SEQ ID NO: 243250 - RNA, 28 nt, Human
uuuugaugacaauaaaaaguuaacaaua

SEQ ID NO: 243251 - RNA, 21 nt, Human
uuuuggcauacgcagucaaca

SEQ ID NO: 243252 - RNA, 26 nt, Human
uuuugguccaaaguaguugcucuuuc

SEQ ID NO: 243253 - RNA, 21 nt, Human
aaacauaaaagacugcaaaac

SEQ ID NO: 243254 - RNA, 22 nt, Human
aaacauaaaagacugcaaaaca

SEQ ID NO: 243255 - RNA, 18 nt, Human
aaccauaugaaacugcug

SEQ ID NO: 243256 - RNA, 18 nt, Human
aagaacuuaaucacagac

SEQ ID NO: 243257 - RNA, 22 nt, Human
aagcaggucauaaagauggucc

SEQ ID NO: 243258 - RNA, 23 nt, Human
aagcaggucauaaagaugguccu

SEQ ID NO: 243259 - RNA, 22 nt, Human
acacauuuacaaaauagaaaac

SEQ ID NO: 243260 - RNA, 21 nt, Human
acccucucuuuagacagaccc

SEQ ID NO: 243261 - RNA, 23 nt, Human
acuauaaccauacuaaauaugcu

SEQ ID NO: 243262 - RNA, 22 nt, Human
acuccgccgcggccccgcgagc

SEQ ID NO: 243263 - RNA, 23 nt, Human
agaaaaggaauuauuaagguaua

SEQ ID NO: 243264 - RNA, 23 nt, Human
agacaaaccagauuaacaugaaa

SEQ ID NO: 243265 - RNA, 25 nt, Human
agcaaacacaagguaucacaccaaa

SEQ ID NO: 243266 - RNA, 22 nt, Human
aggggcgcagcgugggcgggag

SEQ ID NO: 243267 - RNA, 25 nt, Human
auagagccuuuuucaaaucugagaa

SEQ ID NO: 243268 - RNA, 26 nt, Human
auagagccuuuuucaaaucugagaaa

SEQ ID NO: 243269 - RNA, 20 nt, Human
auauauguauauauaguggg

SEQ ID NO: 243270 - RNA, 21 nt, Human
augauaauaaacauaaaagac

SEQ ID NO: 243271 - RNA, 18 nt, Human
auggucaaaguccuugcc

SEQ ID NO: 243272 - RNA, 21 nt, Human
caaagaaaaaaaucaagauga

SEQ ID NO: 243273 - RNA, 24 nt, Human
caagugaacuaaaagccauaugaa

SEQ ID NO: 243274 - RNA, 24 nt, Human
caauucuauucaguuuaacaaaaa

SEQ ID NO: 243275 - RNA, 18 nt, Human
caucgcuauacaauucua

SEQ ID NO: 243276 - RNA, 20 nt, Human
cauggucaaaguccuugccc

SEQ ID NO: 243277 - RNA, 19 nt, Human
ccccucugggcaggagggg

SEQ ID NO: 243278 - RNA, 21 nt, Human
ccgccgcggccccgcgagcac

SEQ ID NO: 243279 - RNA, 22 nt, Human
ccgccgcggccccgcgagcacu

SEQ ID NO: 243280 - RNA, 23 nt, Human
ccgcgcugagacugcugccucuu

SEQ ID NO: 243281 - RNA, 21 nt, Human
cggcugcggggcuggguccug

SEQ ID NO: 243282 - RNA, 18 nt, Human
cgggcgaauggcagcgag

SEQ ID NO: 243283 - RNA, 19 nt, Human
cguagccaggccgcccgac

SEQ ID NO: 243284 - RNA, 21 nt, Human
cgucaacuucgcccgcucccc

SEQ ID NO: 243285 - RNA, 22 nt, Human
cuccgcgccgggucuucucccc

SEQ ID NO: 243286 - RNA, 23 nt, Human
cuccgcgcugagacugcugccuc

SEQ ID NO: 243287 - RNA, 20 nt, Human
cugcugccucuuuccuaggc

SEQ ID NO: 243288 - RNA, 20 nt, Human
cuuuuggaaugacuuucuaa

SEQ ID NO: 243289 - RNA, 18 nt, Human
gacauacaccaauguaug

SEQ ID NO: 243290 - RNA, 23 nt, Human
gcaaagcuucuuucagagucaaa

SEQ ID NO: 243291 - RNA, 18 nt, Human
gccgcgccgcucagcagc

SEQ ID NO: 243292 - RNA, 23 nt, Human
gcgacagaccgcuggcugcagcc

SEQ ID NO: 243293 - RNA, 18 nt, Human
gcgcagcgugggcgggag

SEQ ID NO: 243294 - RNA, 20 nt, Human
gcggcucaggugggcgagcg

SEQ ID NO: 243295 - RNA, 20 nt, Human
ggauggggaguggccauuuc

SEQ ID NO: 243296 - RNA, 22 nt, Human
ggcaaaacauuacagcuuaaag

SEQ ID NO: 243297 - RNA, 23 nt, Human
ggcgcggcucaggugggcgagcg

SEQ ID NO: 243298 - RNA, 22 nt, Human
gggcacacaggcacgcgcgaca

SEQ ID NO: 243299 - RNA, 18 nt, Human
guagccaggccgcccgac

SEQ ID NO: 243300 - RNA, 23 nt, Human
uaaaagacugcaaaacaauuuaa

SEQ ID NO: 243301 - RNA, 22 nt, Human
uaaaauaacuaaaacuauuaag

SEQ ID NO: 243302 - RNA, 23 nt, Human
uaaaauaacuaaaacuauuaagc

SEQ ID NO: 243303 - RNA, 18 nt, Human
uaaaauuaaaggacacau

SEQ ID NO: 243304 - RNA, 28 nt, Human
uaagccuauugauagcuaagaaaauaau

SEQ ID NO: 243305 - RNA, 24 nt, Human
uacaaacaagugaacuaaaagcca

SEQ ID NO: 243306 - RNA, 18 nt, Human
uacagugaagggaaugga

SEQ ID NO: 243307 - RNA, 19 nt, Human
uacauaaauauauauguau

SEQ ID NO: 243308 - RNA, 20 nt, Human
uacauaaauauauauguaua

SEQ ID NO: 243309 - RNA, 20 nt, Human
uacauaaauauauauguaua

SEQ ID NO: 243310 - RNA, 21 nt, Human
uagagcagcacgguacacucc

SEQ ID NO: 243311 - RNA, 25 nt, Human
uagagcagcacgguacacuccgccg

SEQ ID NO: 243312 - RNA, 21 nt, Human
uagcuaagaaaauaauugucu

SEQ ID NO: 243313 - RNA, 19 nt, Human
uauuauggcuuuuugcaac

SEQ ID NO: 243314 - RNA, 19 nt, Human
ucaaaguucaucaugugcc

SEQ ID NO: 243315 - RNA, 22 nt, Human
ucaaauaaugauagaccugcau

SEQ ID NO: 243316 - RNA, 21 nt, Human
uccaaagaaaaaaaucaagau

SEQ ID NO: 243317 - RNA, 18 nt, Human
ucccacggucccgcagcc

SEQ ID NO: 243318 - RNA, 25 nt, Human
ucuacauaaauauauauguauauau

SEQ ID NO: 243319 - RNA, 21 nt, Human
ugagauagagccuuuuucaaa

SEQ ID NO: 243320 - RNA, 19 nt, Human
ugauaauaaacauaaaaga

SEQ ID NO: 243321 - RNA, 22 nt, Human
ugauagcagagcucugcaaaau

SEQ ID NO: 243322 - RNA, 24 nt, Human
ugcugccucuuuccuaggcugggc

SEQ ID NO: 243323 - RNA, 22 nt, Human
uggacagacaaaccagauuaac

SEQ ID NO: 243324 - RNA, 23 nt, Human
ugggcugcggauccucccugggg

SEQ ID NO: 243325 - RNA, 20 nt, Human
ugucacagaagaucugucuc

SEQ ID NO: 243326 - RNA, 22 nt, Human
ugugggggauggggaguggcca

SEQ ID NO: 243327 - RNA, 22 nt, Human
uuaaaacacuuucaaaagcuaa

SEQ ID NO: 243328 - RNA, 23 nt, Human
uuaaaggacacauuuacaaaaua

SEQ ID NO: 243329 - RNA, 24 nt, Human
uucauauauucaguuaaacccaaa

SEQ ID NO: 243330 - RNA, 20 nt, Human
uuuaaacuacaaaugcagca

SEQ ID NO: 243331 - RNA, 19 nt, Human
uuuccuaggcugggcugag

SEQ ID NO: 243332 - RNA, 19 nt, Human
uuuugcaacauggcaaaac

SEQ ID NO: 243333 - RNA, 21 nt, Human
aaacgugugugaccuccccca

SEQ ID NO: 243334 - RNA, 19 nt, Human
aagccgccccuucaaacua

SEQ ID NO: 243335 - RNA, 23 nt, Human
agaaaagcugcaagguggguucu

SEQ ID NO: 243336 - RNA, 18 nt, Human
agaauacuuuagaaaguu

SEQ ID NO: 243337 - RNA, 23 nt, Human
agcgguggaaaaaauaagggucu

SEQ ID NO: 243338 - RNA, 18 nt, Human
auucuugacuugcuuuca

SEQ ID NO: 243339 - RNA, 25 nt, Human
auugaacugucuucaaaaucuuggc

SEQ ID NO: 243340 - RNA, 21 nt, Human
caaaaucuuggccaaaauggg

SEQ ID NO: 243341 - RNA, 20 nt, Human
caagccacacugcagaaaag

SEQ ID NO: 243342 - RNA, 27 nt, Human
caauacaguaguaacagguaucacuuc

SEQ ID NO: 243343 - RNA, 18 nt, Human
cacgcccauccauuccca

SEQ ID NO: 243344 - RNA, 20 nt, Human
cacugcagaaaagcugcaag

SEQ ID NO: 243345 - RNA, 19 nt, Human
cagaaacgugugugaccuc

SEQ ID NO: 243346 - RNA, 22 nt, Human
caggacucuaaaaacaauacag

SEQ ID NO: 243347 - RNA, 27 nt, Human
ccauguaaacaaaacacaggugaggag

SEQ ID NO: 243348 - RNA, 22 nt, Human
cccauccauucccacucagaaa

SEQ ID NO: 243349 - RNA, 27 nt, Human
cccccaaacgaucacaaguuuaggucc

SEQ ID NO: 243350 - RNA, 18 nt, Human
ccccuucaaacuaauuuc

SEQ ID NO: 243351 - RNA, 23 nt, Human
ccgccccuucaaacuaauuucug

SEQ ID NO: 243352 - RNA, 22 nt, Human
ccucuucauuccuagggguaga

SEQ ID NO: 243353 - RNA, 22 nt, Human
cgaggaguuguagaagguucac

SEQ ID NO: 243354 - RNA, 23 nt, Human
cgcccauccauucccacucagaa

SEQ ID NO: 243355 - RNA, 20 nt, Human
gaaaagcugcaagguggguu

SEQ ID NO: 243356 - RNA, 27 nt, Human
gccacacugcagaaaagcugcaaggug

SEQ ID NO: 243357 - RNA, 19 nt, Human
gguccagguuuucaaaagc

SEQ ID NO: 243358 - RNA, 22 nt, Human
gguccauguaaacaaaacacag

SEQ ID NO: 243359 - RNA, 19 nt, Human
guaucuacaaguugaacag

SEQ ID NO: 243360 - RNA, 24 nt, Human
gugaccucccccaaacgaucacaa

SEQ ID NO: 243361 - RNA, 23 nt, Human
uagccuccagacuucaggacucu

SEQ ID NO: 243362 - RNA, 23 nt, Human
uagcgguggaaaaaauaaggguc

SEQ ID NO: 243363 - RNA, 22 nt, Human
ucacuucucaugugaccaccuc

SEQ ID NO: 243364 - RNA, 25 nt, Human
ucagaacauguuuuggucagguaua

SEQ ID NO: 243365 - RNA, 22 nt, Human
uccagacuucaggacucuaaaa

SEQ ID NO: 243366 - RNA, 21 nt, Human
ucuguccuacacauaucagaa

SEQ ID NO: 243367 - RNA, 20 nt, Human
ucuuaugucaaauguagaau

SEQ ID NO: 243368 - RNA, 18 nt, Human
ucuuccgccccgaaaggg

SEQ ID NO: 243369 - RNA, 22 nt, Human
ucuugacuugcuuucaggaagu

SEQ ID NO: 243370 - RNA, 20 nt, Human
ugacauagagguccagguuu

SEQ ID NO: 243371 - RNA, 21 nt, Human
ugaccucccccaaacgaucac

SEQ ID NO: 243372 - RNA, 25 nt, Human
ugaccucccccaaacgaucacaagu

SEQ ID NO: 243373 - RNA, 18 nt, Human
ugacuugcuuucaggaag

SEQ ID NO: 243374 - RNA, 19 nt, Human
ugagaaugguccuucugga

SEQ ID NO: 243375 - RNA, 18 nt, Human
ugagaugcucaaacguag

SEQ ID NO: 243376 - RNA, 23 nt, Human
uggaaaaaauaagggucucccac

SEQ ID NO: 243377 - RNA, 22 nt, Human
uggccaaaaugggaaaacucaa

SEQ ID NO: 243378 - RNA, 23 nt, Human
uggguucuuccauuccugcaccu

SEQ ID NO: 243379 - RNA, 21 nt, Human
ugucuucaaaaucuuggccaa

SEQ ID NO: 243380 - RNA, 19 nt, Human
uuaaaggauuguugugcuu

SEQ ID NO: 243381 - RNA, 19 nt, Human
uuccagaaucucuuaaccu

SEQ ID NO: 243382 - RNA, 22 nt, Human
uucuuccauuccugcaccucag

SEQ ID NO: 243383 - RNA, 24 nt, Human
uuucaaaagccgccccuucaaacu

SEQ ID NO: 243384 - RNA, 20 nt, Human
uuuggucagguauaaaaugg

SEQ ID NO: 243385 - RNA, 22 nt, Human
aaaaaagaaaaaacccacagaa

SEQ ID NO: 243386 - RNA, 24 nt, Human
aaaacgcccuuggccuucgcccug

SEQ ID NO: 243387 - RNA, 22 nt, Human
aaaagaaaaaagaaaaaaccca

SEQ ID NO: 243388 - RNA, 18 nt, Human
aaagaaaaaagaaaaaac

SEQ ID NO: 243389 - RNA, 21 nt, Human
aaagccaaugauucucaaucc

SEQ ID NO: 243390 - RNA, 22 nt, Human
acagaauucauguucucacagu

SEQ ID NO: 243391 - RNA, 24 nt, Human
agaaaaaacccacagaaucacaga

SEQ ID NO: 243392 - RNA, 23 nt, Human
agaaaaaagaaaaaacccacaga

SEQ ID NO: 243393 - RNA, 23 nt, Human
agacucgccggcaacugggaagg

SEQ ID NO: 243394 - RNA, 21 nt, Human
caagaaagguauaaaagccaa

SEQ ID NO: 243395 - RNA, 23 nt, Human
caagaaagguauaaaagccaaug

SEQ ID NO: 243396 - RNA, 24 nt, Human
cacagaaucacagaauucauguuc

SEQ ID NO: 243397 - RNA, 18 nt, Human
cacucuccucagccaaag

SEQ ID NO: 243398 - RNA, 19 nt, Human
cagccaaaggagacagcgc

SEQ ID NO: 243399 - RNA, 19 nt, Human
cagcgccgaccuccggcag

SEQ ID NO: 243400 - RNA, 19 nt, Human
ccccacaaacuugaucgca

SEQ ID NO: 243401 - RNA, 22 nt, Human
ccccggggucgggcgccccucu

SEQ ID NO: 243402 - RNA, 18 nt, Human
cccgcacuuccugccacc

SEQ ID NO: 243403 - RNA, 19 nt, Human
ccggcaacugggaaggggg

SEQ ID NO: 243404 - RNA, 21 nt, Human
ccggcaacugggaaggggggc

SEQ ID NO: 243405 - RNA, 18 nt, Human
ccugccaccgccgcccca

SEQ ID NO: 243406 - RNA, 23 nt, Human
ccugccaccgccgccccaacuga

SEQ ID NO: 243407 - RNA, 20 nt, Human
ccuggccugccgcccucccc

SEQ ID NO: 243408 - RNA, 21 nt, Human
ccuggccugccgcccuccccg

SEQ ID NO: 243409 - RNA, 18 nt, Human
cgcccuggccugccgccc

SEQ ID NO: 243410 - RNA, 24 nt, Human
cgcccuuggccuucgcccuggccu

SEQ ID NO: 243411 - RNA, 18 nt, Human
cuagucuccggcgccaca

SEQ ID NO: 243412 - RNA, 20 nt, Human
cucagcgccgaccuccggcc

SEQ ID NO: 243413 - RNA, 19 nt, Human
cucccgggccggggccgcg

SEQ ID NO: 243414 - RNA, 21 nt, Human
cucgaggcgagacucgccggc

SEQ ID NO: 243415 - RNA, 23 nt, Human
cuuccugccaccgccgccccaac

SEQ ID NO: 243416 - RNA, 24 nt, Human
cuucgcccuggccugccgcccucc

SEQ ID NO: 243417 - RNA, 25 nt, Human
cuuggccuucgcccuggccugccgc

SEQ ID NO: 243418 - RNA, 23 nt, Human
cuuggccuucgcccuggccuggu

SEQ ID NO: 243419 - RNA, 19 nt, Human
gaaaaaagaaaaaacccac

SEQ ID NO: 243420 - RNA, 23 nt, Human
ggaggggaaaggaacaagaucgc

SEQ ID NO: 243421 - RNA, 27 nt, Human
gggccggggccgcgcagcuaggucaga

SEQ ID NO: 243422 - RNA, 23 nt, Human
uaaaagccaaugauucucaaucc

SEQ ID NO: 243423 - RNA, 20 nt, Human
uccaaaugugaaagucaggu

SEQ ID NO: 243424 - RNA, 18 nt, Human
uccccggggucgggcgcc

SEQ ID NO: 243425 - RNA, 18 nt, Human
ucccgggcugcgcgaccu

SEQ ID NO: 243426 - RNA, 23 nt, Human
ucucccgggcugcgcgaccuccg

SEQ ID NO: 243427 - RNA, 18 nt, Human
uggccugccgcccucccc

SEQ ID NO: 243428 - RNA, 18 nt, Human
ugggaaggggggccccca

SEQ ID NO: 243429 - RNA, 25 nt, Human
aaacagaaaaugagggcagagccca

SEQ ID NO: 243430 - RNA, 26 nt, Human
aacuuucucuucaggccacaagaagc

SEQ ID NO: 243431 - RNA, 27 nt, Human
aagaaagagcccuuggggacagcagcc

SEQ ID NO: 243432 - RNA, 25 nt, Human
aagaagcccuaacccaagcggaggc

SEQ ID NO: 243433 - RNA, 21 nt, Human
aagcagagccuggcacugccc

SEQ ID NO: 243434 - RNA, 23 nt, Human
aaggagguuggcugaaggaauac

SEQ ID NO: 243435 - RNA, 21 nt, Human
aagugaccuaugaucucuggc

SEQ ID NO: 243436 - RNA, 23 nt, Human
acagagcacagaagccaaagaga

SEQ ID NO: 243437 - RNA, 22 nt, Human
acauggagucucuacauaacca

SEQ ID NO: 243438 - RNA, 22 nt, Human
accaauccccacucccugccau

SEQ ID NO: 243439 - RNA, 22 nt, Human
acccacuuagccucccuuaccu

SEQ ID NO: 243440 - RNA, 22 nt, Human
acguagucccggauguccacca

SEQ ID NO: 243441 - RNA, 19 nt, Human
acucugauccugcucaucu

SEQ ID NO: 243442 - RNA, 23 nt, Human
agacuaaaggugaggcuucaagg

SEQ ID NO: 243443 - RNA, 20 nt, Human
agagacacccagggccuggg

SEQ ID NO: 243444 - RNA, 20 nt, Human
agagacagccccuccacccc

SEQ ID NO: 243445 - RNA, 18 nt, Human
agaggaugaaaugagcgc

SEQ ID NO: 243446 - RNA, 19 nt, Human
agcacagaagccaaagaga

SEQ ID NO: 243447 - RNA, 20 nt, Human
agcagcagcaauaaacagaa

SEQ ID NO: 243448 - RNA, 22 nt, Human
agcagcagcaauaaacagaaaa

SEQ ID NO: 243449 - RNA, 25 nt, Human
agcaggaggcggaaacgguugcagg

SEQ ID NO: 243450 - RNA, 30 nt, Human
aggaccccacaccccugccaccaucccacc

SEQ ID NO: 243451 - RNA, 19 nt, Human
aggcggcacuuacugcaaa

SEQ ID NO: 243452 - RNA, 20 nt, Human
agggcagagcccaguguguc

SEQ ID NO: 243453 - RNA, 23 nt, Human
agguacauggaggucagguggcu

SEQ ID NO: 243454 - RNA, 19 nt, Human
agguggcugaggagggaug

SEQ ID NO: 243455 - RNA, 18 nt, Human
auacagagcacagaagcc

SEQ ID NO: 243456 - RNA, 18 nt, Human
cacaagaagcccuaaccc

SEQ ID NO: 243457 - RNA, 20 nt, Human
cacaccccugccaccauccc

SEQ ID NO: 243458 - RNA, 23 nt, Human
cacagcagcagcaauaaacagaa

SEQ ID NO: 243459 - RNA, 20 nt, Human
cacagccauacugccuccuc

SEQ ID NO: 243460 - RNA, 28 nt, Human
cacauccaggccauggaaaaggcugccc

SEQ ID NO: 243461 - RNA, 25 nt, Human
caccccugccaccaucccacaaauc

SEQ ID NO: 243462 - RNA, 18 nt, Human
cacugcugaauaauagcu

SEQ ID NO: 243463 - RNA, 18 nt, Human
cacuggcgucugcccuau

SEQ ID NO: 243464 - RNA, 23 nt, Human
cagaagccaaagagaauucaggc

SEQ ID NO: 243465 - RNA, 19 nt, Human
cagagaaagaaaguaggac

SEQ ID NO: 243466 - RNA, 22 nt, Human
cagcagcauacagagcacagaa

SEQ ID NO: 243467 - RNA, 22 nt, Human
cauaguacgcaaccaccucuga

SEQ ID NO: 243468 - RNA, 20 nt, Human
caucagccgccgguccaaga

SEQ ID NO: 243469 - RNA, 19 nt, Human
cauggaggucagguggcug

SEQ ID NO: 243470 - RNA, 19 nt, Human
ccagagacagccccucccc

SEQ ID NO: 243471 - RNA, 21 nt, Human
cccaaguucuuggccuccagg

SEQ ID NO: 243472 - RNA, 19 nt, Human
cccaccccuguccucccag

SEQ ID NO: 243473 - RNA, 26 nt, Human
cccacugcuaacucuggguccccacc

SEQ ID NO: 243474 - RNA, 23 nt, Human
ccccacaccccugccaccauccc

SEQ ID NO: 243475 - RNA, 19 nt, Human
ccccugccaccaucccaca

SEQ ID NO: 243476 - RNA, 24 nt, Human
cccuauuaauugaagcugaaauga

SEQ ID NO: 243477 - RNA, 24 nt, Human
ccgucggggcugcacccuggcugu

SEQ ID NO: 243478 - RNA, 20 nt, Human
ccucccuuaccucuucuguc

SEQ ID NO: 243479 - RNA, 21 nt, Human
ccucccuuaccucuucugucu

SEQ ID NO: 243480 - RNA, 20 nt, Human
ccugagccugugcccaguug

SEQ ID NO: 243481 - RNA, 21 nt, Human
ccugaugcugggcuguuaccc

SEQ ID NO: 243482 - RNA, 20 nt, Human
ccugcaucagccgccggucc

SEQ ID NO: 243483 - RNA, 25 nt, Human
ccuggcacugcccacucugaccaag

SEQ ID NO: 243484 - RNA, 21 nt, Human
ccuggcuacaggcagagcgag

SEQ ID NO: 243485 - RNA, 23 nt, Human
cuagagccugcuguugccacagu

SEQ ID NO: 243486 - RNA, 20 nt, Human
cuaggagaaacagugauucc

SEQ ID NO: 243487 - RNA, 21 nt, Human
cuaguccccugugccaggaac

SEQ ID NO: 243488 - RNA, 21 nt, Human
cucacaacccaaagcagagcc

SEQ ID NO: 243489 - RNA, 23 nt, Human
cucacugcccacgguucgccgcu

SEQ ID NO: 243490 - RNA, 23 nt, Human
cucauauacucuacaugccccua

SEQ ID NO: 243491 - RNA, 22 nt, Human
cuccaggccgcagucaaaaccc

SEQ ID NO: 243492 - RNA, 19 nt, Human
cucuacauaaccacaggau

SEQ ID NO: 243493 - RNA, 19 nt, Human
cugauccugcucaucacac

SEQ ID NO: 243494 - RNA, 18 nt, Human
cugcacagccauacugcc

SEQ ID NO: 243495 - RNA, 21 nt, Human
cugcauguccaccugcugcuc

SEQ ID NO: 243496 - RNA, 20 nt, Human
cuuacgaaauaccuuuucag

SEQ ID NO: 243497 - RNA, 25 nt, Human
gaaaacacagcagcagcaauaaaca

SEQ ID NO: 243498 - RNA, 20 nt, Human
gaaauaccuuuucagcaucu

SEQ ID NO: 243499 - RNA, 19 nt, Human
gaccccacaccccugccac

SEQ ID NO: 243500 - RNA, 22 nt, Human
gaggccuucagacuccuaggag

SEQ ID NO: 243501 - RNA, 23 nt, Human
gauuccuucuacugcuccauccc

SEQ ID NO: 243502 - RNA, 18 nt, Human
gcaugggguagaaguugg

SEQ ID NO: 243503 - RNA, 21 nt, Human
gccccuaguccccugugccag

SEQ ID NO: 243504 - RNA, 18 nt, Human
ggcagugaggaagccaga

SEQ ID NO: 243505 - RNA, 20 nt, Human
ggccaagugcccaguuugcc

SEQ ID NO: 243506 - RNA, 23 nt, Human
gggauggguagcugguagagugg

SEQ ID NO: 243507 - RNA, 19 nt, Human
ggggacagcagcauacaga

SEQ ID NO: 243508 - RNA, 23 nt, Human
ggggcuccuuggggacguagggc

SEQ ID NO: 243509 - RNA, 22 nt, Human
gguggcugaggagggauggguu

SEQ ID NO: 243510 - RNA, 23 nt, Human
gugaaggaccccacaccccugcc

SEQ ID NO: 243511 - RNA, 21 nt, Human
guugguuucugaaacagaccu

SEQ ID NO: 243512 - RNA, 20 nt, Human
uaaacagaaaaugagggcag

SEQ ID NO: 243513 - RNA, 22 nt, Human
uaaacagaaaaugagggcagag

SEQ ID NO: 243514 - RNA, 19 nt, Human
uaacucuggguccccaccc

SEQ ID NO: 243515 - RNA, 21 nt, Human
uaacucuggguccccaccccu

SEQ ID NO: 243516 - RNA, 21 nt, Human
uaagaaagagcccuuggggac

SEQ ID NO: 243517 - RNA, 19 nt, Human
uacauggaggucagguggc

SEQ ID NO: 243518 - RNA, 22 nt, Human
uaccgucggggcugcacccugg

SEQ ID NO: 243519 - RNA, 21 nt, Human
uaccucuucugucugcuucca

SEQ ID NO: 243520 - RNA, 21 nt, Human
uaccugaagugaccuaugauc

SEQ ID NO: 243521 - RNA, 21 nt, Human
uagaaugccaucacuguuggu

SEQ ID NO: 243522 - RNA, 22 nt, Human
uaggccaagugcccaguuugcc

SEQ ID NO: 243523 - RNA, 20 nt, Human
uaggccaugacuggcauggg

SEQ ID NO: 243524 - RNA, 22 nt, Human
ucacuggguuuguggguugcgc

SEQ ID NO: 243525 - RNA, 23 nt, Human
ucagcgcccggccuccgcgccgc

SEQ ID NO: 243526 - RNA, 19 nt, Human
uccacacacaccgucagcg

SEQ ID NO: 243527 - RNA, 23 nt, Human
uccacacacaccgucagcgcccg

SEQ ID NO: 243528 - RNA, 21 nt, Human
uccagagaaagaaaguaggac

SEQ ID NO: 243529 - RNA, 21 nt, Human
uccagagacagccccuccacc

SEQ ID NO: 243530 - RNA, 25 nt, Human
uccugcaucagccgccgguccaaga

SEQ ID NO: 243531 - RNA, 21 nt, Human
uccuggcuacaggcagagcga

SEQ ID NO: 243532 - RNA, 22 nt, Human
uccuuccugccauucugcagcc

SEQ ID NO: 243533 - RNA, 18 nt, Human
uccuugagcccuuggccu

SEQ ID NO: 243534 - RNA, 22 nt, Human
ucuacauaaccacaggauuccc

SEQ ID NO: 243535 - RNA, 22 nt, Human
ucucuacauaaccacaggauuc

SEQ ID NO: 243536 - RNA, 18 nt, Human
ucucuggccaugacaauc

SEQ ID NO: 243537 - RNA, 19 nt, Human
ucugcagccuguuagccaa

SEQ ID NO: 243538 - RNA, 26 nt, Human
ucuguauggaugugcagggccagcuc

SEQ ID NO: 243539 - RNA, 20 nt, Human
ugaaaugagcgcagaccaac

SEQ ID NO: 243540 - RNA, 22 nt, Human
ugaaggaccccacaccccugcc

SEQ ID NO: 243541 - RNA, 19 nt, Human
ugaaggcuccugcacagcc

SEQ ID NO: 243542 - RNA, 23 nt, Human
ugaauaccucugcagauagacuu

SEQ ID NO: 243543 - RNA, 20 nt, Human
ugagaagaaagggccuucag

SEQ ID NO: 243544 - RNA, 22 nt, Human
ugagugcggucuccgccgaggg

SEQ ID NO: 243545 - RNA, 23 nt, Human
ugaucucuggccaugacaaucuc

SEQ ID NO: 243546 - RNA, 23 nt, Human
ugcauccuggcuacaggcagagc

SEQ ID NO: 243547 - RNA, 18 nt, Human
ugcauguccaccugcugc

SEQ ID NO: 243548 - RNA, 27 nt, Human
ugcccaagcacauggagucuuggaggc

SEQ ID NO: 243549 - RNA, 21 nt, Human
ugcccagggcuaccuugccuu

SEQ ID NO: 243550 - RNA, 21 nt, Human
uggacggggaggccagagggu

SEQ ID NO: 243551 - RNA, 19 nt, Human
uggccuggagggggagcuu

SEQ ID NO: 243552 - RNA, 21 nt, Human
uggcuaguuucugacuuuaau

SEQ ID NO: 243553 - RNA, 21 nt, Human
uggggacagcagcauacagag

SEQ ID NO: 243554 - RNA, 18 nt, Human
ugguuucugaaacagacc

SEQ ID NO: 243555 - RNA, 21 nt, Human
ugucacaguucugggaggcag

SEQ ID NO: 243556 - RNA, 20 nt, Human
uguccaccugcugcucgugc

SEQ ID NO: 243557 - RNA, 21 nt, Human
uuacccacuuagccucccuua

SEQ ID NO: 243558 - RNA, 19 nt, Human
uuccugccauucugcagcc

SEQ ID NO: 243559 - RNA, 23 nt, Human
uuccuucuacugcuccaucccca

SEQ ID NO: 243560 - RNA, 23 nt, Human
uucucuuguuguccuugagcccu

SEQ ID NO: 243561 - RNA, 24 nt, Human
uuggccuccaggccgcagucaaaa

SEQ ID NO: 243562 - RNA, 19 nt, Human
aagguaggaaaaugccacc

SEQ ID NO: 243563 - RNA, 18 nt, Human
cagcagccccaagaggag

SEQ ID NO: 243564 - RNA, 22 nt, Human
cagcagcuuccuccugggguuc

SEQ ID NO: 243565 - RNA, 23 nt, Human
cccccagacccggccgggccuau

SEQ ID NO: 243566 - RNA, 19 nt, Human
ccucagggcacugguuggg

SEQ ID NO: 243567 - RNA, 23 nt, Human
cgcccccagacccggccgggccu

SEQ ID NO: 243568 - RNA, 21 nt, Human
cgccccgcccccagacccggc

SEQ ID NO: 243569 - RNA, 19 nt, Human
cgggguggggggcggggcc

SEQ ID NO: 243570 - RNA, 19 nt, Human
cugggguuccccggcccug

SEQ ID NO: 243571 - RNA, 25 nt, Human
gagaggcuguagcccugggcaaucc

SEQ ID NO: 243572 - RNA, 19 nt, Human
gagcaggaggcuugggcuu

SEQ ID NO: 243573 - RNA, 22 nt, Human
gcaaacgccccgcccccagacc

SEQ ID NO: 243574 - RNA, 21 nt, Human
ggagcaggaggcuugggcuug

SEQ ID NO: 243575 - RNA, 23 nt, Human
ggcucagcagcuuccuccugggg

SEQ ID NO: 243576 - RNA, 20 nt, Human
gggggcggggccaggggcgg

SEQ ID NO: 243577 - RNA, 23 nt, Human
ggguggggggcggggccaggggc

SEQ ID NO: 243578 - RNA, 21 nt, Human
uacguuuuaaugcagcagccc

SEQ ID NO: 243579 - RNA, 19 nt, Human
uagagcagaagugcuuuuc

SEQ ID NO: 243580 - RNA, 20 nt, Human
uagcccugggcaaucccggg

SEQ ID NO: 243581 - RNA, 22 nt, Human
uaugaagacggaaugccucuua

SEQ ID NO: 243582 - RNA, 19 nt, Human
uggggggcggggccagggg

SEQ ID NO: 243583 - RNA, 25 nt, Human
aagcagaaauuaggaguccccagag

SEQ ID NO: 243584 - RNA, 19 nt, Human
caaacaaaaccccagcccc

SEQ ID NO: 243585 - RNA, 21 nt, Human
ccacaagaaaagacugauccc

SEQ ID NO: 243586 - RNA, 22 nt, Human
ccuucuacaaacaaaaccccag

SEQ ID NO: 243587 - RNA, 24 nt, Human
cuucuacaaacaaaaccccagccc

SEQ ID NO: 243588 - RNA, 22 nt, Human
uccccagagccuucuacaaaca

SEQ ID NO: 243589 - RNA, 25 nt, Human
ucccugcuuuaggcuggggaagcag

SEQ ID NO: 243590 - RNA, 20 nt, Human
uuaggcuggggaagcagaaa

SEQ ID NO: 243591 - RNA, 18 nt, Human
aaacagccuccccuggaa

SEQ ID NO: 243592 - RNA, 22 nt, Human
aagcuagcugugaaagaccuac

SEQ ID NO: 243593 - RNA, 20 nt, Human
aagggaccggcggugaagcc

SEQ ID NO: 243594 - RNA, 28 nt, Human
aauacccauauaccuuuacccaaauagc

SEQ ID NO: 243595 - RNA, 18 nt, Human
acaggcuuguuugaggac

SEQ ID NO: 243596 - RNA, 23 nt, Human
agaaaugcuuuauucccauuguc

SEQ ID NO: 243597 - RNA, 19 nt, Human
agcuagcugugaaagaccu

SEQ ID NO: 243598 - RNA, 21 nt, Human
auauaccuuuacccaaauagc

SEQ ID NO: 243599 - RNA, 22 nt, Human
auuguccacugaaaauacaacc

SEQ ID NO: 243600 - RNA, 19 nt, Human
caagggaccggcggugaag

SEQ ID NO: 243601 - RNA, 19 nt, Human
cagaaaaauacccauauac

SEQ ID NO: 243602 - RNA, 21 nt, Human
cagcacgcagacaugucucuc

SEQ ID NO: 243603 - RNA, 23 nt, Human
caguguacaacucuucacagagc

SEQ ID NO: 243604 - RNA, 22 nt, Human
ccaccaagaaaucucuguugua

SEQ ID NO: 243605 - RNA, 21 nt, Human
cccaaauagcuaccaccaaga

SEQ ID NO: 243606 - RNA, 20 nt, Human
cccucugaaauaauaacaaa

SEQ ID NO: 243607 - RNA, 24 nt, Human
ccggcggugaagccacucaccccc

SEQ ID NO: 243608 - RNA, 26 nt, Human
ccucaaaaccuuccauuugguuccuu

SEQ ID NO: 243609 - RNA, 22 nt, Human
ccugcuaaagcugagaggugaa

SEQ ID NO: 243610 - RNA, 23 nt, Human
ccuggguaaacagccuccccugg

SEQ ID NO: 243611 - RNA, 22 nt, Human
cgaaaggcagcgcugcaaggga

SEQ ID NO: 243612 - RNA, 24 nt, Human
cggcggugaagccacucacccccu

SEQ ID NO: 243613 - RNA, 21 nt, Human
cuccuugucucuguugccuuc

SEQ ID NO: 243614 - RNA, 20 nt, Human
gaaaggcagcgcugcaaggg

SEQ ID NO: 243615 - RNA, 19 nt, Human
gacauugccuggguaaaca

SEQ ID NO: 243616 - RNA, 23 nt, Human
gaccuacaucaccucaaaaccuu

SEQ ID NO: 243617 - RNA, 23 nt, Human
gagaggugaagggcuaaaaacac

SEQ ID NO: 243618 - RNA, 18 nt, Human
gcuuguuugaggacauug

SEQ ID NO: 243619 - RNA, 18 nt, Human
ucaguguacaacucuuca

SEQ ID NO: 243620 - RNA, 21 nt, Human
uccugccaugucacauucuug

SEQ ID NO: 243621 - RNA, 18 nt, Human
ucuuguaaccagcugcag

SEQ ID NO: 243622 - RNA, 18 nt, Human
ugaaauaauaacaaagca

SEQ ID NO: 243623 - RNA, 23 nt, Human
ugcuuuauucccauuguccacug

SEQ ID NO: 243624 - RNA, 18 nt, Human
ugguuccauagauccugc

SEQ ID NO: 243625 - RNA, 19 nt, Human
ugucucuguugccuuccuc

SEQ ID NO: 243626 - RNA, 24 nt, Human
aaccagugagcagagagcauaaga

SEQ ID NO: 243627 - RNA, 20 nt, Human
aacuugucaauauuuuccuc

SEQ ID NO: 243628 - RNA, 21 nt, Human
cacguuuaacuuugugaauuu

SEQ ID NO: 243629 - RNA, 25 nt, Human
cacuccugugccuacgacccaggag

SEQ ID NO: 243630 - RNA, 21 nt, Human
ccugugccuacgacccaggag

SEQ ID NO: 243631 - RNA, 19 nt, Human
cuccugugccuacgaccca

SEQ ID NO: 243632 - RNA, 22 nt, Human
ugaguugaucuacacugacaaa

SEQ ID NO: 243633 - RNA, 21 nt, Human
uggcccaaugacacagccuuu

SEQ ID NO: 243634 - RNA, 22 nt, Human
uggcccaaugacacagccuuua

SEQ ID NO: 243635 - RNA, 23 nt, Human
uguuuuuacuuuaacaaugauug

SEQ ID NO: 243636 - RNA, 21 nt, Human
aaacucauaucccaaauacag

SEQ ID NO: 243637 - RNA, 26 nt, Human
aacucuuuccccaaacucauauccca

SEQ ID NO: 243638 - RNA, 22 nt, Human
aagcaggggccacaacggagaa

SEQ ID NO: 243639 - RNA, 22 nt, Human
acaccgcacaaaacaguaagac

SEQ ID NO: 243640 - RNA, 18 nt, Human
acccacacaacgggacac

SEQ ID NO: 243641 - RNA, 20 nt, Human
acucuaaaacagaaggugag

SEQ ID NO: 243642 - RNA, 21 nt, Human
agcuggagacacaccgcacaa

SEQ ID NO: 243643 - RNA, 24 nt, Human
auacaauggaggauacaaaaggaa

SEQ ID NO: 243644 - RNA, 21 nt, Human
caacucuaaaacagaagguga

SEQ ID NO: 243645 - RNA, 20 nt, Human
cacaaaacaguaagacuuaa

SEQ ID NO: 243646 - RNA, 23 nt, Human
cagcuggagacacaccgcacaaa

SEQ ID NO: 243647 - RNA, 23 nt, Human
caggggccacaacggagaaagag

SEQ ID NO: 243648 - RNA, 18 nt, Human
cccacacaacgggacacc

SEQ ID NO: 243649 - RNA, 20 nt, Human
cccacacaacgggacaccau

SEQ ID NO: 243650 - RNA, 20 nt, Human
ccccaaacucauaucccaaa

SEQ ID NO: 243651 - RNA, 19 nt, Human
cccccagauaccaguggcu

SEQ ID NO: 243652 - RNA, 18 nt, Human
ccccguuccaggccuccc

SEQ ID NO: 243653 - RNA, 21 nt, Human
ccucccuggugcccgcugcuc

SEQ ID NO: 243654 - RNA, 23 nt, Human
cgggacaccaucgguaacuauga

SEQ ID NO: 243655 - RNA, 25 nt, Human
cuaaaacagaaggugaggacuaaau

SEQ ID NO: 243656 - RNA, 18 nt, Human
gagugaaggaggauaauu

SEQ ID NO: 243657 - RNA, 21 nt, Human
ggagacacaccgcacaaaaca

SEQ ID NO: 243658 - RNA, 24 nt, Human
ggccacaacggagaaagagauacc

SEQ ID NO: 243659 - RNA, 19 nt, Human
gggaaaacauccaaagagg

SEQ ID NO: 243660 - RNA, 21 nt, Human
gguaagaggaagaacaagcac

SEQ ID NO: 243661 - RNA, 20 nt, Human
gugaaacagaacgcuaagcc

SEQ ID NO: 243662 - RNA, 22 nt, Human
guggggcagcaagaaccuuaaa

SEQ ID NO: 243663 - RNA, 20 nt, Human
guguaagacaacuuagcaca

SEQ ID NO: 243664 - RNA, 25 nt, Human
uaaacccacacaacgggacaccuua

SEQ ID NO: 243665 - RNA, 23 nt, Human
uacaaaaggaagaagagauaaaa

SEQ ID NO: 243666 - RNA, 20 nt, Human
uacaauggaggauacaaaag

SEQ ID NO: 243667 - RNA, 25 nt, Human
uacaguaagaagagagugugauuac

SEQ ID NO: 243668 - RNA, 21 nt, Human
uaccaucaaaaaaguuaaaau

SEQ ID NO: 243669 - RNA, 20 nt, Human
uagcacagaguaaacccaca

SEQ ID NO: 243670 - RNA, 20 nt, Human
uauuugucuucauggaacuu

SEQ ID NO: 243671 - RNA, 24 nt, Human
ucaacuuuuauuuuuaauuaccca

SEQ ID NO: 243672 - RNA, 19 nt, Human
ucagcuggagacacaccgc

SEQ ID NO: 243673 - RNA, 22 nt, Human
ucagcuguaacaauacaguauu

SEQ ID NO: 243674 - RNA, 21 nt, Human
uccccaaacucauaucccaaa

SEQ ID NO: 243675 - RNA, 19 nt, Human
ugacagggagugaaggagg

SEQ ID NO: 243676 - RNA, 24 nt, Human
ugagggcaauaaacuuggaaacug

SEQ ID NO: 243677 - RNA, 21 nt, Human
ugauuacagacacccucucuc

SEQ ID NO: 243678 - RNA, 21 nt, Human
ugcaaagaacuagggaaggug

SEQ ID NO: 243679 - RNA, 23 nt, Human
ugcuccguuuucugggccucgau

SEQ ID NO: 243680 - RNA, 18 nt, Human
uggagacacaccgcacaa

SEQ ID NO: 243681 - RNA, 18 nt, Human
uggggaaaacauccaaag

SEQ ID NO: 243682 - RNA, 20 nt, Human
ugucuucauggaacuuuacu

SEQ ID NO: 243683 - RNA, 19 nt, Human
uguguacuguccuuuguau

SEQ ID NO: 243684 - RNA, 22 nt, Human
uguucuagucccccagauacca

SEQ ID NO: 243685 - RNA, 24 nt, Human
uuaauuacccaaguguguacuguc

SEQ ID NO: 243686 - RNA, 22 nt, Human
uucaugcuccccgccucacucc

SEQ ID NO: 243687 - RNA, 24 nt, Human
aaaggagcugggggaguggauccu

SEQ ID NO: 243688 - RNA, 22 nt, Human
aagcagggucugggggauaagc

SEQ ID NO: 243689 - RNA, 18 nt, Human
aagcuccuuucuccucuc

SEQ ID NO: 243690 - RNA, 20 nt, Human
acaacaagacaucucccucc

SEQ ID NO: 243691 - RNA, 24 nt, Human
acaugcagagaagccaagcagggg

SEQ ID NO: 243692 - RNA, 19 nt, Human
accacaugcagagaagcca

SEQ ID NO: 243693 - RNA, 18 nt, Human
acuauagcagggaagcgu

SEQ ID NO: 243694 - RNA, 20 nt, Human
agaacucagacccugguggu

SEQ ID NO: 243695 - RNA, 22 nt, Human
agaaggcaagcccacaugacua

SEQ ID NO: 243696 - RNA, 19 nt, Human
agcacggggaggguggagc

SEQ ID NO: 243697 - RNA, 21 nt, Human
agcagaacacagcagcacggg

SEQ ID NO: 243698 - RNA, 21 nt, Human
agcuucuggguuucucagucu

SEQ ID NO: 243699 - RNA, 20 nt, Human
aguggcuuauuuuuaaccca

SEQ ID NO: 243700 - RNA, 20 nt, Human
auaagcuccuuucuccucuc

SEQ ID NO: 243701 - RNA, 22 nt, Human
aucaccuuccccuaagcaggac

SEQ ID NO: 243702 - RNA, 23 nt, Human
auccuuggggaagggagggcggc

SEQ ID NO: 243703 - RNA, 18 nt, Human
aucucccuccccuccccc

SEQ ID NO: 243704 - RNA, 21 nt, Human
caaaggacucagcaguagcca

SEQ ID NO: 243705 - RNA, 23 nt, Human
caacaagacaucucccuccccuc

SEQ ID NO: 243706 - RNA, 27 nt, Human
caacaagacaucucccuccccuccccc

SEQ ID NO: 243707 - RNA, 19 nt, Human
caaccccaaaggacucagc

SEQ ID NO: 243708 - RNA, 22 nt, Human
caagccacagcagaugaccaca

SEQ ID NO: 243709 - RNA, 20 nt, Human
caaguccccacaacaagaca

SEQ ID NO: 243710 - RNA, 25 nt, Human
caaguccccacaacaagacaucucc

SEQ ID NO: 243711 - RNA, 23 nt, Human
caaguccucuggccuggcuucca

SEQ ID NO: 243712 - RNA, 21 nt, Human
cacugggauuuaccaggauga

SEQ ID NO: 243713 - RNA, 24 nt, Human
cagugcuaggagaggguucucagg

SEQ ID NO: 243714 - RNA, 18 nt, Human
caugacuaccagcuucug

SEQ ID NO: 243715 - RNA, 22 nt, Human
cauucucuaaaggagcuggggg

SEQ ID NO: 243716 - RNA, 22 nt, Human
ccagcccaaguccccacaacaa

SEQ ID NO: 243717 - RNA, 22 nt, Human
ccagucguuuggcagagaaggc

SEQ ID NO: 243718 - RNA, 18 nt, Human
cccagcccaaguccccac

SEQ ID NO: 243719 - RNA, 20 nt, Human
cccagcccaaguccccacaa

SEQ ID NO: 243720 - RNA, 24 nt, Human
cccaggacccugcuagaacucaga

SEQ ID NO: 243721 - RNA, 21 nt, Human
cccauuaaacaccaagccaca

SEQ ID NO: 243722 - RNA, 22 nt, Human
ccccaggacccugcuagaacuc

SEQ ID NO: 243723 - RNA, 19 nt, Human
cccccaggacccugcuaga

SEQ ID NO: 243724 - RNA, 20 nt, Human
cccucaaccccaaaggacuc

SEQ ID NO: 243725 - RNA, 22 nt, Human
cccuuuuuccuuccuccaucuc

SEQ ID NO: 243726 - RNA, 24 nt, Human
cccuuuuuccuuccuccaucuccc

SEQ ID NO: 243727 - RNA, 23 nt, Human
ccucccaggaugccaaauaaaua

SEQ ID NO: 243728 - RNA, 18 nt, Human
ccucccauuuagcccagc

SEQ ID NO: 243729 - RNA, 23 nt, Human
ccucccccauccucucccuguua

SEQ ID NO: 243730 - RNA, 21 nt, Human
ccucccccuagcucccaucuc

SEQ ID NO: 243731 - RNA, 21 nt, Human
ccuccccucccccuagcuccc

SEQ ID NO: 243732 - RNA, 22 nt, Human
ccuggcuuccaccucccagauc

SEQ ID NO: 243733 - RNA, 22 nt, Human
ccuggggugguauuuucagccc

SEQ ID NO: 243734 - RNA, 18 nt, Human
ccuugccguuuugugcug

SEQ ID NO: 243735 - RNA, 23 nt, Human
cucacugacgguauccugcccca

SEQ ID NO: 243736 - RNA, 22 nt, Human
cucccuccccucccccuagcuc

SEQ ID NO: 243737 - RNA, 20 nt, Human
cucccuguuaacuuugguuu

SEQ ID NO: 243738 - RNA, 19 nt, Human
cucuaaacuuugcccacuc

SEQ ID NO: 243739 - RNA, 19 nt, Human
cugaugagcugcuaagaag

SEQ ID NO: 243740 - RNA, 22 nt, Human
cugggaugugaaugguauaaag

SEQ ID NO: 243741 - RNA, 20 nt, Human
cugguggcaaaggguccucu

SEQ ID NO: 243742 - RNA, 24 nt, Human
cuuccuccaucucauuuuccccaa

SEQ ID NO: 243743 - RNA, 26 nt, Human
cuucucccuuuuuccuuccuccaucu

SEQ ID NO: 243744 - RNA, 18 nt, Human
gaccugggcaaaguuuuc

SEQ ID NO: 243745 - RNA, 24 nt, Human
gagcugggggaguggauccuuggg

SEQ ID NO: 243746 - RNA, 20 nt, Human
gcagggucugggggauaagc

SEQ ID NO: 243747 - RNA, 19 nt, Human
gcagugggauacccccagg

SEQ ID NO: 243748 - RNA, 21 nt, Human
gcucagcuucucccuuuuucc

SEQ ID NO: 243749 - RNA, 21 nt, Human
ggaaaucccucccaggaugcc

SEQ ID NO: 243750 - RNA, 18 nt, Human
ggaauguugggggaguca

SEQ ID NO: 243751 - RNA, 18 nt, Human
ggaggaaagggugcagcc

SEQ ID NO: 243752 - RNA, 21 nt, Human
ggaguggauccuuggggaagg

SEQ ID NO: 243753 - RNA, 18 nt, Human
ggcucagcuucucccuuu

SEQ ID NO: 243754 - RNA, 23 nt, Human
gggaagcaguagaacaguauagc

SEQ ID NO: 243755 - RNA, 18 nt, Human
gggaugggaaauggagga

SEQ ID NO: 243756 - RNA, 24 nt, Human
gggcugcucacuggcuugcuuggg

SEQ ID NO: 243757 - RNA, 21 nt, Human
ggggaggagcagaacacagca

SEQ ID NO: 243758 - RNA, 21 nt, Human
ggggaguggauccuuggggaa

SEQ ID NO: 243759 - RNA, 18 nt, Human
gggggaugggaaauggag

SEQ ID NO: 243760 - RNA, 24 nt, Human
ggguggagcuaggaagaacacaag

SEQ ID NO: 243761 - RNA, 18 nt, Human
ggucugggggauaagcuc

SEQ ID NO: 243762 - RNA, 21 nt, Human
gguggcuccaaucaccuuccc

SEQ ID NO: 243763 - RNA, 23 nt, Human
gucugggggauaagcuccuuucu

SEQ ID NO: 243764 - RNA, 19 nt, Human
uaaaggagcugggggagug

SEQ ID NO: 243765 - RNA, 19 nt, Human
uaagaagaugaugaaccuc

SEQ ID NO: 243766 - RNA, 27 nt, Human
uaagaagaugaugaaccucagagcuga

SEQ ID NO: 243767 - RNA, 18 nt, Human
uacagcagcugggaacua

SEQ ID NO: 243768 - RNA, 19 nt, Human
uaccaggaugauggucucu

SEQ ID NO: 243769 - RNA, 18 nt, Human
uagcagggaagcgugggg

SEQ ID NO: 243770 - RNA, 23 nt, Human
uagcucccaucucccucaacccc

SEQ ID NO: 243771 - RNA, 25 nt, Human
uauucuaauuuguccccucccccaa

SEQ ID NO: 243772 - RNA, 24 nt, Human
ucaauaccagcauuugacagugcu

SEQ ID NO: 243773 - RNA, 20 nt, Human
ucacaggaauggaugauggg

SEQ ID NO: 243774 - RNA, 22 nt, Human
ucaccuuccccuaagcaggaca

SEQ ID NO: 243775 - RNA, 19 nt, Human
ucccaucucccucaacccc

SEQ ID NO: 243776 - RNA, 21 nt, Human
ucccaucucccucaaccccaa

SEQ ID NO: 243777 - RNA, 18 nt, Human
uccccacaacaagacauc

SEQ ID NO: 243778 - RNA, 19 nt, Human
uccucuguccaagagcggg

SEQ ID NO: 243779 - RNA, 23 nt, Human
ucgggguugugaaggaccugggc

SEQ ID NO: 243780 - RNA, 20 nt, Human
ucguuuggcagagaaggcaa

SEQ ID NO: 243781 - RNA, 20 nt, Human
ucuaggaucucacucuggug

SEQ ID NO: 243782 - RNA, 23 nt, Human
ucucugagacccauccucagucc

SEQ ID NO: 243783 - RNA, 21 nt, Human
ugaaccucagagcugaugcug

SEQ ID NO: 243784 - RNA, 22 nt, Human
ugaccacaugcagagaagccaa

SEQ ID NO: 243785 - RNA, 19 nt, Human
ugagacccauccucagucc

SEQ ID NO: 243786 - RNA, 21 nt, Human
ugagacccauccucagucccc

SEQ ID NO: 243787 - RNA, 18 nt, Human
ugaugaaccucagagcug

SEQ ID NO: 243788 - RNA, 18 nt, Human
ugcuggggugucaaaugu

SEQ ID NO: 243789 - RNA, 24 nt, Human
uggagguggcuccguuacagcagc

SEQ ID NO: 243790 - RNA, 19 nt, Human
uggcucagcuucucccuuu

SEQ ID NO: 243791 - RNA, 19 nt, Human
uggcuuauuuuuaacccau

SEQ ID NO: 243792 - RNA, 20 nt, Human
uggcuugcuuggggcgaggu

SEQ ID NO: 243793 - RNA, 19 nt, Human
ugggaaaucucgggguugu

SEQ ID NO: 243794 - RNA, 24 nt, Human
ugggaaaucucgggguugugaagg

SEQ ID NO: 243795 - RNA, 18 nt, Human
ugggcagagugggcucag

SEQ ID NO: 243796 - RNA, 18 nt, Human
ugggcagagugggcucag

SEQ ID NO: 243797 - RNA, 19 nt, Human
ugggcagagugggcucagg

SEQ ID NO: 243798 - RNA, 20 nt, Human
ugggcagagugggcucaggg

SEQ ID NO: 243799 - RNA, 22 nt, Human
uggggugucaaauguugggaug

SEQ ID NO: 243800 - RNA, 26 nt, Human
uggggugucaaauguugggaugucag

SEQ ID NO: 243801 - RNA, 19 nt, Human
uggugguugaggagauggg

SEQ ID NO: 243802 - RNA, 19 nt, Human
ugguugaggagauggggga

SEQ ID NO: 243803 - RNA, 21 nt, Human
ugucuggacacagcccuggga

SEQ ID NO: 243804 - RNA, 18 nt, Human
uguugggaugucaggcag

SEQ ID NO: 243805 - RNA, 25 nt, Human
uucuaauuuguccccucccccaucc

SEQ ID NO: 243806 - RNA, 18 nt, Human
uucucccuuuuuccuucc

SEQ ID NO: 243807 - RNA, 18 nt, Human
uuggagaggcagccagug

SEQ ID NO: 243808 - RNA, 21 nt, Human
uuggagaggcagccaguguuc

SEQ ID NO: 243809 - RNA, 21 nt, Human
uuuucagcccguuuucauuuc

SEQ ID NO: 243810 - RNA, 18 nt, Human
aaaaacacaaacaaaaga

SEQ ID NO: 243811 - RNA, 21 nt, Human
aaaaacacaaacaaaagagga

SEQ ID NO: 243812 - RNA, 20 nt, Human
aaaaauggaaaacuuugccu

SEQ ID NO: 243813 - RNA, 19 nt, Human
aaacaaaagaggagaccuu

SEQ ID NO: 243814 - RNA, 23 nt, Human
aaacaaaagaggagaccuuuagc

SEQ ID NO: 243815 - RNA, 18 nt, Human
aaaguucucacauaucuu

SEQ ID NO: 243816 - RNA, 19 nt, Human
aacuugcaguaguaaagaa

SEQ ID NO: 243817 - RNA, 19 nt, Human
aagaaaaucccaaagcaaa

SEQ ID NO: 243818 - RNA, 24 nt, Human
aagccaauguaagacaaaggaagg

SEQ ID NO: 243819 - RNA, 21 nt, Human
acgaaacacuuaaaaaaaaag

SEQ ID NO: 243820 - RNA, 20 nt, Human
acuaguagguuccuccccag

SEQ ID NO: 243821 - RNA, 22 nt, Human
agccauuucagucuugaacuug

SEQ ID NO: 243822 - RNA, 19 nt, Human
aggcuggguuugugugguc

SEQ ID NO: 243823 - RNA, 18 nt, Human
aguaucuuuguacauuca

SEQ ID NO: 243824 - RNA, 22 nt, Human
aucucaccagaacucucuguca

SEQ ID NO: 243825 - RNA, 20 nt, Human
auggggcccaaaccacuugc

SEQ ID NO: 243826 - RNA, 23 nt, Human
auuaagacucuuuuugaugacuc

SEQ ID NO: 243827 - RNA, 19 nt, Human
caaaaacacaaacaaaaga

SEQ ID NO: 243828 - RNA, 21 nt, Human
caaaaauggaaaacuuugccu

SEQ ID NO: 243829 - RNA, 23 nt, Human
caaaccacuugcauggccagucu

SEQ ID NO: 243830 - RNA, 20 nt, Human
caaucagaucagcuucuagu

SEQ ID NO: 243831 - RNA, 22 nt, Human
cacaaaaacacaaacaaaagag

SEQ ID NO: 243832 - RNA, 19 nt, Human
cacaaacaaaagaggagac

SEQ ID NO: 243833 - RNA, 22 nt, Human
caccaugacacaguauagcauu

SEQ ID NO: 243834 - RNA, 24 nt, Human
cacugaagugggauucaacacgca

SEQ ID NO: 243835 - RNA, 26 nt, Human
cacuuuuauguuaugggaaucaaggg

SEQ ID NO: 243836 - RNA, 24 nt, Human
cagcaaaaacugagaaauuuagug

SEQ ID NO: 243837 - RNA, 20 nt, Human
cagcagagaugaacuggggu

SEQ ID NO: 243838 - RNA, 25 nt, Human
cagcagagaugaacugggguaguac

SEQ ID NO: 243839 - RNA, 25 nt, Human
cagccuucaaacugaaggagcuuaa

SEQ ID NO: 243840 - RNA, 21 nt, Human
caggcacaaaaacacaaacaa

SEQ ID NO: 243841 - RNA, 20 nt, Human
caucagaaggguugaucagg

SEQ ID NO: 243842 - RNA, 20 nt, Human
cauuacugcaauaucagacu

SEQ ID NO: 243843 - RNA, 21 nt, Human
cauuacugcaauaucagacuu

SEQ ID NO: 243844 - RNA, 24 nt, Human
ccagaacuucaaaaaacauuauuc

SEQ ID NO: 243845 - RNA, 18 nt, Human
ccccccuccucuggcgcc

SEQ ID NO: 243846 - RNA, 19 nt, Human
ccccugcguccccccuccc

SEQ ID NO: 243847 - RNA, 19 nt, Human
ccuauguagacuaaagaau

SEQ ID NO: 243848 - RNA, 19 nt, Human
ccucccgcucucacacucu

SEQ ID NO: 243849 - RNA, 22 nt, Human
ccucucccagcgccgcgagagu

SEQ ID NO: 243850 - RNA, 19 nt, Human
ccugcucucucuuuuucuc

SEQ ID NO: 243851 - RNA, 21 nt, Human
cgcgcgccgccucccccuccg

SEQ ID NO: 243852 - RNA, 19 nt, Human
cggugcugacugcuucauc

SEQ ID NO: 243853 - RNA, 26 nt, Human
cuaguacccccacacacgcucaccca

SEQ ID NO: 243854 - RNA, 18 nt, Human
cuauguagacuaaagaau

SEQ ID NO: 243855 - RNA, 21 nt, Human
cugaauggggcccaaaccacu

SEQ ID NO: 243856 - RNA, 20 nt, Human
cugcaauaucagacuucaau

SEQ ID NO: 243857 - RNA, 18 nt, Human
cugcccugccugcuccug

SEQ ID NO: 243858 - RNA, 20 nt, Human
cugcccugccugcuccuggg

SEQ ID NO: 243859 - RNA, 20 nt, Human
cuucuguacacuuguuccca

SEQ ID NO: 243860 - RNA, 20 nt, Human
cuugcugagaaccucuucca

SEQ ID NO: 243861 - RNA, 18 nt, Human
gaaauacuguuauuuccc

SEQ ID NO: 243862 - RNA, 19 nt, Human
gaaauucucuacaucaucu

SEQ ID NO: 243863 - RNA, 19 nt, Human
gaacuugcaguaguaaaga

SEQ ID NO: 243864 - RNA, 19 nt, Human
gacacaguauagcauuugg

SEQ ID NO: 243865 - RNA, 18 nt, Human
gcaauaucagacuucaau

SEQ ID NO: 243866 - RNA, 25 nt, Human
gcacugaaauucucuacaaccggag

SEQ ID NO: 243867 - RNA, 22 nt, Human
gccaauguaagacaaaggaagg

SEQ ID NO: 243868 - RNA, 22 nt, Human
gccgcgcgccgccucccccucc

SEQ ID NO: 243869 - RNA, 23 nt, Human
gccucccccuccgcccucuccca

SEQ ID NO: 243870 - RNA, 22 nt, Human
gcuauuaaaaaagagggugcag

SEQ ID NO: 243871 - RNA, 27 nt, Human
ggcacaaaaacacaaacagcagggacu

SEQ ID NO: 243872 - RNA, 19 nt, Human
ggcggggaggcggcgcgcu

SEQ ID NO: 243873 - RNA, 18 nt, Human
ggggcccaaaccacuugc

SEQ ID NO: 243874 - RNA, 18 nt, Human
guagcacuuuuauguuau

SEQ ID NO: 243875 - RNA, 20 nt, Human
gugaaaggcacaacuuguuu

SEQ ID NO: 243876 - RNA, 22 nt, Human
gugcucucacucucucucacuc

SEQ ID NO: 243877 - RNA, 21 nt, Human
gugguguggcuggccuugguc

SEQ ID NO: 243878 - RNA, 18 nt, Human
uaaaaaauaagugcauca

SEQ ID NO: 243879 - RNA, 19 nt, Human
uaaaaaauaagugcaucaa

SEQ ID NO: 243880 - RNA, 18 nt, Human
uaaaaagccaauguaaga

SEQ ID NO: 243881 - RNA, 21 nt, Human
uaagacaaaugccucuaccua

SEQ ID NO: 243882 - RNA, 22 nt, Human
uaagauucacuguuuucccagu

SEQ ID NO: 243883 - RNA, 24 nt, Human
uaagugcaucaaguaucuuuguac

SEQ ID NO: 243884 - RNA, 19 nt, Human
uaaguggguggacaaaugc

SEQ ID NO: 243885 - RNA, 21 nt, Human
uacacucacuacauuauguca

SEQ ID NO: 243886 - RNA, 22 nt, Human
uaccaugccauucucccccacu

SEQ ID NO: 243887 - RNA, 18 nt, Human
uaccccacccugcucucu

SEQ ID NO: 243888 - RNA, 25 nt, Human
uacucccaacugcuuugguauuugc

SEQ ID NO: 243889 - RNA, 23 nt, Human
uagcagaagucaguuggguuggc

SEQ ID NO: 243890 - RNA, 18 nt, Human
uaggauaccacuggguga

SEQ ID NO: 243891 - RNA, 18 nt, Human
uaggguucuuugaacuug

SEQ ID NO: 243892 - RNA, 19 nt, Human
uagguaauuuugcaggaau

SEQ ID NO: 243893 - RNA, 21 nt, Human
uagguuccuccccaggcuggg

SEQ ID NO: 243894 - RNA, 23 nt, Human
uaguagguuccuccccaggcugg

SEQ ID NO: 243895 - RNA, 18 nt, Human
uauguaggauaccacugg

SEQ ID NO: 243896 - RNA, 19 nt, Human
ucacuguuuucccaguucu

SEQ ID NO: 243897 - RNA, 20 nt, Human
ucagcagagaugaacugggg

SEQ ID NO: 243898 - RNA, 21 nt, Human
ucagcuucuaguacccccaca

SEQ ID NO: 243899 - RNA, 27 nt, Human
uccagaaaagaaaaucccaaagcaaau

SEQ ID NO: 243900 - RNA, 22 nt, Human
ucccaacugcuuugguauuugc

SEQ ID NO: 243901 - RNA, 22 nt, Human
ucccauaauuauguugaaauua

SEQ ID NO: 243902 - RNA, 20 nt, Human
uccuccuuaccccacccugc

SEQ ID NO: 243903 - RNA, 22 nt, Human
uccucuggcgccgcgcgccgcc

SEQ ID NO: 243904 - RNA, 21 nt, Human
ucucccccacucucaaguagc

SEQ ID NO: 243905 - RNA, 21 nt, Human
ucucucucucucuaagacaaa

SEQ ID NO: 243906 - RNA, 24 nt, Human
ucuugggaaacacaauuggugcua

SEQ ID NO: 243907 - RNA, 19 nt, Human
ucuuucucucucucucucc

SEQ ID NO: 243908 - RNA, 19 nt, Human
ugaaaaguagccuaccaug

SEQ ID NO: 243909 - RNA, 20 nt, Human
ugaaaauaucacaugcccuc

SEQ ID NO: 243910 - RNA, 25 nt, Human
ugacaaaaauggaaaacuuugccua

SEQ ID NO: 243911 - RNA, 23 nt, Human
ugagaauuuucuuugcaauuucc

SEQ ID NO: 243912 - RNA, 23 nt, Human
ugagagagggcggggaggcggcg

SEQ ID NO: 243913 - RNA, 22 nt, Human
ugauguacuugucaaggcccug

SEQ ID NO: 243914 - RNA, 21 nt, Human
ugcauggccagucuacacuca

SEQ ID NO: 243915 - RNA, 18 nt, Human
ugccagaacuucaaaaaa

SEQ ID NO: 243916 - RNA, 19 nt, Human
ugccagaacuucaaaaaac

SEQ ID NO: 243917 - RNA, 24 nt, Human
ugcccugccugcuccugggacagc

SEQ ID NO: 243918 - RNA, 18 nt, Human
ugcgcggcggagaggagc

SEQ ID NO: 243919 - RNA, 19 nt, Human
uggaaaauuuaaaaagcca

SEQ ID NO: 243920 - RNA, 23 nt, Human
ugggagguaucauuauuccuggu

SEQ ID NO: 243921 - RNA, 21 nt, Human
ugguacacagcacugaaauuc

SEQ ID NO: 243922 - RNA, 21 nt, Human
uggucgggggcuccucccgcu

SEQ ID NO: 243923 - RNA, 19 nt, Human
ugugcaggcacaaaaacac

SEQ ID NO: 243924 - RNA, 18 nt, Human
uguuaaaaaguucaucua

SEQ ID NO: 243925 - RNA, 22 nt, Human
uguuaaaaaguucaucuaugaa

SEQ ID NO: 243926 - RNA, 23 nt, Human
uguucagcagagaugaacugggg

SEQ ID NO: 243927 - RNA, 23 nt, Human
uguuuuauaaacuugcugucuca

SEQ ID NO: 243928 - RNA, 27 nt, Human
uucccaguucugaucauagaagccauu

SEQ ID NO: 243929 - RNA, 24 nt, Human
uucuagccaacuuguuuuagaaaa

SEQ ID NO: 243930 - RNA, 22 nt, Human
uugggguggacuuggguguugc

SEQ ID NO: 243931 - RNA, 21 nt, Human
uuguguguuuagagucugaga

SEQ ID NO: 243932 - RNA, 22 nt, Human
uuguguguuuagagucugagag

SEQ ID NO: 243933 - RNA, 21 nt, Human
uuuauaaacuugcugucucac

SEQ ID NO: 243934 - RNA, 21 nt, Human
uuucuuucucauucuuucucu

SEQ ID NO: 243935 - RNA, 20 nt, Human
uuuguguggucgggggcucc

SEQ ID NO: 243936 - RNA, 27 nt, Human
aaacagaauagugaaaugaggggaccc

SEQ ID NO: 243937 - RNA, 21 nt, Human
aagagcucaugccuaaauauu

SEQ ID NO: 243938 - RNA, 29 nt, Human
agcaaaaauaauuguccaauugaacccag

SEQ ID NO: 243939 - RNA, 19 nt, Human
aguuuggggaugagauuau

SEQ ID NO: 243940 - RNA, 22 nt, Human
auagccuucaggcacaugaaag

SEQ ID NO: 243941 - RNA, 18 nt, Human
auauauuuauaucuauaa

SEQ ID NO: 243942 - RNA, 19 nt, Human
aucaggucaauuucugcau

SEQ ID NO: 243943 - RNA, 21 nt, Human
auugaaucuuucuucccauuu

SEQ ID NO: 243944 - RNA, 23 nt, Human
caaaacagagcagagcaaaaaua

SEQ ID NO: 243945 - RNA, 21 nt, Human
caaggccuucagaauguagug

SEQ ID NO: 243946 - RNA, 23 nt, Human
cagcaauaccacucaagucuagc

SEQ ID NO: 243947 - RNA, 21 nt, Human
caugcucuucccuuccugcaa

SEQ ID NO: 243948 - RNA, 28 nt, Human
ccugcaaucagacuccuugaucaacggg

SEQ ID NO: 243949 - RNA, 27 nt, Human
ccugcaaucagacuccuugguuuaauu

SEQ ID NO: 243950 - RNA, 18 nt, Human
cucaaaggguugauaaua

SEQ ID NO: 243951 - RNA, 23 nt, Human
gccuuguuauuucuccugcaacu

SEQ ID NO: 243952 - RNA, 21 nt, Human
uaacaaggccuucagaaugua

SEQ ID NO: 243953 - RNA, 21 nt, Human
uacuccaugcaaaacagagca

SEQ ID NO: 243954 - RNA, 19 nt, Human
uauaauacuguaucaaaca

SEQ ID NO: 243955 - RNA, 19 nt, Human
ucaggcacaugaaagguaa

SEQ ID NO: 243956 - RNA, 18 nt, Human
ucccaaauggccucagag

SEQ ID NO: 243957 - RNA, 21 nt, Human
ucguugugucguguucucaaa

SEQ ID NO: 243958 - RNA, 19 nt, Human
ucuaaacaccacuuccuca

SEQ ID NO: 243959 - RNA, 22 nt, Human
ucuuccuguugcaaauggaaau

SEQ ID NO: 243960 - RNA, 22 nt, Human
ugaaagggggggugaaacuggu

SEQ ID NO: 243961 - RNA, 22 nt, Human
ugaauaagaaguuauaauauuc

SEQ ID NO: 243962 - RNA, 21 nt, Human
ugcaacuauucaaggaagugg

SEQ ID NO: 243963 - RNA, 20 nt, Human
ugccaagagcucaugccuaa

SEQ ID NO: 243964 - RNA, 22 nt, Human
ugccagaauccuucucgggagc

SEQ ID NO: 243965 - RNA, 23 nt, Human
uguaguggauagccuucaggcac

SEQ ID NO: 243966 - RNA, 21 nt, Human
uucaggcacaugaaagguaaa

SEQ ID NO: 243967 - RNA, 20 nt, Human
uucauuuuuuaaauagaaaa

SEQ ID NO: 243968 - RNA, 18 nt, Human
uugaacccauguaaagcc

SEQ ID NO: 243969 - RNA, 25 nt, Human
uugauaauauuuucuggcuucuuuc

SEQ ID NO: 243970 - RNA, 23 nt, Human
aaagcgacauggcaaaccaccgg

SEQ ID NO: 243971 - RNA, 20 nt, Human
aaauagccccaagcacaaag

SEQ ID NO: 243972 - RNA, 24 nt, Human
aagaaacauuaaucaaaacuuaaa

SEQ ID NO: 243973 - RNA, 22 nt, Human
aagcaaauaauaauaauaaaau

SEQ ID NO: 243974 - RNA, 18 nt, Human
aaguccaccaaaugucaa

SEQ ID NO: 243975 - RNA, 19 nt, Human
acaggcagacagccaguca

SEQ ID NO: 243976 - RNA, 22 nt, Human
acaggugaaaugcacaucugaa

SEQ ID NO: 243977 - RNA, 22 nt, Human
acuguaauucagccuggcacag

SEQ ID NO: 243978 - RNA, 18 nt, Human
agacagccagucauggag

SEQ ID NO: 243979 - RNA, 19 nt, Human
agcaagauaaaguccacca

SEQ ID NO: 243980 - RNA, 24 nt, Human
agcuuucuccuuuuuuuuuuauuu

SEQ ID NO: 243981 - RNA, 25 nt, Human
agugcaauuguaagaaugacuaccc

SEQ ID NO: 243982 - RNA, 18 nt, Human
auaguaauaagaauaaag

SEQ ID NO: 243983 - RNA, 18 nt, Human
auggagcaggaacagcag

SEQ ID NO: 243984 - RNA, 24 nt, Human
augggaaggaggcccaaaagcgac

SEQ ID NO: 243985 - RNA, 23 nt, Human
caagauaaaguccaccaaauguc

SEQ ID NO: 243986 - RNA, 22 nt, Human
cacacaaauagccccaagcaca

SEQ ID NO: 243987 - RNA, 23 nt, Human
cacacaaauagccccaagcacaa

SEQ ID NO: 243988 - RNA, 19 nt, Human
cacacaguauacugaaaau

SEQ ID NO: 243989 - RNA, 23 nt, Human
caccucucgcuuccucccucgac

SEQ ID NO: 243990 - RNA, 20 nt, Human
cacuguaauucagccuggca

SEQ ID NO: 243991 - RNA, 21 nt, Human
cagagacaggcaugggaagga

SEQ ID NO: 243992 - RNA, 22 nt, Human
cagcaagauaaaguccaccaaa

SEQ ID NO: 243993 - RNA, 22 nt, Human
cagcaagauaaaguccaccaaa

SEQ ID NO: 243994 - RNA, 27 nt, Human
cauuaaucaaaacuuaaagagacauac

SEQ ID NO: 243995 - RNA, 24 nt, Human
ccaaaagcgacauggcaaaccacc

SEQ ID NO: 243996 - RNA, 18 nt, Human
ccacaguagacagacugg

SEQ ID NO: 243997 - RNA, 23 nt, Human
ccagcaagauaaaguccaccaaa

SEQ ID NO: 243998 - RNA, 25 nt, Human
cccaaaagcgacauggcaaaccacc

SEQ ID NO: 243999 - RNA, 23 nt, Human
ccccaagcacaaagccaauccac

SEQ ID NO: 244000 - RNA, 21 nt, Human
cucacaaggcucccuccuaga

SEQ ID NO: 244001 - RNA, 23 nt, Human
cugaguucuacaugaaaagcaaa

SEQ ID NO: 244002 - RNA, 21 nt, Human
gaaaauacaggcagacagcca

SEQ ID NO: 244003 - RNA, 20 nt, Human
gaaauacaaccagaagucua

SEQ ID NO: 244004 - RNA, 21 nt, Human
gaaauacaaccagaagucuac

SEQ ID NO: 244005 - RNA, 20 nt, Human
ggcucccuccuagagagaaa

SEQ ID NO: 244006 - RNA, 18 nt, Human
gggcaggggacucgcucu

SEQ ID NO: 244007 - RNA, 24 nt, Human
gggcaggggacucgcucuuuguug

SEQ ID NO: 244008 - RNA, 22 nt, Human
uaaguaucccacacaguauacu

SEQ ID NO: 244009 - RNA, 25 nt, Human
uacaaccagaagucuacagaucacc

SEQ ID NO: 244010 - RNA, 24 nt, Human
uagaaucuuggcacaugcuguguu

SEQ ID NO: 244011 - RNA, 22 nt, Human
uagacagacuggugaagcccca

SEQ ID NO: 244012 - RNA, 19 nt, Human
ucauagcagcaaagcaugc

SEQ ID NO: 244013 - RNA, 23 nt, Human
ucugaacagagacaggcauggga

SEQ ID NO: 244014 - RNA, 20 nt, Human
ugaaaugcacaucugaacag

SEQ ID NO: 244015 - RNA, 23 nt, Human
ugcuguguucuucauccuuuguc

SEQ ID NO: 244016 - RNA, 19 nt, Human
uggagcaggaacagcagug

SEQ ID NO: 244017 - RNA, 24 nt, Human
uucaaauaauuccauuuaagaaac

SEQ ID NO: 244018 - RNA, 20 nt, Human
uucacuguaauucagccugg

SEQ ID NO: 244019 - RNA, 18 nt, Human
uuuauuagaauaagagau

SEQ ID NO: 244020 - RNA, 23 nt, Human
uuuuuuuuuuuuuuuuuagcuuu

SEQ ID NO: 244021 - RNA, 19 nt, Human
aaccuaaggaagcagagcc

SEQ ID NO: 244022 - RNA, 21 nt, Human
aagcagagccucugagaccac

SEQ ID NO: 244023 - RNA, 19 nt, Human
agcuggaagggcggggcau

SEQ ID NO: 244024 - RNA, 18 nt, Human
aggaggguggguggaggc

SEQ ID NO: 244025 - RNA, 21 nt, Human
agggacggugggcaggucacc

SEQ ID NO: 244026 - RNA, 18 nt, Human
caccagcgggacgcaggg

SEQ ID NO: 244027 - RNA, 22 nt, Human
cagagccucugagaccacacac

SEQ ID NO: 244028 - RNA, 25 nt, Human
cagaggcaccccggccaggacgggc

SEQ ID NO: 244029 - RNA, 23 nt, Human
cagcuggaagggcggggcaugga

SEQ ID NO: 244030 - RNA, 19 nt, Human
caggaggguggguggaggc

SEQ ID NO: 244031 - RNA, 19 nt, Human
ccccgccacggugcucucc

SEQ ID NO: 244032 - RNA, 22 nt, Human
ccgcgggccggcggcggcggcg

SEQ ID NO: 244033 - RNA, 20 nt, Human
ccggcggcggcggcgccucu

SEQ ID NO: 244034 - RNA, 24 nt, Human
ccggcggcggcggcgccucuagcc

SEQ ID NO: 244035 - RNA, 25 nt, Human
ccucuagccggggcccauagggggc

SEQ ID NO: 244036 - RNA, 20 nt, Human
cgaagaaggcugacgccgca

SEQ ID NO: 244037 - RNA, 21 nt, Human
cgaggcccgaagaaggcugac

SEQ ID NO: 244038 - RNA, 19 nt, Human
cgaggguagccgaggggcg

SEQ ID NO: 244039 - RNA, 24 nt, Human
cgcagcccgaguccgagaggcagg

SEQ ID NO: 244040 - RNA, 22 nt, Human
cgccacggugcucuccgcaggg

SEQ ID NO: 244041 - RNA, 19 nt, Human
cggcccaggccggcgucgg

SEQ ID NO: 244042 - RNA, 24 nt, Human
cggcgucggggcggccgagggcgg

SEQ ID NO: 244043 - RNA, 21 nt, Human
gcccguccccagaggcacccc

SEQ ID NO: 244044 - RNA, 23 nt, Human
gccgcuaccgcugccgaggcccg

SEQ ID NO: 244045 - RNA, 19 nt, Human
gccgggagcggucggcgcc

SEQ ID NO: 244046 - RNA, 21 nt, Human
gcgggccggcggcggcggcga

SEQ ID NO: 244047 - RNA, 18 nt, Human
ggcaggucaccagcggga

SEQ ID NO: 244048 - RNA, 21 nt, Human
ggcggccgagggcgggcggcg

SEQ ID NO: 244049 - RNA, 19 nt, Human
ggcggcggcgccucuagcc

SEQ ID NO: 244050 - RNA, 22 nt, Human
ggcggcggcggcgccucuagcc

SEQ ID NO: 244051 - RNA, 22 nt, Human
ggcggggcauggacagggacgg

SEQ ID NO: 244052 - RNA, 22 nt, Human
gggacggugggcaggucaccag

SEQ ID NO: 244053 - RNA, 19 nt, Human
gggcauggacagggacggu

SEQ ID NO: 244054 - RNA, 19 nt, Human
ggggcauggacagggacgg

SEQ ID NO: 244055 - RNA, 22 nt, Human
ggggcggccgagggcgggcggc

SEQ ID NO: 244056 - RNA, 20 nt, Human
ucaccagcgggacgcaggga

SEQ ID NO: 244057 - RNA, 24 nt, Human
uccccagaggcaccccggccagga

SEQ ID NO: 244058 - RNA, 22 nt, Human
uccucagcuggaagggcggggc

SEQ ID NO: 244059 - RNA, 25 nt, Human
ugaggcgagcgagccgcuaccgcug

SEQ ID NO: 244060 - RNA, 24 nt, Human
uuuugcuuuuucucucccuguuuu

SEQ ID NO: 244061 - RNA, 23 nt, Human
uuuuuuuuuuuuuuuugcuuuuu

SEQ ID NO: 244062 - RNA, 25 nt, Human
uuuuuuuuuuuuuuuuuugcuuuuu

SEQ ID NO: 244063 - RNA, 27 nt, Human
uuuuuuuuuuuuuuuuuuuuuuugggg

SEQ ID NO: 244064 - RNA, 23 nt, Human
aaagaucagcuuucccugaauaa

SEQ ID NO: 244065 - RNA, 24 nt, Human
aaauauuaaaauagauccugagcc

SEQ ID NO: 244066 - RNA, 18 nt, Human
acaaugagccacaacugc

SEQ ID NO: 244067 - RNA, 19 nt, Human
acugcccugguauuuaaga

SEQ ID NO: 244068 - RNA, 24 nt, Human
agcauccuguuucuacuguaguug

SEQ ID NO: 244069 - RNA, 20 nt, Human
agccagugacaaaaaauuug

SEQ ID NO: 244070 - RNA, 22 nt, Human
agccagugacaaaaaauuugaa

SEQ ID NO: 244071 - RNA, 18 nt, Human
aggcagauacugauuuua

SEQ ID NO: 244072 - RNA, 20 nt, Human
augggccaacaguaaaaugc

SEQ ID NO: 244073 - RNA, 24 nt, Human
cacaaugagccacaacugcccugg

SEQ ID NO: 244074 - RNA, 23 nt, Human
ccaacaguaaaaugcacaaugag

SEQ ID NO: 244075 - RNA, 23 nt, Human
ccccgcugcguccgcgggcuccg

SEQ ID NO: 244076 - RNA, 23 nt, Human
cccgcagcagucccgcggcagcc

SEQ ID NO: 244077 - RNA, 18 nt, Human
cccugguauuuaagaaaa

SEQ ID NO: 244078 - RNA, 19 nt, Human
ccgccgcggcucgcggcuc

SEQ ID NO: 244079 - RNA, 28 nt, Human
ccgccucccgcagcagucccgcggcagc

SEQ ID NO: 244080 - RNA, 18 nt, Human
ccgcugcccgccucccgc

SEQ ID NO: 244081 - RNA, 19 nt, Human
ccggcgccgccaccgacuu

SEQ ID NO: 244082 - RNA, 19 nt, Human
ccucccgcagcagucccgc

SEQ ID NO: 244083 - RNA, 24 nt, Human
cgcggcccccgcugcccgccuccc

SEQ ID NO: 244084 - RNA, 19 nt, Human
cggcgggggccgcugcagg

SEQ ID NO: 244085 - RNA, 26 nt, Human
cucgcggcccccgcugcccgccuccc

SEQ ID NO: 244086 - RNA, 18 nt, Human
cugcccgccucccgcagc

SEQ ID NO: 244087 - RNA, 18 nt, Human
gaaaugaaugggccaaca

SEQ ID NO: 244088 - RNA, 19 nt, Human
gaccuaaaagaggcagaua

SEQ ID NO: 244089 - RNA, 26 nt, Human
gaggccggcggugaggcggcaaggaa

SEQ ID NO: 244090 - RNA, 18 nt, Human
gagggcuccuccgccgcc

SEQ ID NO: 244091 - RNA, 21 nt, Human
gcaaggaagagcggcugcuca

SEQ ID NO: 244092 - RNA, 18 nt, Human
gcgggcgcgcugcucgcc

SEQ ID NO: 244093 - RNA, 22 nt, Human
ggaauugcagaacccccugcuu

SEQ ID NO: 244094 - RNA, 20 nt, Human
ggcgacggggaagucgagga

SEQ ID NO: 244095 - RNA, 18 nt, Human
ggcggcgggcgcccgcuu

SEQ ID NO: 244096 - RNA, 20 nt, Human
gggaagucgaggaggccggc

SEQ ID NO: 244097 - RNA, 23 nt, Human
uaaaauagauccugagccccuca

SEQ ID NO: 244098 - RNA, 22 nt, Human
uaaaaugcacaaugagccacaa

SEQ ID NO: 244099 - RNA, 22 nt, Human
uagaauaucaaugugguucccc

SEQ ID NO: 244100 - RNA, 21 nt, Human
uagauccugagccccucagcc

SEQ ID NO: 244101 - RNA, 28 nt, Human
uagcauacucugaccuaaaagaggcaga

SEQ ID NO: 244102 - RNA, 24 nt, Human
ucauagcuguucaguggcaucaug

SEQ ID NO: 244103 - RNA, 20 nt, Human
ucauuuuuuuuuucugguuu

SEQ ID NO: 244104 - RNA, 25 nt, Human
ucggcggcgggcgcccgcuucuccc

SEQ ID NO: 244105 - RNA, 19 nt, Human
ucugaccuaaaagaggcag

SEQ ID NO: 244106 - RNA, 18 nt, Human
ugaaaauacaaaaccaua

SEQ ID NO: 244107 - RNA, 24 nt, Human
ugaaaauacaaaaccauaauuucc

SEQ ID NO: 244108 - RNA, 22 nt, Human
ugacaaaaaauuugaacggaau

SEQ ID NO: 244109 - RNA, 18 nt, Human
ugagccccucagccgcua

SEQ ID NO: 244110 - RNA, 21 nt, Human
uggaagccggucccacucccc

SEQ ID NO: 244111 - RNA, 20 nt, Human
ugggcuuuugcauacugagc

SEQ ID NO: 244112 - RNA, 23 nt, Human
uguuucuacuguaguugaucugc

SEQ ID NO: 244113 - RNA, 18 nt, Human
uucauuguuuuccuguuc

SEQ ID NO: 244114 - RNA, 21 nt, Human
uucccugaauaaacaaaaaug

SEQ ID NO: 244115 - RNA, 26 nt, Human
uuuuaaaaauauauguauguauugcu

SEQ ID NO: 244116 - RNA, 22 nt, Human
uuuuuuuuucugguuugaaaaa

SEQ ID NO: 244117 - RNA, 26 nt, Human
aaaaaaacccuuucaaagggcaggcu

SEQ ID NO: 244118 - RNA, 18 nt, Human
aaaucccccaugaugccc

SEQ ID NO: 244119 - RNA, 24 nt, Human
aagaaaaaaaacccuuucaaaggg

SEQ ID NO: 244120 - RNA, 21 nt, Human
acccgugccccccaaacggca

SEQ ID NO: 244121 - RNA, 20 nt, Human
agagugaacauccugcccag

SEQ ID NO: 244122 - RNA, 21 nt, Human
aggaauaaguuaagugucccc

SEQ ID NO: 244123 - RNA, 21 nt, Human
aggcgggcgguggugggcagg

SEQ ID NO: 244124 - RNA, 22 nt, Human
auccugcccagggccuccccca

SEQ ID NO: 244125 - RNA, 18 nt, Human
auggagggcagucccugc

SEQ ID NO: 244126 - RNA, 19 nt, Human
auggagggcagucccugcg

SEQ ID NO: 244127 - RNA, 20 nt, Human
auggagggcagucccugcgg

SEQ ID NO: 244128 - RNA, 24 nt, Human
cacccgugccccccaaacggcaga

SEQ ID NO: 244129 - RNA, 20 nt, Human
caccuuguggcauggcgggc

SEQ ID NO: 244130 - RNA, 18 nt, Human
cagggcuccacccccugg

SEQ ID NO: 244131 - RNA, 20 nt, Human
cagguucacccgugcccccc

SEQ ID NO: 244132 - RNA, 19 nt, Human
cccacccuccccccagugc

SEQ ID NO: 244133 - RNA, 22 nt, Human
ccccagugcagggugggcacag

SEQ ID NO: 244134 - RNA, 19 nt, Human
cccccagugcagggugggc

SEQ ID NO: 244135 - RNA, 19 nt, Human
ccccccagugcaggguggg

SEQ ID NO: 244136 - RNA, 18 nt, Human
ccccccucccuccuuccc

SEQ ID NO: 244137 - RNA, 23 nt, Human
cccugcccacccuccccccagug

SEQ ID NO: 244138 - RNA, 19 nt, Human
cccugcggggucuagggag

SEQ ID NO: 244139 - RNA, 21 nt, Human
ccggcggccgggauggagggc

SEQ ID NO: 244140 - RNA, 19 nt, Human
ccugcccacccucccccca

SEQ ID NO: 244141 - RNA, 23 nt, Human
ccugcccagggccucccccaccu

SEQ ID NO: 244142 - RNA, 21 nt, Human
cggcagagggcuaagagggcc

SEQ ID NO: 244143 - RNA, 19 nt, Human
cgggcggggcggggcgggg

SEQ ID NO: 244144 - RNA, 22 nt, Human
cggggcggggugggaguggggc

SEQ ID NO: 244145 - RNA, 19 nt, Human
cgggggcugcgggaggccg

SEQ ID NO: 244146 - RNA, 21 nt, Human
cugcccagggccucccccacc

SEQ ID NO: 244147 - RNA, 24 nt, Human
cuuccccaauaaauagagugaaca

SEQ ID NO: 244148 - RNA, 19 nt, Human
gcacagggcuccacccccu

SEQ ID NO: 244149 - RNA, 18 nt, Human
gcaggagcaagaaaaaaa

SEQ ID NO: 244150 - RNA, 25 nt, Human
gcggggugggaguggggcggcaggu

SEQ ID NO: 244151 - RNA, 19 nt, Human
ggccauggcuggggcgccc

SEQ ID NO: 244152 - RNA, 23 nt, Human
ggcggggcggggcggggugggag

SEQ ID NO: 244153 - RNA, 18 nt, Human
ggcuggggcagggccugg

SEQ ID NO: 244154 - RNA, 19 nt, Human
gggccgggggcugcgggag

SEQ ID NO: 244155 - RNA, 19 nt, Human
gggcggggugggagugggg

SEQ ID NO: 244156 - RNA, 20 nt, Human
gggcugcgggaggccgcuuc

SEQ ID NO: 244157 - RNA, 24 nt, Human
gggcuggggcagggccuggggcgc

SEQ ID NO: 244158 - RNA, 19 nt, Human
ggggugggaguggggcggc

SEQ ID NO: 244159 - RNA, 22 nt, Human
guucacccgugccccccaaacg

SEQ ID NO: 244160 - RNA, 18 nt, Human
uaagagggccuggccgcg

SEQ ID NO: 244161 - RNA, 23 nt, Human
uacgggcggggcggggcggggug

SEQ ID NO: 244162 - RNA, 18 nt, Human
ucauggcugcccaggcgg

SEQ ID NO: 244163 - RNA, 23 nt, Human
ucccccaugaugcccugucccug

SEQ ID NO: 244164 - RNA, 19 nt, Human
ucccugcccacccuccccc

SEQ ID NO: 244165 - RNA, 20 nt, Human
ucccugcccacccucccccc

SEQ ID NO: 244166 - RNA, 21 nt, Human
ugcagggugggcacagggcuc

SEQ ID NO: 244167 - RNA, 24 nt, Human
ugccaaaucccccaugaugcccug

SEQ ID NO: 244168 - RNA, 18 nt, Human
ugcccgcgggaugcagag

SEQ ID NO: 244169 - RNA, 21 nt, Human
ugggcacagggcuccaccccc

SEQ ID NO: 244170 - RNA, 18 nt, Human
uggggcgcccuccgcagg

SEQ ID NO: 244171 - RNA, 24 nt, Human
uguacgggcggggcggggcggggu

SEQ ID NO: 244172 - RNA, 18 nt, Human
aaaggggggugggguccc

SEQ ID NO: 244173 - RNA, 18 nt, Human
aaggcuuccugugcagug

SEQ ID NO: 244174 - RNA, 19 nt, Human
acccccaaagggggguggg

SEQ ID NO: 244175 - RNA, 28 nt, Human
accuccccuccucccugcaucaccccag

SEQ ID NO: 244176 - RNA, 21 nt, Human
agagcccuggccccagaugac

SEQ ID NO: 244177 - RNA, 22 nt, Human
aggcauccagagagcccuggcc

SEQ ID NO: 244178 - RNA, 20 nt, Human
aguuuauuuggcuucuggcu

SEQ ID NO: 244179 - RNA, 25 nt, Human
caccuccccuccucccugcaucacc

SEQ ID NO: 244180 - RNA, 18 nt, Human
cacuggaucccgaggcua

SEQ ID NO: 244181 - RNA, 24 nt, Human
cacuggaucccgaggcuaagacuc

SEQ ID NO: 244182 - RNA, 19 nt, Human
cagccccagacccacgccu

SEQ ID NO: 244183 - RNA, 22 nt, Human
cccacgccucucuggggagcca

SEQ ID NO: 244184 - RNA, 20 nt, Human
ccccagacccacgccucucu

SEQ ID NO: 244185 - RNA, 18 nt, Human
ccccagaugacccccagg

SEQ ID NO: 244186 - RNA, 25 nt, Human
cccccaaagggggguggggucccug

SEQ ID NO: 244187 - RNA, 21 nt, Human
cccccagggcaggagguccau

SEQ ID NO: 244188 - RNA, 22 nt, Human
ccccccgcaucucgggcuucug

SEQ ID NO: 244189 - RNA, 19 nt, Human
ccccgcucccuucuuccuc

SEQ ID NO: 244190 - RNA, 24 nt, Human
ccccgcucccuucuuccuccuccc

SEQ ID NO: 244191 - RNA, 20 nt, Human
ccccgucuccuuuggccccg

SEQ ID NO: 244192 - RNA, 18 nt, Human
ccccuuccagugugaagg

SEQ ID NO: 244193 - RNA, 21 nt, Human
cccggaaccugggcauccggg

SEQ ID NO: 244194 - RNA, 20 nt, Human
cccugcaccuccccuccucc

SEQ ID NO: 244195 - RNA, 19 nt, Human
cccuggccccagaugaccc

SEQ ID NO: 244196 - RNA, 18 nt, Human
cccuggcccucagcccca

SEQ ID NO: 244197 - RNA, 24 nt, Human
cccuggcuggggcagcaggaaggc

SEQ ID NO: 244198 - RNA, 24 nt, Human
ccgaccccgcucccuucuuccucc

SEQ ID NO: 244199 - RNA, 20 nt, Human
ccgggcccuggcccucagcc

SEQ ID NO: 244200 - RNA, 18 nt, Human
ccugcaucaccccagcag

SEQ ID NO: 244201 - RNA, 24 nt, Human
ccugcaucaccccagcaggcaauu

SEQ ID NO: 244202 - RNA, 22 nt, Human
ccuggccccagaugacccccag

SEQ ID NO: 244203 - RNA, 27 nt, Human
ccuggccccgucuccuuuggccccgac

SEQ ID NO: 244204 - RNA, 18 nt, Human
ccuggcccucagccccag

SEQ ID NO: 244205 - RNA, 21 nt, Human
ccuguuccuggccccgucucc

SEQ ID NO: 244206 - RNA, 30 nt, Human
cgcaggucccccuuccagugugaaggcuuu

SEQ ID NO: 244207 - RNA, 22 nt, Human
cgccucaacuccgguugggucu

SEQ ID NO: 244208 - RNA, 23 nt, Human
cggaaccugggcauccgggcccu

SEQ ID NO: 244209 - RNA, 23 nt, Human
cggccccucuucccugcaccucc

SEQ ID NO: 244210 - RNA, 19 nt, Human
cucccuucuuccuccuccc

SEQ ID NO: 244211 - RNA, 23 nt, Human
cuccggcgccucaccauggcuag

SEQ ID NO: 244212 - RNA, 24 nt, Human
cugcaccuccccuccucccugcag

SEQ ID NO: 244213 - RNA, 26 nt, Human
cuggggcagcaggaaggcauccagag

SEQ ID NO: 244214 - RNA, 27 nt, Human
cuuccugugcaguguaguguuccugac

SEQ ID NO: 244215 - RNA, 20 nt, Human
gagcucgggggaguggccug

SEQ ID NO: 244216 - RNA, 19 nt, Human
gcagcuggagcucggggga

SEQ ID NO: 244217 - RNA, 22 nt, Human
gccccggggccuccggcgccuc

SEQ ID NO: 244218 - RNA, 25 nt, Human
gccggccccucuucccugcaccucc

SEQ ID NO: 244219 - RNA, 20 nt, Human
gcuccgaccccgcucccuuc

SEQ ID NO: 244220 - RNA, 24 nt, Human
gcugaggccggccccucuucccug

SEQ ID NO: 244221 - RNA, 21 nt, Human
gcuggguacaguguugggccc

SEQ ID NO: 244222 - RNA, 20 nt, Human
ggaccuacagguuucagaug

SEQ ID NO: 244223 - RNA, 21 nt, Human
ggcagcaggaaggcauccaga

SEQ ID NO: 244224 - RNA, 18 nt, Human
gggcagcaggaaggcauc

SEQ ID NO: 244225 - RNA, 21 nt, Human
gggcaguguggucaggccggg

SEQ ID NO: 244226 - RNA, 21 nt, Human
gggcccuggcccucagcccca

SEQ ID NO: 244227 - RNA, 24 nt, Human
ggggggaccuacagguuucagaug

SEQ ID NO: 244228 - RNA, 19 nt, Human
gggggguggggccccgggg

SEQ ID NO: 244229 - RNA, 20 nt, Human
gggggguggggucccugggg

SEQ ID NO: 244230 - RNA, 20 nt, Human
ggguggggccccggggccuc

SEQ ID NO: 244231 - RNA, 23 nt, Human
ggucaggccggggggguggggcc

SEQ ID NO: 244232 - RNA, 19 nt, Human
gguggggccccggggccuc

SEQ ID NO: 244233 - RNA, 18 nt, Human
gguggggucccuggggaa

SEQ ID NO: 244234 - RNA, 19 nt, Human
gguggggucccuggggaaa

SEQ ID NO: 244235 - RNA, 20 nt, Human
guagggcaggugagcugggg

SEQ ID NO: 244236 - RNA, 24 nt, Human
gugacagcugaggccggccccucu

SEQ ID NO: 244237 - RNA, 23 nt, Human
uaagacuccaacccuggcugggg

SEQ ID NO: 244238 - RNA, 20 nt, Human
ucaccauggcuagcuuggag

SEQ ID NO: 244239 - RNA, 21 nt, Human
uccagagagcccuggccccag

SEQ ID NO: 244240 - RNA, 22 nt, Human
ucccugagacaggcucuggucc

SEQ ID NO: 244241 - RNA, 19 nt, Human
ucccuggggaaacugaggc

SEQ ID NO: 244242 - RNA, 19 nt, Human
ucucugggugcccgugguc

SEQ ID NO: 244243 - RNA, 20 nt, Human
ucucugggugcccguggucc

SEQ ID NO: 244244 - RNA, 18 nt, Human
ugacccagcuccuguucc

SEQ ID NO: 244245 - RNA, 19 nt, Human
ugcaccuccccuccucccu

SEQ ID NO: 244246 - RNA, 19 nt, Human
ugcucuaagcccuagggca

SEQ ID NO: 244247 - RNA, 19 nt, Human
ugcuggugacagcugaggc

SEQ ID NO: 244248 - RNA, 20 nt, Human
ugcugugacuccuccuaagg

SEQ ID NO: 244249 - RNA, 20 nt, Human
uggagcaguccugggagccu

SEQ ID NO: 244250 - RNA, 22 nt, Human
uggaggagggcacccagggcag

SEQ ID NO: 244251 - RNA, 18 nt, Human
uggccccagaugaccccc

SEQ ID NO: 244252 - RNA, 24 nt, Human
uggcuucuggcuucacuggauccc

SEQ ID NO: 244253 - RNA, 18 nt, Human
ugggucuuuuugcgcagg

SEQ ID NO: 244254 - RNA, 19 nt, Human
ugggucuuuuugcgcaggg

SEQ ID NO: 244255 - RNA, 19 nt, Human
uucucugggugcccguggu

SEQ ID NO: 244256 - RNA, 21 nt, Human
uuuuuuggggagacagcuuuu

SEQ ID NO: 244257 - RNA, 21 nt, Human
uuuuuuuuuuuuggggagaca

SEQ ID NO: 244258 - RNA, 20 nt, Human
aaagugcagucuaagugguu

SEQ ID NO: 244259 - RNA, 22 nt, Human
aacagcaccccgguucuucagc

SEQ ID NO: 244260 - RNA, 22 nt, Human
aaccucccccugggccuuaaga

SEQ ID NO: 244261 - RNA, 18 nt, Human
aggacccagccuuagccu

SEQ ID NO: 244262 - RNA, 18 nt, Human
auaaagacaacccuggcu

SEQ ID NO: 244263 - RNA, 20 nt, Human
aucuuucuguugauuaugug

SEQ ID NO: 244264 - RNA, 18 nt, Human
auuucaagguuuuucaca

SEQ ID NO: 244265 - RNA, 21 nt, Human
caccgccccuccccccacccc

SEQ ID NO: 244266 - RNA, 23 nt, Human
caccgccccuccccccacccccu

SEQ ID NO: 244267 - RNA, 20 nt, Human
cacugggcccucgggggcuc

SEQ ID NO: 244268 - RNA, 21 nt, Human
cagcacaaaaggcggcgcugc

SEQ ID NO: 244269 - RNA, 22 nt, Human
cagcacaaaaggcggcgcugcu

SEQ ID NO: 244270 - RNA, 24 nt, Human
cagccccaucuuucuguugauuau

SEQ ID NO: 244271 - RNA, 21 nt, Human
ccaccgccccuccccccaccc

SEQ ID NO: 244272 - RNA, 22 nt, Human
cccaccgccccuccccccaccc

SEQ ID NO: 244273 - RNA, 20 nt, Human
cccagccuuagccucccucc

SEQ ID NO: 244274 - RNA, 22 nt, Human
cccccuauuauuuggggauaaa

SEQ ID NO: 244275 - RNA, 18 nt, Human
ccccuccccccacccccu

SEQ ID NO: 244276 - RNA, 23 nt, Human
cccucccaccgccccucccccca

SEQ ID NO: 244277 - RNA, 20 nt, Human
ccgccccuccccccaccccc

SEQ ID NO: 244278 - RNA, 19 nt, Human
ccuaaccucccccugggcc

SEQ ID NO: 244279 - RNA, 18 nt, Human
ccucagaggggaggaccc

SEQ ID NO: 244280 - RNA, 20 nt, Human
ccugagaaaccucagagggg

SEQ ID NO: 244281 - RNA, 23 nt, Human
ccugccccucccaccgccccucc

SEQ ID NO: 244282 - RNA, 19 nt, Human
ccuuagccacagcucuacg

SEQ ID NO: 244283 - RNA, 22 nt, Human
cgcauauauauauauauaugua

SEQ ID NO: 244284 - RNA, 18 nt, Human
cgccccuccccccacccc

SEQ ID NO: 244285 - RNA, 26 nt, Human
cggaacagaaaagugcagucuaagug

SEQ ID NO: 244286 - RNA, 24 nt, Human
cggccgcagcacaaaaggcggcgc

SEQ ID NO: 244287 - RNA, 21 nt, Human
cucccuccucccaagugcaaa

SEQ ID NO: 244288 - RNA, 18 nt, Human
cugcugcagcuccgcucc

SEQ ID NO: 244289 - RNA, 20 nt, Human
gaaaccucagaggggaggac

SEQ ID NO: 244290 - RNA, 19 nt, Human
gauaaaagcagggacuuaa

SEQ ID NO: 244291 - RNA, 18 nt, Human
gauggugaacacugggcc

SEQ ID NO: 244292 - RNA, 18 nt, Human
gcauauauauauauauau

SEQ ID NO: 244293 - RNA, 19 nt, Human
gccuuagccucccuccucc

SEQ ID NO: 244294 - RNA, 19 nt, Human
gcgcauauauauauauaua

SEQ ID NO: 244295 - RNA, 19 nt, Human
gcgcauauauauauauaua

SEQ ID NO: 244296 - RNA, 21 nt, Human
gggcaggaaggggcuugcccu

SEQ ID NO: 244297 - RNA, 23 nt, Human
gggguggggcaggaaggggcuug

SEQ ID NO: 244298 - RNA, 21 nt, Human
uacauugccaccugagaaacc

SEQ ID NO: 244299 - RNA, 22 nt, Human
uacauugccaccugagaaaccu

SEQ ID NO: 244300 - RNA, 20 nt, Human
uaggacaguccccaccccaa

SEQ ID NO: 244301 - RNA, 18 nt, Human
uauauauauauguauaua

SEQ ID NO: 244302 - RNA, 18 nt, Human
uauauauauguauauaua

SEQ ID NO: 244303 - RNA, 18 nt, Human
uauauauguauauauaua

SEQ ID NO: 244304 - RNA, 19 nt, Human
uauauauguauauauauau

SEQ ID NO: 244305 - RNA, 18 nt, Human
uauauguauauauauaua

SEQ ID NO: 244306 - RNA, 18 nt, Human
uauauguauauauauaua

SEQ ID NO: 244307 - RNA, 20 nt, Human
uauauguauauauauauaau

SEQ ID NO: 244308 - RNA, 23 nt, Human
uauguauauauauauaauccaua

SEQ ID NO: 244309 - RNA, 25 nt, Human
uauguauauauauauaauccauaua

SEQ ID NO: 244310 - RNA, 19 nt, Human
uauguggcgcauauauaua

SEQ ID NO: 244311 - RNA, 30 nt, Human
uauguggcgcauauauauauauauauguaa

SEQ ID NO: 244312 - RNA, 18 nt, Human
ucccaccgccccuccccc

SEQ ID NO: 244313 - RNA, 22 nt, Human
ucccaccgccccuccccccacc

SEQ ID NO: 244314 - RNA, 20 nt, Human
ucccuccucccaagugcaaa

SEQ ID NO: 244315 - RNA, 23 nt, Human
uccgcggccgcagcacaaaaggc

SEQ ID NO: 244316 - RNA, 18 nt, Human
ucuccugccccucccacc

SEQ ID NO: 244317 - RNA, 22 nt, Human
ugggguggggcaggaaggggcu

SEQ ID NO: 244318 - RNA, 23 nt, Human
uguauauauauauaauccauaua

SEQ ID NO: 244319 - RNA, 21 nt, Human
uguggcgcauauauauauaua

SEQ ID NO: 244320 - RNA, 21 nt, Human
uguggcgcauauauauauaua

SEQ ID NO: 244321 - RNA, 25 nt, Human
uguggcgcauauauauauauauaug

SEQ ID NO: 244322 - RNA, 27 nt, Human
uuauguggcgcauauauauauauauau

SEQ ID NO: 244323 - RNA, 22 nt, Human
uuccacagcugccagugucccu

SEQ ID NO: 244324 - RNA, 23 nt, Human
uucuauugccuuguugcuugcug

SEQ ID NO: 244325 - RNA, 24 nt, Human
uuucaagguuuuucacagggguug

SEQ ID NO: 244326 - RNA, 21 nt, Human
uuuucuauugccuuguugcua

SEQ ID NO: 244327 - RNA, 18 nt, Human
aaaauaaauaucaauguu

SEQ ID NO: 244328 - RNA, 22 nt, Human
aaaaugcugggagagaguggga

SEQ ID NO: 244329 - RNA, 21 nt, Human
agagagugggaugagucuggg

SEQ ID NO: 244330 - RNA, 22 nt, Human
agcuagaauauucaauaaaaua

SEQ ID NO: 244331 - RNA, 20 nt, Human
agggggugguaaagaugggg

SEQ ID NO: 244332 - RNA, 24 nt, Human
augacacucagaagauuuuuggga

SEQ ID NO: 244333 - RNA, 23 nt, Human
auucaauaaaauagaucccugcc

SEQ ID NO: 244334 - RNA, 25 nt, Human
cucuuuuuuuuuuugcaagaaauua

SEQ ID NO: 244335 - RNA, 24 nt, Human
gagagagugggaugagucuggggg

SEQ ID NO: 244336 - RNA, 23 nt, Human
gggugggguggaucugaaaugcc

SEQ ID NO: 244337 - RNA, 21 nt, Human
gugggguggaucugaaaugcc

SEQ ID NO: 244338 - RNA, 19 nt, Human
ucugggggugggguggauc

SEQ ID NO: 244339 - RNA, 23 nt, Human
uuccagagauuugcgaagucuca

SEQ ID NO: 244340 - RNA, 24 nt, Human
uuuuugcaagaaauuauugucucu

SEQ ID NO: 244341 - RNA, 22 nt, Human
aacagaguccaccucucaacag

SEQ ID NO: 244342 - RNA, 18 nt, Human
aaccugaaaaguguggug

SEQ ID NO: 244343 - RNA, 21 nt, Human
aagggcucgcccaccccuucu

SEQ ID NO: 244344 - RNA, 24 nt, Human
aaugcuacgugaguccugaguagc

SEQ ID NO: 244345 - RNA, 22 nt, Human
acagaugagggaacugagugcc

SEQ ID NO: 244346 - RNA, 18 nt, Human
acagcagccuggagggug

SEQ ID NO: 244347 - RNA, 18 nt, Human
accagggagccuucccag

SEQ ID NO: 244348 - RNA, 19 nt, Human
acucgacuggagcaggggc

SEQ ID NO: 244349 - RNA, 23 nt, Human
acugauccaagcgggucaggcca

SEQ ID NO: 244350 - RNA, 20 nt, Human
agaacacaggucagccuugg

SEQ ID NO: 244351 - RNA, 21 nt, Human
agccagcagcaaaggggcaca

SEQ ID NO: 244352 - RNA, 22 nt, Human
aggaccuguguugcaacaaccu

SEQ ID NO: 244353 - RNA, 24 nt, Human
aggagguugaggcuagcagacacc

SEQ ID NO: 244354 - RNA, 23 nt, Human
aggcugcaguucuuuaugugcug

SEQ ID NO: 244355 - RNA, 27 nt, Human
agugugaugcugagcugugcucugggg

SEQ ID NO: 244356 - RNA, 24 nt, Human
auaccugcugaccugguucugcac

SEQ ID NO: 244357 - RNA, 21 nt, Human
auccugagagagaccaaacac

SEQ ID NO: 244358 - RNA, 19 nt, Human
auucuaccagggagccuuc

SEQ ID NO: 244359 - RNA, 23 nt, Human
caaacacagagcaggucacuuag

SEQ ID NO: 244360 - RNA, 26 nt, Human
caacucaggaccuguguugcaacaag

SEQ ID NO: 244361 - RNA, 21 nt, Human
caagcgggucaggccaacucg

SEQ ID NO: 244362 - RNA, 24 nt, Human
caaugguaacagaguccaccucuc

SEQ ID NO: 244363 - RNA, 26 nt, Human
cacacauacucauccuccaaacaucc

SEQ ID NO: 244364 - RNA, 20 nt, Human
cacugaucauguccauccac

SEQ ID NO: 244365 - RNA, 23 nt, Human
cacuuagaaucccagaccuggga

SEQ ID NO: 244366 - RNA, 22 nt, Human
cagaggucaacucaggaccugu

SEQ ID NO: 244367 - RNA, 21 nt, Human
cagcaggguggggcagggcuc

SEQ ID NO: 244368 - RNA, 18 nt, Human
cagccuggagggugaggg

SEQ ID NO: 244369 - RNA, 21 nt, Human
cagcucaagacugugucccuu

SEQ ID NO: 244370 - RNA, 21 nt, Human
caggaaggcugcuuuccggca

SEQ ID NO: 244371 - RNA, 23 nt, Human
caggaccuguguugcaacaaccu

SEQ ID NO: 244372 - RNA, 24 nt, Human
caggagguugaggcuagcagacac

SEQ ID NO: 244373 - RNA, 19 nt, Human
caucacccuucaccuuuac

SEQ ID NO: 244374 - RNA, 19 nt, Human
cauucugcuugcccccacc

SEQ ID NO: 244375 - RNA, 22 nt, Human
cauucuuuuccccuacacccaa

SEQ ID NO: 244376 - RNA, 18 nt, Human
ccagguaacuccugccau

SEQ ID NO: 244377 - RNA, 25 nt, Human
cccaccccuucugacccaggcugga

SEQ ID NO: 244378 - RNA, 20 nt, Human
cccacugugagccggggggc

SEQ ID NO: 244379 - RNA, 23 nt, Human
ccucugccacacauacucauccu

SEQ ID NO: 244380 - RNA, 19 nt, Human
ccuuggguugggggagaaa

SEQ ID NO: 244381 - RNA, 23 nt, Human
cggacgucucucucugcugcuuu

SEQ ID NO: 244382 - RNA, 19 nt, Human
cggcguccccugccccagg

SEQ ID NO: 244383 - RNA, 19 nt, Human
cuccccugucugccaacaa

SEQ ID NO: 244384 - RNA, 19 nt, Human
cuccuacagugucacugcc

SEQ ID NO: 244385 - RNA, 24 nt, Human
cucgcccaccccuucugacccagg

SEQ ID NO: 244386 - RNA, 24 nt, Human
cugcaucacccuucaccuuuacag

SEQ ID NO: 244387 - RNA, 22 nt, Human
cugcugcucuggggaagagugg

SEQ ID NO: 244388 - RNA, 20 nt, Human
cuggagcaggggcagaaaaa

SEQ ID NO: 244389 - RNA, 23 nt, Human
cugggagaagaggcuaagcuggg

SEQ ID NO: 244390 - RNA, 22 nt, Human
cuuuccggcaguguggagccgg

SEQ ID NO: 244391 - RNA, 23 nt, Human
gacagcucaagacugugucccuu

SEQ ID NO: 244392 - RNA, 24 nt, Human
gagaagaggcuaagcuggggcaau

SEQ ID NO: 244393 - RNA, 22 nt, Human
gagcagucugacucaaugugga

SEQ ID NO: 244394 - RNA, 22 nt, Human
gaggcuagcagacacccccuga

SEQ ID NO: 244395 - RNA, 26 nt, Human
gcagcaaaggggcacaugucugggga

SEQ ID NO: 244396 - RNA, 23 nt, Human
gcagccaugaaagugcuuugagg

SEQ ID NO: 244397 - RNA, 26 nt, Human
gcccaccccuucugacccaggcugga

SEQ ID NO: 244398 - RNA, 22 nt, Human
gcuuuccuuagcacugaucaug

SEQ ID NO: 244399 - RNA, 23 nt, Human
ggagccuucccagggucaggcau

SEQ ID NO: 244400 - RNA, 22 nt, Human
ggagucucggcguccccugccc

SEQ ID NO: 244401 - RNA, 20 nt, Human
ggcugagccuguguuuucag

SEQ ID NO: 244402 - RNA, 21 nt, Human
gggcagugcugggccugaagg

SEQ ID NO: 244403 - RNA, 18 nt, Human
ggggcaauggggaagggg

SEQ ID NO: 244404 - RNA, 20 nt, Human
ggguugggggagaaaggcag

SEQ ID NO: 244405 - RNA, 19 nt, Human
gguugggggagaaaggcag

SEQ ID NO: 244406 - RNA, 20 nt, Human
uaacuccugccauccuccuu

SEQ ID NO: 244407 - RNA, 24 nt, Human
uacaaagaguucucuacaacccag

SEQ ID NO: 244408 - RNA, 23 nt, Human
uacaacccagacucugcaguacc

SEQ ID NO: 244409 - RNA, 20 nt, Human
uacagugucacugcccugcc

SEQ ID NO: 244410 - RNA, 21 nt, Human
uaccagggagccuucccaggg

SEQ ID NO: 244411 - RNA, 18 nt, Human
uauccugcaucacccuuc

SEQ ID NO: 244412 - RNA, 24 nt, Human
ucaaugguaacagaguccaccucu

SEQ ID NO: 244413 - RNA, 24 nt, Human
ucaggcauucuuuuccccuacacc

SEQ ID NO: 244414 - RNA, 24 nt, Human
ucauccugagagagaccaaacaca

SEQ ID NO: 244415 - RNA, 19 nt, Human
uccccagguaacuccugcc

SEQ ID NO: 244416 - RNA, 21 nt, Human
uccccgggagcagucugacuc

SEQ ID NO: 244417 - RNA, 22 nt, Human
uccccugggaacggcugagccu

SEQ ID NO: 244418 - RNA, 23 nt, Human
uccucaaugguaacagaguccac

SEQ ID NO: 244419 - RNA, 18 nt, Human
uccugcaucacccuucac

SEQ ID NO: 244420 - RNA, 24 nt, Human
uccuuagcacugaucauguccauc

SEQ ID NO: 244421 - RNA, 21 nt, Human
ucuacaacccagacucugcag

SEQ ID NO: 244422 - RNA, 23 nt, Human
ucucuacaacccagacucugcag

SEQ ID NO: 244423 - RNA, 20 nt, Human
ucugccacacauacucaucc

SEQ ID NO: 244424 - RNA, 21 nt, Human
ugacccaggcuggaagcugcu

SEQ ID NO: 244425 - RNA, 22 nt, Human
ugagagagaccaaacacagagc

SEQ ID NO: 244426 - RNA, 22 nt, Human
ugagcuggccaggugaggccag

SEQ ID NO: 244427 - RNA, 22 nt, Human
ugagcuucucccacggagucuc

SEQ ID NO: 244428 - RNA, 21 nt, Human
ugagggaacugagugccagcg

SEQ ID NO: 244429 - RNA, 19 nt, Human
ugaguccugaguagcuccc

SEQ ID NO: 244430 - RNA, 19 nt, Human
ugagugccagcgagucugg

SEQ ID NO: 244431 - RNA, 24 nt, Human
ugcacugaaccugaguuugggccc

SEQ ID NO: 244432 - RNA, 24 nt, Human
ugccacacauacucauccuccaaa

SEQ ID NO: 244433 - RNA, 25 nt, Human
ugccagagggcagccaugaaagugc

SEQ ID NO: 244434 - RNA, 23 nt, Human
ugcugagcugugcucuggggaac

SEQ ID NO: 244435 - RNA, 20 nt, Human
ugcugcucuggggaagagug

SEQ ID NO: 244436 - RNA, 20 nt, Human
ugcugcugcgaggcccuggu

SEQ ID NO: 244437 - RNA, 20 nt, Human
ugcugggccugaaggggcuc

SEQ ID NO: 244438 - RNA, 18 nt, Human
uggaagagguuugaggag

SEQ ID NO: 244439 - RNA, 21 nt, Human
uggaagagguuugaggaguca

SEQ ID NO: 244440 - RNA, 23 nt, Human
uggcggauguuuuuucagcaggg

SEQ ID NO: 244441 - RNA, 24 nt, Human
ugggcccuuacacacuugacacuc

SEQ ID NO: 244442 - RNA, 22 nt, Human
uggguugggggagaaaggcagg

SEQ ID NO: 244443 - RNA, 18 nt, Human
ugguagccagcagcaaag

SEQ ID NO: 244444 - RNA, 22 nt, Human
ugguucugcacugaaccugagu

SEQ ID NO: 244445 - RNA, 19 nt, Human
ugucaucaccccaaacuuu

SEQ ID NO: 244446 - RNA, 20 nt, Human
ugucuuggcaagauguggga

SEQ ID NO: 244447 - RNA, 18 nt, Human
ugugcugggggccggggc

SEQ ID NO: 244448 - RNA, 20 nt, Human
uguuuuguuuccccagguaa

SEQ ID NO: 244449 - RNA, 21 nt, Human
uucugacccaggcuggaagcu

SEQ ID NO: 244450 - RNA, 22 nt, Human
uugcuaugcuccuacaguguca

SEQ ID NO: 244451 - RNA, 18 nt, Human
uuuaugugugccucugcc

SEQ ID NO: 244452 - RNA, 21 nt, Human
aaacaggagauuaaaaacaaa

SEQ ID NO: 244453 - RNA, 22 nt, Human
aaacaggagauuaaaaacaagg

SEQ ID NO: 244454 - RNA, 20 nt, Human
aacaacaaaaaagguaaagg

SEQ ID NO: 244455 - RNA, 23 nt, Human
aacaacaacaaaaaagguaaagg

SEQ ID NO: 244456 - RNA, 21 nt, Human
aaccucguggccaccagcccu

SEQ ID NO: 244457 - RNA, 23 nt, Human
acaacaaaaaagguaaagguuuc

SEQ ID NO: 244458 - RNA, 27 nt, Human
acaacaacaaaaaagguaaagguuuca

SEQ ID NO: 244459 - RNA, 20 nt, Human
accucguggccaccagcccu

SEQ ID NO: 244460 - RNA, 19 nt, Human
agaauuuuccaaguccaua

SEQ ID NO: 244461 - RNA, 21 nt, Human
auacaguagugauuaagagaa

SEQ ID NO: 244462 - RNA, 22 nt, Human
caacaaaaaagguaaagguuuc

SEQ ID NO: 244463 - RNA, 23 nt, Human
caacaacaacaaaaaagguaaag

SEQ ID NO: 244464 - RNA, 24 nt, Human
cacagucagugcacucaacaaaca

SEQ ID NO: 244465 - RNA, 25 nt, Human
caccggagccccgaagugcgggagu

SEQ ID NO: 244466 - RNA, 20 nt, Human
cagcuugccaacaacaacaa

SEQ ID NO: 244467 - RNA, 23 nt, Human
ccaacaacaacaaaaaagguaaa

SEQ ID NO: 244468 - RNA, 21 nt, Human
ccccgcauggccgcggcgggc

SEQ ID NO: 244469 - RNA, 22 nt, Human
ccugcagcuugccaacaacaac

SEQ ID NO: 244470 - RNA, 21 nt, Human
cgcuugucaccugugcagucu

SEQ ID NO: 244471 - RNA, 31 nt, Human
cguggccaccagcccuccagagggccuuuuc

SEQ ID NO: 244472 - RNA, 21 nt, Human
cugcagcuugccaacaacaac

SEQ ID NO: 244473 - RNA, 20 nt, Human
gcuugucaccugugcagucu

SEQ ID NO: 244474 - RNA, 24 nt, Human
ggaggagacagaggcgaugguccg

SEQ ID NO: 244475 - RNA, 27 nt, Human
ggccgcggcgggcaguaagcugcagcc

SEQ ID NO: 244476 - RNA, 19 nt, Human
uaaaaacaagguaugggac

SEQ ID NO: 244477 - RNA, 22 nt, Human
uaaagguuucacagucagugca

SEQ ID NO: 244478 - RNA, 22 nt, Human
uaaccucguggccaccagcccu

SEQ ID NO: 244479 - RNA, 19 nt, Human
uacaaaccugcagcuugcc

SEQ ID NO: 244480 - RNA, 23 nt, Human
uacaaaccugcagcuugccaaca

SEQ ID NO: 244481 - RNA, 25 nt, Human
uacaguagugauuaagagaauuuuc

SEQ ID NO: 244482 - RNA, 26 nt, Human
uacaguagugauuaagagaauuuucc

SEQ ID NO: 244483 - RNA, 22 nt, Human
ucaaaacacuacgcugauguca

SEQ ID NO: 244484 - RNA, 21 nt, Human
ucacagucagugcacucaaca

SEQ ID NO: 244485 - RNA, 23 nt, Human
ucagccuuuugcauuacaaaccu

SEQ ID NO: 244486 - RNA, 18 nt, Human
ucgcgcgagacacggagg

SEQ ID NO: 244487 - RNA, 22 nt, Human
uggccgcggcgggcaguaagcu

SEQ ID NO: 244488 - RNA, 19 nt, Human
uuauacugcuucucagcac

SEQ ID NO: 244489 - RNA, 22 nt, Human
uucacagucagugcacucaaca

SEQ ID NO: 244490 - RNA, 23 nt, Human
uugaaccuagaaaggucaaaaca

SEQ ID NO: 244491 - RNA, 19 nt, Human
uuucacagucagugcacuu

SEQ ID NO: 244492 - RNA, 20 nt, Human
aaacaaauguacgacagguc

SEQ ID NO: 244493 - RNA, 23 nt, Human
aaacaaauguacgacaggucaga

SEQ ID NO: 244494 - RNA, 26 nt, Human
aaacaaauguacgacaggucagaaac

SEQ ID NO: 244495 - RNA, 22 nt, Human
aaacuuuauacaguaauugaaa

SEQ ID NO: 244496 - RNA, 22 nt, Human
aaauacuggauuuaaagugcag

SEQ ID NO: 244497 - RNA, 22 nt, Human
acggagcuuccuuuucuuggcc

SEQ ID NO: 244498 - RNA, 21 nt, Human
agucaauauuacaauuaacac

SEQ ID NO: 244499 - RNA, 21 nt, Human
auauuacaaacacacagaagc

SEQ ID NO: 244500 - RNA, 19 nt, Human
auuacaauuaacacagaga

SEQ ID NO: 244501 - RNA, 20 nt, Human
caaacacacagaagccuaaa

SEQ ID NO: 244502 - RNA, 21 nt, Human
caaacacacagaagccuaaac

SEQ ID NO: 244503 - RNA, 21 nt, Human
caccgccuggccagccacagc

SEQ ID NO: 244504 - RNA, 23 nt, Human
cagcgccuuucuccucucccuuc

SEQ ID NO: 244505 - RNA, 23 nt, Human
caguaauugaaauuacgcauuuc

SEQ ID NO: 244506 - RNA, 22 nt, Human
cauaaacgacucaaacaaaugu

SEQ ID NO: 244507 - RNA, 21 nt, Human
caugaguaaacaaauacugga

SEQ ID NO: 244508 - RNA, 19 nt, Human
cauugcucucagauucugc

SEQ ID NO: 244509 - RNA, 19 nt, Human
ccagccgcaccgccuggcc

SEQ ID NO: 244510 - RNA, 19 nt, Human
ccccaagaagaucagcucu

SEQ ID NO: 244511 - RNA, 20 nt, Human
ccgcaccgccuggccagcca

SEQ ID NO: 244512 - RNA, 19 nt, Human
ccgccgcgccgccgccucc

SEQ ID NO: 244513 - RNA, 19 nt, Human
ccgcgcccucgccgccgcg

SEQ ID NO: 244514 - RNA, 21 nt, Human
ccgcgccgccgccuccucucc

SEQ ID NO: 244515 - RNA, 20 nt, Human
ccgcgccgcucgcccucugc

SEQ ID NO: 244516 - RNA, 28 nt, Human
ccgggcagcaacggcggcggcguccccc

SEQ ID NO: 244517 - RNA, 24 nt, Human
ccuccguggccgcgccgcucgccc

SEQ ID NO: 244518 - RNA, 22 nt, Human
ccuccucuccggcgcccucucc

SEQ ID NO: 244519 - RNA, 25 nt, Human
ccugcgccgcggugcagcucaaggg

SEQ ID NO: 244520 - RNA, 22 nt, Human
ccuuaaaaauuauagaaauaga

SEQ ID NO: 244521 - RNA, 23 nt, Human
cgacucaaacaaauguacgacag

SEQ ID NO: 244522 - RNA, 18 nt, Human
cgccgcgcccucgccgcc

SEQ ID NO: 244523 - RNA, 20 nt, Human
cgccgcgccgccgccuccuc

SEQ ID NO: 244524 - RNA, 24 nt, Human
cgccuccucuccggcgcccucucc

SEQ ID NO: 244525 - RNA, 21 nt, Human
cggcggcggcucgcuccuccu

SEQ ID NO: 244526 - RNA, 21 nt, Human
cucgccgccgcgccgccgccu

SEQ ID NO: 244527 - RNA, 24 nt, Human
cuguuuuuuuuuuuuuuaacauga

SEQ ID NO: 244528 - RNA, 25 nt, Human
gcagaguuuagaguacagcggaccg

SEQ ID NO: 244529 - RNA, 22 nt, Human
gccgcgccgcucgcccucugcc

SEQ ID NO: 244530 - RNA, 19 nt, Human
gcgccgcgcccucgccgcc

SEQ ID NO: 244531 - RNA, 21 nt, Human
gcugaagugcaauagcugcug

SEQ ID NO: 244532 - RNA, 20 nt, Human
ggaagggacggagcuuccuu

SEQ ID NO: 244533 - RNA, 19 nt, Human
gggcagcaacggcggcggc

SEQ ID NO: 244534 - RNA, 24 nt, Human
gggugagcgggaagggacggagcu

SEQ ID NO: 244535 - RNA, 20 nt, Human
gugcagcgccuuucuccucu

SEQ ID NO: 244536 - RNA, 27 nt, Human
guguuuugucuguuuuuuuuuuuuuuc

SEQ ID NO: 244537 - RNA, 18 nt, Human
uaaagugcagcgccuuuc

SEQ ID NO: 244538 - RNA, 20 nt, Human
uacgacaggucagaaacuua

SEQ ID NO: 244539 - RNA, 24 nt, Human
uauuagagcauauuacaaacacac

SEQ ID NO: 244540 - RNA, 24 nt, Human
ucgcgcgccgcgcccucgccgccg

SEQ ID NO: 244541 - RNA, 20 nt, Human
uggccggcugacaagucggc

SEQ ID NO: 244542 - RNA, 24 nt, Human
uggccggcugacaagucggcuucg

SEQ ID NO: 244543 - RNA, 19 nt, Human
uggcugaagugcaauagcu

SEQ ID NO: 244544 - RNA, 20 nt, Human
uggcugaagugcaauagcug

SEQ ID NO: 244545 - RNA, 18 nt, Human
ugugcaacugguacaguu

SEQ ID NO: 244546 - RNA, 25 nt, Human
uucccacccccaagaagaucagcuc

SEQ ID NO: 244547 - RNA, 22 nt, Human
uuuuuuuuuuguugagagucuc

SEQ ID NO: 244548 - RNA, 20 nt, Human
uuuuuuuuuuuuuuguugag

SEQ ID NO: 244549 - RNA, 20 nt, Human
uuuuuuuuuuuuuuuuuguu

SEQ ID NO: 244550 - RNA, 24 nt, Human
uuuuuuuuuuuuuuuuuuuuuggg

SEQ ID NO: 244551 - RNA, 18 nt, Human
aaaaaugcagcaaauaua

SEQ ID NO: 244552 - RNA, 26 nt, Human
aaaaggaaaauaaacaaugaaaaaaa

SEQ ID NO: 244553 - RNA, 25 nt, Human
aaauaaacaaugaaaaaaaugcagc

SEQ ID NO: 244554 - RNA, 22 nt, Human
aacacgccaaaaagcuaacacu

SEQ ID NO: 244555 - RNA, 26 nt, Human
aauaaacaaugaaaaaaaugcagcaa

SEQ ID NO: 244556 - RNA, 18 nt, Human
acacgccaaaaagcuaac

SEQ ID NO: 244557 - RNA, 20 nt, Human
acauacacacaaucacagaa

SEQ ID NO: 244558 - RNA, 21 nt, Human
acuuccgguuccgggcugaaa

SEQ ID NO: 244559 - RNA, 18 nt, Human
agaacacgccaaaaagcu

SEQ ID NO: 244560 - RNA, 23 nt, Human
agcuaguuugauaccuccuguuc

SEQ ID NO: 244561 - RNA, 26 nt, Human
aggaaaauaaacaaugaaaaaaaugc

SEQ ID NO: 244562 - RNA, 19 nt, Human
aggaagaaaugaucauuua

SEQ ID NO: 244563 - RNA, 25 nt, Human
aggaggagggccguaaacuccgggg

SEQ ID NO: 244564 - RNA, 19 nt, Human
aggcaguuggcauucagaa

SEQ ID NO: 244565 - RNA, 21 nt, Human
auagagcagcugccacuuacc

SEQ ID NO: 244566 - RNA, 27 nt, Human
auucagaacacgccaaaaagcuaacua

SEQ ID NO: 244567 - RNA, 21 nt, Human
caacacacauacacacaauca

SEQ ID NO: 244568 - RNA, 27 nt, Human
caacacacauacacacaaucacagaau

SEQ ID NO: 244569 - RNA, 26 nt, Human
caagaauaaagucauucuugagguuc

SEQ ID NO: 244570 - RNA, 21 nt, Human
cagaacacgccaaaaagcuaa

SEQ ID NO: 244571 - RNA, 24 nt, Human
caguaaaauuguauguccaccaug

SEQ ID NO: 244572 - RNA, 22 nt, Human
cauucagaacacgccaaaaagc

SEQ ID NO: 244573 - RNA, 19 nt, Human
ccaaaaagcuaacacucau

SEQ ID NO: 244574 - RNA, 24 nt, Human
ccccgcccacuacacuuccgguuc

SEQ ID NO: 244575 - RNA, 24 nt, Human
cccgcgcccacccgccuccggacc

SEQ ID NO: 244576 - RNA, 19 nt, Human
ccgccuccggaccgacccu

SEQ ID NO: 244577 - RNA, 26 nt, Human
ccgggugagacccgcgcccacccgcc

SEQ ID NO: 244578 - RNA, 21 nt, Human
ccuccggaccgacccucagcc

SEQ ID NO: 244579 - RNA, 22 nt, Human
ccuccggaccgacccucagccu

SEQ ID NO: 244580 - RNA, 21 nt, Human
ccucuaauaugaaaaaaugga

SEQ ID NO: 244581 - RNA, 20 nt, Human
cgccaaaaagcuaacacuca

SEQ ID NO: 244582 - RNA, 27 nt, Human
gaaaaggaaaauaaacaaugaaaaaaa

SEQ ID NO: 244583 - RNA, 21 nt, Human
gaggcagcggccacagccgug

SEQ ID NO: 244584 - RNA, 19 nt, Human
gccaaaaagcuaacacuca

SEQ ID NO: 244585 - RNA, 26 nt, Human
gccacaguucacugcaucuugcgugc

SEQ ID NO: 244586 - RNA, 24 nt, Human
ggaaacaggaggagggccguaaac

SEQ ID NO: 244587 - RNA, 20 nt, Human
ggauggaacugaguucagua

SEQ ID NO: 244588 - RNA, 18 nt, Human
ggcucuggcuccgcugcg

SEQ ID NO: 244589 - RNA, 27 nt, Human
uaaaaaaaaagucuuucuuugcauauu

SEQ ID NO: 244590 - RNA, 19 nt, Human
uaacuugguauauaccauc

SEQ ID NO: 244591 - RNA, 26 nt, Human
uaauauaccaccaaucacucuaaauu

SEQ ID NO: 244592 - RNA, 19 nt, Human
uacccugucuuuaacuugg

SEQ ID NO: 244593 - RNA, 23 nt, Human
uauaccaucuuuugggaaaaaaa

SEQ ID NO: 244594 - RNA, 23 nt, Human
ucaacacacauacacacaaucac

SEQ ID NO: 244595 - RNA, 19 nt, Human
ucacugcaggaagaaauga

SEQ ID NO: 244596 - RNA, 22 nt, Human
ucagaacacgccaaaaagcuaa

SEQ ID NO: 244597 - RNA, 23 nt, Human
ucagaacacgccaaaaagcuaac

SEQ ID NO: 244598 - RNA, 24 nt, Human
uccaagaaucacugcaggaagaaa

SEQ ID NO: 244599 - RNA, 26 nt, Human
uccaagaaucacugcaggaagaaaug

SEQ ID NO: 244600 - RNA, 18 nt, Human
uccgggcugaaaucggaa

SEQ ID NO: 244601 - RNA, 22 nt, Human
uccgggguaggggaggggagaa

SEQ ID NO: 244602 - RNA, 19 nt, Human
uccguggcggggguagagg

SEQ ID NO: 244603 - RNA, 21 nt, Human
ugaaaaaauggacgcuguuug

SEQ ID NO: 244604 - RNA, 22 nt, Human
ugagaaaacaauccaagaauca

SEQ ID NO: 244605 - RNA, 27 nt, Human
ugagaugagauacaagaauaaagucau

SEQ ID NO: 244606 - RNA, 19 nt, Human
uggaacugaguucaguacu

SEQ ID NO: 244607 - RNA, 22 nt, Human
uguauguccaccaugagaaaag

SEQ ID NO: 244608 - RNA, 19 nt, Human
uguccaccaugagaaaagg

SEQ ID NO: 244609 - RNA, 21 nt, Human
uuauaagguuuuccuuuccuu

SEQ ID NO: 244610 - RNA, 28 nt, Human
uuuaagagauuaauauuagagucauaaa

SEQ ID NO: 244611 - RNA, 30 nt, Human
uuuacaguuucaacacacauacacacagug

SEQ ID NO: 244612 - RNA, 20 nt, Human
aaauccucucaccugcagaa

SEQ ID NO: 244613 - RNA, 19 nt, Human
aaccacauuccaacuccuc

SEQ ID NO: 244614 - RNA, 24 nt, Human
aaccucuucccuccugggaaccac

SEQ ID NO: 244615 - RNA, 22 nt, Human
aagaagcaaggcaggcaguggg

SEQ ID NO: 244616 - RNA, 19 nt, Human
aagggcgaugguccuggcu

SEQ ID NO: 244617 - RNA, 23 nt, Human
acagcaccagaaggaagaagcaa

SEQ ID NO: 244618 - RNA, 19 nt, Human
acagggcgccucuuccugc

SEQ ID NO: 244619 - RNA, 20 nt, Human
acaguucaucucagcugccu

SEQ ID NO: 244620 - RNA, 24 nt, Human
acucuacugcccggagagccaugg

SEQ ID NO: 244621 - RNA, 23 nt, Human
agccuauggucuucacagcacca

SEQ ID NO: 244622 - RNA, 21 nt, Human
agcggccccugccucagccca

SEQ ID NO: 244623 - RNA, 25 nt, Human
aggcaggcaccagcucacccuggcu

SEQ ID NO: 244624 - RNA, 22 nt, Human
aggugauggugggaggaggggu

SEQ ID NO: 244625 - RNA, 24 nt, Human
aggugauggugggaggaggggugg

SEQ ID NO: 244626 - RNA, 20 nt, Human
aucccaggccccagaugcuc

SEQ ID NO: 244627 - RNA, 19 nt, Human
caacagaugacacaaccaa

SEQ ID NO: 244628 - RNA, 23 nt, Human
caagucccccagccugacucaca

SEQ ID NO: 244629 - RNA, 19 nt, Human
cacaaccaaggcaggucca

SEQ ID NO: 244630 - RNA, 24 nt, Human
cacagcaccagaaggaagaagcaa

SEQ ID NO: 244631 - RNA, 25 nt, Human
cacagcaccagaaggaagaagcaag

SEQ ID NO: 244632 - RNA, 22 nt, Human
caccagaaggaagaagcaaggc

SEQ ID NO: 244633 - RNA, 20 nt, Human
caccaggcccugcucucccg

SEQ ID NO: 244634 - RNA, 23 nt, Human
caccugcagaacagagauggcuu

SEQ ID NO: 244635 - RNA, 23 nt, Human
cacgccuggcucuggggaagccc

SEQ ID NO: 244636 - RNA, 21 nt, Human
cacucuacugcccggagagcc

SEQ ID NO: 244637 - RNA, 18 nt, Human
cagagaccaagcaccccu

SEQ ID NO: 244638 - RNA, 21 nt, Human
cagaggauggggcaccugcug

SEQ ID NO: 244639 - RNA, 25 nt, Human
cagaugacacaaccaaggcaggucc

SEQ ID NO: 244640 - RNA, 20 nt, Human
cagaugcuccccugguccuc

SEQ ID NO: 244641 - RNA, 21 nt, Human
cagcccaccggggccaguccu

SEQ ID NO: 244642 - RNA, 26 nt, Human
cagccuauggucuucacagcaccaga

SEQ ID NO: 244643 - RNA, 24 nt, Human
cagcucccugguuccacaccaggc

SEQ ID NO: 244644 - RNA, 21 nt, Human
cagcugccugccagccuaugg

SEQ ID NO: 244645 - RNA, 19 nt, Human
caggcaccagcucacccug

SEQ ID NO: 244646 - RNA, 20 nt, Human
cagggcugagaggcuggaga

SEQ ID NO: 244647 - RNA, 23 nt, Human
cagugguaaagacaguucaucuc

SEQ ID NO: 244648 - RNA, 21 nt, Human
caguuccaggucucuuagacc

SEQ ID NO: 244649 - RNA, 18 nt, Human
caucccaggccccagaug

SEQ ID NO: 244650 - RNA, 20 nt, Human
ccagaugcuccccugguccu

SEQ ID NO: 244651 - RNA, 24 nt, Human
cccacagcucccugguuccacacc

SEQ ID NO: 244652 - RNA, 19 nt, Human
cccagggacagauacggac

SEQ ID NO: 244653 - RNA, 21 nt, Human
ccccagaugcuccccuggucc

SEQ ID NO: 244654 - RNA, 20 nt, Human
ccccucaucagugguaaaga

SEQ ID NO: 244655 - RNA, 24 nt, Human
ccccugccucagcccaccggggcc

SEQ ID NO: 244656 - RNA, 25 nt, Human
ccccuggcuccuuuccaccuggccu

SEQ ID NO: 244657 - RNA, 23 nt, Human
cccgacccuucuccuaugccucc

SEQ ID NO: 244658 - RNA, 20 nt, Human
cccugcuugcuacccucagc

SEQ ID NO: 244659 - RNA, 23 nt, Human
ccucucaccugcagaacagagau

SEQ ID NO: 244660 - RNA, 21 nt, Human
ccucuucccuccugggaacca

SEQ ID NO: 244661 - RNA, 21 nt, Human
ccugguggcacccccucccca

SEQ ID NO: 244662 - RNA, 21 nt, Human
cgacccuucuccuaugccucc

SEQ ID NO: 244663 - RNA, 21 nt, Human
cucacacacucuacugccccu

SEQ ID NO: 244664 - RNA, 21 nt, Human
cuccuuuccaccuggccugcc

SEQ ID NO: 244665 - RNA, 20 nt, Human
cucucggccugcuuccucuc

SEQ ID NO: 244666 - RNA, 18 nt, Human
cugccucagcccaccggg

SEQ ID NO: 244667 - RNA, 20 nt, Human
cuggagaaguggagggcuac

SEQ ID NO: 244668 - RNA, 20 nt, Human
cuggccugccccuucugugg

SEQ ID NO: 244669 - RNA, 18 nt, Human
cuggggcauggggggcag

SEQ ID NO: 244670 - RNA, 23 nt, Human
cuugggacagcagggucugcugg

SEQ ID NO: 244671 - RNA, 22 nt, Human
cuuugcagagaccaagcacccc

SEQ ID NO: 244672 - RNA, 24 nt, Human
gaaggcagagaacaugugggaaau

SEQ ID NO: 244673 - RNA, 20 nt, Human
gaccuguuuuucuuccauuu

SEQ ID NO: 244674 - RNA, 25 nt, Human
gagaacaugugggaaauagucuaac

SEQ ID NO: 244675 - RNA, 20 nt, Human
gaggacccugggcugagacc

SEQ ID NO: 244676 - RNA, 24 nt, Human
gccccugccucagcccaccggggc

SEQ ID NO: 244677 - RNA, 20 nt, Human
gccguuguggcacaggcaga

SEQ ID NO: 244678 - RNA, 18 nt, Human
gcugagaccuguuuuucu

SEQ ID NO: 244679 - RNA, 22 nt, Human
gcugagaggcuggagaagugga

SEQ ID NO: 244680 - RNA, 19 nt, Human
ggagauggggagggcgugg

SEQ ID NO: 244681 - RNA, 24 nt, Human
ggccgccauccucuggcaguucca

SEQ ID NO: 244682 - RNA, 19 nt, Human
ggcucaggccugacgacag

SEQ ID NO: 244683 - RNA, 18 nt, Human
ggcucuggggaagcccag

SEQ ID NO: 244684 - RNA, 19 nt, Human
ggcugagaggcuggagaag

SEQ ID NO: 244685 - RNA, 19 nt, Human
gggaagcccaggccgccau

SEQ ID NO: 244686 - RNA, 20 nt, Human
gggacagcagggucugcugg

SEQ ID NO: 244687 - RNA, 18 nt, Human
gggaggaaguggccuuca

SEQ ID NO: 244688 - RNA, 19 nt, Human
gggaggaaguggccuucag

SEQ ID NO: 244689 - RNA, 21 nt, Human
gggagggcguggagaauccgg

SEQ ID NO: 244690 - RNA, 22 nt, Human
gggcagaggauggggcaccugc

SEQ ID NO: 244691 - RNA, 25 nt, Human
gggcagaggauggggcaccugcugg

SEQ ID NO: 244692 - RNA, 19 nt, Human
ggggcaccugcuggccguu

SEQ ID NO: 244693 - RNA, 19 nt, Human
gggggcagggagacuggga

SEQ ID NO: 244694 - RNA, 23 nt, Human
gggugggcuugggacagcagggu

SEQ ID NO: 244695 - RNA, 21 nt, Human
ggguggugacaagguaugaac

SEQ ID NO: 244696 - RNA, 19 nt, Human
ggugggaggaggggugggc

SEQ ID NO: 244697 - RNA, 18 nt, Human
guggagggcuacuguccc

SEQ ID NO: 244698 - RNA, 23 nt, Human
uacaggguucacagggcgccucu

SEQ ID NO: 244699 - RNA, 22 nt, Human
uauggucuucacagcaccagaa

SEQ ID NO: 244700 - RNA, 21 nt, Human
ucaaaguggggagugagggag

SEQ ID NO: 244701 - RNA, 23 nt, Human
ucacaaccccugcuugcuacccu

SEQ ID NO: 244702 - RNA, 21 nt, Human
ucagcccaccggggccagucc

SEQ ID NO: 244703 - RNA, 19 nt, Human
ucccaggccccagaugcuc

SEQ ID NO: 244704 - RNA, 24 nt, Human
ucccaggccccagaugcuccccug

SEQ ID NO: 244705 - RNA, 20 nt, Human
ucccaggguuacugugucuc

SEQ ID NO: 244706 - RNA, 21 nt, Human
ucccaggguuacugugucuca

SEQ ID NO: 244707 - RNA, 23 nt, Human
ucccccagccugacucacaaccc

SEQ ID NO: 244708 - RNA, 21 nt, Human
uccccugguccuccuggaaug

SEQ ID NO: 244709 - RNA, 23 nt, Human
ucccgcaggaaaauggauuccca

SEQ ID NO: 244710 - RNA, 21 nt, Human
ucccugguuccacaccaggcc

SEQ ID NO: 244711 - RNA, 18 nt, Human
ucucccgcacgccuggcu

SEQ ID NO: 244712 - RNA, 20 nt, Human
ucucccgcaggaaaauggau

SEQ ID NO: 244713 - RNA, 24 nt, Human
ucugcugugggcagaggauggggc

SEQ ID NO: 244714 - RNA, 22 nt, Human
ucuggauacaggagcacagggg

SEQ ID NO: 244715 - RNA, 19 nt, Human
ucuggggcauggggggcag

SEQ ID NO: 244716 - RNA, 21 nt, Human
ugaaggcagagaacauguggg

SEQ ID NO: 244717 - RNA, 21 nt, Human
ugacacaaccaaggcaggucc

SEQ ID NO: 244718 - RNA, 21 nt, Human
ugacucacaaccccugcuugc

SEQ ID NO: 244719 - RNA, 20 nt, Human
ugagggaggugaugguggga

SEQ ID NO: 244720 - RNA, 20 nt, Human
ugauggugggaggaggggug

SEQ ID NO: 244721 - RNA, 24 nt, Human
ugauggugggaggaggggugggcu

SEQ ID NO: 244722 - RNA, 22 nt, Human
ugcagaacagagauggcuucaa

SEQ ID NO: 244723 - RNA, 25 nt, Human
ugccagccuauggucuucacagcac

SEQ ID NO: 244724 - RNA, 18 nt, Human
ugccccuucuguggccau

SEQ ID NO: 244725 - RNA, 19 nt, Human
ugcccggagagccauggga

SEQ ID NO: 244726 - RNA, 21 nt, Human
ugccucagcccaccggggccg

SEQ ID NO: 244727 - RNA, 20 nt, Human
ugcuggggaggcucgggcgg

SEQ ID NO: 244728 - RNA, 22 nt, Human
uggccgacagcccugguggcac

SEQ ID NO: 244729 - RNA, 21 nt, Human
uggcucaggccugacgacagc

SEQ ID NO: 244730 - RNA, 22 nt, Human
ugggagauggggagggcgugga

SEQ ID NO: 244731 - RNA, 19 nt, Human
ugggaggaaguggccuuca

SEQ ID NO: 244732 - RNA, 18 nt, Human
ugggaggaggggugggcu

SEQ ID NO: 244733 - RNA, 20 nt, Human
ugggcagaggauggggcacc

SEQ ID NO: 244734 - RNA, 24 nt, Human
uggggagggcguggagaauccggg

SEQ ID NO: 244735 - RNA, 20 nt, Human
uggucuucacagcaccagaa

SEQ ID NO: 244736 - RNA, 23 nt, Human
uuccacaccaggcccugcucucc

SEQ ID NO: 244737 - RNA, 21 nt, Human
uuccaggucucuuagaccacu

SEQ ID NO: 244738 - RNA, 18 nt, Human
uucuccuaugccucccag

SEQ ID NO: 244739 - RNA, 20 nt, Human
uuucccuaccuggcccucug

SEQ ID NO: 244740 - RNA, 22 nt, Human
uuucugcuguggcuucccacag

SEQ ID NO: 244741 - RNA, 21 nt, Human
uuugcagagaccaagcacccc

SEQ ID NO: 244742 - RNA, 26 nt, Human
aaaaaagaaaauuaguuaacaaaagg

SEQ ID NO: 244743 - RNA, 18 nt, Human
aaaaaagggcuguaggua

SEQ ID NO: 244744 - RNA, 21 nt, Human
aaacugauuuaucaaucuuca

SEQ ID NO: 244745 - RNA, 23 nt, Human
aaagacaaggccaagaguaccac

SEQ ID NO: 244746 - RNA, 20 nt, Human
aaaguacagaauaaguagag

SEQ ID NO: 244747 - RNA, 21 nt, Human
aaccuuguuguucugucagug

SEQ ID NO: 244748 - RNA, 22 nt, Human
aagaaaagaaaucacuuaaagc

SEQ ID NO: 244749 - RNA, 19 nt, Human
aagaaaauaaucaagaaga

SEQ ID NO: 244750 - RNA, 18 nt, Human
aagaagaaaagaaaucac

SEQ ID NO: 244751 - RNA, 19 nt, Human
aagacaaagacaaggccaa

SEQ ID NO: 244752 - RNA, 22 nt, Human
aagcuuuacaaauaaaacaagc

SEQ ID NO: 244753 - RNA, 22 nt, Human
acaaggccaagaguaccacaga

SEQ ID NO: 244754 - RNA, 20 nt, Human
accacagauuucugaaguuc

SEQ ID NO: 244755 - RNA, 23 nt, Human
agaagaaaagaaaucacuuaaag

SEQ ID NO: 244756 - RNA, 20 nt, Human
agguacugcugcuguugcug

SEQ ID NO: 244757 - RNA, 22 nt, Human
auagaacugcagaugaagcuga

SEQ ID NO: 244758 - RNA, 19 nt, Human
augaagcugaaaaacaagg

SEQ ID NO: 244759 - RNA, 19 nt, Human
caaaaugcaaagccugaaa

SEQ ID NO: 244760 - RNA, 26 nt, Human
cacaaaaccaucaacucaagauaucc

SEQ ID NO: 244761 - RNA, 21 nt, Human
cacuaugcggcagcaaauggu

SEQ ID NO: 244762 - RNA, 18 nt, Human
cacuguacacaguuaggc

SEQ ID NO: 244763 - RNA, 21 nt, Human
cacuguguugugucacccacu

SEQ ID NO: 244764 - RNA, 20 nt, Human
cagcaaaugguucuuaaaua

SEQ ID NO: 244765 - RNA, 23 nt, Human
cagcaaaugguucuuaaauaguu

SEQ ID NO: 244766 - RNA, 22 nt, Human
cagugaaacuuuuucccgauga

SEQ ID NO: 244767 - RNA, 20 nt, Human
cauagaacugcagaugaagc

SEQ ID NO: 244768 - RNA, 22 nt, Human
ccaaaaaaagggcuguagguac

SEQ ID NO: 244769 - RNA, 18 nt, Human
cccuccuccuccucggcc

SEQ ID NO: 244770 - RNA, 19 nt, Human
cccuuagccccauucuaag

SEQ ID NO: 244771 - RNA, 20 nt, Human
ccgccgcuucccccuccucc

SEQ ID NO: 244772 - RNA, 19 nt, Human
ccuauguagcagugaaacu

SEQ ID NO: 244773 - RNA, 24 nt, Human
ccuccucggccgccgccgccgccu

SEQ ID NO: 244774 - RNA, 20 nt, Human
ccucggccgccgccgccgcc

SEQ ID NO: 244775 - RNA, 20 nt, Human
cgccgccgccgccucuccca

SEQ ID NO: 244776 - RNA, 20 nt, Human
cuaaaucacaaaaccaucaa

SEQ ID NO: 244777 - RNA, 24 nt, Human
cugaaguucuucccuauccaaugg

SEQ ID NO: 244778 - RNA, 22 nt, Human
cugcaauucacugugcagcauc

SEQ ID NO: 244779 - RNA, 19 nt, Human
cuggcuucacagaguggag

SEQ ID NO: 244780 - RNA, 21 nt, Human
gaaacuuuuucccgaugacag

SEQ ID NO: 244781 - RNA, 22 nt, Human
gaagacaaagacaaggccaaga

SEQ ID NO: 244782 - RNA, 20 nt, Human
gaagcugaaaaacaaggccu

SEQ ID NO: 244783 - RNA, 19 nt, Human
gacaugaggggaaaaaggu

SEQ ID NO: 244784 - RNA, 22 nt, Human
gacauuuaacauuagcagaaca

SEQ ID NO: 244785 - RNA, 23 nt, Human
gacuguacuuucccaauaacaac

SEQ ID NO: 244786 - RNA, 23 nt, Human
gggcagccgucuccaccgucgcc

SEQ ID NO: 244787 - RNA, 22 nt, Human
gggcuguagguacugcugcugu

SEQ ID NO: 244788 - RNA, 20 nt, Human
uaaaaagggacaugaucgug

SEQ ID NO: 244789 - RNA, 21 nt, Human
uaaaacacagccacuugcaaa

SEQ ID NO: 244790 - RNA, 22 nt, Human
uaaaacacagccacuugcaaac

SEQ ID NO: 244791 - RNA, 22 nt, Human
uaaacuucucuccaaaaaaagg

SEQ ID NO: 244792 - RNA, 22 nt, Human
uaagaaaauaaucaagaagaaa

SEQ ID NO: 244793 - RNA, 22 nt, Human
uaagggcuuugggucuaugguu

SEQ ID NO: 244794 - RNA, 20 nt, Human
uacaguaggaaaagcuuugg

SEQ ID NO: 244795 - RNA, 19 nt, Human
uaggaaaagcuuuggggua

SEQ ID NO: 244796 - RNA, 22 nt, Human
ucagguaaggcuuaaaaaggga

SEQ ID NO: 244797 - RNA, 22 nt, Human
uccaagcauuuuccuuugccgc

SEQ ID NO: 244798 - RNA, 18 nt, Human
uccauaaugggacacugg

SEQ ID NO: 244799 - RNA, 19 nt, Human
ucccaauaacaacugcuuu

SEQ ID NO: 244800 - RNA, 22 nt, Human
ucccauuuaaaacacagccacu

SEQ ID NO: 244801 - RNA, 18 nt, Human
uccucggccgccgccgcc

SEQ ID NO: 244802 - RNA, 22 nt, Human
uccucggccgccgccgccgccu

SEQ ID NO: 244803 - RNA, 23 nt, Human
uccuuugccgccgccgcuucccc

SEQ ID NO: 244804 - RNA, 19 nt, Human
ucuaugguuuaauuaccua

SEQ ID NO: 244805 - RNA, 19 nt, Human
ucuccaaaaaaagggcugu

SEQ ID NO: 244806 - RNA, 20 nt, Human
ucuccaaaaaaagggcugua

SEQ ID NO: 244807 - RNA, 20 nt, Human
ucuuuuguuuuaagcuuccc

SEQ ID NO: 244808 - RNA, 23 nt, Human
ucuuuuguuuuaagcuucccugu

SEQ ID NO: 244809 - RNA, 18 nt, Human
ugcugcuuuccuuugcau

SEQ ID NO: 244810 - RNA, 20 nt, Human
ugggguauuucgcugcacau

SEQ ID NO: 244811 - RNA, 20 nt, Human
ugguuuugagacuguacuuu

SEQ ID NO: 244812 - RNA, 18 nt, Human
uguggaagacaaacacug

SEQ ID NO: 244813 - RNA, 21 nt, Human
ugugguuuuagagaagauaca

SEQ ID NO: 244814 - RNA, 20 nt, Human
uuaaaaauaaauugcaucaa

SEQ ID NO: 244815 - RNA, 23 nt, Human
uuaaaacacagccacuugcaaac

SEQ ID NO: 244816 - RNA, 19 nt, Human
uuagccccauucuaagcac

SEQ ID NO: 244817 - RNA, 23 nt, Human
uuccuuugccgccgccgcuuccc

SEQ ID NO: 244818 - RNA, 24 nt, Human
uuugccgccgccgcuucccccucc

SEQ ID NO: 244819 - RNA, 28 nt, Human
uuuuauaaauacacaugauacugucacc

SEQ ID NO: 244820 - RNA, 20 nt, Human
aaaagaaacugucacuagug

SEQ ID NO: 244821 - RNA, 21 nt, Human
aaaaucaucaauaauuuacaa

SEQ ID NO: 244822 - RNA, 19 nt, Human
aaacagaaagagacugccc

SEQ ID NO: 244823 - RNA, 21 nt, Human
aaacagaaagagacugcccgg

SEQ ID NO: 244824 - RNA, 19 nt, Human
aacauacacaguaugcuau

SEQ ID NO: 244825 - RNA, 21 nt, Human
aaccagccuccaggagaucaa

SEQ ID NO: 244826 - RNA, 22 nt, Human
aagguucggugcgaugcuggcu

SEQ ID NO: 244827 - RNA, 21 nt, Human
aauuaugugguuuacacaguu

SEQ ID NO: 244828 - RNA, 22 nt, Human
accccagagcguggcgcgcagu

SEQ ID NO: 244829 - RNA, 22 nt, Human
accgccuccccgacuuuuccau

SEQ ID NO: 244830 - RNA, 23 nt, Human
acgccgggccacugggauccggc

SEQ ID NO: 244831 - RNA, 22 nt, Human
agaguuauauaauauacaccaa

SEQ ID NO: 244832 - RNA, 21 nt, Human
agauacugcguuagcuuccuu

SEQ ID NO: 244833 - RNA, 20 nt, Human
agcagaaccagccuccagga

SEQ ID NO: 244834 - RNA, 22 nt, Human
agcagaaccagccuccaggaga

SEQ ID NO: 244835 - RNA, 19 nt, Human
agcaggaaccagggcgccg

SEQ ID NO: 244836 - RNA, 21 nt, Human
aguggccugcugucagauggc

SEQ ID NO: 244837 - RNA, 19 nt, Human
auaccagaauuuaccaaua

SEQ ID NO: 244838 - RNA, 19 nt, Human
auugcuacaaucuucaagu

SEQ ID NO: 244839 - RNA, 21 nt, Human
caaauuccugccuuagaauca

SEQ ID NO: 244840 - RNA, 21 nt, Human
cacggcgucugagccugccca

SEQ ID NO: 244841 - RNA, 18 nt, Human
cagcagaaccagccucca

SEQ ID NO: 244842 - RNA, 23 nt, Human
cagcauagcauguacaguauaaa

SEQ ID NO: 244843 - RNA, 19 nt, Human
cagccgcggccccccgaag

SEQ ID NO: 244844 - RNA, 20 nt, Human
caggggcaugguaaauaagc

SEQ ID NO: 244845 - RNA, 22 nt, Human
cccuguguagaggcagcagaac

SEQ ID NO: 244846 - RNA, 18 nt, Human
ccgacccgccaccccgcc

SEQ ID NO: 244847 - RNA, 23 nt, Human
ccgcccugcucugccccugacuc

SEQ ID NO: 244848 - RNA, 20 nt, Human
ccgccgccccucauuugccc

SEQ ID NO: 244849 - RNA, 21 nt, Human
ccgccgccccucauuugcccu

SEQ ID NO: 244850 - RNA, 19 nt, Human
ccggccgagcgcuccagcc

SEQ ID NO: 244851 - RNA, 18 nt, Human
ccggcggcggcagcggca

SEQ ID NO: 244852 - RNA, 23 nt, Human
ccuucgaaaauggcaccauucac

SEQ ID NO: 244853 - RNA, 20 nt, Human
ccuuugggauguacaaaaau

SEQ ID NO: 244854 - RNA, 22 nt, Human
cgaaaauggcaccauucacugu

SEQ ID NO: 244855 - RNA, 19 nt, Human
cgacuuuuccauuuccccu

SEQ ID NO: 244856 - RNA, 20 nt, Human
cggcagaagcaggaaccagg

SEQ ID NO: 244857 - RNA, 23 nt, Human
cggcggcagcggcagaagcagga

SEQ ID NO: 244858 - RNA, 18 nt, Human
cucaugagguggucguga

SEQ ID NO: 244859 - RNA, 26 nt, Human
cugcaggccugugggagccgagcacg

SEQ ID NO: 244860 - RNA, 22 nt, Human
cugcccaggggcggcgcagcgg

SEQ ID NO: 244861 - RNA, 22 nt, Human
cugcugucagauggcuucuaau

SEQ ID NO: 244862 - RNA, 19 nt, Human
gcagugucaggggcauggu

SEQ ID NO: 244863 - RNA, 20 nt, Human
gccggaccccagagcguggc

SEQ ID NO: 244864 - RNA, 18 nt, Human
ggacgccagccaccgccu

SEQ ID NO: 244865 - RNA, 23 nt, Human
ggacgccagccaccgccuccccg

SEQ ID NO: 244866 - RNA, 20 nt, Human
ggcgcagcggacgccagcca

SEQ ID NO: 244867 - RNA, 18 nt, Human
gugucauuuuuagcugcu

SEQ ID NO: 244868 - RNA, 26 nt, Human
uaaaaugaauauuccauacuuaaaua

SEQ ID NO: 244869 - RNA, 18 nt, Human
uaagaauuacaaaaucau

SEQ ID NO: 244870 - RNA, 25 nt, Human
uacaauguuacaaauauauauaugu

SEQ ID NO: 244871 - RNA, 21 nt, Human
uacaccaauauacacaaaaca

SEQ ID NO: 244872 - RNA, 20 nt, Human
uacuuuacaauguuacaaau

SEQ ID NO: 244873 - RNA, 21 nt, Human
ucaaugcugucuuaauuuaga

SEQ ID NO: 244874 - RNA, 18 nt, Human
uccacauucaaaacauca

SEQ ID NO: 244875 - RNA, 21 nt, Human
uccauacuuaaauaagaacca

SEQ ID NO: 244876 - RNA, 19 nt, Human
uccccccgacccgccaccc

SEQ ID NO: 244877 - RNA, 19 nt, Human
uccguaaacagaaagagac

SEQ ID NO: 244878 - RNA, 22 nt, Human
uccguaaacagaaagagacugc

SEQ ID NO: 244879 - RNA, 23 nt, Human
ucucuccguaaacagaaagagac

SEQ ID NO: 244880 - RNA, 22 nt, Human
ucugcaaacaagauguggcuac

SEQ ID NO: 244881 - RNA, 24 nt, Human
ugaaacagucagcagacacgaucc

SEQ ID NO: 244882 - RNA, 18 nt, Human
ugaaagauucaugaaggc

SEQ ID NO: 244883 - RNA, 24 nt, Human
ugaaugaaacagucagcagacacg

SEQ ID NO: 244884 - RNA, 21 nt, Human
ugacucacggcgucugagccu

SEQ ID NO: 244885 - RNA, 22 nt, Human
ugauuugaccaaccacauugga

SEQ ID NO: 244886 - RNA, 27 nt, Human
ugccccugacucacggcgucugagccu

SEQ ID NO: 244887 - RNA, 19 nt, Human
ugcgaugcuggcugcaggc

SEQ ID NO: 244888 - RNA, 24 nt, Human
ugcucagugcagugucaggggcau

SEQ ID NO: 244889 - RNA, 21 nt, Human
ugcucuuucuggagagucuca

SEQ ID NO: 244890 - RNA, 23 nt, Human
uggagagucucaugagguggucg

SEQ ID NO: 244891 - RNA, 24 nt, Human
uggagagucucaugagguggucgu

SEQ ID NO: 244892 - RNA, 20 nt, Human
uggcgcgcaguccagagcgg

SEQ ID NO: 244893 - RNA, 18 nt, Human
uggcugcaggccuguggg

SEQ ID NO: 244894 - RNA, 20 nt, Human
ugggauccggcggcggcagc

SEQ ID NO: 244895 - RNA, 22 nt, Human
uguauaccagaauuuaccaaua

SEQ ID NO: 244896 - RNA, 21 nt, Human
uguuacaaauauauauaugua

SEQ ID NO: 244897 - RNA, 20 nt, Human
uuagagcaaacauggcaucc

SEQ ID NO: 244898 - RNA, 27 nt, Human
uucuuaucugcaaacaagauguggcua

SEQ ID NO: 244899 - RNA, 21 nt, Human
uugaccaaccacauuggacaa

SEQ ID NO: 244900 - RNA, 22 nt, Human
uuguaugcaugagugagaaaag

SEQ ID NO: 244901 - RNA, 20 nt, Human
uuuacaaaaguuuucauuuu

SEQ ID NO: 244902 - RNA, 20 nt, Human
uuuccauuuccccuuucucu

SEQ ID NO: 244903 - RNA, 21 nt, Human
aaaucaauuucuaacaacuga

SEQ ID NO: 244904 - RNA, 22 nt, Human
aacauccccguccccccguucu

SEQ ID NO: 244905 - RNA, 23 nt, Human
aaggaagacuguggagggugggg

SEQ ID NO: 244906 - RNA, 20 nt, Human
aaggcaaggaagacugugga

SEQ ID NO: 244907 - RNA, 21 nt, Human
aaggugagcuccgcaaaauca

SEQ ID NO: 244908 - RNA, 20 nt, Human
acagcaaccucauccccuau

SEQ ID NO: 244909 - RNA, 20 nt, Human
accacgucgcccagccgcag

SEQ ID NO: 244910 - RNA, 25 nt, Human
accacgucgcccagccgcaggguca

SEQ ID NO: 244911 - RNA, 25 nt, Human
accccuuccuccccuacacagccag

SEQ ID NO: 244912 - RNA, 24 nt, Human
accuucccaaagcccccgaugcca

SEQ ID NO: 244913 - RNA, 24 nt, Human
accuugcuuucagucuuccugcua

SEQ ID NO: 244914 - RNA, 21 nt, Human
acgauagaccuucccaaagcc

SEQ ID NO: 244915 - RNA, 23 nt, Human
agaaagcacgauagaccuuccca

SEQ ID NO: 244916 - RNA, 20 nt, Human
agccagagcugauggccaca

SEQ ID NO: 244917 - RNA, 21 nt, Human
aggcaguuccccuuuccaccu

SEQ ID NO: 244918 - RNA, 23 nt, Human
aguggacacggguagaaaggccc

SEQ ID NO: 244919 - RNA, 23 nt, Human
caaccucauccccuauccagaaa

SEQ ID NO: 244920 - RNA, 22 nt, Human
caagcccuaugaccccacacug

SEQ ID NO: 244921 - RNA, 24 nt, Human
caccacgucgcccagccgcagggu

SEQ ID NO: 244922 - RNA, 25 nt, Human
caccacgucgcccagccgcaggguc

SEQ ID NO: 244923 - RNA, 23 nt, Human
caccagcccucgucgccggacac

SEQ ID NO: 244924 - RNA, 21 nt, Human
caccccuuccuccccuacaca

SEQ ID NO: 244925 - RNA, 24 nt, Human
caccuccaccacgucgcccagccg

SEQ ID NO: 244926 - RNA, 18 nt, Human
cacgauagaccuucccaa

SEQ ID NO: 244927 - RNA, 25 nt, Human
cagaaaagcuccuaucucgaaccaa

SEQ ID NO: 244928 - RNA, 18 nt, Human
cagaauauccaacacugg

SEQ ID NO: 244929 - RNA, 22 nt, Human
cagggucagcucguccucgccc

SEQ ID NO: 244930 - RNA, 18 nt, Human
ccaacuggcugaggagag

SEQ ID NO: 244931 - RNA, 27 nt, Human
ccaauaaucucuuccaaggugagcucc

SEQ ID NO: 244932 - RNA, 24 nt, Human
ccaccagcccucgucgccggacac

SEQ ID NO: 244933 - RNA, 25 nt, Human
ccccacacugggccaccuugcuuuc

SEQ ID NO: 244934 - RNA, 22 nt, Human
cccgaugccaauaaucucuucc

SEQ ID NO: 244935 - RNA, 26 nt, Human
cccucaucuccgcuggcugucccccu

SEQ ID NO: 244936 - RNA, 24 nt, Human
ccuccaguggacacggguagaaag

SEQ ID NO: 244937 - RNA, 22 nt, Human
ccucgcccgccgccucguacuc

SEQ ID NO: 244938 - RNA, 23 nt, Human
cgucgccggacaccugcgagucc

SEQ ID NO: 244939 - RNA, 24 nt, Human
cugaggcaguuccccuuuccaccu

SEQ ID NO: 244940 - RNA, 18 nt, Human
cugauguccucaucaggg

SEQ ID NO: 244941 - RNA, 22 nt, Human
cuggaagugcagauaggcagug

SEQ ID NO: 244942 - RNA, 18 nt, Human
cuuccugcuagcaugaaa

SEQ ID NO: 244943 - RNA, 23 nt, Human
cuugcccgccccaauccuuuucg

SEQ ID NO: 244944 - RNA, 18 nt, Human
gaacucggggcugacaaa

SEQ ID NO: 244945 - RNA, 19 nt, Human
gaccaaaaucaaucacaga

SEQ ID NO: 244946 - RNA, 19 nt, Human
gagcugcuuucacagcaac

SEQ ID NO: 244947 - RNA, 21 nt, Human
gcccuguuuccaucccuucca

SEQ ID NO: 244948 - RNA, 21 nt, Human
gcggcuggagaaggcgcugcg

SEQ ID NO: 244949 - RNA, 18 nt, Human
ggcuggagaaggcgcugc

SEQ ID NO: 244950 - RNA, 18 nt, Human
gggcuggaucucaggggg

SEQ ID NO: 244951 - RNA, 20 nt, Human
gguccucgccgccgggcugg

SEQ ID NO: 244952 - RNA, 22 nt, Human
gucgccggacaccugcgagucc

SEQ ID NO: 244953 - RNA, 22 nt, Human
gugacucugcagggucacuccc

SEQ ID NO: 244954 - RNA, 22 nt, Human
ucaaagugcauuaucagugcaa

SEQ ID NO: 244955 - RNA, 24 nt, Human
ucaagcccuaugaccccacacugg

SEQ ID NO: 244956 - RNA, 22 nt, Human
ucacagcaaccucauccccuau

SEQ ID NO: 244957 - RNA, 19 nt, Human
ucacucuaaaggcaaggaa

SEQ ID NO: 244958 - RNA, 19 nt, Human
ucagugcaagaaguagggc

SEQ ID NO: 244959 - RNA, 21 nt, Human
ucagugcaagaaguagggcug

SEQ ID NO: 244960 - RNA, 18 nt, Human
ucccaaagcccccgaugc

SEQ ID NO: 244961 - RNA, 21 nt, Human
ucccaaagcccccgaugccaa

SEQ ID NO: 244962 - RNA, 18 nt, Human
uccuaacauccccguccc

SEQ ID NO: 244963 - RNA, 18 nt, Human
uccuggguguugggggac

SEQ ID NO: 244964 - RNA, 24 nt, Human
uccuuggacagcaccuccaccacg

SEQ ID NO: 244965 - RNA, 18 nt, Human
ucgccggacaccugcgag

SEQ ID NO: 244966 - RNA, 18 nt, Human
ucuauggucuggcugaug

SEQ ID NO: 244967 - RNA, 22 nt, Human
ucuuccaaggugagcuccgcaa

SEQ ID NO: 244968 - RNA, 24 nt, Human
ucuuggcgaacauucucuaugguc

SEQ ID NO: 244969 - RNA, 25 nt, Human
ugcaugcaccccuuccuccccuaca

SEQ ID NO: 244970 - RNA, 19 nt, Human
ugcccacccgcugguucag

SEQ ID NO: 244971 - RNA, 18 nt, Human
uggagggugggggacaug

SEQ ID NO: 244972 - RNA, 20 nt, Human
uggcagcggcuggagaaggc

SEQ ID NO: 244973 - RNA, 18 nt, Human
uggcugagugacucugca

SEQ ID NO: 244974 - RNA, 20 nt, Human
uggcugagugacucugcagg

SEQ ID NO: 244975 - RNA, 21 nt, Human
ugggaagcugaacucggggcu

SEQ ID NO: 244976 - RNA, 23 nt, Human
aaaauggcaaaaccaaccagucc

SEQ ID NO: 244977 - RNA, 23 nt, Human
aaaauggcaaaaccaaccagucc

SEQ ID NO: 244978 - RNA, 24 nt, Human
aaacaagaaaaaugugacagcagc

SEQ ID NO: 244979 - RNA, 24 nt, Human
aaacaagaaaaaugugacagcagc

SEQ ID NO: 244980 - RNA, 18 nt, Human
aaagcagggagaugggcc

SEQ ID NO: 244981 - RNA, 18 nt, Human
aaagcagggagaugggcc

SEQ ID NO: 244982 - RNA, 19 nt, Human
aacaaaauggcaaaaccaa

SEQ ID NO: 244983 - RNA, 23 nt, Human
aacaaaauggcaaaaccaaccag

SEQ ID NO: 244984 - RNA, 26 nt, Human
aaccaccccaacccccucccaaccuc

SEQ ID NO: 244985 - RNA, 26 nt, Human
aaccaccccaacccccucccaaccuc

SEQ ID NO: 244986 - RNA, 22 nt, Human
aacccccucccaaccuccucca

SEQ ID NO: 244987 - RNA, 22 nt, Human
aacccccucccaaccuccucca

SEQ ID NO: 244988 - RNA, 22 nt, Human
aacuuagccucaaccaccccaa

SEQ ID NO: 244989 - RNA, 22 nt, Human
aagaaaaaugugacagcagcua

SEQ ID NO: 244990 - RNA, 22 nt, Human
aagaaaaaugugacagcagcua

SEQ ID NO: 244991 - RNA, 23 nt, Human
aagcaggagggaaggcgagccua

SEQ ID NO: 244992 - RNA, 23 nt, Human
aagcaggagggaaggcgagccua

SEQ ID NO: 244993 - RNA, 24 nt, Human
aagcaggagggaaggcgagccuag

SEQ ID NO: 244994 - RNA, 24 nt, Human
aagcaggagggaaggcgagccuag

SEQ ID NO: 244995 - RNA, 19 nt, Human
aaggacccgggagcccgag

SEQ ID NO: 244996 - RNA, 20 nt, Human
aaggacccgggagcccgagu

SEQ ID NO: 244997 - RNA, 20 nt, Human
aagggcccgacaccaccugc

SEQ ID NO: 244998 - RNA, 24 nt, Human
aauaaaaggacaaaacaagaaaaa

SEQ ID NO: 244999 - RNA, 24 nt, Human
aauaaaaggacaaaacaagaaaaa

SEQ ID NO: 245000 - RNA, 20 nt, Human
acaaaacaagaaaaauguga

SEQ ID NO: 245001 - RNA, 19 nt, Human
accaccccaacccccuccc

SEQ ID NO: 245002 - RNA, 19 nt, Human
accaccccaacccccuccc

SEQ ID NO: 245003 - RNA, 22 nt, Human
accccaacccccucccaaccuc

SEQ ID NO: 245004 - RNA, 25 nt, Human
accccaacccccucccaaccuccuu

SEQ ID NO: 245005 - RNA, 19 nt, Human
acccgggagcccgaguugg

SEQ ID NO: 245006 - RNA, 19 nt, Human
agaaaaaaauaaaaggaca

SEQ ID NO: 245007 - RNA, 19 nt, Human
agaaaaaaauaaaaggaca

SEQ ID NO: 245008 - RNA, 22 nt, Human
agaaaaaaauaaaaggacaaaa

SEQ ID NO: 245009 - RNA, 22 nt, Human
agaaaaaaauaaaaggacaaaa

SEQ ID NO: 245010 - RNA, 21 nt, Human
agaaaagcagcauacacacaa

SEQ ID NO: 245011 - RNA, 21 nt, Human
agaaaagcagcauacacacaa

SEQ ID NO: 245012 - RNA, 19 nt, Human
agacaagaggggaacacgg

SEQ ID NO: 245013 - RNA, 20 nt, Human
agacaagaggggaacacggg

SEQ ID NO: 245014 - RNA, 18 nt, Human
agagggagaggcaguggc

SEQ ID NO: 245015 - RNA, 18 nt, Human
agagggagaggcaguggc

SEQ ID NO: 245016 - RNA, 18 nt, Human
agauccagggagaaggga

SEQ ID NO: 245017 - RNA, 18 nt, Human
agauccagggagaaggga

SEQ ID NO: 245018 - RNA, 24 nt, Human
agcagggagaugggcccaggcugg

SEQ ID NO: 245019 - RNA, 24 nt, Human
agcagggagaugggcccaggcugg

SEQ ID NO: 245020 - RNA, 23 nt, Human
agccuagcgggcugcccagcacg

SEQ ID NO: 245021 - RNA, 23 nt, Human
agccuagcgggcugcccagcacg

SEQ ID NO: 245022 - RNA, 21 nt, Human
agccucugcaccccucuuccc

SEQ ID NO: 245023 - RNA, 22 nt, Human
aggacccgggagcccgaguugg

SEQ ID NO: 245024 - RNA, 21 nt, Human
aggagccgggagccagcgagc

SEQ ID NO: 245025 - RNA, 18 nt, Human
aggagguguggggcaggg

SEQ ID NO: 245026 - RNA, 20 nt, Human
aggcagcacugacccccaac

SEQ ID NO: 245027 - RNA, 20 nt, Human
aggcagcacugacccccaac

SEQ ID NO: 245028 - RNA, 18 nt, Human
agggaaggcgagccuagc

SEQ ID NO: 245029 - RNA, 18 nt, Human
agggaaggcgagccuagc

SEQ ID NO: 245030 - RNA, 18 nt, Human
agggaaguguggggggcg

SEQ ID NO: 245031 - RNA, 18 nt, Human
agggaaguguggggggcg

SEQ ID NO: 245032 - RNA, 22 nt, Human
agggagaggcaguggcuuaagc

SEQ ID NO: 245033 - RNA, 18 nt, Human
agggagaggggaacaggg

SEQ ID NO: 245034 - RNA, 24 nt, Human
agggggccaaggacccgggagccc

SEQ ID NO: 245035 - RNA, 24 nt, Human
agggggccaaggacccgggagccc

SEQ ID NO: 245036 - RNA, 18 nt, Human
agguagauccagggagaa

SEQ ID NO: 245037 - RNA, 18 nt, Human
agguagauccagggagaa

SEQ ID NO: 245038 - RNA, 24 nt, Human
agugacaugggaggagggaaggga

SEQ ID NO: 245039 - RNA, 23 nt, Human
auccaccuccacucuucccucca

SEQ ID NO: 245040 - RNA, 18 nt, Human
augggacagagaugccaa

SEQ ID NO: 245041 - RNA, 20 nt, Human
augggacagagaugccaaaa

SEQ ID NO: 245042 - RNA, 21 nt, Human
augggacagagaugccaaaac

SEQ ID NO: 245043 - RNA, 21 nt, Human
caaaaaaagaugaggauagaa

SEQ ID NO: 245044 - RNA, 21 nt, Human
caaaaaaagaugaggauagaa

SEQ ID NO: 245045 - RNA, 21 nt, Human
caaaacaagaaaaaugugaca

SEQ ID NO: 245046 - RNA, 21 nt, Human
caaaacaagaaaaaugugaca

SEQ ID NO: 245047 - RNA, 24 nt, Human
caaaaccaaccaguccacgcucca

SEQ ID NO: 245048 - RNA, 24 nt, Human
caaaaccaaccaguccacgcucca

SEQ ID NO: 245049 - RNA, 24 nt, Human
caaaauggcaaaaccaaccagucc

SEQ ID NO: 245050 - RNA, 24 nt, Human
caaaauggcaaaaccaaccagucc

SEQ ID NO: 245051 - RNA, 20 nt, Human
caacaaaauggcaaaaccaa

SEQ ID NO: 245052 - RNA, 23 nt, Human
caacaaaauggcaaaaccaacca

SEQ ID NO: 245053 - RNA, 23 nt, Human
caacaaaauggcaaaaccaacca

SEQ ID NO: 245054 - RNA, 24 nt, Human
caacaaaauggcaaaaccaaccag

SEQ ID NO: 245055 - RNA, 23 nt, Human
caacuuagccucaaccaccccaa

SEQ ID NO: 245056 - RNA, 20 nt, Human
cacagccucugcaccccucu

SEQ ID NO: 245057 - RNA, 20 nt, Human
cacagccucugcaccccucu

SEQ ID NO: 245058 - RNA, 22 nt, Human
caccacucggaauccaccucca

SEQ ID NO: 245059 - RNA, 22 nt, Human
caccacucggaauccaccucca

SEQ ID NO: 245060 - RNA, 21 nt, Human
cacggucagcguccugucacc

SEQ ID NO: 245061 - RNA, 21 nt, Human
cacggucagcguccugucacc

SEQ ID NO: 245062 - RNA, 21 nt, Human
cagaagggagccaggagagcg

SEQ ID NO: 245063 - RNA, 21 nt, Human
cagcaagaagggcccgacacc

SEQ ID NO: 245064 - RNA, 21 nt, Human
cagcaagaagggcccgacacc

SEQ ID NO: 245065 - RNA, 22 nt, Human
cagccucugcaccccucuuccc

SEQ ID NO: 245066 - RNA, 22 nt, Human
cagcguccugucaccacucgga

SEQ ID NO: 245067 - RNA, 22 nt, Human
cagcguccugucaccacucgga

SEQ ID NO: 245068 - RNA, 21 nt, Human
caguccacgcuccaagggccc

SEQ ID NO: 245069 - RNA, 21 nt, Human
caguccacgcuccaagggccc

SEQ ID NO: 245070 - RNA, 23 nt, Human
caguuucuuuuggguuuggacca

SEQ ID NO: 245071 - RNA, 23 nt, Human
caguuucuuuuggguuuggacca

SEQ ID NO: 245072 - RNA, 26 nt, Human
cauacacacaacaaaauggcaaaacc

SEQ ID NO: 245073 - RNA, 26 nt, Human
cauacacacaacaaaauggcaaaacc

SEQ ID NO: 245074 - RNA, 19 nt, Human
ccaaagaaccaaaaaaaga

SEQ ID NO: 245075 - RNA, 22 nt, Human
ccaacccccucccaaccuccuc

SEQ ID NO: 245076 - RNA, 22 nt, Human
ccaacccccucccaaccuccuc

SEQ ID NO: 245077 - RNA, 19 nt, Human
ccaaccuccuccacggagc

SEQ ID NO: 245078 - RNA, 19 nt, Human
ccacagccucugcaccccu

SEQ ID NO: 245079 - RNA, 20 nt, Human
ccagccacagccucugcacc

SEQ ID NO: 245080 - RNA, 20 nt, Human
ccagccacagccucugcacc

SEQ ID NO: 245081 - RNA, 22 nt, Human
ccagguagauccagggagaagg

SEQ ID NO: 245082 - RNA, 22 nt, Human
ccagguagauccagggagaagg

SEQ ID NO: 245083 - RNA, 21 nt, Human
cccaaccuccuccacggagca

SEQ ID NO: 245084 - RNA, 26 nt, Human
cccaacuuagccucaaccaccccaac

SEQ ID NO: 245085 - RNA, 26 nt, Human
cccaacuuagccucaaccaccccaac

SEQ ID NO: 245086 - RNA, 23 nt, Human
ccccaacccccucccaaccuccu

SEQ ID NO: 245087 - RNA, 23 nt, Human
ccccaacuuggggcagggcagca

SEQ ID NO: 245088 - RNA, 24 nt, Human
cccccaacuuggggcagggcagca

SEQ ID NO: 245089 - RNA, 18 nt, Human
cccgggagcccgaguugg

SEQ ID NO: 245090 - RNA, 21 nt, Human
cccuaagcugcccacauccuc

SEQ ID NO: 245091 - RNA, 21 nt, Human
cccuaagcugcccacauccuc

SEQ ID NO: 245092 - RNA, 20 nt, Human
ccgcaccgccuccagggccc

SEQ ID NO: 245093 - RNA, 20 nt, Human
ccgcaccgccuccagggccc

SEQ ID NO: 245094 - RNA, 20 nt, Human
ccgccgagacggagcugggg

SEQ ID NO: 245095 - RNA, 24 nt, Human
ccucaaccaccccaacccccuccc

SEQ ID NO: 245096 - RNA, 24 nt, Human
ccucaaccaccccaacccccuccc

SEQ ID NO: 245097 - RNA, 25 nt, Human
ccucaaccaccccaacccccuccca

SEQ ID NO: 245098 - RNA, 25 nt, Human
ccucaaccaccccaacccccuccca

SEQ ID NO: 245099 - RNA, 22 nt, Human
ccuccagggcccuaagcugccc

SEQ ID NO: 245100 - RNA, 22 nt, Human
ccuccagggcccuaagcugccc

SEQ ID NO: 245101 - RNA, 22 nt, Human
ccuggcauuugcccggaacguc

SEQ ID NO: 245102 - RNA, 22 nt, Human
ccuggcauuugcccggaacguc

SEQ ID NO: 245103 - RNA, 18 nt, Human
cgccagggaagugugggg

SEQ ID NO: 245104 - RNA, 18 nt, Human
cgccagggaagugugggg

SEQ ID NO: 245105 - RNA, 19 nt, Human
cgcccuguucccucuaaca

SEQ ID NO: 245106 - RNA, 19 nt, Human
cgcccuguucccucuaaca

SEQ ID NO: 245107 - RNA, 23 nt, Human
cggagcuggggcagaagggagcc

SEQ ID NO: 245108 - RNA, 21 nt, Human
cgggaaagggggccaaggacc

SEQ ID NO: 245109 - RNA, 21 nt, Human
cgggaaagggggccaaggacc

SEQ ID NO: 245110 - RNA, 20 nt, Human
cgggagcccgaguuggggcc

SEQ ID NO: 245111 - RNA, 20 nt, Human
cgggagcccgaguuggggcc

SEQ ID NO: 245112 - RNA, 22 nt, Human
cgggaggagccgggagccagcg

SEQ ID NO: 245113 - RNA, 21 nt, Human
cgggcacgcaaagcaggaggg

SEQ ID NO: 245114 - RNA, 21 nt, Human
cgggcacgcaaagcaggaggg

SEQ ID NO: 245115 - RNA, 19 nt, Human
cggucagcguccugucacc

SEQ ID NO: 245116 - RNA, 19 nt, Human
cggucagcguccugucacc

SEQ ID NO: 245117 - RNA, 24 nt, Human
cuccacggucagcguccugucacc

SEQ ID NO: 245118 - RNA, 24 nt, Human
cuccacggucagcguccugucacc

SEQ ID NO: 245119 - RNA, 20 nt, Human
cucggaauccaccuccacuc

SEQ ID NO: 245120 - RNA, 20 nt, Human
cucggaauccaccuccacuc

SEQ ID NO: 245121 - RNA, 22 nt, Human
cugaccggcucaccagccacag

SEQ ID NO: 245122 - RNA, 22 nt, Human
cugaccggcucaccagccacag

SEQ ID NO: 245123 - RNA, 19 nt, Human
cugcaccccucuucccugc

SEQ ID NO: 245124 - RNA, 19 nt, Human
cugcaccccucuucccugc

SEQ ID NO: 245125 - RNA, 21 nt, Human
cugcaccccucuucccugccg

SEQ ID NO: 245126 - RNA, 21 nt, Human
cugcaccccucuucccugccg

SEQ ID NO: 245127 - RNA, 23 nt, Human
cugcaccccucuucccugccgca

SEQ ID NO: 245128 - RNA, 23 nt, Human
cugcaccccucuucccugccgca

SEQ ID NO: 245129 - RNA, 22 nt, Human
cugguucuccucuccuagaucc

SEQ ID NO: 245130 - RNA, 22 nt, Human
cugguucuccucuccuagaucc

SEQ ID NO: 245131 - RNA, 21 nt, Human
cuuagccucaaccaccccaac

SEQ ID NO: 245132 - RNA, 21 nt, Human
cuuagccucaaccaccccaac

SEQ ID NO: 245133 - RNA, 22 nt, Human
cuuagccucaaccaccccaacc

SEQ ID NO: 245134 - RNA, 22 nt, Human
cuuagccucaaccaccccaacc

SEQ ID NO: 245135 - RNA, 19 nt, Human
gaagagccgugaggaggua

SEQ ID NO: 245136 - RNA, 21 nt, Human
gaagggcccgacaccaccugc

SEQ ID NO: 245137 - RNA, 19 nt, Human
gacagcagcuaggcgggua

SEQ ID NO: 245138 - RNA, 18 nt, Human
gacaugggaggagggaag

SEQ ID NO: 245139 - RNA, 20 nt, Human
gacccgggagcccgaguugg

SEQ ID NO: 245140 - RNA, 18 nt, Human
gaggagggaagggagagg

SEQ ID NO: 245141 - RNA, 19 nt, Human
gaggagguguggggcaggg

SEQ ID NO: 245142 - RNA, 18 nt, Human
gagugagaggaggugugg

SEQ ID NO: 245143 - RNA, 18 nt, Human
gagugagaggaggugugg

SEQ ID NO: 245144 - RNA, 23 nt, Human
gcaaagcaggagggaaggcgagc

SEQ ID NO: 245145 - RNA, 23 nt, Human
gcaaagcaggagggaaggcgagc

SEQ ID NO: 245146 - RNA, 29 nt, Human
gcaaagcaggagggaaggcgagccuagcg

SEQ ID NO: 245147 - RNA, 29 nt, Human
gcaaagcaggagggaaggcgagccuagcg

SEQ ID NO: 245148 - RNA, 18 nt, Human
gcggggcgcagggaggcg

SEQ ID NO: 245149 - RNA, 21 nt, Human
ggacaggcagcacugaccccc

SEQ ID NO: 245150 - RNA, 21 nt, Human
ggacaggcagcacugaccccc

SEQ ID NO: 245151 - RNA, 23 nt, Human
ggaccagagggagaggcaguggc

SEQ ID NO: 245152 - RNA, 23 nt, Human
ggaccagagggagaggcaguggc

SEQ ID NO: 245153 - RNA, 18 nt, Human
ggagaggggaacagggga

SEQ ID NO: 245154 - RNA, 19 nt, Human
ggagaugggcccaggcugg

SEQ ID NO: 245155 - RNA, 19 nt, Human
ggagaugggcccaggcugg

SEQ ID NO: 245156 - RNA, 23 nt, Human
ggcccuuucuuguucuccagccc

SEQ ID NO: 245157 - RNA, 23 nt, Human
ggcccuuucuuguucuccagccc

SEQ ID NO: 245158 - RNA, 24 nt, Human
gggaacacgggggagaccgguacc

SEQ ID NO: 245159 - RNA, 19 nt, Human
gggacagagaugccaaaac

SEQ ID NO: 245160 - RNA, 21 nt, Human
gggagaggcaguggcuuaagc

SEQ ID NO: 245161 - RNA, 21 nt, Human
gggaggagggaagggagaggg

SEQ ID NO: 245162 - RNA, 20 nt, Human
gggcaagaccaaagcaggga

SEQ ID NO: 245163 - RNA, 18 nt, Human
gggcagggcugcugcugc

SEQ ID NO: 245164 - RNA, 18 nt, Human
gggcagggcugcugcugc

SEQ ID NO: 245165 - RNA, 18 nt, Human
gggcagggcugcugcugc

SEQ ID NO: 245166 - RNA, 22 nt, Human
ggggcaagaccaaagcagggag

SEQ ID NO: 245167 - RNA, 19 nt, Human
ggggcagggcugcugcugc

SEQ ID NO: 245168 - RNA, 18 nt, Human
ggucggugcgggcccugg

SEQ ID NO: 245169 - RNA, 18 nt, Human
ggucggugcgggcccugg

SEQ ID NO: 245170 - RNA, 21 nt, Human
guagauccagggagaagggag

SEQ ID NO: 245171 - RNA, 21 nt, Human
guagauccagggagaagggag

SEQ ID NO: 245172 - RNA, 23 nt, Human
gugacaugggaggagggaaggga

SEQ ID NO: 245173 - RNA, 21 nt, Human
gugauggggcaagaccaaagc

SEQ ID NO: 245174 - RNA, 21 nt, Human
gugauggggcaagaccaaagc

SEQ ID NO: 245175 - RNA, 21 nt, Human
guggggcagggcugcugcugc

SEQ ID NO: 245176 - RNA, 20 nt, Human
guucccucuaacacuuacug

SEQ ID NO: 245177 - RNA, 20 nt, Human
uagaaaagaaaagcagcaua

SEQ ID NO: 245178 - RNA, 20 nt, Human
uagaaaagaaaagcagcaua

SEQ ID NO: 245179 - RNA, 22 nt, Human
uagccucaaccaccccaacccc

SEQ ID NO: 245180 - RNA, 22 nt, Human
uagccucaaccaccccaacccc

SEQ ID NO: 245181 - RNA, 24 nt, Human
ucaaccaccccaacccccucccaa

SEQ ID NO: 245182 - RNA, 24 nt, Human
ucaaccaccccaacccccucccaa

SEQ ID NO: 245183 - RNA, 23 nt, Human
ucagcguccugucaccacucgga

SEQ ID NO: 245184 - RNA, 23 nt, Human
ucagcguccugucaccacucgga

SEQ ID NO: 245185 - RNA, 22 nt, Human
uccaccuccacucuucccucca

SEQ ID NO: 245186 - RNA, 23 nt, Human
uccgcccuguucccucuaacacc

SEQ ID NO: 245187 - RNA, 23 nt, Human
uccgcccuguucccucuaacacc

SEQ ID NO: 245188 - RNA, 22 nt, Human
uccuagaucccaacuuagccuc

SEQ ID NO: 245189 - RNA, 22 nt, Human
uccuagaucccaacuuagccuc

SEQ ID NO: 245190 - RNA, 18 nt, Human
uccuccagcggggguggc

SEQ ID NO: 245191 - RNA, 18 nt, Human
uccuccagcggggguggc

SEQ ID NO: 245192 - RNA, 24 nt, Human
ucggaauccaccuccacucuuccc

SEQ ID NO: 245193 - RNA, 24 nt, Human
ucggaauccaccuccacucuuccc

SEQ ID NO: 245194 - RNA, 23 nt, Human
ucuccuagaucccaacuuagccu

SEQ ID NO: 245195 - RNA, 23 nt, Human
ucuccuagaucccaacuuagccu

SEQ ID NO: 245196 - RNA, 18 nt, Human
ucuccuggcccuuucuug

SEQ ID NO: 245197 - RNA, 18 nt, Human
ucuccuggcccuuucuug

SEQ ID NO: 245198 - RNA, 21 nt, Human
ucuugguuagaaaagaaaagc

SEQ ID NO: 245199 - RNA, 21 nt, Human
ucuugguuagaaaagaaaagc

SEQ ID NO: 245200 - RNA, 19 nt, Human
ugacccccaacuuggggca

SEQ ID NO: 245201 - RNA, 19 nt, Human
ugacccccaacuuggggca

SEQ ID NO: 245202 - RNA, 20 nt, Human
ugagaggagguguggggcag

SEQ ID NO: 245203 - RNA, 20 nt, Human
ugagaggagguguggggcag

SEQ ID NO: 245204 - RNA, 18 nt, Human
ugaggauagaaucugguu

SEQ ID NO: 245205 - RNA, 18 nt, Human
ugaggauagaaucugguu

SEQ ID NO: 245206 - RNA, 24 nt, Human
ugaggauagaaucugguucuccuc

SEQ ID NO: 245207 - RNA, 25 nt, Human
ugaggauagaaucugguucuccucu

SEQ ID NO: 245208 - RNA, 26 nt, Human
ugaggauagaaucugguucuccucuc

SEQ ID NO: 245209 - RNA, 26 nt, Human
ugaggauagaaucugguucuccucuc

SEQ ID NO: 245210 - RNA, 24 nt, Human
ugcccagcacggcgcccaagcgcu

SEQ ID NO: 245211 - RNA, 24 nt, Human
ugcccagcacggcgcccaagcgcu

SEQ ID NO: 245212 - RNA, 21 nt, Human
ugcgggcccuggcauuugccc

SEQ ID NO: 245213 - RNA, 21 nt, Human
ugcgggcccuggcauuugccc

SEQ ID NO: 245214 - RNA, 24 nt, Human
uggcaaaaccaaccaguccacgcu

SEQ ID NO: 245215 - RNA, 24 nt, Human
uggcaaaaccaaccaguccacgcu

SEQ ID NO: 245216 - RNA, 19 nt, Human
uggggaggggggggcgccc

SEQ ID NO: 245217 - RNA, 19 nt, Human
uggggcaagaccaaagcag

SEQ ID NO: 245218 - RNA, 20 nt, Human
uggggcaagaccaaagcagg

SEQ ID NO: 245219 - RNA, 19 nt, Human
uguggggggcgggagacaa

SEQ ID NO: 245220 - RNA, 19 nt, Human
uguggggggcgggagacaa

SEQ ID NO: 245221 - RNA, 19 nt, Human
uucccucuaacacuuacug

SEQ ID NO: 245222 - RNA, 23 nt, Human
uucuuguucuccagcccuggcuu

SEQ ID NO: 245223 - RNA, 23 nt, Human
uucuuguucuccagcccuggcuu

SEQ ID NO: 245224 - RNA, 21 nt, Human
uuucuuguucuccagcccugg

SEQ ID NO: 245225 - RNA, 21 nt, Human
uuucuuguucuccagcccugg

SEQ ID NO: 245226 - RNA, 22 nt, Human
aaaugcaggggcaggcucuugg

SEQ ID NO: 245227 - RNA, 19 nt, Human
aggaaauguggaacaaaau

SEQ ID NO: 245228 - RNA, 26 nt, Human
augggggagugacagcagcucccccu

SEQ ID NO: 245229 - RNA, 20 nt, Human
auuucucaggauuacuucuu

SEQ ID NO: 245230 - RNA, 23 nt, Human
cagcagggccagggccugggcuc

SEQ ID NO: 245231 - RNA, 24 nt, Human
caggggcaggcucuuggcagaaag

SEQ ID NO: 245232 - RNA, 18 nt, Human
ccaaaagggccugcagcu

SEQ ID NO: 245233 - RNA, 22 nt, Human
cccagcagggccagggccuggg

SEQ ID NO: 245234 - RNA, 18 nt, Human
cccaggacaaaugcaggg

SEQ ID NO: 245235 - RNA, 22 nt, Human
cccaggcccagggucccugccu

SEQ ID NO: 245236 - RNA, 18 nt, Human
ccccucccuccccaggcc

SEQ ID NO: 245237 - RNA, 20 nt, Human
ccggcaggcgggcgggcgcg

SEQ ID NO: 245238 - RNA, 18 nt, Human
ccggcgcggggcggcgcg

SEQ ID NO: 245239 - RNA, 26 nt, Human
ccugcagcuaaggcgugggguggggc

SEQ ID NO: 245240 - RNA, 19 nt, Human
cgcggggcggcgcggggcg

SEQ ID NO: 245241 - RNA, 19 nt, Human
cggagccggcgcggggcga

SEQ ID NO: 245242 - RNA, 21 nt, Human
cggcgcggggcggcgcggggc

SEQ ID NO: 245243 - RNA, 23 nt, Human
cggcgcggggcggcgcggggcgg

SEQ ID NO: 245244 - RNA, 18 nt, Human
gagccccuggacaggccc

SEQ ID NO: 245245 - RNA, 21 nt, Human
gagccggcgcggggcggcgcg

SEQ ID NO: 245246 - RNA, 22 nt, Human
gauggcccaggcccaggguccc

SEQ ID NO: 245247 - RNA, 19 nt, Human
gccccuggacaggcccgcu

SEQ ID NO: 245248 - RNA, 21 nt, Human
gccugcagcuaaggcgugggg

SEQ ID NO: 245249 - RNA, 24 nt, Human
gcgcggggcggcgcggggcggggc

SEQ ID NO: 245250 - RNA, 19 nt, Human
gcgggcgcgagcugcggag

SEQ ID NO: 245251 - RNA, 20 nt, Human
gcugcggagccggcgcgggg

SEQ ID NO: 245252 - RNA, 18 nt, Human
ggcugccucggggauggg

SEQ ID NO: 245253 - RNA, 21 nt, Human
gggccggcaggcgggcgggcg

SEQ ID NO: 245254 - RNA, 18 nt, Human
gggcggcgcggggcgggg

SEQ ID NO: 245255 - RNA, 23 nt, Human
uccccaggccugaaacauuucuc

SEQ ID NO: 245256 - RNA, 23 nt, Human
uccccaggccugaaacauuucuc

SEQ ID NO: 245257 - RNA, 23 nt, Human
ucgggggcuccccucccucccca

SEQ ID NO: 245258 - RNA, 20 nt, Human
ucugaccuucagccccagcc

SEQ ID NO: 245259 - RNA, 20 nt, Human
ugacagcagcucccccuggu

SEQ ID NO: 245260 - RNA, 24 nt, Human
uggauggcccaggcccaggguccc

SEQ ID NO: 245261 - RNA, 22 nt, Human
uggcagaaagaguagaaaggaa

SEQ ID NO: 245262 - RNA, 21 nt, Human
ugggccccuuugcccaaaagg

SEQ ID NO: 245263 - RNA, 20 nt, Human
ugggcugccucggggaugga

SEQ ID NO: 245264 - RNA, 23 nt, Human
uuaauaccaauauaguucucucu

SEQ ID NO: 245265 - RNA, 20 nt, Human
uuuuuuuuuuaaaacaaacc

SEQ ID NO: 245266 - RNA, 18 nt, Human
aagcaaaucauagugcag

SEQ ID NO: 245267 - RNA, 18 nt, Human
accacguuccccacccgg

SEQ ID NO: 245268 - RNA, 22 nt, Human
cacccggggcugcgucaccccg

SEQ ID NO: 245269 - RNA, 18 nt, Human
cccccgccagcucacccc

SEQ ID NO: 245270 - RNA, 22 nt, Human
ccccgcggcucccggauucccg

SEQ ID NO: 245271 - RNA, 18 nt, Human
ccgcacccgcguccuccc

SEQ ID NO: 245272 - RNA, 25 nt, Human
ccgccgccgcaccacguuccccacc

SEQ ID NO: 245273 - RNA, 20 nt, Human
ccgccgccgccgccgcacca

SEQ ID NO: 245274 - RNA, 21 nt, Human
ccgccgccgccgccgcaccac

SEQ ID NO: 245275 - RNA, 18 nt, Human
ccgccgccgccgccgccg

SEQ ID NO: 245276 - RNA, 23 nt, Human
ccgcuaacaagcacgaacggcgc

SEQ ID NO: 245277 - RNA, 24 nt, Human
ccggguuugccgucgccgccgccg

SEQ ID NO: 245278 - RNA, 21 nt, Human
ccucucgggggcggcggaggc

SEQ ID NO: 245279 - RNA, 25 nt, Human
cgccgccgccgccgcaccacguucc

SEQ ID NO: 245280 - RNA, 19 nt, Human
gcccccgccagcucacccc

SEQ ID NO: 245281 - RNA, 23 nt, Human
ggcgcguccucucgggggcggcg

SEQ ID NO: 245282 - RNA, 27 nt, Human
uaacaagcacgaacggcgccgcuuccc

SEQ ID NO: 245283 - RNA, 20 nt, Human
uagaccgcacccgcguccuc

SEQ ID NO: 245284 - RNA, 22 nt, Human
uagggcccggcccccgccagcu

SEQ ID NO: 245285 - RNA, 18 nt, Human
uaguuaaagcaaaucaua

SEQ ID NO: 245286 - RNA, 25 nt, Human
uauaacccauaauaguuaaagcaaa

SEQ ID NO: 245287 - RNA, 22 nt, Human
ucagccgcugcacggcgcgucc

SEQ ID NO: 245288 - RNA, 20 nt, Human
ucccagccagcaugggucgg

SEQ ID NO: 245289 - RNA, 21 nt, Human
uccuccucccgcgcgccggcc

SEQ ID NO: 245290 - RNA, 21 nt, Human
uccuuauuuuuccuuucaaug

SEQ ID NO: 245291 - RNA, 18 nt, Human
ucgccgccgccgccacuc

SEQ ID NO: 245292 - RNA, 18 nt, Human
ucgccgccgccgccacuc

SEQ ID NO: 245293 - RNA, 24 nt, Human
ucgccgccgccgccacucagccgc

SEQ ID NO: 245294 - RNA, 21 nt, Human
ucgccgccgccgccgccgccg

SEQ ID NO: 245295 - RNA, 22 nt, Human
ucgccgccgccgccgccgccgc

SEQ ID NO: 245296 - RNA, 18 nt, Human
uuagggcccggcccccgc

SEQ ID NO: 245297 - RNA, 21 nt, Human
uucauuuuccugucauuugag

SEQ ID NO: 245298 - RNA, 21 nt, Human
uuugccgucgccgccgccgcc

SEQ ID NO: 245299 - RNA, 20 nt, Human
aaauagcccugaaucaucag

SEQ ID NO: 245300 - RNA, 20 nt, Human
aaccugguaaucugccuaua

SEQ ID NO: 245301 - RNA, 21 nt, Human
aagaaggagcacacuggaaaa

SEQ ID NO: 245302 - RNA, 18 nt, Human
aaggaguugcaagaaaaa

SEQ ID NO: 245303 - RNA, 26 nt, Human
acaaauagagcucuuugcaauaauau

SEQ ID NO: 245304 - RNA, 23 nt, Human
aggaaugcagcuaacaaauuugu

SEQ ID NO: 245305 - RNA, 24 nt, Human
caccaucacugggacagcagcaac

SEQ ID NO: 245306 - RNA, 25 nt, Human
cagcagcaacauacagacuucagaa

SEQ ID NO: 245307 - RNA, 18 nt, Human
ccucccaggccagcggcc

SEQ ID NO: 245308 - RNA, 19 nt, Human
ccucccaggccagcggcca

SEQ ID NO: 245309 - RNA, 20 nt, Human
cgcuccgcccuuuccucggc

SEQ ID NO: 245310 - RNA, 19 nt, Human
cucccaggccagcggccca

SEQ ID NO: 245311 - RNA, 27 nt, Human
gaaaaacuuuauaaauacauuauguaa

SEQ ID NO: 245312 - RNA, 20 nt, Human
gaugacgcgcccggagagcc

SEQ ID NO: 245313 - RNA, 19 nt, Human
gcggcccagacaggugagc

SEQ ID NO: 245314 - RNA, 25 nt, Human
ggaaaggaauuccauuaauuguaga

SEQ ID NO: 245315 - RNA, 22 nt, Human
ggacagcagcaacauacagacu

SEQ ID NO: 245316 - RNA, 20 nt, Human
ggguggaggggaugcuccuu

SEQ ID NO: 245317 - RNA, 20 nt, Human
uagcaggaaaggaauuccau

SEQ ID NO: 245318 - RNA, 21 nt, Human
uagcccugaaucaucaguaac

SEQ ID NO: 245319 - RNA, 22 nt, Human
uagucugcuuuugcaaaaggag

SEQ ID NO: 245320 - RNA, 19 nt, Human
uaucgugguaacaucagaa

SEQ ID NO: 245321 - RNA, 18 nt, Human
ucccaggccagcggccca

SEQ ID NO: 245322 - RNA, 20 nt, Human
ucccgccggcccccgccucc

SEQ ID NO: 245323 - RNA, 24 nt, Human
ucccgccggcccccgccucccagg

SEQ ID NO: 245324 - RNA, 18 nt, Human
uccucggcuuggcucccg

SEQ ID NO: 245325 - RNA, 21 nt, Human
ucggcuuggcucccgccggcc

SEQ ID NO: 245326 - RNA, 24 nt, Human
ugcaaaaggaguugcaagaaaaau

SEQ ID NO: 245327 - RNA, 19 nt, Human
ugcaagaaaaaugugacag

SEQ ID NO: 245328 - RNA, 20 nt, Human
ugcaagaaaaaugugacagc

SEQ ID NO: 245329 - RNA, 27 nt, Human
ugcagaaaaauauugauugaucagugg

SEQ ID NO: 245330 - RNA, 22 nt, Human
ugcagaaaaauauugauugcua

SEQ ID NO: 245331 - RNA, 24 nt, Human
uuaaaacauuuuagucugcuuuug

SEQ ID NO: 245332 - RNA, 23 nt, Human
uuaaagaaauauaaaucuuaauu

SEQ ID NO: 245333 - RNA, 19 nt, Human
uucaaaaugauggucaaga

SEQ ID NO: 245334 - RNA, 23 nt, Human
aaacaagaaaaaaggacagcuga

SEQ ID NO: 245335 - RNA, 20 nt, Human
aaaccagaaagcaauuagug

SEQ ID NO: 245336 - RNA, 23 nt, Human
aaaccgccccuccaaacggcuca

SEQ ID NO: 245337 - RNA, 21 nt, Human
aaagccacaacuaccagaaac

SEQ ID NO: 245338 - RNA, 20 nt, Human
aagacggagcuaagcuguag

SEQ ID NO: 245339 - RNA, 27 nt, Human
aagagaucaguaaaauauggauagagc

SEQ ID NO: 245340 - RNA, 26 nt, Human
aagcaacaguaagcaguaaggugcac

SEQ ID NO: 245341 - RNA, 20 nt, Human
aagccaagacgggcuggaga

SEQ ID NO: 245342 - RNA, 19 nt, Human
aagugcuccccaaggauuc

SEQ ID NO: 245343 - RNA, 21 nt, Human
acaccgagucaacuccacagu

SEQ ID NO: 245344 - RNA, 20 nt, Human
acagagugacacugcugggu

SEQ ID NO: 245345 - RNA, 23 nt, Human
acagggcugccaggaggaauucu

SEQ ID NO: 245346 - RNA, 19 nt, Human
acauccccagaaaccgccc

SEQ ID NO: 245347 - RNA, 19 nt, Human
accaaugggugacacacac

SEQ ID NO: 245348 - RNA, 21 nt, Human
accacaguaacuacagaguga

SEQ ID NO: 245349 - RNA, 19 nt, Human
acccugggacauccccaga

SEQ ID NO: 245350 - RNA, 19 nt, Human
accgcacugggacagaaca

SEQ ID NO: 245351 - RNA, 28 nt, Human
accuugaggaacauaauauucuagaaag

SEQ ID NO: 245352 - RNA, 22 nt, Human
acuaccagaaaccgccccucca

SEQ ID NO: 245353 - RNA, 21 nt, Human
agagccaauuggggaagaauc

SEQ ID NO: 245354 - RNA, 19 nt, Human
agaugccagugacuagagc

SEQ ID NO: 245355 - RNA, 21 nt, Human
agaugccagugacuagagcca

SEQ ID NO: 245356 - RNA, 24 nt, Human
agccacaacuaccagaaaccgccc

SEQ ID NO: 245357 - RNA, 26 nt, Human
aggaaccacugcaucuuucaaacccu

SEQ ID NO: 245358 - RNA, 18 nt, Human
aggauucaggagagggag

SEQ ID NO: 245359 - RNA, 23 nt, Human
aggcaccgcacugggacagaaca

SEQ ID NO: 245360 - RNA, 27 nt, Human
aguggcaggaacaaauacuuaaagaga

SEQ ID NO: 245361 - RNA, 24 nt, Human
caagacgggcuggagacaggacca

SEQ ID NO: 245362 - RNA, 19 nt, Human
cacaacuaccagaaaccgc

SEQ ID NO: 245363 - RNA, 23 nt, Human
cacagcucagcacugcaaccuuu

SEQ ID NO: 245364 - RNA, 25 nt, Human
cacaguaacuacagagugacacugc

SEQ ID NO: 245365 - RNA, 18 nt, Human
cacaguacacaguggcag

SEQ ID NO: 245366 - RNA, 19 nt, Human
cacuguauuaaacuccagg

SEQ ID NO: 245367 - RNA, 24 nt, Human
cagaaaccgcccacagcucagcac

SEQ ID NO: 245368 - RNA, 25 nt, Human
cagaaaccgcccacagcucagcacu

SEQ ID NO: 245369 - RNA, 25 nt, Human
cagcagggcaucauguagaaaagga

SEQ ID NO: 245370 - RNA, 24 nt, Human
cagcucuugucgccccucccgcag

SEQ ID NO: 245371 - RNA, 19 nt, Human
caggcugcaacaucagcca

SEQ ID NO: 245372 - RNA, 22 nt, Human
cauaaaagccacaacuaccaga

SEQ ID NO: 245373 - RNA, 23 nt, Human
cauugcugucaaaaaucaaacaa

SEQ ID NO: 245374 - RNA, 22 nt, Human
cccuccaaacggcucaaaggag

SEQ ID NO: 245375 - RNA, 21 nt, Human
ccgccgccgccuccgccgcgc

SEQ ID NO: 245376 - RNA, 22 nt, Human
ccgccgccgccuccgccgcgcu

SEQ ID NO: 245377 - RNA, 19 nt, Human
ccgccgccuccgccgcgcu

SEQ ID NO: 245378 - RNA, 21 nt, Human
ccgccgccuccgccgcgcuga

SEQ ID NO: 245379 - RNA, 22 nt, Human
ccgcucagcucuugucgccccu

SEQ ID NO: 245380 - RNA, 18 nt, Human
cgcacugggacagaacac

SEQ ID NO: 245381 - RNA, 18 nt, Human
cgccccucccgcagggac

SEQ ID NO: 245382 - RNA, 23 nt, Human
cgccgccgccggugcagccgccg

SEQ ID NO: 245383 - RNA, 24 nt, Human
cgcugaccgggaggaggaaggaag

SEQ ID NO: 245384 - RNA, 19 nt, Human
cgggagagcugaagagccg

SEQ ID NO: 245385 - RNA, 22 nt, Human
cgggccggcgggcgggcggagg

SEQ ID NO: 245386 - RNA, 20 nt, Human
cgugguugaaaagacggagc

SEQ ID NO: 245387 - RNA, 19 nt, Human
cuccacaguacacaguggc

SEQ ID NO: 245388 - RNA, 20 nt, Human
gaaaaaaggacagcugagaa

SEQ ID NO: 245389 - RNA, 27 nt, Human
gaaguacauacugccgcaggucaccaa

SEQ ID NO: 245390 - RNA, 23 nt, Human
gagacaggaccaggggucaagaa

SEQ ID NO: 245391 - RNA, 23 nt, Human
gauaagccaagacgggcuggaga

SEQ ID NO: 245392 - RNA, 20 nt, Human
gcaccgcacugggacagaac

SEQ ID NO: 245393 - RNA, 23 nt, Human
gcccacagcucagcacugcaacc

SEQ ID NO: 245394 - RNA, 18 nt, Human
gcugccgggccgccgccg

SEQ ID NO: 245395 - RNA, 20 nt, Human
ggaagucaagaggaggcacc

SEQ ID NO: 245396 - RNA, 18 nt, Human
ggagagggaggaaccacu

SEQ ID NO: 245397 - RNA, 18 nt, Human
ggagagggaggaaccacu

SEQ ID NO: 245398 - RNA, 19 nt, Human
ggcgggcggagggaggggc

SEQ ID NO: 245399 - RNA, 18 nt, Human
gggcgggccggcgggcgg

SEQ ID NO: 245400 - RNA, 20 nt, Human
gggcgggcggagggaggggc

SEQ ID NO: 245401 - RNA, 20 nt, Human
gucaacuccacaguacacag

SEQ ID NO: 245402 - RNA, 18 nt, Human
guccaguccucugagccc

SEQ ID NO: 245403 - RNA, 21 nt, Human
gugcagccgccgacgcugacc

SEQ ID NO: 245404 - RNA, 19 nt, Human
gugcggcugcauggucagc

SEQ ID NO: 245405 - RNA, 22 nt, Human
gugcuccccaaggauuccggag

SEQ ID NO: 245406 - RNA, 22 nt, Human
uaaagugagaugccagugacuu

SEQ ID NO: 245407 - RNA, 20 nt, Human
uacaaacauuaaguacugca

SEQ ID NO: 245408 - RNA, 19 nt, Human
uacugccgcaggucaccaa

SEQ ID NO: 245409 - RNA, 31 nt, Human
uagcacauaccuuauauauguuagugacuag

SEQ ID NO: 245410 - RNA, 20 nt, Human
ucaaaaaucaaacaagaaaa

SEQ ID NO: 245411 - RNA, 22 nt, Human
ucaagaacugggaagaagaaca

SEQ ID NO: 245412 - RNA, 20 nt, Human
ucagcucuugucgccccucc

SEQ ID NO: 245413 - RNA, 21 nt, Human
uccacaagcuccugcucuggg

SEQ ID NO: 245414 - RNA, 23 nt, Human
uccacccugggacauccccagaa

SEQ ID NO: 245415 - RNA, 19 nt, Human
ucgccccucccgcagggac

SEQ ID NO: 245416 - RNA, 19 nt, Human
ucugacagucugacucagc

SEQ ID NO: 245417 - RNA, 24 nt, Human
ugaaagcauaaaagccacaacuac

SEQ ID NO: 245418 - RNA, 21 nt, Human
ugaauuacaaaugcauuucug

SEQ ID NO: 245419 - RNA, 19 nt, Human
ugaccacaguaacuacaga

SEQ ID NO: 245420 - RNA, 23 nt, Human
ugacgggcgggccggcgggcggg

SEQ ID NO: 245421 - RNA, 21 nt, Human
ugacugcauuuucuaaaagcu

SEQ ID NO: 245422 - RNA, 22 nt, Human
ugagaugccagugacuagagcc

SEQ ID NO: 245423 - RNA, 20 nt, Human
ugcaguacuuccuuuuuauu

SEQ ID NO: 245424 - RNA, 21 nt, Human
uggaacacaacucagagguaa

SEQ ID NO: 245425 - RNA, 21 nt, Human
uggggaaacaguuaugguccc

SEQ ID NO: 245426 - RNA, 22 nt, Human
uggggaagaaucucucucuggu

SEQ ID NO: 245427 - RNA, 21 nt, Human
uguacuucucucaccaaaugu

SEQ ID NO: 245428 - RNA, 25 nt, Human
ugucaaaaaucaaacaagaaaaaag

SEQ ID NO: 245429 - RNA, 18 nt, Human
ugucgccccucccgcagg

SEQ ID NO: 245430 - RNA, 21 nt, Human
uuaaguacugcacauaacgcu

SEQ ID NO: 245431 - RNA, 18 nt, Human
uucauauuagcaggcagu

SEQ ID NO: 245432 - RNA, 25 nt, Human
uuccaauaaggagcuugggguaccc

SEQ ID NO: 245433 - RNA, 19 nt, Human
uucgugguugaaaagacgg

SEQ ID NO: 245434 - RNA, 24 nt, Human
uuggcugccgggccgccgccgccu

SEQ ID NO: 245435 - RNA, 19 nt, Human
uugucgccccucccgcagg

SEQ ID NO: 245436 - RNA, 20 nt, Human
uuucaaaccagaaagcaauu

SEQ ID NO: 245437 - RNA, 18 nt, Human
uuuuuuuuuuuuuuuuug

SEQ ID NO: 245438 - RNA, 24 nt, Human
aacucuugccuacuugauuaagga

SEQ ID NO: 245439 - RNA, 22 nt, Human
aagaaaaagaucuugccaagaa

SEQ ID NO: 245440 - RNA, 25 nt, Human
aagaagaccaaagcaagagcaacua

SEQ ID NO: 245441 - RNA, 25 nt, Human
aagaagaccaaagcaagagcaacua

SEQ ID NO: 245442 - RNA, 19 nt, Human
aagaaggagaaacaggaga

SEQ ID NO: 245443 - RNA, 23 nt, Human
aagggaagaaggagaaacaggag

SEQ ID NO: 245444 - RNA, 21 nt, Human
acagaacccuggggaagaagc

SEQ ID NO: 245445 - RNA, 21 nt, Human
acagaacccuggggaagaagc

SEQ ID NO: 245446 - RNA, 20 nt, Human
acaucaucuccugaagaacg

SEQ ID NO: 245447 - RNA, 20 nt, Human
acaucaucuccugaagaacg

SEQ ID NO: 245448 - RNA, 21 nt, Human
acuggcaauauauuacagaug

SEQ ID NO: 245449 - RNA, 21 nt, Human
acuggcaauauauuacagaug

SEQ ID NO: 245450 - RNA, 24 nt, Human
agaaacaggagaaggggggaagga

SEQ ID NO: 245451 - RNA, 22 nt, Human
agaagaaaaagaucuugccaag

SEQ ID NO: 245452 - RNA, 18 nt, Human
agaaggggggaaggagua

SEQ ID NO: 245453 - RNA, 24 nt, Human
agaaggggggaaggaguagaagag

SEQ ID NO: 245454 - RNA, 23 nt, Human
agcuuguaugguuucucaucuau

SEQ ID NO: 245455 - RNA, 25 nt, Human
aggagaaacaggagaaggggggaag

SEQ ID NO: 245456 - RNA, 18 nt, Human
aggagaaggggggaagga

SEQ ID NO: 245457 - RNA, 23 nt, Human
aguagugcuguaugaauacagac

SEQ ID NO: 245458 - RNA, 19 nt, Human
auggaccaugugguacccc

SEQ ID NO: 245459 - RNA, 19 nt, Human
auggaccaugugguacccc

SEQ ID NO: 245460 - RNA, 20 nt, Human
caaauuuggaagcuacaucu

SEQ ID NO: 245461 - RNA, 20 nt, Human
caaauuuggaagcuacaucu

SEQ ID NO: 245462 - RNA, 23 nt, Human
caagagcaacucagaauuaagaa

SEQ ID NO: 245463 - RNA, 20 nt, Human
cacuguagagauccaagagc

SEQ ID NO: 245464 - RNA, 23 nt, Human
cagaacccuggggaagaagcagg

SEQ ID NO: 245465 - RNA, 23 nt, Human
cagaacccuggggaagaagcagg

SEQ ID NO: 245466 - RNA, 22 nt, Human
cagaauuaagaacaaaagauuc

SEQ ID NO: 245467 - RNA, 18 nt, Human
cagccauuaaaauuacac

SEQ ID NO: 245468 - RNA, 19 nt, Human
cagggguccugccgaggcu

SEQ ID NO: 245469 - RNA, 21 nt, Human
caugaaauggaccauguggua

SEQ ID NO: 245470 - RNA, 20 nt, Human
cauuuguguguguguguguu

SEQ ID NO: 245471 - RNA, 18 nt, Human
ccccauauauucccccuu

SEQ ID NO: 245472 - RNA, 18 nt, Human
ccccauauauucccccuu

SEQ ID NO: 245473 - RNA, 21 nt, Human
cucagaauuaagaacaaaaga

SEQ ID NO: 245474 - RNA, 24 nt, Human
cugcauuugugugugugugugugg

SEQ ID NO: 245475 - RNA, 24 nt, Human
cugcauuugugugugugugugugg

SEQ ID NO: 245476 - RNA, 19 nt, Human
gaagaaggagaaacaggag

SEQ ID NO: 245477 - RNA, 25 nt, Human
gaugaagaagaguuggaggaaggga

SEQ ID NO: 245478 - RNA, 21 nt, Human
gcggaucuguaucuacaucca

SEQ ID NO: 245479 - RNA, 21 nt, Human
gcggaucuguaucuacaucca

SEQ ID NO: 245480 - RNA, 19 nt, Human
gcugcaauacagaacccug

SEQ ID NO: 245481 - RNA, 19 nt, Human
gcugcaauacagaacccug

SEQ ID NO: 245482 - RNA, 18 nt, Human
gcuggauggggccacugc

SEQ ID NO: 245483 - RNA, 19 nt, Human
ggaagggaagaaggagaaa

SEQ ID NO: 245484 - RNA, 22 nt, Human
gggaagaaggagaaacaggaga

SEQ ID NO: 245485 - RNA, 18 nt, Human
gggaaggaguagaagagg

SEQ ID NO: 245486 - RNA, 19 nt, Human
gggaaggaguagaagaggg

SEQ ID NO: 245487 - RNA, 21 nt, Human
gggcaaaggagaagaaaaaga

SEQ ID NO: 245488 - RNA, 21 nt, Human
gggcaaaggagaagaaaaaga

SEQ ID NO: 245489 - RNA, 21 nt, Human
guaaagaaaaugcuauuucgg

SEQ ID NO: 245490 - RNA, 23 nt, Human
gugugugugucugcgugugugug

SEQ ID NO: 245491 - RNA, 21 nt, Human
gugugugugugugucugcgug

SEQ ID NO: 245492 - RNA, 21 nt, Human
uaaguagugcuguaugaauac

SEQ ID NO: 245493 - RNA, 21 nt, Human
uaaguagugcuguaugaauac

SEQ ID NO: 245494 - RNA, 18 nt, Human
uacacuuuauggaaaagg

SEQ ID NO: 245495 - RNA, 18 nt, Human
uacacuuuauggaaaagg

SEQ ID NO: 245496 - RNA, 21 nt, Human
uagcugcaauacagaacccug

SEQ ID NO: 245497 - RNA, 21 nt, Human
uagcugcaauacagaacccug

SEQ ID NO: 245498 - RNA, 21 nt, Human
uagugcuguaugaauacagac

SEQ ID NO: 245499 - RNA, 18 nt, Human
uauauucccccuuuacau

SEQ ID NO: 245500 - RNA, 18 nt, Human
uauauucccccuuuacau

SEQ ID NO: 245501 - RNA, 19 nt, Human
uauggaaaaggcuucucua

SEQ ID NO: 245502 - RNA, 19 nt, Human
uauggaaaaggcuucucua

SEQ ID NO: 245503 - RNA, 19 nt, Human
ucagaugccagggucuggu

SEQ ID NO: 245504 - RNA, 24 nt, Human
ucuacauccaucugacuaggccaa

SEQ ID NO: 245505 - RNA, 24 nt, Human
ucuacauccaucugacuaggccaa

SEQ ID NO: 245506 - RNA, 24 nt, Human
ucugagagagcucacuccccccau

SEQ ID NO: 245507 - RNA, 24 nt, Human
ucugagagagcucacuccccccau

SEQ ID NO: 245508 - RNA, 19 nt, Human
ugaaauggaccauguggua

SEQ ID NO: 245509 - RNA, 19 nt, Human
ugaaauggaccauguggua

SEQ ID NO: 245510 - RNA, 23 nt, Human
ugaaauggaccaugugguacccc

SEQ ID NO: 245511 - RNA, 23 nt, Human
ugaaauggaccaugugguacccc

SEQ ID NO: 245512 - RNA, 21 nt, Human
ugacagacgaggauggaggga

SEQ ID NO: 245513 - RNA, 21 nt, Human
ugcauuugugugugugugugu

SEQ ID NO: 245514 - RNA, 21 nt, Human
ugcauuugugugugugugugu

SEQ ID NO: 245515 - RNA, 21 nt, Human
ugccaagaauauagcauauaa

SEQ ID NO: 245516 - RNA, 19 nt, Human
ugcuggauggggccacugc

SEQ ID NO: 245517 - RNA, 24 nt, Human
ugcuggauggggccacugcacacc

SEQ ID NO: 245518 - RNA, 24 nt, Human
ugcuggauggggccacugcacacc

SEQ ID NO: 245519 - RNA, 18 nt, Human
uggaagcuacaucuucaa

SEQ ID NO: 245520 - RNA, 18 nt, Human
uggaagcuacaucuucaa

SEQ ID NO: 245521 - RNA, 21 nt, Human
uggaggaagggaagaaggaga

SEQ ID NO: 245522 - RNA, 18 nt, Human
uguaugaauacagacaca

SEQ ID NO: 245523 - RNA, 18 nt, Human
uguaugaauacagacaca

SEQ ID NO: 245524 - RNA, 22 nt, Human
uguaugaauacagacacaugcg

SEQ ID NO: 245525 - RNA, 22 nt, Human
uguaugaauacagacacaugcg

SEQ ID NO: 245526 - RNA, 19 nt, Human
ugucugcauuugugugugu

SEQ ID NO: 245527 - RNA, 19 nt, Human
ugucugcauuugugugugu

SEQ ID NO: 245528 - RNA, 20 nt, Human
ugugucugauuugcuuucug

SEQ ID NO: 245529 - RNA, 20 nt, Human
ugugucugauuugcuuucug

SEQ ID NO: 245530 - RNA, 21 nt, Human
ugugugucugcgugugugugu

SEQ ID NO: 245531 - RNA, 21 nt, Human
ugugugucugcgugugugugu

SEQ ID NO: 245532 - RNA, 22 nt, Human
ugugugugucugcgugugugug

SEQ ID NO: 245533 - RNA, 22 nt, Human
ugugugugugugucugcgugug

SEQ ID NO: 245534 - RNA, 22 nt, Human
ugugugugugugucugcgugug

SEQ ID NO: 245535 - RNA, 21 nt, Human
ugugugugugugugugucugc

SEQ ID NO: 245536 - RNA, 21 nt, Human
ugugugugugugugugucugc

SEQ ID NO: 245537 - RNA, 24 nt, Human
ugugugugugugugugucugcgug

SEQ ID NO: 245538 - RNA, 18 nt, Human
uuagauacugucuacucu

SEQ ID NO: 245539 - RNA, 22 nt, Human
uucaaauuuggaagcuacaucu

SEQ ID NO: 245540 - RNA, 22 nt, Human
uucaaauuuggaagcuacaucu

SEQ ID NO: 245541 - RNA, 21 nt, Human
uucccccuuuacauguuuucu

SEQ ID NO: 245542 - RNA, 21 nt, Human
uucccccuuuacauguuuucu

SEQ ID NO: 245543 - RNA, 24 nt, Human
uucucuaauugugucugauuugcu

SEQ ID NO: 245544 - RNA, 24 nt, Human
uucucuaauugugucugauuugcu

SEQ ID NO: 245545 - RNA, 21 nt, Human
uugugugucugcauuugugug

SEQ ID NO: 245546 - RNA, 21 nt, Human
uugugugucugcauuugugug

SEQ ID NO: 245547 - RNA, 31 nt, Human
uugugugucugcauuuguguguguguguguu

SEQ ID NO: 245548 - RNA, 20 nt, Human
uuugcagccauuaaaauuac

SEQ ID NO: 245549 - RNA, 20 nt, Human
uuugcagccauuaaaauuac

SEQ ID NO: 245550 - RNA, 20 nt, Human
accccggcccgaccccgacc

SEQ ID NO: 245551 - RNA, 21 nt, Human
aggugaaggugguccucacug

SEQ ID NO: 245552 - RNA, 20 nt, Human
cccccacgaccggggacggg

SEQ ID NO: 245553 - RNA, 28 nt, Human
cccgaccccgacccaggcugcgcacggc

SEQ ID NO: 245554 - RNA, 21 nt, Human
cccgcagagccugcgggcggc

SEQ ID NO: 245555 - RNA, 23 nt, Human
cccggcccgaccccgacccaggc

SEQ ID NO: 245556 - RNA, 25 nt, Human
ccgcucguccgcucgcccgcccgcc

SEQ ID NO: 245557 - RNA, 23 nt, Human
cgacccaggcugcgcacggcccc

SEQ ID NO: 245558 - RNA, 23 nt, Human
cgcccucgcccgcccuccggccc

SEQ ID NO: 245559 - RNA, 18 nt, Human
cggccccucccccgcccg

SEQ ID NO: 245560 - RNA, 20 nt, Human
cggccccucccccgcccggg

SEQ ID NO: 245561 - RNA, 20 nt, Human
cggccccuccggaaacccga

SEQ ID NO: 245562 - RNA, 23 nt, Human
cggcccuucccucagggaugucc

SEQ ID NO: 245563 - RNA, 24 nt, Human
cucacugccaccccggaagguuuc

SEQ ID NO: 245564 - RNA, 20 nt, Human
cugcgcacggccccuccccc

SEQ ID NO: 245565 - RNA, 18 nt, Human
gacccaggcugcgcacgg

SEQ ID NO: 245566 - RNA, 23 nt, Human
gaccccggcccgaccccgaccca

SEQ ID NO: 245567 - RNA, 19 nt, Human
gcccgcccuccggccccuc

SEQ ID NO: 245568 - RNA, 18 nt, Human
gcccggggaccaaccggc

SEQ ID NO: 245569 - RNA, 20 nt, Human
gccgaccccggcccgacccc

SEQ ID NO: 245570 - RNA, 19 nt, Human
gggacggggcucccucggc

SEQ ID NO: 245571 - RNA, 19 nt, Human
gggcggugcccccacgacc

SEQ ID NO: 245572 - RNA, 19 nt, Human
ucacugccaccccggagcc

SEQ ID NO: 245573 - RNA, 22 nt, Human
ucccaggugccgaccccggccc

SEQ ID NO: 245574 - RNA, 18 nt, Human
ucccgcucccggcccuuc

SEQ ID NO: 245575 - RNA, 20 nt, Human
ucggcgcgcgccucgggccg

SEQ ID NO: 245576 - RNA, 19 nt, Human
aaaaaugcuauacauccac

SEQ ID NO: 245577 - RNA, 20 nt, Human
aaaagcaugaccgggauugg

SEQ ID NO: 245578 - RNA, 20 nt, Human
aaaagcaugaccgggauugg

SEQ ID NO: 245579 - RNA, 22 nt, Human
aaaccugccugacaccagggcc

SEQ ID NO: 245580 - RNA, 22 nt, Human
aaaccugccugacaccagggcc

SEQ ID NO: 245581 - RNA, 21 nt, Human
aaacgacacuucuccaccccu

SEQ ID NO: 245582 - RNA, 21 nt, Human
aaacgacacuucuccaccccu

SEQ ID NO: 245583 - RNA, 18 nt, Human
aaaucucugcaacaagag

SEQ ID NO: 245584 - RNA, 18 nt, Human
aaaucucugcaacaagag

SEQ ID NO: 245585 - RNA, 19 nt, Human
aacacauccucacucugcu

SEQ ID NO: 245586 - RNA, 19 nt, Human
aacacauccucacucugcu

SEQ ID NO: 245587 - RNA, 22 nt, Human
aaccaaacauggcugauaaaau

SEQ ID NO: 245588 - RNA, 22 nt, Human
aaccaaacauggcugauaaaau

SEQ ID NO: 245589 - RNA, 20 nt, Human
aaccagaagguaugggccuu

SEQ ID NO: 245590 - RNA, 20 nt, Human
aaccagaagguaugggccuu

SEQ ID NO: 245591 - RNA, 21 nt, Human
aagagcuccagcuuagagucc

SEQ ID NO: 245592 - RNA, 21 nt, Human
aagagcuccagcuuagagucc

SEQ ID NO: 245593 - RNA, 18 nt, Human
aagcaaguuaaucacagg

SEQ ID NO: 245594 - RNA, 18 nt, Human
aagcaaguuaaucacagg

SEQ ID NO: 245595 - RNA, 22 nt, Human
aagcagcuguccaacagcccuc

SEQ ID NO: 245596 - RNA, 22 nt, Human
aagcagcuguccaacagcccuc

SEQ ID NO: 245597 - RNA, 21 nt, Human
aagcagcugugcaugcucaaa

SEQ ID NO: 245598 - RNA, 21 nt, Human
aagcagcugugcaugcucaaa

SEQ ID NO: 245599 - RNA, 19 nt, Human
aagcugccaagaagacccu

SEQ ID NO: 245600 - RNA, 19 nt, Human
aagcugccaagaagacccu

SEQ ID NO: 245601 - RNA, 20 nt, Human
aaguucaugaauacaaauaa

SEQ ID NO: 245602 - RNA, 20 nt, Human
aaguucaugaauacaaauaa

SEQ ID NO: 245603 - RNA, 20 nt, Human
aauagcacuaggggcugaag

SEQ ID NO: 245604 - RNA, 20 nt, Human
aauagcacuaggggcugaag

SEQ ID NO: 245605 - RNA, 25 nt, Human
aaucacacgagcauuuacaaccaaa

SEQ ID NO: 245606 - RNA, 25 nt, Human
aaucacacgagcauuuacaaccaaa

SEQ ID NO: 245607 - RNA, 24 nt, Human
acaaagacagacacacacaugcac

SEQ ID NO: 245608 - RNA, 24 nt, Human
acaaagacagacacacacaugcac

SEQ ID NO: 245609 - RNA, 19 nt, Human
acacacacaugcacacaca

SEQ ID NO: 245610 - RNA, 33 nt, Human
acacacacaugcacacacacuaacacgcacggu

SEQ ID NO: 245611 - RNA, 33 nt, Human
acacacuaacacgcacgcacacgcacgcacagu

SEQ ID NO: 245612 - RNA, 33 nt, Human; identical to SEQ ID NO: 245611

SEQ ID NO: 245613 - RNA, 33 nt, Human
acacaugcacacacacuaacacgcacgcacagu

SEQ ID NO: 245614 - RNA, 27 nt, Human
acaugcacacacacuaacacgcacggu

SEQ ID NO: 245615 - RNA, 27 nt, Human
acaugcacacacacuaacacgcacggu

SEQ ID NO: 245616 - RNA, 19 nt, Human
acgacacuucuccaccccu

SEQ ID NO: 245617 - RNA, 21 nt, Human
acgacacuucuccaccccuga

SEQ ID NO: 245618 - RNA, 21 nt, Human
acgacacuucuccaccccuga

SEQ ID NO: 245619 - RNA, 22 nt, Human
agaagccaaaguggcaaaagca

SEQ ID NO: 245620 - RNA, 22 nt, Human
agaagccaaaguggcaaaagca

SEQ ID NO: 245621 - RNA, 23 nt, Human
agagagcaggacaagcagcugug

SEQ ID NO: 245622 - RNA, 23 nt, Human
agagagcaggacaagcagcugug

SEQ ID NO: 245623 - RNA, 19 nt, Human
agagcucuuccaagagcuc

SEQ ID NO: 245624 - RNA, 19 nt, Human
agagcucuuccaagagcuc

SEQ ID NO: 245625 - RNA, 24 nt, Human
agccaaaguggcaaaagcaugacc

SEQ ID NO: 245626 - RNA, 24 nt, Human
agccaaaguggcaaaagcaugacc

SEQ ID NO: 245627 - RNA, 18 nt, Human
aggacaagcagcugugca

SEQ ID NO: 245628 - RNA, 18 nt, Human
aggacaagcagcugugca

SEQ ID NO: 245629 - RNA, 20 nt, Human
agggaaucgccaucagucug

SEQ ID NO: 245630 - RNA, 19 nt, Human
auaaaaaugcuauacaucc

SEQ ID NO: 245631 - RNA, 19 nt, Human
auaaaaaugcuauacaucc

SEQ ID NO: 245632 - RNA, 24 nt, Human
auagcaagacgugcaaaacacauc

SEQ ID NO: 245633 - RNA, 24 nt, Human
auagcaagacgugcaaaacacauc

SEQ ID NO: 245634 - RNA, 29 nt, Human
augcacacacacuaacacgcacgcacacg

SEQ ID NO: 245635 - RNA, 29 nt, Human
augcacacacacuaacacgcacgcacacg

SEQ ID NO: 245636 - RNA, 29 nt, Human
augcacacacacuaacacgcacgcacagu

SEQ ID NO: 245637 - RNA, 29 nt, Human
augcacacacacuaacacgcacgcacagu

SEQ ID NO: 245638 - RNA, 22 nt, Human
auucugucacacagccaacacu

SEQ ID NO: 245639 - RNA, 22 nt, Human
auucugucacacagccaacacu

SEQ ID NO: 245640 - RNA, 22 nt, Human
auuuauuucuccccaaaccaag

SEQ ID NO: 245641 - RNA, 22 nt, Human
auuuauuucuccccaaaccaag

SEQ ID NO: 245642 - RNA, 18 nt, Human
auuugcccuuucucccca

SEQ ID NO: 245643 - RNA, 18 nt, Human
auuugcccuuucucccca

SEQ ID NO: 245644 - RNA, 24 nt, Human
caaaaggagaaacucuucuucaaa

SEQ ID NO: 245645 - RNA, 21 nt, Human
caaaaugccugaaauucagca

SEQ ID NO: 245646 - RNA, 21 nt, Human
caaaaugccugaaauucagca

SEQ ID NO: 245647 - RNA, 23 nt, Human
caaauaaaauagcaauuucccuc

SEQ ID NO: 245648 - RNA, 23 nt, Human
caaauaaaauagcaauuucccuc

SEQ ID NO: 245649 - RNA, 19 nt, Human
caacucucagaaagaagag

SEQ ID NO: 245650 - RNA, 19 nt, Human
caacucucagaaagaagag

SEQ ID NO: 245651 - RNA, 19 nt, Human
caagccccgcuaagggcag

SEQ ID NO: 245652 - RNA, 24 nt, Human
caagguggggucacaggagaagcc

SEQ ID NO: 245653 - RNA, 24 nt, Human
caagguggggucacaggagaagcc

SEQ ID NO: 245654 - RNA, 18 nt, Human
cacaaacauauuuacagu

SEQ ID NO: 245655 - RNA, 21 nt, Human
cacaaacauauuuacaguuuc

SEQ ID NO: 245656 - RNA, 21 nt, Human
cacaaacauauuuacaguuuc

SEQ ID NO: 245657 - RNA, 18 nt, Human
cacacacaugcacacaca

SEQ ID NO: 245658 - RNA, 18 nt, Human
cacacacaugcacacaca

SEQ ID NO: 245659 - RNA, 25 nt, Human
caccagggccuccugaagagagcag

SEQ ID NO: 245660 - RNA, 25 nt, Human
caccagggccuccugaagagagcag

SEQ ID NO: 245661 - RNA, 19 nt, Human
cacccugucccucuggagu

SEQ ID NO: 245662 - RNA, 23 nt, Human
cagaacagaaaccaggugcucag

SEQ ID NO: 245663 - RNA, 22 nt, Human
cagcugcagucuuuuaacuauc

SEQ ID NO: 245664 - RNA, 18 nt, Human
caggggguccacccuguc

SEQ ID NO: 245665 - RNA, 18 nt, Human
caggggguccacccuguc

SEQ ID NO: 245666 - RNA, 19 nt, Human
caugacaucaagaaccugc

SEQ ID NO: 245667 - RNA, 19 nt, Human
caugacaucaagaaccugc

SEQ ID NO: 245668 - RNA, 25 nt, Human
caugugcucacaugcacacaugacc

SEQ ID NO: 245669 - RNA, 25 nt, Human
caugugcucacaugcacacaugacc

SEQ ID NO: 245670 - RNA, 22 nt, Human
cccacaagcagcuguccaacag

SEQ ID NO: 245671 - RNA, 22 nt, Human
cccacaagcagcuguccaacag

SEQ ID NO: 245672 - RNA, 18 nt, Human
cccaccgucaaggugggg

SEQ ID NO: 245673 - RNA, 19 nt, Human
cccaccgucaagguggggu

SEQ ID NO: 245674 - RNA, 18 nt, Human
cccccuuccaccauggag

SEQ ID NO: 245675 - RNA, 18 nt, Human
cccccuuccaccauggag

SEQ ID NO: 245676 - RNA, 27 nt, Human
ccccgccugcacccgcacccucucccc

SEQ ID NO: 245677 - RNA, 19 nt, Human
ccccugcgacuggggcaag

SEQ ID NO: 245678 - RNA, 20 nt, Human
cccgcacccucuccccggcc

SEQ ID NO: 245679 - RNA, 21 nt, Human
cccgcacccucuccccggccc

SEQ ID NO: 245680 - RNA, 26 nt, Human
cccgcgcgcgcggcugcugucagccg

SEQ ID NO: 245681 - RNA, 28 nt, Human
cccgcgcgcgcggcugcugucagccgca

SEQ ID NO: 245682 - RNA, 22 nt, Human
cccugcgacuggggcaagcccc

SEQ ID NO: 245683 - RNA, 20 nt, Human
ccgcacccucuccccggccc

SEQ ID NO: 245684 - RNA, 24 nt, Human
ccgggcccacaagcagcuguccaa

SEQ ID NO: 245685 - RNA, 24 nt, Human
ccgggcccacaagcagcuguccaa

SEQ ID NO: 245686 - RNA, 18 nt, Human
ccuaaaaggacagcagcu

SEQ ID NO: 245687 - RNA, 18 nt, Human
ccuaaaaggacagcagcu

SEQ ID NO: 245688 - RNA, 18 nt, Human
ccucccacaaagacagac

SEQ ID NO: 245689 - RNA, 24 nt, Human
ccucccacaaagacagacacacca

SEQ ID NO: 245690 - RNA, 24 nt, Human
ccucccacaaagacagacacacca

SEQ ID NO: 245691 - RNA, 19 nt, Human
ccuccuuccuucuugcucc

SEQ ID NO: 245692 - RNA, 19 nt, Human
ccuccuuccuucuugcucc

SEQ ID NO: 245693 - RNA, 19 nt, Human
ccucucgacuugcccggcu

SEQ ID NO: 245694 - RNA, 19 nt, Human
ccucucgacuugcccggcu

SEQ ID NO: 245695 - RNA, 21 nt, Human
ccugcacccgcacccucuccc

SEQ ID NO: 245696 - RNA, 31 nt, Human
ccugcgacuggggcaagccccgcuaagggcc

SEQ ID NO: 245697 - RNA, 26 nt, Human
ccugcgacuggggcaagccggggucc

SEQ ID NO: 245698 - RNA, 22 nt, Human
ccuuccccucacagugaagugg

SEQ ID NO: 245699 - RNA, 22 nt, Human
ccuuccccucacagugaagugg

SEQ ID NO: 245700 - RNA, 26 nt, Human
cgacuugcccggcucagaacuucagc

SEQ ID NO: 245701 - RNA, 26 nt, Human
cgacuugcccggcucagaacuucagc

SEQ ID NO: 245702 - RNA, 18 nt, Human
cgcacauauacgcaugug

SEQ ID NO: 245703 - RNA, 18 nt, Human
cgcacauauacgcaugug

SEQ ID NO: 245704 - RNA, 21 nt, Human
cgccugcacccgcacccucuc

SEQ ID NO: 245705 - RNA, 19 nt, Human
cgcgaccccgcagacuccc

SEQ ID NO: 245706 - RNA, 19 nt, Human
cggcucagaacuucagcag

SEQ ID NO: 245707 - RNA, 19 nt, Human
cggcucagaacuucagcag

SEQ ID NO: 245708 - RNA, 23 nt, Human
cgucgcaguacucccguuccagc

SEQ ID NO: 245709 - RNA, 21 nt, Human
cguuccagcugcugcgcccgc

SEQ ID NO: 245710 - RNA, 25 nt, Human
cuacaaggccgacuccgggcugcgu

SEQ ID NO: 245711 - RNA, 18 nt, Human
cuacgccccaccgucaag

SEQ ID NO: 245712 - RNA, 18 nt, Human
cuacgccccaccgucaag

SEQ ID NO: 245713 - RNA, 19 nt, Human
cuagugcacagaagccagu

SEQ ID NO: 245714 - RNA, 19 nt, Human
cuagugcacagaagccagu

SEQ ID NO: 245715 - RNA, 24 nt, Human
cucacaugcacacaugaccgccua

SEQ ID NO: 245716 - RNA, 24 nt, Human
cucacaugcacacaugaccgccua

SEQ ID NO: 245717 - RNA, 20 nt, Human
cuccccggcccuugcugccc

SEQ ID NO: 245718 - RNA, 24 nt, Human
cugaaguaucaauuguguucaaca

SEQ ID NO: 245719 - RNA, 24 nt, Human
cugaaguaucaauuguguucaaca

SEQ ID NO: 245720 - RNA, 18 nt, Human
cugcaccuucgccccuac

SEQ ID NO: 245721 - RNA, 21 nt, Human
cugccugacaccagggccucc

SEQ ID NO: 245722 - RNA, 21 nt, Human
cugccugacaccagggccucc

SEQ ID NO: 245723 - RNA, 20 nt, Human
cugcgcccgcuaaggcucca

SEQ ID NO: 245724 - RNA, 21 nt, Human
cuguaggaaaucacacgagca

SEQ ID NO: 245725 - RNA, 21 nt, Human
cuguaggaaaucacacgagca

SEQ ID NO: 245726 - RNA, 22 nt, Human
cuuuuuggcuguacguaucacu

SEQ ID NO: 245727 - RNA, 21 nt, Human
gaaaacagauggcaugaauaa

SEQ ID NO: 245728 - RNA, 21 nt, Human
gaaaacagauggcaugaauaa

SEQ ID NO: 245729 - RNA, 20 nt, Human
gacgcacauauacgcaugug

SEQ ID NO: 245730 - RNA, 19 nt, Human
gagaaagacagcaaaagga

SEQ ID NO: 245731 - RNA, 19 nt, Human
gagaaagacagcaaaagga

SEQ ID NO: 245732 - RNA, 23 nt, Human
gagaaagacagcaaaaggaggaa

SEQ ID NO: 245733 - RNA, 19 nt, Human
gagaaauggcaacaccugg

SEQ ID NO: 245734 - RNA, 19 nt, Human
gagaaauggcaacaccugg

SEQ ID NO: 245735 - RNA, 18 nt, Human
gcaacaccugggggugag

SEQ ID NO: 245736 - RNA, 21 nt, Human
gcacacccccuuccaccaugg

SEQ ID NO: 245737 - RNA, 21 nt, Human
gcacacccccuuccaccaugg

SEQ ID NO: 245738 - RNA, 22 nt, Human
gcaugugcucacaugcacacau

SEQ ID NO: 245739 - RNA, 22 nt, Human
gcaugugcucacaugcacacau

SEQ ID NO: 245740 - RNA, 24 nt, Human
gccaaaguggcaaaagcaugaccg

SEQ ID NO: 245741 - RNA, 24 nt, Human
gccaaaguggcaaaagcaugaccg

SEQ ID NO: 245742 - RNA, 19 nt, Human
gcccaaauacaagauucug

SEQ ID NO: 245743 - RNA, 19 nt, Human
gcccaaauacaagauucug

SEQ ID NO: 245744 - RNA, 22 nt, Human
gcccuggagcauccacaaccuc

SEQ ID NO: 245745 - RNA, 22 nt, Human
gcccuggagcauccacaaccuc

SEQ ID NO: 245746 - RNA, 19 nt, Human
gccugcacccgcacccucu

SEQ ID NO: 245747 - RNA, 19 nt, Human
gcgcaggugcggcugccgc

SEQ ID NO: 245748 - RNA, 24 nt, Human
gcgucgcaguacucccguuccagc

SEQ ID NO: 245749 - RNA, 24 nt, Human
gcuggaugugccccugcgacuggg

SEQ ID NO: 245750 - RNA, 18 nt, Human
ggaaaagcccuggucuuu

SEQ ID NO: 245751 - RNA, 18 nt, Human
ggaaaagcccuggucuuu

SEQ ID NO: 245752 - RNA, 20 nt, Human
ggaaacaccuuggcccaaau

SEQ ID NO: 245753 - RNA, 21 nt, Human
ggacggugucaggucugaagc

SEQ ID NO: 245754 - RNA, 21 nt, Human
ggacggugucaggucugaagc

SEQ ID NO: 245755 - RNA, 23 nt, Human
ggagcauccacaaccuccuguaa

SEQ ID NO: 245756 - RNA, 23 nt, Human
ggagcauccacaaccuccuguaa

SEQ ID NO: 245757 - RNA, 20 nt, Human
ggcccuugcugcccgcccag

SEQ ID NO: 245758 - RNA, 25 nt, Human
ggcuggaugugccccugcgacuggg

SEQ ID NO: 245759 - RNA, 18 nt, Human
ggugagggagaaagagag

SEQ ID NO: 245760 - RNA, 18 nt, Human
ggugagggagaaagagag

SEQ ID NO: 245761 - RNA, 22 nt, Human
ggugagggagaaagagagacgc

SEQ ID NO: 245762 - RNA, 22 nt, Human
ggugagggagaaagagagacgc

SEQ ID NO: 245763 - RNA, 23 nt, Human
gucgcaguacucccguuccagcu

SEQ ID NO: 245764 - RNA, 20 nt, Human
guuccagcugcugcgcccgc

SEQ ID NO: 245765 - RNA, 20 nt, Human
uaaaaaugcuauacauccac

SEQ ID NO: 245766 - RNA, 20 nt, Human
uaaaaaugcuauacauccac

SEQ ID NO: 245767 - RNA, 20 nt, Human
uaaagaguacacaggaagua

SEQ ID NO: 245768 - RNA, 20 nt, Human
uaaagaguacacaggaagua

SEQ ID NO: 245769 - RNA, 20 nt, Human
uaagcagagaaauggcaaca

SEQ ID NO: 245770 - RNA, 23 nt, Human
uaagcagagaaauggcaacacug

SEQ ID NO: 245771 - RNA, 19 nt, Human
uaauuugcccuuucucccc

SEQ ID NO: 245772 - RNA, 19 nt, Human
uaauuugcccuuucucccc

SEQ ID NO: 245773 - RNA, 18 nt, Human
uacaaaauucugaaacaa

SEQ ID NO: 245774 - RNA, 18 nt, Human
uacaaaauucugaaacaa

SEQ ID NO: 245775 - RNA, 26 nt, Human
uacaauauacaaaauucugaaacaaa

SEQ ID NO: 245776 - RNA, 26 nt, Human
uacaauauacaaaauucugaaacaaa

SEQ ID NO: 245777 - RNA, 25 nt, Human
uacacuuucuucucuccuuuuaagg

SEQ ID NO: 245778 - RNA, 25 nt, Human
uacacuuucuucucuccuuuuaagg

SEQ ID NO: 245779 - RNA, 18 nt, Human
uacauguaucacugcacu

SEQ ID NO: 245780 - RNA, 18 nt, Human
uacauguaucacugcacu

SEQ ID NO: 245781 - RNA, 21 nt, Human
uacuccgggcccacaagcagc

SEQ ID NO: 245782 - RNA, 21 nt, Human
uacuccgggcccacaagcagc

SEQ ID NO: 245783 - RNA, 23 nt, Human
uaucaauuguguucaacacagaa

SEQ ID NO: 245784 - RNA, 23 nt, Human
uaucaauuguguucaacacagaa

SEQ ID NO: 245785 - RNA, 21 nt, Human
uauuuggucaaaaggagaaac

SEQ ID NO: 245786 - RNA, 20 nt, Human
ucaagaucugagaaccauac

SEQ ID NO: 245787 - RNA, 20 nt, Human
ucaagaucugagaaccauac

SEQ ID NO: 245788 - RNA, 20 nt, Human
ucacaucaaaagcaccugaa

SEQ ID NO: 245789 - RNA, 20 nt, Human
ucacaucaaaagcaccugaa

SEQ ID NO: 245790 - RNA, 19 nt, Human
ucacaugcacacaugaccg

SEQ ID NO: 245791 - RNA, 19 nt, Human
ucacaugcacacaugaccg

SEQ ID NO: 245792 - RNA, 19 nt, Human
ucacuugccauaauauccu

SEQ ID NO: 245793 - RNA, 19 nt, Human
ucacuugccauaauauccu

SEQ ID NO: 245794 - RNA, 18 nt, Human
ucagaacuucagcagcug

SEQ ID NO: 245795 - RNA, 18 nt, Human
ucagaacuucagcagcug

SEQ ID NO: 245796 - RNA, 18 nt, Human
ucagucugccuccuuccu

SEQ ID NO: 245797 - RNA, 18 nt, Human
ucagucugccuccuuccu

SEQ ID NO: 245798 - RNA, 20 nt, Human
ucccgcgcgcgcggcugcug

SEQ ID NO: 245799 - RNA, 18 nt, Human
ucccguuccagcugcugc

SEQ ID NO: 245800 - RNA, 24 nt, Human
ucccucuggaguacauguaucacu

SEQ ID NO: 245801 - RNA, 19 nt, Human
uccucauguagaacaaaau

SEQ ID NO: 245802 - RNA, 19 nt, Human
uccucauguagaacaaaau

SEQ ID NO: 245803 - RNA, 20 nt, Human
uccucauguagaacaaaauu

SEQ ID NO: 245804 - RNA, 20 nt, Human
uccucauguagaacaaaauu

SEQ ID NO: 245805 - RNA, 24 nt, Human
uccuuuuuggcuguacguaucacu

SEQ ID NO: 245806 - RNA, 22 nt, Human
ucgcaguacucccguuccagcu

SEQ ID NO: 245807 - RNA, 21 nt, Human
ucgccaucagucugccuccuu

SEQ ID NO: 245808 - RNA, 21 nt, Human
ucgccaucagucugccuccuu

SEQ ID NO: 245809 - RNA, 21 nt, Human
ucuccccggcccuugcugccc

SEQ ID NO: 245810 - RNA, 18 nt, Human
ucugaagcaaccagaagg

SEQ ID NO: 245811 - RNA, 18 nt, Human
ucugaagcaaccagaagg

SEQ ID NO: 245812 - RNA, 22 nt, Human
ucugccuccuuccuucuugcuc

SEQ ID NO: 245813 - RNA, 22 nt, Human
ucugccuccuuccuucuugcuc

SEQ ID NO: 245814 - RNA, 18 nt, Human
ucuguucagagaaaucag

SEQ ID NO: 245815 - RNA, 18 nt, Human
ucuguucagagaaaucag

SEQ ID NO: 245816 - RNA, 18 nt, Human
ucuucuucaaauccccaa

SEQ ID NO: 245817 - RNA, 26 nt, Human
ugaaaacgacacuucuccaccccuga

SEQ ID NO: 245818 - RNA, 26 nt, Human
ugaaaacgacacuucuccaccccuga

SEQ ID NO: 245819 - RNA, 18 nt, Human
ugaaagggggagaguccc

SEQ ID NO: 245820 - RNA, 18 nt, Human
ugaaagggggagaguccc

SEQ ID NO: 245821 - RNA, 24 nt, Human
ugaaggguaagcagagaaauggca

SEQ ID NO: 245822 - RNA, 24 nt, Human
ugaaggguaagcagagaaauggca

SEQ ID NO: 245823 - RNA, 18 nt, Human
ugacaccagggccuccug

SEQ ID NO: 245824 - RNA, 18 nt, Human
ugacaccagggccuccug

SEQ ID NO: 245825 - RNA, 24 nt, Human
ugagagggaaucgccaucagucug

SEQ ID NO: 245826 - RNA, 20 nt, Human
ugagggagaaagagagacgc

SEQ ID NO: 245827 - RNA, 22 nt, Human
ugagggagaaagagagacgcaa

SEQ ID NO: 245828 - RNA, 22 nt, Human
ugagggagaaagagagacgcaa

SEQ ID NO: 245829 - RNA, 20 nt, Human
ugcacacaugaccgccuaug

SEQ ID NO: 245830 - RNA, 20 nt, Human
ugcacacaugaccgccuaug

SEQ ID NO: 245831 - RNA, 21 nt, Human
ugcacagaagccaguuggucc

SEQ ID NO: 245832 - RNA, 21 nt, Human
ugcacagaagccaguuggucc

SEQ ID NO: 245833 - RNA, 20 nt, Human
ugcacccgcacccucucccc

SEQ ID NO: 245834 - RNA, 22 nt, Human
ugccaagaagacccuuuuccau

SEQ ID NO: 245835 - RNA, 22 nt, Human
ugccaagaagacccuuuuccau

SEQ ID NO: 245836 - RNA, 18 nt, Human
ugccauaauaucagcuga

SEQ ID NO: 245837 - RNA, 18 nt, Human
ugccauaauaucagcuga

SEQ ID NO: 245838 - RNA, 20 nt, Human
ugcccuggagcauccacaac

SEQ ID NO: 245839 - RNA, 20 nt, Human
ugcccuggagcauccacaac

SEQ ID NO: 245840 - RNA, 20 nt, Human
ugccgcgaccccgcagaccg

SEQ ID NO: 245841 - RNA, 19 nt, Human
ugccuccuuccuucuugcu

SEQ ID NO: 245842 - RNA, 19 nt, Human
ugccuccuuccuucuugcu

SEQ ID NO: 245843 - RNA, 23 nt, Human
ugcgcuggucgcccgcgcaggug

SEQ ID NO: 245844 - RNA, 20 nt, Human
ugcucacaugcacacaugac

SEQ ID NO: 245845 - RNA, 20 nt, Human
ugcucacaugcacacaugac

SEQ ID NO: 245846 - RNA, 26 nt, Human
ugcucacaugcacacaugaccgccua

SEQ ID NO: 245847 - RNA, 26 nt, Human
ugcucacaugcacacaugaccgccua

SEQ ID NO: 245848 - RNA, 25 nt, Human
ugcucagaaaccgaagagcucuucc

SEQ ID NO: 245849 - RNA, 25 nt, Human
ugcucagaaaccgaagagcucuucc

SEQ ID NO: 245850 - RNA, 21 nt, Human
ugcucaggacuccaucucuuc

SEQ ID NO: 245851 - RNA, 21 nt, Human
uggaaacaccuuggcccaaau

SEQ ID NO: 245852 - RNA, 21 nt, Human
uggaaacaccuuggcccaaau

SEQ ID NO: 245853 - RNA, 20 nt, Human
uggcaacaccugggggugag

SEQ ID NO: 245854 - RNA, 20 nt, Human
uggggucacaggagaagcca

SEQ ID NO: 245855 - RNA, 20 nt, Human
uggggucacaggagaagcca

SEQ ID NO: 245856 - RNA, 19 nt, Human
uguagaacaaaaugccuga

SEQ ID NO: 245857 - RNA, 18 nt, Human
ugucacacagccaacacu

SEQ ID NO: 245858 - RNA, 18 nt, Human
uguuaagcugccaagaag

SEQ ID NO: 245859 - RNA, 18 nt, Human
uguuaagcugccaagaag

SEQ ID NO: 245860 - RNA, 19 nt, Human
uguucaacacagaauagca

SEQ ID NO: 245861 - RNA, 19 nt, Human
uguucaacacagaauagca

SEQ ID NO: 245862 - RNA, 21 nt, Human
uucacuggcaaaccugccuga

SEQ ID NO: 245863 - RNA, 21 nt, Human
uucacuggcaaaccugccuga

SEQ ID NO: 245864 - RNA, 21 nt, Human
uucaucuugcuguggauggug

SEQ ID NO: 245865 - RNA, 21 nt, Human
uucaucuugcuguggauggug

SEQ ID NO: 245866 - RNA, 23 nt, Human
uucaucuugcuguggauggugag

SEQ ID NO: 245867 - RNA, 23 nt, Human
uucaucuugcuguggauggugag

SEQ ID NO: 245868 - RNA, 21 nt, Human
uuccagcugcugcgcccgcua

SEQ ID NO: 245869 - RNA, 19 nt, Human
uucuguucagagaaaucag

SEQ ID NO: 245870 - RNA, 19 nt, Human
uucuguucagagaaaucag

SEQ ID NO: 245871 - RNA, 19 nt, Human
uugaacauauuccuaaaag

SEQ ID NO: 245872 - RNA, 19 nt, Human
uugaacauauuccuaaaag

SEQ ID NO: 245873 - RNA, 21 nt, Human
uugcuguggauggugaggauu

SEQ ID NO: 245874 - RNA, 21 nt, Human
uugcuguggauggugaggauu

SEQ ID NO: 245875 - RNA, 23 nt, Human
uuuacuuugcauugaacauauuc

SEQ ID NO: 245876 - RNA, 23 nt, Human
uuuacuuugcauugaacauauuc

SEQ ID NO: 245877 - RNA, 18 nt, Human
uuucacaucaaaagcacc

SEQ ID NO: 245878 - RNA, 18 nt, Human
uuucacaucaaaagcacc

SEQ ID NO: 245879 - RNA, 26 nt, Human
uuuuacuuugauuuucagcauuucuu

SEQ ID NO: 245880 - RNA, 26 nt, Human
uuuuacuuugauuuucagcauuucuu

SEQ ID NO: 245881 - RNA, 23 nt, Human
aagcuggaggccucagcaaagga

SEQ ID NO: 245882 - RNA, 21 nt, Human
acucagcgccccccacccucc

SEQ ID NO: 245883 - RNA, 22 nt, Human
agaacccuuccauuccagaacu

SEQ ID NO: 245884 - RNA, 19 nt, Human
agagguggccaggcccaug

SEQ ID NO: 245885 - RNA, 18 nt, Human
agccagaacccuuccauu

SEQ ID NO: 245886 - RNA, 26 nt, Human
aggaggcagguccaggccccagggug

SEQ ID NO: 245887 - RNA, 20 nt, Human
aggcaggaggcagguccagg

SEQ ID NO: 245888 - RNA, 28 nt, Human
aggcaggaggcagguccaggccccaggg

SEQ ID NO: 245889 - RNA, 21 nt, Human
aggcagguccaggccccaggg

SEQ ID NO: 245890 - RNA, 22 nt, Human
aggcccaugcuccaccccggcc

SEQ ID NO: 245891 - RNA, 21 nt, Human
agggugcagagaugucugucu

SEQ ID NO: 245892 - RNA, 18 nt, Human
cacacacagaagcagcga

SEQ ID NO: 245893 - RNA, 19 nt, Human
caccacacacagaagcagc

SEQ ID NO: 245894 - RNA, 21 nt, Human
caccacacacagaagcagcga

SEQ ID NO: 245895 - RNA, 22 nt, Human
caccucugcccuucagcagguu

SEQ ID NO: 245896 - RNA, 21 nt, Human
cacgccccccagcuccacuuc

SEQ ID NO: 245897 - RNA, 18 nt, Human
cagagacugggacgcugg

SEQ ID NO: 245898 - RNA, 20 nt, Human
cagcagcagcagcgggagau

SEQ ID NO: 245899 - RNA, 21 nt, Human
cagcagcagcgggagauugaa

SEQ ID NO: 245900 - RNA, 18 nt, Human
cagcagguuggggcagcc

SEQ ID NO: 245901 - RNA, 19 nt, Human
cagcgccccccacccucca

SEQ ID NO: 245902 - RNA, 23 nt, Human
cagcgggagauugaacuggggcc

SEQ ID NO: 245903 - RNA, 19 nt, Human
caggccccagggugcagag

SEQ ID NO: 245904 - RNA, 22 nt, Human
cagguccaggccccagggugca

SEQ ID NO: 245905 - RNA, 23 nt, Human
cccacggcggccccgcccgaggc

SEQ ID NO: 245906 - RNA, 24 nt, Human
ccccacccuccaccucugcccuuc

SEQ ID NO: 245907 - RNA, 22 nt, Human
ccccacggcggccccgcccgag

SEQ ID NO: 245908 - RNA, 18 nt, Human
ccccccacccuccaccuc

SEQ ID NO: 245909 - RNA, 20 nt, Human
ccccccagcuccacuucugc

SEQ ID NO: 245910 - RNA, 24 nt, Human
cccgaggccccguggggagggcgg

SEQ ID NO: 245911 - RNA, 24 nt, Human
cccguggggagggcggguggggag

SEQ ID NO: 245912 - RNA, 19 nt, Human
cccuccaccucugcccuuc

SEQ ID NO: 245913 - RNA, 23 nt, Human
cccucccaccgcccuccucccca

SEQ ID NO: 245914 - RNA, 23 nt, Human
cccugagucccuacucagcgccc

SEQ ID NO: 245915 - RNA, 21 nt, Human
ccuacucagcgccccccaccc

SEQ ID NO: 245916 - RNA, 18 nt, Human
ccucagggaugcuagccc

SEQ ID NO: 245917 - RNA, 20 nt, Human
ccucccaccgcccuccuccc

SEQ ID NO: 245918 - RNA, 20 nt, Human
cgcagcagcagcagcgggag

SEQ ID NO: 245919 - RNA, 24 nt, Human
cgccccccacccuccaccucugcc

SEQ ID NO: 245920 - RNA, 20 nt, Human
cucagcgccccccacccucc

SEQ ID NO: 245921 - RNA, 25 nt, Human
cucagcgccccccacccuccaccuc

SEQ ID NO: 245922 - RNA, 18 nt, Human
cuccaccccggccugggc

SEQ ID NO: 245923 - RNA, 21 nt, Human
cucuccacgccccccagcucc

SEQ ID NO: 245924 - RNA, 20 nt, Human
cugccagagacugggacgcu

SEQ ID NO: 245925 - RNA, 22 nt, Human
cuggaggccucagcaaaggaga

SEQ ID NO: 245926 - RNA, 24 nt, Human
cuuccauuccagaacugccagaga

SEQ ID NO: 245927 - RNA, 18 nt, Human
cuuggccugccugaagcu

SEQ ID NO: 245928 - RNA, 23 nt, Human
gaggcagguccaggccccagggu

SEQ ID NO: 245929 - RNA, 23 nt, Human
gaggucccgaggccccgugggga

SEQ ID NO: 245930 - RNA, 26 nt, Human
gagucccuacucagcgccccccaccc

SEQ ID NO: 245931 - RNA, 21 nt, Human
gcagguccaggccccagggug

SEQ ID NO: 245932 - RNA, 19 nt, Human
gcgggagaggggcaggcag

SEQ ID NO: 245933 - RNA, 23 nt, Human
ggaggcagguccaggccccccaa

SEQ ID NO: 245934 - RNA, 28 nt, Human
ggaugcuagcccuugagacuaaggaauu

SEQ ID NO: 245935 - RNA, 21 nt, Human
ggcccugagucccuacucagc

SEQ ID NO: 245936 - RNA, 20 nt, Human
gggcaggcaggaggcagguc

SEQ ID NO: 245937 - RNA, 21 nt, Human
gggcgcagcagcagcagcggg

SEQ ID NO: 245938 - RNA, 24 nt, Human
gggcgcagcagcagcagcgggaga

SEQ ID NO: 245939 - RNA, 18 nt, Human
ggggaggagaaggccuug

SEQ ID NO: 245940 - RNA, 20 nt, Human
gggugggguuugaaugagau

SEQ ID NO: 245941 - RNA, 18 nt, Human
ucagcgccccccacccuc

SEQ ID NO: 245942 - RNA, 22 nt, Human
ucccaccgcccuccuccccacg

SEQ ID NO: 245943 - RNA, 18 nt, Human
uccccacggcggccccgc

SEQ ID NO: 245944 - RNA, 20 nt, Human
uccccacggcggccccgccc

SEQ ID NO: 245945 - RNA, 18 nt, Human
ucuccacgccccccagcu

SEQ ID NO: 245946 - RNA, 19 nt, Human
ugaacuggggccaccugag

SEQ ID NO: 245947 - RNA, 20 nt, Human
ugagaugaggggggcaggca

SEQ ID NO: 245948 - RNA, 20 nt, Human
ugaggggggcaggcauggcc

SEQ ID NO: 245949 - RNA, 22 nt, Human
ugaggucccgaggccccguggg

SEQ ID NO: 245950 - RNA, 18 nt, Human
ugccaagguccgggcugg

SEQ ID NO: 245951 - RNA, 18 nt, Human
uggcccugagucccuacu

SEQ ID NO: 245952 - RNA, 20 nt, Human
uggcgggagaggggcaggca

SEQ ID NO: 245953 - RNA, 23 nt, Human
aaaaagccagaacgaccccagua

SEQ ID NO: 245954 - RNA, 26 nt, Human
aaaagaacaucgaaugguaauggaca

SEQ ID NO: 245955 - RNA, 21 nt, Human
aaacauugcucugaacaaaag

SEQ ID NO: 245956 - RNA, 23 nt, Human
aaagaaaaaacaaaacccaaaca

SEQ ID NO: 245957 - RNA, 21 nt, Human
aaccugcauugggagcgcugu

SEQ ID NO: 245958 - RNA, 28 nt, Human
aagaaaaaacaaaacccaaacacuuccu

SEQ ID NO: 245959 - RNA, 23 nt, Human
aagaaacauugcucugaacaaaa

SEQ ID NO: 245960 - RNA, 18 nt, Human
aagaacaucucagaccaa

SEQ ID NO: 245961 - RNA, 20 nt, Human
aagcgcccucugaggacaaa

SEQ ID NO: 245962 - RNA, 23 nt, Human
aagcgcccucugaggacaaaaug

SEQ ID NO: 245963 - RNA, 22 nt, Human
aagcucguccucacacuaagcc

SEQ ID NO: 245964 - RNA, 21 nt, Human
aaggcagcagagagggcggag

SEQ ID NO: 245965 - RNA, 21 nt, Human
acaggggaagaacaucucaga

SEQ ID NO: 245966 - RNA, 20 nt, Human
accucacugcuguccuccaa

SEQ ID NO: 245967 - RNA, 19 nt, Human
accuggaaacuggcuggac

SEQ ID NO: 245968 - RNA, 24 nt, Human
acugcaaaguaaaagaugcagaaa

SEQ ID NO: 245969 - RNA, 24 nt, Human
agaaauggacauuccucucgcucc

SEQ ID NO: 245970 - RNA, 22 nt, Human
agacccugccugggggccagga

SEQ ID NO: 245971 - RNA, 18 nt, Human
agcagcuuguucuuuacc

SEQ ID NO: 245972 - RNA, 20 nt, Human
agccagaacgaccccaguag

SEQ ID NO: 245973 - RNA, 21 nt, Human
agccaggaaaguaugcuuggu

SEQ ID NO: 245974 - RNA, 21 nt, Human
agcccuugcuguugacaccuc

SEQ ID NO: 245975 - RNA, 25 nt, Human
aggacgcccaguggggaaagagggc

SEQ ID NO: 245976 - RNA, 22 nt, Human
aggcgcugugguuagggugggg

SEQ ID NO: 245977 - RNA, 19 nt, Human
aggcuguucugaccugaaa

SEQ ID NO: 245978 - RNA, 21 nt, Human
agggggugugugcacaggccu

SEQ ID NO: 245979 - RNA, 20 nt, Human
aggggugaggcaaauacagg

SEQ ID NO: 245980 - RNA, 21 nt, Human
aguguugggggaagagaagga

SEQ ID NO: 245981 - RNA, 23 nt, Human
aucuuccuaccuuucuggauucc

SEQ ID NO: 245982 - RNA, 21 nt, Human
caaaaagccagaacgacccca

SEQ ID NO: 245983 - RNA, 21 nt, Human
caaaguaaaagaugcagaaac

SEQ ID NO: 245984 - RNA, 22 nt, Human
caaggcagcagagagggcggag

SEQ ID NO: 245985 - RNA, 18 nt, Human
caaggcagcagcuuguuc

SEQ ID NO: 245986 - RNA, 19 nt, Human
caagucccacggcugaggg

SEQ ID NO: 245987 - RNA, 19 nt, Human
cacacaguuugcaugcacc

SEQ ID NO: 245988 - RNA, 23 nt, Human
caccaaacucaccuuagccuaca

SEQ ID NO: 245989 - RNA, 21 nt, Human
caccccacgcuucugcagagg

SEQ ID NO: 245990 - RNA, 19 nt, Human
cacgaggucgccagggugc

SEQ ID NO: 245991 - RNA, 23 nt, Human
cagacccugccugggggccagga

SEQ ID NO: 245992 - RNA, 24 nt, Human
caggaaaggccaagucucggcuag

SEQ ID NO: 245993 - RNA, 21 nt, Human
caggccugggagaagggcuga

SEQ ID NO: 245994 - RNA, 18 nt, Human
caggggcagucaggaaag

SEQ ID NO: 245995 - RNA, 19 nt, Human
caggguccaguucaaaccc

SEQ ID NO: 245996 - RNA, 22 nt, Human
caugaggucuccaugcuggugc

SEQ ID NO: 245997 - RNA, 22 nt, Human
cauguggucucccuuucguaga

SEQ ID NO: 245998 - RNA, 23 nt, Human
ccaaacucaccuuagccuacacu

SEQ ID NO: 245999 - RNA, 21 nt, Human
ccaaccccaaggcagcagaga

SEQ ID NO: 246000 - RNA, 22 nt, Human
ccaccagcucucuggagacgag

SEQ ID NO: 246001 - RNA, 20 nt, Human
ccaguucaaacccgcuccca

SEQ ID NO: 246002 - RNA, 23 nt, Human
cccaggcuguucugaccugaaac

SEQ ID NO: 246003 - RNA, 22 nt, Human
ccccaccccacgcuucugcaga

SEQ ID NO: 246004 - RNA, 24 nt, Human
ccuaagagcccuugcuguugacac

SEQ ID NO: 246005 - RNA, 20 nt, Human
ccucacugcuguccuccaaa

SEQ ID NO: 246006 - RNA, 20 nt, Human
ccugaacccuucuuaaagcu

SEQ ID NO: 246007 - RNA, 21 nt, Human
ccugcucuguggggccuggag

SEQ ID NO: 246008 - RNA, 18 nt, Human
ccugggaccagauagggc

SEQ ID NO: 246009 - RNA, 18 nt, Human
ccuggucaaggcagcagc

SEQ ID NO: 246010 - RNA, 22 nt, Human
cguagaaaugagucaccccuaa

SEQ ID NO: 246011 - RNA, 26 nt, Human
cucagaccaaguuucuaacaaaaagc

SEQ ID NO: 246012 - RNA, 22 nt, Human
cuccaugcuggugccugacccc

SEQ ID NO: 246013 - RNA, 21 nt, Human
cuccugcucuguggggccugg

SEQ ID NO: 246014 - RNA, 19 nt, Human
cucggcuagcggccucccu

SEQ ID NO: 246015 - RNA, 21 nt, Human
cugagggggugugugcacagg

SEQ ID NO: 246016 - RNA, 18 nt, Human
cugcaccaguggccgcag

SEQ ID NO: 246017 - RNA, 22 nt, Human
cugcuguccuccaaaugagcag

SEQ ID NO: 246018 - RNA, 18 nt, Human
cuggaaacuggcuggacu

SEQ ID NO: 246019 - RNA, 22 nt, Human
cugggggucuccugcucugugg

SEQ ID NO: 246020 - RNA, 23 nt, Human
cugugcacacauguggucucccu

SEQ ID NO: 246021 - RNA, 19 nt, Human
cuguggguaucuuugggag

SEQ ID NO: 246022 - RNA, 21 nt, Human
cugugguuagggugggggggc

SEQ ID NO: 246023 - RNA, 27 nt, Human
cuuaaagaaaaaacaaaacccaaacua

SEQ ID NO: 246024 - RNA, 21 nt, Human
cuugcccccaaggucacgacg

SEQ ID NO: 246025 - RNA, 18 nt, Human
gaaaaaacaaaacccaaa

SEQ ID NO: 246026 - RNA, 21 nt, Human
gaagggcugauuuuacccaca

SEQ ID NO: 246027 - RNA, 24 nt, Human
gaccugaucaaguuuaauaauguu

SEQ ID NO: 246028 - RNA, 24 nt, Human
gagggugaacgcagcccaagacca

SEQ ID NO: 246029 - RNA, 18 nt, Human
gauguguuuucuccuagu

SEQ ID NO: 246030 - RNA, 19 nt, Human
gcagaggccugugucuaca

SEQ ID NO: 246031 - RNA, 21 nt, Human
gccaaccccaaggcagcagag

SEQ ID NO: 246032 - RNA, 19 nt, Human
gcgagugucucugccucuc

SEQ ID NO: 246033 - RNA, 23 nt, Human
gcugagcugugcuaguugggggc

SEQ ID NO: 246034 - RNA, 23 nt, Human
gcugagggggugugugcacaggg

SEQ ID NO: 246035 - RNA, 19 nt, Human
gcugcccagguaacacagg

SEQ ID NO: 246036 - RNA, 20 nt, Human
ggaagaacaucucagaccaa

SEQ ID NO: 246037 - RNA, 24 nt, Human
ggagcgcugucuacuaauuccugu

SEQ ID NO: 246038 - RNA, 21 nt, Human
ggcagcagcuuguucuuuacc

SEQ ID NO: 246039 - RNA, 21 nt, Human
ggccgccuccugccagccccg

SEQ ID NO: 246040 - RNA, 21 nt, Human
ggccugggagaagggcugauu

SEQ ID NO: 246041 - RNA, 23 nt, Human
ggcggccgccuccugccagcccc

SEQ ID NO: 246042 - RNA, 19 nt, Human
gggagugcugagggggugu

SEQ ID NO: 246043 - RNA, 25 nt, Human
gggccggguguggggugaaggggga

SEQ ID NO: 246044 - RNA, 25 nt, Human
ggggugaagggggagugcuggcagg

SEQ ID NO: 246045 - RNA, 20 nt, Human
gucaggaaaggccaagucuc

SEQ ID NO: 246046 - RNA, 20 nt, Human
gucccuccuuugucaugagg

SEQ ID NO: 246047 - RNA, 25 nt, Human
gugcugagggggugugugcacaggg

SEQ ID NO: 246048 - RNA, 24 nt, Human
uaacaaaaagccagaacgacccca

SEQ ID NO: 246049 - RNA, 20 nt, Human
uaagagcccuugcuguugac

SEQ ID NO: 246050 - RNA, 27 nt, Human
uaagccaggguccaguucaaacccgcu

SEQ ID NO: 246051 - RNA, 22 nt, Human
uaaguacuuggggagccaggaa

SEQ ID NO: 246052 - RNA, 20 nt, Human
uacacaccauuaccccaugc

SEQ ID NO: 246053 - RNA, 18 nt, Human
uaccccaugcucuguggg

SEQ ID NO: 246054 - RNA, 18 nt, Human
uagggugggggggccggg

SEQ ID NO: 246055 - RNA, 22 nt, Human
ucacugccaccagcucucugga

SEQ ID NO: 246056 - RNA, 21 nt, Human
ucuccaugcuggugccugacc

SEQ ID NO: 246057 - RNA, 18 nt, Human
ucugaacaaaagaacauc

SEQ ID NO: 246058 - RNA, 21 nt, Human
ucugucaagucccacggcuga

SEQ ID NO: 246059 - RNA, 24 nt, Human
ucugugggugacacacaguuugca

SEQ ID NO: 246060 - RNA, 21 nt, Human
ucuuucuggcugaaaugcaag

SEQ ID NO: 246061 - RNA, 23 nt, Human
ugaaaccuucucuccuaacacau

SEQ ID NO: 246062 - RNA, 19 nt, Human
ugaacaccaguggcagaaa

SEQ ID NO: 246063 - RNA, 18 nt, Human
ugaacgcagcccaagacc

SEQ ID NO: 246064 - RNA, 20 nt, Human
ugacacacaguuugcaugca

SEQ ID NO: 246065 - RNA, 21 nt, Human
ugaccugaucaaguuuaauaa

SEQ ID NO: 246066 - RNA, 22 nt, Human
ugagggugaacgcagcccaaga

SEQ ID NO: 246067 - RNA, 25 nt, Human
ugagggugaacgcagcccaagacca

SEQ ID NO: 246068 - RNA, 18 nt, Human
ugaggucuccaugcuggu

SEQ ID NO: 246069 - RNA, 21 nt, Human
ugaggucuccaugcuggugcc

SEQ ID NO: 246070 - RNA, 29 nt, Human
ugagucccuccuuugucaugaaggaaccu

SEQ ID NO: 246071 - RNA, 22 nt, Human
ugaucuggagcugcccagguaa

SEQ ID NO: 246072 - RNA, 19 nt, Human
ugcccagguaacacagggg

SEQ ID NO: 246073 - RNA, 22 nt, Human
ugcuggcagggagguuggaggg

SEQ ID NO: 246074 - RNA, 22 nt, Human
ugcuuugagucccuccuuuguc

SEQ ID NO: 246075 - RNA, 22 nt, Human
uggaaagaaaacccaguaucau

SEQ ID NO: 246076 - RNA, 21 nt, Human
uggagacgagaauggcauaug

SEQ ID NO: 246077 - RNA, 21 nt, Human
ugggcucagugaucuggagcu

SEQ ID NO: 246078 - RNA, 19 nt, Human
ugggggggccggguguggg

SEQ ID NO: 246079 - RNA, 23 nt, Human
ugguggaucucuaccuggaaacu

SEQ ID NO: 246080 - RNA, 21 nt, Human
ugguucaguuuccaguuucag

SEQ ID NO: 246081 - RNA, 20 nt, Human
uguagagaacauuugguccg

SEQ ID NO: 246082 - RNA, 22 nt, Human
ugucaugaggucuccaugcugg

SEQ ID NO: 246083 - RNA, 19 nt, Human
ugugcacacauguggucuc

SEQ ID NO: 246084 - RNA, 18 nt, Human
uguggggugaagggggag

SEQ ID NO: 246085 - RNA, 21 nt, Human
uguggggugaagggggagugc

SEQ ID NO: 246086 - RNA, 26 nt, Human
uuacugagcugagcuccuuaagaugc

SEQ ID NO: 246087 - RNA, 23 nt, Human
uuagaauggcucauauuucuuuu

SEQ ID NO: 246088 - RNA, 24 nt, Human
uuauuuggccugaccugaucaagu

SEQ ID NO: 246089 - RNA, 23 nt, Human
uuggugacuaggagaaaggcaaa

SEQ ID NO: 246090 - RNA, 18 nt, Human
uuuaacgacaaauuauag

SEQ ID NO: 246091 - RNA, 22 nt, Human
uuuaaguacuuggggagccagg

SEQ ID NO: 246092 - RNA, 22 nt, Human
uuuaccaaaaaguaagcgcccu

SEQ ID NO: 246093 - RNA, 21 nt, Human
uuugcaugcaccaaacucacc

SEQ ID NO: 246094 - RNA, 23 nt, Human
uuuuacccacagaccccaggcug

SEQ ID NO: 246095 - RNA, 22 nt, Human
aaggccgcagccaccaccucag

SEQ ID NO: 246096 - RNA, 19 nt, Human
aagggaaccuuguauuuca

SEQ ID NO: 246097 - RNA, 20 nt, Human
accgaggcggccgcccaacu

SEQ ID NO: 246098 - RNA, 23 nt, Human
agaauaauccaagccgagccuca

SEQ ID NO: 246099 - RNA, 21 nt, Human
agcaaggcacaggcugggggc

SEQ ID NO: 246100 - RNA, 20 nt, Human
aggccgcagccaccaccuca

SEQ ID NO: 246101 - RNA, 23 nt, Human
auucccgugcuuugggcugcagc

SEQ ID NO: 246102 - RNA, 21 nt, Human
caaaggccgcagccaccaccu

SEQ ID NO: 246103 - RNA, 24 nt, Human
cagaauaauccaagccgagccuca

SEQ ID NO: 246104 - RNA, 20 nt, Human
cagcaaggcacaggcugggg

SEQ ID NO: 246105 - RNA, 22 nt, Human
cagccaccaccucagcgucuug

SEQ ID NO: 246106 - RNA, 18 nt, Human
cagggggaguuggggucu

SEQ ID NO: 246107 - RNA, 23 nt, Human
ccccgguagagggugcccgucac

SEQ ID NO: 246108 - RNA, 20 nt, Human
cccgaaguccccuuccgccc

SEQ ID NO: 246109 - RNA, 19 nt, Human
ccggccaaguuggacugca

SEQ ID NO: 246110 - RNA, 25 nt, Human
ccucccguccccagcgcgggggucu

SEQ ID NO: 246111 - RNA, 24 nt, Human
ccuccgggauucuagagcguccgg

SEQ ID NO: 246112 - RNA, 21 nt, Human
cggccgaacccuccacugacu

SEQ ID NO: 246113 - RNA, 22 nt, Human
cuaaagccuuugagaaugcucc

SEQ ID NO: 246114 - RNA, 20 nt, Human
cucgccggccucccgucccc

SEQ ID NO: 246115 - RNA, 19 nt, Human
cugcuccucugcggagccc

SEQ ID NO: 246116 - RNA, 22 nt, Human
cugggaaugugucauccccggu

SEQ ID NO: 246117 - RNA, 27 nt, Human
cugggaaugugucauccccgguagagg

SEQ ID NO: 246118 - RNA, 22 nt, Human
cuggguccagggcuaaagccuu

SEQ ID NO: 246119 - RNA, 23 nt, Human
cuuguucaaaggccgcagccacc

SEQ ID NO: 246120 - RNA, 25 nt, Human
gcagaagggaaccuuguauuucaca

SEQ ID NO: 246121 - RNA, 22 nt, Human
gccuuugagaaugcucccaugg

SEQ ID NO: 246122 - RNA, 18 nt, Human
ggccgaacccuccacuga

SEQ ID NO: 246123 - RNA, 20 nt, Human
ggguccagggcuaaagccuu

SEQ ID NO: 246124 - RNA, 24 nt, Human
gguggcucagguggcugcuuaaga

SEQ ID NO: 246125 - RNA, 22 nt, Human
guggcugagccucuccgcagcu

SEQ ID NO: 246126 - RNA, 18 nt, Human
uaaccgaggcggccgccc

SEQ ID NO: 246127 - RNA, 21 nt, Human
uagcuuggcuacuggcucccg

SEQ ID NO: 246128 - RNA, 20 nt, Human
uagguaucuucccuccgcuc

SEQ ID NO: 246129 - RNA, 22 nt, Human
uauaauacugaaaaggauuguu

SEQ ID NO: 246130 - RNA, 19 nt, Human
ucagguggcugcuuaaggc

SEQ ID NO: 246131 - RNA, 23 nt, Human
uccagggcuaaagccuuugagaa

SEQ ID NO: 246132 - RNA, 21 nt, Human
uccccagcgcgggggucuccg

SEQ ID NO: 246133 - RNA, 20 nt, Human
ucccgaaguccccuuccgcc

SEQ ID NO: 246134 - RNA, 21 nt, Human
uccgccauuugcuugguccca

SEQ ID NO: 246135 - RNA, 26 nt, Human
uccgccauuugcuuggucccaagucc

SEQ ID NO: 246136 - RNA, 23 nt, Human
ucuccgaggguggcucacuuacu

SEQ ID NO: 246137 - RNA, 24 nt, Human
ugccauggcucggugguggcucag

SEQ ID NO: 246138 - RNA, 26 nt, Human
ugccauggcucggugguggcucaggu

SEQ ID NO: 246139 - RNA, 19 nt, Human
uggcagcaaggcacaggcu

SEQ ID NO: 246140 - RNA, 23 nt, Human
uggcuacuggcucccgaaguccc

SEQ ID NO: 246141 - RNA, 21 nt, Human
uggcucagguggcugcuuaag

SEQ ID NO: 246142 - RNA, 24 nt, Human
uggcucccgaaguccccuuccgcc

SEQ ID NO: 246143 - RNA, 20 nt, Human
uggcuucuagguaucuuccc

SEQ ID NO: 246144 - RNA, 21 nt, Human
uggguccagggcuaaagccuu

SEQ ID NO: 246145 - RNA, 21 nt, Human
uggucccaggagcucugggaa

SEQ ID NO: 246146 - RNA, 21 nt, Human
ugucugucccgcgauucccgu

SEQ ID NO: 246147 - RNA, 19 nt, Human
uucaaaggccgcagccacc

SEQ ID NO: 246148 - RNA, 20 nt, Human
uucagggggaguuggggucu

SEQ ID NO: 246149 - RNA, 24 nt, Human
uugcuuggucccaggagcucuggg

SEQ ID NO: 246150 - RNA, 24 nt, Human
uuggcuacuggcucccgaaguccc

SEQ ID NO: 246151 - RNA, 23 nt, Human
uuuguucaaaggccgcagccacc

SEQ ID NO: 246152 - RNA, 22 nt, Human
uuuuuuuuuuugcagaagggaa

SEQ ID NO: 246153 - RNA, 24 nt, Human
uuuuuuuuuuugcagaagggaacc

SEQ ID NO: 246154 - RNA, 25 nt, Human
uuuuuuuuuuuuuuuugcagaaggg

SEQ ID NO: 246155 - RNA, 18 nt, Human
uuuuuuuuuuuuuuuuug

SEQ ID NO: 246156 - RNA, 21 nt, Human
uuuuuuuuuuuuuuuuugcag

SEQ ID NO: 246157 - RNA, 20 nt, Human
uuuuuuuuuuuuuuuuuugg

SEQ ID NO: 246158 - RNA, 20 nt, Human
aaaguccuugggagguggcu

SEQ ID NO: 246159 - RNA, 21 nt, Human
aauccccaggcagcccacucu

SEQ ID NO: 246160 - RNA, 22 nt, Human
accaagauggggcuggccugug

SEQ ID NO: 246161 - RNA, 22 nt, Human
agcccugucccucccaaucccc

SEQ ID NO: 246162 - RNA, 26 nt, Human
aggaggcggcggcugcgaaggaggcg

SEQ ID NO: 246163 - RNA, 22 nt, Human
agggcugggggacgcagagggc

SEQ ID NO: 246164 - RNA, 20 nt, Human
caagauggggcuggccugug

SEQ ID NO: 246165 - RNA, 24 nt, Human
caagcccugucccucccaaucccc

SEQ ID NO: 246166 - RNA, 24 nt, Human
caauaaacugcauuugccucuccc

SEQ ID NO: 246167 - RNA, 20 nt, Human
cacccagaagccccgcagau

SEQ ID NO: 246168 - RNA, 24 nt, Human
cacuuccuuguccucuggcggugg

SEQ ID NO: 246169 - RNA, 22 nt, Human
cacuuuaauaguuggggccagg

SEQ ID NO: 246170 - RNA, 20 nt, Human
cagcagccagcuguccuggc

SEQ ID NO: 246171 - RNA, 22 nt, Human
cagccgccgccgcggaguucgg

SEQ ID NO: 246172 - RNA, 18 nt, Human
caggggcagggcgggcac

SEQ ID NO: 246173 - RNA, 23 nt, Human
caggugccccuccucaagcagug

SEQ ID NO: 246174 - RNA, 18 nt, Human
caugccggugaggucagu

SEQ ID NO: 246175 - RNA, 20 nt, Human
ccagagaccugcuccccaag

SEQ ID NO: 246176 - RNA, 27 nt, Human
ccagcggcccccacuuccuuguccucu

SEQ ID NO: 246177 - RNA, 18 nt, Human
ccagggugacaggaccaa

SEQ ID NO: 246178 - RNA, 21 nt, Human
ccauugccccacccuccccua

SEQ ID NO: 246179 - RNA, 19 nt, Human
cccaggauggggcagggcc

SEQ ID NO: 246180 - RNA, 22 nt, Human
ccccaagcccugucccucccaa

SEQ ID NO: 246181 - RNA, 24 nt, Human
ccccacccuccccuacccugggcc

SEQ ID NO: 246182 - RNA, 19 nt, Human
ccccaggcagcccacucug

SEQ ID NO: 246183 - RNA, 19 nt, Human
ccccauugccccacccucc

SEQ ID NO: 246184 - RNA, 20 nt, Human
cccccacuuccuuguccucu

SEQ ID NO: 246185 - RNA, 21 nt, Human
ccccuccucaagcagugccac

SEQ ID NO: 246186 - RNA, 24 nt, Human
cccuacccugggccagcggccccc

SEQ ID NO: 246187 - RNA, 26 nt, Human
cccucccaauccccaggcagcccacu

SEQ ID NO: 246188 - RNA, 18 nt, Human
cccuccccuacccugggc

SEQ ID NO: 246189 - RNA, 18 nt, Human
cccugggccagcggcccc

SEQ ID NO: 246190 - RNA, 19 nt, Human
cccugucccucccaauccc

SEQ ID NO: 246191 - RNA, 23 nt, Human
ccuccccgccugagguccuaggc

SEQ ID NO: 246192 - RNA, 20 nt, Human
ccuugcggcagcuccuccuc

SEQ ID NO: 246193 - RNA, 25 nt, Human
ccuugggagguggcugggcucagcc

SEQ ID NO: 246194 - RNA, 18 nt, Human
cgcggaggaggcggcggc

SEQ ID NO: 246195 - RNA, 21 nt, Human
cgcggcacagcaccgcgcacg

SEQ ID NO: 246196 - RNA, 18 nt, Human
cggagcgcggcgcggagg

SEQ ID NO: 246197 - RNA, 22 nt, Human
cucugccagagaccugcucccc

SEQ ID NO: 246198 - RNA, 19 nt, Human
cuggcaggggagguaaggc

SEQ ID NO: 246199 - RNA, 20 nt, Human
gcacuggccugagggcuggg

SEQ ID NO: 246200 - RNA, 21 nt, Human
gcaggagccacccagaagccc

SEQ ID NO: 246201 - RNA, 19 nt, Human
gcaggggagguaaggccca

SEQ ID NO: 246202 - RNA, 18 nt, Human
gcaggggcagggcgggca

SEQ ID NO: 246203 - RNA, 24 nt, Human
gccugagggcugggggacgcagag

SEQ ID NO: 246204 - RNA, 18 nt, Human
gcggcggcugcgaaggag

SEQ ID NO: 246205 - RNA, 23 nt, Human
gcucagggcucuucggugggggu

SEQ ID NO: 246206 - RNA, 18 nt, Human
gcugggcucagccugagc

SEQ ID NO: 246207 - RNA, 21 nt, Human
ggacauccuucucugccagag

SEQ ID NO: 246208 - RNA, 21 nt, Human
ggagcgcggcgcggaggaggc

SEQ ID NO: 246209 - RNA, 19 nt, Human
ggagguggcugggcucagc

SEQ ID NO: 246210 - RNA, 20 nt, Human
ggagguggcugggcucagcc

SEQ ID NO: 246211 - RNA, 24 nt, Human
ggcacuugcagguggcacaggcuu

SEQ ID NO: 246212 - RNA, 19 nt, Human
gggcaggggcagggcgggc

SEQ ID NO: 246213 - RNA, 18 nt, Human
gggguuggggcaggggca

SEQ ID NO: 246214 - RNA, 24 nt, Human
guuggggcaggggcagggcgggca

SEQ ID NO: 246215 - RNA, 19 nt, Human
uagaugaaucuaaucccau

SEQ ID NO: 246216 - RNA, 20 nt, Human
ucagcagccagcuguccugg

SEQ ID NO: 246217 - RNA, 20 nt, Human
ucccaauccccaggcagccc

SEQ ID NO: 246218 - RNA, 20 nt, Human
uccccaggcagcccacucug

SEQ ID NO: 246219 - RNA, 23 nt, Human
uccccaggcagcccacucugccc

SEQ ID NO: 246220 - RNA, 22 nt, Human
uccccgccugagguccuaggcc

SEQ ID NO: 246221 - RNA, 22 nt, Human
ucucgggcacagcccuggcccc

SEQ ID NO: 246222 - RNA, 22 nt, Human
ucugccagagaccugcucccca

SEQ ID NO: 246223 - RNA, 23 nt, Human
ugagguccuaggccugccacagg

SEQ ID NO: 246224 - RNA, 19 nt, Human
ugccacaggccagcaugcc

SEQ ID NO: 246225 - RNA, 20 nt, Human
ugccacaggccagcaugccg

SEQ ID NO: 246226 - RNA, 19 nt, Human
uggaaaguccuugggaggu

SEQ ID NO: 246227 - RNA, 23 nt, Human
uggaacggacauccuucucugcc

SEQ ID NO: 246228 - RNA, 22 nt, Human
uggcaggagccacccagaagcc

SEQ ID NO: 246229 - RNA, 24 nt, Human
uggcagggcgcggcacagcaccgc

SEQ ID NO: 246230 - RNA, 19 nt, Human
uggcaggugccccuccuca

SEQ ID NO: 246231 - RNA, 23 nt, Human
ugggacagggccuugcggcagcu

SEQ ID NO: 246232 - RNA, 19 nt, Human
uggggcagggccgugugcu

SEQ ID NO: 246233 - RNA, 18 nt, Human
ugggggacgcagagggcg

SEQ ID NO: 246234 - RNA, 18 nt, Human
uggggguuggggcagggg

SEQ ID NO: 246235 - RNA, 19 nt, Human
ugucagcagccagcugucc

SEQ ID NO: 246236 - RNA, 19 nt, Human
uguccuggcacuggccuga

SEQ ID NO: 246237 - RNA, 21 nt, Human
uuuuuuuuuuuuuuuuccaga

SEQ ID NO: 246238 - RNA, 22 nt, Human
uuuuuuuuuuuuuuuuuuccag

SEQ ID NO: 246239 - RNA, 19 nt, Human
aagcaggcaauccuaucag

SEQ ID NO: 246240 - RNA, 19 nt, Human
aagcaggcaauccuaucag

SEQ ID NO: 246241 - RNA, 24 nt, Human
aagcaggcaauccuaucaggucug

SEQ ID NO: 246242 - RNA, 24 nt, Human
aagcaggcaauccuaucaggucug

SEQ ID NO: 246243 - RNA, 20 nt, Human
aauacaaaagauagaauaaa

SEQ ID NO: 246244 - RNA, 20 nt, Human
aauacaaaagauagaauaaa

SEQ ID NO: 246245 - RNA, 23 nt, Human
acaaaagauagaauaaagggacc

SEQ ID NO: 246246 - RNA, 24 nt, Human
acucuaacugcucaccugaaauga

SEQ ID NO: 246247 - RNA, 24 nt, Human
acucuaacugcucaccugaaauga

SEQ ID NO: 246248 - RNA, 19 nt, Human
agacugagaaggaguggcg

SEQ ID NO: 246249 - RNA, 20 nt, Human
aguggacauggaugaaaugu

SEQ ID NO: 246250 - RNA, 26 nt, Human
auacaaaagauagaauaaagggaccc

SEQ ID NO: 246251 - RNA, 23 nt, Human
caacucccaagcauuucaggccc

SEQ ID NO: 246252 - RNA, 23 nt, Human
caacucccaagcauuucaggccc

SEQ ID NO: 246253 - RNA, 24 nt, Human
cacuaccuggaagauuauuuggca

SEQ ID NO: 246254 - RNA, 24 nt, Human
cacuaccuggaagauuauuuggca

SEQ ID NO: 246255 - RNA, 25 nt, Human
cauuucaggcccacggaggugagag

SEQ ID NO: 246256 - RNA, 25 nt, Human
cauuucaggcccacggaggugagag

SEQ ID NO: 246257 - RNA, 28 nt, Human
cauuuuaucaucuaagcaggcaauccua

SEQ ID NO: 246258 - RNA, 28 nt, Human
cauuuuaucaucuaagcaggcaauccua

SEQ ID NO: 246259 - RNA, 18 nt, Human
ccaaagugcuagaugggc

SEQ ID NO: 246260 - RNA, 18 nt, Human
ccaaagugcuagaugggc

SEQ ID NO: 246261 - RNA, 19 nt, Human
cgaugaagacugagaagga

SEQ ID NO: 246262 - RNA, 21 nt, Human
cuaacugcucaccugaaauga

SEQ ID NO: 246263 - RNA, 21 nt, Human
cuaacugcucaccugaaauga

SEQ ID NO: 246264 - RNA, 22 nt, Human
cucccaagcauuucaggcccac

SEQ ID NO: 246265 - RNA, 22 nt, Human
cucccaagcauuucaggcccac

SEQ ID NO: 246266 - RNA, 22 nt, Human
cuucugaaauacaaaagauaga

SEQ ID NO: 246267 - RNA, 22 nt, Human
cuucugaaauacaaaagauaga

SEQ ID NO: 246268 - RNA, 22 nt, Human
gaucgaugaagacugagaagga

SEQ ID NO: 246269 - RNA, 20 nt, Human
ggcaaggcauuguguuucuu

SEQ ID NO: 246270 - RNA, 21 nt, Human
gggcaaggcauuguguuucuu

SEQ ID NO: 246271 - RNA, 21 nt, Human
gucugaggccagcgucugcuc

SEQ ID NO: 246272 - RNA, 22 nt, Human
uaaaagggaauaagauaugaua

SEQ ID NO: 246273 - RNA, 22 nt, Human
uaaaagggaauaagauaugaua

SEQ ID NO: 246274 - RNA, 22 nt, Human
uaaccuaucaucgacagccuuc

SEQ ID NO: 246275 - RNA, 19 nt, Human
uauaugucuucugaaauac

SEQ ID NO: 246276 - RNA, 19 nt, Human
uauaugucuucugaaauac

SEQ ID NO: 246277 - RNA, 21 nt, Human
ucccaagcauuucaggcccac

SEQ ID NO: 246278 - RNA, 21 nt, Human
ucccaagcauuucaggcccac

SEQ ID NO: 246279 - RNA, 21 nt, Human
ucucuagaaguguggcuugca

SEQ ID NO: 246280 - RNA, 21 nt, Human
ucucuagaaguguggcuugca

SEQ ID NO: 246281 - RNA, 20 nt, Human
ucugaaauacaaaagauaga

SEQ ID NO: 246282 - RNA, 21 nt, Human
ugaaaugucauugaucgauga

SEQ ID NO: 246283 - RNA, 20 nt, Human
ugagaaacugucacuaguac

SEQ ID NO: 246284 - RNA, 20 nt, Human
ugagaaacugucacuaguac

SEQ ID NO: 246285 - RNA, 22 nt, Human
ugagaguuccuucaaugcugac

SEQ ID NO: 246286 - RNA, 22 nt, Human
ugagaguuccuucaaugcugac

SEQ ID NO: 246287 - RNA, 22 nt, Human
ugcaauaucccgaagggugggc

SEQ ID NO: 246288 - RNA, 18 nt, Human
ugcuauuucuaaccuauc

SEQ ID NO: 246289 - RNA, 18 nt, Human
ugcucaccugaaaugauc

SEQ ID NO: 246290 - RNA, 18 nt, Human
ugcucaccugaaaugauc

SEQ ID NO: 246291 - RNA, 20 nt, Human
ugucacuaguacaauuugaa

SEQ ID NO: 246292 - RNA, 20 nt, Human
ugucacuaguacaauuugaa

SEQ ID NO: 246293 - RNA, 22 nt, Human
uuuaaauacugauuuccaaagu

SEQ ID NO: 246294 - RNA, 22 nt, Human
uuuaaauacugauuuccaaagu

SEQ ID NO: 246295 - RNA, 22 nt, Human
uuuuuuuuuuuuuuuuuuaaag

SEQ ID NO: 246296 - RNA, 22 nt, Human
uuuuuuuuuuuuuuuuuuaaag

SEQ ID NO: 246297 - RNA, 20 nt, Human
aaaaaacccugucaagaaag

SEQ ID NO: 246298 - RNA, 30 nt, Human
aaaaggccacaaaagagaaauagcaccacc

SEQ ID NO: 246299 - RNA, 23 nt, Human
aaaagucuaaaaggccacaaaag

SEQ ID NO: 246300 - RNA, 18 nt, Human
aaaccuaaaagacaguaa

SEQ ID NO: 246301 - RNA, 25 nt, Human
aaagaccagguggaaaauggguucc

SEQ ID NO: 246302 - RNA, 20 nt, Human
aaagcaaaugagggagaguu

SEQ ID NO: 246303 - RNA, 21 nt, Human
aaagcuccuaacucaaacuua

SEQ ID NO: 246304 - RNA, 21 nt, Human
aaaugcucaaugaaaccaagc

SEQ ID NO: 246305 - RNA, 22 nt, Human
aaaugcucaaugaaaccaagcu

SEQ ID NO: 246306 - RNA, 20 nt, Human
aaaugggauacaauccccau

SEQ ID NO: 246307 - RNA, 24 nt, Human
aaauguuccuuuuagaccaaagcc

SEQ ID NO: 246308 - RNA, 19 nt, Human
aacaaaagucuaaaaggcc

SEQ ID NO: 246309 - RNA, 20 nt, Human
aaggaacugaauaggcugug

SEQ ID NO: 246310 - RNA, 22 nt, Human
aaggaacugaauaggcuguggg

SEQ ID NO: 246311 - RNA, 18 nt, Human
accucagcauauuacaua

SEQ ID NO: 246312 - RNA, 20 nt, Human
accugccugcugcacuucca

SEQ ID NO: 246313 - RNA, 22 nt, Human
agaaaccagugaguccucuaag

SEQ ID NO: 246314 - RNA, 19 nt, Human
agaauccugccaaacaaag

SEQ ID NO: 246315 - RNA, 21 nt, Human
agagaagagaaacgugguaaa

SEQ ID NO: 246316 - RNA, 22 nt, Human
agauaccgaaaacaccccagcc

SEQ ID NO: 246317 - RNA, 20 nt, Human
aucucagggcugaaacacau

SEQ ID NO: 246318 - RNA, 19 nt, Human
auuuugcagaauccugcca

SEQ ID NO: 246319 - RNA, 20 nt, Human
caaaggaacugaauaggcug

SEQ ID NO: 246320 - RNA, 23 nt, Human
cacaaugucaaacgcaaaaucuc

SEQ ID NO: 246321 - RNA, 19 nt, Human
cacugaccacucccuuugc

SEQ ID NO: 246322 - RNA, 21 nt, Human
cacugcccgcaaccggcuccg

SEQ ID NO: 246323 - RNA, 18 nt, Human
cagaaagaacuugcagca

SEQ ID NO: 246324 - RNA, 19 nt, Human
cagaauccugccaaacaaa

SEQ ID NO: 246325 - RNA, 22 nt, Human
cagauaccgaaaacaccccagc

SEQ ID NO: 246326 - RNA, 21 nt, Human
cagaucccaagguaacgaugg

SEQ ID NO: 246327 - RNA, 21 nt, Human
cagcaaacuucaaggagccaa

SEQ ID NO: 246328 - RNA, 22 nt, Human
cagcagauaccgaaaacacccc

SEQ ID NO: 246329 - RNA, 22 nt, Human
caggacaagcuaccaccagaaa

SEQ ID NO: 246330 - RNA, 18 nt, Human
cauuuugcagaauccugc

SEQ ID NO: 246331 - RNA, 23 nt, Human
ccaaacaaaggaacugaauaggc

SEQ ID NO: 246332 - RNA, 25 nt, Human
ccaaagccuaggccuaugaggguuc

SEQ ID NO: 246333 - RNA, 19 nt, Human
ccaaauaacuuuacagggc

SEQ ID NO: 246334 - RNA, 21 nt, Human
ccacugcccgcaaccggcucc

SEQ ID NO: 246335 - RNA, 25 nt, Human
ccacugcccgcaaccggcuccgguu

SEQ ID NO: 246336 - RNA, 21 nt, Human
cccacggucagccucucuguu

SEQ ID NO: 246337 - RNA, 23 nt, Human
cccgcauccgcauggugagcccc

SEQ ID NO: 246338 - RNA, 19 nt, Human
ccugcugcacuuccaacuc

SEQ ID NO: 246339 - RNA, 24 nt, Human
ccuucacugaccacucccuuugcc

SEQ ID NO: 246340 - RNA, 21 nt, Human
ccuuugccagagguccagaaa

SEQ ID NO: 246341 - RNA, 26 nt, Human
cgaaaacaccccagccuggcagaucc

SEQ ID NO: 246342 - RNA, 19 nt, Human
cgcguccacugcccgcaac

SEQ ID NO: 246343 - RNA, 21 nt, Human
cgggauaacuggaaaaauaga

SEQ ID NO: 246344 - RNA, 19 nt, Human
cugaccacucccuuugcca

SEQ ID NO: 246345 - RNA, 21 nt, Human
gacaagcuaccaccagaaaca

SEQ ID NO: 246346 - RNA, 20 nt, Human
gauuucacauuagcuuaaaa

SEQ ID NO: 246347 - RNA, 22 nt, Human
gcaaacuucaaggagccaaaga

SEQ ID NO: 246348 - RNA, 21 nt, Human
gcaaagcaaaugagggagagu

SEQ ID NO: 246349 - RNA, 19 nt, Human
gccugcugcacuuccaacu

SEQ ID NO: 246350 - RNA, 22 nt, Human
ggacaagcuaccaccagaaaca

SEQ ID NO: 246351 - RNA, 22 nt, Human
ggcaaggggagcagagaagaga

SEQ ID NO: 246352 - RNA, 18 nt, Human
guagaaaaaaacccuguc

SEQ ID NO: 246353 - RNA, 21 nt, Human
uaaaaaacugggcacaccuca

SEQ ID NO: 246354 - RNA, 23 nt, Human
uaaaaggccacaaaagagaaaua

SEQ ID NO: 246355 - RNA, 19 nt, Human
uaaaccuaaaagacaguaa

SEQ ID NO: 246356 - RNA, 21 nt, Human
uaaaccuaaaagacaguaaaa

SEQ ID NO: 246357 - RNA, 24 nt, Human
uaaauguuccuuuuagaccaaagc

SEQ ID NO: 246358 - RNA, 19 nt, Human
uaagaccuguugacagcag

SEQ ID NO: 246359 - RNA, 28 nt, Human
uagggcaacaaaagucuaaaaggccaca

SEQ ID NO: 246360 - RNA, 19 nt, Human
ucaagcagcccuguaagac

SEQ ID NO: 246361 - RNA, 20 nt, Human
ucaaggagccaaagaggagu

SEQ ID NO: 246362 - RNA, 22 nt, Human
uccacugaggucgccaccucag

SEQ ID NO: 246363 - RNA, 28 nt, Human
uccagaaagaacuugcagcaugaucacc

SEQ ID NO: 246364 - RNA, 18 nt, Human
ucccagacacaaugucaa

SEQ ID NO: 246365 - RNA, 22 nt, Human
uccgauguugcucugcuggucc

SEQ ID NO: 246366 - RNA, 24 nt, Human
ugaaaagaaaccagugaguccucu

SEQ ID NO: 246367 - RNA, 23 nt, Human
ugaacagcagauaccgaaaacac

SEQ ID NO: 246368 - RNA, 24 nt, Human
ugaaccaacuagauguuaauacug

SEQ ID NO: 246369 - RNA, 18 nt, Human
ugaaucuggguuuuccuc

SEQ ID NO: 246370 - RNA, 19 nt, Human
ugagacacauuuugcagaa

SEQ ID NO: 246371 - RNA, 22 nt, Human
ugagccccacggucaggacccu

SEQ ID NO: 246372 - RNA, 20 nt, Human
ugauuuggagugaagaauuc

SEQ ID NO: 246373 - RNA, 20 nt, Human
ugccucuugcuuuuuagcug

SEQ ID NO: 246374 - RNA, 21 nt, Human
ugccucuugcuuuuuagcugg

SEQ ID NO: 246375 - RNA, 22 nt, Human
ugcucaaugaaaccaagcucuu

SEQ ID NO: 246376 - RNA, 20 nt, Human
uggcagaucccaagguaacu

SEQ ID NO: 246377 - RNA, 18 nt, Human
ugggaugcaauuggucaa

SEQ ID NO: 246378 - RNA, 22 nt, Human
uuagggcaacaaaagucuaaaa

SEQ ID NO: 246379 - RNA, 24 nt, Human
uucaauucagucuuuacauuucuc

SEQ ID NO: 246380 - RNA, 22 nt, Human
uuccuuuuagaccaaagccuag

SEQ ID NO: 246381 - RNA, 25 nt, Human
uuuaaaguagaaaaaaacccuguca

SEQ ID NO: 246382 - RNA, 20 nt, Human
uuuaaauacucuuaaggcau

SEQ ID NO: 246383 - RNA, 26 nt, Human
uuuaagaagagguacuuuuugcuuau

SEQ ID NO: 246384 - RNA, 23 nt, Human
uuuuaaauguuccuuuuagacca

SEQ ID NO: 246385 - RNA, 21 nt, Human
uuuuacaguuaagcacaugau

SEQ ID NO: 246386 - RNA, 19 nt, Human
uuuuggcauuguuaaucac

SEQ ID NO: 246387 - RNA, 23 nt, Human
aaaaaugccaauauaaauaccau

SEQ ID NO: 246388 - RNA, 20 nt, Human
aaaauaaggaaugcuuuuaa

SEQ ID NO: 246389 - RNA, 22 nt, Human
aaagagcagaaccaaucucaag

SEQ ID NO: 246390 - RNA, 18 nt, Human
aaagaggcaaagacuugg

SEQ ID NO: 246391 - RNA, 18 nt, Human
aaauaccauauaucaaau

SEQ ID NO: 246392 - RNA, 18 nt, Human
aagcaccacaaaugugug

SEQ ID NO: 246393 - RNA, 23 nt, Human
aagcaccacaaaugugugugacc

SEQ ID NO: 246394 - RNA, 25 nt, Human
aaggaaaaaauaaaaauaaagaaaa

SEQ ID NO: 246395 - RNA, 23 nt, Human
aaguaaaccuaaaguuagaaacc

SEQ ID NO: 246396 - RNA, 24 nt, Human
aauauaaauaccauauaucaaauu

SEQ ID NO: 246397 - RNA, 18 nt, Human
aaugaggcaggaagaccc

SEQ ID NO: 246398 - RNA, 19 nt, Human
acccugagaaagaaaagag

SEQ ID NO: 246399 - RNA, 18 nt, Human
agaaaaaaaagaggcaaa

SEQ ID NO: 246400 - RNA, 21 nt, Human
agaaaagagcauaaccuggga

SEQ ID NO: 246401 - RNA, 22 nt, Human
agaaaccaaggugaaaugaaug

SEQ ID NO: 246402 - RNA, 23 nt, Human
agaaagaaaagagcauaaccugg

SEQ ID NO: 246403 - RNA, 21 nt, Human
agagcagaaccaaucucaagc

SEQ ID NO: 246404 - RNA, 23 nt, Human
agaggaaugaggcaggaagaccc

SEQ ID NO: 246405 - RNA, 18 nt, Human
agccuuggagcucagggc

SEQ ID NO: 246406 - RNA, 24 nt, Human
aggaaaaaauaaaaauaaagaaaa

SEQ ID NO: 246407 - RNA, 21 nt, Human
aggaagacccguaccuaacca

SEQ ID NO: 246408 - RNA, 20 nt, Human
aggaagguggcugcgucuuc

SEQ ID NO: 246409 - RNA, 22 nt, Human
aggcaggaagacccguaccuaa

SEQ ID NO: 246410 - RNA, 20 nt, Human
agugucaagagcagccgggg

SEQ ID NO: 246411 - RNA, 19 nt, Human
auccaggaagggauaccau

SEQ ID NO: 246412 - RNA, 19 nt, Human
auccauuuuuucccuuuag

SEQ ID NO: 246413 - RNA, 24 nt, Human
augaccuuauguuuucccccacga

SEQ ID NO: 246414 - RNA, 19 nt, Human
caaguaucuguuucccuuu

SEQ ID NO: 246415 - RNA, 19 nt, Human
cacauuuguuucuuguuuu

SEQ ID NO: 246416 - RNA, 18 nt, Human
cagaagaaacguucccac

SEQ ID NO: 246417 - RNA, 21 nt, Human
caggaagggauaccaucuguc

SEQ ID NO: 246418 - RNA, 20 nt, Human
cauaucaaguaucuguuucc

SEQ ID NO: 246419 - RNA, 19 nt, Human
cccacacacaauggaaguu

SEQ ID NO: 246420 - RNA, 20 nt, Human
cccacgacacaagucaccgu

SEQ ID NO: 246421 - RNA, 19 nt, Human
cccgcucgcucgccucucc

SEQ ID NO: 246422 - RNA, 19 nt, Human
ccgcugugggcuggcuggu

SEQ ID NO: 246423 - RNA, 23 nt, Human
cuaauacaccuuagcaaagaaaa

SEQ ID NO: 246424 - RNA, 18 nt, Human
cuccgcacggaccgugcc

SEQ ID NO: 246425 - RNA, 24 nt, Human
cucgcucgccucuccgcacggacc

SEQ ID NO: 246426 - RNA, 19 nt, Human
cugcccaccaaagaggacc

SEQ ID NO: 246427 - RNA, 18 nt, Human
cugggcccugaaauccua

SEQ ID NO: 246428 - RNA, 24 nt, Human
cugguuucuguugagcuuggggcc

SEQ ID NO: 246429 - RNA, 22 nt, Human
cuugcaaacaucaaagcaccac

SEQ ID NO: 246430 - RNA, 20 nt, Human
gaaccaaucucaagcagcca

SEQ ID NO: 246431 - RNA, 21 nt, Human
gcugcccaccaaagaggaccc

SEQ ID NO: 246432 - RNA, 19 nt, Human
gcugugggcuggcugguga

SEQ ID NO: 246433 - RNA, 23 nt, Human
ggaaaguggggugggcacauuug

SEQ ID NO: 246434 - RNA, 18 nt, Human
gguguuggggugggaaag

SEQ ID NO: 246435 - RNA, 22 nt, Human
gugacccuacgaucucucgggu

SEQ ID NO: 246436 - RNA, 20 nt, Human
guguggcauggugcagagcc

SEQ ID NO: 246437 - RNA, 18 nt, Human
guguguggcauggugcag

SEQ ID NO: 246438 - RNA, 22 nt, Human
uaaaccuaaaguuagaaaccaa

SEQ ID NO: 246439 - RNA, 22 nt, Human
uaauacaccuuagcaaagaaaa

SEQ ID NO: 246440 - RNA, 24 nt, Human
ucaaaacuaacaacauacugugua

SEQ ID NO: 246441 - RNA, 19 nt, Human
ucacaccaggauaaaaaga

SEQ ID NO: 246442 - RNA, 21 nt, Human
ucagagguuagacuugcaaac

SEQ ID NO: 246443 - RNA, 18 nt, Human
ucccacacacaauggaag

SEQ ID NO: 246444 - RNA, 22 nt, Human
ucccccacgacacaagucaccg

SEQ ID NO: 246445 - RNA, 22 nt, Human
uccgcacggaccgugccugccg

SEQ ID NO: 246446 - RNA, 18 nt, Human
ucggguagguggccagag

SEQ ID NO: 246447 - RNA, 19 nt, Human
ucuccagaagaaacguucc

SEQ ID NO: 246448 - RNA, 27 nt, Human
ucuccgcacggaccgugccugccgccu

SEQ ID NO: 246449 - RNA, 19 nt, Human
ucucucggguagguggcca

SEQ ID NO: 246450 - RNA, 18 nt, Human
ugaaugacaguuuugugg

SEQ ID NO: 246451 - RNA, 20 nt, Human
ugagaaagaaaagagcauaa

SEQ ID NO: 246452 - RNA, 21 nt, Human
ugaggcaggaagacccguacc

SEQ ID NO: 246453 - RNA, 24 nt, Human
ugccaauauaaauaccauauauca

SEQ ID NO: 246454 - RNA, 21 nt, Human
uggaaagagacuaagaaaaug

SEQ ID NO: 246455 - RNA, 22 nt, Human
uggcaacaucucggggaguggc

SEQ ID NO: 246456 - RNA, 20 nt, Human
uggcugcgucuucccgcucg

SEQ ID NO: 246457 - RNA, 19 nt, Human
ugggaaaugggcuacaugg

SEQ ID NO: 246458 - RNA, 18 nt, Human
uggguugaaaaaugccaa

SEQ ID NO: 246459 - RNA, 21 nt, Human
uguguggcauggugcagagcc

SEQ ID NO: 246460 - RNA, 18 nt, Human
uguugcaccugcuaaguc

SEQ ID NO: 246461 - RNA, 25 nt, Human
uguuggggugggaaagaguuguucu

SEQ ID NO: 246462 - RNA, 21 nt, Human
uuaguuaaaaaauaaggaaug

SEQ ID NO: 246463 - RNA, 19 nt, Human
uucccacacacaauggaag

SEQ ID NO: 246464 - RNA, 21 nt, Human
uuggaaagagacuaagaaaau

SEQ ID NO: 246465 - RNA, 23 nt, Human
uuggaaagagacuaagaaaaugu

SEQ ID NO: 246466 - RNA, 24 nt, Human
uugggagucauagauuuuucugug

SEQ ID NO: 246467 - RNA, 22 nt, Human
aaaagaacagguaaagugcaag

SEQ ID NO: 246468 - RNA, 23 nt, Human
aagcagacagacaauggggucca

SEQ ID NO: 246469 - RNA, 18 nt, Human
acagcagagagacaacgg

SEQ ID NO: 246470 - RNA, 20 nt, Human
acagcagagagacaacggaa

SEQ ID NO: 246471 - RNA, 21 nt, Human
accaacugggccagcaccacc

SEQ ID NO: 246472 - RNA, 21 nt, Human
acccugggaaguguugggcga

SEQ ID NO: 246473 - RNA, 22 nt, Human
acugcgccggagcccgugcugu

SEQ ID NO: 246474 - RNA, 19 nt, Human
agcacuaccuccucagccc

SEQ ID NO: 246475 - RNA, 18 nt, Human
agcagguggcuggcuggg

SEQ ID NO: 246476 - RNA, 20 nt, Human
agcccgugcugucagcucug

SEQ ID NO: 246477 - RNA, 22 nt, Human
agcuacugagaagccaaaagac

SEQ ID NO: 246478 - RNA, 19 nt, Human
aggcggagggggaggggac

SEQ ID NO: 246479 - RNA, 22 nt, Human
aggcggagggggaggggacagg

SEQ ID NO: 246480 - RNA, 18 nt, Human
agggagggaggcacgggg

SEQ ID NO: 246481 - RNA, 21 nt, Human
agggcaggugggaagcagaca

SEQ ID NO: 246482 - RNA, 25 nt, Human
aggugggaagcagacagacaauggg

SEQ ID NO: 246483 - RNA, 21 nt, Human
augcaggcuggugcccgaggg

SEQ ID NO: 246484 - RNA, 22 nt, Human
auuuccaucccucacaugcccc

SEQ ID NO: 246485 - RNA, 21 nt, Human
caaaauaaauuagaaugggug

SEQ ID NO: 246486 - RNA, 20 nt, Human
caacugggccagcaccaccc

SEQ ID NO: 246487 - RNA, 21 nt, Human
caacugggccagcaccaccca

SEQ ID NO: 246488 - RNA, 18 nt, Human
cagcccccucucccucuc

SEQ ID NO: 246489 - RNA, 22 nt, Human
cagcgcugggauucagugcugg

SEQ ID NO: 246490 - RNA, 20 nt, Human
cagucagccagggcugcggc

SEQ ID NO: 246491 - RNA, 18 nt, Human
cauggcauguacuuuuac

SEQ ID NO: 246492 - RNA, 22 nt, Human
ccaugcccccaagccccccucg

SEQ ID NO: 246493 - RNA, 24 nt, Human
ccaugcccccaagccccccucgcc

SEQ ID NO: 246494 - RNA, 22 nt, Human
ccccaugcccccaagccccccc

SEQ ID NO: 246495 - RNA, 24 nt, Human
ccccaugcccccaagccccccucg

SEQ ID NO: 246496 - RNA, 18 nt, Human
cccccaagccccccucgc

SEQ ID NO: 246497 - RNA, 21 nt, Human
cccccucccuuucccugaccc

SEQ ID NO: 246498 - RNA, 20 nt, Human
ccccucccuuucccugaccc

SEQ ID NO: 246499 - RNA, 19 nt, Human
ccccugggccuacagcacu

SEQ ID NO: 246500 - RNA, 19 nt, Human
cccucacaugccccccucc

SEQ ID NO: 246501 - RNA, 24 nt, Human
ccucccuuucccugacccccuggg

SEQ ID NO: 246502 - RNA, 24 nt, Human
ccugacaucagccuuccccuuagc

SEQ ID NO: 246503 - RNA, 24 nt, Human
cgacacagcagagagacaacggaa

SEQ ID NO: 246504 - RNA, 21 nt, Human
cgaggcggcuccggcggaggc

SEQ ID NO: 246505 - RNA, 21 nt, Human
cggaaauaaauagggugggug

SEQ ID NO: 246506 - RNA, 21 nt, Human
cggccggcggcuccggggcgg

SEQ ID NO: 246507 - RNA, 19 nt, Human
cggcuccggcggaggcgga

SEQ ID NO: 246508 - RNA, 23 nt, Human
cuccccagugcugcagcacugac

SEQ ID NO: 246509 - RNA, 18 nt, Human
cuccucagcccccucucc

SEQ ID NO: 246510 - RNA, 23 nt, Human
cuggugcccgaggggcagggggu

SEQ ID NO: 246511 - RNA, 18 nt, Human
gaagccaagccaggcaca

SEQ ID NO: 246512 - RNA, 23 nt, Human
gacaaugggguccaggcagaguu

SEQ ID NO: 246513 - RNA, 19 nt, Human
gagaagccaaaagacaaaa

SEQ ID NO: 246514 - RNA, 19 nt, Human
gagggaguggcugggggcc

SEQ ID NO: 246515 - RNA, 19 nt, Human
gcagggagggaggcacggg

SEQ ID NO: 246516 - RNA, 21 nt, Human
gcccgaggggcaggggguggg

SEQ ID NO: 246517 - RNA, 25 nt, Human
gcgacacagcagagagacaacggaa

SEQ ID NO: 246518 - RNA, 18 nt, Human
gcgccggagcccgugcug

SEQ ID NO: 246519 - RNA, 19 nt, Human
gcugggggccucagggcag

SEQ ID NO: 246520 - RNA, 24 nt, Human
ggcaggggguggggagggcaggug

SEQ ID NO: 246521 - RNA, 20 nt, Human
gggcaggggguggggagggc

SEQ ID NO: 246522 - RNA, 19 nt, Human
gggggcgcugcggcagagg

SEQ ID NO: 246523 - RNA, 21 nt, Human
ggggguggggagggcaggugg

SEQ ID NO: 246524 - RNA, 25 nt, Human
ggggguggggagggcaggugggaag

SEQ ID NO: 246525 - RNA, 22 nt, Human
gggugggugagccuggugccag

SEQ ID NO: 246526 - RNA, 22 nt, Human
gguaaagugcaaggagaaucca

SEQ ID NO: 246527 - RNA, 22 nt, Human
gucaggagcagguggcuggcug

SEQ ID NO: 246528 - RNA, 22 nt, Human
gugcugcagcacugacacaaag

SEQ ID NO: 246529 - RNA, 19 nt, Human
uaccacacaaguuuauuua

SEQ ID NO: 246530 - RNA, 18 nt, Human
uaccccagcccccagcca

SEQ ID NO: 246531 - RNA, 23 nt, Human
uacugagaagccaaaagacaaaa

SEQ ID NO: 246532 - RNA, 19 nt, Human
uaggaaaggacuauaaugg

SEQ ID NO: 246533 - RNA, 20 nt, Human
ucaaauacacagcugcuggc

SEQ ID NO: 246534 - RNA, 19 nt, Human
ucccucacaugccccccuc

SEQ ID NO: 246535 - RNA, 19 nt, Human
ugaacacauaugcaggcug

SEQ ID NO: 246536 - RNA, 20 nt, Human
ugaacacauaugcaggcugg

SEQ ID NO: 246537 - RNA, 22 nt, Human
ugagaagccaaaagacaaaaua

SEQ ID NO: 246538 - RNA, 18 nt, Human
ugaguccuaccccagccc

SEQ ID NO: 246539 - RNA, 24 nt, Human
ugcaggcuggugcccgaggggcag

SEQ ID NO: 246540 - RNA, 22 nt, Human
ugcccgaggggcaggggguggg

SEQ ID NO: 246541 - RNA, 22 nt, Human
ugcugucagcucuggaaaagaa

SEQ ID NO: 246542 - RNA, 18 nt, Human
uggcagcagcacccuggg

SEQ ID NO: 246543 - RNA, 19 nt, Human
uggcuggggcggguggcag

SEQ ID NO: 246544 - RNA, 19 nt, Human
uggcugggggccucagggc

SEQ ID NO: 246545 - RNA, 21 nt, Human
uggcugggggccucagggcag

SEQ ID NO: 246546 - RNA, 20 nt, Human
ugggaaguguugggcgacac

SEQ ID NO: 246547 - RNA, 23 nt, Human
ugggauucagugcuggggcaggg

SEQ ID NO: 246548 - RNA, 20 nt, Human
ugggccagcaccacccagga

SEQ ID NO: 246549 - RNA, 21 nt, Human
uggggagggcaggugggaagc

SEQ ID NO: 246550 - RNA, 24 nt, Human
ugggguccaggcagaguuugugug

SEQ ID NO: 246551 - RNA, 21 nt, Human
uggugccaggaggucauuucc

SEQ ID NO: 246552 - RNA, 22 nt, Human
uguggugaaccaggcugcugga

SEQ ID NO: 246553 - RNA, 23 nt, Human
uguguggugaaccaggcugcugg

SEQ ID NO: 246554 - RNA, 23 nt, Human
uuccggccccaugcccccaagcc

SEQ ID NO: 246555 - RNA, 20 nt, Human
aacccgcugucccuucuccc

SEQ ID NO: 246556 - RNA, 21 nt, Human
aacccgcugucccuucuccca

SEQ ID NO: 246557 - RNA, 21 nt, Human
aagaggccagcgcucucaaga

SEQ ID NO: 246558 - RNA, 22 nt, Human
aagaggccagcgcucucaagac

SEQ ID NO: 246559 - RNA, 19 nt, Human
aagcagcuuucagagccuc

SEQ ID NO: 246560 - RNA, 19 nt, Human
aaggaggucaucaucgaag

SEQ ID NO: 246561 - RNA, 18 nt, Human
aagucccgagccaaagcc

SEQ ID NO: 246562 - RNA, 21 nt, Human
acaacagcacagcggcgcaga

SEQ ID NO: 246563 - RNA, 18 nt, Human
acacacuccagagaugcc

SEQ ID NO: 246564 - RNA, 18 nt, Human
acacucacacaagguuga

SEQ ID NO: 246565 - RNA, 19 nt, Human
acacucacacaagguugac

SEQ ID NO: 246566 - RNA, 24 nt, Human
acccccacaacagggccagaggug

SEQ ID NO: 246567 - RNA, 19 nt, Human
acccccagucccuugaaau

SEQ ID NO: 246568 - RNA, 19 nt, Human
acucacacaagguugacau

SEQ ID NO: 246569 - RNA, 23 nt, Human
acugccucugugacaacccccac

SEQ ID NO: 246570 - RNA, 19 nt, Human
agaaaaaagaaucaaaagg

SEQ ID NO: 246571 - RNA, 19 nt, Human
agaagguggcugugguggc

SEQ ID NO: 246572 - RNA, 26 nt, Human
agagaugccaguggcccaggcuugga

SEQ ID NO: 246573 - RNA, 23 nt, Human
agcagcugggggcagagggcggg

SEQ ID NO: 246574 - RNA, 25 nt, Human
agcagcugggggcagagggcggggg

SEQ ID NO: 246575 - RNA, 19 nt, Human
agcaggcccccacccccgg

SEQ ID NO: 246576 - RNA, 18 nt, Human
agccccugccucggccuc

SEQ ID NO: 246577 - RNA, 20 nt, Human
agcggaggaggagaaggugg

SEQ ID NO: 246578 - RNA, 22 nt, Human
agcugggggcagagggcggggg

SEQ ID NO: 246579 - RNA, 21 nt, Human
aggaaauguuggauguggcca

SEQ ID NO: 246580 - RNA, 20 nt, Human
aggagaagguggcuguggug

SEQ ID NO: 246581 - RNA, 21 nt, Human
aggagcagcugggggcagagg

SEQ ID NO: 246582 - RNA, 21 nt, Human
aggcccccacccccggccacc

SEQ ID NO: 246583 - RNA, 30 nt, Human
aggcgaggacgggagaggacagcggaggaa

SEQ ID NO: 246584 - RNA, 19 nt, Human
agggagggaggaagaggcc

SEQ ID NO: 246585 - RNA, 21 nt, Human
agguggcugugguggcggcgg

SEQ ID NO: 246586 - RNA, 23 nt, Human
aucaucgaagugccaacccuccu

SEQ ID NO: 246587 - RNA, 22 nt, Human
cacccccagucccuugaaaucc

SEQ ID NO: 246588 - RNA, 19 nt, Human
cacuccagagaugccagug

SEQ ID NO: 246589 - RNA, 22 nt, Human
cacugacccacagcaggccccc

SEQ ID NO: 246590 - RNA, 24 nt, Human
cacugccucugugacaacccccac

SEQ ID NO: 246591 - RNA, 21 nt, Human
cagaaggugggcgguggcagc

SEQ ID NO: 246592 - RNA, 18 nt, Human
cagcaggcccccaccccc

SEQ ID NO: 246593 - RNA, 22 nt, Human
cagcaggcccccacccccggcc

SEQ ID NO: 246594 - RNA, 19 nt, Human
cagccccugccucggccuc

SEQ ID NO: 246595 - RNA, 22 nt, Human
cagcgcucucaagacaucaagg

SEQ ID NO: 246596 - RNA, 20 nt, Human
cagcggcaaggagggggaug

SEQ ID NO: 246597 - RNA, 19 nt, Human
caggcgcccuacccugcag

SEQ ID NO: 246598 - RNA, 18 nt, Human
cagguggcauaggccuug

SEQ ID NO: 246599 - RNA, 22 nt, Human
ccaaagccgagugacaaaagca

SEQ ID NO: 246600 - RNA, 22 nt, Human
ccaggucugcaaaguggccaaa

SEQ ID NO: 246601 - RNA, 22 nt, Human
cccacaacagggccagaggugg

SEQ ID NO: 246602 - RNA, 27 nt, Human
cccacaacagggccagaggugguugau

SEQ ID NO: 246603 - RNA, 19 nt, Human
cccacccaucaauuuggaa

SEQ ID NO: 246604 - RNA, 20 nt, Human
cccaccccaacccccgucac

SEQ ID NO: 246605 - RNA, 31 nt, Human
cccagccccugccucggccucccccguggcc

SEQ ID NO: 246606 - RNA, 21 nt, Human
ccccaacccccgucacacuca

SEQ ID NO: 246607 - RNA, 22 nt, Human
ccccacacacuccagagaugcc

SEQ ID NO: 246608 - RNA, 22 nt, Human
ccccaccccaacccccgucaca

SEQ ID NO: 246609 - RNA, 20 nt, Human
ccccacccccggccaccaag

SEQ ID NO: 246610 - RNA, 28 nt, Human
ccccagaagcagcuuucagagccucucc

SEQ ID NO: 246611 - RNA, 18 nt, Human
cccccagucccuugaaau

SEQ ID NO: 246612 - RNA, 21 nt, Human
ccccucugcccagccccugcc

SEQ ID NO: 246613 - RNA, 22 nt, Human
cccgagccaaagccgagugaca

SEQ ID NO: 246614 - RNA, 18 nt, Human
cccgccccaccccaaccc

SEQ ID NO: 246615 - RNA, 20 nt, Human
cccgccccaccccaaccccc

SEQ ID NO: 246616 - RNA, 20 nt, Human
cccucugcccagccccugcc

SEQ ID NO: 246617 - RNA, 18 nt, Human
ccgccccaccccaacccc

SEQ ID NO: 246618 - RNA, 23 nt, Human
ccgccccaccccaacccccguca

SEQ ID NO: 246619 - RNA, 23 nt, Human
ccucccagacccccacacacucc

SEQ ID NO: 246620 - RNA, 19 nt, Human
ccucccgccccaccccaac

SEQ ID NO: 246621 - RNA, 26 nt, Human
ccucccgccccaccccaacccccguc

SEQ ID NO: 246622 - RNA, 22 nt, Human
ccuccuccccucugcccagccc

SEQ ID NO: 246623 - RNA, 21 nt, Human
ccuccugccaggcuugccuuc

SEQ ID NO: 246624 - RNA, 18 nt, Human
ccucugugacaaccccca

SEQ ID NO: 246625 - RNA, 22 nt, Human
ccucugugacaacccccacaac

SEQ ID NO: 246626 - RNA, 24 nt, Human
cgccccaccccaacccccgucaca

SEQ ID NO: 246627 - RNA, 21 nt, Human
cgcggcgagagggcgcguucc

SEQ ID NO: 246628 - RNA, 24 nt, Human
cgcugcuguuggugccggagcugg

SEQ ID NO: 246629 - RNA, 20 nt, Human
cggccucccccguggccucc

SEQ ID NO: 246630 - RNA, 22 nt, Human
cgggaccugccucccagacccc

SEQ ID NO: 246631 - RNA, 24 nt, Human
cgggcggcaggcgcgagcagcggg

SEQ ID NO: 246632 - RNA, 19 nt, Human
cgguggcagcggcgcugcu

SEQ ID NO: 246633 - RNA, 18 nt, Human
cucaagacaucaagguca

SEQ ID NO: 246634 - RNA, 21 nt, Human
cuccagagaugccaguggccc

SEQ ID NO: 246635 - RNA, 22 nt, Human
cucccagacccccacacacucc

SEQ ID NO: 246636 - RNA, 19 nt, Human
cucccccguggccucccgc

SEQ ID NO: 246637 - RNA, 23 nt, Human
cucccccguggccucccgcccca

SEQ ID NO: 246638 - RNA, 19 nt, Human
cucccgccccaccccaacc

SEQ ID NO: 246639 - RNA, 21 nt, Human
cuccuccccucugcccagccc

SEQ ID NO: 246640 - RNA, 21 nt, Human
cucggccucccccguggccuc

SEQ ID NO: 246641 - RNA, 22 nt, Human
cucggccucccccguggccucc

SEQ ID NO: 246642 - RNA, 20 nt, Human
cucuccacaauuauugaccg

SEQ ID NO: 246643 - RNA, 19 nt, Human
cugggggcagagggcgggg

SEQ ID NO: 246644 - RNA, 21 nt, Human
cugguggguggcggugacugc

SEQ ID NO: 246645 - RNA, 24 nt, Human
cuucucccacaggcugcccugcag

SEQ ID NO: 246646 - RNA, 21 nt, Human
gaagugccaacccuccugcca

SEQ ID NO: 246647 - RNA, 23 nt, Human
gaagugccaacccuccugccagg

SEQ ID NO: 246648 - RNA, 18 nt, Human
gacccacagcaggccccc

SEQ ID NO: 246649 - RNA, 21 nt, Human
gaccugccucccagaccccca

SEQ ID NO: 246650 - RNA, 22 nt, Human
gaccugccucccagacccccac

SEQ ID NO: 246651 - RNA, 21 nt, Human
gagaagguggcugugguggcg

SEQ ID NO: 246652 - RNA, 25 nt, Human
gagccaaagccgagugacaaaagca

SEQ ID NO: 246653 - RNA, 21 nt, Human
gaggagaagguggcuguggug

SEQ ID NO: 246654 - RNA, 18 nt, Human
gaggagcagcugggggca

SEQ ID NO: 246655 - RNA, 31 nt, Human
gaggaggagaagguggcugugguggcggccg

SEQ ID NO: 246656 - RNA, 18 nt, Human
gccaacccuccugccagg

SEQ ID NO: 246657 - RNA, 20 nt, Human
gcccaggcuuggaaacgggu

SEQ ID NO: 246658 - RNA, 20 nt, Human
gcggcaggcgcgagcagcgg

SEQ ID NO: 246659 - RNA, 19 nt, Human
gcggcgagagggcgcguuc

SEQ ID NO: 246660 - RNA, 21 nt, Human
gcugggggcagagggcggggg

SEQ ID NO: 246661 - RNA, 18 nt, Human
gcuuucagagccucuccu

SEQ ID NO: 246662 - RNA, 23 nt, Human
ggacagcggaggaggagaaggug

SEQ ID NO: 246663 - RNA, 20 nt, Human
ggagaggacagcggaggagg

SEQ ID NO: 246664 - RNA, 18 nt, Human
ggcccaggcuuggaaacg

SEQ ID NO: 246665 - RNA, 20 nt, Human
ggcggcaggcgcgagcagcg

SEQ ID NO: 246666 - RNA, 19 nt, Human
ggcgguggcagcggcgcug

SEQ ID NO: 246667 - RNA, 19 nt, Human
gggaaggacagggggcucg

SEQ ID NO: 246668 - RNA, 21 nt, Human
gggaaggacagggggcucggg

SEQ ID NO: 246669 - RNA, 18 nt, Human
gggaaggacagggggcug

SEQ ID NO: 246670 - RNA, 21 nt, Human
gggaccugccucccagacccc

SEQ ID NO: 246671 - RNA, 20 nt, Human
ggggaagaaaaaagaaucaa

SEQ ID NO: 246672 - RNA, 19 nt, Human
ggguuucuguggagcagag

SEQ ID NO: 246673 - RNA, 20 nt, Human
gugccaacccuccugccagg

SEQ ID NO: 246674 - RNA, 19 nt, Human
gugcuuccuccuccccucu

SEQ ID NO: 246675 - RNA, 24 nt, Human
guggcccaggcuuggaaacgggug

SEQ ID NO: 246676 - RNA, 32 nt, Human
guggcggcggcagaaggugggcgguggcaaca

SEQ ID NO: 246677 - RNA, 33 nt, Human
guggcggcggcagaaggugggcgguggcaacga

SEQ ID NO: 246678 - RNA, 21 nt, Human
guggcugugguggcggcggca

SEQ ID NO: 246679 - RNA, 21 nt, Human
guggcuuccucucccacuccc

SEQ ID NO: 246680 - RNA, 20 nt, Human
gugguggcggcggcagaagg

SEQ ID NO: 246681 - RNA, 22 nt, Human
uaaaacaggguuucuguggagc

SEQ ID NO: 246682 - RNA, 18 nt, Human
uagcccuaaagucccagg

SEQ ID NO: 246683 - RNA, 23 nt, Human
ucaaaaggaauugccugaggaaa

SEQ ID NO: 246684 - RNA, 19 nt, Human
ucaaauccuuuguugcugc

SEQ ID NO: 246685 - RNA, 28 nt, Human
ucaccugauagucgacagaggcgaggac

SEQ ID NO: 246686 - RNA, 19 nt, Human
ucacugauuuugaaguccc

SEQ ID NO: 246687 - RNA, 20 nt, Human
ucaggcgcccuacccugcag

SEQ ID NO: 246688 - RNA, 24 nt, Human
ucccccagaagcagcuuucagagc

SEQ ID NO: 246689 - RNA, 21 nt, Human
ucccccguggccucccgcccc

SEQ ID NO: 246690 - RNA, 24 nt, Human
ucccgagccaaagccgagugacaa

SEQ ID NO: 246691 - RNA, 21 nt, Human
ucccgccccaccccaaccccc

SEQ ID NO: 246692 - RNA, 20 nt, Human
uccuuuguugcugccacugc

SEQ ID NO: 246693 - RNA, 21 nt, Human
ugacaacccccacaacagggc

SEQ ID NO: 246694 - RNA, 22 nt, Human
ugacaacccccacaacagggcc

SEQ ID NO: 246695 - RNA, 27 nt, Human
ugacaucgucugccuguggccguaguc

SEQ ID NO: 246696 - RNA, 24 nt, Human
ugacccacagcaggcccccacccc

SEQ ID NO: 246697 - RNA, 23 nt, Human
ugaggaaauguuggauguggcca

SEQ ID NO: 246698 - RNA, 19 nt, Human
ugaggccggcgggcggcag

SEQ ID NO: 246699 - RNA, 18 nt, Human
ugccacugccucugugac

SEQ ID NO: 246700 - RNA, 20 nt, Human
ugccaggcuugccuucucuu

SEQ ID NO: 246701 - RNA, 22 nt, Human
ugccaguggcccaggcuuggaa

SEQ ID NO: 246702 - RNA, 22 nt, Human
ugccucggccucccccguggcc

SEQ ID NO: 246703 - RNA, 23 nt, Human
ugccucggccucccccguggccu

SEQ ID NO: 246704 - RNA, 20 nt, Human
ugcgaggagcagcugggggc

SEQ ID NO: 246705 - RNA, 18 nt, Human
ugcuguuggugccggagc

SEQ ID NO: 246706 - RNA, 19 nt, Human
uggcacacugacccacagc

SEQ ID NO: 246707 - RNA, 23 nt, Human
uggcauaggccuuggcucuccca

SEQ ID NO: 246708 - RNA, 20 nt, Human
uggcccaggcuuggaaacgg

SEQ ID NO: 246709 - RNA, 25 nt, Human
uggccucccgccccaccccaacccc

SEQ ID NO: 246710 - RNA, 18 nt, Human
uggcuccacgaacacacc

SEQ ID NO: 246711 - RNA, 21 nt, Human
uggcuccacgaacacaccaaa

SEQ ID NO: 246712 - RNA, 18 nt, Human
uggcuuccucucccacuc

SEQ ID NO: 246713 - RNA, 20 nt, Human
uggcuuccucucccacuccc

SEQ ID NO: 246714 - RNA, 20 nt, Human
ugggggcagagggcgggggc

SEQ ID NO: 246715 - RNA, 21 nt, Human
ugggggcagagggcgggggcc

SEQ ID NO: 246716 - RNA, 22 nt, Human
ugggggcagagggcgggggccg

SEQ ID NO: 246717 - RNA, 23 nt, Human
ugggggcagagggcgggggccgg

SEQ ID NO: 246718 - RNA, 23 nt, Human
uggguggcggugacugcgagggc

SEQ ID NO: 246719 - RNA, 23 nt, Human
ugguggcggcggcagaagguggg

SEQ ID NO: 246720 - RNA, 21 nt, Human
ugugguggcggcggcagaagg

SEQ ID NO: 246721 - RNA, 21 nt, Human
ugugguggcggcggcagaagg

SEQ ID NO: 246722 - RNA, 23 nt, Human
ugugguggcggcggcagaaggug

SEQ ID NO: 246723 - RNA, 19 nt, Human
uuagcccuaaagucccagg

SEQ ID NO: 246724 - RNA, 23 nt, Human
uucaccugauagucgacagaggc

SEQ ID NO: 246725 - RNA, 21 nt, Human
uugaagucccgagccaaagcc

SEQ ID NO: 246726 - RNA, 20 nt, Human
uugugcuuccuccuccccuc

SEQ ID NO: 246727 - RNA, 21 nt, Human
aacagaaauacacaauauacu

SEQ ID NO: 246728 - RNA, 24 nt, Human
accacauuaggcauuaccaguaca

SEQ ID NO: 246729 - RNA, 18 nt, Human
agaggagggggagccgcu

SEQ ID NO: 246730 - RNA, 20 nt, Human
agagggaagaggacgcggag

SEQ ID NO: 246731 - RNA, 24 nt, Human
agggaagaggacgcggaguaagag

SEQ ID NO: 246732 - RNA, 22 nt, Human
caggcagaccacauuaggcauu

SEQ ID NO: 246733 - RNA, 22 nt, Human
caugugaaccuacuuuuuaagc

SEQ ID NO: 246734 - RNA, 20 nt, Human
ccccggcgggggaaagaggg

SEQ ID NO: 246735 - RNA, 21 nt, Human
cggccgggcuguggugcgggc

SEQ ID NO: 246736 - RNA, 18 nt, Human
cgggacggugcaacaagc

SEQ ID NO: 246737 - RNA, 26 nt, Human
gaacagaaaaugaacagaagggaccc

SEQ ID NO: 246738 - RNA, 30 nt, Human
gcggacaguaacgagggagggcuucgggcc

SEQ ID NO: 246739 - RNA, 22 nt, Human
uacacaauauacuuaccuguac

SEQ ID NO: 246740 - RNA, 20 nt, Human
uauuauacaacucuaugaac

SEQ ID NO: 246741 - RNA, 23 nt, Human
uuuuaagcaaucauguuuuauua

SEQ ID NO: 246742 - RNA, 24 nt, Human
uuuuuuuuuuuuuuucaaguuuuu

SEQ ID NO: 246743 - RNA, 23 nt, Human
uuuuuuuuuuuuuuuuuuucaag

SEQ ID NO: 246744 - RNA, 21 nt, Human
aaaacaaaacagcacagcccu

SEQ ID NO: 246745 - RNA, 20 nt, Human
aaacaaaacagcacagcccu

SEQ ID NO: 246746 - RNA, 26 nt, Human
aaacaaaacagcacagcccuaggagg

SEQ ID NO: 246747 - RNA, 29 nt, Human
aaacgaggaggcggaggaggagggacccc

SEQ ID NO: 246748 - RNA, 19 nt, Human
aaacgaugccgaccggcga

SEQ ID NO: 246749 - RNA, 22 nt, Human
aacaggucugugaugcccuuag

SEQ ID NO: 246750 - RNA, 18 nt, Human
aacccguugaaccccauu

SEQ ID NO: 246751 - RNA, 18 nt, Human
acugcacuuuaauucugc

SEQ ID NO: 246752 - RNA, 19 nt, Human
agaugcagacguuauugcc

SEQ ID NO: 246753 - RNA, 19 nt, Human
aggcgccguggggagggcg

SEQ ID NO: 246754 - RNA, 19 nt, Human
caaaacaaaacagcacagc

SEQ ID NO: 246755 - RNA, 21 nt, Human
caaaacaaaacagcacagccc

SEQ ID NO: 246756 - RNA, 20 nt, Human
caaaacaaaacagcacagcu

SEQ ID NO: 246757 - RNA, 22 nt, Human
cacaaugcgagggucaaaacaa

SEQ ID NO: 246758 - RNA, 20 nt, Human
cagcgccgccggcggcgccu

SEQ ID NO: 246759 - RNA, 21 nt, Human
cauuuccaucaguguucagga

SEQ ID NO: 246760 - RNA, 19 nt, Human
ccccucaccuccuucucca

SEQ ID NO: 246761 - RNA, 18 nt, Human
cccgacugcuucucccuc

SEQ ID NO: 246762 - RNA, 21 nt, Human
cccgccggcguccccuugccu

SEQ ID NO: 246763 - RNA, 22 nt, Human
cccgccggcguccccuugccuc

SEQ ID NO: 246764 - RNA, 26 nt, Human
ccucaccuccuucuccacucccuccc

SEQ ID NO: 246765 - RNA, 23 nt, Human
ccucucuagcgagcuugcugccu

SEQ ID NO: 246766 - RNA, 23 nt, Human
ccuggcccgggccgucccccggc

SEQ ID NO: 246767 - RNA, 23 nt, Human
ccuugccucagggcgccccgcga

SEQ ID NO: 246768 - RNA, 19 nt, Human
cgaagacgaucagauaccg

SEQ ID NO: 246769 - RNA, 18 nt, Human
cgaggaggcggaggagga

SEQ ID NO: 246770 - RNA, 24 nt, Human
cgagggucaaaacaaaacagcaca

SEQ ID NO: 246771 - RNA, 24 nt, Human
cgauccugggcccccucaccuccu

SEQ ID NO: 246772 - RNA, 19 nt, Human
cgccguggggagggcggcu

SEQ ID NO: 246773 - RNA, 25 nt, Human
cucucguccucagacuuuaauuuca

SEQ ID NO: 246774 - RNA, 21 nt, Human
cugccucagccuccgcccugc

SEQ ID NO: 246775 - RNA, 22 nt, Human
cugccucagccuccgcccugcu

SEQ ID NO: 246776 - RNA, 20 nt, Human
gaccauaaacgaugccgacc

SEQ ID NO: 246777 - RNA, 19 nt, Human
gagacucuggcaugcuaac

SEQ ID NO: 246778 - RNA, 20 nt, Human
gagccgagccugcgggcggc

SEQ ID NO: 246779 - RNA, 18 nt, Human
gagccugcgggcggcggg

SEQ ID NO: 246780 - RNA, 18 nt, Human
gcaaagcugaaacuuaaa

SEQ ID NO: 246781 - RNA, 22 nt, Human
gcccccucaccuccuucuccac

SEQ ID NO: 246782 - RNA, 22 nt, Human
gcccccucaccuccuucuccac

SEQ ID NO: 246783 - RNA, 18 nt, Human
gcccggacacggacagga

SEQ ID NO: 246784 - RNA, 19 nt, Human
gccgccgcgggcugugggc

SEQ ID NO: 246785 - RNA, 23 nt, Human
gcgagcuugcugccucagccucc

SEQ ID NO: 246786 - RNA, 18 nt, Human
gcggagcgcugagaagac

SEQ ID NO: 246787 - RNA, 21 nt, Human
gcuacacugacuggcucagcg

SEQ ID NO: 246788 - RNA, 19 nt, Human
gcucauucucucccugccu

SEQ ID NO: 246789 - RNA, 25 nt, Human
ggcccgggccgucccccggcggguc

SEQ ID NO: 246790 - RNA, 18 nt, Human
ggccgaggcgaggagacc

SEQ ID NO: 246791 - RNA, 18 nt, Human
ggcggccgaggcgaggag

SEQ ID NO: 246792 - RNA, 24 nt, Human
ggcggcgggcugcgcuucucgcgg

SEQ ID NO: 246793 - RNA, 22 nt, Human
ggcggcucccuucccccuacgg

SEQ ID NO: 246794 - RNA, 20 nt, Human
gucggcccacggcccuggcc

SEQ ID NO: 246795 - RNA, 22 nt, Human
uaacccguugaaccccauucgu

SEQ ID NO: 246796 - RNA, 23 nt, Human
uaagucccugcccuuuguacaca

SEQ ID NO: 246797 - RNA, 19 nt, Human
uagaucccgggccuggccc

SEQ ID NO: 246798 - RNA, 23 nt, Human
uaggaggccggcgaccagcgucc

SEQ ID NO: 246799 - RNA, 18 nt, Human
uaucuagaggaaguaaaa

SEQ ID NO: 246800 - RNA, 20 nt, Human
ucaccuccuucuccacuccc

SEQ ID NO: 246801 - RNA, 22 nt, Human
ucagccuccgcccugcuggccg

SEQ ID NO: 246802 - RNA, 20 nt, Human
uccacacagcgccgccggcg

SEQ ID NO: 246803 - RNA, 18 nt, Human
uccccaugaacgaggaau

SEQ ID NO: 246804 - RNA, 22 nt, Human
uccccaugaacgaggaauuccc

SEQ ID NO: 246805 - RNA, 24 nt, Human
ucccccaacuucuuagagggacaa

SEQ ID NO: 246806 - RNA, 18 nt, Human
ucccggggcucauucucu

SEQ ID NO: 246807 - RNA, 18 nt, Human
uccgaaaaggcgccgugg

SEQ ID NO: 246808 - RNA, 21 nt, Human
uccugggcccccucaccuccu

SEQ ID NO: 246809 - RNA, 22 nt, Human
ucggcggccgaggcgaggagac

SEQ ID NO: 246810 - RNA, 21 nt, Human
ucuagaucccgggccuggccc

SEQ ID NO: 246811 - RNA, 21 nt, Human
ucuccacucccucccgucgca

SEQ ID NO: 246812 - RNA, 18 nt, Human
ugaaggaaguggagcgca

SEQ ID NO: 246813 - RNA, 24 nt, Human
ugagaagacggucgaacuugacua

SEQ ID NO: 246814 - RNA, 19 nt, Human
ugcaaagcugaaacuuaaa

SEQ ID NO: 246815 - RNA, 20 nt, Human
ugccucagccuccgcccugc

SEQ ID NO: 246816 - RNA, 23 nt, Human
ugccucagccuccgcccugcugg

SEQ ID NO: 246817 - RNA, 20 nt, Human
ugccucagggcgccccgcga

SEQ ID NO: 246818 - RNA, 25 nt, Human
ugcgcccgacugcuucucccucucu

SEQ ID NO: 246819 - RNA, 23 nt, Human
ugcgggcggcgggcugcgcuucg

SEQ ID NO: 246820 - RNA, 26 nt, Human
ugcuucucccucucuagcgagcuugc

SEQ ID NO: 246821 - RNA, 23 nt, Human
uggcccgggccgucccccggcgg

SEQ ID NO: 246822 - RNA, 19 nt, Human
uggcucagcgugugccuac

SEQ ID NO: 246823 - RNA, 19 nt, Human
ugggcccccucaccuccuu

SEQ ID NO: 246824 - RNA, 21 nt, Human
uggguuccggggggaguaugg

SEQ ID NO: 246825 - RNA, 21 nt, Human
uguccggggcugcacgcgcgc

SEQ ID NO: 246826 - RNA, 24 nt, Human
ugugaugcccuuagauguccgggg

SEQ ID NO: 246827 - RNA, 25 nt, Human
uuacugcacuuuaauucugcacaau

SEQ ID NO: 246828 - RNA, 24 nt, Human
uuagauguccggggcugcacgcgc

SEQ ID NO: 246829 - RNA, 19 nt, Human
uuccccaugaacgaggaau

SEQ ID NO: 246830 - RNA, 22 nt, Human
uugcuacuuaauuuacaucaua

SEQ ID NO: 246831 - RNA, 22 nt, Human
agaaagcacuguccuggcccuc

SEQ ID NO: 246832 - RNA, 18 nt, Human
agcagauagaagcgccag

SEQ ID NO: 246833 - RNA, 24 nt, Human
agcagcagguccguccaggagaaa

SEQ ID NO: 246834 - RNA, 22 nt, Human
agccaauaguggcaucaaacca

SEQ ID NO: 246835 - RNA, 24 nt, Human
auagaauaccuugucuucaaaaga

SEQ ID NO: 246836 - RNA, 19 nt, Human
cagcagcagguccguccag

SEQ ID NO: 246837 - RNA, 18 nt, Human
cagcuccuaggguugcuc

SEQ ID NO: 246838 - RNA, 24 nt, Human
cauguccccaaacacucccacacc

SEQ ID NO: 246839 - RNA, 22 nt, Human
cccacaccgcggcucuuagaga

SEQ ID NO: 246840 - RNA, 23 nt, Human
ccccguguccugggccauguccc

SEQ ID NO: 246841 - RNA, 23 nt, Human
cucuguagcaaugagguggcuga

SEQ ID NO: 246842 - RNA, 24 nt, Human
cuuccaccaucucucccacugguc

SEQ ID NO: 246843 - RNA, 23 nt, Human
ggccgaauguacagcagauagaa

SEQ ID NO: 246844 - RNA, 22 nt, Human
ucaggccgaauguacagcagau

SEQ ID NO: 246845 - RNA, 22 nt, Human
ucagguacucuguagcaaugag

SEQ ID NO: 246846 - RNA, 20 nt, Human
uccguccaggagaaagcacu

SEQ ID NO: 246847 - RNA, 22 nt, Human
uccuaggguugcucuggguucu

SEQ ID NO: 246848 - RNA, 22 nt, Human
ucuuccaccaucucucccacug

SEQ ID NO: 246849 - RNA, 18 nt, Human
ugagguggcugaccaagg

SEQ ID NO: 246850 - RNA, 24 nt, Human
ugagguggcugaccaagguauagu

SEQ ID NO: 246851 - RNA, 20 nt, Human
uguagcaaugagguggcuga

SEQ ID NO: 246852 - RNA, 24 nt, Human
acuaaaaaugaccuguguuccacc

SEQ ID NO: 246853 - RNA, 27 nt, Human
ccuguguuccaccauuuuuauccacca

SEQ ID NO: 246854 - RNA, 21 nt, Human
uuccaccauuuuuauccacaa

SEQ ID NO: 246855 - RNA, 19 nt, Human
uuuauccacaacuucccuc

SEQ ID NO: 246856 - RNA, 21 nt, Human
uuuuauccacaacuucccuca

SEQ ID NO: 246857 - RNA, 22 nt, Human
aaacagaagacaggaacuugga

SEQ ID NO: 246858 - RNA, 19 nt, Human
aaagcacagcaggacacag

SEQ ID NO: 246859 - RNA, 18 nt, Human
aagacaggaacuuggagc

SEQ ID NO: 246860 - RNA, 24 nt, Human
aagcuuuugggagagaaaccccag

SEQ ID NO: 246861 - RNA, 19 nt, Human
acagcaggacacagugugg

SEQ ID NO: 246862 - RNA, 21 nt, Human
accccacucuuucuuccauuu

SEQ ID NO: 246863 - RNA, 18 nt, Human
accugcucuauugcccag

SEQ ID NO: 246864 - RNA, 21 nt, Human
acggagaaccagagacucaga

SEQ ID NO: 246865 - RNA, 20 nt, Human
acuagaacccaggacuccug

SEQ ID NO: 246866 - RNA, 19 nt, Human
agaaccagagacucagaca

SEQ ID NO: 246867 - RNA, 24 nt, Human
agaaccagagacucagacaaagaa

SEQ ID NO: 246868 - RNA, 21 nt, Human
agaagggaaggaggccagggc

SEQ ID NO: 246869 - RNA, 21 nt, Human
agacacaucgaccuucugcua

SEQ ID NO: 246870 - RNA, 18 nt, Human
agagaggaugggagaggc

SEQ ID NO: 246871 - RNA, 22 nt, Human
agagcagggacuagaacccagg

SEQ ID NO: 246872 - RNA, 23 nt, Human
agaggaaggauuaggccaaggug

SEQ ID NO: 246873 - RNA, 19 nt, Human
agcacaaaccuucccaacu

SEQ ID NO: 246874 - RNA, 19 nt, Human
agcagcauuuugucugcau

SEQ ID NO: 246875 - RNA, 21 nt, Human
agcuucgucugccugguagac

SEQ ID NO: 246876 - RNA, 24 nt, Human
aggaauaaggaaggauccuuuggc

SEQ ID NO: 246877 - RNA, 19 nt, Human
aggaggggggaugggagga

SEQ ID NO: 246878 - RNA, 18 nt, Human
aggcauuuugcuuggaaa

SEQ ID NO: 246879 - RNA, 21 nt, Human
aggcucccuccugucccugcu

SEQ ID NO: 246880 - RNA, 22 nt, Human
aggcucccuccugucccugcuu

SEQ ID NO: 246881 - RNA, 24 nt, Human
aggcuuagacugcaagaagcuuuu

SEQ ID NO: 246882 - RNA, 18 nt, Human
agggacuagaacccagga

SEQ ID NO: 246883 - RNA, 18 nt, Human
aggggacauaccacagga

SEQ ID NO: 246884 - RNA, 21 nt, Human
aggggaccuuaugccagccug

SEQ ID NO: 246885 - RNA, 22 nt, Human
aggggaggcaggccccgaggaa

SEQ ID NO: 246886 - RNA, 21 nt, Human
agggguggguauuucaggagc

SEQ ID NO: 246887 - RNA, 24 nt, Human
agucagcacaaaccuucccaacuu

SEQ ID NO: 246888 - RNA, 21 nt, Human
agugcugggauuggcacagag

SEQ ID NO: 246889 - RNA, 23 nt, Human
auaaaacagaagacaggaagagg

SEQ ID NO: 246890 - RNA, 19 nt, Human
augagccaucucccaaaac

SEQ ID NO: 246891 - RNA, 20 nt, Human
auggugucuugggaugccuu

SEQ ID NO: 246892 - RNA, 21 nt, Human
cacagcaggacacaguguggg

SEQ ID NO: 246893 - RNA, 21 nt, Human
cacucugccucucaggguccu

SEQ ID NO: 246894 - RNA, 22 nt, Human
cagaauaaacagcagggcacaa

SEQ ID NO: 246895 - RNA, 22 nt, Human
cagagcagggacuagaacccag

SEQ ID NO: 246896 - RNA, 22 nt, Human
cagaggccuugguugagcuccu

SEQ ID NO: 246897 - RNA, 18 nt, Human
cagcaggacacagugugg

SEQ ID NO: 246898 - RNA, 19 nt, Human
cagcagggcacaaagaggu

SEQ ID NO: 246899 - RNA, 23 nt, Human
caggaaaauauacagaugcggca

SEQ ID NO: 246900 - RNA, 19 nt, Human
caggccccgaggaaguaag

SEQ ID NO: 246901 - RNA, 24 nt, Human
cagggaugccaggcagccuggcag

SEQ ID NO: 246902 - RNA, 21 nt, Human
caggucaagaguuaaaguccc

SEQ ID NO: 246903 - RNA, 21 nt, Human
cagguguggacgcccauggug

SEQ ID NO: 246904 - RNA, 22 nt, Human
cagucagggaagcucugagugc

SEQ ID NO: 246905 - RNA, 18 nt, Human
caguuucccaagaaggga

SEQ ID NO: 246906 - RNA, 20 nt, Human
cauugccaccuuccccuuac

SEQ ID NO: 246907 - RNA, 19 nt, Human
cauuuauugaaaacagugu

SEQ ID NO: 246908 - RNA, 22 nt, Human
ccaaaaccugaaugcucuucuc

SEQ ID NO: 246909 - RNA, 23 nt, Human
ccaaaccacaauccccaggcucc

SEQ ID NO: 246910 - RNA, 22 nt, Human
ccaacagcugcauacaggucaa

SEQ ID NO: 246911 - RNA, 21 nt, Human
ccacaggagccaccacagccu

SEQ ID NO: 246912 - RNA, 21 nt, Human
ccagaaggcagagcaggaaaa

SEQ ID NO: 246913 - RNA, 19 nt, Human
ccagagaggcugcuagcag

SEQ ID NO: 246914 - RNA, 20 nt, Human
ccagggaagaucaauuucua

SEQ ID NO: 246915 - RNA, 22 nt, Human
cccaaaccacaauccccaggcu

SEQ ID NO: 246916 - RNA, 23 nt, Human
cccacagcugguggugcuggggc

SEQ ID NO: 246917 - RNA, 24 nt, Human
cccaggcaugaaggugcuccaagg

SEQ ID NO: 246918 - RNA, 19 nt, Human
cccauggugucagcuggug

SEQ ID NO: 246919 - RNA, 23 nt, Human
cccccagggaagaucaauuucua

SEQ ID NO: 246920 - RNA, 21 nt, Human
cccggccuugguccucccagc

SEQ ID NO: 246921 - RNA, 21 nt, Human
cccuauaccacacucugccuc

SEQ ID NO: 246922 - RNA, 23 nt, Human
cccuccugucccugcuucucuca

SEQ ID NO: 246923 - RNA, 21 nt, Human
ccgaaggaggggggaugggag

SEQ ID NO: 246924 - RNA, 18 nt, Human
ccucccacggcuauucug

SEQ ID NO: 246925 - RNA, 21 nt, Human
ccugaguauucagccuggggc

SEQ ID NO: 246926 - RNA, 21 nt, Human
ccugccaugggugagccucug

SEQ ID NO: 246927 - RNA, 24 nt, Human
ccugcucuauugcccaguaaugga

SEQ ID NO: 246928 - RNA, 21 nt, Human
ccuggcucuuuucacugccug

SEQ ID NO: 246929 - RNA, 21 nt, Human
ccugucccauguccuugggaa

SEQ ID NO: 246930 - RNA, 21 nt, Human
ccuuuaauggggaacauaagg

SEQ ID NO: 246931 - RNA, 24 nt, Human
cuagaaccaggugucugccuuccc

SEQ ID NO: 246932 - RNA, 20 nt, Human
cuagaacccaggacuccugg

SEQ ID NO: 246933 - RNA, 23 nt, Human
cucaggcccucccgcaaucuguc

SEQ ID NO: 246934 - RNA, 23 nt, Human
cucaugcagcccaguuucccaag

SEQ ID NO: 246935 - RNA, 22 nt, Human
cucauucuccauuaucuuccuc

SEQ ID NO: 246936 - RNA, 20 nt, Human
cuccgcccagcucaugcccc

SEQ ID NO: 246937 - RNA, 19 nt, Human
cucuauugcccaguaaugg

SEQ ID NO: 246938 - RNA, 22 nt, Human
cucugcuacugacugcccacag

SEQ ID NO: 246939 - RNA, 19 nt, Human
cugcccaaaagcacagcag

SEQ ID NO: 246940 - RNA, 22 nt, Human
cugccuucccaaaccacaaucc

SEQ ID NO: 246941 - RNA, 22 nt, Human
cuggagccuuuucccuauacca

SEQ ID NO: 246942 - RNA, 21 nt, Human
cuuaauauauauauauauaug

SEQ ID NO: 246943 - RNA, 21 nt, Human
cuucccaaucauucccucuca

SEQ ID NO: 246944 - RNA, 21 nt, Human
gaaccagaggcaggcugugaa

SEQ ID NO: 246945 - RNA, 22 nt, Human
gagccuggauucggccuguguu

SEQ ID NO: 246946 - RNA, 20 nt, Human
gaggaaggaaaggagaaaug

SEQ ID NO: 246947 - RNA, 23 nt, Human
gaggccagggcccagagcagaug

SEQ ID NO: 246948 - RNA, 18 nt, Human
gaugcggcauucaguuca

SEQ ID NO: 246949 - RNA, 25 nt, Human
gcacagaggccuugguugagcuccu

SEQ ID NO: 246950 - RNA, 18 nt, Human
gcagcacuuggcaggguu

SEQ ID NO: 246951 - RNA, 22 nt, Human
gcagcagcagcauuuugucugc

SEQ ID NO: 246952 - RNA, 19 nt, Human
gcccaguuucccaagaagg

SEQ ID NO: 246953 - RNA, 23 nt, Human
gccuggagccuuuucccuauacc

SEQ ID NO: 246954 - RNA, 21 nt, Human
gcucuauugcccaguaaugga

SEQ ID NO: 246955 - RNA, 19 nt, Human
ggaaggaaaggagaaaugg

SEQ ID NO: 246956 - RNA, 19 nt, Human
ggacgcccauggugucagc

SEQ ID NO: 246957 - RNA, 18 nt, Human
ggagaaccagagacucag

SEQ ID NO: 246958 - RNA, 19 nt, Human
ggagaaccagagacucaga

SEQ ID NO: 246959 - RNA, 19 nt, Human
ggagaagccaccgcuaggg

SEQ ID NO: 246960 - RNA, 18 nt, Human
ggagcagcagcagcagca

SEQ ID NO: 246961 - RNA, 25 nt, Human
ggagccuuuucccuauaccacacua

SEQ ID NO: 246962 - RNA, 19 nt, Human
ggaggccagggcccagagc

SEQ ID NO: 246963 - RNA, 24 nt, Human
ggagucggggaacggcugcuuggg

SEQ ID NO: 246964 - RNA, 20 nt, Human
ggagugcugggauuggcaca

SEQ ID NO: 246965 - RNA, 23 nt, Human
ggagugcugggauuggcacagaa

SEQ ID NO: 246966 - RNA, 21 nt, Human
ggauguuggggugugcccagg

SEQ ID NO: 246967 - RNA, 20 nt, Human
ggcagauggagauggucaag

SEQ ID NO: 246968 - RNA, 21 nt, Human
ggcccagagcagaugcucugc

SEQ ID NO: 246969 - RNA, 20 nt, Human
ggccuugguccucccagcuu

SEQ ID NO: 246970 - RNA, 19 nt, Human
gggaacauaagggauaagg

SEQ ID NO: 246971 - RNA, 22 nt, Human
gggaaggaggccagggcccaga

SEQ ID NO: 246972 - RNA, 23 nt, Human
gggacauaccacaggacucagaa

SEQ ID NO: 246973 - RNA, 21 nt, Human
gggaugggaggaaggaaagga

SEQ ID NO: 246974 - RNA, 21 nt, Human
ggggaacauaagggauaaggc

SEQ ID NO: 246975 - RNA, 18 nt, Human
ggggaugggaggaaggaa

SEQ ID NO: 246976 - RNA, 18 nt, Human
gguagacacaucgaccuu

SEQ ID NO: 246977 - RNA, 23 nt, Human
ggucaagaguuaaagucccccag

SEQ ID NO: 246978 - RNA, 23 nt, Human
gucccauguccuugggaacccac

SEQ ID NO: 246979 - RNA, 23 nt, Human
gugaggcucaggggugaggaguc

SEQ ID NO: 246980 - RNA, 18 nt, Human
uaaaacagaagacaggaa

SEQ ID NO: 246981 - RNA, 19 nt, Human
uaaaacagaagacaggaac

SEQ ID NO: 246982 - RNA, 18 nt, Human
uaaaggccacugggguaa

SEQ ID NO: 246983 - RNA, 19 nt, Human
uaaggugcauuuauugaaa

SEQ ID NO: 246984 - RNA, 23 nt, Human
uacaaaauauaacaucauuuaca

SEQ ID NO: 246985 - RNA, 23 nt, Human
uacagaauggugaagcauaugau

SEQ ID NO: 246986 - RNA, 20 nt, Human
uacaugugccauucauagac

SEQ ID NO: 246987 - RNA, 22 nt, Human
uaccacaggacucagaaccuug

SEQ ID NO: 246988 - RNA, 20 nt, Human
uacuuuuuuagggaugaggg

SEQ ID NO: 246989 - RNA, 22 nt, Human
uagaaccaggugucugccuucc

SEQ ID NO: 246990 - RNA, 20 nt, Human
uagaacccaggacuccuggc

SEQ ID NO: 246991 - RNA, 21 nt, Human
uagaacccaggacuccuggcu

SEQ ID NO: 246992 - RNA, 18 nt, Human
uagagugaggcccagacu

SEQ ID NO: 246993 - RNA, 23 nt, Human
uauaaaacagaagacaggaacuu

SEQ ID NO: 246994 - RNA, 21 nt, Human
uauaggggccugggguacaaa

SEQ ID NO: 246995 - RNA, 23 nt, Human
uaucuuggagcucuggagggcau

SEQ ID NO: 246996 - RNA, 20 nt, Human
ucaggggaggcaggccccga

SEQ ID NO: 246997 - RNA, 25 nt, Human
ucaucuagugcauguuccuaguuac

SEQ ID NO: 246998 - RNA, 20 nt, Human
ucccaaaaccugaaugcucu

SEQ ID NO: 246999 - RNA, 19 nt, Human
ucccaaaaccugaaugcuu

SEQ ID NO: 247000 - RNA, 24 nt, Human
ucccaaaccacaauccccaggcuc

SEQ ID NO: 247001 - RNA, 23 nt, Human
ucccaagaagggaaggaggccag

SEQ ID NO: 247002 - RNA, 18 nt, Human
ucccacaggagccaccac

SEQ ID NO: 247003 - RNA, 18 nt, Human
ucccacggcuauucugcu

SEQ ID NO: 247004 - RNA, 22 nt, Human
ucccauugccaccuuccccuua

SEQ ID NO: 247005 - RNA, 20 nt, Human
uccccaggcucccuccuguc

SEQ ID NO: 247006 - RNA, 18 nt, Human
ucccugaguauucagccu

SEQ ID NO: 247007 - RNA, 21 nt, Human
ucccugaguauucagccuggg

SEQ ID NO: 247008 - RNA, 25 nt, Human
ucccugaguauucagccuggggagg

SEQ ID NO: 247009 - RNA, 22 nt, Human
uccugccuugggugcucccggc

SEQ ID NO: 247010 - RNA, 19 nt, Human
ucgaagagaugaagucacc

SEQ ID NO: 247011 - RNA, 19 nt, Human
ucucaggggcuucucuggc

SEQ ID NO: 247012 - RNA, 22 nt, Human
ucucaggggcuucucuggcucc

SEQ ID NO: 247013 - RNA, 20 nt, Human
ucuccugccuggagccuuuu

SEQ ID NO: 247014 - RNA, 18 nt, Human
ucugaccacucucuugcu

SEQ ID NO: 247015 - RNA, 20 nt, Human
ucugccuucccaaaccacaa

SEQ ID NO: 247016 - RNA, 19 nt, Human
ucugcuagcuugacaagug

SEQ ID NO: 247017 - RNA, 18 nt, Human
ugaaaacaguguaugcua

SEQ ID NO: 247018 - RNA, 23 nt, Human
ugaaagauugcuuugugcuuguc

SEQ ID NO: 247019 - RNA, 20 nt, Human
ugaaaugggaagauauggug

SEQ ID NO: 247020 - RNA, 21 nt, Human
ugaagaaacugaaguucgaag

SEQ ID NO: 247021 - RNA, 20 nt, Human
ugaaggagugggucccucug

SEQ ID NO: 247022 - RNA, 23 nt, Human
ugaaguucgaagagaugaaguca

SEQ ID NO: 247023 - RNA, 18 nt, Human
ugacuucuaaugugcccu

SEQ ID NO: 247024 - RNA, 18 nt, Human
ugagaugagggaggagga

SEQ ID NO: 247025 - RNA, 19 nt, Human
ugagcuccugcauuguauu

SEQ ID NO: 247026 - RNA, 24 nt, Human
ugaggcccagacagggaaagagac

SEQ ID NO: 247027 - RNA, 23 nt, Human
ugagggccagagaggcugcuagc

SEQ ID NO: 247028 - RNA, 22 nt, Human
ugaggggagaggugugucacug

SEQ ID NO: 247029 - RNA, 19 nt, Human
ugaguugacaaugggaauu

SEQ ID NO: 247030 - RNA, 18 nt, Human
ugcagcccaguuucccaa

SEQ ID NO: 247031 - RNA, 26 nt, Human
ugccaggcagccuggcaggauuuggg

SEQ ID NO: 247032 - RNA, 21 nt, Human
ugcccaaaagcacagcaggac

SEQ ID NO: 247033 - RNA, 21 nt, Human
ugcccacagcugguggugcug

SEQ ID NO: 247034 - RNA, 22 nt, Human
ugccccagggaugccaggcagc

SEQ ID NO: 247035 - RNA, 19 nt, Human
ugccuugggugcucccggc

SEQ ID NO: 247036 - RNA, 18 nt, Human
ugcuacugacugcccaca

SEQ ID NO: 247037 - RNA, 19 nt, Human
ugcuaugcacucuguuaag

SEQ ID NO: 247038 - RNA, 21 nt, Human
uggcaaaaaagcauacagcau

SEQ ID NO: 247039 - RNA, 22 nt, Human
uggcaggauuugggugacuucu

SEQ ID NO: 247040 - RNA, 25 nt, Human
uggcauaugggcccaaauguguucu

SEQ ID NO: 247041 - RNA, 24 nt, Human
ugggagagaaaccccaggcaugaa

SEQ ID NO: 247042 - RNA, 23 nt, Human
ugggauguuggggugugcccagg

SEQ ID NO: 247043 - RNA, 19 nt, Human
ugggauuggcacagaggcc

SEQ ID NO: 247044 - RNA, 20 nt, Human
ugggcccaaauguguucuga

SEQ ID NO: 247045 - RNA, 23 nt, Human
uggguauuucaggagcagcagca

SEQ ID NO: 247046 - RNA, 21 nt, Human
uggugucuugggaugccuugg

SEQ ID NO: 247047 - RNA, 21 nt, Human
uucaugucucccaauaggagc

SEQ ID NO: 247048 - RNA, 18 nt, Human
uuccuaguuacauuugcu

SEQ ID NO: 247049 - RNA, 25 nt, Human
uuccugccuugggugcucccggcug

SEQ ID NO: 247050 - RNA, 20 nt, Human
uuccuuugacucugaaaaau

SEQ ID NO: 247051 - RNA, 20 nt, Human
uucgaagagaugaagucacc

SEQ ID NO: 247052 - RNA, 19 nt, Human
uucugcucccagcagucag

SEQ ID NO: 247053 - RNA, 20 nt, Human
uucuuuggcauugaaaaugg

SEQ ID NO: 247054 - RNA, 20 nt, Human
uugaaaauggaguuucugcu

SEQ ID NO: 247055 - RNA, 22 nt, Human
uugcuuugugcuugucuggagc

SEQ ID NO: 247056 - RNA, 24 nt, Human
uuggagggcuuauaucuuggagcu

SEQ ID NO: 247057 - RNA, 23 nt, Human
uuuuuugguuauccacgaggguu

SEQ ID NO: 247058 - RNA, 18 nt, Human
uuuuuuuuuuuuuuuuug

SEQ ID NO: 247059 - RNA, 21 nt, Human
uuuuuuuuuuuuuuuuugguu

SEQ ID NO: 247060 - RNA, 20 nt, Human
aaaugccaacagccaguaug

SEQ ID NO: 247061 - RNA, 21 nt, Human
aacccggagcugaggccagca

SEQ ID NO: 247062 - RNA, 22 nt, Human
aacccggagcugaggccagcag

SEQ ID NO: 247063 - RNA, 21 nt, Human
aaugccaacagccaguaugaa

SEQ ID NO: 247064 - RNA, 18 nt, Human
aggccggagcuccagggg

SEQ ID NO: 247065 - RNA, 18 nt, Human
caacugccauguccacag

SEQ ID NO: 247066 - RNA, 20 nt, Human
cagcaggcuggcucuggcuu

SEQ ID NO: 247067 - RNA, 22 nt, Human
caggcaguuuacagaaaugcca

SEQ ID NO: 247068 - RNA, 23 nt, Human
caguaugaaaagagacuggcuuu

SEQ ID NO: 247069 - RNA, 19 nt, Human
caguuuacagaaaugccaa

SEQ ID NO: 247070 - RNA, 21 nt, Human
ccaacccggagcugaggccag

SEQ ID NO: 247071 - RNA, 22 nt, Human
cccggagcugaggccagcaggc

SEQ ID NO: 247072 - RNA, 27 nt, Human
gaaugggaguuggggcacagccaucuc

SEQ ID NO: 247073 - RNA, 21 nt, Human
gcugaggccagcaggcuggcu

SEQ ID NO: 247074 - RNA, 19 nt, Human
ggcuucugaccugcugggc

SEQ ID NO: 247075 - RNA, 19 nt, Human
gguaaggcuggaauuaaac

SEQ ID NO: 247076 - RNA, 21 nt, Human
guccauggugggugaauggga

SEQ ID NO: 247077 - RNA, 22 nt, Human
uacacugggugggcaaagauga

SEQ ID NO: 247078 - RNA, 25 nt, Human
uccacaguaaugaugaaugcuucuc

SEQ ID NO: 247079 - RNA, 20 nt, Human
ugaaauguaauuugagcagu

SEQ ID NO: 247080 - RNA, 21 nt, Human
ugaaugggaguuggggcacag

SEQ ID NO: 247081 - RNA, 20 nt, Human
ugacagcagccucaccugga

SEQ ID NO: 247082 - RNA, 24 nt, Human
ugaccugcugggcaggccggagcu

SEQ ID NO: 247083 - RNA, 21 nt, Human
ugggguggggccagguuuauu

SEQ ID NO: 247084 - RNA, 20 nt, Human
uggguaaggcuggaauuaaa

SEQ ID NO: 247085 - RNA, 24 nt, Human
uggguccauggugggugaauggga

SEQ ID NO: 247086 - RNA, 25 nt, Human
uggugggugaaugggaguuggggca

SEQ ID NO: 247087 - RNA, 24 nt, Human
uuuuuggguggagcaacaacugcc

SEQ ID NO: 247088 - RNA, 22 nt, Human
uuuuuuuuuuugggguggggcc

SEQ ID NO: 247089 - RNA, 21 nt, Human
uuuuuuuuuuuuuuggggugg

SEQ ID NO: 247090 - RNA, 22 nt, Human
uuuuuuuuuuuuuuuuuggggu

SEQ ID NO: 247091 - RNA, 26 nt, Human
uuuuuuuuuuuuuuuuuggggugggg

SEQ ID NO: 247092 - RNA, 18 nt, Human
aaaaagaucuuauuucuc

SEQ ID NO: 247093 - RNA, 24 nt, Human
aaacaaacugacaaaaaagaucuu

SEQ ID NO: 247094 - RNA, 26 nt, Human
aaaccacucccucccuccaugggaag

SEQ ID NO: 247095 - RNA, 23 nt, Human
aacucacccucagucaucuucug

SEQ ID NO: 247096 - RNA, 18 nt, Human
aagaaaaaacgagaucag

SEQ ID NO: 247097 - RNA, 20 nt, Human
aagauccaaccuccagcacc

SEQ ID NO: 247098 - RNA, 18 nt, Human
aaggggagggagggggag

SEQ ID NO: 247099 - RNA, 18 nt, Human
acaaacugacaaaaaaga

SEQ ID NO: 247100 - RNA, 20 nt, Human
acaagagcuaguggguuaau

SEQ ID NO: 247101 - RNA, 21 nt, Human
acacaugaagcaaacaaaaua

SEQ ID NO: 247102 - RNA, 20 nt, Human
accugcaaaccacucccucc

SEQ ID NO: 247103 - RNA, 21 nt, Human
accuggcacaggcaaggggag

SEQ ID NO: 247104 - RNA, 20 nt, Human
agaaaaugaaagccaggguc

SEQ ID NO: 247105 - RNA, 18 nt, Human
agaaggcaagccccgccu

SEQ ID NO: 247106 - RNA, 19 nt, Human
agacagucaccuggcaaag

SEQ ID NO: 247107 - RNA, 26 nt, Human
agagaaaaugaaagccagggucuuug

SEQ ID NO: 247108 - RNA, 21 nt, Human
agcaggccaaggacugcucag

SEQ ID NO: 247109 - RNA, 23 nt, Human
agccugugguccugggagcuggg

SEQ ID NO: 247110 - RNA, 22 nt, Human
aggaacuuggccaccugcaaac

SEQ ID NO: 247111 - RNA, 23 nt, Human
aggcaaguuccaagaccuuagca

SEQ ID NO: 247112 - RNA, 18 nt, Human
aggcagaaucuccucaug

SEQ ID NO: 247113 - RNA, 23 nt, Human
aggcccacaaggagcccugaggc

SEQ ID NO: 247114 - RNA, 21 nt, Human
aggcuccugagucaaagcucc

SEQ ID NO: 247115 - RNA, 19 nt, Human
aggcuuccuaggugaccag

SEQ ID NO: 247116 - RNA, 18 nt, Human
agggaccagggaaagaga

SEQ ID NO: 247117 - RNA, 18 nt, Human
agggagggggagcugguc

SEQ ID NO: 247118 - RNA, 21 nt, Human
aggggagggagggggagcugg

SEQ ID NO: 247119 - RNA, 22 nt, Human
agggggcugggauucuaaagcu

SEQ ID NO: 247120 - RNA, 21 nt, Human
agggggguccaggagcccagg

SEQ ID NO: 247121 - RNA, 19 nt, Human
agucaccuggcaaaggcag

SEQ ID NO: 247122 - RNA, 22 nt, Human
augaagcaaacaaaauagcccu

SEQ ID NO: 247123 - RNA, 25 nt, Human
auggaggccccugccugagccugug

SEQ ID NO: 247124 - RNA, 25 nt, Human
caaccuccagcaccaggaagccccu

SEQ ID NO: 247125 - RNA, 19 nt, Human
caccaggugccuccagggu

SEQ ID NO: 247126 - RNA, 19 nt, Human
caccuggcaaaggcagaau

SEQ ID NO: 247127 - RNA, 21 nt, Human
caccuggcacaggcaagggga

SEQ ID NO: 247128 - RNA, 22 nt, Human
cacuaaauuaacauugccccag

SEQ ID NO: 247129 - RNA, 24 nt, Human
cagaagcuuguccaacaccagaag

SEQ ID NO: 247130 - RNA, 23 nt, Human
cagacaauugcccacggcucaac

SEQ ID NO: 247131 - RNA, 18 nt, Human
cagcagccaggcgucugg

SEQ ID NO: 247132 - RNA, 21 nt, Human
cagcaggagaacaccaugccc

SEQ ID NO: 247133 - RNA, 23 nt, Human
cagcaggagaacaccaugcccau

SEQ ID NO: 247134 - RNA, 24 nt, Human
caggacagaguccauggccucauu

SEQ ID NO: 247135 - RNA, 20 nt, Human
caggagcccaggcccacaag

SEQ ID NO: 247136 - RNA, 25 nt, Human
caggccaaggacugcucaggccccu

SEQ ID NO: 247137 - RNA, 27 nt, Human
caggccaaggcccagaugcuggcugcc

SEQ ID NO: 247138 - RNA, 23 nt, Human
caggcuccugagucaaagcuccu

SEQ ID NO: 247139 - RNA, 22 nt, Human
caggggauacaagggaccaggg

SEQ ID NO: 247140 - RNA, 22 nt, Human
cagggugagaccaggcccagcu

SEQ ID NO: 247141 - RNA, 24 nt, Human
cauacaaacaaacugacaaaaaag

SEQ ID NO: 247142 - RNA, 22 nt, Human
caucauguugcagugaagaaaa

SEQ ID NO: 247143 - RNA, 22 nt, Human
ccacuaaauuaacauugcccca

SEQ ID NO: 247144 - RNA, 22 nt, Human
ccagcaccaggaagccccugcc

SEQ ID NO: 247145 - RNA, 22 nt, Human
ccaggcccacaaggagcccuga

SEQ ID NO: 247146 - RNA, 19 nt, Human
ccccagaaguccaaaaacc

SEQ ID NO: 247147 - RNA, 20 nt, Human
cccccaucuauaaaugggau

SEQ ID NO: 247148 - RNA, 21 nt, Human
ccccugccacaugccuggccu

SEQ ID NO: 247149 - RNA, 25 nt, Human
ccccuggggcccauggaggccccug

SEQ ID NO: 247150 - RNA, 21 nt, Human
cccugccugagccuguggucc

SEQ ID NO: 247151 - RNA, 20 nt, Human
cccuggauccgaaagggcca

SEQ ID NO: 247152 - RNA, 22 nt, Human
ccuaacuccagccuacccugau

SEQ ID NO: 247153 - RNA, 21 nt, Human
ccuaggugaccaggagccggg

SEQ ID NO: 247154 - RNA, 19 nt, Human
ccucaggccuucaggacag

SEQ ID NO: 247155 - RNA, 18 nt, Human
ccucauuucugaaucugc

SEQ ID NO: 247156 - RNA, 20 nt, Human
ccuccaaaugcacucagccu

SEQ ID NO: 247157 - RNA, 19 nt, Human
ccuccagcaccaggaagcc

SEQ ID NO: 247158 - RNA, 27 nt, Human
ccuccagggugagaccaggcccagcuc

SEQ ID NO: 247159 - RNA, 21 nt, Human
ccugcucuaaccccugccaca

SEQ ID NO: 247160 - RNA, 23 nt, Human
ccugggcugccucucccagcacc

SEQ ID NO: 247161 - RNA, 23 nt, Human
cuaaagcugcuggucagucccua

SEQ ID NO: 247162 - RNA, 21 nt, Human
cuaacuccagccuacccugau

SEQ ID NO: 247163 - RNA, 21 nt, Human
cuccaaaugcacucagccugc

SEQ ID NO: 247164 - RNA, 20 nt, Human
cuccugagucaaagcuccua

SEQ ID NO: 247165 - RNA, 27 nt, Human
cuccugagucaaagcuccuaguuauac

SEQ ID NO: 247166 - RNA, 21 nt, Human
cucucccagcaccauguaccc

SEQ ID NO: 247167 - RNA, 24 nt, Human
cucucccagcaccauguacccuag

SEQ ID NO: 247168 - RNA, 18 nt, Human
cugaggccuguugagaug

SEQ ID NO: 247169 - RNA, 19 nt, Human
cuggccauggauggaaagg

SEQ ID NO: 247170 - RNA, 21 nt, Human
cuggggaagaggagcauggcc

SEQ ID NO: 247171 - RNA, 18 nt, Human
cuggguggggcuuucugg

SEQ ID NO: 247172 - RNA, 22 nt, Human
cuugggagcagacccgcucccc

SEQ ID NO: 247173 - RNA, 21 nt, Human
cuuugugcuccaggccaaggc

SEQ ID NO: 247174 - RNA, 18 nt, Human
gaaucugaggcuuccuag

SEQ ID NO: 247175 - RNA, 20 nt, Human
gacacaugaagcaaacaaaa

SEQ ID NO: 247176 - RNA, 24 nt, Human
gaccacuuaccccagaaguccaaa

SEQ ID NO: 247177 - RNA, 18 nt, Human
gagcauggccaccaggug

SEQ ID NO: 247178 - RNA, 20 nt, Human
gaggagcauggccaccaggu

SEQ ID NO: 247179 - RNA, 22 nt, Human
gauacaagggaccagggaaaga

SEQ ID NO: 247180 - RNA, 24 nt, Human
gaucagcagccaggcgucugggga

SEQ ID NO: 247181 - RNA, 23 nt, Human
gcacaggcaaggggagggagggg

SEQ ID NO: 247182 - RNA, 19 nt, Human
gcaugagacaacggugggg

SEQ ID NO: 247183 - RNA, 20 nt, Human
gccaugaugaugacaggaca

SEQ ID NO: 247184 - RNA, 19 nt, Human
gccuguuacuggcaugaga

SEQ ID NO: 247185 - RNA, 24 nt, Human
gcuccccagaugagacuuccuggg

SEQ ID NO: 247186 - RNA, 19 nt, Human
gcugcuucugcuccaggaa

SEQ ID NO: 247187 - RNA, 21 nt, Human
ggagaagguagagaugcugcu

SEQ ID NO: 247188 - RNA, 19 nt, Human
ggauauaaaagguacuacc

SEQ ID NO: 247189 - RNA, 18 nt, Human
ggccaaggcccagaugcu

SEQ ID NO: 247190 - RNA, 25 nt, Human
gggaaggaaucugaggcuuccuagg

SEQ ID NO: 247191 - RNA, 20 nt, Human
ggggagggagggggagcugg

SEQ ID NO: 247192 - RNA, 23 nt, Human
ggucaggguccagcuguuggggg

SEQ ID NO: 247193 - RNA, 18 nt, Human
ggucuaaacacguggcug

SEQ ID NO: 247194 - RNA, 18 nt, Human
ggugaccaggagccgggc

SEQ ID NO: 247195 - RNA, 21 nt, Human
gguggggaaggcgaucagcag

SEQ ID NO: 247196 - RNA, 23 nt, Human
gucaggguccagcuguuggggga

SEQ ID NO: 247197 - RNA, 22 nt, Human
gucuaaacacguggcuguggga

SEQ ID NO: 247198 - RNA, 24 nt, Human
uaaggacaaguggggcagguaggg

SEQ ID NO: 247199 - RNA, 22 nt, Human
uacaucaagauccaaccuccag

SEQ ID NO: 247200 - RNA, 23 nt, Human
uaccccagaaguccaaaaaccca

SEQ ID NO: 247201 - RNA, 23 nt, Human
uagaccacuuaccccagaagucc

SEQ ID NO: 247202 - RNA, 19 nt, Human
uaggagacaucaguccugc

SEQ ID NO: 247203 - RNA, 18 nt, Human
ucacccucagucaucuuc

SEQ ID NO: 247204 - RNA, 22 nt, Human
ucagaagcuuguccaacaccag

SEQ ID NO: 247205 - RNA, 20 nt, Human
ucaugucgagugugagccaa

SEQ ID NO: 247206 - RNA, 24 nt, Human
uccaaaaacccaaucucugcaugu

SEQ ID NO: 247207 - RNA, 26 nt, Human
uccaaaaacccaaucucugcaugucu

SEQ ID NO: 247208 - RNA, 23 nt, Human
uccaggcuaaggacaaguggggc

SEQ ID NO: 247209 - RNA, 22 nt, Human
uccaugggaaggaaucugaggc

SEQ ID NO: 247210 - RNA, 19 nt, Human
ucccagcaccauguacccu

SEQ ID NO: 247211 - RNA, 20 nt, Human
uccccagaugagacuuccug

SEQ ID NO: 247212 - RNA, 25 nt, Human
uccccaguguuccccuggggcccau

SEQ ID NO: 247213 - RNA, 27 nt, Human
ucccuggauccgaaagggccacucacu

SEQ ID NO: 247214 - RNA, 21 nt, Human
ucuaaagcugcuggucagucc

SEQ ID NO: 247215 - RNA, 20 nt, Human
ucucccagcaccauguaccc

SEQ ID NO: 247216 - RNA, 23 nt, Human
ucucccagcaccauguacccuag

SEQ ID NO: 247217 - RNA, 22 nt, Human
ucugcuccaggaagcccagaua

SEQ ID NO: 247218 - RNA, 20 nt, Human
ugaagcaaacaaaauagccc

SEQ ID NO: 247219 - RNA, 23 nt, Human
ugagagaaaaugaaagccagggu

SEQ ID NO: 247220 - RNA, 19 nt, Human
ugagaugugcugaccucac

SEQ ID NO: 247221 - RNA, 23 nt, Human
ugagaugugcugaccucaccugg

SEQ ID NO: 247222 - RNA, 24 nt, Human
ugagccugugguccugggagcugg

SEQ ID NO: 247223 - RNA, 19 nt, Human
ugaggcugugacuuugccu

SEQ ID NO: 247224 - RNA, 21 nt, Human
ugaggcugugacuuugccuga

SEQ ID NO: 247225 - RNA, 24 nt, Human
ugagggaauucacucuugacgggg

SEQ ID NO: 247226 - RNA, 25 nt, Human
ugaggguugguggguggggaaggcg

SEQ ID NO: 247227 - RNA, 19 nt, Human
ugaguggucagggggcugg

SEQ ID NO: 247228 - RNA, 23 nt, Human
ugaguggucagggggcugggauu

SEQ ID NO: 247229 - RNA, 23 nt, Human
ugaugacaggacaggcuaaaugg

SEQ ID NO: 247230 - RNA, 21 nt, Human
ugcaaaccacucccucccucc

SEQ ID NO: 247231 - RNA, 18 nt, Human
ugccugagccuguggucc

SEQ ID NO: 247232 - RNA, 25 nt, Human
ugccugagccugugguccugggagc

SEQ ID NO: 247233 - RNA, 20 nt, Human
ugcucaggccccuugggagc

SEQ ID NO: 247234 - RNA, 21 nt, Human
ugcucuaaccccugccacaug

SEQ ID NO: 247235 - RNA, 18 nt, Human
ugcugcugucagaggucc

SEQ ID NO: 247236 - RNA, 25 nt, Human
uggcuuugcccugaggguugguggg

SEQ ID NO: 247237 - RNA, 22 nt, Human
uggggaagaggagcauggccac

SEQ ID NO: 247238 - RNA, 19 nt, Human
uggggaaggcgaucagcag

SEQ ID NO: 247239 - RNA, 21 nt, Human
uggucaggguccagcuguugg

SEQ ID NO: 247240 - RNA, 19 nt, Human
ugguccugggagcugggga

SEQ ID NO: 247241 - RNA, 24 nt, Human
ugucacaggcuccugagucaaagc

SEQ ID NO: 247242 - RNA, 19 nt, Human
ugucagagguccaggcuaa

SEQ ID NO: 247243 - RNA, 18 nt, Human
ugucauuguuugagccug

SEQ ID NO: 247244 - RNA, 21 nt, Human
ugucauuguuugagccuguua

SEQ ID NO: 247245 - RNA, 24 nt, Human
uguccaacaccagaaggcaagccc

SEQ ID NO: 247246 - RNA, 21 nt, Human
ugucgagugugagccaaguua

SEQ ID NO: 247247 - RNA, 18 nt, Human
ugugaaagggggguccag

SEQ ID NO: 247248 - RNA, 26 nt, Human
uuaacauugccccagucugagggagc

SEQ ID NO: 247249 - RNA, 24 nt, Human
uuacaucaagauccaaccuccagc

SEQ ID NO: 247250 - RNA, 23 nt, Human
uuauccagacucucugugcuuug

SEQ ID NO: 247251 - RNA, 25 nt, Human
uuccugggcugccucucccagcacc

SEQ ID NO: 247252 - RNA, 21 nt, Human
aaaacaccuagggacagaaua

SEQ ID NO: 247253 - RNA, 22 nt, Human
aacacucccugacaaagagcua

SEQ ID NO: 247254 - RNA, 22 nt, Human
aagaaaaaaaaaaguuaucugg

SEQ ID NO: 247255 - RNA, 22 nt, Human
aagaggacaggaaaauuuagga

SEQ ID NO: 247256 - RNA, 22 nt, Human
aagcagucauggaauaagcaug

SEQ ID NO: 247257 - RNA, 22 nt, Human
aagugugcaaccuacagacccu

SEQ ID NO: 247258 - RNA, 24 nt, Human
aauaagcaauuagaaaacguucaa

SEQ ID NO: 247259 - RNA, 21 nt, Human
aauucaugcugacagggcugu

SEQ ID NO: 247260 - RNA, 19 nt, Human
acagucccccacaaaagcu

SEQ ID NO: 247261 - RNA, 18 nt, Human
acauuacaaauucaugcu

SEQ ID NO: 247262 - RNA, 21 nt, Human
accagcucugcccucccuucu

SEQ ID NO: 247263 - RNA, 20 nt, Human
agaauagcaagcccaacuua

SEQ ID NO: 247264 - RNA, 21 nt, Human
agacauacguaauaaaccucc

SEQ ID NO: 247265 - RNA, 18 nt, Human
agagaaaaaaaaaaaauc

SEQ ID NO: 247266 - RNA, 21 nt, Human
agauccugaaaggcacuuucu

SEQ ID NO: 247267 - RNA, 20 nt, Human
aggcggcagcggcugcgaaa

SEQ ID NO: 247268 - RNA, 20 nt, Human
agggaggauaaggggaaggc

SEQ ID NO: 247269 - RNA, 18 nt, Human
agucuggggaaaaaaggc

SEQ ID NO: 247270 - RNA, 22 nt, Human
agugcugaaaccaugcauagga

SEQ ID NO: 247271 - RNA, 26 nt, Human
auaaaccuccaaaaauagauccugaa

SEQ ID NO: 247272 - RNA, 30 nt, Human
auuacaaauucaugcugacagggcuguggg

SEQ ID NO: 247273 - RNA, 19 nt, Human
caaagcauuauuuacuaca

SEQ ID NO: 247274 - RNA, 23 nt, Human
caaagugugcaaccuacagaccc

SEQ ID NO: 247275 - RNA, 22 nt, Human
caagcccaacuuacaguccccc

SEQ ID NO: 247276 - RNA, 19 nt, Human
cagccgcaccagcucugcc

SEQ ID NO: 247277 - RNA, 22 nt, Human
ccaaaaauagauccugaaaggc

SEQ ID NO: 247278 - RNA, 19 nt, Human
ccagaauacaauaaauaag

SEQ ID NO: 247279 - RNA, 21 nt, Human
ccagaauacaauaaauaagca

SEQ ID NO: 247280 - RNA, 18 nt, Human
ccauggccagccgcaccg

SEQ ID NO: 247281 - RNA, 23 nt, Human
cccccacaaaagcuaaaauucau

SEQ ID NO: 247282 - RNA, 21 nt, Human
ccuuuuuugaugucaggcugg

SEQ ID NO: 247283 - RNA, 24 nt, Human
cgccaacaagucuggggaaaaaag

SEQ ID NO: 247284 - RNA, 24 nt, Human
cguacguccuccaaaagacagcug

SEQ ID NO: 247285 - RNA, 18 nt, Human
cuccaaaaauagauccug

SEQ ID NO: 247286 - RNA, 21 nt, Human
cuccaaaaauagauccugaaa

SEQ ID NO: 247287 - RNA, 18 nt, Human
cucuguaccacaccagcc

SEQ ID NO: 247288 - RNA, 20 nt, Human
cuggagcuccaacugggaac

SEQ ID NO: 247289 - RNA, 19 nt, Human
cuguaugacaucacaaggc

SEQ ID NO: 247290 - RNA, 20 nt, Human
cuuacagucccccacaaaag

SEQ ID NO: 247291 - RNA, 22 nt, Human
cuuacagucccccacaaaagcc

SEQ ID NO: 247292 - RNA, 18 nt, Human
gaaagucaaugcaauuau

SEQ ID NO: 247293 - RNA, 18 nt, Human
gaaaugcgcaagcugcgg

SEQ ID NO: 247294 - RNA, 18 nt, Human
gaaggaagcugguuucuc

SEQ ID NO: 247295 - RNA, 19 nt, Human
gaaggagcagcggcgaggc

SEQ ID NO: 247296 - RNA, 18 nt, Human
gagcucaagacauuacaa

SEQ ID NO: 247297 - RNA, 19 nt, Human
gagcugaaagaggacagga

SEQ ID NO: 247298 - RNA, 21 nt, Human
gagcugaaagaggacaggaaa

SEQ ID NO: 247299 - RNA, 20 nt, Human
gaggcggcagcggcugcgaa

SEQ ID NO: 247300 - RNA, 21 nt, Human
gaguuggugagguuuggcuag

SEQ ID NO: 247301 - RNA, 21 nt, Human
gcaagcagucauggaauaagc

SEQ ID NO: 247302 - RNA, 18 nt, Human
gcgcaagcugcggacagc

SEQ ID NO: 247303 - RNA, 19 nt, Human
guaauaaaccuccaaaaau

SEQ ID NO: 247304 - RNA, 24 nt, Human
uacaauaaauaagcaauuagaaaa

SEQ ID NO: 247305 - RNA, 21 nt, Human
uacugcccugugacuucucug

SEQ ID NO: 247306 - RNA, 22 nt, Human
uagcaggcgggcgccucgugcc

SEQ ID NO: 247307 - RNA, 21 nt, Human
uaggacaccuuggccuaccug

SEQ ID NO: 247308 - RNA, 21 nt, Human
uauugugcaguguggaguacu

SEQ ID NO: 247309 - RNA, 20 nt, Human
ucaggagcugaaagaggaca

SEQ ID NO: 247310 - RNA, 22 nt, Human
ucuaacccaagguuuuucugua

SEQ ID NO: 247311 - RNA, 19 nt, Human
ucucugaaggaagcugguu

SEQ ID NO: 247312 - RNA, 20 nt, Human
ucucuguagcuacaccagcu

SEQ ID NO: 247313 - RNA, 26 nt, Human
ucucuguaugacaucacaaggcugcc

SEQ ID NO: 247314 - RNA, 21 nt, Human
ucuguacuuacgccauacccc

SEQ ID NO: 247315 - RNA, 21 nt, Human
ugaacaaaacaccuagggaca

SEQ ID NO: 247316 - RNA, 24 nt, Human
ugaacaaaacaccuagggacagaa

SEQ ID NO: 247317 - RNA, 18 nt, Human
ugacaucacaaggcugcc

SEQ ID NO: 247318 - RNA, 20 nt, Human
ugaggugauggcuucucugu

SEQ ID NO: 247319 - RNA, 28 nt, Human
ugagguuuggcuagugcugaccacaggg

SEQ ID NO: 247320 - RNA, 19 nt, Human
ugccaagugccuguuuuuc

SEQ ID NO: 247321 - RNA, 18 nt, Human
ugcccugugacuucucug

SEQ ID NO: 247322 - RNA, 20 nt, Human
ugcugaaaccaugcauagga

SEQ ID NO: 247323 - RNA, 23 nt, Human
ugcuggaaacauguuguuaaagg

SEQ ID NO: 247324 - RNA, 21 nt, Human
ugggaacuugcguuacaugca

SEQ ID NO: 247325 - RNA, 22 nt, Human
ugggaggaguuauugugcagug

SEQ ID NO: 247326 - RNA, 19 nt, Human
uguacuuacgccauacccc

SEQ ID NO: 247327 - RNA, 20 nt, Human
ugugcaguguggaguacuca

SEQ ID NO: 247328 - RNA, 20 nt, Human
uuacagggaggauaagggga

SEQ ID NO: 247329 - RNA, 19 nt, Human
uuagagguggcaauuaaga

SEQ ID NO: 247330 - RNA, 19 nt, Human
uucaugcugacagggcugu

SEQ ID NO: 247331 - RNA, 18 nt, Human
uucuagaacuaggaguug

SEQ ID NO: 247332 - RNA, 21 nt, Human
uugagagaaaaaaaaaaaauc

SEQ ID NO: 247333 - RNA, 18 nt, Human
uugggugauagggcacaa

SEQ ID NO: 247334 - RNA, 19 nt, Human
uuggugcuguuagaggugg

SEQ ID NO: 247335 - RNA, 21 nt, Human
uuuuuugaugucaggcuggag

SEQ ID NO: 247336 - RNA, 22 nt, Human
uuuuuuuuuuuuuuuuuuaagg

SEQ ID NO: 247337 - RNA, 28 nt, Human
acgugggccagccccugcugugggcacc

SEQ ID NO: 247338 - RNA, 22 nt, Human
acugcggucuccuccgcgcgcc

SEQ ID NO: 247339 - RNA, 23 nt, Human
agggagcugggugccacuggacc

SEQ ID NO: 247340 - RNA, 20 nt, Human
agggguguugcuucuccagc

SEQ ID NO: 247341 - RNA, 21 nt, Human
cacacugagcaaguggucacu

SEQ ID NO: 247342 - RNA, 24 nt, Human
caccgaaucccuucgcuaaccaac

SEQ ID NO: 247343 - RNA, 25 nt, Human
cagcccccugcagccuggugucuuc

SEQ ID NO: 247344 - RNA, 20 nt, Human
cagccccugcugugggcacc

SEQ ID NO: 247345 - RNA, 24 nt, Human
cagugcccccacgccgcacucucc

SEQ ID NO: 247346 - RNA, 19 nt, Human
ccacccgccggccugcucc

SEQ ID NO: 247347 - RNA, 21 nt, Human
ccacgggccgcccagagcccc

SEQ ID NO: 247348 - RNA, 21 nt, Human
ccacuggaccgagccugguuc

SEQ ID NO: 247349 - RNA, 22 nt, Human
ccagagcccccuacgugggcca

SEQ ID NO: 247350 - RNA, 25 nt, Human
ccagcccccugcagccuggugucuu

SEQ ID NO: 247351 - RNA, 22 nt, Human
ccauccaucugcaccgaauccc

SEQ ID NO: 247352 - RNA, 18 nt, Human
cccagagcccccuacgug

SEQ ID NO: 247353 - RNA, 19 nt, Human
cccccacgccgcacucucc

SEQ ID NO: 247354 - RNA, 23 nt, Human
ccccgaggcggucccggcugcac

SEQ ID NO: 247355 - RNA, 21 nt, Human
ccccgcggguccuagcgccgg

SEQ ID NO: 247356 - RNA, 19 nt, Human
cccgcgcccgcccccagga

SEQ ID NO: 247357 - RNA, 22 nt, Human
cccguggacuccgcagcccaga

SEQ ID NO: 247358 - RNA, 21 nt, Human
ccgaggcggucccggcugcac

SEQ ID NO: 247359 - RNA, 19 nt, Human
ccgcacucuccacucucuc

SEQ ID NO: 247360 - RNA, 25 nt, Human
ccgcccagagcccccuacgugggcc

SEQ ID NO: 247361 - RNA, 21 nt, Human
ccgcgccccgcgcccgccccc

SEQ ID NO: 247362 - RNA, 26 nt, Human
ccgcgcccgcccccaggagggccucc

SEQ ID NO: 247363 - RNA, 23 nt, Human
ccggccgcacugcggucuccucc

SEQ ID NO: 247364 - RNA, 21 nt, Human
ccggggaccgcggccuggugg

SEQ ID NO: 247365 - RNA, 25 nt, Human
ccuccgcgcgccgccgccgccgccg

SEQ ID NO: 247366 - RNA, 19 nt, Human
ccucuggggccaagggccc

SEQ ID NO: 247367 - RNA, 23 nt, Human
ccugcugugggcaccaggaggau

SEQ ID NO: 247368 - RNA, 19 nt, Human
ccuugggccuggucagugc

SEQ ID NO: 247369 - RNA, 20 nt, Human
ccuugggccuggucagugcc

SEQ ID NO: 247370 - RNA, 21 nt, Human
cgcagcccagacgguccaucc

SEQ ID NO: 247371 - RNA, 22 nt, Human
cgcccagagcccccuacguggg

SEQ ID NO: 247372 - RNA, 19 nt, Human
cgcccccgagccgcgcccc

SEQ ID NO: 247373 - RNA, 24 nt, Human
cgcggguccuagcgccggccgcac

SEQ ID NO: 247374 - RNA, 23 nt, Human
cuccggggaccgcggccuggugg

SEQ ID NO: 247375 - RNA, 21 nt, Human
cugggguguccacgggccgcc

SEQ ID NO: 247376 - RNA, 22 nt, Human
cuuccuguuuucugcucagggg

SEQ ID NO: 247377 - RNA, 22 nt, Human
cuugcccgccuggacccuccuu

SEQ ID NO: 247378 - RNA, 20 nt, Human
gagggccuccgcgagccggc

SEQ ID NO: 247379 - RNA, 18 nt, Human
gcaaccgagguccccgcg

SEQ ID NO: 247380 - RNA, 23 nt, Human
gcaccgaaucccuucgcuaacca

SEQ ID NO: 247381 - RNA, 21 nt, Human
gcagcccagacgguccaucca

SEQ ID NO: 247382 - RNA, 21 nt, Human
gcccagagcccccuacguggg

SEQ ID NO: 247383 - RNA, 24 nt, Human
gcccagagcccccuacgugggcca

SEQ ID NO: 247384 - RNA, 22 nt, Human
gcccccacgccgcacucuccac

SEQ ID NO: 247385 - RNA, 18 nt, Human
gccugccacaggccaggc

SEQ ID NO: 247386 - RNA, 25 nt, Human
gcggggagggagagggguguugcuu

SEQ ID NO: 247387 - RNA, 23 nt, Human
gcggguccuagcgccggccgcac

SEQ ID NO: 247388 - RNA, 19 nt, Human
gcugagacgggaggggggu

SEQ ID NO: 247389 - RNA, 18 nt, Human
gggagugggggaaagcgc

SEQ ID NO: 247390 - RNA, 23 nt, Human
ggggagugggggaaagcgcgagg

SEQ ID NO: 247391 - RNA, 20 nt, Human
gucuccuccgcgcgccgccg

SEQ ID NO: 247392 - RNA, 18 nt, Human
uccacgggccgcccagag

SEQ ID NO: 247393 - RNA, 20 nt, Human
uccgcgcgccgccgccgccg

SEQ ID NO: 247394 - RNA, 23 nt, Human
uccgcgcgccgccgccgccgccg

SEQ ID NO: 247395 - RNA, 21 nt, Human
uccuccgcgcgccgccgccgc

SEQ ID NO: 247396 - RNA, 21 nt, Human
uccuugggccuggucagugcc

SEQ ID NO: 247397 - RNA, 18 nt, Human
ucuccuccgcgcgccgcc

SEQ ID NO: 247398 - RNA, 22 nt, Human
ucugggguguccacgggccgcc

SEQ ID NO: 247399 - RNA, 22 nt, Human
ugcaccgaaucccuucgcuaac

SEQ ID NO: 247400 - RNA, 22 nt, Human
ugcaccgaaucccuucgcuaac

SEQ ID NO: 247401 - RNA, 20 nt, Human
ugcggaggacgggucaggag

SEQ ID NO: 247402 - RNA, 20 nt, Human
uggggccaagggccccaccg

SEQ ID NO: 247403 - RNA, 22 nt, Human
uuuaagaugcucuagcacccca

SEQ ID NO: 247404 - RNA, 21 nt, Human
uuuaagaugcucuagcacccu

SEQ ID NO: 247405 - RNA, 18 nt, Human
uuuugggggcgaagaagg

SEQ ID NO: 247406 - RNA, 22 nt, Human
uuuugggggcgaagaagggucg

SEQ ID NO: 247407 - RNA, 19 nt, Human
uuuuuuuuuuuuagagucc

SEQ ID NO: 247408 - RNA, 19 nt, Human
aaccccacugcccgcccag

SEQ ID NO: 247409 - RNA, 26 nt, Human
aauaggcacacccagacacacccccu

SEQ ID NO: 247410 - RNA, 20 nt, Human
aauggaggugugugugcccu

SEQ ID NO: 247411 - RNA, 23 nt, Human
aaugguaaagcuacggcggacac

SEQ ID NO: 247412 - RNA, 23 nt, Human
acacacacacacacacacacaca

SEQ ID NO: 247413 - RNA, 23 nt, Human
acacacacacacacacacacaug

SEQ ID NO: 247414 - RNA, 23 nt, Human
acacacacacacacacacaugca

SEQ ID NO: 247415 - RNA, 23 nt, Human
acacacacacacacacaugcacg

SEQ ID NO: 247416 - RNA, 24 nt, Human
acacacacacacacaugcacgcau

SEQ ID NO: 247417 - RNA, 23 nt, Human
acacacacgcacacauacacaca

SEQ ID NO: 247418 - RNA, 23 nt, Human
acacacaugcacgcauacacaca

SEQ ID NO: 247419 - RNA, 24 nt, Human
acaugcacgcauacacacacgcac

SEQ ID NO: 247420 - RNA, 21 nt, Human
accugaguccaauggcccggc

SEQ ID NO: 247421 - RNA, 23 nt, Human
acgcagucccucucacacucacc

SEQ ID NO: 247422 - RNA, 25 nt, Human
agaaaucaguaaagaaauucacagc

SEQ ID NO: 247423 - RNA, 23 nt, Human
agaggccccucugaccacaaggg

SEQ ID NO: 247424 - RNA, 19 nt, Human
agcccccccaaagggcggg

SEQ ID NO: 247425 - RNA, 23 nt, Human
agcccgcccuggcccccagcccc

SEQ ID NO: 247426 - RNA, 22 nt, Human
aggcacacccagacacaccccc

SEQ ID NO: 247427 - RNA, 25 nt, Human
aggcacacccagacacacccccucc

SEQ ID NO: 247428 - RNA, 18 nt, Human
aggugggugggggguggc

SEQ ID NO: 247429 - RNA, 18 nt, Human
aucccacacccaaauccu

SEQ ID NO: 247430 - RNA, 22 nt, Human
auccuucccccacucacaaccc

SEQ ID NO: 247431 - RNA, 19 nt, Human
auucacuuccccuucccca

SEQ ID NO: 247432 - RNA, 20 nt, Human
cacacacacacacacacaca

SEQ ID NO: 247433 - RNA, 20 nt, Human
cacacacacacacacacaca

SEQ ID NO: 247434 - RNA, 20 nt, Human
cacacacacacacacacaca

SEQ ID NO: 247435 - RNA, 26 nt, Human
cacacacacacacacacaugcacgca

SEQ ID NO: 247436 - RNA, 28 nt, Human
cacacacaugcacgcauacacacacgca

SEQ ID NO: 247437 - RNA, 20 nt, Human
cacacccagacacacccccu

SEQ ID NO: 247438 - RNA, 19 nt, Human
cacacccccucccaccccc

SEQ ID NO: 247439 - RNA, 18 nt, Human
cacacucaccccugcauu

SEQ ID NO: 247440 - RNA, 19 nt, Human
cacccaaauccuuccccca

SEQ ID NO: 247441 - RNA, 22 nt, Human
cacccaaauccuucccccacuc

SEQ ID NO: 247442 - RNA, 23 nt, Human
cacccagacacacccccucccac

SEQ ID NO: 247443 - RNA, 18 nt, Human
caccccaagccuaggcau

SEQ ID NO: 247444 - RNA, 19 nt, Human
caccuucaucccacaccca

SEQ ID NO: 247445 - RNA, 22 nt, Human
cacgcucucaauaggcacaccc

SEQ ID NO: 247446 - RNA, 26 nt, Human
cacgugcacacacacacacacacaca

SEQ ID NO: 247447 - RNA, 22 nt, Human
cagacacacccccucccacccc

SEQ ID NO: 247448 - RNA, 22 nt, Human
cagcacucagagucaagaaagg

SEQ ID NO: 247449 - RNA, 33 nt, Human
caggcgcacgugcacacacacacacacacagug

SEQ ID NO: 247450 - RNA, 23 nt, Human
cagguggcccccaacugacgacu

SEQ ID NO: 247451 - RNA, 21 nt, Human
ccacugcccgcccagccuuug

SEQ ID NO: 247452 - RNA, 22 nt, Human
ccagacacacccccucccaccc

SEQ ID NO: 247453 - RNA, 25 nt, Human
cccacucacaaccccaaguuucuca

SEQ ID NO: 247454 - RNA, 23 nt, Human
cccagacacacccccucccaccc

SEQ ID NO: 247455 - RNA, 19 nt, Human
cccagcccccccaaagggc

SEQ ID NO: 247456 - RNA, 21 nt, Human
ccccaagccuaggcauaccug

SEQ ID NO: 247457 - RNA, 21 nt, Human
cccccagcccccccaaagggc

SEQ ID NO: 247458 - RNA, 20 nt, Human
ccccucugaccacaagggcu

SEQ ID NO: 247459 - RNA, 21 nt, Human
cccucugaccacaagggcucc

SEQ ID NO: 247460 - RNA, 21 nt, Human
ccgcccagccuuugggucagg

SEQ ID NO: 247461 - RNA, 22 nt, Human
ccgcccuggcccccagcccccc

SEQ ID NO: 247462 - RNA, 18 nt, Human
ccucccacccccgggcug

SEQ ID NO: 247463 - RNA, 22 nt, Human
ccugaguccaauggcccggccc

SEQ ID NO: 247464 - RNA, 18 nt, Human
ccuuccccagccucacug

SEQ ID NO: 247465 - RNA, 26 nt, Human
cgcauacacacacgcacacauacaca

SEQ ID NO: 247466 - RNA, 25 nt, Human
cgugcacacacacacacacacacac

SEQ ID NO: 247467 - RNA, 30 nt, Human
cucagagucaagaaaggguuaacuaaaaaa

SEQ ID NO: 247468 - RNA, 24 nt, Human
cugcauuaucacucucacacucac

SEQ ID NO: 247469 - RNA, 19 nt, Human
gagcggcagcuggaauuug

SEQ ID NO: 247470 - RNA, 25 nt, Human
gcacacauacacacacgagcuccca

SEQ ID NO: 247471 - RNA, 25 nt, Human
gcacacauacacacacgagcuccca

SEQ ID NO: 247472 - RNA, 18 nt, Human
gcagcagccggcacgguu

SEQ ID NO: 247473 - RNA, 22 nt, Human
gccacaguggugacaggcagcc

SEQ ID NO: 247474 - RNA, 23 nt, Human
ggccacaguggugacaggcagcc

SEQ ID NO: 247475 - RNA, 18 nt, Human
ggcccccagcccccccaa

SEQ ID NO: 247476 - RNA, 22 nt, Human
ggcuggagcccgcgcugccuug

SEQ ID NO: 247477 - RNA, 20 nt, Human
gugggaccagugggguccag

SEQ ID NO: 247478 - RNA, 23 nt, Human
uaaagaaauucacagcacucaga

SEQ ID NO: 247479 - RNA, 19 nt, Human
uacacacacgcacacauac

SEQ ID NO: 247480 - RNA, 25 nt, Human
uacacacacgcacacauacacacac

SEQ ID NO: 247481 - RNA, 19 nt, Human
uaccugaguccaauggccc

SEQ ID NO: 247482 - RNA, 23 nt, Human
uaucacucucacacucacauucu

SEQ ID NO: 247483 - RNA, 20 nt, Human
ucaugcccacccucaggcgc

SEQ ID NO: 247484 - RNA, 22 nt, Human
uccaauggcccggcccagcccu

SEQ ID NO: 247485 - RNA, 21 nt, Human
uccaccccaagccuaggcaua

SEQ ID NO: 247486 - RNA, 23 nt, Human
ucccacacccaaauccuuccccc

SEQ ID NO: 247487 - RNA, 22 nt, Human
ucccccacucacaaccccaagu

SEQ ID NO: 247488 - RNA, 24 nt, Human
uccuucccccacucacaaccccaa

SEQ ID NO: 247489 - RNA, 18 nt, Human
ugagagggcgggagagcc

SEQ ID NO: 247490 - RNA, 22 nt, Human
ugcaaacgcagucccucucaca

SEQ ID NO: 247491 - RNA, 20 nt, Human
ugcacacacacacacacaca

SEQ ID NO: 247492 - RNA, 25 nt, Human
ugcacacacacacacacacacacac

SEQ ID NO: 247493 - RNA, 26 nt, Human
ugcacgcauacacacacgcacacaua

SEQ ID NO: 247494 - RNA, 24 nt, Human
ugcccacccucaggcgcacgugca

SEQ ID NO: 247495 - RNA, 21 nt, Human
ugcuuacguuaaaucacauuu

SEQ ID NO: 247496 - RNA, 23 nt, Human
ugcuugcagaagcaacuagagcg

SEQ ID NO: 247497 - RNA, 18 nt, Human
ugggaaaucucagguggg

SEQ ID NO: 247498 - RNA, 21 nt, Human
ugggaauauauuaagcuuuug

SEQ ID NO: 247499 - RNA, 22 nt, Human
ugggggcagcccgcccuggccc

SEQ ID NO: 247500 - RNA, 23 nt, Human
ugggucagguggcccccaacuga

SEQ ID NO: 247501 - RNA, 21 nt, Human
ugggugggggguggcucuucc

SEQ ID NO: 247502 - RNA, 28 nt, Human
uguccugcaccuucaucccacacccaaa

SEQ ID NO: 247503 - RNA, 19 nt, Human
uucccccacucacaacccc

SEQ ID NO: 247504 - RNA, 20 nt, Human
uuggagaggccacaguggug

SEQ ID NO: 247505 - RNA, 21 nt, Human
aaaacagcauuuccuauggcc

SEQ ID NO: 247506 - RNA, 21 nt, Human
aagaagagggcagggugagau

SEQ ID NO: 247507 - RNA, 21 nt, Human
aaggcaggaugaggcagaagc

SEQ ID NO: 247508 - RNA, 21 nt, Human
agccugagcuuuggggcucug

SEQ ID NO: 247509 - RNA, 21 nt, Human
agggcagggugagauuuccgg

SEQ ID NO: 247510 - RNA, 22 nt, Human
auacaaugacuacaaauguguc

SEQ ID NO: 247511 - RNA, 21 nt, Human
caaaauaccuugcauagcuua

SEQ ID NO: 247512 - RNA, 19 nt, Human
caacacaagaagagggcag

SEQ ID NO: 247513 - RNA, 25 nt, Human
caaguacauauguccuaugauuuua

SEQ ID NO: 247514 - RNA, 20 nt, Human
cacaacacaagaagagggca

SEQ ID NO: 247515 - RNA, 21 nt, Human
cacuaaggcaggaugaggcag

SEQ ID NO: 247516 - RNA, 27 nt, Human
cccugaacuccaggagcugcaggcccc

SEQ ID NO: 247517 - RNA, 19 nt, Human
cuccaggagcugcaggccc

SEQ ID NO: 247518 - RNA, 19 nt, Human
cugagcuuuggggcucugc

SEQ ID NO: 247519 - RNA, 20 nt, Human
cuugcauagcuuauucauuc

SEQ ID NO: 247520 - RNA, 22 nt, Human
gcagaagcaaguuguguccaca

SEQ ID NO: 247521 - RNA, 18 nt, Human
gcaggaugaggcagaagc

SEQ ID NO: 247522 - RNA, 21 nt, Human
gcuuuggggcucugcacugcg

SEQ ID NO: 247523 - RNA, 20 nt, Human
ggcagggugagauuuccggg

SEQ ID NO: 247524 - RNA, 22 nt, Human
ggcgagcaagaggggcaaggcu

SEQ ID NO: 247525 - RNA, 21 nt, Human
gggcagggugagauuuccggg

SEQ ID NO: 247526 - RNA, 22 nt, Human
uacaaaaaaacagcauuuccua

SEQ ID NO: 247527 - RNA, 21 nt, Human
uacaaaauaccuugcauagcu

SEQ ID NO: 247528 - RNA, 21 nt, Human
ucaaaugagauugcacacuaa

SEQ ID NO: 247529 - RNA, 18 nt, Human
uccacaaguacauauguc

SEQ ID NO: 247530 - RNA, 18 nt, Human
ucccugaacuccaggagc

SEQ ID NO: 247531 - RNA, 25 nt, Human
uccgggucucccugaacuccaggag

SEQ ID NO: 247532 - RNA, 26 nt, Human
ugaaguggugaauuuuaacucuuuga

SEQ ID NO: 247533 - RNA, 22 nt, Human
ugacaaacacaacacaagaaga

SEQ ID NO: 247534 - RNA, 20 nt, Human
ugcauacauccauauacaua

SEQ ID NO: 247535 - RNA, 19 nt, Human
uggccaguguucuacagaa

SEQ ID NO: 247536 - RNA, 20 nt, Human
uguauaaaaaauccaacuug

SEQ ID NO: 247537 - RNA, 21 nt, Human
uuguuccacaaguacauaugu

SEQ ID NO: 247538 - RNA, 24 nt, Human
uuuaugcauacauccauauacaua

SEQ ID NO: 247539 - RNA, 19 nt, Human
aaacagaauugagcagugc

SEQ ID NO: 247540 - RNA, 21 nt, Human
aaacgaaaaacagaauugagc

SEQ ID NO: 247541 - RNA, 23 nt, Human
acaaaauaagcaaaaaacaaaaa

SEQ ID NO: 247542 - RNA, 22 nt, Human
acauuaaaaagacaacauuaga

SEQ ID NO: 247543 - RNA, 20 nt, Human
acuaaacuuuucauucuauu

SEQ ID NO: 247544 - RNA, 18 nt, Human
agaaacuagaccuaaagu

SEQ ID NO: 247545 - RNA, 19 nt, Human
agacacuaaaguuugcucu

SEQ ID NO: 247546 - RNA, 22 nt, Human
agcaaaaaacaaaaaguguuaa

SEQ ID NO: 247547 - RNA, 24 nt, Human
agcacuuugggaggcugaggcagg

SEQ ID NO: 247548 - RNA, 23 nt, Human
agccuguaaucccagcacuuugg

SEQ ID NO: 247549 - RNA, 24 nt, Human
agccuguaaucccagcacuuuggg

SEQ ID NO: 247550 - RNA, 19 nt, Human
aggcugaggcagguggauc

SEQ ID NO: 247551 - RNA, 21 nt, Human
aggcugaggcagguggaucac

SEQ ID NO: 247552 - RNA, 20 nt, Human
aguauuaaguacaccaagcu

SEQ ID NO: 247553 - RNA, 24 nt, Human
auaaauacuaucaaaagaaacuag

SEQ ID NO: 247554 - RNA, 22 nt, Human
auuacaaucuauugaucacauc

SEQ ID NO: 247555 - RNA, 24 nt, Human
caaaaaacaaaaaguguuaaacag

SEQ ID NO: 247556 - RNA, 23 nt, Human
caccaagcuguccacauuuucag

SEQ ID NO: 247557 - RNA, 18 nt, Human
cagaagaucuucauacaa

SEQ ID NO: 247558 - RNA, 24 nt, Human
cagcacuuugggaggcugaggcag

SEQ ID NO: 247559 - RNA, 24 nt, Human
cagcacuuugggaggcugaggcag

SEQ ID NO: 247560 - RNA, 18 nt, Human
caucaaaaauagacauga

SEQ ID NO: 247561 - RNA, 19 nt, Human
caucaaaaauagacaugau

SEQ ID NO: 247562 - RNA, 20 nt, Human
caucaaaaauagacaugaua

SEQ ID NO: 247563 - RNA, 20 nt, Human
caucaaaaauagacaugaua

SEQ ID NO: 247564 - RNA, 19 nt, Human
ccauugugaauaugguuau

SEQ ID NO: 247565 - RNA, 20 nt, Human
ccuguaaucccagcacuuug

SEQ ID NO: 247566 - RNA, 19 nt, Human
cgaaaaacagaauugagca

SEQ ID NO: 247567 - RNA, 20 nt, Human
cuaacauuaaaaagacaaca

SEQ ID NO: 247568 - RNA, 18 nt, Human
cugcauauguauuuccuu

SEQ ID NO: 247569 - RNA, 24 nt, Human
cuguccacauuuucaggugagaaa

SEQ ID NO: 247570 - RNA, 22 nt, Human
gacaaugcaaacgaaaaacaga

SEQ ID NO: 247571 - RNA, 24 nt, Human
ggcaauaacaggugugcaaaagaa

SEQ ID NO: 247572 - RNA, 19 nt, Human
ggcuccgugggccuggugg

SEQ ID NO: 247573 - RNA, 19 nt, Human
uaaaaauggcaauguaaug

SEQ ID NO: 247574 - RNA, 21 nt, Human
uaagcaaaaaacaaaaagugu

SEQ ID NO: 247575 - RNA, 26 nt, Human
uagauuuugucgauuuauagcaauuu

SEQ ID NO: 247576 - RNA, 25 nt, Human
uauauaaguaaaaaaaaguuagacu

SEQ ID NO: 247577 - RNA, 23 nt, Human
ucaagccuguaaucccagcacuu

SEQ ID NO: 247578 - RNA, 20 nt, Human
ugaagcaaaauaauaaagug

SEQ ID NO: 247579 - RNA, 25 nt, Human
ugcaaacgaaaaacagaauugagca

SEQ ID NO: 247580 - RNA, 22 nt, Human
uggcaauaacaggugugcaaaa

SEQ ID NO: 247581 - RNA, 18 nt, Human
ugggaggcugaggcaggu

SEQ ID NO: 247582 - RNA, 24 nt, Human
ugggaggcugaggcagguggauca

SEQ ID NO: 247583 - RNA, 20 nt, Human
ugggcuccgugggccuggug

SEQ ID NO: 247584 - RNA, 23 nt, Human
uuaaauggcucaauuaguagaua

SEQ ID NO: 247585 - RNA, 25 nt, Human
uugggaggcugaggcagguggauca

SEQ ID NO: 247586 - RNA, 20 nt, Human
uuucacagucauaacuuaga

SEQ ID NO: 247587 - RNA, 26 nt, Human
uuuuauaaauauauaacuuugucacu

SEQ ID NO: 247588 - RNA, 21 nt, Human
aaacaagaaauccaacaaaga

SEQ ID NO: 247589 - RNA, 21 nt, Human
aacaagaaauccaacaaagaa

SEQ ID NO: 247590 - RNA, 23 nt, Human
aacucagcucaaugccggaagcc

SEQ ID NO: 247591 - RNA, 25 nt, Human
aagaacacaaacaagaaauccaaca

SEQ ID NO: 247592 - RNA, 18 nt, Human
accacccgcuaucccccu

SEQ ID NO: 247593 - RNA, 19 nt, Human
caacaaagaacugagcgca

SEQ ID NO: 247594 - RNA, 24 nt, Human
caacucagcucaaugccggaagcc

SEQ ID NO: 247595 - RNA, 24 nt, Human
caccguccguggugccgcgcccca

SEQ ID NO: 247596 - RNA, 23 nt, Human
ccaacaaagaacugagcgcagca

SEQ ID NO: 247597 - RNA, 18 nt, Human
ccaagccggacgggccca

SEQ ID NO: 247598 - RNA, 18 nt, Human
ccccuucccucaccaccc

SEQ ID NO: 247599 - RNA, 18 nt, Human
cccgccagcgccuccgcc

SEQ ID NO: 247600 - RNA, 18 nt, Human
cccgccagcgccuccgcc

SEQ ID NO: 247601 - RNA, 19 nt, Human
cccgccagcgccuccgccc

SEQ ID NO: 247602 - RNA, 23 nt, Human
cccucaccacccgcuaucccccu

SEQ ID NO: 247603 - RNA, 21 nt, Human
ccgcgccccagcccgggucug

SEQ ID NO: 247604 - RNA, 23 nt, Human
ccucaccacccgcuaucccccug

SEQ ID NO: 247605 - RNA, 18 nt, Human
ccuccgccccgacagccc

SEQ ID NO: 247606 - RNA, 23 nt, Human
ccuggccccggcgcaccgauggc

SEQ ID NO: 247607 - RNA, 18 nt, Human
cgccccgacagcccaagc

SEQ ID NO: 247608 - RNA, 19 nt, Human
cgccuccgccccgacagcc

SEQ ID NO: 247609 - RNA, 21 nt, Human
cgccuccgccccgacagccca

SEQ ID NO: 247610 - RNA, 25 nt, Human
cuccgccccgacagcccaagccgga

SEQ ID NO: 247611 - RNA, 23 nt, Human
gaagcccgccagcgccuccgccc

SEQ ID NO: 247612 - RNA, 23 nt, Human
gccccgacagcccaagccggacg

SEQ ID NO: 247613 - RNA, 21 nt, Human
gggcccagguucugccuggcc

SEQ ID NO: 247614 - RNA, 21 nt, Human
guccguggugccgcgccccag

SEQ ID NO: 247615 - RNA, 20 nt, Human
uaagaacacaaacaagaaau

SEQ ID NO: 247616 - RNA, 21 nt, Human
uaagaacacaaacaagaaauc

SEQ ID NO: 247617 - RNA, 23 nt, Human
uaagaacacaaacaagaaaucca

SEQ ID NO: 247618 - RNA, 24 nt, Human
uccgccccgacagcccaagccgga

SEQ ID NO: 247619 - RNA, 23 nt, Human
uccguggugccgcgccccagccc

SEQ ID NO: 247620 - RNA, 21 nt, Human
ugccggaagcccgccagcgcc

SEQ ID NO: 247621 - RNA, 21 nt, Human
uuuuuuuuuuuuuuuccgugg

SEQ ID NO: 247622 - RNA, 19 nt, Human
uuuuuuuuuuuuuuuuccg

SEQ ID NO: 247623 - RNA, 21 nt, Human
uuuuuuuuuuuuuuuuuccgu

SEQ ID NO: 247624 - RNA, 23 nt, Human
uuuuuuuuuuuuuuuuuccgugg

SEQ ID NO: 247625 - RNA, 25 nt, Human
aaaaaaaaaaaacccuuaaaaagga

SEQ ID NO: 247626 - RNA, 23 nt, Human
aaaaaaaaaacccuuaaaaagga

SEQ ID NO: 247627 - RNA, 18 nt, Human
aaaaaaaaaagggagaaa

SEQ ID NO: 247628 - RNA, 20 nt, Human
aaaaaaacccuuaaaaagga

SEQ ID NO: 247629 - RNA, 20 nt, Human
aaaaauuccuguuggggaca

SEQ ID NO: 247630 - RNA, 19 nt, Human
aaaaccucuaugccaccca

SEQ ID NO: 247631 - RNA, 25 nt, Human
aaaagacaaagaaaugaggccuaaa

SEQ ID NO: 247632 - RNA, 23 nt, Human
aaaaggaggaggguucauucuga

SEQ ID NO: 247633 - RNA, 20 nt, Human
aaacacacaaaacccuucac

SEQ ID NO: 247634 - RNA, 19 nt, Human
aaaccucuaugccacccaa

SEQ ID NO: 247635 - RNA, 21 nt, Human
aaaggaggaggguucauucug

SEQ ID NO: 247636 - RNA, 20 nt, Human
aacaacaagccgaguccccc

SEQ ID NO: 247637 - RNA, 21 nt, Human
aacaacaagccgagucccccc

SEQ ID NO: 247638 - RNA, 22 nt, Human
aacaagccgagucccccccaca

SEQ ID NO: 247639 - RNA, 21 nt, Human
aagcagcuuaauuaaagccag

SEQ ID NO: 247640 - RNA, 20 nt, Human
aagcaggagugaaacaugcc

SEQ ID NO: 247641 - RNA, 21 nt, Human
acaaaaccucuaugccaccca

SEQ ID NO: 247642 - RNA, 23 nt, Human
acaaaaccucuaugccacccaaa

SEQ ID NO: 247643 - RNA, 22 nt, Human
acaagccgagucccccccacac

SEQ ID NO: 247644 - RNA, 22 nt, Human
acaauggagacagguuccagga

SEQ ID NO: 247645 - RNA, 22 nt, Human
acacacacacacaacacgggca

SEQ ID NO: 247646 - RNA, 21 nt, Human
acacccucccugucccaaccc

SEQ ID NO: 247647 - RNA, 20 nt, Human
acccucccugucccaacccc

SEQ ID NO: 247648 - RNA, 20 nt, Human
agaaaugaggccuaaacaca

SEQ ID NO: 247649 - RNA, 24 nt, Human
agacaaagaaaugaggccuaaaca

SEQ ID NO: 247650 - RNA, 21 nt, Human
agaccgacaucaucagaaaua

SEQ ID NO: 247651 - RNA, 20 nt, Human
agagucucuuaaaugguucu

SEQ ID NO: 247652 - RNA, 18 nt, Human
agccgagucccccccaca

SEQ ID NO: 247653 - RNA, 23 nt, Human
aggaaaaagacaaagaaaugagg

SEQ ID NO: 247654 - RNA, 21 nt, Human
aggaagugggaugagggcugg

SEQ ID NO: 247655 - RNA, 21 nt, Human
aggaggccaccugggcagggc

SEQ ID NO: 247656 - RNA, 20 nt, Human
aggcagagcuaucagcccuc

SEQ ID NO: 247657 - RNA, 24 nt, Human
agguuguaaggccagagucagcac

SEQ ID NO: 247658 - RNA, 21 nt, Human
agucagcacagacccauggcu

SEQ ID NO: 247659 - RNA, 23 nt, Human
aucucccauacauaccacgagag

SEQ ID NO: 247660 - RNA, 21 nt, Human
auggaaccccaucaaugccag

SEQ ID NO: 247661 - RNA, 25 nt, Human
auuacuccaaaccggucaucuucuc

SEQ ID NO: 247662 - RNA, 26 nt, Human
caaaacacccucccugucccaacccc

SEQ ID NO: 247663 - RNA, 22 nt, Human
caaaacgaaagaauaugcacaa

SEQ ID NO: 247664 - RNA, 23 nt, Human
caaagaaaugaggccuaaacaca

SEQ ID NO: 247665 - RNA, 23 nt, Human
caacaacaagccgaguccccccc

SEQ ID NO: 247666 - RNA, 25 nt, Human
caacaacaagccgaguccccccucu

SEQ ID NO: 247667 - RNA, 19 nt, Human
caacaagccgagucccccc

SEQ ID NO: 247668 - RNA, 23 nt, Human
caacaagccgagucccccccaca

SEQ ID NO: 247669 - RNA, 21 nt, Human
caaccccaaauggccacuccc

SEQ ID NO: 247670 - RNA, 24 nt, Human
caagcagcuuaauuaaagccagga

SEQ ID NO: 247671 - RNA, 23 nt, Human
cacacacacacacaacacgggca

SEQ ID NO: 247672 - RNA, 19 nt, Human
cacacucacucacucacuc

SEQ ID NO: 247673 - RNA, 18 nt, Human
cacagacccauggcuccu

SEQ ID NO: 247674 - RNA, 24 nt, Human
cacccaaaacacccucccuguccc

SEQ ID NO: 247675 - RNA, 25 nt, Human
cacccaaaacacccucccuguccca

SEQ ID NO: 247676 - RNA, 24 nt, Human
cacccucccugucccaaccccaaa

SEQ ID NO: 247677 - RNA, 20 nt, Human
caccgacaacaacaagccga

SEQ ID NO: 247678 - RNA, 21 nt, Human
caccgacaacaacaagccgag

SEQ ID NO: 247679 - RNA, 18 nt, Human
cacggcccuccgugaggc

SEQ ID NO: 247680 - RNA, 18 nt, Human
cacuaugugcucagaggu

SEQ ID NO: 247681 - RNA, 21 nt, Human
cacuggcccucaauacaaaac

SEQ ID NO: 247682 - RNA, 18 nt, Human
cagcggcggcggggaggg

SEQ ID NO: 247683 - RNA, 24 nt, Human
caugugcccggcagggcuggagga

SEQ ID NO: 247684 - RNA, 18 nt, Human
cauucugauuacuccaaa

SEQ ID NO: 247685 - RNA, 22 nt, Human
ccaaaacgaaagaauaugcaca

SEQ ID NO: 247686 - RNA, 19 nt, Human
ccaaaccggucaucuucuc

SEQ ID NO: 247687 - RNA, 24 nt, Human
ccaccugggcagggcaggcguccc

SEQ ID NO: 247688 - RNA, 21 nt, Human
ccaggacaguaggaaaggaag

SEQ ID NO: 247689 - RNA, 23 nt, Human
cccaaaacacccucccuguccca

SEQ ID NO: 247690 - RNA, 19 nt, Human
cccaaccccaaauggccac

SEQ ID NO: 247691 - RNA, 22 nt, Human
cccaucaaugccagcaaaggag

SEQ ID NO: 247692 - RNA, 23 nt, Human
ccccaaauggccacucccuggug

SEQ ID NO: 247693 - RNA, 24 nt, Human
ccccaaauggccacucccuggugg

SEQ ID NO: 247694 - RNA, 18 nt, Human
ccccccacacacacacuc

SEQ ID NO: 247695 - RNA, 22 nt, Human
cccccccacacacacacucacu

SEQ ID NO: 247696 - RNA, 25 nt, Human
cccugguggcugcugcuucacugcu

SEQ ID NO: 247697 - RNA, 21 nt, Human
ccgagucccccccacacacac

SEQ ID NO: 247698 - RNA, 21 nt, Human
ccuacggcccagggagcggcc

SEQ ID NO: 247699 - RNA, 23 nt, Human
ccucaauacaaaaccucuaugcc

SEQ ID NO: 247700 - RNA, 20 nt, Human
ccucccugucccaaccccaa

SEQ ID NO: 247701 - RNA, 25 nt, Human
ccucccugucccaaccccaaauggc

SEQ ID NO: 247702 - RNA, 18 nt, Human
ccugucccaaccccaaau

SEQ ID NO: 247703 - RNA, 22 nt, Human
cgccgcaggcuuaaacagcugg

SEQ ID NO: 247704 - RNA, 21 nt, Human
cggcccagggagcggccacug

SEQ ID NO: 247705 - RNA, 22 nt, Human
cggcccagggagcggccacugc

SEQ ID NO: 247706 - RNA, 20 nt, Human
cggcggcggggaggggaagg

SEQ ID NO: 247707 - RNA, 23 nt, Human
cuaaacacacaaaacccuucacu

SEQ ID NO: 247708 - RNA, 21 nt, Human
cucaauacaaaaccucuaugc

SEQ ID NO: 247709 - RNA, 22 nt, Human
cucaauacaaaaccucuaugcc

SEQ ID NO: 247710 - RNA, 25 nt, Human
cucacucacacacacacacaacacg

SEQ ID NO: 247711 - RNA, 19 nt, Human
cucacucacucacucacuc

SEQ ID NO: 247712 - RNA, 20 nt, Human
cucacucacucgcucucuca

SEQ ID NO: 247713 - RNA, 23 nt, Human
cucugugcugcgaaucugucccc

SEQ ID NO: 247714 - RNA, 23 nt, Human
cuuaacuugcaagacaauucuuc

SEQ ID NO: 247715 - RNA, 21 nt, Human
gaagaaagaaagauuucauca

SEQ ID NO: 247716 - RNA, 24 nt, Human
gacgauggagacagacaguuuuua

SEQ ID NO: 247717 - RNA, 21 nt, Human
gaggaggguucauucugauua

SEQ ID NO: 247718 - RNA, 21 nt, Human
gcugcugcuucacugcugcca

SEQ ID NO: 247719 - RNA, 19 nt, Human
gcuggaucacacaauggag

SEQ ID NO: 247720 - RNA, 20 nt, Human
ggaaaaagacaaagaaauga

SEQ ID NO: 247721 - RNA, 20 nt, Human
ggaaggggugaaggggaggg

SEQ ID NO: 247722 - RNA, 20 nt, Human
ggacagggaaucccugaagg

SEQ ID NO: 247723 - RNA, 19 nt, Human
ggcagagcuaucagcccuc

SEQ ID NO: 247724 - RNA, 18 nt, Human
ggcaggcgucccccgggc

SEQ ID NO: 247725 - RNA, 19 nt, Human
ggcaugugcccggcagggc

SEQ ID NO: 247726 - RNA, 23 nt, Human
gggaagaaagaaagauuucauca

SEQ ID NO: 247727 - RNA, 24 nt, Human
gggcagggcaggcgucccccgggc

SEQ ID NO: 247728 - RNA, 20 nt, Human
gggcaugugcccggcagggc

SEQ ID NO: 247729 - RNA, 18 nt, Human
ggggaaggggugaagggg

SEQ ID NO: 247730 - RNA, 21 nt, Human
gguaaagggagggcccagggc

SEQ ID NO: 247731 - RNA, 20 nt, Human
guucauucaaaaauggaacc

SEQ ID NO: 247732 - RNA, 21 nt, Human
uaaacacacaaaacccuucac

SEQ ID NO: 247733 - RNA, 20 nt, Human
uaaacagcuggcugagagaa

SEQ ID NO: 247734 - RNA, 18 nt, Human
uaaagggagggcccaggg

SEQ ID NO: 247735 - RNA, 18 nt, Human
uacaaaaccucuaugcca

SEQ ID NO: 247736 - RNA, 24 nt, Human
uacaaaaucaguuggcucuauuuc

SEQ ID NO: 247737 - RNA, 22 nt, Human
uacacauaugaagguaaaggga

SEQ ID NO: 247738 - RNA, 23 nt, Human
uacacuagaaaucagcaaaugcc

SEQ ID NO: 247739 - RNA, 23 nt, Human
uacuuuuuauuuccauggaaugg

SEQ ID NO: 247740 - RNA, 22 nt, Human
uagaaaaaggaaaaaaaaaaaa

SEQ ID NO: 247741 - RNA, 22 nt, Human
uagaaaucagcaaaugccagga

SEQ ID NO: 247742 - RNA, 20 nt, Human
uagcuuuuuagaaaaaggaa

SEQ ID NO: 247743 - RNA, 22 nt, Human
ucaccgacaacaacaagccgag

SEQ ID NO: 247744 - RNA, 24 nt, Human
ucacucacacacacacacaacacg

SEQ ID NO: 247745 - RNA, 18 nt, Human
ucacucacucacucacuc

SEQ ID NO: 247746 - RNA, 19 nt, Human
ucacuggcaucugcugacc

SEQ ID NO: 247747 - RNA, 25 nt, Human
ucagcccucaagcagcuuaauuaaa

SEQ ID NO: 247748 - RNA, 18 nt, Human
ucaucagaaauagguaca

SEQ ID NO: 247749 - RNA, 20 nt, Human
uccacagaaaaagcugccaa

SEQ ID NO: 247750 - RNA, 21 nt, Human
uccuacggcccagggagcggc

SEQ ID NO: 247751 - RNA, 23 nt, Human
ucucacucacacacacacacaac

SEQ ID NO: 247752 - RNA, 23 nt, Human
ucucccauacauaccacgagagu

SEQ ID NO: 247753 - RNA, 20 nt, Human
ucugaaaccuguguaagcuu

SEQ ID NO: 247754 - RNA, 19 nt, Human
ugaaaggaggaugagacga

SEQ ID NO: 247755 - RNA, 24 nt, Human
ugaggccuaaacacacaaaacccu

SEQ ID NO: 247756 - RNA, 25 nt, Human
ugcccggcagggcuggaggagcugg

SEQ ID NO: 247757 - RNA, 18 nt, Human
ugcucagagguccggccg

SEQ ID NO: 247758 - RNA, 23 nt, Human
uggaauggaaucaaacacgaacu

SEQ ID NO: 247759 - RNA, 24 nt, Human
uggaauggaaucaaacacgaacuu

SEQ ID NO: 247760 - RNA, 24 nt, Human
uggaggagcugguagggugggcag

SEQ ID NO: 247761 - RNA, 21 nt, Human
uggcugcugcuucacugcugc

SEQ ID NO: 247762 - RNA, 22 nt, Human
ugggaaggguccgcacuggggu

SEQ ID NO: 247763 - RNA, 23 nt, Human
uggggacagggaaucccugaagg

SEQ ID NO: 247764 - RNA, 24 nt, Human
ugguagggugggcaggacacuaug

SEQ ID NO: 247765 - RNA, 19 nt, Human
ugucccaaccccaaauggc

SEQ ID NO: 247766 - RNA, 21 nt, Human
ugucgcuuugcaagaccgaca

SEQ ID NO: 247767 - RNA, 20 nt, Human
uuaaaaaauauacaguggaa

SEQ ID NO: 247768 - RNA, 22 nt, Human
uuaaacagcuggcugagagaag

SEQ ID NO: 247769 - RNA, 21 nt, Human
uucacuggcaucugcugacca

SEQ ID NO: 247770 - RNA, 19 nt, Human
uucuucggcaguauguaca

SEQ ID NO: 247771 - RNA, 20 nt, Human
uugaaggcuuccugcugcca

SEQ ID NO: 247772 - RNA, 20 nt, Human
uuuccaugugaauaagccau

SEQ ID NO: 247773 - RNA, 23 nt, Human
uuuuuuuuuuuuuuuuuuuaagg

SEQ ID NO: 247774 - RNA, 23 nt, Human
aaaaaaaaaaaaaaggaaaagaa

SEQ ID NO: 247775 - RNA, 19 nt, Human
aaccaacuuggagcucacc

SEQ ID NO: 247776 - RNA, 21 nt, Human
acaggcacccccuccgccccc

SEQ ID NO: 247777 - RNA, 20 nt, Human
agagaggagaggggguacgg

SEQ ID NO: 247778 - RNA, 19 nt, Human
agaggagaggggguacggg

SEQ ID NO: 247779 - RNA, 19 nt, Human
agauguagggccccuugcu

SEQ ID NO: 247780 - RNA, 23 nt, Human
aggaguuggugggaaaagagggg

SEQ ID NO: 247781 - RNA, 28 nt, Human
aggcggggggcgcggccuccucgcgcgg

SEQ ID NO: 247782 - RNA, 18 nt, Human
agggagcccacagcugug

SEQ ID NO: 247783 - RNA, 23 nt, Human
aggggacccggccggccuuggcu

SEQ ID NO: 247784 - RNA, 22 nt, Human
aggggcugcagacagcaggggg

SEQ ID NO: 247785 - RNA, 25 nt, Human
aggggguacgggcaguggcugcucg

SEQ ID NO: 247786 - RNA, 24 nt, Human
caacuccccggggaggggcugcag

SEQ ID NO: 247787 - RNA, 23 nt, Human
caaggcagacgcgaccggggcca

SEQ ID NO: 247788 - RNA, 18 nt, Human
cacaggcacccccuccgc

SEQ ID NO: 247789 - RNA, 23 nt, Human
caccccugcccacuguccagggg

SEQ ID NO: 247790 - RNA, 24 nt, Human
cagacagcagggggagaggacugg

SEQ ID NO: 247791 - RNA, 26 nt, Human
ccaaggcagacgcgaccggggccacg

SEQ ID NO: 247792 - RNA, 22 nt, Human
ccaggguugggagggaaguggc

SEQ ID NO: 247793 - RNA, 21 nt, Human
cccccuggaaaaaaaaaaaaa

SEQ ID NO: 247794 - RNA, 21 nt, Human
ccccuaagaaaacauuucuuc

SEQ ID NO: 247795 - RNA, 21 nt, Human
ccccugcccacuguccagggg

SEQ ID NO: 247796 - RNA, 19 nt, Human
cccgagagggagcccacag

SEQ ID NO: 247797 - RNA, 18 nt, Human
cccuggaaaaaaaaaaaa

SEQ ID NO: 247798 - RNA, 18 nt, Human
cccugggaagacagggca

SEQ ID NO: 247799 - RNA, 22 nt, Human
ccgcccccgagagggagcccac

SEQ ID NO: 247800 - RNA, 25 nt, Human
ccggggccacggcgaccgucgaggu

SEQ ID NO: 247801 - RNA, 19 nt, Human
ccuccggagauuguagccg

SEQ ID NO: 247802 - RNA, 23 nt, Human
ccuccuuuccuucuggaggcucc

SEQ ID NO: 247803 - RNA, 22 nt, Human
ccuugcucuuugucuucuucuc

SEQ ID NO: 247804 - RNA, 18 nt, Human
cgaccggggccacggcga

SEQ ID NO: 247805 - RNA, 24 nt, Human
cgcggcgauaguggcggcggaggc

SEQ ID NO: 247806 - RNA, 27 nt, Human
cggccuuggcucccguguggauggcuu

SEQ ID NO: 247807 - RNA, 22 nt, Human
cuacuccauucuccccucuccc

SEQ ID NO: 247808 - RNA, 18 nt, Human
cucacaagucccugggaa

SEQ ID NO: 247809 - RNA, 22 nt, Human
cuccauucuccccucucccccg

SEQ ID NO: 247810 - RNA, 20 nt, Human
cugccaccccugcccacugu

SEQ ID NO: 247811 - RNA, 21 nt, Human
cugggaagacagggcaugggc

SEQ ID NO: 247812 - RNA, 21 nt, Human
cugugggaggggccggggucc

SEQ ID NO: 247813 - RNA, 19 nt, Human
cuucagggccgcugugucc

SEQ ID NO: 247814 - RNA, 21 nt, Human
cuuuccuucuggaggcuccuu

SEQ ID NO: 247815 - RNA, 22 nt, Human
gaaaaaaaaaaaaaaggaaaag

SEQ ID NO: 247816 - RNA, 24 nt, Human
gaaaaaaaaaaaaaaggaaaagaa

SEQ ID NO: 247817 - RNA, 20 nt, Human
gacucuacuccauucucccc

SEQ ID NO: 247818 - RNA, 20 nt, Human
gagaggagcuuguaccaagg

SEQ ID NO: 247819 - RNA, 19 nt, Human
gagcuuguaccaagggacc

SEQ ID NO: 247820 - RNA, 22 nt, Human
gccgacacuggcggggguggcg

SEQ ID NO: 247821 - RNA, 21 nt, Human
gcuuacagagaggagaggggg

SEQ ID NO: 247822 - RNA, 18 nt, Human
ggaaaaaaaaaaaaaagg

SEQ ID NO: 247823 - RNA, 21 nt, Human
ggaaaaaaaaaaaaaaggaaa

SEQ ID NO: 247824 - RNA, 18 nt, Human
ggaagacagggcaugggc

SEQ ID NO: 247825 - RNA, 21 nt, Human
ggaggcggggggcgcggccuc

SEQ ID NO: 247826 - RNA, 18 nt, Human
ggccggccuuggcucccg

SEQ ID NO: 247827 - RNA, 21 nt, Human
ggcggggggcgcggccucggc

SEQ ID NO: 247828 - RNA, 22 nt, Human
gggaaauaggaguuggugggaa

SEQ ID NO: 247829 - RNA, 20 nt, Human
gggacccggccggccuuggc

SEQ ID NO: 247830 - RNA, 23 nt, Human
gggcgcggccucggccgcgggcg

SEQ ID NO: 247831 - RNA, 24 nt, Human
gggcugcagacagcagggggagag

SEQ ID NO: 247832 - RNA, 21 nt, Human
ggggaggggcugcagacagca

SEQ ID NO: 247833 - RNA, 22 nt, Human
guggcggcggaggcggggggcg

SEQ ID NO: 247834 - RNA, 24 nt, Human
guguccucugccaccccugcccac

SEQ ID NO: 247835 - RNA, 24 nt, Human
uaaaaccuagcgaauuccccuaag

SEQ ID NO: 247836 - RNA, 25 nt, Human
uaagaaaacauuucuuccuccuuuc

SEQ ID NO: 247837 - RNA, 18 nt, Human
uagccguucuugaacucc

SEQ ID NO: 247838 - RNA, 21 nt, Human
uaggaguuggugggaaaagag

SEQ ID NO: 247839 - RNA, 18 nt, Human
ucacaggcacccccuccg

SEQ ID NO: 247840 - RNA, 21 nt, Human
ucccccgcaaccaacuuggag

SEQ ID NO: 247841 - RNA, 21 nt, Human
uccucugccaccccugcccac

SEQ ID NO: 247842 - RNA, 20 nt, Human
uccuugguugguagggaaau

SEQ ID NO: 247843 - RNA, 18 nt, Human
ucuuccuccuuuccuucu

SEQ ID NO: 247844 - RNA, 22 nt, Human
ucuugaacuccuuggcgcacag

SEQ ID NO: 247845 - RNA, 19 nt, Human
uggaaaaaaaaaaaaaagg

SEQ ID NO: 247846 - RNA, 19 nt, Human
uggaaaaaaaaaaaaaagg

SEQ ID NO: 247847 - RNA, 18 nt, Human
uggaggcuccuugguugg

SEQ ID NO: 247848 - RNA, 24 nt, Human
uggcggggguggcggagggggccg

SEQ ID NO: 247849 - RNA, 19 nt, Human
uggcugagagcucacaggc

SEQ ID NO: 247850 - RNA, 21 nt, Human
uggcugagagcucacaggcac

SEQ ID NO: 247851 - RNA, 26 nt, Human
uggugggaaaagaggggggagaggag

SEQ ID NO: 247852 - RNA, 19 nt, Human
ugucuucuucuccaaggca

SEQ ID NO: 247853 - RNA, 26 nt, Human
uguggauggcuucgugccuccggaga

SEQ ID NO: 247854 - RNA, 29 nt, Human
uguggauggcuucgugccuccggagauuu

SEQ ID NO: 247855 - RNA, 20 nt, Human
uuggugggaaaagagggggg

SEQ ID NO: 247856 - RNA, 24 nt, Human
uuggugggaaaagaggggggagag

SEQ ID NO: 247857 - RNA, 23 nt, Human
aaacaaagcagacacucagaagc

SEQ ID NO: 247858 - RNA, 25 nt, Human
aaacaaagcagacacucagaagcaa

SEQ ID NO: 247859 - RNA, 21 nt, Human
aacaccccagccccagccccu

SEQ ID NO: 247860 - RNA, 24 nt, Human
aagaagacaaaaagagcaaguaug

SEQ ID NO: 247861 - RNA, 23 nt, Human
aaggggccagugauuaaucagac

SEQ ID NO: 247862 - RNA, 21 nt, Human
acaaagcagacacucagaagc

SEQ ID NO: 247863 - RNA, 18 nt, Human
acaccccagccccagccc

SEQ ID NO: 247864 - RNA, 18 nt, Human
acccggggcccagauggg

SEQ ID NO: 247865 - RNA, 23 nt, Human
agaacacagugagccaagggcac

SEQ ID NO: 247866 - RNA, 24 nt, Human
agccaacuucaacaccccagcccc

SEQ ID NO: 247867 - RNA, 19 nt, Human
caaaaagagcaaguauggg

SEQ ID NO: 247868 - RNA, 20 nt, Human
caaagcagacacucagaagc

SEQ ID NO: 247869 - RNA, 24 nt, Human
caaagcagacacucagaagcaaac

SEQ ID NO: 247870 - RNA, 23 nt, Human
caacuucaacaccccagccccag

SEQ ID NO: 247871 - RNA, 22 nt, Human
cacacaaguuccagauagucaa

SEQ ID NO: 247872 - RNA, 18 nt, Human
cacugccauaccugagga

SEQ ID NO: 247873 - RNA, 19 nt, Human
cagccccucagcuccuccu

SEQ ID NO: 247874 - RNA, 23 nt, Human
ccaacuucaacaccccagcccca

SEQ ID NO: 247875 - RNA, 21 nt, Human
ccagauagucaaaugcuuccc

SEQ ID NO: 247876 - RNA, 21 nt, Human
ccaugcagaacacagugagcc

SEQ ID NO: 247877 - RNA, 20 nt, Human
cccagccccucagcuccucc

SEQ ID NO: 247878 - RNA, 22 nt, Human
ccccagccccagccccucagcu

SEQ ID NO: 247879 - RNA, 23 nt, Human
ccccagccccagccccucagcuc

SEQ ID NO: 247880 - RNA, 19 nt, Human
ccccucagcuccuccugcc

SEQ ID NO: 247881 - RNA, 18 nt, Human
cccggggcccagaugggu

SEQ ID NO: 247882 - RNA, 20 nt, Human
ccgcucucucuugaacccgg

SEQ ID NO: 247883 - RNA, 24 nt, Human
ccggggcccagaugggugggggug

SEQ ID NO: 247884 - RNA, 20 nt, Human
ccucagcuccuccugcccac

SEQ ID NO: 247885 - RNA, 26 nt, Human
ccuccugcccaccucuacuaaacaaa

SEQ ID NO: 247886 - RNA, 22 nt, Human
cuacuaaacaaagcagacacuc

SEQ ID NO: 247887 - RNA, 24 nt, Human
cuacuaaacaaagcagacacucag

SEQ ID NO: 247888 - RNA, 23 nt, Human
cucagcuccuccugcccaccucu

SEQ ID NO: 247889 - RNA, 22 nt, Human
cugaagaagacaaaaagagcaa

SEQ ID NO: 247890 - RNA, 20 nt, Human
cuuggauuugggguuacagc

SEQ ID NO: 247891 - RNA, 20 nt, Human
gaccccgcucucucuugaac

SEQ ID NO: 247892 - RNA, 20 nt, Human
gcagaacacagugagccaag

SEQ ID NO: 247893 - RNA, 20 nt, Human
ggggugggagcggcaggggc

SEQ ID NO: 247894 - RNA, 23 nt, Human
uaaaaccaggugagucacugcca

SEQ ID NO: 247895 - RNA, 20 nt, Human
ucaacaccccagccccagcc

SEQ ID NO: 247896 - RNA, 18 nt, Human
ucacuggguguccuggcc

SEQ ID NO: 247897 - RNA, 22 nt, Human
ucagaagcaaacucuauauggc

SEQ ID NO: 247898 - RNA, 21 nt, Human
ucagcuccuccugcccaccuc

SEQ ID NO: 247899 - RNA, 21 nt, Human
uccaaaccaugcagaacacag

SEQ ID NO: 247900 - RNA, 20 nt, Human
ucccagggugaugacauccc

SEQ ID NO: 247901 - RNA, 23 nt, Human
uccccagcuggcccgcccagccc

SEQ ID NO: 247902 - RNA, 23 nt, Human
uccugcccaccucuacuaaacaa

SEQ ID NO: 247903 - RNA, 20 nt, Human
ucugaagaagacaaaaagag

SEQ ID NO: 247904 - RNA, 21 nt, Human
ugaagaagacaaaaagagcaa

SEQ ID NO: 247905 - RNA, 19 nt, Human
ugggguuacagccaguuug

SEQ ID NO: 247906 - RNA, 18 nt, Human
uguccuggccccaacagc

SEQ ID NO: 247907 - RNA, 23 nt, Human
uguccuggccccaacagcugggg

SEQ ID NO: 247908 - RNA, 22 nt, Human
uuaaaaccaggugagucacugc

SEQ ID NO: 247909 - RNA, 19 nt, Human
uucccagggugaugacauc

SEQ ID NO: 247910 - RNA, 20 nt, Human
uuguuuuauuaaaaccaggu

SEQ ID NO: 247911 - RNA, 22 nt, Human
aagaugggccacaagagacauu

SEQ ID NO: 247912 - RNA, 20 nt, Human
aagcagcagcacauuguuuu

SEQ ID NO: 247913 - RNA, 24 nt, Human
acacuuggaagguuggugcugggg

SEQ ID NO: 247914 - RNA, 19 nt, Human
acugugccccaaacaaggu

SEQ ID NO: 247915 - RNA, 18 nt, Human
agcugcuccaccuucccc

SEQ ID NO: 247916 - RNA, 23 nt, Human
aggaagcagcaguagccaguuug

SEQ ID NO: 247917 - RNA, 24 nt, Human
agguggugagagacugacaugggu

SEQ ID NO: 247918 - RNA, 19 nt, Human
agucaggccugcagccagg

SEQ ID NO: 247919 - RNA, 22 nt, Human
agucaggccugcagccaggccu

SEQ ID NO: 247920 - RNA, 24 nt, Human
auagaaacuaaauuauuuccaauu

SEQ ID NO: 247921 - RNA, 20 nt, Human
aucaccaugaaauccauggu

SEQ ID NO: 247922 - RNA, 25 nt, Human
aucauccuuucagcuucucuaauuc

SEQ ID NO: 247923 - RNA, 22 nt, Human
augacacaaaaauagccaggac

SEQ ID NO: 247924 - RNA, 18 nt, Human
auggcgagggucccuccu

SEQ ID NO: 247925 - RNA, 19 nt, Human
caaacaagguucacaaaag

SEQ ID NO: 247926 - RNA, 21 nt, Human
caauacuugaauaaaugacac

SEQ ID NO: 247927 - RNA, 22 nt, Human
caccaugaaauccauggucuuc

SEQ ID NO: 247928 - RNA, 24 nt, Human
cacccacaucaucgaagcuggagg

SEQ ID NO: 247929 - RNA, 23 nt, Human
cacuuggaagguuggugcugggg

SEQ ID NO: 247930 - RNA, 21 nt, Human
cagcaaguuuuuucugggugg

SEQ ID NO: 247931 - RNA, 18 nt, Human
cagcaguagccaguuugg

SEQ ID NO: 247932 - RNA, 19 nt, Human
caggaucauccuuucagcu

SEQ ID NO: 247933 - RNA, 23 nt, Human
caugauaaaguuggaaauccauu

SEQ ID NO: 247934 - RNA, 20 nt, Human
ccacaucaucgaagcuggag

SEQ ID NO: 247935 - RNA, 23 nt, Human
ccauguaucugcuagaucaccuc

SEQ ID NO: 247936 - RNA, 20 nt, Human
cccauggcgagggucccucc

SEQ ID NO: 247937 - RNA, 21 nt, Human
cccauggcgagggucccuccu

SEQ ID NO: 247938 - RNA, 20 nt, Human
cccguggacccauggcgagg

SEQ ID NO: 247939 - RNA, 19 nt, Human
cccuccuccccuuccuccu

SEQ ID NO: 247940 - RNA, 21 nt, Human
cccuccuccccuuccuccucc

SEQ ID NO: 247941 - RNA, 19 nt, Human
ccucccaacaauuuucuga

SEQ ID NO: 247942 - RNA, 18 nt, Human
ccucccgccucgcccucc

SEQ ID NO: 247943 - RNA, 20 nt, Human
ccucccgccucgcccuccuc

SEQ ID NO: 247944 - RNA, 19 nt, Human
ccucgcccuccuccccuuc

SEQ ID NO: 247945 - RNA, 21 nt, Human
ccucgcccuccuccccuuccu

SEQ ID NO: 247946 - RNA, 23 nt, Human
ccugcaccucccgccucgcccuc

SEQ ID NO: 247947 - RNA, 20 nt, Human
ccugcagcugcuccaccuuc

SEQ ID NO: 247948 - RNA, 20 nt, Human
ccugcagcugcuccaccuuc

SEQ ID NO: 247949 - RNA, 21 nt, Human
ccugcagcugcuccaccuucc

SEQ ID NO: 247950 - RNA, 25 nt, Human
cguggacccauggcgagggucccuc

SEQ ID NO: 247951 - RNA, 19 nt, Human
cuacugugccccaaacaag

SEQ ID NO: 247952 - RNA, 19 nt, Human
cucccacacuuuacaucca

SEQ ID NO: 247953 - RNA, 18 nt, Human
cucgugcucgugggcucc

SEQ ID NO: 247954 - RNA, 18 nt, Human
cucuaggcccguggaccc

SEQ ID NO: 247955 - RNA, 21 nt, Human
cugcaccucccgccucgcccu

SEQ ID NO: 247956 - RNA, 21 nt, Human
cugcagcugcuccaccuuccc

SEQ ID NO: 247957 - RNA, 23 nt, Human
cugcuagaucaccucguuggugu

SEQ ID NO: 247958 - RNA, 22 nt, Human
cuuccaguaagaugggccacaa

SEQ ID NO: 247959 - RNA, 25 nt, Human
cuugcuggaaucaccaugaaaucca

SEQ ID NO: 247960 - RNA, 20 nt, Human
gagagacugacauggguucc

SEQ ID NO: 247961 - RNA, 20 nt, Human
gaggccacaggaagcagcag

SEQ ID NO: 247962 - RNA, 19 nt, Human
gauaaaguuggaaauccau

SEQ ID NO: 247963 - RNA, 18 nt, Human
gcaccucccgccucgccc

SEQ ID NO: 247964 - RNA, 22 nt, Human
gcagcaguagccaguuuggcac

SEQ ID NO: 247965 - RNA, 19 nt, Human
gcagcugcuccaccuuccc

SEQ ID NO: 247966 - RNA, 19 nt, Human
gcauauuuaacucugugag

SEQ ID NO: 247967 - RNA, 23 nt, Human
gcccuccuccccuuccuccuccu

SEQ ID NO: 247968 - RNA, 21 nt, Human
gccucgcccuccuccccuucc

SEQ ID NO: 247969 - RNA, 18 nt, Human
ggaagguuggugcugggg

SEQ ID NO: 247970 - RNA, 22 nt, Human
ggacacccacaucaucgaagcu

SEQ ID NO: 247971 - RNA, 23 nt, Human
ggccugcagcugcuccaccuucc

SEQ ID NO: 247972 - RNA, 18 nt, Human
gucaccuuggugaggcua

SEQ ID NO: 247973 - RNA, 19 nt, Human
gucuguagaagccuccagc

SEQ ID NO: 247974 - RNA, 18 nt, Human
gugucaccuuggugaggc

SEQ ID NO: 247975 - RNA, 20 nt, Human
uaaaugacacaaaaauagcu

SEQ ID NO: 247976 - RNA, 20 nt, Human
uacauccaucuucccuuccc

SEQ ID NO: 247977 - RNA, 22 nt, Human
uacauccaucuucccuucccga

SEQ ID NO: 247978 - RNA, 20 nt, Human
uacugugccccaaacaaggu

SEQ ID NO: 247979 - RNA, 23 nt, Human
uauguuucccggaacucucuucc

SEQ ID NO: 247980 - RNA, 19 nt, Human
ucagcuuugcauuuucagc

SEQ ID NO: 247981 - RNA, 18 nt, Human
ucaggccugcagccaggc

SEQ ID NO: 247982 - RNA, 21 nt, Human
ucaggccugcagccaggccug

SEQ ID NO: 247983 - RNA, 19 nt, Human
ucaggugagcagugagacc

SEQ ID NO: 247984 - RNA, 19 nt, Human
uccaccuuccccaggauca

SEQ ID NO: 247985 - RNA, 19 nt, Human
uccucaggugagcagugag

SEQ ID NO: 247986 - RNA, 21 nt, Human
ucgcccuccuccccuuccucc

SEQ ID NO: 247987 - RNA, 20 nt, Human
ucgugcucgugggcuccacu

SEQ ID NO: 247988 - RNA, 25 nt, Human
ucugcaggacacccacaucaucgaa

SEQ ID NO: 247989 - RNA, 18 nt, Human
ucuguagaagccuccagu

SEQ ID NO: 247990 - RNA, 18 nt, Human
ugaagcagcagcacauug

SEQ ID NO: 247991 - RNA, 21 nt, Human
ugagagacugacauggguucc

SEQ ID NO: 247992 - RNA, 20 nt, Human
ugcaggacacccacaucauc

SEQ ID NO: 247993 - RNA, 22 nt, Human
ugcauuuucagcaacauaguua

SEQ ID NO: 247994 - RNA, 23 nt, Human
ugcccugcagacuugaauccuac

SEQ ID NO: 247995 - RNA, 20 nt, Human
ugcucgugggcuccacugug

SEQ ID NO: 247996 - RNA, 20 nt, Human
uggcgagggucccuccugca

SEQ ID NO: 247997 - RNA, 24 nt, Human
ugggccacaagagacauuuugcuu

SEQ ID NO: 247998 - RNA, 18 nt, Human
uggguuccaggccauccu

SEQ ID NO: 247999 - RNA, 18 nt, Human
ugugggcaguagucaggc

SEQ ID NO: 248000 - RNA, 22 nt, Human
uguuucccggaacucucuucca

SEQ ID NO: 248001 - RNA, 25 nt, Human
uucaccauuuguaauacauauugau

SEQ ID NO: 248002 - RNA, 20 nt, Human
uuccccaggaucauccuuuc

SEQ ID NO: 248003 - RNA, 22 nt, Human
uugccauguaucugcuagauca

SEQ ID NO: 248004 - RNA, 20 nt, Human
uuuugcuugauaaccggagg

SEQ ID NO: 248005 - RNA, 18 nt, Human
aaacagaagggaaaccga

SEQ ID NO: 248006 - RNA, 25 nt, Human
aaacagaagggaaaccgaggcaggg

SEQ ID NO: 248007 - RNA, 23 nt, Human
aacagaagggaaaccgaggcagg

SEQ ID NO: 248008 - RNA, 21 nt, Human
aagccggacucuguagaggac

SEQ ID NO: 248009 - RNA, 24 nt, Human
aagcugccagcccacugccuccau

SEQ ID NO: 248010 - RNA, 19 nt, Human
accagggacuggccgcaga

SEQ ID NO: 248011 - RNA, 24 nt, Human
accccugggagcgucagcaccacc

SEQ ID NO: 248012 - RNA, 18 nt, Human
acccgacuccagggagcc

SEQ ID NO: 248013 - RNA, 19 nt, Human
accugcuggcugcucucca

SEQ ID NO: 248014 - RNA, 23 nt, Human
acucaggcacggugaggcucugu

SEQ ID NO: 248015 - RNA, 19 nt, Human
agaaacccucccagcuguc

SEQ ID NO: 248016 - RNA, 24 nt, Human
agccagugggcaccaaccucagga

SEQ ID NO: 248017 - RNA, 21 nt, Human
agcugugugccccgaggcccc

SEQ ID NO: 248018 - RNA, 18 nt, Human
aggcacugggggguuaag

SEQ ID NO: 248019 - RNA, 21 nt, Human
agggagcccccguggccccgc

SEQ ID NO: 248020 - RNA, 20 nt, Human
agggucuuucgggugggggc

SEQ ID NO: 248021 - RNA, 24 nt, Human
aucccucagacggccuugggccag

SEQ ID NO: 248022 - RNA, 21 nt, Human
augccacucaggcacggugag

SEQ ID NO: 248023 - RNA, 24 nt, Human
caaagggucccagccagugggcac

SEQ ID NO: 248024 - RNA, 20 nt, Human
caccagccgcauggcagggc

SEQ ID NO: 248025 - RNA, 24 nt, Human
cacccaugguggcuuuauucaguc

SEQ ID NO: 248026 - RNA, 22 nt, Human
cacgcugcacagugggugaugu

SEQ ID NO: 248027 - RNA, 19 nt, Human
cacuaaacagaagggaaac

SEQ ID NO: 248028 - RNA, 27 nt, Human
cacuaaacagaagggaaaccgaggcag

SEQ ID NO: 248029 - RNA, 21 nt, Human
cagcucccgcggucaggcccc

SEQ ID NO: 248030 - RNA, 19 nt, Human
caggacccgacuccaggga

SEQ ID NO: 248031 - RNA, 21 nt, Human
cagggagggcuggcuuuagcg

SEQ ID NO: 248032 - RNA, 21 nt, Human
cagggccaggagggcaccagg

SEQ ID NO: 248033 - RNA, 21 nt, Human
caggggggccggcuggcagug

SEQ ID NO: 248034 - RNA, 19 nt, Human
caucccaagcacaucugug

SEQ ID NO: 248035 - RNA, 21 nt, Human
caugccccccacagcagacca

SEQ ID NO: 248036 - RNA, 24 nt, Human
ccaccuggagcuucccucggcugc

SEQ ID NO: 248037 - RNA, 23 nt, Human
ccacgcccacggcucccuccacc

SEQ ID NO: 248038 - RNA, 18 nt, Human
ccacugccuccaugcggg

SEQ ID NO: 248039 - RNA, 22 nt, Human
ccagaagcucccuggagagcug

SEQ ID NO: 248040 - RNA, 26 nt, Human
cccaggagcacccggcacuucccgaa

SEQ ID NO: 248041 - RNA, 18 nt, Human
ccccaaagcugggugccu

SEQ ID NO: 248042 - RNA, 22 nt, Human
ccccacgcccacggcucccucc

SEQ ID NO: 248043 - RNA, 24 nt, Human
ccccagcugugugccccgaggccc

SEQ ID NO: 248044 - RNA, 23 nt, Human
cccccacagcagaccagaguccc

SEQ ID NO: 248045 - RNA, 24 nt, Human
ccccgaggccccgggaagugggga

SEQ ID NO: 248046 - RNA, 23 nt, Human
ccccuggggcagcgaccagaucc

SEQ ID NO: 248047 - RNA, 22 nt, Human
cccgucaucccaagcacaucug

SEQ ID NO: 248048 - RNA, 18 nt, Human
cccuccaccaggcagaca

SEQ ID NO: 248049 - RNA, 22 nt, Human
ccgcgucugcaggcggcuccag

SEQ ID NO: 248050 - RNA, 18 nt, Human
ccuccagaccgagaaacc

SEQ ID NO: 248051 - RNA, 24 nt, Human
ccugcaugccccccacagcagacc

SEQ ID NO: 248052 - RNA, 20 nt, Human
ccuggcaccccugggagcgu

SEQ ID NO: 248053 - RNA, 20 nt, Human
ccugucccaguggcuccugg

SEQ ID NO: 248054 - RNA, 23 nt, Human
cgacuccacgggacggggacgcu

SEQ ID NO: 248055 - RNA, 26 nt, Human
cgagcccaaaggucguagggagccag

SEQ ID NO: 248056 - RNA, 22 nt, Human
cgccgagcugccgggcaccugc

SEQ ID NO: 248057 - RNA, 19 nt, Human
cgcggucaggccccaucag

SEQ ID NO: 248058 - RNA, 19 nt, Human
cggccuugggccagaagcu

SEQ ID NO: 248059 - RNA, 23 nt, Human
cggcuggaguuugguuuucagaa

SEQ ID NO: 248060 - RNA, 20 nt, Human
cgggacggggacgcuugggc

SEQ ID NO: 248061 - RNA, 23 nt, Human
cuacgccuccagaccgagaaacc

SEQ ID NO: 248062 - RNA, 19 nt, Human
cucccgcggucaggcccca

SEQ ID NO: 248063 - RNA, 19 nt, Human
cucccuggagagcugggca

SEQ ID NO: 248064 - RNA, 18 nt, Human
cucgcugggcccaggcca

SEQ ID NO: 248065 - RNA, 19 nt, Human
cugccaggacccgacucca

SEQ ID NO: 248066 - RNA, 19 nt, Human
cugcccaucagucccccug

SEQ ID NO: 248067 - RNA, 22 nt, Human
cugccgggcaccugcuggcugc

SEQ ID NO: 248068 - RNA, 24 nt, Human
cuggagagcugggcaccucgagga

SEQ ID NO: 248069 - RNA, 26 nt, Human
gacgggccgaggagggagccaggagc

SEQ ID NO: 248070 - RNA, 19 nt, Human
gacucugcccaucaguccc

SEQ ID NO: 248071 - RNA, 19 nt, Human
gaggagcuggccucgagcc

SEQ ID NO: 248072 - RNA, 18 nt, Human
gcagcaccgggacaggcc

SEQ ID NO: 248073 - RNA, 19 nt, Human
gcagcaccgggacaggccc

SEQ ID NO: 248074 - RNA, 22 nt, Human
gcagcgccgggcgaccaagucc

SEQ ID NO: 248075 - RNA, 18 nt, Human
gcguuggcacacagggaa

SEQ ID NO: 248076 - RNA, 21 nt, Human
gcuccagcaggcagcacgggc

SEQ ID NO: 248077 - RNA, 20 nt, Human
gcucucggcagggccucugg

SEQ ID NO: 248078 - RNA, 21 nt, Human
ggacagcgggcauggggagga

SEQ ID NO: 248079 - RNA, 20 nt, Human
ggccaggagggcaccaggga

SEQ ID NO: 248080 - RNA, 26 nt, Human
ggccgaggaccgcgucugccguggac

SEQ ID NO: 248081 - RNA, 19 nt, Human
gggacagcgggcaugggga

SEQ ID NO: 248082 - RNA, 23 nt, Human
gggagcagcaggaagcugccagc

SEQ ID NO: 248083 - RNA, 20 nt, Human
gggaggcacccgucauccca

SEQ ID NO: 248084 - RNA, 21 nt, Human
gggcagcaccgggacaggccc

SEQ ID NO: 248085 - RNA, 18 nt, Human
gggcagcagggccaggag

SEQ ID NO: 248086 - RNA, 20 nt, Human
gggcagcagggccaggaggg

SEQ ID NO: 248087 - RNA, 19 nt, Human
gggcauggggaggagcugg

SEQ ID NO: 248088 - RNA, 21 nt, Human
gggccaggagggcaccaggga

SEQ ID NO: 248089 - RNA, 19 nt, Human
gggccuaaggucaaugcag

SEQ ID NO: 248090 - RNA, 22 nt, Human
gguggagcggcgcuuccucagc

SEQ ID NO: 248091 - RNA, 23 nt, Human
ggugggggcagccccagcugugu

SEQ ID NO: 248092 - RNA, 21 nt, Human
guggagcauucuggcagcgcc

SEQ ID NO: 248093 - RNA, 24 nt, Human
guggagggucuuucgggugggggc

SEQ ID NO: 248094 - RNA, 24 nt, Human
guggggacgggccgaggagggagc

SEQ ID NO: 248095 - RNA, 18 nt, Human
gugggggcagccccagcu

SEQ ID NO: 248096 - RNA, 21 nt, Human
gugggggcagccccagcugug

SEQ ID NO: 248097 - RNA, 19 nt, Human
gugugccccgaggccccgg

SEQ ID NO: 248098 - RNA, 24 nt, Human
uaggagcccucacugggcagcagg

SEQ ID NO: 248099 - RNA, 18 nt, Human
uccaccaggcagacagag

SEQ ID NO: 248100 - RNA, 21 nt, Human
ucccaguggcuccuggcaccc

SEQ ID NO: 248101 - RNA, 24 nt, Human
uccccacgcccacggcucccucca

SEQ ID NO: 248102 - RNA, 26 nt, Human
ucccucagacggccuuggggugccaa

SEQ ID NO: 248103 - RNA, 21 nt, Human
uccuggcuggggcagcaccgg

SEQ ID NO: 248104 - RNA, 24 nt, Human
uccuggcuggggcagcaccgggac

SEQ ID NO: 248105 - RNA, 20 nt, Human
uccuuggagggcagacggug

SEQ ID NO: 248106 - RNA, 21 nt, Human
uccuuggagggcagacggugg

SEQ ID NO: 248107 - RNA, 24 nt, Human
ucucaaggagcugggacagcgggc

SEQ ID NO: 248108 - RNA, 21 nt, Human
ucugcaggcggcuccagcagg

SEQ ID NO: 248109 - RNA, 21 nt, Human
ugaacccacccguaggagccc

SEQ ID NO: 248110 - RNA, 19 nt, Human
ugacagggagcagcaggaa

SEQ ID NO: 248111 - RNA, 21 nt, Human
ugacagggagcagcaggaagc

SEQ ID NO: 248112 - RNA, 24 nt, Human
ugcccuggcccuugagcccguccu

SEQ ID NO: 248113 - RNA, 21 nt, Human
ugccgggcaccugcuggcugc

SEQ ID NO: 248114 - RNA, 19 nt, Human
uggcuccuggcaccccugg

SEQ ID NO: 248115 - RNA, 26 nt, Human
ugggcuucgccgccgagccugguuca

SEQ ID NO: 248116 - RNA, 25 nt, Human
uggggaggagcuggccucgagccca

SEQ ID NO: 248117 - RNA, 20 nt, Human
ugggugucuccaaggcuggg

SEQ ID NO: 248118 - RNA, 21 nt, Human
ugucccaguggcuccuggcac

SEQ ID NO: 248119 - RNA, 19 nt, Human
uuuucagaagcgaaggcug

SEQ ID NO: 248120 - RNA, 20 nt, Human
aacacauucaguagcaaaga

SEQ ID NO: 248121 - RNA, 18 nt, Human
aagaaagcacacacacua

SEQ ID NO: 248122 - RNA, 20 nt, Human
aagcgccccagacgccgccg

SEQ ID NO: 248123 - RNA, 19 nt, Human
aaugauccuccugccucag

SEQ ID NO: 248124 - RNA, 19 nt, Human
acuggagugcaguggcaug

SEQ ID NO: 248125 - RNA, 24 nt, Human
agccuuccgagauuacaggcaugc

SEQ ID NO: 248126 - RNA, 24 nt, Human
agcucacggcaccgggcugcaacc

SEQ ID NO: 248127 - RNA, 20 nt, Human
agugcaguggcaugaucaug

SEQ ID NO: 248128 - RNA, 23 nt, Human
agugcaguggcaugaucauggcu

SEQ ID NO: 248129 - RNA, 24 nt, Human
agugcaguggcaugaucauggcuc

SEQ ID NO: 248130 - RNA, 24 nt, Human
auccagacuggagugcaguggcau

SEQ ID NO: 248131 - RNA, 24 nt, Human
augauccuccugccucagccuucc

SEQ ID NO: 248132 - RNA, 19 nt, Human
caaaacauguucaaacaca

SEQ ID NO: 248133 - RNA, 27 nt, Human
caaaugauccuccugccucagccuucc

SEQ ID NO: 248134 - RNA, 21 nt, Human
caacgagcccagcgccgcaac

SEQ ID NO: 248135 - RNA, 19 nt, Human
cacacacauuaagaaagca

SEQ ID NO: 248136 - RNA, 23 nt, Human
cagccuuccgagauuacaggcau

SEQ ID NO: 248137 - RNA, 21 nt, Human
caugcaccaccacgccuagcc

SEQ ID NO: 248138 - RNA, 23 nt, Human
caugcaccaccacgccuagccga

SEQ ID NO: 248139 - RNA, 20 nt, Human
cauggcucacugaagccuug

SEQ ID NO: 248140 - RNA, 19 nt, Human
ccagcgccgcaacgcccag

SEQ ID NO: 248141 - RNA, 18 nt, Human
ccccagacgccgccgcug

SEQ ID NO: 248142 - RNA, 24 nt, Human
ccccagacgccgccgcugcuuucc

SEQ ID NO: 248143 - RNA, 21 nt, Human
ccgccgcugcuuuccggccgc

SEQ ID NO: 248144 - RNA, 23 nt, Human
ccgccgcugcuuuccggccgccc

SEQ ID NO: 248145 - RNA, 19 nt, Human
ccgcugcuuuccggccgcc

SEQ ID NO: 248146 - RNA, 22 nt, Human
ccggccgcccccucggcuacag

SEQ ID NO: 248147 - RNA, 26 nt, Human
ccuccugccucagccuuccgagauua

SEQ ID NO: 248148 - RNA, 21 nt, Human
cgaaagcgccccagacgccgc

SEQ ID NO: 248149 - RNA, 21 nt, Human
cgagauuacaggcaugcacca

SEQ ID NO: 248150 - RNA, 21 nt, Human
cggcugcagcaacgagcccag

SEQ ID NO: 248151 - RNA, 24 nt, Human
cucaaaugauccuccugccucagc

SEQ ID NO: 248152 - RNA, 24 nt, Human
cucucucugucauccagacuggag

SEQ ID NO: 248153 - RNA, 23 nt, Human
cucucugucauccagacuggagu

SEQ ID NO: 248154 - RNA, 19 nt, Human
cugaagccuugaccuccug

SEQ ID NO: 248155 - RNA, 18 nt, Human
cugccucagccuuccgag

SEQ ID NO: 248156 - RNA, 22 nt, Human
cuuuccggccgcccccucggcu

SEQ ID NO: 248157 - RNA, 19 nt, Human
gaaaccucuucagcucacg

SEQ ID NO: 248158 - RNA, 23 nt, Human
gagauuacaggcaugcaccacca

SEQ ID NO: 248159 - RNA, 18 nt, Human
gagcaggguccggcugca

SEQ ID NO: 248160 - RNA, 21 nt, Human
gaugagcuugaaagcugcaga

SEQ ID NO: 248161 - RNA, 21 nt, Human
gcucacugaagccuugaccuc

SEQ ID NO: 248162 - RNA, 22 nt, Human
uacaggcaugcaccaccacgcc

SEQ ID NO: 248163 - RNA, 19 nt, Human
uagcaaggcugauagaaau

SEQ ID NO: 248164 - RNA, 18 nt, Human
uagcuuuagcaaggcuga

SEQ ID NO: 248165 - RNA, 24 nt, Human
ucacugaagccuugaccuccuggg

SEQ ID NO: 248166 - RNA, 21 nt, Human
ucagccuuccgagauuacagg

SEQ ID NO: 248167 - RNA, 21 nt, Human
uccugccucagccuuccgaga

SEQ ID NO: 248168 - RNA, 20 nt, Human
uccugggcccucaugagcuc

SEQ ID NO: 248169 - RNA, 24 nt, Human
ucucucucugucauccagacugga

SEQ ID NO: 248170 - RNA, 24 nt, Human
ucucucugucauccagacuggagu

SEQ ID NO: 248171 - RNA, 22 nt, Human
ugagacagggucucucucuguc

SEQ ID NO: 248172 - RNA, 24 nt, Human
ugagcucaaaugauccuccugccu

SEQ ID NO: 248173 - RNA, 19 nt, Human
ugagcuugaaagcugcaga

SEQ ID NO: 248174 - RNA, 23 nt, Human
ugcaguggcaugaucauggcuca

SEQ ID NO: 248175 - RNA, 24 nt, Human
ugccucagccuuccgagauuacag

SEQ ID NO: 248176 - RNA, 19 nt, Human
uggagugcaguggcaugau

SEQ ID NO: 248177 - RNA, 21 nt, Human
uggagugcaguggcaugauca

SEQ ID NO: 248178 - RNA, 24 nt, Human
uggagugcaguggcaugaucaugg

SEQ ID NO: 248179 - RNA, 22 nt, Human
uggcacacacauuaagaaagca

SEQ ID NO: 248180 - RNA, 21 nt, Human
uggcaugaucauggcucacug

SEQ ID NO: 248181 - RNA, 24 nt, Human
uggcucacugaagccuugaccucc

SEQ ID NO: 248182 - RNA, 24 nt, Human
ugggccccuagcuuuagcaaggcu

SEQ ID NO: 248183 - RNA, 21 nt, Human
ugucauccagacuggagugca

SEQ ID NO: 248184 - RNA, 20 nt, Human
uucaaacacauucaguagca

SEQ ID NO: 248185 - RNA, 22 nt, Human
uucaaacacauucaguagcaaa

SEQ ID NO: 248186 - RNA, 18 nt, Human
uugagacagggucucucu

SEQ ID NO: 248187 - RNA, 22 nt, Human
uugagacagggucucucucugu

SEQ ID NO: 248188 - RNA, 23 nt, Human
aaaaacuagcaaaauauuuguaa

SEQ ID NO: 248189 - RNA, 22 nt, Human
aaaaagacaaggagggccugag

SEQ ID NO: 248190 - RNA, 20 nt, Human
aaaacaagauauacaagguu

SEQ ID NO: 248191 - RNA, 20 nt, Human
aaaaggaacaauacuggaua

SEQ ID NO: 248192 - RNA, 18 nt, Human
aaaaucacuaaaaccacc

SEQ ID NO: 248193 - RNA, 18 nt, Human
aaaaugcaccacccuagu

SEQ ID NO: 248194 - RNA, 18 nt, Human
aaaauuggaagccacuua

SEQ ID NO: 248195 - RNA, 18 nt, Human
aaacagaaaggaaggcuc

SEQ ID NO: 248196 - RNA, 19 nt, Human
aaacagacacacacacaua

SEQ ID NO: 248197 - RNA, 28 nt, Human
aaacagacacacacacauacaguuaccu

SEQ ID NO: 248198 - RNA, 27 nt, Human
aaacaucguaagacuacacacaaaacu

SEQ ID NO: 248199 - RNA, 19 nt, Human
aaagcaauugggaagaagc

SEQ ID NO: 248200 - RNA, 18 nt, Human
aaauacauggcugaaaca

SEQ ID NO: 248201 - RNA, 21 nt, Human
aaauggaaaaauaaauccguc

SEQ ID NO: 248202 - RNA, 20 nt, Human
aacuuauuucaucaucccca

SEQ ID NO: 248203 - RNA, 23 nt, Human
aagcauuacagauuaauuaaacu

SEQ ID NO: 248204 - RNA, 21 nt, Human
acagcccagaaacagacacac

SEQ ID NO: 248205 - RNA, 20 nt, Human
acauuaucucauuaaaaagc

SEQ ID NO: 248206 - RNA, 19 nt, Human
accugaaacuugguaaaaa

SEQ ID NO: 248207 - RNA, 19 nt, Human
acuacuacuacuacuauua

SEQ ID NO: 248208 - RNA, 21 nt, Human
acuacuacuacuauuauugcu

SEQ ID NO: 248209 - RNA, 19 nt, Human
acuagaauagacagcccag

SEQ ID NO: 248210 - RNA, 22 nt, Human
agaaaaaaauggaaaaagggac

SEQ ID NO: 248211 - RNA, 18 nt, Human
agaaaaaaauggaaaaau

SEQ ID NO: 248212 - RNA, 25 nt, Human
agaaaagaaaaaauauuuaaaauau

SEQ ID NO: 248213 - RNA, 26 nt, Human
agaaagaaaacagaguucauagagaa

SEQ ID NO: 248214 - RNA, 22 nt, Human
agaagaacaaagcuggacuaca

SEQ ID NO: 248215 - RNA, 24 nt, Human
agaauagacagcccagaaacagac

SEQ ID NO: 248216 - RNA, 22 nt, Human
agaauguaaaaauaacuuaaaa

SEQ ID NO: 248217 - RNA, 20 nt, Human
agaauuugugaagcuguuug

SEQ ID NO: 248218 - RNA, 18 nt, Human
agacaaggagggccugag

SEQ ID NO: 248219 - RNA, 20 nt, Human
auagagcaucuaggacugcc

SEQ ID NO: 248220 - RNA, 23 nt, Human
augaaugaaucucacagacuuaa

SEQ ID NO: 248221 - RNA, 18 nt, Human
augauuccaacuauacaa

SEQ ID NO: 248222 - RNA, 20 nt, Human
auuaacaauagaauggauga

SEQ ID NO: 248223 - RNA, 21 nt, Human
caaagcaagguugauuuaauu

SEQ ID NO: 248224 - RNA, 22 nt, Human
caaaguaacuggcucuagauca

SEQ ID NO: 248225 - RNA, 20 nt, Human
caagcaucaacaaauagacu

SEQ ID NO: 248226 - RNA, 24 nt, Human
caagcaucaacaaauagacuagaa

SEQ ID NO: 248227 - RNA, 25 nt, Human
caaguggauaucuauucuaccagga

SEQ ID NO: 248228 - RNA, 24 nt, Human
cacaaaaagcacuaauuuugaaag

SEQ ID NO: 248229 - RNA, 21 nt, Human
cacauuaucucauuaaaaagc

SEQ ID NO: 248230 - RNA, 19 nt, Human
cagaagaagauacccaagu

SEQ ID NO: 248231 - RNA, 22 nt, Human
cagauuaaaaccauggggaaau

SEQ ID NO: 248232 - RNA, 23 nt, Human
cagcccagaaacagacacacaca

SEQ ID NO: 248233 - RNA, 19 nt, Human
caucaacaaauagacuaga

SEQ ID NO: 248234 - RNA, 21 nt, Human
ccacuuaagugccuauuaaca

SEQ ID NO: 248235 - RNA, 22 nt, Human
cccagaaacagacacacacaca

SEQ ID NO: 248236 - RNA, 18 nt, Human
ccugaaacuugguaaaaa

SEQ ID NO: 248237 - RNA, 19 nt, Human
ccuuggugugagaaaacuc

SEQ ID NO: 248238 - RNA, 19 nt, Human
cuacauggcaaugaaaagg

SEQ ID NO: 248239 - RNA, 19 nt, Human
cucaaguggauaucuauuc

SEQ ID NO: 248240 - RNA, 19 nt, Human
cucauuagaaagaaaacag

SEQ ID NO: 248241 - RNA, 20 nt, Human
cuccuggauagguagugaaa

SEQ ID NO: 248242 - RNA, 22 nt, Human
cugcugcugcuaacuacuacua

SEQ ID NO: 248243 - RNA, 21 nt, Human
cuuaaacaugacacaaaaagc

SEQ ID NO: 248244 - RNA, 21 nt, Human
gaauccaguuuagauaggccu

SEQ ID NO: 248245 - RNA, 23 nt, Human
gagggccugagugauaugacccu

SEQ ID NO: 248246 - RNA, 23 nt, Human
gauuccaacuauacaauguuuau

SEQ ID NO: 248247 - RNA, 21 nt, Human
gcugaaacacaaaguaacugg

SEQ ID NO: 248248 - RNA, 24 nt, Human
ggacauauucagaauguaaaaaua

SEQ ID NO: 248249 - RNA, 19 nt, Human
gggagcccucuacccaaac

SEQ ID NO: 248250 - RNA, 24 nt, Human
ggggcuucuagggagucaaaaaug

SEQ ID NO: 248251 - RNA, 23 nt, Human
guggguugcaguaaaaagacaag

SEQ ID NO: 248252 - RNA, 20 nt, Human
uaaaaucacuaaaaccacca

SEQ ID NO: 248253 - RNA, 23 nt, Human
uaaauucauacaaucacuuagga

SEQ ID NO: 248254 - RNA, 18 nt, Human
uaagugacagagcuguga

SEQ ID NO: 248255 - RNA, 18 nt, Human
uaauacacauuaaaaagg

SEQ ID NO: 248256 - RNA, 21 nt, Human
uaauucugaguaagcaagaca

SEQ ID NO: 248257 - RNA, 25 nt, Human
uacaaaauccagaggaaucuacaaa

SEQ ID NO: 248258 - RNA, 21 nt, Human
uacccaaacagaaaggaaggc

SEQ ID NO: 248259 - RNA, 18 nt, Human
uagaaagaaaacagaguu

SEQ ID NO: 248260 - RNA, 19 nt, Human
uagaaagaaaacagaguuc

SEQ ID NO: 248261 - RNA, 21 nt, Human
uagaaagaaaacagaguucau

SEQ ID NO: 248262 - RNA, 21 nt, Human
uagaauagacagcccagaaac

SEQ ID NO: 248263 - RNA, 20 nt, Human
uagaauggaugaacugagga

SEQ ID NO: 248264 - RNA, 26 nt, Human
uagaucauguagcaauuaguuaaaga

SEQ ID NO: 248265 - RNA, 20 nt, Human
uauagguauguaugugugug

SEQ ID NO: 248266 - RNA, 20 nt, Human
ucaaaaucaugaaaaaucuc

SEQ ID NO: 248267 - RNA, 22 nt, Human
uccccacaauuuucaugaaaua

SEQ ID NO: 248268 - RNA, 19 nt, Human
ucuauaccugcucuggugg

SEQ ID NO: 248269 - RNA, 20 nt, Human
ugaaacacaaaguaacuggc

SEQ ID NO: 248270 - RNA, 20 nt, Human
ugaaacacaaaguaacuggc

SEQ ID NO: 248271 - RNA, 18 nt, Human
ugaagaagaacaaagcug

SEQ ID NO: 248272 - RNA, 18 nt, Human
ugacaugaaugaaucuca

SEQ ID NO: 248273 - RNA, 24 nt, Human
ugacuuuuuacaagcacauagagc

SEQ ID NO: 248274 - RNA, 23 nt, Human
ugaguaagcaagacauacaacau

SEQ ID NO: 248275 - RNA, 21 nt, Human
ugaguauauagguauguaugu

SEQ ID NO: 248276 - RNA, 18 nt, Human
ugcaccauguccaccaaa

SEQ ID NO: 248277 - RNA, 21 nt, Human
ugcucugguggucucuguauu

SEQ ID NO: 248278 - RNA, 27 nt, Human
ugcuuuccucauccucuaccaguucca

SEQ ID NO: 248279 - RNA, 21 nt, Human
uggggaaauacagauuaaaaa

SEQ ID NO: 248280 - RNA, 27 nt, Human
uguacacaugacaugaaugaaucucac

SEQ ID NO: 248281 - RNA, 21 nt, Human
ugugugagaauuugugaagcu

SEQ ID NO: 248282 - RNA, 19 nt, Human
uguuauguauaauaucaca

SEQ ID NO: 248283 - RNA, 21 nt, Human
uguucguggguucucuuccuc

SEQ ID NO: 248284 - RNA, 25 nt, Human
uuacaagcacauagagcaucuagga

SEQ ID NO: 248285 - RNA, 18 nt, Human
uuacuagauuuaagaaau

SEQ ID NO: 248286 - RNA, 21 nt, Human
uuaggaaaacugguaauaucu

SEQ ID NO: 248287 - RNA, 21 nt, Human
uucaaaaucaugaaaaauauc

SEQ ID NO: 248288 - RNA, 25 nt, Human
uucguggguucucuuccccuaaggg

SEQ ID NO: 248289 - RNA, 22 nt, Human
uuguucaucaaaauucaacauu

SEQ ID NO: 248290 - RNA, 23 nt, Human
uuuacuacacacuuuaaaggugu

SEQ ID NO: 248291 - RNA, 21 nt, Human
uuuauaaacagacgaaauuac

SEQ ID NO: 248292 - RNA, 22 nt, Human
uuugacacaagcaucaacaaau

SEQ ID NO: 248293 - RNA, 19 nt, Human
uuuucauacugcagcaagu

SEQ ID NO: 248294 - RNA, 20 nt, Human
aaaaaaaaaagcugaacuga

SEQ ID NO: 248295 - RNA, 22 nt, Human
aaaaaaagcugaacugaugaug

SEQ ID NO: 248296 - RNA, 20 nt, Human
aaaacaaaacaaaacaaaaa

SEQ ID NO: 248297 - RNA, 22 nt, Human
aaaacaagucuauaaacugaaa

SEQ ID NO: 248298 - RNA, 23 nt, Human
aaaauacuuuuccccacucccug

SEQ ID NO: 248299 - RNA, 19 nt, Human
aaacaaaacaaaacaaaaa

SEQ ID NO: 248300 - RNA, 21 nt, Human
aaacaaauugcagcccaagac

SEQ ID NO: 248301 - RNA, 18 nt, Human
aaacuugcaguaaacuug

SEQ ID NO: 248302 - RNA, 18 nt, Human
aaagaacaggauccuaca

SEQ ID NO: 248303 - RNA, 22 nt, Human
aaagaggcccuugcaccgggcu

SEQ ID NO: 248304 - RNA, 23 nt, Human
aaagcugaacugaugaugaaaau

SEQ ID NO: 248305 - RNA, 18 nt, Human
aaauguacaaaguguaua

SEQ ID NO: 248306 - RNA, 25 nt, Human
aaauguccccucaaaauacuuuucc

SEQ ID NO: 248307 - RNA, 19 nt, Human
aacaaaaaugacugugcau

SEQ ID NO: 248308 - RNA, 20 nt, Human
aacaaugacugacauucuua

SEQ ID NO: 248309 - RNA, 20 nt, Human
aacauccaaaccucaaaaaa

SEQ ID NO: 248310 - RNA, 22 nt, Human
aaccaaaaaaaaaagcugaacu

SEQ ID NO: 248311 - RNA, 22 nt, Human
aaccaacaaacccaaccccccc

SEQ ID NO: 248312 - RNA, 23 nt, Human
aaccaacaaacccaaccccccca

SEQ ID NO: 248313 - RNA, 20 nt, Human
aacuacaagcagaaaguaag

SEQ ID NO: 248314 - RNA, 26 nt, Human
aagaaagcaaagcaacauggugggca

SEQ ID NO: 248315 - RNA, 21 nt, Human
aagcaacuacaagcagaaagu

SEQ ID NO: 248316 - RNA, 20 nt, Human
aagcaaggcaaaagcagaga

SEQ ID NO: 248317 - RNA, 22 nt, Human
aagcacacuguccuuuccucuu

SEQ ID NO: 248318 - RNA, 27 nt, Human
aagcauaaaacaaauugcagcccaaga

SEQ ID NO: 248319 - RNA, 21 nt, Human
aagcaucucucucaagcauaa

SEQ ID NO: 248320 - RNA, 22 nt, Human
aagcaugaaaacguggcagacc

SEQ ID NO: 248321 - RNA, 21 nt, Human
aagggguauggagugcuaacu

SEQ ID NO: 248322 - RNA, 19 nt, Human
aauaacaugugaagucacc

SEQ ID NO: 248323 - RNA, 26 nt, Human
aaucaugguuacaccauagucugguu

SEQ ID NO: 248324 - RNA, 21 nt, Human
acaagcuguccacaagaaagc

SEQ ID NO: 248325 - RNA, 18 nt, Human
acauaauaguaaaaccaa

SEQ ID NO: 248326 - RNA, 24 nt, Human
acauuucccauuuucauauuuugg

SEQ ID NO: 248327 - RNA, 23 nt, Human
accaaaaaaaaaagcugaacuga

SEQ ID NO: 248328 - RNA, 22 nt, Human
accaacaaacccaaccccccca

SEQ ID NO: 248329 - RNA, 25 nt, Human
accacgucuuacaaucuauuacauu

SEQ ID NO: 248330 - RNA, 20 nt, Human
acuguaaaguuaaauuggcc

SEQ ID NO: 248331 - RNA, 20 nt, Human
agaagauaucuuacuuuuuc

SEQ ID NO: 248332 - RNA, 23 nt, Human
agaagugcaaaaagucaaccuuc

SEQ ID NO: 248333 - RNA, 20 nt, Human
agacaagaacuaacaaugac

SEQ ID NO: 248334 - RNA, 18 nt, Human
agagcaaaaucgagaaaa

SEQ ID NO: 248335 - RNA, 22 nt, Human
agcaaacuuuucuuuuaacacu

SEQ ID NO: 248336 - RNA, 18 nt, Human
agcaacaaccaaaaaaaa

SEQ ID NO: 248337 - RNA, 20 nt, Human
agcaauuaaaaaacaaucac

SEQ ID NO: 248338 - RNA, 21 nt, Human
agcacauuuguccuuucagca

SEQ ID NO: 248339 - RNA, 22 nt, Human
agcaggaggaagccggagcccg

SEQ ID NO: 248340 - RNA, 22 nt, Human
agcauaaaacaaauugcagccc

SEQ ID NO: 248341 - RNA, 23 nt, Human
agccggagcccgcgcgggcgccg

SEQ ID NO: 248342 - RNA, 18 nt, Human
aggaggaagccggagccc

SEQ ID NO: 248343 - RNA, 24 nt, Human
aggcagauuuggccccauggaguu

SEQ ID NO: 248344 - RNA, 22 nt, Human
agucuuuugacuuuugacagag

SEQ ID NO: 248345 - RNA, 26 nt, Human
agugaaaccaacaaacccaacccccc

SEQ ID NO: 248346 - RNA, 21 nt, Human
aguugaaaauuaaaaccauga

SEQ ID NO: 248347 - RNA, 22 nt, Human
aguuugguggugcaaucgguau

SEQ ID NO: 248348 - RNA, 19 nt, Human
auaaaacaaauugcagccc

SEQ ID NO: 248349 - RNA, 24 nt, Human
auacagaagugcaaaaagucaacc

SEQ ID NO: 248350 - RNA, 24 nt, Human
auacuuuuccccacucccugcuuu

SEQ ID NO: 248351 - RNA, 22 nt, Human
auccuuuacuagcugcaacauc

SEQ ID NO: 248352 - RNA, 21 nt, Human
auggcaauuuuaaauacaagg

SEQ ID NO: 248353 - RNA, 24 nt, Human
augguacuuaaagccaugaugugc

SEQ ID NO: 248354 - RNA, 23 nt, Human
caaaaaagagcaacaaccaaaaa

SEQ ID NO: 248355 - RNA, 19 nt, Human
caaaacaaaacaaaaauca

SEQ ID NO: 248356 - RNA, 22 nt, Human
caaaacaaaacaaaacaaaaau

SEQ ID NO: 248357 - RNA, 20 nt, Human
caaacccaacccccccaaaa

SEQ ID NO: 248358 - RNA, 22 nt, Human
caaaccucaaaaaaaggaauuc

SEQ ID NO: 248359 - RNA, 24 nt, Human
caacaaaaagucccuuguucuauu

SEQ ID NO: 248360 - RNA, 18 nt, Human
caacaaacccaacccccc

SEQ ID NO: 248361 - RNA, 21 nt, Human
caacaaacccaacccccccaa

SEQ ID NO: 248362 - RNA, 19 nt, Human
caaccaaaaaaaaaagcug

SEQ ID NO: 248363 - RNA, 23 nt, Human
caacccccccaaaaaagagcaac

SEQ ID NO: 248364 - RNA, 25 nt, Human
caacccccccaaaaaagagcaacaa

SEQ ID NO: 248365 - RNA, 22 nt, Human
caauuuuuagaacugcugaaca

SEQ ID NO: 248366 - RNA, 21 nt, Human
cacuaaagcagccuagggcaa

SEQ ID NO: 248367 - RNA, 28 nt, Human
cacucccugcuuuaaaaguacauggaaa

SEQ ID NO: 248368 - RNA, 18 nt, Human
cagagcaaaaauauccuu

SEQ ID NO: 248369 - RNA, 23 nt, Human
cagaucccucccucaccacgucu

SEQ ID NO: 248370 - RNA, 21 nt, Human
cagcccaagacaaaauacaua

SEQ ID NO: 248371 - RNA, 21 nt, Human
cagguuucucucuuuugacua

SEQ ID NO: 248372 - RNA, 21 nt, Human
caguaaacuuggaaguaugga

SEQ ID NO: 248373 - RNA, 22 nt, Human
caguuuagagcaaaaucgagaa

SEQ ID NO: 248374 - RNA, 20 nt, Human
cauaaaaacuugcaguaaac

SEQ ID NO: 248375 - RNA, 24 nt, Human
cauaaaacaaauugcagcccaaga

SEQ ID NO: 248376 - RNA, 26 nt, Human
cauaaucaacccucaagaguuugcac

SEQ ID NO: 248377 - RNA, 23 nt, Human
cauugguauggguuccaacccgu

SEQ ID NO: 248378 - RNA, 20 nt, Human
cauuuguccuuucagcagau

SEQ ID NO: 248379 - RNA, 18 nt, Human
ccaaaaaagagcaacaac

SEQ ID NO: 248380 - RNA, 20 nt, Human
ccaaaaaagagcaacaacca

SEQ ID NO: 248381 - RNA, 21 nt, Human
ccaaaaaagagcaacaaccaa

SEQ ID NO: 248382 - RNA, 24 nt, Human
ccaaaaaagagcaacaaccaaaaa

SEQ ID NO: 248383 - RNA, 24 nt, Human
ccaacaaacccaacccccccaaaa

SEQ ID NO: 248384 - RNA, 26 nt, Human
ccaacccccccaaaaaagagcaacaa

SEQ ID NO: 248385 - RNA, 22 nt, Human
ccaauacauaauagaaucaugg

SEQ ID NO: 248386 - RNA, 18 nt, Human
ccacaagaaagcaaagca

SEQ ID NO: 248387 - RNA, 19 nt, Human
cccaaaaaagagcaacaac

SEQ ID NO: 248388 - RNA, 20 nt, Human
cccacccaauuacuagguua

SEQ ID NO: 248389 - RNA, 24 nt, Human
cccacucccugcuuuaaaaguaca

SEQ ID NO: 248390 - RNA, 18 nt, Human
cccagccccaccaggaag

SEQ ID NO: 248391 - RNA, 18 nt, Human
cccagcggcgccgagagc

SEQ ID NO: 248392 - RNA, 18 nt, Human
cccccaaaaaagagcaac

SEQ ID NO: 248393 - RNA, 24 nt, Human
cccccaaaaaagagcaacaaccaa

SEQ ID NO: 248394 - RNA, 21 nt, Human
cccccgcccgcccagccccac

SEQ ID NO: 248395 - RNA, 22 nt, Human
cccccgcccgcccagccccacc

SEQ ID NO: 248396 - RNA, 24 nt, Human
ccccgcccgcccagccccaccagg

SEQ ID NO: 248397 - RNA, 21 nt, Human
cccgcccagccccaccaggaa

SEQ ID NO: 248398 - RNA, 20 nt, Human
cccgcgacggaaaauggaac

SEQ ID NO: 248399 - RNA, 23 nt, Human
cccucaaaauacuuuuccccacu

SEQ ID NO: 248400 - RNA, 22 nt, Human
cccuucgacaccgaauuuccaa

SEQ ID NO: 248401 - RNA, 20 nt, Human
ccgcccgcccagccccacca

SEQ ID NO: 248402 - RNA, 19 nt, Human
ccucccgcgcuuccccggg

SEQ ID NO: 248403 - RNA, 20 nt, Human
ccugguaucagccuugugcu

SEQ ID NO: 248404 - RNA, 20 nt, Human
ccuugcaccgggcuuugcaa

SEQ ID NO: 248405 - RNA, 23 nt, Human
cgauagcaacaacuuaacuucuu

SEQ ID NO: 248406 - RNA, 19 nt, Human
cgccguggauccccucggc

SEQ ID NO: 248407 - RNA, 19 nt, Human
cgcgggcgccguggauccc

SEQ ID NO: 248408 - RNA, 28 nt, Human
cggccccucccccgcccgcccagccccc

SEQ ID NO: 248409 - RNA, 24 nt, Human
cgucaauaucaaggaaaagaucuc

SEQ ID NO: 248410 - RNA, 24 nt, Human
cgugcagaccggacgcccucccgc

SEQ ID NO: 248411 - RNA, 21 nt, Human
cguggauccccucggccuccc

SEQ ID NO: 248412 - RNA, 21 nt, Human
cguuccaacaugcuaaauugc

SEQ ID NO: 248413 - RNA, 23 nt, Human
cucaccacgucuuacaaucuauu

SEQ ID NO: 248414 - RNA, 24 nt, Human
cucccgcgcuuccccgggccacag

SEQ ID NO: 248415 - RNA, 21 nt, Human
cucucaguaaccccuucccag

SEQ ID NO: 248416 - RNA, 22 nt, Human
cugaaaacaauaacacugaaga

SEQ ID NO: 248417 - RNA, 23 nt, Human
cugaaaacaauaacacugaagaa

SEQ ID NO: 248418 - RNA, 18 nt, Human
cuuggcacauucaucucu

SEQ ID NO: 248419 - RNA, 19 nt, Human
cuuuccgccggcgcccucc

SEQ ID NO: 248420 - RNA, 28 nt, Human
cuuugguuucaaaaaaaaaaaaaaagaa

SEQ ID NO: 248421 - RNA, 27 nt, Human
gaaauuggcagaaacugaucugaauaa

SEQ ID NO: 248422 - RNA, 22 nt, Human
gaacaaaacaaaacaaaacaaa

SEQ ID NO: 248423 - RNA, 21 nt, Human
gaacagagcaaaaauauccuu

SEQ ID NO: 248424 - RNA, 22 nt, Human
gaccuggccccuacuucagcaa

SEQ ID NO: 248425 - RNA, 21 nt, Human
gagaaaaugauuuuuuuuuuc

SEQ ID NO: 248426 - RNA, 25 nt, Human
gcaaacuuuucuuuuaacacuaaag

SEQ ID NO: 248427 - RNA, 18 nt, Human
gcaaagcauuuauagucu

SEQ ID NO: 248428 - RNA, 21 nt, Human
gcaagcaaggcaaaagcagag

SEQ ID NO: 248429 - RNA, 22 nt, Human
gcaagcaaggcaaaagcagaga

SEQ ID NO: 248430 - RNA, 26 nt, Human
gcaauuuuuagaacugcugaacagag

SEQ ID NO: 248431 - RNA, 20 nt, Human
gcagugaaaagacuguugca

SEQ ID NO: 248432 - RNA, 25 nt, Human
gcguaucuuuccagcugaaaaaauc

SEQ ID NO: 248433 - RNA, 22 nt, Human
gcucucaguaaccccuucccag

SEQ ID NO: 248434 - RNA, 20 nt, Human
ggaaaagaucucccacuaga

SEQ ID NO: 248435 - RNA, 22 nt, Human
ggccccucccccgcccgcccag

SEQ ID NO: 248436 - RNA, 19 nt, Human
ggguuugaaaggauggcgu

SEQ ID NO: 248437 - RNA, 23 nt, Human
gucccuuguucuauuuauugauu

SEQ ID NO: 248438 - RNA, 22 nt, Human
gugaaaccaacaaacccaaccc

SEQ ID NO: 248439 - RNA, 20 nt, Human
guuaacaugcaauaugugga

SEQ ID NO: 248440 - RNA, 23 nt, Human
guucauuuugaaagaggcccuug

SEQ ID NO: 248441 - RNA, 21 nt, Human
guuuuuauucaaaauaagauc

SEQ ID NO: 248442 - RNA, 24 nt, Human
uaaaaaacaaucacauaacaacua

SEQ ID NO: 248443 - RNA, 18 nt, Human
uaaaacaagucuauaaac

SEQ ID NO: 248444 - RNA, 19 nt, Human
uaaaaucaacacaucaguc

SEQ ID NO: 248445 - RNA, 21 nt, Human
uaaccagcuggagugaaggcu

SEQ ID NO: 248446 - RNA, 21 nt, Human
uaacuagguaugcaucuuuga

SEQ ID NO: 248447 - RNA, 22 nt, Human
uaagaucuuacuauuauacagg

SEQ ID NO: 248448 - RNA, 18 nt, Human
uaaggaauaucugaucca

SEQ ID NO: 248449 - RNA, 20 nt, Human
uaagugcaacauuuuuaacc

SEQ ID NO: 248450 - RNA, 24 nt, Human
uaauguaacuaacuacaauaacau

SEQ ID NO: 248451 - RNA, 21 nt, Human
uacaaucaguaaaaucaacac

SEQ ID NO: 248452 - RNA, 20 nt, Human
uacagaagugcaaaaaguca

SEQ ID NO: 248453 - RNA, 22 nt, Human
uacagacguaccaauacauaau

SEQ ID NO: 248454 - RNA, 19 nt, Human
uacagcaaagucaacuacu

SEQ ID NO: 248455 - RNA, 18 nt, Human
uacaguauaguaugcaua

SEQ ID NO: 248456 - RNA, 21 nt, Human
uacauaauaguaaaaccaagc

SEQ ID NO: 248457 - RNA, 18 nt, Human
uacuagcugcaacaucca

SEQ ID NO: 248458 - RNA, 24 nt, Human
uagaagcgguuccaagcagcagag

SEQ ID NO: 248459 - RNA, 23 nt, Human
uagaaguaccugcuauuuuuggu

SEQ ID NO: 248460 - RNA, 24 nt, Human
uagagcaaaaucgagaaaaugauu

SEQ ID NO: 248461 - RNA, 24 nt, Human
uagcuacagugugcuguuugguuu

SEQ ID NO: 248462 - RNA, 22 nt, Human
uagcugcaacauccaaaccuca

SEQ ID NO: 248463 - RNA, 21 nt, Human
uagcuggcagcaagcaaggca

SEQ ID NO: 248464 - RNA, 24 nt, Human
uagcuggcagcaagcaaggcaaaa

SEQ ID NO: 248465 - RNA, 18 nt, Human
uaguaccaaccucucaca

SEQ ID NO: 248466 - RNA, 27 nt, Human
uauauuagaaagcaucucucucaagca

SEQ ID NO: 248467 - RNA, 22 nt, Human
uauuagaaagcaucucucucaa

SEQ ID NO: 248468 - RNA, 22 nt, Human
ucaacccucaagaguuugcaca

SEQ ID NO: 248469 - RNA, 25 nt, Human
ucaaccuucucccuagacguuccaa

SEQ ID NO: 248470 - RNA, 23 nt, Human
ucagcaaaguugucugaaaggga

SEQ ID NO: 248471 - RNA, 21 nt, Human
ucagcagaugaaagugguagg

SEQ ID NO: 248472 - RNA, 18 nt, Human
uccacaagaaagcaaagc

SEQ ID NO: 248473 - RNA, 20 nt, Human
ucccccgcccgcccagcccc

SEQ ID NO: 248474 - RNA, 21 nt, Human
uccuggcaaacuacaagcugu

SEQ ID NO: 248475 - RNA, 23 nt, Human
ucuccucacagcugaauuugcaa

SEQ ID NO: 248476 - RNA, 22 nt, Human
ucucuugauuauaaguagaaau

SEQ ID NO: 248477 - RNA, 21 nt, Human
ucuggcuuccgcugcugcugc

SEQ ID NO: 248478 - RNA, 18 nt, Human
ugaaaacaauaacacuga

SEQ ID NO: 248479 - RNA, 24 nt, Human
ugaaaacuagacaagaacuaacaa

SEQ ID NO: 248480 - RNA, 23 nt, Human
ugaaaauguccccucaaaauacu

SEQ ID NO: 248481 - RNA, 18 nt, Human
ugaaaccaacaaacccaa

SEQ ID NO: 248482 - RNA, 21 nt, Human
ugaaaccaacaaacccaaccc

SEQ ID NO: 248483 - RNA, 18 nt, Human
ugaaagggaaucuccuca

SEQ ID NO: 248484 - RNA, 23 nt, Human
ugaaauggauacaguagaaaaua

SEQ ID NO: 248485 - RNA, 20 nt, Human
ugaccuggccccuacuucag

SEQ ID NO: 248486 - RNA, 21 nt, Human
ugcaagcaugaaaacguggca

SEQ ID NO: 248487 - RNA, 21 nt, Human
ugcaauggaguuugguggugc

SEQ ID NO: 248488 - RNA, 19 nt, Human
ugcauaacucugugcuaga

SEQ ID NO: 248489 - RNA, 21 nt, Human
ugcugcgcggccccucccccg

SEQ ID NO: 248490 - RNA, 20 nt, Human
ugcuguuugguuugccuguu

SEQ ID NO: 248491 - RNA, 20 nt, Human
uggaguuugguggugcaauc

SEQ ID NO: 248492 - RNA, 22 nt, Human
uggaguuugguggugcaaucgg

SEQ ID NO: 248493 - RNA, 23 nt, Human
ugggggugucugggcuagaggug

SEQ ID NO: 248494 - RNA, 23 nt, Human
ugguaaaaucuaauaaaacaagu

SEQ ID NO: 248495 - RNA, 18 nt, Human
ugguauggguuccaaccc

SEQ ID NO: 248496 - RNA, 22 nt, Human
ugguuucaaaaaaaaaaaaaaa

SEQ ID NO: 248497 - RNA, 24 nt, Human
uguacaaaguguauaggcaacagu

SEQ ID NO: 248498 - RNA, 22 nt, Human
uguccacaagaaagcaaagcaa

SEQ ID NO: 248499 - RNA, 23 nt, Human
ugucugggcuagagguggagggu

SEQ ID NO: 248500 - RNA, 19 nt, Human
uguuacugugucucagaaa

SEQ ID NO: 248501 - RNA, 21 nt, Human
uguuauacaguauaguaugca

SEQ ID NO: 248502 - RNA, 18 nt, Human
uuaaaaguagggccuggu

SEQ ID NO: 248503 - RNA, 21 nt, Human
uuacaaacaaaauaaaucauc

SEQ ID NO: 248504 - RNA, 24 nt, Human
uuagaaagcaucucucucaagcau

SEQ ID NO: 248505 - RNA, 20 nt, Human
uuagagaaauacuaggauug

SEQ ID NO: 248506 - RNA, 25 nt, Human
uuaguacuagcaaauaugcaacaaa

SEQ ID NO: 248507 - RNA, 23 nt, Human
uuauaacaaggccugauacucag

SEQ ID NO: 248508 - RNA, 22 nt, Human
uucaaaaaaaaaaaaaaagaau

SEQ ID NO: 248509 - RNA, 24 nt, Human
uucaaagagguuuugguuuuuaga

SEQ ID NO: 248510 - RNA, 19 nt, Human
uucaacuuuccgccggcgc

SEQ ID NO: 248511 - RNA, 24 nt, Human
uucaccugcugaaagaacaggauc

SEQ ID NO: 248512 - RNA, 22 nt, Human
uucauuuugaaagaggcccuug

SEQ ID NO: 248513 - RNA, 24 nt, Human
uugauuauaaguagaaaugggggu

SEQ ID NO: 248514 - RNA, 27 nt, Human
uugcaguaaacuuggaaguauggaaag

SEQ ID NO: 248515 - RNA, 25 nt, Human
uugguaucuuccaucucaugcguuc

SEQ ID NO: 248516 - RNA, 21 nt, Human
uugguuucaaaaaaaaaaaaa

SEQ ID NO: 248517 - RNA, 21 nt, Human
uuuagagcaaaaucgagaaaa

SEQ ID NO: 248518 - RNA, 24 nt, Human
uuuguuauuuguaaaccuugaaag

SEQ ID NO: 248519 - RNA, 23 nt, Human
aaaaaaaacaaaggaagcuugga

SEQ ID NO: 248520 - RNA, 19 nt, Human
aaacgaaaacguccuaagc

SEQ ID NO: 248521 - RNA, 23 nt, Human
aaacggaacaaggaaccagagcu

SEQ ID NO: 248522 - RNA, 24 nt, Human
aaacggaacaaggaaccagagcuc

SEQ ID NO: 248523 - RNA, 25 nt, Human
aaagcucccacauguaguaagccac

SEQ ID NO: 248524 - RNA, 18 nt, Human
aacagcugcccagcccgc

SEQ ID NO: 248525 - RNA, 24 nt, Human
aagaaaguccaaggguggaggggg

SEQ ID NO: 248526 - RNA, 22 nt, Human
aagcacacaccaccagagaccc

SEQ ID NO: 248527 - RNA, 23 nt, Human
aagcgcaagggugccgcagccac

SEQ ID NO: 248528 - RNA, 18 nt, Human
acaccaccagagacccug

SEQ ID NO: 248529 - RNA, 24 nt, Human
accagcaaaagcgcaagggugccg

SEQ ID NO: 248530 - RNA, 20 nt, Human
acccaguguugaaccccagc

SEQ ID NO: 248531 - RNA, 20 nt, Human
acucauuuaucccucccccc

SEQ ID NO: 248532 - RNA, 18 nt, Human
acugucuaauccuguuag

SEQ ID NO: 248533 - RNA, 22 nt, Human
acuuuaggaggugagagaagga

SEQ ID NO: 248534 - RNA, 19 nt, Human
agcacugacuccaggaaaa

SEQ ID NO: 248535 - RNA, 19 nt, Human
agcagcacugacuccagga

SEQ ID NO: 248536 - RNA, 22 nt, Human
agccacggcgaaaagaaagucc

SEQ ID NO: 248537 - RNA, 18 nt, Human
aggaaaaaaaaacaaagg

SEQ ID NO: 248538 - RNA, 22 nt, Human
aggaaaaaacgagcauaaccca

SEQ ID NO: 248539 - RNA, 23 nt, Human
aggaaaaaacgagcauaacccag

SEQ ID NO: 248540 - RNA, 21 nt, Human
augguccaugguacuugcugu

SEQ ID NO: 248541 - RNA, 18 nt, Human
auuccugagccacacccc

SEQ ID NO: 248542 - RNA, 24 nt, Human
caaaagcgcaagggugccgcagcc

SEQ ID NO: 248543 - RNA, 20 nt, Human
caacaugaagcuagcagcac

SEQ ID NO: 248544 - RNA, 21 nt, Human
caagcacacaccaccagagac

SEQ ID NO: 248545 - RNA, 21 nt, Human
caccccugucaccgccaaaga

SEQ ID NO: 248546 - RNA, 18 nt, Human
caccuggcccccugaaga

SEQ ID NO: 248547 - RNA, 25 nt, Human
caccuggcccccugaagacccacgu

SEQ ID NO: 248548 - RNA, 26 nt, Human
cacucuugggcucauaugcauucucc

SEQ ID NO: 248549 - RNA, 19 nt, Human
cagagccccgcuugggcgc

SEQ ID NO: 248550 - RNA, 21 nt, Human
cagcaaaagcgcaagggugcc

SEQ ID NO: 248551 - RNA, 20 nt, Human
cagcacggaacgagaccuuu

SEQ ID NO: 248552 - RNA, 23 nt, Human
caggaaaaaacgagcauaaccca

SEQ ID NO: 248553 - RNA, 24 nt, Human
cagucaucaaguccgcaagcacac

SEQ ID NO: 248554 - RNA, 22 nt, Human
cauaacccaguguugaacccca

SEQ ID NO: 248555 - RNA, 23 nt, Human
cauagacacucauuuaucccucc

SEQ ID NO: 248556 - RNA, 19 nt, Human
caugucacauaccaaaagc

SEQ ID NO: 248557 - RNA, 21 nt, Human
caugucacauaccaaaagcuc

SEQ ID NO: 248558 - RNA, 21 nt, Human
cauuaggggaggggucaucug

SEQ ID NO: 248559 - RNA, 18 nt, Human
ccaaggguggagggguga

SEQ ID NO: 248560 - RNA, 20 nt, Human
ccagagccccgcuugggcgc

SEQ ID NO: 248561 - RNA, 21 nt, Human
ccagguacuuggauccgugcc

SEQ ID NO: 248562 - RNA, 21 nt, Human
ccaguucuuccucuaauggcu

SEQ ID NO: 248563 - RNA, 22 nt, Human
ccccaaagacgcuugaaccuuu

SEQ ID NO: 248564 - RNA, 23 nt, Human
ccccagcgugugggcugcagagg

SEQ ID NO: 248565 - RNA, 21 nt, Human
ccccugaagacccacgugcgu

SEQ ID NO: 248566 - RNA, 24 nt, Human
ccccugaagacccacgugcgucug

SEQ ID NO: 248567 - RNA, 18 nt, Human
cccgcaugucacauacca

SEQ ID NO: 248568 - RNA, 21 nt, Human
ccuaagcagccacucaggccc

SEQ ID NO: 248569 - RNA, 20 nt, Human
ccuccauggcagugaccagc

SEQ ID NO: 248570 - RNA, 21 nt, Human
ccuccccccuuccacuucuca

SEQ ID NO: 248571 - RNA, 19 nt, Human
ccugaauggauuggcucuu

SEQ ID NO: 248572 - RNA, 23 nt, Human
ccugagccacaccccggccacca

SEQ ID NO: 248573 - RNA, 21 nt, Human
cgcacggggguccccaaagac

SEQ ID NO: 248574 - RNA, 20 nt, Human
cgcagccacggcgaaaagaa

SEQ ID NO: 248575 - RNA, 23 nt, Human
cgugccucugggagggucucuuc

SEQ ID NO: 248576 - RNA, 21 nt, Human
cuaaaacuccucuacuccuca

SEQ ID NO: 248577 - RNA, 18 nt, Human
cuaagcagccacucaggc

SEQ ID NO: 248578 - RNA, 18 nt, Human
cucaaggcggauuuaaau

SEQ ID NO: 248579 - RNA, 24 nt, Human
cucaaggcggauuuaaauugagga

SEQ ID NO: 248580 - RNA, 21 nt, Human
cucauuuaucccuccccccuu

SEQ ID NO: 248581 - RNA, 20 nt, Human
cuccccccuuccacuucuca

SEQ ID NO: 248582 - RNA, 24 nt, Human
cuccccccuuccacuucucagacc

SEQ ID NO: 248583 - RNA, 18 nt, Human
cugggggcacauugcggg

SEQ ID NO: 248584 - RNA, 21 nt, Human
cuuccacuucucagaccacag

SEQ ID NO: 248585 - RNA, 24 nt, Human
gaaaaaacgagcauaacccagugu

SEQ ID NO: 248586 - RNA, 23 nt, Human
gaagcgcccgauggagucaagga

SEQ ID NO: 248587 - RNA, 20 nt, Human
gaaggacaggaaaaaaaaac

SEQ ID NO: 248588 - RNA, 20 nt, Human
gacccugagaauguggcucu

SEQ ID NO: 248589 - RNA, 26 nt, Human
gagaaggacaggaaaaaaaaacaaag

SEQ ID NO: 248590 - RNA, 25 nt, Human
gagcucgccuguuuccagccagagu

SEQ ID NO: 248591 - RNA, 21 nt, Human
gcaaaagcgcaagggugccgg

SEQ ID NO: 248592 - RNA, 20 nt, Human
gcaccccugucaccgccaaa

SEQ ID NO: 248593 - RNA, 21 nt, Human
gcacugacuccaggaaaaaac

SEQ ID NO: 248594 - RNA, 23 nt, Human
gcagagcaacaugaagcuagcag

SEQ ID NO: 248595 - RNA, 20 nt, Human
gccccacuccaccuuccaaa

SEQ ID NO: 248596 - RNA, 23 nt, Human
gcuuugauucauagacacucauu

SEQ ID NO: 248597 - RNA, 19 nt, Human
ggcugcagaggcaacauca

SEQ ID NO: 248598 - RNA, 20 nt, Human
ggcugcagaggcaacaucag

SEQ ID NO: 248599 - RNA, 21 nt, Human
gggcagccacggccuggggag

SEQ ID NO: 248600 - RNA, 20 nt, Human
gguaacaggggcaaguggga

SEQ ID NO: 248601 - RNA, 22 nt, Human
gguacuugcuguggccagguac

SEQ ID NO: 248602 - RNA, 22 nt, Human
ggugagagaaggacaggaaaaa

SEQ ID NO: 248603 - RNA, 24 nt, Human
uaacagcugcccagcccgcauguc

SEQ ID NO: 248604 - RNA, 19 nt, Human
uaagaagcugaggacagga

SEQ ID NO: 248605 - RNA, 20 nt, Human
uaagcagccacucaggccca

SEQ ID NO: 248606 - RNA, 19 nt, Human
uagacacucauuuaucccu

SEQ ID NO: 248607 - RNA, 21 nt, Human
uagcagcacugacuccaggaa

SEQ ID NO: 248608 - RNA, 23 nt, Human
uaggaaaaaugaagucuacuuua

SEQ ID NO: 248609 - RNA, 24 nt, Human
uaguaagccacuccuugacugucu

SEQ ID NO: 248610 - RNA, 24 nt, Human
ucaaaagucuuccucgaccucaag

SEQ ID NO: 248611 - RNA, 22 nt, Human
ucagagcucaccuugccagagc

SEQ ID NO: 248612 - RNA, 26 nt, Human
ucauuuaucccuccccccuuccacuu

SEQ ID NO: 248613 - RNA, 23 nt, Human
uccaggaaaaaacgagcauaacc

SEQ ID NO: 248614 - RNA, 19 nt, Human
uccaugguacuugcugugg

SEQ ID NO: 248615 - RNA, 21 nt, Human
ucccaagccccacuccaccuu

SEQ ID NO: 248616 - RNA, 22 nt, Human
ucccaagccccacuccaccuuc

SEQ ID NO: 248617 - RNA, 24 nt, Human
ucccuugugaggaaaagagggggu

SEQ ID NO: 248618 - RNA, 22 nt, Human
uccgcaagcacacaccaccaga

SEQ ID NO: 248619 - RNA, 24 nt, Human
uccgcaagcacacaccaccagggu

SEQ ID NO: 248620 - RNA, 24 nt, Human
uccuaagcagccacucaggcccac

SEQ ID NO: 248621 - RNA, 20 nt, Human
ucuaagacucuguaugcaaa

SEQ ID NO: 248622 - RNA, 22 nt, Human
ucuacuuuaggaggugagagaa

SEQ ID NO: 248623 - RNA, 19 nt, Human
ucucugugcugccccacgu

SEQ ID NO: 248624 - RNA, 18 nt, Human
ucugcagcugugugccuc

SEQ ID NO: 248625 - RNA, 22 nt, Human
ugaagcuagcagcacugacucc

SEQ ID NO: 248626 - RNA, 21 nt, Human
ugaauggauuggcucuucaga

SEQ ID NO: 248627 - RNA, 20 nt, Human
ugaggaaaagagggggugag

SEQ ID NO: 248628 - RNA, 19 nt, Human
ugaggaguuuguucaaaag

SEQ ID NO: 248629 - RNA, 27 nt, Human
ugauucauagacacucauuuaucccuc

SEQ ID NO: 248630 - RNA, 20 nt, Human
ugccagagccccgcuugggc

SEQ ID NO: 248631 - RNA, 18 nt, Human
ugcccgugucucugugcc

SEQ ID NO: 248632 - RNA, 22 nt, Human
uggaaaacggaacaaggaacca

SEQ ID NO: 248633 - RNA, 21 nt, Human
uggacucuaacagcugcccag

SEQ ID NO: 248634 - RNA, 24 nt, Human
uggacucuaacagcugcccagccc

SEQ ID NO: 248635 - RNA, 22 nt, Human
uggcccccucucugugcugccc

SEQ ID NO: 248636 - RNA, 18 nt, Human
uggccggaaauugccggu

SEQ ID NO: 248637 - RNA, 22 nt, Human
ugggaggaagccaugccuggca

SEQ ID NO: 248638 - RNA, 22 nt, Human
ugggagggucucuucugugacg

SEQ ID NO: 248639 - RNA, 19 nt, Human
uggggugugugggcagcca

SEQ ID NO: 248640 - RNA, 22 nt, Human
uggggugugugggcagccacgg

SEQ ID NO: 248641 - RNA, 19 nt, Human
ugucgcagagcaacaugaa

SEQ ID NO: 248642 - RNA, 26 nt, Human
uguggccagguacuuggauccgugcc

SEQ ID NO: 248643 - RNA, 24 nt, Human
uguugcaauuggaaaacggaacaa

SEQ ID NO: 248644 - RNA, 19 nt, Human
uuacauuccugagccacac

SEQ ID NO: 248645 - RNA, 22 nt, Human
uucauagacacucauuuauccc

SEQ ID NO: 248646 - RNA, 19 nt, Human
uucccaagccccacuccac

SEQ ID NO: 248647 - RNA, 27 nt, Human
uucccaagccccacuccaccuuccaaa

SEQ ID NO: 248648 - RNA, 28 nt, Human
uucccaagccccacuccaccuuccaaaa

SEQ ID NO: 248649 - RNA, 22 nt, Human
uuuuuauccacauuugcuuuug

SEQ ID NO: 248650 - RNA, 21 nt, Human
aaaccugcagcuggaaacugg

SEQ ID NO: 248651 - RNA, 18 nt, Human
aacugcauuccacugaca

SEQ ID NO: 248652 - RNA, 23 nt, Human
aaggcucucucuggcccucacgg

SEQ ID NO: 248653 - RNA, 23 nt, Human
aagucccuccugacgggaucccc

SEQ ID NO: 248654 - RNA, 18 nt, Human
acaagucuuuaaagugac

SEQ ID NO: 248655 - RNA, 23 nt, Human
agaagaccccagacagccuuucc

SEQ ID NO: 248656 - RNA, 23 nt, Human
aggccgugacgacugaguccugu

SEQ ID NO: 248657 - RNA, 20 nt, Human
auagaaaauagccuuuaaca

SEQ ID NO: 248658 - RNA, 21 nt, Human
auggaauaguaaaaaaacugc

SEQ ID NO: 248659 - RNA, 22 nt, Human
caaaccugcagcuggaaacugg

SEQ ID NO: 248660 - RNA, 19 nt, Human
cacagcucggcucacccac

SEQ ID NO: 248661 - RNA, 23 nt, Human
cacagcucggcucacccaccagc

SEQ ID NO: 248662 - RNA, 24 nt, Human
cacuaagucccuccugacgggauc

SEQ ID NO: 248663 - RNA, 24 nt, Human
cagcugccggcgggaagucucacu

SEQ ID NO: 248664 - RNA, 18 nt, Human
caucacaggagggcaggc

SEQ ID NO: 248665 - RNA, 18 nt, Human
ccacagaaccaacgucca

SEQ ID NO: 248666 - RNA, 18 nt, Human
cccacagcugggagccuc

SEQ ID NO: 248667 - RNA, 19 nt, Human
cccacagcugggagccuca

SEQ ID NO: 248668 - RNA, 20 nt, Human
ccccagacagccuuuccagu

SEQ ID NO: 248669 - RNA, 19 nt, Human
ccgggauaacggcgccucc

SEQ ID NO: 248670 - RNA, 22 nt, Human
ccucacggucagccaggcugcc

SEQ ID NO: 248671 - RNA, 19 nt, Human
ccuccgcggcgaacacgcc

SEQ ID NO: 248672 - RNA, 27 nt, Human
ccuccugacgggauccacaggaauugg

SEQ ID NO: 248673 - RNA, 19 nt, Human
cgggauccacaggaaucuu

SEQ ID NO: 248674 - RNA, 24 nt, Human
cucacggucagccaggcugccuug

SEQ ID NO: 248675 - RNA, 19 nt, Human
cuuuuaaaccagccgccac

SEQ ID NO: 248676 - RNA, 19 nt, Human
gaaggcucucucuggcccu

SEQ ID NO: 248677 - RNA, 23 nt, Human
gagccaaucugcgccgccgggag

SEQ ID NO: 248678 - RNA, 19 nt, Human
gauuugugcauguuuccuu

SEQ ID NO: 248679 - RNA, 21 nt, Human
gcccacagcugggagccucag

SEQ ID NO: 248680 - RNA, 22 nt, Human
gcccacagcugggagccucagc

SEQ ID NO: 248681 - RNA, 21 nt, Human
gccuuuugugguucagccuga

SEQ ID NO: 248682 - RNA, 18 nt, Human
ggaauaguaaaaaaacug

SEQ ID NO: 248683 - RNA, 19 nt, Human
ggcagagccacuaaguccc

SEQ ID NO: 248684 - RNA, 21 nt, Human
ggccgugacgacugaguccug

SEQ ID NO: 248685 - RNA, 22 nt, Human
guacauccuuccccugcaguca

SEQ ID NO: 248686 - RNA, 20 nt, Human
uagaacagacucuaacaaac

SEQ ID NO: 248687 - RNA, 22 nt, Human
uaguaaaaaaacugcauuccac

SEQ ID NO: 248688 - RNA, 19 nt, Human
ucaaaucucagucuguacu

SEQ ID NO: 248689 - RNA, 21 nt, Human
ucaaaucucagucuguacugu

SEQ ID NO: 248690 - RNA, 22 nt, Human
ucacacuuuuuucuucuugauu

SEQ ID NO: 248691 - RNA, 19 nt, Human
ucacaggagggcaggccca

SEQ ID NO: 248692 - RNA, 23 nt, Human
ucaccgacaauggugaaaucaag

SEQ ID NO: 248693 - RNA, 20 nt, Human
uccacugacaaaaaaaauag

SEQ ID NO: 248694 - RNA, 19 nt, Human
uccaucuuggaaauaaggc

SEQ ID NO: 248695 - RNA, 24 nt, Human
uccauuuguaccacagaaccaacg

SEQ ID NO: 248696 - RNA, 18 nt, Human
ucccauggccuuuugugg

SEQ ID NO: 248697 - RNA, 24 nt, Human
ucccauggccuuuugugguucagc

SEQ ID NO: 248698 - RNA, 23 nt, Human
uccgugaaggcucucucuggccc

SEQ ID NO: 248699 - RNA, 20 nt, Human
uccuguacuccauuuguacc

SEQ ID NO: 248700 - RNA, 20 nt, Human
ucuuucuccgcuucuucucc

SEQ ID NO: 248701 - RNA, 22 nt, Human
ugcauuccacugacaaaaaaaa

SEQ ID NO: 248702 - RNA, 20 nt, Human
uggaauaguaaaaaaacugc

SEQ ID NO: 248703 - RNA, 19 nt, Human
uuggaaauaaggcuucucu

SEQ ID NO: 248704 - RNA, 22 nt, Human
uuuaaagugacuuuucccaaca

SEQ ID NO: 248705 - RNA, 22 nt, Human
uuuccaguucucccgagucuuu

SEQ ID NO: 248706 - RNA, 18 nt, Human
aacagcugaccgcgcgcg

SEQ ID NO: 248707 - RNA, 22 nt, Human
caccgccaacagcugaccgcgc

SEQ ID NO: 248708 - RNA, 22 nt, Human
cacuuuauauuucauaccaagu

SEQ ID NO: 248709 - RNA, 23 nt, Human
ccacauagcuguauacuguaacu

SEQ ID NO: 248710 - RNA, 22 nt, Human
ccuuacagccccagcauccgcu

SEQ ID NO: 248711 - RNA, 24 nt, Human
cgccaacagcugaccgcgcgcgcc

SEQ ID NO: 248712 - RNA, 20 nt, Human
cggcagcggcggcagaggag

SEQ ID NO: 248713 - RNA, 21 nt, Human
cuuacagccccagcauccgcu

SEQ ID NO: 248714 - RNA, 19 nt, Human
gagccccggcguccuccuc

SEQ ID NO: 248715 - RNA, 20 nt, Human
gcagcggcggcagaggaggg

SEQ ID NO: 248716 - RNA, 23 nt, Human
gcggcagcggcggcagaggaggg

SEQ ID NO: 248717 - RNA, 18 nt, Human
gggaaggcgagccccggc

SEQ ID NO: 248718 - RNA, 22 nt, Human
aacugcccagggucacacagga

SEQ ID NO: 248719 - RNA, 19 nt, Human
aagcaggaaggagucguug

SEQ ID NO: 248720 - RNA, 20 nt, Human
acaauaucaccaccucccuc

SEQ ID NO: 248721 - RNA, 25 nt, Human
aggaaggagucguuggaagguuacc

SEQ ID NO: 248722 - RNA, 22 nt, Human
aucaccaccucccucugcccag

SEQ ID NO: 248723 - RNA, 18 nt, Human
cacaauaucaccaccucc

SEQ ID NO: 248724 - RNA, 18 nt, Human
caccaccucccucugccc

SEQ ID NO: 248725 - RNA, 26 nt, Human
caggaaccagaccacacaaccuucag

SEQ ID NO: 248726 - RNA, 22 nt, Human
cagguccccacaguucuucccc

SEQ ID NO: 248727 - RNA, 25 nt, Human
caucugggcacccccagaucugccc

SEQ ID NO: 248728 - RNA, 22 nt, Human
cauggugcugccagggggccuu

SEQ ID NO: 248729 - RNA, 19 nt, Human
ccacaguucuuccccucca

SEQ ID NO: 248730 - RNA, 21 nt, Human
ccagaccacacaauaucacca

SEQ ID NO: 248731 - RNA, 24 nt, Human
ccagaccacacaauaucaccaccu

SEQ ID NO: 248732 - RNA, 21 nt, Human
ccagaucugcccucacacccu

SEQ ID NO: 248733 - RNA, 19 nt, Human
cccacaguucuuccccucc

SEQ ID NO: 248734 - RNA, 20 nt, Human
cccacaguucuuccccucca

SEQ ID NO: 248735 - RNA, 20 nt, Human
ccccacaguucuuccccucc

SEQ ID NO: 248736 - RNA, 23 nt, Human
ccuccagguguccugcuuaguuc

SEQ ID NO: 248737 - RNA, 18 nt, Human
ccucuuugacaaacgggg

SEQ ID NO: 248738 - RNA, 23 nt, Human
cuccuuccaucugggcaccccca

SEQ ID NO: 248739 - RNA, 21 nt, Human
gcccagggucacacaggaacc

SEQ ID NO: 248740 - RNA, 20 nt, Human
ggccuccagguccccacagu

SEQ ID NO: 248741 - RNA, 19 nt, Human
ucacacaggaaccagacca

SEQ ID NO: 248742 - RNA, 20 nt, Human
ucacacaggaaccagaccac

SEQ ID NO: 248743 - RNA, 19 nt, Human
ucccccaugccugccuccu

SEQ ID NO: 248744 - RNA, 23 nt, Human
ugacaaacggggaccagggaggu

SEQ ID NO: 248745 - RNA, 18 nt, Human
ugcccagggucacacagg

SEQ ID NO: 248746 - RNA, 23 nt, Human
ugggugucccccaugccugccuc

SEQ ID NO: 248747 - RNA, 23 nt, Human
uugggugucccccaugccugccu

SEQ ID NO: 248748 - RNA, 20 nt, Human
aaaauguucaguaucuccuc

SEQ ID NO: 248749 - RNA, 25 nt, Human
aaaugcuggaggcacacacaggucu

SEQ ID NO: 248750 - RNA, 18 nt, Human
aaccaaagccuugcugua

SEQ ID NO: 248751 - RNA, 19 nt, Human
aagcagaaacgaggcucug

SEQ ID NO: 248752 - RNA, 20 nt, Human
aagcagaaacgaggcucugc

SEQ ID NO: 248753 - RNA, 25 nt, Human
aagcaggaggaaagaggagaaacga

SEQ ID NO: 248754 - RNA, 23 nt, Human
aagcaggaggaaagaggagggac

SEQ ID NO: 248755 - RNA, 28 nt, Human
acagaaaaaaacaguaaaugguccuuca

SEQ ID NO: 248756 - RNA, 22 nt, Human
acuccauuguccaagugccgag

SEQ ID NO: 248757 - RNA, 18 nt, Human
agaaaucccagaaucaag

SEQ ID NO: 248758 - RNA, 24 nt, Human
agagaagagguaaaacugaaaaag

SEQ ID NO: 248759 - RNA, 19 nt, Human
agagcuacaaaugcaccca

SEQ ID NO: 248760 - RNA, 19 nt, Human
aggaaagaggagaaacgag

SEQ ID NO: 248761 - RNA, 26 nt, Human
agguagagacagguccagagcuacaa

SEQ ID NO: 248762 - RNA, 18 nt, Human
aguguagaacugagagag

SEQ ID NO: 248763 - RNA, 22 nt, Human
aucaaaaagauucccagcucua

SEQ ID NO: 248764 - RNA, 26 nt, Human
augaagcaggaggaaagaggagaaac

SEQ ID NO: 248765 - RNA, 21 nt, Human
caaaaagauucccagcucuaa

SEQ ID NO: 248766 - RNA, 20 nt, Human
cacaaugucaccauggccag

SEQ ID NO: 248767 - RNA, 18 nt, Human
caccauguaucugggggc

SEQ ID NO: 248768 - RNA, 19 nt, Human
cagaaacgaggcucugcug

SEQ ID NO: 248769 - RNA, 20 nt, Human
cagaaacgaggcucugcuga

SEQ ID NO: 248770 - RNA, 21 nt, Human
cagaacagcaauuauguagug

SEQ ID NO: 248771 - RNA, 19 nt, Human
cagcaucuaccaaaaagag

SEQ ID NO: 248772 - RNA, 26 nt, Human
cagcaucuaccaaaaagaggauacaa

SEQ ID NO: 248773 - RNA, 22 nt, Human
caggcucaauauccacugcuug

SEQ ID NO: 248774 - RNA, 20 nt, Human
caugacaacaggagcuaagu

SEQ ID NO: 248775 - RNA, 18 nt, Human
caugcucugaaaauagac

SEQ ID NO: 248776 - RNA, 25 nt, Human
cauggccagucaccccaaggguuga

SEQ ID NO: 248777 - RNA, 22 nt, Human
ccaggacaguugcgaagcgcaa

SEQ ID NO: 248778 - RNA, 25 nt, Human
ccaguggccugcugcaguuuacuuc

SEQ ID NO: 248779 - RNA, 19 nt, Human
cccaggagggaagagcggg

SEQ ID NO: 248780 - RNA, 23 nt, Human
ccccgucaugacaacaggagcug

SEQ ID NO: 248781 - RNA, 23 nt, Human
cccuucccagcccugccuccaaa

SEQ ID NO: 248782 - RNA, 18 nt, Human
ccgccucuaucuuaaagu

SEQ ID NO: 248783 - RNA, 21 nt, Human
ccuauaacucccagagaucac

SEQ ID NO: 248784 - RNA, 22 nt, Human
ccucacucuguccccgucauga

SEQ ID NO: 248785 - RNA, 19 nt, Human
cgaccuaccugccagccuu

SEQ ID NO: 248786 - RNA, 20 nt, Human
cucuaugcagaaaccuccuc

SEQ ID NO: 248787 - RNA, 22 nt, Human
cucuggugcuacagaaaaaaac

SEQ ID NO: 248788 - RNA, 20 nt, Human
cuggugcuacagaaaaaaac

SEQ ID NO: 248789 - RNA, 24 nt, Human
cuuaagaguuggacuucacaggcu

SEQ ID NO: 248790 - RNA, 23 nt, Human
cuucccaugggcagaacuccggu

SEQ ID NO: 248791 - RNA, 21 nt, Human
cuucccuuuccuccuccuccc

SEQ ID NO: 248792 - RNA, 25 nt, Human
gaucaccucuuauggccgccucuau

SEQ ID NO: 248793 - RNA, 23 nt, Human
gcacagccgccagaccagaagag

SEQ ID NO: 248794 - RNA, 19 nt, Human
gcagaaaccuccucaacuu

SEQ ID NO: 248795 - RNA, 22 nt, Human
gcagaaaccuccucaacuuuaa

SEQ ID NO: 248796 - RNA, 18 nt, Human
gcccaggagggaagagcg

SEQ ID NO: 248797 - RNA, 19 nt, Human
gcccuggggcgggaagugc

SEQ ID NO: 248798 - RNA, 18 nt, Human
gcgcucccuucccagccc

SEQ ID NO: 248799 - RNA, 20 nt, Human
gcucccuucccagcccugcc

SEQ ID NO: 248800 - RNA, 25 nt, Human
gcugaaagcagaaacgaggcucugg

SEQ ID NO: 248801 - RNA, 23 nt, Human
ggagcuuaagaguuggacuucac

SEQ ID NO: 248802 - RNA, 20 nt, Human
ggagggggagagugagugcu

SEQ ID NO: 248803 - RNA, 22 nt, Human
gggcaccucuggauacagucca

SEQ ID NO: 248804 - RNA, 20 nt, Human
gguagagacagguccagagc

SEQ ID NO: 248805 - RNA, 25 nt, Human
guaacaccugucuacgcucuuccca

SEQ ID NO: 248806 - RNA, 19 nt, Human
uaacucccagagaucaccu

SEQ ID NO: 248807 - RNA, 18 nt, Human
uaauaaggcuccacugag

SEQ ID NO: 248808 - RNA, 19 nt, Human
uacaaaugcacccaugugg

SEQ ID NO: 248809 - RNA, 20 nt, Human
uaccaaaaagaggauacaau

SEQ ID NO: 248810 - RNA, 23 nt, Human
uauggacauaaagacucuaugca

SEQ ID NO: 248811 - RNA, 19 nt, Human
ucacccaggacaguugcga

SEQ ID NO: 248812 - RNA, 23 nt, Human
ucagcaguccuuuuaaaugcugg

SEQ ID NO: 248813 - RNA, 27 nt, Human
ucagcaguccuuuuaaaugcuggaggc

SEQ ID NO: 248814 - RNA, 20 nt, Human
ucaguaucuccucagugucu

SEQ ID NO: 248815 - RNA, 20 nt, Human
ucagugucuuguccuuaggu

SEQ ID NO: 248816 - RNA, 24 nt, Human
uccaaaaugaagauugaaggaagu

SEQ ID NO: 248817 - RNA, 24 nt, Human
uccacugagagggagaaaucccag

SEQ ID NO: 248818 - RNA, 21 nt, Human
ucccagaaucaagagagcgcu

SEQ ID NO: 248819 - RNA, 23 nt, Human
ucccaugaccuauaacucccaga

SEQ ID NO: 248820 - RNA, 19 nt, Human
ugaaagcagaaacgaggcu

SEQ ID NO: 248821 - RNA, 24 nt, Human
ugagacccgggacuuggaaaccaa

SEQ ID NO: 248822 - RNA, 23 nt, Human
ugagagagaagagguaaaacugg

SEQ ID NO: 248823 - RNA, 19 nt, Human
ugauucagcagaacagcaa

SEQ ID NO: 248824 - RNA, 18 nt, Human
ugcuaaccaucaccaugu

SEQ ID NO: 248825 - RNA, 18 nt, Human
ugcuacagaaaaaaacag

SEQ ID NO: 248826 - RNA, 20 nt, Human
ugcuggaggcacacacaggu

SEQ ID NO: 248827 - RNA, 26 nt, Human
ugcuuggucccuucugccacauuuua

SEQ ID NO: 248828 - RNA, 21 nt, Human
uggaagagauuugauucagca

SEQ ID NO: 248829 - RNA, 21 nt, Human
uggucuguuuguaacuuuagu

SEQ ID NO: 248830 - RNA, 20 nt, Human
uguaguaaacaaaucagcaa

SEQ ID NO: 248831 - RNA, 23 nt, Human
uucaaguguaucaguguagaacu

SEQ ID NO: 248832 - RNA, 23 nt, Human
uucaguaucuccucagugucuug

SEQ ID NO: 248833 - RNA, 21 nt, Human
uuucacggacgagccauugcu

SEQ ID NO: 248834 - RNA, 20 nt, Human
uuucauagggaacuuuggau

SEQ ID NO: 248835 - RNA, 21 nt, Human
uuuguagucagcuauggcaau

SEQ ID NO: 248836 - RNA, 18 nt, Human
aacugcucuuuaugagac

SEQ ID NO: 248837 - RNA, 22 nt, Human
acagaggcagcugcgucccaca

SEQ ID NO: 248838 - RNA, 23 nt, Human
ccacuccgugacuccccaguaca

SEQ ID NO: 248839 - RNA, 19 nt, Human
cccccagaaaagcuggagg

SEQ ID NO: 248840 - RNA, 19 nt, Human
ccuggagcccggccacucc

SEQ ID NO: 248841 - RNA, 23 nt, Human
gcacuuccucuuuuugguggaga

SEQ ID NO: 248842 - RNA, 18 nt, Human
gcaugauucuccaauaug

SEQ ID NO: 248843 - RNA, 21 nt, Human
ggcacuuccucuuuuuggugg

SEQ ID NO: 248844 - RNA, 23 nt, Human
ggcagcugcgucccacacgccaa

SEQ ID NO: 248845 - RNA, 21 nt, Human
uacgaagccucgugacccccg

SEQ ID NO: 248846 - RNA, 21 nt, Human
uaguaaaacugcucuuuauga

SEQ ID NO: 248847 - RNA, 21 nt, Human
ugagacccccagaaaagcugg

SEQ ID NO: 248848 - RNA, 22 nt, Human
ugagacccccagaaaagcugga

SEQ ID NO: 248849 - RNA, 19 nt, Human
uggagagagaagacacuac

SEQ ID NO: 248850 - RNA, 18 nt, Human
uggaggcacuuccucuuu

SEQ ID NO: 248851 - RNA, 21 nt, Human
uuuaugagacccccagaaaag

SEQ ID NO: 248852 - RNA, 24 nt, Human
aaauaagcccgcuaaaauaucacc

SEQ ID NO: 248853 - RNA, 21 nt, Human
aagcauaaccagcaaaacaau

SEQ ID NO: 248854 - RNA, 24 nt, Human
aagcauaaccagcaaaacaaucau

SEQ ID NO: 248855 - RNA, 22 nt, Human
acagaaaacauccuuuauucca

SEQ ID NO: 248856 - RNA, 23 nt, Human
agggcacuuuaugcaacugaagu

SEQ ID NO: 248857 - RNA, 22 nt, Human
agugugagggcacuuuaugcaa

SEQ ID NO: 248858 - RNA, 19 nt, Human
caagcauaaccagcaaaac

SEQ ID NO: 248859 - RNA, 22 nt, Human
cagcagugugagggcacuuuau

SEQ ID NO: 248860 - RNA, 22 nt, Human
cccgcuaaaauaucaccaagca

SEQ ID NO: 248861 - RNA, 20 nt, Human
cgcuuuaugggugguaaaac

SEQ ID NO: 248862 - RNA, 24 nt, Human
cuacuacauguguuaauuuucagu

SEQ ID NO: 248863 - RNA, 22 nt, Human
cucuaagaaaauuuaaaaggaa

SEQ ID NO: 248864 - RNA, 24 nt, Human
cugagaacaaauucuggagaugaa

SEQ ID NO: 248865 - RNA, 22 nt, Human
cuggagccggugcuuuccccug

SEQ ID NO: 248866 - RNA, 22 nt, Human
uaaaauuuuaaggcuacuacau

SEQ ID NO: 248867 - RNA, 18 nt, Human
uaagguagaaaaguacaa

SEQ ID NO: 248868 - RNA, 19 nt, Human
uacagaacugaguuuacag

SEQ ID NO: 248869 - RNA, 21 nt, Human
uaucaccaagcauaaccagca

SEQ ID NO: 248870 - RNA, 19 nt, Human
ucccuggcuggggcggaag

SEQ ID NO: 248871 - RNA, 20 nt, Human
ucccuggcuggggcggaagc

SEQ ID NO: 248872 - RNA, 20 nt, Human
ugaauggugguaauggcugc

SEQ ID NO: 248873 - RNA, 18 nt, Human
ugggucagaaaggauaac

SEQ ID NO: 248874 - RNA, 21 nt, Human
uuaaauaaauauccucacuga

SEQ ID NO: 248875 - RNA, 24 nt, Human
uucaguacauguccaacagaaaac

SEQ ID NO: 248876 - RNA, 19 nt, Human
uugaaugguauaguuucag

SEQ ID NO: 248877 - RNA, 19 nt, Human
uuuacagauuacagaacuu

SEQ ID NO: 248878 - RNA, 21 nt, Human
aagcugccguggugcuuccau

SEQ ID NO: 248879 - RNA, 21 nt, Human
aaggcacaccgauugcauuug

SEQ ID NO: 248880 - RNA, 18 nt, Human
agaaaauagcagagcaca

SEQ ID NO: 248881 - RNA, 23 nt, Human
agaagaaauaauuuucaagucca

SEQ ID NO: 248882 - RNA, 21 nt, Human
agaaucuuucaagcacaauau

SEQ ID NO: 248883 - RNA, 18 nt, Human
aggaaagagcuacuugcc

SEQ ID NO: 248884 - RNA, 20 nt, Human
aggcaggaaagagcuacuug

SEQ ID NO: 248885 - RNA, 19 nt, Human
caaaauuuacucaugcccc

SEQ ID NO: 248886 - RNA, 19 nt, Human
caaaguagagaagaaauaa

SEQ ID NO: 248887 - RNA, 22 nt, Human
cacaaguuaaaacaaugggcac

SEQ ID NO: 248888 - RNA, 20 nt, Human
cacaguggcagcaauguugg

SEQ ID NO: 248889 - RNA, 23 nt, Human
cagaaaauagcagagcacaacua

SEQ ID NO: 248890 - RNA, 25 nt, Human
cauuaaccugaaaacaacaucugca

SEQ ID NO: 248891 - RNA, 21 nt, Human
cguguccauuaaccugaaaac

SEQ ID NO: 248892 - RNA, 18 nt, Human
cugggcuuuguauuguuu

SEQ ID NO: 248893 - RNA, 23 nt, Human
cuugaccuuagccauuuugcagc

SEQ ID NO: 248894 - RNA, 18 nt, Human
gagaagcaggcaggaaag

SEQ ID NO: 248895 - RNA, 22 nt, Human
gagcugagaagcaggcaggaaa

SEQ ID NO: 248896 - RNA, 18 nt, Human
guguccauuaaccugaaa

SEQ ID NO: 248897 - RNA, 18 nt, Human
guguccauuaaccugaaa

SEQ ID NO: 248898 - RNA, 19 nt, Human
uaaaaagacagcguaccau

SEQ ID NO: 248899 - RNA, 19 nt, Human
uaaaaagacagcguaccau

SEQ ID NO: 248900 - RNA, 22 nt, Human
uaaaaagacagcguaccauaau

SEQ ID NO: 248901 - RNA, 21 nt, Human
uaaaacaaugggcacaaaagc

SEQ ID NO: 248902 - RNA, 24 nt, Human
uaaccugaaaacaacaucugcauc

SEQ ID NO: 248903 - RNA, 18 nt, Human
uaauccaaggcacaccga

SEQ ID NO: 248904 - RNA, 24 nt, Human
uacaugauuuuaaaaagacagcgu

SEQ ID NO: 248905 - RNA, 25 nt, Human
ugaaaaaaagaauuacaacaugaaa

SEQ ID NO: 248906 - RNA, 21 nt, Human
ugaaaacaacaucugcaucau

SEQ ID NO: 248907 - RNA, 19 nt, Human
ugaaauacgagcugcuucu

SEQ ID NO: 248908 - RNA, 21 nt, Human
ugacuuaauucauuaauaaac

SEQ ID NO: 248909 - RNA, 18 nt, Human
ugagaagcaggcaggaaa

SEQ ID NO: 248910 - RNA, 21 nt, Human
ugagaagcaggcaggaaagag

SEQ ID NO: 248911 - RNA, 18 nt, Human
ugagaugagaaucuuuca

SEQ ID NO: 248912 - RNA, 20 nt, Human
ugccccgaaaagaauuucug

SEQ ID NO: 248913 - RNA, 22 nt, Human
ugccccgaaaagaauuucuggg

SEQ ID NO: 248914 - RNA, 19 nt, Human
ugggaggaaaaaaaaaaaa

SEQ ID NO: 248915 - RNA, 23 nt, Human
uuuaaaaagacagcguaccauaa

SEQ ID NO: 248916 - RNA, 24 nt, Human
uuuguaaacuacucucaugaaaau

SEQ ID NO: 248917 - RNA, 20 nt, Human
aaaaacuaauguaaauucga

SEQ ID NO: 248918 - RNA, 24 nt, Human
aaaaacuacauaaagugcuuuuag

SEQ ID NO: 248919 - RNA, 20 nt, Human
aaacacuagaggacugcauu

SEQ ID NO: 248920 - RNA, 20 nt, Human
aaacagaaaguuagggaaac

SEQ ID NO: 248921 - RNA, 21 nt, Human
aaacagaagucaaaaaguagu

SEQ ID NO: 248922 - RNA, 19 nt, Human
aaacuugcaacaagguuug

SEQ ID NO: 248923 - RNA, 21 nt, Human
aaagauaccaguccaaggaaa

SEQ ID NO: 248924 - RNA, 22 nt, Human
aaagauuuauuuuuuuuucuca

SEQ ID NO: 248925 - RNA, 23 nt, Human
aaaguccuccuccauagcuuccc

SEQ ID NO: 248926 - RNA, 21 nt, Human
aaagugcuuuuagguccuuag

SEQ ID NO: 248927 - RNA, 22 nt, Human
aacacagcucaccucuuucugu

SEQ ID NO: 248928 - RNA, 19 nt, Human
aagaaaauuuaaaccugca

SEQ ID NO: 248929 - RNA, 21 nt, Human
aagaaucauggaaaccaagcc

SEQ ID NO: 248930 - RNA, 20 nt, Human
aagcggcuuaugaucaagaa

SEQ ID NO: 248931 - RNA, 21 nt, Human
acaucuaugcacuuguuucca

SEQ ID NO: 248932 - RNA, 24 nt, Human
accaccugccuccuccucccccua

SEQ ID NO: 248933 - RNA, 22 nt, Human
acucuagaacugaacagaacaa

SEQ ID NO: 248934 - RNA, 21 nt, Human
acugaaauccaaagaugccag

SEQ ID NO: 248935 - RNA, 23 nt, Human
acugccccaagcccaaaauauca

SEQ ID NO: 248936 - RNA, 20 nt, Human
agaaaaaccuaucuaaggaa

SEQ ID NO: 248937 - RNA, 19 nt, Human
agaacugaacagaacaaag

SEQ ID NO: 248938 - RNA, 20 nt, Human
agaggacugcauguuuuucc

SEQ ID NO: 248939 - RNA, 22 nt, Human
agaugggcaggcagggcaguuc

SEQ ID NO: 248940 - RNA, 22 nt, Human
agcacccaugguauuaccaccu

SEQ ID NO: 248941 - RNA, 24 nt, Human
agcccucacugccccaagcccaaa

SEQ ID NO: 248942 - RNA, 22 nt, Human
aggaaaagggacuuccucccac

SEQ ID NO: 248943 - RNA, 20 nt, Human
aggaaguuacagcuuggaga

SEQ ID NO: 248944 - RNA, 23 nt, Human
aggaaguuacagcuuggagucca

SEQ ID NO: 248945 - RNA, 25 nt, Human
agggauggcaggggaaagcuguagg

SEQ ID NO: 248946 - RNA, 18 nt, Human
agguauaaaaguccugaa

SEQ ID NO: 248947 - RNA, 19 nt, Human
aguccaacugcauaaacug

SEQ ID NO: 248948 - RNA, 26 nt, Human
auaaaacaauaguugaaaagauacca

SEQ ID NO: 248949 - RNA, 23 nt, Human
auacacucuagaacugaacagaa

SEQ ID NO: 248950 - RNA, 21 nt, Human
augaaacacuagaggacugca

SEQ ID NO: 248951 - RNA, 25 nt, Human
auugaaaacuugcauauaaugaagu

SEQ ID NO: 248952 - RNA, 23 nt, Human
caaaaggguaugaaaaaaacuaa

SEQ ID NO: 248953 - RNA, 26 nt, Human
caaaccacuugggguguccuaagccc

SEQ ID NO: 248954 - RNA, 21 nt, Human
caaaugucucuccauccaccu

SEQ ID NO: 248955 - RNA, 24 nt, Human
caaccagucugcauacaguuacac

SEQ ID NO: 248956 - RNA, 23 nt, Human
caagacugaaauccaaagaugcc

SEQ ID NO: 248957 - RNA, 20 nt, Human
caccugccuccuccuccccc

SEQ ID NO: 248958 - RNA, 19 nt, Human
cacuacaaccagucugcau

SEQ ID NO: 248959 - RNA, 20 nt, Human
cacuacaaccagucugcaua

SEQ ID NO: 248960 - RNA, 21 nt, Human
cacuccccuccuccuuuccca

SEQ ID NO: 248961 - RNA, 23 nt, Human
cacuccccuccuccuuucccaaa

SEQ ID NO: 248962 - RNA, 19 nt, Human
cacugccccaagcccaaaa

SEQ ID NO: 248963 - RNA, 22 nt, Human
cagaucuuaagauuaauuaaaa

SEQ ID NO: 248964 - RNA, 24 nt, Human
cagucagcacuuagaccaccugcc

SEQ ID NO: 248965 - RNA, 28 nt, Human
cauagaaaagcuguaagaaacagguucc

SEQ ID NO: 248966 - RNA, 23 nt, Human
cauggaaaccaagccgucagaga

SEQ ID NO: 248967 - RNA, 24 nt, Human
ccaagccaaaguauaacagguaua

SEQ ID NO: 248968 - RNA, 24 nt, Human
ccaaggaaaagggacuuccuccca

SEQ ID NO: 248969 - RNA, 18 nt, Human
ccagucgccgccgccgcc

SEQ ID NO: 248970 - RNA, 24 nt, Human
cccaaaccacuugggguguccuaa

SEQ ID NO: 248971 - RNA, 26 nt, Human
cccacagaauguacaugaaacacuag

SEQ ID NO: 248972 - RNA, 22 nt, Human
cccagguuuucaaagaaaaacc

SEQ ID NO: 248973 - RNA, 21 nt, Human
cccaugguauuaccaccugcu

SEQ ID NO: 248974 - RNA, 19 nt, Human
ccccaaagacaggauaaaa

SEQ ID NO: 248975 - RNA, 22 nt, Human
ccccaagcccaaaauaucaacu

SEQ ID NO: 248976 - RNA, 25 nt, Human
ccccaagcccaaaauaucaacuaag

SEQ ID NO: 248977 - RNA, 20 nt, Human
cccccaaagacaggauaaaa

SEQ ID NO: 248978 - RNA, 21 nt, Human
cccccuauaaacccaccacuc

SEQ ID NO: 248979 - RNA, 20 nt, Human
ccccuauaaacccaccacuc

SEQ ID NO: 248980 - RNA, 24 nt, Human
ccccuauaaacccaccacuccccu

SEQ ID NO: 248981 - RNA, 23 nt, Human
cccuaccaucuucacuaaaucua

SEQ ID NO: 248982 - RNA, 24 nt, Human
cccuaccaucuucacuaaaucuaa

SEQ ID NO: 248983 - RNA, 20 nt, Human
cccuauaaacccaccacucc

SEQ ID NO: 248984 - RNA, 22 nt, Human
cccuccuccuuucccaaaccac

SEQ ID NO: 248985 - RNA, 21 nt, Human
cccugagagaagcguaagaca

SEQ ID NO: 248986 - RNA, 24 nt, Human
ccuauaaacccaccacuccccucc

SEQ ID NO: 248987 - RNA, 22 nt, Human
ccuccuccauagcuucccaaac

SEQ ID NO: 248988 - RNA, 22 nt, Human
ccuccucccccuauaaacccac

SEQ ID NO: 248989 - RNA, 18 nt, Human
ccugccuccuccuccccc

SEQ ID NO: 248990 - RNA, 20 nt, Human
cgugaaagaugaaaggucug

SEQ ID NO: 248991 - RNA, 26 nt, Human
cuaaaaguccuccuccauagcuuccc

SEQ ID NO: 248992 - RNA, 19 nt, Human
cuaaaggucauguuccgag

SEQ ID NO: 248993 - RNA, 25 nt, Human
cucacugccccaagcccaaaauauc

SEQ ID NO: 248994 - RNA, 20 nt, Human
cucaggaaaaacagaaaguu

SEQ ID NO: 248995 - RNA, 23 nt, Human
cuccuccauagcuucccaaacaa

SEQ ID NO: 248996 - RNA, 19 nt, Human
cucuugguggggagggagg

SEQ ID NO: 248997 - RNA, 19 nt, Human
cucuugguggggagggagg

SEQ ID NO: 248998 - RNA, 21 nt, Human
cuuuccacccuaccaucuuca

SEQ ID NO: 248999 - RNA, 21 nt, Human
cuuuuggaggauuugcccaaa

SEQ ID NO: 249000 - RNA, 30 nt, Human
gaaaaaccuaucuaaggaauacuuaccaaa

SEQ ID NO: 249001 - RNA, 18 nt, Human
gaaccaagguguucaccc

SEQ ID NO: 249002 - RNA, 23 nt, Human
gaaccaagguguucaccccccac

SEQ ID NO: 249003 - RNA, 21 nt, Human
gccauccuucuaagcaaaucc

SEQ ID NO: 249004 - RNA, 18 nt, Human
gcuacuggccacuuuccu

SEQ ID NO: 249005 - RNA, 19 nt, Human
gggaaucauuaauagaaac

SEQ ID NO: 249006 - RNA, 19 nt, Human
gggagggagggucacucag

SEQ ID NO: 249007 - RNA, 22 nt, Human
guaagacaaacagaagucaaaa

SEQ ID NO: 249008 - RNA, 18 nt, Human
gucugcauacaguuacac

SEQ ID NO: 249009 - RNA, 24 nt, Human
guuaaauuaggucaaauggaagga

SEQ ID NO: 249010 - RNA, 23 nt, Human
guuuugguggugguggugguugg

SEQ ID NO: 249011 - RNA, 22 nt, Human
uaaaaauagcucuagcaaagau

SEQ ID NO: 249012 - RNA, 27 nt, Human
uaacaagcaagccuaauaauagcacca

SEQ ID NO: 249013 - RNA, 22 nt, Human
uaacagguauaaaaguccugaa

SEQ ID NO: 249014 - RNA, 23 nt, Human
uaacagguauaaaaguccugaac

SEQ ID NO: 249015 - RNA, 21 nt, Human
uaagaaguauacugggaaagc

SEQ ID NO: 249016 - RNA, 21 nt, Human
uaagacaaacagaagucaaaa

SEQ ID NO: 249017 - RNA, 25 nt, Human
uaagcccucacugccccaagcccaa

SEQ ID NO: 249018 - RNA, 22 nt, Human
uaagucugauagaacaaacaac

SEQ ID NO: 249019 - RNA, 24 nt, Human
uaauguaaauucgauacuuccuuc

SEQ ID NO: 249020 - RNA, 22 nt, Human
uagaacaaacaucaagacugaa

SEQ ID NO: 249021 - RNA, 23 nt, Human
uagaacaaacaucaagacugaaa

SEQ ID NO: 249022 - RNA, 25 nt, Human
uagaccaccugccuccuccuccccc

SEQ ID NO: 249023 - RNA, 18 nt, Human
uaguugaaaagauaccag

SEQ ID NO: 249024 - RNA, 25 nt, Human
uauggcucugagaugggcaggcagg

SEQ ID NO: 249025 - RNA, 21 nt, Human
uauuugcuuuauugacauacu

SEQ ID NO: 249026 - RNA, 22 nt, Human
ucaaauggaaggaacucaaaug

SEQ ID NO: 249027 - RNA, 23 nt, Human
ucaccaguuaaauuaggucaaau

SEQ ID NO: 249028 - RNA, 21 nt, Human
ucaggaaaaacagaaaguuag

SEQ ID NO: 249029 - RNA, 19 nt, Human
ucauaccuaaugaauuggg

SEQ ID NO: 249030 - RNA, 23 nt, Human
uccacccuaccaucuucacuaaa

SEQ ID NO: 249031 - RNA, 20 nt, Human
ucccuuguacaguacugagg

SEQ ID NO: 249032 - RNA, 24 nt, Human
uccuaagcccucacugccccaagg

SEQ ID NO: 249033 - RNA, 22 nt, Human
uccuccauagcuucccaaacaa

SEQ ID NO: 249034 - RNA, 22 nt, Human
uccuccuccauagcuucccaaa

SEQ ID NO: 249035 - RNA, 24 nt, Human
uccuccuuucccaaaccacuuggg

SEQ ID NO: 249036 - RNA, 22 nt, Human
ugaacagaacaaaguuuagcau

SEQ ID NO: 249037 - RNA, 18 nt, Human
ugacucuucaaucaaugg

SEQ ID NO: 249038 - RNA, 21 nt, Human
ugagaaaacuggggaagaccc

SEQ ID NO: 249039 - RNA, 23 nt, Human
ugagaugggcaggcagggcaguu

SEQ ID NO: 249040 - RNA, 19 nt, Human
ugaggggacuuuugacaca

SEQ ID NO: 249041 - RNA, 19 nt, Human
ugccaaaaucuaaaagggc

SEQ ID NO: 249042 - RNA, 19 nt, Human
uggaaggaacucaaaugag

SEQ ID NO: 249043 - RNA, 26 nt, Human
uggcacagcuaucaaaaguacagcug

SEQ ID NO: 249044 - RNA, 18 nt, Human
uggggccccuaaaaacca

SEQ ID NO: 249045 - RNA, 21 nt, Human
ugucuguauuuccacagucau

SEQ ID NO: 249046 - RNA, 18 nt, Human
uguugcugaaacugaacu

SEQ ID NO: 249047 - RNA, 22 nt, Human
uuaaauggaguccacagacuaa

SEQ ID NO: 249048 - RNA, 18 nt, Human
uuaaccagaaccaaggug

SEQ ID NO: 249049 - RNA, 22 nt, Human
uucagggauggcaggggaaagc

SEQ ID NO: 249050 - RNA, 19 nt, Human
uuccauucaucaaccucuc

SEQ ID NO: 249051 - RNA, 19 nt, Human
uucccaaacaaaguuuguu

SEQ ID NO: 249052 - RNA, 20 nt, Human
uugccuggcuacuggccacu

SEQ ID NO: 249053 - RNA, 23 nt, Human
uugcugaaacugaacuuugcuuc

SEQ ID NO: 249054 - RNA, 25 nt, Human
uugcugaaacugaacuuugcuucuu

SEQ ID NO: 249055 - RNA, 21 nt, Human
uuucaaggaaggacaggaaau

SEQ ID NO: 249056 - RNA, 22 nt, Human
uuucaaggaaggacaggaaaua

SEQ ID NO: 249057 - RNA, 18 nt, Human
uuuuuauaugcacacagc

SEQ ID NO: 249058 - RNA, 22 nt, Human
aaaacuacagaaaccaaaccga

SEQ ID NO: 249059 - RNA, 19 nt, Human
aaacaaacagucaugccag

SEQ ID NO: 249060 - RNA, 19 nt, Human
aaacagacagggagcaaug

SEQ ID NO: 249061 - RNA, 23 nt, Human
aaaggcagcaaaagcagccugaa

SEQ ID NO: 249062 - RNA, 19 nt, Human
aaccgaaugcacaaauaag

SEQ ID NO: 249063 - RNA, 23 nt, Human
aagagaguggggaaacagacagg

SEQ ID NO: 249064 - RNA, 18 nt, Human
aaggcaucccacccaaag

SEQ ID NO: 249065 - RNA, 22 nt, Human
aauccgcaugacucacauccca

SEQ ID NO: 249066 - RNA, 21 nt, Human
acaaagcaggcuuggagaaac

SEQ ID NO: 249067 - RNA, 27 nt, Human
acagaaaccaaaccgaaugcacaaaua

SEQ ID NO: 249068 - RNA, 19 nt, Human
acaucuucaaccagcucuc

SEQ ID NO: 249069 - RNA, 23 nt, Human
acccuaguaccccgaguucauca

SEQ ID NO: 249070 - RNA, 28 nt, Human
agacauccugcuauaagcccugacccuu

SEQ ID NO: 249071 - RNA, 26 nt, Human
agagaguggggaaacagacagggagc

SEQ ID NO: 249072 - RNA, 23 nt, Human
aggcauccugaacucagcagcuc

SEQ ID NO: 249073 - RNA, 21 nt, Human
aggcuuggagaaacaaacagu

SEQ ID NO: 249074 - RNA, 23 nt, Human
aggugcagccagacauccugcua

SEQ ID NO: 249075 - RNA, 22 nt, Human
auaaagcacagagggcacugac

SEQ ID NO: 249076 - RNA, 20 nt, Human
augacucacaucccaccccu

SEQ ID NO: 249077 - RNA, 21 nt, Human
caaggcaucccacccaaaggu

SEQ ID NO: 249078 - RNA, 20 nt, Human
cacagaaaccugcaggagac

SEQ ID NO: 249079 - RNA, 21 nt, Human
cagaacgcugcgcuggcacug

SEQ ID NO: 249080 - RNA, 19 nt, Human
cagcagcucuccugacauc

SEQ ID NO: 249081 - RNA, 23 nt, Human
ccagaacgcugcgcuggcacugu

SEQ ID NO: 249082 - RNA, 18 nt, Human
cccaaggaauccuuaugg

SEQ ID NO: 249083 - RNA, 23 nt, Human
cccacccaaaggugagaagcaca

SEQ ID NO: 249084 - RNA, 20 nt, Human
cccaccccugcgacugagga

SEQ ID NO: 249085 - RNA, 25 nt, Human
ccuaaaccacacgcaggcauccuga

SEQ ID NO: 249086 - RNA, 23 nt, Human
ccuaguaccccgaguucaucaag

SEQ ID NO: 249087 - RNA, 23 nt, Human
ccugcgacugaggagcccagaac

SEQ ID NO: 249088 - RNA, 22 nt, Human
cgaaugcacaaauaagagagug

SEQ ID NO: 249089 - RNA, 21 nt, Human
cuaaaccacacgcaggcaucc

SEQ ID NO: 249090 - RNA, 21 nt, Human
cucacaucccaccccugcgac

SEQ ID NO: 249091 - RNA, 22 nt, Human
cuggcaaggcaucccacccaaa

SEQ ID NO: 249092 - RNA, 21 nt, Human
gaaugcacaaauaagagagug

SEQ ID NO: 249093 - RNA, 24 nt, Human
gaccaccccaaaccagaaucccaa

SEQ ID NO: 249094 - RNA, 18 nt, Human
gacugaggagcccagaac

SEQ ID NO: 249095 - RNA, 26 nt, Human
gagaaacaaacagucaugccaggugc

SEQ ID NO: 249096 - RNA, 20 nt, Human
gauuacaaacaucuucaacc

SEQ ID NO: 249097 - RNA, 23 nt, Human
ggaaacagacagggagcaauggc

SEQ ID NO: 249098 - RNA, 20 nt, Human
ggcagcaaaagcagccugaa

SEQ ID NO: 249099 - RNA, 18 nt, Human
gugagaagcacaaagcag

SEQ ID NO: 249100 - RNA, 22 nt, Human
uaaaaauuaaaacuacagaaac

SEQ ID NO: 249101 - RNA, 21 nt, Human
uaaaacuacagaaaccaaacc

SEQ ID NO: 249102 - RNA, 22 nt, Human
uaaaacuacagaaaccaaaccg

SEQ ID NO: 249103 - RNA, 25 nt, Human
uaaaacuacagaaaccaaagggagc

SEQ ID NO: 249104 - RNA, 22 nt, Human
uaagaaggcuaacaccuaaacc

SEQ ID NO: 249105 - RNA, 18 nt, Human
uaagagaguggggaaaca

SEQ ID NO: 249106 - RNA, 19 nt, Human
uaagagaguggggaaacag

SEQ ID NO: 249107 - RNA, 22 nt, Human
ucagcaaccaaguaagacacac

SEQ ID NO: 249108 - RNA, 23 nt, Human
ucaucaagugcucugguuuugug

SEQ ID NO: 249109 - RNA, 22 nt, Human
ucaugccaggugcagccagaca

SEQ ID NO: 249110 - RNA, 18 nt, Human
ugacucacaucccacccc

SEQ ID NO: 249111 - RNA, 26 nt, Human
ugcagccagacauccugcuauaagcc

SEQ ID NO: 249112 - RNA, 19 nt, Human
ugcaggagacugaaaacga

SEQ ID NO: 249113 - RNA, 23 nt, Human
ugccaggugcagccagacauccu

SEQ ID NO: 249114 - RNA, 23 nt, Human
ugcccucuuccaccacaggggca

SEQ ID NO: 249115 - RNA, 21 nt, Human
ugcucugguuuuguguccaua

SEQ ID NO: 249116 - RNA, 18 nt, Human
uggagacaaagcacucgg

SEQ ID NO: 249117 - RNA, 23 nt, Human
uguucagcaaccaaguaagacac

SEQ ID NO: 249118 - RNA, 25 nt, Human
aaaaaaaacaaaacaaaaaaacagc

SEQ ID NO: 249119 - RNA, 21 nt, Human
aaaaaaacagcaaacagaaaa

SEQ ID NO: 249120 - RNA, 24 nt, Human
aaaaaaacagcaaacagaaaacag

SEQ ID NO: 249121 - RNA, 28 nt, Human
aaaaacagcaaacagaaaaccgguaccc

SEQ ID NO: 249122 - RNA, 19 nt, Human
aaaacaaaaaaacagcaaa

SEQ ID NO: 249123 - RNA, 23 nt, Human
aaacaaaaaaacagcaaacagaa

SEQ ID NO: 249124 - RNA, 22 nt, Human
aaacaaaacaaaaaaacagcaa

SEQ ID NO: 249125 - RNA, 25 nt, Human
aaacagaaaacaguugugcccccaa

SEQ ID NO: 249126 - RNA, 27 nt, Human
aaacagaaaacaguugugcccccaaaa

SEQ ID NO: 249127 - RNA, 20 nt, Human
aaacagcaaacagaaaacag

SEQ ID NO: 249128 - RNA, 20 nt, Human
aaacucucucggcacaaccc

SEQ ID NO: 249129 - RNA, 25 nt, Human
aacaaaacaaaaaaacagcaaacag

SEQ ID NO: 249130 - RNA, 23 nt, Human
aaccacccaaagccuagucuaga

SEQ ID NO: 249131 - RNA, 18 nt, Human
aauucaacacuguuaagg

SEQ ID NO: 249132 - RNA, 26 nt, Human
acaaaacaaaaaaacagcaaacagaa

SEQ ID NO: 249133 - RNA, 27 nt, Human
acaaaacaaaaaaacagcaaacagaaa

SEQ ID NO: 249134 - RNA, 25 nt, Human
acagcaaacagaaaacaguugugcc

SEQ ID NO: 249135 - RNA, 22 nt, Human
acccauucccaaaggguccacc

SEQ ID NO: 249136 - RNA, 22 nt, Human
accgggccccccuuuuuuugua

SEQ ID NO: 249137 - RNA, 22 nt, Human
agaaaaaaaacaaaacaaaaaa

SEQ ID NO: 249138 - RNA, 23 nt, Human
agaaaaaaaacaaaacaaaaaaa

SEQ ID NO: 249139 - RNA, 25 nt, Human
agaaaaaaaacaaaacaaaaaaaca

SEQ ID NO: 249140 - RNA, 26 nt, Human
agaaaaaaaacaaaacaaaaaaacag

SEQ ID NO: 249141 - RNA, 27 nt, Human
agaaaaaaaacaaaacaaaaaaacagc

SEQ ID NO: 249142 - RNA, 19 nt, Human
agggaguagaggcaaagac

SEQ ID NO: 249143 - RNA, 20 nt, Human
caaaacaaaaaaacagcaaa

SEQ ID NO: 249144 - RNA, 19 nt, Human
caaaaguacucagaaguca

SEQ ID NO: 249145 - RNA, 25 nt, Human
caaacagaaaacaguugugccccca

SEQ ID NO: 249146 - RNA, 27 nt, Human
cacaacccaaguucagagacgaggccu

SEQ ID NO: 249147 - RNA, 18 nt, Human
caugacccauucccaaag

SEQ ID NO: 249148 - RNA, 19 nt, Human
ccaaagaacuaccuccacc

SEQ ID NO: 249149 - RNA, 23 nt, Human
ccaaagaacuaccuccaccaaag

SEQ ID NO: 249150 - RNA, 23 nt, Human
ccaaaggguccaccgaguccuga

SEQ ID NO: 249151 - RNA, 20 nt, Human
ccccaaaaguacucagaagu

SEQ ID NO: 249152 - RNA, 21 nt, Human
ccccccuuuuuuuguacgaaa

SEQ ID NO: 249153 - RNA, 22 nt, Human
ccugcaugacgugccucagagc

SEQ ID NO: 249154 - RNA, 19 nt, Human
cuccucuuuccucacccca

SEQ ID NO: 249155 - RNA, 18 nt, Human
cuggagaaaaaaaacaaa

SEQ ID NO: 249156 - RNA, 21 nt, Human
cuggugcuacugcaaagaaag

SEQ ID NO: 249157 - RNA, 20 nt, Human
gagaaaaaaaacaaaacaaa

SEQ ID NO: 249158 - RNA, 23 nt, Human
gagaaaaaaaacaaaacaaaaaa

SEQ ID NO: 249159 - RNA, 24 nt, Human
gagaaaaaaaacaaaacaaaaaaa

SEQ ID NO: 249160 - RNA, 22 nt, Human
gauacaauacauauucaccuua

SEQ ID NO: 249161 - RNA, 22 nt, Human
ggaaccacccaaagccuagucu

SEQ ID NO: 249162 - RNA, 23 nt, Human
gugauacaauacauauucaccuu

SEQ ID NO: 249163 - RNA, 19 nt, Human
uaccgggccccccuuuuuu

SEQ ID NO: 249164 - RNA, 18 nt, Human
ucaccaacauuccucgcc

SEQ ID NO: 249165 - RNA, 24 nt, Human
uccaccgaguccugaacucagcuu

SEQ ID NO: 249166 - RNA, 20 nt, Human
ucucucggcacaacccaagu

SEQ ID NO: 249167 - RNA, 20 nt, Human
ugaccugcaugacgugccuc

SEQ ID NO: 249168 - RNA, 21 nt, Human
ugccucagagcuucucuccac

SEQ ID NO: 249169 - RNA, 19 nt, Human
ugggaaacacagaacaaac

SEQ ID NO: 249170 - RNA, 19 nt, Human
ugggaugggaaguagggcg

SEQ ID NO: 249171 - RNA, 23 nt, Human
ugugauacaauacauauucaccu

SEQ ID NO: 249172 - RNA, 24 nt, Human
aaagugcugggauuacagguguga

SEQ ID NO: 249173 - RNA, 18 nt, Human
aacgugaaaaaaaugaaa

SEQ ID NO: 249174 - RNA, 18 nt, Human
aagugcugggauuacagg

SEQ ID NO: 249175 - RNA, 19 nt, Human
aagugcugggauuacaggu

SEQ ID NO: 249176 - RNA, 26 nt, Human
aagugcugggauuacaggugugagcc

SEQ ID NO: 249177 - RNA, 24 nt, Human
accaucuuggcuaggcuggucuug

SEQ ID NO: 249178 - RNA, 20 nt, Human
acgggguuucaccaucuugg

SEQ ID NO: 249179 - RNA, 21 nt, Human
acgggguuucaccaucuuggc

SEQ ID NO: 249180 - RNA, 21 nt, Human
acgggguuucaccaucuuggc

SEQ ID NO: 249181 - RNA, 21 nt, Human
agcucuauuuacacugauggc

SEQ ID NO: 249182 - RNA, 19 nt, Human
aggacaugcagggagccuu

SEQ ID NO: 249183 - RNA, 25 nt, Human
aggcuggagugcaguggcgcgaucu

SEQ ID NO: 249184 - RNA, 19 nt, Human
aguagcugggauuacaggc

SEQ ID NO: 249185 - RNA, 23 nt, Human
agugcaguggcgcgaucuuggcu

SEQ ID NO: 249186 - RNA, 24 nt, Human
agugcaguggcgcgaucuuggcuc

SEQ ID NO: 249187 - RNA, 27 nt, Human
augaaaacagauacuucacuacaaaua

SEQ ID NO: 249188 - RNA, 24 nt, Human
augauccacccacauuggccuccc

SEQ ID NO: 249189 - RNA, 22 nt, Human
augcagaccacacccauguggc

SEQ ID NO: 249190 - RNA, 18 nt, Human
auuacaggcgcaugccau

SEQ ID NO: 249191 - RNA, 24 nt, Human
caaagugcugggauuacaggugug

SEQ ID NO: 249192 - RNA, 18 nt, Human
caagcccagcuaauuuuu

SEQ ID NO: 249193 - RNA, 21 nt, Human
caccaucuuggcuaggcuggu

SEQ ID NO: 249194 - RNA, 24 nt, Human
caccaucuuggcuaggcuggucuu

SEQ ID NO: 249195 - RNA, 22 nt, Human
cacucuauugcugaggcuggag

SEQ ID NO: 249196 - RNA, 21 nt, Human
cacugcaaccucugccgccug

SEQ ID NO: 249197 - RNA, 23 nt, Human
cacugcaaccucugccgccuggg

SEQ ID NO: 249198 - RNA, 19 nt, Human
caguggcgcgaucuuggcu

SEQ ID NO: 249199 - RNA, 21 nt, Human
ccaaagugcugggauuacagg

SEQ ID NO: 249200 - RNA, 21 nt, Human
ccaaagugcugggauuacagg

SEQ ID NO: 249201 - RNA, 24 nt, Human
ccaaagugcugggauuacaggugu

SEQ ID NO: 249202 - RNA, 22 nt, Human
ccacccacauuggccucccaaa

SEQ ID NO: 249203 - RNA, 23 nt, Human
cccgaguagcugggauuacaggc

SEQ ID NO: 249204 - RNA, 24 nt, Human
cccgaguagcugggauuacaggcg

SEQ ID NO: 249205 - RNA, 22 nt, Human
ccgaguagcugggauuacaggc

SEQ ID NO: 249206 - RNA, 20 nt, Human
ccgcagcgcggacguucccg

SEQ ID NO: 249207 - RNA, 24 nt, Human
ccgccuggguuuaagcgauucucc

SEQ ID NO: 249208 - RNA, 18 nt, Human
ccgcgccacgcccucccc

SEQ ID NO: 249209 - RNA, 21 nt, Human
ccgcgcccggccagcauagua

SEQ ID NO: 249210 - RNA, 20 nt, Human
ccucugccgccuggguuuaa

SEQ ID NO: 249211 - RNA, 22 nt, Human
ccugaccucaugauccacccac

SEQ ID NO: 249212 - RNA, 23 nt, Human
ccugccucaaccucccgaguagc

SEQ ID NO: 249213 - RNA, 24 nt, Human
ccugccucaaccucccgaguagcu

SEQ ID NO: 249214 - RNA, 18 nt, Human
ccugcuccgcagcgcgga

SEQ ID NO: 249215 - RNA, 20 nt, Human
ccuggguuuaagcgauucuc

SEQ ID NO: 249216 - RNA, 23 nt, Human
ccuggguuuaagcgauucuccug

SEQ ID NO: 249217 - RNA, 19 nt, Human
cggccgcuugccgacgacg

SEQ ID NO: 249218 - RNA, 24 nt, Human
cgggguuucaccaucuuggcuagg

SEQ ID NO: 249219 - RNA, 24 nt, Human
cucacugcaaccucugccgccugg

SEQ ID NO: 249220 - RNA, 20 nt, Human
cuccgcgccacgcccucccc

SEQ ID NO: 249221 - RNA, 18 nt, Human
cuccugaccucaugaucc

SEQ ID NO: 249222 - RNA, 21 nt, Human
cucgggccgggcccgccuccc

SEQ ID NO: 249223 - RNA, 23 nt, Human
cugcaaccucugccgccuggguu

SEQ ID NO: 249224 - RNA, 24 nt, Human
cugcaaccucugccgccuggguuu

SEQ ID NO: 249225 - RNA, 24 nt, Human
gaccucaugauccacccacauugg

SEQ ID NO: 249226 - RNA, 24 nt, Human
gagacgggguuucaccaucuuggc

SEQ ID NO: 249227 - RNA, 26 nt, Human
gaguagcugggauuacaggcgcaugc

SEQ ID NO: 249228 - RNA, 18 nt, Human
gauuacaggcgcaugcca

SEQ ID NO: 249229 - RNA, 18 nt, Human
gauuacaggugugagcca

SEQ ID NO: 249230 - RNA, 22 nt, Human
gauuacaggugugagccaccgc

SEQ ID NO: 249231 - RNA, 22 nt, Human
gauuacaggugugagccaccgc

SEQ ID NO: 249232 - RNA, 24 nt, Human
gccuggguuuaagcgauucuccug

SEQ ID NO: 249233 - RNA, 18 nt, Human
gcuccgcgccacgcccuc

SEQ ID NO: 249234 - RNA, 19 nt, Human
gcuccgcgccacgcccucc

SEQ ID NO: 249235 - RNA, 23 nt, Human
gcuccgcgccacgcccuccccgc

SEQ ID NO: 249236 - RNA, 23 nt, Human
gcuggucuugaacuccugaccuc

SEQ ID NO: 249237 - RNA, 18 nt, Human
ggcuggagugcaguggcg

SEQ ID NO: 249238 - RNA, 24 nt, Human
ggcuggucuugaacuccugaccuc

SEQ ID NO: 249239 - RNA, 23 nt, Human
gggguuucaccaucuuggcuagg

SEQ ID NO: 249240 - RNA, 19 nt, Human
ggucuugaacuccugaccu

SEQ ID NO: 249241 - RNA, 24 nt, Human
gugaaaaaaaugaaaacagauacc

SEQ ID NO: 249242 - RNA, 20 nt, Human
uaagcgauucuccugccuca

SEQ ID NO: 249243 - RNA, 23 nt, Human
uacaggugugagccaccgcgccc

SEQ ID NO: 249244 - RNA, 19 nt, Human
uacuagagacgggguuuca

SEQ ID NO: 249245 - RNA, 26 nt, Human
uacuagagacgggguuucaccaucuu

SEQ ID NO: 249246 - RNA, 21 nt, Human
uauugcugaggcuggagugca

SEQ ID NO: 249247 - RNA, 21 nt, Human
ucacugcaaccucugccgccu

SEQ ID NO: 249248 - RNA, 23 nt, Human
ucacugcaaccucugccgccugg

SEQ ID NO: 249249 - RNA, 24 nt, Human
ucacugcaaccucugccgccuggg

SEQ ID NO: 249250 - RNA, 23 nt, Human
ucccaaagugcugggauuacagg

SEQ ID NO: 249251 - RNA, 24 nt, Human
ucccgaguagcugggauuacaggc

SEQ ID NO: 249252 - RNA, 25 nt, Human
ucggcuccgcgccacgcccuccccg

SEQ ID NO: 249253 - RNA, 24 nt, Human
ucucacucuauugcugaggcugga

SEQ ID NO: 249254 - RNA, 24 nt, Human
ucuccugccucaaccucccgagua

SEQ ID NO: 249255 - RNA, 21 nt, Human
ucuugaacuccugaccucaug

SEQ ID NO: 249256 - RNA, 22 nt, Human
ugcaguggcgcgaucuuggcuc

SEQ ID NO: 249257 - RNA, 24 nt, Human
ugccucaaccucccgaguagcugg

SEQ ID NO: 249258 - RNA, 22 nt, Human
ugcugaggcuggagugcagugg

SEQ ID NO: 249259 - RNA, 24 nt, Human
ugcugaggcuggagugcaguggcg

SEQ ID NO: 249260 - RNA, 24 nt, Human
ugcugggauuacaggugugagcca

SEQ ID NO: 249261 - RNA, 23 nt, Human
uggagugcaguggcgcgaucuug

SEQ ID NO: 249262 - RNA, 24 nt, Human
uggagugcaguggcgcgaucuugg

SEQ ID NO: 249263 - RNA, 24 nt, Human
uggcuaggcuggucuugaacuccu

SEQ ID NO: 249264 - RNA, 19 nt, Human
ugggauuacaggcgcaugc

SEQ ID NO: 249265 - RNA, 21 nt, Human
ugggauuacaggcgcaugcca

SEQ ID NO: 249266 - RNA, 21 nt, Human
ugggauuacaggcgcaugcca

SEQ ID NO: 249267 - RNA, 22 nt, Human
ugggauuacaggcgcaugccau

SEQ ID NO: 249268 - RNA, 24 nt, Human
ugggauuacaggcgcaugccauca

SEQ ID NO: 249269 - RNA, 18 nt, Human
ugggauuacaggugugag

SEQ ID NO: 249270 - RNA, 19 nt, Human
ugggauuacaggugugagc

SEQ ID NO: 249271 - RNA, 21 nt, Human
ugggauuacaggugugagcca

SEQ ID NO: 249272 - RNA, 22 nt, Human
ugggauuacaggugugagccac

SEQ ID NO: 249273 - RNA, 23 nt, Human
ugggauuacaggugugagccacc

SEQ ID NO: 249274 - RNA, 24 nt, Human
ugggauuacaggugugagccaccg

SEQ ID NO: 249275 - RNA, 24 nt, Human
uuacuagagacgggguuucaccau

SEQ ID NO: 249276 - RNA, 23 nt, Human
uugcugaggcuggagugcagugg

SEQ ID NO: 249277 - RNA, 18 nt, Human
uuggccucccaaagugcu

SEQ ID NO: 249278 - RNA, 19 nt, Human
uuuaagcucuauuuacacu

SEQ ID NO: 249279 - RNA, 24 nt, Human
uuucaccaucuuggcuaggcuggu

SEQ ID NO: 249280 - RNA, 20 nt, Human
aaaagcacacuucccagaac

SEQ ID NO: 249281 - RNA, 19 nt, Human
aggcagaggucccagcaac

SEQ ID NO: 249282 - RNA, 18 nt, Human
aggcagcggcaggagggg

SEQ ID NO: 249283 - RNA, 20 nt, Human
aggcagcggcaggaggggcg

SEQ ID NO: 249284 - RNA, 18 nt, Human
cacaaaccaggggagaca

SEQ ID NO: 249285 - RNA, 20 nt, Human
cagaggucccagcaacauug

SEQ ID NO: 249286 - RNA, 20 nt, Human
cagcggcaggaggggcgagg

SEQ ID NO: 249287 - RNA, 18 nt, Human
cagcuccuuccucugggg

SEQ ID NO: 249288 - RNA, 21 nt, Human
caggacacuacagcuccuucc

SEQ ID NO: 249289 - RNA, 22 nt, Human
caggggagacaagaaccuccac

SEQ ID NO: 249290 - RNA, 22 nt, Human
cauugucaauggcaggcagcgg

SEQ ID NO: 249291 - RNA, 20 nt, Human
ccaaaagcacacuucccaga

SEQ ID NO: 249292 - RNA, 21 nt, Human
ggcagaaaggagggugccugg

SEQ ID NO: 249293 - RNA, 22 nt, Human
ggcgugggcgaguccaugaguc

SEQ ID NO: 249294 - RNA, 19 nt, Human
ggcugcaguggggaggcag

SEQ ID NO: 249295 - RNA, 21 nt, Human
ucccagaaccgcgcuagaggc

SEQ ID NO: 249296 - RNA, 18 nt, Human
ugcaguggggaggcagag

SEQ ID NO: 249297 - RNA, 18 nt, Human
uggcaggcagcggcagga

SEQ ID NO: 249298 - RNA, 21 nt, Human
ugggaaguucgagggcugcag

SEQ ID NO: 249299 - RNA, 18 nt, Human
uuaacggaugccaaaagc

SEQ ID NO: 249300 - RNA, 26 nt, Human
aacacuucugucccuagcagagcucc

SEQ ID NO: 249301 - RNA, 21 nt, Human
aagcaucacuuccagaaacac

SEQ ID NO: 249302 - RNA, 24 nt, Human
aagcaucacuuccagaaacacuuc

SEQ ID NO: 249303 - RNA, 19 nt, Human
aaguaaugggccuuuucuu

SEQ ID NO: 249304 - RNA, 22 nt, Human
acuucugucccuagcagagcuc

SEQ ID NO: 249305 - RNA, 21 nt, Human
agagcuccagccaggcuccag

SEQ ID NO: 249306 - RNA, 21 nt, Human
agccuguguugguaugaaacc

SEQ ID NO: 249307 - RNA, 23 nt, Human
aggaagugcugaagccuguguug

SEQ ID NO: 249308 - RNA, 18 nt, Human
aggacagcacauaccuua

SEQ ID NO: 249309 - RNA, 19 nt, Human
agugccgaggauucgccug

SEQ ID NO: 249310 - RNA, 25 nt, Human
caacuucacugggacaggaaacaca

SEQ ID NO: 249311 - RNA, 20 nt, Human
cacuucugucccuagcagag

SEQ ID NO: 249312 - RNA, 25 nt, Human
cacuucugucccuagcagagcucca

SEQ ID NO: 249313 - RNA, 21 nt, Human
caggaaacacaccaaaggaag

SEQ ID NO: 249314 - RNA, 18 nt, Human
ccacgcucgaccgccaca

SEQ ID NO: 249315 - RNA, 19 nt, Human
gaagcaucacuuccagaaa

SEQ ID NO: 249316 - RNA, 20 nt, Human
gagcuccagccaggcuccag

SEQ ID NO: 249317 - RNA, 19 nt, Human
gcagagcuccagccaggcu

SEQ ID NO: 249318 - RNA, 19 nt, Human
gccacgcucgaccgccaca

SEQ ID NO: 249319 - RNA, 23 nt, Human
gcucuggucaguuacuuucacua

SEQ ID NO: 249320 - RNA, 18 nt, Human
uaaugggccuuuucuuac

SEQ ID NO: 249321 - RNA, 22 nt, Human
uaaugggccuuuucuuacacau

SEQ ID NO: 249322 - RNA, 20 nt, Human
uauuugguuccaacuucacu

SEQ ID NO: 249323 - RNA, 23 nt, Human
ucaauaggacagcacauaccuua

SEQ ID NO: 249324 - RNA, 18 nt, Human
ucaguuacuuucacuauc

SEQ ID NO: 249325 - RNA, 19 nt, Human
ucugaaaacaaauccugga

SEQ ID NO: 249326 - RNA, 18 nt, Human
ucugucccuagcagagcu

SEQ ID NO: 249327 - RNA, 20 nt, Human
ugaaugugacacauaggacc

SEQ ID NO: 249328 - RNA, 22 nt, Human
ugaugaaugugacacauaggac

SEQ ID NO: 249329 - RNA, 20 nt, Human
uuucugaaaacaaauccugg

SEQ ID NO: 249330 - RNA, 19 nt, Human
aacaagaggaccccagggu

SEQ ID NO: 249331 - RNA, 20 nt, Human
caaaaggaguaagugcagca

SEQ ID NO: 249332 - RNA, 24 nt, Human
cacugccccuucccaaggggcagg

SEQ ID NO: 249333 - RNA, 19 nt, Human
cagcaugggagaaagaggg

SEQ ID NO: 249334 - RNA, 20 nt, Human
ccucaaaggcaucacugccc

SEQ ID NO: 249335 - RNA, 22 nt, Human
ccucaaaggcaucacugccccu

SEQ ID NO: 249336 - RNA, 21 nt, Human
ccuuccccucaaaggcaucac

SEQ ID NO: 249337 - RNA, 18 nt, Human
gacuguggccggccaacc

SEQ ID NO: 249338 - RNA, 25 nt, Human
gaggaccccaggguugcaagcaggc

SEQ ID NO: 249339 - RNA, 25 nt, Human
gggaagcugagaaucuccgcgcggu

SEQ ID NO: 249340 - RNA, 18 nt, Human
ggggcaggccagcaggga

SEQ ID NO: 249341 - RNA, 20 nt, Human
uccgcgcgguggacuguggc

SEQ ID NO: 249342 - RNA, 22 nt, Human
uccgcgcgguggacuguggccg

SEQ ID NO: 249343 - RNA, 19 nt, Human
uccuccuuccccucaaagg

SEQ ID NO: 249344 - RNA, 21 nt, Human
ugccgagggccgugcggccgc

SEQ ID NO: 249345 - RNA, 20 nt, Human
ugcggccgcgcuuggcgggc

SEQ ID NO: 249346 - RNA, 18 nt, Human
aacacccuccccacccag

SEQ ID NO: 249347 - RNA, 23 nt, Human
aacacccuccccacccagggcac

SEQ ID NO: 249348 - RNA, 22 nt, Human
aacccuccggcaucagcugauc

SEQ ID NO: 249349 - RNA, 21 nt, Human
aagcggggucgggggcggggg

SEQ ID NO: 249350 - RNA, 24 nt, Human
caacacccuccccacccagucucc

SEQ ID NO: 249351 - RNA, 19 nt, Human
cccacccagucuccccgcc

SEQ ID NO: 249352 - RNA, 19 nt, Human
ccccacccagucuccccgc

SEQ ID NO: 249353 - RNA, 20 nt, Human
cccuccccacccagucuccc

SEQ ID NO: 249354 - RNA, 21 nt, Human
cggcuucaaacccuccggcau

SEQ ID NO: 249355 - RNA, 18 nt, Human
cucgcucccucgcggcgc

SEQ ID NO: 249356 - RNA, 20 nt, Human
gacacgaaagguccaggccc

SEQ ID NO: 249357 - RNA, 22 nt, Human
gccgauccuuaaaagcaaaccc

SEQ ID NO: 249358 - RNA, 22 nt, Human
gcgacagggagccgauccuuaa

SEQ ID NO: 249359 - RNA, 18 nt, Human
gcgggacgcaggcgggua

SEQ ID NO: 249360 - RNA, 20 nt, Human
gcggggucgggggcgggggu

SEQ ID NO: 249361 - RNA, 21 nt, Human
gggggcgggggucucugcagu

SEQ ID NO: 249362 - RNA, 18 nt, Human
gguccgaucgcccgccgc

SEQ ID NO: 249363 - RNA, 22 nt, Human
ggucgggggcgggggucucugc

SEQ ID NO: 249364 - RNA, 26 nt, Human
uaaaagcaaacccuacaaauaaauaa

SEQ ID NO: 249365 - RNA, 26 nt, Human
ucaacacccuccccacccagucuccc

SEQ ID NO: 249366 - RNA, 23 nt, Human
ucgcccgccgcugucacugcgac

SEQ ID NO: 249367 - RNA, 19 nt, Human
uuuauucaacacccucccc

SEQ ID NO: 249368 - RNA, 18 nt, Human
aagaguuggcauuaaucu

SEQ ID NO: 249369 - RNA, 20 nt, Human
aagcaucaaaggaugcuacc

SEQ ID NO: 249370 - RNA, 22 nt, Human
acuacaguguucacuucgcacc

SEQ ID NO: 249371 - RNA, 19 nt, Human
acuucuuaugaaaggaugc

SEQ ID NO: 249372 - RNA, 22 nt, Human
agagucaaaagaugaacuggca

SEQ ID NO: 249373 - RNA, 18 nt, Human
agaguccucucacuucuu

SEQ ID NO: 249374 - RNA, 20 nt, Human
aucaaaggaugcuaccuaca

SEQ ID NO: 249375 - RNA, 23 nt, Human
caaaccagguuguggaaucuauu

SEQ ID NO: 249376 - RNA, 24 nt, Human
caaaugccacacauacacuuucua

SEQ ID NO: 249377 - RNA, 21 nt, Human
caaccuaagagaacauacgga

SEQ ID NO: 249378 - RNA, 22 nt, Human
cacuuucuagcuuucugaaauc

SEQ ID NO: 249379 - RNA, 25 nt, Human
cacuuucuagcuuucugaaaucacc

SEQ ID NO: 249380 - RNA, 18 nt, Human
cagcuccaccaucugcuu

SEQ ID NO: 249381 - RNA, 21 nt, Human
cauacggaguucucuuuggga

SEQ ID NO: 249382 - RNA, 24 nt, Human
cauaucccugcuuuaauacaacca

SEQ ID NO: 249383 - RNA, 26 nt, Human
cucucugcucugcuggagugguugau

SEQ ID NO: 249384 - RNA, 25 nt, Human
cuuucugaaaucaccgaacacauua

SEQ ID NO: 249385 - RNA, 19 nt, Human
ggaaaacaacaagacuaca

SEQ ID NO: 249386 - RNA, 23 nt, Human
ggcagaguggguuacucaaccua

SEQ ID NO: 249387 - RNA, 23 nt, Human
uaaaaagugaaaacaaaugccac

SEQ ID NO: 249388 - RNA, 23 nt, Human
uaagggaaagcaggcaaucuguu

SEQ ID NO: 249389 - RNA, 20 nt, Human
uaaguggcauauucagcucc

SEQ ID NO: 249390 - RNA, 24 nt, Human
uaaucuuugaacaaaaaagauuuc

SEQ ID NO: 249391 - RNA, 18 nt, Human
uaaugauaaaagcaaacc

SEQ ID NO: 249392 - RNA, 22 nt, Human
uauaguuggugaaagaauaauc

SEQ ID NO: 249393 - RNA, 23 nt, Human
ucagccucucugcucugcuggag

SEQ ID NO: 249394 - RNA, 22 nt, Human
ugaaacuacagaauaacaacua

SEQ ID NO: 249395 - RNA, 24 nt, Human
ugaacaaaaaagauuucaagccac

SEQ ID NO: 249396 - RNA, 21 nt, Human
ugcaucugauucugaaauuac

SEQ ID NO: 249397 - RNA, 25 nt, Human
ugccacacauacacuuucuagcuuu

SEQ ID NO: 249398 - RNA, 21 nt, Human
ugcuaccuacauucaagccac

SEQ ID NO: 249399 - RNA, 22 nt, Human
uggcacuccuguuauggcuguc

SEQ ID NO: 249400 - RNA, 19 nt, Human
ugguuaaagaagccaaguu

SEQ ID NO: 249401 - RNA, 18 nt, Human
uguucacuucgcaccaug

SEQ ID NO: 249402 - RNA, 22 nt, Human
uguuuuaaaaagugaaaacaaa

SEQ ID NO: 249403 - RNA, 21 nt, Human
uuagcuaagccacaguugcac

SEQ ID NO: 249404 - RNA, 24 nt, Human
uuugccaauuuuauaaaauacagc

SEQ ID NO: 249405 - RNA, 19 nt, Human
uuuucaguguucuuguuuu

SEQ ID NO: 249406 - RNA, 25 nt, Human
acacaggucuagccugacucucagu

SEQ ID NO: 249407 - RNA, 21 nt, Human
auuccaguagguauuauugau

SEQ ID NO: 249408 - RNA, 18 nt, Human
auugcucuuuauuucugu

SEQ ID NO: 249409 - RNA, 20 nt, Human
cacugugaaaacugcuccuc

SEQ ID NO: 249410 - RNA, 21 nt, Human
cagggacuucuucuuuguuug

SEQ ID NO: 249411 - RNA, 19 nt, Human
caugcuugacuucucauga

SEQ ID NO: 249412 - RNA, 25 nt, Human
ccagggacuucuucuuuguuugacu

SEQ ID NO: 249413 - RNA, 22 nt, Human
ccucccauuuccagauggaggc

SEQ ID NO: 249414 - RNA, 27 nt, Human
ccucuaaacacaggucuagccugacuc

SEQ ID NO: 249415 - RNA, 21 nt, Human
cucaguaaucccccacccuac

SEQ ID NO: 249416 - RNA, 21 nt, Human
cuccucuaaacacaggucuag

SEQ ID NO: 249417 - RNA, 21 nt, Human
uccaugcuugacuucucauga

SEQ ID NO: 249418 - RNA, 20 nt, Human
ugacucucaguaauccccca

SEQ ID NO: 249419 - RNA, 22 nt, Human
uggaggccucccuaggguaggg

SEQ ID NO: 249420 - RNA, 19 nt, Human
aaagccuaggaaaggagac

SEQ ID NO: 249421 - RNA, 18 nt, Human
aaccugguaacccaguaa

SEQ ID NO: 249422 - RNA, 22 nt, Human
acccaguaaagaguucaggcuu

SEQ ID NO: 249423 - RNA, 21 nt, Human
accucccucccuucccuuccu

SEQ ID NO: 249424 - RNA, 19 nt, Human
agaggcaggcaccaggagc

SEQ ID NO: 249425 - RNA, 24 nt, Human
agccggauccccgcgcggggcccg

SEQ ID NO: 249426 - RNA, 20 nt, Human
aggagguggccccucugaga

SEQ ID NO: 249427 - RNA, 23 nt, Human
aguaaagaguucaggcuucucug

SEQ ID NO: 249428 - RNA, 23 nt, Human
cagauagaacagaccucccuccc

SEQ ID NO: 249429 - RNA, 19 nt, Human
caguccugggccuggcccc

SEQ ID NO: 249430 - RNA, 21 nt, Human
ccacccacggcugaggaggug

SEQ ID NO: 249431 - RNA, 23 nt, Human
cccaaaaaagccuaggaaaggag

SEQ ID NO: 249432 - RNA, 21 nt, Human
cccaccggcccacccucccca

SEQ ID NO: 249433 - RNA, 19 nt, Human
cccacggcugaggaggugg

SEQ ID NO: 249434 - RNA, 20 nt, Human
cccagcccuggcugcccucu

SEQ ID NO: 249435 - RNA, 23 nt, Human
cccaggucccgcuggcucccggg

SEQ ID NO: 249436 - RNA, 19 nt, Human
ccccaccggcccacccucc

SEQ ID NO: 249437 - RNA, 20 nt, Human
ccccaccggcccacccuccc

SEQ ID NO: 249438 - RNA, 22 nt, Human
ccccaccggcccacccucccca

SEQ ID NO: 249439 - RNA, 21 nt, Human
ccccaggcucucgccuagccc

SEQ ID NO: 249440 - RNA, 22 nt, Human
ccccaggcucucgccuagcccu

SEQ ID NO: 249441 - RNA, 27 nt, Human
cccccaccccagcccugccccuagguu

SEQ ID NO: 249442 - RNA, 18 nt, Human
ccccgcgcggggcccgcc

SEQ ID NO: 249443 - RNA, 22 nt, Human
ccccgcgcggggcccgccaugc

SEQ ID NO: 249444 - RNA, 18 nt, Human
ccccuuccagucuuuucc

SEQ ID NO: 249445 - RNA, 19 nt, Human
ccccuuccagucuuuucca

SEQ ID NO: 249446 - RNA, 18 nt, Human
ccccuuccccucucacuc

SEQ ID NO: 249447 - RNA, 18 nt, Human
cccucccgccccacccca

SEQ ID NO: 249448 - RNA, 21 nt, Human
cccucccgccccaccccaggc

SEQ ID NO: 249449 - RNA, 22 nt, Human
cccucccuucccuuccuuuccc

SEQ ID NO: 249450 - RNA, 21 nt, Human
cccuggcugcccucugcggcc

SEQ ID NO: 249451 - RNA, 22 nt, Human
cccuuccuuuccccuuccaguc

SEQ ID NO: 249452 - RNA, 24 nt, Human
cccuuccuuuccccuuccagucuu

SEQ ID NO: 249453 - RNA, 18 nt, Human
ccgcuggcucccgggugc

SEQ ID NO: 249454 - RNA, 21 nt, Human
ccggcccacccuccccaagua

SEQ ID NO: 249455 - RNA, 24 nt, Human
ccuagcccugcccucuggggugac

SEQ ID NO: 249456 - RNA, 20 nt, Human
ccucccgccccaccccaggc

SEQ ID NO: 249457 - RNA, 24 nt, Human
ccucccgccccaccccaggcucuc

SEQ ID NO: 249458 - RNA, 21 nt, Human
ccugccccuagguuguccugu

SEQ ID NO: 249459 - RNA, 25 nt, Human
ccuggccccacucagagggacccug

SEQ ID NO: 249460 - RNA, 22 nt, Human
ccugggguggaggagagaggca

SEQ ID NO: 249461 - RNA, 22 nt, Human
ccuucccuuccuuuccccuucc

SEQ ID NO: 249462 - RNA, 24 nt, Human
cgccuggcgccccuuccccucuca

SEQ ID NO: 249463 - RNA, 23 nt, Human
cgggcgccccugcccaggucccg

SEQ ID NO: 249464 - RNA, 19 nt, Human
cucccgccccaccccaggc

SEQ ID NO: 249465 - RNA, 20 nt, Human
cucccuucccuuccuuuccc

SEQ ID NO: 249466 - RNA, 18 nt, Human
cugccccuagguuguccu

SEQ ID NO: 249467 - RNA, 19 nt, Human
cugcuccgggcgccccugc

SEQ ID NO: 249468 - RNA, 18 nt, Human
cuguccucuaagccuggg

SEQ ID NO: 249469 - RNA, 20 nt, Human
cuuuccccuuccagucuuuu

SEQ ID NO: 249470 - RNA, 22 nt, Human
cuuuccccuuccagucuuuucc

SEQ ID NO: 249471 - RNA, 18 nt, Human
gaaaggagacuggagagg

SEQ ID NO: 249472 - RNA, 18 nt, Human
gaaaggagacuggagagg

SEQ ID NO: 249473 - RNA, 19 nt, Human
gcccccaccccagcccugc

SEQ ID NO: 249474 - RNA, 21 nt, Human
gcgccccuuccccucucacuc

SEQ ID NO: 249475 - RNA, 19 nt, Human
gcuacggccccaccggccc

SEQ ID NO: 249476 - RNA, 23 nt, Human
gcucgccuggcgccccuuccccu

SEQ ID NO: 249477 - RNA, 20 nt, Human
gcucucgccuagcccugccc

SEQ ID NO: 249478 - RNA, 19 nt, Human
ggaaaggagacuggagagg

SEQ ID NO: 249479 - RNA, 22 nt, Human
ggcugcccucugcggcccccac

SEQ ID NO: 249480 - RNA, 22 nt, Human
gggcccaccacccacggcugag

SEQ ID NO: 249481 - RNA, 19 nt, Human
ggguaggagaggaccaggg

SEQ ID NO: 249482 - RNA, 24 nt, Human
gguaggagaggaccagggagaggg

SEQ ID NO: 249483 - RNA, 24 nt, Human
guccucagcaauguaugaaccugg

SEQ ID NO: 249484 - RNA, 22 nt, Human
uagaacagaccucccucccuuc

SEQ ID NO: 249485 - RNA, 22 nt, Human
uagcccugcccucuggggugac

SEQ ID NO: 249486 - RNA, 22 nt, Human
uccccuuccagucuuuuccaua

SEQ ID NO: 249487 - RNA, 27 nt, Human
ucccgccccaccccaggcucucgccua

SEQ ID NO: 249488 - RNA, 25 nt, Human
ucccuuccuuuccccuuccagucuu

SEQ ID NO: 249489 - RNA, 20 nt, Human
uccugggccuggccccacuc

SEQ ID NO: 249490 - RNA, 23 nt, Human
ucucugccaugggcccaccaccc

SEQ ID NO: 249491 - RNA, 22 nt, Human
ucugcggcccccaccccagccc

SEQ ID NO: 249492 - RNA, 18 nt, Human
ucuguccucuaagccugg

SEQ ID NO: 249493 - RNA, 19 nt, Human
ucuguccucuaagccuggg

SEQ ID NO: 249494 - RNA, 18 nt, Human
ugcuccgggcgccccugc

SEQ ID NO: 249495 - RNA, 23 nt, Human
ugcuccgggcgccccugcccagg

SEQ ID NO: 249496 - RNA, 19 nt, Human
uggagagggcuggcugagg

SEQ ID NO: 249497 - RNA, 19 nt, Human
uggcucccgggugcucgcc

SEQ ID NO: 249498 - RNA, 18 nt, Human
uggcugaggguggguggg

SEQ ID NO: 249499 - RNA, 20 nt, Human
ugggguggaggagagaggca

SEQ ID NO: 249500 - RNA, 22 nt, Human
ugggguucugagaggacauggg

SEQ ID NO: 249501 - RNA, 24 nt, Human
ugggguucugagaggacaugggug

SEQ ID NO: 249502 - RNA, 19 nt, Human
uguaugaaccugguaaccc

SEQ ID NO: 249503 - RNA, 21 nt, Human
ugugacaguccugggccuggc

SEQ ID NO: 249504 - RNA, 24 nt, Human
uucaaggcugggguucugagagga

SEQ ID NO: 249505 - RNA, 20 nt, Human
uuucuguccucuaagccugg

SEQ ID NO: 249506 - RNA, 23 nt, Human
cacaaaccuguaccaagaagcac

SEQ ID NO: 249507 - RNA, 22 nt, Human
ucacaaaccuguaccaagaagc

SEQ ID NO: 249508 - RNA, 19 nt, Human
ugagucaaagacgacauuu

SEQ ID NO: 249509 - RNA, 24 nt, Human
uucaacaacugcaaaaugagccuc

SEQ ID NO: 249510 - RNA, 24 nt, Human
uugguacuugagucaaagacgaca

SEQ ID NO: 249511 - RNA, 19 nt, Human
uuugaagcauuuaguaaca

SEQ ID NO: 249512 - RNA, 22 nt, Human
aaguuuaucugcaacggcuuug

SEQ ID NO: 249513 - RNA, 23 nt, Human
accuugaaaaauaaaaucaagga

SEQ ID NO: 249514 - RNA, 22 nt, Human
auuaaaauacaaaguuuaucug

SEQ ID NO: 249515 - RNA, 20 nt, Human
auuuggaaggcaugaugaug

SEQ ID NO: 249516 - RNA, 21 nt, Human
ccacccacaauuuggaaggca

SEQ ID NO: 249517 - RNA, 18 nt, Human
ccgacuggcaggcacagg

SEQ ID NO: 249518 - RNA, 18 nt, Human
cgacuggcaggcacagga

SEQ ID NO: 249519 - RNA, 20 nt, Human
cgcggaagugacuccaacga

SEQ ID NO: 249520 - RNA, 21 nt, Human
cuccaacgaccuccacacugc

SEQ ID NO: 249521 - RNA, 20 nt, Human
cuggcaggcacaggagcugg

SEQ ID NO: 249522 - RNA, 18 nt, Human
gaccuccacacugcccag

SEQ ID NO: 249523 - RNA, 25 nt, Human
gcggaagugacuccaacgaccucca

SEQ ID NO: 249524 - RNA, 24 nt, Human
uacaguaaucaucaccaaagcaaa

SEQ ID NO: 249525 - RNA, 18 nt, Human
uccacacugcccagcgcc

SEQ ID NO: 249526 - RNA, 21 nt, Human
ugaaaaauaaaaucaaggacg

SEQ ID NO: 249527 - RNA, 23 nt, Human
ugaaaaauaaaaucaaggacggc

SEQ ID NO: 249528 - RNA, 20 nt, Human
ugacaugaugccuucauaaa

SEQ ID NO: 249529 - RNA, 21 nt, Human
ugacgcggaagugacuccaac

SEQ ID NO: 249530 - RNA, 18 nt, Human
ugacuccaacgaccucca

SEQ ID NO: 249531 - RNA, 21 nt, Human
ugcgcccacagagccacccac

SEQ ID NO: 249532 - RNA, 20 nt, Human
uggaaggcaugaugauguca

SEQ ID NO: 249533 - RNA, 19 nt, Human
uugaaaaauaaaaucaagg

SEQ ID NO: 249534 - RNA, 26 nt, Human
uuuuuuuuuuuuuuuuuacagaaggg

SEQ ID NO: 249535 - RNA, 22 nt, Human
uuuuuuuuuuuuuuuuuuacag

SEQ ID NO: 249536 - RNA, 21 nt, Human
aacgagcagacagaaggcacu

SEQ ID NO: 249537 - RNA, 23 nt, Human
aauggaauuguggggaagaacaa

SEQ ID NO: 249538 - RNA, 18 nt, Human
agggcaugauugauuaaa

SEQ ID NO: 249539 - RNA, 18 nt, Human
agggguggggcuggggag

SEQ ID NO: 249540 - RNA, 18 nt, Human
agggguggggcuggggag

SEQ ID NO: 249541 - RNA, 21 nt, Human
cacuggugggucacaucucgg

SEQ ID NO: 249542 - RNA, 23 nt, Human
caggccccaugugacaccagggg

SEQ ID NO: 249543 - RNA, 19 nt, Human
ccccaugugacaccagggg

SEQ ID NO: 249544 - RNA, 19 nt, Human
ccuuggcauccaggcuugg

SEQ ID NO: 249545 - RNA, 18 nt, Human
cgggccugggagagggag

SEQ ID NO: 249546 - RNA, 20 nt, Human
cgggccugggagagggaggg

SEQ ID NO: 249547 - RNA, 24 nt, Human
cguggccaggccccaugugacacc

SEQ ID NO: 249548 - RNA, 27 nt, Human
cuucccagaaucccuugucccucccca

SEQ ID NO: 249549 - RNA, 20 nt, Human
gaagaacaaaagcgggcucu

SEQ ID NO: 249550 - RNA, 21 nt, Human
gaagaacaaaagcgggcucug

SEQ ID NO: 249551 - RNA, 18 nt, Human
gagagggagggcguggcc

SEQ ID NO: 249552 - RNA, 19 nt, Human
gcuggggagugagagggac

SEQ ID NO: 249553 - RNA, 22 nt, Human
ggagugagagggacaaggcagg

SEQ ID NO: 249554 - RNA, 20 nt, Human
ggccugggagagggagggcg

SEQ ID NO: 249555 - RNA, 19 nt, Human
ggcguggccaggccccaug

SEQ ID NO: 249556 - RNA, 23 nt, Human
gggcacuuagggguggggcuggg

SEQ ID NO: 249557 - RNA, 22 nt, Human
gggccugggagagggagggcgu

SEQ ID NO: 249558 - RNA, 18 nt, Human
gggguggggcuggggagu

SEQ ID NO: 249559 - RNA, 23 nt, Human
guggccaggccccaugugacacc

SEQ ID NO: 249560 - RNA, 19 nt, Human
uaaagcuaacgagcagaca

SEQ ID NO: 249561 - RNA, 24 nt, Human
uaguaauggaauuguggggaagaa

SEQ ID NO: 249562 - RNA, 27 nt, Human
ucccagaaucccuugucccuccccacu

SEQ ID NO: 249563 - RNA, 20 nt, Human
ugauguguuucuuaguaaug

SEQ ID NO: 249564 - RNA, 26 nt, Human
uggccaggccccaugugacaccaggg

SEQ ID NO: 249565 - RNA, 27 nt, Human
uggccaggccccaugugacaccagggg

SEQ ID NO: 249566 - RNA, 18 nt, Human
uuagggguggggcugggg

SEQ ID NO: 249567 - RNA, 18 nt, Human
aaaaagucccagcacuuu

SEQ ID NO: 249568 - RNA, 22 nt, Human
aaaaauauaauacucucagucc

SEQ ID NO: 249569 - RNA, 21 nt, Human
aaaacuuaccaguuccccaag

SEQ ID NO: 249570 - RNA, 28 nt, Human
aaacaaaauccacucaaagacauuaaaa

SEQ ID NO: 249571 - RNA, 20 nt, Human
aaaugccucuucaggguccc

SEQ ID NO: 249572 - RNA, 18 nt, Human
aacuuaccaguuccccaa

SEQ ID NO: 249573 - RNA, 19 nt, Human
aaggggcuagguagaaguc

SEQ ID NO: 249574 - RNA, 21 nt, Human
aaguuccugcagccucugcuu

SEQ ID NO: 249575 - RNA, 23 nt, Human
acacaucaccuuccuuguucccu

SEQ ID NO: 249576 - RNA, 20 nt, Human
accaaaaagucccagcacuu

SEQ ID NO: 249577 - RNA, 20 nt, Human
acuucccuucucugucucaa

SEQ ID NO: 249578 - RNA, 19 nt, Human
agaagucuauccaacuguu

SEQ ID NO: 249579 - RNA, 20 nt, Human
agcacccugccagaaguaag

SEQ ID NO: 249580 - RNA, 20 nt, Human
agggaccugcugcaggccag

SEQ ID NO: 249581 - RNA, 22 nt, Human
auaagagagcagaaaugcaagg

SEQ ID NO: 249582 - RNA, 18 nt, Human
auccccacacaaguuccu

SEQ ID NO: 249583 - RNA, 21 nt, Human
cagaagccuaggacaguauaa

SEQ ID NO: 249584 - RNA, 21 nt, Human
cagaauuucucaaggcauuau

SEQ ID NO: 249585 - RNA, 22 nt, Human
caguuucuuuagaagucuucca

SEQ ID NO: 249586 - RNA, 23 nt, Human
ccacacaaguuccugcagccucu

SEQ ID NO: 249587 - RNA, 18 nt, Human
ccagcuuuuucaacaagc

SEQ ID NO: 249588 - RNA, 26 nt, Human
cccaggaaaaauauaauacucucagu

SEQ ID NO: 249589 - RNA, 27 nt, Human
ccuccaggcuacuuaaguacuuaauuu

SEQ ID NO: 249590 - RNA, 27 nt, Human
ccugcacacugcuucuaugaacacccc

SEQ ID NO: 249591 - RNA, 22 nt, Human
ccugcagccucugcuuaugugc

SEQ ID NO: 249592 - RNA, 21 nt, Human
ccuuguucccuuucaccccca

SEQ ID NO: 249593 - RNA, 20 nt, Human
cgccggagcccccgcuacuc

SEQ ID NO: 249594 - RNA, 26 nt, Human
cgccggagcccccgcuacuccgacag

SEQ ID NO: 249595 - RNA, 20 nt, Human
cuccaacacucugaaaugcc

SEQ ID NO: 249596 - RNA, 26 nt, Human
cugcacacugcuucuaugaacacccc

SEQ ID NO: 249597 - RNA, 24 nt, Human
cugcagccucugcuuaugugcuca

SEQ ID NO: 249598 - RNA, 20 nt, Human
cugcaggccagcugugacau

SEQ ID NO: 249599 - RNA, 22 nt, Human
cuucuccugccugccagacuca

SEQ ID NO: 249600 - RNA, 24 nt, Human
gagaaagaaauguggaaagcauug

SEQ ID NO: 249601 - RNA, 21 nt, Human
gcaaacuuucuucaacuuaua

SEQ ID NO: 249602 - RNA, 22 nt, Human
gcaaacuuucuucaacuuauaa

SEQ ID NO: 249603 - RNA, 20 nt, Human
gcaagaucucugagagacag

SEQ ID NO: 249604 - RNA, 20 nt, Human
gcagaaaugcaagaucucug

SEQ ID NO: 249605 - RNA, 18 nt, Human
guccuuuccuacuaauca

SEQ ID NO: 249606 - RNA, 20 nt, Human
uaaaaauugugguaaaaaau

SEQ ID NO: 249607 - RNA, 19 nt, Human
uaacuggagaaaaagcucc

SEQ ID NO: 249608 - RNA, 22 nt, Human
uagcaaaacucucauuuugguu

SEQ ID NO: 249609 - RNA, 22 nt, Human
uauguaaaucuacauuacuaga

SEQ ID NO: 249610 - RNA, 26 nt, Human
ucaagugucaaacuauuuaaaauucc

SEQ ID NO: 249611 - RNA, 24 nt, Human
ucacagggaccugcugcaggccag

SEQ ID NO: 249612 - RNA, 22 nt, Human
ucagcucagcacccugccagaa

SEQ ID NO: 249613 - RNA, 18 nt, Human
ucagugguggacaugaac

SEQ ID NO: 249614 - RNA, 21 nt, Human
uccaaacaaacugccuuugau

SEQ ID NO: 249615 - RNA, 22 nt, Human
ucuggcaacaaugaucaucaga

SEQ ID NO: 249616 - RNA, 21 nt, Human
ugaaggaacaacagucaaucc

SEQ ID NO: 249617 - RNA, 22 nt, Human
ugagauccccacacaaguuccu

SEQ ID NO: 249618 - RNA, 18 nt, Human
ugcuucuaugaacacccc

SEQ ID NO: 249619 - RNA, 21 nt, Human
uggcaacaaugaucaucagaa

SEQ ID NO: 249620 - RNA, 19 nt, Human
ugguacagcaaacuuucuu

SEQ ID NO: 249621 - RNA, 21 nt, Human
ugguacagcaaacuuucuuca

SEQ ID NO: 249622 - RNA, 22 nt, Human
uuaacuggagaaaaagcuccga

SEQ ID NO: 249623 - RNA, 24 nt, Human
uuaccaaaaagucccagcacuuug

SEQ ID NO: 249624 - RNA, 21 nt, Human
uuucuagaaccuaccuccagg

SEQ ID NO: 249625 - RNA, 20 nt, Human
uuuucuagaaccuaccucca

SEQ ID NO: 249626 - RNA, 19 nt, Human
aaaaaaaaaaccaaguacu

SEQ ID NO: 249627 - RNA, 26 nt, Human
aaaaaaaaaaccaaguacuucucauu

SEQ ID NO: 249628 - RNA, 21 nt, Human
aaaaaaaaccaaguacuucuc

SEQ ID NO: 249629 - RNA, 19 nt, Human
aacacggugaaacccuguc

SEQ ID NO: 249630 - RNA, 20 nt, Human
aacacggugaaacccugucu

SEQ ID NO: 249631 - RNA, 21 nt, Human
aacacggugaaacccugucuc

SEQ ID NO: 249632 - RNA, 24 nt, Human
acagagcaagacucggucucaaaa

SEQ ID NO: 249633 - RNA, 26 nt, Human
acccacugcacuccagccuggguaac

SEQ ID NO: 249634 - RNA, 24 nt, Human
acccugucucuacuaaaaguacaa

SEQ ID NO: 249635 - RNA, 24 nt, Human
acugcacuccagccuggguaacag

SEQ ID NO: 249636 - RNA, 26 nt, Human
acugcacuccagccuggguaacagag

SEQ ID NO: 249637 - RNA, 19 nt, Human
agagcuugcagugagccaa

SEQ ID NO: 249638 - RNA, 23 nt, Human
agagcuugcagugagccaagauc

SEQ ID NO: 249639 - RNA, 24 nt, Human
agcacuuugggaggccgagguggg

SEQ ID NO: 249640 - RNA, 24 nt, Human
agccuggguaacagagcaagacuc

SEQ ID NO: 249641 - RNA, 23 nt, Human
agcuaauugggaggcugaggcag

SEQ ID NO: 249642 - RNA, 18 nt, Human
aggcaggagaauggugcg

SEQ ID NO: 249643 - RNA, 21 nt, Human
aggcaggagaauggugcgaac

SEQ ID NO: 249644 - RNA, 24 nt, Human
aggcaggagaauggugcgaacccg

SEQ ID NO: 249645 - RNA, 19 nt, Human
aggccccagaagcagccaa

SEQ ID NO: 249646 - RNA, 22 nt, Human
aggccccagaagcagccaagcu

SEQ ID NO: 249647 - RNA, 21 nt, Human
aggccgaggugggcggaucac

SEQ ID NO: 249648 - RNA, 18 nt, Human
aggcugaggcaggagaau

SEQ ID NO: 249649 - RNA, 19 nt, Human
aggcugaggcaggagaaug

SEQ ID NO: 249650 - RNA, 24 nt, Human
aggugggcggaucacgaggucagg

SEQ ID NO: 249651 - RNA, 23 nt, Human
aucacccacugcacuccagccug

SEQ ID NO: 249652 - RNA, 19 nt, Human
augccuguaaucccagcac

SEQ ID NO: 249653 - RNA, 20 nt, Human
caagaucacccacugcacuc

SEQ ID NO: 249654 - RNA, 19 nt, Human
caagcuaauugggaggcug

SEQ ID NO: 249655 - RNA, 21 nt, Human
caaguacuucucauuuaagac

SEQ ID NO: 249656 - RNA, 21 nt, Human
cacacaggccccagaagcagc

SEQ ID NO: 249657 - RNA, 19 nt, Human
cacuaauccggggagggac

SEQ ID NO: 249658 - RNA, 23 nt, Human
cacuccagccuggguaacagagc

SEQ ID NO: 249659 - RNA, 18 nt, Human
cacugcacuccagccugg

SEQ ID NO: 249660 - RNA, 19 nt, Human
cacugcacuccagccuggg

SEQ ID NO: 249661 - RNA, 19 nt, Human
cacugcacuccagccuggg

SEQ ID NO: 249662 - RNA, 21 nt, Human
cacugcacuccagccugggua

SEQ ID NO: 249663 - RNA, 22 nt, Human
cacugcacuccagccuggguaa

SEQ ID NO: 249664 - RNA, 23 nt, Human
cacugcacuccagccuggguaac

SEQ ID NO: 249665 - RNA, 24 nt, Human
cacugcacuccagccuggguaaca

SEQ ID NO: 249666 - RNA, 21 nt, Human
cagagcaagacucggucucag

SEQ ID NO: 249667 - RNA, 21 nt, Human
cagcacuuugggaggccgagg

SEQ ID NO: 249668 - RNA, 24 nt, Human
cagcacuuugggaggccgaggugg

SEQ ID NO: 249669 - RNA, 19 nt, Human
caggccccagaagcagcca

SEQ ID NO: 249670 - RNA, 20 nt, Human
caggccccagaagcagccaa

SEQ ID NO: 249671 - RNA, 21 nt, Human
caggccccagaagcagccaag

SEQ ID NO: 249672 - RNA, 20 nt, Human
caugccuguaaucccagcac

SEQ ID NO: 249673 - RNA, 24 nt, Human
caugccuguaaucccagcacuuug

SEQ ID NO: 249674 - RNA, 18 nt, Human
ccacugcacuccagccug

SEQ ID NO: 249675 - RNA, 20 nt, Human
ccacugcacuccagccuggg

SEQ ID NO: 249676 - RNA, 20 nt, Human
ccacugcacuccagccuggg

SEQ ID NO: 249677 - RNA, 21 nt, Human
ccacugcacuccagccugggu

SEQ ID NO: 249678 - RNA, 22 nt, Human
ccacugcacuccagccugggua

SEQ ID NO: 249679 - RNA, 24 nt, Human
ccacugcacuccagccuggguaac

SEQ ID NO: 249680 - RNA, 24 nt, Human
cccacugcacuccagccuggguaa

SEQ ID NO: 249681 - RNA, 18 nt, Human
ccccagaagcagccaagc

SEQ ID NO: 249682 - RNA, 19 nt, Human
ccccagaagcagccaagcu

SEQ ID NO: 249683 - RNA, 23 nt, Human
cccggggagggcagagcuugcag

SEQ ID NO: 249684 - RNA, 18 nt, Human
cccugggccucggggauc

SEQ ID NO: 249685 - RNA, 20 nt, Human
ccgacacacagggccacacc

SEQ ID NO: 249686 - RNA, 22 nt, Human
ccuggcuaacacggugaaaccc

SEQ ID NO: 249687 - RNA, 24 nt, Human
ccuggcuaacacggugaaacccug

SEQ ID NO: 249688 - RNA, 22 nt, Human
ccuggguaacagagcaagacuc

SEQ ID NO: 249689 - RNA, 20 nt, Human
ccuguaaucccagcacuuug

SEQ ID NO: 249690 - RNA, 22 nt, Human
ccuguaaucccagcacuuuggg

SEQ ID NO: 249691 - RNA, 24 nt, Human
cgagaccauccuggcuaacacggu

SEQ ID NO: 249692 - RNA, 24 nt, Human
cgaggugggcggaucacgagguca

SEQ ID NO: 249693 - RNA, 24 nt, Human
cgcccugggccucggggaucauuc

SEQ ID NO: 249694 - RNA, 18 nt, Human
cgcggccgccccucgggc

SEQ ID NO: 249695 - RNA, 18 nt, Human
cgguggcucaugccugua

SEQ ID NO: 249696 - RNA, 23 nt, Human
cucaugccuguaaucccagcacu

SEQ ID NO: 249697 - RNA, 24 nt, Human
cucaugccuguaaucccagcacuu

SEQ ID NO: 249698 - RNA, 18 nt, Human
cuggcuaacacggugaaa

SEQ ID NO: 249699 - RNA, 24 nt, Human
cuggcuaacacggugaaacccugu

SEQ ID NO: 249700 - RNA, 27 nt, Human
gaaaaaaaaaaccaaguacuucucauu

SEQ ID NO: 249701 - RNA, 19 nt, Human
gaaacccugucucuacuaa

SEQ ID NO: 249702 - RNA, 20 nt, Human
gaacccggggagggcagagc

SEQ ID NO: 249703 - RNA, 20 nt, Human
gagcaagacucggucucaaa

SEQ ID NO: 249704 - RNA, 18 nt, Human
gagcuugcagugagccaa

SEQ ID NO: 249705 - RNA, 21 nt, Human
gaggcauuuucucacuuugau

SEQ ID NO: 249706 - RNA, 23 nt, Human
gaggugggcggaucacgagguca

SEQ ID NO: 249707 - RNA, 24 nt, Human
gaucacccacugcacuccagccug

SEQ ID NO: 249708 - RNA, 24 nt, Human
gcacuccagccuggguaacagagc

SEQ ID NO: 249709 - RNA, 19 nt, Human
gcccugggccucggggauc

SEQ ID NO: 249710 - RNA, 23 nt, Human
gcccugggccucggggaucauuc

SEQ ID NO: 249711 - RNA, 21 nt, Human
gcccugggccucggggauccc

SEQ ID NO: 249712 - RNA, 18 nt, Human
gccugcuccucaccaucc

SEQ ID NO: 249713 - RNA, 24 nt, Human
gcuaacacggugaaacccugucuc

SEQ ID NO: 249714 - RNA, 23 nt, Human
ggcagagcuugcagugagccaag

SEQ ID NO: 249715 - RNA, 21 nt, Human
ggcagaugacuguaggccaag

SEQ ID NO: 249716 - RNA, 21 nt, Human
ggcggaucacgaggucaggag

SEQ ID NO: 249717 - RNA, 21 nt, Human
ggcucaugccuguaaucccag

SEQ ID NO: 249718 - RNA, 20 nt, Human
gggaggccgaggugggcgga

SEQ ID NO: 249719 - RNA, 24 nt, Human
gggcggaucacgaggucaggagau

SEQ ID NO: 249720 - RNA, 18 nt, Human
ggugcgaacccggggagg

SEQ ID NO: 249721 - RNA, 23 nt, Human
gguggcucaugccuguaauccca

SEQ ID NO: 249722 - RNA, 24 nt, Human
gguggcucaugccuguaaucccag

SEQ ID NO: 249723 - RNA, 21 nt, Human
gugaaacccugucucuacuaa

SEQ ID NO: 249724 - RNA, 23 nt, Human
guggcucaugccuguaaucccag

SEQ ID NO: 249725 - RNA, 22 nt, Human
uaacacggugaaacccugucuc

SEQ ID NO: 249726 - RNA, 24 nt, Human
uaacacggugaaacccugucucua

SEQ ID NO: 249727 - RNA, 25 nt, Human
uaacagagcaagacucggucucagu

SEQ ID NO: 249728 - RNA, 18 nt, Human
uaagaaaaaaaaaaccaa

SEQ ID NO: 249729 - RNA, 22 nt, Human
uaagaaaaaaaaaaccaaguac

SEQ ID NO: 249730 - RNA, 26 nt, Human
uauacauauuuaagaaaaaaaaaacc

SEQ ID NO: 249731 - RNA, 23 nt, Human
uauaguaaguauucacuauucca

SEQ ID NO: 249732 - RNA, 24 nt, Human
uauaguaaguauucacuauuccac

SEQ ID NO: 249733 - RNA, 18 nt, Human
ucacgaggucaggagauc

SEQ ID NO: 249734 - RNA, 24 nt, Human
ucacgaggucaggagaucgagacc

SEQ ID NO: 249735 - RNA, 22 nt, Human
ucaugccuguaaucccagcacu

SEQ ID NO: 249736 - RNA, 19 nt, Human
uccacuaccaaaguagguc

SEQ ID NO: 249737 - RNA, 19 nt, Human
uccgggccagggcacuggg

SEQ ID NO: 249738 - RNA, 19 nt, Human
ucgcggccgccccucgggc

SEQ ID NO: 249739 - RNA, 19 nt, Human
ucgcggccgccccucgggc

SEQ ID NO: 249740 - RNA, 27 nt, Human
ucgggcucggcuucuugcuccuccggg

SEQ ID NO: 249741 - RNA, 22 nt, Human
ucucuacuaaaaguacaaaaaa

SEQ ID NO: 249742 - RNA, 24 nt, Human
ucucuacuaaaaguacaaaaaauu

SEQ ID NO: 249743 - RNA, 23 nt, Human
ugaggcaggagaauggugcgaac

SEQ ID NO: 249744 - RNA, 24 nt, Human
ugaggcaggagaauggugcgaacc

SEQ ID NO: 249745 - RNA, 25 nt, Human
ugaggcaggagaauggugcgaaccc

SEQ ID NO: 249746 - RNA, 20 nt, Human
ugccugcuccucaccauccg

SEQ ID NO: 249747 - RNA, 23 nt, Human
ugccuguaaucccagcacuuugg

SEQ ID NO: 249748 - RNA, 23 nt, Human
ugccuguaaucccagcacuuugg

SEQ ID NO: 249749 - RNA, 24 nt, Human
ugccuguaaucccagcacuuuggg

SEQ ID NO: 249750 - RNA, 21 nt, Human
ugcggaagcacgacgcccugg

SEQ ID NO: 249751 - RNA, 22 nt, Human
uggcagaugacuguaggccaag

SEQ ID NO: 249752 - RNA, 22 nt, Human
uggcucaugccuguaaucccag

SEQ ID NO: 249753 - RNA, 24 nt, Human
uggcucaugccuguaaucccagca

SEQ ID NO: 249754 - RNA, 18 nt, Human
uggcugcgaaagcagcag

SEQ ID NO: 249755 - RNA, 19 nt, Human
ugggaggccgaggugggcg

SEQ ID NO: 249756 - RNA, 24 nt, Human
ugggaggccgaggugggcggauca

SEQ ID NO: 249757 - RNA, 18 nt, Human
ugggaggcugaggcagga

SEQ ID NO: 249758 - RNA, 24 nt, Human
ugggaggcugaggcaggagaaugg

SEQ ID NO: 249759 - RNA, 19 nt, Human
uggugcgaacccggggagg

SEQ ID NO: 249760 - RNA, 19 nt, Human
uuauacuaaagagaagaaa

SEQ ID NO: 249761 - RNA, 20 nt, Human
uugcagugagccaagaucac

SEQ ID NO: 249762 - RNA, 21 nt, Human
uugccugcuccucaccauccg

SEQ ID NO: 249763 - RNA, 25 nt, Human
uugggaggccgaggugggcggauca

SEQ ID NO: 249764 - RNA, 20 nt, Human
uuuaagaaaaaaaaaaccaa

SEQ ID NO: 249765 - RNA, 23 nt, Human
uuuaagaaaaaaaaaaccaagua

SEQ ID NO: 249766 - RNA, 26 nt, Human
aaaaaaaaaaaaaacuagggugagag

SEQ ID NO: 249767 - RNA, 24 nt, Human
aaaaaaaaaaaacuagggugagag

SEQ ID NO: 249768 - RNA, 19 nt, Human
acccaggcuggagugcagu

SEQ ID NO: 249769 - RNA, 18 nt, Human
accuccccuauacccccg

SEQ ID NO: 249770 - RNA, 20 nt, Human
acucacugcacuucagccug

SEQ ID NO: 249771 - RNA, 18 nt, Human
acugcacuucagccuggg

SEQ ID NO: 249772 - RNA, 24 nt, Human
acugcacuucagccugggagacag

SEQ ID NO: 249773 - RNA, 22 nt, Human
acugcagucuguugguaaaacu

SEQ ID NO: 249774 - RNA, 20 nt, Human
acuucagccugggagacaga

SEQ ID NO: 249775 - RNA, 19 nt, Human
agacagaacaagacagacc

SEQ ID NO: 249776 - RNA, 24 nt, Human
agacagacccugucgccccacacc

SEQ ID NO: 249777 - RNA, 25 nt, Human
aggcuggagugcaguggcucaaucu

SEQ ID NO: 249778 - RNA, 20 nt, Human
agugcaguggcucaaucuug

SEQ ID NO: 249779 - RNA, 22 nt, Human
caagaguuuuucuuuuggguuc

SEQ ID NO: 249780 - RNA, 21 nt, Human
cacaccuccccuauacccccg

SEQ ID NO: 249781 - RNA, 18 nt, Human
cacugcacuucagccugg

SEQ ID NO: 249782 - RNA, 19 nt, Human
cacugcacuucagccuggg

SEQ ID NO: 249783 - RNA, 19 nt, Human
cacugcacuucagccuggg

SEQ ID NO: 249784 - RNA, 21 nt, Human
cacugcacuucagccugggag

SEQ ID NO: 249785 - RNA, 22 nt, Human
cacugcacuucagccugggaga

SEQ ID NO: 249786 - RNA, 23 nt, Human
cacugcacuucagccugggagac

SEQ ID NO: 249787 - RNA, 24 nt, Human
cacugcacuucagccugggagaca

SEQ ID NO: 249788 - RNA, 25 nt, Human
cacugcacuucagccugggagacag

SEQ ID NO: 249789 - RNA, 26 nt, Human
cagaacaagacagacccugucgcccc

SEQ ID NO: 249790 - RNA, 25 nt, Human
cccacaccuccccuauaaucgguug

SEQ ID NO: 249791 - RNA, 21 nt, Human
cccacaccuccccuauacccc

SEQ ID NO: 249792 - RNA, 19 nt, Human
cccugucgccccacaccuc

SEQ ID NO: 249793 - RNA, 24 nt, Human
cccugucgccccacaccuccccua

SEQ ID NO: 249794 - RNA, 24 nt, Human
cgcgcugucacccaggcuggagug

SEQ ID NO: 249795 - RNA, 25 nt, Human
cggaaaaaaaaaagugcaaaaaaaa

SEQ ID NO: 249796 - RNA, 18 nt, Human
cggguggggggaggggug

SEQ ID NO: 249797 - RNA, 21 nt, Human
cucagauuucuacaacucguu

SEQ ID NO: 249798 - RNA, 25 nt, Human
cuucuguucuucauuguuagcucca

SEQ ID NO: 249799 - RNA, 21 nt, Human
gagagccaugaaauagcugaa

SEQ ID NO: 249800 - RNA, 18 nt, Human
gcaaaaaaaaaaaaaaac

SEQ ID NO: 249801 - RNA, 25 nt, Human
gcuggagugcaguggcucaaucuug

SEQ ID NO: 249802 - RNA, 24 nt, Human
gcugucacccaggcuggagugcag

SEQ ID NO: 249803 - RNA, 22 nt, Human
ggaaaaaaaaaagugcaaaaaa

SEQ ID NO: 249804 - RNA, 23 nt, Human
ggaaaaaaaaaagugcaaaaaaa

SEQ ID NO: 249805 - RNA, 23 nt, Human
ggaaaaaaaaaagugcaaaaaaa

SEQ ID NO: 249806 - RNA, 20 nt, Human
ggaaauaaaauuaaauaaag

SEQ ID NO: 249807 - RNA, 19 nt, Human
ggcuggagugcaguggcuc

SEQ ID NO: 249808 - RNA, 21 nt, Human
uagaaggaaacacuuuaucau

SEQ ID NO: 249809 - RNA, 20 nt, Human
ucaagaguuuuucuuuuggg

SEQ ID NO: 249810 - RNA, 22 nt, Human
ucacccaggcuggagugcagug

SEQ ID NO: 249811 - RNA, 19 nt, Human
ucacugcacuucagccugg

SEQ ID NO: 249812 - RNA, 24 nt, Human
ucacugcacuucagccugggagac

SEQ ID NO: 249813 - RNA, 26 nt, Human
ucgccccacaccuccccuauaccccc

SEQ ID NO: 249814 - RNA, 24 nt, Human
ucgcgcugucacccaggcuggagu

SEQ ID NO: 249815 - RNA, 23 nt, Human
ucucgcgcugucacccaggcugg

SEQ ID NO: 249816 - RNA, 24 nt, Human
ucucgcgcugucacccaggcugga

SEQ ID NO: 249817 - RNA, 24 nt, Human
ucucuuguuuucaagaguuuuucu

SEQ ID NO: 249818 - RNA, 24 nt, Human
ugaagaaacugcaguccugugcgg

SEQ ID NO: 249819 - RNA, 20 nt, Human
ugagagccaugaaauagcug

SEQ ID NO: 249820 - RNA, 22 nt, Human
ugagauggagucucgcgcuguc

SEQ ID NO: 249821 - RNA, 18 nt, Human
ugcaaaaaaaaaaaaaaa

SEQ ID NO: 249822 - RNA, 22 nt, Human
ugcaaaaaaaaaaaaaaacuag

SEQ ID NO: 249823 - RNA, 23 nt, Human
ugcaguggcucaaucuugacuca

SEQ ID NO: 249824 - RNA, 22 nt, Human
ugcauggaagaaaucucuuguu

SEQ ID NO: 249825 - RNA, 19 nt, Human
uggagugcaguggcucaau

SEQ ID NO: 249826 - RNA, 23 nt, Human
uggagugcaguggcucaaucuug

SEQ ID NO: 249827 - RNA, 19 nt, Human
ugucugaagaggggcagaa

SEQ ID NO: 249828 - RNA, 18 nt, Human
uucaccuaacuauguacc

SEQ ID NO: 249829 - RNA, 23 nt, Human
uugacucacugcacuucagccug

SEQ ID NO: 249830 - RNA, 19 nt, Human
aacccugcggcccccaccu

SEQ ID NO: 249831 - RNA, 20 nt, Human
aacccugcggcccccaccuc

SEQ ID NO: 249832 - RNA, 19 nt, Human
agacagugcgccugaucag

SEQ ID NO: 249833 - RNA, 23 nt, Human
agcuaugagcuguucuauuuucu

SEQ ID NO: 249834 - RNA, 19 nt, Human
cacucucucucccucccuc

SEQ ID NO: 249835 - RNA, 20 nt, Human
cccucccucucucuccuguc

SEQ ID NO: 249836 - RNA, 20 nt, Human
cccuccuguuucucuccugu

SEQ ID NO: 249837 - RNA, 20 nt, Human
ccucccucucucccuuucuc

SEQ ID NO: 249838 - RNA, 19 nt, Human
ccugcggcccccaccuccu

SEQ ID NO: 249839 - RNA, 21 nt, Human
cgucgguaggaaaacaaaagg

SEQ ID NO: 249840 - RNA, 18 nt, Human
cucccucccucucucucc

SEQ ID NO: 249841 - RNA, 24 nt, Human
cucccucucucccuuucucucaaa

SEQ ID NO: 249842 - RNA, 19 nt, Human
cucccuuucucucaaucca

SEQ ID NO: 249843 - RNA, 18 nt, Human
cucucucucucucucucu

SEQ ID NO: 249844 - RNA, 18 nt, Human
cucucucucucucucucu

SEQ ID NO: 249845 - RNA, 18 nt, Human
cucucucucucucucucu

SEQ ID NO: 249846 - RNA, 18 nt, Human
cucucucucucucucucu

SEQ ID NO: 249847 - RNA, 18 nt, Human
cucucucucucucucucu

SEQ ID NO: 249848 - RNA, 18 nt, Human
cucucucucucucucucu

SEQ ID NO: 249849 - RNA, 18 nt, Human
cucucucucucucucucu

SEQ ID NO: 249850 - RNA, 18 nt, Human
cucucucucucucucucu

SEQ ID NO: 249851 - RNA, 18 nt, Human
cucucucucucucucucu

SEQ ID NO: 249852 - RNA, 18 nt, Human
cucucucucucucucucu

SEQ ID NO: 249853 - RNA, 18 nt, Human
cucucucucucucucucu

SEQ ID NO: 249854 - RNA, 18 nt, Human
cucucucucucucucucu

SEQ ID NO: 249855 - RNA, 18 nt, Human
cucucucucucucucucu

SEQ ID NO: 249856 - RNA, 18 nt, Human
cucucucucucucucucu

SEQ ID NO: 249857 - RNA, 18 nt, Human
cuuggauccuuuccuucu

SEQ ID NO: 249858 - RNA, 18 nt, Human
cuuuccuucuuuugcucu

SEQ ID NO: 249859 - RNA, 18 nt, Human
gagcucagcgccccaacc

SEQ ID NO: 249860 - RNA, 19 nt, Human
gcagccucugguguguggu

SEQ ID NO: 249861 - RNA, 21 nt, Human
gcaggacgccgguagauggca

SEQ ID NO: 249862 - RNA, 23 nt, Human
gccccaacccugcggcccccacc

SEQ ID NO: 249863 - RNA, 19 nt, Human
gcccccaccuccuugcccu

SEQ ID NO: 249864 - RNA, 23 nt, Human
gccugaucagggggucugggagc

SEQ ID NO: 249865 - RNA, 21 nt, Human
gcgccugaucagggggucugg

SEQ ID NO: 249866 - RNA, 23 nt, Human
gcgccugaucagggggucuggga

SEQ ID NO: 249867 - RNA, 22 nt, Human
gggccuccgaguuuuuuccccu

SEQ ID NO: 249868 - RNA, 23 nt, Human
gugcccaguccugcagccucugg

SEQ ID NO: 249869 - RNA, 23 nt, Human
uacaaaacugcuuucaaaacgag

SEQ ID NO: 249870 - RNA, 19 nt, Human
ucacucucucucccucccu

SEQ ID NO: 249871 - RNA, 20 nt, Human
ucccuuucucucaauccaca

SEQ ID NO: 249872 - RNA, 22 nt, Human
uccuguuucucucucucuucca

SEQ ID NO: 249873 - RNA, 26 nt, Human
ucgcucccucccucucucuccugucu

SEQ ID NO: 249874 - RNA, 26 nt, Human
ucucccucccucucucccuuucucuc

SEQ ID NO: 249875 - RNA, 18 nt, Human
ucuccugucucucucucu

SEQ ID NO: 249876 - RNA, 23 nt, Human
ucucgcucccucccucucucucc

SEQ ID NO: 249877 - RNA, 21 nt, Human
ugagggauuuguuuuaugaug

SEQ ID NO: 249878 - RNA, 20 nt, Human
uggcuucggguggggggagg

SEQ ID NO: 249879 - RNA, 19 nt, Human
uggggcuuuuuuuucuugg

SEQ ID NO: 249880 - RNA, 18 nt, Human
uguguauuaaauaucaag

SEQ ID NO: 249881 - RNA, 19 nt, Human
uuucucucucucuuccaca

SEQ ID NO: 249882 - RNA, 25 nt, Human
aaauaaccagaaggcaaagugaagc

SEQ ID NO: 249883 - RNA, 22 nt, Human
agacagaaaccauaaauaacca

SEQ ID NO: 249884 - RNA, 23 nt, Human
cggugcaggcggcggaugcugcu

SEQ ID NO: 249885 - RNA, 19 nt, Human
cuuuaaaaauuaugaaagg

SEQ ID NO: 249886 - RNA, 19 nt, Human
gcggggucaggccggggcg

SEQ ID NO: 249887 - RNA, 26 nt, Human
ucagacagaaaccauaaauaaccaac

SEQ ID NO: 249888 - RNA, 22 nt, Human
ucaggccggggcgggccgcacg

SEQ ID NO: 249889 - RNA, 20 nt, Human
ucaggccggggcgggccgcc

SEQ ID NO: 249890 - RNA, 24 nt, Human
ucauuaauagaguuagaaauguuu

SEQ ID NO: 249891 - RNA, 23 nt, Human
ugcaggcggcggaugcugcuggg

SEQ ID NO: 249892 - RNA, 26 nt, Human
uggggugacggugcugacugcagcca

SEQ ID NO: 249893 - RNA, 24 nt, Human
aggagguacacccggcggagaggc

SEQ ID NO: 249894 - RNA, 18 nt, Human
aagugggucucugagaag

SEQ ID NO: 249895 - RNA, 23 nt, Human
agauggaaauggacauuacaacc

SEQ ID NO: 249896 - RNA, 18 nt, Human
cuccccucaaauggcccc

SEQ ID NO: 249897 - RNA, 19 nt, Human
guguucaguccugugcugg

SEQ ID NO: 249898 - RNA, 20 nt, Human
uaaggugguugggcuuggac

SEQ ID NO: 249899 - RNA, 23 nt, Human
uaggugcuuuauucuccacagag

SEQ ID NO: 249900 - RNA, 18 nt, Human
ugagaagucugaugugcc

SEQ ID NO: 249901 - RNA, 18 nt, Human
ugauguggaaagggagac

SEQ ID NO: 249902 - RNA, 24 nt, Human
ugcuuuauucuccacagagugaua

SEQ ID NO: 249903 - RNA, 20 nt, Human
uggaaauggacauuacaacc

SEQ ID NO: 249904 - RNA, 20 nt, Human
uguacagaacugaauaaagu

SEQ ID NO: 249905 - RNA, 19 nt, Human
uguucaguccugugcuggu

SEQ ID NO: 249906 - RNA, 21 nt, Human
uugauguggaaagggagacgg

SEQ ID NO: 249907 - RNA, 19 nt, Human
aaaaaccaaaccaaaccca

SEQ ID NO: 249908 - RNA, 21 nt, Human
aaaaaccaaaccaaacccaaa

SEQ ID NO: 249909 - RNA, 18 nt, Human
aaaaacuaaaagcaaaac

SEQ ID NO: 249910 - RNA, 20 nt, Human
aaaaagcaaaacaaaagccc

SEQ ID NO: 249911 - RNA, 22 nt, Human
aaaaccccagaaagacaaguaa

SEQ ID NO: 249912 - RNA, 20 nt, Human
aaaagcaaaacaaaagccca

SEQ ID NO: 249913 - RNA, 21 nt, Human
aaaagcccaggauagaggaga

SEQ ID NO: 249914 - RNA, 21 nt, Human
aaacagaaaaaccccagaaag

SEQ ID NO: 249915 - RNA, 18 nt, Human
aaaccaaaccaaacccaa

SEQ ID NO: 249916 - RNA, 20 nt, Human
aaaccccagaaagacaagua

SEQ ID NO: 249917 - RNA, 30 nt, Human
aaacuaaaaagcaaaacaaaagcccaggag

SEQ ID NO: 249918 - RNA, 26 nt, Human
aaacuaaaagcaaaacuaaaaagcaa

SEQ ID NO: 249919 - RNA, 25 nt, Human
aaacugaucaauuaaaaacccacag

SEQ ID NO: 249920 - RNA, 23 nt, Human
aaacuggaagggaaagaggcugg

SEQ ID NO: 249921 - RNA, 18 nt, Human
aaagaggcccccaucuuc

SEQ ID NO: 249922 - RNA, 23 nt, Human
aaagaggcugggcaacugccucu

SEQ ID NO: 249923 - RNA, 20 nt, Human
aaagggcaaagaaggaaggg

SEQ ID NO: 249924 - RNA, 31 nt, Human
aaauaaaaaccaaaccaaacccaaacagaaa

SEQ ID NO: 249925 - RNA, 19 nt, Human
aaauacacaagacaacaca

SEQ ID NO: 249926 - RNA, 18 nt, Human
aaauauaagccucaacac

SEQ ID NO: 249927 - RNA, 20 nt, Human
aaaugcuguguucccaacca

SEQ ID NO: 249928 - RNA, 24 nt, Human
aacacagaaaaggauauaccaaua

SEQ ID NO: 249929 - RNA, 23 nt, Human
aaccaaaccaaacccaaacagaa

SEQ ID NO: 249930 - RNA, 20 nt, Human
aacccaaacagaaaaacccc

SEQ ID NO: 249931 - RNA, 23 nt, Human
aacuaaaaagcaaaacaaaagcc

SEQ ID NO: 249932 - RNA, 20 nt, Human
aacuaggaaggaggaggacg

SEQ ID NO: 249933 - RNA, 24 nt, Human
aacucccucacuucuaaccauucc

SEQ ID NO: 249934 - RNA, 18 nt, Human
aacuccuuucuccaccca

SEQ ID NO: 249935 - RNA, 22 nt, Human
aagcaaaacaagaauccacugg

SEQ ID NO: 249936 - RNA, 23 nt, Human
aagcaacagguauaauuuuaaca

SEQ ID NO: 249937 - RNA, 24 nt, Human
aagcagcucuggacaaugauucca

SEQ ID NO: 249938 - RNA, 21 nt, Human
aagcaggaacuggugagucug

SEQ ID NO: 249939 - RNA, 26 nt, Human
aagcccaccagcaggcagggccggga

SEQ ID NO: 249940 - RNA, 18 nt, Human
aagccuuuugcacuccac

SEQ ID NO: 249941 - RNA, 23 nt, Human
aaggagcaggcuucaaguucugc

SEQ ID NO: 249942 - RNA, 27 nt, Human
aaggagccuaguuuagaaaagugcaaa

SEQ ID NO: 249943 - RNA, 21 nt, Human
aaggagcugugguuagacggg

SEQ ID NO: 249944 - RNA, 22 nt, Human
aagggcucacggguagcccgac

SEQ ID NO: 249945 - RNA, 24 nt, Human
aaucuugccuuuccuuaaaagcac

SEQ ID NO: 249946 - RNA, 19 nt, Human
aaugcccacggggcacacc

SEQ ID NO: 249947 - RNA, 23 nt, Human
acaaauauaagccucaacaccac

SEQ ID NO: 249948 - RNA, 20 nt, Human
acaaauccagguaguucuca

SEQ ID NO: 249949 - RNA, 21 nt, Human
acaaauucacugaaagaggcc

SEQ ID NO: 249950 - RNA, 18 nt, Human
acaagagugcaaaaccug

SEQ ID NO: 249951 - RNA, 26 nt, Human
acacacacauccccuccuggcucccc

SEQ ID NO: 249952 - RNA, 25 nt, Human
acacagcacacguuacaguguccag

SEQ ID NO: 249953 - RNA, 23 nt, Human
acaccacaguuaagaggaccagu

SEQ ID NO: 249954 - RNA, 21 nt, Human
acacgcacguggacgcacgca

SEQ ID NO: 249955 - RNA, 22 nt, Human
acacguuacaguguccagauac

SEQ ID NO: 249956 - RNA, 19 nt, Human
acacuacaaaaaagcaauc

SEQ ID NO: 249957 - RNA, 21 nt, Human
acagacagugaaauguguggu

SEQ ID NO: 249958 - RNA, 21 nt, Human
acagcaagcccaugccucuaa

SEQ ID NO: 249959 - RNA, 20 nt, Human
acagcagggagggaagcuuu

SEQ ID NO: 249960 - RNA, 25 nt, Human
accacagcuauggaccagacagaca

SEQ ID NO: 249961 - RNA, 21 nt, Human
accaggaagaacagcuuugcc

SEQ ID NO: 249962 - RNA, 18 nt, Human
acccaaacagaaaaaccc

SEQ ID NO: 249963 - RNA, 20 nt, Human
accccaaggcaggggcagca

SEQ ID NO: 249964 - RNA, 19 nt, Human
accuggugcagcucacagg

SEQ ID NO: 249965 - RNA, 22 nt, Human
accuuccauaccacucccaaaa

SEQ ID NO: 249966 - RNA, 21 nt, Human
acgaaacucuaaguuuacuga

SEQ ID NO: 249967 - RNA, 19 nt, Human
acgaaucugcuuggacaga

SEQ ID NO: 249968 - RNA, 23 nt, Human
acgucccuugagaauggaccaug

SEQ ID NO: 249969 - RNA, 24 nt, Human
acuaaaaagcaaaacaaaagccca

SEQ ID NO: 249970 - RNA, 25 nt, Human
acucacccucucuucugaccccccu

SEQ ID NO: 249971 - RNA, 19 nt, Human
acuccuucaugauuacacc

SEQ ID NO: 249972 - RNA, 20 nt, Human
acugaaauacacaagacaac

SEQ ID NO: 249973 - RNA, 23 nt, Human
acugcuaacacugaacacacgcc

SEQ ID NO: 249974 - RNA, 22 nt, Human
acugcucugagugauuaggaau

SEQ ID NO: 249975 - RNA, 23 nt, Human
acugcuuuggguggcuucuggcu

SEQ ID NO: 249976 - RNA, 19 nt, Human
agaaaaacauccccaaugc

SEQ ID NO: 249977 - RNA, 22 nt, Human
agaaagacaaguaaagggcaaa

SEQ ID NO: 249978 - RNA, 19 nt, Human
agaaagggggaaauagaga

SEQ ID NO: 249979 - RNA, 21 nt, Human
agaagaaagggacauuucugg

SEQ ID NO: 249980 - RNA, 22 nt, Human
agaagugaagcuggggggguca

SEQ ID NO: 249981 - RNA, 24 nt, Human
agacaacacacacuugacaguuca

SEQ ID NO: 249982 - RNA, 19 nt, Human
agacaccaaaauggagaga

SEQ ID NO: 249983 - RNA, 18 nt, Human
agacacccugccuagcuc

SEQ ID NO: 249984 - RNA, 22 nt, Human
agacagacagugaaaugugugg

SEQ ID NO: 249985 - RNA, 18 nt, Human
agacaggugccacuuucc

SEQ ID NO: 249986 - RNA, 25 nt, Human
agacagguucagaagccauguccuc

SEQ ID NO: 249987 - RNA, 19 nt, Human
agagaaaccaaucaggaag

SEQ ID NO: 249988 - RNA, 26 nt, Human
agagaaucaacaaaucccgucagagc

SEQ ID NO: 249989 - RNA, 18 nt, Human
agagcagagagaagagua

SEQ ID NO: 249990 - RNA, 19 nt, Human
agaggaagggcuggggacc

SEQ ID NO: 249991 - RNA, 21 nt, Human
agagugggaaggaggguggug

SEQ ID NO: 249992 - RNA, 23 nt, Human
agaugaucaaaaagaacuguuac

SEQ ID NO: 249993 - RNA, 24 nt, Human
agcaaaacauugccauucaagaag

SEQ ID NO: 249994 - RNA, 20 nt, Human
agcaggucaagggagcgcuc

SEQ ID NO: 249995 - RNA, 20 nt, Human
agcagguggaagggaucagg

SEQ ID NO: 249996 - RNA, 22 nt, Human
agccagcucccuucugcacagg

SEQ ID NO: 249997 - RNA, 22 nt, Human
agcccggagcgggagcuggggg

SEQ ID NO: 249998 - RNA, 22 nt, Human
agccucaggccccacuggcagc

SEQ ID NO: 249999 - RNA, 19 nt, Human
agcuaaacucucuagcaga

SEQ ID NO: 250000 - RNA, 21 nt, Human
agcuaagugugucccggccuc

SEQ ID NO: 250001 - RNA, 20 nt, Human
agcugcagggccccugccug

SEQ ID NO: 250002 - RNA, 24 nt, Human
agcugccuuuauucuuguugguuu

SEQ ID NO: 250003 - RNA, 20 nt, Human
aggaaauggacacauauaug

SEQ ID NO: 250004 - RNA, 21 nt, Human
aggaaggaggaggacggagga

SEQ ID NO: 250005 - RNA, 23 nt, Human
aggacaaagggcaggcagaguuc

SEQ ID NO: 250006 - RNA, 23 nt, Human
aggacacagguccuagaaucugc

SEQ ID NO: 250007 - RNA, 21 nt, Human
aggcagaaauggaaggggaga

SEQ ID NO: 250008 - RNA, 26 nt, Human
aggcagaagugccuuccuaguucccu

SEQ ID NO: 250009 - RNA, 22 nt, Human
aggcagggggccuuggggaggc

SEQ ID NO: 250010 - RNA, 18 nt, Human
aggcagugagaggccagc

SEQ ID NO: 250011 - RNA, 19 nt, Human
aggccauagccacugguca

SEQ ID NO: 250012 - RNA, 22 nt, Human
aggccucccgucuccgcuccag

SEQ ID NO: 250013 - RNA, 18 nt, Human
aggcugccccagcccugg

SEQ ID NO: 250014 - RNA, 19 nt, Human
agggaggggcugucaggug

SEQ ID NO: 250015 - RNA, 20 nt, Human
agggauugggcugaugggag

SEQ ID NO: 250016 - RNA, 20 nt, Human
aggggcuaucagugggcagg

SEQ ID NO: 250017 - RNA, 22 nt, Human
agguguuuugggagcccaaaac

SEQ ID NO: 250018 - RNA, 23 nt, Human
agucagaagugaagcuggggggg

SEQ ID NO: 250019 - RNA, 23 nt, Human
aguuuagaaaagugcaaagcuac

SEQ ID NO: 250020 - RNA, 18 nt, Human
auaaaaacccaacugacc

SEQ ID NO: 250021 - RNA, 18 nt, Human
aucuguucagcucucccc

SEQ ID NO: 250022 - RNA, 24 nt, Human
augccuaaugaggguaauggcuuu

SEQ ID NO: 250023 - RNA, 21 nt, Human
auggaccaugccaccucaccc

SEQ ID NO: 250024 - RNA, 24 nt, Human
auggccucuagcgccacccguugg

SEQ ID NO: 250025 - RNA, 21 nt, Human
augggugacaggggggccugg

SEQ ID NO: 250026 - RNA, 19 nt, Human
auuaagaauuacaaaagca

SEQ ID NO: 250027 - RNA, 18 nt, Human
auucugucagcuaaagaa

SEQ ID NO: 250028 - RNA, 19 nt, Human
auugucccaaaacacaaaa

SEQ ID NO: 250029 - RNA, 21 nt, Human
caaaacaagaauccacugggc

SEQ ID NO: 250030 - RNA, 23 nt, Human
caaaacaagaauccacugggcgg

SEQ ID NO: 250031 - RNA, 26 nt, Human
caaaacacaaaaacugaaggugaaua

SEQ ID NO: 250032 - RNA, 23 nt, Human
caaaauugaaauugaggucacac

SEQ ID NO: 250033 - RNA, 21 nt, Human
caaacccaaacagaaaaaccc

SEQ ID NO: 250034 - RNA, 22 nt, Human
caaacccaaacagaaaaacccc

SEQ ID NO: 250035 - RNA, 23 nt, Human
caaacccaaacagaaaaacccca

SEQ ID NO: 250036 - RNA, 24 nt, Human
caaacccaaacagaaaaaccccag

SEQ ID NO: 250037 - RNA, 19 nt, Human
caaagcaggaacuggugag

SEQ ID NO: 250038 - RNA, 19 nt, Human
caaagggcaggcagaguuc

SEQ ID NO: 250039 - RNA, 20 nt, Human
caacagaagggagcugugcu

SEQ ID NO: 250040 - RNA, 18 nt, Human
caaccugaccccaaggca

SEQ ID NO: 250041 - RNA, 24 nt, Human
caacuaugagacucuacaaacaga

SEQ ID NO: 250042 - RNA, 24 nt, Human
caacucaggagggggcagacaccc

SEQ ID NO: 250043 - RNA, 18 nt, Human
caacuggaacaagggugg

SEQ ID NO: 250044 - RNA, 28 nt, Human
caacuggaacaagggugggggagacugu

SEQ ID NO: 250045 - RNA, 21 nt, Human
caagaagaacuccgagggaaa

SEQ ID NO: 250046 - RNA, 23 nt, Human
caagaccggcaaucccacuggcu

SEQ ID NO: 250047 - RNA, 25 nt, Human
caaggaaacaucaaucuugccuuuc

SEQ ID NO: 250048 - RNA, 29 nt, Human
caauaacugaaauacacaagacaacacac

SEQ ID NO: 250049 - RNA, 22 nt, Human
cacaccccaaaacugggccgga

SEQ ID NO: 250050 - RNA, 19 nt, Human
cacaggccauagccacugg

SEQ ID NO: 250051 - RNA, 19 nt, Human
cacaguuaagaggaccagu

SEQ ID NO: 250052 - RNA, 30 nt, Human
caccaaaauggagagaaucaacaaaucccc

SEQ ID NO: 250053 - RNA, 20 nt, Human
caccaggaagaacagcuuug

SEQ ID NO: 250054 - RNA, 18 nt, Human
caccauaguaaggaagcc

SEQ ID NO: 250055 - RNA, 23 nt, Human
cacccaacuuggcaguuuguguc

SEQ ID NO: 250056 - RNA, 23 nt, Human
cacccaccuguucacggccaaac

SEQ ID NO: 250057 - RNA, 25 nt, Human
caccccaguggacuccagcucccag

SEQ ID NO: 250058 - RNA, 23 nt, Human
caccugcuuccuucugccuccug

SEQ ID NO: 250059 - RNA, 20 nt, Human
caccuggcacaggaaagccc

SEQ ID NO: 250060 - RNA, 24 nt, Human
cacgacugccccaucggcccugaa

SEQ ID NO: 250061 - RNA, 18 nt, Human
cacggggcacaccuugga

SEQ ID NO: 250062 - RNA, 20 nt, Human
cacuccacuguccagcuccc

SEQ ID NO: 250063 - RNA, 18 nt, Human
cacugaaccgggugggcc

SEQ ID NO: 250064 - RNA, 19 nt, Human
cacugaaccgggugggccc

SEQ ID NO: 250065 - RNA, 22 nt, Human
cacugagcugucaagaccggca

SEQ ID NO: 250066 - RNA, 20 nt, Human
cacuuuaaaacaagcgcagg

SEQ ID NO: 250067 - RNA, 20 nt, Human
cagaaaacacgcacguggac

SEQ ID NO: 250068 - RNA, 21 nt, Human
cagaaagacaaguaaagggca

SEQ ID NO: 250069 - RNA, 20 nt, Human
cagaagugaagcuggggggg

SEQ ID NO: 250070 - RNA, 20 nt, Human
cagacagugaaauguguggu

SEQ ID NO: 250071 - RNA, 26 nt, Human
cagagcccaaggccuccucagggcuc

SEQ ID NO: 250072 - RNA, 18 nt, Human
cagcaaugaaaagcuggg

SEQ ID NO: 250073 - RNA, 20 nt, Human
cagcacacguuacagugucc

SEQ ID NO: 250074 - RNA, 22 nt, Human
cagcaggaggacaaagggcagg

SEQ ID NO: 250075 - RNA, 24 nt, Human
cagcaggcagggccgggaggggua

SEQ ID NO: 250076 - RNA, 25 nt, Human
cagccugccugcaccuuguccuacu

SEQ ID NO: 250077 - RNA, 22 nt, Human
cagcucacagguuccgagacag

SEQ ID NO: 250078 - RNA, 20 nt, Human
cagcuccccagaaacacuga

SEQ ID NO: 250079 - RNA, 25 nt, Human
cagcuccccagaaacacugaaccgg

SEQ ID NO: 250080 - RNA, 19 nt, Human
caggagccuucuguccuug

SEQ ID NO: 250081 - RNA, 23 nt, Human
caggcaucucaggccaagugcua

SEQ ID NO: 250082 - RNA, 18 nt, Human
cagggcaggcagggggcc

SEQ ID NO: 250083 - RNA, 23 nt, Human
cagggcucugcccccccaccggg

SEQ ID NO: 250084 - RNA, 24 nt, Human
caguagagagaaccucauguuugg

SEQ ID NO: 250085 - RNA, 18 nt, Human
cagugggcaggagccaaa

SEQ ID NO: 250086 - RNA, 21 nt, Human
cauaccacucccaaaagacag

SEQ ID NO: 250087 - RNA, 27 nt, Human
caucagcagagcagguggaagggauca

SEQ ID NO: 250088 - RNA, 22 nt, Human
caugucacaucaaagcaggaac

SEQ ID NO: 250089 - RNA, 24 nt, Human
cauuuggggcaaugacacaggcua

SEQ ID NO: 250090 - RNA, 22 nt, Human
ccaaaacacaaaaacugaaggu

SEQ ID NO: 250091 - RNA, 24 nt, Human
ccaaaaccaugccuaaugagggua

SEQ ID NO: 250092 - RNA, 24 nt, Human
ccaaaacugggccggacacagcug

SEQ ID NO: 250093 - RNA, 20 nt, Human
ccaaaagacagguucagaag

SEQ ID NO: 250094 - RNA, 22 nt, Human
ccaaaauggagagaaucaacaa

SEQ ID NO: 250095 - RNA, 25 nt, Human
ccaaacagaaaaaccccagaaagac

SEQ ID NO: 250096 - RNA, 24 nt, Human
ccaaaccaaacccaaacagaaaaa

SEQ ID NO: 250097 - RNA, 23 nt, Human
ccaacauuagccugaccugugcc

SEQ ID NO: 250098 - RNA, 23 nt, Human
ccaaccuccugucaaccugaccc

SEQ ID NO: 250099 - RNA, 18 nt, Human
ccaagagagugcaagccc

SEQ ID NO: 250100 - RNA, 21 nt, Human
ccacagcaagcccaugccucu

SEQ ID NO: 250101 - RNA, 22 nt, Human
ccacagcaagcccaugccucua

SEQ ID NO: 250102 - RNA, 19 nt, Human
ccaccaccuggccugucca

SEQ ID NO: 250103 - RNA, 24 nt, Human
ccaccuuccauaccacucccaaaa

SEQ ID NO: 250104 - RNA, 21 nt, Human
ccacuggcagcucuggaauaa

SEQ ID NO: 250105 - RNA, 22 nt, Human
ccacuggcuaugacaagcccac

SEQ ID NO: 250106 - RNA, 26 nt, Human
ccacugggcggaacaaaaccugguuu

SEQ ID NO: 250107 - RNA, 22 nt, Human
ccagaaagacaaguaaagggca

SEQ ID NO: 250108 - RNA, 18 nt, Human
ccagaagagacaaacacg

SEQ ID NO: 250109 - RNA, 21 nt, Human
ccagggcgauaaaccgccaag

SEQ ID NO: 250110 - RNA, 22 nt, Human
ccagucagcccagagagccuga

SEQ ID NO: 250111 - RNA, 23 nt, Human
ccauagcucucggccucugggcu

SEQ ID NO: 250112 - RNA, 22 nt, Human
ccaucacugucacagcaaugaa

SEQ ID NO: 250113 - RNA, 23 nt, Human
ccaugccucuaagccccuacacc

SEQ ID NO: 250114 - RNA, 20 nt, Human
cccaaccucagacagguuuc

SEQ ID NO: 250115 - RNA, 19 nt, Human
cccacagcaagcccaugcc

SEQ ID NO: 250116 - RNA, 23 nt, Human
cccacagcaagcccaugccucua

SEQ ID NO: 250117 - RNA, 25 nt, Human
cccacagcaagcccaugccucuaag

SEQ ID NO: 250118 - RNA, 26 nt, Human
cccacugcuaacacugaaagguuuuc

SEQ ID NO: 250119 - RNA, 22 nt, Human
cccacuggcagcucuggaauaa

SEQ ID NO: 250120 - RNA, 20 nt, Human
cccagaggcugccccagccc

SEQ ID NO: 250121 - RNA, 21 nt, Human
cccagccccauucuccccagc

SEQ ID NO: 250122 - RNA, 27 nt, Human
cccagcccugguccuccgaagggccgg

SEQ ID NO: 250123 - RNA, 18 nt, Human
cccaggccagccugccug

SEQ ID NO: 250124 - RNA, 22 nt, Human
cccaggccagccugccugcacc

SEQ ID NO: 250125 - RNA, 20 nt, Human
cccaggcucgacagaguggg

SEQ ID NO: 250126 - RNA, 21 nt, Human
ccccccaccgggcagguccuc

SEQ ID NO: 250127 - RNA, 26 nt, Human
ccccgcuccauccgggcagggcuaga

SEQ ID NO: 250128 - RNA, 20 nt, Human
ccccgcugugcucugcccgg

SEQ ID NO: 250129 - RNA, 21 nt, Human
ccccucucaucucagucacca

SEQ ID NO: 250130 - RNA, 22 nt, Human
cccggccugaccccaggccagc

SEQ ID NO: 250131 - RNA, 22 nt, Human
cccuacaccacagcuauggacc

SEQ ID NO: 250132 - RNA, 21 nt, Human
cccucuuucgccaucacuguc

SEQ ID NO: 250133 - RNA, 21 nt, Human
cccugguccuccgaagggcuc

SEQ ID NO: 250134 - RNA, 21 nt, Human
cccugugccccaagugcaccu

SEQ ID NO: 250135 - RNA, 23 nt, Human
ccggcaugcaauggucacuacag

SEQ ID NO: 250136 - RNA, 24 nt, Human
ccuacaccacagcuauggaccaga

SEQ ID NO: 250137 - RNA, 18 nt, Human
ccuaguucccuggguguu

SEQ ID NO: 250138 - RNA, 21 nt, Human
ccuaugcuaugguuaucagaa

SEQ ID NO: 250139 - RNA, 21 nt, Human
ccucacaccucccugucccaa

SEQ ID NO: 250140 - RNA, 22 nt, Human
ccucacccugggccauccucuc

SEQ ID NO: 250141 - RNA, 23 nt, Human
ccucacccugggccauccucucc

SEQ ID NO: 250142 - RNA, 22 nt, Human
ccucaggccccacuggcagcuc

SEQ ID NO: 250143 - RNA, 19 nt, Human
ccucagggcucaaaacagg

SEQ ID NO: 250144 - RNA, 19 nt, Human
ccuccagauuccccuugcc

SEQ ID NO: 250145 - RNA, 28 nt, Human
ccucccgucuccgcuccagcccccaggc

SEQ ID NO: 250146 - RNA, 19 nt, Human
ccuccucgccuccucugcc

SEQ ID NO: 250147 - RNA, 18 nt, Human
ccucgccuccuccuccuc

SEQ ID NO: 250148 - RNA, 20 nt, Human
ccucgccuccuccuccuccu

SEQ ID NO: 250149 - RNA, 20 nt, Human
ccucuaagccccuacaccac

SEQ ID NO: 250150 - RNA, 19 nt, Human
ccucugccccuaucccagg

SEQ ID NO: 250151 - RNA, 18 nt, Human
ccucugggcuggcacagg

SEQ ID NO: 250152 - RNA, 19 nt, Human
ccucuuucacaagcacggg

SEQ ID NO: 250153 - RNA, 22 nt, Human
ccugaccccaaggcaggggcag

SEQ ID NO: 250154 - RNA, 23 nt, Human
ccugaccccaaggcaggggcagc

SEQ ID NO: 250155 - RNA, 18 nt, Human
ccugaccccaggccagcc

SEQ ID NO: 250156 - RNA, 23 nt, Human
ccugaccccaggccagccugccu

SEQ ID NO: 250157 - RNA, 22 nt, Human
ccugcacccagaaccuugggac

SEQ ID NO: 250158 - RNA, 23 nt, Human
ccugcaccuuguccuacugccuc

SEQ ID NO: 250159 - RNA, 18 nt, Human
ccuggcacaggaaagccc

SEQ ID NO: 250160 - RNA, 21 nt, Human
ccuggcacaggaaagcccuug

SEQ ID NO: 250161 - RNA, 22 nt, Human
ccugucccaacgugguugggag

SEQ ID NO: 250162 - RNA, 20 nt, Human
ccugucccaggugcacuguu

SEQ ID NO: 250163 - RNA, 20 nt, Human
ccuguccugugaagcguccu

SEQ ID NO: 250164 - RNA, 22 nt, Human
ccugucugcaucgagcaaaagc

SEQ ID NO: 250165 - RNA, 26 nt, Human
ccugucugcaucgagcaaaagcaaaa

SEQ ID NO: 250166 - RNA, 22 nt, Human
ccuugcugcucucuugcucuuc

SEQ ID NO: 250167 - RNA, 18 nt, Human
ccuuugguagugccagga

SEQ ID NO: 250168 - RNA, 25 nt, Human
ccuuuucuaaagauugauacaauau

SEQ ID NO: 250169 - RNA, 23 nt, Human
cgaaaacgggaguguccucucaa

SEQ ID NO: 250170 - RNA, 20 nt, Human
cgagcagagcaggagugggc

SEQ ID NO: 250171 - RNA, 19 nt, Human
cgcccaggugacggggaag

SEQ ID NO: 250172 - RNA, 29 nt, Human
cgcggcggcggcggcggcggccauuuucc

SEQ ID NO: 250173 - RNA, 30 nt, Human
cgcucggcgcggcggcggcggcggcgacga

SEQ ID NO: 250174 - RNA, 18 nt, Human
cggccaaacaucagcggc

SEQ ID NO: 250175 - RNA, 20 nt, Human
cggccaaacaucagcggcaa

SEQ ID NO: 250176 - RNA, 22 nt, Human
cggccucugggcuggcacaggg

SEQ ID NO: 250177 - RNA, 20 nt, Human
cgggagcccagcaugggcaa

SEQ ID NO: 250178 - RNA, 22 nt, Human
cuaaaaagcaaaacaaaagccc

SEQ ID NO: 250179 - RNA, 22 nt, Human
cuaaaagcaaaacuaaaaagca

SEQ ID NO: 250180 - RNA, 25 nt, Human
cuaaaagcaaaacuaaaaagcaaaa

SEQ ID NO: 250181 - RNA, 23 nt, Human
cuaaagauugauacaauaucuaa

SEQ ID NO: 250182 - RNA, 21 nt, Human
cuacuccuggaggggaccccu

SEQ ID NO: 250183 - RNA, 22 nt, Human
cuagcgccuggcugugaccaag

SEQ ID NO: 250184 - RNA, 24 nt, Human
cuaugugcugagcccacuuuaaaa

SEQ ID NO: 250185 - RNA, 19 nt, Human
cucacccucucuucugacc

SEQ ID NO: 250186 - RNA, 21 nt, Human
cucacggguagcccggccacu

SEQ ID NO: 250187 - RNA, 19 nt, Human
cuccaaccuccugucaacc

SEQ ID NO: 250188 - RNA, 22 nt, Human
cuccuagccaugccagagcuuu

SEQ ID NO: 250189 - RNA, 19 nt, Human
cuccugggcuccacugcuu

SEQ ID NO: 250190 - RNA, 25 nt, Human
cucggccucugggcuggcacagggg

SEQ ID NO: 250191 - RNA, 21 nt, Human
cucggcgcggcggcggcggcg

SEQ ID NO: 250192 - RNA, 18 nt, Human
cucuccccucucaucuca

SEQ ID NO: 250193 - RNA, 23 nt, Human
cugaacacuacaaaaaagcaauc

SEQ ID NO: 250194 - RNA, 23 nt, Human
cugaccccccuucccuuccuggg

SEQ ID NO: 250195 - RNA, 22 nt, Human
cugcacccagaaccuugggacc

SEQ ID NO: 250196 - RNA, 21 nt, Human
cugcagcaagccuuguugaag

SEQ ID NO: 250197 - RNA, 26 nt, Human
cugccaacauuagccugaccugugcc

SEQ ID NO: 250198 - RNA, 20 nt, Human
cugcgaggcugacuccacau

SEQ ID NO: 250199 - RNA, 21 nt, Human
cugcuuuggguggcuucuggc

SEQ ID NO: 250200 - RNA, 23 nt, Human
cuggcacaggggagcaugacuuc

SEQ ID NO: 250201 - RNA, 18 nt, Human
cugggcaacugccucuuu

SEQ ID NO: 250202 - RNA, 22 nt, Human
cuggggccguuggcuaguuugg

SEQ ID NO: 250203 - RNA, 22 nt, Human
cugggugcugccuggagccucc

SEQ ID NO: 250204 - RNA, 23 nt, Human
cuggucccagcucgggucuuggg

SEQ ID NO: 250205 - RNA, 21 nt, Human
cuggugauuauaaugcucucu

SEQ ID NO: 250206 - RNA, 22 nt, Human
cugucaagaugagaagaguggg

SEQ ID NO: 250207 - RNA, 26 nt, Human
cugucaagaugagaagagugggaagg

SEQ ID NO: 250208 - RNA, 20 nt, Human
cuucaaccugacugugcuug

SEQ ID NO: 250209 - RNA, 18 nt, Human
cuucacagacaggccagg

SEQ ID NO: 250210 - RNA, 19 nt, Human
cuucugaccccccuucccu

SEQ ID NO: 250211 - RNA, 22 nt, Human
cuugcuggcuuggagugggacu

SEQ ID NO: 250212 - RNA, 22 nt, Human
cuuggccuuuucaccucaucug

SEQ ID NO: 250213 - RNA, 24 nt, Human
cuuucacccaccaaaaauuacaca

SEQ ID NO: 250214 - RNA, 22 nt, Human
cuuuugcacuccacuguccagc

SEQ ID NO: 250215 - RNA, 21 nt, Human
gaaaaacauccccaaugcucc

SEQ ID NO: 250216 - RNA, 18 nt, Human
gaaaguaacuggaagaac

SEQ ID NO: 250217 - RNA, 24 nt, Human
gaaaugugugguguucuggccccc

SEQ ID NO: 250218 - RNA, 23 nt, Human
gaacaaaaggcagaaauggaagg

SEQ ID NO: 250219 - RNA, 23 nt, Human
gaagaaagggacauuucuggagu

SEQ ID NO: 250220 - RNA, 21 nt, Human
gaagaacagcuuugccacuug

SEQ ID NO: 250221 - RNA, 20 nt, Human
gaaggggacugggggaguca

SEQ ID NO: 250222 - RNA, 18 nt, Human
gaagugccuuccuaguuc

SEQ ID NO: 250223 - RNA, 24 nt, Human
gacagcagggagggaagcuuuugg

SEQ ID NO: 250224 - RNA, 23 nt, Human
gacucacccucucuucugacccc

SEQ ID NO: 250225 - RNA, 25 nt, Human
gagaaauaaaaaccaaaccaaaccc

SEQ ID NO: 250226 - RNA, 23 nt, Human
gagaagcaggugacaauuugggg

SEQ ID NO: 250227 - RNA, 23 nt, Human
gagaggggcuaucagugggcagg

SEQ ID NO: 250228 - RNA, 22 nt, Human
gagcagacaggugccacuuucc

SEQ ID NO: 250229 - RNA, 20 nt, Human
gagcagagcaggagugggca

SEQ ID NO: 250230 - RNA, 19 nt, Human
gagcagaggaagggcuggg

SEQ ID NO: 250231 - RNA, 20 nt, Human
gagcagggcucugccccccc

SEQ ID NO: 250232 - RNA, 24 nt, Human
gagccuccuucaccuggcacagga

SEQ ID NO: 250233 - RNA, 18 nt, Human
gagcugucaagaccggca

SEQ ID NO: 250234 - RNA, 22 nt, Human
gaggugccuggucaacagcuug

SEQ ID NO: 250235 - RNA, 19 nt, Human
gagugggacuccugggcuc

SEQ ID NO: 250236 - RNA, 19 nt, Human
gcacaagucggagcccgga

SEQ ID NO: 250237 - RNA, 21 nt, Human
gcagugagaggccagcucaga

SEQ ID NO: 250238 - RNA, 22 nt, Human
gcauggagccccuguugggcca

SEQ ID NO: 250239 - RNA, 22 nt, Human
gccaaacaucagcggcaacggc

SEQ ID NO: 250240 - RNA, 22 nt, Human
gccaguuuuggauuggggcugg

SEQ ID NO: 250241 - RNA, 21 nt, Human
gcccacagcagagcgucccag

SEQ ID NO: 250242 - RNA, 20 nt, Human
gccguuggcuaguuuggcac

SEQ ID NO: 250243 - RNA, 22 nt, Human
gccucaggccccacuggcagcc

SEQ ID NO: 250244 - RNA, 19 nt, Human
gcggcggcggcggcggcca

SEQ ID NO: 250245 - RNA, 19 nt, Human
gcgggaggggaggugccug

SEQ ID NO: 250246 - RNA, 21 nt, Human
gcuaccuaggagagcaagacc

SEQ ID NO: 250247 - RNA, 23 nt, Human
gcucaccaggcaucucaggccaa

SEQ ID NO: 250248 - RNA, 23 nt, Human
gcucuggacaaugauuccagaag

SEQ ID NO: 250249 - RNA, 26 nt, Human
gcuggcacaggggagcaugacuucaa

SEQ ID NO: 250250 - RNA, 18 nt, Human
gcuuggagugggacuccu

SEQ ID NO: 250251 - RNA, 23 nt, Human
gcuuucccuccaaccuccuguca

SEQ ID NO: 250252 - RNA, 21 nt, Human
ggaacaaaaccugguuuugca

SEQ ID NO: 250253 - RNA, 22 nt, Human
ggaagcaaaacaagaauccacu

SEQ ID NO: 250254 - RNA, 18 nt, Human
ggaauaaacuggaaggga

SEQ ID NO: 250255 - RNA, 22 nt, Human
ggacagaauggggguuuggggg

SEQ ID NO: 250256 - RNA, 21 nt, Human
ggacuccugggcuccacugcu

SEQ ID NO: 250257 - RNA, 19 nt, Human
ggacugggggagucaggcc

SEQ ID NO: 250258 - RNA, 26 nt, Human
ggagaaacaagagugcaaaaccuggg

SEQ ID NO: 250259 - RNA, 21 nt, Human
ggagaagagacaacagcugcc

SEQ ID NO: 250260 - RNA, 21 nt, Human
ggagcuggucuacagaagcaa

SEQ ID NO: 250261 - RNA, 27 nt, Human
ggaggacaaagggcaggcagaguucug

SEQ ID NO: 250262 - RNA, 26 nt, Human
ggaggguggggaauagagaugucaca

SEQ ID NO: 250263 - RNA, 21 nt, Human
ggaucagggauugggcugaug

SEQ ID NO: 250264 - RNA, 22 nt, Human
ggcaacggccuccucgccuccu

SEQ ID NO: 250265 - RNA, 20 nt, Human
ggcagagaagcaggugacaa

SEQ ID NO: 250266 - RNA, 21 nt, Human
ggcaggagccaaaccucuugg

SEQ ID NO: 250267 - RNA, 19 nt, Human
ggcccagcuccuccagucc

SEQ ID NO: 250268 - RNA, 18 nt, Human
ggccuuggggaggcagug

SEQ ID NO: 250269 - RNA, 22 nt, Human
ggcgcggcggcggcggcggcgg

SEQ ID NO: 250270 - RNA, 19 nt, Human
gggaaggaggguggugcug

SEQ ID NO: 250271 - RNA, 19 nt, Human
gggaaggaggguggugcug

SEQ ID NO: 250272 - RNA, 22 nt, Human
gggaaggaggguggugcugggc

SEQ ID NO: 250273 - RNA, 19 nt, Human
gggaaugaggaagaaaggg

SEQ ID NO: 250274 - RNA, 21 nt, Human
gggagaaacaagagugcaaaa

SEQ ID NO: 250275 - RNA, 19 nt, Human
gggagcagaggaagggcug

SEQ ID NO: 250276 - RNA, 18 nt, Human
gggaggggcugucaggug

SEQ ID NO: 250277 - RNA, 25 nt, Human
gggagguggggggagcugggggagc

SEQ ID NO: 250278 - RNA, 18 nt, Human
gggagugggggagguggg

SEQ ID NO: 250279 - RNA, 24 nt, Human
gggagugggggagguggggggagc

SEQ ID NO: 250280 - RNA, 27 nt, Human
gggcaggagccaaaccucuuggccuuu

SEQ ID NO: 250281 - RNA, 19 nt, Human
gggcagggcuagaggucac

SEQ ID NO: 250282 - RNA, 23 nt, Human
gggcagggcuagaggucaccggg

SEQ ID NO: 250283 - RNA, 20 nt, Human
gggccuuggggaggcaguga

SEQ ID NO: 250284 - RNA, 20 nt, Human
gggcucugcccccccaccgg

SEQ ID NO: 250285 - RNA, 22 nt, Human
ggggagcagaggaagggcuggg

SEQ ID NO: 250286 - RNA, 19 nt, Human
ggggagguggggggagcug

SEQ ID NO: 250287 - RNA, 23 nt, Human
ggggcugucagguguuuugggag

SEQ ID NO: 250288 - RNA, 23 nt, Human
ggggggaggggaagcaaaacaag

SEQ ID NO: 250289 - RNA, 19 nt, Human
gggucccuggcguucuacc

SEQ ID NO: 250290 - RNA, 18 nt, Human
guaggauuuccuccaggg

SEQ ID NO: 250291 - RNA, 18 nt, Human
gucaccaucccccucccu

SEQ ID NO: 250292 - RNA, 23 nt, Human
gucaccaucccccucccuccgaa

SEQ ID NO: 250293 - RNA, 19 nt, Human
gucugguuauuacccucuu

SEQ ID NO: 250294 - RNA, 18 nt, Human
gugacaggggggccuggu

SEQ ID NO: 250295 - RNA, 18 nt, Human
gugcugggccuuccaggu

SEQ ID NO: 250296 - RNA, 21 nt, Human
gugcugggccuuccaggucaa

SEQ ID NO: 250297 - RNA, 21 nt, Human
gugggcccagaggcugcccca

SEQ ID NO: 250298 - RNA, 18 nt, Human
gugugguguucuggcccc

SEQ ID NO: 250299 - RNA, 20 nt, Human
guucccaaccacgacugccc

SEQ ID NO: 250300 - RNA, 22 nt, Human
guuuugcagugacuuggaaagu

SEQ ID NO: 250301 - RNA, 18 nt, Human
uaaaaaccaaaccaaacc

SEQ ID NO: 250302 - RNA, 19 nt, Human
uaaaaacccacagcaagcc

SEQ ID NO: 250303 - RNA, 22 nt, Human
uaaaaagaugggaucccacaug

SEQ ID NO: 250304 - RNA, 19 nt, Human
uaaaaagcaaaacaaaagc

SEQ ID NO: 250305 - RNA, 22 nt, Human
uaaaaagcaaaacaaaagccca

SEQ ID NO: 250306 - RNA, 22 nt, Human
uaaaacgaccuacuuauuuucu

SEQ ID NO: 250307 - RNA, 20 nt, Human
uaaaguaauugucccaaaac

SEQ ID NO: 250308 - RNA, 24 nt, Human
uaacugaaauacacaagacaacac

SEQ ID NO: 250309 - RNA, 21 nt, Human
uaagaaaaacauccccaaugc

SEQ ID NO: 250310 - RNA, 18 nt, Human
uaagccccuacaccacag

SEQ ID NO: 250311 - RNA, 23 nt, Human
uaaggaaauggacacauauaugc

SEQ ID NO: 250312 - RNA, 21 nt, Human
uaagucacagacugcucugag

SEQ ID NO: 250313 - RNA, 25 nt, Human
uaagugauuuaaaauucagagauuc

SEQ ID NO: 250314 - RNA, 21 nt, Human
uaauuuuagacccugggggag

SEQ ID NO: 250315 - RNA, 27 nt, Human
uacauaaaaacccaacugaccaaaaua

SEQ ID NO: 250316 - RNA, 18 nt, Human
uacuuagcaaaauuccuu

SEQ ID NO: 250317 - RNA, 22 nt, Human
uagcucuuccagaugcugcacc

SEQ ID NO: 250318 - RNA, 22 nt, Human
uaggaaggaggaggacggagga

SEQ ID NO: 250319 - RNA, 23 nt, Human
uauaacaaguagacuaugccuuu

SEQ ID NO: 250320 - RNA, 18 nt, Human
uauacagauauauauaua

SEQ ID NO: 250321 - RNA, 23 nt, Human
uauauaaaaauucaacugcuuug

SEQ ID NO: 250322 - RNA, 18 nt, Human
uaucccucugcucccucc

SEQ ID NO: 250323 - RNA, 21 nt, Human
uaucuaaaagagaaagacacc

SEQ ID NO: 250324 - RNA, 18 nt, Human
uaugcgcacagucuaugu

SEQ ID NO: 250325 - RNA, 24 nt, Human
ucaagaccggcaaucccacuggcu

SEQ ID NO: 250326 - RNA, 23 nt, Human
ucagaagaagcaaugacagcagg

SEQ ID NO: 250327 - RNA, 21 nt, Human
ucagcucuccccucucaucuc

SEQ ID NO: 250328 - RNA, 20 nt, Human
ucaggagggggcagacaccc

SEQ ID NO: 250329 - RNA, 19 nt, Human
uccagcccccaggcucgac

SEQ ID NO: 250330 - RNA, 21 nt, Human
uccaugguaggaacucuagaa

SEQ ID NO: 250331 - RNA, 27 nt, Human
ucccaaccucagacagguuuccaggcu

SEQ ID NO: 250332 - RNA, 18 nt, Human
ucccacaugaaaacugau

SEQ ID NO: 250333 - RNA, 21 nt, Human
ucccagagguggaaggcgacc

SEQ ID NO: 250334 - RNA, 21 nt, Human
uccccuccuggcuccccucaa

SEQ ID NO: 250335 - RNA, 21 nt, Human
ucccucacuucuaaccauucc

SEQ ID NO: 250336 - RNA, 22 nt, Human
uccgcucggcgcggcggcggcg

SEQ ID NO: 250337 - RNA, 23 nt, Human
uccucagggcucaaaacaggguu

SEQ ID NO: 250338 - RNA, 18 nt, Human
uccuccucgccuccuccu

SEQ ID NO: 250339 - RNA, 21 nt, Human
uccugacagggcaggcagggg

SEQ ID NO: 250340 - RNA, 22 nt, Human
ucgcacaggccauagccacugg

SEQ ID NO: 250341 - RNA, 24 nt, Human
ucggacccuacuggcagggaggcc

SEQ ID NO: 250342 - RNA, 20 nt, Human
ucggcuugcuggcuuggagu

SEQ ID NO: 250343 - RNA, 22 nt, Human
ucuacacccaguaguucaaggg

SEQ ID NO: 250344 - RNA, 19 nt, Human
ucucuaaagaauccaacug

SEQ ID NO: 250345 - RNA, 19 nt, Human
ucuggaagcauaagacugc

SEQ ID NO: 250346 - RNA, 18 nt, Human
ucuggagucuucacuacu

SEQ ID NO: 250347 - RNA, 23 nt, Human
ucuguaaacacagaaaaggauau

SEQ ID NO: 250348 - RNA, 20 nt, Human
ucuguccuuggaggaagagu

SEQ ID NO: 250349 - RNA, 20 nt, Human
ucuguucagcucuccccucu

SEQ ID NO: 250350 - RNA, 23 nt, Human
ucuucacuacuccuggaggggac

SEQ ID NO: 250351 - RNA, 26 nt, Human
ucuucagcucugcacacacacauccc

SEQ ID NO: 250352 - RNA, 22 nt, Human
ucuucuuaaagaacugguaccu

SEQ ID NO: 250353 - RNA, 22 nt, Human
ucuuuuggauucaggccucaga

SEQ ID NO: 250354 - RNA, 24 nt, Human
ucuuuuuuuauuuucccuuguccu

SEQ ID NO: 250355 - RNA, 23 nt, Human
ugaaacacacucggacccuacug

SEQ ID NO: 250356 - RNA, 18 nt, Human
ugaaagaagcgaggaaaa

SEQ ID NO: 250357 - RNA, 22 nt, Human
ugaaaggcgacugacucgugau

SEQ ID NO: 250358 - RNA, 19 nt, Human
ugaaaugaacaaaaggcag

SEQ ID NO: 250359 - RNA, 24 nt, Human
ugaaaugaacaaaaggcagaaaug

SEQ ID NO: 250360 - RNA, 24 nt, Human
ugaacacuacaaaaaagcaaucaa

SEQ ID NO: 250361 - RNA, 23 nt, Human
ugaagauaugcagcuagauaagg

SEQ ID NO: 250362 - RNA, 25 nt, Human
ugaagcagugacaaaucaaacggaa

SEQ ID NO: 250363 - RNA, 18 nt, Human
ugaaugaacugucauggg

SEQ ID NO: 250364 - RNA, 21 nt, Human
ugacaaaucaaacggaaagga

SEQ ID NO: 250365 - RNA, 18 nt, Human
ugaccccccuucccuucc

SEQ ID NO: 250366 - RNA, 20 nt, Human
ugagaagagugggaaggagg

SEQ ID NO: 250367 - RNA, 21 nt, Human
ugagaauggaccaugccaccu

SEQ ID NO: 250368 - RNA, 20 nt, Human
ugagagcugcagggccccug

SEQ ID NO: 250369 - RNA, 21 nt, Human
ugaggucacaccccaaaacug

SEQ ID NO: 250370 - RNA, 22 nt, Human
ugauccgaggcgagcagagcag

SEQ ID NO: 250371 - RNA, 18 nt, Human
ugcacugcccucacaccu

SEQ ID NO: 250372 - RNA, 20 nt, Human
ugccagagcuggagcagaca

SEQ ID NO: 250373 - RNA, 19 nt, Human
ugcccggccugaccccagg

SEQ ID NO: 250374 - RNA, 25 nt, Human
ugcccugcugcacuacgcuagacuc

SEQ ID NO: 250375 - RNA, 18 nt, Human
ugcccugggaaggggagg

SEQ ID NO: 250376 - RNA, 18 nt, Human
ugcccugggaaggggagg

SEQ ID NO: 250377 - RNA, 22 nt, Human
ugccuaaugaggguaauggcuu

SEQ ID NO: 250378 - RNA, 20 nt, Human
ugccucuaagccccuacacc

SEQ ID NO: 250379 - RNA, 19 nt, Human
ugccuggagccuccuucac

SEQ ID NO: 250380 - RNA, 20 nt, Human
ugccuggagccuccuucacc

SEQ ID NO: 250381 - RNA, 22 nt, Human
ugcuagaaaguccaacuaugag

SEQ ID NO: 250382 - RNA, 21 nt, Human
ugcucccuccuugcacugccc

SEQ ID NO: 250383 - RNA, 21 nt, Human
uggaaaaggagcugugguuag

SEQ ID NO: 250384 - RNA, 25 nt, Human
uggaacacaaaaggagaaauaaaaa

SEQ ID NO: 250385 - RNA, 21 nt, Human
uggaaggcgaccaggcugugc

SEQ ID NO: 250386 - RNA, 20 nt, Human
uggaagggaaagaggcuggg

SEQ ID NO: 250387 - RNA, 21 nt, Human
uggagagagaaugcccaccac

SEQ ID NO: 250388 - RNA, 21 nt, Human
uggaggaagaguucuggagga

SEQ ID NO: 250389 - RNA, 22 nt, Human
uggauauaaucagggucaccag

SEQ ID NO: 250390 - RNA, 20 nt, Human
uggauguggccuuaaugacc

SEQ ID NO: 250391 - RNA, 23 nt, Human
uggcaacacaucagcuauucggc

SEQ ID NO: 250392 - RNA, 26 nt, Human
uggcaaggaagugcuagacaguuucu

SEQ ID NO: 250393 - RNA, 22 nt, Human
uggcacaggggagcaugacuuc

SEQ ID NO: 250394 - RNA, 28 nt, Human
uggcagcagcucacaugggacaugccug

SEQ ID NO: 250395 - RNA, 21 nt, Human
uggcagggaggccugcgaggc

SEQ ID NO: 250396 - RNA, 28 nt, Human
uggcaguuugugucugguuccggcaccg

SEQ ID NO: 250397 - RNA, 18 nt, Human
uggccucuagcgccaccc

SEQ ID NO: 250398 - RNA, 24 nt, Human
uggcguuucuggguguccccugug

SEQ ID NO: 250399 - RNA, 20 nt, Human
ugggcccagaggcugcccca

SEQ ID NO: 250400 - RNA, 22 nt, Human
ugggcggaacaaaaccugguuu

SEQ ID NO: 250401 - RNA, 22 nt, Human
uggggccagacuugagccacca

SEQ ID NO: 250402 - RNA, 20 nt, Human
uggggcugguguggggccag

SEQ ID NO: 250403 - RNA, 26 nt, Human
ugggggcaaagagauuucccccgagg

SEQ ID NO: 250404 - RNA, 18 nt, Human
uggggggagcugggggag

SEQ ID NO: 250405 - RNA, 18 nt, Human
uggggguugugcucccuc

SEQ ID NO: 250406 - RNA, 20 nt, Human
ugggugacaggggggccugg

SEQ ID NO: 250407 - RNA, 21 nt, Human
ugggugacaggggggccuggu

SEQ ID NO: 250408 - RNA, 23 nt, Human
ugggugacaggggggccuggugg

SEQ ID NO: 250409 - RNA, 24 nt, Human
ugguagugccaggaguucgaggcc

SEQ ID NO: 250410 - RNA, 19 nt, Human
uggugaacgcuccaccuuc

SEQ ID NO: 250411 - RNA, 20 nt, Human
uggugcugggccuuccaggu

SEQ ID NO: 250412 - RNA, 23 nt, Human
ugguucaggccagucuacaccca

SEQ ID NO: 250413 - RNA, 19 nt, Human
uguaauuuucugccaaaug

SEQ ID NO: 250414 - RNA, 21 nt, Human
uguauuuuuauggagcagucu

SEQ ID NO: 250415 - RNA, 18 nt, Human
ugucacaucaaagcagga

SEQ ID NO: 250416 - RNA, 24 nt, Human
ugucaugggugacaggggggccug

SEQ ID NO: 250417 - RNA, 24 nt, Human
ugucaugggugacaggggggccug

SEQ ID NO: 250418 - RNA, 18 nt, Human
uguccagauacacgggag

SEQ ID NO: 250419 - RNA, 19 nt, Human
uguccugugaagcguccuu

SEQ ID NO: 250420 - RNA, 23 nt, Human
ugucuuaaacaguaaugcccacg

SEQ ID NO: 250421 - RNA, 22 nt, Human
ugugaagcguccuugccaguuu

SEQ ID NO: 250422 - RNA, 22 nt, Human
ugugaccaaguaucuccagcuc

SEQ ID NO: 250423 - RNA, 21 nt, Human
ugugcaauauacagauauaua

SEQ ID NO: 250424 - RNA, 23 nt, Human
ugugcccacagcagagcguccca

SEQ ID NO: 250425 - RNA, 18 nt, Human
ugugucuagucggugcgu

SEQ ID NO: 250426 - RNA, 18 nt, Human
uguucuugaauucaaagg

SEQ ID NO: 250427 - RNA, 24 nt, Human
uguugguuugcuuugcaauccgcu

SEQ ID NO: 250428 - RNA, 20 nt, Human
uuaaaaagaugggaucccac

SEQ ID NO: 250429 - RNA, 23 nt, Human
uuaaagguaggacagaauggggg

SEQ ID NO: 250430 - RNA, 18 nt, Human
uucaaccugacugugcuu

SEQ ID NO: 250431 - RNA, 23 nt, Human
uucccuggguguuuuccugacac

SEQ ID NO: 250432 - RNA, 23 nt, Human
uucccuuguccuaugcuaugguu

SEQ ID NO: 250433 - RNA, 21 nt, Human
uuccugaacagagguuaaaaa

SEQ ID NO: 250434 - RNA, 18 nt, Human
uuccugacacgucagcgc

SEQ ID NO: 250435 - RNA, 22 nt, Human
uucucuaaagaauccaacuguc

SEQ ID NO: 250436 - RNA, 23 nt, Human
uucuggggacuggagccgacaag

SEQ ID NO: 250437 - RNA, 23 nt, Human
uugcagcaaacacuuagaguuuc

SEQ ID NO: 250438 - RNA, 24 nt, Human
uugccaguuuuggauuggggcugg

SEQ ID NO: 250439 - RNA, 23 nt, Human
uugccauucaagaagaacuccga

SEQ ID NO: 250440 - RNA, 18 nt, Human
uugcccccuccccugucc

SEQ ID NO: 250441 - RNA, 22 nt, Human
uuggaacugucaacuaugguuc

SEQ ID NO: 250442 - RNA, 19 nt, Human
uugggaaagacgagggaau

SEQ ID NO: 250443 - RNA, 19 nt, Human
uuggggcugguguggggcc

SEQ ID NO: 250444 - RNA, 18 nt, Human
uuuccuuaaaagcacggg

SEQ ID NO: 250445 - RNA, 18 nt, Human
uuucuccacccaacuugg

SEQ ID NO: 250446 - RNA, 21 nt, Human
uuucuggauuuuuuugguguu

SEQ ID NO: 250447 - RNA, 27 nt, Human
uuuuccccucuaauauguaauuuuaga

SEQ ID NO: 250448 - RNA, 22 nt, Human
uuuuuauuuucccuuguccuau

SEQ ID NO: 250449 - RNA, 23 nt, Human
aaaaguacaaacaucagcuugga

SEQ ID NO: 250450 - RNA, 19 nt, Human
aacauggugaaacuccauc

SEQ ID NO: 250451 - RNA, 20 nt, Human
aacauggugaaacuccaucu

SEQ ID NO: 250452 - RNA, 21 nt, Human
aacauggugaaacuccaucuc

SEQ ID NO: 250453 - RNA, 20 nt, Human
aagauaugaauguaaaaaga

SEQ ID NO: 250454 - RNA, 21 nt, Human
aagguucugcuugcaagauau

SEQ ID NO: 250455 - RNA, 26 nt, Human
acacacacucacacccacauacauau

SEQ ID NO: 250456 - RNA, 23 nt, Human
acacacccacacauacacacaca

SEQ ID NO: 250457 - RNA, 24 nt, Human
acacccacacauacacacacacuc

SEQ ID NO: 250458 - RNA, 21 nt, Human
acagcuucuguuauuucagcu

SEQ ID NO: 250459 - RNA, 18 nt, Human
acaucugcagaccuacaa

SEQ ID NO: 250460 - RNA, 20 nt, Human
accgagaucacaccacugca

SEQ ID NO: 250461 - RNA, 24 nt, Human
acuccaucucuacuaaaaauauaa

SEQ ID NO: 250462 - RNA, 18 nt, Human
acugcacuucagccuggg

SEQ ID NO: 250463 - RNA, 24 nt, Human
acugcacuucagccugggggguag

SEQ ID NO: 250464 - RNA, 22 nt, Human
acugguuaucuuuacgaaacaa

SEQ ID NO: 250465 - RNA, 24 nt, Human
acuucagccugggggguagaguga

SEQ ID NO: 250466 - RNA, 21 nt, Human
agaguuaaaccaagauaaagc

SEQ ID NO: 250467 - RNA, 23 nt, Human
agccaggcaugguggcaggcgcc

SEQ ID NO: 250468 - RNA, 22 nt, Human
agccuggccaacauggugaaac

SEQ ID NO: 250469 - RNA, 24 nt, Human
agccuggccaacauggugaaacuc

SEQ ID NO: 250470 - RNA, 24 nt, Human
agccugggggguagagugagacuc

SEQ ID NO: 250471 - RNA, 24 nt, Human
aggcaugguggcaggcgccuguaa

SEQ ID NO: 250472 - RNA, 21 nt, Human
aggcggagguugcagugaacc

SEQ ID NO: 250473 - RNA, 24 nt, Human
aggcggagguugcagugaaccgag

SEQ ID NO: 250474 - RNA, 24 nt, Human
aggcugagguacgagaaucacuug

SEQ ID NO: 250475 - RNA, 24 nt, Human
agguacgagaaucacuugaaccug

SEQ ID NO: 250476 - RNA, 25 nt, Human
aguuaaauaaaacaaguagggggcc

SEQ ID NO: 250477 - RNA, 21 nt, Human
auaaaacaaguagggggcccu

SEQ ID NO: 250478 - RNA, 18 nt, Human
auaaagcuauucucuaaa

SEQ ID NO: 250479 - RNA, 21 nt, Human
auaaauauauuuaacucaugu

SEQ ID NO: 250480 - RNA, 24 nt, Human
aucacaccacugcacuucagccug

SEQ ID NO: 250481 - RNA, 25 nt, Human
augcaccccuuugcaacagacaccc

SEQ ID NO: 250482 - RNA, 21 nt, Human
caaaacaguuauguguggggc

SEQ ID NO: 250483 - RNA, 24 nt, Human
caacauggugaaacuccaucucua

SEQ ID NO: 250484 - RNA, 21 nt, Human
caauacauuuuugcacgugca

SEQ ID NO: 250485 - RNA, 28 nt, Human
cacacucacacccacauacauauauaug

SEQ ID NO: 250486 - RNA, 20 nt, Human
cacccacauacauauauaug

SEQ ID NO: 250487 - RNA, 18 nt, Human
cacccaugccagguugga

SEQ ID NO: 250488 - RNA, 18 nt, Human
caccccuuugcaacagac

SEQ ID NO: 250489 - RNA, 18 nt, Human
cacugcacuucagccugg

SEQ ID NO: 250490 - RNA, 19 nt, Human
cacugcacuucagccuggg

SEQ ID NO: 250491 - RNA, 19 nt, Human
cacugcacuucagccuggg

SEQ ID NO: 250492 - RNA, 24 nt, Human
cacugcacuucagccuggggggua

SEQ ID NO: 250493 - RNA, 18 nt, Human
cacugcaguaacacaaaa

SEQ ID NO: 250494 - RNA, 23 nt, Human
cacuucagccugggggguagagu

SEQ ID NO: 250495 - RNA, 23 nt, Human
cagcaaaaagugcacuuagauau

SEQ ID NO: 250496 - RNA, 22 nt, Human
cagccugggggguagagugaga

SEQ ID NO: 250497 - RNA, 18 nt, Human
cagguaagugccugauuc

SEQ ID NO: 250498 - RNA, 21 nt, Human
cauacacacacacucacaccc

SEQ ID NO: 250499 - RNA, 23 nt, Human
cauacacacacacucacacccac

SEQ ID NO: 250500 - RNA, 33 nt, Human
cauacacacacacucacacccacauacauagug

SEQ ID NO: 250501 - RNA, 18 nt, Human
caucguacacagcuucug

SEQ ID NO: 250502 - RNA, 20 nt, Human
ccacugcacuucagccuggg

SEQ ID NO: 250503 - RNA, 20 nt, Human
ccacugcacuucagccuggg

SEQ ID NO: 250504 - RNA, 22 nt, Human
ccacugcacuucagccuggggg

SEQ ID NO: 250505 - RNA, 23 nt, Human
ccacugcacuucagccugggggg

SEQ ID NO: 250506 - RNA, 24 nt, Human
ccacugcacuucagccuggggggu

SEQ ID NO: 250507 - RNA, 18 nt, Human
ccagaguucgagaccagc

SEQ ID NO: 250508 - RNA, 25 nt, Human
ccaugcaccccuuugcaacagacac

SEQ ID NO: 250509 - RNA, 18 nt, Human
cccacacauacacacaca

SEQ ID NO: 250510 - RNA, 23 nt, Human
ccuggccaacauggugaaacucc

SEQ ID NO: 250511 - RNA, 24 nt, Human
ccuggccaacauggugaaacucca

SEQ ID NO: 250512 - RNA, 19 nt, Human
ccuguaaucccagcuacuc

SEQ ID NO: 250513 - RNA, 21 nt, Human
ccuguaaucccagcuacucgg

SEQ ID NO: 250514 - RNA, 22 nt, Human
ccuguaaucccagcuacucggg

SEQ ID NO: 250515 - RNA, 19 nt, Human
ccuuauuuaccgauuuaga

SEQ ID NO: 250516 - RNA, 24 nt, Human
cgagaccagccuggccaacauggu

SEQ ID NO: 250517 - RNA, 24 nt, Human
cgccuguaaucccagcuacucggg

SEQ ID NO: 250518 - RNA, 21 nt, Human
cgugcaaaacaguuaugugug

SEQ ID NO: 250519 - RNA, 26 nt, Human
cuaaaaauauaaauaucagccaggca

SEQ ID NO: 250520 - RNA, 23 nt, Human
cuggccaacauggugaaacucca

SEQ ID NO: 250521 - RNA, 20 nt, Human
cugugccuacagggugcuuu

SEQ ID NO: 250522 - RNA, 23 nt, Human
gagaucacaccacugcacuucag

SEQ ID NO: 250523 - RNA, 22 nt, Human
gagguugcagugaaccgagauc

SEQ ID NO: 250524 - RNA, 18 nt, Human
gcaguaacacaaaaguac

SEQ ID NO: 250525 - RNA, 24 nt, Human
gccaacauggugaaacuccaucuc

SEQ ID NO: 250526 - RNA, 18 nt, Human
ggagguugcagugaaccg

SEQ ID NO: 250527 - RNA, 24 nt, Human
ggagguugcagugaaccgagauca

SEQ ID NO: 250528 - RNA, 23 nt, Human
gggaggcugagguacgagaauca

SEQ ID NO: 250529 - RNA, 24 nt, Human
gguggcaggcgccuguaaucccag

SEQ ID NO: 250530 - RNA, 18 nt, Human
guccagaguucgagaccg

SEQ ID NO: 250531 - RNA, 22 nt, Human
uaaaauaaaacuaaagaguuaa

SEQ ID NO: 250532 - RNA, 21 nt, Human
uaaagaucacuucuugaccca

SEQ ID NO: 250533 - RNA, 24 nt, Human
uacaugagcuaaaaucaguuucuu

SEQ ID NO: 250534 - RNA, 22 nt, Human
uacccuaaugcaucguacacag

SEQ ID NO: 250535 - RNA, 19 nt, Human
uagagugagacucaauguc

SEQ ID NO: 250536 - RNA, 25 nt, Human
uagcuuuggcuuauauaaauaauuc

SEQ ID NO: 250537 - RNA, 25 nt, Human
uauauauguauguacauauaaauau

SEQ ID NO: 250538 - RNA, 24 nt, Human
uauguaaagggauauauauaugua

SEQ ID NO: 250539 - RNA, 28 nt, Human
uauguaacacacacccacacauacacac

SEQ ID NO: 250540 - RNA, 27 nt, Human
uauguauguacauauaaauauauuuca

SEQ ID NO: 250541 - RNA, 24 nt, Human
uauuuuuguuuuccccucuuaaaa

SEQ ID NO: 250542 - RNA, 26 nt, Human
ucaacagcccuuucccaugcaccccu

SEQ ID NO: 250543 - RNA, 21 nt, Human
ucaacuuuccuuauuuccuua

SEQ ID NO: 250544 - RNA, 20 nt, Human
ucaaugucuagaaaugaagu

SEQ ID NO: 250545 - RNA, 22 nt, Human
ucagcaaaaagugcacuuagau

SEQ ID NO: 250546 - RNA, 23 nt, Human
ucagccaggcaugguggcaggcg

SEQ ID NO: 250547 - RNA, 23 nt, Human
uccaagggcuacagcugaaauuu

SEQ ID NO: 250548 - RNA, 22 nt, Human
ucccaugcaccccuuugcaaca

SEQ ID NO: 250549 - RNA, 25 nt, Human
ucgggaggcugagguacgagaauca

SEQ ID NO: 250550 - RNA, 20 nt, Human
ucuacaagaucugaggucca

SEQ ID NO: 250551 - RNA, 19 nt, Human
ucucuacuaaaaauauaaa

SEQ ID NO: 250552 - RNA, 23 nt, Human
ucugagguccagaguucgagacc

SEQ ID NO: 250553 - RNA, 25 nt, Human
ucugcagaccuacaaggaguuugca

SEQ ID NO: 250554 - RNA, 23 nt, Human
ugaaguaucagcaaaaagugcac

SEQ ID NO: 250555 - RNA, 22 nt, Human
ugagcuaaaaucaguuucuuua

SEQ ID NO: 250556 - RNA, 24 nt, Human
ugagguacgagaaucacuugaacc

SEQ ID NO: 250557 - RNA, 18 nt, Human
ugcaacagacacccaugc

SEQ ID NO: 250558 - RNA, 22 nt, Human
uggcaggcgccuguaaucccag

SEQ ID NO: 250559 - RNA, 24 nt, Human
uggccaacauggugaaacuccauc

SEQ ID NO: 250560 - RNA, 18 nt, Human
ugggacacacaucugcag

SEQ ID NO: 250561 - RNA, 24 nt, Human
ugguggcaggcgccuguaauccca

SEQ ID NO: 250562 - RNA, 23 nt, Human
ugguuccugcuuuucuacugcuc

SEQ ID NO: 250563 - RNA, 20 nt, Human
uguacauauaaauauauuua

SEQ ID NO: 250564 - RNA, 21 nt, Human
ugucugugccuacagggugcu

SEQ ID NO: 250565 - RNA, 20 nt, Human
ugugggagaauuauauaugg

SEQ ID NO: 250566 - RNA, 24 nt, Human
uucagccugggggguagagugaga

SEQ ID NO: 250567 - RNA, 25 nt, Human
uucauaaggguguuuucuuucauau

SEQ ID NO: 250568 - RNA, 19 nt, Human
uucccaugcaccccuuugc

SEQ ID NO: 250569 - RNA, 20 nt, Human
uuccuuauauuccaaauauu

SEQ ID NO: 250570 - RNA, 23 nt, Human
uucucugcaaaaacugguuaucu

SEQ ID NO: 250571 - RNA, 23 nt, Human
uugaaccuggaggcggagguugc

SEQ ID NO: 250572 - RNA, 20 nt, Human
uugcagugaaccgagaucac

SEQ ID NO: 250573 - RNA, 23 nt, Human
uuucuacugcucuguucuacaaa

SEQ ID NO: 250574 - RNA, 18 nt, Human
uuuuguuuuguuuguuuu

SEQ ID NO: 250575 - RNA, 24 nt, Human
uuuuuuguuuuguuuguuuuuaau

SEQ ID NO: 250576 - RNA, 20 nt, Human
uuuuuuuuuuucaagguucu

SEQ ID NO: 250577 - RNA, 22 nt, Human
aagaaggaaaggagccccccag

SEQ ID NO: 250578 - RNA, 19 nt, Human
aaggagccccccagggugg

SEQ ID NO: 250579 - RNA, 20 nt, Human
aggcugaggagggcgggggu

SEQ ID NO: 250580 - RNA, 19 nt, Human
caaauaggaagaaggaaag

SEQ ID NO: 250581 - RNA, 21 nt, Human
caccagguucuucacggcgcu

SEQ ID NO: 250582 - RNA, 21 nt, Human
cagccgcccaccuccaagccc

SEQ ID NO: 250583 - RNA, 19 nt, Human
cagcucggggagggagcga

SEQ ID NO: 250584 - RNA, 18 nt, Human
caggaucaggcugaggag

SEQ ID NO: 250585 - RNA, 19 nt, Human
ccaccagguucuucacggc

SEQ ID NO: 250586 - RNA, 24 nt, Human
ccggcuccuccauagcgacccccg

SEQ ID NO: 250587 - RNA, 21 nt, Human
ccuccaagcccccaccgcgga

SEQ ID NO: 250588 - RNA, 21 nt, Human
ccuccacgcugcggaaguaga

SEQ ID NO: 250589 - RNA, 18 nt, Human
ccuugugcugggccagcu

SEQ ID NO: 250590 - RNA, 19 nt, Human
ccuugugcugggccagcuc

SEQ ID NO: 250591 - RNA, 21 nt, Human
cggcgcugcaggcguacucca

SEQ ID NO: 250592 - RNA, 19 nt, Human
cucccaacgcugcaugucu

SEQ ID NO: 250593 - RNA, 18 nt, Human
cuccuccauagcgacccc

SEQ ID NO: 250594 - RNA, 23 nt, Human
ggaaaggagccccccagggugga

SEQ ID NO: 250595 - RNA, 19 nt, Human
guggaaugaucuuugucug

SEQ ID NO: 250596 - RNA, 21 nt, Human
guggcccugggcacuggcauu

SEQ ID NO: 250597 - RNA, 19 nt, Human
uccagccgcccaccuccaa

SEQ ID NO: 250598 - RNA, 18 nt, Human
uccaggaucaggcugagg

SEQ ID NO: 250599 - RNA, 24 nt, Human
ucccaacgcugcaugucugccuug

SEQ ID NO: 250600 - RNA, 19 nt, Human
ucccuggcucugcuccucc

SEQ ID NO: 250601 - RNA, 21 nt, Human
ucccuggcucugcuccuccca

SEQ ID NO: 250602 - RNA, 24 nt, Human
ugauggccuguuugagcagacccu

SEQ ID NO: 250603 - RNA, 23 nt, Human
uggauugaguccagccgcccacc

SEQ ID NO: 250604 - RNA, 21 nt, Human
uggcucccuggcucugcuccu

SEQ ID NO: 250605 - RNA, 20 nt, Human
uguccgugacuuucuucccc

SEQ ID NO: 250606 - RNA, 19 nt, Human
uuccuccgggcuguggccc

SEQ ID NO: 250607 - RNA, 23 nt, Human
aaaaaaacacauuuuggcuuaag

SEQ ID NO: 250608 - RNA, 19 nt, Human
aaaaaaagggacauagaga

SEQ ID NO: 250609 - RNA, 18 nt, Human
aaaaaagggacauagaga

SEQ ID NO: 250610 - RNA, 23 nt, Human
aaaaacaaaacuucuacaaagag

SEQ ID NO: 250611 - RNA, 23 nt, Human
aaaagagaaaaaauggauaagaa

SEQ ID NO: 250612 - RNA, 24 nt, Human
aaacagaaagaaaauaguuacuca

SEQ ID NO: 250613 - RNA, 22 nt, Human
aaacaugcagccacggcgaccc

SEQ ID NO: 250614 - RNA, 21 nt, Human
aaccaaccagaugauuuagaa

SEQ ID NO: 250615 - RNA, 19 nt, Human
aaccuucaaagucaaucca

SEQ ID NO: 250616 - RNA, 21 nt, Human
aacuacaaaaagccacaaaug

SEQ ID NO: 250617 - RNA, 23 nt, Human
aaggagcacaacagugaaaagaa

SEQ ID NO: 250618 - RNA, 25 nt, Human
aaggggcccugcauuugauaaaaau

SEQ ID NO: 250619 - RNA, 24 nt, Human
aauaacaacaauaaucuuuacuuc

SEQ ID NO: 250620 - RNA, 21 nt, Human
aauauaccccccucccgcuau

SEQ ID NO: 250621 - RNA, 24 nt, Human
acaugcagccacggcgacccacac

SEQ ID NO: 250622 - RNA, 18 nt, Human
acuuuuuuuuuuuccaca

SEQ ID NO: 250623 - RNA, 24 nt, Human
agaaaaaaaaaauaacaacaauaa

SEQ ID NO: 250624 - RNA, 25 nt, Human
agaaagaaaauaguuacucaaaugu

SEQ ID NO: 250625 - RNA, 21 nt, Human
agaaauacacauuucaaaaac

SEQ ID NO: 250626 - RNA, 23 nt, Human
agagaaaaaaaaaauaacaacaa

SEQ ID NO: 250627 - RNA, 19 nt, Human
agcacaacagugaaaagaa

SEQ ID NO: 250628 - RNA, 19 nt, Human
agcacccagucuuucacau

SEQ ID NO: 250629 - RNA, 24 nt, Human
agcagagcgagcagagagcuggga

SEQ ID NO: 250630 - RNA, 20 nt, Human
agcucaguucccaaauuccu

SEQ ID NO: 250631 - RNA, 18 nt, Human
agggccauauuugcagga

SEQ ID NO: 250632 - RNA, 21 nt, Human
aguaaaagaaaacagaaagaa

SEQ ID NO: 250633 - RNA, 18 nt, Human
aguccuuuuugguuuuuu

SEQ ID NO: 250634 - RNA, 19 nt, Human
auagcacacacacacacug

SEQ ID NO: 250635 - RNA, 22 nt, Human
auauagcaguguugauauuacu

SEQ ID NO: 250636 - RNA, 21 nt, Human
auuccugcauucguuccugau

SEQ ID NO: 250637 - RNA, 22 nt, Human
auuuggggguccugacacaccg

SEQ ID NO: 250638 - RNA, 19 nt, Human
caaaugcuuugcaaacucu

SEQ ID NO: 250639 - RNA, 24 nt, Human
caagaaaaaaaaaaaaacuaguaa

SEQ ID NO: 250640 - RNA, 25 nt, Human
caaggggaaaaaaacacauuuuggc

SEQ ID NO: 250641 - RNA, 18 nt, Human
caaguuaagaaaaauaua

SEQ ID NO: 250642 - RNA, 19 nt, Human
caaguuaggauaugcacuu

SEQ ID NO: 250643 - RNA, 25 nt, Human
cacacacacacacugcaagaaaaaa

SEQ ID NO: 250644 - RNA, 22 nt, Human
caccgggauuguucaacagucc

SEQ ID NO: 250645 - RNA, 20 nt, Human
cacugcaagaaaaaaaaaaa

SEQ ID NO: 250646 - RNA, 25 nt, Human
cagaguaaaagaaaacagaaagaaa

SEQ ID NO: 250647 - RNA, 24 nt, Human
cagaguaccugacuuuuuuuuuuu

SEQ ID NO: 250648 - RNA, 19 nt, Human
cagcccgaagaugucuggg

SEQ ID NO: 250649 - RNA, 19 nt, Human
cagcguugaagugcuucuc

SEQ ID NO: 250650 - RNA, 25 nt, Human
cagcugaccuuaaacuuauaaaaug

SEQ ID NO: 250651 - RNA, 18 nt, Human
ccacacagaaccuucaaa

SEQ ID NO: 250652 - RNA, 23 nt, Human
ccagcggcagccuuuuacaauga

SEQ ID NO: 250653 - RNA, 19 nt, Human
cccacacagaaccuucaaa

SEQ ID NO: 250654 - RNA, 24 nt, Human
cccagcggcagccuuuuacaauga

SEQ ID NO: 250655 - RNA, 24 nt, Human
cccauuaccgggucuguccaagca

SEQ ID NO: 250656 - RNA, 19 nt, Human
ccuauauugcugacaagau

SEQ ID NO: 250657 - RNA, 18 nt, Human
ccugcaacaugacacuau

SEQ ID NO: 250658 - RNA, 18 nt, Human
ccuuuugacagcugaccu

SEQ ID NO: 250659 - RNA, 21 nt, Human
cguugaagugcuucuccaccu

SEQ ID NO: 250660 - RNA, 20 nt, Human
cuagcacccagucuuucaca

SEQ ID NO: 250661 - RNA, 19 nt, Human
cugcaagaaaaaaaaaaaa

SEQ ID NO: 250662 - RNA, 22 nt, Human
cugcaagaaaaaaaaaaaaacu

SEQ ID NO: 250663 - RNA, 24 nt, Human
cugcaagaaaaaaaaaaaaacuag

SEQ ID NO: 250664 - RNA, 19 nt, Human
cugccacccagcggcagcc

SEQ ID NO: 250665 - RNA, 18 nt, Human
cuggguguacgcgugugc

SEQ ID NO: 250666 - RNA, 20 nt, Human
cuuauucaccaaguaaauuc

SEQ ID NO: 250667 - RNA, 18 nt, Human
cuugaaauggcuauuaaa

SEQ ID NO: 250668 - RNA, 20 nt, Human
gaaccugcaacaugacacua

SEQ ID NO: 250669 - RNA, 27 nt, Human
gagcacaacagugaaaagaaguuagcc

SEQ ID NO: 250670 - RNA, 19 nt, Human
gaggcaauuuaaaaguacu

SEQ ID NO: 250671 - RNA, 23 nt, Human
ggauauuuuccuuucuuaagaga

SEQ ID NO: 250672 - RNA, 18 nt, Human
guaaauuccauaucacuu

SEQ ID NO: 250673 - RNA, 21 nt, Human
gugagaucagaaaggggcccu

SEQ ID NO: 250674 - RNA, 24 nt, Human
guugcaaugugauauguucuaacc

SEQ ID NO: 250675 - RNA, 23 nt, Human
guuuuucuucucucucucguccc

SEQ ID NO: 250676 - RNA, 21 nt, Human
uaaaaacggaugacaaagcaa

SEQ ID NO: 250677 - RNA, 21 nt, Human
uaaaaauagcaugaaagaaac

SEQ ID NO: 250678 - RNA, 23 nt, Human
uaaaaguacuuuuacaaaacaga

SEQ ID NO: 250679 - RNA, 23 nt, Human
uaaauaacguugaaccugcaaca

SEQ ID NO: 250680 - RNA, 19 nt, Human
uaaccccacagguuauccu

SEQ ID NO: 250681 - RNA, 24 nt, Human
uaauuaaaaacggaugacaaagca

SEQ ID NO: 250682 - RNA, 21 nt, Human
uaccaauggccacccauuacc

SEQ ID NO: 250683 - RNA, 23 nt, Human
uagaaauacacauuucaaaaaca

SEQ ID NO: 250684 - RNA, 24 nt, Human
uagcaaagcauggaguucuucaug

SEQ ID NO: 250685 - RNA, 18 nt, Human
uauaaaauguaagcagag

SEQ ID NO: 250686 - RNA, 22 nt, Human
uauagcacacacacacacugca

SEQ ID NO: 250687 - RNA, 19 nt, Human
uauagcaguguugauauua

SEQ ID NO: 250688 - RNA, 18 nt, Human
uauuuaauaagagaugca

SEQ ID NO: 250689 - RNA, 20 nt, Human
uauuuuuuccuuccuuuucu

SEQ ID NO: 250690 - RNA, 23 nt, Human
ucaaaaacaaaacuucuacaaag

SEQ ID NO: 250691 - RNA, 22 nt, Human
ucaaacaugcagccacggcgac

SEQ ID NO: 250692 - RNA, 27 nt, Human
ucaaacaugcagccacggcgacccaca

SEQ ID NO: 250693 - RNA, 19 nt, Human
ucagaaaggggcccugcau

SEQ ID NO: 250694 - RNA, 21 nt, Human
uccaagagaaggaaaaucuuu

SEQ ID NO: 250695 - RNA, 22 nt, Human
uccaagagaaggaaaaucuuuc

SEQ ID NO: 250696 - RNA, 19 nt, Human
uccacacacggcacauaua

SEQ ID NO: 250697 - RNA, 18 nt, Human
uccuuccuuuucuuucuc

SEQ ID NO: 250698 - RNA, 21 nt, Human
ucuagcacccagucuuucacc

SEQ ID NO: 250699 - RNA, 19 nt, Human
ucucuuggcuucugccacc

SEQ ID NO: 250700 - RNA, 24 nt, Human
ucugugacugcgagcagagcgagc

SEQ ID NO: 250701 - RNA, 20 nt, Human
ucuuucucuuuccuguuucc

SEQ ID NO: 250702 - RNA, 22 nt, Human
ugaaauggugagaucagaaagg

SEQ ID NO: 250703 - RNA, 18 nt, Human
ugacugcgagcagagcga

SEQ ID NO: 250704 - RNA, 21 nt, Human
ugacugcgagcagagcgagca

SEQ ID NO: 250705 - RNA, 20 nt, Human
ugcaaaaaacaaaauaaaaa

SEQ ID NO: 250706 - RNA, 18 nt, Human
uggauacaaccaaaggug

SEQ ID NO: 250707 - RNA, 22 nt, Human
ugggaugucaggugaccuggug

SEQ ID NO: 250708 - RNA, 22 nt, Human
uggugaaauggugagaucagaa

SEQ ID NO: 250709 - RNA, 21 nt, Human
uguuguacaacucaaguggcg

SEQ ID NO: 250710 - RNA, 20 nt, Human
uucaaagucaauccaauagc

SEQ ID NO: 250711 - RNA, 21 nt, Human
uuccaagagaaggaaaaucuu

SEQ ID NO: 250712 - RNA, 20 nt, Human
uuccugaugaaggaagaccc

SEQ ID NO: 250713 - RNA, 21 nt, Human
uuuccuuccuuuucuuucucu

SEQ ID NO: 250714 - RNA, 24 nt, Human
uuucuauauguugcauaacagcug

SEQ ID NO: 250715 - RNA, 19 nt, Human
uuucuucucucucucgucc

SEQ ID NO: 250716 - RNA, 19 nt, Human
uuugcaaacucugucuuac

SEQ ID NO: 250717 - RNA, 21 nt, Human
uuuuuuuuuuuccacacacgg

SEQ ID NO: 250718 - RNA, 21 nt, Human
aaaccuggggagggggagggc

SEQ ID NO: 250719 - RNA, 19 nt, Human
aaagcaggucugggguugg

SEQ ID NO: 250720 - RNA, 22 nt, Human
aaaggacacugaaacauccaca

SEQ ID NO: 250721 - RNA, 21 nt, Human
aaaggacacugaaacauccag

SEQ ID NO: 250722 - RNA, 23 nt, Human
aaauaaucagcaagagaaggugc

SEQ ID NO: 250723 - RNA, 27 nt, Human
aacaggacacgaagcacaagaaaggaa

SEQ ID NO: 250724 - RNA, 18 nt, Human
aacuuaccccucacccca

SEQ ID NO: 250725 - RNA, 24 nt, Human
aagaggagagaauccagauucucc

SEQ ID NO: 250726 - RNA, 24 nt, Human
aagguagggagggcugggaggggg

SEQ ID NO: 250727 - RNA, 20 nt, Human
acaaaucaacagccucacac

SEQ ID NO: 250728 - RNA, 22 nt, Human
acagagaagaaaggacacugaa

SEQ ID NO: 250729 - RNA, 18 nt, Human
accccucaccccacccca

SEQ ID NO: 250730 - RNA, 24 nt, Human
accccucaccccaccccaggggau

SEQ ID NO: 250731 - RNA, 21 nt, Human
acccuggcuucuuucaagccc

SEQ ID NO: 250732 - RNA, 18 nt, Human
acgaagcacaagaaagga

SEQ ID NO: 250733 - RNA, 21 nt, Human
acucgcccugccccaggaccc

SEQ ID NO: 250734 - RNA, 20 nt, Human
acugcagaaaugucacauau

SEQ ID NO: 250735 - RNA, 22 nt, Human
agaagaaaggacacugaaacau

SEQ ID NO: 250736 - RNA, 21 nt, Human
agaauacuaagaaagcaucac

SEQ ID NO: 250737 - RNA, 20 nt, Human
agcagaggggagaacaagga

SEQ ID NO: 250738 - RNA, 19 nt, Human
agcgggaggagcccggggc

SEQ ID NO: 250739 - RNA, 21 nt, Human
aggcugagaggaggggagugg

SEQ ID NO: 250740 - RNA, 18 nt, Human
agggacagagaagaaagg

SEQ ID NO: 250741 - RNA, 23 nt, Human
agggcugggagggggucaggggu

SEQ ID NO: 250742 - RNA, 24 nt, Human
aggggagaacaaggaguucccagg

SEQ ID NO: 250743 - RNA, 18 nt, Human
aggggauuccaaagaguc

SEQ ID NO: 250744 - RNA, 19 nt, Human
aggggauuccaaagaguca

SEQ ID NO: 250745 - RNA, 20 nt, Human
aggugguggggggggguguc

SEQ ID NO: 250746 - RNA, 21 nt, Human
agguggugggggggggugucc

SEQ ID NO: 250747 - RNA, 25 nt, Human
auacagcacgaaaagaaauauugaa

SEQ ID NO: 250748 - RNA, 20 nt, Human
aucagaaacguguauucuuu

SEQ ID NO: 250749 - RNA, 18 nt, Human
augaacaagauuacaccc

SEQ ID NO: 250750 - RNA, 18 nt, Human
cacauauucacagaccac

SEQ ID NO: 250751 - RNA, 20 nt, Human
cacauauucacagaccaccc

SEQ ID NO: 250752 - RNA, 18 nt, Human
caccaccucccucccucu

SEQ ID NO: 250753 - RNA, 18 nt, Human
caccauacagcacgaaaa

SEQ ID NO: 250754 - RNA, 23 nt, Human
caccauacagcacgaaaagaaau

SEQ ID NO: 250755 - RNA, 23 nt, Human
cagauucuccauuccagccuccc

SEQ ID NO: 250756 - RNA, 21 nt, Human
cagccuccagcccggcugggg

SEQ ID NO: 250757 - RNA, 21 nt, Human
caggacccaggaagagcccca

SEQ ID NO: 250758 - RNA, 19 nt, Human
cagggaagggcgggcggug

SEQ ID NO: 250759 - RNA, 22 nt, Human
cagggacagagaagaaaggaca

SEQ ID NO: 250760 - RNA, 18 nt, Human
cauacagcacgaaaagaa

SEQ ID NO: 250761 - RNA, 19 nt, Human
cauggcccauccugccccu

SEQ ID NO: 250762 - RNA, 25 nt, Human
cccaggacccaggaagagccccagg

SEQ ID NO: 250763 - RNA, 22 nt, Human
cccaggagccccuacccccaag

SEQ ID NO: 250764 - RNA, 23 nt, Human
cccaggagccccuacccccaaga

SEQ ID NO: 250765 - RNA, 22 nt, Human
cccaguucuucagagggagugg

SEQ ID NO: 250766 - RNA, 22 nt, Human
ccccaggacccaggaagagccc

SEQ ID NO: 250767 - RNA, 18 nt, Human
ccccagggacagagaaga

SEQ ID NO: 250768 - RNA, 21 nt, Human
ccccucccuuccucuuccuca

SEQ ID NO: 250769 - RNA, 20 nt, Human
cccggggcagggaagggcgg

SEQ ID NO: 250770 - RNA, 18 nt, Human
cccucccuuccucuuccu

SEQ ID NO: 250771 - RNA, 21 nt, Human
cccuggaucgaggcucaucag

SEQ ID NO: 250772 - RNA, 20 nt, Human
cccuuccucuuccucaccac

SEQ ID NO: 250773 - RNA, 22 nt, Human
ccgcccaggagccccuaccucg

SEQ ID NO: 250774 - RNA, 23 nt, Human
ccuaucauucaacuauucaccca

SEQ ID NO: 250775 - RNA, 20 nt, Human
ccucacacuuggacucgccc

SEQ ID NO: 250776 - RNA, 22 nt, Human
ccucaccaccucccucccucug

SEQ ID NO: 250777 - RNA, 24 nt, Human
ccucaccaccucccucccucugga

SEQ ID NO: 250778 - RNA, 25 nt, Human
ccuccgcgaaagccuaaacuuaccc

SEQ ID NO: 250779 - RNA, 18 nt, Human
ccugccccaggacccagg

SEQ ID NO: 250780 - RNA, 18 nt, Human
ccugccccucccuuccuc

SEQ ID NO: 250781 - RNA, 24 nt, Human
ccuggggagggggagggccauuag

SEQ ID NO: 250782 - RNA, 19 nt, Human
cgaaagccuaaacuuaccc

SEQ ID NO: 250783 - RNA, 18 nt, Human
cgggaggagcccggggca

SEQ ID NO: 250784 - RNA, 18 nt, Human
cgucaacaggacacgaag

SEQ ID NO: 250785 - RNA, 22 nt, Human
cucaccccaccccaggggauuc

SEQ ID NO: 250786 - RNA, 18 nt, Human
cuccauggcccauccugc

SEQ ID NO: 250787 - RNA, 18 nt, Human
cuccaugucuccuccccu

SEQ ID NO: 250788 - RNA, 25 nt, Human
cucgcccugccccaggacccaggaa

SEQ ID NO: 250789 - RNA, 22 nt, Human
cucuuccucaccaccucccucc

SEQ ID NO: 250790 - RNA, 24 nt, Human
cuugcccacugucccugaaagcug

SEQ ID NO: 250791 - RNA, 18 nt, Human
cuuggacucgcccugccc

SEQ ID NO: 250792 - RNA, 19 nt, Human
gaaacauccacacauggua

SEQ ID NO: 250793 - RNA, 20 nt, Human
gaaagaguuuucaaacaaaa

SEQ ID NO: 250794 - RNA, 21 nt, Human
gaacaagauuacacccuggcu

SEQ ID NO: 250795 - RNA, 21 nt, Human
gacacgaagcacaagaaagga

SEQ ID NO: 250796 - RNA, 23 nt, Human
gagcccggggcagggaagggcgg

SEQ ID NO: 250797 - RNA, 18 nt, Human
gaggagcccggggcaggg

SEQ ID NO: 250798 - RNA, 18 nt, Human
gaggugggaaggcuggac

SEQ ID NO: 250799 - RNA, 18 nt, Human
gcccaggagccccuaccc

SEQ ID NO: 250800 - RNA, 19 nt, Human
gcccaggagccccuacccc

SEQ ID NO: 250801 - RNA, 18 nt, Human
gcccauccugccccuccc

SEQ ID NO: 250802 - RNA, 19 nt, Human
gcccucacccccaccccgu

SEQ ID NO: 250803 - RNA, 22 nt, Human
ggcaaagagcggguagcccucg

SEQ ID NO: 250804 - RNA, 20 nt, Human
ggcagggaagggcgggcggu

SEQ ID NO: 250805 - RNA, 23 nt, Human
ggcugggagggggucagggguca

SEQ ID NO: 250806 - RNA, 20 nt, Human
gggaauagccugagaaggga

SEQ ID NO: 250807 - RNA, 22 nt, Human
gggaggggcucgcuggguggug

SEQ ID NO: 250808 - RNA, 23 nt, Human
ggggaggggcucgcuggguggug

SEQ ID NO: 250809 - RNA, 22 nt, Human
ggggagggggagggccauuaga

SEQ ID NO: 250810 - RNA, 24 nt, Human
ggggcagggaagggcgggcgguga

SEQ ID NO: 250811 - RNA, 18 nt, Human
gggguugggggaagaggg

SEQ ID NO: 250812 - RNA, 24 nt, Human
gguccucagugcuacggaggggag

SEQ ID NO: 250813 - RNA, 19 nt, Human
gguggaggcgaauuuggcu

SEQ ID NO: 250814 - RNA, 23 nt, Human
gguggggggggguguccucuugc

SEQ ID NO: 250815 - RNA, 19 nt, Human
gucacggcaaagagcgggu

SEQ ID NO: 250816 - RNA, 23 nt, Human
gugcucaguucauggucugcagg

SEQ ID NO: 250817 - RNA, 25 nt, Human
gugcuguugagggggggagaauggu

SEQ ID NO: 250818 - RNA, 24 nt, Human
uaaccgucaacaggacacgaagca

SEQ ID NO: 250819 - RNA, 20 nt, Human
uacuccaggaacugugucaa

SEQ ID NO: 250820 - RNA, 21 nt, Human
uacugaacugcagaaauguca

SEQ ID NO: 250821 - RNA, 26 nt, Human
ucaacuauucacccauucagcauuua

SEQ ID NO: 250822 - RNA, 21 nt, Human
ucccaggcuccaugucuccuc

SEQ ID NO: 250823 - RNA, 19 nt, Human
ucccugaaagcugugggaa

SEQ ID NO: 250824 - RNA, 20 nt, Human
uccucaccaccucccucccu

SEQ ID NO: 250825 - RNA, 21 nt, Human
uccuucuaccaacugcuuuaa

SEQ ID NO: 250826 - RNA, 23 nt, Human
ugaaagaguuuucaaacaaaacu

SEQ ID NO: 250827 - RNA, 22 nt, Human
ugaaagcugugggaaaccuggg

SEQ ID NO: 250828 - RNA, 23 nt, Human
ugacuccagugguuacuuuggca

SEQ ID NO: 250829 - RNA, 24 nt, Human
ugagcaccuaucauucaacuauuc

SEQ ID NO: 250830 - RNA, 21 nt, Human
ugagguggugggggggggugu

SEQ ID NO: 250831 - RNA, 20 nt, Human
ugaguaagugaucacugcuc

SEQ ID NO: 250832 - RNA, 18 nt, Human
ugauugucaggugugggg

SEQ ID NO: 250833 - RNA, 22 nt, Human
ugcaugaacaagauuacacccu

SEQ ID NO: 250834 - RNA, 22 nt, Human
ugcucagcugagggagaagcuu

SEQ ID NO: 250835 - RNA, 21 nt, Human
ugcucugaaagcaggucuggg

SEQ ID NO: 250836 - RNA, 22 nt, Human
ugcuuuaagggguggggagagg

SEQ ID NO: 250837 - RNA, 19 nt, Human
uggcuugagaggaagaaga

SEQ ID NO: 250838 - RNA, 20 nt, Human
ugggaaaccuggggaggggg

SEQ ID NO: 250839 - RNA, 23 nt, Human
ugggaaaccuggggagggggagg

SEQ ID NO: 250840 - RNA, 25 nt, Human
ugggaaaccuggggagggggagggc

SEQ ID NO: 250841 - RNA, 21 nt, Human
ugggaaggcuggacgugcugu

SEQ ID NO: 250842 - RNA, 20 nt, Human
ugggggaagaggguacucca

SEQ ID NO: 250843 - RNA, 23 nt, Human
uguuccacugagguggugggggg

SEQ ID NO: 250844 - RNA, 19 nt, Human
uucacagaccaccccaucc

SEQ ID NO: 250845 - RNA, 19 nt, Human
uucagagggagugggugga

SEQ ID NO: 250846 - RNA, 21 nt, Human
uugagaggaagaagacauuaa

SEQ ID NO: 250847 - RNA, 19 nt, Human
aaaaauacaagaaaaccag

SEQ ID NO: 250848 - RNA, 21 nt, Human
aaauacuucuaucccaaucca

SEQ ID NO: 250849 - RNA, 20 nt, Human
aacaugaugaaaccucaugu

SEQ ID NO: 250850 - RNA, 20 nt, Human
aacauggugaaacccccguc

SEQ ID NO: 250851 - RNA, 21 nt, Human
aacauggugaaacccccgucu

SEQ ID NO: 250852 - RNA, 22 nt, Human
aacauggugaaacccccgucuc

SEQ ID NO: 250853 - RNA, 19 nt, Human
aaccagccugguguggugg

SEQ ID NO: 250854 - RNA, 21 nt, Human
aagaaaaccagccuggugugg

SEQ ID NO: 250855 - RNA, 22 nt, Human
aagacagaagcagagagaacaa

SEQ ID NO: 250856 - RNA, 23 nt, Human
aagagcaaaacuuugucucaaaa

SEQ ID NO: 250857 - RNA, 24 nt, Human
aaucgcuugaaccugggaggugga

SEQ ID NO: 250858 - RNA, 24 nt, Human
aaucucuugaaccugggaggcgga

SEQ ID NO: 250859 - RNA, 24 nt, Human
aaucuucuguucaggagcaccuga

SEQ ID NO: 250860 - RNA, 24 nt, Human
acagagcaagauuuggucucaaaa

SEQ ID NO: 250861 - RNA, 19 nt, Human
accacugcacuccagccug

SEQ ID NO: 250862 - RNA, 24 nt, Human
accacugcacuccagccuggguga

SEQ ID NO: 250863 - RNA, 24 nt, Human
accugaggucaggaguucgagacc

SEQ ID NO: 250864 - RNA, 24 nt, Human
accugaggucaggaguuugagacc

SEQ ID NO: 250865 - RNA, 22 nt, Human
acuaaaaauacaagaaaaccag

SEQ ID NO: 250866 - RNA, 19 nt, Human
acuccagccugggccacag

SEQ ID NO: 250867 - RNA, 24 nt, Human
acuccagccugggccacagagcaa

SEQ ID NO: 250868 - RNA, 18 nt, Human
acugcacuccagccuggg

SEQ ID NO: 250869 - RNA, 18 nt, Human
acugcacuccagccuggg

SEQ ID NO: 250870 - RNA, 24 nt, Human
acugcacuccagccugggccacag

SEQ ID NO: 250871 - RNA, 24 nt, Human
acugcacuccagccugggugacaa

SEQ ID NO: 250872 - RNA, 25 nt, Human
acugcacuccagccugggugacaag

SEQ ID NO: 250873 - RNA, 20 nt, Human
agaacaaggggacauauauu

SEQ ID NO: 250874 - RNA, 19 nt, Human
agacagaagcagagagaac

SEQ ID NO: 250875 - RNA, 23 nt, Human
agacagaagcagagagaacaagg

SEQ ID NO: 250876 - RNA, 24 nt, Human
agcacuuugggaggcugaggcggg

SEQ ID NO: 250877 - RNA, 22 nt, Human
agccuggcuaacauggugaaac

SEQ ID NO: 250878 - RNA, 24 nt, Human
agccuggcuaacauggugaaaccc

SEQ ID NO: 250879 - RNA, 24 nt, Human
agccugggccacagagcaagauuu

SEQ ID NO: 250880 - RNA, 22 nt, Human
aggcaggagaaucgcuugaacc

SEQ ID NO: 250881 - RNA, 24 nt, Human
aggcaggagaaucgcuugaaccug

SEQ ID NO: 250882 - RNA, 22 nt, Human
aggcaggagaaucucuugaacc

SEQ ID NO: 250883 - RNA, 24 nt, Human
aggcaggagaaucucuugaaccug

SEQ ID NO: 250884 - RNA, 24 nt, Human
aggcaugguggcucaugccuguaa

SEQ ID NO: 250885 - RNA, 19 nt, Human
aggccagaagcaggaagag

SEQ ID NO: 250886 - RNA, 24 nt, Human
aggcggagguugcagugagccaag

SEQ ID NO: 250887 - RNA, 22 nt, Human
aggcggguggaucaccugaggu

SEQ ID NO: 250888 - RNA, 26 nt, Human
aggcggguggaucaccugaggucagg

SEQ ID NO: 250889 - RNA, 20 nt, Human
aggcugaggcaggagaaucg

SEQ ID NO: 250890 - RNA, 24 nt, Human
aggcugaggcaggagaaucgcuug

SEQ ID NO: 250891 - RNA, 24 nt, Human
aggcugaggcaggagaaucucuug

SEQ ID NO: 250892 - RNA, 21 nt, Human
aggcugaggcggguggaucac

SEQ ID NO: 250893 - RNA, 24 nt, Human
aggcugaggcggguggaucaccug

SEQ ID NO: 250894 - RNA, 20 nt, Human
agguggagguugcagugagc

SEQ ID NO: 250895 - RNA, 24 nt, Human
agguggagguugcagugagcugag

SEQ ID NO: 250896 - RNA, 22 nt, Human
aggugggugcaucaccugaggu

SEQ ID NO: 250897 - RNA, 23 nt, Human
aguggcucaugccuguaauccca

SEQ ID NO: 250898 - RNA, 24 nt, Human
aguggcucaugccuguaaucccag

SEQ ID NO: 250899 - RNA, 24 nt, Human
auaggccgggcacaguggcucaug

SEQ ID NO: 250900 - RNA, 19 nt, Human
auaguucauuaauccaggu

SEQ ID NO: 250901 - RNA, 24 nt, Human
aucaccugaggucaggaguucgag

SEQ ID NO: 250902 - RNA, 24 nt, Human
aucaccugaggucaggaguuugag

SEQ ID NO: 250903 - RNA, 23 nt, Human
auccuugccgugggguucugagg

SEQ ID NO: 250904 - RNA, 24 nt, Human
aucgugccacugcacuccagccug

SEQ ID NO: 250905 - RNA, 19 nt, Human
augccuguaaucccagcac

SEQ ID NO: 250906 - RNA, 24 nt, Human
auugcaccacugcacuccagccug

SEQ ID NO: 250907 - RNA, 28 nt, Human
auuuggucucaaaaaaaaaaaaaaaaaa

SEQ ID NO: 250908 - RNA, 24 nt, Human
caagaaaaccagccugguguggug

SEQ ID NO: 250909 - RNA, 21 nt, Human
caagacagaagcagagagaac

SEQ ID NO: 250910 - RNA, 20 nt, Human
caccacugcacuccagccug

SEQ ID NO: 250911 - RNA, 26 nt, Human
caccacugcacuccagccugggugac

SEQ ID NO: 250912 - RNA, 23 nt, Human
caccugaggucaggaguucgaga

SEQ ID NO: 250913 - RNA, 23 nt, Human
caccugaggucaggaguuugaga

SEQ ID NO: 250914 - RNA, 21 nt, Human
caccuguaaucccagcugcuc

SEQ ID NO: 250915 - RNA, 24 nt, Human
caccuguaaucccagcugcucagg

SEQ ID NO: 250916 - RNA, 23 nt, Human
cacuccagccugggccacagagc

SEQ ID NO: 250917 - RNA, 20 nt, Human
cacuccagccugggugacaa

SEQ ID NO: 250918 - RNA, 21 nt, Human
cacuccagccugggugacaag

SEQ ID NO: 250919 - RNA, 24 nt, Human
cacuccagccugggugacaagagc

SEQ ID NO: 250920 - RNA, 18 nt, Human
cacugcacuccagccugg

SEQ ID NO: 250921 - RNA, 19 nt, Human
cacugcacuccagccuggg

SEQ ID NO: 250922 - RNA, 19 nt, Human
cacugcacuccagccuggg

SEQ ID NO: 250923 - RNA, 22 nt, Human
cacugcacuccagccugggcca

SEQ ID NO: 250924 - RNA, 24 nt, Human
cacugcacuccagccugggccaca

SEQ ID NO: 250925 - RNA, 21 nt, Human
cacugcacuccagccugggug

SEQ ID NO: 250926 - RNA, 22 nt, Human
cacugcacuccagccuggguga

SEQ ID NO: 250927 - RNA, 23 nt, Human
cacugcacuccagccugggugac

SEQ ID NO: 250928 - RNA, 24 nt, Human
cacugcacuccagccugggugaca

SEQ ID NO: 250929 - RNA, 25 nt, Human
cacugcacuccagccugggugacaa

SEQ ID NO: 250930 - RNA, 24 nt, Human
cagcacuuugggaggcugaggcgg

SEQ ID NO: 250931 - RNA, 24 nt, Human
cagcugcucaggaggcugaggcag

SEQ ID NO: 250932 - RNA, 24 nt, Human
caucaccugaggucaggaguuuga

SEQ ID NO: 250933 - RNA, 20 nt, Human
caugccuguaaucccagcac

SEQ ID NO: 250934 - RNA, 24 nt, Human
caugccuguaaucccagcacuuug

SEQ ID NO: 250935 - RNA, 24 nt, Human
caugccuguaaucccugcacuuug

SEQ ID NO: 250936 - RNA, 24 nt, Human
cauggccaggcaugguggcucaug

SEQ ID NO: 250937 - RNA, 18 nt, Human
ccacugcacuccagccug

SEQ ID NO: 250938 - RNA, 20 nt, Human
ccacugcacuccagccuggg

SEQ ID NO: 250939 - RNA, 20 nt, Human
ccacugcacuccagccuggg

SEQ ID NO: 250940 - RNA, 20 nt, Human
ccacugcacuccagccuggg

SEQ ID NO: 250941 - RNA, 21 nt, Human
ccacugcacuccagccugggc

SEQ ID NO: 250942 - RNA, 24 nt, Human
ccacugcacuccagccugggccac

SEQ ID NO: 250943 - RNA, 21 nt, Human
ccacugcacuccagccugggu

SEQ ID NO: 250944 - RNA, 21 nt, Human
ccacugcacuccagccugggu

SEQ ID NO: 250945 - RNA, 24 nt, Human
ccacugcacuccagccugggugac

SEQ ID NO: 250946 - RNA, 25 nt, Human
ccacugcacuccagccugggugaca

SEQ ID NO: 250947 - RNA, 19 nt, Human
cccaauccagucugcuugc

SEQ ID NO: 250948 - RNA, 23 nt, Human
ccccgucucuacuaaaaauacaa

SEQ ID NO: 250949 - RNA, 23 nt, Human
ccguacuuccuccucugaaaucc

SEQ ID NO: 250950 - RNA, 23 nt, Human
ccucaagacagaagcagagagaa

SEQ ID NO: 250951 - RNA, 18 nt, Human
ccucugaaauccauggug

SEQ ID NO: 250952 - RNA, 22 nt, Human
ccugaggucaggaguucgagac

SEQ ID NO: 250953 - RNA, 22 nt, Human
ccugaggucaggaguuugagac

SEQ ID NO: 250954 - RNA, 24 nt, Human
ccuggccaacaugaugaaaccuca

SEQ ID NO: 250955 - RNA, 23 nt, Human
ccuggcuaacauggugaaacccc

SEQ ID NO: 250956 - RNA, 25 nt, Human
ccuggcuaacauggugaaacccccg

SEQ ID NO: 250957 - RNA, 19 nt, Human
ccugggaggcggagguugc

SEQ ID NO: 250958 - RNA, 21 nt, Human
ccugggagguggagguugcag

SEQ ID NO: 250959 - RNA, 19 nt, Human
ccugggccacagagcaaga

SEQ ID NO: 250960 - RNA, 22 nt, Human
ccuguaaucccagcuacuucgg

SEQ ID NO: 250961 - RNA, 21 nt, Human
ccuguaaucccagcugcucag

SEQ ID NO: 250962 - RNA, 22 nt, Human
ccuguaaucccugcacuuuggg

SEQ ID NO: 250963 - RNA, 24 nt, Human
cgagaccagccuggcuaacauggu

SEQ ID NO: 250964 - RNA, 20 nt, Human
cgcaccuguaaucccagcug

SEQ ID NO: 250965 - RNA, 24 nt, Human
cgccuguaaucccagcuacuucgg

SEQ ID NO: 250966 - RNA, 24 nt, Human
cggguggaucaccugaggucagga

SEQ ID NO: 250967 - RNA, 18 nt, Human
cucaaaaaaaaaaaaaaa

SEQ ID NO: 250968 - RNA, 18 nt, Human
cucaaaaaaaaaaaaaaa

SEQ ID NO: 250969 - RNA, 18 nt, Human
cucaaaaaaaaaaaaaaa

SEQ ID NO: 250970 - RNA, 18 nt, Human
cucaaaaaaaaaaaaaaa

SEQ ID NO: 250971 - RNA, 24 nt, Human
cucaaaaaaaaaaaaaaaaaagaa

SEQ ID NO: 250972 - RNA, 26 nt, Human
cucaaaaaaaaaaaaaaaaaagaauc

SEQ ID NO: 250973 - RNA, 22 nt, Human
cucaagacagaagcagagagaa

SEQ ID NO: 250974 - RNA, 24 nt, Human
cucaugccuguaaucccagcacuu

SEQ ID NO: 250975 - RNA, 24 nt, Human
cucaugccuguaaucccugcacuu

SEQ ID NO: 250976 - RNA, 18 nt, Human
cucgagccagcugucugg

SEQ ID NO: 250977 - RNA, 24 nt, Human
cucuacuaaaaauacaagaaaacc

SEQ ID NO: 250978 - RNA, 24 nt, Human
cugcacuuugggaggcugaggugg

SEQ ID NO: 250979 - RNA, 21 nt, Human
cuguaaucccagcugcucagg

SEQ ID NO: 250980 - RNA, 19 nt, Human
cuugaaccugggaggugga

SEQ ID NO: 250981 - RNA, 23 nt, Human
gagaaucgcuugaaccugggagg

SEQ ID NO: 250982 - RNA, 20 nt, Human
gagaccggccuggccaacau

SEQ ID NO: 250983 - RNA, 21 nt, Human
gagaggcucgagccagcuguc

SEQ ID NO: 250984 - RNA, 23 nt, Human
gagaucgugccacugcacuccag

SEQ ID NO: 250985 - RNA, 20 nt, Human
gagcaagauuuggucucaaa

SEQ ID NO: 250986 - RNA, 19 nt, Human
gagcaggagaggcucgagc

SEQ ID NO: 250987 - RNA, 18 nt, Human
gagguugcagugagccaa

SEQ ID NO: 250988 - RNA, 21 nt, Human
gagguugcagugagccaagau

SEQ ID NO: 250989 - RNA, 23 nt, Human
gagguugcagugagccaagauug

SEQ ID NO: 250990 - RNA, 23 nt, Human
gagguugcagugagcugagaucg

SEQ ID NO: 250991 - RNA, 21 nt, Human
gaucaccugaggucaggaguu

SEQ ID NO: 250992 - RNA, 24 nt, Human
gaucaccugaggucaggaguucga

SEQ ID NO: 250993 - RNA, 24 nt, Human
gcacuccagccugggccacagagc

SEQ ID NO: 250994 - RNA, 19 nt, Human
gcacuuugggaggcugagg

SEQ ID NO: 250995 - RNA, 23 nt, Human
gcacuuugggaggcugagguggg

SEQ ID NO: 250996 - RNA, 20 nt, Human
gcaggaagagagaugcagug

SEQ ID NO: 250997 - RNA, 22 nt, Human
gcaucaccugaggucaggaguu

SEQ ID NO: 250998 - RNA, 22 nt, Human
gccacugcacuccagccugggc

SEQ ID NO: 250999 - RNA, 22 nt, Human
gccaggcaugguggcucaugcc

SEQ ID NO: 251000 - RNA, 22 nt, Human
gccuggccaacaugaugaaacc

SEQ ID NO: 251001 - RNA, 25 nt, Human
gcuaacauggugaaacccccgucuc

SEQ ID NO: 251002 - RNA, 20 nt, Human
gcugagaucgugccacugca

SEQ ID NO: 251003 - RNA, 22 nt, Human
ggagguugcagugagccaagau

SEQ ID NO: 251004 - RNA, 24 nt, Human
ggagguugcagugagccaagauug

SEQ ID NO: 251005 - RNA, 22 nt, Human
ggagguugcagugagcugagau

SEQ ID NO: 251006 - RNA, 23 nt, Human
ggagguugcagugagcugagauc

SEQ ID NO: 251007 - RNA, 24 nt, Human
ggagguugcagugagcugagaucg

SEQ ID NO: 251008 - RNA, 23 nt, Human
ggcacaguggcucaugccuguaa

SEQ ID NO: 251009 - RNA, 23 nt, Human
ggcaugguggcgggcgccuguaa

SEQ ID NO: 251010 - RNA, 23 nt, Human
ggccgggcacaguggcucaugcc

SEQ ID NO: 251011 - RNA, 18 nt, Human
gggcacaguggcucaugc

SEQ ID NO: 251012 - RNA, 18 nt, Human
ggucaggaguuugagacc

SEQ ID NO: 251013 - RNA, 19 nt, Human
gguggagguugcagugagc

SEQ ID NO: 251014 - RNA, 24 nt, Human
gguggcacgcaccuguaaucccag

SEQ ID NO: 251015 - RNA, 24 nt, Human
gguggcgggcgccuguaaucccag

SEQ ID NO: 251016 - RNA, 24 nt, Human
gguggcucaugccuguaaucccug

SEQ ID NO: 251017 - RNA, 20 nt, Human
guggagguugcagugagcug

SEQ ID NO: 251018 - RNA, 24 nt, Human
guugcagugagcugagaucgugcc

SEQ ID NO: 251019 - RNA, 19 nt, Human
uaaaaauacaagaaaacca

SEQ ID NO: 251020 - RNA, 24 nt, Human
uaaaaauacaagaaaaccagccug

SEQ ID NO: 251021 - RNA, 23 nt, Human
uaacauggugaaacccccgucuc

SEQ ID NO: 251022 - RNA, 25 nt, Human
uaacauggugaaacccccgucucua

SEQ ID NO: 251023 - RNA, 21 nt, Human
uacacaaauacuucuauccca

SEQ ID NO: 251024 - RNA, 19 nt, Human
uacuucggaggcugaggca

SEQ ID NO: 251025 - RNA, 22 nt, Human
uaucccaauccagucugcuugc

SEQ ID NO: 251026 - RNA, 20 nt, Human
ucaaaaaaaaaaaaaaaaaa

SEQ ID NO: 251027 - RNA, 24 nt, Human
ucaaaaaaaaaaaaaaaaaagaau

SEQ ID NO: 251028 - RNA, 21 nt, Human
ucaagacagaagcagagagaa

SEQ ID NO: 251029 - RNA, 25 nt, Human
ucaagacagaagcagagagaacaac

SEQ ID NO: 251030 - RNA, 22 nt, Human
ucaugccuguaaucccagcacu

SEQ ID NO: 251031 - RNA, 22 nt, Human
ucaugccuguaaucccugcacu

SEQ ID NO: 251032 - RNA, 19 nt, Human
uccagccugggugacaaga

SEQ ID NO: 251033 - RNA, 19 nt, Human
ucccugcacuuugggaggc

SEQ ID NO: 251034 - RNA, 24 nt, Human
ucgcuugaaccugggagguggagg

SEQ ID NO: 251035 - RNA, 19 nt, Human
ucucaaaaaaaaaaaaaaa

SEQ ID NO: 251036 - RNA, 19 nt, Human
ucucaaaaaaaaaaaaaaa

SEQ ID NO: 251037 - RNA, 24 nt, Human
ucucaaaaaaaaaaaaaaaaaauc

SEQ ID NO: 251038 - RNA, 18 nt, Human
ucucuacuaaaaauacaa

SEQ ID NO: 251039 - RNA, 22 nt, Human
ucucuugaaccugggaggcgga

SEQ ID NO: 251040 - RNA, 24 nt, Human
ucucuugaaccugggaggcggagg

SEQ ID NO: 251041 - RNA, 24 nt, Human
ugaaccugggaggcggagguugca

SEQ ID NO: 251042 - RNA, 24 nt, Human
ugaaccugggagguggagguugca

SEQ ID NO: 251043 - RNA, 21 nt, Human
ugaaugcaagauacaaggcca

SEQ ID NO: 251044 - RNA, 24 nt, Human
ugaaugcaagauacaaggccagaa

SEQ ID NO: 251045 - RNA, 23 nt, Human
ugagaccggccuggccaacauga

SEQ ID NO: 251046 - RNA, 22 nt, Human
ugagcugagaucgugccacugc

SEQ ID NO: 251047 - RNA, 20 nt, Human
ugaggcaggagaaucgcuug

SEQ ID NO: 251048 - RNA, 24 nt, Human
ugaggcaggagaaucgcuugaacc

SEQ ID NO: 251049 - RNA, 25 nt, Human
ugaggcaggagaaucgcuugaaccu

SEQ ID NO: 251050 - RNA, 20 nt, Human
ugaggcaggagaaucucuug

SEQ ID NO: 251051 - RNA, 24 nt, Human
ugaggcaggagaaucucuugaacc

SEQ ID NO: 251052 - RNA, 25 nt, Human
ugaggcaggagaaucucuugaaccu

SEQ ID NO: 251053 - RNA, 20 nt, Human
ugaggcggguggaucaccug

SEQ ID NO: 251054 - RNA, 22 nt, Human
ugaggcggguggaucaccugag

SEQ ID NO: 251055 - RNA, 24 nt, Human
ugaggcggguggaucaccugaggu

SEQ ID NO: 251056 - RNA, 26 nt, Human
ugaggcggguggaucaccugagguca

SEQ ID NO: 251057 - RNA, 22 nt, Human
ugagggaaaaugagggccaaau

SEQ ID NO: 251058 - RNA, 18 nt, Human
ugaggucaggaguuugag

SEQ ID NO: 251059 - RNA, 20 nt, Human
ugaggugggugcaucaccug

SEQ ID NO: 251060 - RNA, 24 nt, Human
ugaggugggugcaucaccugaggu

SEQ ID NO: 251061 - RNA, 26 nt, Human
ugaggugggugcaucaccugagguca

SEQ ID NO: 251062 - RNA, 21 nt, Human
ugcaccacugcacuccagccu

SEQ ID NO: 251063 - RNA, 24 nt, Human
ugcaucaccugaggucaggaguuu

SEQ ID NO: 251064 - RNA, 18 nt, Human
ugccgugggguucugagg

SEQ ID NO: 251065 - RNA, 23 nt, Human
ugccuguaaucccagcacuuugg

SEQ ID NO: 251066 - RNA, 24 nt, Human
ugccuguaaucccagcacuuuggg

SEQ ID NO: 251067 - RNA, 23 nt, Human
ugccuguaaucccugcacuuugg

SEQ ID NO: 251068 - RNA, 22 nt, Human
ugcuugcguuucucuaggcuuc

SEQ ID NO: 251069 - RNA, 24 nt, Human
uggaucaccugaggucaggaguuc

SEQ ID NO: 251070 - RNA, 27 nt, Human
uggaucaccugaggucaggaguucgag

SEQ ID NO: 251071 - RNA, 24 nt, Human
uggccaggcaugguggcucaugcc

SEQ ID NO: 251072 - RNA, 24 nt, Human
uggcucaugccuguaaucccagca

SEQ ID NO: 251073 - RNA, 24 nt, Human
uggcucaugccuguaaucccugca

SEQ ID NO: 251074 - RNA, 29 nt, Human
ugggaggcggagguugcagugacaacggu

SEQ ID NO: 251075 - RNA, 24 nt, Human
ugggaggcggagguugcagugagc

SEQ ID NO: 251076 - RNA, 20 nt, Human
ugggaggcugaggcgggugg

SEQ ID NO: 251077 - RNA, 23 nt, Human
ugggaggcugaggcggguggauc

SEQ ID NO: 251078 - RNA, 24 nt, Human
ugggaggcugaggcggguggauca

SEQ ID NO: 251079 - RNA, 19 nt, Human
ugggaggcugaggugggug

SEQ ID NO: 251080 - RNA, 18 nt, Human
ugggagguggagguugca

SEQ ID NO: 251081 - RNA, 29 nt, Human
ugggagguggagguugcagugacaacggu

SEQ ID NO: 251082 - RNA, 24 nt, Human
ugggagguggagguugcagugagc

SEQ ID NO: 251083 - RNA, 21 nt, Human
ugggguucugagggaaaauga

SEQ ID NO: 251084 - RNA, 24 nt, Human
ugggugcaucaccugaggucagga

SEQ ID NO: 251085 - RNA, 20 nt, Human
uggucucaaaaaaaaaaaaa

SEQ ID NO: 251086 - RNA, 24 nt, Human
ugguggcacgcaccuguaauccca

SEQ ID NO: 251087 - RNA, 24 nt, Human
ugguggcgggcgccuguaauccca

SEQ ID NO: 251088 - RNA, 23 nt, Human
ugguggcucaugccuguaauccc

SEQ ID NO: 251089 - RNA, 24 nt, Human
uggugugguggcacgcaccuguaa

SEQ ID NO: 251090 - RNA, 24 nt, Human
ugucuacuaaaaaugcaaaaaauu

SEQ ID NO: 251091 - RNA, 18 nt, Human
uuagccgggcaugguggc

SEQ ID NO: 251092 - RNA, 22 nt, Human
uuccuaacuuaccucugcuaua

SEQ ID NO: 251093 - RNA, 24 nt, Human
uugaaccugggaggcggagguugc

SEQ ID NO: 251094 - RNA, 24 nt, Human
uugaaccugggagguggagguugc

SEQ ID NO: 251095 - RNA, 22 nt, Human
uugcagugagccaagauugcac

SEQ ID NO: 251096 - RNA, 18 nt, Human
uugcagugagcugagauc

SEQ ID NO: 251097 - RNA, 21 nt, Human
uugcagugagcugagaucgug

SEQ ID NO: 251098 - RNA, 22 nt, Human
uugcagugagcugagaucgugc

SEQ ID NO: 251099 - RNA, 25 nt, Human
uugggaggcugaggcggguggauca

SEQ ID NO: 251100 - RNA, 21 nt, Human
uuggucucaaaaaaaaaaaaa

SEQ ID NO: 251101 - RNA, 22 nt, Human
uuucccauagcagcuagcaccu

SEQ ID NO: 251102 - RNA, 22 nt, Human
aaacaggaagugauguauaagg

SEQ ID NO: 251103 - RNA, 23 nt, Human
aaagagagagaaagagagagagc

SEQ ID NO: 251104 - RNA, 24 nt, Human
aacaguauaauagcauuuacaaua

SEQ ID NO: 251105 - RNA, 18 nt, Human
aagaaacaacguaauaug

SEQ ID NO: 251106 - RNA, 22 nt, Human
aagaauggaacuccacagucau

SEQ ID NO: 251107 - RNA, 24 nt, Human
aauccugcaaaucagaccuuccug

SEQ ID NO: 251108 - RNA, 19 nt, Human
aaugcauauucccuuaagc

SEQ ID NO: 251109 - RNA, 23 nt, Human
aauuuauuuacaaugucuacaua

SEQ ID NO: 251110 - RNA, 18 nt, Human
agagaaagagagagagcg

SEQ ID NO: 251111 - RNA, 22 nt, Human
agaggaaaagagagagaaagag

SEQ ID NO: 251112 - RNA, 21 nt, Human
agguggugguuguugcauggg

SEQ ID NO: 251113 - RNA, 22 nt, Human
aguuauuuuaaugcucuaaaaa

SEQ ID NO: 251114 - RNA, 22 nt, Human
auacaguucauuuuuccagucc

SEQ ID NO: 251115 - RNA, 18 nt, Human
caagccccaggcuagaaa

SEQ ID NO: 251116 - RNA, 22 nt, Human
caagccccaggcuagaaagagg

SEQ ID NO: 251117 - RNA, 21 nt, Human
caaugcauauucccuuaagcu

SEQ ID NO: 251118 - RNA, 21 nt, Human
cacagucauugcagaaaaaac

SEQ ID NO: 251119 - RNA, 18 nt, Human
cacuguuggguggugagg

SEQ ID NO: 251120 - RNA, 21 nt, Human
caguucauuuuuccaguccuu

SEQ ID NO: 251121 - RNA, 21 nt, Human
caugaccgaugcuuugcucag

SEQ ID NO: 251122 - RNA, 20 nt, Human
ccccgggcuacauacucccc

SEQ ID NO: 251123 - RNA, 21 nt, Human
ccuuccugucccuugcaggau

SEQ ID NO: 251124 - RNA, 19 nt, Human
cucccuuccuacuucaacu

SEQ ID NO: 251125 - RNA, 18 nt, Human
gaugcuccuugguccaga

SEQ ID NO: 251126 - RNA, 19 nt, Human
ggaaaagagagagaaagag

SEQ ID NO: 251127 - RNA, 28 nt, Human
ggauaacuguaaggcuuuuuaauguaag

SEQ ID NO: 251128 - RNA, 23 nt, Human
gggcaucugggguuggguauaac

SEQ ID NO: 251129 - RNA, 19 nt, Human
gguccagaguagaugccaa

SEQ ID NO: 251130 - RNA, 19 nt, Human
uaccagucuccuuaagaca

SEQ ID NO: 251131 - RNA, 20 nt, Human
uaggcuucuaaacacacggc

SEQ ID NO: 251132 - RNA, 24 nt, Human
ucaguugguauuuccugcuuuuua

SEQ ID NO: 251133 - RNA, 18 nt, Human
uccacagucauugcagaa

SEQ ID NO: 251134 - RNA, 24 nt, Human
uccaugcaucaucacuguugggug

SEQ ID NO: 251135 - RNA, 19 nt, Human
ucccuuaagcuacugagca

SEQ ID NO: 251136 - RNA, 22 nt, Human
ugaaaucagucaccauugcaga

SEQ ID NO: 251137 - RNA, 18 nt, Human
ugaagagcuauggaaaca

SEQ ID NO: 251138 - RNA, 25 nt, Human
ugacuucaguugguauuuccugcuu

SEQ ID NO: 251139 - RNA, 19 nt, Human
ugagcaggaugggggggca

SEQ ID NO: 251140 - RNA, 23 nt, Human
ugagcaugaauguccaugacuug

SEQ ID NO: 251141 - RNA, 23 nt, Human
ugcagaaaaaacaugauuugaaa

SEQ ID NO: 251142 - RNA, 26 nt, Human
ugcagaaaaaacaugauuugaaauca

SEQ ID NO: 251143 - RNA, 21 nt, Human
ugccaagaauggaacuccaca

SEQ ID NO: 251144 - RNA, 20 nt, Human
uggaaacaacacacauagug

SEQ ID NO: 251145 - RNA, 28 nt, Human
uguaaggaggcuucuggaggaagugaag

SEQ ID NO: 251146 - RNA, 21 nt, Human
uugcagccuucccccuugcuu

SEQ ID NO: 251147 - RNA, 25 nt, Human
aaaaaagcccagucuagacaacgaa

SEQ ID NO: 251148 - RNA, 21 nt, Human
aaaaagcccagucuagacaac

SEQ ID NO: 251149 - RNA, 21 nt, Human
aacacauucugaagcuggagu

SEQ ID NO: 251150 - RNA, 24 nt, Human
aagaauucauggacauacaauacc

SEQ ID NO: 251151 - RNA, 20 nt, Human
aagcccagucuagacaaccg

SEQ ID NO: 251152 - RNA, 24 nt, Human
aagcccagucuagacaacgaagaa

SEQ ID NO: 251153 - RNA, 21 nt, Human
aaugacaaaaguaaaaaauaa

SEQ ID NO: 251154 - RNA, 19 nt, Human
acacaaagcuccccauggg

SEQ ID NO: 251155 - RNA, 19 nt, Human
acacacauaguguggaaaa

SEQ ID NO: 251156 - RNA, 20 nt, Human
acacauaguguggaaaacaa

SEQ ID NO: 251157 - RNA, 24 nt, Human
acauuuauggaggaacaaaggccg

SEQ ID NO: 251158 - RNA, 22 nt, Human
acugaugaaccaaaacagucau

SEQ ID NO: 251159 - RNA, 23 nt, Human
agaaaagaagaauucauggacau

SEQ ID NO: 251160 - RNA, 22 nt, Human
agaccgaacucuguacgaaguu

SEQ ID NO: 251161 - RNA, 18 nt, Human
agauuccuuuuuuuuuuu

SEQ ID NO: 251162 - RNA, 21 nt, Human
agccaaaaguucaucaugauc

SEQ ID NO: 251163 - RNA, 21 nt, Human
aguaaaaaauaaucacagcug

SEQ ID NO: 251164 - RNA, 18 nt, Human
auauaccacagucucucc

SEQ ID NO: 251165 - RNA, 24 nt, Human
caaagcuccccaugggcugacccu

SEQ ID NO: 251166 - RNA, 18 nt, Human
caaauaugaaugcauugg

SEQ ID NO: 251167 - RNA, 18 nt, Human
cacaaccaaggcucagaa

SEQ ID NO: 251168 - RNA, 23 nt, Human
cacauagaauaucuaacaugaaa

SEQ ID NO: 251169 - RNA, 18 nt, Human
caugcccauuccacucau

SEQ ID NO: 251170 - RNA, 28 nt, Human
ccaauuccacagcagaucugauacuagc

SEQ ID NO: 251171 - RNA, 20 nt, Human
ccacaaccaaggcucagaac

SEQ ID NO: 251172 - RNA, 18 nt, Human
ccaggguggguagggggu

SEQ ID NO: 251173 - RNA, 19 nt, Human
ccaggguggguaggggguc

SEQ ID NO: 251174 - RNA, 26 nt, Human
ccaugggcugacccucuggacuauau

SEQ ID NO: 251175 - RNA, 22 nt, Human
ccccaaaaauaauaauaagaau

SEQ ID NO: 251176 - RNA, 21 nt, Human
cccccaagcuuugaguuucug

SEQ ID NO: 251177 - RNA, 21 nt, Human
ccucuggacuauaugcugcuc

SEQ ID NO: 251178 - RNA, 20 nt, Human
ccucuucuuccuccuccucc

SEQ ID NO: 251179 - RNA, 20 nt, Human
ccucuucuuccuccuccucc

SEQ ID NO: 251180 - RNA, 19 nt, Human
cgcuccaauaaacuccugg

SEQ ID NO: 251181 - RNA, 25 nt, Human
cggauccccauguguugcugaccau

SEQ ID NO: 251182 - RNA, 19 nt, Human
cgggcaugaaaacacauuc

SEQ ID NO: 251183 - RNA, 22 nt, Human
cuguacuauucuucuucuggca

SEQ ID NO: 251184 - RNA, 22 nt, Human
gaacaaaggccgggcaugaaaa

SEQ ID NO: 251185 - RNA, 21 nt, Human
gaacuccuggaagaagcuccu

SEQ ID NO: 251186 - RNA, 22 nt, Human
gagacuucucccaauucuccaa

SEQ ID NO: 251187 - RNA, 23 nt, Human
gauauuucuucuuuuucucuuuu

SEQ ID NO: 251188 - RNA, 20 nt, Human
gauuccuuuuuuuuuuuucc

SEQ ID NO: 251189 - RNA, 21 nt, Human
gcugaagauuccuuuuuuuuu

SEQ ID NO: 251190 - RNA, 20 nt, Human
gcugacauagucauuccagg

SEQ ID NO: 251191 - RNA, 18 nt, Human
gcugcuccuuggcucacu

SEQ ID NO: 251192 - RNA, 26 nt, Human
ggcaaauaugaaugcauugggggucc

SEQ ID NO: 251193 - RNA, 22 nt, Human
ggguguggggucaucuggggag

SEQ ID NO: 251194 - RNA, 25 nt, Human
guuacaguauucucuugcuccuuuu

SEQ ID NO: 251195 - RNA, 19 nt, Human
uaacggcgugaucaacaga

SEQ ID NO: 251196 - RNA, 24 nt, Human
uaacucucggagucuuuuuccagg

SEQ ID NO: 251197 - RNA, 19 nt, Human
uagaauaucuaacaugaaa

SEQ ID NO: 251198 - RNA, 22 nt, Human
uagacaacgaagaauuuuuuuu

SEQ ID NO: 251199 - RNA, 27 nt, Human
uaguccccuggcaugcucugcaaacuu

SEQ ID NO: 251200 - RNA, 18 nt, Human
uauggaggaacaaaggcc

SEQ ID NO: 251201 - RNA, 19 nt, Human
uauggaggaacaaaggccg

SEQ ID NO: 251202 - RNA, 25 nt, Human
uauuaagugucaacaucuggucaaa

SEQ ID NO: 251203 - RNA, 20 nt, Human
uccgccaacauugggaucua

SEQ ID NO: 251204 - RNA, 23 nt, Human
uccgugcaucaucauggcuggcc

SEQ ID NO: 251205 - RNA, 21 nt, Human
uccuccugaucuuccuccucc

SEQ ID NO: 251206 - RNA, 24 nt, Human
uccucuucuuccuccuccuccuga

SEQ ID NO: 251207 - RNA, 21 nt, Human
ucucuccuggauggugaauuc

SEQ ID NO: 251208 - RNA, 20 nt, Human
ucugcaaacuucccccuugc

SEQ ID NO: 251209 - RNA, 25 nt, Human
ucugugauauuucuucuuuuucucu

SEQ ID NO: 251210 - RNA, 24 nt, Human
ucuuccuccuccuccugaucuucc

SEQ ID NO: 251211 - RNA, 25 nt, Human
ucuucuuuuucucuuuuuuccucuu

SEQ ID NO: 251212 - RNA, 19 nt, Human
ucuuuuuuccucuucuucc

SEQ ID NO: 251213 - RNA, 18 nt, Human
ucuuuuuuuuuucaauug

SEQ ID NO: 251214 - RNA, 19 nt, Human
ugaauguccauaaccuguc

SEQ ID NO: 251215 - RNA, 22 nt, Human
ugaccauccaacacaaagcucc

SEQ ID NO: 251216 - RNA, 20 nt, Human
ugacuggucaaucaugggcu

SEQ ID NO: 251217 - RNA, 19 nt, Human
ugagaaacguaguccccug

SEQ ID NO: 251218 - RNA, 21 nt, Human
ugaugaagguuacauguagug

SEQ ID NO: 251219 - RNA, 20 nt, Human
ugcgauugcuuuacaugaug

SEQ ID NO: 251220 - RNA, 18 nt, Human
ugcuauuuuuuagggggg

SEQ ID NO: 251221 - RNA, 20 nt, Human
ugcucugcaaacuucccccu

SEQ ID NO: 251222 - RNA, 21 nt, Human
ugcugaccauccaacacaaag

SEQ ID NO: 251223 - RNA, 19 nt, Human
uggcaugcucugcaaacuu

SEQ ID NO: 251224 - RNA, 20 nt, Human
ugggaacaacacacauagug

SEQ ID NO: 251225 - RNA, 21 nt, Human
ugggcaugaauguccauaacc

SEQ ID NO: 251226 - RNA, 18 nt, Human
uggucaaucaugggcugu

SEQ ID NO: 251227 - RNA, 18 nt, Human
ugguggggauggcuuggc

SEQ ID NO: 251228 - RNA, 23 nt, Human
uguccauaaccuguccgccaaca

SEQ ID NO: 251229 - RNA, 18 nt, Human
uguggggucaucugggga

SEQ ID NO: 251230 - RNA, 19 nt, Human
uguguugaggaaagcugcc

SEQ ID NO: 251231 - RNA, 22 nt, Human
uguguuuccuuuucccuugagu

SEQ ID NO: 251232 - RNA, 19 nt, Human
uuacaguauucucuugcuc

SEQ ID NO: 251233 - RNA, 20 nt, Human
uuacauggacagaauugucu

SEQ ID NO: 251234 - RNA, 20 nt, Human
uuauggaggaacaaaggccg

SEQ ID NO: 251235 - RNA, 26 nt, Human
uuccuauauuuauacuacaguaguua

SEQ ID NO: 251236 - RNA, 21 nt, Human
uuccuuuuuuuuuuuuccaaa

SEQ ID NO: 251237 - RNA, 26 nt, Human
uucugugauauuucuucuuuuucucu

SEQ ID NO: 251238 - RNA, 21 nt, Human
uucuuguugcauugguccucu

SEQ ID NO: 251239 - RNA, 18 nt, Human
uuuaggggggaaaaaaag

SEQ ID NO: 251240 - RNA, 23 nt, Human
uuuugcguguguuuccuuuuccc

SEQ ID NO: 251241 - RNA, 26 nt, Human
uuuuuucucuucuaaaacuauuugag

SEQ ID NO: 251242 - RNA, 24 nt, Human
aaaaagaaaaggcuggugacaccc

SEQ ID NO: 251243 - RNA, 19 nt, Human
aaagaaaaggcuggugaca

SEQ ID NO: 251244 - RNA, 23 nt, Human
aagaagagugagggggcaaaaug

SEQ ID NO: 251245 - RNA, 20 nt, Human
aagcaaaggcccagaggcaa

SEQ ID NO: 251246 - RNA, 21 nt, Human
acaaagcaaaggcccagaggc

SEQ ID NO: 251247 - RNA, 25 nt, Human
acaaagcaaaggcccagaggcagag

SEQ ID NO: 251248 - RNA, 25 nt, Human
acaaagcaaaggcccagaggcagag

SEQ ID NO: 251249 - RNA, 18 nt, Human
acaguuaaaaaagaagag

SEQ ID NO: 251250 - RNA, 21 nt, Human
acaguuaaaaaagaagaguga

SEQ ID NO: 251251 - RNA, 26 nt, Human
acaguuaaaaaagaagagugaggggg

SEQ ID NO: 251252 - RNA, 19 nt, Human
agagaagagguggaagugg

SEQ ID NO: 251253 - RNA, 18 nt, Human
agauguggaaaaauaaaa

SEQ ID NO: 251254 - RNA, 23 nt, Human
aggaggaaaaaaaaaaaaagaaa

SEQ ID NO: 251255 - RNA, 18 nt, Human
aggaggaccaugugacgg

SEQ ID NO: 251256 - RNA, 21 nt, Human
aggcagaggccugacacuggc

SEQ ID NO: 251257 - RNA, 18 nt, Human
aggcucagaguaaggcgg

SEQ ID NO: 251258 - RNA, 19 nt, Human
aguuaaaaaagaagaguga

SEQ ID NO: 251259 - RNA, 28 nt, Human
augggacagcagagcugucaaaacagaa

SEQ ID NO: 251260 - RNA, 22 nt, Human
caaaacagaacccaaugaugac

SEQ ID NO: 251261 - RNA, 21 nt, Human
caaaggcccagaggcagaggc

SEQ ID NO: 251262 - RNA, 26 nt, Human
caaauuuuuaacuuauuccaucucca

SEQ ID NO: 251263 - RNA, 22 nt, Human
cacaaagcaaaggcccagaggc

SEQ ID NO: 251264 - RNA, 27 nt, Human
cacaaagcaaaggcccagaggcagagg

SEQ ID NO: 251265 - RNA, 22 nt, Human
caccgcuggccuucugggaccu

SEQ ID NO: 251266 - RNA, 18 nt, Human
cagcagcuuaaggaggaa

SEQ ID NO: 251267 - RNA, 18 nt, Human
cagcugggcugagcgagg

SEQ ID NO: 251268 - RNA, 25 nt, Human
ccaaugaugacggcugaaaaucaag

SEQ ID NO: 251269 - RNA, 22 nt, Human
ccaccagcaccguccaucagca

SEQ ID NO: 251270 - RNA, 24 nt, Human
ccccuggcgugguugaccuggucc

SEQ ID NO: 251271 - RNA, 19 nt, Human
cccuaugggacagcagagc

SEQ ID NO: 251272 - RNA, 22 nt, Human
ccgaucacccagguuugccauu

SEQ ID NO: 251273 - RNA, 24 nt, Human
ccuaaccccuggcuguggacagga

SEQ ID NO: 251274 - RNA, 21 nt, Human
ccuccugguggagcuuugugu

SEQ ID NO: 251275 - RNA, 21 nt, Human
ccuggaaccaccgcuggccuu

SEQ ID NO: 251276 - RNA, 19 nt, Human
ccuucugggaccucgcuuc

SEQ ID NO: 251277 - RNA, 25 nt, Human
cgaaggagugggggccauuuuggug

SEQ ID NO: 251278 - RNA, 18 nt, Human
cgggccugcagaccuaac

SEQ ID NO: 251279 - RNA, 24 nt, Human
cuaaccccuggcuguggacaggag

SEQ ID NO: 251280 - RNA, 22 nt, Human
cuccuggaaccaccgcuggccu

SEQ ID NO: 251281 - RNA, 23 nt, Human
cuuguucccgaucacccagguuu

SEQ ID NO: 251282 - RNA, 19 nt, Human
cuuuccuuugguuuaacag

SEQ ID NO: 251283 - RNA, 27 nt, Human
gaagugggcgccaaaucucccaagggg

SEQ ID NO: 251284 - RNA, 20 nt, Human
gaggacacgaaggagugggg

SEQ ID NO: 251285 - RNA, 19 nt, Human
gccagcgccucuccacugg

SEQ ID NO: 251286 - RNA, 19 nt, Human
gccuccugguggagcuuug

SEQ ID NO: 251287 - RNA, 22 nt, Human
gcguuggaggugggagggcccc

SEQ ID NO: 251288 - RNA, 19 nt, Human
ggagauagcgggaggacac

SEQ ID NO: 251289 - RNA, 21 nt, Human
ggauuuccuucauuugugcuu

SEQ ID NO: 251290 - RNA, 19 nt, Human
ggcuguggacaggagaggc

SEQ ID NO: 251291 - RNA, 19 nt, Human
gggcaaaaugguuugucac

SEQ ID NO: 251292 - RNA, 21 nt, Human
gggcggggcguuggagguggg

SEQ ID NO: 251293 - RNA, 24 nt, Human
gggcguuggaggugggagggcccc

SEQ ID NO: 251294 - RNA, 21 nt, Human
gggggcaaaaugguuugucac

SEQ ID NO: 251295 - RNA, 24 nt, Human
gguacaacgugcuuguucccgauc

SEQ ID NO: 251296 - RNA, 19 nt, Human
guacaacgugcuuguuccc

SEQ ID NO: 251297 - RNA, 21 nt, Human
guccuggcgaucgguugccuu

SEQ ID NO: 251298 - RNA, 21 nt, Human
guggaagugggcgccaaaucu

SEQ ID NO: 251299 - RNA, 18 nt, Human
gugggcccguucagcaga

SEQ ID NO: 251300 - RNA, 18 nt, Human
guuguuuucggggucacu

SEQ ID NO: 251301 - RNA, 22 nt, Human
guuguuuucggggucacuugca

SEQ ID NO: 251302 - RNA, 19 nt, Human
uaaaaaagaagagugaggg

SEQ ID NO: 251303 - RNA, 18 nt, Human
uaacaguuaaaaaagaag

SEQ ID NO: 251304 - RNA, 19 nt, Human
uaauuuguuuguuuuccuu

SEQ ID NO: 251305 - RNA, 24 nt, Human
uagaaagaacguccgauuuggaga

SEQ ID NO: 251306 - RNA, 22 nt, Human
uauguugguuuuaauugaaaag

SEQ ID NO: 251307 - RNA, 19 nt, Human
ucacucagaacaggcacag

SEQ ID NO: 251308 - RNA, 22 nt, Human
ucagaacaggcacagucagcug

SEQ ID NO: 251309 - RNA, 22 nt, Human
ucagacaguuacuaaaauaaac

SEQ ID NO: 251310 - RNA, 23 nt, Human
uccaaaguugaaaaagaucagac

SEQ ID NO: 251311 - RNA, 23 nt, Human
uccccuugaugcucgauggggac

SEQ ID NO: 251312 - RNA, 23 nt, Human
uccugggugaugcuuccuggucc

SEQ ID NO: 251313 - RNA, 25 nt, Human
ucucagcuagaaagaacguccgauu

SEQ ID NO: 251314 - RNA, 24 nt, Human
ucuccacuggccaccagcaccguc

SEQ ID NO: 251315 - RNA, 19 nt, Human
ugaaccagccuccuggugg

SEQ ID NO: 251316 - RNA, 19 nt, Human
ugacggcugugguuguuuu

SEQ ID NO: 251317 - RNA, 19 nt, Human
ugagagaagagguggaagu

SEQ ID NO: 251318 - RNA, 18 nt, Human
ugagaggagggugcccca

SEQ ID NO: 251319 - RNA, 22 nt, Human
ugagggggcaaaaugguuuguc

SEQ ID NO: 251320 - RNA, 18 nt, Human
uggaaccaccgcuggccu

SEQ ID NO: 251321 - RNA, 23 nt, Human
uggacaggagaggcugcuccagg

SEQ ID NO: 251322 - RNA, 21 nt, Human
uggaggugggagggccccggc

SEQ ID NO: 251323 - RNA, 19 nt, Human
uggcacuacagauguggaa

SEQ ID NO: 251324 - RNA, 20 nt, Human
uggcacuacagauguggaaa

SEQ ID NO: 251325 - RNA, 19 nt, Human
ugggagggccccggcugag

SEQ ID NO: 251326 - RNA, 21 nt, Human
ugucaaaacagaacccaauga

SEQ ID NO: 251327 - RNA, 21 nt, Human
uguugcagugaggccacaaag

SEQ ID NO: 251328 - RNA, 26 nt, Human
uuaaggaggaaaaaaaaaaaaagaaa

SEQ ID NO: 251329 - RNA, 22 nt, Human
uucagcagauguuacaggaaaa

SEQ ID NO: 251330 - RNA, 19 nt, Human
uuguucccgaucacccagg

SEQ ID NO: 251331 - RNA, 18 nt, Human
uuuuuuuuuuuuuuggac

SEQ ID NO: 251332 - RNA, 18 nt, Human
uuuuuuuuuuuuuuuuug

SEQ ID NO: 251333 - RNA, 23 nt, Human
uuuuuuuuuuuuuuuuuggacuu

SEQ ID NO: 251334 - RNA, 22 nt, Human
aaaaagaaccugaggggcggag

SEQ ID NO: 251335 - RNA, 21 nt, Human
aagaaagucaacaauuauuaa

SEQ ID NO: 251336 - RNA, 20 nt, Human
agagauauuggucuuaagau

SEQ ID NO: 251337 - RNA, 24 nt, Human
agauagcucuuuagaaacaaguug

SEQ ID NO: 251338 - RNA, 18 nt, Human
cggcaggauggaagaauc

SEQ ID NO: 251339 - RNA, 24 nt, Human
gaaaaagaaccugaggggcggagg

SEQ ID NO: 251340 - RNA, 22 nt, Human
gagcggcgcccgacagaaggac

SEQ ID NO: 251341 - RNA, 19 nt, Human
gcaggauggaagaauccau

SEQ ID NO: 251342 - RNA, 21 nt, Human
gguuguggccgcuuccgcccg

SEQ ID NO: 251343 - RNA, 22 nt, Human
uaaaaaagacaguaacauaaug

SEQ ID NO: 251344 - RNA, 22 nt, Human
uaacauaaugacagaugggcuu

SEQ ID NO: 251345 - RNA, 21 nt, Human
uagaaaaagaaccugaggggc

SEQ ID NO: 251346 - RNA, 23 nt, Human
uaucacacccacacucauccggc

SEQ ID NO: 251347 - RNA, 18 nt, Human
uggaauuagaaaaagaac

SEQ ID NO: 251348 - RNA, 19 nt, Human
uggccgcuuccgcccgcca

SEQ ID NO: 251349 - RNA, 24 nt, Human
uuggucuuaagauagcucuuuaga

SEQ ID NO: 251350 - RNA, 32 nt, Human
aaaaaaaaauacacacacacacacacauagug

SEQ ID NO: 251351 - RNA, 21 nt, Human
aaaaaacaauuaaagaaagca

SEQ ID NO: 251352 - RNA, 22 nt, Human
aaaaaccaagacaguauuuagu

SEQ ID NO: 251353 - RNA, 21 nt, Human
aaaaagcaaagcaaaggggua

SEQ ID NO: 251354 - RNA, 21 nt, Human
aaaaagucugagcuacaagga

SEQ ID NO: 251355 - RNA, 23 nt, Human
aaaaauggaacccagaagacaga

SEQ ID NO: 251356 - RNA, 27 nt, Human
aaaagaccaaggcagacaugaauacag

SEQ ID NO: 251357 - RNA, 23 nt, Human
aaaauaaaucuauguacaaaaca

SEQ ID NO: 251358 - RNA, 21 nt, Human
aaacaacccucugaaacaggc

SEQ ID NO: 251359 - RNA, 22 nt, Human
aaacaaggaguucugaaaagaa

SEQ ID NO: 251360 - RNA, 18 nt, Human
aaacagaaaguagaaugg

SEQ ID NO: 251361 - RNA, 23 nt, Human
aaacagacaagugaauaaaagau

SEQ ID NO: 251362 - RNA, 25 nt, Human
aaacagacaagugaauaaaagauca

SEQ ID NO: 251363 - RNA, 20 nt, Human
aaacaggaugagaaacaagg

SEQ ID NO: 251364 - RNA, 26 nt, Human
aaacuuaaagggaagaaggaaaugau

SEQ ID NO: 251365 - RNA, 21 nt, Human
aaagagaggaaaggcagugca

SEQ ID NO: 251366 - RNA, 21 nt, Human
aaagagauaacaacagacgug

SEQ ID NO: 251367 - RNA, 20 nt, Human
aaagaggacccuggauucug

SEQ ID NO: 251368 - RNA, 21 nt, Human
aaagauuagugagaaauagga

SEQ ID NO: 251369 - RNA, 21 nt, Human
aaagcaaguaaaagagagcca

SEQ ID NO: 251370 - RNA, 18 nt, Human
aaagccaucacuagaaaa

SEQ ID NO: 251371 - RNA, 23 nt, Human
aaauauauacucugaaaaacaca

SEQ ID NO: 251372 - RNA, 23 nt, Human
aacaaaacaacccucugaaacag

SEQ ID NO: 251373 - RNA, 25 nt, Human
aacaacaacaacaaaaacuggagcc

SEQ ID NO: 251374 - RNA, 25 nt, Human
aacaacaacgauaacucuaauaacc

SEQ ID NO: 251375 - RNA, 22 nt, Human
aacaacagacgugaaaaagucu

SEQ ID NO: 251376 - RNA, 21 nt, Human
aacaaggaguucugaaaagaa

SEQ ID NO: 251377 - RNA, 19 nt, Human
aacaccuccugucgaucuc

SEQ ID NO: 251378 - RNA, 19 nt, Human
aacagacgugaaaaagucu

SEQ ID NO: 251379 - RNA, 20 nt, Human
aacauacaaaugaccaguaa

SEQ ID NO: 251380 - RNA, 19 nt, Human
aaccaacccaucaaccagu

SEQ ID NO: 251381 - RNA, 22 nt, Human
aaccucagcuccuacaagcugg

SEQ ID NO: 251382 - RNA, 23 nt, Human
aaccuuacaccccaagagguaac

SEQ ID NO: 251383 - RNA, 27 nt, Human
aacgaaaaaaccaagacagcagggacu

SEQ ID NO: 251384 - RNA, 22 nt, Human
aacuggccaugacgguggccuc

SEQ ID NO: 251385 - RNA, 23 nt, Human
aagaaaaaaaaagaaaauuauaa

SEQ ID NO: 251386 - RNA, 19 nt, Human
aagaaggaaaugauaaaaa

SEQ ID NO: 251387 - RNA, 18 nt, Human
aagacagaaagaucccaa

SEQ ID NO: 251388 - RNA, 24 nt, Human
aagagccucaaccaauacuggcuc

SEQ ID NO: 251389 - RNA, 21 nt, Human
aagcaacaaccaggggcccau

SEQ ID NO: 251390 - RNA, 22 nt, Human
aagcaagugagagauaaaccca

SEQ ID NO: 251391 - RNA, 18 nt, Human
aagcacaauggcauaaaa

SEQ ID NO: 251392 - RNA, 24 nt, Human
aagcaccccaaugaggagccccaa

SEQ ID NO: 251393 - RNA, 24 nt, Human
aagcagaaaauaacaaguguuggg

SEQ ID NO: 251394 - RNA, 20 nt, Human
aagcagaaagaggacccugg

SEQ ID NO: 251395 - RNA, 20 nt, Human
aaggcagacaugaauacaga

SEQ ID NO: 251396 - RNA, 24 nt, Human
aaguaaccuuauggaauaagagaa

SEQ ID NO: 251397 - RNA, 21 nt, Human
aaguaccuuauaacguuggau

SEQ ID NO: 251398 - RNA, 23 nt, Human
aaguucacagccaccugccuugg

SEQ ID NO: 251399 - RNA, 18 nt, Human
aauacagauaugcggugc

SEQ ID NO: 251400 - RNA, 25 nt, Human
aauagaaaaaugacuaggaauuaga

SEQ ID NO: 251401 - RNA, 21 nt, Human
aauccccaacauuuauacccc

SEQ ID NO: 251402 - RNA, 18 nt, Human
aauccccauccccuuccc

SEQ ID NO: 251403 - RNA, 24 nt, Human
aaugguuccccaaaaagggaaugg

SEQ ID NO: 251404 - RNA, 21 nt, Human
aauguacacuacucaggugac

SEQ ID NO: 251405 - RNA, 23 nt, Human
aauguucugcucccugugccccu

SEQ ID NO: 251406 - RNA, 20 nt, Human
acaaaacaacccucugaaac

SEQ ID NO: 251407 - RNA, 21 nt, Human
acaaaacagugucaccaacca

SEQ ID NO: 251408 - RNA, 22 nt, Human
acaacaacaaaaacuggagccu

SEQ ID NO: 251409 - RNA, 20 nt, Human
acaacaacaaaaacuggagg

SEQ ID NO: 251410 - RNA, 21 nt, Human
acaagcaacaaccaggggccc

SEQ ID NO: 251411 - RNA, 22 nt, Human
acaaggcaaauucuuuagugag

SEQ ID NO: 251412 - RNA, 22 nt, Human
acaauaugaagauacauccaaa

SEQ ID NO: 251413 - RNA, 22 nt, Human
acaauaugagaaaaacagauac

SEQ ID NO: 251414 - RNA, 21 nt, Human
acacacacacacacacacgca

SEQ ID NO: 251415 - RNA, 18 nt, Human
acacacacacacacacau

SEQ ID NO: 251416 - RNA, 23 nt, Human
acacacacacacacgcacacaca

SEQ ID NO: 251417 - RNA, 23 nt, Human
acacacacacacgcacacacaca

SEQ ID NO: 251418 - RNA, 23 nt, Human
acacacacgcacacacacacaca

SEQ ID NO: 251419 - RNA, 19 nt, Human
acacagaugacaagaaucu

SEQ ID NO: 251420 - RNA, 19 nt, Human
acacagcagugccccaucu

SEQ ID NO: 251421 - RNA, 19 nt, Human
acacagcagugccccaucu

SEQ ID NO: 251422 - RNA, 26 nt, Human
acaccaaaagcacagaccacaaaagu

SEQ ID NO: 251423 - RNA, 21 nt, Human
acaccccaagagguaacacag

SEQ ID NO: 251424 - RNA, 24 nt, Human
acacgcacacacacacacaccaca

SEQ ID NO: 251425 - RNA, 25 nt, Human
acagaacagcagugcaaggacagaa

SEQ ID NO: 251426 - RNA, 18 nt, Human
acagcagugcaaggacag

SEQ ID NO: 251427 - RNA, 21 nt, Human
accaaaagcacagaccacaaa

SEQ ID NO: 251428 - RNA, 23 nt, Human
accaaaagccauuuguaccccaa

SEQ ID NO: 251429 - RNA, 23 nt, Human
accaaaagccauuuguaccccaa

SEQ ID NO: 251430 - RNA, 18 nt, Human
accauaccaacacguaca

SEQ ID NO: 251431 - RNA, 18 nt, Human
accaugcucuccuacaug

SEQ ID NO: 251432 - RNA, 22 nt, Human
acccacaccccaaacaaaacaa

SEQ ID NO: 251433 - RNA, 20 nt, Human
acccacuccuaaccccucug

SEQ ID NO: 251434 - RNA, 18 nt, Human
acccaggaauuucacuuc

SEQ ID NO: 251435 - RNA, 22 nt, Human
accccaagagguaacacagaac

SEQ ID NO: 251436 - RNA, 26 nt, Human
accccaagagguaacacagaacagca

SEQ ID NO: 251437 - RNA, 23 nt, Human
acccuguaugcccauugaaacaa

SEQ ID NO: 251438 - RNA, 21 nt, Human
accuacagaugcugccuccuc

SEQ ID NO: 251439 - RNA, 21 nt, Human
accucagcuccuacaagcugg

SEQ ID NO: 251440 - RNA, 19 nt, Human
accuccgcgcuuacauccc

SEQ ID NO: 251441 - RNA, 24 nt, Human
accucgcccacucucuccccacaa

SEQ ID NO: 251442 - RNA, 21 nt, Human
accugaaacacaaaauuaaaa

SEQ ID NO: 251443 - RNA, 21 nt, Human
acgcaguuuuaccccaguucc

SEQ ID NO: 251444 - RNA, 20 nt, Human
acgcugugcccagcggaggg

SEQ ID NO: 251445 - RNA, 19 nt, Human
acuagcagaaacuuaaguu

SEQ ID NO: 251446 - RNA, 23 nt, Human
acucaccaaaaggaaaaaaacaa

SEQ ID NO: 251447 - RNA, 25 nt, Human
acucauauauaugaccaaaagccau

SEQ ID NO: 251448 - RNA, 18 nt, Human
acuccuggguaucuaccc

SEQ ID NO: 251449 - RNA, 22 nt, Human
acucucuccccacaauccccau

SEQ ID NO: 251450 - RNA, 24 nt, Human
agaaaaaaaagaaaauuauaagaa

SEQ ID NO: 251451 - RNA, 24 nt, Human
agaaaaacagauacuuuuaaacac

SEQ ID NO: 251452 - RNA, 18 nt, Human
agaaaagacaacagaugu

SEQ ID NO: 251453 - RNA, 18 nt, Human
agaaagaaacuccuacaa

SEQ ID NO: 251454 - RNA, 24 nt, Human
agaaagcaaguaaaagagagccau

SEQ ID NO: 251455 - RNA, 26 nt, Human
agaaagcgcacccaggucaagccccc

SEQ ID NO: 251456 - RNA, 23 nt, Human
agaacagucccacccaggagaca

SEQ ID NO: 251457 - RNA, 22 nt, Human
agaauuccuccugaggaaacuu

SEQ ID NO: 251458 - RNA, 18 nt, Human
agacaacagauguguuuc

SEQ ID NO: 251459 - RNA, 22 nt, Human
agacagaaagugugugcuuagc

SEQ ID NO: 251460 - RNA, 18 nt, Human
agaggaaaaaugcagaga

SEQ ID NO: 251461 - RNA, 23 nt, Human
agaguaacagggacagcacacca

SEQ ID NO: 251462 - RNA, 21 nt, Human
agcaacaacuuaaccaacacu

SEQ ID NO: 251463 - RNA, 24 nt, Human
agcaagaaauaaauaaaagggacc

SEQ ID NO: 251464 - RNA, 19 nt, Human
agcaaguaaaagagagcca

SEQ ID NO: 251465 - RNA, 20 nt, Human
agcaauaugaaccugaaguc

SEQ ID NO: 251466 - RNA, 19 nt, Human
agcaccuuccuucucagca

SEQ ID NO: 251467 - RNA, 23 nt, Human
agcagucauagucagucagaugc

SEQ ID NO: 251468 - RNA, 19 nt, Human
agcauacccgagacuacuu

SEQ ID NO: 251469 - RNA, 20 nt, Human
agccuaaaauuuccagaaau

SEQ ID NO: 251470 - RNA, 24 nt, Human
agcgauucucgugccucagccucc

SEQ ID NO: 251471 - RNA, 19 nt, Human
aggaaaaaaacaaggcaaa

SEQ ID NO: 251472 - RNA, 22 nt, Human
aggaaaggcagugcagggcugg

SEQ ID NO: 251473 - RNA, 21 nt, Human
aggaagagggcggggcucagg

SEQ ID NO: 251474 - RNA, 25 nt, Human
aggaagaggggaaggcaucagguuu

SEQ ID NO: 251475 - RNA, 19 nt, Human
aggacaaagccacagugug

SEQ ID NO: 251476 - RNA, 20 nt, Human
aggacagaacagucccaccc

SEQ ID NO: 251477 - RNA, 18 nt, Human
aggacaguugcugcaaug

SEQ ID NO: 251478 - RNA, 23 nt, Human
aggacccuggauucugcacacag

SEQ ID NO: 251479 - RNA, 23 nt, Human
aggagccccaauggccgccccgc

SEQ ID NO: 251480 - RNA, 22 nt, Human
aggagcuuggguuucuaggggc

SEQ ID NO: 251481 - RNA, 28 nt, Human
aggcaaacaggcccaggugaguagaaca

SEQ ID NO: 251482 - RNA, 21 nt, Human
aggcacauuccagccucccaa

SEQ ID NO: 251483 - RNA, 20 nt, Human
aggcggcaggggaggcgggu

SEQ ID NO: 251484 - RNA, 21 nt, Human
aggcuggggguuagagaaaga

SEQ ID NO: 251485 - RNA, 26 nt, Human
agggcagcugagucaaucuccuuuuu

SEQ ID NO: 251486 - RNA, 20 nt, Human
agguauagucacaugaugag

SEQ ID NO: 251487 - RNA, 24 nt, Human
aggucaagcccccaaaccccaagg

SEQ ID NO: 251488 - RNA, 18 nt, Human
agucagaugcaccaaggg

SEQ ID NO: 251489 - RNA, 22 nt, Human
agugacccuaugagguaagagc

SEQ ID NO: 251490 - RNA, 22 nt, Human
agugcaagacaggcuguguggu

SEQ ID NO: 251491 - RNA, 21 nt, Human
aguuuaagggcacagccuggg

SEQ ID NO: 251492 - RNA, 22 nt, Human
auaaaaaacaggaugagaaaca

SEQ ID NO: 251493 - RNA, 20 nt, Human
auaagcagaggacaaagcca

SEQ ID NO: 251494 - RNA, 23 nt, Human
auacacacacacacacacacagu

SEQ ID NO: 251495 - RNA, 22 nt, Human
auacacacacacacacacauaa

SEQ ID NO: 251496 - RNA, 23 nt, Human
auacuaaauucccuugaaauuca

SEQ ID NO: 251497 - RNA, 19 nt, Human
auagaaagaaacuccuaca

SEQ ID NO: 251498 - RNA, 21 nt, Human
auagcaguuaucuuccagggu

SEQ ID NO: 251499 - RNA, 25 nt, Human
auauauauauauauacauauauaua

SEQ ID NO: 251500 - RNA, 25 nt, Human
auauauauauauauacauauauaua

SEQ ID NO: 251501 - RNA, 19 nt, Human
auauauguauauauauaua

SEQ ID NO: 251502 - RNA, 19 nt, Human
auauauguauauauauaug

SEQ ID NO: 251503 - RNA, 20 nt, Human
auauguauauauauauauau

SEQ ID NO: 251504 - RNA, 20 nt, Human
aucccacacuaggcaccgcg

SEQ ID NO: 251505 - RNA, 20 nt, Human
aucccacacuaggcaccgcg

SEQ ID NO: 251506 - RNA, 22 nt, Human
aucccacacuaggcaccgcggc

SEQ ID NO: 251507 - RNA, 22 nt, Human
aucccacacuaggcaccgcggc

SEQ ID NO: 251508 - RNA, 21 nt, Human
auccccacuuccaauccccaa

SEQ ID NO: 251509 - RNA, 18 nt, Human
auccccauccccuucccu

SEQ ID NO: 251510 - RNA, 24 nt, Human
aucccccaccauuuguguuggucc

SEQ ID NO: 251511 - RNA, 23 nt, Human
augaaggcaaagaauguggcccc

SEQ ID NO: 251512 - RNA, 18 nt, Human
augaggaacaaauccaga

SEQ ID NO: 251513 - RNA, 20 nt, Human
augccaagccggguggugcc

SEQ ID NO: 251514 - RNA, 23 nt, Human
augcucacagcugcacgauuuaa

SEQ ID NO: 251515 - RNA, 19 nt, Human
augcucuccuacauggccu

SEQ ID NO: 251516 - RNA, 18 nt, Human
augcugccuccucuggac

SEQ ID NO: 251517 - RNA, 23 nt, Human
auggggugcgccccaagcacccc

SEQ ID NO: 251518 - RNA, 25 nt, Human
auguacauaaaaacccauguacaca

SEQ ID NO: 251519 - RNA, 22 nt, Human
auguauauauauauauauacau

SEQ ID NO: 251520 - RNA, 21 nt, Human
auuauaaaggucaauaugaga

SEQ ID NO: 251521 - RNA, 22 nt, Human
auuaucaauauccuuaagaugu

SEQ ID NO: 251522 - RNA, 24 nt, Human
auucaaacacggcuaccacacaga

SEQ ID NO: 251523 - RNA, 20 nt, Human
caaaacaacccucugaaaca

SEQ ID NO: 251524 - RNA, 25 nt, Human
caaaagcaacccaaguguccacuaa

SEQ ID NO: 251525 - RNA, 22 nt, Human
caaaagcacagaccacaaaagu

SEQ ID NO: 251526 - RNA, 23 nt, Human
caaaagcacagaccacaaaagua

SEQ ID NO: 251527 - RNA, 26 nt, Human
caaaagcacagaccacaaaaguaaaa

SEQ ID NO: 251528 - RNA, 22 nt, Human
caaaccccaaggagaguccugg

SEQ ID NO: 251529 - RNA, 20 nt, Human
caaacuaaacagacaaguga

SEQ ID NO: 251530 - RNA, 23 nt, Human
caaacuaaaugaacuauccccug

SEQ ID NO: 251531 - RNA, 21 nt, Human
caaauaaccaaguuuaagggc

SEQ ID NO: 251532 - RNA, 22 nt, Human
caaauaaccaaguuuaagggca

SEQ ID NO: 251533 - RNA, 18 nt, Human
caaauaaccucaaagcca

SEQ ID NO: 251534 - RNA, 24 nt, Human
caaaucaaccaccuaaguugcuaa

SEQ ID NO: 251535 - RNA, 24 nt, Human
caaaucccaggcacauuccagccu

SEQ ID NO: 251536 - RNA, 24 nt, Human
caacaacaaaaacuggagccuaaa

SEQ ID NO: 251537 - RNA, 23 nt, Human
caacaacaacaaaaacuggagcc

SEQ ID NO: 251538 - RNA, 22 nt, Human
caacaaccaggggcccauucag

SEQ ID NO: 251539 - RNA, 24 nt, Human
caacagcauacccgagacuacuuc

SEQ ID NO: 251540 - RNA, 22 nt, Human
caacaggccguuccugcgguuc

SEQ ID NO: 251541 - RNA, 22 nt, Human
caacagggcagaauggagaaaa

SEQ ID NO: 251542 - RNA, 19 nt, Human
caacccaauagaaauacaa

SEQ ID NO: 251543 - RNA, 26 nt, Human
caacuucucacuuccaagcaacaacu

SEQ ID NO: 251544 - RNA, 18 nt, Human
caagcaacaaccaggggc

SEQ ID NO: 251545 - RNA, 23 nt, Human
caagcaccccaaugaggagcccc

SEQ ID NO: 251546 - RNA, 21 nt, Human
caagcccccaaaccccaagga

SEQ ID NO: 251547 - RNA, 28 nt, Human
caagcgauucucgugccucagccucccg

SEQ ID NO: 251548 - RNA, 22 nt, Human
caaggaaagucaucgcaaguau

SEQ ID NO: 251549 - RNA, 24 nt, Human
caagugccauuucauccccacuuc

SEQ ID NO: 251550 - RNA, 21 nt, Human
caaguguuggggaggaugugg

SEQ ID NO: 251551 - RNA, 24 nt, Human
caauagaaauacaaauccaaacua

SEQ ID NO: 251552 - RNA, 24 nt, Human
caauagccaaaagcaacccaagug

SEQ ID NO: 251553 - RNA, 23 nt, Human
caauaugaagauacauccaaagu

SEQ ID NO: 251554 - RNA, 23 nt, Human
cacaaaauagaauuuauggcaua

SEQ ID NO: 251555 - RNA, 21 nt, Human
cacaacacacaccacggggaa

SEQ ID NO: 251556 - RNA, 20 nt, Human
cacaagaucagccaugccca

SEQ ID NO: 251557 - RNA, 21 nt, Human
cacaagaucagccaugcccac

SEQ ID NO: 251558 - RNA, 22 nt, Human
cacaauugcaaagauguggaac

SEQ ID NO: 251559 - RNA, 18 nt, Human
cacacacacacacacaca

SEQ ID NO: 251560 - RNA, 20 nt, Human
cacacacacacacacacaca

SEQ ID NO: 251561 - RNA, 20 nt, Human
cacacacacacacacacaca

SEQ ID NO: 251562 - RNA, 22 nt, Human
cacacacacacacacacacaca

SEQ ID NO: 251563 - RNA, 26 nt, Human
cacacacacacacacacacacgcaca

SEQ ID NO: 251564 - RNA, 25 nt, Human
cacacacacacacacacacgcacac

SEQ ID NO: 251565 - RNA, 26 nt, Human
cacacacacacacacgcacacacaca

SEQ ID NO: 251566 - RNA, 24 nt, Human
cacacacacacacgcacacacaca

SEQ ID NO: 251567 - RNA, 24 nt, Human
cacacacacaccacaaauggccaa

SEQ ID NO: 251568 - RNA, 27 nt, Human
cacacacacgcacacacacacacacca

SEQ ID NO: 251569 - RNA, 20 nt, Human
cacacaguugucaccuugac

SEQ ID NO: 251570 - RNA, 22 nt, Human
cacacauaaagaaaaaaaagaa

SEQ ID NO: 251571 - RNA, 20 nt, Human
cacaccucuggaaauucaca

SEQ ID NO: 251572 - RNA, 21 nt, Human
cacagaacagcagugcaagga

SEQ ID NO: 251573 - RNA, 22 nt, Human
cacagaccacaaaaguaaaaac

SEQ ID NO: 251574 - RNA, 25 nt, Human
cacagaccacaaaaguaaaaacaga

SEQ ID NO: 251575 - RNA, 20 nt, Human
cacagaugacaagaaucuac

SEQ ID NO: 251576 - RNA, 22 nt, Human
cacagauuccacaacacacacc

SEQ ID NO: 251577 - RNA, 18 nt, Human
cacagcacaauucagaau

SEQ ID NO: 251578 - RNA, 20 nt, Human
cacaggagcagaggcccagg

SEQ ID NO: 251579 - RNA, 22 nt, Human
cacaguuucaaaucaaccaccu

SEQ ID NO: 251580 - RNA, 24 nt, Human
cacauaacaaguucagaaaccaca

SEQ ID NO: 251581 - RNA, 26 nt, Human
cacauacacagguucucuggaaagaa

SEQ ID NO: 251582 - RNA, 21 nt, Human
caccaaaaggaaaaaaacaag

SEQ ID NO: 251583 - RNA, 23 nt, Human
caccaagggcagcugagucaauc

SEQ ID NO: 251584 - RNA, 19 nt, Human
caccaggaggaagcuggua

SEQ ID NO: 251585 - RNA, 23 nt, Human
caccaugccccuccucacacaaa

SEQ ID NO: 251586 - RNA, 21 nt, Human
cacccacuccuaaccccucug

SEQ ID NO: 251587 - RNA, 20 nt, Human
cacccacucuggagggcaac

SEQ ID NO: 251588 - RNA, 21 nt, Human
cacccacucuggagggcaaca

SEQ ID NO: 251589 - RNA, 24 nt, Human
caccccaaacaaaacaacccucug

SEQ ID NO: 251590 - RNA, 20 nt, Human
caccccucccuuugguucuc

SEQ ID NO: 251591 - RNA, 21 nt, Human
caccccugccccgcagagccu

SEQ ID NO: 251592 - RNA, 25 nt, Human
caccucgcccacucucuccccacaa

SEQ ID NO: 251593 - RNA, 28 nt, Human
caccugugacaaaugaggaacaaaucca

SEQ ID NO: 251594 - RNA, 20 nt, Human
caccuuccuucucagcacag

SEQ ID NO: 251595 - RNA, 21 nt, Human
caccuuguagcaaagcaaaac

SEQ ID NO: 251596 - RNA, 21 nt, Human
cacuacuggguaucuacccaa

SEQ ID NO: 251597 - RNA, 23 nt, Human
cacuauauauuaaagucacaaaa

SEQ ID NO: 251598 - RNA, 18 nt, Human
cacugcacauggagaggu

SEQ ID NO: 251599 - RNA, 22 nt, Human
cacuucuucagucuuccccacc

SEQ ID NO: 251600 - RNA, 19 nt, Human
cacuuuggaaaguuucuaa

SEQ ID NO: 251601 - RNA, 23 nt, Human
cagaaagcgcacccaggucaagc

SEQ ID NO: 251602 - RNA, 19 nt, Human
cagaagaguaacagggaca

SEQ ID NO: 251603 - RNA, 22 nt, Human
cagaauugcaaagauauggaac

SEQ ID NO: 251604 - RNA, 22 nt, Human
cagacaagugaauaaaagauca

SEQ ID NO: 251605 - RNA, 19 nt, Human
cagacagcacuccuuccca

SEQ ID NO: 251606 - RNA, 27 nt, Human
cagaccacuugggauaauaccaguucu

SEQ ID NO: 251607 - RNA, 20 nt, Human
cagagccgggcucacaccug

SEQ ID NO: 251608 - RNA, 19 nt, Human
cagagccuuuuuguccccc

SEQ ID NO: 251609 - RNA, 19 nt, Human
cagagugacauaauggaca

SEQ ID NO: 251610 - RNA, 23 nt, Human
cagaguugggggacuaaggcgga

SEQ ID NO: 251611 - RNA, 26 nt, Human
cagcacaauucagaauugcaaagaua

SEQ ID NO: 251612 - RNA, 23 nt, Human
cagcagacaaagcaaugcucaca

SEQ ID NO: 251613 - RNA, 19 nt, Human
cagcaugccaguugcugga

SEQ ID NO: 251614 - RNA, 22 nt, Human
cagccucccaaagacuauggaa

SEQ ID NO: 251615 - RNA, 21 nt, Human
cagccucgacuucacgggcuc

SEQ ID NO: 251616 - RNA, 24 nt, Human
cagcucagaaccaagcaggguuuu

SEQ ID NO: 251617 - RNA, 22 nt, Human
cagcuccugaaaaaaucacacc

SEQ ID NO: 251618 - RNA, 20 nt, Human
cagggcuggagguccuggag

SEQ ID NO: 251619 - RNA, 21 nt, Human
cagggcuggagguccuggagg

SEQ ID NO: 251620 - RNA, 19 nt, Human
caggguggaagcaagaguu

SEQ ID NO: 251621 - RNA, 18 nt, Human
cagugcagggcuggaggu

SEQ ID NO: 251622 - RNA, 18 nt, Human
cagugcagggcuggaggu

SEQ ID NO: 251623 - RNA, 24 nt, Human
cauaaugaguaccacacaaagcca

SEQ ID NO: 251624 - RNA, 22 nt, Human
cauaauggacacuagagacuca

SEQ ID NO: 251625 - RNA, 25 nt, Human
cauacacacacacacacacacacac

SEQ ID NO: 251626 - RNA, 19 nt, Human
cauaggaguacauacaugu

SEQ ID NO: 251627 - RNA, 18 nt, Human
cauauauauauauauaca

SEQ ID NO: 251628 - RNA, 23 nt, Human
caucaaagaacacaaucaacaaa

SEQ ID NO: 251629 - RNA, 19 nt, Human
caucaguguaaauaauuaa

SEQ ID NO: 251630 - RNA, 25 nt, Human
cauccccacucagcagucugcagac

SEQ ID NO: 251631 - RNA, 24 nt, Human
cauccccuucccuuuuuaggucuu

SEQ ID NO: 251632 - RNA, 21 nt, Human
caugaagucccgccccuaggg

SEQ ID NO: 251633 - RNA, 18 nt, Human
caugauagaucaaagaug

SEQ ID NO: 251634 - RNA, 23 nt, Human
caugcugugcccagaauuccucc

SEQ ID NO: 251635 - RNA, 18 nt, Human
cauguacacagauaugcg

SEQ ID NO: 251636 - RNA, 23 nt, Human
cauguacacagauaugcgguaua

SEQ ID NO: 251637 - RNA, 23 nt, Human
ccaaaaggaaaaaaacaaggcaa

SEQ ID NO: 251638 - RNA, 20 nt, Human
ccaaacacagaaaagacaac

SEQ ID NO: 251639 - RNA, 21 nt, Human
ccaaccagaugugccaagagc

SEQ ID NO: 251640 - RNA, 22 nt, Human
ccaagcaacaacuuaaccaaca

SEQ ID NO: 251641 - RNA, 23 nt, Human
ccaauggccgccccgcccccucu

SEQ ID NO: 251642 - RNA, 23 nt, Human
ccacaccccaaacaaaacaaccc

SEQ ID NO: 251643 - RNA, 24 nt, Human
ccacagugauaaacuaaccuaaga

SEQ ID NO: 251644 - RNA, 18 nt, Human
ccagaaagcgcacccagg

SEQ ID NO: 251645 - RNA, 19 nt, Human
ccagaagacagaaagaucc

SEQ ID NO: 251646 - RNA, 22 nt, Human
ccagaggucucacugcacaugg

SEQ ID NO: 251647 - RNA, 22 nt, Human
ccagcacuccacccguuuguca

SEQ ID NO: 251648 - RNA, 22 nt, Human
ccagcagacaaagcaaugcuca

SEQ ID NO: 251649 - RNA, 23 nt, Human
ccagcagacacaugacaaaagca

SEQ ID NO: 251650 - RNA, 19 nt, Human
ccagcccugcagcucaugg

SEQ ID NO: 251651 - RNA, 22 nt, Human
ccaggucaagcccccaaacccc

SEQ ID NO: 251652 - RNA, 25 nt, Human
ccaugccccuccucacacaaacaca

SEQ ID NO: 251653 - RNA, 23 nt, Human
ccauguacauaaaaacccaugua

SEQ ID NO: 251654 - RNA, 18 nt, Human
ccauuuccaaacaguguc

SEQ ID NO: 251655 - RNA, 24 nt, Human
cccaaacaaaacaacccucugaaa

SEQ ID NO: 251656 - RNA, 26 nt, Human
cccaaacaaaacaacccucugaaaca

SEQ ID NO: 251657 - RNA, 27 nt, Human
cccaaagagauaacaacagaggaguuc

SEQ ID NO: 251658 - RNA, 20 nt, Human
cccaaagccccagagaauuc

SEQ ID NO: 251659 - RNA, 23 nt, Human
cccaacgauaaaaauaaccauga

SEQ ID NO: 251660 - RNA, 21 nt, Human
cccaaugaggagccccaaugg

SEQ ID NO: 251661 - RNA, 25 nt, Human
cccacaauauaggcauuuacaaggc

SEQ ID NO: 251662 - RNA, 20 nt, Human
cccacaauccccauccccuu

SEQ ID NO: 251663 - RNA, 20 nt, Human
cccacaccccaaacaaaaca

SEQ ID NO: 251664 - RNA, 21 nt, Human
cccacaccccaaacaaaacaa

SEQ ID NO: 251665 - RNA, 22 nt, Human
cccacaccccaaacaaaacaac

SEQ ID NO: 251666 - RNA, 19 nt, Human
cccacauaucacuucuaca

SEQ ID NO: 251667 - RNA, 19 nt, Human
cccaccccugccccgcaga

SEQ ID NO: 251668 - RNA, 24 nt, Human
cccacucucuccccacaaucccca

SEQ ID NO: 251669 - RNA, 20 nt, Human
cccagaagacagaaagaucc

SEQ ID NO: 251670 - RNA, 22 nt, Human
ccccaaaagccauugaaauuaa

SEQ ID NO: 251671 - RNA, 27 nt, Human
ccccaauggccgccccgcccccucucu

SEQ ID NO: 251672 - RNA, 18 nt, Human
ccccacaauccccauccc

SEQ ID NO: 251673 - RNA, 21 nt, Human
ccccacaauccccauccccuu

SEQ ID NO: 251674 - RNA, 23 nt, Human
ccccacaauuccgggacgcccgg

SEQ ID NO: 251675 - RNA, 23 nt, Human
ccccagcacuccacccguuuguc

SEQ ID NO: 251676 - RNA, 19 nt, Human
cccccaaaccccaaggaga

SEQ ID NO: 251677 - RNA, 20 nt, Human
cccccaaaccccaaggagag

SEQ ID NO: 251678 - RNA, 22 nt, Human
cccccacaauuccgggacgccc

SEQ ID NO: 251679 - RNA, 18 nt, Human
ccccgggcuggagguggg

SEQ ID NO: 251680 - RNA, 18 nt, Human
ccccuagggucgcacuac

SEQ ID NO: 251681 - RNA, 20 nt, Human
ccccuagggucgcacuaccc

SEQ ID NO: 251682 - RNA, 18 nt, Human
ccccucgcccaccuccgc

SEQ ID NO: 251683 - RNA, 21 nt, Human
ccccucucuacgacugugccc

SEQ ID NO: 251684 - RNA, 25 nt, Human
ccccugaagcagccacgcugugccc

SEQ ID NO: 251685 - RNA, 21 nt, Human
ccccuggauuggaguggaggc

SEQ ID NO: 251686 - RNA, 24 nt, Human
ccccuggauuggaguggaggcaag

SEQ ID NO: 251687 - RNA, 19 nt, Human
ccccuggcuagucccaguu

SEQ ID NO: 251688 - RNA, 19 nt, Human
ccccuucccuuuuuagguc

SEQ ID NO: 251689 - RNA, 18 nt, Human
cccgcacugcaccauaau

SEQ ID NO: 251690 - RNA, 21 nt, Human
cccgcacugcaccauaaugag

SEQ ID NO: 251691 - RNA, 25 nt, Human
cccgcagagccuggaaauaguggcg

SEQ ID NO: 251692 - RNA, 25 nt, Human
cccgcagagccuggaaauaguggcg

SEQ ID NO: 251693 - RNA, 18 nt, Human
cccgggcuggagguggga

SEQ ID NO: 251694 - RNA, 22 nt, Human
cccuagggucgcacuacccgcc

SEQ ID NO: 251695 - RNA, 22 nt, Human
cccucagccgagacugcagagc

SEQ ID NO: 251696 - RNA, 18 nt, Human
cccugaguaacguugguc

SEQ ID NO: 251697 - RNA, 23 nt, Human
cccugccccgcagagccuggaaa

SEQ ID NO: 251698 - RNA, 23 nt, Human
cccugccccgcagagccuggaaa

SEQ ID NO: 251699 - RNA, 23 nt, Human
ccgcccgcgagauacucuaacac

SEQ ID NO: 251700 - RNA, 18 nt, Human
ccgccgggaaguggaguc

SEQ ID NO: 251701 - RNA, 24 nt, Human
ccuaaaauuuccagaaauagaucc

SEQ ID NO: 251702 - RNA, 18 nt, Human
ccuacaagucaacaacaa

SEQ ID NO: 251703 - RNA, 21 nt, Human
ccucagcuccuacaagcuggg

SEQ ID NO: 251704 - RNA, 18 nt, Human
ccuccagauuccacguga

SEQ ID NO: 251705 - RNA, 19 nt, Human
ccucgcccacucucucccc

SEQ ID NO: 251706 - RNA, 23 nt, Human
ccucgcccacucucuccccacaa

SEQ ID NO: 251707 - RNA, 19 nt, Human
ccucuagucuuggcucauu

SEQ ID NO: 251708 - RNA, 19 nt, Human
ccucuggacacugccucug

SEQ ID NO: 251709 - RNA, 20 nt, Human
ccucuggagggugggggauu

SEQ ID NO: 251710 - RNA, 19 nt, Human
ccucugggugccucagcuc

SEQ ID NO: 251711 - RNA, 19 nt, Human
ccucugugggaagggaggc

SEQ ID NO: 251712 - RNA, 21 nt, Human
ccugaagcagccacgcugugc

SEQ ID NO: 251713 - RNA, 20 nt, Human
ccugcagcucaugggaagga

SEQ ID NO: 251714 - RNA, 20 nt, Human
ccugcaggacccacuacugu

SEQ ID NO: 251715 - RNA, 21 nt, Human
ccugccccgcagagccuggaa

SEQ ID NO: 251716 - RNA, 21 nt, Human
ccugccccgcagagccuggaa

SEQ ID NO: 251717 - RNA, 24 nt, Human
ccuggaacgaaaaaaccaagacag

SEQ ID NO: 251718 - RNA, 18 nt, Human
ccuggauuggaguggagg

SEQ ID NO: 251719 - RNA, 24 nt, Human
ccuguacagcuuuacacauacaca

SEQ ID NO: 251720 - RNA, 22 nt, Human
ccuugagguggaagcugggggu

SEQ ID NO: 251721 - RNA, 19 nt, Human
ccuuggccuaggggguggc

SEQ ID NO: 251722 - RNA, 19 nt, Human
ccuuuggggucagcacagg

SEQ ID NO: 251723 - RNA, 18 nt, Human
cgaaggagaggaaacuag

SEQ ID NO: 251724 - RNA, 19 nt, Human
cgacauacuuaacacuacu

SEQ ID NO: 251725 - RNA, 21 nt, Human
cgaccaaacacagaaaagacu

SEQ ID NO: 251726 - RNA, 23 nt, Human
cgcauacacuuagacccaaaucc

SEQ ID NO: 251727 - RNA, 19 nt, Human
cgcccaucuuucaagugac

SEQ ID NO: 251728 - RNA, 20 nt, Human
cgccccaagcaccccaauga

SEQ ID NO: 251729 - RNA, 19 nt, Human
cgccgggaaguggagucug

SEQ ID NO: 251730 - RNA, 20 nt, Human
cgccgggaaguggagucugg

SEQ ID NO: 251731 - RNA, 22 nt, Human
cggccucaccucucugcuccug

SEQ ID NO: 251732 - RNA, 21 nt, Human
cggccuccgcgcuuacauccc

SEQ ID NO: 251733 - RNA, 21 nt, Human
cggcggcaucccacacuaggc

SEQ ID NO: 251734 - RNA, 18 nt, Human
cggcggcuuccccuucuu

SEQ ID NO: 251735 - RNA, 18 nt, Human
cggcuccggacaccuccu

SEQ ID NO: 251736 - RNA, 19 nt, Human
cgggauacgaaggagagga

SEQ ID NO: 251737 - RNA, 21 nt, Human
cgguauggacaggcagcugca

SEQ ID NO: 251738 - RNA, 20 nt, Human
cgugacuaauacacucuaag

SEQ ID NO: 251739 - RNA, 24 nt, Human
cgugccucagccucccgaguagcu

SEQ ID NO: 251740 - RNA, 24 nt, Human
cguuaugaaggcaaugugauaggg

SEQ ID NO: 251741 - RNA, 25 nt, Human
cguuaugaaggcaaugugauagggg

SEQ ID NO: 251742 - RNA, 18 nt, Human
cuaaccuaagaaaaucgu

SEQ ID NO: 251743 - RNA, 18 nt, Human
cuaauacacucuaaaucc

SEQ ID NO: 251744 - RNA, 24 nt, Human
cucaaggucuucugaauugaaccc

SEQ ID NO: 251745 - RNA, 26 nt, Human
cucacacaaacacagauuccacaaca

SEQ ID NO: 251746 - RNA, 23 nt, Human
cucacagaaacagaaaguagaau

SEQ ID NO: 251747 - RNA, 19 nt, Human
cucaccaaaaggaaaaaaa

SEQ ID NO: 251748 - RNA, 23 nt, Human
cucaccaaaaggaaaaaaacaag

SEQ ID NO: 251749 - RNA, 25 nt, Human
cucacccacgcacuaaauuccccaa

SEQ ID NO: 251750 - RNA, 18 nt, Human
cucaccucucugcuccug

SEQ ID NO: 251751 - RNA, 23 nt, Human
cucacugccgaggcaaugccacu

SEQ ID NO: 251752 - RNA, 20 nt, Human
cucaggaauggaaaaccaaa

SEQ ID NO: 251753 - RNA, 21 nt, Human
cucaggaauggaaaaccaaau

SEQ ID NO: 251754 - RNA, 19 nt, Human
cuccccaccuacacaccca

SEQ ID NO: 251755 - RNA, 26 nt, Human
cucccuugcugcucccuuugaaacaa

SEQ ID NO: 251756 - RNA, 22 nt, Human
cuccggacaccuccuucccgag

SEQ ID NO: 251757 - RNA, 18 nt, Human
cuccuaaccccucugcag

SEQ ID NO: 251758 - RNA, 18 nt, Human
cuccuggcauguggcggc

SEQ ID NO: 251759 - RNA, 19 nt, Human
cucgcccacucucucccca

SEQ ID NO: 251760 - RNA, 24 nt, Human
cucggucccccucgcccaccuccc

SEQ ID NO: 251761 - RNA, 25 nt, Human
cucgugccucagccucccgaguagc

SEQ ID NO: 251762 - RNA, 24 nt, Human
cucuacgacugugcccccggggcu

SEQ ID NO: 251763 - RNA, 18 nt, Human
cucuccuacauggccuua

SEQ ID NO: 251764 - RNA, 19 nt, Human
cucuguguaaggagaaaac

SEQ ID NO: 251765 - RNA, 18 nt, Human
cucuugucacccacuccu

SEQ ID NO: 251766 - RNA, 19 nt, Human
cucuuucgcccaggcugga

SEQ ID NO: 251767 - RNA, 24 nt, Human
cugcagauuuccuccgggaugcuc

SEQ ID NO: 251768 - RNA, 22 nt, Human
cuggccacaggagguggguucu

SEQ ID NO: 251769 - RNA, 18 nt, Human
cugguuaccccucuggag

SEQ ID NO: 251770 - RNA, 20 nt, Human
cuguauuguccuaguuuuuu

SEQ ID NO: 251771 - RNA, 18 nt, Human
cuguccccuuugggcugg

SEQ ID NO: 251772 - RNA, 22 nt, Human
cugugugcagcacucguuuccc

SEQ ID NO: 251773 - RNA, 18 nt, Human
cuuaaagggaagaaggaa

SEQ ID NO: 251774 - RNA, 26 nt, Human
cuuccaauccccaacauuuauacccc

SEQ ID NO: 251775 - RNA, 18 nt, Human
cuuccuguugccauuucc

SEQ ID NO: 251776 - RNA, 21 nt, Human
cuugagguggaagcugggggu

SEQ ID NO: 251777 - RNA, 24 nt, Human
cuuggauaugacaccaaaagcaca

SEQ ID NO: 251778 - RNA, 20 nt, Human
cuuuuguuuguuuguuuuga

SEQ ID NO: 251779 - RNA, 25 nt, Human
gaaaagaccaaggcagacaugaaua

SEQ ID NO: 251780 - RNA, 31 nt, Human
gaaaaucauacacacacacacacacacacag

SEQ ID NO: 251781 - RNA, 20 nt, Human
gaaagaucccaacgauaaaa

SEQ ID NO: 251782 - RNA, 21 nt, Human
gaaggcaaugugauagggguc

SEQ ID NO: 251783 - RNA, 21 nt, Human
gacaaaugaggaacaaaucca

SEQ ID NO: 251784 - RNA, 19 nt, Human
gacacugccucugggugcc

SEQ ID NO: 251785 - RNA, 24 nt, Human
gacauuuuuccaaagacaacauac

SEQ ID NO: 251786 - RNA, 21 nt, Human
gaccaaacacagaaaagacaa

SEQ ID NO: 251787 - RNA, 24 nt, Human
gaccaacauuauucuauuuuggca

SEQ ID NO: 251788 - RNA, 23 nt, Human
gaccacaaaaguaaaaacagaua

SEQ ID NO: 251789 - RNA, 21 nt, Human
gagccuuuuugucccccacaa

SEQ ID NO: 251790 - RNA, 19 nt, Human
gaggagcccugaguaacgu

SEQ ID NO: 251791 - RNA, 26 nt, Human
gaggagcccugaguaacguuggucug

SEQ ID NO: 251792 - RNA, 23 nt, Human
gaggagcuuggguuucuaggggc

SEQ ID NO: 251793 - RNA, 19 nt, Human
gaguaccacacaaagccag

SEQ ID NO: 251794 - RNA, 20 nt, Human
gagucagggacaagcaacaa

SEQ ID NO: 251795 - RNA, 21 nt, Human
gauaacaacagacgugaaaaa

SEQ ID NO: 251796 - RNA, 21 nt, Human
gaucacaggcgugcgccacca

SEQ ID NO: 251797 - RNA, 24 nt, Human
gaugagaaacaaggaguucugaaa

SEQ ID NO: 251798 - RNA, 24 nt, Human
gaugccuacucugugugcagcacu

SEQ ID NO: 251799 - RNA, 23 nt, Human
gaugccuucacucagaggaaguu

SEQ ID NO: 251800 - RNA, 26 nt, Human
gcaaaauauuacaauaaaacuuaaag

SEQ ID NO: 251801 - RNA, 21 nt, Human
gcaaucuaaaaaaagcagaaa

SEQ ID NO: 251802 - RNA, 21 nt, Human
gcacacacacacacaccacaa

SEQ ID NO: 251803 - RNA, 22 nt, Human
gcacuaaauuccccaaagcccc

SEQ ID NO: 251804 - RNA, 22 nt, Human
gcacuggguugggcaucaccag

SEQ ID NO: 251805 - RNA, 20 nt, Human
gcagaggcccaggcagggcc

SEQ ID NO: 251806 - RNA, 22 nt, Human
gcagauuuccuccgggaugcuc

SEQ ID NO: 251807 - RNA, 20 nt, Human
gcagcugagucaaucuccuu

SEQ ID NO: 251808 - RNA, 23 nt, Human
gcagggcuggagguccuggaggg

SEQ ID NO: 251809 - RNA, 18 nt, Human
gcaguucucuguguacuc

SEQ ID NO: 251810 - RNA, 24 nt, Human
gcccaggcuggaaugcaguggcuc

SEQ ID NO: 251811 - RNA, 25 nt, Human
gcccccaaaccccaaggagaguccu

SEQ ID NO: 251812 - RNA, 26 nt, Human
gccccuccucacacaaacacagauuc

SEQ ID NO: 251813 - RNA, 25 nt, Human
gcccggagccugcugggacaugaag

SEQ ID NO: 251814 - RNA, 24 nt, Human
gccucggucccccucgcccaccuc

SEQ ID NO: 251815 - RNA, 24 nt, Human
gcgauucucgugccucagccuccc

SEQ ID NO: 251816 - RNA, 20 nt, Human
gcggagggcaggcgcagaca

SEQ ID NO: 251817 - RNA, 30 nt, Human
gcgggcggugggcggcggcggcuuccccuu

SEQ ID NO: 251818 - RNA, 20 nt, Human
gcgguauagccuuaucuaca

SEQ ID NO: 251819 - RNA, 21 nt, Human
gcgguuauagaggugcugggg

SEQ ID NO: 251820 - RNA, 21 nt, Human
gcuaccugcagacucggggug

SEQ ID NO: 251821 - RNA, 21 nt, Human
gcuaccugcagacucggggug

SEQ ID NO: 251822 - RNA, 19 nt, Human
gcuauauacucaaaagaac

SEQ ID NO: 251823 - RNA, 27 nt, Human
gcucauuuaaaaagcacaaacauucaa

SEQ ID NO: 251824 - RNA, 21 nt, Human
gcuccccgggcuggagguggg

SEQ ID NO: 251825 - RNA, 21 nt, Human
gcugaaucuuaccaugguauu

SEQ ID NO: 251826 - RNA, 24 nt, Human
gcuggaaugcaguggcucgaucug

SEQ ID NO: 251827 - RNA, 22 nt, Human
ggaaaggaggccuggauuguuu

SEQ ID NO: 251828 - RNA, 21 nt, Human
ggaaauaguggcgggccgggc

SEQ ID NO: 251829 - RNA, 21 nt, Human
ggaaauaguggcgggccgggc

SEQ ID NO: 251830 - RNA, 25 nt, Human
ggaaaugucaaugggaccaaccucc

SEQ ID NO: 251831 - RNA, 21 nt, Human
ggaagagggcggggcucagga

SEQ ID NO: 251832 - RNA, 18 nt, Human
ggaccugugcucccuugg

SEQ ID NO: 251833 - RNA, 19 nt, Human
ggagcccugaguaacguug

SEQ ID NO: 251834 - RNA, 24 nt, Human
ggagcccugaguaacguuggucug

SEQ ID NO: 251835 - RNA, 20 nt, Human
ggccaguuucgucaggaaga

SEQ ID NO: 251836 - RNA, 20 nt, Human
ggccaugacgguggccucug

SEQ ID NO: 251837 - RNA, 20 nt, Human
ggcggcacagugacuucucc

SEQ ID NO: 251838 - RNA, 24 nt, Human
ggcggcaggggaggcggguggugu

SEQ ID NO: 251839 - RNA, 19 nt, Human
ggcgggcggugggcggcgg

SEQ ID NO: 251840 - RNA, 19 nt, Human
ggcgggcggugggcggcgg

SEQ ID NO: 251841 - RNA, 19 nt, Human
ggcgggcggugggcggcgg

SEQ ID NO: 251842 - RNA, 19 nt, Human
ggcgggcggugggcggcgg

SEQ ID NO: 251843 - RNA, 19 nt, Human
ggcgggcggugggcggcgg

SEQ ID NO: 251844 - RNA, 22 nt, Human
ggcgggcggugggcggcggcgg

SEQ ID NO: 251845 - RNA, 25 nt, Human
ggcggugggcggcggccuccgcgcu

SEQ ID NO: 251846 - RNA, 19 nt, Human
ggcggugggcggcggcggc

SEQ ID NO: 251847 - RNA, 19 nt, Human
ggcugggggcagaacaugg

SEQ ID NO: 251848 - RNA, 18 nt, Human
gggaagaaggaaaugaua

SEQ ID NO: 251849 - RNA, 19 nt, Human
gggagguuaaguaacuugc

SEQ ID NO: 251850 - RNA, 23 nt, Human
gggaugccuucacucagaggaag

SEQ ID NO: 251851 - RNA, 18 nt, Human
gggcggugggcggcggca

SEQ ID NO: 251852 - RNA, 19 nt, Human
ggggguggcaggaggcggc

SEQ ID NO: 251853 - RNA, 23 nt, Human
gggguggcaggaggcggcagggg

SEQ ID NO: 251854 - RNA, 22 nt, Human
gguuaccccucuggaggguggg

SEQ ID NO: 251855 - RNA, 19 nt, Human
guauauauauauauauaca

SEQ ID NO: 251856 - RNA, 21 nt, Human
gucaaaacaguuuaacagcuc

SEQ ID NO: 251857 - RNA, 18 nt, Human
gugagguuuccauuggcc

SEQ ID NO: 251858 - RNA, 22 nt, Human
gugccucagccucccgaguagc

SEQ ID NO: 251859 - RNA, 18 nt, Human
guucugagcuggagaaaa

SEQ ID NO: 251860 - RNA, 20 nt, Human
guugcugaggcuggagggaa

SEQ ID NO: 251861 - RNA, 19 nt, Human
guuuggguagaggugaggc

SEQ ID NO: 251862 - RNA, 24 nt, Human
guuuguuuugagacacggucuuuc

SEQ ID NO: 251863 - RNA, 24 nt, Human
uaaaaaaaagauauaaaauaagaa

SEQ ID NO: 251864 - RNA, 22 nt, Human
uaaaaaaagcagaaaauaacaa

SEQ ID NO: 251865 - RNA, 21 nt, Human
uaaaaaacaauuaaagaaagc

SEQ ID NO: 251866 - RNA, 22 nt, Human
uaaaaaacaggaugagaaacaa

SEQ ID NO: 251867 - RNA, 26 nt, Human
uaaaaaaccacauauuggguacaaug

SEQ ID NO: 251868 - RNA, 21 nt, Human
uaaaaaacgaaaccauacaag

SEQ ID NO: 251869 - RNA, 19 nt, Human
uaaaaagacaccugaucac

SEQ ID NO: 251870 - RNA, 22 nt, Human
uaaaaagacaccugaucacagc

SEQ ID NO: 251871 - RNA, 20 nt, Human
uaaaaagcaaagcaaagggg

SEQ ID NO: 251872 - RNA, 23 nt, Human
uaaaaagcaaagcaaagggguaa

SEQ ID NO: 251873 - RNA, 19 nt, Human
uaaaaauugcugaaacaac

SEQ ID NO: 251874 - RNA, 21 nt, Human
uaaaaccauaagugcucacug

SEQ ID NO: 251875 - RNA, 26 nt, Human
uaaaaguaccuuauaacguuggauuu

SEQ ID NO: 251876 - RNA, 24 nt, Human
uaaaauagucaaaggacuugaaua

SEQ ID NO: 251877 - RNA, 18 nt, Human
uaaaaucucagacuucac

SEQ ID NO: 251878 - RNA, 18 nt, Human
uaaaaucucagacuucac

SEQ ID NO: 251879 - RNA, 24 nt, Human
uaaaaucucagacuucacuacugu

SEQ ID NO: 251880 - RNA, 24 nt, Human
uaaaaucucagacuucacuacugu

SEQ ID NO: 251881 - RNA, 20 nt, Human
uaaaaugaccauaccaacac

SEQ ID NO: 251882 - RNA, 20 nt, Human
uaaaauuuccagaaauagau

SEQ ID NO: 251883 - RNA, 23 nt, Human
uaaacuggaaaaaaauauuugca

SEQ ID NO: 251884 - RNA, 20 nt, Human
uaaagauuagugagaaauag

SEQ ID NO: 251885 - RNA, 20 nt, Human
uaaaggcaccucgcccacuc

SEQ ID NO: 251886 - RNA, 25 nt, Human
uaacaaaauguauucaucuuucuug

SEQ ID NO: 251887 - RNA, 22 nt, Human
uaacaacaacaacaaaaacugg

SEQ ID NO: 251888 - RNA, 24 nt, Human
uaacaacaacaacaaaaacuggag

SEQ ID NO: 251889 - RNA, 18 nt, Human
uaacacccacaccccaaa

SEQ ID NO: 251890 - RNA, 21 nt, Human
uaagacaacuaaaauaccuua

SEQ ID NO: 251891 - RNA, 21 nt, Human
uaagacacaguugcaaggacg

SEQ ID NO: 251892 - RNA, 21 nt, Human
uaagcaaaaccuuacacccca

SEQ ID NO: 251893 - RNA, 23 nt, Human
uaaggcacgauuuacauacuaaa

SEQ ID NO: 251894 - RNA, 20 nt, Human
uaaggcggagccuggguccc

SEQ ID NO: 251895 - RNA, 20 nt, Human
uaauauaauaacauuagcca

SEQ ID NO: 251896 - RNA, 19 nt, Human
uaaugaguaccacacaaag

SEQ ID NO: 251897 - RNA, 22 nt, Human
uaaugaguaccacacaaagcca

SEQ ID NO: 251898 - RNA, 22 nt, Human
uaaugguuccccaaaaagggaa

SEQ ID NO: 251899 - RNA, 21 nt, Human
uacaaaacaggaagagaucag

SEQ ID NO: 251900 - RNA, 23 nt, Human
uacaaaacaggaagagaucaggc

SEQ ID NO: 251901 - RNA, 26 nt, Human
uacacacacacacacacacacacacg

SEQ ID NO: 251902 - RNA, 20 nt, Human
uacacacacacacacacaua

SEQ ID NO: 251903 - RNA, 20 nt, Human
uacacacacacacacacaua

SEQ ID NO: 251904 - RNA, 21 nt, Human
uacacacacacacacacauaa

SEQ ID NO: 251905 - RNA, 21 nt, Human
uacacacacacacacacauaa

SEQ ID NO: 251906 - RNA, 27 nt, Human
uacacacacacacacacauaaagaaaa

SEQ ID NO: 251907 - RNA, 27 nt, Human
uacacacacacacacacauaaagaaaa

SEQ ID NO: 251908 - RNA, 26 nt, Human
uacacauaacaaguucagaaaccaca

SEQ ID NO: 251909 - RNA, 26 nt, Human
uacagaaauauagacuaagacaacua

SEQ ID NO: 251910 - RNA, 22 nt, Human
uacagaguuuguuuugcaagau

SEQ ID NO: 251911 - RNA, 22 nt, Human
uacaggaguguucuagccucca

SEQ ID NO: 251912 - RNA, 18 nt, Human
uacagugaccacaaaagg

SEQ ID NO: 251913 - RNA, 21 nt, Human
uaccacauuauuaaaaaacaa

SEQ ID NO: 251914 - RNA, 18 nt, Human
uaccaggaauuagacucu

SEQ ID NO: 251915 - RNA, 21 nt, Human
uaccauacagagcaacauacc

SEQ ID NO: 251916 - RNA, 25 nt, Human
uaccaugguauuaaaugagaauguu

SEQ ID NO: 251917 - RNA, 25 nt, Human
uaccaugguauuaaaugagaauguu

SEQ ID NO: 251918 - RNA, 19 nt, Human
uaccccucuggaggguggg

SEQ ID NO: 251919 - RNA, 18 nt, Human
uacccgagacuacuuccc

SEQ ID NO: 251920 - RNA, 20 nt, Human
uacccgccgggaaguggagu

SEQ ID NO: 251921 - RNA, 23 nt, Human
uagaaaaaugguuaaaaugacca

SEQ ID NO: 251922 - RNA, 23 nt, Human
uagaaaauacccuguaugcccau

SEQ ID NO: 251923 - RNA, 20 nt, Human
uagaaugggguugcugaggc

SEQ ID NO: 251924 - RNA, 19 nt, Human
uagacgcagcucagaacca

SEQ ID NO: 251925 - RNA, 25 nt, Human
uagcaaagguacauggauucuggcc

SEQ ID NO: 251926 - RNA, 25 nt, Human
uagcaagaaauaaauaaaauuguaa

SEQ ID NO: 251927 - RNA, 23 nt, Human
uagcuuuuguuuguuuguuuuga

SEQ ID NO: 251928 - RNA, 19 nt, Human
uaggggguggcaggaggcg

SEQ ID NO: 251929 - RNA, 21 nt, Human
uaggggguggcaggaggcggc

SEQ ID NO: 251930 - RNA, 24 nt, Human
uaggggguggcaggaggcggcagg

SEQ ID NO: 251931 - RNA, 22 nt, Human
uagggucgcacuacccgccggg

SEQ ID NO: 251932 - RNA, 25 nt, Human
uaguaguuaucuuagggguccggga

SEQ ID NO: 251933 - RNA, 19 nt, Human
uagugccaacguuguuguc

SEQ ID NO: 251934 - RNA, 18 nt, Human
uaguuuguuuuugguuua

SEQ ID NO: 251935 - RNA, 18 nt, Human
uaguuuuuguauuggaua

SEQ ID NO: 251936 - RNA, 25 nt, Human
uauaaacuggaaaaaaauauuugca

SEQ ID NO: 251937 - RNA, 22 nt, Human
uauaauaggugcuuuuugcacc

SEQ ID NO: 251938 - RNA, 23 nt, Human
uauacacacacacacacacauaa

SEQ ID NO: 251939 - RNA, 21 nt, Human
uauacauauauauauaaacua

SEQ ID NO: 251940 - RNA, 22 nt, Human
uauacucacaacaggaagugua

SEQ ID NO: 251941 - RNA, 20 nt, Human
uauauacauauauauauaua

SEQ ID NO: 251942 - RNA, 20 nt, Human
uauauacauauauauauaua

SEQ ID NO: 251943 - RNA, 24 nt, Human
uauauacauauauauauauauaca

SEQ ID NO: 251944 - RNA, 22 nt, Human
uauauauacauauauauauaua

SEQ ID NO: 251945 - RNA, 23 nt, Human
uauauauacauauauauauauau

SEQ ID NO: 251946 - RNA, 22 nt, Human
uauauauauacauauauauaua

SEQ ID NO: 251947 - RNA, 23 nt, Human
uauauauauacauauauauauaa

SEQ ID NO: 251948 - RNA, 23 nt, Human
uauauauauacauauauauauau

SEQ ID NO: 251949 - RNA, 24 nt, Human
uauauauauacauauauauauaua

SEQ ID NO: 251950 - RNA, 27 nt, Human
uauauauauacauauauauauauauua

SEQ ID NO: 251951 - RNA, 31 nt, Human
uauauauauauacacacacacacacacauag

SEQ ID NO: 251952 - RNA, 20 nt, Human
uauauauauauacauauaua

SEQ ID NO: 251953 - RNA, 20 nt, Human
uauauauauauacauauaua

SEQ ID NO: 251954 - RNA, 22 nt, Human
uauauauauauacauauauaua

SEQ ID NO: 251955 - RNA, 22 nt, Human
uauauauauauacauauauaua

SEQ ID NO: 251956 - RNA, 24 nt, Human
uauauauauauauacauauauaua

SEQ ID NO: 251957 - RNA, 24 nt, Human
uauauauauauauacauauauaua

SEQ ID NO: 251958 - RNA, 18 nt, Human
uauauauauauguauaua

SEQ ID NO: 251959 - RNA, 18 nt, Human
uauauauauauguauaua

SEQ ID NO: 251960 - RNA, 20 nt, Human
uauauauauguauauauaua

SEQ ID NO: 251961 - RNA, 20 nt, Human
uauauauauguauauauaua

SEQ ID NO: 251962 - RNA, 23 nt, Human
uauauauauguauauauauauau

SEQ ID NO: 251963 - RNA, 23 nt, Human
uauauauauguauauauauaugu

SEQ ID NO: 251964 - RNA, 24 nt, Human
uauauauauguauauauauaugua

SEQ ID NO: 251965 - RNA, 24 nt, Human
uauauaugaccaaaagccauuugu

SEQ ID NO: 251966 - RNA, 24 nt, Human
uauauguauauauauauauauaca

SEQ ID NO: 251967 - RNA, 24 nt, Human
uauauguauauauauauguauaua

SEQ ID NO: 251968 - RNA, 19 nt, Human
uauauuacccacaccucug

SEQ ID NO: 251969 - RNA, 18 nt, Human
uauccagaauauagaaag

SEQ ID NO: 251970 - RNA, 25 nt, Human
uauccuccagauuccacgugauccu

SEQ ID NO: 251971 - RNA, 18 nt, Human
uaucuucuacauggccuu

SEQ ID NO: 251972 - RNA, 24 nt, Human
uaugaacaacagauacucucauac

SEQ ID NO: 251973 - RNA, 23 nt, Human
uaugaccaaaagccauuuguacc

SEQ ID NO: 251974 - RNA, 23 nt, Human
uaugaccaaaagccauuuguacc

SEQ ID NO: 251975 - RNA, 19 nt, Human
uaugacccaggaauuucac

SEQ ID NO: 251976 - RNA, 20 nt, Human
uaugacccaggaauuucacu

SEQ ID NO: 251977 - RNA, 23 nt, Human
uaugagaaaaacagauacuuuua

SEQ ID NO: 251978 - RNA, 21 nt, Human
uauggcaaaguacuccccacc

SEQ ID NO: 251979 - RNA, 18 nt, Human
uauguauauauauauaua

SEQ ID NO: 251980 - RNA, 19 nt, Human
uauguauauauauauauau

SEQ ID NO: 251981 - RNA, 24 nt, Human
uauguauauauauauauauacaua

SEQ ID NO: 251982 - RNA, 18 nt, Human
uauguauauauauaugua

SEQ ID NO: 251983 - RNA, 19 nt, Human
uauguauauauauauguau

SEQ ID NO: 251984 - RNA, 22 nt, Human
uauguauauauauauguauaua

SEQ ID NO: 251985 - RNA, 22 nt, Human
uaugugcauauacauaaauaua

SEQ ID NO: 251986 - RNA, 23 nt, Human
ucaaacucacagaaacagaaagu

SEQ ID NO: 251987 - RNA, 22 nt, Human
ucaaagauggcaacuagcagaa

SEQ ID NO: 251988 - RNA, 24 nt, Human
ucaagugaaacuuaaagggaagaa

SEQ ID NO: 251989 - RNA, 19 nt, Human
ucacacauguaguaaaggc

SEQ ID NO: 251990 - RNA, 23 nt, Human
ucacaccuucacaguuucaaauc

SEQ ID NO: 251991 - RNA, 18 nt, Human
ucacagccaccugccuug

SEQ ID NO: 251992 - RNA, 24 nt, Human
ucacccacgcacuaaauuccccaa

SEQ ID NO: 251993 - RNA, 26 nt, Human
ucacucaccaaaaggaaaaaaacaag

SEQ ID NO: 251994 - RNA, 24 nt, Human
ucacugcagccucgacuucacggg

SEQ ID NO: 251995 - RNA, 18 nt, Human
ucacuucuacaaggacac

SEQ ID NO: 251996 - RNA, 18 nt, Human
ucagcaugccaguugcug

SEQ ID NO: 251997 - RNA, 19 nt, Human
ucagcaugccaguugcugg

SEQ ID NO: 251998 - RNA, 19 nt, Human
ucaggaagagggcggggcu

SEQ ID NO: 251999 - RNA, 18 nt, Human
ucagggacaagcaacaac

SEQ ID NO: 252000 - RNA, 19 nt, Human
ucaugaucccccaccauuu

SEQ ID NO: 252001 - RNA, 19 nt, Human
uccaaacuacaauuaaaua

SEQ ID NO: 252002 - RNA, 18 nt, Human
uccaaagacaacauacaa

SEQ ID NO: 252003 - RNA, 19 nt, Human
uccaaauucuggaagcagg

SEQ ID NO: 252004 - RNA, 20 nt, Human
uccacagggaaagcagacuc

SEQ ID NO: 252005 - RNA, 27 nt, Human
uccacagugcaagacaggccggggucc

SEQ ID NO: 252006 - RNA, 23 nt, Human
uccacagugcaagacaggcugug

SEQ ID NO: 252007 - RNA, 22 nt, Human
uccacgugauccugcucacacc

SEQ ID NO: 252008 - RNA, 18 nt, Human
uccaggggauacaugugu

SEQ ID NO: 252009 - RNA, 24 nt, Human
ucccaacgauaaaaauaaccauga

SEQ ID NO: 252010 - RNA, 21 nt, Human
uccccacaauccccauccccu

SEQ ID NO: 252011 - RNA, 21 nt, Human
uccccacaauccccauccccu

SEQ ID NO: 252012 - RNA, 21 nt, Human
uccccaccuuguagcaaagca

SEQ ID NO: 252013 - RNA, 18 nt, Human
uccccagcacuccacccg

SEQ ID NO: 252014 - RNA, 24 nt, Human
ucccgaguagcugugaucacaggc

SEQ ID NO: 252015 - RNA, 20 nt, Human
ucccuacuguuaaaugaaaa

SEQ ID NO: 252016 - RNA, 27 nt, Human
ucccuuggguuaagggugaaaccucag

SEQ ID NO: 252017 - RNA, 22 nt, Human
uccgagaugggcuggaccucug

SEQ ID NO: 252018 - RNA, 21 nt, Human
uccggacaccuccuucccgag

SEQ ID NO: 252019 - RNA, 19 nt, Human
uccgucggaggagcaaagg

SEQ ID NO: 252020 - RNA, 23 nt, Human
uccgucggaggagcaaagguuuu

SEQ ID NO: 252021 - RNA, 24 nt, Human
uccucacacaaacacagauuccac

SEQ ID NO: 252022 - RNA, 19 nt, Human
uccuccagaggucucacug

SEQ ID NO: 252023 - RNA, 21 nt, Human
uccucuggacacugccucugg

SEQ ID NO: 252024 - RNA, 22 nt, Human
uccugcgguucucagugcugcc

SEQ ID NO: 252025 - RNA, 21 nt, Human
uccuuaagauguaaauggcuu

SEQ ID NO: 252026 - RNA, 21 nt, Human
uccuuaauauguaaagagcuc

SEQ ID NO: 252027 - RNA, 18 nt, Human
uccuuggaaucucucagc

SEQ ID NO: 252028 - RNA, 19 nt, Human
ucgaucucaccugaucuga

SEQ ID NO: 252029 - RNA, 20 nt, Human
ucgcccaccuccgcgcuuac

SEQ ID NO: 252030 - RNA, 20 nt, Human
ucgcccacucucuccccaca

SEQ ID NO: 252031 - RNA, 23 nt, Human
ucgcccacucucuccccacaauc

SEQ ID NO: 252032 - RNA, 22 nt, Human
ucgcccaggcuggaaugcagug

SEQ ID NO: 252033 - RNA, 21 nt, Human
ucggaagggagguccugcucu

SEQ ID NO: 252034 - RNA, 26 nt, Human
ucuaagaggaaaaaaaaacuagaaaa

SEQ ID NO: 252035 - RNA, 23 nt, Human
ucuacaguaaaaauugcugaaac

SEQ ID NO: 252036 - RNA, 22 nt, Human
ucuacgacugugcccccggggc

SEQ ID NO: 252037 - RNA, 20 nt, Human
ucuauagcaguuaucuucca

SEQ ID NO: 252038 - RNA, 24 nt, Human
ucuauaugaccaaaagccauuugu

SEQ ID NO: 252039 - RNA, 21 nt, Human
ucugaggaagaggggaaggca

SEQ ID NO: 252040 - RNA, 20 nt, Human
ucugcacacagcagugcccc

SEQ ID NO: 252041 - RNA, 25 nt, Human
ucugcagauuuccuccgggaugcuc

SEQ ID NO: 252042 - RNA, 19 nt, Human
ucugcugcguaugcaaguc

SEQ ID NO: 252043 - RNA, 22 nt, Human
ucuguauuguccuaguuuuugu

SEQ ID NO: 252044 - RNA, 19 nt, Human
ucuuggacccugggggccu

SEQ ID NO: 252045 - RNA, 18 nt, Human
ucuuuagugagguaagaa

SEQ ID NO: 252046 - RNA, 19 nt, Human
ucuuucgcccaggcuggaa

SEQ ID NO: 252047 - RNA, 23 nt, Human
ucuuucucuuucgcccaggcugg

SEQ ID NO: 252048 - RNA, 24 nt, Human
ucuuucucuuucgcccaggcugga

SEQ ID NO: 252049 - RNA, 21 nt, Human
ugaaaaaguaaccuuauggaa

SEQ ID NO: 252050 - RNA, 20 nt, Human
ugaaacaagcaccuuccuuc

SEQ ID NO: 252051 - RNA, 21 nt, Human
ugaaaggugcuggaggggaug

SEQ ID NO: 252052 - RNA, 23 nt, Human
ugaaaggugcuggaggggaugcc

SEQ ID NO: 252053 - RNA, 22 nt, Human
ugaagacaccuacagaugcugc

SEQ ID NO: 252054 - RNA, 19 nt, Human
ugaagguguggggaaaugu

SEQ ID NO: 252055 - RNA, 21 nt, Human
ugaauagacauuuuuccaaag

SEQ ID NO: 252056 - RNA, 26 nt, Human
ugaaucacccacaggguuugaaguuc

SEQ ID NO: 252057 - RNA, 21 nt, Human
ugaauggauaaaaaaaagaua

SEQ ID NO: 252058 - RNA, 21 nt, Human
ugacaccaaaagcacagacca

SEQ ID NO: 252059 - RNA, 18 nt, Human
ugaccaaaagccauuugu

SEQ ID NO: 252060 - RNA, 20 nt, Human
ugaccaaaagccauuuguac

SEQ ID NO: 252061 - RNA, 22 nt, Human
ugaccuggaacgaaaaaaccaa

SEQ ID NO: 252062 - RNA, 22 nt, Human
ugacuaauucacuugauaacac

SEQ ID NO: 252063 - RNA, 21 nt, Human
ugacuaauucacuugauaacc

SEQ ID NO: 252064 - RNA, 23 nt, Human
ugacugaccuggaacgaaaaaac

SEQ ID NO: 252065 - RNA, 19 nt, Human
ugacuucuccccagcacuc

SEQ ID NO: 252066 - RNA, 21 nt, Human
ugagaaaaacagauacuuuua

SEQ ID NO: 252067 - RNA, 18 nt, Human
ugagaaacaaggaguucu

SEQ ID NO: 252068 - RNA, 24 nt, Human
ugagagcaccaugccccuccucaa

SEQ ID NO: 252069 - RNA, 21 nt, Human
ugaggaaaaagaucagguugc

SEQ ID NO: 252070 - RNA, 24 nt, Human
ugaggaagaggggaaggcaucagg

SEQ ID NO: 252071 - RNA, 25 nt, Human
ugaggaagaggggaaggcaucaggu

SEQ ID NO: 252072 - RNA, 22 nt, Human
ugaguggauaaauaaaaugugg

SEQ ID NO: 252073 - RNA, 24 nt, Human
ugauaaagccgguucugaggaaga

SEQ ID NO: 252074 - RNA, 21 nt, Human
ugauaacacccacaccccaaa

SEQ ID NO: 252075 - RNA, 21 nt, Human
ugaucuagcaaucccacuccu

SEQ ID NO: 252076 - RNA, 24 nt, Human
ugcaaaacaaucaauagaaaaaug

SEQ ID NO: 252077 - RNA, 24 nt, Human
ugcaaaauaauaaauuuucucuaa

SEQ ID NO: 252078 - RNA, 20 nt, Human
ugcaaacuuuacaguaaacu

SEQ ID NO: 252079 - RNA, 22 nt, Human
ugcaagaugaaaaaguucugga

SEQ ID NO: 252080 - RNA, 18 nt, Human
ugcagagagaaacugugg

SEQ ID NO: 252081 - RNA, 18 nt, Human
ugcagagagaaacugugg

SEQ ID NO: 252082 - RNA, 23 nt, Human
ugcagagagaaacugugguaaaa

SEQ ID NO: 252083 - RNA, 21 nt, Human
ugcagcaauuuuggauggagc

SEQ ID NO: 252084 - RNA, 24 nt, Human
ugcagcaauuuuggauggagcugg

SEQ ID NO: 252085 - RNA, 24 nt, Human
ugccucagccucccgaguagcugu

SEQ ID NO: 252086 - RNA, 25 nt, Human
ugccucagccucccgaguagcugug

SEQ ID NO: 252087 - RNA, 19 nt, Human
ugccucugggugccucagc

SEQ ID NO: 252088 - RNA, 26 nt, Human
ugcgguucucagugcugccaaccugg

SEQ ID NO: 252089 - RNA, 18 nt, Human
ugcuauuucaauuucauc

SEQ ID NO: 252090 - RNA, 24 nt, Human
ugcucauaggcugggggcggaguu

SEQ ID NO: 252091 - RNA, 18 nt, Human
ugcucuccuacauggccu

SEQ ID NO: 252092 - RNA, 22 nt, Human
ugcuggaggggaugccuucacu

SEQ ID NO: 252093 - RNA, 18 nt, Human
uggaaagaaacugcagca

SEQ ID NO: 252094 - RNA, 21 nt, Human
uggaacaaaaaaucaaagaca

SEQ ID NO: 252095 - RNA, 24 nt, Human
uggaacauguaccuguucaucuuu

SEQ ID NO: 252096 - RNA, 20 nt, Human
uggaaccaacccaucaacca

SEQ ID NO: 252097 - RNA, 21 nt, Human
uggaaccaacccaucaaccag

SEQ ID NO: 252098 - RNA, 19 nt, Human
uggaaccaaccuacaugcc

SEQ ID NO: 252099 - RNA, 20 nt, Human
uggaacgaaaaaaccaagaa

SEQ ID NO: 252100 - RNA, 21 nt, Human
uggaaggaaacuagcaaagca

SEQ ID NO: 252101 - RNA, 23 nt, Human
uggaauaugacuuagcaauaaaa

SEQ ID NO: 252102 - RNA, 19 nt, Human
uggaaugcaguggcucgau

SEQ ID NO: 252103 - RNA, 23 nt, Human
uggaaugcaguggcucgaucugg

SEQ ID NO: 252104 - RNA, 23 nt, Human
uggacacugccucugggugccuc

SEQ ID NO: 252105 - RNA, 22 nt, Human
uggaccucugggagguucccag

SEQ ID NO: 252106 - RNA, 24 nt, Human
uggaggugggaccugugcucccuu

SEQ ID NO: 252107 - RNA, 25 nt, Human
uggauaucauauacucacaacagga

SEQ ID NO: 252108 - RNA, 23 nt, Human
uggaugaauggauaaaaaaaaga

SEQ ID NO: 252109 - RNA, 22 nt, Human
uggcaaaguacuccccaccuac

SEQ ID NO: 252110 - RNA, 21 nt, Human
uggcaaauguggccuucccuc

SEQ ID NO: 252111 - RNA, 19 nt, Human
uggcaguggcuuccauucu

SEQ ID NO: 252112 - RNA, 20 nt, Human
uggcauaaucccauuuuugu

SEQ ID NO: 252113 - RNA, 19 nt, Human
uggcgggccgggccgcugc

SEQ ID NO: 252114 - RNA, 19 nt, Human
uggcgggccgggccgcugc

SEQ ID NO: 252115 - RNA, 23 nt, Human
ugggaagggaggcuggggguuag

SEQ ID NO: 252116 - RNA, 21 nt, Human
ugggaggagcccugaguaacg

SEQ ID NO: 252117 - RNA, 22 nt, Human
ugggaggagcccugaguaacgu

SEQ ID NO: 252118 - RNA, 21 nt, Human
ugggauaauaccaguucuauc

SEQ ID NO: 252119 - RNA, 19 nt, Human
ugggccuuuaaagacuggu

SEQ ID NO: 252120 - RNA, 23 nt, Human
ugggcugggggcagaacaugggc

SEQ ID NO: 252121 - RNA, 20 nt, Human
uggggaaauggagagucagg

SEQ ID NO: 252122 - RNA, 18 nt, Human
uggggaggguaagagggg

SEQ ID NO: 252123 - RNA, 20 nt, Human
uggggaggguaagagggggg

SEQ ID NO: 252124 - RNA, 21 nt, Human
uggggaggguaagaggggggc

SEQ ID NO: 252125 - RNA, 26 nt, Human
ugggggcagaacaugggcucagaguu

SEQ ID NO: 252126 - RNA, 22 nt, Human
ugggugucuucauuucaugccc

SEQ ID NO: 252127 - RNA, 25 nt, Human
uguaaaaaccugauguuaguggcua

SEQ ID NO: 252128 - RNA, 20 nt, Human
uguaaaggggaagaaaagug

SEQ ID NO: 252129 - RNA, 25 nt, Human
uguaagcaaaaccuuacaccccaag

SEQ ID NO: 252130 - RNA, 20 nt, Human
uguaaggagaaaacacccac

SEQ ID NO: 252131 - RNA, 22 nt, Human
uguacauuacagcauuauacuu

SEQ ID NO: 252132 - RNA, 18 nt, Human
uguauauauauauauaua

SEQ ID NO: 252133 - RNA, 22 nt, Human
uguauauauauauauauacaua

SEQ ID NO: 252134 - RNA, 22 nt, Human
uguauauauauauguauauaua

SEQ ID NO: 252135 - RNA, 22 nt, Human
ugucacagacgcuuuccuagaa

SEQ ID NO: 252136 - RNA, 19 nt, Human
ugugcacaagggguugugu

SEQ ID NO: 252137 - RNA, 21 nt, Human
uguguacauuacagcauuaua

SEQ ID NO: 252138 - RNA, 18 nt, Human
uguguaugugcauauaca

SEQ ID NO: 252139 - RNA, 19 nt, Human
uguguaugugcauauacau

SEQ ID NO: 252140 - RNA, 21 nt, Human
ugugucccagacucgggauac

SEQ ID NO: 252141 - RNA, 18 nt, Human
uguguguaugugcauaua

SEQ ID NO: 252142 - RNA, 22 nt, Human
uguguguaugugcauauacaua

SEQ ID NO: 252143 - RNA, 24 nt, Human
uguuauagagccauaaaaauaaca

SEQ ID NO: 252144 - RNA, 23 nt, Human
uuaaaaaacaauuaaagaaagca

SEQ ID NO: 252145 - RNA, 20 nt, Human
uuaaaaagcacaaacauuca

SEQ ID NO: 252146 - RNA, 20 nt, Human
uuaaaauuucaagugaaacu

SEQ ID NO: 252147 - RNA, 22 nt, Human
uuaaacacugccagagaguaaa

SEQ ID NO: 252148 - RNA, 24 nt, Human
uuaacacuucuucagucuucccca

SEQ ID NO: 252149 - RNA, 19 nt, Human
uuaauuuuacagugaccac

SEQ ID NO: 252150 - RNA, 22 nt, Human
uuacaaggcuuuucuaagacuu

SEQ ID NO: 252151 - RNA, 21 nt, Human
uuagacuauuucaaaacuaaa

SEQ ID NO: 252152 - RNA, 21 nt, Human
uuagucacucaccaaaaggaa

SEQ ID NO: 252153 - RNA, 21 nt, Human
uuauaccagaaagacacuuga

SEQ ID NO: 252154 - RNA, 25 nt, Human
uuaugaggaaaaagaucagguuguc

SEQ ID NO: 252155 - RNA, 24 nt, Human
uuauuuucuaagaggaaaaaaaaa

SEQ ID NO: 252156 - RNA, 19 nt, Human
uucaacaaacuaaacagac

SEQ ID NO: 252157 - RNA, 20 nt, Human
uucauacacuccacagcccc

SEQ ID NO: 252158 - RNA, 24 nt, Human
uuccaagcaacaacuuaaccaaca

SEQ ID NO: 252159 - RNA, 22 nt, Human
uuccacggcacaugaggagagg

SEQ ID NO: 252160 - RNA, 25 nt, Human
uuccagaaauagauccagagagaaa

SEQ ID NO: 252161 - RNA, 21 nt, Human
uucccuugaaauucaaugcaa

SEQ ID NO: 252162 - RNA, 19 nt, Human
uuccgaggaggagcuuggg

SEQ ID NO: 252163 - RNA, 22 nt, Human
uuccgaggaggagcuuggguuu

SEQ ID NO: 252164 - RNA, 26 nt, Human
uuccuagaauaguuuguuuuugguuu

SEQ ID NO: 252165 - RNA, 21 nt, Human
uucucuuucgcccaggcugga

SEQ ID NO: 252166 - RNA, 22 nt, Human
uucuucuucagcaugccaguug

SEQ ID NO: 252167 - RNA, 22 nt, Human
uugauacagacuguacucggga

SEQ ID NO: 252168 - RNA, 19 nt, Human
uugcagcaauuuuggaugg

SEQ ID NO: 252169 - RNA, 22 nt, Human
uugcugaggcuggagggaaugg

SEQ ID NO: 252170 - RNA, 19 nt, Human
uuggagaugccaugagcac

SEQ ID NO: 252171 - RNA, 24 nt, Human
uuggucccccuggcuagucccagu

SEQ ID NO: 252172 - RNA, 22 nt, Human
uugguuguuacaaagacuacaa

SEQ ID NO: 252173 - RNA, 21 nt, Human
uugugcacucuuggugagaac

SEQ ID NO: 252174 - RNA, 20 nt, Human
uuuacagagaugcucacagc

SEQ ID NO: 252175 - RNA, 23 nt, Human
uuuaguacauccacagccagaaa

SEQ ID NO: 252176 - RNA, 26 nt, Human
uuucacaacagcauacccgagacuac

SEQ ID NO: 252177 - RNA, 23 nt, Human
uuuccauuggccggcugggauuc

SEQ ID NO: 252178 - RNA, 19 nt, Human
uuuccuagaauaguuuguu

SEQ ID NO: 252179 - RNA, 18 nt, Human
uuuguaaucauaaaaaac

SEQ ID NO: 252180 - RNA, 21 nt, Human
uuuuaucuucuacauggccuu

SEQ ID NO: 252181 - RNA, 24 nt, Human
uuuugcaccaacaauaacaggaaa

SEQ ID NO: 252182 - RNA, 20 nt, Human
uuuuugguuuauuuaaucug

SEQ ID NO: 252183 - RNA, 21 nt, Human
aaccuagcauuuccucccaca

SEQ ID NO: 252184 - RNA, 21 nt, Human
aaggggccccaaagccucaga

SEQ ID NO: 252185 - RNA, 23 nt, Human
aaggggccccaaagccucagaug

SEQ ID NO: 252186 - RNA, 23 nt, Human
aaggggccccaaagccucagaug

SEQ ID NO: 252187 - RNA, 21 nt, Human
acaauaacagcauuuguagaa

SEQ ID NO: 252188 - RNA, 19 nt, Human
acagagcgcugaggcagcc

SEQ ID NO: 252189 - RNA, 19 nt, Human
acagagcgcugaggcagcc

SEQ ID NO: 252190 - RNA, 18 nt, Human
acgggccuauauggggac

SEQ ID NO: 252191 - RNA, 18 nt, Human
acgggccuauauggggac

SEQ ID NO: 252192 - RNA, 23 nt, Human
acuuggagaggcuguggaguccc

SEQ ID NO: 252193 - RNA, 19 nt, Human
agaagcaguaucucugaag

SEQ ID NO: 252194 - RNA, 19 nt, Human
agaagcaguaucucugaag

SEQ ID NO: 252195 - RNA, 20 nt, Human
agacagggauguguuucugg

SEQ ID NO: 252196 - RNA, 20 nt, Human
agacagggauguguuucugg

SEQ ID NO: 252197 - RNA, 24 nt, Human
agccucuacguuguuuucagcucc

SEQ ID NO: 252198 - RNA, 24 nt, Human
agccucuacguuguuuucagcucc

SEQ ID NO: 252199 - RNA, 19 nt, Human
aggaggaggcauggguggc

SEQ ID NO: 252200 - RNA, 19 nt, Human
aggaggaggcauggguggc

SEQ ID NO: 252201 - RNA, 18 nt, Human
aggcagccagggcuucag

SEQ ID NO: 252202 - RNA, 18 nt, Human
aggcagccagggcuucag

SEQ ID NO: 252203 - RNA, 24 nt, Human
aggccaggugguguccagaccagg

SEQ ID NO: 252204 - RNA, 24 nt, Human
aggccaggugguguccagaccagg

SEQ ID NO: 252205 - RNA, 20 nt, Human
aggcccucacccagcagccc

SEQ ID NO: 252206 - RNA, 20 nt, Human
aggcccucacccagcagccc

SEQ ID NO: 252207 - RNA, 23 nt, Human
aucucugucugauuccaugagag

SEQ ID NO: 252208 - RNA, 23 nt, Human
aucucugucugauuccaugagag

SEQ ID NO: 252209 - RNA, 19 nt, Human
cacaaaaaccuagcauuuc

SEQ ID NO: 252210 - RNA, 19 nt, Human
cacaaaaaccuagcauuuc

SEQ ID NO: 252211 - RNA, 22 nt, Human
cacaauaacagcauuuguagaa

SEQ ID NO: 252212 - RNA, 20 nt, Human
cacagcccaacagccccuuu

SEQ ID NO: 252213 - RNA, 20 nt, Human
cacagcccaacagccccuuu

SEQ ID NO: 252214 - RNA, 21 nt, Human
cacaggacacugucacuggag

SEQ ID NO: 252215 - RNA, 21 nt, Human
cacaggacacugucacuggag

SEQ ID NO: 252216 - RNA, 23 nt, Human
cagaacuuccuagaaaauccuaa

SEQ ID NO: 252217 - RNA, 23 nt, Human
cagaacuuccuagaaaauccuaa

SEQ ID NO: 252218 - RNA, 20 nt, Human
cagaagaccuggcugagguc

SEQ ID NO: 252219 - RNA, 20 nt, Human
cagaagaccuggcugagguc

SEQ ID NO: 252220 - RNA, 21 nt, Human
cagcuccuaguuguucagccc

SEQ ID NO: 252221 - RNA, 21 nt, Human
cagcuccuaguuguucagccc

SEQ ID NO: 252222 - RNA, 21 nt, Human
caggggacacuuuccagccuc

SEQ ID NO: 252223 - RNA, 21 nt, Human
caggggacacuuuccagccuc

SEQ ID NO: 252224 - RNA, 21 nt, Human
caucuccagaagaccuggcug

SEQ ID NO: 252225 - RNA, 21 nt, Human
caucuccagaagaccuggcug

SEQ ID NO: 252226 - RNA, 22 nt, Human
cauuuggcaaucauuuuccaca

SEQ ID NO: 252227 - RNA, 22 nt, Human
cauuuggcaaucauuuuccaca

SEQ ID NO: 252228 - RNA, 19 nt, Human
ccacccagucaagccugug

SEQ ID NO: 252229 - RNA, 19 nt, Human
ccacccagucaagccugug

SEQ ID NO: 252230 - RNA, 25 nt, Human
ccagcagcccuccuuauuaucuccc

SEQ ID NO: 252231 - RNA, 25 nt, Human
ccagcagcccuccuuauuaucuccc

SEQ ID NO: 252232 - RNA, 23 nt, Human
ccagccaucucauuuggcaauca

SEQ ID NO: 252233 - RNA, 23 nt, Human
ccagccaucucauuuggcaauca

SEQ ID NO: 252234 - RNA, 23 nt, Human
ccagccucuacguuguuuucagc

SEQ ID NO: 252235 - RNA, 23 nt, Human
ccagccucuacguuguuuucagc

SEQ ID NO: 252236 - RNA, 20 nt, Human
cccagcagcccuccuuauua

SEQ ID NO: 252237 - RNA, 20 nt, Human
cccagcagcccuccuuauua

SEQ ID NO: 252238 - RNA, 19 nt, Human
cccuccccuccagaaugca

SEQ ID NO: 252239 - RNA, 19 nt, Human
cccuccccuccagaaugca

SEQ ID NO: 252240 - RNA, 22 nt, Human
ccucaaaugucaucuccagaag

SEQ ID NO: 252241 - RNA, 22 nt, Human
ccucaaaugucaucuccagaag

SEQ ID NO: 252242 - RNA, 18 nt, Human
cucacccagcagcccucc

SEQ ID NO: 252243 - RNA, 18 nt, Human
cucacccagcagcccucc

SEQ ID NO: 252244 - RNA, 25 nt, Human
cucacucugaacuuggaagguuuuc

SEQ ID NO: 252245 - RNA, 21 nt, Human
cucagaugugcagccuacaga

SEQ ID NO: 252246 - RNA, 21 nt, Human
cucagaugugcagccuacaga

SEQ ID NO: 252247 - RNA, 21 nt, Human
cuccagaagaccuggcugagg

SEQ ID NO: 252248 - RNA, 21 nt, Human
cuccagaagaccuggcugagg

SEQ ID NO: 252249 - RNA, 22 nt, Human
cuccaugcagaaucucacucug

SEQ ID NO: 252250 - RNA, 24 nt, Human
cuccuuuucucuggagcacagccc

SEQ ID NO: 252251 - RNA, 24 nt, Human
cuccuuuucucuggagcacagccc

SEQ ID NO: 252252 - RNA, 18 nt, Human
cugguguugggagacaga

SEQ ID NO: 252253 - RNA, 18 nt, Human
cugguguugggagacaga

SEQ ID NO: 252254 - RNA, 20 nt, Human
cugucacuggagaaccuucc

SEQ ID NO: 252255 - RNA, 20 nt, Human
cugucacuggagaaccuucc

SEQ ID NO: 252256 - RNA, 25 nt, Human
cuuauuaucuccccuccccuccaga

SEQ ID NO: 252257 - RNA, 25 nt, Human
cuuauuaucuccccuccccuccaga

SEQ ID NO: 252258 - RNA, 20 nt, Human
cuuauuuuuuuuuuuggcuu

SEQ ID NO: 252259 - RNA, 20 nt, Human
cuuauuuuuuuuuuuggcuu

SEQ ID NO: 252260 - RNA, 21 nt, Human
cuuguccacccagucaagccu

SEQ ID NO: 252261 - RNA, 21 nt, Human
cuuguccacccagucaagccu

SEQ ID NO: 252262 - RNA, 19 nt, Human
gacagagcgcugaggcagc

SEQ ID NO: 252263 - RNA, 19 nt, Human
gacagagcgcugaggcagc

SEQ ID NO: 252264 - RNA, 25 nt, Human
gaccaggaggaggccuggcugaccu

SEQ ID NO: 252265 - RNA, 25 nt, Human
gaccaggaggaggccuggcugaccu

SEQ ID NO: 252266 - RNA, 22 nt, Human
gagaacagcgguaggaggaggc

SEQ ID NO: 252267 - RNA, 22 nt, Human
gagaacagcgguaggaggaggc

SEQ ID NO: 252268 - RNA, 18 nt, Human
gagaguuuucuuacaaag

SEQ ID NO: 252269 - RNA, 18 nt, Human
gagaguuuucuuacaaag

SEQ ID NO: 252270 - RNA, 20 nt, Human
gagcacagcccaacagccgu

SEQ ID NO: 252271 - RNA, 20 nt, Human
gagcacagcccaacagccgu

SEQ ID NO: 252272 - RNA, 24 nt, Human
gcagcugaguugcuguccuugacu

SEQ ID NO: 252273 - RNA, 24 nt, Human
gcagcugaguugcuguccuugacu

SEQ ID NO: 252274 - RNA, 19 nt, Human
gcagucacaggacacuguc

SEQ ID NO: 252275 - RNA, 19 nt, Human
gcugcuccuuuucucugga

SEQ ID NO: 252276 - RNA, 19 nt, Human
gcugcuccuuuucucugga

SEQ ID NO: 252277 - RNA, 21 nt, Human
ggcuauuuuucugucuucucu

SEQ ID NO: 252278 - RNA, 21 nt, Human
ggcuauuuuucugucuucucu

SEQ ID NO: 252279 - RNA, 24 nt, Human
gggagacagagcgcugaggcagcc

SEQ ID NO: 252280 - RNA, 24 nt, Human
gggagacagagcgcugaggcagcc

SEQ ID NO: 252281 - RNA, 28 nt, Human
gggcuucagucccccaugcucuuuggcc

SEQ ID NO: 252282 - RNA, 28 nt, Human
gggcuucagucccccaugcucuuuggcc

SEQ ID NO: 252283 - RNA, 24 nt, Human
gugaaggugggauugggguggggg

SEQ ID NO: 252284 - RNA, 24 nt, Human
gugaaggugggauugggguggggg

SEQ ID NO: 252285 - RNA, 18 nt, Human
gugguguccagaccagga

SEQ ID NO: 252286 - RNA, 18 nt, Human
gugguguccagaccagga

SEQ ID NO: 252287 - RNA, 20 nt, Human
guguugggagacagagcgcu

SEQ ID NO: 252288 - RNA, 20 nt, Human
guguugggagacagagcgcu

SEQ ID NO: 252289 - RNA, 22 nt, Human
uaagacucccaggaaugcuggg

SEQ ID NO: 252290 - RNA, 22 nt, Human
uaagacucccaggaaugcuggg

SEQ ID NO: 252291 - RNA, 18 nt, Human
uagaacacacagcaagag

SEQ ID NO: 252292 - RNA, 18 nt, Human
uagaacacacagcaagag

SEQ ID NO: 252293 - RNA, 21 nt, Human
uaggaggaggcauggguggca

SEQ ID NO: 252294 - RNA, 21 nt, Human
uaggaggaggcauggguggca

SEQ ID NO: 252295 - RNA, 20 nt, Human
ucacccagcagcccuccuua

SEQ ID NO: 252296 - RNA, 20 nt, Human
ucacccagcagcccuccuua

SEQ ID NO: 252297 - RNA, 18 nt, Human
ucagcccaacaacucagc

SEQ ID NO: 252298 - RNA, 18 nt, Human
ucagcccaacaacucagc

SEQ ID NO: 252299 - RNA, 20 nt, Human
uccaaagcuccucucccacc

SEQ ID NO: 252300 - RNA, 21 nt, Human
uccaaagcuccucucccacca

SEQ ID NO: 252301 - RNA, 21 nt, Human
uccaaagcuccucucccacca

SEQ ID NO: 252302 - RNA, 23 nt, Human
uccacagcucuugcccuuuuugg

SEQ ID NO: 252303 - RNA, 23 nt, Human
uccacagcucuugcccuuuuugg

SEQ ID NO: 252304 - RNA, 24 nt, Human
uccacaucuccaggcccucaccca

SEQ ID NO: 252305 - RNA, 24 nt, Human
uccacaucuccaggcccucaccca

SEQ ID NO: 252306 - RNA, 21 nt, Human
ucccccaugcucuuuggccau

SEQ ID NO: 252307 - RNA, 21 nt, Human
ucccccaugcucuuuggccau

SEQ ID NO: 252308 - RNA, 24 nt, Human
ucccucugcaacaccagcuggugu

SEQ ID NO: 252309 - RNA, 24 nt, Human
ucccucugcaacaccagcuggugu

SEQ ID NO: 252310 - RNA, 22 nt, Human
uccuuauuaucuccccuccccu

SEQ ID NO: 252311 - RNA, 22 nt, Human
uccuuauuaucuccccuccccu

SEQ ID NO: 252312 - RNA, 21 nt, Human
ucuccaggcccucacccagca

SEQ ID NO: 252313 - RNA, 21 nt, Human
ucuccaggcccucacccagca

SEQ ID NO: 252314 - RNA, 20 nt, Human
ucuccccuccccuccagaau

SEQ ID NO: 252315 - RNA, 20 nt, Human
ucuccccuccccuccagaau

SEQ ID NO: 252316 - RNA, 24 nt, Human
ucugcaacaccagcugguguuggg

SEQ ID NO: 252317 - RNA, 24 nt, Human
ucugcaacaccagcugguguuggg

SEQ ID NO: 252318 - RNA, 19 nt, Human
ugaccuaggagaacagcgg

SEQ ID NO: 252319 - RNA, 19 nt, Human
ugaccuaggagaacagcgg

SEQ ID NO: 252320 - RNA, 21 nt, Human
ugagaagcaguaucucugaag

SEQ ID NO: 252321 - RNA, 21 nt, Human
ugagaagcaguaucucugaag

SEQ ID NO: 252322 - RNA, 27 nt, Human
uggagcacagcccaacagccccugcug

SEQ ID NO: 252323 - RNA, 27 nt, Human
uggagcacagcccaacagccccugcug

SEQ ID NO: 252324 - RNA, 18 nt, Human
uggggacaccgaaaccua

SEQ ID NO: 252325 - RNA, 18 nt, Human
uggggacaccgaaaccua

SEQ ID NO: 252326 - RNA, 21 nt, Human
ugggguggggguaguugggua

SEQ ID NO: 252327 - RNA, 23 nt, Human
uguguggacgggccuauaugggg

SEQ ID NO: 252328 - RNA, 23 nt, Human
uguguggacgggccuauaugggg

SEQ ID NO: 252329 - RNA, 22 nt, Human
uuucuuguccccuuuugcaguc

SEQ ID NO: 252330 - RNA, 22 nt, Human
uuucuuguccccuuuugcaguc

SEQ ID NO: 252331 - RNA, 22 nt, Human
uuugcagucacaggacacuguc

SEQ ID NO: 252332 - RNA, 18 nt, Human
uuuuucuugggguuucgg

SEQ ID NO: 252333 - RNA, 18 nt, Human
uuuuucuugggguuucgg

SEQ ID NO: 252334 - RNA, 18 nt, Human
aaaagcaaauaccugccc

SEQ ID NO: 252335 - RNA, 20 nt, Human
aaaagcaaauaccugcccac

SEQ ID NO: 252336 - RNA, 19 nt, Human
aagcaaaagcaaacacaua

SEQ ID NO: 252337 - RNA, 23 nt, Human
aagcaaaagcaaacacauaccug

SEQ ID NO: 252338 - RNA, 21 nt, Human
aagcaaaagcaaauaccugcc

SEQ ID NO: 252339 - RNA, 23 nt, Human
aagcaaaagcaaauaccugccca

SEQ ID NO: 252340 - RNA, 24 nt, Human
aagcaaaagcaaauaccugcccac

SEQ ID NO: 252341 - RNA, 26 nt, Human
acaaagauaguuguucugcaugaaua

SEQ ID NO: 252342 - RNA, 23 nt, Human
acacaugaucucacacaucugga

SEQ ID NO: 252343 - RNA, 22 nt, Human
accugcucacugccauacgcac

SEQ ID NO: 252344 - RNA, 24 nt, Human
acuucacgacgguuccaaaggcca

SEQ ID NO: 252345 - RNA, 23 nt, Human
acuuuuuauccacuugagugaau

SEQ ID NO: 252346 - RNA, 21 nt, Human
agcggugcacuucugcagagc

SEQ ID NO: 252347 - RNA, 18 nt, Human
agugccuauuuucaucag

SEQ ID NO: 252348 - RNA, 22 nt, Human
auccucggcaucuucacucugg

SEQ ID NO: 252349 - RNA, 23 nt, Human
caaaagcaaacacauaccugcuc

SEQ ID NO: 252350 - RNA, 22 nt, Human
caaagcaauagcggugcacuuc

SEQ ID NO: 252351 - RNA, 18 nt, Human
caagcaaaagcaaacaca

SEQ ID NO: 252352 - RNA, 22 nt, Human
caagcaaaagcaaacacauacc

SEQ ID NO: 252353 - RNA, 19 nt, Human
caccuugucuaacacuguu

SEQ ID NO: 252354 - RNA, 24 nt, Human
cacgacgguuccaaaggccaccac

SEQ ID NO: 252355 - RNA, 18 nt, Human
cacuuuguguaaacccuc

SEQ ID NO: 252356 - RNA, 19 nt, Human
caggaagaaauguuuucuu

SEQ ID NO: 252357 - RNA, 18 nt, Human
caggagcuagguaaguuu

SEQ ID NO: 252358 - RNA, 18 nt, Human
cauccucggcaucuucac

SEQ ID NO: 252359 - RNA, 18 nt, Human
cccgguccugagccccag

SEQ ID NO: 252360 - RNA, 20 nt, Human
cccgguccugagccccagcc

SEQ ID NO: 252361 - RNA, 27 nt, Human
cccucugucacuuuuucacuggaaacc

SEQ ID NO: 252362 - RNA, 21 nt, Human
ccucugucacuuuuucacugg

SEQ ID NO: 252363 - RNA, 21 nt, Human
cgguccugagccccagcggcc

SEQ ID NO: 252364 - RNA, 23 nt, Human
cuggaaaccgugugauuuuuuuu

SEQ ID NO: 252365 - RNA, 22 nt, Human
cuuuguguaaacccucuauaaa

SEQ ID NO: 252366 - RNA, 20 nt, Human
gauagcaauuuaauuuucag

SEQ ID NO: 252367 - RNA, 20 nt, Human
gauagcaauuuaauuuucag

SEQ ID NO: 252368 - RNA, 20 nt, Human
ggcacuuuguguaaacccuc

SEQ ID NO: 252369 - RNA, 19 nt, Human
guccugagccccagcggcc

SEQ ID NO: 252370 - RNA, 19 nt, Human
uaaaaaagacaagaaacug

SEQ ID NO: 252371 - RNA, 24 nt, Human
uaauacacaugaucucacacaucu

SEQ ID NO: 252372 - RNA, 19 nt, Human
ucaccuucuccaucuucac

SEQ ID NO: 252373 - RNA, 22 nt, Human
ucacucuggagacaucuugaau

SEQ ID NO: 252374 - RNA, 20 nt, Human
uccaaaggccaccacccucu

SEQ ID NO: 252375 - RNA, 21 nt, Human
uccugagccccagcggccagu

SEQ ID NO: 252376 - RNA, 18 nt, Human
ucucacacaucuggaaug

SEQ ID NO: 252377 - RNA, 18 nt, Human
ucuuuaauaaguggcacu

SEQ ID NO: 252378 - RNA, 18 nt, Human
ugaaaaacagauucgaaa

SEQ ID NO: 252379 - RNA, 19 nt, Human
ugaauucaggcacuguggc

SEQ ID NO: 252380 - RNA, 24 nt, Human
ugacaaaauguauaaaaaagacaa

SEQ ID NO: 252381 - RNA, 22 nt, Human
ugagccccagcggccagucucc

SEQ ID NO: 252382 - RNA, 24 nt, Human
ugagugaauucaggcacuguggcu

SEQ ID NO: 252383 - RNA, 22 nt, Human
ugauagcaauuuaauuuucagu

SEQ ID NO: 252384 - RNA, 22 nt, Human
ugauagcaauuuaauuuucagu

SEQ ID NO: 252385 - RNA, 21 nt, Human
ugcaagcaaaagcaaauaccu

SEQ ID NO: 252386 - RNA, 21 nt, Human
ugcaugaauacaucacauaug

SEQ ID NO: 252387 - RNA, 22 nt, Human
uuaaaaacaaaauacaaagaua

SEQ ID NO: 252388 - RNA, 22 nt, Human
uuaaacacauuuuaaaaacaaa

SEQ ID NO: 252389 - RNA, 23 nt, Human
uucaaagcaaguucaccuucucc

SEQ ID NO: 252390 - RNA, 22 nt, Human
uuccaggcagaagacuucacga

SEQ ID NO: 252391 - RNA, 22 nt, Human
uuuuuuuuuuacccucccaaag

SEQ ID NO: 252392 - RNA, 18 nt, Human
uuuuuuuuuuuacccucc

SEQ ID NO: 252393 - RNA, 19 nt, Human
uuuuuuuuuuuacccuccc

SEQ ID NO: 252394 - RNA, 25 nt, Human
uuuuuuuuuuuuuuauuuacaaagg

SEQ ID NO: 252395 - RNA, 21 nt, Human
uuuuuuuuuuuuuuuuuauuu

SEQ ID NO: 252396 - RNA, 22 nt, Human
aguugaaaguagcuaacuauga

SEQ ID NO: 252397 - RNA, 18 nt, Human
uagaagaaugagguggcu

SEQ ID NO: 252398 - RNA, 18 nt, Human
uagaagaaugagguggcu

SEQ ID NO: 252399 - RNA, 20 nt, Human
uauuuccagcuauuuacaga

SEQ ID NO: 252400 - RNA, 23 nt, Human
uuuuuuuuuuuuuuugacuuuga

SEQ ID NO: 252401 - RNA, 18 nt, Human
uuuuuuuuuuuuuuuuug

SEQ ID NO: 252402 - RNA, 24 nt, Human
uuuuuuuuuuuuuuuuuugacuuu

SEQ ID NO: 252403 - RNA, 21 nt, Human
agcaaacaacauagaaggcau

SEQ ID NO: 252404 - RNA, 20 nt, Human
auagaauuuuauacugugac

SEQ ID NO: 252405 - RNA, 23 nt, Human
caacauagaaggcauuugugaca

SEQ ID NO: 252406 - RNA, 25 nt, Human
cacucuauccucucuucaccugguc

SEQ ID NO: 252407 - RNA, 19 nt, Human
cauagaaggcauuugugac

SEQ ID NO: 252408 - RNA, 24 nt, Human
cauagaucuguaaugauuuuuuuu

SEQ ID NO: 252409 - RNA, 22 nt, Human
cuacagagcaaacaacauagaa

SEQ ID NO: 252410 - RNA, 22 nt, Human
cuucagaauaccugcucgugcc

SEQ ID NO: 252411 - RNA, 20 nt, Human
gcaaaaauucccccaaggag

SEQ ID NO: 252412 - RNA, 23 nt, Human
gcaaaaauucccccaaggagacc

SEQ ID NO: 252413 - RNA, 22 nt, Human
ggauucuuggcucacucaguuc

SEQ ID NO: 252414 - RNA, 22 nt, Human
uacucaaauguuaccuauuuca

SEQ ID NO: 252415 - RNA, 23 nt, Human
ucagcugucagguggcucuccuc

SEQ ID NO: 252416 - RNA, 19 nt, Human
uguaaugauuuuuuuuugc

SEQ ID NO: 252417 - RNA, 21 nt, Human
uucacucuauccucucuucac

SEQ ID NO: 252418 - RNA, 21 nt, Human
uugagaaucucugguaucuuu

SEQ ID NO: 252419 - RNA, 25 nt, Human
aaacaacuucaacucuguacaaagg

SEQ ID NO: 252420 - RNA, 20 nt, Human
aaggaagacaaauaccaaaa

SEQ ID NO: 252421 - RNA, 19 nt, Human
agacaaauaccaaaaacaa

SEQ ID NO: 252422 - RNA, 20 nt, Human
aggaagacaaauaccaaaaa

SEQ ID NO: 252423 - RNA, 18 nt, Human
aguaaugaaaaagaaaag

SEQ ID NO: 252424 - RNA, 19 nt, Human
caaauacaucaagaccaga

SEQ ID NO: 252425 - RNA, 21 nt, Human
caacuucaacucuguacaaag

SEQ ID NO: 252426 - RNA, 24 nt, Human
cauucaucuggugcuuuggggcca

SEQ ID NO: 252427 - RNA, 22 nt, Human
ccaagucaaauauggcauuuca

SEQ ID NO: 252428 - RNA, 24 nt, Human
ccagaagccaagucaaauauggca

SEQ ID NO: 252429 - RNA, 23 nt, Human
cucccuguccgggcggccgggag

SEQ ID NO: 252430 - RNA, 22 nt, Human
cugcggaucuguaauuucucuc

SEQ ID NO: 252431 - RNA, 22 nt, Human
cuggugcuuuggggccauggag

SEQ ID NO: 252432 - RNA, 22 nt, Human
gaaaagaaguugaaaaaacaac

SEQ ID NO: 252433 - RNA, 25 nt, Human
gaaagcucccuguccgggcggccgg

SEQ ID NO: 252434 - RNA, 23 nt, Human
gaagacaaauaccaaaaacauca

SEQ ID NO: 252435 - RNA, 24 nt, Human
gguaaggaagacaaauaccaaaaa

SEQ ID NO: 252436 - RNA, 24 nt, Human
uaagugaaaugaaauaaguaaugu

SEQ ID NO: 252437 - RNA, 21 nt, Human
uacaauuggauucuccuacag

SEQ ID NO: 252438 - RNA, 19 nt, Human
uaguaaugaaaaagaaaag

SEQ ID NO: 252439 - RNA, 25 nt, Human
uaucagaaaauuaaucauucuuauc

SEQ ID NO: 252440 - RNA, 21 nt, Human
ucaugauauacacauauuuuu

SEQ ID NO: 252441 - RNA, 18 nt, Human
ugagugccgagacacgaa

SEQ ID NO: 252442 - RNA, 19 nt, Human
ugguaaggaagacaaauac

SEQ ID NO: 252443 - RNA, 21 nt, Human
uguccugucgccggccaagcg

SEQ ID NO: 252444 - RNA, 22 nt, Human
uuccuuaacaacauucaucugg

SEQ ID NO: 252445 - RNA, 19 nt, Human
aaaaacagcugaugaaaca

SEQ ID NO: 252446 - RNA, 21 nt, Human
aaaagucuuuuaugcaaaaga

SEQ ID NO: 252447 - RNA, 19 nt, Human
aaacagcugaugaaacacu

SEQ ID NO: 252448 - RNA, 22 nt, Human
aagacaaugaaauguggcuuua

SEQ ID NO: 252449 - RNA, 18 nt, Human
aaguuguuauacuugaag

SEQ ID NO: 252450 - RNA, 24 nt, Human
aaucacuuaauaauccugcuuuga

SEQ ID NO: 252451 - RNA, 21 nt, Human
acagggaagcuacucuuucca

SEQ ID NO: 252452 - RNA, 21 nt, Human
agcacaaaaaacaaagccaag

SEQ ID NO: 252453 - RNA, 21 nt, Human
aggaauuacugagcuacauug

SEQ ID NO: 252454 - RNA, 18 nt, Human
aggacccggccacgaaua

SEQ ID NO: 252455 - RNA, 20 nt, Human
auucagcauggugacuugac

SEQ ID NO: 252456 - RNA, 20 nt, Human
caaaaaacaaagccaagucu

SEQ ID NO: 252457 - RNA, 20 nt, Human
caagcccaucgcccccgagc

SEQ ID NO: 252458 - RNA, 21 nt, Human
cacaacacauaagggaguagg

SEQ ID NO: 252459 - RNA, 21 nt, Human
cagcaugugcugccgccuucu

SEQ ID NO: 252460 - RNA, 20 nt, Human
cauaaaggaaucaguguaca

SEQ ID NO: 252461 - RNA, 20 nt, Human
ccagagguucucggccuuca

SEQ ID NO: 252462 - RNA, 24 nt, Human
ccagcuaauaacaguacaucucug

SEQ ID NO: 252463 - RNA, 19 nt, Human
ccccccuucuccuccuccu

SEQ ID NO: 252464 - RNA, 21 nt, Human
ccccccuucuccuccuccucc

SEQ ID NO: 252465 - RNA, 21 nt, Human
cccccgagcccagcaugugcu

SEQ ID NO: 252466 - RNA, 22 nt, Human
cccccgagcccagcaugugcuc

SEQ ID NO: 252467 - RNA, 24 nt, Human
cccccgagcccagcaugugcugcc

SEQ ID NO: 252468 - RNA, 22 nt, Human
cccccuucuccuccuccuuacu

SEQ ID NO: 252469 - RNA, 27 nt, Human
ccgagcccagcaugugcugccgccuuc

SEQ ID NO: 252470 - RNA, 21 nt, Human
ccuaauagcacaaaaaacaaa

SEQ ID NO: 252471 - RNA, 19 nt, Human
ccugcuggcuucuuccuau

SEQ ID NO: 252472 - RNA, 18 nt, Human
cgccuucucccugccagg

SEQ ID NO: 252473 - RNA, 21 nt, Human
cuaaaaacagcugaugaaaca

SEQ ID NO: 252474 - RNA, 20 nt, Human
cuauagaauuccuguugggg

SEQ ID NO: 252475 - RNA, 19 nt, Human
cuugacuacacaacaaucc

SEQ ID NO: 252476 - RNA, 18 nt, Human
cuuucugcaucagugaau

SEQ ID NO: 252477 - RNA, 18 nt, Human
gaaggagccccccuucuc

SEQ ID NO: 252478 - RNA, 23 nt, Human
gaggagucucagacuguuauuug

SEQ ID NO: 252479 - RNA, 21 nt, Human
gagguaugaggagucucagac

SEQ ID NO: 252480 - RNA, 18 nt, Human
gccagaaauuagcacuuc

SEQ ID NO: 252481 - RNA, 20 nt, Human
gcccaucgcccccgagccca

SEQ ID NO: 252482 - RNA, 20 nt, Human
ggaaagccucucugggacag

SEQ ID NO: 252483 - RNA, 19 nt, Human
ggacaggcaguggggaguu

SEQ ID NO: 252484 - RNA, 22 nt, Human
ggaguaggggagguaauacagg

SEQ ID NO: 252485 - RNA, 24 nt, Human
ggaguaggggagguaauacaggga

SEQ ID NO: 252486 - RNA, 19 nt, Human
guaucauuuaaaccaauau

SEQ ID NO: 252487 - RNA, 20 nt, Human
guggcuuuaaaaaaaaagua

SEQ ID NO: 252488 - RNA, 18 nt, Human
guuagaauuggucuuccc

SEQ ID NO: 252489 - RNA, 24 nt, Human
uaacuaaaaacagcugaugaaaca

SEQ ID NO: 252490 - RNA, 23 nt, Human
uaaugcucaucagaauuuccuaa

SEQ ID NO: 252491 - RNA, 18 nt, Human
uacaggacuccauguuuc

SEQ ID NO: 252492 - RNA, 18 nt, Human
uagaauuccuguuggggg

SEQ ID NO: 252493 - RNA, 19 nt, Human
uaggggagguaauacaggg

SEQ ID NO: 252494 - RNA, 24 nt, Human
uaguucaauuuauucagaaaccaa

SEQ ID NO: 252495 - RNA, 23 nt, Human
uaguuuggauuuaguucaauuua

SEQ ID NO: 252496 - RNA, 24 nt, Human
uaucaaaguaaugggagguggacc

SEQ ID NO: 252497 - RNA, 18 nt, Human
ucaauuuauucagaaacc

SEQ ID NO: 252498 - RNA, 19 nt, Human
ucccuuccccucuacugua

SEQ ID NO: 252499 - RNA, 22 nt, Human
uccgcgcacaagcccaucgccc

SEQ ID NO: 252500 - RNA, 24 nt, Human
ucucagacuguuauuugcuguuag

SEQ ID NO: 252501 - RNA, 20 nt, Human
ucuccuccuccuuacuauag

SEQ ID NO: 252502 - RNA, 19 nt, Human
ucuucccagcuaauaacag

SEQ ID NO: 252503 - RNA, 19 nt, Human
ugaggagucucagacuguu

SEQ ID NO: 252504 - RNA, 18 nt, Human
ugauggccaggaccucuu

SEQ ID NO: 252505 - RNA, 22 nt, Human
ugauucagguaagaccuugccu

SEQ ID NO: 252506 - RNA, 22 nt, Human
ugcgcaugcgcuuccugaggcc

SEQ ID NO: 252507 - RNA, 28 nt, Human
uggcacagaugcuauugguccuuaaugu

SEQ ID NO: 252508 - RNA, 19 nt, Human
ugggggugggccagaaauu

SEQ ID NO: 252509 - RNA, 21 nt, Human
uuacugagcuacauuggaaag

SEQ ID NO: 252510 - RNA, 21 nt, Human
uucauuuuuauuaauagaaaa

SEQ ID NO: 252511 - RNA, 20 nt, Human
uuccaguuucaaaguuguuc

SEQ ID NO: 252512 - RNA, 23 nt, Human
uugcgcaugcgcuuccugaggcc

SEQ ID NO: 252513 - RNA, 19 nt, Human
uugcucauaggucuuucag

SEQ ID NO: 252514 - RNA, 25 nt, Human
uuggucuucccagcuaauaacagua

SEQ ID NO: 252515 - RNA, 18 nt, Human
uuuguucuuaaaguuucu

SEQ ID NO: 252516 - RNA, 21 nt, Human
acacgcgcgcuccgcgccucc

SEQ ID NO: 252517 - RNA, 22 nt, Human
acacgcgcgcuccgcgccuccc

SEQ ID NO: 252518 - RNA, 21 nt, Human
aggaccacacgcgcgcuccgc

SEQ ID NO: 252519 - RNA, 22 nt, Human
aggucaggcagugaaaaaacca

SEQ ID NO: 252520 - RNA, 20 nt, Human
ccccgcaucuggcucgcgcc

SEQ ID NO: 252521 - RNA, 23 nt, Human
cgcucggggcgccgcgggcggcg

SEQ ID NO: 252522 - RNA, 22 nt, Human
cggcgcaaggaccacacgcgcg

SEQ ID NO: 252523 - RNA, 19 nt, Human
cggcuccgcaucugcucac

SEQ ID NO: 252524 - RNA, 19 nt, Human
cucgcgcccuccacucggc

SEQ ID NO: 252525 - RNA, 20 nt, Human
gcagugaaaaaaccauugga

SEQ ID NO: 252526 - RNA, 21 nt, Human
ggaaccaguggagaagucagc

SEQ ID NO: 252527 - RNA, 18 nt, Human
ggcgcaaggaccacacgc

SEQ ID NO: 252528 - RNA, 21 nt, Human
ucagcggcgcaaggaccacac

SEQ ID NO: 252529 - RNA, 18 nt, Human
uccacucggcuccgcauc

SEQ ID NO: 252530 - RNA, 24 nt, Human
uccguggccugugggaccaagccu

SEQ ID NO: 252531 - RNA, 23 nt, Human
ucgccccgcaucuggcucgcgcc

SEQ ID NO: 252532 - RNA, 23 nt, Human
ucucagcaagucagcugucgccc

SEQ ID NO: 252533 - RNA, 21 nt, Human
ugcaggccauugguccguggc

SEQ ID NO: 252534 - RNA, 24 nt, Human
uggacaaaguguggacuguugcuu

SEQ ID NO: 252535 - RNA, 20 nt, Human
uggcaagagcaaagaauauc

SEQ ID NO: 252536 - RNA, 21 nt, Human
aaacagaagugguaauugagc

SEQ ID NO: 252537 - RNA, 21 nt, Human
aaacagaagugguaauugagc

SEQ ID NO: 252538 - RNA, 21 nt, Human
aaacagaagugguaauugagc

SEQ ID NO: 252539 - RNA, 24 nt, Human
aaacagaagugguaauugagccua

SEQ ID NO: 252540 - RNA, 24 nt, Human
aaacagaagugguaauugagccua

SEQ ID NO: 252541 - RNA, 24 nt, Human
aaacagaagugguaauugagccua

SEQ ID NO: 252542 - RNA, 21 nt, Human
aagaccccacagccuuccaaa

SEQ ID NO: 252543 - RNA, 29 nt, Human
aagaccccacagccuuccaaagauccccc

SEQ ID NO: 252544 - RNA, 29 nt, Human
aagaccccacagccuuccaaagauccccc

SEQ ID NO: 252545 - RNA, 20 nt, Human
acaccagccccccaacucuu

SEQ ID NO: 252546 - RNA, 22 nt, Human
acaggccaccauagccacagcc

SEQ ID NO: 252547 - RNA, 24 nt, Human
accccacagccuuccaaagauccc

SEQ ID NO: 252548 - RNA, 24 nt, Human
accccacagccuuccaaagauccc

SEQ ID NO: 252549 - RNA, 24 nt, Human
accccacagccuuccaaagauccc

SEQ ID NO: 252550 - RNA, 24 nt, Human
acguagaacuuucuuccccuccuc

SEQ ID NO: 252551 - RNA, 24 nt, Human
acguagaacuuucuuccccuccuc

SEQ ID NO: 252552 - RNA, 24 nt, Human
acuccugcucuuuucucuaauccc

SEQ ID NO: 252553 - RNA, 24 nt, Human
acuccugcucuuuucucuaauccc

SEQ ID NO: 252554 - RNA, 24 nt, Human
acuccugcucuuuucucuaauccc

SEQ ID NO: 252555 - RNA, 22 nt, Human
acugugucucagcuccagcagu

SEQ ID NO: 252556 - RNA, 22 nt, Human
acugugucucagcuccagcagu

SEQ ID NO: 252557 - RNA, 19 nt, Human
acuugggccugagcucucu

SEQ ID NO: 252558 - RNA, 19 nt, Human
aggaagagcaagaccccac

SEQ ID NO: 252559 - RNA, 19 nt, Human
aggaagagcaagaccccac

SEQ ID NO: 252560 - RNA, 19 nt, Human
aggaagagcaagaccccac

SEQ ID NO: 252561 - RNA, 22 nt, Human
aggaagagcaagaccccacagc

SEQ ID NO: 252562 - RNA, 22 nt, Human
aggaagagcaagaccccacagc

SEQ ID NO: 252563 - RNA, 22 nt, Human
aggaagagcaagaccccacagc

SEQ ID NO: 252564 - RNA, 18 nt, Human
aggcaggcugguuuggga

SEQ ID NO: 252565 - RNA, 18 nt, Human
aggcaggcugguuuggga

SEQ ID NO: 252566 - RNA, 20 nt, Human
agggaacacagauuccccag

SEQ ID NO: 252567 - RNA, 20 nt, Human
agggaacacagauuccccag

SEQ ID NO: 252568 - RNA, 20 nt, Human
agggaacacagauuccccag

SEQ ID NO: 252569 - RNA, 18 nt, Human
agggacaaggugagagga

SEQ ID NO: 252570 - RNA, 18 nt, Human
agggacaaggugagagga

SEQ ID NO: 252571 - RNA, 18 nt, Human
agggacaaggugagagga

SEQ ID NO: 252572 - RNA, 20 nt, Human
aguggagggacaaggugaga

SEQ ID NO: 252573 - RNA, 21 nt, Human
aguggagggacaaggugagag

SEQ ID NO: 252574 - RNA, 21 nt, Human
aguggagggacaaggugagag

SEQ ID NO: 252575 - RNA, 21 nt, Human
aucccaggauccacaaagcaa

SEQ ID NO: 252576 - RNA, 21 nt, Human
aucccaggauccacaaagcaa

SEQ ID NO: 252577 - RNA, 22 nt, Human
augugacccuggccggguaacu

SEQ ID NO: 252578 - RNA, 27 nt, Human
caaagauccccuaugguccaaaguccu

SEQ ID NO: 252579 - RNA, 27 nt, Human
caaagauccccuaugguccaaaguccu

SEQ ID NO: 252580 - RNA, 27 nt, Human
caaagauccccuaugguccaaaguccu

SEQ ID NO: 252581 - RNA, 22 nt, Human
caagaccccacagccuuccaaa

SEQ ID NO: 252582 - RNA, 22 nt, Human
caagaccccacagccuuccaaa

SEQ ID NO: 252583 - RNA, 30 nt, Human
caagaccccacagccuuccaaagauccccc

SEQ ID NO: 252584 - RNA, 20 nt, Human
cacugggauccuacuuugug

SEQ ID NO: 252585 - RNA, 22 nt, Human
caguggguucugcccugggcag

SEQ ID NO: 252586 - RNA, 22 nt, Human
caguggguucugcccugggcag

SEQ ID NO: 252587 - RNA, 19 nt, Human
cauccagucguguagcucc

SEQ ID NO: 252588 - RNA, 22 nt, Human
caucuuugucagcuggcccuug

SEQ ID NO: 252589 - RNA, 22 nt, Human
cauuccucauuccagcugagga

SEQ ID NO: 252590 - RNA, 22 nt, Human
cauuccucauuccagcugagga

SEQ ID NO: 252591 - RNA, 22 nt, Human
cauuccucauuccagcugagga

SEQ ID NO: 252592 - RNA, 24 nt, Human
ccaguggguucugcccugggcagc

SEQ ID NO: 252593 - RNA, 24 nt, Human
ccaguggguucugcccugggcagc

SEQ ID NO: 252594 - RNA, 24 nt, Human
ccaguggguucugcccugggcagc

SEQ ID NO: 252595 - RNA, 23 nt, Human
cgaagaacucuggguauagcuca

SEQ ID NO: 252596 - RNA, 21 nt, Human
cggaagauggcugggaaauuc

SEQ ID NO: 252597 - RNA, 21 nt, Human
cggaagauggcugggaaauuc

SEQ ID NO: 252598 - RNA, 22 nt, Human
cucucuuuucuuucuuauccuu

SEQ ID NO: 252599 - RNA, 21 nt, Human
cugggcagcuccccaccuucu

SEQ ID NO: 252600 - RNA, 21 nt, Human
cugggcagcuccccaccuucu

SEQ ID NO: 252601 - RNA, 21 nt, Human
cugggcagcuccccaccuucu

SEQ ID NO: 252602 - RNA, 24 nt, Human
cuggggcacaaguuccccuucucc

SEQ ID NO: 252603 - RNA, 21 nt, Human
cugugucucagcuccagcagu

SEQ ID NO: 252604 - RNA, 21 nt, Human
cugugucucagcuccagcagu

SEQ ID NO: 252605 - RNA, 21 nt, Human
cugugucucagcuccagcagu

SEQ ID NO: 252606 - RNA, 24 nt, Human
cugugucucagcuccagcagucuc

SEQ ID NO: 252607 - RNA, 24 nt, Human
cugugucucagcuccagcagucuc

SEQ ID NO: 252608 - RNA, 24 nt, Human
cugugucucagcuccagcagucuc

SEQ ID NO: 252609 - RNA, 20 nt, Human
cuucggaagauggcugggaa

SEQ ID NO: 252610 - RNA, 20 nt, Human
cuucggaagauggcugggaa

SEQ ID NO: 252611 - RNA, 19 nt, Human
cuuuccugagaaauggcag

SEQ ID NO: 252612 - RNA, 18 nt, Human
gaagagcaagaccccaca

SEQ ID NO: 252613 - RNA, 18 nt, Human
gaagagcaagaccccaca

SEQ ID NO: 252614 - RNA, 18 nt, Human
gaagagcaagaccccaca

SEQ ID NO: 252615 - RNA, 23 nt, Human
gacaaggugagaggagccagggg

SEQ ID NO: 252616 - RNA, 21 nt, Human
gacccaggacuccugcucuuu

SEQ ID NO: 252617 - RNA, 24 nt, Human
gagcaagaccccacagccuuccaa

SEQ ID NO: 252618 - RNA, 24 nt, Human
gagcaagaccccacagccuuccaa

SEQ ID NO: 252619 - RNA, 24 nt, Human
gagcaagaccccacagccuuccaa

SEQ ID NO: 252620 - RNA, 21 nt, Human
gaguggagcgaagaacucugg

SEQ ID NO: 252621 - RNA, 21 nt, Human
gcagucucaacugggaagacc

SEQ ID NO: 252622 - RNA, 21 nt, Human
gcagucucaacugggaagacc

SEQ ID NO: 252623 - RNA, 21 nt, Human
gcagucucaacugggaagacc

SEQ ID NO: 252624 - RNA, 20 nt, Human
gccccccaacucuuagcacc

SEQ ID NO: 252625 - RNA, 24 nt, Human
ggacaaggugagaggagccagggg

SEQ ID NO: 252626 - RNA, 24 nt, Human
ggacaaggugagaggagccagggg

SEQ ID NO: 252627 - RNA, 24 nt, Human
ggacaaggugagaggagccagggg

SEQ ID NO: 252628 - RNA, 22 nt, Human
gggacugaugauucgccacuug

SEQ ID NO: 252629 - RNA, 19 nt, Human
gugagaggagccaggggua

SEQ ID NO: 252630 - RNA, 23 nt, Human
uaacaggccaccauagccacagc

SEQ ID NO: 252631 - RNA, 22 nt, Human
uacaccagccccccaacucuua

SEQ ID NO: 252632 - RNA, 24 nt, Human
uacaccagccccccaacucuuagc

SEQ ID NO: 252633 - RNA, 23 nt, Human
uagcucagaccaguccaucuccu

SEQ ID NO: 252634 - RNA, 20 nt, Human
uaggaaggugcuucauggca

SEQ ID NO: 252635 - RNA, 27 nt, Human
uaggcauguguacacauauacauggug

SEQ ID NO: 252636 - RNA, 21 nt, Human
uaucccaggauccacaaagca

SEQ ID NO: 252637 - RNA, 21 nt, Human
uaucccaggauccacaaagca

SEQ ID NO: 252638 - RNA, 21 nt, Human
uaucccaggauccacaaagca

SEQ ID NO: 252639 - RNA, 20 nt, Human
ucacaaggagaaaggagugc

SEQ ID NO: 252640 - RNA, 20 nt, Human
ucacaaggagaaaggagugc

SEQ ID NO: 252641 - RNA, 20 nt, Human
ucacaaggagaaaggagugc

SEQ ID NO: 252642 - RNA, 22 nt, Human
uccaaaguccuuugaccaucuc

SEQ ID NO: 252643 - RNA, 22 nt, Human
uccaaaguccuuugaccaucuc

SEQ ID NO: 252644 - RNA, 22 nt, Human
uccaaaguccuuugaccaucuc

SEQ ID NO: 252645 - RNA, 19 nt, Human
uccacuaacaggccaccau

SEQ ID NO: 252646 - RNA, 19 nt, Human
ucccaggauccacaaagca

SEQ ID NO: 252647 - RNA, 19 nt, Human
ucccugggagacgaggucc

SEQ ID NO: 252648 - RNA, 19 nt, Human
ucccugggagacgaggucc

SEQ ID NO: 252649 - RNA, 19 nt, Human
ucccugggagacgaggucc

SEQ ID NO: 252650 - RNA, 19 nt, Human
ucccugggagacgaggucc

SEQ ID NO: 252651 - RNA, 20 nt, Human
ucccugggagacgaggucca

SEQ ID NO: 252652 - RNA, 20 nt, Human
ucccugggagacgaggucca

SEQ ID NO: 252653 - RNA, 22 nt, Human
uccuccagaggcacacgcucaa

SEQ ID NO: 252654 - RNA, 24 nt, Human
uccuccagaggcacacgcucaaac

SEQ ID NO: 252655 - RNA, 24 nt, Human
ucggaagauggcugggaaauucuu

SEQ ID NO: 252656 - RNA, 24 nt, Human
ucggaagauggcugggaaauucuu

SEQ ID NO: 252657 - RNA, 23 nt, Human
ucucaacugggaagacccaggac

SEQ ID NO: 252658 - RNA, 23 nt, Human
ucucaacugggaagacccaggac

SEQ ID NO: 252659 - RNA, 23 nt, Human
ucucaacugggaagacccaggac

SEQ ID NO: 252660 - RNA, 21 nt, Human
ucugcaaacuccacuugggcc

SEQ ID NO: 252661 - RNA, 18 nt, Human
ugagaggagccaggggua

SEQ ID NO: 252662 - RNA, 18 nt, Human
ugagaggagccaggggua

SEQ ID NO: 252663 - RNA, 20 nt, Human
ugagugcacauccagucgug

SEQ ID NO: 252664 - RNA, 20 nt, Human
ugccuggaggacgggaucuu

SEQ ID NO: 252665 - RNA, 20 nt, Human
ugccuggaggacgggaucuu

SEQ ID NO: 252666 - RNA, 22 nt, Human
uggaagccaccugcaggagcug

SEQ ID NO: 252667 - RNA, 19 nt, Human
uggcaguggagggacaagg

SEQ ID NO: 252668 - RNA, 19 nt, Human
uggcaguggagggacaagg

SEQ ID NO: 252669 - RNA, 19 nt, Human
uggcaguggagggacaagg

SEQ ID NO: 252670 - RNA, 22 nt, Human
uggcgguugaugugacccuggc

SEQ ID NO: 252671 - RNA, 19 nt, Human
ugguagaaggcauaugaua

SEQ ID NO: 252672 - RNA, 19 nt, Human
ugguagaaggcauaugaua

SEQ ID NO: 252673 - RNA, 19 nt, Human
ugguagaaggcauaugaua

SEQ ID NO: 252674 - RNA, 22 nt, Human
ugguccaaaguccuuugaccau

SEQ ID NO: 252675 - RNA, 22 nt, Human
ugguccaaaguccuuugaccau

SEQ ID NO: 252676 - RNA, 22 nt, Human
ugguccaaaguccuuugaccau

SEQ ID NO: 252677 - RNA, 22 nt, Human
uguauucuucggaagauggcug

SEQ ID NO: 252678 - RNA, 22 nt, Human
uguauucuucggaagauggcug

SEQ ID NO: 252679 - RNA, 24 nt, Human
ugugggucggggaagaggaagaac

SEQ ID NO: 252680 - RNA, 20 nt, Human
uguguacacauauacauggu

SEQ ID NO: 252681 - RNA, 20 nt, Human
uguguacacauauacauggu

SEQ ID NO: 252682 - RNA, 19 nt, Human
uguguacacauauacaugu

SEQ ID NO: 252683 - RNA, 21 nt, Human
uguguacacauauacauguua

SEQ ID NO: 252684 - RNA, 21 nt, Human
uguguacacauauacauguua

SEQ ID NO: 252685 - RNA, 22 nt, Human
uucacccggaucuccagaccca

SEQ ID NO: 252686 - RNA, 25 nt, Human
uuuuuuuuuuuuuuuuuuuuagggg

SEQ ID NO: 252687 - RNA, 25 nt, Human
uuuuuuuuuuuuuuuuuuuuagggg

SEQ ID NO: 252688 - RNA, 25 nt, Human
uuuuuuuuuuuuuuuuuuuuagggg

SEQ ID NO: 252689 - RNA, 26 nt, Human
auggcagcgacggugauucccgaaac

SEQ ID NO: 252690 - RNA, 19 nt, Human
caccagcaacgucaacgaa

SEQ ID NO: 252691 - RNA, 22 nt, Human
caccugaguccgcgaacacagc

SEQ ID NO: 252692 - RNA, 29 nt, Human
cagcaacgucaacgaagagaagaaauucc

SEQ ID NO: 252693 - RNA, 24 nt, Human
cagcgacggugauucccgaaacuu

SEQ ID NO: 252694 - RNA, 19 nt, Human
ccaaacagugaacaccagc

SEQ ID NO: 252695 - RNA, 22 nt, Human
ccagcaacgucaacgaagagaa

SEQ ID NO: 252696 - RNA, 19 nt, Human
ccgaaacuugacuaauucc

SEQ ID NO: 252697 - RNA, 21 nt, Human
cgaaacuugacuaauuccaaa

SEQ ID NO: 252698 - RNA, 21 nt, Human
gagaagaaauuccuuccaccu

SEQ ID NO: 252699 - RNA, 22 nt, Human
ggcagcgacggugauucccgaa

SEQ ID NO: 252700 - RNA, 22 nt, Human
gugauucccgaaacuugacuaa

SEQ ID NO: 252701 - RNA, 26 nt, Human
guugauggcagcgacggugauucccu

SEQ ID NO: 252702 - RNA, 20 nt, Human
ugacuaauuccaaacaguga

SEQ ID NO: 252703 - RNA, 22 nt, Human
ugacuaauuccaaacagugaac

SEQ ID NO: 252704 - RNA, 20 nt, Human
aacauggggauggggaaaaa

SEQ ID NO: 252705 - RNA, 22 nt, Human
acaggcugaaggaggggccuga

SEQ ID NO: 252706 - RNA, 19 nt, Human
accagcuggggugggggga

SEQ ID NO: 252707 - RNA, 20 nt, Human
agaagggcccgucaggccca

SEQ ID NO: 252708 - RNA, 18 nt, Human
agaucccaggagggccag

SEQ ID NO: 252709 - RNA, 24 nt, Human
agcagaccagcuggggugggggga

SEQ ID NO: 252710 - RNA, 20 nt, Human
auggggauggggaaaaaagc

SEQ ID NO: 252711 - RNA, 21 nt, Human
caacccccagggcugcagucc

SEQ ID NO: 252712 - RNA, 23 nt, Human
cccccaacccgaggggcagacug

SEQ ID NO: 252713 - RNA, 26 nt, Human
gccccagaucccaggagggccaggac

SEQ ID NO: 252714 - RNA, 19 nt, Human
gcucccacccuggccuaag

SEQ ID NO: 252715 - RNA, 23 nt, Human
ggauggggaaaaaagcaccaggu

SEQ ID NO: 252716 - RNA, 18 nt, Human
ggccacaggcugaaggag

SEQ ID NO: 252717 - RNA, 22 nt, Human
ggccacaggcugaaggaggggc

SEQ ID NO: 252718 - RNA, 19 nt, Human
ggcuguaggaaauccaagc

SEQ ID NO: 252719 - RNA, 23 nt, Human
ugaggcaccgcagccugcaaccc

SEQ ID NO: 252720 - RNA, 24 nt, Human
ugaggcaccgcagccugcaacccc

SEQ ID NO: 252721 - RNA, 18 nt, Human
ugggauacucccccaacc

SEQ ID NO: 252722 - RNA, 19 nt, Human
ugggauacucccccaaccc

SEQ ID NO: 252723 - RNA, 24 nt, Human
uggggauggggaaaaaagcaccag

SEQ ID NO: 252724 - RNA, 18 nt, Human
ugucagagaggacagcug

SEQ ID NO: 252725 - RNA, 21 nt, Human
ugucuguccucaaaacgggcu

SEQ ID NO: 252726 - RNA, 24 nt, Human
uucagaauaaaaggaacaugggga

SEQ ID NO: 252727 - RNA, 23 nt, Human
uuuucagaauaaaaggaacaugg

SEQ ID NO: 252728 - RNA, 23 nt, Human
aaaaacuucuacacuacaacaaa

SEQ ID NO: 252729 - RNA, 21 nt, Human
aaacaaaaauaaaaaccucaa

SEQ ID NO: 252730 - RNA, 22 nt, Human
aaacaagauaaagacgcaugca

SEQ ID NO: 252731 - RNA, 24 nt, Human
aaagaauggcaaacauuuucgccu

SEQ ID NO: 252732 - RNA, 21 nt, Human
aaaguaguuuacagagcaguu

SEQ ID NO: 252733 - RNA, 18 nt, Human
aacagaaauaugaaaauc

SEQ ID NO: 252734 - RNA, 24 nt, Human
aaccucaacaacaaaauauuaacc

SEQ ID NO: 252735 - RNA, 19 nt, Human
aacuaaaaugaugucucag

SEQ ID NO: 252736 - RNA, 20 nt, Human
aagaagcgaguaaaaguccc

SEQ ID NO: 252737 - RNA, 23 nt, Human
aagaauggcaaacauuuucgccu

SEQ ID NO: 252738 - RNA, 21 nt, Human
aagggcaggaggguugacaga

SEQ ID NO: 252739 - RNA, 19 nt, Human
aaguguucgaugaccgaac

SEQ ID NO: 252740 - RNA, 21 nt, Human
aauggcaaacauuuucgccuc

SEQ ID NO: 252741 - RNA, 30 nt, Human
accccaaccaagccgucaccuacccgaccu

SEQ ID NO: 252742 - RNA, 20 nt, Human
accuaagaccacaaagggca

SEQ ID NO: 252743 - RNA, 24 nt, Human
agagaugagugaagauucugguaa

SEQ ID NO: 252744 - RNA, 24 nt, Human
agagcuagaaacaacuucagaucu

SEQ ID NO: 252745 - RNA, 24 nt, Human
agggcaggaggguugacagagguc

SEQ ID NO: 252746 - RNA, 18 nt, Human
agugcuuuuccccaucau

SEQ ID NO: 252747 - RNA, 22 nt, Human
augcaaccuauagcaccauacc

SEQ ID NO: 252748 - RNA, 19 nt, Human
caaaacaucugaaaaacac

SEQ ID NO: 252749 - RNA, 26 nt, Human
caaccaagccgucaccuacccgaccu

SEQ ID NO: 252750 - RNA, 21 nt, Human
caaccuauagcaccauaccua

SEQ ID NO: 252751 - RNA, 23 nt, Human
caaccucaaugaacuaaaaugau

SEQ ID NO: 252752 - RNA, 24 nt, Human
caagauaaagacgcaugcaaccua

SEQ ID NO: 252753 - RNA, 26 nt, Human
caaguaguccccucgcagcgacccca

SEQ ID NO: 252754 - RNA, 22 nt, Human
caauggaagaacugugaccaga

SEQ ID NO: 252755 - RNA, 22 nt, Human
cacacccaggccagacuuucaa

SEQ ID NO: 252756 - RNA, 20 nt, Human
cacccccaccaaggaccaau

SEQ ID NO: 252757 - RNA, 23 nt, Human
cacccccaccaaggaccaauuua

SEQ ID NO: 252758 - RNA, 23 nt, Human
cacuacaacaaaagcacagcggg

SEQ ID NO: 252759 - RNA, 23 nt, Human
cacucccgaccccaagccacagg

SEQ ID NO: 252760 - RNA, 19 nt, Human
cacugcuugagagcagggc

SEQ ID NO: 252761 - RNA, 19 nt, Human
cagaagacagaugauuuga

SEQ ID NO: 252762 - RNA, 23 nt, Human
caucauguuuaucuggggcuccu

SEQ ID NO: 252763 - RNA, 21 nt, Human
cauggcaaaacaucugaaaaa

SEQ ID NO: 252764 - RNA, 19 nt, Human
ccaaacaaacaagauaaag

SEQ ID NO: 252765 - RNA, 21 nt, Human
ccaaacaaacaagauaaagac

SEQ ID NO: 252766 - RNA, 24 nt, Human
ccaaccaagccgucaccuacccga

SEQ ID NO: 252767 - RNA, 20 nt, Human
ccaagauaaguaucagaucc

SEQ ID NO: 252768 - RNA, 24 nt, Human
ccaagccacaggcuacgacucacg

SEQ ID NO: 252769 - RNA, 23 nt, Human
cccacacccaggccagacuuuca

SEQ ID NO: 252770 - RNA, 22 nt, Human
ccccaagccacaggcuacgacu

SEQ ID NO: 252771 - RNA, 23 nt, Human
ccccaagccacaggcuacgacuc

SEQ ID NO: 252772 - RNA, 19 nt, Human
cccgaccccaagccacagg

SEQ ID NO: 252773 - RNA, 19 nt, Human
ccgaccccaagccacaggc

SEQ ID NO: 252774 - RNA, 21 nt, Human
ccgaccccaagccacaggcua

SEQ ID NO: 252775 - RNA, 22 nt, Human
ccuauagcaccauaccuaagac

SEQ ID NO: 252776 - RNA, 24 nt, Human
ccuccugcacucccgaccccaagc

SEQ ID NO: 252777 - RNA, 19 nt, Human
ccugccaaccucaaugaac

SEQ ID NO: 252778 - RNA, 18 nt, Human
cuacaacaaaagcacagc

SEQ ID NO: 252779 - RNA, 23 nt, Human
cucacgccucggcgcuccaagua

SEQ ID NO: 252780 - RNA, 18 nt, Human
cuccaaguaguccccucg

SEQ ID NO: 252781 - RNA, 23 nt, Human
cucgcagcgaccccaaccaagcc

SEQ ID NO: 252782 - RNA, 19 nt, Human
cugcacucccgaccccaag

SEQ ID NO: 252783 - RNA, 27 nt, Human
cugugaccagaagagaaaccggggucc

SEQ ID NO: 252784 - RNA, 21 nt, Human
cuucuacacuacaacaaaagc

SEQ ID NO: 252785 - RNA, 23 nt, Human
gaaacaacuucagaucucaccua

SEQ ID NO: 252786 - RNA, 24 nt, Human
gaacuaccaccuuagauaaucccg

SEQ ID NO: 252787 - RNA, 23 nt, Human
gaagucccaagauaaguaucaga

SEQ ID NO: 252788 - RNA, 19 nt, Human
gagagcagggcccuuccgu

SEQ ID NO: 252789 - RNA, 23 nt, Human
gagcccagggcagugccuggcag

SEQ ID NO: 252790 - RNA, 24 nt, Human
gauggguuaagaagcuauagagcu

SEQ ID NO: 252791 - RNA, 19 nt, Human
gcaaucccugccaaccuca

SEQ ID NO: 252792 - RNA, 20 nt, Human
gcauuaugacauuggugugg

SEQ ID NO: 252793 - RNA, 19 nt, Human
gcugccuucuaaugaagac

SEQ ID NO: 252794 - RNA, 19 nt, Human
ggcaucauccaucauuuuu

SEQ ID NO: 252795 - RNA, 27 nt, Human
ggcuacaaaagcagccauagcucagaa

SEQ ID NO: 252796 - RNA, 20 nt, Human
gggaaaaugggacaaaaucu

SEQ ID NO: 252797 - RNA, 23 nt, Human
gggcagugccuggcagguaucug

SEQ ID NO: 252798 - RNA, 24 nt, Human
gguugacagaggucuuaagaggaa

SEQ ID NO: 252799 - RNA, 20 nt, Human
guucguugacugaugugucc

SEQ ID NO: 252800 - RNA, 24 nt, Human
guuuuucaaaaaccucugugcauu

SEQ ID NO: 252801 - RNA, 22 nt, Human
uaaaaaccucaacaacaaaaua

SEQ ID NO: 252802 - RNA, 21 nt, Human
uaaacaaaaauaaaaaccuca

SEQ ID NO: 252803 - RNA, 23 nt, Human
uaacacacccucacaauuaucua

SEQ ID NO: 252804 - RNA, 23 nt, Human
uaacccuacagacaugugcuaca

SEQ ID NO: 252805 - RNA, 19 nt, Human
uacaguugaagcagguggc

SEQ ID NO: 252806 - RNA, 21 nt, Human
uagaaacaacuucagaucuca

SEQ ID NO: 252807 - RNA, 19 nt, Human
uagaguccaauacuuuuaa

SEQ ID NO: 252808 - RNA, 22 nt, Human
uagcaccauaccuaagaccaca

SEQ ID NO: 252809 - RNA, 31 nt, Human
uaggaugagaucccaaauauagaaccuauuu

SEQ ID NO: 252810 - RNA, 25 nt, Human
uaucagagaggaaaaaugcugccuu

SEQ ID NO: 252811 - RNA, 26 nt, Human
uaucugaaguaaacaaaaauaaaaac

SEQ ID NO: 252812 - RNA, 18 nt, Human
uaugcuccacauggcaaa

SEQ ID NO: 252813 - RNA, 24 nt, Human
ucagguuagugcuucucggaaagg

SEQ ID NO: 252814 - RNA, 22 nt, Human
ucagugcuuuuccccaucaugu

SEQ ID NO: 252815 - RNA, 20 nt, Human
ucauguuuaucuggggcucc

SEQ ID NO: 252816 - RNA, 19 nt, Human
ucccacacccaggccagac

SEQ ID NO: 252817 - RNA, 27 nt, Human
ucccacacccaggccagacuuucaaaa

SEQ ID NO: 252818 - RNA, 22 nt, Human
ucgccuccugcacucccgaccc

SEQ ID NO: 252819 - RNA, 20 nt, Human
ucggaaaggcuacaaaagca

SEQ ID NO: 252820 - RNA, 23 nt, Human
ucucugacaucuguauaacccua

SEQ ID NO: 252821 - RNA, 18 nt, Human
ucuuagcaugcauaauuu

SEQ ID NO: 252822 - RNA, 30 nt, Human
ugaaaaacacucagauguuuuucaaaaacc

SEQ ID NO: 252823 - RNA, 22 nt, Human
ugaaaauccaugauuuuccaga

SEQ ID NO: 252824 - RNA, 24 nt, Human
ugaagcagguggcaucauccauca

SEQ ID NO: 252825 - RNA, 19 nt, Human
ugacauugguguggaaauu

SEQ ID NO: 252826 - RNA, 21 nt, Human
ugaccgaacucccacacccag

SEQ ID NO: 252827 - RNA, 24 nt, Human
ugaccgaacucccacacccaggcc

SEQ ID NO: 252828 - RNA, 18 nt, Human
ugagaucccaaauauaga

SEQ ID NO: 252829 - RNA, 24 nt, Human
ugauacacccccaccaaggaccaa

SEQ ID NO: 252830 - RNA, 20 nt, Human
uggaagaacugugaccagaa

SEQ ID NO: 252831 - RNA, 21 nt, Human
uuaauauuaacaaacggaaaa

SEQ ID NO: 252832 - RNA, 19 nt, Human
uuaguucagugcuuuuccc

SEQ ID NO: 252833 - RNA, 20 nt, Human
uuugacacuguucuuauucu

SEQ ID NO: 252834 - RNA, 21 nt, Human
uuuuucuuccucuugaugucu

SEQ ID NO: 252835 - RNA, 24 nt, Human
uuuuuuuuuuugucaucauaagug

SEQ ID NO: 252836 - RNA, 18 nt, Human
uuuuuuuuuuuuuuuguc

SEQ ID NO: 252837 - RNA, 18 nt, Human
uuuuuuuuuuuuuuuuug

SEQ ID NO: 252838 - RNA, 19 nt, Human
uuuuuuuuuuuuuuuuugu

SEQ ID NO: 252839 - RNA, 20 nt, Human
aaaggccugcagcugggaga

SEQ ID NO: 252840 - RNA, 21 nt, Human
aaggaguuggugcucgggaau

SEQ ID NO: 252841 - RNA, 18 nt, Human
aaggcccccuuguaagga

SEQ ID NO: 252842 - RNA, 18 nt, Human
aaucagcagaagcaugca

SEQ ID NO: 252843 - RNA, 22 nt, Human
acccagaggguauggggaagac

SEQ ID NO: 252844 - RNA, 20 nt, Human
agagggagcacucauggaga

SEQ ID NO: 252845 - RNA, 23 nt, Human
aggggcugggaugggccaucagg

SEQ ID NO: 252846 - RNA, 24 nt, Human
aggggcugggaugggccaucaggg

SEQ ID NO: 252847 - RNA, 25 nt, Human
agucccuacccacucccagcccugc

SEQ ID NO: 252848 - RNA, 20 nt, Human
agugaggaagcaggacaaga

SEQ ID NO: 252849 - RNA, 25 nt, Human
augggcccuguucacacugcacugc

SEQ ID NO: 252850 - RNA, 18 nt, Human
auuacacugucuuuuugc

SEQ ID NO: 252851 - RNA, 24 nt, Human
caacacccagaggguauggggaag

SEQ ID NO: 252852 - RNA, 21 nt, Human
caacucauucucauggagccc

SEQ ID NO: 252853 - RNA, 19 nt, Human
cagcaggggagcaaggagg

SEQ ID NO: 252854 - RNA, 18 nt, Human
caggacaagauggaccac

SEQ ID NO: 252855 - RNA, 21 nt, Human
caggggaagcugaguaugaua

SEQ ID NO: 252856 - RNA, 18 nt, Human
cagucccuacccacuccc

SEQ ID NO: 252857 - RNA, 19 nt, Human
ccaucagcaggggagcaag

SEQ ID NO: 252858 - RNA, 24 nt, Human
cccagcccugcagagauuguccuc

SEQ ID NO: 252859 - RNA, 19 nt, Human
cccccuuguaaggaguugg

SEQ ID NO: 252860 - RNA, 24 nt, Human
cccuacccacucccagcccugcag

SEQ ID NO: 252861 - RNA, 18 nt, Human
ccugcagcugggagagug

SEQ ID NO: 252862 - RNA, 20 nt, Human
ccugcagcugggagaguggc

SEQ ID NO: 252863 - RNA, 20 nt, Human
cuagaauacaccaugggccc

SEQ ID NO: 252864 - RNA, 18 nt, Human
cugcucccucauguggcu

SEQ ID NO: 252865 - RNA, 18 nt, Human
cuuggcauagagcuucag

SEQ ID NO: 252866 - RNA, 23 nt, Human
gaugcugaagaugggacaugguu

SEQ ID NO: 252867 - RNA, 19 nt, Human
gcagagauuguccucugcu

SEQ ID NO: 252868 - RNA, 23 nt, Human
gcagcagagggagcacucaugga

SEQ ID NO: 252869 - RNA, 19 nt, Human
gcccuguucacacugcacu

SEQ ID NO: 252870 - RNA, 21 nt, Human
ggacaagauggaccacaaagg

SEQ ID NO: 252871 - RNA, 20 nt, Human
ggaggagccaggugccuaca

SEQ ID NO: 252872 - RNA, 25 nt, Human
ggaugcugaagaugggacaugguuu

SEQ ID NO: 252873 - RNA, 19 nt, Human
gggaagcugaguaugauag

SEQ ID NO: 252874 - RNA, 19 nt, Human
gggaggaaaggugccugag

SEQ ID NO: 252875 - RNA, 24 nt, Human
ggggagcaaggaggagccaggugc

SEQ ID NO: 252876 - RNA, 21 nt, Human
ggggaggaaaggugccugagg

SEQ ID NO: 252877 - RNA, 20 nt, Human
ggggaguaaguuggugggag

SEQ ID NO: 252878 - RNA, 18 nt, Human
gucccuacccacucccag

SEQ ID NO: 252879 - RNA, 22 nt, Human
guggcuaaaccucucaacaccc

SEQ ID NO: 252880 - RNA, 21 nt, Human
guucuuggcauagagcuucag

SEQ ID NO: 252881 - RNA, 19 nt, Human
uaaaccucucaacacccag

SEQ ID NO: 252882 - RNA, 26 nt, Human
uaaguuggugggagggaugcugauca

SEQ ID NO: 252883 - RNA, 18 nt, Human
uagaaccaugugccucuc

SEQ ID NO: 252884 - RNA, 21 nt, Human
uaggaauggaugcccugggug

SEQ ID NO: 252885 - RNA, 18 nt, Human
uaugauagugaggugggc

SEQ ID NO: 252886 - RNA, 18 nt, Human
ucauggagcccagccagg

SEQ ID NO: 252887 - RNA, 19 nt, Human
uccacagugaggaagcagg

SEQ ID NO: 252888 - RNA, 21 nt, Human
uccacagugaggaagcaggac

SEQ ID NO: 252889 - RNA, 24 nt, Human
uccaggggaggaaaggugccugag

SEQ ID NO: 252890 - RNA, 25 nt, Human
uccucugcucccucauguggcuaau

SEQ ID NO: 252891 - RNA, 18 nt, Human
uccuggcugucagcuguu

SEQ ID NO: 252892 - RNA, 19 nt, Human
ucucggaagaggccugggg

SEQ ID NO: 252893 - RNA, 18 nt, Human
ugaagccaguucauucag

SEQ ID NO: 252894 - RNA, 19 nt, Human
ugagagcagcccagaggag

SEQ ID NO: 252895 - RNA, 21 nt, Human
ugagagcagcccagaggagug

SEQ ID NO: 252896 - RNA, 23 nt, Human
ugaggugggcugggguuccacgg

SEQ ID NO: 252897 - RNA, 19 nt, Human
ugcaccugacuccaggugu

SEQ ID NO: 252898 - RNA, 24 nt, Human
ugcaccugacuccagguguaauuu

SEQ ID NO: 252899 - RNA, 25 nt, Human
uggcauagagcuucaggggcuggga

SEQ ID NO: 252900 - RNA, 21 nt, Human
uggcuaaaccucucaacaccc

SEQ ID NO: 252901 - RNA, 18 nt, Human
ugggagaguggcuccugg

SEQ ID NO: 252902 - RNA, 20 nt, Human
ugggagggaugcugaagaug

SEQ ID NO: 252903 - RNA, 21 nt, Human
ugggaugggccaucaggggaa

SEQ ID NO: 252904 - RNA, 22 nt, Human
uggugugcgguagcuguguucu

SEQ ID NO: 252905 - RNA, 20 nt, Human
uguaaggaguuggugcucgg

SEQ ID NO: 252906 - RNA, 19 nt, Human
uguggcauggcugagagcc

SEQ ID NO: 252907 - RNA, 18 nt, Human
uucagucccuacccacuc

SEQ ID NO: 252908 - RNA, 23 nt, Human
uuggcuguggcuguuucagggug

SEQ ID NO: 252909 - RNA, 21 nt, Human
uuggugcucgggaaucagcag

SEQ ID NO: 252910 - RNA, 21 nt, Human
uuuauugagaccuucaguccc

SEQ ID NO: 252911 - RNA, 23 nt, Human
aaccacacgcccuacuuugcccu

SEQ ID NO: 252912 - RNA, 19 nt, Human
aacccaugccggcuccucu

SEQ ID NO: 252913 - RNA, 22 nt, Human
aagaggcagcgggcccauggaa

SEQ ID NO: 252914 - RNA, 21 nt, Human
aagccagcaugagggccccaa

SEQ ID NO: 252915 - RNA, 25 nt, Human
aaggggcaagagaggcaaccaggga

SEQ ID NO: 252916 - RNA, 19 nt, Human
acacgcaccugggaucggc

SEQ ID NO: 252917 - RNA, 22 nt, Human
acaggacagugaggacuggggg

SEQ ID NO: 252918 - RNA, 27 nt, Human
acccgccccacccccuucugugucgcu

SEQ ID NO: 252919 - RNA, 21 nt, Human
acccuccccuuccccaguccc

SEQ ID NO: 252920 - RNA, 22 nt, Human
agacccgccccacccccuucug

SEQ ID NO: 252921 - RNA, 18 nt, Human
agagggagggagggguga

SEQ ID NO: 252922 - RNA, 20 nt, Human
aggaagaccuggggguggca

SEQ ID NO: 252923 - RNA, 18 nt, Human
aggacaaggggcaagaga

SEQ ID NO: 252924 - RNA, 24 nt, Human
aggcaaccagggagacaaggggaa

SEQ ID NO: 252925 - RNA, 23 nt, Human
aggcagcgggcccauggaaagca

SEQ ID NO: 252926 - RNA, 22 nt, Human
agggaggggugacuguguggug

SEQ ID NO: 252927 - RNA, 22 nt, Human
aggggcuggggcagggcccgug

SEQ ID NO: 252928 - RNA, 22 nt, Human
agguggagggugggaaagaggg

SEQ ID NO: 252929 - RNA, 18 nt, Human
augugugagagaggggcu

SEQ ID NO: 252930 - RNA, 21 nt, Human
caaacgcccacccugccaacc

SEQ ID NO: 252931 - RNA, 23 nt, Human
ccacagcaguuguggcacauggu

SEQ ID NO: 252932 - RNA, 22 nt, Human
ccagcaugagggccccaaacgc

SEQ ID NO: 252933 - RNA, 21 nt, Human
ccaguccccagcccuauggug

SEQ ID NO: 252934 - RNA, 22 nt, Human
ccauagacccgccccacccccu

SEQ ID NO: 252935 - RNA, 22 nt, Human
ccccaaacgcccacccugccaa

SEQ ID NO: 252936 - RNA, 24 nt, Human
ccccaguccccagcccuaugguga

SEQ ID NO: 252937 - RNA, 22 nt, Human
cccgugagagguggaggguggg

SEQ ID NO: 252938 - RNA, 19 nt, Human
cccuuuccuguccauccca

SEQ ID NO: 252939 - RNA, 22 nt, Human
ccgugagagguggaggguggga

SEQ ID NO: 252940 - RNA, 18 nt, Human
ccuauggugauuuaaagg

SEQ ID NO: 252941 - RNA, 18 nt, Human
ccuccccuuccccagucc

SEQ ID NO: 252942 - RNA, 20 nt, Human
ccucgcucccuuucucccca

SEQ ID NO: 252943 - RNA, 26 nt, Human
ccucugaacacccuccccuuccccag

SEQ ID NO: 252944 - RNA, 18 nt, Human
ccuggggcuuccgggccu

SEQ ID NO: 252945 - RNA, 27 nt, Human
cuacuuugcccuuuccuguccauccca

SEQ ID NO: 252946 - RNA, 20 nt, Human
cucagugccuaagaaaacag

SEQ ID NO: 252947 - RNA, 18 nt, Human
cuccucugaccucgcucc

SEQ ID NO: 252948 - RNA, 21 nt, Human
cugaacacccuccccuucccc

SEQ ID NO: 252949 - RNA, 18 nt, Human
cuggggguggcagguggc

SEQ ID NO: 252950 - RNA, 20 nt, Human
gacccgccccacccccuucu

SEQ ID NO: 252951 - RNA, 18 nt, Human
gagacagagacacacgca

SEQ ID NO: 252952 - RNA, 20 nt, Human
gcaagagaggcaaccaggga

SEQ ID NO: 252953 - RNA, 24 nt, Human
gccaagaggcagcgggcccaugga

SEQ ID NO: 252954 - RNA, 18 nt, Human
gccucugaacacccuccc

SEQ ID NO: 252955 - RNA, 20 nt, Human
gccucugaacacccuccccu

SEQ ID NO: 252956 - RNA, 19 nt, Human
gcuaggagagacagagaca

SEQ ID NO: 252957 - RNA, 19 nt, Human
ggaaagcaggaagaccugg

SEQ ID NO: 252958 - RNA, 18 nt, Human
ggaaugggcacgcugggc

SEQ ID NO: 252959 - RNA, 21 nt, Human
ggcuccucugaccucgcuccc

SEQ ID NO: 252960 - RNA, 21 nt, Human
gggaggggugacuguguggug

SEQ ID NO: 252961 - RNA, 18 nt, Human
gggcugagaagccaagag

SEQ ID NO: 252962 - RNA, 20 nt, Human
gggcuggggcagggcccguc

SEQ ID NO: 252963 - RNA, 25 nt, Human
gggcuggggcagggcccgugagagg

SEQ ID NO: 252964 - RNA, 19 nt, Human
gggcuucaggacaaggggc

SEQ ID NO: 252965 - RNA, 23 nt, Human
ggggaagugucuuggggacagaa

SEQ ID NO: 252966 - RNA, 18 nt, Human
ggggacggggcuuagggg

SEQ ID NO: 252967 - RNA, 22 nt, Human
ggggacggggcuuaggggcugg

SEQ ID NO: 252968 - RNA, 26 nt, Human
uaccccagggccgacgcagggccgac

SEQ ID NO: 252969 - RNA, 19 nt, Human
uaggagagacagagacaca

SEQ ID NO: 252970 - RNA, 24 nt, Human
ucaggacaaggggcaagagaggca

SEQ ID NO: 252971 - RNA, 27 nt, Human
ucagugccuaagaaaacaggacaguga

SEQ ID NO: 252972 - RNA, 25 nt, Human
uccccauagacccgccccacccccu

SEQ ID NO: 252973 - RNA, 23 nt, Human
ucccucagugccuaagaaaacag

SEQ ID NO: 252974 - RNA, 21 nt, Human
ucugaccucgcucccuuucuc

SEQ ID NO: 252975 - RNA, 23 nt, Human
ucugaccucgcucccuuucuccc

SEQ ID NO: 252976 - RNA, 26 nt, Human
ugaacacccuccccuuccccaguccc

SEQ ID NO: 252977 - RNA, 19 nt, Human
ugacugugugguggugcug

SEQ ID NO: 252978 - RNA, 24 nt, Human
ugagagguggagggugggaaagag

SEQ ID NO: 252979 - RNA, 19 nt, Human
ugagggccccaaacgccca

SEQ ID NO: 252980 - RNA, 22 nt, Human
ugaugugugagagaggggcuag

SEQ ID NO: 252981 - RNA, 20 nt, Human
ugccucugaacacccucccc

SEQ ID NO: 252982 - RNA, 19 nt, Human
uggaaagcaggaagaccug

SEQ ID NO: 252983 - RNA, 20 nt, Human
uggaagcugccuguguccuc

SEQ ID NO: 252984 - RNA, 21 nt, Human
uggaagcugccuguguccucu

SEQ ID NO: 252985 - RNA, 23 nt, Human
uggaagcugccuguguccucugg

SEQ ID NO: 252986 - RNA, 20 nt, Human
uggagggugggaaagaggga

SEQ ID NO: 252987 - RNA, 21 nt, Human
uggagggugggaaagagggag

SEQ ID NO: 252988 - RNA, 19 nt, Human
uggcacaugguaccccagg

SEQ ID NO: 252989 - RNA, 22 nt, Human
ugggaaagagggagggaggggu

SEQ ID NO: 252990 - RNA, 18 nt, Human
uguccaucccagaccuac

SEQ ID NO: 252991 - RNA, 18 nt, Human
uucuugaggccaccaugg

SEQ ID NO: 252992 - RNA, 24 nt, Human
uuggaagcugccuguguccucugg

SEQ ID NO: 252993 - RNA, 23 nt, Human
uuuaaaggggcugagaagccaag

SEQ ID NO: 252994 - RNA, 21 nt, Human
aaagcuauuuuaaaacaaaac

SEQ ID NO: 252995 - RNA, 23 nt, Human
aaaguccugucacuucccugcuu

SEQ ID NO: 252996 - RNA, 21 nt, Human
aacauggugagacccccaucc

SEQ ID NO: 252997 - RNA, 24 nt, Human
aagcugccaggugcacgccuguca

SEQ ID NO: 252998 - RNA, 22 nt, Human
acacuuugaaaaagcugccagg

SEQ ID NO: 252999 - RNA, 24 nt, Human
accuuaagacaaggaggaaaaaaa

SEQ ID NO: 253000 - RNA, 20 nt, Human
acuuugaaaaagcugccagg

SEQ ID NO: 253001 - RNA, 22 nt, Human
agccugggcaacauggugagac

SEQ ID NO: 253002 - RNA, 23 nt, Human
agccugggcaacauggugagacc

SEQ ID NO: 253003 - RNA, 24 nt, Human
agccugggcaacauggugagaccc

SEQ ID NO: 253004 - RNA, 22 nt, Human
agcucuggggcggggcggccgg

SEQ ID NO: 253005 - RNA, 22 nt, Human
aggaaaaaaaccucuacaagga

SEQ ID NO: 253006 - RNA, 22 nt, Human
aggaggaaaaaaaccucuacaa

SEQ ID NO: 253007 - RNA, 23 nt, Human
aucguuuaggaaaacucccuaaa

SEQ ID NO: 253008 - RNA, 21 nt, Human
auuugccuucccacagacaaa

SEQ ID NO: 253009 - RNA, 18 nt, Human
caaaggcaucauuuaggu

SEQ ID NO: 253010 - RNA, 19 nt, Human
caacauggugagaccccca

SEQ ID NO: 253011 - RNA, 21 nt, Human
caacauggugagacccccauc

SEQ ID NO: 253012 - RNA, 23 nt, Human
caacauggugagacccccauccc

SEQ ID NO: 253013 - RNA, 19 nt, Human
cacccgcaccagagugauc

SEQ ID NO: 253014 - RNA, 19 nt, Human
cacgccugucaucccagcu

SEQ ID NO: 253015 - RNA, 26 nt, Human
cacucccgcuucuccucagccaagaa

SEQ ID NO: 253016 - RNA, 19 nt, Human
caggugcacgccugucauc

SEQ ID NO: 253017 - RNA, 24 nt, Human
cauggugagacccccaucccaaaa

SEQ ID NO: 253018 - RNA, 23 nt, Human
ccaaacacccgcaccagagugau

SEQ ID NO: 253019 - RNA, 22 nt, Human
ccacauaacaauauuuuuauga

SEQ ID NO: 253020 - RNA, 23 nt, Human
cccacauaacaauauuuuuauga

SEQ ID NO: 253021 - RNA, 23 nt, Human
ccugggcaacauggugagacccc

SEQ ID NO: 253022 - RNA, 25 nt, Human
ccugggcaacauggugagaccccca

SEQ ID NO: 253023 - RNA, 31 nt, Human
ccuucccacagacaaaggcaucauuuagguu

SEQ ID NO: 253024 - RNA, 22 nt, Human
ccuuugguuagagcucuggggc

SEQ ID NO: 253025 - RNA, 20 nt, Human
cgaggagguccgcagcagcc

SEQ ID NO: 253026 - RNA, 18 nt, Human
cgccugucaucccagcua

SEQ ID NO: 253027 - RNA, 24 nt, Human
cgccugucaucccagcuacucagg

SEQ ID NO: 253028 - RNA, 21 nt, Human
cuacccccgcuucccaacuuu

SEQ ID NO: 253029 - RNA, 19 nt, Human
cuggcuggggccgggcugg

SEQ ID NO: 253030 - RNA, 23 nt, Human
cuggggccgggcuggggcugggu

SEQ ID NO: 253031 - RNA, 19 nt, Human
cuggggcggggcggccggg

SEQ ID NO: 253032 - RNA, 23 nt, Human
cuuggcucuuaccaaucuuucug

SEQ ID NO: 253033 - RNA, 24 nt, Human
cuuggcucuuaccaaucuuucugu

SEQ ID NO: 253034 - RNA, 23 nt, Human
gccugucaucccagcuacucagg

SEQ ID NO: 253035 - RNA, 18 nt, Human
ggccgggcuggggcuggg

SEQ ID NO: 253036 - RNA, 22 nt, Human
gggcuggggcuggguccggguc

SEQ ID NO: 253037 - RNA, 19 nt, Human
gggguuugagaccagccug

SEQ ID NO: 253038 - RNA, 22 nt, Human
gggguuugagaccagccugggc

SEQ ID NO: 253039 - RNA, 21 nt, Human
uaaaaaaugacucccuuagau

SEQ ID NO: 253040 - RNA, 20 nt, Human
uaaaacaaaaccaaacaccc

SEQ ID NO: 253041 - RNA, 21 nt, Human
uaaaacaaaaccaaacacccg

SEQ ID NO: 253042 - RNA, 22 nt, Human
uaaaacaaaaccaaacacccgc

SEQ ID NO: 253043 - RNA, 20 nt, Human
uaggugcuuccaucagccac

SEQ ID NO: 253044 - RNA, 24 nt, Human
uaugaccuuaagacaaggaggaaa

SEQ ID NO: 253045 - RNA, 18 nt, Human
ucagccaagaacaaugaa

SEQ ID NO: 253046 - RNA, 21 nt, Human
ucagccacucccgcuucuccu

SEQ ID NO: 253047 - RNA, 20 nt, Human
ucccacauaacaauauuuuu

SEQ ID NO: 253048 - RNA, 24 nt, Human
uccccgggcgggcaucggagcucu

SEQ ID NO: 253049 - RNA, 22 nt, Human
ucuacaaggaaauaggaagaaa

SEQ ID NO: 253050 - RNA, 21 nt, Human
ugcaaagcuauuuuaaaacaa

SEQ ID NO: 253051 - RNA, 20 nt, Human
ugcuuccaucagccacuccc

SEQ ID NO: 253052 - RNA, 25 nt, Human
uggcuggggccgggcuggggcuggg

SEQ ID NO: 253053 - RNA, 21 nt, Human
uggggccgggcuggggcuggg

SEQ ID NO: 253054 - RNA, 21 nt, Human
uggggguuugagaccagccug

SEQ ID NO: 253055 - RNA, 22 nt, Human
uguaguccuacccccgcuuccc

SEQ ID NO: 253056 - RNA, 18 nt, Human
uuaagacaaggaggaaaa

SEQ ID NO: 253057 - RNA, 22 nt, Human
uucaguguaguccuacccccgc

SEQ ID NO: 253058 - RNA, 20 nt, Human
uuuuuuuuuuuuuuucccac

SEQ ID NO: 253059 - RNA, 19 nt, Human
aaccuuugcccagcaguuc

SEQ ID NO: 253060 - RNA, 21 nt, Human
aaggagcuuugggagacuggu

SEQ ID NO: 253061 - RNA, 22 nt, Human
acaaaaucugguccuguucgca

SEQ ID NO: 253062 - RNA, 20 nt, Human
acagcucagcccccaaaucc

SEQ ID NO: 253063 - RNA, 21 nt, Human
acccagaagucucugcccaac

SEQ ID NO: 253064 - RNA, 25 nt, Human
accuuccccagaaacaucucuauug

SEQ ID NO: 253065 - RNA, 23 nt, Human
accuuugcccagcaguucaggau

SEQ ID NO: 253066 - RNA, 22 nt, Human
acugagagacauuagccagggc

SEQ ID NO: 253067 - RNA, 21 nt, Human
agacagggaggggaagcuggu

SEQ ID NO: 253068 - RNA, 21 nt, Human
agagacauuagccagggccaa

SEQ ID NO: 253069 - RNA, 22 nt, Human
agccaaggcacacccagaaguc

SEQ ID NO: 253070 - RNA, 23 nt, Human
agccaaggcacacccagaagucu

SEQ ID NO: 253071 - RNA, 19 nt, Human
agcucagcccccaaauccc

SEQ ID NO: 253072 - RNA, 20 nt, Human
aggaccccugagccccagcc

SEQ ID NO: 253073 - RNA, 22 nt, Human
aggagcuuugggagacugguug

SEQ ID NO: 253074 - RNA, 19 nt, Human
aggcaaaagucuggcaggc

SEQ ID NO: 253075 - RNA, 19 nt, Human
aggcaaaagucuggcaggc

SEQ ID NO: 253076 - RNA, 21 nt, Human
agggacccacagugccaccuu

SEQ ID NO: 253077 - RNA, 21 nt, Human
caaccacccgaaggcccugcc

SEQ ID NO: 253078 - RNA, 19 nt, Human
caagacacuugccagggac

SEQ ID NO: 253079 - RNA, 20 nt, Human
caaggcacacccagaagucu

SEQ ID NO: 253080 - RNA, 21 nt, Human
caagguggcugccccagaucc

SEQ ID NO: 253081 - RNA, 18 nt, Human
caagugcccccugcccuu

SEQ ID NO: 253082 - RNA, 22 nt, Human
cagacagggaggggaagcuggu

SEQ ID NO: 253083 - RNA, 22 nt, Human
cagaccccacccagaggccaug

SEQ ID NO: 253084 - RNA, 19 nt, Human
cagaggcaaaagucuggca

SEQ ID NO: 253085 - RNA, 23 nt, Human
cagauccugggcuugccaaccac

SEQ ID NO: 253086 - RNA, 25 nt, Human
cagcagaggcaaaagucuggcaggc

SEQ ID NO: 253087 - RNA, 21 nt, Human
cagcccccaaaucccaaccag

SEQ ID NO: 253088 - RNA, 21 nt, Human
cagcucaagugcccccugccc

SEQ ID NO: 253089 - RNA, 20 nt, Human
caggaagauggggagugggc

SEQ ID NO: 253090 - RNA, 24 nt, Human
cagggacugccuaucacaagacac

SEQ ID NO: 253091 - RNA, 21 nt, Human
cagugccaauugccacucaga

SEQ ID NO: 253092 - RNA, 23 nt, Human
ccaaccagacagggaggggaagc

SEQ ID NO: 253093 - RNA, 19 nt, Human
ccaccaccugguccaccug

SEQ ID NO: 253094 - RNA, 20 nt, Human
ccaccuugggagccaaggca

SEQ ID NO: 253095 - RNA, 18 nt, Human
ccagccaucacacccaca

SEQ ID NO: 253096 - RNA, 21 nt, Human
ccagcucaagugcccccugcc

SEQ ID NO: 253097 - RNA, 24 nt, Human
cccagcccagcucaagugcccccu

SEQ ID NO: 253098 - RNA, 26 nt, Human
cccagcucaagugcccccugcccuuu

SEQ ID NO: 253099 - RNA, 20 nt, Human
ccccagacagcucagccccc

SEQ ID NO: 253100 - RNA, 21 nt, Human
ccccagacagcucagccccca

SEQ ID NO: 253101 - RNA, 25 nt, Human
ccccagauccagccaucacacccac

SEQ ID NO: 253102 - RNA, 24 nt, Human
ccccaggggaaugacugagagaca

SEQ ID NO: 253103 - RNA, 23 nt, Human
cccccaaaucccaaccagacagg

SEQ ID NO: 253104 - RNA, 22 nt, Human
cccccugcccuuuuucaauuca

SEQ ID NO: 253105 - RNA, 20 nt, Human
ccccugagccccagcccagc

SEQ ID NO: 253106 - RNA, 22 nt, Human
ccccugagccccagcccagcuc

SEQ ID NO: 253107 - RNA, 21 nt, Human
ccccuggagccucucuggccc

SEQ ID NO: 253108 - RNA, 21 nt, Human
cccugagccccagcccagcuc

SEQ ID NO: 253109 - RNA, 21 nt, Human
cccuggagccucucuggccac

SEQ ID NO: 253110 - RNA, 23 nt, Human
cccuggagccucucuggccacca

SEQ ID NO: 253111 - RNA, 23 nt, Human
cccugggcugucuaacucaccuc

SEQ ID NO: 253112 - RNA, 24 nt, Human
ccuaacagcaagaaaggcugggaa

SEQ ID NO: 253113 - RNA, 18 nt, Human
ccucucuggccaccaccu

SEQ ID NO: 253114 - RNA, 20 nt, Human
ccugggaccccagacagcuc

SEQ ID NO: 253115 - RNA, 20 nt, Human
ccugggcuugccaaccaccc

SEQ ID NO: 253116 - RNA, 21 nt, Human
ccugguccaccugguccccug

SEQ ID NO: 253117 - RNA, 22 nt, Human
cggccagaccccacccagaggc

SEQ ID NO: 253118 - RNA, 23 nt, Human
cggccagaccccacccagaggcc

SEQ ID NO: 253119 - RNA, 22 nt, Human
cuaacucaccucccaggggccu

SEQ ID NO: 253120 - RNA, 19 nt, Human
cuagccccuggagccucuc

SEQ ID NO: 253121 - RNA, 18 nt, Human
cuccagcagaggcaaaag

SEQ ID NO: 253122 - RNA, 21 nt, Human
cugagagacauuagccagggc

SEQ ID NO: 253123 - RNA, 19 nt, Human
cugccuaaaggguuaggac

SEQ ID NO: 253124 - RNA, 24 nt, Human
cuucaugguagcaagguggcugcc

SEQ ID NO: 253125 - RNA, 23 nt, Human
cuugccagggacccacagugcca

SEQ ID NO: 253126 - RNA, 18 nt, Human
cuuggccuuuccuucaug

SEQ ID NO: 253127 - RNA, 19 nt, Human
gcaaaaccuuccccagaaa

SEQ ID NO: 253128 - RNA, 18 nt, Human
gccaaggcacacccagaa

SEQ ID NO: 253129 - RNA, 22 nt, Human
gcccccugcccuuuuucaauuc

SEQ ID NO: 253130 - RNA, 21 nt, Human
gccccuggagccucucuggcc

SEQ ID NO: 253131 - RNA, 24 nt, Human
gcucagcccccaaaucccaaccag

SEQ ID NO: 253132 - RNA, 21 nt, Human
gcugggacccguuaugcucca

SEQ ID NO: 253133 - RNA, 21 nt, Human
ggaaaugagcaaaaaggauca

SEQ ID NO: 253134 - RNA, 22 nt, Human
ggaagagguaggagcugaggcu

SEQ ID NO: 253135 - RNA, 19 nt, Human
ggacacagaugagggaggc

SEQ ID NO: 253136 - RNA, 20 nt, Human
ggaccccugagccccagccc

SEQ ID NO: 253137 - RNA, 24 nt, Human
ggagcuuugggagacugguuggca

SEQ ID NO: 253138 - RNA, 21 nt, Human
ggcuggcaaggagggaagagg

SEQ ID NO: 253139 - RNA, 22 nt, Human
gggaagagguaggagcugaggc

SEQ ID NO: 253140 - RNA, 20 nt, Human
ggguggggagcaaggagcuu

SEQ ID NO: 253141 - RNA, 19 nt, Human
uagcaagguggcugcccca

SEQ ID NO: 253142 - RNA, 20 nt, Human
uaugcuccaucaucugggcc

SEQ ID NO: 253143 - RNA, 20 nt, Human
ucagcccccaaaucccaacc

SEQ ID NO: 253144 - RNA, 23 nt, Human
ucagcccccaaaucccaaccaga

SEQ ID NO: 253145 - RNA, 21 nt, Human
ucaggaacucgggacacagau

SEQ ID NO: 253146 - RNA, 19 nt, Human
ucccaggggccuggggugc

SEQ ID NO: 253147 - RNA, 24 nt, Human
uccccagaaacaucucuauuggau

SEQ ID NO: 253148 - RNA, 28 nt, Human
uccccagaaacaucucuauuggauuugc

SEQ ID NO: 253149 - RNA, 21 nt, Human
ucucuauuggauuugcuuagu

SEQ ID NO: 253150 - RNA, 18 nt, Human
ucucuggccaccaccugg

SEQ ID NO: 253151 - RNA, 21 nt, Human
ucucuggccaccaccuggucc

SEQ ID NO: 253152 - RNA, 20 nt, Human
ugagccccagcccagcucaa

SEQ ID NO: 253153 - RNA, 21 nt, Human
ugagccccaggggaaugacug

SEQ ID NO: 253154 - RNA, 21 nt, Human
ugaggcucuggacccagaggc

SEQ ID NO: 253155 - RNA, 20 nt, Human
ugagggaggcaggagugggc

SEQ ID NO: 253156 - RNA, 19 nt, Human
ugccacucagauccugggc

SEQ ID NO: 253157 - RNA, 18 nt, Human
ugccagggacccacagug

SEQ ID NO: 253158 - RNA, 24 nt, Human
ugccagggacccacagugccaccu

SEQ ID NO: 253159 - RNA, 21 nt, Human
ugccccagauccagccaucac

SEQ ID NO: 253160 - RNA, 23 nt, Human
ugccccagauccagccaucacac

SEQ ID NO: 253161 - RNA, 22 nt, Human
ugcugcagacccuggauucugc

SEQ ID NO: 253162 - RNA, 18 nt, Human
ugcuggagggaauagcug

SEQ ID NO: 253163 - RNA, 22 nt, Human
uggagggaauagcuguggauga

SEQ ID NO: 253164 - RNA, 22 nt, Human
uggcaggcaucaggggcuggca

SEQ ID NO: 253165 - RNA, 20 nt, Human
uggcccugggaccccagaca

SEQ ID NO: 253166 - RNA, 25 nt, Human
ugggaccccagacagcucagccccc

SEQ ID NO: 253167 - RNA, 23 nt, Human
ugggccccggcaugcugaggcuc

SEQ ID NO: 253168 - RNA, 23 nt, Human
ugguccuguucgcaagggguggg

SEQ ID NO: 253169 - RNA, 24 nt, Human
ugguccuguucgcaaggggugggg

SEQ ID NO: 253170 - RNA, 23 nt, Human
ugucccuucaggaacucgggaca

SEQ ID NO: 253171 - RNA, 29 nt, Human
uucagugccaauugccacucagauccugg

SEQ ID NO: 253172 - RNA, 21 nt, Human
uugucuuggccuuuccuucau

SEQ ID NO: 253173 - RNA, 18 nt, Human
aaaaagcagauggaaagg

SEQ ID NO: 253174 - RNA, 21 nt, Human
aaaaagcagauggaaagggga

SEQ ID NO: 253175 - RNA, 19 nt, Human
aaaaggucagaaggcaggc

SEQ ID NO: 253176 - RNA, 21 nt, Human
aagaggccuggaugggaagug

SEQ ID NO: 253177 - RNA, 23 nt, Human
agaacuucgagagacggacacac

SEQ ID NO: 253178 - RNA, 24 nt, Human
agacggacacacagggcaccuccu

SEQ ID NO: 253179 - RNA, 19 nt, Human
agagacuugagcugggcac

SEQ ID NO: 253180 - RNA, 18 nt, Human
aggaagagggcaggggcc

SEQ ID NO: 253181 - RNA, 23 nt, Human
aggaagagggcaggggccggcuu

SEQ ID NO: 253182 - RNA, 19 nt, Human
aggacgggcaggaagaggg

SEQ ID NO: 253183 - RNA, 26 nt, Human
aggagggggagagagacuugagcugg

SEQ ID NO: 253184 - RNA, 20 nt, Human
aggcagacagccaguuggau

SEQ ID NO: 253185 - RNA, 20 nt, Human
aggcagggcaguggcagaga

SEQ ID NO: 253186 - RNA, 18 nt, Human
agggagggugguaggguc

SEQ ID NO: 253187 - RNA, 22 nt, Human
agggcaggggccggcuucaggg

SEQ ID NO: 253188 - RNA, 21 nt, Human
aggucagaaggcaggcgaugg

SEQ ID NO: 253189 - RNA, 23 nt, Human
cacaugaauagaugcucaguaca

SEQ ID NO: 253190 - RNA, 22 nt, Human
cagagaccaaggaccagacccc

SEQ ID NO: 253191 - RNA, 24 nt, Human
caggaaggagcagggaggguggua

SEQ ID NO: 253192 - RNA, 21 nt, Human
cagggagggugguaggguccc

SEQ ID NO: 253193 - RNA, 18 nt, Human
cagggcaguggcagagac

SEQ ID NO: 253194 - RNA, 23 nt, Human
cagggcaguggcagagaccaagg

SEQ ID NO: 253195 - RNA, 20 nt, Human
caguggcagagaccaaggac

SEQ ID NO: 253196 - RNA, 20 nt, Human
cauuuuuguugaaucaagga

SEQ ID NO: 253197 - RNA, 21 nt, Human
ccaagacccccaagggcccac

SEQ ID NO: 253198 - RNA, 21 nt, Human
ccagggccagaggagaggcag

SEQ ID NO: 253199 - RNA, 20 nt, Human
cccaagacccccaagggccc

SEQ ID NO: 253200 - RNA, 24 nt, Human
cccaagacccccaagggcccacuc

SEQ ID NO: 253201 - RNA, 23 nt, Human
ccuccuguucccagggccagagg

SEQ ID NO: 253202 - RNA, 20 nt, Human
ccugcugaugcuccuuccuu

SEQ ID NO: 253203 - RNA, 19 nt, Human
cugaccggcaaaagaggac

SEQ ID NO: 253204 - RNA, 23 nt, Human
cugccaggcuagaccaguucuug

SEQ ID NO: 253205 - RNA, 21 nt, Human
cugugacagcccaagaccccc

SEQ ID NO: 253206 - RNA, 19 nt, Human
gacaggggccugccacaug

SEQ ID NO: 253207 - RNA, 20 nt, Human
gaccccauuucagggagaaa

SEQ ID NO: 253208 - RNA, 20 nt, Human
gagggggagagagacuugag

SEQ ID NO: 253209 - RNA, 26 nt, Human
gcacaaggcucugcauggcuuucugg

SEQ ID NO: 253210 - RNA, 20 nt, Human
gcaguggcagagaccaagga

SEQ ID NO: 253211 - RNA, 20 nt, Human
gcccaagacccccaagggcc

SEQ ID NO: 253212 - RNA, 23 nt, Human
gcccaagacccccaagggcccac

SEQ ID NO: 253213 - RNA, 20 nt, Human
gcccugaccggcaaaagagg

SEQ ID NO: 253214 - RNA, 23 nt, Human
ggcaggaagagggcaggggccgg

SEQ ID NO: 253215 - RNA, 20 nt, Human
ggcaggggccggcuucaggg

SEQ ID NO: 253216 - RNA, 21 nt, Human
ggcgauggagaagcugaaaaa

SEQ ID NO: 253217 - RNA, 18 nt, Human
gggggagaaaggaggggg

SEQ ID NO: 253218 - RNA, 22 nt, Human
gggggagagagacuugagcugg

SEQ ID NO: 253219 - RNA, 25 nt, Human
guuuagggggagaaaggagggggag

SEQ ID NO: 253220 - RNA, 21 nt, Human
uagggucccaugagccccagc

SEQ ID NO: 253221 - RNA, 21 nt, Human
ucaaggaaaaggucagaaggc

SEQ ID NO: 253222 - RNA, 21 nt, Human
ucagaaggcaggcgauggaga

SEQ ID NO: 253223 - RNA, 19 nt, Human
ucccccucccugggagccc

SEQ ID NO: 253224 - RNA, 19 nt, Human
uccccugcgugccagcccu

SEQ ID NO: 253225 - RNA, 19 nt, Human
ucccugggagccccagaga

SEQ ID NO: 253226 - RNA, 21 nt, Human
uccgguggcacaguguggggc

SEQ ID NO: 253227 - RNA, 22 nt, Human
uccuguucccagggccagagga

SEQ ID NO: 253228 - RNA, 22 nt, Human
uccuuuguuccccugcgugcca

SEQ ID NO: 253229 - RNA, 19 nt, Human
ucuagaggcagacagccag

SEQ ID NO: 253230 - RNA, 23 nt, Human
ugaaaaagcagauggaaagggga

SEQ ID NO: 253231 - RNA, 22 nt, Human
ugaaucaaggaaaaggucagaa

SEQ ID NO: 253232 - RNA, 19 nt, Human
ugacagcccaagaccccca

SEQ ID NO: 253233 - RNA, 23 nt, Human
ugaggacuucucuucccccuccc

SEQ ID NO: 253234 - RNA, 23 nt, Human
ugcauggcuuucuggagucccug

SEQ ID NO: 253235 - RNA, 18 nt, Human
ugccaggcuagaccaguu

SEQ ID NO: 253236 - RNA, 20 nt, Human
uggaaaggggaagaggccug

SEQ ID NO: 253237 - RNA, 20 nt, Human
uggaaaggggaagaggccug

SEQ ID NO: 253238 - RNA, 19 nt, Human
uggagaagcugaaaaagca

SEQ ID NO: 253239 - RNA, 23 nt, Human
ugggaaauaacucguggugucgc

SEQ ID NO: 253240 - RNA, 21 nt, Human
ugggagccccagagaaggaug

SEQ ID NO: 253241 - RNA, 18 nt, Human
uggggccagucagcagcc

SEQ ID NO: 253242 - RNA, 21 nt, Human
uggguagagacccugcugaug

SEQ ID NO: 253243 - RNA, 21 nt, Human
uucuggagucccugugacagc

SEQ ID NO: 253244 - RNA, 21 nt, Human
aaaaauauaaauaucuuuaca

SEQ ID NO: 253245 - RNA, 23 nt, Human
aaaaccaacaagaauuugcuccc

SEQ ID NO: 253246 - RNA, 21 nt, Human
aaaauauauacucccaguaaa

SEQ ID NO: 253247 - RNA, 21 nt, Human
aaacaaacagaugccugcaga

SEQ ID NO: 253248 - RNA, 26 nt, Human
aaaggaaguguuaagcuaaccgaacg

SEQ ID NO: 253249 - RNA, 22 nt, Human
aaaggcaagcagcacaaaacca

SEQ ID NO: 253250 - RNA, 19 nt, Human
aaauuuccagccccaugau

SEQ ID NO: 253251 - RNA, 21 nt, Human
aacauuccauuuauuuacaga

SEQ ID NO: 253252 - RNA, 25 nt, Human
aagaacuagaaaccacuguggagcc

SEQ ID NO: 253253 - RNA, 21 nt, Human
aagaagacaggagauauagaa

SEQ ID NO: 253254 - RNA, 23 nt, Human
aagaagacaggagauauagaaga

SEQ ID NO: 253255 - RNA, 23 nt, Human
aagcagaaaaggaaagagggacc

SEQ ID NO: 253256 - RNA, 18 nt, Human
aagcagcacaaaaccaac

SEQ ID NO: 253257 - RNA, 21 nt, Human
aagggaaccaaccauggaaau

SEQ ID NO: 253258 - RNA, 18 nt, Human
aagugucucuucuggauc

SEQ ID NO: 253259 - RNA, 20 nt, Human
aaugguaucugcagccuucc

SEQ ID NO: 253260 - RNA, 21 nt, Human
acaaacaaacagaugccugca

SEQ ID NO: 253261 - RNA, 26 nt, Human
acaaaguccuucacuuugguauucca

SEQ ID NO: 253262 - RNA, 26 nt, Human
acaagcaaauccugucaaugaagaca

SEQ ID NO: 253263 - RNA, 18 nt, Human
acaagcaagaaaauaacg

SEQ ID NO: 253264 - RNA, 23 nt, Human
acacaaacaaacagaugccugca

SEQ ID NO: 253265 - RNA, 20 nt, Human
accaacaagaauuugcuccc

SEQ ID NO: 253266 - RNA, 21 nt, Human
accaacaagaauuugcuccca

SEQ ID NO: 253267 - RNA, 23 nt, Human
acguuccucaacuccucucacuc

SEQ ID NO: 253268 - RNA, 19 nt, Human
acugcaauuuucagaaguu

SEQ ID NO: 253269 - RNA, 19 nt, Human
acugucucuggucugggga

SEQ ID NO: 253270 - RNA, 21 nt, Human
agaaagggaaccaaccaugga

SEQ ID NO: 253271 - RNA, 24 nt, Human
agaaaucuaugaaaacaacuauac

SEQ ID NO: 253272 - RNA, 18 nt, Human
agaagaaauagcaucacc

SEQ ID NO: 253273 - RNA, 25 nt, Human
agacagaacagggguuacauuccaa

SEQ ID NO: 253274 - RNA, 26 nt, Human
agacaggagauauagaagagggaccc

SEQ ID NO: 253275 - RNA, 22 nt, Human
agagaaaggaggugagaucuau

SEQ ID NO: 253276 - RNA, 21 nt, Human
agagaggaugaggggacccag

SEQ ID NO: 253277 - RNA, 18 nt, Human
agaugccugcagagaaag

SEQ ID NO: 253278 - RNA, 20 nt, Human
agugauucuugacccccuag

SEQ ID NO: 253279 - RNA, 24 nt, Human
auagugaaugaaaccuucaagcac

SEQ ID NO: 253280 - RNA, 19 nt, Human
aucuugugauucaaauacu

SEQ ID NO: 253281 - RNA, 18 nt, Human
augaaaccuucaagcacc

SEQ ID NO: 253282 - RNA, 21 nt, Human
auucauagaucaguucccccu

SEQ ID NO: 253283 - RNA, 24 nt, Human
caaaaugcagcagcuaaaucccag

SEQ ID NO: 253284 - RNA, 18 nt, Human
caaacagaugccugcaga

SEQ ID NO: 253285 - RNA, 19 nt, Human
caacacaagcaaauccugu

SEQ ID NO: 253286 - RNA, 20 nt, Human
caacacaagcaaauccuguc

SEQ ID NO: 253287 - RNA, 22 nt, Human
cacaaacaaacagaugccugca

SEQ ID NO: 253288 - RNA, 19 nt, Human
cacaguaucuuggggguua

SEQ ID NO: 253289 - RNA, 22 nt, Human
cagaauagugauucuugacccc

SEQ ID NO: 253290 - RNA, 23 nt, Human
cagaauuucagaguacuucuuau

SEQ ID NO: 253291 - RNA, 22 nt, Human
cagcaccacaagugagguaaca

SEQ ID NO: 253292 - RNA, 24 nt, Human
cagcagcuaaaucccagucuauac

SEQ ID NO: 253293 - RNA, 20 nt, Human
cagcucuuucgcuugugggg

SEQ ID NO: 253294 - RNA, 20 nt, Human
caggugcuggacuccuuggc

SEQ ID NO: 253295 - RNA, 20 nt, Human
caguccuucauauccugaca

SEQ ID NO: 253296 - RNA, 20 nt, Human
cccagcaccacaagugaggu

SEQ ID NO: 253297 - RNA, 22 nt, Human
ccccuuucucccaucauuaucc

SEQ ID NO: 253298 - RNA, 23 nt, Human
cccuaggaguuuccaagagaccc

SEQ ID NO: 253299 - RNA, 19 nt, Human
ccuggauuaaaguacuagc

SEQ ID NO: 253300 - RNA, 24 nt, Human
cucccucuaugccuaccuccaaaa

SEQ ID NO: 253301 - RNA, 19 nt, Human
cucuaaggacaauuauuag

SEQ ID NO: 253302 - RNA, 18 nt, Human
cugacccucaaaagccac

SEQ ID NO: 253303 - RNA, 22 nt, Human
cuuaaaaacauuccauuuauuu

SEQ ID NO: 253304 - RNA, 20 nt, Human
cuuccaccguuuucaaucug

SEQ ID NO: 253305 - RNA, 21 nt, Human
cuugacccccuaggaguuucc

SEQ ID NO: 253306 - RNA, 20 nt, Human
gaaauagcaucaccuaggca

SEQ ID NO: 253307 - RNA, 18 nt, Human
gacuaagcccuccucaaa

SEQ ID NO: 253308 - RNA, 21 nt, Human
gauugaaaaggugagggaaug

SEQ ID NO: 253309 - RNA, 24 nt, Human
gcacggcccaggcacuggaagcuc

SEQ ID NO: 253310 - RNA, 20 nt, Human
gccacugucucuggucuggg

SEQ ID NO: 253311 - RNA, 18 nt, Human
gcucacugucuuccacgu

SEQ ID NO: 253312 - RNA, 24 nt, Human
gcugacccucaaaagccacaaaga

SEQ ID NO: 253313 - RNA, 28 nt, Human
ggagacaggugcuggacuccccaagggg

SEQ ID NO: 253314 - RNA, 24 nt, Human
uaaaagaaaaugcuaaaucugaca

SEQ ID NO: 253315 - RNA, 21 nt, Human
uaacacauuuuaacaugauca

SEQ ID NO: 253316 - RNA, 23 nt, Human
uaacagaaagggaaccaaccaug

SEQ ID NO: 253317 - RNA, 21 nt, Human
uaauggaucacaucuucuuag

SEQ ID NO: 253318 - RNA, 19 nt, Human
uacaguuucagaauaguga

SEQ ID NO: 253319 - RNA, 21 nt, Human
uaccuggauuaaaguacuagc

SEQ ID NO: 253320 - RNA, 21 nt, Human
uagcugucucuugaguaacgu

SEQ ID NO: 253321 - RNA, 20 nt, Human
uaggauaugaaaaaagaaaa

SEQ ID NO: 253322 - RNA, 19 nt, Human
uaggcacggcccaggcacu

SEQ ID NO: 253323 - RNA, 19 nt, Human
uaguucuaagaggucuuga

SEQ ID NO: 253324 - RNA, 21 nt, Human
uauaguguuagggugagagcu

SEQ ID NO: 253325 - RNA, 21 nt, Human
uaucuugugauucaaauacug

SEQ ID NO: 253326 - RNA, 28 nt, Human
uauucuucuuaaaaaaaaaaaaaaaaaa

SEQ ID NO: 253327 - RNA, 23 nt, Human
ucaaugcccacaaaaauaauaag

SEQ ID NO: 253328 - RNA, 23 nt, Human
ucaccaaacuucuguucuuagau

SEQ ID NO: 253329 - RNA, 21 nt, Human
uccaagagaccccucaagugc

SEQ ID NO: 253330 - RNA, 19 nt, Human
uccaaucaagaaucauuac

SEQ ID NO: 253331 - RNA, 21 nt, Human
ucccacugcaauuuucagaag

SEQ ID NO: 253332 - RNA, 21 nt, Human
ucccucauuuccaucuucgua

SEQ ID NO: 253333 - RNA, 18 nt, Human
ucccucuaugccuaccuc

SEQ ID NO: 253334 - RNA, 20 nt, Human
ucccugacaacaccuaguuc

SEQ ID NO: 253335 - RNA, 22 nt, Human
ucccugacaacaccuaguucua

SEQ ID NO: 253336 - RNA, 22 nt, Human
uccuuagauuuuggacuuaauu

SEQ ID NO: 253337 - RNA, 22 nt, Human
uccuucauauccugacaguuaa

SEQ ID NO: 253338 - RNA, 21 nt, Human
uccuuggguaagaggggcacc

SEQ ID NO: 253339 - RNA, 21 nt, Human
ucuacagaucauuggauccau

SEQ ID NO: 253340 - RNA, 23 nt, Human
ucucuucuggaucccuuugcaca

SEQ ID NO: 253341 - RNA, 24 nt, Human
ucuucuuagagaggaugaggggac

SEQ ID NO: 253342 - RNA, 22 nt, Human
ugaagacagaacagggguuaca

SEQ ID NO: 253343 - RNA, 18 nt, Human
ugaagacuaagcccuccu

SEQ ID NO: 253344 - RNA, 21 nt, Human
ugaaugaaaccuucaagcacc

SEQ ID NO: 253345 - RNA, 22 nt, Human
ugaaugacacaaaguccuucac

SEQ ID NO: 253346 - RNA, 23 nt, Human
ugagaaaucuaugaaaacaacua

SEQ ID NO: 253347 - RNA, 19 nt, Human
ugcagccuucccccuaaaa

SEQ ID NO: 253348 - RNA, 23 nt, Human
ugcuaaaucugacauaauuauau

SEQ ID NO: 253349 - RNA, 21 nt, Human
uggaagggguagggcucccuc

SEQ ID NO: 253350 - RNA, 24 nt, Human
uggaagggguagggcucccucuau

SEQ ID NO: 253351 - RNA, 21 nt, Human
uggaaucaucccucauuucca

SEQ ID NO: 253352 - RNA, 18 nt, Human
ugggauuugggauaaaga

SEQ ID NO: 253353 - RNA, 18 nt, Human
uggguaaagaguggaagg

SEQ ID NO: 253354 - RNA, 21 nt, Human
ugguacugugaaaugagcuuu

SEQ ID NO: 253355 - RNA, 22 nt, Human
ugguaucuccaaucaagaauca

SEQ ID NO: 253356 - RNA, 25 nt, Human
uguaauauucauagaucaguucccc

SEQ ID NO: 253357 - RNA, 23 nt, Human
ugucaguccuucauauccugaca

SEQ ID NO: 253358 - RNA, 23 nt, Human
uguuaauucugauugaaaaggug

SEQ ID NO: 253359 - RNA, 19 nt, Human
uguuauaaauuccuugggu

SEQ ID NO: 253360 - RNA, 20 nt, Human
uuaaaaaaaaaaaaaaaaaa

SEQ ID NO: 253361 - RNA, 30 nt, Human
uuauccacugcaucauugaagucaaggauu

SEQ ID NO: 253362 - RNA, 22 nt, Human
uucaaucuguugauuaccagag

SEQ ID NO: 253363 - RNA, 19 nt, Human
uuggacuuaauucaacagc

SEQ ID NO: 253364 - RNA, 22 nt, Human
uuggauguugaaggcaacaggg

SEQ ID NO: 253365 - RNA, 21 nt, Human
uuugcacaaguccaucgcauu

SEQ ID NO: 253366 - RNA, 20 nt, Human
uuuggacuuaauucaacagc

SEQ ID NO: 253367 - RNA, 24 nt, Human
aaaaauaaauuauuuuuaaccucc

SEQ ID NO: 253368 - RNA, 22 nt, Human
aacagaaauauuucaccaauag

SEQ ID NO: 253369 - RNA, 19 nt, Human
aagcuuucucuuguguauu

SEQ ID NO: 253370 - RNA, 18 nt, Human
aaggcccccagcugcauc

SEQ ID NO: 253371 - RNA, 24 nt, Human
aagggucuugcugcucaggccccu

SEQ ID NO: 253372 - RNA, 25 nt, Human
aaucaggccagaccuuuccccagac

SEQ ID NO: 253373 - RNA, 19 nt, Human
acacugcccacuccccaga

SEQ ID NO: 253374 - RNA, 21 nt, Human
accaguagcccuuuaugcuaa

SEQ ID NO: 253375 - RNA, 21 nt, Human
acgcuccaggacagggcugac

SEQ ID NO: 253376 - RNA, 22 nt, Human
acuaucaucuucuguuucaucu

SEQ ID NO: 253377 - RNA, 21 nt, Human
agaaauauuucaccaauagug

SEQ ID NO: 253378 - RNA, 19 nt, Human
agaagagggaaauguggag

SEQ ID NO: 253379 - RNA, 26 nt, Human
agauaucugcucccguauaggauaug

SEQ ID NO: 253380 - RNA, 24 nt, Human
agaugcugauuagcuucaagaccu

SEQ ID NO: 253381 - RNA, 18 nt, Human
agccaauguccugcccag

SEQ ID NO: 253382 - RNA, 22 nt, Human
agccagcccccagcaguuccuu

SEQ ID NO: 253383 - RNA, 22 nt, Human
aggcaggauaaggcugugucuc

SEQ ID NO: 253384 - RNA, 20 nt, Human
aggcccccagcugcauccag

SEQ ID NO: 253385 - RNA, 23 nt, Human
aggccccugucccuggacuccaa

SEQ ID NO: 253386 - RNA, 24 nt, Human
agggagggugguucagagaggcgu

SEQ ID NO: 253387 - RNA, 26 nt, Human
agucacuaccauacuaaccacacaga

SEQ ID NO: 253388 - RNA, 22 nt, Human
auaugccaaagaggcugaacuu

SEQ ID NO: 253389 - RNA, 18 nt, Human
auguggucaagaggggcu

SEQ ID NO: 253390 - RNA, 21 nt, Human
auuucuggcauuacgcuccag

SEQ ID NO: 253391 - RNA, 18 nt, Human
caaaggauuuguaccagu

SEQ ID NO: 253392 - RNA, 19 nt, Human
caacaacaucaggaaaauc

SEQ ID NO: 253393 - RNA, 24 nt, Human
caagacccucuucuucaagugagu

SEQ ID NO: 253394 - RNA, 25 nt, Human
cacaaaagcaacaucccaggacaca

SEQ ID NO: 253395 - RNA, 20 nt, Human
cacacaaaaaacauauaaca

SEQ ID NO: 253396 - RNA, 23 nt, Human
cacagagugcuuauccacgucaa

SEQ ID NO: 253397 - RNA, 19 nt, Human
caccuauaaccaauuaggu

SEQ ID NO: 253398 - RNA, 18 nt, Human
cacggcuucguauguggg

SEQ ID NO: 253399 - RNA, 25 nt, Human
cacuaccauacuaaccacacagaga

SEQ ID NO: 253400 - RNA, 22 nt, Human
cagcugaucccaugcggccgug

SEQ ID NO: 253401 - RNA, 21 nt, Human
caucauccaaggcaauuuuga

SEQ ID NO: 253402 - RNA, 23 nt, Human
caucauggacccaguucaucuuc

SEQ ID NO: 253403 - RNA, 23 nt, Human
cauuaauauccacacccguguag

SEQ ID NO: 253404 - RNA, 22 nt, Human
cauuagaaauaagauuuacaca

SEQ ID NO: 253405 - RNA, 21 nt, Human
ccaaugauagacuucuucagc

SEQ ID NO: 253406 - RNA, 24 nt, Human
ccaauguccugcccagcggccaga

SEQ ID NO: 253407 - RNA, 20 nt, Human
ccacagauaucugcucccgu

SEQ ID NO: 253408 - RNA, 21 nt, Human
ccaccuauaaccaauuaggua

SEQ ID NO: 253409 - RNA, 19 nt, Human
ccaggacagggcugaccag

SEQ ID NO: 253410 - RNA, 23 nt, Human
ccaucaaacuucaagcuccucuc

SEQ ID NO: 253411 - RNA, 21 nt, Human
ccccucgcugucccgucaccu

SEQ ID NO: 253412 - RNA, 24 nt, Human
ccgcucccucucugucugaaggau

SEQ ID NO: 253413 - RNA, 22 nt, Human
ccguguugucucccagccaaug

SEQ ID NO: 253414 - RNA, 23 nt, Human
ccuauaaccaacuagcagauguu

SEQ ID NO: 253415 - RNA, 25 nt, Human
ccucccaccgccuauaaccaacuag

SEQ ID NO: 253416 - RNA, 19 nt, Human
ccucuuccaccacuuggca

SEQ ID NO: 253417 - RNA, 21 nt, Human
ccugcagccuggagaaacugc

SEQ ID NO: 253418 - RNA, 21 nt, Human
ccuggagaaacugccccauuc

SEQ ID NO: 253419 - RNA, 19 nt, Human
ccuuguguuugccuuuucu

SEQ ID NO: 253420 - RNA, 22 nt, Human
cucauuaccucuugcagccgcu

SEQ ID NO: 253421 - RNA, 21 nt, Human
cucccagccaauguccugccc

SEQ ID NO: 253422 - RNA, 20 nt, Human
cucuuccuuuuuccucccca

SEQ ID NO: 253423 - RNA, 18 nt, Human
cugacugucuauguccca

SEQ ID NO: 253424 - RNA, 19 nt, Human
cugugucucauugccagaa

SEQ ID NO: 253425 - RNA, 23 nt, Human
cuucaagcuccucucuggauucu

SEQ ID NO: 253426 - RNA, 22 nt, Human
cuuugcuuaucaugcucccccc

SEQ ID NO: 253427 - RNA, 20 nt, Human
cuuuuuccuccccaugaggc

SEQ ID NO: 253428 - RNA, 21 nt, Human
gaaauaugcagugacauuucu

SEQ ID NO: 253429 - RNA, 23 nt, Human
gaagacgucauccuccacgcccc

SEQ ID NO: 253430 - RNA, 21 nt, Human
gacccaguucaucuucaguaa

SEQ ID NO: 253431 - RNA, 21 nt, Human
gaggggcuggcaaggucuucc

SEQ ID NO: 253432 - RNA, 21 nt, Human
gccgcacaacagugacgcccu

SEQ ID NO: 253433 - RNA, 19 nt, Human
gcuuaucaugcucccccca

SEQ ID NO: 253434 - RNA, 19 nt, Human
ggggucauuguugaaggag

SEQ ID NO: 253435 - RNA, 21 nt, Human
ggguaugaacaaauuagcaac

SEQ ID NO: 253436 - RNA, 27 nt, Human
gggugguucagagaggcgucccugcag

SEQ ID NO: 253437 - RNA, 28 nt, Human
guaauagaguccuuucccaaccggaggg

SEQ ID NO: 253438 - RNA, 23 nt, Human
guagcccccacggacaugaagau

SEQ ID NO: 253439 - RNA, 25 nt, Human
gucccgucaccuccugcacggcuuc

SEQ ID NO: 253440 - RNA, 24 nt, Human
guggacauacacacacuucaucau

SEQ ID NO: 253441 - RNA, 23 nt, Human
guucauucauaucaauccacaug

SEQ ID NO: 253442 - RNA, 19 nt, Human
guuucuugagaagggguaa

SEQ ID NO: 253443 - RNA, 25 nt, Human
uaacagaaauauuucaccaauagug

SEQ ID NO: 253444 - RNA, 22 nt, Human
uaggauaugccaaagaggcuga

SEQ ID NO: 253445 - RNA, 22 nt, Human
uaucaugcuccccccaccuaua

SEQ ID NO: 253446 - RNA, 22 nt, Human
uauggcaacaggguguaucugg

SEQ ID NO: 253447 - RNA, 24 nt, Human
uauggcaacaggguguaucugguc

SEQ ID NO: 253448 - RNA, 21 nt, Human
uaugugggucuggucugggac

SEQ ID NO: 253449 - RNA, 25 nt, Human
uauuuuuaugugaaaugugguugua

SEQ ID NO: 253450 - RNA, 19 nt, Human
ucaaacuucaagcuccucu

SEQ ID NO: 253451 - RNA, 18 nt, Human
ucaauguagcccaguuuc

SEQ ID NO: 253452 - RNA, 20 nt, Human
ucacacaaaaaacauauaac

SEQ ID NO: 253453 - RNA, 20 nt, Human
ucaccaguagcccuuuaugc

SEQ ID NO: 253454 - RNA, 22 nt, Human
ucacuaccauacuaaccacaca

SEQ ID NO: 253455 - RNA, 18 nt, Human
ucaggccccugucccugg

SEQ ID NO: 253456 - RNA, 21 nt, Human
uccacgucaaugaaguaaaau

SEQ ID NO: 253457 - RNA, 18 nt, Human
uccaggacagggcugacc

SEQ ID NO: 253458 - RNA, 21 nt, Human
uccaucauuuggguauuugau

SEQ ID NO: 253459 - RNA, 18 nt, Human
uccccagacaaugucucc

SEQ ID NO: 253460 - RNA, 20 nt, Human
ucccugcagccuggagaaac

SEQ ID NO: 253461 - RNA, 21 nt, Human
ucguggggucauuguugaagg

SEQ ID NO: 253462 - RNA, 20 nt, Human
ucuaugauuacaaacgugga

SEQ ID NO: 253463 - RNA, 26 nt, Human
ucuccauacaaagggucuugcugcuc

SEQ ID NO: 253464 - RNA, 18 nt, Human
ucucccagccaauguccu

SEQ ID NO: 253465 - RNA, 21 nt, Human
ucucccagccaauguccugcc

SEQ ID NO: 253466 - RNA, 22 nt, Human
ucucccagccaauguccugccc

SEQ ID NO: 253467 - RNA, 19 nt, Human
ucucuuguguauuuaacaa

SEQ ID NO: 253468 - RNA, 23 nt, Human
ucuucuguuucaucugaucuuuc

SEQ ID NO: 253469 - RNA, 18 nt, Human
ugaccaggaaggcugggc

SEQ ID NO: 253470 - RNA, 23 nt, Human
ugagaugcugauuagcuucaaga

SEQ ID NO: 253471 - RNA, 21 nt, Human
ugcaggcucuugccagggcag

SEQ ID NO: 253472 - RNA, 22 nt, Human
ugcauccagcgaacacacaucu

SEQ ID NO: 253473 - RNA, 23 nt, Human
ugccagaaauggcuggauccaga

SEQ ID NO: 253474 - RNA, 18 nt, Human
ugcuguaaaaauucacag

SEQ ID NO: 253475 - RNA, 18 nt, Human
ugcuuugcccaucauccc

SEQ ID NO: 253476 - RNA, 18 nt, Human
uggauucuguggauuguu

SEQ ID NO: 253477 - RNA, 24 nt, Human
uggcaaggucuuccacucuccucu

SEQ ID NO: 253478 - RNA, 18 nt, Human
ugggcccagcaggaacug

SEQ ID NO: 253479 - RNA, 18 nt, Human
ugucucauugccagaaau

SEQ ID NO: 253480 - RNA, 21 nt, Human
uguguauuuaacaaaagaaug

SEQ ID NO: 253481 - RNA, 21 nt, Human
uguguuugccuuuucuuugcu

SEQ ID NO: 253482 - RNA, 19 nt, Human
uguugaaaauuauauggcu

SEQ ID NO: 253483 - RNA, 20 nt, Human
uguugaaaauuauauggcuu

SEQ ID NO: 253484 - RNA, 19 nt, Human
uguuucaucugaucuuucc

SEQ ID NO: 253485 - RNA, 18 nt, Human
uguuugccuuuucuuugc

SEQ ID NO: 253486 - RNA, 21 nt, Human
uuccuuguguuugccuuuucu

SEQ ID NO: 253487 - RNA, 21 nt, Human
uucuggcuggcagaaaagcug

SEQ ID NO: 253488 - RNA, 20 nt, Human
uucuugagaagggguaaaag

SEQ ID NO: 253489 - RNA, 19 nt, Human
uugcagccgcucccucucu

SEQ ID NO: 253490 - RNA, 24 nt, Human
uuggcaguugaauuacggaaaaag

SEQ ID NO: 253491 - RNA, 21 nt, Human
uuguauaguucuucuauuucc

SEQ ID NO: 253492 - RNA, 18 nt, Human
uuugcaucguauucuggc

SEQ ID NO: 253493 - RNA, 21 nt, Human
aaacugaggucaggcaagaaa

SEQ ID NO: 253494 - RNA, 23 nt, Human
aaaugcaccuaagagggaaacac

SEQ ID NO: 253495 - RNA, 25 nt, Human
acaaggccuuccucccugcaccucu

SEQ ID NO: 253496 - RNA, 20 nt, Human
acagcugggcaugggcugag

SEQ ID NO: 253497 - RNA, 18 nt, Human
accaaguccucuccaucc

SEQ ID NO: 253498 - RNA, 21 nt, Human
accaaguccucuccauccugc

SEQ ID NO: 253499 - RNA, 21 nt, Human
accagguccucccgacguccu

SEQ ID NO: 253500 - RNA, 23 nt, Human
agaaacaaaaauccaccaagucc

SEQ ID NO: 253501 - RNA, 19 nt, Human
agaaaggaggggucagggc

SEQ ID NO: 253502 - RNA, 21 nt, Human
agacaggagagaagggcagga

SEQ ID NO: 253503 - RNA, 23 nt, Human
agaggcguccuggucacugcucc

SEQ ID NO: 253504 - RNA, 19 nt, Human
agcagguauagaaggaggg

SEQ ID NO: 253505 - RNA, 19 nt, Human
agccccgaugacccaccaa

SEQ ID NO: 253506 - RNA, 18 nt, Human
agcgcugccgcggccgcc

SEQ ID NO: 253507 - RNA, 21 nt, Human
aggcaagaaacaaaaauccac

SEQ ID NO: 253508 - RNA, 23 nt, Human
aggcaagaaacaaaaauccacca

SEQ ID NO: 253509 - RNA, 25 nt, Human
aggcaagaaacaaaaauccaccaag

SEQ ID NO: 253510 - RNA, 23 nt, Human
aggcaagagagagguugucccag

SEQ ID NO: 253511 - RNA, 19 nt, Human
aggcggggcggggcggggc

SEQ ID NO: 253512 - RNA, 18 nt, Human
aggcugggcagcacuggg

SEQ ID NO: 253513 - RNA, 22 nt, Human
aggggcgugaccgacagccccg

SEQ ID NO: 253514 - RNA, 27 nt, Human
caacauacccuagaauaguuccccuga

SEQ ID NO: 253515 - RNA, 21 nt, Human
caagaaacaaaaauccaccaa

SEQ ID NO: 253516 - RNA, 22 nt, Human
caagaaacaaaaauccaccaag

SEQ ID NO: 253517 - RNA, 22 nt, Human
caaggaggggcccaggaaggac

SEQ ID NO: 253518 - RNA, 22 nt, Human
cacaaauauguccccuucuccc

SEQ ID NO: 253519 - RNA, 20 nt, Human
cacaugcuccaggagaaagc

SEQ ID NO: 253520 - RNA, 21 nt, Human
caccagguccucccgacgucc

SEQ ID NO: 253521 - RNA, 22 nt, Human
cacugggccagaggcguccugg

SEQ ID NO: 253522 - RNA, 21 nt, Human
cacuuaaaugccacucggaaa

SEQ ID NO: 253523 - RNA, 20 nt, Human
cagacaggagagaagggcag

SEQ ID NO: 253524 - RNA, 23 nt, Human
cagccuuuauuuuagaaaauaau

SEQ ID NO: 253525 - RNA, 23 nt, Human
ccacaaauauguccccuucuccc

SEQ ID NO: 253526 - RNA, 24 nt, Human
ccaccaggcccugacaaggaagcc

SEQ ID NO: 253527 - RNA, 18 nt, Human
ccaccggggagggcaggc

SEQ ID NO: 253528 - RNA, 20 nt, Human
ccauggcguccuggccugug

SEQ ID NO: 253529 - RNA, 24 nt, Human
cccaacaagcccagugccccccac

SEQ ID NO: 253530 - RNA, 20 nt, Human
cccaagcgcugccgcggccg

SEQ ID NO: 253531 - RNA, 23 nt, Human
cccaaguuuucccaggaccccaa

SEQ ID NO: 253532 - RNA, 23 nt, Human
cccaggacccaaguuuucccagg

SEQ ID NO: 253533 - RNA, 20 nt, Human
cccaggaccccaacuucggg

SEQ ID NO: 253534 - RNA, 23 nt, Human
ccccaacaagcccagugcccccc

SEQ ID NO: 253535 - RNA, 23 nt, Human
ccccaacaagcccagugcccccc

SEQ ID NO: 253536 - RNA, 23 nt, Human
ccccgccccccggccggcguccg

SEQ ID NO: 253537 - RNA, 21 nt, Human
ccccgccgcgccccgcccccc

SEQ ID NO: 253538 - RNA, 23 nt, Human
ccccuucucccauaacucagucc

SEQ ID NO: 253539 - RNA, 24 nt, Human
cccgcaguccuagggaugccuccu

SEQ ID NO: 253540 - RNA, 19 nt, Human
cccugggcuugcccggcuc

SEQ ID NO: 253541 - RNA, 21 nt, Human
ccgcaguccuagggaugccuc

SEQ ID NO: 253542 - RNA, 18 nt, Human
ccgccaggcccccuccuc

SEQ ID NO: 253543 - RNA, 24 nt, Human
ccgccaggcccccuccuccuggcc

SEQ ID NO: 253544 - RNA, 18 nt, Human
ccgccgcgccccgccccc

SEQ ID NO: 253545 - RNA, 18 nt, Human
ccgccucgccuuucgacu

SEQ ID NO: 253546 - RNA, 18 nt, Human
ccgcgccccgccccccgg

SEQ ID NO: 253547 - RNA, 23 nt, Human
ccggcguccgccaggcccccucc

SEQ ID NO: 253548 - RNA, 21 nt, Human
ccgggcaacguggcccuuccc

SEQ ID NO: 253549 - RNA, 21 nt, Human
ccucccugcaccucucuccug

SEQ ID NO: 253550 - RNA, 23 nt, Human
ccuccuagagcaacagggagggc

SEQ ID NO: 253551 - RNA, 24 nt, Human
ccugccauggcguccuggccugug

SEQ ID NO: 253552 - RNA, 22 nt, Human
ccuggccccgaacuuggccugc

SEQ ID NO: 253553 - RNA, 22 nt, Human
cgccgcuucucagucaacccag

SEQ ID NO: 253554 - RNA, 22 nt, Human
cgccucgccuuucgacucgcca

SEQ ID NO: 253555 - RNA, 21 nt, Human
cggccgggccgggcaacgugg

SEQ ID NO: 253556 - RNA, 23 nt, Human
cggccgggccgggcaacguggcc

SEQ ID NO: 253557 - RNA, 19 nt, Human
cggcucccuggcgcaaccc

SEQ ID NO: 253558 - RNA, 19 nt, Human
cucuccugacagcugggca

SEQ ID NO: 253559 - RNA, 19 nt, Human
cugcaccucucuccugaca

SEQ ID NO: 253560 - RNA, 26 nt, Human
cugcuaggcugcaaggagagaagggc

SEQ ID NO: 253561 - RNA, 21 nt, Human
gacaggagagaagggcaggag

SEQ ID NO: 253562 - RNA, 24 nt, Human
gagaagggcaggaggcagugagcc

SEQ ID NO: 253563 - RNA, 21 nt, Human
gaggagccugugugucaaacc

SEQ ID NO: 253564 - RNA, 25 nt, Human
gcacaaggccuuccucccugcaccu

SEQ ID NO: 253565 - RNA, 19 nt, Human
gccccgaacuuggccugcu

SEQ ID NO: 253566 - RNA, 18 nt, Human
gccugugaggacaugggg

SEQ ID NO: 253567 - RNA, 19 nt, Human
gcgccggggccggacggcc

SEQ ID NO: 253568 - RNA, 22 nt, Human
gcuuuccggcucccuggcgcaa

SEQ ID NO: 253569 - RNA, 21 nt, Human
ggaccccaacuucgggagucg

SEQ ID NO: 253570 - RNA, 23 nt, Human
ggaggcagccaugcaccaggucc

SEQ ID NO: 253571 - RNA, 21 nt, Human
ggcaagaaacaaaaauccacc

SEQ ID NO: 253572 - RNA, 23 nt, Human
ggcaaggaggggcccaggaagga

SEQ ID NO: 253573 - RNA, 19 nt, Human
ggccgggcaacguggcccu

SEQ ID NO: 253574 - RNA, 23 nt, Human
ggcgccugggagcgggcggggag

SEQ ID NO: 253575 - RNA, 21 nt, Human
gggcaggaggcagugagcccc

SEQ ID NO: 253576 - RNA, 23 nt, Human
ggggagcagguauagaaggaggg

SEQ ID NO: 253577 - RNA, 23 nt, Human
ggggaggcugggcagcacugggc

SEQ ID NO: 253578 - RNA, 21 nt, Human
ggggagggcaggccaggggac

SEQ ID NO: 253579 - RNA, 18 nt, Human
ggucagggagaagggguc

SEQ ID NO: 253580 - RNA, 19 nt, Human
gucuucuaccaagccagca

SEQ ID NO: 253581 - RNA, 18 nt, Human
gucuugcuugcccccuuc

SEQ ID NO: 253582 - RNA, 26 nt, Human
uaaaugcaccuaagagggaaacacag

SEQ ID NO: 253583 - RNA, 18 nt, Human
uaacucaguccccacugg

SEQ ID NO: 253584 - RNA, 25 nt, Human
uauagaaggagggcucgugcccugg

SEQ ID NO: 253585 - RNA, 21 nt, Human
uaucauuuuggccacaaauau

SEQ ID NO: 253586 - RNA, 22 nt, Human
ucacugcuccaccuggucacug

SEQ ID NO: 253587 - RNA, 24 nt, Human
ucaggcaagaaacaaaaauccacc

SEQ ID NO: 253588 - RNA, 19 nt, Human
ucagggagaaggggucugg

SEQ ID NO: 253589 - RNA, 25 nt, Human
uccaccaaguccucuccauccugcc

SEQ ID NO: 253590 - RNA, 23 nt, Human
uccaccaggcccugacaaggaag

SEQ ID NO: 253591 - RNA, 23 nt, Human
ucccaggaccccaacuucgggag

SEQ ID NO: 253592 - RNA, 18 nt, Human
uccgccaggcccccuccu

SEQ ID NO: 253593 - RNA, 20 nt, Human
uccuggccccgaacuuggcc

SEQ ID NO: 253594 - RNA, 27 nt, Human
ucucuccugacagcugggcaugggcug

SEQ ID NO: 253595 - RNA, 22 nt, Human
ucugucuucuaccaagccagca

SEQ ID NO: 253596 - RNA, 19 nt, Human
ugacaaggaagccccuuug

SEQ ID NO: 253597 - RNA, 24 nt, Human
ugacaaggaagccccuuugguuag

SEQ ID NO: 253598 - RNA, 19 nt, Human
ugacagcugggcaugggcu

SEQ ID NO: 253599 - RNA, 23 nt, Human
ugacagcugggcaugggcugagg

SEQ ID NO: 253600 - RNA, 18 nt, Human
ugcagccuggggacugug

SEQ ID NO: 253601 - RNA, 24 nt, Human
ugccaaacucucugcacaugcucc

SEQ ID NO: 253602 - RNA, 24 nt, Human
ugccacucggaaaaaucaaaaaga

SEQ ID NO: 253603 - RNA, 25 nt, Human
ugccauggcguccuggccugugagg

SEQ ID NO: 253604 - RNA, 23 nt, Human
ugcccaggcgcgucccaagcgcu

SEQ ID NO: 253605 - RNA, 27 nt, Human
ugcccggcucccuugcccgcaguccua

SEQ ID NO: 253606 - RNA, 21 nt, Human
ugcccuggcuggaagagccag

SEQ ID NO: 253607 - RNA, 21 nt, Human
uggcaaggaggggcccaggaa

SEQ ID NO: 253608 - RNA, 21 nt, Human
uggcaaggaggggcccaggaa

SEQ ID NO: 253609 - RNA, 18 nt, Human
ugggagcgggcggggagg

SEQ ID NO: 253610 - RNA, 20 nt, Human
ugggagcgggcggggaggcu

SEQ ID NO: 253611 - RNA, 19 nt, Human
ugggauuaggaggcagcca

SEQ ID NO: 253612 - RNA, 24 nt, Human
ugucccagcacaaggccuuccucc

SEQ ID NO: 253613 - RNA, 20 nt, Human
uguggcaaggaggggcccag

SEQ ID NO: 253614 - RNA, 22 nt, Human
uguggcaaggaggggcccagga

SEQ ID NO: 253615 - RNA, 18 nt, Human
uuccccugaucugacucc

SEQ ID NO: 253616 - RNA, 18 nt, Human
uuccucccugcaccucuc

SEQ ID NO: 253617 - RNA, 20 nt, Human
uucuguagcuuccacuuucu

SEQ ID NO: 253618 - RNA, 19 nt, Human
uugcccccuucaacuuucc

SEQ ID NO: 253619 - RNA, 18 nt, Human
uuucagacaauucagccu

SEQ ID NO: 253620 - RNA, 24 nt, Human
aaaaagcucagccgcggucccaac

SEQ ID NO: 253621 - RNA, 22 nt, Human
aaaaccacuguauuucuacauu

SEQ ID NO: 253622 - RNA, 23 nt, Human
aaaagaaaaaaaaaaacaaaacc

SEQ ID NO: 253623 - RNA, 19 nt, Human
aaaccuucaguuuuaaauc

SEQ ID NO: 253624 - RNA, 27 nt, Human
aaagauuaauaaaugcaauuuaaauaa

SEQ ID NO: 253625 - RNA, 24 nt, Human
aaauaaaauuuccccucuucucuc

SEQ ID NO: 253626 - RNA, 21 nt, Human
aacacaauaguacaggaaucu

SEQ ID NO: 253627 - RNA, 29 nt, Human
aacacacucaaaacacaauaguacaggaa

SEQ ID NO: 253628 - RNA, 20 nt, Human
aaggagcagcugcuucugcc

SEQ ID NO: 253629 - RNA, 23 nt, Human
acaauaguacaggaaucuaauac

SEQ ID NO: 253630 - RNA, 19 nt, Human
acaauguuuaaacuuucuu

SEQ ID NO: 253631 - RNA, 21 nt, Human
acaggaaucuaauacugaaaa

SEQ ID NO: 253632 - RNA, 18 nt, Human
acccuacucccaaaauga

SEQ ID NO: 253633 - RNA, 19 nt, Human
acccuacucccaaaaugaa

SEQ ID NO: 253634 - RNA, 22 nt, Human
accugcgccuccagcggcccug

SEQ ID NO: 253635 - RNA, 18 nt, Human
agaaaaaaaaaaacaaaa

SEQ ID NO: 253636 - RNA, 21 nt, Human
agaaaguguguucuaugaagg

SEQ ID NO: 253637 - RNA, 22 nt, Human
agacggccagaacugagcgacg

SEQ ID NO: 253638 - RNA, 18 nt, Human
agcacuaaaagaaaaaaa

SEQ ID NO: 253639 - RNA, 25 nt, Human
agcacuaaaagaaaaaaaaaaacaa

SEQ ID NO: 253640 - RNA, 18 nt, Human
agcagcugcuucugcacg

SEQ ID NO: 253641 - RNA, 19 nt, Human
aucccgggccccggggguc

SEQ ID NO: 253642 - RNA, 20 nt, Human
aucuaauacugaaaaugacu

SEQ ID NO: 253643 - RNA, 20 nt, Human
caaaacacaauaguacagga

SEQ ID NO: 253644 - RNA, 28 nt, Human
caaaacacaauaguacaggaaucuaaua

SEQ ID NO: 253645 - RNA, 18 nt, Human
cacuguauuucuacauug

SEQ ID NO: 253646 - RNA, 21 nt, Human
cagccgcggucccaaccgcac

SEQ ID NO: 253647 - RNA, 20 nt, Human
cagcugcuucugcacggaag

SEQ ID NO: 253648 - RNA, 22 nt, Human
ccaaaacacacucaaaacacaa

SEQ ID NO: 253649 - RNA, 20 nt, Human
ccaaccgcacccuagcuucg

SEQ ID NO: 253650 - RNA, 22 nt, Human
ccacgggucccggaaaaagcuc

SEQ ID NO: 253651 - RNA, 20 nt, Human
ccagcggcccugcguccucu

SEQ ID NO: 253652 - RNA, 19 nt, Human
cccccgcggcugcccucgc

SEQ ID NO: 253653 - RNA, 18 nt, Human
ccccggggguccuggggc

SEQ ID NO: 253654 - RNA, 18 nt, Human
cccgcaacugccccgcgg

SEQ ID NO: 253655 - RNA, 18 nt, Human
cccgcggcugcccucgcu

SEQ ID NO: 253656 - RNA, 22 nt, Human
cccuagcuucguuaccugcgcc

SEQ ID NO: 253657 - RNA, 21 nt, Human
cgccucacuccggcggggacc

SEQ ID NO: 253658 - RNA, 19 nt, Human
cggcugcccucgcuaacuc

SEQ ID NO: 253659 - RNA, 21 nt, Human
cgucuccguccucuccauuca

SEQ ID NO: 253660 - RNA, 25 nt, Human
cuaaaagaaaaaaaaaaacaaaacc

SEQ ID NO: 253661 - RNA, 19 nt, Human
cuacucccaaaaugaaacc

SEQ ID NO: 253662 - RNA, 22 nt, Human
cugcgcuccacacauccucgcc

SEQ ID NO: 253663 - RNA, 19 nt, Human
cuucacugaauuuugguau

SEQ ID NO: 253664 - RNA, 19 nt, Human
cuuguagaaugccuucacc

SEQ ID NO: 253665 - RNA, 25 nt, Human
gaaaguguguucuaugaagguucca

SEQ ID NO: 253666 - RNA, 19 nt, Human
gagcgcaggcgggcgggcg

SEQ ID NO: 253667 - RNA, 24 nt, Human
gcacuaaaagaaaaaaaaaaacaa

SEQ ID NO: 253668 - RNA, 19 nt, Human
gcccucgcuaacucauccc

SEQ ID NO: 253669 - RNA, 18 nt, Human
ggaaaaagcucagccgcg

SEQ ID NO: 253670 - RNA, 20 nt, Human
ggaaaggagcagcugcuucu

SEQ ID NO: 253671 - RNA, 21 nt, Human
ggaaggggcgggcgggcggcg

SEQ ID NO: 253672 - RNA, 21 nt, Human
ggcggcggccgucgccuuggc

SEQ ID NO: 253673 - RNA, 22 nt, Human
gggcggcggccgucgccuuggc

SEQ ID NO: 253674 - RNA, 19 nt, Human
gggcgggcgcggaaaggag

SEQ ID NO: 253675 - RNA, 25 nt, Human
ggucccaaccgcacccuagcuucgu

SEQ ID NO: 253676 - RNA, 25 nt, Human
gucagcacuaaaagaaaaaaaaaaa

SEQ ID NO: 253677 - RNA, 21 nt, Human
guccuggggcccgagaccucu

SEQ ID NO: 253678 - RNA, 19 nt, Human
gucuccagggccgggagcg

SEQ ID NO: 253679 - RNA, 20 nt, Human
uacaauguagcaauaguaaa

SEQ ID NO: 253680 - RNA, 22 nt, Human
uacaggaaucuaauacugaaaa

SEQ ID NO: 253681 - RNA, 18 nt, Human
uagaaugccuucacugaa

SEQ ID NO: 253682 - RNA, 22 nt, Human
uagcagauaacagauugagcuu

SEQ ID NO: 253683 - RNA, 19 nt, Human
uauaaagaguaaacaaaac

SEQ ID NO: 253684 - RNA, 24 nt, Human
uauuaaaauguaaugcuaacucaa

SEQ ID NO: 253685 - RNA, 18 nt, Human
ucaaaacacaauaguaca

SEQ ID NO: 253686 - RNA, 23 nt, Human
ucagcacuaaaagaaaaaaaaaa

SEQ ID NO: 253687 - RNA, 21 nt, Human
ucccaaaaugaaaccuucagu

SEQ ID NO: 253688 - RNA, 28 nt, Human
ucccgggccccggggguccuggggcccc

SEQ ID NO: 253689 - RNA, 21 nt, Human
uccguccucuccauucagcac

SEQ ID NO: 253690 - RNA, 19 nt, Human
uccuggggcccgagaccuc

SEQ ID NO: 253691 - RNA, 23 nt, Human
ucugacaggguguuuaacaaaca

SEQ ID NO: 253692 - RNA, 23 nt, Human
ugaaaacaauguuuaaacuuucu

SEQ ID NO: 253693 - RNA, 21 nt, Human
ugacaggguguuuaacaaaca

SEQ ID NO: 253694 - RNA, 19 nt, Human
uggcccccgcggcugcccu

SEQ ID NO: 253695 - RNA, 18 nt, Human
uguccuguuuggacaaau

SEQ ID NO: 253696 - RNA, 23 nt, Human
uuaauacccuaacaauuucaucg

SEQ ID NO: 253697 - RNA, 21 nt, Human
uucagcaccacgggucccgga

SEQ ID NO: 253698 - RNA, 20 nt, Human
uuugcuguacuuaaaauagg

SEQ ID NO: 253699 - RNA, 19 nt, Human
aaacccuacccccaccccc

SEQ ID NO: 253700 - RNA, 22 nt, Human
aacccuacccccacccccacuc

SEQ ID NO: 253701 - RNA, 22 nt, Human
agcgcggccccggcccggcccc

SEQ ID NO: 253702 - RNA, 23 nt, Human
aggcagcgcggccccggcccggc

SEQ ID NO: 253703 - RNA, 23 nt, Human
auccugccuacccucccccgcua

SEQ ID NO: 253704 - RNA, 25 nt, Human
auccugccuacccucccccgcuacc

SEQ ID NO: 253705 - RNA, 20 nt, Human
caaacccuaucagaucaugc

SEQ ID NO: 253706 - RNA, 22 nt, Human
caaaggccugacccuugauuca

SEQ ID NO: 253707 - RNA, 23 nt, Human
caaggagccggcaggaggcaggg

SEQ ID NO: 253708 - RNA, 24 nt, Human
cacccagacgucacggccugcgcc

SEQ ID NO: 253709 - RNA, 21 nt, Human
cacccccacuccccacccacu

SEQ ID NO: 253710 - RNA, 29 nt, Human
cacuccugguccccucaagaaccaaggag

SEQ ID NO: 253711 - RNA, 22 nt, Human
cacuuccaccccgucccgggga

SEQ ID NO: 253712 - RNA, 22 nt, Human
cagcagcggcggcggcggcucc

SEQ ID NO: 253713 - RNA, 20 nt, Human
cagccucucgccccaucccg

SEQ ID NO: 253714 - RNA, 19 nt, Human
caggcucucuuccccaauc

SEQ ID NO: 253715 - RNA, 21 nt, Human
caggcucucuuccccaauccu

SEQ ID NO: 253716 - RNA, 22 nt, Human
ccacccccacuccccacccacu

SEQ ID NO: 253717 - RNA, 19 nt, Human
ccacuccccacccacuccu

SEQ ID NO: 253718 - RNA, 20 nt, Human
ccacuccccacccacuccug

SEQ ID NO: 253719 - RNA, 30 nt, Human
ccacuccccacccacuccugguccccucaa

SEQ ID NO: 253720 - RNA, 19 nt, Human
ccacuuccaccccgucccg

SEQ ID NO: 253721 - RNA, 21 nt, Human
ccagacgucacggccugcgcc

SEQ ID NO: 253722 - RNA, 20 nt, Human
cccaauccugccuacccucc

SEQ ID NO: 253723 - RNA, 19 nt, Human
cccacacggagcccaaggc

SEQ ID NO: 253724 - RNA, 22 nt, Human
cccacccccacuccccacccac

SEQ ID NO: 253725 - RNA, 24 nt, Human
cccagggaccaccacgcacacucc

SEQ ID NO: 253726 - RNA, 21 nt, Human
ccccacccccacuuccacccc

SEQ ID NO: 253727 - RNA, 19 nt, Human
ccccagaggcugccuggug

SEQ ID NO: 253728 - RNA, 22 nt, Human
cccccacccccacuuccacccc

SEQ ID NO: 253729 - RNA, 23 nt, Human
cccccacuccccacccacuccug

SEQ ID NO: 253730 - RNA, 22 nt, Human
cccccacuuccaccccgucccc

SEQ ID NO: 253731 - RNA, 20 nt, Human
ccccccacccccacuuccac

SEQ ID NO: 253732 - RNA, 20 nt, Human
cccccgggguccccggcggg

SEQ ID NO: 253733 - RNA, 21 nt, Human
ccccgauccccuccccccacc

SEQ ID NO: 253734 - RNA, 23 nt, Human
ccccgauccccuccccccacccc

SEQ ID NO: 253735 - RNA, 24 nt, Human
cccggccccgauccccucccccca

SEQ ID NO: 253736 - RNA, 23 nt, Human
cccggcccggccccgauccgguu

SEQ ID NO: 253737 - RNA, 23 nt, Human
cccuacccccacccccacucccc

SEQ ID NO: 253738 - RNA, 21 nt, Human
cccuccccccacccccacuuc

SEQ ID NO: 253739 - RNA, 22 nt, Human
cccuccccccacccccacuucc

SEQ ID NO: 253740 - RNA, 23 nt, Human
cccucccccgcuacccagggacc

SEQ ID NO: 253741 - RNA, 20 nt, Human
cccugucacaaacccuauca

SEQ ID NO: 253742 - RNA, 18 nt, Human
ccgccgcagccucucgcc

SEQ ID NO: 253743 - RNA, 24 nt, Human
ccuacccccacccccacuccccac

SEQ ID NO: 253744 - RNA, 23 nt, Human
ccuccccccacccccacuuccac

SEQ ID NO: 253745 - RNA, 20 nt, Human
ccucccccgcuacccaggga

SEQ ID NO: 253746 - RNA, 21 nt, Human
ccuggacccaaaugcaucuac

SEQ ID NO: 253747 - RNA, 26 nt, Human
cgcggccccggcccggccccgauccc

SEQ ID NO: 253748 - RNA, 24 nt, Human
cggcagcagcggcggcggcggcuc

SEQ ID NO: 253749 - RNA, 19 nt, Human
cggccugcgcccucuccca

SEQ ID NO: 253750 - RNA, 23 nt, Human
cggcggcagcagcggcggcggcg

SEQ ID NO: 253751 - RNA, 23 nt, Human
cggcggcggcggcuccgcggccc

SEQ ID NO: 253752 - RNA, 20 nt, Human
cuacccccacccccacuccc

SEQ ID NO: 253753 - RNA, 21 nt, Human
cuccccccacccccacuucca

SEQ ID NO: 253754 - RNA, 24 nt, Human
cuccccccacccccacuuccaccc

SEQ ID NO: 253755 - RNA, 20 nt, Human
cuccggcggcagcggcugcg

SEQ ID NO: 253756 - RNA, 19 nt, Human
cucucccaacaggagggau

SEQ ID NO: 253757 - RNA, 22 nt, Human
cucucgccccaucccgggcucc

SEQ ID NO: 253758 - RNA, 23 nt, Human
cugcaggcucucuuccccaaucc

SEQ ID NO: 253759 - RNA, 24 nt, Human
cugcaggcucucuuccccaauccu

SEQ ID NO: 253760 - RNA, 20 nt, Human
cugcgcccucucccaacagg

SEQ ID NO: 253761 - RNA, 21 nt, Human
cuggacccaaaugcaucuacu

SEQ ID NO: 253762 - RNA, 23 nt, Human
cugguccccucaagaaccaagga

SEQ ID NO: 253763 - RNA, 24 nt, Human
gaaacccuacccccacccccacuc

SEQ ID NO: 253764 - RNA, 22 nt, Human
gagcccaaggcccagggaugcc

SEQ ID NO: 253765 - RNA, 19 nt, Human
gauccccuccccccacccc

SEQ ID NO: 253766 - RNA, 23 nt, Human
gauccccuccccccacccccacu

SEQ ID NO: 253767 - RNA, 25 nt, Human
gcagcggcggcggcggcuccgcggc

SEQ ID NO: 253768 - RNA, 27 nt, Human
gcagcggcggcggcggcuccgcggccc

SEQ ID NO: 253769 - RNA, 19 nt, Human
gcagcggcugcggcgggcg

SEQ ID NO: 253770 - RNA, 18 nt, Human
gcaggccggucucccaca

SEQ ID NO: 253771 - RNA, 21 nt, Human
gccccgauccccuccccccac

SEQ ID NO: 253772 - RNA, 22 nt, Human
gccccgauccccuccccccacc

SEQ ID NO: 253773 - RNA, 21 nt, Human
gccccggcccggccccgaucc

SEQ ID NO: 253774 - RNA, 21 nt, Human
gcccggccccgauccccuccc

SEQ ID NO: 253775 - RNA, 28 nt, Human
gcggcagcagcggcggcggcggcuccuu

SEQ ID NO: 253776 - RNA, 19 nt, Human
gcggcagcggcugcggcgg

SEQ ID NO: 253777 - RNA, 21 nt, Human
ggcagcagcggcggcggcggc

SEQ ID NO: 253778 - RNA, 22 nt, Human
ggcagggagauagcgcuagggg

SEQ ID NO: 253779 - RNA, 19 nt, Human
gggcgcccggcaucgcagg

SEQ ID NO: 253780 - RNA, 19 nt, Human
gugggcuuuuucccggccu

SEQ ID NO: 253781 - RNA, 21 nt, Human
uagggaaacccuacccccaau

SEQ ID NO: 253782 - RNA, 20 nt, Human
ucaaaggccugacccuugau

SEQ ID NO: 253783 - RNA, 23 nt, Human
ucacaagggcuucaguagggaaa

SEQ ID NO: 253784 - RNA, 19 nt, Human
ucaguagggaaacccuacc

SEQ ID NO: 253785 - RNA, 19 nt, Human
ucccacacggagcccaagg

SEQ ID NO: 253786 - RNA, 23 nt, Human
ucccggccuggccaccccccaga

SEQ ID NO: 253787 - RNA, 29 nt, Human
ucccgggcuccggcggcagcggcugcggg

SEQ ID NO: 253788 - RNA, 19 nt, Human
uccggcggcagcggcugcg

SEQ ID NO: 253789 - RNA, 24 nt, Human
ucucccacacggagcccaaggccc

SEQ ID NO: 253790 - RNA, 18 nt, Human
ugagauccugcaggcucu

SEQ ID NO: 253791 - RNA, 20 nt, Human
ugagauccugcaggcucucu

SEQ ID NO: 253792 - RNA, 25 nt, Human
ugagauccugcaggcucucuucccc

SEQ ID NO: 253793 - RNA, 23 nt, Human
ugcaucuacuuacagagcccugg

SEQ ID NO: 253794 - RNA, 23 nt, Human
ugccaaauggugggcuuuuuccc

SEQ ID NO: 253795 - RNA, 18 nt, Human
uuccuccuggacccaaau

SEQ ID NO: 253796 - RNA, 26 nt, Human
aaacaaauacaauuauuaugggagau

SEQ ID NO: 253797 - RNA, 26 nt, Human
acaggaaaaaauguguugguuucuca

SEQ ID NO: 253798 - RNA, 23 nt, Human
acccugaaagucaacugaaugca

SEQ ID NO: 253799 - RNA, 24 nt, Human
acuguuuucuuuuuacccugaaag

SEQ ID NO: 253800 - RNA, 28 nt, Human
caaauuuaaagaauguaacaauauguac

SEQ ID NO: 253801 - RNA, 24 nt, Human
cacaggaaaaaauguguugguuuc

SEQ ID NO: 253802 - RNA, 24 nt, Human
ccaaaauaguacaagucauauuaa

SEQ ID NO: 253803 - RNA, 20 nt, Human
ccucaaaaguacccccuuca

SEQ ID NO: 253804 - RNA, 21 nt, Human
gaaagucaacugaaugcagua

SEQ ID NO: 253805 - RNA, 19 nt, Human
gacaaucgucuuaucuaca

SEQ ID NO: 253806 - RNA, 18 nt, Human
uaaaaaaaagauacaugc

SEQ ID NO: 253807 - RNA, 23 nt, Human
uaaaauaagugaaccucaaaagu

SEQ ID NO: 253808 - RNA, 20 nt, Human
uaacaaauucacaggaaaaa

SEQ ID NO: 253809 - RNA, 20 nt, Human
uaagugaaccucaaaaguac

SEQ ID NO: 253810 - RNA, 22 nt, Human
uaagugaaccucaaaaguaccc

SEQ ID NO: 253811 - RNA, 27 nt, Human
uaagugaaccucaaaaguacccccuuc

SEQ ID NO: 253812 - RNA, 21 nt, Human
uacaagucauauuaacaggcu

SEQ ID NO: 253813 - RNA, 23 nt, Human
uacccugaaagucaacugaaugc

SEQ ID NO: 253814 - RNA, 23 nt, Human
ucauuucaccaucacacuggucc

SEQ ID NO: 253815 - RNA, 24 nt, Human
ucuuaucuacaguagacuucacaa

SEQ ID NO: 253816 - RNA, 18 nt, Human
ugaggacagcuuaguuuc

SEQ ID NO: 253817 - RNA, 18 nt, Human
uguguugguuucucagau

SEQ ID NO: 253818 - RNA, 25 nt, Human
uguucaaguagaaauaaaaaaaaga

SEQ ID NO: 253819 - RNA, 20 nt, Human
uuucucaaauuuaaagaaug

SEQ ID NO: 253820 - RNA, 22 nt, Human
aaacggccugacuggggcaggc

SEQ ID NO: 253821 - RNA, 25 nt, Human
aaaugagguugagaaaccggccccu

SEQ ID NO: 253822 - RNA, 22 nt, Human
aacaaccuccugguggcucggu

SEQ ID NO: 253823 - RNA, 18 nt, Human
aacccuuugggcggggcc

SEQ ID NO: 253824 - RNA, 21 nt, Human
accccaggccggcccaagccc

SEQ ID NO: 253825 - RNA, 19 nt, Human
acucuaaaauuacacugac

SEQ ID NO: 253826 - RNA, 21 nt, Human
agaauaaaaaacacagcacau

SEQ ID NO: 253827 - RNA, 20 nt, Human
agcccucuuccaguacucuc

SEQ ID NO: 253828 - RNA, 18 nt, Human
aggcagaacccuuugggc

SEQ ID NO: 253829 - RNA, 18 nt, Human
aggcaucugaaguggaaa

SEQ ID NO: 253830 - RNA, 20 nt, Human
aggcaucugaaguggaaaua

SEQ ID NO: 253831 - RNA, 21 nt, Human
aggccucugccaggcgagucu

SEQ ID NO: 253832 - RNA, 28 nt, Human
aguauaugcauuccaguguucgcgccag

SEQ ID NO: 253833 - RNA, 19 nt, Human
augagggcuguagguggau

SEQ ID NO: 253834 - RNA, 28 nt, Human
caaauguauccaagaauaaaaaacacag

SEQ ID NO: 253835 - RNA, 23 nt, Human
caacagcagcgaggggacuagcu

SEQ ID NO: 253836 - RNA, 23 nt, Human
caagaauaaaaaacacagcacau

SEQ ID NO: 253837 - RNA, 21 nt, Human
cacagagguggggcugcccga

SEQ ID NO: 253838 - RNA, 20 nt, Human
cacaguccacgcagcaggac

SEQ ID NO: 253839 - RNA, 21 nt, Human
cagcaggacgcuccaggccuc

SEQ ID NO: 253840 - RNA, 21 nt, Human
cagcuccuagggccuccgggc

SEQ ID NO: 253841 - RNA, 27 nt, Human
caggccgggugcgaacgguuccgggcc

SEQ ID NO: 253842 - RNA, 24 nt, Human
cagugugggggccgccugccuccu

SEQ ID NO: 253843 - RNA, 20 nt, Human
ccaguguucgcgccagagac

SEQ ID NO: 253844 - RNA, 19 nt, Human
cccaagcccgacgccaggc

SEQ ID NO: 253845 - RNA, 18 nt, Human
cccaggcaugagggcugu

SEQ ID NO: 253846 - RNA, 21 nt, Human
cccaggccggcccaagcccga

SEQ ID NO: 253847 - RNA, 20 nt, Human
ccccaggccggcccaagccc

SEQ ID NO: 253848 - RNA, 23 nt, Human
ccccaggccggcccaagcccgac

SEQ ID NO: 253849 - RNA, 18 nt, Human
ccuccgcggcccggcggg

SEQ ID NO: 253850 - RNA, 23 nt, Human
ccuccgggccagcggcggacccc

SEQ ID NO: 253851 - RNA, 21 nt, Human
ccucugccaggcgagucucug

SEQ ID NO: 253852 - RNA, 18 nt, Human
ccugugcugcgccugggg

SEQ ID NO: 253853 - RNA, 21 nt, Human
ccugugucucuggagaccugu

SEQ ID NO: 253854 - RNA, 23 nt, Human
cgcagcaggacgcuccaggccuc

SEQ ID NO: 253855 - RNA, 24 nt, Human
cgcccaaguaaaagcucuucuaaa

SEQ ID NO: 253856 - RNA, 22 nt, Human
cgcggcgggcgcccgcggggcc

SEQ ID NO: 253857 - RNA, 21 nt, Human
cggcccggcgggcgggggcag

SEQ ID NO: 253858 - RNA, 19 nt, Human
cggcgggcgcccgcggggc

SEQ ID NO: 253859 - RNA, 23 nt, Human
cgugaaaaaaucaaauguaucca

SEQ ID NO: 253860 - RNA, 23 nt, Human
cucacuucauugcucaggugagc

SEQ ID NO: 253861 - RNA, 24 nt, Human
cugcucaaggacagucaacagcag

SEQ ID NO: 253862 - RNA, 23 nt, Human
gaaaaccaggggaauuagcccuc

SEQ ID NO: 253863 - RNA, 22 nt, Human
gaacagccucagacugaauccg

SEQ ID NO: 253864 - RNA, 20 nt, Human
gaaccuccagcugggcccag

SEQ ID NO: 253865 - RNA, 21 nt, Human
gaccagugagcaagaaugaga

SEQ ID NO: 253866 - RNA, 20 nt, Human
gagaaaaccaggggaauuag

SEQ ID NO: 253867 - RNA, 19 nt, Human
gcagcgaggggacuagcuc

SEQ ID NO: 253868 - RNA, 19 nt, Human
gccccgggggguggcugcu

SEQ ID NO: 253869 - RNA, 25 nt, Human
gcccucuuccaguacucucccccac

SEQ ID NO: 253870 - RNA, 21 nt, Human
gcgcggcgggcgcccgcgggg

SEQ ID NO: 253871 - RNA, 19 nt, Human
gcggaccccaggccggccc

SEQ ID NO: 253872 - RNA, 21 nt, Human
gcggcgggcgcccgcggggcc

SEQ ID NO: 253873 - RNA, 20 nt, Human
gcgggcgggggcagcaccag

SEQ ID NO: 253874 - RNA, 22 nt, Human
gcucaggugagcaaaugagguu

SEQ ID NO: 253875 - RNA, 19 nt, Human
ggaccccaggccggcccaa

SEQ ID NO: 253876 - RNA, 26 nt, Human
ggacggcagugacgacacccccagaa

SEQ ID NO: 253877 - RNA, 21 nt, Human
ggacuuacgugaaaaaaucaa

SEQ ID NO: 253878 - RNA, 20 nt, Human
ggcaggccgggugcgaacgg

SEQ ID NO: 253879 - RNA, 21 nt, Human
ggccucugccaggcgagucuc

SEQ ID NO: 253880 - RNA, 30 nt, Human
gggcaggccgggugcgaacgguuccgggcc

SEQ ID NO: 253881 - RNA, 20 nt, Human
ggggcagcaccagcuccuag

SEQ ID NO: 253882 - RNA, 23 nt, Human
gggggcagcaccagcuccuaggg

SEQ ID NO: 253883 - RNA, 25 nt, Human
gggggguggcugcugcaguuccagg

SEQ ID NO: 253884 - RNA, 21 nt, Human
gguccgcaugccaccccaggg

SEQ ID NO: 253885 - RNA, 21 nt, Human
gguggauggggcagcacagag

SEQ ID NO: 253886 - RNA, 20 nt, Human
gguggcugcugcaguuccag

SEQ ID NO: 253887 - RNA, 18 nt, Human
uaaaaaacacagcacaua

SEQ ID NO: 253888 - RNA, 20 nt, Human
uaaaaaacacagcacauaaa

SEQ ID NO: 253889 - RNA, 21 nt, Human
uaaaaaacacagcacauaaag

SEQ ID NO: 253890 - RNA, 23 nt, Human
uaaaaaacacagcacauaaagua

SEQ ID NO: 253891 - RNA, 21 nt, Human
uacacugacacuaaugcucau

SEQ ID NO: 253892 - RNA, 19 nt, Human
ucaggcacagugugggggc

SEQ ID NO: 253893 - RNA, 21 nt, Human
ucggugcccacaguccacgca

SEQ ID NO: 253894 - RNA, 21 nt, Human
ugaaguggaaauacgauuucc

SEQ ID NO: 253895 - RNA, 22 nt, Human
ugagcaaaugagguugagaaac

SEQ ID NO: 253896 - RNA, 19 nt, Human
uggauggggcagcacagag

SEQ ID NO: 253897 - RNA, 23 nt, Human
uggccuccaaagcccacucuugc

SEQ ID NO: 253898 - RNA, 21 nt, Human
ugggcggggccguaucuggcc

SEQ ID NO: 253899 - RNA, 18 nt, Human
uggggcacccugaagggu

SEQ ID NO: 253900 - RNA, 19 nt, Human
uggggcugcucaaggacag

SEQ ID NO: 253901 - RNA, 22 nt, Human
uggugccugugucucuggagac

SEQ ID NO: 253902 - RNA, 19 nt, Human
ugugggggccgccugccuc

SEQ ID NO: 253903 - RNA, 21 nt, Human
aaaaauuuuuaaaacagggaa

SEQ ID NO: 253904 - RNA, 22 nt, Human
aaaagcaauaaaaaauauguaa

SEQ ID NO: 253905 - RNA, 18 nt, Human
aaaaugucaacucuuaaa

SEQ ID NO: 253906 - RNA, 21 nt, Human
aaaugguuaccagcaugccca

SEQ ID NO: 253907 - RNA, 23 nt, Human
aacacccaccacaaugccuauua

SEQ ID NO: 253908 - RNA, 25 nt, Human
aacauucucugacaauggaauacua

SEQ ID NO: 253909 - RNA, 21 nt, Human
aagcugaggggaaaucuggcu

SEQ ID NO: 253910 - RNA, 24 nt, Human
acaauacagcaaaauaaaccagaa

SEQ ID NO: 253911 - RNA, 18 nt, Human
accccagcucuaguccca

SEQ ID NO: 253912 - RNA, 21 nt, Human
agagaggggggugaggaggga

SEQ ID NO: 253913 - RNA, 22 nt, Human
agaggggggugaggagggagug

SEQ ID NO: 253914 - RNA, 24 nt, Human
agcaacagggauauacccgaagga

SEQ ID NO: 253915 - RNA, 21 nt, Human
aggagagaggggggugaggga

SEQ ID NO: 253916 - RNA, 20 nt, Human
agggguggggaggagagagg

SEQ ID NO: 253917 - RNA, 21 nt, Human
agggguggggaggagagaggg

SEQ ID NO: 253918 - RNA, 21 nt, Human
auaaaccagaagccauguuuu

SEQ ID NO: 253919 - RNA, 21 nt, Human
aucauccucacucccccaaca

SEQ ID NO: 253920 - RNA, 23 nt, Human
aucuaccucuuaacagagaaggu

SEQ ID NO: 253921 - RNA, 19 nt, Human
aucuaggcauggcccaggg

SEQ ID NO: 253922 - RNA, 27 nt, Human
aucuuaugauucaggaacuguaagcug

SEQ ID NO: 253923 - RNA, 22 nt, Human
augcacacucauguuucagagc

SEQ ID NO: 253924 - RNA, 25 nt, Human
augcagaagcuaaaaaguugcuauc

SEQ ID NO: 253925 - RNA, 19 nt, Human
caacacccaccacaaugcc

SEQ ID NO: 253926 - RNA, 21 nt, Human
caauaccagucagcuuacgaa

SEQ ID NO: 253927 - RNA, 20 nt, Human
cacaauacagcaaaauaaac

SEQ ID NO: 253928 - RNA, 23 nt, Human
caccccucucccacuacguaccu

SEQ ID NO: 253929 - RNA, 30 nt, Human
caccccuucagccagaguccugggcccaaa

SEQ ID NO: 253930 - RNA, 18 nt, Human
cacuacguaccugcuggu

SEQ ID NO: 253931 - RNA, 19 nt, Human
cacugaaucagcaacugag

SEQ ID NO: 253932 - RNA, 23 nt, Human
cagaaaaagagagagaaauccug

SEQ ID NO: 253933 - RNA, 27 nt, Human
cagaaaggcaacuaccguacaaucuca

SEQ ID NO: 253934 - RNA, 25 nt, Human
cagaccccagcucuagucccaccac

SEQ ID NO: 253935 - RNA, 23 nt, Human
cagagcccuugaccaggcagccu

SEQ ID NO: 253936 - RNA, 22 nt, Human
cagcaaaaacggggagggugga

SEQ ID NO: 253937 - RNA, 18 nt, Human
cagccagaguccugggcc

SEQ ID NO: 253938 - RNA, 22 nt, Human
cagccagauccuaucuaaugcc

SEQ ID NO: 253939 - RNA, 21 nt, Human
cagccuggaccaaauucaaaa

SEQ ID NO: 253940 - RNA, 22 nt, Human
caggcacagaaaggcaacuacc

SEQ ID NO: 253941 - RNA, 20 nt, Human
cagggauauacccgaaggac

SEQ ID NO: 253942 - RNA, 24 nt, Human
cagggguggggaggagagaggggg

SEQ ID NO: 253943 - RNA, 23 nt, Human
caguguuccccaaaugugguccc

SEQ ID NO: 253944 - RNA, 20 nt, Human
caucauccucacucccccaa

SEQ ID NO: 253945 - RNA, 19 nt, Human
caugaggaaaagguacacc

SEQ ID NO: 253946 - RNA, 22 nt, Human
caugaggaaaagguacaccuca

SEQ ID NO: 253947 - RNA, 19 nt, Human
cauugccuaucaacagagu

SEQ ID NO: 253948 - RNA, 19 nt, Human
ccacacccacugaaucagc

SEQ ID NO: 253949 - RNA, 21 nt, Human
ccaccugccucagaccauuuc

SEQ ID NO: 253950 - RNA, 24 nt, Human
ccacuacguaccugcuggucugcu

SEQ ID NO: 253951 - RNA, 20 nt, Human
ccagaaaaagagagagaaau

SEQ ID NO: 253952 - RNA, 19 nt, Human
ccagcacagaccaggccac

SEQ ID NO: 253953 - RNA, 24 nt, Human
ccagcagcauggugcagggcugag

SEQ ID NO: 253954 - RNA, 24 nt, Human
ccaugaggcaaaaugagacauuaa

SEQ ID NO: 253955 - RNA, 21 nt, Human
ccaugccccaccuucccuaca

SEQ ID NO: 253956 - RNA, 20 nt, Human
cccaaauguggucccaauca

SEQ ID NO: 253957 - RNA, 23 nt, Human
cccagggcuccagccugcagugu

SEQ ID NO: 253958 - RNA, 19 nt, Human
ccccacccacacccacuga

SEQ ID NO: 253959 - RNA, 21 nt, Human
ccccagggcuccagccugcag

SEQ ID NO: 253960 - RNA, 18 nt, Human
ccugagaggcuuccccuu

SEQ ID NO: 253961 - RNA, 20 nt, Human
ccugagaggcuuccccuucu

SEQ ID NO: 253962 - RNA, 21 nt, Human
cgaucccuuauaagagacuaa

SEQ ID NO: 253963 - RNA, 21 nt, Human
cucugccccaucacaccccuc

SEQ ID NO: 253964 - RNA, 20 nt, Human
cugcaguguuccuuuccuag

SEQ ID NO: 253965 - RNA, 22 nt, Human
cugcuggucugcucauuaccau

SEQ ID NO: 253966 - RNA, 19 nt, Human
cuucacucggcugcuccuc

SEQ ID NO: 253967 - RNA, 18 nt, Human
gaaaugugaauucucagg

SEQ ID NO: 253968 - RNA, 23 nt, Human
gaaguuuguuuugcaaggugggg

SEQ ID NO: 253969 - RNA, 24 nt, Human
gaccaguguuccccaaaugugguc

SEQ ID NO: 253970 - RNA, 19 nt, Human
gagaagaauuagccaagug

SEQ ID NO: 253971 - RNA, 18 nt, Human
gagaggggggugaggagg

SEQ ID NO: 253972 - RNA, 24 nt, Human
gcagcaacagggauauacccgaag

SEQ ID NO: 253973 - RNA, 21 nt, Human
gcauggccagcuuuucaccau

SEQ ID NO: 253974 - RNA, 19 nt, Human
gccacugucuuccccagca

SEQ ID NO: 253975 - RNA, 19 nt, Human
gccccacccacacccacug

SEQ ID NO: 253976 - RNA, 21 nt, Human
gccuguuuguauauggcagag

SEQ ID NO: 253977 - RNA, 21 nt, Human
gcuaggcaacaagaagcuaag

SEQ ID NO: 253978 - RNA, 23 nt, Human
ggaaaugugaauucucaggcccc

SEQ ID NO: 253979 - RNA, 23 nt, Human
ggaggagagaggggggugaggag

SEQ ID NO: 253980 - RNA, 23 nt, Human
ggcccaaaagaaaaugguagcag

SEQ ID NO: 253981 - RNA, 23 nt, Human
gggaagugugcgucugaccuucg

SEQ ID NO: 253982 - RNA, 18 nt, Human
ggggugaggagggagugg

SEQ ID NO: 253983 - RNA, 23 nt, Human
ggguggggaggagagaggggggu

SEQ ID NO: 253984 - RNA, 21 nt, Human
gguggggaggagagagggggg

SEQ ID NO: 253985 - RNA, 22 nt, Human
gguugccuuuccucacuuccau

SEQ ID NO: 253986 - RNA, 24 nt, Human
gucugccucuuacuguuuucccau

SEQ ID NO: 253987 - RNA, 23 nt, Human
uaaaaugaggcucaaccucuguc

SEQ ID NO: 253988 - RNA, 19 nt, Human
uaaaaugucaacucuuaaa

SEQ ID NO: 253989 - RNA, 24 nt, Human
uaaguuccucugccccaucacacc

SEQ ID NO: 253990 - RNA, 18 nt, Human
uaauuugaucauuucaca

SEQ ID NO: 253991 - RNA, 25 nt, Human
uaccucuaaguaaaaugucaacucu

SEQ ID NO: 253992 - RNA, 23 nt, Human
uaggugcaccagcacagagaaga

SEQ ID NO: 253993 - RNA, 23 nt, Human
uauuaaaccaugccccaccuucc

SEQ ID NO: 253994 - RNA, 24 nt, Human
ucaacacccaccacaaugccuauu

SEQ ID NO: 253995 - RNA, 20 nt, Human
ucaaccagaaaaagagagag

SEQ ID NO: 253996 - RNA, 25 nt, Human
ucaaccagaaaaagagagagaaauc

SEQ ID NO: 253997 - RNA, 19 nt, Human
ucacaccccucucccacua

SEQ ID NO: 253998 - RNA, 18 nt, Human
ucacugaauccucagaag

SEQ ID NO: 253999 - RNA, 23 nt, Human
uccagccuggaccaaauucaaaa

SEQ ID NO: 254000 - RNA, 21 nt, Human
uccauucugaugugaaggagg

SEQ ID NO: 254001 - RNA, 23 nt, Human
uccccaaauguggucccaaucag

SEQ ID NO: 254002 - RNA, 21 nt, Human
ucugccucuuacuguuuuccc

SEQ ID NO: 254003 - RNA, 26 nt, Human
ucugcuggucucacucuggcuccugu

SEQ ID NO: 254004 - RNA, 24 nt, Human
ucuggcaaggacuagaacaugcaa

SEQ ID NO: 254005 - RNA, 21 nt, Human
ucuucacucggcugcuccucc

SEQ ID NO: 254006 - RNA, 18 nt, Human
ugaaaagcaauaaaaaau

SEQ ID NO: 254007 - RNA, 23 nt, Human
ugaaaagcaauaaaaaauaugua

SEQ ID NO: 254008 - RNA, 21 nt, Human
ugaugugaaggaggagaagaa

SEQ ID NO: 254009 - RNA, 25 nt, Human
ugcacagcgaggugacuaugguuaa

SEQ ID NO: 254010 - RNA, 24 nt, Human
ugcagccagauccuaucuaaugcc

SEQ ID NO: 254011 - RNA, 21 nt, Human
ugcaugcuguagcacaagaaa

SEQ ID NO: 254012 - RNA, 19 nt, Human
ugccacucaagggagagcu

SEQ ID NO: 254013 - RNA, 23 nt, Human
ugccccaucacaccccucuccca

SEQ ID NO: 254014 - RNA, 19 nt, Human
ugcucauuaccauaaaccc

SEQ ID NO: 254015 - RNA, 18 nt, Human
uggcaaaggucagccagc

SEQ ID NO: 254016 - RNA, 18 nt, Human
uggcggaaugucagcaaa

SEQ ID NO: 254017 - RNA, 20 nt, Human
uggcuaggcaacaagaagcu

SEQ ID NO: 254018 - RNA, 19 nt, Human
uggggaggagacagaagga

SEQ ID NO: 254019 - RNA, 21 nt, Human
uggggguaacuagacaaagaa

SEQ ID NO: 254020 - RNA, 20 nt, Human
uggucucacucuggcuccug

SEQ ID NO: 254021 - RNA, 21 nt, Human
uggugaggugagcaagaaagu

SEQ ID NO: 254022 - RNA, 25 nt, Human
ugguggggcuguuccagccuggggc

SEQ ID NO: 254023 - RNA, 19 nt, Human
ugugccuguaacuuaagcu

SEQ ID NO: 254024 - RNA, 20 nt, Human
ugugccuguaacuuaagcuu

SEQ ID NO: 254025 - RNA, 22 nt, Human
uuaaaccaugccccaccuuccc

SEQ ID NO: 254026 - RNA, 18 nt, Human
uuauaaauucuagcuaua

SEQ ID NO: 254027 - RNA, 18 nt, Human
uucaccuguccuuggcuc

SEQ ID NO: 254028 - RNA, 18 nt, Human
uucacucccaccaugagg

SEQ ID NO: 254029 - RNA, 18 nt, Human
uuccagccuggaccaaau

SEQ ID NO: 254030 - RNA, 24 nt, Human
uuccccagcagcauggugcagggc

SEQ ID NO: 254031 - RNA, 21 nt, Human
uucuaaaagagacaauuuuaa

SEQ ID NO: 254032 - RNA, 20 nt, Human
uucucaggccccacccacac

SEQ ID NO: 254033 - RNA, 25 nt, Human
uucucugacaauggaauacuauuca

SEQ ID NO: 254034 - RNA, 24 nt, Human
uuggcaaaggucagccagcuaugu

SEQ ID NO: 254035 - RNA, 21 nt, Human
uuucagagcccuugaccaggc

SEQ ID NO: 254036 - RNA, 18 nt, Human
aaaaacaaccccaaaccc

SEQ ID NO: 254037 - RNA, 21 nt, Human
aaaaacaaccccaaacccaaa

SEQ ID NO: 254038 - RNA, 23 nt, Human
aaaaacaaccccaaacccaaaga

SEQ ID NO: 254039 - RNA, 23 nt, Human
aaaaagaacaaaaacaaccccaa

SEQ ID NO: 254040 - RNA, 24 nt, Human
aaaaagaacaaaaacaaccccaaa

SEQ ID NO: 254041 - RNA, 22 nt, Human
aaaaagcagaauaacugcccca

SEQ ID NO: 254042 - RNA, 19 nt, Human
aaaaagcagaauaacuggu

SEQ ID NO: 254043 - RNA, 20 nt, Human
aaaagaacaaaaacaacccc

SEQ ID NO: 254044 - RNA, 23 nt, Human
aaaagaacaaaaacaaccccaaa

SEQ ID NO: 254045 - RNA, 25 nt, Human
aaaagccaagauaaaaccaaaagca

SEQ ID NO: 254046 - RNA, 22 nt, Human
aaacaaaugcacauuugucccu

SEQ ID NO: 254047 - RNA, 22 nt, Human
aaacaaccccaaacccaaagac

SEQ ID NO: 254048 - RNA, 19 nt, Human
aaacaacugaccugagggc

SEQ ID NO: 254049 - RNA, 24 nt, Human
aaacaguaaacacaaaggauaguc

SEQ ID NO: 254050 - RNA, 26 nt, Human
aaaccaaaagcaaacuugcuaaaaaa

SEQ ID NO: 254051 - RNA, 25 nt, Human
aaagaacaaaaacaaccccaaaccc

SEQ ID NO: 254052 - RNA, 19 nt, Human
aaagcagaauaacugcccc

SEQ ID NO: 254053 - RNA, 21 nt, Human
aaauccuccaaacaaaaugcc

SEQ ID NO: 254054 - RNA, 20 nt, Human
aaaugcuagaauuguccacu

SEQ ID NO: 254055 - RNA, 19 nt, Human
aacaaaaacaaccccaaac

SEQ ID NO: 254056 - RNA, 22 nt, Human
aacaaaaacaaccccaaaccca

SEQ ID NO: 254057 - RNA, 24 nt, Human
aacaaaaacaaccccaaacccaaa

SEQ ID NO: 254058 - RNA, 25 nt, Human
aacaaaaacaaccccaaacccaaag

SEQ ID NO: 254059 - RNA, 24 nt, Human
aacaaccccaaacccaaagacaaa

SEQ ID NO: 254060 - RNA, 18 nt, Human
aaccaaggaagaugacag

SEQ ID NO: 254061 - RNA, 22 nt, Human
aacccaaagacaaaaguaaaga

SEQ ID NO: 254062 - RNA, 18 nt, Human
aaccuucucuccuuucuu

SEQ ID NO: 254063 - RNA, 25 nt, Human
aacgcaaccacacuggaugcagaaa

SEQ ID NO: 254064 - RNA, 22 nt, Human
aacucugaaauccuccaaacaa

SEQ ID NO: 254065 - RNA, 18 nt, Human
aagacaaaaguaaagaaa

SEQ ID NO: 254066 - RNA, 23 nt, Human
aagcggagagcgaggcugugacc

SEQ ID NO: 254067 - RNA, 24 nt, Human
aagugccauucugaaccaacaccc

SEQ ID NO: 254068 - RNA, 18 nt, Human
aaucagccagccaugaug

SEQ ID NO: 254069 - RNA, 19 nt, Human
acaaaaacaaccccaaacc

SEQ ID NO: 254070 - RNA, 22 nt, Human
acaaaaacaaccccaaacccaa

SEQ ID NO: 254071 - RNA, 24 nt, Human
acaaaaacaaccccaaacccaaag

SEQ ID NO: 254072 - RNA, 19 nt, Human
accccaaacccaaagacaa

SEQ ID NO: 254073 - RNA, 23 nt, Human
acccugacacuucugaaacccac

SEQ ID NO: 254074 - RNA, 24 nt, Human
accuaaaaaccuucucuccuuucu

SEQ ID NO: 254075 - RNA, 19 nt, Human
acuacauuuauugaagacu

SEQ ID NO: 254076 - RNA, 20 nt, Human
acugaggaaaacucagcuga

SEQ ID NO: 254077 - RNA, 23 nt, Human
agacaaaaguaaagaaaagggac

SEQ ID NO: 254078 - RNA, 20 nt, Human
agacaaaaguaaagaaaauc

SEQ ID NO: 254079 - RNA, 22 nt, Human
agacaaaaguaaagaaaaucca

SEQ ID NO: 254080 - RNA, 19 nt, Human
agacggccaaggguccugu

SEQ ID NO: 254081 - RNA, 24 nt, Human
agcaaacuugcuaaaaaauccuga

SEQ ID NO: 254082 - RNA, 23 nt, Human
agccaugaugaaaaaaugagucc

SEQ ID NO: 254083 - RNA, 18 nt, Human
agccccgagcucucccuc

SEQ ID NO: 254084 - RNA, 18 nt, Human
aggguccuguccucguuc

SEQ ID NO: 254085 - RNA, 20 nt, Human
agugcauacucaaaggcuuu

SEQ ID NO: 254086 - RNA, 18 nt, Human
augcaagaauuaaagacu

SEQ ID NO: 254087 - RNA, 26 nt, Human
augccacaaccaucccacuuggaauu

SEQ ID NO: 254088 - RNA, 21 nt, Human
caaaaacaaccccaaacccaa

SEQ ID NO: 254089 - RNA, 23 nt, Human
caaaaacaaccccaaacccaaag

SEQ ID NO: 254090 - RNA, 24 nt, Human
caaaaacaaccccaaacccaaaga

SEQ ID NO: 254091 - RNA, 25 nt, Human
caaaaacaaccccaaacccaaagac

SEQ ID NO: 254092 - RNA, 24 nt, Human
caaaaacaguaaacacaaaggaua

SEQ ID NO: 254093 - RNA, 21 nt, Human
caaaaaggaagcccacaucuc

SEQ ID NO: 254094 - RNA, 25 nt, Human
caaaaguaaagaaaauccacuuuuc

SEQ ID NO: 254095 - RNA, 26 nt, Human
caaaaugcuagaauuguccacuagug

SEQ ID NO: 254096 - RNA, 23 nt, Human
caaacaaaugcacauuugucccu

SEQ ID NO: 254097 - RNA, 21 nt, Human
caaacccaaagacaaaaguaa

SEQ ID NO: 254098 - RNA, 24 nt, Human
caaacccaaagacaaaaguaaaga

SEQ ID NO: 254099 - RNA, 23 nt, Human
caaagcccacaaugguggaguuc

SEQ ID NO: 254100 - RNA, 22 nt, Human
caacaugauuacuaaaagccaa

SEQ ID NO: 254101 - RNA, 23 nt, Human
caacauuucacaugcugaccuaa

SEQ ID NO: 254102 - RNA, 25 nt, Human
caagauaaaaccaaaagcaaacuug

SEQ ID NO: 254103 - RNA, 26 nt, Human
caauaaaaauguaauuccaaccuuaa

SEQ ID NO: 254104 - RNA, 21 nt, Human
caauaaaccaaggaagaugac

SEQ ID NO: 254105 - RNA, 19 nt, Human
cacaagacucaaaaaggaa

SEQ ID NO: 254106 - RNA, 19 nt, Human
caccugugaccagaccagc

SEQ ID NO: 254107 - RNA, 21 nt, Human
cacggcuuuacaaaaagcaga

SEQ ID NO: 254108 - RNA, 26 nt, Human
cacucagcucaaaguuaaacagcuga

SEQ ID NO: 254109 - RNA, 18 nt, Human
cacuuggaaucacuccac

SEQ ID NO: 254110 - RNA, 18 nt, Human
cagaaucuaaauuaaaau

SEQ ID NO: 254111 - RNA, 18 nt, Human
cagccaugaugaaaaaau

SEQ ID NO: 254112 - RNA, 18 nt, Human
cagcucaaaguuaaacag

SEQ ID NO: 254113 - RNA, 23 nt, Human
caggaaauagcauagcacuucau

SEQ ID NO: 254114 - RNA, 18 nt, Human
caucccacuuggaaucac

SEQ ID NO: 254115 - RNA, 21 nt, Human
caucccacuuggaaucacucc

SEQ ID NO: 254116 - RNA, 19 nt, Human
caugcaagaauuaaagacu

SEQ ID NO: 254117 - RNA, 21 nt, Human
cauuacaggagacaauuggcc

SEQ ID NO: 254118 - RNA, 22 nt, Human
ccaaaagcaaacuugcuaaaaa

SEQ ID NO: 254119 - RNA, 23 nt, Human
ccaaacccaaagacaaaaguaaa

SEQ ID NO: 254120 - RNA, 22 nt, Human
ccaaagacaaaaguaaagaaaa

SEQ ID NO: 254121 - RNA, 25 nt, Human
ccaagugugcgccccuccggcuccu

SEQ ID NO: 254122 - RNA, 18 nt, Human
ccacaaccaucccacuug

SEQ ID NO: 254123 - RNA, 24 nt, Human
ccagaaguaacugcacuuuucaac

SEQ ID NO: 254124 - RNA, 20 nt, Human
cccaaacccaaagacaaaag

SEQ ID NO: 254125 - RNA, 26 nt, Human
cccccggccgcugccaccucugcggg

SEQ ID NO: 254126 - RNA, 18 nt, Human
ccccgagcucucccucug

SEQ ID NO: 254127 - RNA, 23 nt, Human
ccccucuccccucacucagcuca

SEQ ID NO: 254128 - RNA, 21 nt, Human
ccccucuguccuucccccucc

SEQ ID NO: 254129 - RNA, 24 nt, Human
cccucuccccucacucagcucaaa

SEQ ID NO: 254130 - RNA, 23 nt, Human
cccuguauaagcccauguaaaag

SEQ ID NO: 254131 - RNA, 22 nt, Human
cccuuaaaaacacagaaucuaa

SEQ ID NO: 254132 - RNA, 19 nt, Human
ccgcugccaccucugcggg

SEQ ID NO: 254133 - RNA, 19 nt, Human
ccuccaagccccgagcucu

SEQ ID NO: 254134 - RNA, 18 nt, Human
ccuccggcuccuuccccu

SEQ ID NO: 254135 - RNA, 19 nt, Human
ccucguucucugccucugc

SEQ ID NO: 254136 - RNA, 18 nt, Human
ccugcccccggccgcugc

SEQ ID NO: 254137 - RNA, 18 nt, Human
ccugugaccagaccagcc

SEQ ID NO: 254138 - RNA, 21 nt, Human
cgcagggacccgaaugcccgg

SEQ ID NO: 254139 - RNA, 18 nt, Human
cggccgcugccaccucug

SEQ ID NO: 254140 - RNA, 19 nt, Human
cggcuccuuccccuccccc

SEQ ID NO: 254141 - RNA, 22 nt, Human
cggcuuuacaaaaagcagaauc

SEQ ID NO: 254142 - RNA, 21 nt, Human
cuaaaaaccuucucuccuuuc

SEQ ID NO: 254143 - RNA, 21 nt, Human
cuaaaagccaagauaaaacca

SEQ ID NO: 254144 - RNA, 22 nt, Human
cuaacacaagacucaaaaagga

SEQ ID NO: 254145 - RNA, 19 nt, Human
cuaaugccacaaccauccc

SEQ ID NO: 254146 - RNA, 23 nt, Human
cuccacccugacacuucugaaac

SEQ ID NO: 254147 - RNA, 23 nt, Human
cucuccccucacucagcucaaag

SEQ ID NO: 254148 - RNA, 19 nt, Human
cucuccuuucuucucaccu

SEQ ID NO: 254149 - RNA, 20 nt, Human
cucugccucugcugcccucc

SEQ ID NO: 254150 - RNA, 19 nt, Human
cugaacccuaccugacaug

SEQ ID NO: 254151 - RNA, 19 nt, Human
cugccccaaauugaaauua

SEQ ID NO: 254152 - RNA, 20 nt, Human
cugugaccagaccagccaac

SEQ ID NO: 254153 - RNA, 19 nt, Human
cuuaaacuaaugccacaac

SEQ ID NO: 254154 - RNA, 21 nt, Human
cuuuaccccucuccccucacu

SEQ ID NO: 254155 - RNA, 18 nt, Human
cuuuagggcucucucaaa

SEQ ID NO: 254156 - RNA, 20 nt, Human
gaacaaaaacaaccccaaac

SEQ ID NO: 254157 - RNA, 20 nt, Human
gaacccuuaaaaacacagaa

SEQ ID NO: 254158 - RNA, 20 nt, Human
gaagcuuucacaauccgguu

SEQ ID NO: 254159 - RNA, 19 nt, Human
gcaaaugggaccaaucagu

SEQ ID NO: 254160 - RNA, 21 nt, Human
gcccacaaugguggaguucug

SEQ ID NO: 254161 - RNA, 19 nt, Human
gcggcaccggcgcgagccc

SEQ ID NO: 254162 - RNA, 19 nt, Human
gcuuugguuggaagucacu

SEQ ID NO: 254163 - RNA, 21 nt, Human
ggccaaggguccuguccucgu

SEQ ID NO: 254164 - RNA, 21 nt, Human
gggcggcggcaccggcgcgag

SEQ ID NO: 254165 - RNA, 20 nt, Human
uaaaaaauccugaauuccau

SEQ ID NO: 254166 - RNA, 21 nt, Human
uaaaaccaaaagcaaacuugc

SEQ ID NO: 254167 - RNA, 20 nt, Human
uaaaacuucaaaaagaacaa

SEQ ID NO: 254168 - RNA, 19 nt, Human
uaaaagccaagauaaaacc

SEQ ID NO: 254169 - RNA, 24 nt, Human
uaaaagccaagauaaaaccaaaag

SEQ ID NO: 254170 - RNA, 25 nt, Human
uaaaaggucucagcaccuaacacaa

SEQ ID NO: 254171 - RNA, 20 nt, Human
uaaacaacugaccugagggc

SEQ ID NO: 254172 - RNA, 22 nt, Human
uaaccaggaaauagcauagcac

SEQ ID NO: 254173 - RNA, 24 nt, Human
uaaccaggaaauagcauagcacuu

SEQ ID NO: 254174 - RNA, 22 nt, Human
uaauuccaaccuuaauauucau

SEQ ID NO: 254175 - RNA, 22 nt, Human
uacaaaaagcagaauaacugcc

SEQ ID NO: 254176 - RNA, 27 nt, Human
uacaaaaagcagaauaacugccccaaa

SEQ ID NO: 254177 - RNA, 26 nt, Human
uacaaaauuaggcucucguaccccaa

SEQ ID NO: 254178 - RNA, 20 nt, Human
uacaacauaccauauccuuc

SEQ ID NO: 254179 - RNA, 18 nt, Human
uacaugaagcuuucacaa

SEQ ID NO: 254180 - RNA, 21 nt, Human
uagugcauacucaaaggcuuu

SEQ ID NO: 254181 - RNA, 20 nt, Human
uauggagaaaucagccagcc

SEQ ID NO: 254182 - RNA, 21 nt, Human
ucaaaggcuuugguuggaagu

SEQ ID NO: 254183 - RNA, 21 nt, Human
ucaaguuuuauuuugccucuu

SEQ ID NO: 254184 - RNA, 22 nt, Human
ucaaguuuuauuuugccucuug

SEQ ID NO: 254185 - RNA, 22 nt, Human
ucacaaggugcaguuaagagac

SEQ ID NO: 254186 - RNA, 23 nt, Human
ucacaaggugcaguuaagagacu

SEQ ID NO: 254187 - RNA, 24 nt, Human
ucagcaccuaacacaagacucaaa

SEQ ID NO: 254188 - RNA, 19 nt, Human
ucagucccugaacccuacc

SEQ ID NO: 254189 - RNA, 26 nt, Human
uccaaccagugaguagucucaaagug

SEQ ID NO: 254190 - RNA, 27 nt, Human
uccaaccuuaauauucauaaccaggaa

SEQ ID NO: 254191 - RNA, 18 nt, Human
uccccuaagacugagagc

SEQ ID NO: 254192 - RNA, 23 nt, Human
ucccuacaaaguacaacaugccu

SEQ ID NO: 254193 - RNA, 18 nt, Human
uccgcuguuuccccucca

SEQ ID NO: 254194 - RNA, 22 nt, Human
ucucccucugcugcugccuuag

SEQ ID NO: 254195 - RNA, 23 nt, Human
ucuccuuucuucucaccuauuua

SEQ ID NO: 254196 - RNA, 19 nt, Human
ucugaaacccacucuuucu

SEQ ID NO: 254197 - RNA, 18 nt, Human
ucuguccuucccccuccu

SEQ ID NO: 254198 - RNA, 21 nt, Human
ucuguccuucccccuccuucu

SEQ ID NO: 254199 - RNA, 22 nt, Human
ucuuucucuuuaccccucuccc

SEQ ID NO: 254200 - RNA, 19 nt, Human
ugaaagcaagaccaggggc

SEQ ID NO: 254201 - RNA, 23 nt, Human
ugagggcaaaugggaccaaucag

SEQ ID NO: 254202 - RNA, 20 nt, Human
ugagguuaauuuccagaagu

SEQ ID NO: 254203 - RNA, 18 nt, Human
ugaugaaaaaaugagucc

SEQ ID NO: 254204 - RNA, 30 nt, Human
ugccugaaccaacagucauuacaggagacc

SEQ ID NO: 254205 - RNA, 21 nt, Human
ugcuaaaaaauccugaauucc

SEQ ID NO: 254206 - RNA, 27 nt, Human
ugcuaaaaaauccugaauuccaugagg

SEQ ID NO: 254207 - RNA, 19 nt, Human
ugcucagaacccuuaaaaa

SEQ ID NO: 254208 - RNA, 20 nt, Human
ugggaccaaucagucccuga

SEQ ID NO: 254209 - RNA, 19 nt, Human
ugguuuacauuauucaaag

SEQ ID NO: 254210 - RNA, 23 nt, Human
uguaaaaggucucagcaccuaac

SEQ ID NO: 254211 - RNA, 23 nt, Human
uguccucguucucugccucugcu

SEQ ID NO: 254212 - RNA, 28 nt, Human
ugugaccagaccagccaacaugauuacu

SEQ ID NO: 254213 - RNA, 21 nt, Human
uuaagcuggggcgccagaagc

SEQ ID NO: 254214 - RNA, 20 nt, Human
uuagugcauacucaaaggcu

SEQ ID NO: 254215 - RNA, 25 nt, Human
uucaaagugccauucugaaccaaca

SEQ ID NO: 254216 - RNA, 23 nt, Human
uucaacagauuaaguccuacaaa

SEQ ID NO: 254217 - RNA, 20 nt, Human
uucaucucaagcccucaaaa

SEQ ID NO: 254218 - RNA, 19 nt, Human
uuccgcuguuuccccucca

SEQ ID NO: 254219 - RNA, 23 nt, Human
uucuagaggcugaacuguaugaa

SEQ ID NO: 254220 - RNA, 25 nt, Human
uucucugccucugcugcccucccga

SEQ ID NO: 254221 - RNA, 22 nt, Human
uugaagacucucucccuguaua

SEQ ID NO: 254222 - RNA, 20 nt, Human
uugagguuaauuuccagaag

SEQ ID NO: 254223 - RNA, 22 nt, Human
uuggaagucacuagguaccacu

SEQ ID NO: 254224 - RNA, 24 nt, Human
uuucacagucaccugugaccagac

SEQ ID NO: 254225 - RNA, 19 nt, Human
uuugguuggaagucacuag

SEQ ID NO: 254226 - RNA, 18 nt, Human
uuugucagccgcagccuc

SEQ ID NO: 254227 - RNA, 18 nt, Human
ccaaguaccaaggggcgg

SEQ ID NO: 254228 - RNA, 23 nt, Human
cgaugcaguguuacacgugugug

SEQ ID NO: 254229 - RNA, 18 nt, Human
ggcggcggggggggcggg

SEQ ID NO: 254230 - RNA, 20 nt, Human
ggcggcggggggggcggggg

SEQ ID NO: 254231 - RNA, 19 nt, Human
gggcggcggggggggcggg

SEQ ID NO: 254232 - RNA, 22 nt, Human
gggcggcggggggggcgggggg

SEQ ID NO: 254233 - RNA, 19 nt, Human
uccauccuacugcacauac

SEQ ID NO: 254234 - RNA, 19 nt, Human
uuaauacagcggugccucc

SEQ ID NO: 254235 - RNA, 24 nt, Human
caaucugggggcgggaaaaagggg

SEQ ID NO: 254236 - RNA, 21 nt, Human
cagccuccagaaaaaaagaga

SEQ ID NO: 254237 - RNA, 23 nt, Human
gacaagagaauauacaggaaaga

SEQ ID NO: 254238 - RNA, 23 nt, Human
gccagccuccagaaaaaaagaga

SEQ ID NO: 254239 - RNA, 21 nt, Human
ggugccagccuccagaaaaaa

SEQ ID NO: 254240 - RNA, 20 nt, Human
guaucacaccagaaguuuau

SEQ ID NO: 254241 - RNA, 19 nt, Human
uauacaggaaagaagcauu

SEQ ID NO: 254242 - RNA, 20 nt, Human
ucacaccagaaguuuauuau

SEQ ID NO: 254243 - RNA, 18 nt, Human
ucucaggguucuugugua

SEQ ID NO: 254244 - RNA, 19 nt, Human
ucuccuuugacccucacug

SEQ ID NO: 254245 - RNA, 21 nt, Human
ugccagccuccagaaaaaaag

SEQ ID NO: 254246 - RNA, 23 nt, Human
ugcuacagggggauacaaaauca

SEQ ID NO: 254247 - RNA, 23 nt, Human
aaacaagaauacaggauauuggc

SEQ ID NO: 254248 - RNA, 19 nt, Human
aagaauacaggauauuggc

SEQ ID NO: 254249 - RNA, 22 nt, Human
acagaauucuuaaaaagccaac

SEQ ID NO: 254250 - RNA, 20 nt, Human
ccccuccuaccuaaaaucua

SEQ ID NO: 254251 - RNA, 24 nt, Human
ccccuccuaccuaaaaucuaagaa

SEQ ID NO: 254252 - RNA, 22 nt, Human
gccgaggaggaggaagcagcaa

SEQ ID NO: 254253 - RNA, 18 nt, Human
guaaaacaagaauacagg

SEQ ID NO: 254254 - RNA, 23 nt, Human
guucauaauuccucugcuccccu

SEQ ID NO: 254255 - RNA, 23 nt, Human
uagguuucucauacgugcaauuc

SEQ ID NO: 254256 - RNA, 20 nt, Human
uccccuccuaccuaaaaucu

SEQ ID NO: 254257 - RNA, 18 nt, Human
uggaauggugaggccgag

SEQ ID NO: 254258 - RNA, 21 nt, Human
uucuaauccaaauguaaaaca

SEQ ID NO: 254259 - RNA, 27 nt, Human
uuuuuuuuuuuuuuuuuuuuuuugggg

SEQ ID NO: 254260 - RNA, 18 nt, Human
aggaaggcaggcaggucu

SEQ ID NO: 254261 - RNA, 23 nt, Human
augaccuuugcucuggaacagaa

SEQ ID NO: 254262 - RNA, 18 nt, Human
caagcggcugaaugaccu

SEQ ID NO: 254263 - RNA, 23 nt, Human
ccuuugcucuggaacagaaguca

SEQ ID NO: 254264 - RNA, 23 nt, Human
ccuuugcucuggaacagaaguug

SEQ ID NO: 254265 - RNA, 21 nt, Human
cggguggggggaaaaggcuga

SEQ ID NO: 254266 - RNA, 22 nt, Human
cuggaacagaagucaggaaggc

SEQ ID NO: 254267 - RNA, 19 nt, Human
ggaacagcuucugcaagca

SEQ ID NO: 254268 - RNA, 19 nt, Human
gggaaaaggcugauucaag

SEQ ID NO: 254269 - RNA, 21 nt, Human
gggaaaaggcugauucaagcg

SEQ ID NO: 254270 - RNA, 19 nt, Human
ggggaaaaggcugauucaa

SEQ ID NO: 254271 - RNA, 18 nt, Human
gguggggggaaaaggcug

SEQ ID NO: 254272 - RNA, 22 nt, Human
uaaacaaaguuggggaccggga

SEQ ID NO: 254273 - RNA, 20 nt, Human
ucaagcggcugaaugaccuu

SEQ ID NO: 254274 - RNA, 23 nt, Human
ugccggucacagaucuuuauggg

SEQ ID NO: 254275 - RNA, 19 nt, Human
accuucgaacagcuggagc

SEQ ID NO: 254276 - RNA, 21 nt, Human
cagcgcggugugggugcggcg

SEQ ID NO: 254277 - RNA, 18 nt, Human
gggugcggcgcccucgcc

SEQ ID NO: 254278 - RNA, 18 nt, Human
ggugugggugcggcgccc

SEQ ID NO: 254279 - RNA, 21 nt, Human
gucuggaucaccuucgaacag

SEQ ID NO: 254280 - RNA, 27 nt, Human
uaaaaugaaugagaguuuuuaaacccc

SEQ ID NO: 254281 - RNA, 23 nt, Human
uagaaaaaaaauguaacuggaaa

SEQ ID NO: 254282 - RNA, 21 nt, Human
ucuggaucaccuucgaacagc

SEQ ID NO: 254283 - RNA, 19 nt, Human
ugggugcggcgcccucgcc

SEQ ID NO: 254284 - RNA, 20 nt, Human
uuagguaugaggcugaugcc

SEQ ID NO: 254285 - RNA, 23 nt, Human
uuuuuuuuuuuuuuuuuuuuagg

SEQ ID NO: 254286 - RNA, 21 nt, Human
aaaaaagaaguacuuucuccc

SEQ ID NO: 254287 - RNA, 28 nt, Human
aaaaaccagcucacucccaggacagagc

SEQ ID NO: 254288 - RNA, 21 nt, Human
aaaaaugaaaaauuagccaga

SEQ ID NO: 254289 - RNA, 24 nt, Human
aaaaccuggcacauggcacagugg

SEQ ID NO: 254290 - RNA, 21 nt, Human
aaaagcagcugccacugaagc

SEQ ID NO: 254291 - RNA, 20 nt, Human
aacacggcaaaacccugucu

SEQ ID NO: 254292 - RNA, 21 nt, Human
aacacggcaaaacccugucuc

SEQ ID NO: 254293 - RNA, 22 nt, Human
aacauagugagacccuggcucu

SEQ ID NO: 254294 - RNA, 21 nt, Human
aacccagccaccauacuuaug

SEQ ID NO: 254295 - RNA, 23 nt, Human
aacccugaaccagcaggggccgg

SEQ ID NO: 254296 - RNA, 22 nt, Human
aagaaguacuuucuccccaggg

SEQ ID NO: 254297 - RNA, 24 nt, Human
aagagugaaaacucugucucaaaa

SEQ ID NO: 254298 - RNA, 19 nt, Human
aagcacacagccucaucac

SEQ ID NO: 254299 - RNA, 24 nt, Human
aagcagaagaaucgcuugaaccca

SEQ ID NO: 254300 - RNA, 19 nt, Human
aagcagugggucagaccaa

SEQ ID NO: 254301 - RNA, 22 nt, Human
aagcccaacuagcccacaugga

SEQ ID NO: 254302 - RNA, 19 nt, Human
aagcugaaccuggauggca

SEQ ID NO: 254303 - RNA, 22 nt, Human
aaggugggacuccgucuccgcu

SEQ ID NO: 254304 - RNA, 24 nt, Human
aaucacuugaggccaggaguucaa

SEQ ID NO: 254305 - RNA, 24 nt, Human
aaucgcuugaacccaagaggcgga

SEQ ID NO: 254306 - RNA, 23 nt, Human
acaaagaaaaguccucucagaaa

SEQ ID NO: 254307 - RNA, 19 nt, Human
acacagccucaucacuaac

SEQ ID NO: 254308 - RNA, 20 nt, Human
acagagugagacccugccuc

SEQ ID NO: 254309 - RNA, 18 nt, Human
acagccucaucacuaacc

SEQ ID NO: 254310 - RNA, 24 nt, Human
acaugccuguccagagcacagcug

SEQ ID NO: 254311 - RNA, 20 nt, Human
accagcaggggccgggugcc

SEQ ID NO: 254312 - RNA, 20 nt, Human
acccagaucgcaccacugca

SEQ ID NO: 254313 - RNA, 24 nt, Human
acccagcucucacuugcuggggag

SEQ ID NO: 254314 - RNA, 22 nt, Human
acccugucucuaccaaaaauga

SEQ ID NO: 254315 - RNA, 22 nt, Human
acgcguguguguguaugugugu

SEQ ID NO: 254316 - RNA, 23 nt, Human
acgcguguguguguauguguguu

SEQ ID NO: 254317 - RNA, 18 nt, Human
acuccgucuccgcuaaaa

SEQ ID NO: 254318 - RNA, 21 nt, Human
acucugucaccuaggcuauag

SEQ ID NO: 254319 - RNA, 18 nt, Human
acugcacgccagccuggg

SEQ ID NO: 254320 - RNA, 24 nt, Human
acugcacgccagccugggcaacag

SEQ ID NO: 254321 - RNA, 26 nt, Human
acugcacuccagcgugggcauaagag

SEQ ID NO: 254322 - RNA, 18 nt, Human
acugugucccagaacauc

SEQ ID NO: 254323 - RNA, 19 nt, Human
acugugugacuucuaaggc

SEQ ID NO: 254324 - RNA, 18 nt, Human
agaaaaguccucucagaa

SEQ ID NO: 254325 - RNA, 18 nt, Human
agaaguacuuucucccca

SEQ ID NO: 254326 - RNA, 24 nt, Human
agaaucacuugaggccaggaguuc

SEQ ID NO: 254327 - RNA, 23 nt, Human
agagcaguggguaccccaaaaug

SEQ ID NO: 254328 - RNA, 24 nt, Human
agcacuuugggaggcugaggcagg

SEQ ID NO: 254329 - RNA, 24 nt, Human
agcacuuugggaggcugagguggg

SEQ ID NO: 254330 - RNA, 18 nt, Human
agcaggguggagaaguac

SEQ ID NO: 254331 - RNA, 18 nt, Human
agccacuaugauuugggg

SEQ ID NO: 254332 - RNA, 23 nt, Human
agccagacaugauggugggugcc

SEQ ID NO: 254333 - RNA, 21 nt, Human
agccaguucgaggcaggaggu

SEQ ID NO: 254334 - RNA, 21 nt, Human
agcccaacccucaagcugccc

SEQ ID NO: 254335 - RNA, 20 nt, Human
agcccggccaacacggcaag

SEQ ID NO: 254336 - RNA, 21 nt, Human
agccgcacacacaggagccca

SEQ ID NO: 254337 - RNA, 24 nt, Human
agcuauucgggaggcugagguggg

SEQ ID NO: 254338 - RNA, 25 nt, Human
agcuguuucccugcuaagggcuggu

SEQ ID NO: 254339 - RNA, 24 nt, Human
agcuuccaaguccuuucgacuccc

SEQ ID NO: 254340 - RNA, 18 nt, Human
aggaaaugaagcugugcu

SEQ ID NO: 254341 - RNA, 18 nt, Human
aggcaggagaaucacuug

SEQ ID NO: 254342 - RNA, 19 nt, Human
aggcggagguugcagugaa

SEQ ID NO: 254343 - RNA, 24 nt, Human
aggcugaagcagaagaaucgcuug

SEQ ID NO: 254344 - RNA, 24 nt, Human
aggcugaggcaggagaaucacuug

SEQ ID NO: 254345 - RNA, 19 nt, Human
aggcugaggugggaggauc

SEQ ID NO: 254346 - RNA, 19 nt, Human
aggcugagguggguggauc

SEQ ID NO: 254347 - RNA, 18 nt, Human
aggggccaacccugaacc

SEQ ID NO: 254348 - RNA, 19 nt, Human
aggugggaggaucacuuag

SEQ ID NO: 254349 - RNA, 22 nt, Human
agguggguggaucacccgaggu

SEQ ID NO: 254350 - RNA, 22 nt, Human
agguugaggcugcagugagccg

SEQ ID NO: 254351 - RNA, 18 nt, Human
agucccagcuauucggga

SEQ ID NO: 254352 - RNA, 19 nt, Human
agugcaguggcgugaucuc

SEQ ID NO: 254353 - RNA, 20 nt, Human
agugcaguggcgugaucucg

SEQ ID NO: 254354 - RNA, 23 nt, Human
agugcaguggcgugaucucggcu

SEQ ID NO: 254355 - RNA, 24 nt, Human
agugcaguggcgugaucucggcuc

SEQ ID NO: 254356 - RNA, 24 nt, Human
aguggcucacgcuuguaaucccag

SEQ ID NO: 254357 - RNA, 18 nt, Human
aucaaaauccucaaaccu

SEQ ID NO: 254358 - RNA, 19 nt, Human
aucaaaauccucaaaccuc

SEQ ID NO: 254359 - RNA, 23 nt, Human
aucaaaauccucaaaccucauac

SEQ ID NO: 254360 - RNA, 24 nt, Human
aucgcaccacugcacgccagccug

SEQ ID NO: 254361 - RNA, 21 nt, Human
augaacucaaacccugggacc

SEQ ID NO: 254362 - RNA, 24 nt, Human
augcugaggcucaugggauacagc

SEQ ID NO: 254363 - RNA, 23 nt, Human
caaaaaugaaaaauuagccagac

SEQ ID NO: 254364 - RNA, 23 nt, Human
caaaauccucaaaccucauacaa

SEQ ID NO: 254365 - RNA, 20 nt, Human
caaccuuucucauccccaaa

SEQ ID NO: 254366 - RNA, 23 nt, Human
cacacagccucaucacuaaccag

SEQ ID NO: 254367 - RNA, 24 nt, Human
cacaccuguaaucccagcacuuug

SEQ ID NO: 254368 - RNA, 18 nt, Human
cacaccuguagucccagc

SEQ ID NO: 254369 - RNA, 18 nt, Human
cacaggagcccauggccu

SEQ ID NO: 254370 - RNA, 24 nt, Human
caccacugcacgccagccugggca

SEQ ID NO: 254371 - RNA, 20 nt, Human
cacccuccaacccagccacc

SEQ ID NO: 254372 - RNA, 24 nt, Human
cacccuccaacccagccaccauac

SEQ ID NO: 254373 - RNA, 21 nt, Human
caccgccccauuaguguccca

SEQ ID NO: 254374 - RNA, 24 nt, Human
caccugagcuauuuacaagcugaa

SEQ ID NO: 254375 - RNA, 23 nt, Human
caccuguaaucccagcacuuugg

SEQ ID NO: 254376 - RNA, 24 nt, Human
caccuguaaucccagcacuuuggg

SEQ ID NO: 254377 - RNA, 23 nt, Human
caccuguagucccagcuauucgg

SEQ ID NO: 254378 - RNA, 24 nt, Human
caccuguagucccagcuauucggg

SEQ ID NO: 254379 - RNA, 24 nt, Human
cacgcuuguaaucccagcacuuug

SEQ ID NO: 254380 - RNA, 23 nt, Human
cacuccagcgugggcauaagagu

SEQ ID NO: 254381 - RNA, 20 nt, Human
cacucugucaccuaggcuau

SEQ ID NO: 254382 - RNA, 24 nt, Human
cacucugucaccuaggcuauagug

SEQ ID NO: 254383 - RNA, 22 nt, Human
cacugaggcccccagccaacag

SEQ ID NO: 254384 - RNA, 20 nt, Human
cacugcacgccagccugggc

SEQ ID NO: 254385 - RNA, 23 nt, Human
cacugcacgccagccugggcaac

SEQ ID NO: 254386 - RNA, 24 nt, Human
cacugcacgccagccugggcaaca

SEQ ID NO: 254387 - RNA, 18 nt, Human
cacugcacuccagcgugg

SEQ ID NO: 254388 - RNA, 19 nt, Human
cacugcacuccagcguggg

SEQ ID NO: 254389 - RNA, 19 nt, Human
cacugcacuccagcguggg

SEQ ID NO: 254390 - RNA, 20 nt, Human
cacugcacuccagcgugggc

SEQ ID NO: 254391 - RNA, 21 nt, Human
cacugcacuccagcgugggca

SEQ ID NO: 254392 - RNA, 23 nt, Human
cacugcacuccagcgugggcaua

SEQ ID NO: 254393 - RNA, 18 nt, Human
cacugugugacuucaggc

SEQ ID NO: 254394 - RNA, 18 nt, Human
cagaacauccucccgccc

SEQ ID NO: 254395 - RNA, 21 nt, Human
cagaauggggcugccucuguc

SEQ ID NO: 254396 - RNA, 25 nt, Human
cagagaacaugccuguccagagcac

SEQ ID NO: 254397 - RNA, 24 nt, Human
cagagaacaugccuguccccugaa

SEQ ID NO: 254398 - RNA, 24 nt, Human
cagcacuuugggaggcugaggcag

SEQ ID NO: 254399 - RNA, 25 nt, Human
cagcacuuugggaggcugaggcagg

SEQ ID NO: 254400 - RNA, 24 nt, Human
cagcacuuugggaggcugaggugg

SEQ ID NO: 254401 - RNA, 24 nt, Human
cagcuauucgggaggcugaggugg

SEQ ID NO: 254402 - RNA, 18 nt, Human
cagcucagaagcacacag

SEQ ID NO: 254403 - RNA, 25 nt, Human
cagcucccggagucuggcagccccu

SEQ ID NO: 254404 - RNA, 23 nt, Human
cagcugccaccaggcauccaccc

SEQ ID NO: 254405 - RNA, 19 nt, Human
caggggccugggcaggcag

SEQ ID NO: 254406 - RNA, 22 nt, Human
caggggccugggcaggcagaau

SEQ ID NO: 254407 - RNA, 19 nt, Human
caucaucacacagaccaaa

SEQ ID NO: 254408 - RNA, 20 nt, Human
ccaaacaauuaauuuuccac

SEQ ID NO: 254409 - RNA, 22 nt, Human
ccaacaaugucagugcauugag

SEQ ID NO: 254410 - RNA, 18 nt, Human
ccaacccugaaccagcag

SEQ ID NO: 254411 - RNA, 18 nt, Human
ccacaaagaaaaguccuc

SEQ ID NO: 254412 - RNA, 21 nt, Human
ccacugcacgccagccugggc

SEQ ID NO: 254413 - RNA, 23 nt, Human
ccacugcacgccagccugggcaa

SEQ ID NO: 254414 - RNA, 24 nt, Human
ccacugcacgccagccugggcaac

SEQ ID NO: 254415 - RNA, 25 nt, Human
ccacugccaccaggggcucgcuggg

SEQ ID NO: 254416 - RNA, 19 nt, Human
ccagcccaacccucaagcu

SEQ ID NO: 254417 - RNA, 22 nt, Human
ccaggagguugaggcugcagug

SEQ ID NO: 254418 - RNA, 22 nt, Human
cccaacccucaagcugccccac

SEQ ID NO: 254419 - RNA, 26 nt, Human
cccauuagugucccauuagcuguuuc

SEQ ID NO: 254420 - RNA, 22 nt, Human
cccgaggucaagaguucgagac

SEQ ID NO: 254421 - RNA, 18 nt, Human
cccgcccuacacauagaa

SEQ ID NO: 254422 - RNA, 24 nt, Human
cccggccaacacggcaaaacccug

SEQ ID NO: 254423 - RNA, 18 nt, Human
cccuugguaagcuuuugg

SEQ ID NO: 254424 - RNA, 22 nt, Human
ccggagucuggcagccccuccu

SEQ ID NO: 254425 - RNA, 20 nt, Human
ccuccaacccagccaccaua

SEQ ID NO: 254426 - RNA, 18 nt, Human
ccucugucacucccucug

SEQ ID NO: 254427 - RNA, 22 nt, Human
ccugggcaacauagugagaccc

SEQ ID NO: 254428 - RNA, 21 nt, Human
ccuguagucccagcuacucgg

SEQ ID NO: 254429 - RNA, 22 nt, Human
ccuguagucccagcuacucggg

SEQ ID NO: 254430 - RNA, 21 nt, Human
ccuguagucccagcuauucgg

SEQ ID NO: 254431 - RNA, 18 nt, Human
ccuucggaugcccagcuc

SEQ ID NO: 254432 - RNA, 20 nt, Human
cgcacacacaggagcccaug

SEQ ID NO: 254433 - RNA, 21 nt, Human
cgcagccgggcaggggccaac

SEQ ID NO: 254434 - RNA, 23 nt, Human
cgcccuacacauagaaaccuggg

SEQ ID NO: 254435 - RNA, 23 nt, Human
cgcuuguaaucccagcacuuugg

SEQ ID NO: 254436 - RNA, 24 nt, Human
cgcuuguaaucccagcacuuuggg

SEQ ID NO: 254437 - RNA, 27 nt, Human
cgggaggcugaagcagaagaaucgcuu

SEQ ID NO: 254438 - RNA, 24 nt, Human
cgggaggcugaggugggaggauca

SEQ ID NO: 254439 - RNA, 21 nt, Human
cuauuuacaagcugaaccugg

SEQ ID NO: 254440 - RNA, 20 nt, Human
cucacaccuguagucccagc

SEQ ID NO: 254441 - RNA, 24 nt, Human
cucacaccuguagucccagcuauu

SEQ ID NO: 254442 - RNA, 22 nt, Human
cucacgcuuguaaucccagcac

SEQ ID NO: 254443 - RNA, 24 nt, Human
cucacgcuuguaaucccagcacuu

SEQ ID NO: 254444 - RNA, 23 nt, Human
cucggcucacugcacuccagcgu

SEQ ID NO: 254445 - RNA, 20 nt, Human
cucucucuauccccuccuuu

SEQ ID NO: 254446 - RNA, 19 nt, Human
cuggagccgggccuguguc

SEQ ID NO: 254447 - RNA, 20 nt, Human
cuggagccgggccugugucu

SEQ ID NO: 254448 - RNA, 19 nt, Human
cugugucugucagcagagc

SEQ ID NO: 254449 - RNA, 22 nt, Human
cuuagcccaggagguugaggcu

SEQ ID NO: 254450 - RNA, 20 nt, Human
cuugacacccagcucucacc

SEQ ID NO: 254451 - RNA, 22 nt, Human
gacacccuccaacccagccacc

SEQ ID NO: 254452 - RNA, 21 nt, Human
gacucacaccuguagucccag

SEQ ID NO: 254453 - RNA, 18 nt, Human
gagaaacuuuuguguuuu

SEQ ID NO: 254454 - RNA, 22 nt, Human
gagaaucacuugaggccaggag

SEQ ID NO: 254455 - RNA, 21 nt, Human
gaggccaggaguucaagaccu

SEQ ID NO: 254456 - RNA, 23 nt, Human
gagguggguggaucacccgaggu

SEQ ID NO: 254457 - RNA, 19 nt, Human
gagguugcagugaacccag

SEQ ID NO: 254458 - RNA, 24 nt, Human
gaucacccgaggucaagaguucga

SEQ ID NO: 254459 - RNA, 20 nt, Human
gcacagagugagacccugcc

SEQ ID NO: 254460 - RNA, 20 nt, Human
gcaccacugcacgccagccu

SEQ ID NO: 254461 - RNA, 22 nt, Human
gcaggagaaucacuugaggcca

SEQ ID NO: 254462 - RNA, 24 nt, Human
gccaacacggcaaaacccugucuc

SEQ ID NO: 254463 - RNA, 21 nt, Human
gccaaggugggacuccgucuc

SEQ ID NO: 254464 - RNA, 19 nt, Human
gcccggugcaguggcucac

SEQ ID NO: 254465 - RNA, 21 nt, Human
gccugggcaacauagugagac

SEQ ID NO: 254466 - RNA, 22 nt, Human
gcuggugcaucuggccaggccu

SEQ ID NO: 254467 - RNA, 21 nt, Human
ggacacccuccaacccagcca

SEQ ID NO: 254468 - RNA, 18 nt, Human
ggaccagcuuggaucaaa

SEQ ID NO: 254469 - RNA, 20 nt, Human
ggagaagagcuguguccaca

SEQ ID NO: 254470 - RNA, 24 nt, Human
ggagguugcagugaacccagaucg

SEQ ID NO: 254471 - RNA, 22 nt, Human
ggcaacauagugagacccuggc

SEQ ID NO: 254472 - RNA, 19 nt, Human
ggcacaguggaugaucaga

SEQ ID NO: 254473 - RNA, 19 nt, Human
ggcccggugcaguggcuca

SEQ ID NO: 254474 - RNA, 22 nt, Human
ggcuauagugcaguggcgugau

SEQ ID NO: 254475 - RNA, 19 nt, Human
ggcuggguguggugguuca

SEQ ID NO: 254476 - RNA, 18 nt, Human
gggaggcugaggugggag

SEQ ID NO: 254477 - RNA, 23 nt, Human
gggaggcugaggugggaggauca

SEQ ID NO: 254478 - RNA, 19 nt, Human
gggcacagagugagacccu

SEQ ID NO: 254479 - RNA, 22 nt, Human
ggggagaggagcagagcuuggg

SEQ ID NO: 254480 - RNA, 24 nt, Human
ggguguggugguucacaccuguaa

SEQ ID NO: 254481 - RNA, 20 nt, Human
ggguugcccaucagugucuu

SEQ ID NO: 254482 - RNA, 24 nt, Human
ggugacucacaccuguagucccag

SEQ ID NO: 254483 - RNA, 23 nt, Human
ggugcaguggcucacgcuuguaa

SEQ ID NO: 254484 - RNA, 24 nt, Human
ggugguucacaccuguaaucccag

SEQ ID NO: 254485 - RNA, 20 nt, Human
guacagaagaaugagucuuc

SEQ ID NO: 254486 - RNA, 18 nt, Human
guaggacagaaggagcug

SEQ ID NO: 254487 - RNA, 22 nt, Human
guccuuucgacucccugcagcc

SEQ ID NO: 254488 - RNA, 25 nt, Human
gugaaaaaagacacaggaaaugaag

SEQ ID NO: 254489 - RNA, 20 nt, Human
gugacaccagcccaacccuc

SEQ ID NO: 254490 - RNA, 19 nt, Human
gugcucacuccuguagccg

SEQ ID NO: 254491 - RNA, 21 nt, Human
guggcuguccgcaauguccuu

SEQ ID NO: 254492 - RNA, 18 nt, Human
gugugugcacgcgugugu

SEQ ID NO: 254493 - RNA, 21 nt, Human
guguguguguaugugugugua

SEQ ID NO: 254494 - RNA, 19 nt, Human
uaaaacauauauauguagc

SEQ ID NO: 254495 - RNA, 20 nt, Human
uaacucgaggcucugaccuc

SEQ ID NO: 254496 - RNA, 24 nt, Human
uaagagugaaaacucugucucaaa

SEQ ID NO: 254497 - RNA, 20 nt, Human
uaccaaaaaugaaaaauuag

SEQ ID NO: 254498 - RNA, 23 nt, Human
uaccaaaaaugaaaaauuagcca

SEQ ID NO: 254499 - RNA, 25 nt, Human
uaccaaaaaugaaaaauuagccaga

SEQ ID NO: 254500 - RNA, 24 nt, Human
uauagugcaguggcgugaucucgg

SEQ ID NO: 254501 - RNA, 21 nt, Human
ucaaaccucauacaacacugu

SEQ ID NO: 254502 - RNA, 23 nt, Human
ucacaccuguaaucccagcacuu

SEQ ID NO: 254503 - RNA, 19 nt, Human
ucacacuggccaacagaau

SEQ ID NO: 254504 - RNA, 21 nt, Human
ucaccucccuguccucgacuc

SEQ ID NO: 254505 - RNA, 20 nt, Human
ucacugcacuccagcguggg

SEQ ID NO: 254506 - RNA, 21 nt, Human
ucacugcacuccagcgugggc

SEQ ID NO: 254507 - RNA, 23 nt, Human
ucacuugaggccaggaguucaag

SEQ ID NO: 254508 - RNA, 22 nt, Human
ucagaagcacacagccucauca

SEQ ID NO: 254509 - RNA, 21 nt, Human
ucagacccucuugacacccag

SEQ ID NO: 254510 - RNA, 24 nt, Human
uccacaaguacccaguucaagguc

SEQ ID NO: 254511 - RNA, 20 nt, Human
ucccagaacauccucccgcc

SEQ ID NO: 254512 - RNA, 19 nt, Human
ucccugcagccaagguggg

SEQ ID NO: 254513 - RNA, 20 nt, Human
uccgucuccgcuaaaaacca

SEQ ID NO: 254514 - RNA, 23 nt, Human
uccucagacccucuugacaccca

SEQ ID NO: 254515 - RNA, 23 nt, Human
ucgcaccacugcacgccagccug

SEQ ID NO: 254516 - RNA, 24 nt, Human
ucgcuugaacccaagaggcggagg

SEQ ID NO: 254517 - RNA, 24 nt, Human
ucgggaggcugaagcagaagaauc

SEQ ID NO: 254518 - RNA, 25 nt, Human
ucgggaggcugaggugggaggauca

SEQ ID NO: 254519 - RNA, 27 nt, Human
ucuaccaaaaaugaaaaauuagccaga

SEQ ID NO: 254520 - RNA, 24 nt, Human
ucuauccccuccuuucuuuuuggg

SEQ ID NO: 254521 - RNA, 19 nt, Human
ucucacucugucaccuagg

SEQ ID NO: 254522 - RNA, 22 nt, Human
ucucacucugucaccuaggcua

SEQ ID NO: 254523 - RNA, 23 nt, Human
ucucacucugucaccuaggcuau

SEQ ID NO: 254524 - RNA, 24 nt, Human
ucucacucugucaccuaggcuaua

SEQ ID NO: 254525 - RNA, 19 nt, Human
ucuccgcuaaaaaccagcu

SEQ ID NO: 254526 - RNA, 20 nt, Human
ucucucuauccccuccuuuc

SEQ ID NO: 254527 - RNA, 26 nt, Human
ucucugcuauggacugaguggaccag

SEQ ID NO: 254528 - RNA, 21 nt, Human
ucucugggcccuuucauucuc

SEQ ID NO: 254529 - RNA, 25 nt, Human
ucuucaggugacaccagcccaaccc

SEQ ID NO: 254530 - RNA, 22 nt, Human
ugaacaggcagcucccacugcc

SEQ ID NO: 254531 - RNA, 20 nt, Human
ugaagcagaagaaucgcuug

SEQ ID NO: 254532 - RNA, 24 nt, Human
ugaagcagaagaaucgcuugaacc

SEQ ID NO: 254533 - RNA, 23 nt, Human
ugacaccagcccaacccucaagc

SEQ ID NO: 254534 - RNA, 19 nt, Human
ugagaauugaacugugucc

SEQ ID NO: 254535 - RNA, 22 nt, Human
ugagacagagucucacucuguc

SEQ ID NO: 254536 - RNA, 20 nt, Human
ugaggcaggagaaucacuug

SEQ ID NO: 254537 - RNA, 25 nt, Human
ugaggcaggagaaucacuugaggcc

SEQ ID NO: 254538 - RNA, 26 nt, Human
ugaggcaggagaaucacuugaggcca

SEQ ID NO: 254539 - RNA, 23 nt, Human
ugaggcugcagugagccgugauc

SEQ ID NO: 254540 - RNA, 18 nt, Human
ugaggugggaggaucacu

SEQ ID NO: 254541 - RNA, 23 nt, Human
ugaggugggaggaucacuuagcc

SEQ ID NO: 254542 - RNA, 24 nt, Human
ugaggugggaggaucacuuagccc

SEQ ID NO: 254543 - RNA, 20 nt, Human
ugagguggguggaucacccg

SEQ ID NO: 254544 - RNA, 24 nt, Human
ugagguggguggaucacccgaggu

SEQ ID NO: 254545 - RNA, 26 nt, Human
ugagguggguggaucacccgagguca

SEQ ID NO: 254546 - RNA, 24 nt, Human
ugaguggaccagcuuggaucaaaa

SEQ ID NO: 254547 - RNA, 19 nt, Human
ugaucagagcacaccucag

SEQ ID NO: 254548 - RNA, 24 nt, Human
ugauggugggugccuguaguccca

SEQ ID NO: 254549 - RNA, 19 nt, Human
ugcacgcguguguguguau

SEQ ID NO: 254550 - RNA, 22 nt, Human
ugcacugaggcccccagccaac

SEQ ID NO: 254551 - RNA, 22 nt, Human
ugcagugagccgugaucauacc

SEQ ID NO: 254552 - RNA, 22 nt, Human
ugcaguggcgugaucucggcuc

SEQ ID NO: 254553 - RNA, 19 nt, Human
ugccaccaggcauccaccc

SEQ ID NO: 254554 - RNA, 21 nt, Human
ugccacugaagcccagccugu

SEQ ID NO: 254555 - RNA, 23 nt, Human
ugccuguagucccagcuacucgg

SEQ ID NO: 254556 - RNA, 24 nt, Human
ugccuguagucccagcuacucggg

SEQ ID NO: 254557 - RNA, 18 nt, Human
ugccuucggaugcccagc

SEQ ID NO: 254558 - RNA, 21 nt, Human
ugcuaagggcuggugcaucug

SEQ ID NO: 254559 - RNA, 23 nt, Human
ugcuauggacugaguggaccagc

SEQ ID NO: 254560 - RNA, 23 nt, Human
uggaccagcuuggaucaaaaucc

SEQ ID NO: 254561 - RNA, 20 nt, Human
uggagaagagcuguguccac

SEQ ID NO: 254562 - RNA, 22 nt, Human
uggagcugaacaggcagcuccc

SEQ ID NO: 254563 - RNA, 24 nt, Human
uggaucacccgaggucaagaguuc

SEQ ID NO: 254564 - RNA, 27 nt, Human
uggaucacccgaggucaagaguucgag

SEQ ID NO: 254565 - RNA, 18 nt, Human
uggcagaagugggcuggg

SEQ ID NO: 254566 - RNA, 19 nt, Human
uggcagaagugggcugggu

SEQ ID NO: 254567 - RNA, 18 nt, Human
uggccuggccguggcugu

SEQ ID NO: 254568 - RNA, 20 nt, Human
uggcgugaucucggcucacu

SEQ ID NO: 254569 - RNA, 22 nt, Human
uggcucacgcuuguaaucccag

SEQ ID NO: 254570 - RNA, 24 nt, Human
uggcucacgcuuguaaucccagca

SEQ ID NO: 254571 - RNA, 19 nt, Human
ugggaggcugaggcaggag

SEQ ID NO: 254572 - RNA, 24 nt, Human
ugggaggcugaggcaggagaauca

SEQ ID NO: 254573 - RNA, 20 nt, Human
ugggaggcugaggugggugg

SEQ ID NO: 254574 - RNA, 23 nt, Human
ugggaggcugagguggguggauc

SEQ ID NO: 254575 - RNA, 24 nt, Human
ugggaggcugagguggguggauca

SEQ ID NO: 254576 - RNA, 22 nt, Human
ugggcaacagugagacccuguc

SEQ ID NO: 254577 - RNA, 18 nt, Human
ugggcccuuucauucucu

SEQ ID NO: 254578 - RNA, 21 nt, Human
uggggagaggagcagagcuug

SEQ ID NO: 254579 - RNA, 19 nt, Human
uggggcuggugagcuggag

SEQ ID NO: 254580 - RNA, 21 nt, Human
uggguagaaagcggagcuucc

SEQ ID NO: 254581 - RNA, 24 nt, Human
uggguggaucacccgaggucaaga

SEQ ID NO: 254582 - RNA, 24 nt, Human
uggugacucacaccuguaguccca

SEQ ID NO: 254583 - RNA, 21 nt, Human
uggugggugccuguaguccca

SEQ ID NO: 254584 - RNA, 24 nt, Human
uggugggugccuguagucccagcu

SEQ ID NO: 254585 - RNA, 24 nt, Human
uggugguucacaccuguaauccca

SEQ ID NO: 254586 - RNA, 23 nt, Human
uggugugugcacgcgugugugug

SEQ ID NO: 254587 - RNA, 24 nt, Human
uggugugugcacgcgugugugugu

SEQ ID NO: 254588 - RNA, 21 nt, Human
ugguucacaccuguaauccca

SEQ ID NO: 254589 - RNA, 22 nt, Human
ugguucacaccuguaaucccag

SEQ ID NO: 254590 - RNA, 24 nt, Human
ugguucacaccuguaaucccagca

SEQ ID NO: 254591 - RNA, 18 nt, Human
ugugcacgcgugugugug

SEQ ID NO: 254592 - RNA, 21 nt, Human
ugugcacgcguguguguguau

SEQ ID NO: 254593 - RNA, 24 nt, Human
ugugguggaaaggaggguggguag

SEQ ID NO: 254594 - RNA, 20 nt, Human
uguguacgugcacacacgug

SEQ ID NO: 254595 - RNA, 20 nt, Human
uguguauguguguguacgug

SEQ ID NO: 254596 - RNA, 22 nt, Human
ugugugcacgcgugugugugua

SEQ ID NO: 254597 - RNA, 21 nt, Human
uguguguguauguguguguac

SEQ ID NO: 254598 - RNA, 20 nt, Human
uguuaauaacucgaggcucu

SEQ ID NO: 254599 - RNA, 21 nt, Human
uucaaccuuucucauccccaa

SEQ ID NO: 254600 - RNA, 22 nt, Human
uuccccuugguaagcuuuuggu

SEQ ID NO: 254601 - RNA, 24 nt, Human
uugaacccaagaggcggagguugc

SEQ ID NO: 254602 - RNA, 22 nt, Human
uugaggccaggaguucaagacc

SEQ ID NO: 254603 - RNA, 22 nt, Human
uugcagugaacccagaucgcac

SEQ ID NO: 254604 - RNA, 24 nt, Human
uuggaucaaaauccucaaaccuca

SEQ ID NO: 254605 - RNA, 22 nt, Human
uuggcuuuggccaacaauguca

SEQ ID NO: 254606 - RNA, 25 nt, Human
uugggaggcugaggcaggagaauca

SEQ ID NO: 254607 - RNA, 25 nt, Human
uugggaggcugagguggguggauca

SEQ ID NO: 254608 - RNA, 26 nt, Human
uuuggcuuuggccaacaaugucagug

SEQ ID NO: 254609 - RNA, 22 nt, Human
aacccaaggaggggaaacggca

SEQ ID NO: 254610 - RNA, 24 nt, Human
gcacugggcugauuguauuugcau

SEQ ID NO: 254611 - RNA, 22 nt, Human
ggaaacggcagggccagcggua

SEQ ID NO: 254612 - RNA, 20 nt, Human
uccaauuuccuccccucccu

SEQ ID NO: 254613 - RNA, 23 nt, Human
cccgcggcggggaccccgggggc

SEQ ID NO: 254614 - RNA, 23 nt, Human
ccgggggcggucgccagagugga

SEQ ID NO: 254615 - RNA, 21 nt, Human
cggcccggacuguagcggcgg

SEQ ID NO: 254616 - RNA, 20 nt, Human
cggggaccccgggggcgguc

SEQ ID NO: 254617 - RNA, 20 nt, Human
gcggcggcugcggcugcggc

SEQ ID NO: 254618 - RNA, 23 nt, Human
aaaaagaagucggggcuaccagg

SEQ ID NO: 254619 - RNA, 23 nt, Human
accagggguuucagacgugcucg

SEQ ID NO: 254620 - RNA, 20 nt, Human
agcaacaagcaaagcacauc

SEQ ID NO: 254621 - RNA, 21 nt, Human
aggacagauacucccccacgg

SEQ ID NO: 254622 - RNA, 23 nt, Human
auccgcccagcaacaagcaaagc

SEQ ID NO: 254623 - RNA, 22 nt, Human
augaaaaacaaauaucccuaca

SEQ ID NO: 254624 - RNA, 24 nt, Human
augaaaaacaaauaucccuacaaa

SEQ ID NO: 254625 - RNA, 22 nt, Human
cacgggccggguggggcgaagc

SEQ ID NO: 254626 - RNA, 19 nt, Human
caggacagauacuccccca

SEQ ID NO: 254627 - RNA, 18 nt, Human
cagggcgugggcgaaggc

SEQ ID NO: 254628 - RNA, 24 nt, Human
cauccgcccagcaacaagcaaagc

SEQ ID NO: 254629 - RNA, 20 nt, Human
caucucugcucucaggcagg

SEQ ID NO: 254630 - RNA, 23 nt, Human
ccaugggaaaccgcccccccggg

SEQ ID NO: 254631 - RNA, 21 nt, Human
cccaugggaaaccgccccccc

SEQ ID NO: 254632 - RNA, 19 nt, Human
cccccccgggccuuggaga

SEQ ID NO: 254633 - RNA, 18 nt, Human
ccccgccccggccucccc

SEQ ID NO: 254634 - RNA, 19 nt, Human
ccccgccccggccuccccu

SEQ ID NO: 254635 - RNA, 19 nt, Human
ccgcccagcaacaagcaaa

SEQ ID NO: 254636 - RNA, 23 nt, Human
ccucaggcagcuguucuaacccu

SEQ ID NO: 254637 - RNA, 26 nt, Human
ccuuauuuuaauuaaaaagaagucgg

SEQ ID NO: 254638 - RNA, 22 nt, Human
ccuuggagaauggggguccaag

SEQ ID NO: 254639 - RNA, 22 nt, Human
cgcccagagcgcgcagggacgg

SEQ ID NO: 254640 - RNA, 22 nt, Human
cgcccagcaacaagcaaagcac

SEQ ID NO: 254641 - RNA, 21 nt, Human
cgggggggugccucggugggg

SEQ ID NO: 254642 - RNA, 18 nt, Human
cgugaacagaaggccucc

SEQ ID NO: 254643 - RNA, 23 nt, Human
cgugggcgaaggcggcaggacag

SEQ ID NO: 254644 - RNA, 18 nt, Human
cuaacccugcugccaacg

SEQ ID NO: 254645 - RNA, 21 nt, Human
cugcaagcucagcgccggcug

SEQ ID NO: 254646 - RNA, 19 nt, Human
gcaggacagauacuccccc

SEQ ID NO: 254647 - RNA, 20 nt, Human
gcagggcgugggcgaaggcg

SEQ ID NO: 254648 - RNA, 18 nt, Human
gccaagauucugggggac

SEQ ID NO: 254649 - RNA, 23 nt, Human
gcccagcaacaagcaaagcacau

SEQ ID NO: 254650 - RNA, 18 nt, Human
gcccgccccgccccggcc

SEQ ID NO: 254651 - RNA, 24 nt, Human
gcccgccccgccccggccuccccu

SEQ ID NO: 254652 - RNA, 20 nt, Human
gccggcugcgcccgccccgc

SEQ ID NO: 254653 - RNA, 21 nt, Human
ggcgaagcccggggacucgaa

SEQ ID NO: 254654 - RNA, 24 nt, Human
ggcugcgcccgccccgccccggcc

SEQ ID NO: 254655 - RNA, 24 nt, Human
gggccggguggggcgaagcccggg

SEQ ID NO: 254656 - RNA, 24 nt, Human
ggggacgggggggugccucggugg

SEQ ID NO: 254657 - RNA, 24 nt, Human
ggguggggcgaagcccggggacuc

SEQ ID NO: 254658 - RNA, 24 nt, Human
uaaaacaaagaauccgccgugaac

SEQ ID NO: 254659 - RNA, 21 nt, Human
ucagggaggagccucaggcag

SEQ ID NO: 254660 - RNA, 22 nt, Human
ucccccacgggccggguggggc

SEQ ID NO: 254661 - RNA, 23 nt, Human
uccgcccagcaacaagcaaagca

SEQ ID NO: 254662 - RNA, 20 nt, Human
uccgccgugaacagaaggcu

SEQ ID NO: 254663 - RNA, 24 nt, Human
ucucaggcagguguccuucaggga

SEQ ID NO: 254664 - RNA, 20 nt, Human
uggggcgaagcccggggacu

SEQ ID NO: 254665 - RNA, 21 nt, Human
ugggggacgggggggugccuc

SEQ ID NO: 254666 - RNA, 19 nt, Human
uuuuuuuuuuuuuuuuuug

SEQ ID NO: 254667 - RNA, 23 nt, Human
uuuuuuuuuuuuuuuuuuuuggg

SEQ ID NO: 254668 - RNA, 24 nt, Human
aggaaacugaggcaccaagaggga

SEQ ID NO: 254669 - RNA, 18 nt, Human
aucccagcugccuggcug

SEQ ID NO: 254670 - RNA, 20 nt, Human
caccaagagggaaagugcuc

SEQ ID NO: 254671 - RNA, 18 nt, Human
cacccucucagcggcuca

SEQ ID NO: 254672 - RNA, 24 nt, Human
cugcaaacgccucauaucuacuaa

SEQ ID NO: 254673 - RNA, 20 nt, Human
gccccgacgucgccacccuc

SEQ ID NO: 254674 - RNA, 19 nt, Human
gggaauugaaucccagcug

SEQ ID NO: 254675 - RNA, 18 nt, Human
uuucauaggucaggaaac

SEQ ID NO: 254676 - RNA, 23 nt, Human
aaaaacaaaaacaaaaacaaaaa

SEQ ID NO: 254677 - RNA, 22 nt, Human
aaaacaaaaacaaaaacaaaaa

SEQ ID NO: 254678 - RNA, 25 nt, Human
aaacaaaaacaaaaacaaaaacaaa

SEQ ID NO: 254679 - RNA, 26 nt, Human
aaacaaaaacaaaaacaaaaacaaca

SEQ ID NO: 254680 - RNA, 23 nt, Human
aaacaaaaacaaaaacaacagaa

SEQ ID NO: 254681 - RNA, 27 nt, Human
aaacaaaaacaaaaacaacagaaauaa

SEQ ID NO: 254682 - RNA, 21 nt, Human
aaagaguauauuuggaacaag

SEQ ID NO: 254683 - RNA, 25 nt, Human
aaagugcuggugagauccaggcagg

SEQ ID NO: 254684 - RNA, 21 nt, Human
aacaaaaacaaaaacaacaga

SEQ ID NO: 254685 - RNA, 22 nt, Human
aacgugggaauaaagagaaaga

SEQ ID NO: 254686 - RNA, 24 nt, Human
aacugcagccugggugacagagug

SEQ ID NO: 254687 - RNA, 20 nt, Human
aacuuggcgaaaccccgucu

SEQ ID NO: 254688 - RNA, 21 nt, Human
aacuuggcgaaaccccgucuc

SEQ ID NO: 254689 - RNA, 18 nt, Human
aagaguaaacauuuacgg

SEQ ID NO: 254690 - RNA, 25 nt, Human
aaggcaggcagaucaccugagguca

SEQ ID NO: 254691 - RNA, 19 nt, Human
aagggccccacaacccugu

SEQ ID NO: 254692 - RNA, 24 nt, Human
aagggcucugaucuuccacagccc

SEQ ID NO: 254693 - RNA, 25 nt, Human
acaaaaacaaaaacaaaaacaaaaa

SEQ ID NO: 254694 - RNA, 22 nt, Human
acaaaaacaaaaacaacagaaa

SEQ ID NO: 254695 - RNA, 23 nt, Human
acagagugagacucugucucaaa

SEQ ID NO: 254696 - RNA, 24 nt, Human
acagagugagacucugucucaaaa

SEQ ID NO: 254697 - RNA, 18 nt, Human
accauggagugaaugccc

SEQ ID NO: 254698 - RNA, 24 nt, Human
accccgucucuacaaaaaauacaa

SEQ ID NO: 254699 - RNA, 21 nt, Human
acugcagccugggugacagag

SEQ ID NO: 254700 - RNA, 24 nt, Human
acugcagccugggugacagaguga

SEQ ID NO: 254701 - RNA, 24 nt, Human
agaaagacaaaagaguauauuugg

SEQ ID NO: 254702 - RNA, 20 nt, Human
agaaagcugguccugggcug

SEQ ID NO: 254703 - RNA, 24 nt, Human
agaaggagucagcugcugggucca

SEQ ID NO: 254704 - RNA, 18 nt, Human
agagguugcagugagcug

SEQ ID NO: 254705 - RNA, 22 nt, Human
agagguugcagugagcugagau

SEQ ID NO: 254706 - RNA, 23 nt, Human
agagguugcagugagcugagauc

SEQ ID NO: 254707 - RNA, 24 nt, Human
agagguugcagugagcugagauca

SEQ ID NO: 254708 - RNA, 20 nt, Human
agagguugcagugagcuggc

SEQ ID NO: 254709 - RNA, 22 nt, Human
agaucaccugaggucaggaguu

SEQ ID NO: 254710 - RNA, 25 nt, Human
agcaagaagagggguggaagaagga

SEQ ID NO: 254711 - RNA, 24 nt, Human
agccugggugacagagugagacuc

SEQ ID NO: 254712 - RNA, 21 nt, Human
agcugggugugguggugccug

SEQ ID NO: 254713 - RNA, 24 nt, Human
aggcacgguggcucauucuuguaa

SEQ ID NO: 254714 - RNA, 20 nt, Human
aggcagagguugcagugagc

SEQ ID NO: 254715 - RNA, 24 nt, Human
aggcagagguugcagugagcugag

SEQ ID NO: 254716 - RNA, 26 nt, Human
aggcagaucaccugaggucaggaguu

SEQ ID NO: 254717 - RNA, 26 nt, Human
aggcaggcagaucaccugaggucagg

SEQ ID NO: 254718 - RNA, 24 nt, Human
agguacgagaagugcuugaaccug

SEQ ID NO: 254719 - RNA, 25 nt, Human
caaaaacaaaaacaaaaacaaaaac

SEQ ID NO: 254720 - RNA, 25 nt, Human
caaaaacaaaaacaaaaacaaaaac

SEQ ID NO: 254721 - RNA, 24 nt, Human
caaggcaggcagaucaccugaggu

SEQ ID NO: 254722 - RNA, 22 nt, Human
caccauggagugaaugcccuca

SEQ ID NO: 254723 - RNA, 24 nt, Human
cagaucaccugaggucaggaguuu

SEQ ID NO: 254724 - RNA, 27 nt, Human
cagaucaccugaggucaggaguuugaa

SEQ ID NO: 254725 - RNA, 25 nt, Human
cagcaaacaccucauaccuacuaac

SEQ ID NO: 254726 - RNA, 21 nt, Human
cagcacuuugggaugccaagg

SEQ ID NO: 254727 - RNA, 24 nt, Human
cagcacuuugggaugccaaggcag

SEQ ID NO: 254728 - RNA, 27 nt, Human
cagccugggugacagagugagacucuu

SEQ ID NO: 254729 - RNA, 24 nt, Human
caggcagaucaccugaggucagga

SEQ ID NO: 254730 - RNA, 20 nt, Human
cauuccucaaacaauaggcu

SEQ ID NO: 254731 - RNA, 24 nt, Human
cauucuuguaaucccagcacuuug

SEQ ID NO: 254732 - RNA, 24 nt, Human
ccaacaacaauaaauaagugaugu

SEQ ID NO: 254733 - RNA, 24 nt, Human
ccagugaacugcagccugggugac

SEQ ID NO: 254734 - RNA, 21 nt, Human
ccucauaccuacuaacacuuu

SEQ ID NO: 254735 - RNA, 22 nt, Human
ccugaggucaggaguuugaaac

SEQ ID NO: 254736 - RNA, 25 nt, Human
ccugggaggcagagguugcagugag

SEQ ID NO: 254737 - RNA, 22 nt, Human
ccugggugacagagugagacuc

SEQ ID NO: 254738 - RNA, 21 nt, Human
cuaacacuuugcagcauccaa

SEQ ID NO: 254739 - RNA, 24 nt, Human
cuaacacuuugcagcauccaacaa

SEQ ID NO: 254740 - RNA, 22 nt, Human
cucaaaaacaaaaacaaaaaca

SEQ ID NO: 254741 - RNA, 21 nt, Human
cucacucauaaaguucaccca

SEQ ID NO: 254742 - RNA, 24 nt, Human
cucauucuuguaaucccagcacuu

SEQ ID NO: 254743 - RNA, 24 nt, Human
cugcuggguccagaguaggcuugu

SEQ ID NO: 254744 - RNA, 18 nt, Human
cuggugagauccaggcag

SEQ ID NO: 254745 - RNA, 18 nt, Human
cuguaaucccagcuauuc

SEQ ID NO: 254746 - RNA, 23 nt, Human
cugucucaaaaacaaaaacaaaa

SEQ ID NO: 254747 - RNA, 27 nt, Human
cugucucaaaaacaaaaacaaaaacaa

SEQ ID NO: 254748 - RNA, 24 nt, Human
cuucucgugaacaagggcucugau

SEQ ID NO: 254749 - RNA, 19 nt, Human
cuuugggaugccaaggcag

SEQ ID NO: 254750 - RNA, 20 nt, Human
gagcagucgugaguuugccc

SEQ ID NO: 254751 - RNA, 24 nt, Human
gaucaccugaggucaggaguuuga

SEQ ID NO: 254752 - RNA, 24 nt, Human
gcuggucaacuuggcgaaaccccg

SEQ ID NO: 254753 - RNA, 21 nt, Human
ggaugccaaggcaggcagauc

SEQ ID NO: 254754 - RNA, 18 nt, Human
ggucaggaaacagaggga

SEQ ID NO: 254755 - RNA, 21 nt, Human
gguccugggcuggucaggagg

SEQ ID NO: 254756 - RNA, 21 nt, Human
ggugccugucuguaaucccag

SEQ ID NO: 254757 - RNA, 23 nt, Human
gguggcucauucuuguaauccca

SEQ ID NO: 254758 - RNA, 24 nt, Human
gguggcucauucuuguaaucccag

SEQ ID NO: 254759 - RNA, 24 nt, Human
gguggugccugucuguaaucccag

SEQ ID NO: 254760 - RNA, 24 nt, Human
gugacagagugagacucugucuca

SEQ ID NO: 254761 - RNA, 24 nt, Human
gugcuugaaccugggaggcagagg

SEQ ID NO: 254762 - RNA, 23 nt, Human
guggcucauucuuguaaucccag

SEQ ID NO: 254763 - RNA, 20 nt, Human
guggugccugucuguaaucc

SEQ ID NO: 254764 - RNA, 23 nt, Human
guggugccugucuguaaucccag

SEQ ID NO: 254765 - RNA, 19 nt, Human
guugcagugagcugagauc

SEQ ID NO: 254766 - RNA, 18 nt, Human
uaagggccccacaacccu

SEQ ID NO: 254767 - RNA, 23 nt, Human
uaagugauguuauuuucuguuuc

SEQ ID NO: 254768 - RNA, 23 nt, Human
uacguggcagagcagcaaacacc

SEQ ID NO: 254769 - RNA, 24 nt, Human
uaggacaggcaugguggcuaauau

SEQ ID NO: 254770 - RNA, 25 nt, Human
uaggccaggcacgguggcucauucu

SEQ ID NO: 254771 - RNA, 21 nt, Human
ucaaaaacaaaaacaaaaaca

SEQ ID NO: 254772 - RNA, 23 nt, Human
ucacaccagugaacugcagccug

SEQ ID NO: 254773 - RNA, 18 nt, Human
ucaccaagauacucacuc

SEQ ID NO: 254774 - RNA, 21 nt, Human
ucauaggucaggaaacagagg

SEQ ID NO: 254775 - RNA, 24 nt, Human
ucaugaucccuuugcuggcucucu

SEQ ID NO: 254776 - RNA, 19 nt, Human
uccaaugagcaccauggag

SEQ ID NO: 254777 - RNA, 20 nt, Human
ucccagcacuuugggaugcc

SEQ ID NO: 254778 - RNA, 22 nt, Human
uccucaaacaauaggcucuaga

SEQ ID NO: 254779 - RNA, 31 nt, Human
ucucaaaaacaaaaacaaaaacaaaaacaaa

SEQ ID NO: 254780 - RNA, 21 nt, Human
ucuguaaucccagcuauucgg

SEQ ID NO: 254781 - RNA, 18 nt, Human
ucuguuggcaggagcagg

SEQ ID NO: 254782 - RNA, 18 nt, Human
ugaacaaagggcgaacgu

SEQ ID NO: 254783 - RNA, 24 nt, Human
ugaaccugggaggcagagguugca

SEQ ID NO: 254784 - RNA, 22 nt, Human
ugaacugcagccugggugacag

SEQ ID NO: 254785 - RNA, 22 nt, Human
ugaaugcccucagcaaaccuuc

SEQ ID NO: 254786 - RNA, 21 nt, Human
ugagguacgagaagugcuuga

SEQ ID NO: 254787 - RNA, 18 nt, Human
ugaggucaggaguuugaa

SEQ ID NO: 254788 - RNA, 19 nt, Human
ugcacacauaauaguagac

SEQ ID NO: 254789 - RNA, 22 nt, Human
ugcagcauccaacaacaauaaa

SEQ ID NO: 254790 - RNA, 24 nt, Human
ugcagccugggugacagagugaga

SEQ ID NO: 254791 - RNA, 21 nt, Human
ugcuugaaccugggaggcaga

SEQ ID NO: 254792 - RNA, 22 nt, Human
uggcagagcagcaaacaccuca

SEQ ID NO: 254793 - RNA, 21 nt, Human
uggcaggagcagucgugaguu

SEQ ID NO: 254794 - RNA, 21 nt, Human
uggcucauucuuguaauccca

SEQ ID NO: 254795 - RNA, 24 nt, Human
uggcucauucuuguaaucccagca

SEQ ID NO: 254796 - RNA, 24 nt, Human
ugggaggcagagguugcagugagc

SEQ ID NO: 254797 - RNA, 24 nt, Human
ugggaugccaaggcaggcagauca

SEQ ID NO: 254798 - RNA, 24 nt, Human
ugguggugccugucuguaauccca

SEQ ID NO: 254799 - RNA, 20 nt, Human
uguaaucccagcacuuuggg

SEQ ID NO: 254800 - RNA, 24 nt, Human
ugucuguaaucccagcuauucggg

SEQ ID NO: 254801 - RNA, 20 nt, Human
uuagcugggugugguggugc

SEQ ID NO: 254802 - RNA, 24 nt, Human
uuagcugggugugguggugccugu

SEQ ID NO: 254803 - RNA, 18 nt, Human
uucuuguaaucccagcac

SEQ ID NO: 254804 - RNA, 23 nt, Human
uucuuguaaucccagcacuuugg

SEQ ID NO: 254805 - RNA, 24 nt, Human
uugaaccugggaggcagagguugc

SEQ ID NO: 254806 - RNA, 18 nt, Human
uugcagugagcugagauc

SEQ ID NO: 254807 - RNA, 19 nt, Human
uugcagugagcugagauca

SEQ ID NO: 254808 - RNA, 20 nt, Human
uugcagugagcugagaucac

SEQ ID NO: 254809 - RNA, 23 nt, Human
uuggcaggagcagucgugaguuu

SEQ ID NO: 254810 - RNA, 19 nt, Human
uuggcgaaaccccgucucu

SEQ ID NO: 254811 - RNA, 18 nt, Human
uuucauaggucaggaaac

SEQ ID NO: 254812 - RNA, 18 nt, Human
aaaacagaauccuaccuc

SEQ ID NO: 254813 - RNA, 19 nt, Human
aaaacagaauccuaccucu

SEQ ID NO: 254814 - RNA, 18 nt, Human
aaaacccaaggaagcuga

SEQ ID NO: 254815 - RNA, 18 nt, Human
aaaacccaaggaagcuga

SEQ ID NO: 254816 - RNA, 18 nt, Human
aaacagaauccuaccucu

SEQ ID NO: 254817 - RNA, 21 nt, Human
aaaccagaguaagaaagccug

SEQ ID NO: 254818 - RNA, 18 nt, Human
aaaggaacuauuaaaagg

SEQ ID NO: 254819 - RNA, 23 nt, Human
aaaggaacuauuaaaaggaaggg

SEQ ID NO: 254820 - RNA, 19 nt, Human
aagccuguuuccuccccua

SEQ ID NO: 254821 - RNA, 21 nt, Human
acaagacacaguaaaaggaga

SEQ ID NO: 254822 - RNA, 18 nt, Human
acuagacuauagagggac

SEQ ID NO: 254823 - RNA, 19 nt, Human
acucagccccggagacaaa

SEQ ID NO: 254824 - RNA, 18 nt, Human
agacaaaaggaaaauuga

SEQ ID NO: 254825 - RNA, 18 nt, Human
agacaaaaggaaaauuga

SEQ ID NO: 254826 - RNA, 24 nt, Human
aggaaaauugauaugggggagcgg

SEQ ID NO: 254827 - RNA, 20 nt, Human
aggaaggauaaguagauucu

SEQ ID NO: 254828 - RNA, 18 nt, Human
aggcaaagcucucuugug

SEQ ID NO: 254829 - RNA, 18 nt, Human
aggcaaagcucucuugug

SEQ ID NO: 254830 - RNA, 21 nt, Human
aguaagaaagccuguuuccuc

SEQ ID NO: 254831 - RNA, 19 nt, Human
auaaaacagaauccuaccu

SEQ ID NO: 254832 - RNA, 19 nt, Human
auaaaacagaauccuaccu

SEQ ID NO: 254833 - RNA, 24 nt, Human
auagauuuuccucuaaauacaaaa

SEQ ID NO: 254834 - RNA, 24 nt, Human
auuguaaacuauacuagacuauag

SEQ ID NO: 254835 - RNA, 19 nt, Human
cagaaccuuucuuuccaac

SEQ ID NO: 254836 - RNA, 22 nt, Human
cagccccggagacaaaaggaaa

SEQ ID NO: 254837 - RNA, 20 nt, Human
cagcuaucagcuuccccauu

SEQ ID NO: 254838 - RNA, 22 nt, Human
cagggcaaaauguggccaaagg

SEQ ID NO: 254839 - RNA, 18 nt, Human
cauacaaaacuacaaaag

SEQ ID NO: 254840 - RNA, 21 nt, Human
caugacccauccggcagggag

SEQ ID NO: 254841 - RNA, 18 nt, Human
ccagaguaagaaagccug

SEQ ID NO: 254842 - RNA, 25 nt, Human
ccccagaaagcagcuccauguggcc

SEQ ID NO: 254843 - RNA, 18 nt, Human
cccgcaagacaaaagcaa

SEQ ID NO: 254844 - RNA, 22 nt, Human
ccggagacaaaaggaaaauuga

SEQ ID NO: 254845 - RNA, 18 nt, Human
cgacaggagcccgcaaga

SEQ ID NO: 254846 - RNA, 20 nt, Human
cgaggugagaagaccuacca

SEQ ID NO: 254847 - RNA, 21 nt, Human
cggcaagguccgagguccaaa

SEQ ID NO: 254848 - RNA, 22 nt, Human
cucagccccggagacaaaagga

SEQ ID NO: 254849 - RNA, 20 nt, Human
cucaguccccuaaauagugg

SEQ ID NO: 254850 - RNA, 20 nt, Human
cucauguuuagaaucccaug

SEQ ID NO: 254851 - RNA, 24 nt, Human
cucuaaauacaaaaaaauuaaaga

SEQ ID NO: 254852 - RNA, 19 nt, Human
cugauguccuggagagcaa

SEQ ID NO: 254853 - RNA, 26 nt, Human
cuucaaauuaaaccagaguaagaaaa

SEQ ID NO: 254854 - RNA, 21 nt, Human
gacaaaagcaacccggcgaaa

SEQ ID NO: 254855 - RNA, 18 nt, Human
gcaagacaaaagcaaccc

SEQ ID NO: 254856 - RNA, 19 nt, Human
gccccggagacaaaaggaa

SEQ ID NO: 254857 - RNA, 20 nt, Human
ggguuugucgacgcggcgca

SEQ ID NO: 254858 - RNA, 23 nt, Human
guuuagaaucccaugacccaucc

SEQ ID NO: 254859 - RNA, 19 nt, Human
uaaaacagaauccuaccuc

SEQ ID NO: 254860 - RNA, 24 nt, Human
uaaaagacaaaucagccugaauuu

SEQ ID NO: 254861 - RNA, 21 nt, Human
uaccaugggaucaucauggga

SEQ ID NO: 254862 - RNA, 22 nt, Human
uagcaaauaguacuuuauacaa

SEQ ID NO: 254863 - RNA, 23 nt, Human
uaggagaacuauuaaauguagug

SEQ ID NO: 254864 - RNA, 24 nt, Human
uauaaaacagaauccuaccucuga

SEQ ID NO: 254865 - RNA, 24 nt, Human
uauaaaacagaauccuaccucuga

SEQ ID NO: 254866 - RNA, 22 nt, Human
uaugcaccaucgaggugagaag

SEQ ID NO: 254867 - RNA, 20 nt, Human
ucaacucuuuucauucucug

SEQ ID NO: 254868 - RNA, 21 nt, Human
ucaacucuuuucauucucugu

SEQ ID NO: 254869 - RNA, 18 nt, Human
ucagcuaugagaagguaa

SEQ ID NO: 254870 - RNA, 21 nt, Human
ucagggccaugugcugauguc

SEQ ID NO: 254871 - RNA, 19 nt, Human
uccccagaaagcagcucca

SEQ ID NO: 254872 - RNA, 25 nt, Human
uccccagaaagcagcuccauguggc

SEQ ID NO: 254873 - RNA, 22 nt, Human
uccccauuuuucccaggauggg

SEQ ID NO: 254874 - RNA, 18 nt, Human
ucgaggugagaagaccua

SEQ ID NO: 254875 - RNA, 23 nt, Human
ucucuuauaaauaaucuauagau

SEQ ID NO: 254876 - RNA, 19 nt, Human
ucucuugugucaucagcaa

SEQ ID NO: 254877 - RNA, 19 nt, Human
ucucuugugucaucagcaa

SEQ ID NO: 254878 - RNA, 21 nt, Human
ugaaccuuacuguuccccaga

SEQ ID NO: 254879 - RNA, 19 nt, Human
ugauaaaagacaaucagcc

SEQ ID NO: 254880 - RNA, 21 nt, Human
ugcaccaucgaggugagaaga

SEQ ID NO: 254881 - RNA, 22 nt, Human
ugccucauguuuagaaucccau

SEQ ID NO: 254882 - RNA, 18 nt, Human
ugggauaucagguaagaa

SEQ ID NO: 254883 - RNA, 25 nt, Human
ugucaucagcaaaacccaaggaagc

SEQ ID NO: 254884 - RNA, 25 nt, Human
ugucaucagcaaaacccaaggaagc

SEQ ID NO: 254885 - RNA, 19 nt, Human
ugugguagugcugaucagg

SEQ ID NO: 254886 - RNA, 22 nt, Human
ugugguagugcugaucagggcc

SEQ ID NO: 254887 - RNA, 22 nt, Human
uguuccccagaaagcagcucca

SEQ ID NO: 254888 - RNA, 23 nt, Human
uguuuccuccccuacuagguuca

SEQ ID NO: 254889 - RNA, 23 nt, Human
uuaaaaggaagggauaaaguaga

SEQ ID NO: 254890 - RNA, 25 nt, Human
uuaauacaagacacaguaaaaggag

SEQ ID NO: 254891 - RNA, 20 nt, Human
uucagagcggaaacaccgaa

SEQ ID NO: 254892 - RNA, 22 nt, Human
uuccugcagcccuaguucuacg

SEQ ID NO: 254893 - RNA, 22 nt, Human
uucucaguccccuaaauagugg

SEQ ID NO: 254894 - RNA, 25 nt, Human
uuggaugugguagugcugaucaggg

SEQ ID NO: 254895 - RNA, 19 nt, Human
uuucauucucugucuugcu

SEQ ID NO: 254896 - RNA, 18 nt, Human
uuugaggcaugaaucuag

SEQ ID NO: 254897 - RNA, 19 nt, Human
uuuguaagcccacagauug

SEQ ID NO: 254898 - RNA, 19 nt, Human
uuuguaagcccacagauug

SEQ ID NO: 254899 - RNA, 20 nt, Human
uuuguaagcccacagauugu

SEQ ID NO: 254900 - RNA, 18 nt, Human
uuuuuuuuuuuuuuuuug

SEQ ID NO: 254901 - RNA, 18 nt, Human
uuuuuuuuuuuuuuuuug

SEQ ID NO: 254902 - RNA, 22 nt, Human
uuuuuuuuuuuuuuuuuggucu

SEQ ID NO: 254903 - RNA, 23 nt, Human
aggcauuaagaaccacggaggcu

SEQ ID NO: 254904 - RNA, 19 nt, Human
ccauagcguucccaggugc

SEQ ID NO: 254905 - RNA, 25 nt, Human
cccauagcguucccaggugccagcc

SEQ ID NO: 254906 - RNA, 21 nt, Human
ccccggucgccgccgccgccg

SEQ ID NO: 254907 - RNA, 22 nt, Human
ccgacgccgcgcagcagccggg

SEQ ID NO: 254908 - RNA, 20 nt, Human
ccgcccgccuucgccgccgc

SEQ ID NO: 254909 - RNA, 21 nt, Human
ccgcccgccuucgccgccgcu

SEQ ID NO: 254910 - RNA, 21 nt, Human
ccgccgcccgccuucgccgcc

SEQ ID NO: 254911 - RNA, 28 nt, Human
ccgccgcccgccuucgccgccgcugccg

SEQ ID NO: 254912 - RNA, 23 nt, Human
cgagcucccgggccccggucgcc

SEQ ID NO: 254913 - RNA, 18 nt, Human
cgccgcuaccacuguagg

SEQ ID NO: 254914 - RNA, 22 nt, Human
cucccgggccccggucgccgcc

SEQ ID NO: 254915 - RNA, 18 nt, Human
cugccgcuaccgucgccg

SEQ ID NO: 254916 - RNA, 23 nt, Human
cugccgcuaccgucgccgacgcc

SEQ ID NO: 254917 - RNA, 22 nt, Human
gaggggaagaacugcugaacua

SEQ ID NO: 254918 - RNA, 22 nt, Human
gccgcuaccgucgccgacgccg

SEQ ID NO: 254919 - RNA, 23 nt, Human
ggaggggaagaacugcugaacua

SEQ ID NO: 254920 - RNA, 18 nt, Human
ucccaggugccagccauc

SEQ ID NO: 254921 - RNA, 23 nt, Human
ucccaggugccagccaucuccuc

SEQ ID NO: 254922 - RNA, 22 nt, Human
ucgccgccgccgccgcuaccac

SEQ ID NO: 254923 - RNA, 27 nt, Human
ucgccgccgcugccgcuaccgucgccg

SEQ ID NO: 254924 - RNA, 23 nt, Human
uguaggaggggaagaacugcuga

SEQ ID NO: 254925 - RNA, 20 nt, Human
uuagugaaaauaguccuccu

SEQ ID NO: 254926 - RNA, 20 nt, Human
uuagugaaaauaguccuccu

SEQ ID NO: 254927 - RNA, 18 nt, Human
uugaacgcuaacuuaggu

SEQ ID NO: 254928 - RNA, 22 nt, Human
ccgcugagcuacgugccugacu

SEQ ID NO: 254929 - RNA, 23 nt, Human
ccgcugagcuacgugccugacuu

SEQ ID NO: 254930 - RNA, 21 nt, Human
cgccgcggccgccgcugagcu

SEQ ID NO: 254931 - RNA, 22 nt, Human
uaaaccguuuauuucuccccac

SEQ ID NO: 254932 - RNA, 21 nt, Human
aaaaaggaauuauugaaaaaa

SEQ ID NO: 254933 - RNA, 19 nt, Human
aaaagacagaaauacucaa

SEQ ID NO: 254934 - RNA, 19 nt, Human
aaacccagagagaaaccca

SEQ ID NO: 254935 - RNA, 21 nt, Human
aaaugcuagagcuguccuacc

SEQ ID NO: 254936 - RNA, 21 nt, Human
aagaaagaaagaaaaaucaaa

SEQ ID NO: 254937 - RNA, 20 nt, Human
aagaagagagaacugcagaa

SEQ ID NO: 254938 - RNA, 22 nt, Human
accacaauauuccugauuaaga

SEQ ID NO: 254939 - RNA, 25 nt, Human
agagaacugcagaacaaucuguaaa

SEQ ID NO: 254940 - RNA, 18 nt, Human
agccaagugacagaauga

SEQ ID NO: 254941 - RNA, 24 nt, Human
auauaaaagcuuccuguaaucaag

SEQ ID NO: 254942 - RNA, 20 nt, Human
aucacaauucuaucucagug

SEQ ID NO: 254943 - RNA, 22 nt, Human
cagaacuauuuacaaagaaaga

SEQ ID NO: 254944 - RNA, 24 nt, Human
cagaaugaaaaaguuagcuaagca

SEQ ID NO: 254945 - RNA, 23 nt, Human
cagagugauacucccagcuuacc

SEQ ID NO: 254946 - RNA, 22 nt, Human
cagauuccuaaagaauuaaaaa

SEQ ID NO: 254947 - RNA, 18 nt, Human
cagggccagcuguuucuc

SEQ ID NO: 254948 - RNA, 20 nt, Human
cauuguacuuuccgacuugc

SEQ ID NO: 254949 - RNA, 20 nt, Human
ccugaggaaaagaagagaga

SEQ ID NO: 254950 - RNA, 27 nt, Human
ccuguaaucaaggaauugccggggucc

SEQ ID NO: 254951 - RNA, 23 nt, Human
cucccagcuuaccacaauauucc

SEQ ID NO: 254952 - RNA, 21 nt, Human
gaaaagacagaaauacucaag

SEQ ID NO: 254953 - RNA, 20 nt, Human
gauucuaacuaucugacuug

SEQ ID NO: 254954 - RNA, 26 nt, Human
guaaaaaggaauuauugaaaaaaugu

SEQ ID NO: 254955 - RNA, 20 nt, Human
uaaaagcuuccuguaaucaa

SEQ ID NO: 254956 - RNA, 21 nt, Human
uaagaaaaugcuagagcuguc

SEQ ID NO: 254957 - RNA, 24 nt, Human
uaagaaaaugcuagagcuguccua

SEQ ID NO: 254958 - RNA, 22 nt, Human
uacaaagaaagaaagaaaaauc

SEQ ID NO: 254959 - RNA, 21 nt, Human
uaccacaauauuccugauuaa

SEQ ID NO: 254960 - RNA, 19 nt, Human
uaccugaggaaaagaagag

SEQ ID NO: 254961 - RNA, 18 nt, Human
uauagcaaauacuuucac

SEQ ID NO: 254962 - RNA, 27 nt, Human
uauuucauaaauaaauaccaaaaauau

SEQ ID NO: 254963 - RNA, 25 nt, Human
uauuuuguuacuccagcacuuuuca

SEQ ID NO: 254964 - RNA, 26 nt, Human
ucagaacuauuuacaaagaaagaaag

SEQ ID NO: 254965 - RNA, 23 nt, Human
uccaaacauauaauaauuuaaga

SEQ ID NO: 254966 - RNA, 22 nt, Human
uccaaacccagagagaaaccca

SEQ ID NO: 254967 - RNA, 21 nt, Human
uccuagacaguucaaucaagu

SEQ ID NO: 254968 - RNA, 24 nt, Human
uccugauuaagaaaaugcuagagc

SEQ ID NO: 254969 - RNA, 24 nt, Human
ugaaaagacagaaauacucaagua

SEQ ID NO: 254970 - RNA, 20 nt, Human
ugcagauuccuaaagaauua

SEQ ID NO: 254971 - RNA, 23 nt, Human
uuacaaagaaagaaagaaaaauc

SEQ ID NO: 254972 - RNA, 22 nt, Human
uucaaauucucaucuggagaug

SEQ ID NO: 254973 - RNA, 18 nt, Human
uuuaaagucacaagaauu

SEQ ID NO: 254974 - RNA, 19 nt, Human
uuuuuuuuuuuuuuuuuaa

SEQ ID NO: 254975 - RNA, 18 nt, Human
aaaaaaaaaaaaaacaac

SEQ ID NO: 254976 - RNA, 22 nt, Human
aaaaaaaaaaaaaacaaccaca

SEQ ID NO: 254977 - RNA, 18 nt, Human
aaaaaaaaaaaacaaccc

SEQ ID NO: 254978 - RNA, 20 nt, Human
aaaccccuccacguaaacuc

SEQ ID NO: 254979 - RNA, 18 nt, Human
aaagaaguacaugccccu

SEQ ID NO: 254980 - RNA, 19 nt, Human
agcaaaaggaaaaaaaaaa

SEQ ID NO: 254981 - RNA, 19 nt, Human
auaaagaaguacaugcccc

SEQ ID NO: 254982 - RNA, 18 nt, Human
cccuccacguaaacucag

SEQ ID NO: 254983 - RNA, 19 nt, Human
cucuuucuucaucuagggg

SEQ ID NO: 254984 - RNA, 26 nt, Human
gaaaaaaaaaaaaaaaacaaccacau

SEQ ID NO: 254985 - RNA, 26 nt, Human
ucagaagcuuucuacucccucuauuc

SEQ ID NO: 254986 - RNA, 21 nt, Human
ucucuuucuucaucuaggggc

SEQ ID NO: 254987 - RNA, 19 nt, Human
aagcgaacaaugaaaucag

SEQ ID NO: 254988 - RNA, 23 nt, Human
aagcgaacaaugaaaucagaaac

SEQ ID NO: 254989 - RNA, 23 nt, Human
aaguucuaccaguuuaaaguuuu

SEQ ID NO: 254990 - RNA, 22 nt, Human
agaauuacagaagcgaacaaug

SEQ ID NO: 254991 - RNA, 28 nt, Human
cacagcuguagcauuuauaacaaaguca

SEQ ID NO: 254992 - RNA, 19 nt, Human
ccugcugcuuucgcuggga

SEQ ID NO: 254993 - RNA, 23 nt, Human
cuagcaccagagcagucccuucc

SEQ ID NO: 254994 - RNA, 22 nt, Human
gaagcgaacaaugaaaucagaa

SEQ ID NO: 254995 - RNA, 23 nt, Human
gaagcgaacaaugaaaucagaaa

SEQ ID NO: 254996 - RNA, 19 nt, Human
uagcauuuauaacaaaguc

SEQ ID NO: 254997 - RNA, 21 nt, Human
ugaaaucagaaacaagcucuc

SEQ ID NO: 254998 - RNA, 22 nt, Human
ugaaaucagaaacaagcucuca

SEQ ID NO: 254999 - RNA, 25 nt, Human
uuuuucagaauuacagaagcgaaca

SEQ ID NO: 255000 - RNA, 22 nt, Human
aaacucucagugacagagaucc

SEQ ID NO: 255001 - RNA, 19 nt, Human
aagcagccuggucaccaga

SEQ ID NO: 255002 - RNA, 19 nt, Human
agaugcagugauucacacc

SEQ ID NO: 255003 - RNA, 19 nt, Human
agaugugaucgcuucccca

SEQ ID NO: 255004 - RNA, 24 nt, Human
agcauuaaaggcauucuaugagcu

SEQ ID NO: 255005 - RNA, 19 nt, Human
agggggacuguuugagccc

SEQ ID NO: 255006 - RNA, 19 nt, Human
agucugggcaauauaguga

SEQ ID NO: 255007 - RNA, 24 nt, Human
agucugggcaauauagugagaccu

SEQ ID NO: 255008 - RNA, 25 nt, Human
agucugggcaauauagugagaccuc

SEQ ID NO: 255009 - RNA, 19 nt, Human
agugauucacaccuguaau

SEQ ID NO: 255010 - RNA, 22 nt, Human
auuccaucacuuugggaggcca

SEQ ID NO: 255011 - RNA, 24 nt, Human
cacaccuguaauuccaucacuuug

SEQ ID NO: 255012 - RNA, 21 nt, Human
caccagaugugaucgcuuccc

SEQ ID NO: 255013 - RNA, 19 nt, Human
caccuguaauuccaucacu

SEQ ID NO: 255014 - RNA, 24 nt, Human
caccuguaauuccaucacuuuggg

SEQ ID NO: 255015 - RNA, 21 nt, Human
caucacuuugggaggccaacg

SEQ ID NO: 255016 - RNA, 24 nt, Human
caucacuuugggaggccaacgcag

SEQ ID NO: 255017 - RNA, 22 nt, Human
cauucuaugagcuccuuuagcc

SEQ ID NO: 255018 - RNA, 25 nt, Human
ccaggaguucgagaccagucugggc

SEQ ID NO: 255019 - RNA, 18 nt, Human
cccacaacaaccuugaga

SEQ ID NO: 255020 - RNA, 24 nt, Human
cgagaccagucugggcaauauagu

SEQ ID NO: 255021 - RNA, 23 nt, Human
cuccaagauuugcagcucacaga

SEQ ID NO: 255022 - RNA, 22 nt, Human
cucccacaacaaccuugagaac

SEQ ID NO: 255023 - RNA, 21 nt, Human
cuguuugagcccaggaguucg

SEQ ID NO: 255024 - RNA, 24 nt, Human
cuuguuugcucuggcaaugucucu

SEQ ID NO: 255025 - RNA, 25 nt, Human
gaaugugguuggagugucccacuuc

SEQ ID NO: 255026 - RNA, 20 nt, Human
gcccaggaguucgagaccag

SEQ ID NO: 255027 - RNA, 21 nt, Human
gcuguaguaagcuucuccuuu

SEQ ID NO: 255028 - RNA, 20 nt, Human
ggaggccaacgcagggggac

SEQ ID NO: 255029 - RNA, 26 nt, Human
guaguaagcuucuccuuuuccaauuu

SEQ ID NO: 255030 - RNA, 22 nt, Human
guuugagcccaggaguucgaga

SEQ ID NO: 255031 - RNA, 23 nt, Human
uaagcuucuccuuuuccaauuuu

SEQ ID NO: 255032 - RNA, 23 nt, Human
ucacaccuguaauuccaucacuu

SEQ ID NO: 255033 - RNA, 24 nt, Human
ucacaccuguaauuccaucacuuu

SEQ ID NO: 255034 - RNA, 23 nt, Human
ucucccacaacaaccuugagaac

SEQ ID NO: 255035 - RNA, 24 nt, Human
ucucccacaacaaccuugagaacc

SEQ ID NO: 255036 - RNA, 19 nt, Human
ucucugguuuuugcuccaa

SEQ ID NO: 255037 - RNA, 20 nt, Human
ucucugguuuuugcuccaag

SEQ ID NO: 255038 - RNA, 21 nt, Human
ucucugguuuuugcuccaaga

SEQ ID NO: 255039 - RNA, 22 nt, Human
ugaagcagccuggucaccagau

SEQ ID NO: 255040 - RNA, 23 nt, Human
ugagcccaggaguucgagaccag

SEQ ID NO: 255041 - RNA, 20 nt, Human
ugcucuggcaaugucucugg

SEQ ID NO: 255042 - RNA, 18 nt, Human
uggaauuggcaaucuuuu

SEQ ID NO: 255043 - RNA, 18 nt, Human
uggcaaugucucugguuu

SEQ ID NO: 255044 - RNA, 20 nt, Human
uguuugcuaaguuaaggcuu

SEQ ID NO: 255045 - RNA, 20 nt, Human
uuaaacauuugugauuugau

SEQ ID NO: 255046 - RNA, 19 nt, Human
uuggauuagcauuaaaggc

SEQ ID NO: 255047 - RNA, 23 nt, Human
uuugagcccaggaguucgagacc

SEQ ID NO: 255048 - RNA, 22 nt, Human
uuuggaauuggcaaucuuuuuc

SEQ ID NO: 255049 - RNA, 20 nt, Human
aaaagugcaacucugccccc

SEQ ID NO: 255050 - RNA, 19 nt, Human
aacaguguugaacucuggc

SEQ ID NO: 255051 - RNA, 19 nt, Human
aaccccuucccuuccacag

SEQ ID NO: 255052 - RNA, 25 nt, Human
aaguaauccuccugccucagcuuuc

SEQ ID NO: 255053 - RNA, 25 nt, Human
aagugauccucccaccucaaccucc

SEQ ID NO: 255054 - RNA, 19 nt, Human
acccguuucgucccaccgu

SEQ ID NO: 255055 - RNA, 20 nt, Human
accucaaccuccugaguagc

SEQ ID NO: 255056 - RNA, 18 nt, Human
acuggauugcaugguggc

SEQ ID NO: 255057 - RNA, 21 nt, Human
aguagcugggaauacaggcau

SEQ ID NO: 255058 - RNA, 23 nt, Human
aguagcugggaauacaggcaugc

SEQ ID NO: 255059 - RNA, 20 nt, Human
caaguaauccuccugccuca

SEQ ID NO: 255060 - RNA, 22 nt, Human
caaguaauccuccugccucagc

SEQ ID NO: 255061 - RNA, 27 nt, Human
caaguaauccuccugccucagcuuucu

SEQ ID NO: 255062 - RNA, 27 nt, Human
caagugauccucccaccucaaccuccu

SEQ ID NO: 255063 - RNA, 19 nt, Human
caccaccaugccuaauuuu

SEQ ID NO: 255064 - RNA, 20 nt, Human
caccaugccuaauuuuuuag

SEQ ID NO: 255065 - RNA, 20 nt, Human
caccggcacggacgggaguc

SEQ ID NO: 255066 - RNA, 24 nt, Human
caccucaaccuccugaguagcugg

SEQ ID NO: 255067 - RNA, 18 nt, Human
caccugauuccccagggc

SEQ ID NO: 255068 - RNA, 23 nt, Human
cacugaagccucacuggauugca

SEQ ID NO: 255069 - RNA, 22 nt, Human
cacugggucucccugugugccu

SEQ ID NO: 255070 - RNA, 20 nt, Human
cauggcucauugcagccuug

SEQ ID NO: 255071 - RNA, 22 nt, Human
cauuuacaucugcaucugcaaa

SEQ ID NO: 255072 - RNA, 20 nt, Human
ccagauuuucaagagcaacg

SEQ ID NO: 255073 - RNA, 24 nt, Human
ccagggccugggcuagcacaaagg

SEQ ID NO: 255074 - RNA, 21 nt, Human
cccggacccgccgggcuccug

SEQ ID NO: 255075 - RNA, 21 nt, Human
cccugugugccucagcuaggg

SEQ ID NO: 255076 - RNA, 20 nt, Human
ccggacccgccgggcuccuc

SEQ ID NO: 255077 - RNA, 23 nt, Human
ccuaccauuuugguugcuguaca

SEQ ID NO: 255078 - RNA, 23 nt, Human
ccuaugaucagaucacaucuguu

SEQ ID NO: 255079 - RNA, 21 nt, Human
ccucagcuagggcagggcagg

SEQ ID NO: 255080 - RNA, 24 nt, Human
ccucagcuagggcagggcaggggc

SEQ ID NO: 255081 - RNA, 24 nt, Human
ccucccaccucaaccuccugagua

SEQ ID NO: 255082 - RNA, 24 nt, Human
ccuccugccucagcuuucugaauu

SEQ ID NO: 255083 - RNA, 23 nt, Human
ccugaguagcugggaauacaggc

SEQ ID NO: 255084 - RNA, 22 nt, Human
ccuugaacuucugggcucaagu

SEQ ID NO: 255085 - RNA, 22 nt, Human
cggcacggacgggagucccgga

SEQ ID NO: 255086 - RNA, 24 nt, Human
cucaaguaauccuccugccucagc

SEQ ID NO: 255087 - RNA, 24 nt, Human
cucaagugauccucccaccucaac

SEQ ID NO: 255088 - RNA, 19 nt, Human
cucauugcagccuugaacu

SEQ ID NO: 255089 - RNA, 23 nt, Human
cuccugccucagcuuucugaauu

SEQ ID NO: 255090 - RNA, 19 nt, Human
cugccucagcuuucugaau

SEQ ID NO: 255091 - RNA, 21 nt, Human
cuucaagaccucccuaccauu

SEQ ID NO: 255092 - RNA, 22 nt, Human
cuucaagaccucccuaccauuu

SEQ ID NO: 255093 - RNA, 23 nt, Human
cuucugggcucaagugauccucc

SEQ ID NO: 255094 - RNA, 20 nt, Human
gaaaagugcaacucugcccc

SEQ ID NO: 255095 - RNA, 24 nt, Human
gaacuucugggcucaagugauccu

SEQ ID NO: 255096 - RNA, 24 nt, Human
gaauacaggcaugcaccaccaugc

SEQ ID NO: 255097 - RNA, 24 nt, Human
gaauugcugggauuaucggcauga

SEQ ID NO: 255098 - RNA, 22 nt, Human
gagucccggacccgccgggcuc

SEQ ID NO: 255099 - RNA, 18 nt, Human
gauuaucggcaugagcca

SEQ ID NO: 255100 - RNA, 19 nt, Human
gauuaucggcaugagccac

SEQ ID NO: 255101 - RNA, 21 nt, Human
gauuaucggcaugagccacug

SEQ ID NO: 255102 - RNA, 23 nt, Human
gcaugguggcuuccccaaauucc

SEQ ID NO: 255103 - RNA, 23 nt, Human
gcccccuggugguuugcagcucu

SEQ ID NO: 255104 - RNA, 21 nt, Human
gccggcgcccgcaccggcacg

SEQ ID NO: 255105 - RNA, 24 nt, Human
gccucagcuuucugaauugcuggg

SEQ ID NO: 255106 - RNA, 18 nt, Human
gcucaagugauccuccca

SEQ ID NO: 255107 - RNA, 20 nt, Human
ggcaugagccacugugccca

SEQ ID NO: 255108 - RNA, 19 nt, Human
ggcucaagugauccuccca

SEQ ID NO: 255109 - RNA, 20 nt, Human
gggcaggggcucuugugcgu

SEQ ID NO: 255110 - RNA, 22 nt, Human
gggcucaagugauccucccacc

SEQ ID NO: 255111 - RNA, 19 nt, Human
guaauccuccugccucagc

SEQ ID NO: 255112 - RNA, 20 nt, Human
gucccggacccgccgggcuc

SEQ ID NO: 255113 - RNA, 19 nt, Human
uaaaaugaggacaaaccua

SEQ ID NO: 255114 - RNA, 22 nt, Human
uacaggcaugcaccaccaugcc

SEQ ID NO: 255115 - RNA, 20 nt, Human
uagagauggggucuugcuau

SEQ ID NO: 255116 - RNA, 22 nt, Human
uagcugaguacaaauauuugaa

SEQ ID NO: 255117 - RNA, 23 nt, Human
uauauugcccagucuggccucaa

SEQ ID NO: 255118 - RNA, 24 nt, Human
ucauugcagccuugaacuucuggg

SEQ ID NO: 255119 - RNA, 24 nt, Human
uccacagaguuuaguuuccucauu

SEQ ID NO: 255120 - RNA, 21 nt, Human
uccccaaauuccguaugccuu

SEQ ID NO: 255121 - RNA, 24 nt, Human
uccugaguagcugggaauacaggc

SEQ ID NO: 255122 - RNA, 25 nt, Human
ucuggcaugccauggugcauggugg

SEQ ID NO: 255123 - RNA, 23 nt, Human
ucuggccucaaguaauccuccug

SEQ ID NO: 255124 - RNA, 22 nt, Human
ucugggcucaagugauccuccc

SEQ ID NO: 255125 - RNA, 23 nt, Human
ucuugcuauauugcccagucugg

SEQ ID NO: 255126 - RNA, 23 nt, Human
ugaguacaaauauuugaaauaag

SEQ ID NO: 255127 - RNA, 18 nt, Human
ugccauggugcauggugg

SEQ ID NO: 255128 - RNA, 24 nt, Human
ugccucagcuuucugaauugcugg

SEQ ID NO: 255129 - RNA, 23 nt, Human
ugccuuaggauaugaugcuuggc

SEQ ID NO: 255130 - RNA, 20 nt, Human
ugcuauaaaucccucauugg

SEQ ID NO: 255131 - RNA, 20 nt, Human
ugcugggauuaucggcauga

SEQ ID NO: 255132 - RNA, 18 nt, Human
uggcaaguuuuaaaaugu

SEQ ID NO: 255133 - RNA, 18 nt, Human
uggccucaaguaauccuc

SEQ ID NO: 255134 - RNA, 24 nt, Human
uggccucaaguaauccuccugccu

SEQ ID NO: 255135 - RNA, 25 nt, Human
uggcucauugcagccuugaacuucu

SEQ ID NO: 255136 - RNA, 24 nt, Human
ugggaauacaggcaugcaccacca

SEQ ID NO: 255137 - RNA, 22 nt, Human
ugggauuaucggcaugagccac

SEQ ID NO: 255138 - RNA, 22 nt, Human
ugggauuaucggcaugagccac

SEQ ID NO: 255139 - RNA, 24 nt, Human
ugggauuaucggcaugagccacug

SEQ ID NO: 255140 - RNA, 24 nt, Human
ugggcucaagugauccucccaccu

SEQ ID NO: 255141 - RNA, 23 nt, Human
uggggucuugcuauauugcccag

SEQ ID NO: 255142 - RNA, 24 nt, Human
ugguguaaucauggcucauugcag

SEQ ID NO: 255143 - RNA, 25 nt, Human
uguaugaggccccuggcaguuucug

SEQ ID NO: 255144 - RNA, 20 nt, Human
uuagugcuccuuuuaauaau

SEQ ID NO: 255145 - RNA, 21 nt, Human
uuagugcuccuuuuaauaauu

SEQ ID NO: 255146 - RNA, 22 nt, Human
uuccacagaguuuaguuuccuc

SEQ ID NO: 255147 - RNA, 30 nt, Human
uuccuuuagugcuccuuuuaauaauuuuaa

SEQ ID NO: 255148 - RNA, 21 nt, Human
uugcagcucucuauucaagau

SEQ ID NO: 255149 - RNA, 18 nt, Human
uugcccagucuggccuca

SEQ ID NO: 255150 - RNA, 19 nt, Human
uuuuuuuuuuuuaagaguc

SEQ ID NO: 255151 - RNA, 21 nt, Human
uuuuuuuuuuuuuuuuuuaag

SEQ ID NO: 255152 - RNA, 24 nt, Human
aaaauucuaaaaauaaaauauauc

SEQ ID NO: 255153 - RNA, 21 nt, Human
aagauggacuggcaaagagaa

SEQ ID NO: 255154 - RNA, 20 nt, Human
aauucaguucacagauacug

SEQ ID NO: 255155 - RNA, 22 nt, Human
agaaagcuaaagucugugguga

SEQ ID NO: 255156 - RNA, 26 nt, Human
agucuguggugaauucaguucacaga

SEQ ID NO: 255157 - RNA, 24 nt, Human
aucaaguuuccccugaauaaaaau

SEQ ID NO: 255158 - RNA, 20 nt, Human
gcaaaauccucuugcucaga

SEQ ID NO: 255159 - RNA, 21 nt, Human
gcaaaauccucuugcucagaa

SEQ ID NO: 255160 - RNA, 22 nt, Human
ggcauaaaaaucucaaaucaag

SEQ ID NO: 255161 - RNA, 18 nt, Human
uaaaauauauccugggcu

SEQ ID NO: 255162 - RNA, 22 nt, Human
ucacaggcauaaaaaucucaaa

SEQ ID NO: 255163 - RNA, 24 nt, Human
ucacaggcauaaaaaucucaaauc

SEQ ID NO: 255164 - RNA, 31 nt, Human
ucauauuaaaggaaaauuaucaagaaaaccc

SEQ ID NO: 255165 - RNA, 19 nt, Human
ugauaaagcaugaaaaaaa

SEQ ID NO: 255166 - RNA, 19 nt, Human
uguaaaauagaauauacaa

SEQ ID NO: 255167 - RNA, 23 nt, Human
uuaaaggaaaauuaucaagaaaa

SEQ ID NO: 255168 - RNA, 23 nt, Human
uuccaaggaagucacaggcauuu

SEQ ID NO: 255169 - RNA, 26 nt, Human
aaaaaagaaaaagaaacauuuagaaa

SEQ ID NO: 255170 - RNA, 24 nt, Human
aaaaagaaaaagaaacauuuagaa

SEQ ID NO: 255171 - RNA, 26 nt, Human
aaaaagaaaacaaacuauauggaaaa

SEQ ID NO: 255172 - RNA, 23 nt, Human
aaaacacuggagcacacgguaua

SEQ ID NO: 255173 - RNA, 23 nt, Human
aaaacacuggagcacacgguaua

SEQ ID NO: 255174 - RNA, 23 nt, Human
aaaagaaaaagaaacauuuagaa

SEQ ID NO: 255175 - RNA, 25 nt, Human
aaaagaaaacaaacuauauggaaaa

SEQ ID NO: 255176 - RNA, 23 nt, Human
aagaaaaagaaacauuuagaaaa

SEQ ID NO: 255177 - RNA, 27 nt, Human
aaugcucauuuauucucaaguacuugu

SEQ ID NO: 255178 - RNA, 21 nt, Human
acaacacaagaaaacacugga

SEQ ID NO: 255179 - RNA, 19 nt, Human
acaagacagaaaaagaaaa

SEQ ID NO: 255180 - RNA, 20 nt, Human
acacauuaccaaaguggacc

SEQ ID NO: 255181 - RNA, 28 nt, Human
accuacaagacagaaaaagaaaacaaac

SEQ ID NO: 255182 - RNA, 22 nt, Human
acgccgaaccacccccuccagc

SEQ ID NO: 255183 - RNA, 25 nt, Human
acgccgaaccacccccuccagcucc

SEQ ID NO: 255184 - RNA, 26 nt, Human
agaaaaagaaacauuuagaaaacuau

SEQ ID NO: 255185 - RNA, 21 nt, Human
agaaaacaacacaagaaaaca

SEQ ID NO: 255186 - RNA, 25 nt, Human
agaaaacaacacaagaaaacacugg

SEQ ID NO: 255187 - RNA, 25 nt, Human
agacagaaaaagaaaacaaacuaua

SEQ ID NO: 255188 - RNA, 26 nt, Human
agacagaaaaagaaaacaaacuauau

SEQ ID NO: 255189 - RNA, 25 nt, Human
agacagaaaaagaaaacaaagggac

SEQ ID NO: 255190 - RNA, 26 nt, Human
agacagaaaaagaaaacaaagggacc

SEQ ID NO: 255191 - RNA, 21 nt, Human
agagaaaacaacacaagaaaa

SEQ ID NO: 255192 - RNA, 23 nt, Human
agagaaaacaacacaagaaaaca

SEQ ID NO: 255193 - RNA, 20 nt, Human
agccugaggcgagagcuaau

SEQ ID NO: 255194 - RNA, 18 nt, Human
aguugaagggagaacugu

SEQ ID NO: 255195 - RNA, 19 nt, Human
auggaaaaagccugaggcg

SEQ ID NO: 255196 - RNA, 21 nt, Human
augugagccaacuuaccuaca

SEQ ID NO: 255197 - RNA, 18 nt, Human
auuacaugaugugagcca

SEQ ID NO: 255198 - RNA, 19 nt, Human
caacaucaggaaaguagag

SEQ ID NO: 255199 - RNA, 22 nt, Human
caacggcccccacgccgaacca

SEQ ID NO: 255200 - RNA, 19 nt, Human
caagaaaacacuggagcac

SEQ ID NO: 255201 - RNA, 25 nt, Human
caagaaaacacuggagcacacggua

SEQ ID NO: 255202 - RNA, 18 nt, Human
cacccccuccagcuccgc

SEQ ID NO: 255203 - RNA, 20 nt, Human
cacccccuccagcuccgccc

SEQ ID NO: 255204 - RNA, 21 nt, Human
cacgccgaaccacccccucca

SEQ ID NO: 255205 - RNA, 26 nt, Human
cacgccgaaccacccccuccagcucc

SEQ ID NO: 255206 - RNA, 23 nt, Human
cagaaaaguugugaucagagaaa

SEQ ID NO: 255207 - RNA, 20 nt, Human
caguugaagggagaacuguu

SEQ ID NO: 255208 - RNA, 23 nt, Human
ccaacggcccccacgccgaacca

SEQ ID NO: 255209 - RNA, 22 nt, Human
ccagucaugaaauaaugauccc

SEQ ID NO: 255210 - RNA, 23 nt, Human
ccagucaugaaauaaugaucccc

SEQ ID NO: 255211 - RNA, 22 nt, Human
ccccacgccgaaccacccccuc

SEQ ID NO: 255212 - RNA, 22 nt, Human
ccccacgccgaaccacccccuc

SEQ ID NO: 255213 - RNA, 23 nt, Human
cccccacgccgaaccacccccuc

SEQ ID NO: 255214 - RNA, 18 nt, Human
ccccuccagcuccgcccc

SEQ ID NO: 255215 - RNA, 18 nt, Human
cgcauuguuccacuuucc

SEQ ID NO: 255216 - RNA, 23 nt, Human
cgccgaaccacccccuccagcuc

SEQ ID NO: 255217 - RNA, 24 nt, Human
cggcccccacgccgaaccaccccc

SEQ ID NO: 255218 - RNA, 21 nt, Human
cuacaagacagaaaaagaaaa

SEQ ID NO: 255219 - RNA, 24 nt, Human
cucaaguacuugugcaaggcugau

SEQ ID NO: 255220 - RNA, 20 nt, Human
cuguucauccuucuagaacc

SEQ ID NO: 255221 - RNA, 21 nt, Human
cuuaaaacgcuaaaccucaga

SEQ ID NO: 255222 - RNA, 24 nt, Human
gaaaacacuggagcacacgguaua

SEQ ID NO: 255223 - RNA, 23 nt, Human
gaaaauaaugaaaaccagguagc

SEQ ID NO: 255224 - RNA, 24 nt, Human
ggaaaauaaugaaaaccagguagc

SEQ ID NO: 255225 - RNA, 18 nt, Human
ggaacgcaccagucauga

SEQ ID NO: 255226 - RNA, 23 nt, Human
ggcccccacgccgaaccaccccc

SEQ ID NO: 255227 - RNA, 23 nt, Human
uacaagacagaaaaagaaaacaa

SEQ ID NO: 255228 - RNA, 20 nt, Human
ucaaaaaagaaaaagaaaca

SEQ ID NO: 255229 - RNA, 23 nt, Human
ucagagaaaacaacacaagaaaa

SEQ ID NO: 255230 - RNA, 26 nt, Human
uccuacaaccgacgcauuguuccacu

SEQ ID NO: 255231 - RNA, 19 nt, Human
uccucaucucuuugacaca

SEQ ID NO: 255232 - RNA, 22 nt, Human
ucuuuaauugcugaaugccucu

SEQ ID NO: 255233 - RNA, 19 nt, Human
ugaagggagaacuguucau

SEQ ID NO: 255234 - RNA, 24 nt, Human
ugcacacucaaaaaagaaaaagaa

SEQ ID NO: 255235 - RNA, 19 nt, Human
ugcccuaacuuuagacaug

SEQ ID NO: 255236 - RNA, 21 nt, Human
ugcccuaacuuuagacauguu

SEQ ID NO: 255237 - RNA, 18 nt, Human
uggaagaucauuauuuag

SEQ ID NO: 255238 - RNA, 21 nt, Human
ugggaaaauaaugaaaaccag

SEQ ID NO: 255239 - RNA, 21 nt, Human
uuggaaaguaugaauaucuaa

SEQ ID NO: 255240 - RNA, 20 nt, Human
uuugcaaaccgcuaaaaguc

SEQ ID NO: 255241 - RNA, 25 nt, Human
uuuuuuuuuuuuuaaaaaaugcuca

SEQ ID NO: 255242 - RNA, 20 nt, Human
aaaaaguaaaaacagcuugu

SEQ ID NO: 255243 - RNA, 24 nt, Human
aaaaguauucccaagagaccaagg

SEQ ID NO: 255244 - RNA, 23 nt, Human
aaacaaacguggagacagggcac

SEQ ID NO: 255245 - RNA, 19 nt, Human
aacacagagaggacagggg

SEQ ID NO: 255246 - RNA, 22 nt, Human
aacagcccuguaaaaugaaaac

SEQ ID NO: 255247 - RNA, 23 nt, Human
aacauuuuuaacccaucaucaac

SEQ ID NO: 255248 - RNA, 21 nt, Human
aagaaaacaggcgggagcaga

SEQ ID NO: 255249 - RNA, 21 nt, Human
aagaagccucccuuaagcuga

SEQ ID NO: 255250 - RNA, 25 nt, Human
aagagaccaaggcaagccacgaguc

SEQ ID NO: 255251 - RNA, 23 nt, Human
aagcaaauuuacaacucuuccac

SEQ ID NO: 255252 - RNA, 23 nt, Human
aaucccuguacccuuugcagccc

SEQ ID NO: 255253 - RNA, 20 nt, Human
aaucguggcugaaggugcuu

SEQ ID NO: 255254 - RNA, 20 nt, Human
aaugacaggaaagcuggaga

SEQ ID NO: 255255 - RNA, 19 nt, Human
acaaacgacgacacagugu

SEQ ID NO: 255256 - RNA, 18 nt, Human
accagggugagaaaaggu

SEQ ID NO: 255257 - RNA, 20 nt, Human
accagggugagaaaaggugc

SEQ ID NO: 255258 - RNA, 24 nt, Human
acuuguaauuuaugacaaaaacug

SEQ ID NO: 255259 - RNA, 19 nt, Human
agaaagaaaacaggcggga

SEQ ID NO: 255260 - RNA, 19 nt, Human
agacagggcacugcccgca

SEQ ID NO: 255261 - RNA, 23 nt, Human
agacaggugaucugggggauggc

SEQ ID NO: 255262 - RNA, 18 nt, Human
agacccagcaaauccaaa

SEQ ID NO: 255263 - RNA, 21 nt, Human
agacuccuucacaaagcccuu

SEQ ID NO: 255264 - RNA, 18 nt, Human
agaggacagggggcaaag

SEQ ID NO: 255265 - RNA, 24 nt, Human
agaugaacgaguuauaucuacaag

SEQ ID NO: 255266 - RNA, 21 nt, Human
agauguccccucccugcccuu

SEQ ID NO: 255267 - RNA, 19 nt, Human
agccugggacccugagauu

SEQ ID NO: 255268 - RNA, 18 nt, Human
aggaaaggacaucaaaaa

SEQ ID NO: 255269 - RNA, 26 nt, Human
aggaagcauuuaugccucacaccuuu

SEQ ID NO: 255270 - RNA, 23 nt, Human
aggaggagccggcgccgcgcuca

SEQ ID NO: 255271 - RNA, 22 nt, Human
aggcaaacaaacgacgacacag

SEQ ID NO: 255272 - RNA, 24 nt, Human
aggcaggagaugguagguacagag

SEQ ID NO: 255273 - RNA, 21 nt, Human
aggccacuugucgaaccaccg

SEQ ID NO: 255274 - RNA, 26 nt, Human
aggcgaaaaaguaaaaacaggggacc

SEQ ID NO: 255275 - RNA, 27 nt, Human
aggcuucauucugcaaagcugagggca

SEQ ID NO: 255276 - RNA, 20 nt, Human
agucacuccuuacagaaagu

SEQ ID NO: 255277 - RNA, 21 nt, Human
aguuaaggcugcuguagggug

SEQ ID NO: 255278 - RNA, 18 nt, Human
aucguggcugaaggugcu

SEQ ID NO: 255279 - RNA, 21 nt, Human
augaacaaaacuuacaacccc

SEQ ID NO: 255280 - RNA, 18 nt, Human
auggguggguauuuguuc

SEQ ID NO: 255281 - RNA, 19 nt, Human
auuggacaucuccuguggc

SEQ ID NO: 255282 - RNA, 19 nt, Human
auuugucagaucucucccu

SEQ ID NO: 255283 - RNA, 26 nt, Human
auuugucagaucucucccucccccag

SEQ ID NO: 255284 - RNA, 21 nt, Human
caaagugccucugcuaagagc

SEQ ID NO: 255285 - RNA, 21 nt, Human
caaccccaggaggggagccag

SEQ ID NO: 255286 - RNA, 23 nt, Human
caacucuuccacugggacgauua

SEQ ID NO: 255287 - RNA, 19 nt, Human
caagagaccaaggcaagcc

SEQ ID NO: 255288 - RNA, 19 nt, Human
cacagggcacauuuugggg

SEQ ID NO: 255289 - RNA, 22 nt, Human
cacgagucauucuccaaagcac

SEQ ID NO: 255290 - RNA, 23 nt, Human
cagaacaauuccaggcaaacuaa

SEQ ID NO: 255291 - RNA, 18 nt, Human
cagacccagcaaauccaa

SEQ ID NO: 255292 - RNA, 19 nt, Human
cagcagggaguguguggug

SEQ ID NO: 255293 - RNA, 22 nt, Human
cagccuggaggacaggcauggg

SEQ ID NO: 255294 - RNA, 19 nt, Human
caggaaagcuggagauuag

SEQ ID NO: 255295 - RNA, 25 nt, Human
caggagcccagcagugcucccagug

SEQ ID NO: 255296 - RNA, 23 nt, Human
cagggaaaacagcagggagugug

SEQ ID NO: 255297 - RNA, 21 nt, Human
cauaggcaaacaaacgacgac

SEQ ID NO: 255298 - RNA, 22 nt, Human
cauaggcaaacaaacgacgaca

SEQ ID NO: 255299 - RNA, 22 nt, Human
cauccucaccugcaccuggcaa

SEQ ID NO: 255300 - RNA, 20 nt, Human
ccaagagaccaaggcaagcc

SEQ ID NO: 255301 - RNA, 23 nt, Human
ccaaggaugaugaugcuuuacag

SEQ ID NO: 255302 - RNA, 22 nt, Human
ccacugggacgauccggcccgc

SEQ ID NO: 255303 - RNA, 22 nt, Human
ccaggcaaacuaagaaccugcc

SEQ ID NO: 255304 - RNA, 21 nt, Human
cccaagagaccaaggcaagcc

SEQ ID NO: 255305 - RNA, 22 nt, Human
cccaggaggggagccagaaacu

SEQ ID NO: 255306 - RNA, 23 nt, Human
cccgcaaggccacuugucgaacc

SEQ ID NO: 255307 - RNA, 23 nt, Human
cccugccccuuucuauucccucc

SEQ ID NO: 255308 - RNA, 20 nt, Human
cccuggugcaaucccuguac

SEQ ID NO: 255309 - RNA, 19 nt, Human
ccgaagcuuucaaugacag

SEQ ID NO: 255310 - RNA, 21 nt, Human
ccuaggggaaugggcaguauu

SEQ ID NO: 255311 - RNA, 22 nt, Human
ccucccugccccuuucuauucc

SEQ ID NO: 255312 - RNA, 22 nt, Human
ccucugcuaagagccacucuuc

SEQ ID NO: 255313 - RNA, 23 nt, Human
ccugagauuccgcggguggagaa

SEQ ID NO: 255314 - RNA, 23 nt, Human
ccuggcaaggugggugaaugggg

SEQ ID NO: 255315 - RNA, 24 nt, Human
ccugugaagcccucagaugucccc

SEQ ID NO: 255316 - RNA, 23 nt, Human
ccuuaaaugaacauuuuuaaccc

SEQ ID NO: 255317 - RNA, 24 nt, Human
cgggcugccagauagagucagaaa

SEQ ID NO: 255318 - RNA, 23 nt, Human
cgugauggcccacagccugggac

SEQ ID NO: 255319 - RNA, 20 nt, Human
cuaagucuaaaguguuagaa

SEQ ID NO: 255320 - RNA, 21 nt, Human
cuaguuagaaaaguauuccca

SEQ ID NO: 255321 - RNA, 22 nt, Human
cucacaccuuccaaagugccuc

SEQ ID NO: 255322 - RNA, 21 nt, Human
cucaggugagagcaacccuag

SEQ ID NO: 255323 - RNA, 24 nt, Human
cuccccuguucugcccuggugcaa

SEQ ID NO: 255324 - RNA, 24 nt, Human
cugaaaucguggcugaaggugcug

SEQ ID NO: 255325 - RNA, 25 nt, Human
cugaagcucagagaaguuaccauac

SEQ ID NO: 255326 - RNA, 18 nt, Human
gaaaggacaucaaaaaua

SEQ ID NO: 255327 - RNA, 20 nt, Human
gacaggcaugggggugagga

SEQ ID NO: 255328 - RNA, 20 nt, Human
gagaccaaggcaagccacga

SEQ ID NO: 255329 - RNA, 21 nt, Human
gcagccaauauaguacaaguc

SEQ ID NO: 255330 - RNA, 22 nt, Human
gccuaggggaaugggcaguauu

SEQ ID NO: 255331 - RNA, 21 nt, Human
gccuggaggacaggcaugggg

SEQ ID NO: 255332 - RNA, 23 nt, Human
gcucaguguugggacagacgagg

SEQ ID NO: 255333 - RNA, 24 nt, Human
gcuggugggaaaguuccaggcagg

SEQ ID NO: 255334 - RNA, 18 nt, Human
ggaaauacagucggcccu

SEQ ID NO: 255335 - RNA, 23 nt, Human
ggaggacaggcaugggggugagg

SEQ ID NO: 255336 - RNA, 24 nt, Human
gggaacacagagaggacagggggc

SEQ ID NO: 255337 - RNA, 21 nt, Human
gggacccugagauuccgcggg

SEQ ID NO: 255338 - RNA, 19 nt, Human
ggggaacacagagaggaca

SEQ ID NO: 255339 - RNA, 19 nt, Human
ggucgugauggcccacagc

SEQ ID NO: 255340 - RNA, 19 nt, Human
ggugaucugggggauggcg

SEQ ID NO: 255341 - RNA, 23 nt, Human
gugcuacaaagagguacagaaca

SEQ ID NO: 255342 - RNA, 21 nt, Human
guggaaauggguggguauuug

SEQ ID NO: 255343 - RNA, 23 nt, Human
guggaaauggguggguauuuguu

SEQ ID NO: 255344 - RNA, 19 nt, Human
guguggcaagugucacagu

SEQ ID NO: 255345 - RNA, 22 nt, Human
uaaacagaauauuccacuccac

SEQ ID NO: 255346 - RNA, 20 nt, Human
uaaaugaacauuuuuaaccc

SEQ ID NO: 255347 - RNA, 21 nt, Human
uaaccaggaaauacagucggc

SEQ ID NO: 255348 - RNA, 19 nt, Human
uaagcagacugacagccuu

SEQ ID NO: 255349 - RNA, 28 nt, Human
uaagcagacugacagccuuacuuacaga

SEQ ID NO: 255350 - RNA, 19 nt, Human
uacaaagagguacagaaca

SEQ ID NO: 255351 - RNA, 23 nt, Human
uaccauaccaugguggaaauggg

SEQ ID NO: 255352 - RNA, 20 nt, Human
uacuaaacagaauauuccac

SEQ ID NO: 255353 - RNA, 20 nt, Human
uacuucagcaagauuucugg

SEQ ID NO: 255354 - RNA, 22 nt, Human
uagaacuuaucacaaaacuaac

SEQ ID NO: 255355 - RNA, 20 nt, Human
uaggcaaacaaacgacgaca

SEQ ID NO: 255356 - RNA, 24 nt, Human
ucacaacacuacgugcuacaaaga

SEQ ID NO: 255357 - RNA, 24 nt, Human
ucagaaagaaaacaggcgggagca

SEQ ID NO: 255358 - RNA, 25 nt, Human
ucagagaaguuaccauaccauggug

SEQ ID NO: 255359 - RNA, 19 nt, Human
ucccccaguaccaaggagg

SEQ ID NO: 255360 - RNA, 21 nt, Human
uccccgccagacacuggggaa

SEQ ID NO: 255361 - RNA, 20 nt, Human
uccugccaccgugcccugga

SEQ ID NO: 255362 - RNA, 20 nt, Human
ucuacaagucugaagcugga

SEQ ID NO: 255363 - RNA, 21 nt, Human
ucuccaaagcacaaaacuuua

SEQ ID NO: 255364 - RNA, 18 nt, Human
ucuugguggggcuggugg

SEQ ID NO: 255365 - RNA, 21 nt, Human
ugaacaaaacuuacaacccca

SEQ ID NO: 255366 - RNA, 18 nt, Human
ugacaaaaacugcacuag

SEQ ID NO: 255367 - RNA, 19 nt, Human
ugaggucgugauggcccac

SEQ ID NO: 255368 - RNA, 18 nt, Human
ugcagcccugugaagccc

SEQ ID NO: 255369 - RNA, 24 nt, Human
ugccccuuucuauucccucccuca

SEQ ID NO: 255370 - RNA, 21 nt, Human
ugcccuggagaacauaggcaa

SEQ ID NO: 255371 - RNA, 20 nt, Human
ugcccuggugcaaucccugu

SEQ ID NO: 255372 - RNA, 19 nt, Human
ugcuguaggguggcugugg

SEQ ID NO: 255373 - RNA, 19 nt, Human
ugcuguaggguggcugugg

SEQ ID NO: 255374 - RNA, 21 nt, Human
uggaaaguaaaugaagaugaa

SEQ ID NO: 255375 - RNA, 26 nt, Human
uggacaucuccuguggcuggucacug

SEQ ID NO: 255376 - RNA, 20 nt, Human
uggcaaggugggugaauggg

SEQ ID NO: 255377 - RNA, 19 nt, Human
uggcccagacuccuucaca

SEQ ID NO: 255378 - RNA, 24 nt, Human
uggcuccccgccagacacugggga

SEQ ID NO: 255379 - RNA, 25 nt, Human
uggggaggaauccagacaggugauc

SEQ ID NO: 255380 - RNA, 21 nt, Human
ugguggggcuggugggaaagu

SEQ ID NO: 255381 - RNA, 22 nt, Human
ugguggggcuggugggaaaguu

SEQ ID NO: 255382 - RNA, 18 nt, Human
uguggcuggucacuggga

SEQ ID NO: 255383 - RNA, 20 nt, Human
uguggugguuggaggugccu

SEQ ID NO: 255384 - RNA, 22 nt, Human
uuaccagggugagaaaaggugc

SEQ ID NO: 255385 - RNA, 24 nt, Human
uucauaauuacuacuaagucuaaa

SEQ ID NO: 255386 - RNA, 20 nt, Human
uucauucugcaaagcugagg

SEQ ID NO: 255387 - RNA, 23 nt, Human
uuccaggcaaacuaagaaccugc

SEQ ID NO: 255388 - RNA, 26 nt, Human
uuccaggcagggaaaacagcagggag

SEQ ID NO: 255389 - RNA, 22 nt, Human
uuugucagaucucucccucccc

SEQ ID NO: 255390 - RNA, 19 nt, Human
uuuuuuuuuuuuuuuuuaa

SEQ ID NO: 255391 - RNA, 21 nt, Human
aaagauaucccagcuacaaga

SEQ ID NO: 255392 - RNA, 20 nt, Human
aagccugcuacuuccccugg

SEQ ID NO: 255393 - RNA, 21 nt, Human
aaucuuguccccuuuggucca

SEQ ID NO: 255394 - RNA, 22 nt, Human
aaucuuguccccuuugguccac

SEQ ID NO: 255395 - RNA, 22 nt, Human
accccaaauguaugagcccaac

SEQ ID NO: 255396 - RNA, 22 nt, Human
acgauaacagaagguagcagcc

SEQ ID NO: 255397 - RNA, 21 nt, Human
agcagccacuugucuucucug

SEQ ID NO: 255398 - RNA, 24 nt, Human
aucaaaaaguucaauguuuaugaa

SEQ ID NO: 255399 - RNA, 19 nt, Human
caaccaaaacuuuguaguc

SEQ ID NO: 255400 - RNA, 22 nt, Human
caacugguauuuuucaucucuu

SEQ ID NO: 255401 - RNA, 20 nt, Human
cacaaguuccgaaggcucau

SEQ ID NO: 255402 - RNA, 19 nt, Human
cagaaaaguagagaaucuu

SEQ ID NO: 255403 - RNA, 23 nt, Human
cagagagccuuucucucagcacu

SEQ ID NO: 255404 - RNA, 19 nt, Human
cagcauagaaugauuuaau

SEQ ID NO: 255405 - RNA, 26 nt, Human
caucucuucuuucgauaugaagcuca

SEQ ID NO: 255406 - RNA, 24 nt, Human
cgauaugaagcucagauucaaagc

SEQ ID NO: 255407 - RNA, 21 nt, Human
cguuuuaacauuaaaaauuau

SEQ ID NO: 255408 - RNA, 19 nt, Human
cucauaguacuucagcauc

SEQ ID NO: 255409 - RNA, 21 nt, Human
cuuuugauucuguaccaccuu

SEQ ID NO: 255410 - RNA, 24 nt, Human
gaaaaacuagucacugccacccac

SEQ ID NO: 255411 - RNA, 23 nt, Human
uaaagggaccauaacaaccaaaa

SEQ ID NO: 255412 - RNA, 21 nt, Human
uaugaagcucagauucaaagc

SEQ ID NO: 255413 - RNA, 21 nt, Human
uaugaagcucagauucaaagc

SEQ ID NO: 255414 - RNA, 23 nt, Human
ucacucuucaauacucuuuuguu

SEQ ID NO: 255415 - RNA, 21 nt, Human
uccaagauggacaccuaugaa

SEQ ID NO: 255416 - RNA, 25 nt, Human
uccaagauggacaccuaugaaagau

SEQ ID NO: 255417 - RNA, 20 nt, Human
uccacaaguuccgaaggcuc

SEQ ID NO: 255418 - RNA, 23 nt, Human
ucugcuucagcucuuaguucaga

SEQ ID NO: 255419 - RNA, 19 nt, Human
ucuuuuguuugcuuugaga

SEQ ID NO: 255420 - RNA, 22 nt, Human
ucuuuuguuugcuuugagacug

SEQ ID NO: 255421 - RNA, 23 nt, Human
ugcaaaaaguauguuccaagaug

SEQ ID NO: 255422 - RNA, 23 nt, Human
uguaccaccccaaauguaugagc

SEQ ID NO: 255423 - RNA, 24 nt, Human
uucugcuucagcucuuaguucaga

SEQ ID NO: 255424 - RNA, 24 nt, Human
uuuaugaagcuaaucagcauagaa

SEQ ID NO: 255425 - RNA, 23 nt, Human
uuuguagucucuccacaaguucc

SEQ ID NO: 255426 - RNA, 19 nt, Human
aguccucaaucacugcagc

SEQ ID NO: 255427 - RNA, 26 nt, Human
cuggaaaguauaccaauuucacuuua

SEQ ID NO: 255428 - RNA, 23 nt, Human
cuggugcaguccucaaucacugc

SEQ ID NO: 255429 - RNA, 26 nt, Human
guuaagaucccuucagaacucuggug

SEQ ID NO: 255430 - RNA, 23 nt, Human
ucacugcagcuuuacugucaguc

SEQ ID NO: 255431 - RNA, 22 nt, Human
uccaaaagacggaaaaucgacu

SEQ ID NO: 255432 - RNA, 23 nt, Human
uccaaaagacggaaaaucgacuc

SEQ ID NO: 255433 - RNA, 19 nt, Human
uuacugucagucaguggag

SEQ ID NO: 255434 - RNA, 21 nt, Human
uuuaggaauaggaugaggaga

SEQ ID NO: 255435 - RNA, 21 nt, Human
augggagcuggccuggggcca

SEQ ID NO: 255436 - RNA, 26 nt, Human
caaaacagaauacaaaauuccggcau

SEQ ID NO: 255437 - RNA, 21 nt, Human
cacuuuaaaaaaacuuuugag

SEQ ID NO: 255438 - RNA, 22 nt, Human
cgaugggagcuggccuggggcc

SEQ ID NO: 255439 - RNA, 18 nt, Human
cuggggccaggguccucc

SEQ ID NO: 255440 - RNA, 23 nt, Human
guuuuuuuuuuuuuuuugucuuu

SEQ ID NO: 255441 - RNA, 20 nt, Human
uaaaucuuuacaaaacagaa

SEQ ID NO: 255442 - RNA, 21 nt, Human
uacaaaacagaauacaaaauu

SEQ ID NO: 255443 - RNA, 27 nt, Human
uacaaaacagaauacaaaauuccggca

SEQ ID NO: 255444 - RNA, 22 nt, Human
ugagguuuuuuuuuuuuuuuug

SEQ ID NO: 255445 - RNA, 19 nt, Human
ugggagcuggccuggggcc

SEQ ID NO: 255446 - RNA, 20 nt, Human
uugagguuuuuuuuuuuuuu

SEQ ID NO: 255447 - RNA, 24 nt, Human
uuuuuuuuuuuuuugcaaguuuuu

SEQ ID NO: 255448 - RNA, 23 nt, Human
uuuuuuuuuuuuuugucuuuuaa

SEQ ID NO: 255449 - RNA, 19 nt, Human
uuuuuuuuuuuuuuugcaa

SEQ ID NO: 255450 - RNA, 27 nt, Human
aaaccagagauaaaacccacaccaagg

SEQ ID NO: 255451 - RNA, 22 nt, Human
aaacccacaccaagggcuauuu

SEQ ID NO: 255452 - RNA, 18 nt, Human
aacccacaccaagggcua

SEQ ID NO: 255453 - RNA, 23 nt, Human
aagcgagguacagaaaccuccac

SEQ ID NO: 255454 - RNA, 21 nt, Human
acccagggcgcuccagagacc

SEQ ID NO: 255455 - RNA, 22 nt, Human
acgagcgccaagccacccacaa

SEQ ID NO: 255456 - RNA, 25 nt, Human
agccacccacaaggcagugcggcaa

SEQ ID NO: 255457 - RNA, 22 nt, Human
agcgucccuccucgcuccgccc

SEQ ID NO: 255458 - RNA, 26 nt, Human
aggcagugcggcaaggcucccgggau

SEQ ID NO: 255459 - RNA, 19 nt, Human
agggaggaggagcggcggg

SEQ ID NO: 255460 - RNA, 21 nt, Human
caccaagggcuauuucccaag

SEQ ID NO: 255461 - RNA, 21 nt, Human
caccacggagaacacaaacca

SEQ ID NO: 255462 - RNA, 23 nt, Human
cacugggcucguccuugggaggc

SEQ ID NO: 255463 - RNA, 21 nt, Human
cagagauaaaacccacaccaa

SEQ ID NO: 255464 - RNA, 25 nt, Human
cagcggcagggaccggccgggcaag

SEQ ID NO: 255465 - RNA, 18 nt, Human
cagugucaacaagucagc

SEQ ID NO: 255466 - RNA, 22 nt, Human
cauaaacaugacuacguauaua

SEQ ID NO: 255467 - RNA, 24 nt, Human
ccaagcgagguacagaaaccucca

SEQ ID NO: 255468 - RNA, 25 nt, Human
ccacccacaaggcagugcggcaagg

SEQ ID NO: 255469 - RNA, 23 nt, Human
cccacuccgcccucgcggacccc

SEQ ID NO: 255470 - RNA, 19 nt, Human
ccccacuccgcccucgcgg

SEQ ID NO: 255471 - RNA, 21 nt, Human
ccccggcucgcggccgccggg

SEQ ID NO: 255472 - RNA, 21 nt, Human
cccgcccccgugcgcaccggg

SEQ ID NO: 255473 - RNA, 19 nt, Human
cccuccucgcuccgcccgc

SEQ ID NO: 255474 - RNA, 23 nt, Human
ccgccuugccgguccccgccccc

SEQ ID NO: 255475 - RNA, 18 nt, Human
ccuccacagcagugggga

SEQ ID NO: 255476 - RNA, 22 nt, Human
ccuccacagcaguggggauaag

SEQ ID NO: 255477 - RNA, 21 nt, Human
ccuggcugccgcgccccacuc

SEQ ID NO: 255478 - RNA, 20 nt, Human
cggcagggaccggccgggca

SEQ ID NO: 255479 - RNA, 18 nt, Human
cggccgccgggcguggga

SEQ ID NO: 255480 - RNA, 19 nt, Human
cggccgggcaacccagggc

SEQ ID NO: 255481 - RNA, 19 nt, Human
cggcgggagccgggcaggg

SEQ ID NO: 255482 - RNA, 25 nt, Human
cgggagggacugagugcucgcagug

SEQ ID NO: 255483 - RNA, 19 nt, Human
cgggauccuuacaggcauc

SEQ ID NO: 255484 - RNA, 23 nt, Human
cgggcggggaggaggcgcgcggg

SEQ ID NO: 255485 - RNA, 21 nt, Human
cugccgcgccccacuccgccc

SEQ ID NO: 255486 - RNA, 20 nt, Human
gagcgccaagccacccacaa

SEQ ID NO: 255487 - RNA, 18 nt, Human
gagcggcggggcgggcgg

SEQ ID NO: 255488 - RNA, 20 nt, Human
gaggagcggcggggcgggcg

SEQ ID NO: 255489 - RNA, 20 nt, Human
gcacuauggcauguuacagg

SEQ ID NO: 255490 - RNA, 22 nt, Human
gccaagccacccacaaggcagu

SEQ ID NO: 255491 - RNA, 19 nt, Human
gccgcgccccacuccgccc

SEQ ID NO: 255492 - RNA, 20 nt, Human
gccgcgccccacuccgcccu

SEQ ID NO: 255493 - RNA, 25 nt, Human
ggagaacacaaaccagagauaaaac

SEQ ID NO: 255494 - RNA, 23 nt, Human
gggcgcuccagagacccggcgug

SEQ ID NO: 255495 - RNA, 18 nt, Human
ggggaaaauauuuucucu

SEQ ID NO: 255496 - RNA, 20 nt, Human
ggggcgggcggggaggaggc

SEQ ID NO: 255497 - RNA, 21 nt, Human
ggguuccuggcugccgcgccc

SEQ ID NO: 255498 - RNA, 20 nt, Human
gguggcugaaggcgaacgcu

SEQ ID NO: 255499 - RNA, 26 nt, Human
guagucggguuccuggcugccgcgcc

SEQ ID NO: 255500 - RNA, 18 nt, Human
ucacgccacacaacuaca

SEQ ID NO: 255501 - RNA, 19 nt, Human
ucgcggccgccgggcgugg

SEQ ID NO: 255502 - RNA, 22 nt, Human
ucggguuccuggcugccgcgcc

SEQ ID NO: 255503 - RNA, 20 nt, Human
ugaaggcgaacgcuagcgcc

SEQ ID NO: 255504 - RNA, 23 nt, Human
ugccgguccccgcccccgugcgc

SEQ ID NO: 255505 - RNA, 18 nt, Human
ugcuaaagaauauccuua

SEQ ID NO: 255506 - RNA, 21 nt, Human
uguggguuugcaauauuucag

SEQ ID NO: 255507 - RNA, 23 nt, Human
uucagcuucaaaugaaaaacaag

SEQ ID NO: 255508 - RNA, 22 nt, Human
uuuuuuuuuuuuaaacuuggcu

SEQ ID NO: 255509 - RNA, 20 nt, Human
aacaaaagcgaaacuccauc

SEQ ID NO: 255510 - RNA, 21 nt, Human
aacaaaagcgaaacuccaucu

SEQ ID NO: 255511 - RNA, 22 nt, Human
aacaaaagcgaaacuccaucuc

SEQ ID NO: 255512 - RNA, 20 nt, Human
aacauggagaaaccccgucu

SEQ ID NO: 255513 - RNA, 21 nt, Human
aacauggagaaaccccgucuc

SEQ ID NO: 255514 - RNA, 23 nt, Human
aagaucgcgccauugcacuccag

SEQ ID NO: 255515 - RNA, 24 nt, Human
aauugcuugaaccugggaggcgga

SEQ ID NO: 255516 - RNA, 24 nt, Human
accccgucucuacuaaaacuacaa

SEQ ID NO: 255517 - RNA, 24 nt, Human
accugaggucaggaguuugagacc

SEQ ID NO: 255518 - RNA, 22 nt, Human
agaauugcuugaaccugggagg

SEQ ID NO: 255519 - RNA, 20 nt, Human
agauaguaucaugcauugca

SEQ ID NO: 255520 - RNA, 22 nt, Human
agaucaccugaggucaggaguu

SEQ ID NO: 255521 - RNA, 24 nt, Human
agcacuuugggaggcugaggcggg

SEQ ID NO: 255522 - RNA, 21 nt, Human
agccugggcaacaaaagcgaa

SEQ ID NO: 255523 - RNA, 23 nt, Human
agccugggcaacaaaagcgaaac

SEQ ID NO: 255524 - RNA, 20 nt, Human
aggaguuugagaccagccug

SEQ ID NO: 255525 - RNA, 22 nt, Human
aggcaggagaauugcuugaacc

SEQ ID NO: 255526 - RNA, 24 nt, Human
aggcaggagaauugcuugaaccug

SEQ ID NO: 255527 - RNA, 24 nt, Human
aggcauaguggcgcacgccuguaa

SEQ ID NO: 255528 - RNA, 19 nt, Human
aggcggagguuauggugag

SEQ ID NO: 255529 - RNA, 24 nt, Human
aggcggagguuauggugagccaag

SEQ ID NO: 255530 - RNA, 22 nt, Human
aggcgggcagaucaccugaggu

SEQ ID NO: 255531 - RNA, 26 nt, Human
aggcgggcagaucaccugaggucagg

SEQ ID NO: 255532 - RNA, 24 nt, Human
aggcgugguggcucacgccuguaa

SEQ ID NO: 255533 - RNA, 24 nt, Human
aggcuaaggcaggagaauugcuug

SEQ ID NO: 255534 - RNA, 23 nt, Human
agucaggcauaguggcgcacgcc

SEQ ID NO: 255535 - RNA, 24 nt, Human
aguggcgcacgccuguaaucccag

SEQ ID NO: 255536 - RNA, 24 nt, Human
aucgcgccauugcacuccagccug

SEQ ID NO: 255537 - RNA, 23 nt, Human
aucucaaaaaaaaagagcuauag

SEQ ID NO: 255538 - RNA, 23 nt, Human
auugcacuccagccugggcaaca

SEQ ID NO: 255539 - RNA, 24 nt, Human
auugcacuccagccugggcaacaa

SEQ ID NO: 255540 - RNA, 24 nt, Human
caacauggagaaaccccgucucua

SEQ ID NO: 255541 - RNA, 21 nt, Human
caagagagcuaaauugccaua

SEQ ID NO: 255542 - RNA, 23 nt, Human
cacaggcaucagcacuaaggcag

SEQ ID NO: 255543 - RNA, 23 nt, Human
caccugaggucaggaguuugaga

SEQ ID NO: 255544 - RNA, 18 nt, Human
cacgccuguaaucccagc

SEQ ID NO: 255545 - RNA, 19 nt, Human
cacgccuguaaucccagcu

SEQ ID NO: 255546 - RNA, 24 nt, Human
cacgccuguaauuccagcacuuug

SEQ ID NO: 255547 - RNA, 24 nt, Human
cagaucaccugaggucaggaguuu

SEQ ID NO: 255548 - RNA, 27 nt, Human
cagaucaccugaggucaggaguuugag

SEQ ID NO: 255549 - RNA, 24 nt, Human
cagcacuuugggaggcugaggcgg

SEQ ID NO: 255550 - RNA, 24 nt, Human
cagccaggcgugguggcucacgcc

SEQ ID NO: 255551 - RNA, 24 nt, Human
cagccugaccaacauggagaaacc

SEQ ID NO: 255552 - RNA, 18 nt, Human
caguacacaggcaucagc

SEQ ID NO: 255553 - RNA, 19 nt, Human
cauugcaacauuuauugau

SEQ ID NO: 255554 - RNA, 19 nt, Human
cauugcacuccagccuggg

SEQ ID NO: 255555 - RNA, 21 nt, Human
cauugcacuccagccugggca

SEQ ID NO: 255556 - RNA, 22 nt, Human
cauugcacuccagccugggcaa

SEQ ID NO: 255557 - RNA, 24 nt, Human
cauugcacuccagccugggcaaca

SEQ ID NO: 255558 - RNA, 23 nt, Human
ccagaauacccacuugaauucug

SEQ ID NO: 255559 - RNA, 18 nt, Human
ccauugcacuccagccug

SEQ ID NO: 255560 - RNA, 20 nt, Human
ccauugcacuccagccuggg

SEQ ID NO: 255561 - RNA, 21 nt, Human
ccauugcacuccagccugggc

SEQ ID NO: 255562 - RNA, 23 nt, Human
ccauugcacuccagccugggcaa

SEQ ID NO: 255563 - RNA, 24 nt, Human
ccauugcacuccagccugggcaac

SEQ ID NO: 255564 - RNA, 19 nt, Human
cccaagagagcuaaauugc

SEQ ID NO: 255565 - RNA, 23 nt, Human
ccugaccaacauggagaaacccc

SEQ ID NO: 255566 - RNA, 24 nt, Human
ccugaccaacauggagaaaccccg

SEQ ID NO: 255567 - RNA, 22 nt, Human
ccugaggucaggaguuugagac

SEQ ID NO: 255568 - RNA, 19 nt, Human
ccugggaggcggagguuau

SEQ ID NO: 255569 - RNA, 25 nt, Human
ccugggcaacaaaagcgaaacucca

SEQ ID NO: 255570 - RNA, 21 nt, Human
ccuguaaucccagcuacucag

SEQ ID NO: 255571 - RNA, 22 nt, Human
ccuguaaucccagcuacucagg

SEQ ID NO: 255572 - RNA, 23 nt, Human
cgaaacuccaucucaaaaaaaaa

SEQ ID NO: 255573 - RNA, 24 nt, Human
cgccauugcacuccagccugggca

SEQ ID NO: 255574 - RNA, 24 nt, Human
cgccuguaaucccagcuacucagg

SEQ ID NO: 255575 - RNA, 23 nt, Human
cgccuguaauuccagcacuuugg

SEQ ID NO: 255576 - RNA, 24 nt, Human
cgccuguaauuccagcacuuuggg

SEQ ID NO: 255577 - RNA, 24 nt, Human
cgggcagaucaccugaggucagga

SEQ ID NO: 255578 - RNA, 23 nt, Human
cucaaaaaaaaagagcuauagga

SEQ ID NO: 255579 - RNA, 24 nt, Human
cucacgccuguaauuccagcacuu

SEQ ID NO: 255580 - RNA, 19 nt, Human
cucaucauuuccucacaug

SEQ ID NO: 255581 - RNA, 20 nt, Human
cucaucauuuccucacauga

SEQ ID NO: 255582 - RNA, 18 nt, Human
cuccaucucaaaaaaaaa

SEQ ID NO: 255583 - RNA, 19 nt, Human
cuugaaccugggaggcgga

SEQ ID NO: 255584 - RNA, 24 nt, Human
cuuuuacuuauuuaaauccuucua

SEQ ID NO: 255585 - RNA, 21 nt, Human
gagaaaccccgucucuacuaa

SEQ ID NO: 255586 - RNA, 19 nt, Human
gagguuauggugagccaag

SEQ ID NO: 255587 - RNA, 20 nt, Human
gaguuuucccaauuuaauau

SEQ ID NO: 255588 - RNA, 24 nt, Human
gaucaccugaggucaggaguuuga

SEQ ID NO: 255589 - RNA, 22 nt, Human
gccauugcacuccagccugggc

SEQ ID NO: 255590 - RNA, 24 nt, Human
gccauugcacuccagccugggcaa

SEQ ID NO: 255591 - RNA, 23 nt, Human
gccuguaaucccagcuacucagg

SEQ ID NO: 255592 - RNA, 24 nt, Human
ggagguuauggugagccaagaucg

SEQ ID NO: 255593 - RNA, 25 nt, Human
ggcagaucaccugaggucaggaguu

SEQ ID NO: 255594 - RNA, 21 nt, Human
gggauuugggaacccaagaga

SEQ ID NO: 255595 - RNA, 19 nt, Human
ggucaggaguuugagacca

SEQ ID NO: 255596 - RNA, 24 nt, Human
gguggcucacgccuguaauuccag

SEQ ID NO: 255597 - RNA, 23 nt, Human
guaaagagaaauuggauggcccc

SEQ ID NO: 255598 - RNA, 19 nt, Human
uaaaaguauccuuugugaa

SEQ ID NO: 255599 - RNA, 20 nt, Human
uaaccuguaaaaguauccuu

SEQ ID NO: 255600 - RNA, 24 nt, Human
uaaggcaggagaauugcuugaacc

SEQ ID NO: 255601 - RNA, 24 nt, Human
uaaggcaggagaauugcuugaacc

SEQ ID NO: 255602 - RNA, 18 nt, Human
uacacaggcaucagcacu

SEQ ID NO: 255603 - RNA, 21 nt, Human
uacaccauuccaaaggagaac

SEQ ID NO: 255604 - RNA, 23 nt, Human
uacuaaaacuacaaaauuaguca

SEQ ID NO: 255605 - RNA, 24 nt, Human
uagaauuuuagagcacaaagagac

SEQ ID NO: 255606 - RNA, 23 nt, Human
uagagauggcuugcauuuuuccu

SEQ ID NO: 255607 - RNA, 21 nt, Human
uagagcacaaagagacauugc

SEQ ID NO: 255608 - RNA, 20 nt, Human
uagcggaccuacuaaaauuu

SEQ ID NO: 255609 - RNA, 25 nt, Human
uagguacauuuaaggcaguacacag

SEQ ID NO: 255610 - RNA, 24 nt, Human
uaguggcgcacgccuguaauccca

SEQ ID NO: 255611 - RNA, 21 nt, Human
ucaagcaaaagugugagagaa

SEQ ID NO: 255612 - RNA, 19 nt, Human
ucaccugaggucaggaguu

SEQ ID NO: 255613 - RNA, 22 nt, Human
ucacgccuguaauuccagcacu

SEQ ID NO: 255614 - RNA, 20 nt, Human
ucaggcauaguggcgcacgc

SEQ ID NO: 255615 - RNA, 24 nt, Human
uccagccaggcgugguggcucacg

SEQ ID NO: 255616 - RNA, 20 nt, Human
ucucuacuaaaacuacaaaa

SEQ ID NO: 255617 - RNA, 24 nt, Human
ugagaccagccugaccaacaugga

SEQ ID NO: 255618 - RNA, 22 nt, Human
ugagccaagaucgcgccauugc

SEQ ID NO: 255619 - RNA, 20 nt, Human
ugaggcgggcagaucaccug

SEQ ID NO: 255620 - RNA, 24 nt, Human
ugaggcgggcagaucaccugaggu

SEQ ID NO: 255621 - RNA, 26 nt, Human
ugaggcgggcagaucaccugagguca

SEQ ID NO: 255622 - RNA, 18 nt, Human
ugaggucaggaguuugag

SEQ ID NO: 255623 - RNA, 19 nt, Human
ugauuaguacugcuagcgg

SEQ ID NO: 255624 - RNA, 21 nt, Human
ugauuaguacugcuagcggac

SEQ ID NO: 255625 - RNA, 21 nt, Human
uggcgcacgccuguaauccca

SEQ ID NO: 255626 - RNA, 22 nt, Human
uggcucacgccuguaauuccag

SEQ ID NO: 255627 - RNA, 24 nt, Human
uggcucacgccuguaauuccagca

SEQ ID NO: 255628 - RNA, 24 nt, Human
ugggaggcggagguuauggugagc

SEQ ID NO: 255629 - RNA, 20 nt, Human
ugggaggcugaggcgggcag

SEQ ID NO: 255630 - RNA, 24 nt, Human
ugggaggcugaggcgggcagauca

SEQ ID NO: 255631 - RNA, 24 nt, Human
ugguggcucacgccuguaauucca

SEQ ID NO: 255632 - RNA, 24 nt, Human
uguaaaaguauccuuugugagcac

SEQ ID NO: 255633 - RNA, 22 nt, Human
uguuauuagccaaauuucaagu

SEQ ID NO: 255634 - RNA, 22 nt, Human
uuacuaacauuaccucuggcac

SEQ ID NO: 255635 - RNA, 22 nt, Human
uucaagcaaaagugugagagaa

SEQ ID NO: 255636 - RNA, 24 nt, Human
uuccagcacuuugggaggcugagg

SEQ ID NO: 255637 - RNA, 21 nt, Human
uugaaccugggaggcggaggu

SEQ ID NO: 255638 - RNA, 24 nt, Human
uugcuugaaccugggaggcggagg

SEQ ID NO: 255639 - RNA, 25 nt, Human
uugggaggcugaggcgggcagauca

SEQ ID NO: 255640 - RNA, 22 nt, Human
uuucucaucauuuccucacaug

SEQ ID NO: 255641 - RNA, 20 nt, Human
aaaacagcggagauggagaa

SEQ ID NO: 255642 - RNA, 29 nt, Human
aaagccaguguuauucucacaacaggggu

SEQ ID NO: 255643 - RNA, 18 nt, Human
aacaaaagcucagcaaac

SEQ ID NO: 255644 - RNA, 21 nt, Human
aacagcauuccaguuucacag

SEQ ID NO: 255645 - RNA, 21 nt, Human
aagaccccaaaacagcggaga

SEQ ID NO: 255646 - RNA, 28 nt, Human
aagccaguguuauucucacaacaggggu

SEQ ID NO: 255647 - RNA, 21 nt, Human
aagcgcucuaaaauaagaaaa

SEQ ID NO: 255648 - RNA, 18 nt, Human
aagcguauuaaacaaaaa

SEQ ID NO: 255649 - RNA, 19 nt, Human
aagcguauuaaacaaaaau

SEQ ID NO: 255650 - RNA, 23 nt, Human
aagcucagcaaacuugagcugaa

SEQ ID NO: 255651 - RNA, 24 nt, Human
acagcagccucuccucucccacgg

SEQ ID NO: 255652 - RNA, 20 nt, Human
accaguucuuuaucuccccc

SEQ ID NO: 255653 - RNA, 21 nt, Human
accaguucuuuaucucccccg

SEQ ID NO: 255654 - RNA, 18 nt, Human
acccacagucuggucagg

SEQ ID NO: 255655 - RNA, 19 nt, Human
accccauucccaggagcag

SEQ ID NO: 255656 - RNA, 18 nt, Human
accccgccagccucaaag

SEQ ID NO: 255657 - RNA, 19 nt, Human
acccuaagaccccaaaaca

SEQ ID NO: 255658 - RNA, 22 nt, Human
acccuaagaccccaaaacagcg

SEQ ID NO: 255659 - RNA, 23 nt, Human
acgccggggacucaagcacguua

SEQ ID NO: 255660 - RNA, 25 nt, Human
agagaggcaggaagaggagcugggg

SEQ ID NO: 255661 - RNA, 18 nt, Human
agagcccacuccagccca

SEQ ID NO: 255662 - RNA, 20 nt, Human
agagugggcaggagacgcag

SEQ ID NO: 255663 - RNA, 20 nt, Human
agcgcucuaaaauaagaaaa

SEQ ID NO: 255664 - RNA, 19 nt, Human
aggagcuggggccaguuca

SEQ ID NO: 255665 - RNA, 22 nt, Human
aggagcuggggccaguucaggg

SEQ ID NO: 255666 - RNA, 20 nt, Human
aggcaggaagaggagcuggg

SEQ ID NO: 255667 - RNA, 18 nt, Human
aggcaggggaaggagagc

SEQ ID NO: 255668 - RNA, 18 nt, Human
aggccgccccauccagcu

SEQ ID NO: 255669 - RNA, 19 nt, Human
agguguuagaagcaguagc

SEQ ID NO: 255670 - RNA, 26 nt, Human
aguaaugggagcaaacacaggaggga

SEQ ID NO: 255671 - RNA, 19 nt, Human
aucucccccgcugcucugc

SEQ ID NO: 255672 - RNA, 21 nt, Human
aucucccccgcugcucugccg

SEQ ID NO: 255673 - RNA, 22 nt, Human
augaaacaaaagcucagcaaac

SEQ ID NO: 255674 - RNA, 22 nt, Human
caacaccugacaacauccaucg

SEQ ID NO: 255675 - RNA, 23 nt, Human
caacuucguccaugaacacauca

SEQ ID NO: 255676 - RNA, 18 nt, Human
caccacagcugugcugaa

SEQ ID NO: 255677 - RNA, 18 nt, Human
caccacagcugugcugaa

SEQ ID NO: 255678 - RNA, 20 nt, Human
caccacagcugugcugaaug

SEQ ID NO: 255679 - RNA, 20 nt, Human
caccacagcugugcugaaug

SEQ ID NO: 255680 - RNA, 22 nt, Human
cacccaacugucccugcagccu

SEQ ID NO: 255681 - RNA, 23 nt, Human
cacccaacugucccugcagccug

SEQ ID NO: 255682 - RNA, 26 nt, Human
caccccauucccaggagcagaccccu

SEQ ID NO: 255683 - RNA, 24 nt, Human
cacuacccaaagccaguguuauuc

SEQ ID NO: 255684 - RNA, 23 nt, Human
cacugaggcacagacuagccaac

SEQ ID NO: 255685 - RNA, 22 nt, Human
cagaaggaaagaaacaaaacca

SEQ ID NO: 255686 - RNA, 22 nt, Human
cagaaggaaagaaacaaaaccu

SEQ ID NO: 255687 - RNA, 23 nt, Human
cagacccuaagcguggagggagg

SEQ ID NO: 255688 - RNA, 21 nt, Human
cagccccacccccaagaacac

SEQ ID NO: 255689 - RNA, 20 nt, Human
cagcggagauggagaagacc

SEQ ID NO: 255690 - RNA, 21 nt, Human
caggacagaggcgccaagccc

SEQ ID NO: 255691 - RNA, 18 nt, Human
caggagacgcagggaccc

SEQ ID NO: 255692 - RNA, 18 nt, Human
ccaagcugggcaugacag

SEQ ID NO: 255693 - RNA, 18 nt, Human
ccaagcugggcaugacag

SEQ ID NO: 255694 - RNA, 24 nt, Human
ccaagcugggcaugacagcaccca

SEQ ID NO: 255695 - RNA, 20 nt, Human
ccaagcugggcaugacagug

SEQ ID NO: 255696 - RNA, 20 nt, Human
ccacugggcugacugaguac

SEQ ID NO: 255697 - RNA, 18 nt, Human
ccacuugucaugaacacc

SEQ ID NO: 255698 - RNA, 26 nt, Human
ccagcccugcucucacuguccaggaa

SEQ ID NO: 255699 - RNA, 23 nt, Human
ccagccucaaagcugcagggagg

SEQ ID NO: 255700 - RNA, 18 nt, Human
ccaggagcagaccccgcc

SEQ ID NO: 255701 - RNA, 22 nt, Human
cccaagaagacaucagcccgcc

SEQ ID NO: 255702 - RNA, 20 nt, Human
cccaccccauucccaggagc

SEQ ID NO: 255703 - RNA, 19 nt, Human
cccaggacgugggccggcc

SEQ ID NO: 255704 - RNA, 21 nt, Human
ccccauccagcugcaucuccc

SEQ ID NO: 255705 - RNA, 24 nt, Human
ccccggucacuggggccagggaga

SEQ ID NO: 255706 - RNA, 19 nt, Human
cccuaggaagugaaaaccc

SEQ ID NO: 255707 - RNA, 22 nt, Human
ccgcugcccuggggccuucuca

SEQ ID NO: 255708 - RNA, 19 nt, Human
ccgcugcucugccguuggg

SEQ ID NO: 255709 - RNA, 23 nt, Human
ccggccccugacuguguccuucc

SEQ ID NO: 255710 - RNA, 18 nt, Human
ccgguaccagugacagca

SEQ ID NO: 255711 - RNA, 22 nt, Human
ccuaagaccccaaaacagcgga

SEQ ID NO: 255712 - RNA, 21 nt, Human
ccucuaggagcagcugggaag

SEQ ID NO: 255713 - RNA, 23 nt, Human
ccugggaggguccucaaaccccc

SEQ ID NO: 255714 - RNA, 19 nt, Human
ccugggcuguacccuaaga

SEQ ID NO: 255715 - RNA, 20 nt, Human
cgcugggcagccugagccug

SEQ ID NO: 255716 - RNA, 22 nt, Human
cggcagccugugucgcuugcgc

SEQ ID NO: 255717 - RNA, 24 nt, Human
cgggccaggacagaggcgccaagc

SEQ ID NO: 255718 - RNA, 18 nt, Human
cucacacccaacuguccc

SEQ ID NO: 255719 - RNA, 23 nt, Human
cucacuguccaggaagagccgcu

SEQ ID NO: 255720 - RNA, 21 nt, Human
cuccaagugccuaauucugac

SEQ ID NO: 255721 - RNA, 21 nt, Human
cucccgggccaggacagaggc

SEQ ID NO: 255722 - RNA, 24 nt, Human
cugccacccgguuuccgcgucugg

SEQ ID NO: 255723 - RNA, 22 nt, Human
cugggaggguccucaaaccccc

SEQ ID NO: 255724 - RNA, 19 nt, Human
cuggggccaguucaggggu

SEQ ID NO: 255725 - RNA, 19 nt, Human
gacccacagucuggucagg

SEQ ID NO: 255726 - RNA, 19 nt, Human
gacugcagagagggccugg

SEQ ID NO: 255727 - RNA, 22 nt, Human
gagaggcaggaagaggagcugg

SEQ ID NO: 255728 - RNA, 20 nt, Human
gagcagaccccgccagccuc

SEQ ID NO: 255729 - RNA, 23 nt, Human
gaggagacgcagggaaacccacu

SEQ ID NO: 255730 - RNA, 21 nt, Human
gaggagcuggggccaguucag

SEQ ID NO: 255731 - RNA, 23 nt, Human
gaggagcuggggccaguucaggg

SEQ ID NO: 255732 - RNA, 22 nt, Human
gcagccugguuugcccucacac

SEQ ID NO: 255733 - RNA, 19 nt, Human
gccagagucacuccuguuc

SEQ ID NO: 255734 - RNA, 21 nt, Human
gccagccucaaagcugcaggg

SEQ ID NO: 255735 - RNA, 19 nt, Human
gccaggacagaggcgccaa

SEQ ID NO: 255736 - RNA, 23 nt, Human
gccccauccagcugcaucuccca

SEQ ID NO: 255737 - RNA, 19 nt, Human
gcccccaagaagacaucag

SEQ ID NO: 255738 - RNA, 20 nt, Human
gcgcccagcccugcucucac

SEQ ID NO: 255739 - RNA, 20 nt, Human
gcugggcgcugccacccggu

SEQ ID NO: 255740 - RNA, 20 nt, Human
ggaaaccugggaggguccuc

SEQ ID NO: 255741 - RNA, 21 nt, Human
ggaaggagagcugcuuccuga

SEQ ID NO: 255742 - RNA, 18 nt, Human
ggaaguggguaagauccc

SEQ ID NO: 255743 - RNA, 18 nt, Human
ggagcugacugaucucac

SEQ ID NO: 255744 - RNA, 23 nt, Human
ggagcuggggccaguucaggggu

SEQ ID NO: 255745 - RNA, 18 nt, Human
ggccaggcugggcgcugc

SEQ ID NO: 255746 - RNA, 20 nt, Human
ggcucuggaggaggggcccc

SEQ ID NO: 255747 - RNA, 25 nt, Human
ggcucuggaggaggggccccugcgg

SEQ ID NO: 255748 - RNA, 21 nt, Human
gggcagcggccauguggcacu

SEQ ID NO: 255749 - RNA, 25 nt, Human
gggcuguggccaaaguguuugcccg

SEQ ID NO: 255750 - RNA, 19 nt, Human
ggggccaggcugggcgcug

SEQ ID NO: 255751 - RNA, 24 nt, Human
ggggcccuuccucggccugggaag

SEQ ID NO: 255752 - RNA, 18 nt, Human
ggggcuguggccaaagug

SEQ ID NO: 255753 - RNA, 22 nt, Human
gguccagccgguuuacaaagcc

SEQ ID NO: 255754 - RNA, 23 nt, Human
gugacagcagccucuccucuccc

SEQ ID NO: 255755 - RNA, 19 nt, Human
gugggccggccaguguggc

SEQ ID NO: 255756 - RNA, 21 nt, Human
uaaacaaaaauguagacugaa

SEQ ID NO: 255757 - RNA, 23 nt, Human
uaagaucccacugggcugacuga

SEQ ID NO: 255758 - RNA, 22 nt, Human
uacccuaagaccccaaaacagc

SEQ ID NO: 255759 - RNA, 21 nt, Human
uaggagguagagggcgcuggg

SEQ ID NO: 255760 - RNA, 27 nt, Human
ucaaacccccuggcagggucugcaggc

SEQ ID NO: 255761 - RNA, 19 nt, Human
ucaaagcugcagggaggug

SEQ ID NO: 255762 - RNA, 22 nt, Human
ucacagcagcggccacguggca

SEQ ID NO: 255763 - RNA, 23 nt, Human
ucagaucagaaggaaagaaacaa

SEQ ID NO: 255764 - RNA, 20 nt, Human
uccaagugccuaauucugac

SEQ ID NO: 255765 - RNA, 19 nt, Human
uccaucggcaacuucgucc

SEQ ID NO: 255766 - RNA, 23 nt, Human
uccaucggcaacuucguccauga

SEQ ID NO: 255767 - RNA, 24 nt, Human
ucccaccccauucccaggagcaga

SEQ ID NO: 255768 - RNA, 20 nt, Human
ucccccgcugcucugccguu

SEQ ID NO: 255769 - RNA, 22 nt, Human
ucccucuagaaugacugggucu

SEQ ID NO: 255770 - RNA, 20 nt, Human
ucccugcagccuggcaggug

SEQ ID NO: 255771 - RNA, 23 nt, Human
ucccuguggcucccaccccauuc

SEQ ID NO: 255772 - RNA, 20 nt, Human
uccgcagugggaaaccuggg

SEQ ID NO: 255773 - RNA, 21 nt, Human
uccugggcucugaccugaucu

SEQ ID NO: 255774 - RNA, 20 nt, Human
ucggagcugacugaucucac

SEQ ID NO: 255775 - RNA, 24 nt, Human
ucuaaaauaagaaaauaagaaagu

SEQ ID NO: 255776 - RNA, 21 nt, Human
ucucugggugagggacuucca

SEQ ID NO: 255777 - RNA, 23 nt, Human
ucucuggucugcccccaagaaga

SEQ ID NO: 255778 - RNA, 21 nt, Human
ucugcaggccgccccauccag

SEQ ID NO: 255779 - RNA, 18 nt, Human
ucuggucugcccccaaga

SEQ ID NO: 255780 - RNA, 19 nt, Human
ucuuugaucuugauggccc

SEQ ID NO: 255781 - RNA, 18 nt, Human
ugaaacaaaagcucagca

SEQ ID NO: 255782 - RNA, 21 nt, Human
ugaaacaaaagcucagcaaac

SEQ ID NO: 255783 - RNA, 19 nt, Human
ugacaacauccaucggcaa

SEQ ID NO: 255784 - RNA, 20 nt, Human
ugacaacauccaucggcaac

SEQ ID NO: 255785 - RNA, 21 nt, Human
ugacugaucucacugaggcac

SEQ ID NO: 255786 - RNA, 22 nt, Human
ugacugggucuaaguagggaga

SEQ ID NO: 255787 - RNA, 20 nt, Human
ugagagaggcaggaagagga

SEQ ID NO: 255788 - RNA, 24 nt, Human
ugagcugaaggcaggggaaggaga

SEQ ID NO: 255789 - RNA, 24 nt, Human
ugaguaaugggagcaaacacagga

SEQ ID NO: 255790 - RNA, 21 nt, Human
ugcccgggacgugggcagcgg

SEQ ID NO: 255791 - RNA, 21 nt, Human
ugcccgggacgugggcagcgg

SEQ ID NO: 255792 - RNA, 20 nt, Human
uggaggaggggccccugcgg

SEQ ID NO: 255793 - RNA, 22 nt, Human
uggaucccucuagaaugacugg

SEQ ID NO: 255794 - RNA, 19 nt, Human
uggaugcagccccaccccc

SEQ ID NO: 255795 - RNA, 19 nt, Human
uggcacuccaagcugggca

SEQ ID NO: 255796 - RNA, 18 nt, Human
ugggaaaccugggagggu

SEQ ID NO: 255797 - RNA, 23 nt, Human
ugggagcaaacacaggagggagg

SEQ ID NO: 255798 - RNA, 21 nt, Human
ugggcaggagacgcagggacc

SEQ ID NO: 255799 - RNA, 20 nt, Human
ugggcagugaccgccugggc

SEQ ID NO: 255800 - RNA, 22 nt, Human
ugggcagugaccgccugggcca

SEQ ID NO: 255801 - RNA, 18 nt, Human
uggggccagggagacgug

SEQ ID NO: 255802 - RNA, 20 nt, Human
uggggccagggagacguggu

SEQ ID NO: 255803 - RNA, 18 nt, Human
ugucaugaacaccaugaa

SEQ ID NO: 255804 - RNA, 21 nt, Human
ugucuugccugcaucccccuu

SEQ ID NO: 255805 - RNA, 23 nt, Human
ugucuugccugcaucccccuuca

SEQ ID NO: 255806 - RNA, 22 nt, Human
ugugcugaauguacagccacgu

SEQ ID NO: 255807 - RNA, 22 nt, Human
ugugcugaauguacagccacgu

SEQ ID NO: 255808 - RNA, 21 nt, Human
uguggcacuccaagcugggca

SEQ ID NO: 255809 - RNA, 24 nt, Human
uguggccaaaguguuugcccggcc

SEQ ID NO: 255810 - RNA, 22 nt, Human
uuaaaugccucauugauccauc

SEQ ID NO: 255811 - RNA, 19 nt, Human
uucacagucgccccaacuc

SEQ ID NO: 255812 - RNA, 20 nt, Human
uucacagucgccccaacucu

SEQ ID NO: 255813 - RNA, 20 nt, Human
uuggaugcagccccaccccc

SEQ ID NO: 255814 - RNA, 20 nt, Human
uuuuuuuuuuuuuuuucacg

SEQ ID NO: 255815 - RNA, 20 nt, Human
aaacaaaucaaaugcauggc

SEQ ID NO: 255816 - RNA, 21 nt, Human
acccagcaccauuacuaacug

SEQ ID NO: 255817 - RNA, 21 nt, Human
agaagaaaguugccaaggaca

SEQ ID NO: 255818 - RNA, 19 nt, Human
cagcaccauuacuaacugu

SEQ ID NO: 255819 - RNA, 19 nt, Human
ccaguacggacgggaacac

SEQ ID NO: 255820 - RNA, 21 nt, Human
cgcgacaagagcuagccucca

SEQ ID NO: 255821 - RNA, 18 nt, Human
cggccgcgacaagagcua

SEQ ID NO: 255822 - RNA, 21 nt, Human
uaacagcaagagauuggucuu

SEQ ID NO: 255823 - RNA, 18 nt, Human
ucagaagaaaguugccaa

SEQ ID NO: 255824 - RNA, 23 nt, Human
ucagauaucagaagaaaguugcc

SEQ ID NO: 255825 - RNA, 24 nt, Human
ugccaaggacagaacugauuuaac

SEQ ID NO: 255826 - RNA, 21 nt, Human
uggcucugucuuggguggcgg

SEQ ID NO: 255827 - RNA, 25 nt, Human
aaagauccaggguagcugagggaug

SEQ ID NO: 255828 - RNA, 23 nt, Human
acaaguugcacaaaucaaaaaau

SEQ ID NO: 255829 - RNA, 19 nt, Human
accuccguacgccccccuc

SEQ ID NO: 255830 - RNA, 19 nt, Human
agagaggcugagggcccgg

SEQ ID NO: 255831 - RNA, 19 nt, Human
agagaggcugagggcccgg

SEQ ID NO: 255832 - RNA, 20 nt, Human
aggaggagggagagaguuag

SEQ ID NO: 255833 - RNA, 20 nt, Human
aggaugggaaaggugagggg

SEQ ID NO: 255834 - RNA, 18 nt, Human
aggcugagggcccggggc

SEQ ID NO: 255835 - RNA, 22 nt, Human
agggggccccuaaacccagagc

SEQ ID NO: 255836 - RNA, 19 nt, Human
agggggcuccacacagugc

SEQ ID NO: 255837 - RNA, 18 nt, Human
caagagaggcugagggcc

SEQ ID NO: 255838 - RNA, 25 nt, Human
cacacagugcccgauucgggcucag

SEQ ID NO: 255839 - RNA, 20 nt, Human
cagagcucaccccaaaaugc

SEQ ID NO: 255840 - RNA, 19 nt, Human
cagcugccaccuccguacg

SEQ ID NO: 255841 - RNA, 24 nt, Human
cagucugcuccuuccacagcccua

SEQ ID NO: 255842 - RNA, 22 nt, Human
ccaccuccguacgccccccucg

SEQ ID NO: 255843 - RNA, 21 nt, Human
ccagagcucaccccaaaaugc

SEQ ID NO: 255844 - RNA, 19 nt, Human
cccggaacguggggauugg

SEQ ID NO: 255845 - RNA, 20 nt, Human
cccugagacccccagggaga

SEQ ID NO: 255846 - RNA, 18 nt, Human
ccucccacagcugccacc

SEQ ID NO: 255847 - RNA, 25 nt, Human
ccucccacagcugccaccuccguac

SEQ ID NO: 255848 - RNA, 23 nt, Human
ccuccucccacagcugccaccuc

SEQ ID NO: 255849 - RNA, 24 nt, Human
cgugaaagguucucccugagaccc

SEQ ID NO: 255850 - RNA, 19 nt, Human
cuaaacccagagcucaccc

SEQ ID NO: 255851 - RNA, 29 nt, Human
cucccugagacccccagggagaggugggg

SEQ ID NO: 255852 - RNA, 19 nt, Human
cucugaggaagaggugggc

SEQ ID NO: 255853 - RNA, 24 nt, Human
gaagucaucaaugguaaaccagga

SEQ ID NO: 255854 - RNA, 21 nt, Human
gccaccuccguacgccccccu

SEQ ID NO: 255855 - RNA, 19 nt, Human
gcucugaggaagagguggg

SEQ ID NO: 255856 - RNA, 18 nt, Human
ggaugauuucucagccuc

SEQ ID NO: 255857 - RNA, 23 nt, Human
ggcgaagucaucaaugguaaacc

SEQ ID NO: 255858 - RNA, 20 nt, Human
gggaugggaaucgagaggaa

SEQ ID NO: 255859 - RNA, 20 nt, Human
gggcaaagauccaggguagc

SEQ ID NO: 255860 - RNA, 24 nt, Human
gggggcucugaggaagaggugggc

SEQ ID NO: 255861 - RNA, 18 nt, Human
gguccgggcuugagcucc

SEQ ID NO: 255862 - RNA, 23 nt, Human
guacaagagaggcugagggcccg

SEQ ID NO: 255863 - RNA, 20 nt, Human
ucagcuccagggggcuccac

SEQ ID NO: 255864 - RNA, 19 nt, Human
ucagggucgcggcccggaa

SEQ ID NO: 255865 - RNA, 19 nt, Human
uccauaaacaccuaguuac

SEQ ID NO: 255866 - RNA, 19 nt, Human
ucgcggcccggaacguggg

SEQ ID NO: 255867 - RNA, 25 nt, Human
ucgggcucagcggcccaaccggacg

SEQ ID NO: 255868 - RNA, 30 nt, Human
ugagacccccagggagaggugggggccggg

SEQ ID NO: 255869 - RNA, 24 nt, Human
ugagcuccucggccuuccacgccg

SEQ ID NO: 255870 - RNA, 21 nt, Human
ugcccgauucgggcucagcgg

SEQ ID NO: 255871 - RNA, 18 nt, Human
uggcagaaugaaaaauca

SEQ ID NO: 255872 - RNA, 19 nt, Human
uggcaggaguaggauggga

SEQ ID NO: 255873 - RNA, 22 nt, Human
ugggggcucugaggaagaggug

SEQ ID NO: 255874 - RNA, 19 nt, Human
ugugugugggcaggaggag

SEQ ID NO: 255875 - RNA, 21 nt, Human
uuuuuuuuucuuuuuuccauu

SEQ ID NO: 255876 - RNA, 24 nt, Human
uuuuuuuuuuucuuuuuuccauuc

SEQ ID NO: 255877 - RNA, 25 nt, Human
uuuuuuuuuuuuuuuuuuucuuuuu

SEQ ID NO: 255878 - RNA, 21 nt, Human
agaaagaagaacacaucccac

SEQ ID NO: 255879 - RNA, 18 nt, Human
aggcaaguauaagucuua

SEQ ID NO: 255880 - RNA, 22 nt, Human
cacacuuugauacaacacuuug

SEQ ID NO: 255881 - RNA, 30 nt, Human
gaagaacacaucccacagugcauaaauaaa

SEQ ID NO: 255882 - RNA, 21 nt, Human
aaaaaaaacuguacaaaaaca

SEQ ID NO: 255883 - RNA, 20 nt, Human
aaaaaucacccaccccuuca

SEQ ID NO: 255884 - RNA, 25 nt, Human
aagaagacugaagggaaaagagggg

SEQ ID NO: 255885 - RNA, 19 nt, Human
acaaaaacaaaaaucaccc

SEQ ID NO: 255886 - RNA, 21 nt, Human
acaaaaaucacccaccccuuc

SEQ ID NO: 255887 - RNA, 21 nt, Human
agucagggccgugcugguacc

SEQ ID NO: 255888 - RNA, 18 nt, Human
auagcaaccuucugugcc

SEQ ID NO: 255889 - RNA, 22 nt, Human
auucagucagggccgugcuggu

SEQ ID NO: 255890 - RNA, 19 nt, Human
caagaaagacugauacaga

SEQ ID NO: 255891 - RNA, 27 nt, Human
caagaaagacugauacagagagcccug

SEQ ID NO: 255892 - RNA, 30 nt, Human
cagugaacaucccuuuguuccuuuuagacu

SEQ ID NO: 255893 - RNA, 19 nt, Human
cagugcagaaacccugggg

SEQ ID NO: 255894 - RNA, 23 nt, Human
cagugcagaaacccugggggcag

SEQ ID NO: 255895 - RNA, 18 nt, Human
cccugggggcagccuggg

SEQ ID NO: 255896 - RNA, 19 nt, Human
cugcucucugcucagaggc

SEQ ID NO: 255897 - RNA, 22 nt, Human
cugguaccugcugcugcugcuc

SEQ ID NO: 255898 - RNA, 27 nt, Human
cuucaaauaauuuuuuuuuuuuuuuuu

SEQ ID NO: 255899 - RNA, 19 nt, Human
cuuggacuugagcaucagc

SEQ ID NO: 255900 - RNA, 24 nt, Human
gaaaagaggggaccagugcagaaa

SEQ ID NO: 255901 - RNA, 21 nt, Human
gccugggaaggcagacuaccc

SEQ ID NO: 255902 - RNA, 22 nt, Human
uaaacugucauuaaauuuuauc

SEQ ID NO: 255903 - RNA, 25 nt, Human
uacuauauagcaaccuucugugccc

SEQ ID NO: 255904 - RNA, 22 nt, Human
ucagggacacugggcugauuca

SEQ ID NO: 255905 - RNA, 19 nt, Human
ucucugacuggaaauaauu

SEQ ID NO: 255906 - RNA, 21 nt, Human
ucucugcucagaggcauacag

SEQ ID NO: 255907 - RNA, 22 nt, Human
ugaaaaaaaacuguacaaaaac

SEQ ID NO: 255908 - RNA, 18 nt, Human
ugaagcuugaaaaaaaac

SEQ ID NO: 255909 - RNA, 23 nt, Human
ugaauugucuuuaggcuugaauu

SEQ ID NO: 255910 - RNA, 20 nt, Human
ugcagaaacccugggggcag

SEQ ID NO: 255911 - RNA, 19 nt, Human
ugcugcugcugcucucugc

SEQ ID NO: 255912 - RNA, 21 nt, Human
ugcugcugcugcucucugcuc

SEQ ID NO: 255913 - RNA, 22 nt, Human
ugcugguaccugcugcugcugc

SEQ ID NO: 255914 - RNA, 18 nt, Human
uggaugcaaaugaaugaa

SEQ ID NO: 255915 - RNA, 18 nt, Human
uggugagaaugccaggca

SEQ ID NO: 255916 - RNA, 25 nt, Human
uguacaaaaacaaaaaucacccacc

SEQ ID NO: 255917 - RNA, 19 nt, Human
ugucuaagcugcucaggga

SEQ ID NO: 255918 - RNA, 19 nt, Human
ugugaagcuugaaaaaaaa

SEQ ID NO: 255919 - RNA, 24 nt, Human
uucagucagggccgugcugguacc

SEQ ID NO: 255920 - RNA, 20 nt, Human
uuuuuuuuuuuuaaacuguc

SEQ ID NO: 255921 - RNA, 19 nt, Human
agccucccaggaccccggc

SEQ ID NO: 255922 - RNA, 19 nt, Human
aggcgagacgggagaggag

SEQ ID NO: 255923 - RNA, 20 nt, Human
cccccgggccccgcgucgcu

SEQ ID NO: 255924 - RNA, 21 nt, Human
cccccgggccccgcgucgcuc

SEQ ID NO: 255925 - RNA, 22 nt, Human
ccccgccccgcccccgggcccc

SEQ ID NO: 255926 - RNA, 21 nt, Human
ccccgccgcccucauugucug

SEQ ID NO: 255927 - RNA, 20 nt, Human
ccccgggccccgcgucgcuc

SEQ ID NO: 255928 - RNA, 19 nt, Human
cccgccagccccgcggaac

SEQ ID NO: 255929 - RNA, 18 nt, Human
cccgccccgcccccgggc

SEQ ID NO: 255930 - RNA, 18 nt, Human
ccgccccgcccccgggcc

SEQ ID NO: 255931 - RNA, 18 nt, Human
ccgccgccgccgccgccg

SEQ ID NO: 255932 - RNA, 18 nt, Human
ccgccgccgccgccgccg

SEQ ID NO: 255933 - RNA, 25 nt, Human
ccgccgccgccgccgccgaucccgg

SEQ ID NO: 255934 - RNA, 23 nt, Human
ccgccgccgccgccgccgccgau

SEQ ID NO: 255935 - RNA, 23 nt, Human
ccgccgccgccgccgccgccgcc

SEQ ID NO: 255936 - RNA, 24 nt, Human
ccgccgccgccgccgccgccgccg

SEQ ID NO: 255937 - RNA, 24 nt, Human
ccgccgccgccgccgccgccgccg

SEQ ID NO: 255938 - RNA, 25 nt, Human
ccgccgccgccgccgccgccgccga

SEQ ID NO: 255939 - RNA, 26 nt, Human
ccgccgccgccgccgccgccgccgcu

SEQ ID NO: 255940 - RNA, 23 nt, Human
ccgccgccgccgccgccgccgcu

SEQ ID NO: 255941 - RNA, 23 nt, Human
ccgccgccgccgccgccgcucaa

SEQ ID NO: 255942 - RNA, 25 nt, Human
ccgccgccgccgccgcucaacgccg

SEQ ID NO: 255943 - RNA, 22 nt, Human
ccgccgccgcucaacgccgccc

SEQ ID NO: 255944 - RNA, 21 nt, Human
ccggccgcccgcucgcccgcc

SEQ ID NO: 255945 - RNA, 18 nt, Human
cgagacgggagaggaggg

SEQ ID NO: 255946 - RNA, 22 nt, Human
cgccccgcccccgggccccgcg

SEQ ID NO: 255947 - RNA, 21 nt, Human
cgccgccgccgccgccgaucc

SEQ ID NO: 255948 - RNA, 25 nt, Human
cgccgccgccgccgccgccgccggc

SEQ ID NO: 255949 - RNA, 21 nt, Human
cggccgcccgcucgcccgcca

SEQ ID NO: 255950 - RNA, 20 nt, Human
cggcggugggggcccggcac

SEQ ID NO: 255951 - RNA, 19 nt, Human
cucgccgccgccgccgccg

SEQ ID NO: 255952 - RNA, 22 nt, Human
gcgccgccgccgccgccgccgg

SEQ ID NO: 255953 - RNA, 18 nt, Human
gggcaggcgaggccuggc

SEQ ID NO: 255954 - RNA, 27 nt, Human
ucccaggaccccggcggugggggcccc

SEQ ID NO: 255955 - RNA, 25 nt, Human
ucgccgccgccgccgccgccgccgg

SEQ ID NO: 255956 - RNA, 20 nt, Human
ucgcucgccgccgccgccgc

SEQ ID NO: 255957 - RNA, 26 nt, Human
ucgcucgccgccgccgccgccgccgg

SEQ ID NO: 255958 - RNA, 22 nt, Human
aaaaaaaaucauccacaaaacc

SEQ ID NO: 255959 - RNA, 20 nt, Human
aaaaacccgaaagcccagcc

SEQ ID NO: 255960 - RNA, 25 nt, Human
aaaaauaguucccaaggcauugaau

SEQ ID NO: 255961 - RNA, 21 nt, Human
aaaacaaaaaaacccgaaagc

SEQ ID NO: 255962 - RNA, 23 nt, Human
aaaacaaaaaaacccgaaagccc

SEQ ID NO: 255963 - RNA, 23 nt, Human
aaaacaaaaaacaaaaaaacccg

SEQ ID NO: 255964 - RNA, 21 nt, Human
aaaacaaaacaaaacaaaaaa

SEQ ID NO: 255965 - RNA, 21 nt, Human
aaaacccgaaagcccagccuc

SEQ ID NO: 255966 - RNA, 24 nt, Human
aaaauauagccucucuaagaagca

SEQ ID NO: 255967 - RNA, 21 nt, Human
aaaauuaaaacaagauuuggg

SEQ ID NO: 255968 - RNA, 23 nt, Human
aaacaaaacaaaacaaaaaacaa

SEQ ID NO: 255969 - RNA, 24 nt, Human
aaacaaaacaaaacaaaaaacaaa

SEQ ID NO: 255970 - RNA, 22 nt, Human
aaacaaaacaaaacaaaacaaa

SEQ ID NO: 255971 - RNA, 22 nt, Human
aaacaaaacaaaacaaaacaaa

SEQ ID NO: 255972 - RNA, 24 nt, Human
aaacaauuuuaauaauaccaagau

SEQ ID NO: 255973 - RNA, 19 nt, Human
aaagcccagccucaagccu

SEQ ID NO: 255974 - RNA, 24 nt, Human
aaauucaauaauucacagaaagga

SEQ ID NO: 255975 - RNA, 18 nt, Human
aacagccucacacagacc

SEQ ID NO: 255976 - RNA, 19 nt, Human
aaccugccauaaagaacac

SEQ ID NO: 255977 - RNA, 20 nt, Human
aagaaaacaaaacaaaacaa

SEQ ID NO: 255978 - RNA, 20 nt, Human
aagaacacaacccuucacaa

SEQ ID NO: 255979 - RNA, 24 nt, Human
aagaaucugugguaggaagcaagc

SEQ ID NO: 255980 - RNA, 25 nt, Human
aagcaaagcaaguugccuuccuuag

SEQ ID NO: 255981 - RNA, 18 nt, Human
aaggagcuguaggguuuc

SEQ ID NO: 255982 - RNA, 18 nt, Human
aagucaccgagaaaccaa

SEQ ID NO: 255983 - RNA, 23 nt, Human
aauuacauuuuuguuuaaacagc

SEQ ID NO: 255984 - RNA, 23 nt, Human
aauucucucacagaucacauauu

SEQ ID NO: 255985 - RNA, 25 nt, Human
acaaaauauucuugcaagauuuaaa

SEQ ID NO: 255986 - RNA, 19 nt, Human
acacaccaaaccuaccagg

SEQ ID NO: 255987 - RNA, 22 nt, Human
acacaccaaaccuaccaggcaa

SEQ ID NO: 255988 - RNA, 19 nt, Human
acacaucaaggucuuaugc

SEQ ID NO: 255989 - RNA, 20 nt, Human
acagcugucauucucuggcu

SEQ ID NO: 255990 - RNA, 22 nt, Human
accacucacacugugagagaua

SEQ ID NO: 255991 - RNA, 21 nt, Human
accuuacauccguuaauccua

SEQ ID NO: 255992 - RNA, 21 nt, Human
acuguucauuuaacacagguu

SEQ ID NO: 255993 - RNA, 24 nt, Human
agaaaaaaaaaaacccacaaagag

SEQ ID NO: 255994 - RNA, 25 nt, Human
agaaaacaaaacaaaacaaaacaaa

SEQ ID NO: 255995 - RNA, 20 nt, Human
agcaaaaagacccuaugaac

SEQ ID NO: 255996 - RNA, 22 nt, Human
agcaugcagugaaaaagugcaa

SEQ ID NO: 255997 - RNA, 20 nt, Human
aggaaacauguccaggggca

SEQ ID NO: 255998 - RNA, 20 nt, Human
aggaagcaagcagguuuaag

SEQ ID NO: 255999 - RNA, 22 nt, Human
aggacaaaaggggaggggaugg

SEQ ID NO: 256000 - RNA, 24 nt, Human
agggaccagaccucugacuuaagu

SEQ ID NO: 256001 - RNA, 20 nt, Human
aggggugggaaauggcaggg

SEQ ID NO: 256002 - RNA, 21 nt, Human
aguauaauuugauaaauuuua

SEQ ID NO: 256003 - RNA, 23 nt, Human
agucaccgagaaaccaacacaac

SEQ ID NO: 256004 - RNA, 19 nt, Human
agucccuuucgcugaagca

SEQ ID NO: 256005 - RNA, 19 nt, Human
auaaagcagaggaguaaaa

SEQ ID NO: 256006 - RNA, 23 nt, Human
aucuggucagguauaaauguugg

SEQ ID NO: 256007 - RNA, 21 nt, Human
augcucuggcacaaucugcau

SEQ ID NO: 256008 - RNA, 20 nt, Human
caaaaaaacccgaaagccca

SEQ ID NO: 256009 - RNA, 21 nt, Human
caaaaaacaaaaaaacccgaa

SEQ ID NO: 256010 - RNA, 23 nt, Human
caaaacaaaaaacaaaaaaaccc

SEQ ID NO: 256011 - RNA, 29 nt, Human
caaaacaaaacaaaaaacaaaaaaacccc

SEQ ID NO: 256012 - RNA, 24 nt, Human
caaaacaaaacaaaacaaaacaaa

SEQ ID NO: 256013 - RNA, 25 nt, Human
caaaacaaaacaaaacaaaacaaaa

SEQ ID NO: 256014 - RNA, 22 nt, Human
caaaacagauaauaugaagguc

SEQ ID NO: 256015 - RNA, 24 nt, Human
caaauacaacucaaacuucauaaa

SEQ ID NO: 256016 - RNA, 22 nt, Human
caaccaccccaaaucucuacau

SEQ ID NO: 256017 - RNA, 20 nt, Human
caaccguaacagcaaaaaga

SEQ ID NO: 256018 - RNA, 23 nt, Human
caagaucaucucuggggccagcc

SEQ ID NO: 256019 - RNA, 19 nt, Human
caagucaccgagaaaccaa

SEQ ID NO: 256020 - RNA, 26 nt, Human
cacaacacacacacacacacacaccu

SEQ ID NO: 256021 - RNA, 20 nt, Human
cacacaacacacacacacac

SEQ ID NO: 256022 - RNA, 28 nt, Human
cacacaacacacacacacacacacaccu

SEQ ID NO: 256023 - RNA, 20 nt, Human
cacacaaccccaacaugaac

SEQ ID NO: 256024 - RNA, 18 nt, Human
cacacacacacacacaca

SEQ ID NO: 256025 - RNA, 19 nt, Human
cacaguguccaaccaauga

SEQ ID NO: 256026 - RNA, 18 nt, Human
caccauaauuaagaacug

SEQ ID NO: 256027 - RNA, 18 nt, Human
caccccaaaucucuacau

SEQ ID NO: 256028 - RNA, 18 nt, Human
cacgcucgaagaccgccg

SEQ ID NO: 256029 - RNA, 23 nt, Human
cacgcucgaagaccgccggcgcc

SEQ ID NO: 256030 - RNA, 19 nt, Human
cacuggggccucugcggcg

SEQ ID NO: 256031 - RNA, 21 nt, Human
cacuguucauuggcagaaagu

SEQ ID NO: 256032 - RNA, 22 nt, Human
cagaaaguggggcacaguggag

SEQ ID NO: 256033 - RNA, 19 nt, Human
cagcacaguaaugagaagu

SEQ ID NO: 256034 - RNA, 18 nt, Human
cagccccgggcucggccc

SEQ ID NO: 256035 - RNA, 19 nt, Human
cagcgccgcgcucaccauu

SEQ ID NO: 256036 - RNA, 22 nt, Human
cagggguaggaaauggcagcgc

SEQ ID NO: 256037 - RNA, 23 nt, Human
caguacagauuuugccuuuggga

SEQ ID NO: 256038 - RNA, 24 nt, Human
caguacagauuuugccuuugggaa

SEQ ID NO: 256039 - RNA, 23 nt, Human
cauccgggcacuggggccucugc

SEQ ID NO: 256040 - RNA, 24 nt, Human
caugagggaccagaccucugacuu

SEQ ID NO: 256041 - RNA, 19 nt, Human
cauucaaaauggacuuggu

SEQ ID NO: 256042 - RNA, 24 nt, Human
ccaaaacucaaaagaaaaaaaauc

SEQ ID NO: 256043 - RNA, 24 nt, Human
ccagaccucugacuuaagugacaa

SEQ ID NO: 256044 - RNA, 27 nt, Human
ccagcaacagcacaacgcgggccacag

SEQ ID NO: 256045 - RNA, 22 nt, Human
ccagcgccgcgcucaccauuug

SEQ ID NO: 256046 - RNA, 18 nt, Human
cccaugugcuguggcucc

SEQ ID NO: 256047 - RNA, 20 nt, Human
cccccacgcucgaagaccgc

SEQ ID NO: 256048 - RNA, 21 nt, Human
ccccuagacaaucaaggacuc

SEQ ID NO: 256049 - RNA, 22 nt, Human
cccgaaagcccagccucaagcc

SEQ ID NO: 256050 - RNA, 19 nt, Human
cccgcgggcccugcugcca

SEQ ID NO: 256051 - RNA, 22 nt, Human
cccgggcucggcccguauuggc

SEQ ID NO: 256052 - RNA, 18 nt, Human
ccucacacagaccacuca

SEQ ID NO: 256053 - RNA, 24 nt, Human
ccucaccacugcuacuagguggcc

SEQ ID NO: 256054 - RNA, 21 nt, Human
ccucauuucauuugcaacuug

SEQ ID NO: 256055 - RNA, 21 nt, Human
cgaaauaaagccugauucugg

SEQ ID NO: 256056 - RNA, 19 nt, Human
cgcagccccgggcucggcc

SEQ ID NO: 256057 - RNA, 22 nt, Human
cgcgggcccugcugccagcgcc

SEQ ID NO: 256058 - RNA, 22 nt, Human
cgcucgaagaccgccggcgccc

SEQ ID NO: 256059 - RNA, 20 nt, Human
cggagccgggcggggacgcg

SEQ ID NO: 256060 - RNA, 27 nt, Human
cuaaaaaaaaacuauaauucucucacu

SEQ ID NO: 256061 - RNA, 23 nt, Human
cuaccaagagaguuccugcauuc

SEQ ID NO: 256062 - RNA, 22 nt, Human
cucaaaagaaaaaaaaucaucc

SEQ ID NO: 256063 - RNA, 21 nt, Human
cucccaaaacucaaaagaaaa

SEQ ID NO: 256064 - RNA, 22 nt, Human
cucccaucccucgacacauccc

SEQ ID NO: 256065 - RNA, 20 nt, Human
cuccuccucaccgcuccgac

SEQ ID NO: 256066 - RNA, 19 nt, Human
cucugcuucugcauaacca

SEQ ID NO: 256067 - RNA, 18 nt, Human
cugaaggaacagccucac

SEQ ID NO: 256068 - RNA, 19 nt, Human
cuguccuuuaguuaggaag

SEQ ID NO: 256069 - RNA, 24 nt, Human
cuugcugggcccucccacuccuca

SEQ ID NO: 256070 - RNA, 20 nt, Human
gaagaccgccggcgcccaac

SEQ ID NO: 256071 - RNA, 20 nt, Human
gaagcagauuucauguuucu

SEQ ID NO: 256072 - RNA, 18 nt, Human
gaaugggacaaaggcgga

SEQ ID NO: 256073 - RNA, 18 nt, Human
gaccagaccucugacuua

SEQ ID NO: 256074 - RNA, 21 nt, Human
gagaacacucuggagugaagg

SEQ ID NO: 256075 - RNA, 25 nt, Human
gagcuggggucaaugugcagcgcuc

SEQ ID NO: 256076 - RNA, 19 nt, Human
gaggggauggcuaagggag

SEQ ID NO: 256077 - RNA, 23 nt, Human
gauacuuuucccauucagggcac

SEQ ID NO: 256078 - RNA, 18 nt, Human
gcaaaaauaguucccaag

SEQ ID NO: 256079 - RNA, 24 nt, Human
gcagccccgggcucggcccguauu

SEQ ID NO: 256080 - RNA, 20 nt, Human
gcccagccucaagccucaac

SEQ ID NO: 256081 - RNA, 21 nt, Human
gcuacacacacaccaaaccua

SEQ ID NO: 256082 - RNA, 22 nt, Human
ggacccaaaacaaaagagacaa

SEQ ID NO: 256083 - RNA, 20 nt, Human
ggauucaucagccacuaccu

SEQ ID NO: 256084 - RNA, 19 nt, Human
ggcaggagcggggguugcc

SEQ ID NO: 256085 - RNA, 20 nt, Human
ggcccguauuggcucgcgcu

SEQ ID NO: 256086 - RNA, 20 nt, Human
ggcgcccaacgccugcccag

SEQ ID NO: 256087 - RNA, 21 nt, Human
gggaggggauggcuaagggag

SEQ ID NO: 256088 - RNA, 19 nt, Human
gggccacaguuccuccuca

SEQ ID NO: 256089 - RNA, 18 nt, Human
gggcggcaggagcggggg

SEQ ID NO: 256090 - RNA, 22 nt, Human
ggggaggggauggcuaagggag

SEQ ID NO: 256091 - RNA, 19 nt, Human
ggggcggcaggagcggggg

SEQ ID NO: 256092 - RNA, 21 nt, Human
guuuaaacagcaauuaauccu

SEQ ID NO: 256093 - RNA, 18 nt, Human
uaaaagcacuuuagccau

SEQ ID NO: 256094 - RNA, 20 nt, Human
uaaacagaugaaauggcaaa

SEQ ID NO: 256095 - RNA, 25 nt, Human
uaaauacugcuaaucaguggcaaag

SEQ ID NO: 256096 - RNA, 21 nt, Human
uaacagauggacacacaaugc

SEQ ID NO: 256097 - RNA, 23 nt, Human
uaacagcaaaaagacccuaugaa

SEQ ID NO: 256098 - RNA, 20 nt, Human
uaagauaccaaauaaggcaa

SEQ ID NO: 256099 - RNA, 19 nt, Human
uaaggccacugaaaaagca

SEQ ID NO: 256100 - RNA, 22 nt, Human
uaauaaaacaguaagcuccuga

SEQ ID NO: 256101 - RNA, 24 nt, Human
uacaagaaaacaaaacaaaacaaa

SEQ ID NO: 256102 - RNA, 25 nt, Human
uacaagaaaacaaaacaaaacaaaa

SEQ ID NO: 256103 - RNA, 20 nt, Human
uacacacauacacacacaca

SEQ ID NO: 256104 - RNA, 24 nt, Human
uacagcuugauccucuuaugaaaa

SEQ ID NO: 256105 - RNA, 21 nt, Human
uaccaggcaauuacuguucau

SEQ ID NO: 256106 - RNA, 19 nt, Human
uagcagaaaaauauagccu

SEQ ID NO: 256107 - RNA, 21 nt, Human
uagcaucccuucauggcugca

SEQ ID NO: 256108 - RNA, 23 nt, Human
uagccaucuggucagguauaaau

SEQ ID NO: 256109 - RNA, 19 nt, Human
uaggcacuucucuacccag

SEQ ID NO: 256110 - RNA, 24 nt, Human
uauauacaaccguaacagcaaaaa

SEQ ID NO: 256111 - RNA, 27 nt, Human
uaucaaguucagagaaaaaaaaaaacc

SEQ ID NO: 256112 - RNA, 19 nt, Human
uaucacuugcaguguuuga

SEQ ID NO: 256113 - RNA, 19 nt, Human
ucaaaacagauaauaugaa

SEQ ID NO: 256114 - RNA, 18 nt, Human
ucaaacgacuauacaagg

SEQ ID NO: 256115 - RNA, 23 nt, Human
ucaaccaaaucaaaucuagcuga

SEQ ID NO: 256116 - RNA, 22 nt, Human
ucauccacaaaacccuuuacca

SEQ ID NO: 256117 - RNA, 21 nt, Human
ucccugaagccauggcgaaac

SEQ ID NO: 256118 - RNA, 23 nt, Human
ucccugaagccauggcgaaacaa

SEQ ID NO: 256119 - RNA, 23 nt, Human
uccgggcacuggggccucugcgg

SEQ ID NO: 256120 - RNA, 21 nt, Human
ucuaaacauccugagaccuga

SEQ ID NO: 256121 - RNA, 21 nt, Human
ucucgagccccgggcguccuc

SEQ ID NO: 256122 - RNA, 20 nt, Human
ucugcauaaccacagugucc

SEQ ID NO: 256123 - RNA, 20 nt, Human
ucuggucagguauaaauguu

SEQ ID NO: 256124 - RNA, 18 nt, Human
ugaaacaaacgucuggac

SEQ ID NO: 256125 - RNA, 20 nt, Human
ugaagccauggcgaaacaaa

SEQ ID NO: 256126 - RNA, 18 nt, Human
ugagaagucagagcuggg

SEQ ID NO: 256127 - RNA, 22 nt, Human
ugagaagucagagcugggguca

SEQ ID NO: 256128 - RNA, 21 nt, Human
ugaugcuaguaacauuaaugu

SEQ ID NO: 256129 - RNA, 21 nt, Human
ugcauauuugagguucacaug

SEQ ID NO: 256130 - RNA, 22 nt, Human
ugcgugcguacauacacacaua

SEQ ID NO: 256131 - RNA, 18 nt, Human
uggacaacaugaguuacc

SEQ ID NO: 256132 - RNA, 21 nt, Human
uggcaauaacuuacggagggc

SEQ ID NO: 256133 - RNA, 23 nt, Human
uggcagaaaguggggcacagugg

SEQ ID NO: 256134 - RNA, 22 nt, Human
uggcagcgccaaguccuccugu

SEQ ID NO: 256135 - RNA, 20 nt, Human
ugggaauggacuagcguggc

SEQ ID NO: 256136 - RNA, 23 nt, Human
ugggacccaaaacaaaagagaca

SEQ ID NO: 256137 - RNA, 18 nt, Human
uggggcacaguggagucc

SEQ ID NO: 256138 - RNA, 18 nt, Human
ugggggcggcaggagcgg

SEQ ID NO: 256139 - RNA, 18 nt, Human
ugguaggaagcaagcagg

SEQ ID NO: 256140 - RNA, 25 nt, Human
ugguggcaauaucacuugcaguguu

SEQ ID NO: 256141 - RNA, 21 nt, Human
ugguucccuucuuccccaagg

SEQ ID NO: 256142 - RNA, 24 nt, Human
uguagaggacacaauggcuuucuu

SEQ ID NO: 256143 - RNA, 25 nt, Human
uuaaaaacacugcacucaaaguaau

SEQ ID NO: 256144 - RNA, 22 nt, Human
uuaaaacaagauuugggacaca

SEQ ID NO: 256145 - RNA, 20 nt, Human
uuaaacaaaacuuuaaaagc

SEQ ID NO: 256146 - RNA, 18 nt, Human
uuaaaggauacaggacaa

SEQ ID NO: 256147 - RNA, 27 nt, Human
uuaaaguuucaaugaaaaagaaaaauc

SEQ ID NO: 256148 - RNA, 20 nt, Human
uuagacucuauuuucacucc

SEQ ID NO: 256149 - RNA, 23 nt, Human
uuaggucagccacugccuggucc

SEQ ID NO: 256150 - RNA, 20 nt, Human
uuaguaaaguguuuuuucau

SEQ ID NO: 256151 - RNA, 23 nt, Human
uuaguaaaguguuuuuucauuau

SEQ ID NO: 256152 - RNA, 22 nt, Human
uucaaaagucuaaucaaccacc

SEQ ID NO: 256153 - RNA, 19 nt, Human
uucaaaugaucuaccucag

SEQ ID NO: 256154 - RNA, 20 nt, Human
uucaagggacaaauaaaauc

SEQ ID NO: 256155 - RNA, 20 nt, Human
uucacaaagccccaaguugc

SEQ ID NO: 256156 - RNA, 20 nt, Human
uucacagaaaggacagaaac

SEQ ID NO: 256157 - RNA, 24 nt, Human
uucauacacccauuuaagcuaaau

SEQ ID NO: 256158 - RNA, 22 nt, Human
uucucuggcuuucaccuaaaca

SEQ ID NO: 256159 - RNA, 19 nt, Human
uuuaagcuaaauugcacuu

SEQ ID NO: 256160 - RNA, 22 nt, Human
uuucuuguucacugacgaaacu

SEQ ID NO: 256161 - RNA, 19 nt, Human
uuugcauuugucuuacucu

SEQ ID NO: 256162 - RNA, 23 nt, Human
uuuguguugcacaucuucccauu

SEQ ID NO: 256163 - RNA, 21 nt, Human
aaaaaaaaccaaaaaaaaaaa

SEQ ID NO: 256164 - RNA, 25 nt, Human
aaaaaaaaccaaaaaaaaaaaacac

SEQ ID NO: 256165 - RNA, 22 nt, Human
aaaaaaaccaaaaaaaaaaaac

SEQ ID NO: 256166 - RNA, 20 nt, Human
aaaaaaauccccccaucccc

SEQ ID NO: 256167 - RNA, 20 nt, Human
aaaaauccccccauccccaa

SEQ ID NO: 256168 - RNA, 18 nt, Human
aaaauccccccaucccca

SEQ ID NO: 256169 - RNA, 22 nt, Human
aaaauccccccauccccaaccg

SEQ ID NO: 256170 - RNA, 26 nt, Human
aaaauccccccauccccaaccgucuu

SEQ ID NO: 256171 - RNA, 23 nt, Human
aaacaaaagguggaaaauacaga

SEQ ID NO: 256172 - RNA, 21 nt, Human
aaacagacacaagaauguuga

SEQ ID NO: 256173 - RNA, 24 nt, Human
aaacagacacaagaauguugauga

SEQ ID NO: 256174 - RNA, 23 nt, Human
aaacagguauugaaccacugaau

SEQ ID NO: 256175 - RNA, 26 nt, Human
aaacagguauugaaccacugaaucua

SEQ ID NO: 256176 - RNA, 24 nt, Human
aaagaccacaaagaagaaaaucaa

SEQ ID NO: 256177 - RNA, 20 nt, Human
aacaagaacaaaaaaauccc

SEQ ID NO: 256178 - RNA, 23 nt, Human
aacaagaacaaaaaaaucccccc

SEQ ID NO: 256179 - RNA, 21 nt, Human
aacaagaacaaaaaaucacaa

SEQ ID NO: 256180 - RNA, 23 nt, Human
aaccaaaaaaaaaaaaaaccaaa

SEQ ID NO: 256181 - RNA, 18 nt, Human
aagaacaaaaaaaucccc

SEQ ID NO: 256182 - RNA, 25 nt, Human
aagaagaaaaucaagguggcuauuu

SEQ ID NO: 256183 - RNA, 19 nt, Human
aagagaugaugacuggcuu

SEQ ID NO: 256184 - RNA, 28 nt, Human
aaucacaaccaaaaaaaaaaaaaaccaa

SEQ ID NO: 256185 - RNA, 23 nt, Human
acaaagaagaaaaucaagguggc

SEQ ID NO: 256186 - RNA, 28 nt, Human
acaacaagaacaaaaaaucacaaccaaa

SEQ ID NO: 256187 - RNA, 24 nt, Human
acacaauaguucuugaugcaucca

SEQ ID NO: 256188 - RNA, 22 nt, Human
accaaaaaaaaaaaacacaaua

SEQ ID NO: 256189 - RNA, 19 nt, Human
accacagagagauacauga

SEQ ID NO: 256190 - RNA, 19 nt, Human
agaaaaauaaagcugaagg

SEQ ID NO: 256191 - RNA, 30 nt, Human
agaauaaccaagaauuuuuccccaaagaag

SEQ ID NO: 256192 - RNA, 18 nt, Human
agccaaggacugggcccc

SEQ ID NO: 256193 - RNA, 22 nt, Human
aggaaaaagaccacaaagaaga

SEQ ID NO: 256194 - RNA, 25 nt, Human
aggaaaaagaccacaaagaagaaaa

SEQ ID NO: 256195 - RNA, 23 nt, Human
augguccaagaucauuacaugga

SEQ ID NO: 256196 - RNA, 27 nt, Human
caaaaaaaaaaaacacaauaguucuug

SEQ ID NO: 256197 - RNA, 23 nt, Human
caaaacaaggguacaacaagaac

SEQ ID NO: 256198 - RNA, 24 nt, Human
caaacaaaaaucucugauuccaga

SEQ ID NO: 256199 - RNA, 23 nt, Human
caacaagaacaaaaaaauccccc

SEQ ID NO: 256200 - RNA, 24 nt, Human
caacaagaacaaaaaaaucccccc

SEQ ID NO: 256201 - RNA, 24 nt, Human
caacaagaacaaaaaaucacaacc

SEQ ID NO: 256202 - RNA, 25 nt, Human
caacaagaacaaaaaaucacaacca

SEQ ID NO: 256203 - RNA, 25 nt, Human
caaccaaaaaaaaaaaaaaccaaaa

SEQ ID NO: 256204 - RNA, 23 nt, Human
caacuuucaggaaaaagaccaca

SEQ ID NO: 256205 - RNA, 19 nt, Human
caagaacaaaaaaaucccc

SEQ ID NO: 256206 - RNA, 21 nt, Human
caagaacaaaaaaaucccccc

SEQ ID NO: 256207 - RNA, 22 nt, Human
caagaacaaaaaaaucccccca

SEQ ID NO: 256208 - RNA, 22 nt, Human
caagaacaaaaaaaucccccca

SEQ ID NO: 256209 - RNA, 22 nt, Human
caagagaugaugacuggcuuua

SEQ ID NO: 256210 - RNA, 24 nt, Human
caaggguacaacaagaacaaaaaa

SEQ ID NO: 256211 - RNA, 22 nt, Human
cacaaccaaaaaaaaaaaaaac

SEQ ID NO: 256212 - RNA, 25 nt, Human
caccaaaaguacuuugguuuuuuuc

SEQ ID NO: 256213 - RNA, 23 nt, Human
cacugaaucuacaaguuaauaca

SEQ ID NO: 256214 - RNA, 24 nt, Human
cacuuuuguuuaaaaguccuacaa

SEQ ID NO: 256215 - RNA, 23 nt, Human
caggaaaaagaccacaaagaaga

SEQ ID NO: 256216 - RNA, 28 nt, Human
cauauaaacaacaagaacaaaaaaucac

SEQ ID NO: 256217 - RNA, 25 nt, Human
ccaaaaaaaaaaaacacaauaguuc

SEQ ID NO: 256218 - RNA, 26 nt, Human
ccccccaguugauaaucugugucccc

SEQ ID NO: 256219 - RNA, 18 nt, Human
cccggagguuugcugggg

SEQ ID NO: 256220 - RNA, 18 nt, Human
ccuuggagagaagagugg

SEQ ID NO: 256221 - RNA, 20 nt, Human
cgaguaaggucacugggcuu

SEQ ID NO: 256222 - RNA, 23 nt, Human
cgcccccccucagcuguaauuca

SEQ ID NO: 256223 - RNA, 18 nt, Human
cugaaacucugacuaaua

SEQ ID NO: 256224 - RNA, 20 nt, Human
cugcaacgaguuaaaggacu

SEQ ID NO: 256225 - RNA, 18 nt, Human
cuggaacuggaaaaacaa

SEQ ID NO: 256226 - RNA, 20 nt, Human
cuggaacuggaaaaacaaaa

SEQ ID NO: 256227 - RNA, 22 nt, Human
gaaaaacaaaagguggaaaaua

SEQ ID NO: 256228 - RNA, 20 nt, Human
gaacuggaaaaacaaaaggu

SEQ ID NO: 256229 - RNA, 20 nt, Human
gaauaaccaagaauuuuucc

SEQ ID NO: 256230 - RNA, 19 nt, Human
gacuuggaaaaaguuggug

SEQ ID NO: 256231 - RNA, 22 nt, Human
gcgcucgcuugcucgcucgcuc

SEQ ID NO: 256232 - RNA, 19 nt, Human
gcuugcucgcucgcucgcu

SEQ ID NO: 256233 - RNA, 23 nt, Human
ggagagaagagugguccgcugag

SEQ ID NO: 256234 - RNA, 18 nt, Human
ggguguugugugguaccc

SEQ ID NO: 256235 - RNA, 22 nt, Human
gguaccccccccuccuccgccc

SEQ ID NO: 256236 - RNA, 24 nt, Human
guaacacacuggcagcugaagaaa

SEQ ID NO: 256237 - RNA, 23 nt, Human
guacaacaagaacaaaaaaaucc

SEQ ID NO: 256238 - RNA, 23 nt, Human
guucuuacuuuucauuucuccac

SEQ ID NO: 256239 - RNA, 18 nt, Human
uaaagaaaaauaaagcug

SEQ ID NO: 256240 - RNA, 22 nt, Human
uaaaggacuuggaaaaaguugg

SEQ ID NO: 256241 - RNA, 19 nt, Human
uacaacaagaacaaaaaaa

SEQ ID NO: 256242 - RNA, 23 nt, Human
uacaacaguuuuuuuuuuuuaga

SEQ ID NO: 256243 - RNA, 23 nt, Human
uaccccccccuccuccgcccccc

SEQ ID NO: 256244 - RNA, 20 nt, Human
uacuuugguuuuuuucuuuu

SEQ ID NO: 256245 - RNA, 20 nt, Human
uagaauaucuguaugcgaua

SEQ ID NO: 256246 - RNA, 23 nt, Human
ucacaaccaaaaaaaaaaaaaac

SEQ ID NO: 256247 - RNA, 18 nt, Human
ucaggacauuuacaggua

SEQ ID NO: 256248 - RNA, 19 nt, Human
uccccaaagaaagauuuua

SEQ ID NO: 256249 - RNA, 19 nt, Human
uccuccgcccccccucagc

SEQ ID NO: 256250 - RNA, 22 nt, Human
uccuccgcccccccucagcugu

SEQ ID NO: 256251 - RNA, 23 nt, Human
ucuguuauggcagaauaaccaag

SEQ ID NO: 256252 - RNA, 19 nt, Human
ugaagaaagcugaaacucu

SEQ ID NO: 256253 - RNA, 19 nt, Human
ugaagaggcugcuaugaau

SEQ ID NO: 256254 - RNA, 21 nt, Human
ugauaaucuguguccuggaac

SEQ ID NO: 256255 - RNA, 20 nt, Human
ugaugacuggcuuuaaagaa

SEQ ID NO: 256256 - RNA, 24 nt, Human
uggaaaaacaaaagguggaaaaga

SEQ ID NO: 256257 - RNA, 21 nt, Human
uggaaaauacagacugcaacg

SEQ ID NO: 256258 - RNA, 19 nt, Human
uggauacagccaaggacug

SEQ ID NO: 256259 - RNA, 20 nt, Human
uggcagcugaagaaagcuga

SEQ ID NO: 256260 - RNA, 21 nt, Human
ugucugauggugucauucccu

SEQ ID NO: 256261 - RNA, 20 nt, Human
uuccuuggagagaagagugg

SEQ ID NO: 256262 - RNA, 19 nt, Human
uugaauaugcauucguccu

SEQ ID NO: 256263 - RNA, 20 nt, Human
uugugugguaccccccccuc

SEQ ID NO: 256264 - RNA, 22 nt, Human
uugugugguaccccccccuccu

SEQ ID NO: 256265 - RNA, 21 nt, Human
uuuaaagaaaaauaaagcuga

SEQ ID NO: 256266 - RNA, 25 nt, Human
aaaaacucgaguccaucgggaagcc

SEQ ID NO: 256267 - RNA, 28 nt, Human
aaaaauaacacugcagagagcccauaac

SEQ ID NO: 256268 - RNA, 24 nt, Human
aaaaugcugggauuacagguguga

SEQ ID NO: 256269 - RNA, 26 nt, Human
aaaugcugggauuacaggugugagcc

SEQ ID NO: 256270 - RNA, 18 nt, Human
aacacagcaccacccauc

SEQ ID NO: 256271 - RNA, 20 nt, Human
aacacagcaccacccaucgg

SEQ ID NO: 256272 - RNA, 25 nt, Human
acacagcaccacccaucggacccag

SEQ ID NO: 256273 - RNA, 24 nt, Human
accucgugaucugcccgccuuggc

SEQ ID NO: 256274 - RNA, 18 nt, Human
acgggguuucaccguguu

SEQ ID NO: 256275 - RNA, 19 nt, Human
acgggguuucaccguguua

SEQ ID NO: 256276 - RNA, 20 nt, Human
acgggguuucaccguguuag

SEQ ID NO: 256277 - RNA, 24 nt, Human
acgggguuucaccguguuagccag

SEQ ID NO: 256278 - RNA, 20 nt, Human
agaaaaacgagaaugauuca

SEQ ID NO: 256279 - RNA, 23 nt, Human
agcaccacccaucggacccagca

SEQ ID NO: 256280 - RNA, 18 nt, Human
agcauguuuaccuuuuau

SEQ ID NO: 256281 - RNA, 18 nt, Human
auauaccaguuaugggag

SEQ ID NO: 256282 - RNA, 19 nt, Human
aucugcccgccuuggccuc

SEQ ID NO: 256283 - RNA, 22 nt, Human
augacccuugaaaugcacacaa

SEQ ID NO: 256284 - RNA, 24 nt, Human
caaaaugcugggauuacaggugug

SEQ ID NO: 256285 - RNA, 18 nt, Human
caacacagcaccacccau

SEQ ID NO: 256286 - RNA, 22 nt, Human
cacagcaccacccaucggaccc

SEQ ID NO: 256287 - RNA, 20 nt, Human
caccccaagagcggcagagc

SEQ ID NO: 256288 - RNA, 22 nt, Human
caccgcacagcagugugggggc

SEQ ID NO: 256289 - RNA, 24 nt, Human
caccgcccguccggacucugcacc

SEQ ID NO: 256290 - RNA, 18 nt, Human
caccguguuagccaggau

SEQ ID NO: 256291 - RNA, 23 nt, Human
caccguguuagccaggauggucu

SEQ ID NO: 256292 - RNA, 24 nt, Human
caccguguuagccaggauggucuu

SEQ ID NO: 256293 - RNA, 23 nt, Human
caggaaaggauuuaaaaugacgg

SEQ ID NO: 256294 - RNA, 22 nt, Human
cauauggcucagaauaucaucc

SEQ ID NO: 256295 - RNA, 24 nt, Human
caugacccuugaaaugcacacaaa

SEQ ID NO: 256296 - RNA, 21 nt, Human
cauuuggauccagcaccgccc

SEQ ID NO: 256297 - RNA, 21 nt, Human
ccaaaaugcugggauuacagg

SEQ ID NO: 256298 - RNA, 21 nt, Human
ccaaaaugcugggauuacagg

SEQ ID NO: 256299 - RNA, 24 nt, Human
ccaaaaugcugggauuacaggugu

SEQ ID NO: 256300 - RNA, 21 nt, Human
ccagcacugcccauuuagauc

SEQ ID NO: 256301 - RNA, 21 nt, Human
ccaguggugcaaugagaauag

SEQ ID NO: 256302 - RNA, 19 nt, Human
ccaucggacccaucaccgc

SEQ ID NO: 256303 - RNA, 20 nt, Human
ccgaaccgaacauagcaccg

SEQ ID NO: 256304 - RNA, 23 nt, Human
ccggacccaacacagcaccaccc

SEQ ID NO: 256305 - RNA, 19 nt, Human
ccggcuuugcaaacucauu

SEQ ID NO: 256306 - RNA, 21 nt, Human
ccguccgaaccgaacauagca

SEQ ID NO: 256307 - RNA, 24 nt, Human
ccugaccucgugaucugcccgccu

SEQ ID NO: 256308 - RNA, 26 nt, Human
ccugaccucgugaucugcccgccuug

SEQ ID NO: 256309 - RNA, 18 nt, Human
cgcgcguccgaaccgaac

SEQ ID NO: 256310 - RNA, 22 nt, Human
cggcagagcgcgguucagaaaa

SEQ ID NO: 256311 - RNA, 24 nt, Human
cgggguuucaccguguuagccagg

SEQ ID NO: 256312 - RNA, 21 nt, Human
cguccagauccagcaccgccc

SEQ ID NO: 256313 - RNA, 24 nt, Human
cucacucugugagaggaacaccgc

SEQ ID NO: 256314 - RNA, 24 nt, Human
cuccugaccucgugaucugcccgc

SEQ ID NO: 256315 - RNA, 18 nt, Human
cuggaaauuuucaugucc

SEQ ID NO: 256316 - RNA, 21 nt, Human
gaccucgugaucugcccgccu

SEQ ID NO: 256317 - RNA, 24 nt, Human
gagacgggguuucaccguguuagc

SEQ ID NO: 256318 - RNA, 18 nt, Human
gauuacaggugugagcca

SEQ ID NO: 256319 - RNA, 22 nt, Human
gauuacaggugugagccacugc

SEQ ID NO: 256320 - RNA, 22 nt, Human
gauuacaggugugagccacugc

SEQ ID NO: 256321 - RNA, 23 nt, Human
gcccauuuggauccagcaccgcc

SEQ ID NO: 256322 - RNA, 19 nt, Human
gcccggcccuauuuuguuu

SEQ ID NO: 256323 - RNA, 23 nt, Human
gcccguccagauccagcaccgcc

SEQ ID NO: 256324 - RNA, 24 nt, Human
ggauggucuugaucuccugaccuc

SEQ ID NO: 256325 - RNA, 21 nt, Human
gggaaggaacccgguaccgcc

SEQ ID NO: 256326 - RNA, 23 nt, Human
gggguuucaccguguuagccagg

SEQ ID NO: 256327 - RNA, 23 nt, Human
guagagacgggguuucaccgugu

SEQ ID NO: 256328 - RNA, 20 nt, Human
gugggggcucgaacacccca

SEQ ID NO: 256329 - RNA, 19 nt, Human
uacaggugugagccacugc

SEQ ID NO: 256330 - RNA, 23 nt, Human
uacaggugugagccacugcgccc

SEQ ID NO: 256331 - RNA, 22 nt, Human
uaccacucauacauaauacaaa

SEQ ID NO: 256332 - RNA, 19 nt, Human
uaccuuuuauuguucuagg

SEQ ID NO: 256333 - RNA, 21 nt, Human
uaguagagacgggguuucacc

SEQ ID NO: 256334 - RNA, 24 nt, Human
uaguagagacgggguuucaccgug

SEQ ID NO: 256335 - RNA, 26 nt, Human
uaguagagacgggguuucaccguguu

SEQ ID NO: 256336 - RNA, 26 nt, Human
uaguagagacgggguuucaccguugg

SEQ ID NO: 256337 - RNA, 24 nt, Human
ucaccguguuagccaggauggucu

SEQ ID NO: 256338 - RNA, 22 nt, Human
ucacguggcaucucucagggcc

SEQ ID NO: 256339 - RNA, 22 nt, Human
uccagcaccgcccauuuggauc

SEQ ID NO: 256340 - RNA, 22 nt, Human
uccagcaccgcccguccggacu

SEQ ID NO: 256341 - RNA, 23 nt, Human
ucccaaaaugcugggauuacagg

SEQ ID NO: 256342 - RNA, 21 nt, Human
uccucaggaaugaagcuccug

SEQ ID NO: 256343 - RNA, 18 nt, Human
ucucagggccaaaugggg

SEQ ID NO: 256344 - RNA, 24 nt, Human
ucugcccgccuuggccucccaaaa

SEQ ID NO: 256345 - RNA, 23 nt, Human
ugacgaucacguggcaucucuca

SEQ ID NO: 256346 - RNA, 24 nt, Human
ugcugggauuacaggugugagcca

SEQ ID NO: 256347 - RNA, 22 nt, Human
uggcagauaacgaugugucuga

SEQ ID NO: 256348 - RNA, 22 nt, Human
uggcugcucuuaaacauuuguc

SEQ ID NO: 256349 - RNA, 18 nt, Human
ugggauuacaggugugag

SEQ ID NO: 256350 - RNA, 19 nt, Human
ugggauuacaggugugagc

SEQ ID NO: 256351 - RNA, 21 nt, Human
ugggauuacaggugugagcca

SEQ ID NO: 256352 - RNA, 22 nt, Human
ugggauuacaggugugagccac

SEQ ID NO: 256353 - RNA, 22 nt, Human
ugggauuacaggugugagccac

SEQ ID NO: 256354 - RNA, 24 nt, Human
ugggauuacaggugugagccacug

SEQ ID NO: 256355 - RNA, 18 nt, Human
uuaguagagacgggguuu

SEQ ID NO: 256356 - RNA, 22 nt, Human
uuaguagagacgggguuucacc

SEQ ID NO: 256357 - RNA, 24 nt, Human
uuaguagagacgggguuucaccgu

SEQ ID NO: 256358 - RNA, 24 nt, Human
uugcaaacucauucuucaagaggc

SEQ ID NO: 256359 - RNA, 24 nt, Human
uuggacaucagcaaucuaacugcc

SEQ ID NO: 256360 - RNA, 18 nt, Human
uuggccucccaaaaugcu

SEQ ID NO: 256361 - RNA, 19 nt, Human
uuucaccguguuagccagg

SEQ ID NO: 256362 - RNA, 24 nt, Human
uuuuuaguagagacgggguuucac

SEQ ID NO: 256363 - RNA, 24 nt, Human
aaaccugauccacaucccccccca

SEQ ID NO: 256364 - RNA, 18 nt, Human
aaagcauucugcccacca

SEQ ID NO: 256365 - RNA, 23 nt, Human
aacccucuccccuuuccccuccc

SEQ ID NO: 256366 - RNA, 20 nt, Human
aaggagccccagauggccuc

SEQ ID NO: 256367 - RNA, 21 nt, Human
aagucgcgaacuucccccuag

SEQ ID NO: 256368 - RNA, 19 nt, Human
acaaagccuucagaaagaa

SEQ ID NO: 256369 - RNA, 24 nt, Human
acaaagccuucagaaagaaaaaaa

SEQ ID NO: 256370 - RNA, 27 nt, Human
acaaagccuucagaaagaaaaaaaagc

SEQ ID NO: 256371 - RNA, 22 nt, Human
accagaccccacccuagcucua

SEQ ID NO: 256372 - RNA, 19 nt, Human
accuggguuagcuuuuuug

SEQ ID NO: 256373 - RNA, 20 nt, Human
acuccccaccucuccccacu

SEQ ID NO: 256374 - RNA, 23 nt, Human
agaaaaaaaagcauucugcccac

SEQ ID NO: 256375 - RNA, 22 nt, Human
agccaagcuccccagcuccccc

SEQ ID NO: 256376 - RNA, 23 nt, Human
aggaaaugaugggaacccacagc

SEQ ID NO: 256377 - RNA, 22 nt, Human
aggcagggguaaggccacuggu

SEQ ID NO: 256378 - RNA, 19 nt, Human
aggcauuuauugaauuuau

SEQ ID NO: 256379 - RNA, 21 nt, Human
agggccaggaggcacauuccu

SEQ ID NO: 256380 - RNA, 19 nt, Human
aggggccacugcauagaaa

SEQ ID NO: 256381 - RNA, 23 nt, Human
agucagggaaggggaagaagggc

SEQ ID NO: 256382 - RNA, 23 nt, Human
auagaaaucccaggcuccagcua

SEQ ID NO: 256383 - RNA, 21 nt, Human
auuacuccccaccucucccca

SEQ ID NO: 256384 - RNA, 25 nt, Human
caauguacucucccaccauagcacu

SEQ ID NO: 256385 - RNA, 19 nt, Human
cacacacucccaggcacaa

SEQ ID NO: 256386 - RNA, 21 nt, Human
cacacuuccacauaaccccug

SEQ ID NO: 256387 - RNA, 22 nt, Human
caccacacacucccaggcacaa

SEQ ID NO: 256388 - RNA, 18 nt, Human
cacccuaacaccacacac

SEQ ID NO: 256389 - RNA, 21 nt, Human
cacccuagcucuaaagcaggg

SEQ ID NO: 256390 - RNA, 24 nt, Human
cacccuagcucuaaagcagggucc

SEQ ID NO: 256391 - RNA, 21 nt, Human
caccugugugugaccagaccc

SEQ ID NO: 256392 - RNA, 22 nt, Human
cagcaggggugggggaggggac

SEQ ID NO: 256393 - RNA, 21 nt, Human
cagcccacccaccgcacauca

SEQ ID NO: 256394 - RNA, 24 nt, Human
cagcucccccuucccuguuccucc

SEQ ID NO: 256395 - RNA, 18 nt, Human
caggaggcacauuccugc

SEQ ID NO: 256396 - RNA, 28 nt, Human
cauaucguccccagauggggcagcuuua

SEQ ID NO: 256397 - RNA, 24 nt, Human
ccacagucccucacgaugccuccc

SEQ ID NO: 256398 - RNA, 24 nt, Human
ccacauccccccccaucccugcuc

SEQ ID NO: 256399 - RNA, 20 nt, Human
cccaccgcacaucacuggcc

SEQ ID NO: 256400 - RNA, 22 nt, Human
cccaccgcacaucacuggccua

SEQ ID NO: 256401 - RNA, 19 nt, Human
cccagucccuucccuggcc

SEQ ID NO: 256402 - RNA, 24 nt, Human
ccccaagcuaauuccaggccuuca

SEQ ID NO: 256403 - RNA, 27 nt, Human
ccccccaucccugcucauuucccagac

SEQ ID NO: 256404 - RNA, 19 nt, Human
ccccuaaacagcccaccca

SEQ ID NO: 256405 - RNA, 18 nt, Human
ccccuuuccccucccauc

SEQ ID NO: 256406 - RNA, 19 nt, Human
cccuaaacagcccacccac

SEQ ID NO: 256407 - RNA, 18 nt, Human
cccuccuucucuucucuc

SEQ ID NO: 256408 - RNA, 21 nt, Human
ccucccaucucccuccccaua

SEQ ID NO: 256409 - RNA, 18 nt, Human
ccuccuucucuucucucc

SEQ ID NO: 256410 - RNA, 19 nt, Human
ccuggggagggcucaaggg

SEQ ID NO: 256411 - RNA, 19 nt, Human
ccuucccuccuucucuucu

SEQ ID NO: 256412 - RNA, 21 nt, Human
ccuucucuucucuccccuccc

SEQ ID NO: 256413 - RNA, 18 nt, Human
cuaaauccuucccuccuu

SEQ ID NO: 256414 - RNA, 22 nt, Human
cucccaccauagcacuaaccca

SEQ ID NO: 256415 - RNA, 19 nt, Human
cucccaucucccuccccau

SEQ ID NO: 256416 - RNA, 31 nt, Human
cucccaucucccuccccauaucguccccagg

SEQ ID NO: 256417 - RNA, 18 nt, Human
cucuccccucccaguccc

SEQ ID NO: 256418 - RNA, 20 nt, Human
cugcacccuaacaccacaca

SEQ ID NO: 256419 - RNA, 21 nt, Human
cugccugcugccacacacacu

SEQ ID NO: 256420 - RNA, 21 nt, Human
cuucagaaagucgcgaacuuc

SEQ ID NO: 256421 - RNA, 21 nt, Human
gaagcaucgagggccaggagg

SEQ ID NO: 256422 - RNA, 18 nt, Human
gaccuccccggcucagcg

SEQ ID NO: 256423 - RNA, 23 nt, Human
gcccaccacuagcacccugccau

SEQ ID NO: 256424 - RNA, 23 nt, Human
gccccaagcuaauuccaggccuu

SEQ ID NO: 256425 - RNA, 22 nt, Human
ggaagggcugcuuugggggcug

SEQ ID NO: 256426 - RNA, 22 nt, Human
ggaccuggguuagcuuuuuugu

SEQ ID NO: 256427 - RNA, 23 nt, Human
ggcugcuuugggggcuggggugg

SEQ ID NO: 256428 - RNA, 23 nt, Human
gggcugcuuugggggcuggggug

SEQ ID NO: 256429 - RNA, 24 nt, Human
gucccaaauuccuggggagggcuc

SEQ ID NO: 256430 - RNA, 24 nt, Human
gucuguaguguuuguaucauguca

SEQ ID NO: 256431 - RNA, 22 nt, Human
guucagugaagccugccacagu

SEQ ID NO: 256432 - RNA, 19 nt, Human
uaaagcagggucccaaauu

SEQ ID NO: 256433 - RNA, 19 nt, Human
uacaaagccuaagugggua

SEQ ID NO: 256434 - RNA, 20 nt, Human
uagccuggcucagcucagau

SEQ ID NO: 256435 - RNA, 20 nt, Human
uagcucuaaagcaggguccc

SEQ ID NO: 256436 - RNA, 23 nt, Human
uauuacuccccaccucuccccac

SEQ ID NO: 256437 - RNA, 18 nt, Human
ucaacaccugugugugac

SEQ ID NO: 256438 - RNA, 22 nt, Human
ucaacaccugugugugaccaga

SEQ ID NO: 256439 - RNA, 24 nt, Human
ucacuaucacaaagccuucagaaa

SEQ ID NO: 256440 - RNA, 19 nt, Human
ucagaaagaaaaaaaagca

SEQ ID NO: 256441 - RNA, 22 nt, Human
ucaggggccuugaacagggagg

SEQ ID NO: 256442 - RNA, 20 nt, Human
uccacaucugaagcagggga

SEQ ID NO: 256443 - RNA, 22 nt, Human
uccacaucugaagcaggggaca

SEQ ID NO: 256444 - RNA, 22 nt, Human
uccaggccuucaauguacucuc

SEQ ID NO: 256445 - RNA, 22 nt, Human
ucccagacccucagccaagcuc

SEQ ID NO: 256446 - RNA, 20 nt, Human
ucccaggacgauagucccua

SEQ ID NO: 256447 - RNA, 21 nt, Human
uccccaccucuccccacuucc

SEQ ID NO: 256448 - RNA, 22 nt, Human
uccccagcucccccuucccugu

SEQ ID NO: 256449 - RNA, 25 nt, Human
uccccagcucccccuucccuguucc

SEQ ID NO: 256450 - RNA, 18 nt, Human
uccccuaaacagcccacc

SEQ ID NO: 256451 - RNA, 22 nt, Human
uccccucccaucucccucccca

SEQ ID NO: 256452 - RNA, 20 nt, Human
ucccuccccauaucgucccc

SEQ ID NO: 256453 - RNA, 21 nt, Human
ucccuguguuuacuauuacuc

SEQ ID NO: 256454 - RNA, 22 nt, Human
uccugcucccaaaggcaggggu

SEQ ID NO: 256455 - RNA, 21 nt, Human
ucuguaguguuuguaucaugu

SEQ ID NO: 256456 - RNA, 25 nt, Human
ugaagccugccacagucccucacga

SEQ ID NO: 256457 - RNA, 18 nt, Human
ugaaggaaugaggggacc

SEQ ID NO: 256458 - RNA, 27 nt, Human
ugacacaggaaaugaugggaacccaca

SEQ ID NO: 256459 - RNA, 21 nt, Human
ugaccagaccccacccuagcu

SEQ ID NO: 256460 - RNA, 23 nt, Human
ugagaaaaacccucuccccuuuc

SEQ ID NO: 256461 - RNA, 23 nt, Human
ugauccacauccccccccauccc

SEQ ID NO: 256462 - RNA, 19 nt, Human
ugauuugacacacuucccc

SEQ ID NO: 256463 - RNA, 23 nt, Human
ugcugggucauagaagagugugg

SEQ ID NO: 256464 - RNA, 22 nt, Human
ugcuuugggggcugggguggag

SEQ ID NO: 256465 - RNA, 21 nt, Human
uggcacagugagaaaaacccu

SEQ ID NO: 256466 - RNA, 23 nt, Human
uggcacagugagaaaaacccucc

SEQ ID NO: 256467 - RNA, 18 nt, Human
uggccccaagcuaauucc

SEQ ID NO: 256468 - RNA, 19 nt, Human
uggccuaaggggccacugc

SEQ ID NO: 256469 - RNA, 20 nt, Human
ugggaacccacagcaggggu

SEQ ID NO: 256470 - RNA, 24 nt, Human
ugggggaagggcugcuuugggggc

SEQ ID NO: 256471 - RNA, 19 nt, Human
ugggguggagaaggagccc

SEQ ID NO: 256472 - RNA, 23 nt, Human
uguacucucccaccauagcacua

SEQ ID NO: 256473 - RNA, 24 nt, Human
uuccagauccccuaaacagcccac

SEQ ID NO: 256474 - RNA, 22 nt, Human
uuccuggggagggcucaagggu

SEQ ID NO: 256475 - RNA, 22 nt, Human
uuuuuuuuuuuuucugcugguu

SEQ ID NO: 256476 - RNA, 18 nt, Human
uuuuuuuuuuuuuuucug

SEQ ID NO: 256477 - RNA, 22 nt, Human
uuuuuuuuuuuuuuucugcugg

SEQ ID NO: 256478 - RNA, 23 nt, Human
uuuuuuuuuuuuuuucugcuggu

SEQ ID NO: 256479 - RNA, 20 nt, Human
aaucuguccaccuucucccc

SEQ ID NO: 256480 - RNA, 23 nt, Human
acguggucugagugggucuggag

SEQ ID NO: 256481 - RNA, 23 nt, Human
agggccucacuugggcaggaggg

SEQ ID NO: 256482 - RNA, 20 nt, Human
aucuguccaccuucucccca

SEQ ID NO: 256483 - RNA, 24 nt, Human
caggaggggccucccaaaucuguc

SEQ ID NO: 256484 - RNA, 20 nt, Human
cugagugggucuggaggagu

SEQ ID NO: 256485 - RNA, 18 nt, Human
cuuccaagcccagcuggc

SEQ ID NO: 256486 - RNA, 18 nt, Human
ggcaggaggggccuccca

SEQ ID NO: 256487 - RNA, 19 nt, Human
gggcaggaggggccuccca

SEQ ID NO: 256488 - RNA, 25 nt, Human
gggcaggaggggccucccaaaucug

SEQ ID NO: 256489 - RNA, 19 nt, Human
ucccagggccucacuuggg

SEQ ID NO: 256490 - RNA, 19 nt, Human
ucucugcuugucuucuggu

SEQ ID NO: 256491 - RNA, 19 nt, Human
uugcuggaggggaauuugc

SEQ ID NO: 256492 - RNA, 21 nt, Human
aaagcacagagccaaugaggg

SEQ ID NO: 256493 - RNA, 25 nt, Human
acaguauaaaggucuucgguguguc

SEQ ID NO: 256494 - RNA, 20 nt, Human
accugggagagaaaggaggc

SEQ ID NO: 256495 - RNA, 23 nt, Human
acugagucaucuuuuuuccauuc

SEQ ID NO: 256496 - RNA, 23 nt, Human
agaaaggaggcgacgaagcaggg

SEQ ID NO: 256497 - RNA, 19 nt, Human
agagaggaugguggggcag

SEQ ID NO: 256498 - RNA, 20 nt, Human
agagccaaugagggacagga

SEQ ID NO: 256499 - RNA, 22 nt, Human
agcacagagccaaugagggaca

SEQ ID NO: 256500 - RNA, 21 nt, Human
augaaagcaacauaagaaagc

SEQ ID NO: 256501 - RNA, 19 nt, Human
auuccauucaugaaagcaa

SEQ ID NO: 256502 - RNA, 19 nt, Human
cagcaccugggagagaaag

SEQ ID NO: 256503 - RNA, 27 nt, Human
cagcaccugggagagaaaggaggcgac

SEQ ID NO: 256504 - RNA, 19 nt, Human
cagggcgcggggcgcagag

SEQ ID NO: 256505 - RNA, 24 nt, Human
cagugcagggcugcucugucucuc

SEQ ID NO: 256506 - RNA, 22 nt, Human
cauucaugaaagcaacauaaga

SEQ ID NO: 256507 - RNA, 18 nt, Human
ccauguggagggugcucc

SEQ ID NO: 256508 - RNA, 24 nt, Human
ccggacccucuccgggggacgcuc

SEQ ID NO: 256509 - RNA, 19 nt, Human
cuuuuuuccauuccauuca

SEQ ID NO: 256510 - RNA, 18 nt, Human
gagggaaaacagugcagg

SEQ ID NO: 256511 - RNA, 20 nt, Human
gauaaugggggcaagcaggg

SEQ ID NO: 256512 - RNA, 19 nt, Human
gcucugucucucuguccug

SEQ ID NO: 256513 - RNA, 19 nt, Human
ggaaaacagugcagggcug

SEQ ID NO: 256514 - RNA, 22 nt, Human
ggcaaggcuggauaaugggggc

SEQ ID NO: 256515 - RNA, 21 nt, Human
uaaaagaucacaguauaaagg

SEQ ID NO: 256516 - RNA, 24 nt, Human
uaacugagucaucuuuuuuccauu

SEQ ID NO: 256517 - RNA, 18 nt, Human
uaaugggggcaagcaggc

SEQ ID NO: 256518 - RNA, 21 nt, Human
ucaguaaacccaggugagcag

SEQ ID NO: 256519 - RNA, 21 nt, Human
ucuccgggggacgcucagucc

SEQ ID NO: 256520 - RNA, 18 nt, Human
ugaaagggguaaaagauc

SEQ ID NO: 256521 - RNA, 24 nt, Human
uggagggaaaacagugcagggcug

SEQ ID NO: 256522 - RNA, 24 nt, Human
ugggacggugacuguguauagugg

SEQ ID NO: 256523 - RNA, 23 nt, Human
uguggagggugcuccuucuuguu

SEQ ID NO: 256524 - RNA, 22 nt, Human
ugugguggagggaaaacagugc

SEQ ID NO: 256525 - RNA, 23 nt, Human
uucgguguguccuucaaagauuu

SEQ ID NO: 256526 - RNA, 22 nt, Human
uuuuccauuccauucaugaaag

SEQ ID NO: 256527 - RNA, 20 nt, Human
uuuuuuuuuuuuuuuuuggu

SEQ ID NO: 256528 - RNA, 28 nt, Human
uuuuuuuuuuuuuuuuuuuuuuuggggg

SEQ ID NO: 256529 - RNA, 23 nt, Human
aaaagaagaaaaaaaaaucagga

SEQ ID NO: 256530 - RNA, 21 nt, Human
aaaauggaaaguucucaagug

SEQ ID NO: 256531 - RNA, 19 nt, Human
aaacauaacuccccaaggc

SEQ ID NO: 256532 - RNA, 19 nt, Human
aaaccaggcaaagcuagug

SEQ ID NO: 256533 - RNA, 23 nt, Human
aaaccugaaaagacaggagaugc

SEQ ID NO: 256534 - RNA, 21 nt, Human
aaagacaaaaccaggcaaagc

SEQ ID NO: 256535 - RNA, 23 nt, Human
aaauucccagcccccaaaucagc

SEQ ID NO: 256536 - RNA, 21 nt, Human
aacaagaaugauaaaugcuuu

SEQ ID NO: 256537 - RNA, 22 nt, Human
aacaaggacucuuuucucugga

SEQ ID NO: 256538 - RNA, 22 nt, Human
aacaggaaaagagaggaacaga

SEQ ID NO: 256539 - RNA, 21 nt, Human
aacccuuugugucucagcuuc

SEQ ID NO: 256540 - RNA, 20 nt, Human
aacuauguaagcuccaaggc

SEQ ID NO: 256541 - RNA, 23 nt, Human
aacuauguaagcuccaaggcccc

SEQ ID NO: 256542 - RNA, 24 nt, Human
aacuauguaagcuccaaggcccca

SEQ ID NO: 256543 - RNA, 18 nt, Human
aagaagccaggcacaaaa

SEQ ID NO: 256544 - RNA, 19 nt, Human
aagaagccaggcacaaaag

SEQ ID NO: 256545 - RNA, 20 nt, Human
aagacaaaaccaggcaaagc

SEQ ID NO: 256546 - RNA, 21 nt, Human
aagaguaccauguaaaauuca

SEQ ID NO: 256547 - RNA, 22 nt, Human
aagcagguacaacaaaaaacaa

SEQ ID NO: 256548 - RNA, 22 nt, Human
aagcugaaacuucaauauucau

SEQ ID NO: 256549 - RNA, 21 nt, Human
aaggacuguaaauguugcaaa

SEQ ID NO: 256550 - RNA, 19 nt, Human
aaguuugugcuuaaaucuu

SEQ ID NO: 256551 - RNA, 23 nt, Human
acaaggacucuuuucucuggaca

SEQ ID NO: 256552 - RNA, 18 nt, Human
acagaaugaauaacugau

SEQ ID NO: 256553 - RNA, 18 nt, Human
acagaggggauccaggca

SEQ ID NO: 256554 - RNA, 24 nt, Human
acaguaacagcagcacagacccaa

SEQ ID NO: 256555 - RNA, 26 nt, Human
acagugaccccuagggcccauuuucu

SEQ ID NO: 256556 - RNA, 18 nt, Human
acccccuuccucccucca

SEQ ID NO: 256557 - RNA, 23 nt, Human
accucaaagguuuugcauuguuu

SEQ ID NO: 256558 - RNA, 19 nt, Human
acuauguaagcuccaaggc

SEQ ID NO: 256559 - RNA, 20 nt, Human
agaagaaaaaaaaaucagug

SEQ ID NO: 256560 - RNA, 21 nt, Human
agaauuuuggaagugcuccuc

SEQ ID NO: 256561 - RNA, 20 nt, Human
agacacuuaaaugggaguuu

SEQ ID NO: 256562 - RNA, 18 nt, Human
agacagauucaugggaag

SEQ ID NO: 256563 - RNA, 22 nt, Human
agacagauucaugggaaggcag

SEQ ID NO: 256564 - RNA, 19 nt, Human
agagaaagaagccaggcac

SEQ ID NO: 256565 - RNA, 22 nt, Human
agagcccagccaagcgccucuc

SEQ ID NO: 256566 - RNA, 18 nt, Human
agaggcccaaaggaauau

SEQ ID NO: 256567 - RNA, 21 nt, Human
agaguuguuccuccauaggga

SEQ ID NO: 256568 - RNA, 24 nt, Human
agaguuguuccuccauagggaugg

SEQ ID NO: 256569 - RNA, 18 nt, Human
agcacagacccaaacuug

SEQ ID NO: 256570 - RNA, 18 nt, Human
agcagcacagacccaaac

SEQ ID NO: 256571 - RNA, 21 nt, Human
agcugaaacuucaauauucau

SEQ ID NO: 256572 - RNA, 20 nt, Human
aggaaacuuugagaauagaa

SEQ ID NO: 256573 - RNA, 19 nt, Human
agggaaauauaaguauacu

SEQ ID NO: 256574 - RNA, 22 nt, Human
aggguauccacaguuggcuuga

SEQ ID NO: 256575 - RNA, 24 nt, Human
aggguauccacaguuggcuugaaa

SEQ ID NO: 256576 - RNA, 21 nt, Human
auaaaucucugaaaaauacca

SEQ ID NO: 256577 - RNA, 24 nt, Human
auagagucuuucuucuuuccaaaa

SEQ ID NO: 256578 - RNA, 23 nt, Human
auauaaaucucugaaaaauacca

SEQ ID NO: 256579 - RNA, 21 nt, Human
aucaaaauauuuccaucugau

SEQ ID NO: 256580 - RNA, 24 nt, Human
aucagaaggcucuauagaacucaa

SEQ ID NO: 256581 - RNA, 24 nt, Human
aucuugcaccuacaauccacucga

SEQ ID NO: 256582 - RNA, 20 nt, Human
auuuguacuagucacucuuc

SEQ ID NO: 256583 - RNA, 18 nt, Human
auuuuguauuuuugagac

SEQ ID NO: 256584 - RNA, 22 nt, Human
caaaauggaaaguucucaagug

SEQ ID NO: 256585 - RNA, 25 nt, Human
caaaccugaaaagacaggagaugca

SEQ ID NO: 256586 - RNA, 25 nt, Human
caaaccuugcuuuuuaaaaagaaga

SEQ ID NO: 256587 - RNA, 19 nt, Human
caaaucagccccggugcaa

SEQ ID NO: 256588 - RNA, 23 nt, Human
caacaaaaaacaauuuuagacau

SEQ ID NO: 256589 - RNA, 23 nt, Human
caacaagaaugauaaaugcuuuu

SEQ ID NO: 256590 - RNA, 23 nt, Human
caacaggaaaagagaggaacaga

SEQ ID NO: 256591 - RNA, 23 nt, Human
caacccuuugugucucagcuucu

SEQ ID NO: 256592 - RNA, 22 nt, Human
caagaaugauaaaugcuuuuga

SEQ ID NO: 256593 - RNA, 25 nt, Human
caagcgccucucaguccgugcaucc

SEQ ID NO: 256594 - RNA, 20 nt, Human
caaggcagaggccgcaggga

SEQ ID NO: 256595 - RNA, 22 nt, Human
caaggcagaggccgcagggaac

SEQ ID NO: 256596 - RNA, 21 nt, Human
cacaauuucaauuuauuauca

SEQ ID NO: 256597 - RNA, 21 nt, Human
cacccuuucuaggacaaccua

SEQ ID NO: 256598 - RNA, 22 nt, Human
caccuaaaauccaaaaugaaaa

SEQ ID NO: 256599 - RNA, 20 nt, Human
caccuaaaauccugacguga

SEQ ID NO: 256600 - RNA, 21 nt, Human
cagacacuuaaaugggaguuu

SEQ ID NO: 256601 - RNA, 20 nt, Human
cagagcuacauaggugcaga

SEQ ID NO: 256602 - RNA, 19 nt, Human
cagaggaaucucacaaaug

SEQ ID NO: 256603 - RNA, 20 nt, Human
cagaggaaucucacaaaugu

SEQ ID NO: 256604 - RNA, 22 nt, Human
cagaucccgcgccaggaguugg

SEQ ID NO: 256605 - RNA, 22 nt, Human
cagcacaauacagaggaaucuc

SEQ ID NO: 256606 - RNA, 20 nt, Human
cagcagaauggcaaauuccc

SEQ ID NO: 256607 - RNA, 22 nt, Human
cagcagaauggcaaauucccag

SEQ ID NO: 256608 - RNA, 20 nt, Human
cagcagaucccgcgccagga

SEQ ID NO: 256609 - RNA, 20 nt, Human
cagcccccaaaucagccccu

SEQ ID NO: 256610 - RNA, 23 nt, Human
caggcaaagcuagugaaugauau

SEQ ID NO: 256611 - RNA, 18 nt, Human
cagggaacuaauacucau

SEQ ID NO: 256612 - RNA, 20 nt, Human
caggugcuggcuacagggcc

SEQ ID NO: 256613 - RNA, 21 nt, Human
cagucaaagcagguacaacaa

SEQ ID NO: 256614 - RNA, 22 nt, Human
caguccgugcauccgcccaagg

SEQ ID NO: 256615 - RNA, 18 nt, Human
caguggcgggcugagagc

SEQ ID NO: 256616 - RNA, 20 nt, Human
cagugucuguacagcagaau

SEQ ID NO: 256617 - RNA, 23 nt, Human
cauaaaagacaaaaccaggcaaa

SEQ ID NO: 256618 - RNA, 25 nt, Human
caucagaaggcucuauagaacucaa

SEQ ID NO: 256619 - RNA, 21 nt, Human
caucagcaaacugguagacca

SEQ ID NO: 256620 - RNA, 24 nt, Human
caucagcucccaacccuuuguguc

SEQ ID NO: 256621 - RNA, 26 nt, Human
caucuugcaccuacaauccacucgaa

SEQ ID NO: 256622 - RNA, 26 nt, Human
ccaaggcagaggccgcagggaacuau

SEQ ID NO: 256623 - RNA, 23 nt, Human
ccacugauucauaacugggagac

SEQ ID NO: 256624 - RNA, 22 nt, Human
cccaaaggaauauugcaaauac

SEQ ID NO: 256625 - RNA, 22 nt, Human
cccaaaucagccccggugcaau

SEQ ID NO: 256626 - RNA, 22 nt, Human
cccaaggucacccugucaggag

SEQ ID NO: 256627 - RNA, 20 nt, Human
cccucagcagaucccgcgcc

SEQ ID NO: 256628 - RNA, 24 nt, Human
cccuccacacccuuucuaggacaa

SEQ ID NO: 256629 - RNA, 21 nt, Human
ccuacaauccacucgaacacu

SEQ ID NO: 256630 - RNA, 19 nt, Human
ccuuccucccuccacaccc

SEQ ID NO: 256631 - RNA, 21 nt, Human
ccuuuugauuagaaauccugg

SEQ ID NO: 256632 - RNA, 19 nt, Human
cgggagaaguuggaggcug

SEQ ID NO: 256633 - RNA, 24 nt, Human
cggguauugucgagagcuucuucc

SEQ ID NO: 256634 - RNA, 21 nt, Human
cuauagugucaccuacucuuc

SEQ ID NO: 256635 - RNA, 20 nt, Human
cuaucugcauaaaagacaaa

SEQ ID NO: 256636 - RNA, 20 nt, Human
cucagcaucagucaaagcag

SEQ ID NO: 256637 - RNA, 21 nt, Human
cucagcaucagucaaagcagg

SEQ ID NO: 256638 - RNA, 27 nt, Human
cucgguaacaaaacauaacuccccaag

SEQ ID NO: 256639 - RNA, 23 nt, Human
cugcaaugagaaugaaaagaucc

SEQ ID NO: 256640 - RNA, 23 nt, Human
cugcuccagccugcucucgguca

SEQ ID NO: 256641 - RNA, 20 nt, Human
cuuuugauuagaaauccugg

SEQ ID NO: 256642 - RNA, 22 nt, Human
cuuuuuaaaaagaagaaaaaaa

SEQ ID NO: 256643 - RNA, 23 nt, Human
cuuuuuaaaaagaagaaaaaaaa

SEQ ID NO: 256644 - RNA, 19 nt, Human
gaaaagacaggagaugcag

SEQ ID NO: 256645 - RNA, 20 nt, Human
gaaaauugcaggaagccuga

SEQ ID NO: 256646 - RNA, 19 nt, Human
gaaaguccaauuugaaaac

SEQ ID NO: 256647 - RNA, 23 nt, Human
gaacaaauuguaauaagucccac

SEQ ID NO: 256648 - RNA, 20 nt, Human
gaacucagccauaguagaac

SEQ ID NO: 256649 - RNA, 22 nt, Human
gaaggacuguaaauguugcaaa

SEQ ID NO: 256650 - RNA, 19 nt, Human
gacccccuuccucccucca

SEQ ID NO: 256651 - RNA, 20 nt, Human
gaucccgcgccaggaguugg

SEQ ID NO: 256652 - RNA, 18 nt, Human
gcaauuuauguacauaug

SEQ ID NO: 256653 - RNA, 25 nt, Human
gcagagcuacauaggugcagauuug

SEQ ID NO: 256654 - RNA, 24 nt, Human
gcucuguuucuuacaggugcuggc

SEQ ID NO: 256655 - RNA, 21 nt, Human
ggaguugggcggcugcuccag

SEQ ID NO: 256656 - RNA, 22 nt, Human
ggaugaacaaauuguaauaagu

SEQ ID NO: 256657 - RNA, 23 nt, Human
ggccggguggcaguggcgggcug

SEQ ID NO: 256658 - RNA, 18 nt, Human
gggagaaguuggaggcug

SEQ ID NO: 256659 - RNA, 22 nt, Human
gggauagggaggcauugcuauu

SEQ ID NO: 256660 - RNA, 22 nt, Human
gggcuggaacaaggacucuuuc

SEQ ID NO: 256661 - RNA, 22 nt, Human
ggugcuuuuagagcgcugguac

SEQ ID NO: 256662 - RNA, 26 nt, Human
guagcgcggaucucgguaacaaaaca

SEQ ID NO: 256663 - RNA, 20 nt, Human
gugcccaucaacaauaggau

SEQ ID NO: 256664 - RNA, 22 nt, Human
guugggcggcugcuccagccug

SEQ ID NO: 256665 - RNA, 18 nt, Human
uaaaagacaaaaccaggc

SEQ ID NO: 256666 - RNA, 19 nt, Human
uaaaauaaaugaucacaga

SEQ ID NO: 256667 - RNA, 21 nt, Human
uaacaaaacauaacuccccaa

SEQ ID NO: 256668 - RNA, 18 nt, Human
uaacagcagcacagaccu

SEQ ID NO: 256669 - RNA, 24 nt, Human
uaacaguaacagcagcacagaccu

SEQ ID NO: 256670 - RNA, 19 nt, Human
uaagucccacaauagaaca

SEQ ID NO: 256671 - RNA, 18 nt, Human
uacacagugagaaaugau

SEQ ID NO: 256672 - RNA, 18 nt, Human
uacuuguaacggugguug

SEQ ID NO: 256673 - RNA, 24 nt, Human
uaggaugaacaaauuguaauaagu

SEQ ID NO: 256674 - RNA, 24 nt, Human
uaguugcacuauuuguaauagcgc

SEQ ID NO: 256675 - RNA, 20 nt, Human
uauagugucaccuacucuuc

SEQ ID NO: 256676 - RNA, 25 nt, Human
uauaucucuagacaacuguccaauc

SEQ ID NO: 256677 - RNA, 25 nt, Human
uaucaagcaguaaacaguucuuuuc

SEQ ID NO: 256678 - RNA, 21 nt, Human
uauugcaaauacccaagguca

SEQ ID NO: 256679 - RNA, 19 nt, Human
uauuuuguauuuuugagac

SEQ ID NO: 256680 - RNA, 23 nt, Human
ucaaugcuuauaauaauuuuugg

SEQ ID NO: 256681 - RNA, 18 nt, Human
ucaguccgugcauccgcc

SEQ ID NO: 256682 - RNA, 24 nt, Human
uccacaaucagcacaauacagagg

SEQ ID NO: 256683 - RNA, 19 nt, Human
ucccauuucuauucagaaa

SEQ ID NO: 256684 - RNA, 19 nt, Human
uccuccauagggaugggag

SEQ ID NO: 256685 - RNA, 26 nt, Human
ucgguaacaaaacauaacuccccaag

SEQ ID NO: 256686 - RNA, 24 nt, Human
ucugcaaugagaaugaaaagaucc

SEQ ID NO: 256687 - RNA, 18 nt, Human
ugaaaagacaggagaugc

SEQ ID NO: 256688 - RNA, 21 nt, Human
ugaaaagacaggagaugcaga

SEQ ID NO: 256689 - RNA, 22 nt, Human
ugaaaagauccacaaucagcac

SEQ ID NO: 256690 - RNA, 28 nt, Human
ugaaaagauccacaaucagcacaauaca

SEQ ID NO: 256691 - RNA, 21 nt, Human
ugaagagccaaccugacguga

SEQ ID NO: 256692 - RNA, 22 nt, Human
ugaaugauauuagaagucagga

SEQ ID NO: 256693 - RNA, 20 nt, Human
ugacaugauggaaauaaaau

SEQ ID NO: 256694 - RNA, 19 nt, Human
ugaccccucagcagauccc

SEQ ID NO: 256695 - RNA, 20 nt, Human
ugaccccucagcagaucccu

SEQ ID NO: 256696 - RNA, 21 nt, Human
ugacuuauaauucuagaaggu

SEQ ID NO: 256697 - RNA, 19 nt, Human
ugacuuccagagcccuccu

SEQ ID NO: 256698 - RNA, 20 nt, Human
ugacuuccagagcccuccuc

SEQ ID NO: 256699 - RNA, 23 nt, Human
ugagaaccaccaauauaaucuaa

SEQ ID NO: 256700 - RNA, 24 nt, Human
ugagaaccaccaauauaaucuaaa

SEQ ID NO: 256701 - RNA, 23 nt, Human
ugagaaugaaaagauccacaauc

SEQ ID NO: 256702 - RNA, 18 nt, Human
ugagagcuccagcugugg

SEQ ID NO: 256703 - RNA, 20 nt, Human
ugaguuucaucagcucccaa

SEQ ID NO: 256704 - RNA, 22 nt, Human
ugcaaugagaaugaaaagaucc

SEQ ID NO: 256705 - RNA, 20 nt, Human
ugcuuuuagagcgcugguac

SEQ ID NO: 256706 - RNA, 23 nt, Human
uggaacaaggacucuuuucucug

SEQ ID NO: 256707 - RNA, 21 nt, Human
uggcaacaagaaugauaaaug

SEQ ID NO: 256708 - RNA, 21 nt, Human
uggcaagucuagccaagggcu

SEQ ID NO: 256709 - RNA, 23 nt, Human
uggcaguggcgggcugagagccc

SEQ ID NO: 256710 - RNA, 24 nt, Human
uggcuacagggccauuguucaguu

SEQ ID NO: 256711 - RNA, 18 nt, Human
ugggagacagauucaugg

SEQ ID NO: 256712 - RNA, 18 nt, Human
ugggcauuuuucaagaga

SEQ ID NO: 256713 - RNA, 22 nt, Human
ugguuaacaguaacagcagcac

SEQ ID NO: 256714 - RNA, 19 nt, Human
ugguugugauaaaggagga

SEQ ID NO: 256715 - RNA, 21 nt, Human
ugugaguuucaucagcuccca

SEQ ID NO: 256716 - RNA, 28 nt, Human
uguguauaagaauucuuuggaaggauuu

SEQ ID NO: 256717 - RNA, 20 nt, Human
uguucaguuaaaguuaaguu

SEQ ID NO: 256718 - RNA, 19 nt, Human
uguuuuaaaaagcuaacag

SEQ ID NO: 256719 - RNA, 24 nt, Human
uucaauuuauuaucaaaauauuuc

SEQ ID NO: 256720 - RNA, 23 nt, Human
uucacaauuucaauuuauuauca

SEQ ID NO: 256721 - RNA, 18 nt, Human
uuccaaaauaacaaaugu

SEQ ID NO: 256722 - RNA, 22 nt, Human
uucccagcccccaaaucagccc

SEQ ID NO: 256723 - RNA, 21 nt, Human
uucuaaaguuagacaguuguc

SEQ ID NO: 256724 - RNA, 20 nt, Human
uuggaaggauuugaagaaau

SEQ ID NO: 256725 - RNA, 21 nt, Human
uugugucucagcuucuaaacu

SEQ ID NO: 256726 - RNA, 19 nt, Human
uuugagagcuccagcugug

SEQ ID NO: 256727 - RNA, 19 nt, Human
uuuguacuagucacucuuc

SEQ ID NO: 256728 - RNA, 24 nt, Human
uuugugacuuauaauucuagaagg

SEQ ID NO: 256729 - RNA, 24 nt, Human
uuugugaguuucaucagcucccaa

SEQ ID NO: 256730 - RNA, 21 nt, Human
uuuguuaggaaaaauaagaau

SEQ ID NO: 256731 - RNA, 19 nt, Human
uuuucaguuuauccugccc

SEQ ID NO: 256732 - RNA, 20 nt, Human
uuuuuuuuuuaaaggcaaau

SEQ ID NO: 256733 - RNA, 24 nt, Human
aaacaccuucuuuggacucacacc

SEQ ID NO: 256734 - RNA, 21 nt, Human
aacaagguugacuuuauucca

SEQ ID NO: 256735 - RNA, 22 nt, Human
acaaaaagggcuacauucuaaa

SEQ ID NO: 256736 - RNA, 22 nt, Human
accauguguuuuccauucaaau

SEQ ID NO: 256737 - RNA, 28 nt, Human
auuauaucaguacaaaaagggcuacauu

SEQ ID NO: 256738 - RNA, 27 nt, Human
caaaaagggcuacauucuaaauaguag

SEQ ID NO: 256739 - RNA, 22 nt, Human
cuggaaaagaucuuugcaacuc

SEQ ID NO: 256740 - RNA, 20 nt, Human
gaaaacaccuucuuuggacu

SEQ ID NO: 256741 - RNA, 21 nt, Human
gauuauauucuguguaucagu

SEQ ID NO: 256742 - RNA, 21 nt, Human
uaugaauccauaagccacaaa

SEQ ID NO: 256743 - RNA, 18 nt, Human
ucagugcaagguaaguga

SEQ ID NO: 256744 - RNA, 22 nt, Human
uccauaagccacaaacuugacu

SEQ ID NO: 256745 - RNA, 24 nt, Human
ucuccugucucuuucugucuugaa

SEQ ID NO: 256746 - RNA, 19 nt, Human
ucuugcuacuccaauaucc

SEQ ID NO: 256747 - RNA, 21 nt, Human
ucuuuggacucacaccaugug

SEQ ID NO: 256748 - RNA, 20 nt, Human
ugacugcacauguguucuug

SEQ ID NO: 256749 - RNA, 24 nt, Human
ugagcugcuuuuccuccggcaaaa

SEQ ID NO: 256750 - RNA, 22 nt, Human
ugauggcuucccagccucuugc

SEQ ID NO: 256751 - RNA, 23 nt, Human
ugauggcuucccagccucuugcu

SEQ ID NO: 256752 - RNA, 19 nt, Human
uggaacuaaauuauaucag

SEQ ID NO: 256753 - RNA, 23 nt, Human
uuguggaacuaaauuauaucagu

SEQ ID NO: 256754 - RNA, 22 nt, Human
uuucucagugcaagguaaguga

SEQ ID NO: 256755 - RNA, 25 nt, Human
aaaacacccauaucugucuuccccc

SEQ ID NO: 256756 - RNA, 24 nt, Human
aaauacauucucucaccuauugca

SEQ ID NO: 256757 - RNA, 22 nt, Human
acccauaucugucuucccccua

SEQ ID NO: 256758 - RNA, 23 nt, Human
agucacagaacaugcaggaaaaa

SEQ ID NO: 256759 - RNA, 19 nt, Human
cacccauaucugucuuccc

SEQ ID NO: 256760 - RNA, 23 nt, Human
caggcccaaaauaaaacuuuuua

SEQ ID NO: 256761 - RNA, 22 nt, Human
caugcaggaaaaauuaaccauu

SEQ ID NO: 256762 - RNA, 25 nt, Human
ccaaaauaaaacuuuuuauugagga

SEQ ID NO: 256763 - RNA, 19 nt, Human
gaaaauacauucucucacc

SEQ ID NO: 256764 - RNA, 24 nt, Human
uaaaaacacccauaucugucuucc

SEQ ID NO: 256765 - RNA, 18 nt, Human
ucaaaagcaagugaagaa

SEQ ID NO: 256766 - RNA, 25 nt, Human
ugaaaauacauucucucaccuauug

SEQ ID NO: 256767 - RNA, 19 nt, Human
ugcaaggcucaucuucuuc

SEQ ID NO: 256768 - RNA, 20 nt, Human
aaaaaaaaaaaagaagaaga

SEQ ID NO: 256769 - RNA, 21 nt, Human
aaaaaaaaaagaagaagaagg

SEQ ID NO: 256770 - RNA, 26 nt, Human
aacuuuuuggccuggauucuggagaa

SEQ ID NO: 256771 - RNA, 19 nt, Human
aagccucccugcccagucu

SEQ ID NO: 256772 - RNA, 19 nt, Human
aagccucccugcccagucu

SEQ ID NO: 256773 - RNA, 19 nt, Human
aaggaaccucacaacaggg

SEQ ID NO: 256774 - RNA, 19 nt, Human
acacauuuacaauggcuuu

SEQ ID NO: 256775 - RNA, 24 nt, Human
acagaugcaggcaccuaccaagac

SEQ ID NO: 256776 - RNA, 22 nt, Human
accccaccccaucccccugcag

SEQ ID NO: 256777 - RNA, 18 nt, Human
acccugagggacagggau

SEQ ID NO: 256778 - RNA, 21 nt, Human
acccugagggacagggaugag

SEQ ID NO: 256779 - RNA, 20 nt, Human
acuccaguucccccaguccu

SEQ ID NO: 256780 - RNA, 23 nt, Human
agaugcaggcaccuaccaagacc

SEQ ID NO: 256781 - RNA, 20 nt, Human
agcgggucccaagacugccc

SEQ ID NO: 256782 - RNA, 23 nt, Human
aggccauggggccccagcacccu

SEQ ID NO: 256783 - RNA, 21 nt, Human
agggcugaaggccauggggcc

SEQ ID NO: 256784 - RNA, 18 nt, Human
aguucccccaguccugcc

SEQ ID NO: 256785 - RNA, 21 nt, Human
aucccccugcaggagacaugg

SEQ ID NO: 256786 - RNA, 21 nt, Human
caccccaucccccugcaggag

SEQ ID NO: 256787 - RNA, 23 nt, Human
cacccuugcuucagugccagccc

SEQ ID NO: 256788 - RNA, 19 nt, Human
cacuccaguucccccaguc

SEQ ID NO: 256789 - RNA, 22 nt, Human
cagaaggcagacagaugcaggc

SEQ ID NO: 256790 - RNA, 20 nt, Human
cagccccuggaaggaaccuc

SEQ ID NO: 256791 - RNA, 25 nt, Human
cagccuccagggccuggggucuccu

SEQ ID NO: 256792 - RNA, 25 nt, Human
caggcaccuaccaagaccugaccuc

SEQ ID NO: 256793 - RNA, 24 nt, Human
caugaagaauaccccuccccauuu

SEQ ID NO: 256794 - RNA, 21 nt, Human
cauggugguuguaccccaccc

SEQ ID NO: 256795 - RNA, 24 nt, Human
ccaaagccucccugcccagucuga

SEQ ID NO: 256796 - RNA, 22 nt, Human
ccaagaccugaccucaggaagu

SEQ ID NO: 256797 - RNA, 19 nt, Human
ccagcacccuugcuucagu

SEQ ID NO: 256798 - RNA, 24 nt, Human
ccagccccuggaaggaaccucaca

SEQ ID NO: 256799 - RNA, 18 nt, Human
ccagggccuggggucucc

SEQ ID NO: 256800 - RNA, 23 nt, Human
cccacagccacaaagauggccau

SEQ ID NO: 256801 - RNA, 21 nt, Human
ccccaccccaucccccugcag

SEQ ID NO: 256802 - RNA, 23 nt, Human
ccccaccccaucccccugcagga

SEQ ID NO: 256803 - RNA, 24 nt, Human
ccccagcacccuugcuucagugcc

SEQ ID NO: 256804 - RNA, 21 nt, Human
cccccugcaggagacaugggc

SEQ ID NO: 256805 - RNA, 22 nt, Human
ccgccccggggcugcugggcuu

SEQ ID NO: 256806 - RNA, 18 nt, Human
cguggcccucccggcagu

SEQ ID NO: 256807 - RNA, 18 nt, Human
cugcguggcccucccggc

SEQ ID NO: 256808 - RNA, 21 nt, Human
cuuaagucaugccaaagccuu

SEQ ID NO: 256809 - RNA, 20 nt, Human
cuuuuuggccuggauucugg

SEQ ID NO: 256810 - RNA, 25 nt, Human
gaccacgaccugcguggcccucccg

SEQ ID NO: 256811 - RNA, 18 nt, Human
gauucuggagaacagauu

SEQ ID NO: 256812 - RNA, 25 nt, Human
gcagccuccagggccuggggucucc

SEQ ID NO: 256813 - RNA, 18 nt, Human
gccccggggcugcugggc

SEQ ID NO: 256814 - RNA, 18 nt, Human
gcucagccagggcugaag

SEQ ID NO: 256815 - RNA, 19 nt, Human
ggccuggauucuggagaac

SEQ ID NO: 256816 - RNA, 20 nt, Human
ggcugaaggccauggggccc

SEQ ID NO: 256817 - RNA, 23 nt, Human
gggacagggaugagacagggaag

SEQ ID NO: 256818 - RNA, 20 nt, Human
uacacacauuuacaauggcu

SEQ ID NO: 256819 - RNA, 20 nt, Human
uacccugagggacagggauu

SEQ ID NO: 256820 - RNA, 21 nt, Human
ucagucccaugccuggugccc

SEQ ID NO: 256821 - RNA, 19 nt, Human
ucaguuuaaaaaaaaaaaa

SEQ ID NO: 256822 - RNA, 26 nt, Human
ucaguuuaaaaaaaaaaaagaagaaa

SEQ ID NO: 256823 - RNA, 28 nt, Human
ucaguuuaaaaaaaaaaaagaagaagaa

SEQ ID NO: 256824 - RNA, 22 nt, Human
ucaugccaaagccucccugccc

SEQ ID NO: 256825 - RNA, 18 nt, Human
uccagggccuggggucuc

SEQ ID NO: 256826 - RNA, 22 nt, Human
ucccccaguccugccauggugc

SEQ ID NO: 256827 - RNA, 18 nt, Human
ugaagaauaccccucccc

SEQ ID NO: 256828 - RNA, 20 nt, Human
ugagggcauccaagccaugg

SEQ ID NO: 256829 - RNA, 19 nt, Human
ugcaggcaccuaccaagac

SEQ ID NO: 256830 - RNA, 21 nt, Human
ugggacaggauugagguaugu

SEQ ID NO: 256831 - RNA, 22 nt, Human
ugggacaggauugagguauguu

SEQ ID NO: 256832 - RNA, 23 nt, Human
uuaaaaaaaaaaaagaagaagaa

SEQ ID NO: 256833 - RNA, 23 nt, Human
uuaaaaaaaaaaaagaagaagaa

SEQ ID NO: 256834 - RNA, 22 nt, Human
uugcagccuccagggccugggg

SEQ ID NO: 256835 - RNA, 22 nt, Human
uuggaggauagcagugcugcga

SEQ ID NO: 256836 - RNA, 22 nt, Human
aagcaagaauggacaauuagag

SEQ ID NO: 256837 - RNA, 20 nt, Human
acagagcaugcuucaaauag

SEQ ID NO: 256838 - RNA, 21 nt, Human
caaauaugcaauaaauacuua

SEQ ID NO: 256839 - RNA, 19 nt, Human
gcugaagugaacuaacaaa

SEQ ID NO: 256840 - RNA, 19 nt, Human
uagaauuaucuugcuuuga

SEQ ID NO: 256841 - RNA, 24 nt, Human
uagcaaauaugcaauaaauacuua

SEQ ID NO: 256842 - RNA, 29 nt, Human
ugaacuaacaaaaaccauuaagggaggcc

SEQ ID NO: 256843 - RNA, 22 nt, Human
ugaagugaacuaacaaaaacca

SEQ ID NO: 256844 - RNA, 25 nt, Human
uugagccaaaauauauauacuuaau

SEQ ID NO: 256845 - RNA, 21 nt, Human
aaaagugaaaauuaaacagaa

SEQ ID NO: 256846 - RNA, 23 nt, Human
aaagacaucauccuucuuuaucc

SEQ ID NO: 256847 - RNA, 21 nt, Human
aaauagccuauauauccaaga

SEQ ID NO: 256848 - RNA, 23 nt, Human
aagauauauuuuauuucaugcua

SEQ ID NO: 256849 - RNA, 18 nt, Human
aagucuuuagaaaauagc

SEQ ID NO: 256850 - RNA, 18 nt, Human
aagugccaagcacccucc

SEQ ID NO: 256851 - RNA, 22 nt, Human
acagcaacaagaaucagaugcu

SEQ ID NO: 256852 - RNA, 23 nt, Human
acugcucuuuugucuccugucuu

SEQ ID NO: 256853 - RNA, 19 nt, Human
aguaagaaugauuuauuca

SEQ ID NO: 256854 - RNA, 22 nt, Human
aguauuaccccaaaugcucuuc

SEQ ID NO: 256855 - RNA, 24 nt, Human
augaaaaagggaugccauggccuu

SEQ ID NO: 256856 - RNA, 20 nt, Human
augcaaaggaauauuugucu

SEQ ID NO: 256857 - RNA, 21 nt, Human
augcaaaggaauauuugucuu

SEQ ID NO: 256858 - RNA, 18 nt, Human
caaagauaacuuacugaa

SEQ ID NO: 256859 - RNA, 21 nt, Human
caagaaucagaugcucuuuag

SEQ ID NO: 256860 - RNA, 22 nt, Human
caagcacccuccccaaguauca

SEQ ID NO: 256861 - RNA, 23 nt, Human
cacagaaccaagcuuucuccuga

SEQ ID NO: 256862 - RNA, 24 nt, Human
cagagaaaaaaaggcauccuucca

SEQ ID NO: 256863 - RNA, 21 nt, Human
ccacugcucuuuugucuccug

SEQ ID NO: 256864 - RNA, 19 nt, Human
cccaaauuuccauuuucau

SEQ ID NO: 256865 - RNA, 21 nt, Human
ccuaccccgcacuucuggaag

SEQ ID NO: 256866 - RNA, 19 nt, Human
gaaaauuauuuauuuggaa

SEQ ID NO: 256867 - RNA, 22 nt, Human
gauagcucuucuuccccuaccc

SEQ ID NO: 256868 - RNA, 23 nt, Human
gcaacuuuuagucuuaaauaauc

SEQ ID NO: 256869 - RNA, 20 nt, Human
gcacccuccccaaguaucaa

SEQ ID NO: 256870 - RNA, 18 nt, Human
uaauuuaugaaaaaggga

SEQ ID NO: 256871 - RNA, 22 nt, Human
uaccccgcacuucuggaaguau

SEQ ID NO: 256872 - RNA, 24 nt, Human
uaccccgcacuucuggaaguauua

SEQ ID NO: 256873 - RNA, 21 nt, Human
uagcucuucuuccccuacccc

SEQ ID NO: 256874 - RNA, 25 nt, Human
uagucauauagauacuaguuaaaga

SEQ ID NO: 256875 - RNA, 21 nt, Human
uauucaauaagugccaagcac

SEQ ID NO: 256876 - RNA, 22 nt, Human
uccuuccauaucucaagggauc

SEQ ID NO: 256877 - RNA, 21 nt, Human
ucuccugauagcucuucuucc

SEQ ID NO: 256878 - RNA, 21 nt, Human
ugcauuucauuuucuuugccu

SEQ ID NO: 256879 - RNA, 22 nt, Human
ugccaaaagugaaaauuaaaca

SEQ ID NO: 256880 - RNA, 19 nt, Human
ugccaagcacccuccccaa

SEQ ID NO: 256881 - RNA, 24 nt, Human
uggaaguuacagucuauuauuaca

SEQ ID NO: 256882 - RNA, 18 nt, Human
ugggaagugcugggggau

SEQ ID NO: 256883 - RNA, 27 nt, Human
uuagagauccuccauuucauuacucua

SEQ ID NO: 256884 - RNA, 20 nt, Human
uucaauaagugccaagcacc

SEQ ID NO: 256885 - RNA, 21 nt, Human
uucacagaaccaagcuuucuc

SEQ ID NO: 256886 - RNA, 23 nt, Human
uuccauuuucauacuauuuuaua

SEQ ID NO: 256887 - RNA, 24 nt, Human
uugauggccgaucauauauucaau

SEQ ID NO: 256888 - RNA, 18 nt, Human
uuuagagauccuccauuu

SEQ ID NO: 256889 - RNA, 25 nt, Human
aaaaaaacaaacaagacagaaaucu

SEQ ID NO: 256890 - RNA, 26 nt, Human
aaaacaaacaagacagaaaucuagcc

SEQ ID NO: 256891 - RNA, 24 nt, Human
aaacaaaacaaaaaaacaaacaag

SEQ ID NO: 256892 - RNA, 20 nt, Human
aaacaagacagaaaucuagc

SEQ ID NO: 256893 - RNA, 23 nt, Human
aaagccccauccaaggcuaacau

SEQ ID NO: 256894 - RNA, 20 nt, Human
aaagcuacaggguuccccug

SEQ ID NO: 256895 - RNA, 22 nt, Human
aacaaaaaaacaaacaagacag

SEQ ID NO: 256896 - RNA, 24 nt, Human
aacaaaaaaacaaacaagacagaa

SEQ ID NO: 256897 - RNA, 24 nt, Human
aacaaaacaaaaaaacaaacaaga

SEQ ID NO: 256898 - RNA, 21 nt, Human
aaggagcagaugaccccauuu

SEQ ID NO: 256899 - RNA, 26 nt, Human
acaaaacaaaaaaacaaacaagacag

SEQ ID NO: 256900 - RNA, 26 nt, Human
acaaaacaaaaaaacaaacaagacag

SEQ ID NO: 256901 - RNA, 19 nt, Human
accauggccaccaccuuug

SEQ ID NO: 256902 - RNA, 26 nt, Human
agacagaaaucuagccgaaccgacgc

SEQ ID NO: 256903 - RNA, 22 nt, Human
agagggcaggccacuggugaga

SEQ ID NO: 256904 - RNA, 21 nt, Human
agcaagugugccuuccucagg

SEQ ID NO: 256905 - RNA, 22 nt, Human
agcagcccacccaccaccaccu

SEQ ID NO: 256906 - RNA, 18 nt, Human
agccgaacugccagcacc

SEQ ID NO: 256907 - RNA, 20 nt, Human
aggcagaggcagaucuccga

SEQ ID NO: 256908 - RNA, 25 nt, Human
aggcagaggcagaucuccgaggaaa

SEQ ID NO: 256909 - RNA, 22 nt, Human
aggcugcggggagggggcucgg

SEQ ID NO: 256910 - RNA, 18 nt, Human
agggagggaggcggucag

SEQ ID NO: 256911 - RNA, 18 nt, Human
agggcuggagugcccaga

SEQ ID NO: 256912 - RNA, 20 nt, Human
agucggcgaacuggggucug

SEQ ID NO: 256913 - RNA, 21 nt, Human
aucccucuccucuugcucccu

SEQ ID NO: 256914 - RNA, 18 nt, Human
augggagcagcccaccca

SEQ ID NO: 256915 - RNA, 21 nt, Human
caaaacaaaaaaacaaacaag

SEQ ID NO: 256916 - RNA, 21 nt, Human
caaagugccuguuugcucuuc

SEQ ID NO: 256917 - RNA, 22 nt, Human
caagacagaaaucuagccgaac

SEQ ID NO: 256918 - RNA, 19 nt, Human
caagugcagagcccccaac

SEQ ID NO: 256919 - RNA, 23 nt, Human
cacagcccacccuguggcccccu

SEQ ID NO: 256920 - RNA, 18 nt, Human
caccaccugcugccacug

SEQ ID NO: 256921 - RNA, 23 nt, Human
cacccaccaccaccugcugccac

SEQ ID NO: 256922 - RNA, 20 nt, Human
caccccauuuccccuacccc

SEQ ID NO: 256923 - RNA, 30 nt, Human
caccccauuuccccuaccccgugccccacc

SEQ ID NO: 256924 - RNA, 18 nt, Human
cacccuguggcccccugc

SEQ ID NO: 256925 - RNA, 18 nt, Human
cacccuguggcccccugc

SEQ ID NO: 256926 - RNA, 22 nt, Human
caccggccccacccuaccugac

SEQ ID NO: 256927 - RNA, 18 nt, Human
caccugcugccacuggcc

SEQ ID NO: 256928 - RNA, 19 nt, Human
cagagcccccaacacauuc

SEQ ID NO: 256929 - RNA, 21 nt, Human
cagccaggggacagagagaag

SEQ ID NO: 256930 - RNA, 18 nt, Human
cagcccacccuguggccc

SEQ ID NO: 256931 - RNA, 18 nt, Human
cagcucuucuaacuguga

SEQ ID NO: 256932 - RNA, 18 nt, Human
cagggaccaacaggagca

SEQ ID NO: 256933 - RNA, 25 nt, Human
cauuaaacaaaacaaaaaaacaaac

SEQ ID NO: 256934 - RNA, 18 nt, Human
ccacccuguggcccccug

SEQ ID NO: 256935 - RNA, 23 nt, Human
ccaccgggucagccgggcagugu

SEQ ID NO: 256936 - RNA, 19 nt, Human
ccagccaggcccuguggcc

SEQ ID NO: 256937 - RNA, 23 nt, Human
ccagcugccugaguuugggcaag

SEQ ID NO: 256938 - RNA, 24 nt, Human
cccacccaccaccaccugcugcca

SEQ ID NO: 256939 - RNA, 21 nt, Human
cccaccggccccacccuaccu

SEQ ID NO: 256940 - RNA, 22 nt, Human
cccagccuaagcgagccccagc

SEQ ID NO: 256941 - RNA, 25 nt, Human
cccauccaaggcuaacauucgagag

SEQ ID NO: 256942 - RNA, 25 nt, Human
ccccacccccccgacaucccucucc

SEQ ID NO: 256943 - RNA, 18 nt, Human
ccccacccccucacacug

SEQ ID NO: 256944 - RNA, 19 nt, Human
ccccacccuaccugacagc

SEQ ID NO: 256945 - RNA, 18 nt, Human
ccccagggcucugacccg

SEQ ID NO: 256946 - RNA, 20 nt, Human
ccccagggcucugacccggg

SEQ ID NO: 256947 - RNA, 23 nt, Human
ccccaguggcucaggcuccuucc

SEQ ID NO: 256948 - RNA, 24 nt, Human
cccccaacacauucagauggggcu

SEQ ID NO: 256949 - RNA, 19 nt, Human
ccccccgacaucccucucc

SEQ ID NO: 256950 - RNA, 19 nt, Human
ccccgguaccauggccacc

SEQ ID NO: 256951 - RNA, 21 nt, Human
ccccgugccccacccccccga

SEQ ID NO: 256952 - RNA, 18 nt, Human
ccccugaggggcagaggc

SEQ ID NO: 256953 - RNA, 22 nt, Human
cccuccugcccccucuggcugu

SEQ ID NO: 256954 - RNA, 21 nt, Human
cccuuccugagagcuccacag

SEQ ID NO: 256955 - RNA, 24 nt, Human
cccuuccugagagcuccacagccc

SEQ ID NO: 256956 - RNA, 22 nt, Human
ccggccccagccuuccaaugcu

SEQ ID NO: 256957 - RNA, 19 nt, Human
ccgggcccacgcccugggg

SEQ ID NO: 256958 - RNA, 25 nt, Human
ccgggcccacgcccuggggucgcac

SEQ ID NO: 256959 - RNA, 21 nt, Human
ccuaagcgagccccagcuccu

SEQ ID NO: 256960 - RNA, 23 nt, Human
ccucagccccagcugccugaguu

SEQ ID NO: 256961 - RNA, 22 nt, Human
ccucagggcccuuccugagagc

SEQ ID NO: 256962 - RNA, 22 nt, Human
ccucauuuuccuuuuugguccc

SEQ ID NO: 256963 - RNA, 22 nt, Human
ccucccacucagcccucagggg

SEQ ID NO: 256964 - RNA, 21 nt, Human
ccuccugcccccucuggcugu

SEQ ID NO: 256965 - RNA, 26 nt, Human
ccucuugcucccuccacugggucuca

SEQ ID NO: 256966 - RNA, 21 nt, Human
ccugaggggcagaggcuggaa

SEQ ID NO: 256967 - RNA, 20 nt, Human
ccugggcagcaaggacaggg

SEQ ID NO: 256968 - RNA, 23 nt, Human
ccuggggucgcaccgccacuccc

SEQ ID NO: 256969 - RNA, 20 nt, Human
ccuguuugcucuucuccucu

SEQ ID NO: 256970 - RNA, 21 nt, Human
ccuuugggccucagccccagc

SEQ ID NO: 256971 - RNA, 19 nt, Human
cggggagggggcucgggac

SEQ ID NO: 256972 - RNA, 20 nt, Human
cuaccccgugccccaccccc

SEQ ID NO: 256973 - RNA, 22 nt, Human
cucacccccagggcucugaccc

SEQ ID NO: 256974 - RNA, 21 nt, Human
cuccacugggucucacucucc

SEQ ID NO: 256975 - RNA, 20 nt, Human
cucgugaagccccucauucc

SEQ ID NO: 256976 - RNA, 23 nt, Human
cucucccaccggccccacccuac

SEQ ID NO: 256977 - RNA, 23 nt, Human
cucuccucuugcucccuccacug

SEQ ID NO: 256978 - RNA, 20 nt, Human
cucugcuccuuucucuggcu

SEQ ID NO: 256979 - RNA, 20 nt, Human
cucuggcugcccuacccuuc

SEQ ID NO: 256980 - RNA, 19 nt, Human
cugcccccucuggcuguuc

SEQ ID NO: 256981 - RNA, 21 nt, Human
cugcccuacccuuccccucca

SEQ ID NO: 256982 - RNA, 19 nt, Human
cugccugaguuugggcaag

SEQ ID NO: 256983 - RNA, 24 nt, Human
cugccuuugggccucagccccagc

SEQ ID NO: 256984 - RNA, 20 nt, Human
cugcggggagggggcucggg

SEQ ID NO: 256985 - RNA, 21 nt, Human
cugcugccacuggccuucaga

SEQ ID NO: 256986 - RNA, 18 nt, Human
cuguuugcucuucuccuc

SEQ ID NO: 256987 - RNA, 21 nt, Human
cuuggcaguccccacccccuc

SEQ ID NO: 256988 - RNA, 26 nt, Human
cuuggccuggccugcccggccccagc

SEQ ID NO: 256989 - RNA, 25 nt, Human
cuuggcuuggccuggccugcccggc

SEQ ID NO: 256990 - RNA, 22 nt, Human
cuuucagggcuggagugcccag

SEQ ID NO: 256991 - RNA, 21 nt, Human
cuuucucuguggccuucaggc

SEQ ID NO: 256992 - RNA, 22 nt, Human
gaaaaggagcagaugaccccau

SEQ ID NO: 256993 - RNA, 20 nt, Human
gaacuugacugacugagcaa

SEQ ID NO: 256994 - RNA, 19 nt, Human
gcccuacccuuccccucca

SEQ ID NO: 256995 - RNA, 21 nt, Human
gccgcccucccacucagcccu

SEQ ID NO: 256996 - RNA, 19 nt, Human
gccgggacagcguggccag

SEQ ID NO: 256997 - RNA, 21 nt, Human
gccgggcccacgcccuggggu

SEQ ID NO: 256998 - RNA, 22 nt, Human
gcgagccccagcuccugccccu

SEQ ID NO: 256999 - RNA, 18 nt, Human
gcggggagggggcucggg

SEQ ID NO: 257000 - RNA, 20 nt, Human
gcguggccagccaggcccug

SEQ ID NO: 257001 - RNA, 21 nt, Human
gcugccaauuggguacaccug

SEQ ID NO: 257002 - RNA, 19 nt, Human
ggacagggaccaacaggag

SEQ ID NO: 257003 - RNA, 22 nt, Human
ggccgggacagcguggccagcc

SEQ ID NO: 257004 - RNA, 26 nt, Human
gggcagugugggcuccgcggccgggc

SEQ ID NO: 257005 - RNA, 20 nt, Human
gggccucagccccagcugcc

SEQ ID NO: 257006 - RNA, 22 nt, Human
gggcucgggacgaugggagcag

SEQ ID NO: 257007 - RNA, 20 nt, Human
gggugggggagcgagagggc

SEQ ID NO: 257008 - RNA, 20 nt, Human
guccuugugguaggaguggg

SEQ ID NO: 257009 - RNA, 18 nt, Human
guggacccagccuaagcg

SEQ ID NO: 257010 - RNA, 18 nt, Human
guuugcucuucuccucuu

SEQ ID NO: 257011 - RNA, 22 nt, Human
guuugcucuucuccucuuuucc

SEQ ID NO: 257012 - RNA, 19 nt, Human
guuuuccucccaaggucuu

SEQ ID NO: 257013 - RNA, 18 nt, Human
uaacugugaaagccccau

SEQ ID NO: 257014 - RNA, 19 nt, Human
uaacugugaaagccccauc

SEQ ID NO: 257015 - RNA, 18 nt, Human
uagccgaacugccagcac

SEQ ID NO: 257016 - RNA, 21 nt, Human
uagucggcgaacuggggucug

SEQ ID NO: 257017 - RNA, 30 nt, Human
uauaauaaaaauauacauuaaacaaaacaa

SEQ ID NO: 257018 - RNA, 20 nt, Human
ucagauggggcuggacagac

SEQ ID NO: 257019 - RNA, 21 nt, Human
ucagcucuucuaacugugaaa

SEQ ID NO: 257020 - RNA, 22 nt, Human
uccacugggucucacucuccca

SEQ ID NO: 257021 - RNA, 23 nt, Human
uccacugggucucacucucccaa

SEQ ID NO: 257022 - RNA, 24 nt, Human
uccacugggucucacucucccccc

SEQ ID NO: 257023 - RNA, 19 nt, Human
uccccugaggggcagaggc

SEQ ID NO: 257024 - RNA, 23 nt, Human
ucccucggggcgccuuugucuuc

SEQ ID NO: 257025 - RNA, 23 nt, Human
uccucauuuuccuuuuugguccc

SEQ ID NO: 257026 - RNA, 21 nt, Human
uccucguuugugugccuucuc

SEQ ID NO: 257027 - RNA, 19 nt, Human
uccuuuuugguccccuccu

SEQ ID NO: 257028 - RNA, 23 nt, Human
ucucacucucccaaguccccggu

SEQ ID NO: 257029 - RNA, 21 nt, Human
ugaaagccccauccaaggcua

SEQ ID NO: 257030 - RNA, 18 nt, Human
ugaagccccucauuccuc

SEQ ID NO: 257031 - RNA, 18 nt, Human
ugacugacugagcaacga

SEQ ID NO: 257032 - RNA, 19 nt, Human
ugacugacugagcaacgaa

SEQ ID NO: 257033 - RNA, 21 nt, Human
ugacugacugagcaacgaaga

SEQ ID NO: 257034 - RNA, 18 nt, Human
ugacugagcaacgaagac

SEQ ID NO: 257035 - RNA, 21 nt, Human
ugagacaggcuugaggggugc

SEQ ID NO: 257036 - RNA, 24 nt, Human
ugagacaggcuugaggggugcugg

SEQ ID NO: 257037 - RNA, 20 nt, Human
ugaggcagaggcagaucucc

SEQ ID NO: 257038 - RNA, 22 nt, Human
ugaggggcagaggcuggaaagg

SEQ ID NO: 257039 - RNA, 19 nt, Human
ugccacuggccuucagagg

SEQ ID NO: 257040 - RNA, 22 nt, Human
ugccccacccccccgacauccc

SEQ ID NO: 257041 - RNA, 18 nt, Human
ugcggggagggggcucgg

SEQ ID NO: 257042 - RNA, 21 nt, Human
ugcggggagggggcucgggac

SEQ ID NO: 257043 - RNA, 24 nt, Human
ugcggggagggggcucgggacgau

SEQ ID NO: 257044 - RNA, 23 nt, Human
ugcuccuuucucuggcugcccua

SEQ ID NO: 257045 - RNA, 19 nt, Human
ugcucuucuccucuuuucc

SEQ ID NO: 257046 - RNA, 20 nt, Human
uggacagacacaaagcuacu

SEQ ID NO: 257047 - RNA, 18 nt, Human
uggcaccagggaagcgug

SEQ ID NO: 257048 - RNA, 21 nt, Human
uggccucucgugaagccccuu

SEQ ID NO: 257049 - RNA, 18 nt, Human
uggccuggccugcccggc

SEQ ID NO: 257050 - RNA, 18 nt, Human
uggccuucaggcucaccc

SEQ ID NO: 257051 - RNA, 20 nt, Human
uggcucaggcuccuuccuug

SEQ ID NO: 257052 - RNA, 21 nt, Human
uggcuguucugccuuugggcc

SEQ ID NO: 257053 - RNA, 19 nt, Human
ugggcagcaaggacaggga

SEQ ID NO: 257054 - RNA, 18 nt, Human
ugggcugggugggggagc

SEQ ID NO: 257055 - RNA, 22 nt, Human
uggguacaccuggggcuuucag

SEQ ID NO: 257056 - RNA, 21 nt, Human
ugguaggagugggcgggccgg

SEQ ID NO: 257057 - RNA, 24 nt, Human
ugugaaagccccauccaaggcuag

SEQ ID NO: 257058 - RNA, 25 nt, Human
ugugccuuccucagggcccuuccug

SEQ ID NO: 257059 - RNA, 26 nt, Human
ugugugccuucucugcuccuuucucu

SEQ ID NO: 257060 - RNA, 23 nt, Human
uuaggguggcuuggcagucccca

SEQ ID NO: 257061 - RNA, 27 nt, Human
uucagggcuggagugcccagagccucc

SEQ ID NO: 257062 - RNA, 20 nt, Human
uucccugggguaggugaggc

SEQ ID NO: 257063 - RNA, 18 nt, Human
uuccucagggcccuuccu

SEQ ID NO: 257064 - RNA, 19 nt, Human
uuccuuggaaguucccugg

SEQ ID NO: 257065 - RNA, 21 nt, Human
uuccuuggaaguucccugggg

SEQ ID NO: 257066 - RNA, 20 nt, Human
uucuccucuuuuccgguuuu

SEQ ID NO: 257067 - RNA, 19 nt, Human
uugcucccuccacuggguc

SEQ ID NO: 257068 - RNA, 20 nt, Human
uugcucccuccacugggucu

SEQ ID NO: 257069 - RNA, 21 nt, Human
uugugugccuucucugcuccu

SEQ ID NO: 257070 - RNA, 23 nt, Human
uuucagggcuggagugcccagag

SEQ ID NO: 257071 - RNA, 23 nt, Human
uuugguccccuccugcccccucu

SEQ ID NO: 257072 - RNA, 18 nt, Human
uuuuuuuuuuuuuuuuug

SEQ ID NO: 257073 - RNA, 23 nt, Human
uuuuuuuuuuuuuuuuuggaauu

SEQ ID NO: 257074 - RNA, 22 nt, Human
aaaacaaaacaaaacaaacacc

SEQ ID NO: 257075 - RNA, 22 nt, Human
aaacaaaacaaacaccuggaca

SEQ ID NO: 257076 - RNA, 21 nt, Human
aaacaaaacaaacaccugggg

SEQ ID NO: 257077 - RNA, 26 nt, Human
aaauggucaaguaaggugccaaaaac

SEQ ID NO: 257078 - RNA, 19 nt, Human
aacaaaacaaacaccugga

SEQ ID NO: 257079 - RNA, 18 nt, Human
aauggucaaguaaggugc

SEQ ID NO: 257080 - RNA, 27 nt, Human
acaaaacaaacaccuggacauaaauaa

SEQ ID NO: 257081 - RNA, 20 nt, Human
acaaaacaaacaccuggacc

SEQ ID NO: 257082 - RNA, 22 nt, Human
acagggaaggaacagaggguuc

SEQ ID NO: 257083 - RNA, 18 nt, Human
agaaccacaggcgccccc

SEQ ID NO: 257084 - RNA, 20 nt, Human
agaaccacaggcgcccccug

SEQ ID NO: 257085 - RNA, 18 nt, Human
agaccccugaggcuagug

SEQ ID NO: 257086 - RNA, 26 nt, Human
agccaucucagaaccacaggcgcccc

SEQ ID NO: 257087 - RNA, 23 nt, Human
aggaaccccucaugcccagugcc

SEQ ID NO: 257088 - RNA, 18 nt, Human
aggaggggaccagggggg

SEQ ID NO: 257089 - RNA, 18 nt, Human
aggcugcugcuucccugg

SEQ ID NO: 257090 - RNA, 23 nt, Human
agggagcuggaggggaggaaccc

SEQ ID NO: 257091 - RNA, 21 nt, Human
agggaggaggcacagggaagg

SEQ ID NO: 257092 - RNA, 20 nt, Human
agggggcagaagcugccgga

SEQ ID NO: 257093 - RNA, 24 nt, Human
agugccuuggggauccuggguggc

SEQ ID NO: 257094 - RNA, 19 nt, Human
auucacggccauccacugc

SEQ ID NO: 257095 - RNA, 26 nt, Human
caagaaaccacucgcagaggccagca

SEQ ID NO: 257096 - RNA, 22 nt, Human
caagccagaggaugaugggggc

SEQ ID NO: 257097 - RNA, 21 nt, Human
caaugugggccucugccccuc

SEQ ID NO: 257098 - RNA, 24 nt, Human
caccuggacauaaauaaugagggc

SEQ ID NO: 257099 - RNA, 21 nt, Human
cacugcacgccggauccucgc

SEQ ID NO: 257100 - RNA, 22 nt, Human
cacugcccaggccuaggcaccc

SEQ ID NO: 257101 - RNA, 18 nt, Human
cagcagaauccuuccccc

SEQ ID NO: 257102 - RNA, 20 nt, Human
cagcagaauccuucccccuc

SEQ ID NO: 257103 - RNA, 22 nt, Human
caggggcgaggcugcugcuucc

SEQ ID NO: 257104 - RNA, 26 nt, Human
cauccacugcccaggccuaggcaccc

SEQ ID NO: 257105 - RNA, 19 nt, Human
caucucagaaccacaggcg

SEQ ID NO: 257106 - RNA, 19 nt, Human
ccaggacccugggggcaca

SEQ ID NO: 257107 - RNA, 21 nt, Human
ccagguccccuuuggccuggg

SEQ ID NO: 257108 - RNA, 24 nt, Human
ccagugccugacacugugggcacc

SEQ ID NO: 257109 - RNA, 20 nt, Human
ccauccacugcccaggccua

SEQ ID NO: 257110 - RNA, 18 nt, Human
cccaccagcccccucucc

SEQ ID NO: 257111 - RNA, 23 nt, Human
cccagugccugacacugugggca

SEQ ID NO: 257112 - RNA, 19 nt, Human
cccccgcagccccaccccu

SEQ ID NO: 257113 - RNA, 22 nt, Human
ccccuggcuguggccaagccag

SEQ ID NO: 257114 - RNA, 19 nt, Human
cccucugcuccccuggcug

SEQ ID NO: 257115 - RNA, 25 nt, Human
cccucugcuccccuggcuguggcca

SEQ ID NO: 257116 - RNA, 20 nt, Human
cccuggcagacucccuuugg

SEQ ID NO: 257117 - RNA, 18 nt, Human
ccuaaggcccagagagac

SEQ ID NO: 257118 - RNA, 19 nt, Human
ccucuugcuugcuuuggga

SEQ ID NO: 257119 - RNA, 21 nt, Human
ccuggggcugccccugggugg

SEQ ID NO: 257120 - RNA, 24 nt, Human
cggaacacugcacgccggauccuc

SEQ ID NO: 257121 - RNA, 19 nt, Human
cggacccgcacuuggugcc

SEQ ID NO: 257122 - RNA, 21 nt, Human
cggccauccacugcccaggcc

SEQ ID NO: 257123 - RNA, 20 nt, Human
cucaagggccacggcccacc

SEQ ID NO: 257124 - RNA, 25 nt, Human
cucaagggccacggcccaccucccu

SEQ ID NO: 257125 - RNA, 20 nt, Human
cucagaaccacaggcgcccc

SEQ ID NO: 257126 - RNA, 21 nt, Human
cuccuucgugggguucacagu

SEQ ID NO: 257127 - RNA, 18 nt, Human
cucgcagaggccagcaga

SEQ ID NO: 257128 - RNA, 20 nt, Human
cucgcagaggccagcagaau

SEQ ID NO: 257129 - RNA, 19 nt, Human
cucugccccucugcucccc

SEQ ID NO: 257130 - RNA, 19 nt, Human
cugccgggggugggcuggg

SEQ ID NO: 257131 - RNA, 20 nt, Human
cugcugccgggggugggcug

SEQ ID NO: 257132 - RNA, 24 nt, Human
cuggagcagaacuacauuuagaaa

SEQ ID NO: 257133 - RNA, 22 nt, Human
cugggggcugcugccgggggug

SEQ ID NO: 257134 - RNA, 19 nt, Human
gaaccacaggcgcccccug

SEQ ID NO: 257135 - RNA, 22 nt, Human
gaacccccgcagccccaccccu

SEQ ID NO: 257136 - RNA, 23 nt, Human
gaacuacauuuagaaaauucuaa

SEQ ID NO: 257137 - RNA, 22 nt, Human
gaagaaggugugggcccaaggg

SEQ ID NO: 257138 - RNA, 20 nt, Human
gaagcccaaaggagcuggag

SEQ ID NO: 257139 - RNA, 21 nt, Human
gagagccuggcaguuacagcc

SEQ ID NO: 257140 - RNA, 19 nt, Human
gaggcaggcccagggcccu

SEQ ID NO: 257141 - RNA, 19 nt, Human
gauccuggguggcagacuc

SEQ ID NO: 257142 - RNA, 23 nt, Human
gcaaagagagccuggcaguuaca

SEQ ID NO: 257143 - RNA, 21 nt, Human
gccaaaaacaaaacaaaacaa

SEQ ID NO: 257144 - RNA, 20 nt, Human
gccaagccagaggaugaugg

SEQ ID NO: 257145 - RNA, 23 nt, Human
gccagcagaauccuucccccuca

SEQ ID NO: 257146 - RNA, 21 nt, Human
gccccaccccuuagcuggcuc

SEQ ID NO: 257147 - RNA, 22 nt, Human
gcccccucucccuggggcucag

SEQ ID NO: 257148 - RNA, 23 nt, Human
gcccugggguucaggcugaggag

SEQ ID NO: 257149 - RNA, 24 nt, Human
gccuggcaguuacagcccuggggu

SEQ ID NO: 257150 - RNA, 20 nt, Human
gcggagggagccccugggag

SEQ ID NO: 257151 - RNA, 21 nt, Human
gcugaagcccaaaggagcugg

SEQ ID NO: 257152 - RNA, 22 nt, Human
ggaacccccgcagccccacccc

SEQ ID NO: 257153 - RNA, 23 nt, Human
ggaaccccucaugcccagugccu

SEQ ID NO: 257154 - RNA, 22 nt, Human
ggaagaaggugugggcccaagg

SEQ ID NO: 257155 - RNA, 22 nt, Human
ggaagaaggugugggcccaagg

SEQ ID NO: 257156 - RNA, 23 nt, Human
ggagggcagccucuuaggccaca

SEQ ID NO: 257157 - RNA, 22 nt, Human
ggaggugggagcugggggcugc

SEQ ID NO: 257158 - RNA, 20 nt, Human
ggcagaagcugccggacccg

SEQ ID NO: 257159 - RNA, 23 nt, Human
ggccaagccagaggaugaugggg

SEQ ID NO: 257160 - RNA, 18 nt, Human
ggcucaggacacuggcag

SEQ ID NO: 257161 - RNA, 19 nt, Human
gggaaacagaaacaaaugg

SEQ ID NO: 257162 - RNA, 25 nt, Human
gggaagaaggugugggcccaagggg

SEQ ID NO: 257163 - RNA, 19 nt, Human
gggagggaggaggcacagg

SEQ ID NO: 257164 - RNA, 20 nt, Human
gggcaaagagagccuggcag

SEQ ID NO: 257165 - RNA, 24 nt, Human
ggugccaaaaacaaaacaaaacaa

SEQ ID NO: 257166 - RNA, 21 nt, Human
ggugugggcccaaggggaggu

SEQ ID NO: 257167 - RNA, 18 nt, Human
gguucuagcucagggagg

SEQ ID NO: 257168 - RNA, 22 nt, Human
gugccaaaaacaaaacaaaaca

SEQ ID NO: 257169 - RNA, 19 nt, Human
uaaggugccaaaaacaaaa

SEQ ID NO: 257170 - RNA, 19 nt, Human
uacagcccugggguucagg

SEQ ID NO: 257171 - RNA, 19 nt, Human
uacaguaccauuucccaca

SEQ ID NO: 257172 - RNA, 21 nt, Human
uauccccaccagugucucucc

SEQ ID NO: 257173 - RNA, 20 nt, Human
ucaaguaaggugccaaaaac

SEQ ID NO: 257174 - RNA, 18 nt, Human
ucacuugggaaggagggg

SEQ ID NO: 257175 - RNA, 23 nt, Human
uccacugcccaggccuaggcacc

SEQ ID NO: 257176 - RNA, 22 nt, Human
uccagguccccuuuggccuggg

SEQ ID NO: 257177 - RNA, 19 nt, Human
ucccuggggagaggggccc

SEQ ID NO: 257178 - RNA, 21 nt, Human
ucccuggggagaggggcccug

SEQ ID NO: 257179 - RNA, 24 nt, Human
uccguggugaggcaggcccagggc

SEQ ID NO: 257180 - RNA, 21 nt, Human
ucgcucagggccauggggaag

SEQ ID NO: 257181 - RNA, 23 nt, Human
ucgggagggagggaggaggcaca

SEQ ID NO: 257182 - RNA, 18 nt, Human
ucucuggcacaaggagcc

SEQ ID NO: 257183 - RNA, 18 nt, Human
ucuggcacaaggagccag

SEQ ID NO: 257184 - RNA, 21 nt, Human
ugaagcccaaaggagcuggag

SEQ ID NO: 257185 - RNA, 20 nt, Human
ugagggcggggcagacaggg

SEQ ID NO: 257186 - RNA, 21 nt, Human
ugagggcggggcagacagggu

SEQ ID NO: 257187 - RNA, 22 nt, Human
ugagggcggggcagacagggug

SEQ ID NO: 257188 - RNA, 21 nt, Human
ugccaaaaacaaaacaaaaca

SEQ ID NO: 257189 - RNA, 22 nt, Human
ugccaaaaacaaaacaaaacaa

SEQ ID NO: 257190 - RNA, 23 nt, Human
ugccaaaaacaaaacaaaacaaa

SEQ ID NO: 257191 - RNA, 26 nt, Human
ugccccagucggggaaacagaaacaa

SEQ ID NO: 257192 - RNA, 21 nt, Human
ugcugcuucccuggggagagg

SEQ ID NO: 257193 - RNA, 20 nt, Human
ugcuuugggaaggaaaagag

SEQ ID NO: 257194 - RNA, 21 nt, Human
uggagcucagaccccugaggc

SEQ ID NO: 257195 - RNA, 23 nt, Human
uggcagcugaagcccaaaggagc

SEQ ID NO: 257196 - RNA, 19 nt, Human
uggccuggggcugccccug

SEQ ID NO: 257197 - RNA, 21 nt, Human
ugggaaggaggggaccagggg

SEQ ID NO: 257198 - RNA, 24 nt, Human
ugggagcugggggcugcugccggg

SEQ ID NO: 257199 - RNA, 21 nt, Human
ugggcaaagagagccuggcag

SEQ ID NO: 257200 - RNA, 18 nt, Human
ugggccucugccccucug

SEQ ID NO: 257201 - RNA, 25 nt, Human
uggggagaggggcccuggcagacuc

SEQ ID NO: 257202 - RNA, 18 nt, Human
uggggauccuggguggca

SEQ ID NO: 257203 - RNA, 22 nt, Human
ugggggcacagggagcuggagg

SEQ ID NO: 257204 - RNA, 18 nt, Human
ugggggcggagggagccc

SEQ ID NO: 257205 - RNA, 19 nt, Human
uggggguggacacggaacc

SEQ ID NO: 257206 - RNA, 18 nt, Human
uggguggcagacuccacu

SEQ ID NO: 257207 - RNA, 24 nt, Human
ugugagggcugagaggggccccua

SEQ ID NO: 257208 - RNA, 19 nt, Human
uuccagguccccuuuggcc

SEQ ID NO: 257209 - RNA, 21 nt, Human
uucccuggggagaggggcccu

SEQ ID NO: 257210 - RNA, 21 nt, Human
uuucccacagcagccacggcc

SEQ ID NO: 257211 - RNA, 19 nt, Human
uuuuuuuuuuuuuugccgg

SEQ ID NO: 257212 - RNA, 18 nt, Human
uuuuuuuuuuuuuuuuug

SEQ ID NO: 257213 - RNA, 23 nt, Human
uuuuuuuuuuuuuuuuugccggc

SEQ ID NO: 257214 - RNA, 24 nt, Human
uuuuuuuuuuuuuuuuuuugccgg

SEQ ID NO: 257215 - RNA, 23 nt, Human
aaacuccugcaaaagaaagaaag

SEQ ID NO: 257216 - RNA, 20 nt, Human
aagaacagcagauacugugc

SEQ ID NO: 257217 - RNA, 20 nt, Human
aagacaaaggacugaagaac

SEQ ID NO: 257218 - RNA, 22 nt, Human
aaugacaaagaaagacaaagga

SEQ ID NO: 257219 - RNA, 24 nt, Human
acaaacuccugcaaaagaaagaaa

SEQ ID NO: 257220 - RNA, 23 nt, Human
acugaaugacaaagaaagacaaa

SEQ ID NO: 257221 - RNA, 19 nt, Human
caaacuccugcaaaagaaa

SEQ ID NO: 257222 - RNA, 20 nt, Human
cagcauaacagcucuugucu

SEQ ID NO: 257223 - RNA, 19 nt, Human
caggaccagcaacccucug

SEQ ID NO: 257224 - RNA, 23 nt, Human
caucauggaagcuuccccaugag

SEQ ID NO: 257225 - RNA, 21 nt, Human
ccccaugaguguauuuccacu

SEQ ID NO: 257226 - RNA, 18 nt, Human
cccucucccucccucccu

SEQ ID NO: 257227 - RNA, 22 nt, Human
cccuuuguuuuaaagccaaaaa

SEQ ID NO: 257228 - RNA, 22 nt, Human
cguccugcauguguauuccaaa

SEQ ID NO: 257229 - RNA, 23 nt, Human
cuagaacugaaugacaaagaaag

SEQ ID NO: 257230 - RNA, 18 nt, Human
cucccaccugacaaaaug

SEQ ID NO: 257231 - RNA, 19 nt, Human
cuccugcaaaagaaagaaa

SEQ ID NO: 257232 - RNA, 21 nt, Human
cuccugcaaaagaaagaaaga

SEQ ID NO: 257233 - RNA, 23 nt, Human
cugaagaacagcagauacugugc

SEQ ID NO: 257234 - RNA, 22 nt, Human
cugaaugacaaagaaagacaaa

SEQ ID NO: 257235 - RNA, 24 nt, Human
cugcauguguauuccaaaucuccc

SEQ ID NO: 257236 - RNA, 20 nt, Human
cuuuuuuuuucucccccccc

SEQ ID NO: 257237 - RNA, 18 nt, Human
gagcuccccuucguuuuc

SEQ ID NO: 257238 - RNA, 20 nt, Human
gauuugcuuuuuuuuucucc

SEQ ID NO: 257239 - RNA, 22 nt, Human
gcaaaagaaagaaagaagaaaa

SEQ ID NO: 257240 - RNA, 24 nt, Human
gcagaggaaaggccuagaacugaa

SEQ ID NO: 257241 - RNA, 22 nt, Human
gcuuuuuuuuucuccccccaga

SEQ ID NO: 257242 - RNA, 19 nt, Human
gggucuucacacuuuccug

SEQ ID NO: 257243 - RNA, 18 nt, Human
guaggagacuauccaaag

SEQ ID NO: 257244 - RNA, 21 nt, Human
uaaagccaaaaaagaaaaaaa

SEQ ID NO: 257245 - RNA, 22 nt, Human
uaaagccaaaaaagaaaaaaag

SEQ ID NO: 257246 - RNA, 18 nt, Human
uaacagcucuugucuuga

SEQ ID NO: 257247 - RNA, 20 nt, Human
uaagaaagaaucuuuucuuc

SEQ ID NO: 257248 - RNA, 24 nt, Human
ucaauggauggacgagcuccccuu

SEQ ID NO: 257249 - RNA, 24 nt, Human
ucccucucccucccucccuaguuu

SEQ ID NO: 257250 - RNA, 22 nt, Human
ucuucuuuuucuccucuucucc

SEQ ID NO: 257251 - RNA, 23 nt, Human
ucuuuucuucuuuuucuccucuu

SEQ ID NO: 257252 - RNA, 19 nt, Human
ugaagaacagcagauacug

SEQ ID NO: 257253 - RNA, 22 nt, Human
ugaguguauuuccacucaugug

SEQ ID NO: 257254 - RNA, 23 nt, Human
ugauuugcuuuuuuuuucucccc

SEQ ID NO: 257255 - RNA, 22 nt, Human
uguuuuguuguuuucaauguag

SEQ ID NO: 257256 - RNA, 22 nt, Human
uuaaagacaaacauuuaguagu

SEQ ID NO: 257257 - RNA, 23 nt, Human
uuaguuaauccugaaauuuuacu

SEQ ID NO: 257258 - RNA, 25 nt, Human
uucagaaggaaaauaacauuagaaa

SEQ ID NO: 257259 - RNA, 24 nt, Human
uuccacucaugugcaggaccagca

SEQ ID NO: 257260 - RNA, 21 nt, Human
uuccccaugaguguauuucca

SEQ ID NO: 257261 - RNA, 18 nt, Human
uucuucuuuuucuccucu

SEQ ID NO: 257262 - RNA, 18 nt, Human
uucuucuuuuucuccucu

SEQ ID NO: 257263 - RNA, 22 nt, Human
uugcagauugaucccucgguau

SEQ ID NO: 257264 - RNA, 18 nt, Human
uugcuuuuuuuuucuccc

SEQ ID NO: 257265 - RNA, 23 nt, Human
uuguggguuuuuuguuuaaacuc

SEQ ID NO: 257266 - RNA, 21 nt, Human
uuuucuucuuuuucuccucuu

SEQ ID NO: 257267 - RNA, 21 nt, Human
uuuuguuguuuucaauguaga

SEQ ID NO: 257268 - RNA, 18 nt, Human
aaaaagacagaggucaag

SEQ ID NO: 257269 - RNA, 25 nt, Human
aaaauucccccagcuauguucacua

SEQ ID NO: 257270 - RNA, 25 nt, Human
aaaauucccccagcuauguucacua

SEQ ID NO: 257271 - RNA, 23 nt, Human
aaacuacccccacccccaccucc

SEQ ID NO: 257272 - RNA, 23 nt, Human
aaacuacccccacccccaccucc

SEQ ID NO: 257273 - RNA, 24 nt, Human
aaacuacccccacccccaccuccg

SEQ ID NO: 257274 - RNA, 24 nt, Human
aaacuacccccacccccaccuccg

SEQ ID NO: 257275 - RNA, 18 nt, Human
aaagugcuaggauuauag

SEQ ID NO: 257276 - RNA, 18 nt, Human
aaagugcuaggauuauag

SEQ ID NO: 257277 - RNA, 22 nt, Human
aacaaaacaaaagcccugcaga

SEQ ID NO: 257278 - RNA, 19 nt, Human
aacaagucaccucuguccu

SEQ ID NO: 257279 - RNA, 23 nt, Human
aacaggacccaggcaucucccuc

SEQ ID NO: 257280 - RNA, 23 nt, Human
aacaggacccaggcaucucccuc

SEQ ID NO: 257281 - RNA, 23 nt, Human
aacaggacccaggcaucucccuc

SEQ ID NO: 257282 - RNA, 23 nt, Human
aacaggacccaggcaucucccuc

SEQ ID NO: 257283 - RNA, 25 nt, Human
aacccuugauugguuugggguagcu

SEQ ID NO: 257284 - RNA, 25 nt, Human
aacccuugauugguuugggguagcu

SEQ ID NO: 257285 - RNA, 24 nt, Human
aaccucacccuccccuccaagugg

SEQ ID NO: 257286 - RNA, 25 nt, Human
aacucuucccccucugacucuccug

SEQ ID NO: 257287 - RNA, 25 nt, Human
aacucuucccccucugacucuccug

SEQ ID NO: 257288 - RNA, 23 nt, Human
aagagaaaauuaaaggcagacaa

SEQ ID NO: 257289 - RNA, 23 nt, Human
aagauaccccaaccuccaggccc

SEQ ID NO: 257290 - RNA, 23 nt, Human
aagauaccccaaccuccaggccc

SEQ ID NO: 257291 - RNA, 19 nt, Human
aagauugugucugugggug

SEQ ID NO: 257292 - RNA, 19 nt, Human
aagauugugucugugggug

SEQ ID NO: 257293 - RNA, 19 nt, Human
aagauugugucugugggug

SEQ ID NO: 257294 - RNA, 19 nt, Human
aaggagccuggucuucagg

SEQ ID NO: 257295 - RNA, 19 nt, Human
aaggagccuggucuucagg

SEQ ID NO: 257296 - RNA, 22 nt, Human
aaggagccuggucuucagggcu

SEQ ID NO: 257297 - RNA, 22 nt, Human
aaggagccuggucuucagggcu

SEQ ID NO: 257298 - RNA, 22 nt, Human
aagucaccucuguccucaggug

SEQ ID NO: 257299 - RNA, 18 nt, Human
aagugccugccuaagcca

SEQ ID NO: 257300 - RNA, 18 nt, Human
aagugcuaggauuauagc

SEQ ID NO: 257301 - RNA, 18 nt, Human
aagugcuaggauuauagc

SEQ ID NO: 257302 - RNA, 19 nt, Human
aagugguggcuggaguucg

SEQ ID NO: 257303 - RNA, 21 nt, Human
aauuuccuccuuaaccagaac

SEQ ID NO: 257304 - RNA, 21 nt, Human
aauuuccuccuuaaccagaac

SEQ ID NO: 257305 - RNA, 25 nt, Human
acacauagucccccuugaaagcaua

SEQ ID NO: 257306 - RNA, 19 nt, Human
acacugcccagcucuggga

SEQ ID NO: 257307 - RNA, 19 nt, Human
acacugcccagcucuggga

SEQ ID NO: 257308 - RNA, 23 nt, Human
acagggcagugccugccucagga

SEQ ID NO: 257309 - RNA, 23 nt, Human
acagggcagugccugccucagga

SEQ ID NO: 257310 - RNA, 20 nt, Human
acagugggcagcucugucuc

SEQ ID NO: 257311 - RNA, 20 nt, Human
acagugggcagcucugucuc

SEQ ID NO: 257312 - RNA, 22 nt, Human
accauugaccuccagagaagag

SEQ ID NO: 257313 - RNA, 20 nt, Human
acccccacccccaccuccgc

SEQ ID NO: 257314 - RNA, 20 nt, Human
acccccacccccaccuccgc

SEQ ID NO: 257315 - RNA, 21 nt, Human
acccccaccuccgccuccuac

SEQ ID NO: 257316 - RNA, 21 nt, Human
acccccaccuccgccuccuac

SEQ ID NO: 257317 - RNA, 18 nt, Human
acccugccuauuauaaac

SEQ ID NO: 257318 - RNA, 18 nt, Human
acccugccuauuauaaac

SEQ ID NO: 257319 - RNA, 20 nt, Human
accuauucagaaacuucuca

SEQ ID NO: 257320 - RNA, 20 nt, Human
accuccagagaagagaugac

SEQ ID NO: 257321 - RNA, 20 nt, Human
accuccagagaagagaugac

SEQ ID NO: 257322 - RNA, 18 nt, Human
accuccgccuccuaccuc

SEQ ID NO: 257323 - RNA, 18 nt, Human
accuccgccuccuaccuc

SEQ ID NO: 257324 - RNA, 21 nt, Human
accuccgccuccuaccucagc

SEQ ID NO: 257325 - RNA, 21 nt, Human
accuccgccuccuaccucagc

SEQ ID NO: 257326 - RNA, 24 nt, Human
accuccgccuccuaccucagcugg

SEQ ID NO: 257327 - RNA, 24 nt, Human
accucuguccucaggugauagcuu

SEQ ID NO: 257328 - RNA, 24 nt, Human
accuuuaauuuggcuccgaacucu

SEQ ID NO: 257329 - RNA, 19 nt, Human
accuuuuugaugggaagaa

SEQ ID NO: 257330 - RNA, 19 nt, Human
accuuuuugaugggaagaa

SEQ ID NO: 257331 - RNA, 23 nt, Human
acucccguaaacaaacccuugau

SEQ ID NO: 257332 - RNA, 25 nt, Human
acucucccuggacaaaggcaaaggu

SEQ ID NO: 257333 - RNA, 19 nt, Human
agacagcuagaggaagagc

SEQ ID NO: 257334 - RNA, 20 nt, Human
agacagcuagaggaagagcu

SEQ ID NO: 257335 - RNA, 20 nt, Human
agacaggaaauggaguuggg

SEQ ID NO: 257336 - RNA, 20 nt, Human
agacaggaaauggaguuggg

SEQ ID NO: 257337 - RNA, 24 nt, Human
agacaggaaauggaguugggggcc

SEQ ID NO: 257338 - RNA, 24 nt, Human
agacaggaaauggaguugggggcc

SEQ ID NO: 257339 - RNA, 24 nt, Human
agacaggaaauggaguugggggcc

SEQ ID NO: 257340 - RNA, 24 nt, Human
agacaggaaauggaguugggggcc

SEQ ID NO: 257341 - RNA, 26 nt, Human
agacaggaaauggaguuggggggacc

SEQ ID NO: 257342 - RNA, 26 nt, Human
agacaggaaauggaguuggggggacc

SEQ ID NO: 257343 - RNA, 27 nt, Human
agacaggaaauggaguuggggggaccc

SEQ ID NO: 257344 - RNA, 27 nt, Human
agacaggaaauggaguuggggggaccc

SEQ ID NO: 257345 - RNA, 23 nt, Human
agacagggucucccuauguugcc

SEQ ID NO: 257346 - RNA, 23 nt, Human
agacagggucucccuauguugcc

SEQ ID NO: 257347 - RNA, 19 nt, Human
agaggcuguccgugccucu

SEQ ID NO: 257348 - RNA, 19 nt, Human
agaggcuguccgugccucu

SEQ ID NO: 257349 - RNA, 22 nt, Human
agcaaggcuacaaugggaggga

SEQ ID NO: 257350 - RNA, 22 nt, Human
agcaaggcuacaaugggaggga

SEQ ID NO: 257351 - RNA, 24 nt, Human
agcugaccugagacucagagccuc

SEQ ID NO: 257352 - RNA, 18 nt, Human
agcuggucuugaacuccu

SEQ ID NO: 257353 - RNA, 18 nt, Human
agcuggucuugaacuccu

SEQ ID NO: 257354 - RNA, 24 nt, Human
agcuggucuugaacuccugggcuc

SEQ ID NO: 257355 - RNA, 24 nt, Human
agcuggucuugaacuccugggcuc

SEQ ID NO: 257356 - RNA, 24 nt, Human
aggaucagcaggcugcccccaccg

SEQ ID NO: 257357 - RNA, 23 nt, Human
aggcaucucccuccaccauugac

SEQ ID NO: 257358 - RNA, 23 nt, Human
aggcauuugauaccuuuuugaug

SEQ ID NO: 257359 - RNA, 23 nt, Human
aggcauuugauaccuuuuugaug

SEQ ID NO: 257360 - RNA, 21 nt, Human
aggcugcccccaccgccugcc

SEQ ID NO: 257361 - RNA, 19 nt, Human
aggcuucuggggggaaaug

SEQ ID NO: 257362 - RNA, 20 nt, Human
aggcuucugggggggaaaug

SEQ ID NO: 257363 - RNA, 20 nt, Human
aggcuucugggggggaaaug

SEQ ID NO: 257364 - RNA, 24 nt, Human
agggaguccagccucugcuguugc

SEQ ID NO: 257365 - RNA, 24 nt, Human
agggugggugguggagccucaggg

SEQ ID NO: 257366 - RNA, 20 nt, Human
auaucccuccccugggcagc

SEQ ID NO: 257367 - RNA, 20 nt, Human
auaucccuccccugggcagc

SEQ ID NO: 257368 - RNA, 22 nt, Human
augaugcgcagguucaccccac

SEQ ID NO: 257369 - RNA, 22 nt, Human
augaugcgcagguucaccccac

SEQ ID NO: 257370 - RNA, 22 nt, Human
augcacaggaaagugguggcug

SEQ ID NO: 257371 - RNA, 22 nt, Human
augcacaggaaagugguggcug

SEQ ID NO: 257372 - RNA, 22 nt, Human
augcacaggaaagugguggcug

SEQ ID NO: 257373 - RNA, 22 nt, Human
augcacaggaaagugguggcug

SEQ ID NO: 257374 - RNA, 18 nt, Human
augcuuuguugcucagag

SEQ ID NO: 257375 - RNA, 19 nt, Human
augucacaugucuccuucc

SEQ ID NO: 257376 - RNA, 21 nt, Human
auuugauaccuuuuugauggg

SEQ ID NO: 257377 - RNA, 21 nt, Human
auuugauaccuuuuugauggg

SEQ ID NO: 257378 - RNA, 23 nt, Human
auuuggcuccgaacucucccucc

SEQ ID NO: 257379 - RNA, 21 nt, Human
caaagggcagacacucggaac

SEQ ID NO: 257380 - RNA, 21 nt, Human
caaaggugaacaggaaggagg

SEQ ID NO: 257381 - RNA, 21 nt, Human
caaaggugaacaggaaggagg

SEQ ID NO: 257382 - RNA, 24 nt, Human
caaaggugaacaggaaggagguca

SEQ ID NO: 257383 - RNA, 24 nt, Human
caaaggugaacaggaaggagguca

SEQ ID NO: 257384 - RNA, 18 nt, Human
caaagugcuaggauuaua

SEQ ID NO: 257385 - RNA, 18 nt, Human
caaagugcuaggauuaua

SEQ ID NO: 257386 - RNA, 23 nt, Human
caacaagucaaaaagacagaggu

SEQ ID NO: 257387 - RNA, 22 nt, Human
caagugauccuccugcuucagc

SEQ ID NO: 257388 - RNA, 22 nt, Human
caagugauccuccugcuucagc

SEQ ID NO: 257389 - RNA, 27 nt, Human
caagugauccuccugcuucagccuccc

SEQ ID NO: 257390 - RNA, 27 nt, Human
caagugauccuccugcuucagccuccc

SEQ ID NO: 257391 - RNA, 18 nt, Human
cacagggcagugccugcc

SEQ ID NO: 257392 - RNA, 18 nt, Human
cacagggcagugccugcc

SEQ ID NO: 257393 - RNA, 19 nt, Human
cacaguuggaagggcuguc

SEQ ID NO: 257394 - RNA, 19 nt, Human
cacaguuggaagggcuguc

SEQ ID NO: 257395 - RNA, 19 nt, Human
cacaguuggaagggcuguc

SEQ ID NO: 257396 - RNA, 19 nt, Human
cacaguuggaagggcuguc

SEQ ID NO: 257397 - RNA, 23 nt, Human
cacccucucuaacaggcaaucug

SEQ ID NO: 257398 - RNA, 19 nt, Human
caccgccugccaacagccu

SEQ ID NO: 257399 - RNA, 21 nt, Human
caccgccugccaacagccugg

SEQ ID NO: 257400 - RNA, 18 nt, Human
caccguggguggcacuaa

SEQ ID NO: 257401 - RNA, 18 nt, Human
caccguggguggcacuaa

SEQ ID NO: 257402 - RNA, 22 nt, Human
caccuccgccuccuaccucagc

SEQ ID NO: 257403 - RNA, 22 nt, Human
caccuccgccuccuaccucagc

SEQ ID NO: 257404 - RNA, 25 nt, Human
caccuccgccuccuaccucagcugg

SEQ ID NO: 257405 - RNA, 28 nt, Human
caccuccgccuccuaccucagcugggag

SEQ ID NO: 257406 - RNA, 28 nt, Human
caccuccgccuccuaccucagcugggag

SEQ ID NO: 257407 - RNA, 23 nt, Human
cagagaagagaugacacaguugg

SEQ ID NO: 257408 - RNA, 23 nt, Human
cagagaagagaugacacaguugg

SEQ ID NO: 257409 - RNA, 23 nt, Human
cagagaagagaugacacaguugg

SEQ ID NO: 257410 - RNA, 23 nt, Human
cagagaagagaugacacaguugg

SEQ ID NO: 257411 - RNA, 22 nt, Human
cagagacagggucucccuaugu

SEQ ID NO: 257412 - RNA, 22 nt, Human
cagagacagggucucccuaugu

SEQ ID NO: 257413 - RNA, 25 nt, Human
cagcagcauccagguuuccggggag

SEQ ID NO: 257414 - RNA, 22 nt, Human
cagcaggcugcccccaccgccu

SEQ ID NO: 257415 - RNA, 18 nt, Human
cagcauccagguuuccgg

SEQ ID NO: 257416 - RNA, 21 nt, Human
caggacccggccugagacugu

SEQ ID NO: 257417 - RNA, 21 nt, Human
caggaucagccuggaggggag

SEQ ID NO: 257418 - RNA, 25 nt, Human
caggcaucucccuccaccauugacc

SEQ ID NO: 257419 - RNA, 25 nt, Human
caggcaucucccuccaccauugacc

SEQ ID NO: 257420 - RNA, 25 nt, Human
caggcaucucccuccaccauugacc

SEQ ID NO: 257421 - RNA, 22 nt, Human
cagguaguccacgggcgccacc

SEQ ID NO: 257422 - RNA, 21 nt, Human
cagugggcagcucugucucuu

SEQ ID NO: 257423 - RNA, 21 nt, Human
cagugggcagcucugucucuu

SEQ ID NO: 257424 - RNA, 23 nt, Human
cagugggcagcucugucucuucu

SEQ ID NO: 257425 - RNA, 23 nt, Human
cagugggcagcucugucucuucu

SEQ ID NO: 257426 - RNA, 22 nt, Human
caucacugucccuuaccuuccc

SEQ ID NO: 257427 - RNA, 22 nt, Human
caucacugucccuuaccuuccc

SEQ ID NO: 257428 - RNA, 18 nt, Human
ccaaagugcuaggauuau

SEQ ID NO: 257429 - RNA, 18 nt, Human
ccaaagugcuaggauuau

SEQ ID NO: 257430 - RNA, 24 nt, Human
ccaagcuggucuugaacuccuggg

SEQ ID NO: 257431 - RNA, 24 nt, Human
ccaagcuggucuugaacuccuggg

SEQ ID NO: 257432 - RNA, 21 nt, Human
ccaccgccugccaacagccug

SEQ ID NO: 257433 - RNA, 21 nt, Human
ccacucccugcucucugaccc

SEQ ID NO: 257434 - RNA, 21 nt, Human
ccacucccugcucucugaccc

SEQ ID NO: 257435 - RNA, 23 nt, Human
ccagaggcuguccgugccucuga

SEQ ID NO: 257436 - RNA, 23 nt, Human
ccagaggcuguccgugccucuga

SEQ ID NO: 257437 - RNA, 18 nt, Human
ccagccacagcugcuggc

SEQ ID NO: 257438 - RNA, 19 nt, Human
ccaggcaucucccuccacc

SEQ ID NO: 257439 - RNA, 19 nt, Human
ccaggcaucucccuccacc

SEQ ID NO: 257440 - RNA, 19 nt, Human
ccaggcaucucccuccacc

SEQ ID NO: 257441 - RNA, 19 nt, Human
ccaggcaucucccuccacc

SEQ ID NO: 257442 - RNA, 21 nt, Human
ccaugucacaugucuccuucc

SEQ ID NO: 257443 - RNA, 22 nt, Human
ccauugcucaugcugaaguccc

SEQ ID NO: 257444 - RNA, 20 nt, Human
cccaaaggagccuggucuuc

SEQ ID NO: 257445 - RNA, 20 nt, Human
cccaaaggagccuggucuuc

SEQ ID NO: 257446 - RNA, 22 nt, Human
cccaagccccagagcauggccc

SEQ ID NO: 257447 - RNA, 24 nt, Human
cccaccagacgagagcuccagagg

SEQ ID NO: 257448 - RNA, 24 nt, Human
cccaccagacgagagcuccagagg

SEQ ID NO: 257449 - RNA, 21 nt, Human
cccacugccaguacccggagc

SEQ ID NO: 257450 - RNA, 19 nt, Human
cccagccacagcugcuggc

SEQ ID NO: 257451 - RNA, 25 nt, Human
ccccaaaagcuggcuucuugcuccu

SEQ ID NO: 257452 - RNA, 25 nt, Human
ccccaaaagcuggcuucuugcuccu

SEQ ID NO: 257453 - RNA, 23 nt, Human
ccccaccgccugccaacagccug

SEQ ID NO: 257454 - RNA, 23 nt, Human
cccccacccccaccuccgccucc

SEQ ID NO: 257455 - RNA, 23 nt, Human
cccccacccccaccuccgccucc

SEQ ID NO: 257456 - RNA, 22 nt, Human
cccccaccuccgccuccuaccc

SEQ ID NO: 257457 - RNA, 22 nt, Human
cccccaccuccgccuccuaccc

SEQ ID NO: 257458 - RNA, 24 nt, Human
cccuccaaguggcuuccuaguugu

SEQ ID NO: 257459 - RNA, 22 nt, Human
cccuccaccauugaccuccaga

SEQ ID NO: 257460 - RNA, 22 nt, Human
cccuccaccauugaccuccaga

SEQ ID NO: 257461 - RNA, 22 nt, Human
cccuccaccauugaccuccaga

SEQ ID NO: 257462 - RNA, 23 nt, Human
ccgcaccucgucuugaaauagcc

SEQ ID NO: 257463 - RNA, 23 nt, Human
ccgcaccucgucuugaaauagcc

SEQ ID NO: 257464 - RNA, 22 nt, Human
ccggggacgacagugcauccag

SEQ ID NO: 257465 - RNA, 22 nt, Human
ccggggacgacagugcauccag

SEQ ID NO: 257466 - RNA, 22 nt, Human
ccuauguugcccaagcuggucu

SEQ ID NO: 257467 - RNA, 24 nt, Human
ccuauguugcccaagcuggucuug

SEQ ID NO: 257468 - RNA, 20 nt, Human
ccucaaccuggggaagacca

SEQ ID NO: 257469 - RNA, 20 nt, Human
ccucaaccuggggaagacca

SEQ ID NO: 257470 - RNA, 20 nt, Human
ccucaggaccugccuucccc

SEQ ID NO: 257471 - RNA, 20 nt, Human
ccucaggaccugccuucccc

SEQ ID NO: 257472 - RNA, 26 nt, Human
ccuccugcuucagccucccaaagugc

SEQ ID NO: 257473 - RNA, 26 nt, Human
ccuccugcuucagccucccaaagugc

SEQ ID NO: 257474 - RNA, 19 nt, Human
ccugccaacagccuggagg

SEQ ID NO: 257475 - RNA, 24 nt, Human
ccugcuucagccucccaaagugcu

SEQ ID NO: 257476 - RNA, 18 nt, Human
ccugggcucaagugaucc

SEQ ID NO: 257477 - RNA, 18 nt, Human
ccugggcucaagugaucc

SEQ ID NO: 257478 - RNA, 22 nt, Human
ccugggcucaagugauccuccu

SEQ ID NO: 257479 - RNA, 22 nt, Human
ccugggcucaagugauccuccu

SEQ ID NO: 257480 - RNA, 23 nt, Human
ccugggcucaagugauccuccug

SEQ ID NO: 257481 - RNA, 23 nt, Human
ccugggcucaagugauccuccug

SEQ ID NO: 257482 - RNA, 20 nt, Human
ccuggucuucagggcugcau

SEQ ID NO: 257483 - RNA, 20 nt, Human
ccuggucuucagggcugcau

SEQ ID NO: 257484 - RNA, 22 nt, Human
ccuuaucacuggacucuucuug

SEQ ID NO: 257485 - RNA, 22 nt, Human
ccuuaucacuggacucuucuug

SEQ ID NO: 257486 - RNA, 20 nt, Human
ccuuccaaccaggugcaccc

SEQ ID NO: 257487 - RNA, 18 nt, Human
ccuucccagccacucccu

SEQ ID NO: 257488 - RNA, 18 nt, Human
cgaggcgaguagacagca

SEQ ID NO: 257489 - RNA, 19 nt, Human
cggggcccugagcguaaug

SEQ ID NO: 257490 - RNA, 22 nt, Human
cgguccaccuauucagaaacuu

SEQ ID NO: 257491 - RNA, 18 nt, Human
cguagacuggggccauga

SEQ ID NO: 257492 - RNA, 18 nt, Human
cuaguuguccuuccaacc

SEQ ID NO: 257493 - RNA, 24 nt, Human
cucaagugauccuccugcuucagc

SEQ ID NO: 257494 - RNA, 24 nt, Human
cucaagugauccuccugcuucagc

SEQ ID NO: 257495 - RNA, 25 nt, Human
cucacccagcaucauggcauccagu

SEQ ID NO: 257496 - RNA, 25 nt, Human
cucacccagcaucauggcauccagu

SEQ ID NO: 257497 - RNA, 20 nt, Human
cucaggaccugccuucccca

SEQ ID NO: 257498 - RNA, 20 nt, Human
cucaggaccugccuucccca

SEQ ID NO: 257499 - RNA, 25 nt, Human
cucaggagugaaaaugcacaggaaa

SEQ ID NO: 257500 - RNA, 25 nt, Human
cucaggagugaaaaugcacaggaaa

SEQ ID NO: 257501 - RNA, 25 nt, Human
cucaggagugaaaaugcacaggaaa

SEQ ID NO: 257502 - RNA, 25 nt, Human
cucaggagugaaaaugcacaggaaa

SEQ ID NO: 257503 - RNA, 23 nt, Human
cucaggcugacuaacaauuugcc

SEQ ID NO: 257504 - RNA, 19 nt, Human
cuccagaggcuguccgugc

SEQ ID NO: 257505 - RNA, 20 nt, Human
cuccagaggcuguccgugcc

SEQ ID NO: 257506 - RNA, 23 nt, Human
cuccagaggcuguccgugccucu

SEQ ID NO: 257507 - RNA, 23 nt, Human
cuccagaggcuguccgugccucu

SEQ ID NO: 257508 - RNA, 21 nt, Human
cucccuccaccauugaccucc

SEQ ID NO: 257509 - RNA, 21 nt, Human
cucccuccaccauugaccucc

SEQ ID NO: 257510 - RNA, 21 nt, Human
cucccuccaccauugaccucc

SEQ ID NO: 257511 - RNA, 21 nt, Human
cucccuccaccauugaccucc

SEQ ID NO: 257512 - RNA, 22 nt, Human
cuccucaaccuggggaagacca

SEQ ID NO: 257513 - RNA, 23 nt, Human
cuccugggcucaagugauccucc

SEQ ID NO: 257514 - RNA, 25 nt, Human
cuccugggcucaagugauccuccug

SEQ ID NO: 257515 - RNA, 27 nt, Human
cucucccugcaggcugauucuucaaaa

SEQ ID NO: 257516 - RNA, 23 nt, Human
cugcuucagccucccaaagugcu

SEQ ID NO: 257517 - RNA, 24 nt, Human
cugcuucagccucccaaagugcua

SEQ ID NO: 257518 - RNA, 24 nt, Human
cugcuucagccucccaaagugcua

SEQ ID NO: 257519 - RNA, 19 nt, Human
cuggucuugaacuccuggg

SEQ ID NO: 257520 - RNA, 19 nt, Human
cuggucuugaacuccuggg

SEQ ID NO: 257521 - RNA, 24 nt, Human
cugucucuuggaugcuucuuucuc

SEQ ID NO: 257522 - RNA, 24 nt, Human
cugucucuuggaugcuucuuucuc

SEQ ID NO: 257523 - RNA, 22 nt, Human
cuuaaaguggggccgguagccc

SEQ ID NO: 257524 - RNA, 22 nt, Human
cuuaaaguggggccgguagccc

SEQ ID NO: 257525 - RNA, 20 nt, Human
cuugaacuccugggcucaag

SEQ ID NO: 257526 - RNA, 21 nt, Human
gaacaagucaccucuguccuc

SEQ ID NO: 257527 - RNA, 22 nt, Human
gaagugaauccauuguguucga

SEQ ID NO: 257528 - RNA, 22 nt, Human
gacaaaggcaaaggugaacagg

SEQ ID NO: 257529 - RNA, 22 nt, Human
gacaaaggcaaaggugaacagg

SEQ ID NO: 257530 - RNA, 18 nt, Human
gacccaggcaucucccuc

SEQ ID NO: 257531 - RNA, 18 nt, Human
gacccaggcaucucccuc

SEQ ID NO: 257532 - RNA, 18 nt, Human
gacccaggcaucucccuc

SEQ ID NO: 257533 - RNA, 18 nt, Human
gacccaggcaucucccuc

SEQ ID NO: 257534 - RNA, 22 nt, Human
gacccauucuaacucuuccccc

SEQ ID NO: 257535 - RNA, 22 nt, Human
gacccauucuaacucuuccccc

SEQ ID NO: 257536 - RNA, 20 nt, Human
gacccggccugagacuguca

SEQ ID NO: 257537 - RNA, 18 nt, Human
gcaaaggugaacaggaag

SEQ ID NO: 257538 - RNA, 20 nt, Human
gcagcucugucucuucuucu

SEQ ID NO: 257539 - RNA, 20 nt, Human
gcagcucugucucuucuucu

SEQ ID NO: 257540 - RNA, 23 nt, Human
gcccaagccccagagcauggccc

SEQ ID NO: 257541 - RNA, 18 nt, Human
gccucacccagcaucaug

SEQ ID NO: 257542 - RNA, 18 nt, Human
gccucacccagcaucaug

SEQ ID NO: 257543 - RNA, 19 nt, Human
gccuccuaccucagcuggg

SEQ ID NO: 257544 - RNA, 19 nt, Human
gccuccuaccucagcuggg

SEQ ID NO: 257545 - RNA, 20 nt, Human
gcuacagcaccugcaagguu

SEQ ID NO: 257546 - RNA, 21 nt, Human
gcuacagcaccugcaagguuc

SEQ ID NO: 257547 - RNA, 21 nt, Human
gcuacagcaccugcaagguuc

SEQ ID NO: 257548 - RNA, 19 nt, Human
gcucaagugauccuccugc

SEQ ID NO: 257549 - RNA, 21 nt, Human
gcuccagaggcuguccgugcc

SEQ ID NO: 257550 - RNA, 19 nt, Human
gcuucuugcuccaaggaga

SEQ ID NO: 257551 - RNA, 19 nt, Human
gcuucuugcuccaaggaga

SEQ ID NO: 257552 - RNA, 19 nt, Human
ggaagaacaggacccaggg

SEQ ID NO: 257553 - RNA, 19 nt, Human
ggaagaacaggacccaggg

SEQ ID NO: 257554 - RNA, 19 nt, Human
ggaagaacaggacccaggg

SEQ ID NO: 257555 - RNA, 19 nt, Human
ggaagaacaggacccaggg

SEQ ID NO: 257556 - RNA, 18 nt, Human
ggaagaccacagggcagu

SEQ ID NO: 257557 - RNA, 28 nt, Human
ggagccccucccaaagggcagacacuau

SEQ ID NO: 257558 - RNA, 20 nt, Human
ggaguccagccucugcuguu

SEQ ID NO: 257559 - RNA, 20 nt, Human
ggaguccagccucugcuguu

SEQ ID NO: 257560 - RNA, 22 nt, Human
ggaguccagccucugcuguugc

SEQ ID NO: 257561 - RNA, 18 nt, Human
ggcagcucugucucuucu

SEQ ID NO: 257562 - RNA, 18 nt, Human
ggcagcucugucucuucu

SEQ ID NO: 257563 - RNA, 27 nt, Human
ggcaugggacuggguucucccucuagg

SEQ ID NO: 257564 - RNA, 27 nt, Human
ggcaugggacuggguucucccucuagg

SEQ ID NO: 257565 - RNA, 20 nt, Human
gggaagaccacagggcagug

SEQ ID NO: 257566 - RNA, 19 nt, Human
gggaagccaggagacaucu

SEQ ID NO: 257567 - RNA, 19 nt, Human
gggaagccaggagacaucu

SEQ ID NO: 257568 - RNA, 20 nt, Human
gggagcagugcuaggcagag

SEQ ID NO: 257569 - RNA, 20 nt, Human
gggaggggccucacccagca

SEQ ID NO: 257570 - RNA, 20 nt, Human
gggaggggccucacccagca

SEQ ID NO: 257571 - RNA, 22 nt, Human
gggcagcucugucucuucuucu

SEQ ID NO: 257572 - RNA, 22 nt, Human
gggcagcucugucucuucuucu

SEQ ID NO: 257573 - RNA, 22 nt, Human
gggcgccaccucugcaagcccc

SEQ ID NO: 257574 - RNA, 19 nt, Human
gggcucaagugauccuccu

SEQ ID NO: 257575 - RNA, 19 nt, Human
gggcucaagugauccuccu

SEQ ID NO: 257576 - RNA, 21 nt, Human
gggcucaagugauccuccugc

SEQ ID NO: 257577 - RNA, 19 nt, Human
ggggaucugaguuagggga

SEQ ID NO: 257578 - RNA, 19 nt, Human
ggggaucugaguuagggga

SEQ ID NO: 257579 - RNA, 19 nt, Human
ggggaucugaguuagggga

SEQ ID NO: 257580 - RNA, 19 nt, Human
ggggaucugaguuagggga

SEQ ID NO: 257581 - RNA, 23 nt, Human
gggggggaaaugaaagggugggu

SEQ ID NO: 257582 - RNA, 23 nt, Human
gggggggaaaugaaagggugggu

SEQ ID NO: 257583 - RNA, 21 nt, Human
ggggguaucucaggcugacua

SEQ ID NO: 257584 - RNA, 19 nt, Human
ggguagcugcugaagucag

SEQ ID NO: 257585 - RNA, 19 nt, Human
ggguagcugcugaagucag

SEQ ID NO: 257586 - RNA, 21 nt, Human
ggguggcacuaauuuccuccu

SEQ ID NO: 257587 - RNA, 21 nt, Human
ggguggcacuaauuuccuccu

SEQ ID NO: 257588 - RNA, 22 nt, Human
ggugggugguggagccucaggg

SEQ ID NO: 257589 - RNA, 22 nt, Human
ggugggugguggagccucaggg

SEQ ID NO: 257590 - RNA, 22 nt, Human
ggugggugguggagccucaggg

SEQ ID NO: 257591 - RNA, 21 nt, Human
guaaucauaagcacauaaaug

SEQ ID NO: 257592 - RNA, 21 nt, Human
guaaucauaagcacauaaaug

SEQ ID NO: 257593 - RNA, 21 nt, Human
guaaucauaagcacauaaaug

SEQ ID NO: 257594 - RNA, 21 nt, Human
guaaucauaagcacauaaaug

SEQ ID NO: 257595 - RNA, 22 nt, Human
gucccaugucacucccauuugu

SEQ ID NO: 257596 - RNA, 24 nt, Human
gugauccuccugcuucagccuccc

SEQ ID NO: 257597 - RNA, 24 nt, Human
gugauccuccugcuucagccuccc

SEQ ID NO: 257598 - RNA, 18 nt, Human
gugccugccucaggaccu

SEQ ID NO: 257599 - RNA, 18 nt, Human
gugccugccucaggaccu

SEQ ID NO: 257600 - RNA, 24 nt, Human
guuugggguagcugcugaagucag

SEQ ID NO: 257601 - RNA, 22 nt, Human
uaaaauucccccagcuauguuc

SEQ ID NO: 257602 - RNA, 22 nt, Human
uaaaauucccccagcuauguuc

SEQ ID NO: 257603 - RNA, 18 nt, Human
uaaacuacccccaccccc

SEQ ID NO: 257604 - RNA, 18 nt, Human
uaaacuacccccaccccc

SEQ ID NO: 257605 - RNA, 24 nt, Human
uaaacuacccccacccccaccucc

SEQ ID NO: 257606 - RNA, 24 nt, Human
uaaacuacccccacccccaccucc

SEQ ID NO: 257607 - RNA, 21 nt, Human
uaaaugugauucucaaggauu

SEQ ID NO: 257608 - RNA, 21 nt, Human
uaaaugugauucucaaggauu

SEQ ID NO: 257609 - RNA, 21 nt, Human
uaaaugugauucucaaggauu

SEQ ID NO: 257610 - RNA, 21 nt, Human
uaaaugugauucucaaggauu

SEQ ID NO: 257611 - RNA, 24 nt, Human
uaacucuucccccucugacucucc

SEQ ID NO: 257612 - RNA, 24 nt, Human
uaacucuucccccucugacucucc

SEQ ID NO: 257613 - RNA, 22 nt, Human
uaagacacuguaacuagccucc

SEQ ID NO: 257614 - RNA, 19 nt, Human
uaccuucccagccacuccc

SEQ ID NO: 257615 - RNA, 19 nt, Human
uaccuucccagccacuccc

SEQ ID NO: 257616 - RNA, 22 nt, Human
uagacagaaacuuggggguauc

SEQ ID NO: 257617 - RNA, 21 nt, Human
uagacugggccaugagggccg

SEQ ID NO: 257618 - RNA, 23 nt, Human
uagccaccgcaccucgucuugaa

SEQ ID NO: 257619 - RNA, 23 nt, Human
uagccaccgcaccucgucuugaa

SEQ ID NO: 257620 - RNA, 21 nt, Human
uagcgccacaccuugucuccc

SEQ ID NO: 257621 - RNA, 21 nt, Human
uagcgccacaccuugucuccu

SEQ ID NO: 257622 - RNA, 23 nt, Human
uaggaaccucacccuccccucca

SEQ ID NO: 257623 - RNA, 21 nt, Human
uaggaugcaagugccuucucu

SEQ ID NO: 257624 - RNA, 21 nt, Human
uaggaugcaagugccuucucu

SEQ ID NO: 257625 - RNA, 21 nt, Human
uauaguuuucuccaucuugcu

SEQ ID NO: 257626 - RNA, 23 nt, Human
uauguugcccaagcuggucuuga

SEQ ID NO: 257627 - RNA, 23 nt, Human
uauguugcccaagcuggucuuga

SEQ ID NO: 257628 - RNA, 24 nt, Human
uauguugcccaagcuggucuugaa

SEQ ID NO: 257629 - RNA, 24 nt, Human
uauguugcccaagcuggucuugaa

SEQ ID NO: 257630 - RNA, 22 nt, Human
uauuagauccuucuagaggcuu

SEQ ID NO: 257631 - RNA, 23 nt, Human
ucagagccucggugauaucuucu

SEQ ID NO: 257632 - RNA, 23 nt, Human
uccaaccaggugcacccucucua

SEQ ID NO: 257633 - RNA, 24 nt, Human
uccaagauaccccaaccuccaggc

SEQ ID NO: 257634 - RNA, 25 nt, Human
uccaagauaccccaaccuccaggcc

SEQ ID NO: 257635 - RNA, 19 nt, Human
uccaaggagagagcauuga

SEQ ID NO: 257636 - RNA, 19 nt, Human
uccaaggagagagcauuga

SEQ ID NO: 257637 - RNA, 18 nt, Human
ucccaaagggcagacacu

SEQ ID NO: 257638 - RNA, 23 nt, Human
ucccaaagugcuaggauuauagc

SEQ ID NO: 257639 - RNA, 23 nt, Human
ucccaaagugcuaggauuauagc

SEQ ID NO: 257640 - RNA, 23 nt, Human
uccccuaaagaucuaauagagau

SEQ ID NO: 257641 - RNA, 19 nt, Human
ucccuccaccauugaccuc

SEQ ID NO: 257642 - RNA, 19 nt, Human
ucccuccaccauugaccuc

SEQ ID NO: 257643 - RNA, 19 nt, Human
ucccuccaccauugaccuc

SEQ ID NO: 257644 - RNA, 19 nt, Human
ucccuccaccauugaccuc

SEQ ID NO: 257645 - RNA, 20 nt, Human
ucccuccaccauugaccucc

SEQ ID NO: 257646 - RNA, 20 nt, Human
ucccuccaccauugaccucc

SEQ ID NO: 257647 - RNA, 20 nt, Human
ucccuccaccauugaccucc

SEQ ID NO: 257648 - RNA, 20 nt, Human
ucccuccaccauugaccucc

SEQ ID NO: 257649 - RNA, 18 nt, Human
ucccuggacaaaggcaaa

SEQ ID NO: 257650 - RNA, 18 nt, Human
ucccuggacaaaggcaaa

SEQ ID NO: 257651 - RNA, 18 nt, Human
ucccuuaccuucccagcc

SEQ ID NO: 257652 - RNA, 21 nt, Human
ucccuuaccuucccagccacu

SEQ ID NO: 257653 - RNA, 21 nt, Human
ucccuuaccuucccagccacu

SEQ ID NO: 257654 - RNA, 21 nt, Human
uccucaaccuggggaagacca

SEQ ID NO: 257655 - RNA, 20 nt, Human
uccucaaguaagacacugua

SEQ ID NO: 257656 - RNA, 18 nt, Human
uccucucuggcccauacc

SEQ ID NO: 257657 - RNA, 18 nt, Human
uccucucuggcccauacc

SEQ ID NO: 257658 - RNA, 21 nt, Human
uccugggcucaagugauccuc

SEQ ID NO: 257659 - RNA, 21 nt, Human
uccugggcucaagugauccuc

SEQ ID NO: 257660 - RNA, 22 nt, Human
uccugggcucaagugauccucc

SEQ ID NO: 257661 - RNA, 22 nt, Human
uccugggcucaagugauccucc

SEQ ID NO: 257662 - RNA, 24 nt, Human
uccugggcucaagugauccuccug

SEQ ID NO: 257663 - RNA, 24 nt, Human
uccugggcucaagugauccuccug

SEQ ID NO: 257664 - RNA, 25 nt, Human
uccuuaggaaccucacccuccccuc

SEQ ID NO: 257665 - RNA, 18 nt, Human
ucuaagacagacaggaaa

SEQ ID NO: 257666 - RNA, 20 nt, Human
ucuaagacagacaggaaaug

SEQ ID NO: 257667 - RNA, 20 nt, Human
ucuaagacagacaggaaaug

SEQ ID NO: 257668 - RNA, 20 nt, Human
ucuaagacagacaggaaaug

SEQ ID NO: 257669 - RNA, 23 nt, Human
ucucaggcugacuaacaauuugc

SEQ ID NO: 257670 - RNA, 24 nt, Human
ucucccuauguugcccaagcuggu

SEQ ID NO: 257671 - RNA, 24 nt, Human
ucucccuauguugcccaagcuggu

SEQ ID NO: 257672 - RNA, 24 nt, Human
ucucccugcaggcugauucuucaa

SEQ ID NO: 257673 - RNA, 23 nt, Human
ucucccuggacaaaggcaaaggu

SEQ ID NO: 257674 - RNA, 23 nt, Human
ucuccucaaccuggggaagacca

SEQ ID NO: 257675 - RNA, 23 nt, Human
ucuccucaaccuggggaagacca

SEQ ID NO: 257676 - RNA, 21 nt, Human
ucucuaacaggcaaucugggu

SEQ ID NO: 257677 - RNA, 23 nt, Human
ucucuuaugaacauggaguuagc

SEQ ID NO: 257678 - RNA, 23 nt, Human
ucugcaagccccaggacccggcc

SEQ ID NO: 257679 - RNA, 25 nt, Human
ucuguccucaggugauagcuuuugg

SEQ ID NO: 257680 - RNA, 20 nt, Human
ucugucucuucuucuuccuc

SEQ ID NO: 257681 - RNA, 20 nt, Human
ucugucucuucuucuuccuc

SEQ ID NO: 257682 - RNA, 22 nt, Human
ucuguuccugguuucccagaug

SEQ ID NO: 257683 - RNA, 22 nt, Human
ucuguuccugguuucccagaug

SEQ ID NO: 257684 - RNA, 21 nt, Human
ucuugaacuccugggcucaag

SEQ ID NO: 257685 - RNA, 21 nt, Human
ucuugaacuccugggcucaag

SEQ ID NO: 257686 - RNA, 22 nt, Human
ucuugaacuccugggcucaagu

SEQ ID NO: 257687 - RNA, 23 nt, Human
ucuugaacuccugggcucaagug

SEQ ID NO: 257688 - RNA, 23 nt, Human
ucuugaacuccugggcucaagug

SEQ ID NO: 257689 - RNA, 19 nt, Human
ucuugccuuuugcccaaag

SEQ ID NO: 257690 - RNA, 19 nt, Human
ucuugccuuuugcccaaag

SEQ ID NO: 257691 - RNA, 18 nt, Human
ucuuggaugcuucuuucu

SEQ ID NO: 257692 - RNA, 18 nt, Human
ucuuggaugcuucuuucu

SEQ ID NO: 257693 - RNA, 25 nt, Human
ugaacuccugggcucaagugauccu

SEQ ID NO: 257694 - RNA, 25 nt, Human
ugaacuccugggcucaagugauccu

SEQ ID NO: 257695 - RNA, 19 nt, Human
ugaagaaguagacucggcc

SEQ ID NO: 257696 - RNA, 19 nt, Human
ugaagaaguagacucggcc

SEQ ID NO: 257697 - RNA, 20 nt, Human
ugacaaauccucuguccccu

SEQ ID NO: 257698 - RNA, 20 nt, Human
ugacaaauccucuguccccu

SEQ ID NO: 257699 - RNA, 21 nt, Human
ugacccaccugccagagucuu

SEQ ID NO: 257700 - RNA, 21 nt, Human
ugacccaccugccagagucuu

SEQ ID NO: 257701 - RNA, 24 nt, Human
ugacccaguccucucuggcccaua

SEQ ID NO: 257702 - RNA, 24 nt, Human
ugacccaguccucucuggcccaua

SEQ ID NO: 257703 - RNA, 26 nt, Human
ugacccaguccucucuggcccauacc

SEQ ID NO: 257704 - RNA, 26 nt, Human
ugacccaguccucucuggcccauacc

SEQ ID NO: 257705 - RNA, 22 nt, Human
ugacccauucuaacucuucccc

SEQ ID NO: 257706 - RNA, 22 nt, Human
ugacccauucuaacucuucccc

SEQ ID NO: 257707 - RNA, 22 nt, Human
ugaccuccagagaagagaugac

SEQ ID NO: 257708 - RNA, 21 nt, Human
ugaccugagauuucugggagc

SEQ ID NO: 257709 - RNA, 21 nt, Human
ugaccugagauuucugggagc

SEQ ID NO: 257710 - RNA, 24 nt, Human
ugagagcaugugaggaaagaacaa

SEQ ID NO: 257711 - RNA, 21 nt, Human
ugagcagacagguauuucauu

SEQ ID NO: 257712 - RNA, 21 nt, Human
ugagcagacagguauuucauu

SEQ ID NO: 257713 - RNA, 21 nt, Human
ugagcagacagguauuucauu

SEQ ID NO: 257714 - RNA, 19 nt, Human
ugaugggaagaagggcucu

SEQ ID NO: 257715 - RNA, 19 nt, Human
ugaugggaagaagggcucu

SEQ ID NO: 257716 - RNA, 20 nt, Human
ugcaaauggggaaucugaga

SEQ ID NO: 257717 - RNA, 20 nt, Human
ugcaaauggggaaucugaga

SEQ ID NO: 257718 - RNA, 20 nt, Human
ugcaaauggggaaucugaga

SEQ ID NO: 257719 - RNA, 20 nt, Human
ugcaaauggggaaucugaga

SEQ ID NO: 257720 - RNA, 19 nt, Human
ugccagagucuugccuuuu

SEQ ID NO: 257721 - RNA, 19 nt, Human
ugccagagucuugccuuuu

SEQ ID NO: 257722 - RNA, 18 nt, Human
ugccaggcacuucacaua

SEQ ID NO: 257723 - RNA, 18 nt, Human
ugccaggcacuucacaua

SEQ ID NO: 257724 - RNA, 18 nt, Human
ugccaggcacuucacaua

SEQ ID NO: 257725 - RNA, 18 nt, Human
ugccaggcacuucacaua

SEQ ID NO: 257726 - RNA, 18 nt, Human
ugccauagagagccugga

SEQ ID NO: 257727 - RNA, 18 nt, Human
ugccauagagagccugga

SEQ ID NO: 257728 - RNA, 20 nt, Human
ugcccaaaggagccuggucu

SEQ ID NO: 257729 - RNA, 20 nt, Human
ugcccaaaggagccuggucu

SEQ ID NO: 257730 - RNA, 22 nt, Human
ugcccaaaggagccuggucuuc

SEQ ID NO: 257731 - RNA, 22 nt, Human
ugcccaaaggagccuggucuuc

SEQ ID NO: 257732 - RNA, 24 nt, Human
ugcccaagcuggucuugaacuccu

SEQ ID NO: 257733 - RNA, 24 nt, Human
ugcccaagcuggucuugaacuccu

SEQ ID NO: 257734 - RNA, 19 nt, Human
ugccucugaccugagauuu

SEQ ID NO: 257735 - RNA, 24 nt, Human
ugccugccuaagccaccuuuaauu

SEQ ID NO: 257736 - RNA, 24 nt, Human
ugcuucagccucccaaagugcuag

SEQ ID NO: 257737 - RNA, 24 nt, Human
ugcuucagccucccaaagugcuag

SEQ ID NO: 257738 - RNA, 19 nt, Human
ugcuucuuucuccccuuuc

SEQ ID NO: 257739 - RNA, 19 nt, Human
ugcuucuuucuccccuuuc

SEQ ID NO: 257740 - RNA, 19 nt, Human
uggccuuucccccugggcc

SEQ ID NO: 257741 - RNA, 21 nt, Human
uggcuccgaacucucccuccc

SEQ ID NO: 257742 - RNA, 18 nt, Human
uggcuuccuaguuguccu

SEQ ID NO: 257743 - RNA, 24 nt, Human
ugggagcaugugaauaaaauggca

SEQ ID NO: 257744 - RNA, 24 nt, Human
ugggagcaugugaauaaaauggca

SEQ ID NO: 257745 - RNA, 19 nt, Human
ugggagggagggagaacau

SEQ ID NO: 257746 - RNA, 19 nt, Human
ugggagggagggagaacau

SEQ ID NO: 257747 - RNA, 20 nt, Human
ugggcucaagugauccuccu

SEQ ID NO: 257748 - RNA, 20 nt, Human
ugggcucaagugauccuccu

SEQ ID NO: 257749 - RNA, 24 nt, Human
ugggcucaagugauccuccugcuu

SEQ ID NO: 257750 - RNA, 24 nt, Human
ugggcucaagugauccuccugcuu

SEQ ID NO: 257751 - RNA, 22 nt, Human
uggggaaucugagauucaacaa

SEQ ID NO: 257752 - RNA, 22 nt, Human
uggggaaucugagauucaacaa

SEQ ID NO: 257753 - RNA, 22 nt, Human
uggggaaucugagauucaacaa

SEQ ID NO: 257754 - RNA, 22 nt, Human
uggggaaucugagauucaacaa

SEQ ID NO: 257755 - RNA, 18 nt, Human
ugggggggaaaugaaagg

SEQ ID NO: 257756 - RNA, 18 nt, Human
ugggggggaaaugaaagg

SEQ ID NO: 257757 - RNA, 20 nt, Human
ugggggggaaaugaaagggu

SEQ ID NO: 257758 - RNA, 20 nt, Human
ugggggggaaaugaaagggu

SEQ ID NO: 257759 - RNA, 22 nt, Human
uggguuucuguuuggccuuucc

SEQ ID NO: 257760 - RNA, 22 nt, Human
uggguuucuguuuggccuuucc

SEQ ID NO: 257761 - RNA, 26 nt, Human
ugguccacucaacaaaacaaaagccc

SEQ ID NO: 257762 - RNA, 18 nt, Human
ugguugagaggccaauag

SEQ ID NO: 257763 - RNA, 24 nt, Human
ugucuaagacagacaggaaaugga

SEQ ID NO: 257764 - RNA, 24 nt, Human
ugucuaagacagacaggaaaugga

SEQ ID NO: 257765 - RNA, 24 nt, Human
ugucuaagacagacaggaaaugga

SEQ ID NO: 257766 - RNA, 24 nt, Human
ugucuaagacagacaggaaaugga

SEQ ID NO: 257767 - RNA, 24 nt, Human
uguugcugcucuuuucuuucucug

SEQ ID NO: 257768 - RNA, 24 nt, Human
uguugcugcucuuuucuuucucug

SEQ ID NO: 257769 - RNA, 25 nt, Human
uuaaagaagugaauccauuguguuc

SEQ ID NO: 257770 - RNA, 20 nt, Human
uuccaaggcauuugauaccu

SEQ ID NO: 257771 - RNA, 20 nt, Human
uuccaaggcauuugauaccu

SEQ ID NO: 257772 - RNA, 20 nt, Human
uuccaaggcccuugcucagu

SEQ ID NO: 257773 - RNA, 20 nt, Human
uuccaaggcccuugcucagu

SEQ ID NO: 257774 - RNA, 20 nt, Human
uuccaaggcccuugcucagu

SEQ ID NO: 257775 - RNA, 20 nt, Human
uuccaaggcccuugcucagu

SEQ ID NO: 257776 - RNA, 24 nt, Human
uuccaaggcccuugcucaguuuuc

SEQ ID NO: 257777 - RNA, 23 nt, Human
uuccagauguguucuaguggccc

SEQ ID NO: 257778 - RNA, 19 nt, Human
uuccauggucauuaaugcc

SEQ ID NO: 257779 - RNA, 24 nt, Human
uucucaucucccucccuuuuauag

SEQ ID NO: 257780 - RNA, 21 nt, Human
uucuccaucuugcugcauuuc

SEQ ID NO: 257781 - RNA, 23 nt, Human
uucugggagccuugggggagcag

SEQ ID NO: 257782 - RNA, 21 nt, Human
uugaaagcauaggucuuccca

SEQ ID NO: 257783 - RNA, 24 nt, Human
uugcaaauggggaaucugagauuc

SEQ ID NO: 257784 - RNA, 24 nt, Human
uugcaaauggggaaucugagauuc

SEQ ID NO: 257785 - RNA, 23 nt, Human
uugcagagacagggucucccuau

SEQ ID NO: 257786 - RNA, 23 nt, Human
uugcagagacagggucucccuau

SEQ ID NO: 257787 - RNA, 21 nt, Human
uugcgccugcuacagcaccug

SEQ ID NO: 257788 - RNA, 21 nt, Human
uugcgccugcuacagcaccug

SEQ ID NO: 257789 - RNA, 21 nt, Human
uugcgccugcuacagcaccug

SEQ ID NO: 257790 - RNA, 19 nt, Human
uugcugcauuuccagaugu

SEQ ID NO: 257791 - RNA, 23 nt, Human
uugcugcauuuccagauguguuc

SEQ ID NO: 257792 - RNA, 23 nt, Human
uuggaugcuucuuucuccccuuu

SEQ ID NO: 257793 - RNA, 23 nt, Human
uuggaugcuucuuucuccccuuu

SEQ ID NO: 257794 - RNA, 22 nt, Human
uuuauuuuuuugcagagacagg

SEQ ID NO: 257795 - RNA, 22 nt, Human
uuuauuuuuuugcagagacagg

SEQ ID NO: 257796 - RNA, 23 nt, Human
uuuauuuuuuugcagagacaggg

SEQ ID NO: 257797 - RNA, 23 nt, Human
uuuauuuuuuugcagagacaggg

SEQ ID NO: 257798 - RNA, 19 nt, Human
uuucccccugggccccaua

SEQ ID NO: 257799 - RNA, 19 nt, Human
uuucccccugggccccaua

SEQ ID NO: 257800 - RNA, 19 nt, Human
uuugaugggaagaagggcu

SEQ ID NO: 257801 - RNA, 25 nt, Human
uuuuuauuuuuuugcagagacaggg

SEQ ID NO: 257802 - RNA, 25 nt, Human
uuuuuauuuuuuugcagagacaggg

SEQ ID NO: 257803 - RNA, 21 nt, Human
aaaaaaacaaagugcauacaa

SEQ ID NO: 257804 - RNA, 24 nt, Human
aaaaacaagacccaaagaaaaaaa

SEQ ID NO: 257805 - RNA, 22 nt, Human
aaaacaaagugcauacaaagca

SEQ ID NO: 257806 - RNA, 25 nt, Human
aaagguucuaaggcagccagcagug

SEQ ID NO: 257807 - RNA, 21 nt, Human
aacaagacccaaagaaaaaaa

SEQ ID NO: 257808 - RNA, 25 nt, Human
aagaaaaaaacaaagugcauacaaa

SEQ ID NO: 257809 - RNA, 21 nt, Human
aagacccaaagaaaaaaacaa

SEQ ID NO: 257810 - RNA, 18 nt, Human
agaagagccugaagugug

SEQ ID NO: 257811 - RNA, 21 nt, Human
agcggcucaugguccggcccc

SEQ ID NO: 257812 - RNA, 19 nt, Human
aggagccacucucuggaau

SEQ ID NO: 257813 - RNA, 21 nt, Human
aggcagccagcagugaaaagc

SEQ ID NO: 257814 - RNA, 19 nt, Human
aggggcagggagggcugag

SEQ ID NO: 257815 - RNA, 19 nt, Human
aggggcagggagggcugag

SEQ ID NO: 257816 - RNA, 19 nt, Human
aguggaaaaaaaaaacaag

SEQ ID NO: 257817 - RNA, 21 nt, Human
caaagaaaaaaacaaagugca

SEQ ID NO: 257818 - RNA, 22 nt, Human
cacucucuggaaucuuaaauua

SEQ ID NO: 257819 - RNA, 25 nt, Human
cagcagugaaaagccaggggucugg

SEQ ID NO: 257820 - RNA, 19 nt, Human
cagccuccagccaccgccu

SEQ ID NO: 257821 - RNA, 18 nt, Human
cagguaggagugagaaug

SEQ ID NO: 257822 - RNA, 18 nt, Human
cauggggaaugguugaag

SEQ ID NO: 257823 - RNA, 22 nt, Human
ccaggccccuccggguccuucu

SEQ ID NO: 257824 - RNA, 24 nt, Human
cccaaagaaaaaaacaaagugcau

SEQ ID NO: 257825 - RNA, 24 nt, Human
cccaaagcagggcugcguugaaaa

SEQ ID NO: 257826 - RNA, 25 nt, Human
cccccgccgccgccgccgccgccgg

SEQ ID NO: 257827 - RNA, 20 nt, Human
cccccgcgccccagcccccg

SEQ ID NO: 257828 - RNA, 21 nt, Human
cccccgcgccccagcccccgc

SEQ ID NO: 257829 - RNA, 19 nt, Human
ccccgccgccgccgccgcc

SEQ ID NO: 257830 - RNA, 21 nt, Human
ccccgccgccgccgccgccgc

SEQ ID NO: 257831 - RNA, 20 nt, Human
ccccgcgccccagcccccgc

SEQ ID NO: 257832 - RNA, 18 nt, Human
ccccgcgcgucgcccggg

SEQ ID NO: 257833 - RNA, 18 nt, Human
cccggcucagcggcucau

SEQ ID NO: 257834 - RNA, 25 nt, Human
ccgccgccgccgccgcagguccugg

SEQ ID NO: 257835 - RNA, 18 nt, Human
ccgccgccgccgccgccg

SEQ ID NO: 257836 - RNA, 18 nt, Human
ccgccgccgccgccgccg

SEQ ID NO: 257837 - RNA, 21 nt, Human
ccgccgccgccgccgccgcag

SEQ ID NO: 257838 - RNA, 22 nt, Human
ccggguccuucucuaguucucc

SEQ ID NO: 257839 - RNA, 26 nt, Human
ccuccggguccuucucuaggggccgc

SEQ ID NO: 257840 - RNA, 22 nt, Human
ccugguccgcggcgcagggcug

SEQ ID NO: 257841 - RNA, 18 nt, Human
ccugugggagccagggcc

SEQ ID NO: 257842 - RNA, 23 nt, Human
cgccgccgccgccgcaggucccc

SEQ ID NO: 257843 - RNA, 20 nt, Human
cgcuggcucgguggccuggg

SEQ ID NO: 257844 - RNA, 22 nt, Human
cggcccccgcgccccagccccc

SEQ ID NO: 257845 - RNA, 21 nt, Human
cucagcggcucaugguccggc

SEQ ID NO: 257846 - RNA, 22 nt, Human
cucccuggccccgcgcgucgcc

SEQ ID NO: 257847 - RNA, 18 nt, Human
cuccggguccuucucuag

SEQ ID NO: 257848 - RNA, 23 nt, Human
cuggccccgcgcgucgcccgggg

SEQ ID NO: 257849 - RNA, 18 nt, Human
cuggcucgguggccuggg

SEQ ID NO: 257850 - RNA, 24 nt, Human
cugguccgcggcgcagggcugcgc

SEQ ID NO: 257851 - RNA, 25 nt, Human
gaaaaaaaaaacaagacccaaagaa

SEQ ID NO: 257852 - RNA, 24 nt, Human
gaaaaaaacaaagugcauacaaag

SEQ ID NO: 257853 - RNA, 22 nt, Human
gagaagagccugaaguguggca

SEQ ID NO: 257854 - RNA, 20 nt, Human
gagcugaaggcacggcugcc

SEQ ID NO: 257855 - RNA, 24 nt, Human
gauuagcuguagagcugaaggcac

SEQ ID NO: 257856 - RNA, 23 nt, Human
gcagcaccagggcagcccaaagc

SEQ ID NO: 257857 - RNA, 24 nt, Human
gcagugaaaagccaggggucugga

SEQ ID NO: 257858 - RNA, 20 nt, Human
gcccccgccgccgccgccgc

SEQ ID NO: 257859 - RNA, 21 nt, Human
gccucgccgccugguuggagc

SEQ ID NO: 257860 - RNA, 19 nt, Human
ggaggggcagggagggcug

SEQ ID NO: 257861 - RNA, 18 nt, Human
ggccccuccggguccuuc

SEQ ID NO: 257862 - RNA, 23 nt, Human
ggccugggguuugcccggcucag

SEQ ID NO: 257863 - RNA, 24 nt, Human
gggaaggggcgccugggaggagua

SEQ ID NO: 257864 - RNA, 22 nt, Human
gggcagggagggcugagcggga

SEQ ID NO: 257865 - RNA, 18 nt, Human
ggggaaugguugaaggga

SEQ ID NO: 257866 - RNA, 19 nt, Human
gugucuuuauucauacuug

SEQ ID NO: 257867 - RNA, 20 nt, Human
guugugaaaggagaagagcc

SEQ ID NO: 257868 - RNA, 24 nt, Human
uaagaaagguucuaaggcagccag

SEQ ID NO: 257869 - RNA, 25 nt, Human
uaaggcagccagcagugaaaagcca

SEQ ID NO: 257870 - RNA, 27 nt, Human
uacagucagcaucuauucuugggcacc

SEQ ID NO: 257871 - RNA, 21 nt, Human
uaggugucuuuauucauacuu

SEQ ID NO: 257872 - RNA, 18 nt, Human
ucacuaugugggcugaga

SEQ ID NO: 257873 - RNA, 23 nt, Human
ucaugguccggcccccgcgcccc

SEQ ID NO: 257874 - RNA, 25 nt, Human
ugaaguguggcagcaccagggcagc

SEQ ID NO: 257875 - RNA, 19 nt, Human
ugagaaugcugauuagcug

SEQ ID NO: 257876 - RNA, 18 nt, Human
ugagcgggaagccacggc

SEQ ID NO: 257877 - RNA, 21 nt, Human
ugaggaagucuggaugcagcg

SEQ ID NO: 257878 - RNA, 22 nt, Human
uggagaagagacucgguaggga

SEQ ID NO: 257879 - RNA, 20 nt, Human
uggggaaugguugaagggag

SEQ ID NO: 257880 - RNA, 19 nt, Human
ugguugaagggaggggcag

SEQ ID NO: 257881 - RNA, 19 nt, Human
uuagggguggcucugaggg

SEQ ID NO: 257882 - RNA, 25 nt, Human
uucuaaguggaaaaaaaaaacaaga

SEQ ID NO: 257883 - RNA, 21 nt, Human
uuggagccugguccgcggcgc

SEQ ID NO: 257884 - RNA, 22 nt, Human
aaguaaaaauugggaaauuuau

SEQ ID NO: 257885 - RNA, 22 nt, Human
caacuaugaaaaaaauuggaag

SEQ ID NO: 257886 - RNA, 23 nt, Human
ccaccacuagucuuccuccugga

SEQ ID NO: 257887 - RNA, 21 nt, Human
cucuccuacauucugcuuuag

SEQ ID NO: 257888 - RNA, 21 nt, Human
cuuuuaaguaaaaauugggaa

SEQ ID NO: 257889 - RNA, 27 nt, Human
gaaaaaauaauggugucuaacugcaga

SEQ ID NO: 257890 - RNA, 23 nt, Human
ggaaauaaaaaucaaacggauca

SEQ ID NO: 257891 - RNA, 24 nt, Human
uauacaacuaugaaaaaaauugga

SEQ ID NO: 257892 - RNA, 22 nt, Human
ucuaauguggauugaaauucug

SEQ ID NO: 257893 - RNA, 28 nt, Human
uggccacaaaagccauugcuuguaaaua

SEQ ID NO: 257894 - RNA, 21 nt, Human
ugucauggaauccaccacuag

SEQ ID NO: 257895 - RNA, 23 nt, Human
uggggcucagggcugcauggggc

SEQ ID NO: 257896 - RNA, 24 nt, Human
aaacagccagcuacugccccccac

SEQ ID NO: 257897 - RNA, 23 nt, Human
aaagaaacugacagaggcccaaa

SEQ ID NO: 257898 - RNA, 18 nt, Human
aaagucuccugccuucug

SEQ ID NO: 257899 - RNA, 18 nt, Human
aacagacaaggggccucc

SEQ ID NO: 257900 - RNA, 19 nt, Human
aacagccagcuacugcccc

SEQ ID NO: 257901 - RNA, 21 nt, Human
aacagccagcuacugcccccc

SEQ ID NO: 257902 - RNA, 24 nt, Human
aacagccagcuacugccccccaca

SEQ ID NO: 257903 - RNA, 18 nt, Human
aagcacuagggggucacu

SEQ ID NO: 257904 - RNA, 19 nt, Human
aagggggccuggcuggggc

SEQ ID NO: 257905 - RNA, 26 nt, Human
aagugcgcgguggagucagcggaggg

SEQ ID NO: 257906 - RNA, 18 nt, Human
acagaaaugccacgaaac

SEQ ID NO: 257907 - RNA, 18 nt, Human
acagacaaggggccuccg

SEQ ID NO: 257908 - RNA, 20 nt, Human
acauggaaaagaaacugaca

SEQ ID NO: 257909 - RNA, 19 nt, Human
accccacccugagugagga

SEQ ID NO: 257910 - RNA, 20 nt, Human
acccugagugaggauucagg

SEQ ID NO: 257911 - RNA, 19 nt, Human
acugccccccacaaucccc

SEQ ID NO: 257912 - RNA, 28 nt, Human
agaggggcaaggcacagcuucgcaguca

SEQ ID NO: 257913 - RNA, 22 nt, Human
agccacagaaaugccacgaaac

SEQ ID NO: 257914 - RNA, 24 nt, Human
aggaagcacuagggggucacugag

SEQ ID NO: 257915 - RNA, 20 nt, Human
aggaggagguggguggcggg

SEQ ID NO: 257916 - RNA, 21 nt, Human
aggcaguucugggcccaggga

SEQ ID NO: 257917 - RNA, 22 nt, Human
aggcggguuccgguggcagcgc

SEQ ID NO: 257918 - RNA, 19 nt, Human
agucagcggagggucccgg

SEQ ID NO: 257919 - RNA, 18 nt, Human
aguggggacagggugaac

SEQ ID NO: 257920 - RNA, 19 nt, Human
aguucugggcccagggagg

SEQ ID NO: 257921 - RNA, 26 nt, Human
aguugaugggagucaagcuguucucu

SEQ ID NO: 257922 - RNA, 20 nt, Human
augagcaacuggggcaaccc

SEQ ID NO: 257923 - RNA, 22 nt, Human
auggaaggcaguucugggccca

SEQ ID NO: 257924 - RNA, 18 nt, Human
caacuggggcaaccccuc

SEQ ID NO: 257925 - RNA, 18 nt, Human
caaugaccaggccugagc

SEQ ID NO: 257926 - RNA, 18 nt, Human
caccaguguggcagugac

SEQ ID NO: 257927 - RNA, 26 nt, Human
caccccucacucuagagcuaaggccu

SEQ ID NO: 257928 - RNA, 24 nt, Human
cacugcagagccacagaaaugcca

SEQ ID NO: 257929 - RNA, 21 nt, Human
cagaaaugccacgaaacagcc

SEQ ID NO: 257930 - RNA, 19 nt, Human
cagcccgggccgccggcgg

SEQ ID NO: 257931 - RNA, 20 nt, Human
cagccgggagggaacgacgg

SEQ ID NO: 257932 - RNA, 21 nt, Human
caggccugagccaggguucgg

SEQ ID NO: 257933 - RNA, 20 nt, Human
cagguaacugaccaaagucu

SEQ ID NO: 257934 - RNA, 18 nt, Human
caguggccaggcggggcg

SEQ ID NO: 257935 - RNA, 19 nt, Human
caguggccaggcggggcgg

SEQ ID NO: 257936 - RNA, 20 nt, Human
cauacauggaaaagaaacug

SEQ ID NO: 257937 - RNA, 22 nt, Human
ccaaaucguuuccuggcagccc

SEQ ID NO: 257938 - RNA, 21 nt, Human
ccacagccucagcuccaggaa

SEQ ID NO: 257939 - RNA, 22 nt, Human
ccaguguggcagugacuguagg

SEQ ID NO: 257940 - RNA, 20 nt, Human
cccacaauccccgcgacuag

SEQ ID NO: 257941 - RNA, 26 nt, Human
cccacagccucagcuccaggaagcac

SEQ ID NO: 257942 - RNA, 20 nt, Human
cccagcccgggccgccggcc

SEQ ID NO: 257943 - RNA, 24 nt, Human
cccagcgccaggcgaccggucccc

SEQ ID NO: 257944 - RNA, 20 nt, Human
cccccacaauccccgcgacu

SEQ ID NO: 257945 - RNA, 18 nt, Human
cccccagguuccacccac

SEQ ID NO: 257946 - RNA, 20 nt, Human
cccccagguuccacccaccc

SEQ ID NO: 257947 - RNA, 19 nt, Human
ccccgccgccgccgccccu

SEQ ID NO: 257948 - RNA, 20 nt, Human
ccccugaaggcggguuccgg

SEQ ID NO: 257949 - RNA, 19 nt, Human
ccccugcuuaguccgcgcc

SEQ ID NO: 257950 - RNA, 24 nt, Human
cccgccccuccccgggcucgggag

SEQ ID NO: 257951 - RNA, 26 nt, Human
cccgggcucgggaggcgggguccccc

SEQ ID NO: 257952 - RNA, 21 nt, Human
cccugcgcgggagaucccccc

SEQ ID NO: 257953 - RNA, 18 nt, Human
ccgccgccgccgccccug

SEQ ID NO: 257954 - RNA, 19 nt, Human
ccgggccuggagagggcgg

SEQ ID NO: 257955 - RNA, 21 nt, Human
ccuccccgccccuccccgggc

SEQ ID NO: 257956 - RNA, 18 nt, Human
ccugaaggcggguuccgg

SEQ ID NO: 257957 - RNA, 23 nt, Human
ccuguccucuaacgacccaggaa

SEQ ID NO: 257958 - RNA, 20 nt, Human
ccuuguccuccccgccccuc

SEQ ID NO: 257959 - RNA, 23 nt, Human
cgaaacagccagcuacugccccc

SEQ ID NO: 257960 - RNA, 22 nt, Human
cgaagggggccuggcuggggcc

SEQ ID NO: 257961 - RNA, 19 nt, Human
cgaccagguccagcggcgg

SEQ ID NO: 257962 - RNA, 23 nt, Human
cgaccagguccagcggcggggga

SEQ ID NO: 257963 - RNA, 22 nt, Human
cgagaaaagcuggcucuuccug

SEQ ID NO: 257964 - RNA, 23 nt, Human
cgcauggucccagcgcgcgugcg

SEQ ID NO: 257965 - RNA, 21 nt, Human
cgccaggcgaccgguccccgc

SEQ ID NO: 257966 - RNA, 21 nt, Human
cgcgcccgagcccccguccgu

SEQ ID NO: 257967 - RNA, 23 nt, Human
cgggagggaacgacgggggcgac

SEQ ID NO: 257968 - RNA, 18 nt, Human
cgguggagucagcggagg

SEQ ID NO: 257969 - RNA, 21 nt, Human
cugagcccagcgccaggcgac

SEQ ID NO: 257970 - RNA, 22 nt, Human
cugggcccagggaggugcccaa

SEQ ID NO: 257971 - RNA, 18 nt, Human
gaggaggagguggguggc

SEQ ID NO: 257972 - RNA, 19 nt, Human
gaggaggagguggguggcg

SEQ ID NO: 257973 - RNA, 24 nt, Human
gcagcgccggggucucccgaaucg

SEQ ID NO: 257974 - RNA, 19 nt, Human
gcauggucccagcgcgcgu

SEQ ID NO: 257975 - RNA, 20 nt, Human
gcccagaauucccagguaac

SEQ ID NO: 257976 - RNA, 22 nt, Human
gcccccagguuccacccacccc

SEQ ID NO: 257977 - RNA, 20 nt, Human
gccguggagggcgcuguucg

SEQ ID NO: 257978 - RNA, 24 nt, Human
gccuggggaggaggaggugggugg

SEQ ID NO: 257979 - RNA, 22 nt, Human
ggaagcacuagggggucacuga

SEQ ID NO: 257980 - RNA, 22 nt, Human
ggacguggcgcauggguccuca

SEQ ID NO: 257981 - RNA, 19 nt, Human
ggagagucccaggacugcg

SEQ ID NO: 257982 - RNA, 19 nt, Human
ggagcagaacggggugaga

SEQ ID NO: 257983 - RNA, 23 nt, Human
ggccuggggaggaggaggugggu

SEQ ID NO: 257984 - RNA, 21 nt, Human
gggaacgacgggggcgacgac

SEQ ID NO: 257985 - RNA, 25 nt, Human
gggagcaacggaaaagguuaacagc

SEQ ID NO: 257986 - RNA, 18 nt, Human
gggggucccgggaagugc

SEQ ID NO: 257987 - RNA, 21 nt, Human
gggucgggugggcccgggaau

SEQ ID NO: 257988 - RNA, 20 nt, Human
gggugggagaggggcaaggc

SEQ ID NO: 257989 - RNA, 21 nt, Human
ggguucuuggggauagaaggg

SEQ ID NO: 257990 - RNA, 18 nt, Human
ggucacugaggcuggaca

SEQ ID NO: 257991 - RNA, 19 nt, Human
gguccagcggcgggggacu

SEQ ID NO: 257992 - RNA, 24 nt, Human
ggugaggccgcgggcccgccccuu

SEQ ID NO: 257993 - RNA, 21 nt, Human
ggugcaagcagggaagggguu

SEQ ID NO: 257994 - RNA, 19 nt, Human
guccagcggcgggggacuc

SEQ ID NO: 257995 - RNA, 18 nt, Human
gucccugucuuuccacca

SEQ ID NO: 257996 - RNA, 22 nt, Human
guccucaggggugauaucuggg

SEQ ID NO: 257997 - RNA, 18 nt, Human
gugcgcgguggagucagc

SEQ ID NO: 257998 - RNA, 21 nt, Human
uaaaacuguggggagugggga

SEQ ID NO: 257999 - RNA, 22 nt, Human
uaaaaugcagauuccugacccc

SEQ ID NO: 258000 - RNA, 21 nt, Human
uacaaauuucccccuccucau

SEQ ID NO: 258001 - RNA, 25 nt, Human
uacauggaaaagaaacugacagagg

SEQ ID NO: 258002 - RNA, 19 nt, Human
ucacugaggcuggacagca

SEQ ID NO: 258003 - RNA, 23 nt, Human
ucagggugagugugggaucugca

SEQ ID NO: 258004 - RNA, 24 nt, Human
uccaccacccaggacguggcgcau

SEQ ID NO: 258005 - RNA, 18 nt, Human
uccacccaccccucacuc

SEQ ID NO: 258006 - RNA, 18 nt, Human
ucccggagggccaggguc

SEQ ID NO: 258007 - RNA, 20 nt, Human
ucccuccagccacugauucc

SEQ ID NO: 258008 - RNA, 23 nt, Human
uccuccccgccccuccccgggcu

SEQ ID NO: 258009 - RNA, 18 nt, Human
uccugagugggaugaaua

SEQ ID NO: 258010 - RNA, 21 nt, Human
uccuggaaaaggaagguccug

SEQ ID NO: 258011 - RNA, 19 nt, Human
ucuagaagaauaguuccag

SEQ ID NO: 258012 - RNA, 20 nt, Human
ucuuggggauagaaggguuc

SEQ ID NO: 258013 - RNA, 19 nt, Human
ugagcaacuggggcaaccc

SEQ ID NO: 258014 - RNA, 20 nt, Human
ugaggagacugagcccagcg

SEQ ID NO: 258015 - RNA, 23 nt, Human
ugaggaggcaaugaccaggccug

SEQ ID NO: 258016 - RNA, 24 nt, Human
ugaguugaugggagucaagcuguu

SEQ ID NO: 258017 - RNA, 27 nt, Human
ugcagagccacagaaaugccacgaaac

SEQ ID NO: 258018 - RNA, 26 nt, Human
ugcccaagcuggguggccuggggagg

SEQ ID NO: 258019 - RNA, 20 nt, Human
ugcccccagguuccacccac

SEQ ID NO: 258020 - RNA, 23 nt, Human
ugcccccagguuccacccacccc

SEQ ID NO: 258021 - RNA, 22 nt, Human
ugcgggugggagaggggcaagg

SEQ ID NO: 258022 - RNA, 24 nt, Human
uggaaaagaaacugacagaggccc

SEQ ID NO: 258023 - RNA, 19 nt, Human
uggagagggcggggggcac

SEQ ID NO: 258024 - RNA, 23 nt, Human
uggaggaacacugcagagccaca

SEQ ID NO: 258025 - RNA, 22 nt, Human
uggagucagcggagggucccgg

SEQ ID NO: 258026 - RNA, 22 nt, Human
uggccccuaagugacucuaccc

SEQ ID NO: 258027 - RNA, 19 nt, Human
uggcgcauggguccucagg

SEQ ID NO: 258028 - RNA, 18 nt, Human
uggcggcagccgggaggg

SEQ ID NO: 258029 - RNA, 23 nt, Human
ugggcccagggaggugcccaagc

SEQ ID NO: 258030 - RNA, 21 nt, Human
ugggcugguuccgggucuggg

SEQ ID NO: 258031 - RNA, 18 nt, Human
uggggaggaggagguggg

SEQ ID NO: 258032 - RNA, 18 nt, Human
uggggaguggggacaggg

SEQ ID NO: 258033 - RNA, 22 nt, Human
ugggguggaggaacacugcaga

SEQ ID NO: 258034 - RNA, 21 nt, Human
ugggucccagguccccaccag

SEQ ID NO: 258035 - RNA, 18 nt, Human
uguccugagugggaugaa

SEQ ID NO: 258036 - RNA, 19 nt, Human
uguggggaguggggacagg

SEQ ID NO: 258037 - RNA, 21 nt, Human
ugugugggggucccgggaagu

SEQ ID NO: 258038 - RNA, 23 nt, Human
uuccgggucugggucccaggucc

SEQ ID NO: 258039 - RNA, 18 nt, Human
uugguccugggguggagg

SEQ ID NO: 258040 - RNA, 19 nt, Human
acucaguagcguuuugagu

SEQ ID NO: 258041 - RNA, 20 nt, Human
agcguuuugagugucgguuc

SEQ ID NO: 258042 - RNA, 24 nt, Human
gagugucgguucagcuaaccugac

SEQ ID NO: 258043 - RNA, 20 nt, Human
gggcuucauccuagcagucc

SEQ ID NO: 258044 - RNA, 21 nt, Human
uagcguuuugagugucgguuc

SEQ ID NO: 258045 - RNA, 21 nt, Human
ucuuuauugugacucaguagc

SEQ ID NO: 258046 - RNA, 20 nt, Human
uugaauaaguccucugugcu

SEQ ID NO: 258047 - RNA, 22 nt, Human
uuuuuuacucuuuaaaacaauc

SEQ ID NO: 258048 - RNA, 27 nt, Human
uuuuuuuuuuuuuuuuuuacucuuuaa

SEQ ID NO: 258049 - RNA, 19 nt, Human
aaagugcccauauugugcc

SEQ ID NO: 258050 - RNA, 23 nt, Human
aaaugaccggcaagauacagauu

SEQ ID NO: 258051 - RNA, 21 nt, Human
aacgaacauuucaauucacag

SEQ ID NO: 258052 - RNA, 19 nt, Human
acagcacaggcaggagaaa

SEQ ID NO: 258053 - RNA, 21 nt, Human
acagcacaggcaggagaaaac

SEQ ID NO: 258054 - RNA, 18 nt, Human
caagcuaagcagcagccc

SEQ ID NO: 258055 - RNA, 18 nt, Human
cacucuaugugacaaggu

SEQ ID NO: 258056 - RNA, 20 nt, Human
cagcacaggcaggagaaaac

SEQ ID NO: 258057 - RNA, 21 nt, Human
cagcagcccauuugaaugccc

SEQ ID NO: 258058 - RNA, 23 nt, Human
cauuuaaagugcccauauugugc

SEQ ID NO: 258059 - RNA, 21 nt, Human
ccauauugugccuucuacaua

SEQ ID NO: 258060 - RNA, 23 nt, Human
cucuaugugacaaggugcaagcu

SEQ ID NO: 258061 - RNA, 20 nt, Human
cugucuugccugccuccuug

SEQ ID NO: 258062 - RNA, 23 nt, Human
gcccuguaauaacauaaaaauga

SEQ ID NO: 258063 - RNA, 20 nt, Human
uaaagugcccauauugugcc

SEQ ID NO: 258064 - RNA, 24 nt, Human
uaagcaaauagucuacacagauac

SEQ ID NO: 258065 - RNA, 18 nt, Human
ugacucgagucacagcac

SEQ ID NO: 258066 - RNA, 22 nt, Human
ugcccuguaauaacauaaaaau

SEQ ID NO: 258067 - RNA, 24 nt, Human
ugggaaagaucacucuaugugaca

SEQ ID NO: 258068 - RNA, 22 nt, Human
uguaauaacauaaaaaugaccg

SEQ ID NO: 258069 - RNA, 21 nt, Human
uuaggugaagaauuauuagcu

SEQ ID NO: 258070 - RNA, 23 nt, Human
caacugcaauaaaaaagggugac

SEQ ID NO: 258071 - RNA, 20 nt, Human
caauaaaaaagggugacaua

SEQ ID NO: 258072 - RNA, 22 nt, Human
ccaacugcaauaaaaaagggug

SEQ ID NO: 258073 - RNA, 19 nt, Human
cguccagagacaauuguuc

SEQ ID NO: 258074 - RNA, 22 nt, Human
gaacagugcuuaucaauucuga

SEQ ID NO: 258075 - RNA, 19 nt, Human
uaccauggaauaaacauuu

SEQ ID NO: 258076 - RNA, 23 nt, Human
ugaaugaaugaauggauguucug

SEQ ID NO: 258077 - RNA, 18 nt, Human
aaaucuaguucuaaauug

SEQ ID NO: 258078 - RNA, 19 nt, Human
acaauucaacccacgaaac

SEQ ID NO: 258079 - RNA, 19 nt, Human
acccugguaagcucacauu

SEQ ID NO: 258080 - RNA, 23 nt, Human
aucuucucuucaaacucuacccc

SEQ ID NO: 258081 - RNA, 21 nt, Human
auguaagauggaauguguaag

SEQ ID NO: 258082 - RNA, 19 nt, Human
caaacucuaccccuccugg

SEQ ID NO: 258083 - RNA, 23 nt, Human
caaagacccugguaagcucacau

SEQ ID NO: 258084 - RNA, 22 nt, Human
caacccacgaaacauaucaucu

SEQ ID NO: 258085 - RNA, 21 nt, Human
cacuccaaucucugccucugu

SEQ ID NO: 258086 - RNA, 19 nt, Human
ccccuagguggcuaugcuc

SEQ ID NO: 258087 - RNA, 22 nt, Human
ccuucaacauucugaaagugga

SEQ ID NO: 258088 - RNA, 21 nt, Human
cuuaacuaauuacaucugcaa

SEQ ID NO: 258089 - RNA, 21 nt, Human
gcaggacacaauguaacgaaa

SEQ ID NO: 258090 - RNA, 22 nt, Human
ggagaugcgucacuccaaucuc

SEQ ID NO: 258091 - RNA, 21 nt, Human
guccucuggguagggcccuuc

SEQ ID NO: 258092 - RNA, 21 nt, Human
uaagcaggacacaauguaacg

SEQ ID NO: 258093 - RNA, 22 nt, Human
uacagugaugggaaacaaugac

SEQ ID NO: 258094 - RNA, 21 nt, Human
uagaagauauacauaggacau

SEQ ID NO: 258095 - RNA, 23 nt, Human
uagaauggauacagugaugggaa

SEQ ID NO: 258096 - RNA, 18 nt, Human
uaggacauuuuaagaaac

SEQ ID NO: 258097 - RNA, 23 nt, Human
ucacauucauggguaccuggggu

SEQ ID NO: 258098 - RNA, 19 nt, Human
ucacuccaaucucugccuc

SEQ ID NO: 258099 - RNA, 21 nt, Human
ucacuccaaucucugccucug

SEQ ID NO: 258100 - RNA, 22 nt, Human
uccaaggguagaaaacagcacc

SEQ ID NO: 258101 - RNA, 20 nt, Human
ucugucuucacacggccucc

SEQ ID NO: 258102 - RNA, 22 nt, Human
ugaaauaguaaauauugaggug

SEQ ID NO: 258103 - RNA, 21 nt, Human
ugacaaaaaggcuuacuuucc

SEQ ID NO: 258104 - RNA, 22 nt, Human
ugccucugucuucacacggccu

SEQ ID NO: 258105 - RNA, 21 nt, Human
ugcugaacuucccuucaacau

SEQ ID NO: 258106 - RNA, 18 nt, Human
uggaaucacuaauguaag

SEQ ID NO: 258107 - RNA, 21 nt, Human
ugggggacacaauucaaccca

SEQ ID NO: 258108 - RNA, 18 nt, Human
ugguaagcucacauucau

SEQ ID NO: 258109 - RNA, 18 nt, Human
uguaagauggaaugugua

SEQ ID NO: 258110 - RNA, 20 nt, Human
uguccucuggguagggcccu

SEQ ID NO: 258111 - RNA, 22 nt, Human
uugaggugacaaaaaggcuuac

SEQ ID NO: 258112 - RNA, 19 nt, Human
uuucuguccucuggguagg

SEQ ID NO: 258113 - RNA, 21 nt, Human
aaacacuccaacaaaaaacaa

SEQ ID NO: 258114 - RNA, 24 nt, Human
aaacacuccaacaaaaaacaaagg

SEQ ID NO: 258115 - RNA, 19 nt, Human
aacaaaaaacaaaggugag

SEQ ID NO: 258116 - RNA, 21 nt, Human
aacacuccaacaaaaaacaaa

SEQ ID NO: 258117 - RNA, 18 nt, Human
acacuccaacaaaaaaca

SEQ ID NO: 258118 - RNA, 25 nt, Human
accuccacuccucccuuuccuccag

SEQ ID NO: 258119 - RNA, 23 nt, Human
acuccaacaaaaaacaaagguga

SEQ ID NO: 258120 - RNA, 18 nt, Human
caaacuggcuccuucccc

SEQ ID NO: 258121 - RNA, 19 nt, Human
cacuccaacaaaaaacaaa

SEQ ID NO: 258122 - RNA, 18 nt, Human
cacuccucccuuuccucc

SEQ ID NO: 258123 - RNA, 24 nt, Human
cacuccucccuuuccuccagaaca

SEQ ID NO: 258124 - RNA, 18 nt, Human
cauggcacugcaaagcag

SEQ ID NO: 258125 - RNA, 22 nt, Human
ccacuccucccuuuccuccaga

SEQ ID NO: 258126 - RNA, 19 nt, Human
ccagcccaccuccacuccu

SEQ ID NO: 258127 - RNA, 24 nt, Human
cccagcccaccuccacuccucccu

SEQ ID NO: 258128 - RNA, 25 nt, Human
cccagcccaccuccacuccucccuu

SEQ ID NO: 258129 - RNA, 23 nt, Human
ccuccagaacagaauaccaguuu

SEQ ID NO: 258130 - RNA, 22 nt, Human
cggcaaacuggcuccuucccca

SEQ ID NO: 258131 - RNA, 23 nt, Human
gaauccaaguuuauuagaaacac

SEQ ID NO: 258132 - RNA, 24 nt, Human
gagaauccaaguuuauuagaaaca

SEQ ID NO: 258133 - RNA, 19 nt, Human
ggguuggucccagugggga

SEQ ID NO: 258134 - RNA, 24 nt, Human
gguuagagaauccaaguuuauuag

SEQ ID NO: 258135 - RNA, 19 nt, Human
uauuagaaacacuccaaca

SEQ ID NO: 258136 - RNA, 26 nt, Human
uccaacaaaaaacaaaggugagaaga

SEQ ID NO: 258137 - RNA, 24 nt, Human
uccacuccucccuuuccuccagaa

SEQ ID NO: 258138 - RNA, 21 nt, Human
uccggcaaacuggcuccuucc

SEQ ID NO: 258139 - RNA, 19 nt, Human
aaaaaaaaaacucauccac

SEQ ID NO: 258140 - RNA, 28 nt, Human
aaaaacucauccacucagcaauaguggc

SEQ ID NO: 258141 - RNA, 19 nt, Human
aaaaagaaaauaaaagggg

SEQ ID NO: 258142 - RNA, 28 nt, Human
aaaaggaccggcagaaggaaagagggga

SEQ ID NO: 258143 - RNA, 24 nt, Human
aaaaggggaggggguaagaaaagg

SEQ ID NO: 258144 - RNA, 21 nt, Human
aaaaguuaaguggggggaaug

SEQ ID NO: 258145 - RNA, 23 nt, Human
aaacaaggaaagaggucaucuaa

SEQ ID NO: 258146 - RNA, 21 nt, Human
aaaccaaauuuaaugaaauaa

SEQ ID NO: 258147 - RNA, 23 nt, Human
aaagccgcggcuggcgccgggca

SEQ ID NO: 258148 - RNA, 24 nt, Human
aaaguuaaguggggggaaugggga

SEQ ID NO: 258149 - RNA, 20 nt, Human
aacaaaacaaggaaagaggu

SEQ ID NO: 258150 - RNA, 21 nt, Human
aacauuccaacuccuucccac

SEQ ID NO: 258151 - RNA, 24 nt, Human
aaccaccacucaucucugcucaga

SEQ ID NO: 258152 - RNA, 20 nt, Human
aagaauaaaaaagaaagcaa

SEQ ID NO: 258153 - RNA, 23 nt, Human
aagacacuuugcuccccggccuu

SEQ ID NO: 258154 - RNA, 18 nt, Human
aaggaaacagacaggggg

SEQ ID NO: 258155 - RNA, 21 nt, Human
aauaagcagugaacaaagcaa

SEQ ID NO: 258156 - RNA, 22 nt, Human
aauacuuggacauacagcagca

SEQ ID NO: 258157 - RNA, 18 nt, Human
acaaaacaaggaaagagg

SEQ ID NO: 258158 - RNA, 22 nt, Human
acaaggaaagaggucaucuaaa

SEQ ID NO: 258159 - RNA, 21 nt, Human
accuggagggggugggggagc

SEQ ID NO: 258160 - RNA, 22 nt, Human
accuggagggggugggggagcu

SEQ ID NO: 258161 - RNA, 22 nt, Human
acuccagcacccaaggcacggg

SEQ ID NO: 258162 - RNA, 21 nt, Human
acuuggcggggggcagagggg

SEQ ID NO: 258163 - RNA, 27 nt, Human
agaaagcaacucuugucuuauuaugaa

SEQ ID NO: 258164 - RNA, 19 nt, Human
agaaagcccagaucugcaa

SEQ ID NO: 258165 - RNA, 19 nt, Human
agaagacugcacuuuacau

SEQ ID NO: 258166 - RNA, 19 nt, Human
agaagggaggggaaagagu

SEQ ID NO: 258167 - RNA, 18 nt, Human
agacagggggagaggaag

SEQ ID NO: 258168 - RNA, 23 nt, Human
agaccaaaggcugcuuagcacag

SEQ ID NO: 258169 - RNA, 23 nt, Human
agagcagagcuggacacguccuc

SEQ ID NO: 258170 - RNA, 19 nt, Human
agagcggucccuccccccg

SEQ ID NO: 258171 - RNA, 23 nt, Human
agagcggucccuccccccgcccc

SEQ ID NO: 258172 - RNA, 18 nt, Human
agaggggagaagggaggg

SEQ ID NO: 258173 - RNA, 19 nt, Human
agaggggagaagggagggg

SEQ ID NO: 258174 - RNA, 26 nt, Human
agaggggagaagggaggggaaagagu

SEQ ID NO: 258175 - RNA, 20 nt, Human
agaggggcugcgaggcggca

SEQ ID NO: 258176 - RNA, 19 nt, Human
agcagccuugcuccaaaga

SEQ ID NO: 258177 - RNA, 20 nt, Human
agcaggcugagcaagagggu

SEQ ID NO: 258178 - RNA, 24 nt, Human
agcagugaacaaagcaaaaagaaa

SEQ ID NO: 258179 - RNA, 22 nt, Human
agcccaugguggggggaaauuc

SEQ ID NO: 258180 - RNA, 20 nt, Human
agccgcggcuggcgccgggc

SEQ ID NO: 258181 - RNA, 20 nt, Human
aggaaaaaaaaaaaacucau

SEQ ID NO: 258182 - RNA, 18 nt, Human
aggaaagaggggagaagg

SEQ ID NO: 258183 - RNA, 25 nt, Human
aggaaagaggucaucuaaaaaaugu

SEQ ID NO: 258184 - RNA, 21 nt, Human
aggaccuggaggggguggggg

SEQ ID NO: 258185 - RNA, 19 nt, Human
aggcacgggcagcagccuu

SEQ ID NO: 258186 - RNA, 22 nt, Human
aggcacgggcagcagccuugcu

SEQ ID NO: 258187 - RNA, 20 nt, Human
agggaggggaaagagugagg

SEQ ID NO: 258188 - RNA, 18 nt, Human
agggccugguagaggagg

SEQ ID NO: 258189 - RNA, 19 nt, Human
agggggaaggaaacagaca

SEQ ID NO: 258190 - RNA, 20 nt, Human
agggggagaggaagggccug

SEQ ID NO: 258191 - RNA, 21 nt, Human
agggggcagaggaauuccaga

SEQ ID NO: 258192 - RNA, 19 nt, Human
aggggugggguugcccagg

SEQ ID NO: 258193 - RNA, 24 nt, Human
agggugagauuccaaaaaaauguu

SEQ ID NO: 258194 - RNA, 22 nt, Human
aguggaagggaacugaaggcug

SEQ ID NO: 258195 - RNA, 18 nt, Human
aguggggggaauggggag

SEQ ID NO: 258196 - RNA, 18 nt, Human
aucacgguuauauauuug

SEQ ID NO: 258197 - RNA, 21 nt, Human
auucccuucccuuuccauucc

SEQ ID NO: 258198 - RNA, 18 nt, Human
auucuauucucuuucucu

SEQ ID NO: 258199 - RNA, 20 nt, Human
caaacucugaggaccuggag

SEQ ID NO: 258200 - RNA, 23 nt, Human
caacucucccacagcccauggug

SEQ ID NO: 258201 - RNA, 24 nt, Human
caauuggacuuucacccggcaaua

SEQ ID NO: 258202 - RNA, 21 nt, Human
cacccaaggcacgggcagcag

SEQ ID NO: 258203 - RNA, 19 nt, Human
cacucaucucugcucagag

SEQ ID NO: 258204 - RNA, 19 nt, Human
cacugcugucgaacauucc

SEQ ID NO: 258205 - RNA, 27 nt, Human
cagaacgcaggaacugccucggccggc

SEQ ID NO: 258206 - RNA, 21 nt, Human
cagcagcacccaaaguugccu

SEQ ID NO: 258207 - RNA, 24 nt, Human
cagcagcacccaaaguugccugcc

SEQ ID NO: 258208 - RNA, 19 nt, Human
cagcagcaugaaaacaaaa

SEQ ID NO: 258209 - RNA, 23 nt, Human
cagcagcaugaaaacaaaacaag

SEQ ID NO: 258210 - RNA, 19 nt, Human
cagccaaaaggaccggcag

SEQ ID NO: 258211 - RNA, 24 nt, Human
cagcgcgcaccuccaccccgccug

SEQ ID NO: 258212 - RNA, 18 nt, Human
cagcgggucggaggacug

SEQ ID NO: 258213 - RNA, 19 nt, Human
cagcuuccgggccacgucc

SEQ ID NO: 258214 - RNA, 19 nt, Human
caggaauacagaagacugc

SEQ ID NO: 258215 - RNA, 22 nt, Human
caggacgccgcccgcagccucc

SEQ ID NO: 258216 - RNA, 26 nt, Human
caggcgccgggggcuggagccgaggg

SEQ ID NO: 258217 - RNA, 21 nt, Human
cagggggagaggaagggccug

SEQ ID NO: 258218 - RNA, 18 nt, Human
caugcagaccaaaggcug

SEQ ID NO: 258219 - RNA, 22 nt, Human
ccaaccaccacucaucucugcu

SEQ ID NO: 258220 - RNA, 20 nt, Human
ccaagcauuucagaaaugaa

SEQ ID NO: 258221 - RNA, 24 nt, Human
ccaccgagcacgauccgcucgcac

SEQ ID NO: 258222 - RNA, 24 nt, Human
ccacguccgccgccugccgcuucu

SEQ ID NO: 258223 - RNA, 20 nt, Human
ccagaaaaggagagaaaaca

SEQ ID NO: 258224 - RNA, 25 nt, Human
ccaggaacagcuuucagaaaaggga

SEQ ID NO: 258225 - RNA, 22 nt, Human
ccaggggugggguugcccaggc

SEQ ID NO: 258226 - RNA, 23 nt, Human
cccaggauugggcgcuccgggac

SEQ ID NO: 258227 - RNA, 26 nt, Human
cccccgagccgaggacgcagaggggc

SEQ ID NO: 258228 - RNA, 23 nt, Human
cccccgccccccggaguccccgc

SEQ ID NO: 258229 - RNA, 20 nt, Human
cccccggaguccccgcgccc

SEQ ID NO: 258230 - RNA, 20 nt, Human
ccccgcagcccgagccucca

SEQ ID NO: 258231 - RNA, 24 nt, Human
ccccgcagcccgagccuccaccga

SEQ ID NO: 258232 - RNA, 22 nt, Human
ccccgcgccccgcagcccgagc

SEQ ID NO: 258233 - RNA, 21 nt, Human
ccccgggcgguugucacagcc

SEQ ID NO: 258234 - RNA, 19 nt, Human
cccgcagccucccggaguc

SEQ ID NO: 258235 - RNA, 19 nt, Human
cccggaguccccgcgcccc

SEQ ID NO: 258236 - RNA, 19 nt, Human
cccggaguccguggcagag

SEQ ID NO: 258237 - RNA, 24 nt, Human
cccuccuucuucccugggaugccc

SEQ ID NO: 258238 - RNA, 18 nt, Human
cccuucccuuuccauucc

SEQ ID NO: 258239 - RNA, 21 nt, Human
ccgccugaugugagggacggg

SEQ ID NO: 258240 - RNA, 18 nt, Human
ccggaguccccgcgcccc

SEQ ID NO: 258241 - RNA, 18 nt, Human
ccggcaauauuccagaac

SEQ ID NO: 258242 - RNA, 18 nt, Human
ccggcccccgagccgagg

SEQ ID NO: 258243 - RNA, 24 nt, Human
ccggccuuaagcaauuaaggagaa

SEQ ID NO: 258244 - RNA, 25 nt, Human
ccucaggacgccgcccgcagccucc

SEQ ID NO: 258245 - RNA, 21 nt, Human
ccucaggagucugcagauccc

SEQ ID NO: 258246 - RNA, 21 nt, Human
ccucggcucacaccuuucucg

SEQ ID NO: 258247 - RNA, 19 nt, Human
ccugaagcuccgauucugc

SEQ ID NO: 258248 - RNA, 21 nt, Human
ccugucuaacccaccggggaa

SEQ ID NO: 258249 - RNA, 21 nt, Human
cgcaggaacugccucggcuca

SEQ ID NO: 258250 - RNA, 22 nt, Human
cgcccgcagccucccggagucc

SEQ ID NO: 258251 - RNA, 19 nt, Human
cgccgggcaccgacagagc

SEQ ID NO: 258252 - RNA, 18 nt, Human
cgcggcgcgccuccggcc

SEQ ID NO: 258253 - RNA, 18 nt, Human
cggccaggaacagcuuuc

SEQ ID NO: 258254 - RNA, 23 nt, Human
cggccuuaagcaauuaaggagaa

SEQ ID NO: 258255 - RNA, 23 nt, Human
cgugaaaaugcagggccugggca

SEQ ID NO: 258256 - RNA, 18 nt, Human
cuccaccgagcacgaucc

SEQ ID NO: 258257 - RNA, 22 nt, Human
cuccccccgccccccggagucc

SEQ ID NO: 258258 - RNA, 23 nt, Human
cuccgcgcaccguugcaggcgcg

SEQ ID NO: 258259 - RNA, 20 nt, Human
cuccuccaacuccagcaccc

SEQ ID NO: 258260 - RNA, 19 nt, Human
cuccugaagcuccgauucu

SEQ ID NO: 258261 - RNA, 21 nt, Human
cugcgaggcggcaggcgccgg

SEQ ID NO: 258262 - RNA, 19 nt, Human
cuucuguucuccgccguug

SEQ ID NO: 258263 - RNA, 19 nt, Human
cuuugucugcccucugaag

SEQ ID NO: 258264 - RNA, 19 nt, Human
gaaaacaaaacaaggaaag

SEQ ID NO: 258265 - RNA, 27 nt, Human
gacacuggggugucaauauauaacauu

SEQ ID NO: 258266 - RNA, 20 nt, Human
gagacccuucaaagccgcgg

SEQ ID NO: 258267 - RNA, 22 nt, Human
gagagaaaacacugcugucgaa

SEQ ID NO: 258268 - RNA, 19 nt, Human
gagcaguuauuccuuugug

SEQ ID NO: 258269 - RNA, 21 nt, Human
gagcguccgcucggcaucgcc

SEQ ID NO: 258270 - RNA, 18 nt, Human
gaggggcauucauuguuu

SEQ ID NO: 258271 - RNA, 21 nt, Human
gagggggugggggagcucaaa

SEQ ID NO: 258272 - RNA, 22 nt, Human
gcagaacgcaggaacugccucg

SEQ ID NO: 258273 - RNA, 19 nt, Human
gcagacucagaccccagcc

SEQ ID NO: 258274 - RNA, 18 nt, Human
gcagcaugaaaacaaaac

SEQ ID NO: 258275 - RNA, 20 nt, Human
gcaggaauacagaagacugg

SEQ ID NO: 258276 - RNA, 23 nt, Human
gccacuaagcagguaccaaccua

SEQ ID NO: 258277 - RNA, 18 nt, Human
gccccgcagcccgagccu

SEQ ID NO: 258278 - RNA, 23 nt, Human
gccccgcagcccgagccuccacc

SEQ ID NO: 258279 - RNA, 24 nt, Human
gcccucaggagucugcagaucccu

SEQ ID NO: 258280 - RNA, 24 nt, Human
ggaaacagacagggggagaggaag

SEQ ID NO: 258281 - RNA, 21 nt, Human
ggaaggaaacagacaggggga

SEQ ID NO: 258282 - RNA, 23 nt, Human
ggacauacagcagcaugaaaaca

SEQ ID NO: 258283 - RNA, 22 nt, Human
ggagaggaagggccugguagag

SEQ ID NO: 258284 - RNA, 23 nt, Human
ggagcacaccaucccccaugcag

SEQ ID NO: 258285 - RNA, 19 nt, Human
ggaggggaucuuucuuguc

SEQ ID NO: 258286 - RNA, 25 nt, Human
ggaggggguaagaaaaggaaaaaga

SEQ ID NO: 258287 - RNA, 18 nt, Human
ggagggggugggggagcu

SEQ ID NO: 258288 - RNA, 20 nt, Human
ggcggcaggcgccgggggcu

SEQ ID NO: 258289 - RNA, 19 nt, Human
ggcugagcaagagggugcc

SEQ ID NO: 258290 - RNA, 21 nt, Human
ggcugcgaggcggcaggcgcc

SEQ ID NO: 258291 - RNA, 20 nt, Human
gggaacagacaaaacaaaag

SEQ ID NO: 258292 - RNA, 20 nt, Human
gggaauggggagggaagggg

SEQ ID NO: 258293 - RNA, 25 nt, Human
gggaauggggagggaaggggguugg

SEQ ID NO: 258294 - RNA, 21 nt, Human
gggcagagggggaucaauagg

SEQ ID NO: 258295 - RNA, 23 nt, Human
gggcaggggagggagacccuuca

SEQ ID NO: 258296 - RNA, 21 nt, Human
gggcauucauuguuuggcucc

SEQ ID NO: 258297 - RNA, 24 nt, Human
gggcgguugucacagccgcgggug

SEQ ID NO: 258298 - RNA, 24 nt, Human
gggcuggagccgagggucggggaa

SEQ ID NO: 258299 - RNA, 18 nt, Human
ggggaaucuaugugcccc

SEQ ID NO: 258300 - RNA, 22 nt, Human
ggggagaagggaggggaaagag

SEQ ID NO: 258301 - RNA, 30 nt, Human
ggggagaagggaggggaaagagugagguuu

SEQ ID NO: 258302 - RNA, 19 nt, Human
ggggagaggaagggccugg

SEQ ID NO: 258303 - RNA, 26 nt, Human
gggggcccaugccccgggcgguuguc

SEQ ID NO: 258304 - RNA, 21 nt, Human
ggggguugggagagcagagcg

SEQ ID NO: 258305 - RNA, 25 nt, Human
gguauuagcuccucuccugaagcuc

SEQ ID NO: 258306 - RNA, 22 nt, Human
ggucauggagucuugcccagaa

SEQ ID NO: 258307 - RNA, 25 nt, Human
gguucccccccuuuaaauuaacccu

SEQ ID NO: 258308 - RNA, 20 nt, Human
guaaaaugaugaggcucuca

SEQ ID NO: 258309 - RNA, 23 nt, Human
guaagacacgcucguuaacaaaa

SEQ ID NO: 258310 - RNA, 19 nt, Human
guaucuagaggaaaaaggc

SEQ ID NO: 258311 - RNA, 19 nt, Human
gucaacucucccacagccc

SEQ ID NO: 258312 - RNA, 18 nt, Human
gucacagccgcggguggg

SEQ ID NO: 258313 - RNA, 18 nt, Human
guccccuccuucuucccu

SEQ ID NO: 258314 - RNA, 19 nt, Human
guuguauggugagcccaga

SEQ ID NO: 258315 - RNA, 26 nt, Human
uaaauagauaaccaucacuguaauga

SEQ ID NO: 258316 - RNA, 22 nt, Human
uaagaaaaggaaaaagaauaaa

SEQ ID NO: 258317 - RNA, 21 nt, Human
uacagcagcaugaaaacaaaa

SEQ ID NO: 258318 - RNA, 25 nt, Human
uacagcagcaugaaaacaaaacaag

SEQ ID NO: 258319 - RNA, 19 nt, Human
uacggucaacucucccaca

SEQ ID NO: 258320 - RNA, 20 nt, Human
uagggaacagacaaaacaaa

SEQ ID NO: 258321 - RNA, 21 nt, Human
uaggguguguuuuucauuuac

SEQ ID NO: 258322 - RNA, 21 nt, Human
uaguguguaggguguguuuuu

SEQ ID NO: 258323 - RNA, 23 nt, Human
ucagagaaggcugagcaggcuga

SEQ ID NO: 258324 - RNA, 24 nt, Human
ucauucuggggucguggggagcga

SEQ ID NO: 258325 - RNA, 20 nt, Human
uccagaacuacuauucucca

SEQ ID NO: 258326 - RNA, 21 nt, Human
ucccuccccccgccccccgga

SEQ ID NO: 258327 - RNA, 20 nt, Human
uccgcgcaccguugcaggcg

SEQ ID NO: 258328 - RNA, 22 nt, Human
uccgcgcaccguugcaggcgcg

SEQ ID NO: 258329 - RNA, 23 nt, Human
uccguggcagagcugcuaagggc

SEQ ID NO: 258330 - RNA, 24 nt, Human
ucggggaaaggcgcggcuccucug

SEQ ID NO: 258331 - RNA, 18 nt, Human
ucuaguguguagggugug

SEQ ID NO: 258332 - RNA, 20 nt, Human
ugaaauaaacaacgugggug

SEQ ID NO: 258333 - RNA, 20 nt, Human
ugaacaaagcaaaaagaaaa

SEQ ID NO: 258334 - RNA, 21 nt, Human
ugaaggcgggguuugcuccuc

SEQ ID NO: 258335 - RNA, 19 nt, Human
ugagcccagagccuucaga

SEQ ID NO: 258336 - RNA, 18 nt, Human
ugaugugagggacggggg

SEQ ID NO: 258337 - RNA, 25 nt, Human
ugcccagaauacggucaacucuccc

SEQ ID NO: 258338 - RNA, 19 nt, Human
ugccuaacacacagcagag

SEQ ID NO: 258339 - RNA, 19 nt, Human
uggaagggaacugaaggcu

SEQ ID NO: 258340 - RNA, 20 nt, Human
uggcaaaguguugaugacuc

SEQ ID NO: 258341 - RNA, 19 nt, Human
uggcuccugccugacugau

SEQ ID NO: 258342 - RNA, 21 nt, Human
uggggagcccucaggacgccg

SEQ ID NO: 258343 - RNA, 21 nt, Human
uggggagggaaggggguuggg

SEQ ID NO: 258344 - RNA, 23 nt, Human
uggggagggaaggggguugggag

SEQ ID NO: 258345 - RNA, 19 nt, Human
uggggggaauggggaggga

SEQ ID NO: 258346 - RNA, 19 nt, Human
ugggucugccggggagggg

SEQ ID NO: 258347 - RNA, 21 nt, Human
ugucacagccgcggguggguc

SEQ ID NO: 258348 - RNA, 23 nt, Human
uguucggagucuaguguguaggg

SEQ ID NO: 258349 - RNA, 24 nt, Human
uguuggggggcccaugccccgggc

SEQ ID NO: 258350 - RNA, 20 nt, Human
uuaugaaauaacaauacuug

SEQ ID NO: 258351 - RNA, 22 nt, Human
uucaccauuaacgucauauuua

SEQ ID NO: 258352 - RNA, 24 nt, Human
uuggggagggggcagaggaauucc

SEQ ID NO: 258353 - RNA, 22 nt, Human
uugggucugcuggggagcccuc

SEQ ID NO: 258354 - RNA, 20 nt, Human
uugucacagccgcggguggg

SEQ ID NO: 258355 - RNA, 22 nt, Human
ccuccuacagacucucggaagc

SEQ ID NO: 258356 - RNA, 21 nt, Human
ccucugaaaaauauaaguaaa

SEQ ID NO: 258357 - RNA, 19 nt, Human
cucaaacacauauagguga

SEQ ID NO: 258358 - RNA, 22 nt, Human
cucugaaaaauauaaguaaaaa

SEQ ID NO: 258359 - RNA, 22 nt, Human
uaacacagcugcuaguggaagg

SEQ ID NO: 258360 - RNA, 24 nt, Human
uaagucugucacaaccucaaacac

SEQ ID NO: 258361 - RNA, 18 nt, Human
uauuuauuccucucuucc

SEQ ID NO: 258362 - RNA, 23 nt, Human
ucccugguucagcuccaaggucc

SEQ ID NO: 258363 - RNA, 30 nt, Human
uuucacaaauauauauccccuauauuacuu

SEQ ID NO: 258364 - RNA, 23 nt, Human
aagcuaacaaggaaaaauggcac

SEQ ID NO: 258365 - RNA, 18 nt, Human
acaucauuuaaaugaauu

SEQ ID NO: 258366 - RNA, 25 nt, Human
agaaagcaaacuaaucuauaacuca

SEQ ID NO: 258367 - RNA, 25 nt, Human
agaaaugaaagcuaacaaggaaaaa

SEQ ID NO: 258368 - RNA, 20 nt, Human
cauaaaagcaaaauguaaua

SEQ ID NO: 258369 - RNA, 19 nt, Human
ccuggagucacugucuugu

SEQ ID NO: 258370 - RNA, 20 nt, Human
ggacagaaucacuguccgua

SEQ ID NO: 258371 - RNA, 25 nt, Human
uaagaagaaaauuuuauuccagaaa

SEQ ID NO: 258372 - RNA, 27 nt, Human
uaauggaugcuucuuccacaauagucu

SEQ ID NO: 258373 - RNA, 26 nt, Human
uaugcuagaauauaucuacugaaaca

SEQ ID NO: 258374 - RNA, 29 nt, Human
ucacugucuuguuuaggacagaaucacuu

SEQ ID NO: 258375 - RNA, 19 nt, Human
ugaaagcuaacaaggaaaa

SEQ ID NO: 258376 - RNA, 21 nt, Human
uucuuccacaauagucuucag

SEQ ID NO: 258377 - RNA, 21 nt, Human
aaacacaagaaaaacagcaac

SEQ ID NO: 258378 - RNA, 18 nt, Human
aaaggccugggaagagaa

SEQ ID NO: 258379 - RNA, 23 nt, Human
aacacaagaaaaacagcaacacc

SEQ ID NO: 258380 - RNA, 21 nt, Human
aacaugaggcuccggaggaaa

SEQ ID NO: 258381 - RNA, 20 nt, Human
aaccaaggaccucuucucag

SEQ ID NO: 258382 - RNA, 18 nt, Human
aaccucccccuccucccc

SEQ ID NO: 258383 - RNA, 20 nt, Human
aacgggggagcacggggaga

SEQ ID NO: 258384 - RNA, 23 nt, Human
aagaagucagggagcgugacguc

SEQ ID NO: 258385 - RNA, 25 nt, Human
aagcagcuuuucuggagaaaagggg

SEQ ID NO: 258386 - RNA, 24 nt, Human
aagcguccccgggagaagcagggu

SEQ ID NO: 258387 - RNA, 21 nt, Human
aaggaacaguccccugggagg

SEQ ID NO: 258388 - RNA, 23 nt, Human
aaggaacaguccccugggaggug

SEQ ID NO: 258389 - RNA, 18 nt, Human
aagggcuggguggugacu

SEQ ID NO: 258390 - RNA, 20 nt, Human
aagucccuccuuccccaccu

SEQ ID NO: 258391 - RNA, 21 nt, Human
acacagcagauguuccaaaca

SEQ ID NO: 258392 - RNA, 18 nt, Human
accagacagcaauagcag

SEQ ID NO: 258393 - RNA, 18 nt, Human
accuuccugaugucucaa

SEQ ID NO: 258394 - RNA, 22 nt, Human
agacagcaauagcagcagcagc

SEQ ID NO: 258395 - RNA, 22 nt, Human
agaccagaugcugguccauguc

SEQ ID NO: 258396 - RNA, 18 nt, Human
agacccaggcugcagggg

SEQ ID NO: 258397 - RNA, 19 nt, Human
agagagaaauaaggaacag

SEQ ID NO: 258398 - RNA, 23 nt, Human
agccgcuggguuuuuaccuuccu

SEQ ID NO: 258399 - RNA, 19 nt, Human
aggaggccugggggugggu

SEQ ID NO: 258400 - RNA, 24 nt, Human
aggaggccuggggguggguggggg

SEQ ID NO: 258401 - RNA, 24 nt, Human
aggcauucccugccuucuuuggcc

SEQ ID NO: 258402 - RNA, 22 nt, Human
aggccaaagcaggcugcccaga

SEQ ID NO: 258403 - RNA, 22 nt, Human
aggcccccgaugcuggggacag

SEQ ID NO: 258404 - RNA, 22 nt, Human
aggccggggcagggccggggga

SEQ ID NO: 258405 - RNA, 23 nt, Human
aggcugaggggaggggcgagcuc

SEQ ID NO: 258406 - RNA, 19 nt, Human
aggcuggcgggcaggcagg

SEQ ID NO: 258407 - RNA, 23 nt, Human
aggcuggcgggcaggcaggaggg

SEQ ID NO: 258408 - RNA, 20 nt, Human
agggaacaggaagggauuuu

SEQ ID NO: 258409 - RNA, 18 nt, Human
agggagaggcgggcaggc

SEQ ID NO: 258410 - RNA, 24 nt, Human
agggagggagggccaggcgcuccc

SEQ ID NO: 258411 - RNA, 25 nt, Human
agggccaccucuggggguuuggggg

SEQ ID NO: 258412 - RNA, 22 nt, Human
aggguguugaggggaugggagg

SEQ ID NO: 258413 - RNA, 22 nt, Human
auagcagcagcagcacacgaag

SEQ ID NO: 258414 - RNA, 22 nt, Human
caaacugcaggaggcacccaaa

SEQ ID NO: 258415 - RNA, 21 nt, Human
caaagcaggcugcccagaggc

SEQ ID NO: 258416 - RNA, 21 nt, Human
caagaaaaacagcaacaccca

SEQ ID NO: 258417 - RNA, 18 nt, Human
caagagccaagcccaggg

SEQ ID NO: 258418 - RNA, 18 nt, Human
caaggaaccaaccucccc

SEQ ID NO: 258419 - RNA, 24 nt, Human
caauagcagcagcagcacacgaag

SEQ ID NO: 258420 - RNA, 24 nt, Human
cacaaacacaagaaaaacagcaac

SEQ ID NO: 258421 - RNA, 25 nt, Human
cacaaacacaagaaaaacagcaacc

SEQ ID NO: 258422 - RNA, 18 nt, Human
cacacgaaggccggggca

SEQ ID NO: 258423 - RNA, 25 nt, Human
caccucagccugcccuccugagguc

SEQ ID NO: 258424 - RNA, 27 nt, Human
cacuccgcagggaagaacgggggagca

SEQ ID NO: 258425 - RNA, 21 nt, Human
cacuggcucaggaugcaggga

SEQ ID NO: 258426 - RNA, 19 nt, Human
cacugggccggacaggugg

SEQ ID NO: 258427 - RNA, 20 nt, Human
cagacagcaauagcagcagc

SEQ ID NO: 258428 - RNA, 24 nt, Human
cagagcaaggccccuuaucacccc

SEQ ID NO: 258429 - RNA, 21 nt, Human
cagcaacacccaucgucacca

SEQ ID NO: 258430 - RNA, 23 nt, Human
cagcaacacccaucgucaccaau

SEQ ID NO: 258431 - RNA, 22 nt, Human
cagcacacgaaggccggggcag

SEQ ID NO: 258432 - RNA, 25 nt, Human
cagcaggguggcccuucccucccuu

SEQ ID NO: 258433 - RNA, 22 nt, Human
cagcaucacaugcguucacaaa

SEQ ID NO: 258434 - RNA, 24 nt, Human
caggaccaggagggaacaggaagg

SEQ ID NO: 258435 - RNA, 18 nt, Human
caggcauucccugccuuc

SEQ ID NO: 258436 - RNA, 21 nt, Human
caggcugaggccccaccuguc

SEQ ID NO: 258437 - RNA, 23 nt, Human
caggcuggaagggcuagggaggg

SEQ ID NO: 258438 - RNA, 18 nt, Human
cagguggggagggggggg

SEQ ID NO: 258439 - RNA, 22 nt, Human
ccaaagcaggcugcccagaggc

SEQ ID NO: 258440 - RNA, 23 nt, Human
ccaagcccagggcuggggacugg

SEQ ID NO: 258441 - RNA, 22 nt, Human
ccaccugucccuuggagcagug

SEQ ID NO: 258442 - RNA, 23 nt, Human
ccagaggcagagaaagccgcauc

SEQ ID NO: 258443 - RNA, 19 nt, Human
ccaggaccaggagggaaca

SEQ ID NO: 258444 - RNA, 19 nt, Human
ccaggcccaccugucccuu

SEQ ID NO: 258445 - RNA, 24 nt, Human
cccaaacccacaggccgccaggcc

SEQ ID NO: 258446 - RNA, 19 nt, Human
cccacaggccgccaggccc

SEQ ID NO: 258447 - RNA, 21 nt, Human
cccacauacaaggaaaggcca

SEQ ID NO: 258448 - RNA, 18 nt, Human
cccacuuccacagcauca

SEQ ID NO: 258449 - RNA, 20 nt, Human
cccagggcuggggacugggg

SEQ ID NO: 258450 - RNA, 25 nt, Human
ccccaaggaaccaaccucccccucu

SEQ ID NO: 258451 - RNA, 19 nt, Human
ccccaggcugaggccccac

SEQ ID NO: 258452 - RNA, 23 nt, Human
cccccaaggaaccaaccuccccc

SEQ ID NO: 258453 - RNA, 23 nt, Human
cccccucgccgcccagccccugc

SEQ ID NO: 258454 - RNA, 21 nt, Human
ccccgggcccccucgccgccc

SEQ ID NO: 258455 - RNA, 22 nt, Human
ccccugacuccucccccuucca

SEQ ID NO: 258456 - RNA, 19 nt, Human
ccccugccccagcccaucu

SEQ ID NO: 258457 - RNA, 19 nt, Human
cccuagcucuggcccucug

SEQ ID NO: 258458 - RNA, 21 nt, Human
cccuccaggcauucccugccu

SEQ ID NO: 258459 - RNA, 19 nt, Human
cccuccuccccgagguaag

SEQ ID NO: 258460 - RNA, 24 nt, Human
ccgcagcuuucugggccaaguggc

SEQ ID NO: 258461 - RNA, 18 nt, Human
ccgcgagccgggcacagg

SEQ ID NO: 258462 - RNA, 20 nt, Human
ccuccaggcauucccugccu

SEQ ID NO: 258463 - RNA, 19 nt, Human
ccucccauccagacccagg

SEQ ID NO: 258464 - RNA, 23 nt, Human
ccucccccuuccacgcucagccc

SEQ ID NO: 258465 - RNA, 20 nt, Human
ccucgccgcccagccccugc

SEQ ID NO: 258466 - RNA, 24 nt, Human
ccucugaggauggugaccugguuu

SEQ ID NO: 258467 - RNA, 19 nt, Human
ccucugaguggccucgucc

SEQ ID NO: 258468 - RNA, 22 nt, Human
ccugggaagagaacaugaggcu

SEQ ID NO: 258469 - RNA, 20 nt, Human
ccuuuacccacaccaggaga

SEQ ID NO: 258470 - RNA, 21 nt, Human
cgccggggccgaggcugcggc

SEQ ID NO: 258471 - RNA, 19 nt, Human
cgcucccacaggugaggac

SEQ ID NO: 258472 - RNA, 18 nt, Human
cggcacuggagcuggcac

SEQ ID NO: 258473 - RNA, 19 nt, Human
cgggauggggggagaagca

SEQ ID NO: 258474 - RNA, 20 nt, Human
cgggcccccucgccgcccag

SEQ ID NO: 258475 - RNA, 20 nt, Human
cuacagucuggggucgcuac

SEQ ID NO: 258476 - RNA, 23 nt, Human
cucagcccuguccuugacccaac

SEQ ID NO: 258477 - RNA, 21 nt, Human
cucccccuuccacgcucagcc

SEQ ID NO: 258478 - RNA, 22 nt, Human
cucccccuuccacgcucagccc

SEQ ID NO: 258479 - RNA, 22 nt, Human
cuccccgagguaaggacuccca

SEQ ID NO: 258480 - RNA, 19 nt, Human
cuccggaggaaagccgggg

SEQ ID NO: 258481 - RNA, 21 nt, Human
cucuccucccauccagaccca

SEQ ID NO: 258482 - RNA, 22 nt, Human
cugacuccucccccuuccacgc

SEQ ID NO: 258483 - RNA, 21 nt, Human
cugcaggaggcacccaaaccc

SEQ ID NO: 258484 - RNA, 18 nt, Human
cugcccacuuccacagcu

SEQ ID NO: 258485 - RNA, 20 nt, Human
cugcugcucugcagcucccc

SEQ ID NO: 258486 - RNA, 20 nt, Human
cugggggugggugggggggc

SEQ ID NO: 258487 - RNA, 23 nt, Human
gacugcccacuuccacagcauca

SEQ ID NO: 258488 - RNA, 18 nt, Human
gacuggggacaggggccc

SEQ ID NO: 258489 - RNA, 18 nt, Human
gagaagcaggguguugag

SEQ ID NO: 258490 - RNA, 22 nt, Human
gagccaagcccagggcugggga

SEQ ID NO: 258491 - RNA, 26 nt, Human
gaggguagggaggggaagcaggagcg

SEQ ID NO: 258492 - RNA, 19 nt, Human
gcacccccuuccccuagga

SEQ ID NO: 258493 - RNA, 25 nt, Human
gcacuagauuucggcacuagauuug

SEQ ID NO: 258494 - RNA, 23 nt, Human
gcacuagauuugcaggcccccgg

SEQ ID NO: 258495 - RNA, 18 nt, Human
gcagggcccacucaaaag

SEQ ID NO: 258496 - RNA, 20 nt, Human
gcccagaggcagagaaagcc

SEQ ID NO: 258497 - RNA, 21 nt, Human
gccccugacuccucccccuuc

SEQ ID NO: 258498 - RNA, 23 nt, Human
gccccugccccagcccaucagug

SEQ ID NO: 258499 - RNA, 18 nt, Human
gccgaggcugcggcccgc

SEQ ID NO: 258500 - RNA, 18 nt, Human
gccggacagguggcacau

SEQ ID NO: 258501 - RNA, 18 nt, Human
gccggggccgaggcugcg

SEQ ID NO: 258502 - RNA, 24 nt, Human
gcgcagcgcacuccgaccccuugg

SEQ ID NO: 258503 - RNA, 23 nt, Human
gcggguggaugaugagguaucug

SEQ ID NO: 258504 - RNA, 20 nt, Human
gcucuggcccucuguucuga

SEQ ID NO: 258505 - RNA, 18 nt, Human
gcugcaggggacggggaa

SEQ ID NO: 258506 - RNA, 21 nt, Human
gcuuccucccgcuacacugaa

SEQ ID NO: 258507 - RNA, 18 nt, Human
ggaaagccgggggccugg

SEQ ID NO: 258508 - RNA, 23 nt, Human
ggacagauguggucccgacagca

SEQ ID NO: 258509 - RNA, 20 nt, Human
ggacggggaggggcagcggg

SEQ ID NO: 258510 - RNA, 19 nt, Human
ggaggacagaggcaaaggg

SEQ ID NO: 258511 - RNA, 20 nt, Human
ggagggggggggggcccacu

SEQ ID NO: 258512 - RNA, 24 nt, Human
ggaugggaggacagaggcaaaggg

SEQ ID NO: 258513 - RNA, 18 nt, Human
ggcaaaggggcuggagca

SEQ ID NO: 258514 - RNA, 20 nt, Human
ggcagggccgggggaagaag

SEQ ID NO: 258515 - RNA, 19 nt, Human
ggcccgggggcacuggcuc

SEQ ID NO: 258516 - RNA, 21 nt, Human
ggcccgggggcacuggcucag

SEQ ID NO: 258517 - RNA, 19 nt, Human
ggccgaggcugcggcccgc

SEQ ID NO: 258518 - RNA, 19 nt, Human
ggccugggggugggugggg

SEQ ID NO: 258519 - RNA, 22 nt, Human
ggcuagggagggagggccaggc

SEQ ID NO: 258520 - RNA, 19 nt, Human
gggaagaacgggggagcac

SEQ ID NO: 258521 - RNA, 19 nt, Human
gggcacaggucaggcuggc

SEQ ID NO: 258522 - RNA, 23 nt, Human
gggccaccucuggggguuugggg

SEQ ID NO: 258523 - RNA, 24 nt, Human
gggccaccucuggggguuuggggg

SEQ ID NO: 258524 - RNA, 20 nt, Human
gggccgaggcugcggcccgc

SEQ ID NO: 258525 - RNA, 21 nt, Human
gggcugaacgcaggacagcgc

SEQ ID NO: 258526 - RNA, 18 nt, Human
ggggacggggaaggggaa

SEQ ID NO: 258527 - RNA, 18 nt, Human
ggggacggggaaggggaa

SEQ ID NO: 258528 - RNA, 21 nt, Human
ggggaugggaggacagaggca

SEQ ID NO: 258529 - RNA, 22 nt, Human
ggggcagcggguggaugaugag

SEQ ID NO: 258530 - RNA, 18 nt, Human
gggggugggugggggggc

SEQ ID NO: 258531 - RNA, 18 nt, Human
ggguuggucuggggacag

SEQ ID NO: 258532 - RNA, 21 nt, Human
ggugggugagagaguggggga

SEQ ID NO: 258533 - RNA, 19 nt, Human
guguguguguguccaggug

SEQ ID NO: 258534 - RNA, 23 nt, Human
gugugugugugugucccaggcug

SEQ ID NO: 258535 - RNA, 18 nt, Human
gugugugugugugugugu

SEQ ID NO: 258536 - RNA, 23 nt, Human
uaacgaaucacagugacugcaac

SEQ ID NO: 258537 - RNA, 21 nt, Human
uacaaggaaaggccaaagcag

SEQ ID NO: 258538 - RNA, 21 nt, Human
uacaggcucagccucugagga

SEQ ID NO: 258539 - RNA, 22 nt, Human
uagcaaaagggcucucucccag

SEQ ID NO: 258540 - RNA, 19 nt, Human
uaggaucuaaggauucuuu

SEQ ID NO: 258541 - RNA, 23 nt, Human
uaguaaaaauacaguauguacaa

SEQ ID NO: 258542 - RNA, 21 nt, Human
ucacauccagggacaccggcu

SEQ ID NO: 258543 - RNA, 24 nt, Human
uccacacagcagauguuccaaaca

SEQ ID NO: 258544 - RNA, 24 nt, Human
uccacgcucagcccuguccuugac

SEQ ID NO: 258545 - RNA, 26 nt, Human
ucccagagccacgggucuggcaggag

SEQ ID NO: 258546 - RNA, 22 nt, Human
uccccaccucagccugcccucc

SEQ ID NO: 258547 - RNA, 25 nt, Human
uccccauuuccccuccaaaggcccc

SEQ ID NO: 258548 - RNA, 19 nt, Human
ucccccuccuccccgaggu

SEQ ID NO: 258549 - RNA, 19 nt, Human
uccccgggcagggcccacu

SEQ ID NO: 258550 - RNA, 21 nt, Human
uccccgggcagggcccacuca

SEQ ID NO: 258551 - RNA, 22 nt, Human
uccccgggcccccucgccgccc

SEQ ID NO: 258552 - RNA, 18 nt, Human
ucccuuggagcagugccc

SEQ ID NO: 258553 - RNA, 22 nt, Human
ucgguaacuaaagucuuggagc

SEQ ID NO: 258554 - RNA, 22 nt, Human
ucuacagucuggggucgcuaca

SEQ ID NO: 258555 - RNA, 18 nt, Human
ucucagagaaaggugcug

SEQ ID NO: 258556 - RNA, 20 nt, Human
ucuggagaaaagggguucau

SEQ ID NO: 258557 - RNA, 19 nt, Human
ucuuugcugccuucuggaa

SEQ ID NO: 258558 - RNA, 23 nt, Human
ugacuccucccccuuccacgcuc

SEQ ID NO: 258559 - RNA, 19 nt, Human
ugagggcacaggaagcuug

SEQ ID NO: 258560 - RNA, 20 nt, Human
ugaggggaggggcgagcucc

SEQ ID NO: 258561 - RNA, 22 nt, Human
ugaggggaggggcgagcuccac

SEQ ID NO: 258562 - RNA, 20 nt, Human
ugagguaucugugcaggccc

SEQ ID NO: 258563 - RNA, 19 nt, Human
ugcagcuccccgggcaggg

SEQ ID NO: 258564 - RNA, 20 nt, Human
ugcaggcccccgaugcuggg

SEQ ID NO: 258565 - RNA, 24 nt, Human
ugcccacuuccacagcaucacaug

SEQ ID NO: 258566 - RNA, 19 nt, Human
ugccccguccggucaggcc

SEQ ID NO: 258567 - RNA, 21 nt, Human
ugcgugcgugugugugugugu

SEQ ID NO: 258568 - RNA, 24 nt, Human
ugcgugcgugugugugugugugug

SEQ ID NO: 258569 - RNA, 27 nt, Human
ugcgugugcgugcgugugugugugugu

SEQ ID NO: 258570 - RNA, 21 nt, Human
ugcgugugugugugugugugu

SEQ ID NO: 258571 - RNA, 21 nt, Human
ugcgugugugugugugugugu

SEQ ID NO: 258572 - RNA, 21 nt, Human
ugcgugugugugugugugugu

SEQ ID NO: 258573 - RNA, 24 nt, Human
ugcguucacaaacacaagaaaaac

SEQ ID NO: 258574 - RNA, 22 nt, Human
ugcugguccaugucucccaaac

SEQ ID NO: 258575 - RNA, 22 nt, Human
ugcuuuccccauuuccccucca

SEQ ID NO: 258576 - RNA, 19 nt, Human
uggaaacaagaccagaugc

SEQ ID NO: 258577 - RNA, 23 nt, Human
uggaugaugagguaucugugcag

SEQ ID NO: 258578 - RNA, 23 nt, Human
uggccccccaaggaaccaaccuc

SEQ ID NO: 258579 - RNA, 19 nt, Human
uggggacuggggacagggg

SEQ ID NO: 258580 - RNA, 23 nt, Human
uggggacuggggacaggggccca

SEQ ID NO: 258581 - RNA, 18 nt, Human
ugggggccucugaguggc

SEQ ID NO: 258582 - RNA, 21 nt, Human
ugggggugggacccgggaugg

SEQ ID NO: 258583 - RNA, 18 nt, Human
ugggguggguacaggcuc

SEQ ID NO: 258584 - RNA, 21 nt, Human
ugggugggggggcuggccugg

SEQ ID NO: 258585 - RNA, 23 nt, Human
uggugggugagagagugggggac

SEQ ID NO: 258586 - RNA, 21 nt, Human
ugguguguguguguccaggug

SEQ ID NO: 258587 - RNA, 24 nt, Human
ugugcaggcccgggggcacuggcu

SEQ ID NO: 258588 - RNA, 21 nt, Human
ugugcgugcgugugugugugu

SEQ ID NO: 258589 - RNA, 24 nt, Human
ugugugcgugugcgugcgugugug

SEQ ID NO: 258590 - RNA, 21 nt, Human
uguguguguguguguguccca

SEQ ID NO: 258591 - RNA, 18 nt, Human
ugugugugugugugugug

SEQ ID NO: 258592 - RNA, 18 nt, Human
ugugugugugugugugug

SEQ ID NO: 258593 - RNA, 18 nt, Human
ugugugugugugugugug

SEQ ID NO: 258594 - RNA, 18 nt, Human
ugugugugugugugugug

SEQ ID NO: 258595 - RNA, 18 nt, Human
ugugugugugugugugug

SEQ ID NO: 258596 - RNA, 18 nt, Human
ugugugugugugugugug

SEQ ID NO: 258597 - RNA, 18 nt, Human
ugugugugugugugugug

SEQ ID NO: 258598 - RNA, 18 nt, Human
ugugugugugugugugug

SEQ ID NO: 258599 - RNA, 18 nt, Human
ugugugugugugugugug

SEQ ID NO: 258600 - RNA, 18 nt, Human
ugugugugugugugugug

SEQ ID NO: 258601 - RNA, 21 nt, Human
ugugugugugugugugugugu

SEQ ID NO: 258602 - RNA, 21 nt, Human
ugugugugugugugugugugu

SEQ ID NO: 258603 - RNA, 21 nt, Human
ugugugugugugugugugugu

SEQ ID NO: 258604 - RNA, 21 nt, Human
ugugugugugugugugugugu

SEQ ID NO: 258605 - RNA, 21 nt, Human
ugugugugugugugugugugu

SEQ ID NO: 258606 - RNA, 21 nt, Human
ugugugugugugugugugugu

SEQ ID NO: 258607 - RNA, 21 nt, Human
ugugugugugugugugugugu

SEQ ID NO: 258608 - RNA, 21 nt, Human
ugugugugugugugugugugu

SEQ ID NO: 258609 - RNA, 21 nt, Human
ugugugugugugugugugugu

SEQ ID NO: 258610 - RNA, 21 nt, Human
ugugugugugugugugugugu

SEQ ID NO: 258611 - RNA, 21 nt, Human
ugugugugugugugugugugu

SEQ ID NO: 258612 - RNA, 21 nt, Human
ugugugugugugugugugugu

SEQ ID NO: 258613 - RNA, 21 nt, Human
ugugugugugugugugugugu

SEQ ID NO: 258614 - RNA, 21 nt, Human
ugugugugugugugugugugu

SEQ ID NO: 258615 - RNA, 21 nt, Human
ugugugugugugugugugugu

SEQ ID NO: 258616 - RNA, 21 nt, Human
ugugugugugugugugugugu

SEQ ID NO: 258617 - RNA, 22 nt, Human
ugugugugugugugugugugug

SEQ ID NO: 258618 - RNA, 22 nt, Human
ugugugugugugugugugugug

SEQ ID NO: 258619 - RNA, 22 nt, Human
ugugugugugugugugugugug

SEQ ID NO: 258620 - RNA, 22 nt, Human
ugugugugugugugugugugug

SEQ ID NO: 258621 - RNA, 22 nt, Human
ugugugugugugugugugugug

SEQ ID NO: 258622 - RNA, 22 nt, Human
ugugugugugugugugugugug

SEQ ID NO: 258623 - RNA, 22 nt, Human
ugugugugugugugugugugug

SEQ ID NO: 258624 - RNA, 22 nt, Human
ugugugugugugugugugugug

SEQ ID NO: 258625 - RNA, 22 nt, Human
uguguguguguguguguguguu

SEQ ID NO: 258626 - RNA, 21 nt, Human
uucaagaccuuugcugaccuu

SEQ ID NO: 258627 - RNA, 22 nt, Human
uucacaaacacaagaaaaacag

SEQ ID NO: 258628 - RNA, 18 nt, Human
uuccccauuuccccucca

SEQ ID NO: 258629 - RNA, 22 nt, Human
uuccccuccaaaggccugggaa

SEQ ID NO: 258630 - RNA, 19 nt, Human
uugacccaaccaaggaccu

SEQ ID NO: 258631 - RNA, 20 nt, Human
uugcacccccuuccccuagg

SEQ ID NO: 258632 - RNA, 19 nt, Human
uuucuggagaaaagggguu

SEQ ID NO: 258633 - RNA, 23 nt, Human
uuuucuggagaaaagggguucau

SEQ ID NO: 258634 - RNA, 19 nt, Human
uuuuuuuuuuuccacacag

SEQ ID NO: 258635 - RNA, 22 nt, Human
uuuuuuuuuuuuuuuuuuuggc

SEQ ID NO: 258636 - RNA, 21 nt, Human
aaagcaggagaagagaaaacc

SEQ ID NO: 258637 - RNA, 20 nt, Human
aacagccgugaacagggcca

SEQ ID NO: 258638 - RNA, 20 nt, Human
aagcaggagaagagaaaacc

SEQ ID NO: 258639 - RNA, 22 nt, Human
aagcaggagaagagaaaaccca

SEQ ID NO: 258640 - RNA, 23 nt, Human
aagcaggagaagagaaaacccaa

SEQ ID NO: 258641 - RNA, 25 nt, Human
aagcaggagaagagaaaacccaaaa

SEQ ID NO: 258642 - RNA, 21 nt, Human
aagcuugaaggcuaccggucc

SEQ ID NO: 258643 - RNA, 23 nt, Human
aaggacccaccccuuaaguauuc

SEQ ID NO: 258644 - RNA, 19 nt, Human
acagacuugggcagaagga

SEQ ID NO: 258645 - RNA, 23 nt, Human
accuuggcugccuggacuccagc

SEQ ID NO: 258646 - RNA, 21 nt, Human
agacccugaacauggagcggg

SEQ ID NO: 258647 - RNA, 21 nt, Human
agaggaaaaggggccagcagg

SEQ ID NO: 258648 - RNA, 21 nt, Human
agaugaagucaggacaggaca

SEQ ID NO: 258649 - RNA, 19 nt, Human
agcagaggucagggccucc

SEQ ID NO: 258650 - RNA, 19 nt, Human
aggaggaccacggcugaag

SEQ ID NO: 258651 - RNA, 21 nt, Human
aggaggggucugggggacccu

SEQ ID NO: 258652 - RNA, 22 nt, Human
aggcugcaagucugaugggaca

SEQ ID NO: 258653 - RNA, 23 nt, Human
agggggcagcagaagcccaggaa

SEQ ID NO: 258654 - RNA, 23 nt, Human
agucccgcucccacgaccuuagu

SEQ ID NO: 258655 - RNA, 23 nt, Human
aguguccuggaaggcuuaagggc

SEQ ID NO: 258656 - RNA, 27 nt, Human
aucuccuccaacacgaugucccugcug

SEQ ID NO: 258657 - RNA, 19 nt, Human
augggacacagacuugggc

SEQ ID NO: 258658 - RNA, 23 nt, Human
augggacacagacuugggcagaa

SEQ ID NO: 258659 - RNA, 18 nt, Human
caaagugggcuccucugc

SEQ ID NO: 258660 - RNA, 21 nt, Human
cacugcagcagaggucagggc

SEQ ID NO: 258661 - RNA, 21 nt, Human
cagaauaaagaggggugggug

SEQ ID NO: 258662 - RNA, 25 nt, Human
cagaauaaagagggguggguggaaa

SEQ ID NO: 258663 - RNA, 21 nt, Human
cagccagcugggccaccacua

SEQ ID NO: 258664 - RNA, 23 nt, Human
cagccagcugggccaccacuagg

SEQ ID NO: 258665 - RNA, 18 nt, Human
ccaaaaugagaaggaaaa

SEQ ID NO: 258666 - RNA, 18 nt, Human
ccacagccacccgcucug

SEQ ID NO: 258667 - RNA, 19 nt, Human
ccaggugugggcugugugg

SEQ ID NO: 258668 - RNA, 23 nt, Human
cccaggaaccugggcuaaggcac

SEQ ID NO: 258669 - RNA, 24 nt, Human
cccaugugugcacauccuguuuca

SEQ ID NO: 258670 - RNA, 18 nt, Human
ccccaggaaagcaggaga

SEQ ID NO: 258671 - RNA, 21 nt, Human
cccgcucugugucuggcuucc

SEQ ID NO: 258672 - RNA, 20 nt, Human
ccuccaacacgaugucccug

SEQ ID NO: 258673 - RNA, 19 nt, Human
ccugcugguauccucccua

SEQ ID NO: 258674 - RNA, 21 nt, Human
ccuggauguggcucagggcca

SEQ ID NO: 258675 - RNA, 18 nt, Human
cugaagccacagccaccc

SEQ ID NO: 258676 - RNA, 24 nt, Human
cugacagccuugcacaugucauac

SEQ ID NO: 258677 - RNA, 19 nt, Human
cuggacuccagccagcugg

SEQ ID NO: 258678 - RNA, 19 nt, Human
cuuccgaguccacaugagu

SEQ ID NO: 258679 - RNA, 20 nt, Human
gaacagggccaggugugggc

SEQ ID NO: 258680 - RNA, 23 nt, Human
gagaaggaaaaguucugggcugg

SEQ ID NO: 258681 - RNA, 25 nt, Human
gagaaguugggauccauucuucagg

SEQ ID NO: 258682 - RNA, 23 nt, Human
gagcgcuuaaucucuccccagga

SEQ ID NO: 258683 - RNA, 21 nt, Human
gcagaagcccaggaaccuggg

SEQ ID NO: 258684 - RNA, 20 nt, Human
gcccaugugugcacauccug

SEQ ID NO: 258685 - RNA, 20 nt, Human
gccccgagcccggcaagaug

SEQ ID NO: 258686 - RNA, 20 nt, Human
gccuccaucuccaccccggu

SEQ ID NO: 258687 - RNA, 18 nt, Human
gcuaagcccgauggaagu

SEQ ID NO: 258688 - RNA, 20 nt, Human
gcugacagccuugcacaugu

SEQ ID NO: 258689 - RNA, 19 nt, Human
gcuguccagcuccagcugc

SEQ ID NO: 258690 - RNA, 23 nt, Human
ggaccacggcugaagccacagcc

SEQ ID NO: 258691 - RNA, 20 nt, Human
ggcugccuggacuccagcca

SEQ ID NO: 258692 - RNA, 21 nt, Human
gggaauuggggaacaucaaaa

SEQ ID NO: 258693 - RNA, 21 nt, Human
gggcagaaggagagaugaagu

SEQ ID NO: 258694 - RNA, 23 nt, Human
gggggucgggggcggauggugau

SEQ ID NO: 258695 - RNA, 19 nt, Human
guuggcaucugagucugca

SEQ ID NO: 258696 - RNA, 26 nt, Human
uaaaggaaccugacgucuuucccuca

SEQ ID NO: 258697 - RNA, 25 nt, Human
uagacccugaacauggagcgggucc

SEQ ID NO: 258698 - RNA, 20 nt, Human
uccacaaagaacaugauuuc

SEQ ID NO: 258699 - RNA, 23 nt, Human
ucccucagccuacauugcauccc

SEQ ID NO: 258700 - RNA, 18 nt, Human
ucugugucuggcuuccug

SEQ ID NO: 258701 - RNA, 19 nt, Human
ugaaaggagccagacccca

SEQ ID NO: 258702 - RNA, 20 nt, Human
ugagggggcagcagaagccc

SEQ ID NO: 258703 - RNA, 18 nt, Human
ugagguuagcuggggucc

SEQ ID NO: 258704 - RNA, 20 nt, Human
ugauaugcuccagaauaaag

SEQ ID NO: 258705 - RNA, 20 nt, Human
ugcccacaucuaccauagcc

SEQ ID NO: 258706 - RNA, 24 nt, Human
ugcccguccuuccgaguccacaug

SEQ ID NO: 258707 - RNA, 18 nt, Human
ugccuggacuccagccag

SEQ ID NO: 258708 - RNA, 21 nt, Human
ugccuggaucuucacggcaug

SEQ ID NO: 258709 - RNA, 19 nt, Human
ugcucaagguaaacaaaca

SEQ ID NO: 258710 - RNA, 22 nt, Human
ugcuguccagcuccagcugcac

SEQ ID NO: 258711 - RNA, 20 nt, Human
uggaaggcuuaagggccugc

SEQ ID NO: 258712 - RNA, 25 nt, Human
uggagcgggucccaggagaaaaugc

SEQ ID NO: 258713 - RNA, 20 nt, Human
uggccaccuggcuggagaaa

SEQ ID NO: 258714 - RNA, 19 nt, Human
uggcuggagaaacucauuc

SEQ ID NO: 258715 - RNA, 23 nt, Human
uggcugguggggaauuggggaac

SEQ ID NO: 258716 - RNA, 19 nt, Human
ugggaaggacccaccccuu

SEQ ID NO: 258717 - RNA, 22 nt, Human
ugggcagaaggagagaugaagu

SEQ ID NO: 258718 - RNA, 18 nt, Human
uggucaccuuggcugccu

SEQ ID NO: 258719 - RNA, 24 nt, Human
uguuggggaagcugggauuguccc

SEQ ID NO: 258720 - RNA, 21 nt, Human
uucuucaggcaagcuugugcu

SEQ ID NO: 258721 - RNA, 24 nt, Human
uugcaucccagcuccaggccuggg

SEQ ID NO: 258722 - RNA, 21 nt, Human
uuggauuggcugguggggaau

SEQ ID NO: 258723 - RNA, 23 nt, Human
uuucucaguuaucuggcauugcu

SEQ ID NO: 258724 - RNA, 18 nt, Human
aaccuggcacagcggcac

SEQ ID NO: 258725 - RNA, 20 nt, Human
aacuccuguuauuucagcac

SEQ ID NO: 258726 - RNA, 21 nt, Human
acaagaauucuccaugaggug

SEQ ID NO: 258727 - RNA, 18 nt, Human
acaaugcucucccagaac

SEQ ID NO: 258728 - RNA, 19 nt, Human
acagaaauggucucugaac

SEQ ID NO: 258729 - RNA, 23 nt, Human
auggggggcggugaggugggguu

SEQ ID NO: 258730 - RNA, 21 nt, Human
cagauaucuuuccucacauuu

SEQ ID NO: 258731 - RNA, 18 nt, Human
cagcggcaccaucccgcc

SEQ ID NO: 258732 - RNA, 19 nt, Human
caguucugccaacauuccu

SEQ ID NO: 258733 - RNA, 23 nt, Human
cccauaccucaauguguguugag

SEQ ID NO: 258734 - RNA, 24 nt, Human
cccuucauccuacauacccauuua

SEQ ID NO: 258735 - RNA, 25 nt, Human
cccuuuugucccacuaguauaagag

SEQ ID NO: 258736 - RNA, 23 nt, Human
ccgggauggggggcggugaggug

SEQ ID NO: 258737 - RNA, 20 nt, Human
ccuacauacccauuuaucuu

SEQ ID NO: 258738 - RNA, 21 nt, Human
ccuuuuucucccuuuuguccc

SEQ ID NO: 258739 - RNA, 23 nt, Human
cguccuugcugccgugagcugac

SEQ ID NO: 258740 - RNA, 21 nt, Human
cuugcuuccuuuuucucccuu

SEQ ID NO: 258741 - RNA, 24 nt, Human
cuugcuuccuuuuucucccuuuug

SEQ ID NO: 258742 - RNA, 22 nt, Human
gauuucuaacaucagccaaucc

SEQ ID NO: 258743 - RNA, 23 nt, Human
gcaaaauacaauacuucaaccug

SEQ ID NO: 258744 - RNA, 28 nt, Human
gcacaguucuucacaagaagggaacgcc

SEQ ID NO: 258745 - RNA, 18 nt, Human
gcuucaguaaacuauccu

SEQ ID NO: 258746 - RNA, 22 nt, Human
ggaaggacaugucuaccacaga

SEQ ID NO: 258747 - RNA, 18 nt, Human
gggggcggugaggugggg

SEQ ID NO: 258748 - RNA, 20 nt, Human
uaacaaugcucucccagaac

SEQ ID NO: 258749 - RNA, 23 nt, Human
uacuucaaccuggcacagcggca

SEQ ID NO: 258750 - RNA, 22 nt, Human
uagcuucaucaaaacgaauaau

SEQ ID NO: 258751 - RNA, 23 nt, Human
ucaauaauaauaguuuaacaaag

SEQ ID NO: 258752 - RNA, 21 nt, Human
uccacagaugaagcacaguuc

SEQ ID NO: 258753 - RNA, 21 nt, Human
uccuacauacccauuuaucuu

SEQ ID NO: 258754 - RNA, 25 nt, Human
uccuuaauaacaaugcucucccaga

SEQ ID NO: 258755 - RNA, 21 nt, Human
uccuuuuucucccuuuugucc

SEQ ID NO: 258756 - RNA, 19 nt, Human
ucuugcuuccuuuuucucc

SEQ ID NO: 258757 - RNA, 23 nt, Human
ugaagcacaguucuucacaagaa

SEQ ID NO: 258758 - RNA, 26 nt, Human
ugcuuccuuuuucucccuuuuguccc

SEQ ID NO: 258759 - RNA, 24 nt, Human
ugggaaagagguggucauaaaagu

SEQ ID NO: 258760 - RNA, 18 nt, Human
uggggggcggugaggugg

SEQ ID NO: 258761 - RNA, 24 nt, Human
uggggggcggugaggugggguugg

SEQ ID NO: 258762 - RNA, 18 nt, Human
ugggguuggugggggagu

SEQ ID NO: 258763 - RNA, 18 nt, Human
ugucccacuaguauaaga

SEQ ID NO: 258764 - RNA, 23 nt, Human
uuaaauaacccuucauccuacau

SEQ ID NO: 258765 - RNA, 25 nt, Human
uucaaccuggcacagcggcaccauc

SEQ ID NO: 258766 - RNA, 18 nt, Human
uuccacagcugcaacgcu

SEQ ID NO: 258767 - RNA, 20 nt, Human
uuuccaguucugccaacauu

SEQ ID NO: 258768 - RNA, 24 nt, Human
uuuuuuuuuuuuuuaaacuuuuga

SEQ ID NO: 258769 - RNA, 21 nt, Human
aaaaaugggaaaaugaagaga

SEQ ID NO: 258770 - RNA, 24 nt, Human
aaagugcugggauuacaggcguga

SEQ ID NO: 258771 - RNA, 23 nt, Human
aaaucaauucuacuuggaauuca

SEQ ID NO: 258772 - RNA, 23 nt, Human
aagagaaaagguagaugacagaa

SEQ ID NO: 258773 - RNA, 18 nt, Human
aagaugccagugagugug

SEQ ID NO: 258774 - RNA, 22 nt, Human
aagggcuacagacugaggggau

SEQ ID NO: 258775 - RNA, 19 nt, Human
aagugcugggauuacaggc

SEQ ID NO: 258776 - RNA, 19 nt, Human
aagugcugggauuacaggc

SEQ ID NO: 258777 - RNA, 26 nt, Human
aagugcugggauuacaggcgugagcc

SEQ ID NO: 258778 - RNA, 20 nt, Human
aaguggaggcccuuggggug

SEQ ID NO: 258779 - RNA, 24 nt, Human
aauuguuuguauuuuuaguagaga

SEQ ID NO: 258780 - RNA, 20 nt, Human
acaggaccuuaggaagaggc

SEQ ID NO: 258781 - RNA, 24 nt, Human
accauguuggccaggcuggucuug

SEQ ID NO: 258782 - RNA, 21 nt, Human
acugcugaaaagcccaaggga

SEQ ID NO: 258783 - RNA, 22 nt, Human
agagaaaagguagaugacagaa

SEQ ID NO: 258784 - RNA, 23 nt, Human
agaggaaggaaagauucugagga

SEQ ID NO: 258785 - RNA, 20 nt, Human
agauuccuggccuccaguuc

SEQ ID NO: 258786 - RNA, 20 nt, Human
agccagagagggcuuccagg

SEQ ID NO: 258787 - RNA, 24 nt, Human
agcgauucuccugccucagccucc

SEQ ID NO: 258788 - RNA, 23 nt, Human
aggggcaccugccuguccuuagc

SEQ ID NO: 258789 - RNA, 21 nt, Human
aggggcuaaucaguggggcag

SEQ ID NO: 258790 - RNA, 19 nt, Human
agguggaagacuggagaga

SEQ ID NO: 258791 - RNA, 22 nt, Human
aguagaaggaaaacauucuaaa

SEQ ID NO: 258792 - RNA, 22 nt, Human
aguagagaugggguuucaccau

SEQ ID NO: 258793 - RNA, 18 nt, Human
aguagcugguauuauagg

SEQ ID NO: 258794 - RNA, 21 nt, Human
agugcaguggcgcgaucucag

SEQ ID NO: 258795 - RNA, 23 nt, Human
agugcaguggcgcgaucucagcu

SEQ ID NO: 258796 - RNA, 24 nt, Human
agugcaguggcgcgaucucagcuc

SEQ ID NO: 258797 - RNA, 18 nt, Human
aucccugggcaaccaggc

SEQ ID NO: 258798 - RNA, 20 nt, Human
augggaaaaugaagagaaaa

SEQ ID NO: 258799 - RNA, 22 nt, Human
augggguuucaccauguuggcc

SEQ ID NO: 258800 - RNA, 23 nt, Human
augggguuucaccauguuggcca

SEQ ID NO: 258801 - RNA, 24 nt, Human
augggguuucaccauguuggccag

SEQ ID NO: 258802 - RNA, 19 nt, Human
auucagaguguuccugaaa

SEQ ID NO: 258803 - RNA, 33 nt, Human
auuuauuuauuuauuuauuuauuuauuuuuggu

SEQ ID NO: 258804 - RNA, 24 nt, Human
caaagugcugggauuacaggcgug

SEQ ID NO: 258805 - RNA, 20 nt, Human
caagcgauucuccugccuca

SEQ ID NO: 258806 - RNA, 22 nt, Human
caagcgauucuccugccucagc

SEQ ID NO: 258807 - RNA, 21 nt, Human
caccauguuggccaggcuggu

SEQ ID NO: 258808 - RNA, 23 nt, Human
caccauguuggccaggcuggucu

SEQ ID NO: 258809 - RNA, 24 nt, Human
caccauguuggccaggcuggucuu

SEQ ID NO: 258810 - RNA, 27 nt, Human
caccauguuggccaggcuggucuugaa

SEQ ID NO: 258811 - RNA, 22 nt, Human
cacucuuccucuuccuucccuu

SEQ ID NO: 258812 - RNA, 21 nt, Human
cacugcaaccucugccuccug

SEQ ID NO: 258813 - RNA, 23 nt, Human
cacugcaaccucugccuccuggg

SEQ ID NO: 258814 - RNA, 19 nt, Human
caggcucuccuccaccccu

SEQ ID NO: 258815 - RNA, 24 nt, Human
cauguuggccaggcuggucuugaa

SEQ ID NO: 258816 - RNA, 22 nt, Human
ccaaagugcugggauuacaggc

SEQ ID NO: 258817 - RNA, 22 nt, Human
ccaaagugcugggauuacaggc

SEQ ID NO: 258818 - RNA, 24 nt, Human
ccaaagugcugggauuacaggcgu

SEQ ID NO: 258819 - RNA, 22 nt, Human
ccaggcucuccuccaccccugc

SEQ ID NO: 258820 - RNA, 24 nt, Human
ccagguggaagacuggagagagaa

SEQ ID NO: 258821 - RNA, 20 nt, Human
ccccacgucacccuugccag

SEQ ID NO: 258822 - RNA, 23 nt, Human
cccgcagcaaggucaggccaagu

SEQ ID NO: 258823 - RNA, 18 nt, Human
cccugggcaaccaggcuc

SEQ ID NO: 258824 - RNA, 18 nt, Human
ccgcagaaacagccccac

SEQ ID NO: 258825 - RNA, 21 nt, Human
ccucccccacucccuccugga

SEQ ID NO: 258826 - RNA, 24 nt, Human
ccuccuggguucaagcgauucucc

SEQ ID NO: 258827 - RNA, 19 nt, Human
ccucugccuccuggguuca

SEQ ID NO: 258828 - RNA, 21 nt, Human
ccugaccucgugauucgcccg

SEQ ID NO: 258829 - RNA, 23 nt, Human
ccugccucagccuccggaguagc

SEQ ID NO: 258830 - RNA, 23 nt, Human
ccuggguucaagcgauucuccug

SEQ ID NO: 258831 - RNA, 21 nt, Human
ccugguacagggcuuuccucc

SEQ ID NO: 258832 - RNA, 24 nt, Human
cgccucggccucccaaagugcugg

SEQ ID NO: 258833 - RNA, 24 nt, Human
cucacugcaaccucugccuccugg

SEQ ID NO: 258834 - RNA, 24 nt, Human
cuccugaccucgugauucgcccgc

SEQ ID NO: 258835 - RNA, 21 nt, Human
cuccuggguucaagcgauucu

SEQ ID NO: 258836 - RNA, 22 nt, Human
cucuacuguuccuggggacaga

SEQ ID NO: 258837 - RNA, 19 nt, Human
cugcaaccucugccuccug

SEQ ID NO: 258838 - RNA, 23 nt, Human
cugcaaccucugccuccuggguu

SEQ ID NO: 258839 - RNA, 24 nt, Human
cugcaaccucugccuccuggguuc

SEQ ID NO: 258840 - RNA, 23 nt, Human
cugccucagccuccggaguagcu

SEQ ID NO: 258841 - RNA, 18 nt, Human
cugguacagggcuuuccu

SEQ ID NO: 258842 - RNA, 19 nt, Human
cuucuaggggcuaaucagu

SEQ ID NO: 258843 - RNA, 21 nt, Human
gaaaucaauucuacuuggaau

SEQ ID NO: 258844 - RNA, 22 nt, Human
gaagaucuuggagggcagugcu

SEQ ID NO: 258845 - RNA, 25 nt, Human
gaccaggguuugucuuccccacccc

SEQ ID NO: 258846 - RNA, 22 nt, Human
gaccucgugauucgcccgccuc

SEQ ID NO: 258847 - RNA, 18 nt, Human
gagaugggguuucaccau

SEQ ID NO: 258848 - RNA, 24 nt, Human
gagaugggguuucaccauguuggc

SEQ ID NO: 258849 - RNA, 18 nt, Human
gagcaauggagcagaggg

SEQ ID NO: 258850 - RNA, 18 nt, Human
gaggggaugaccaggguu

SEQ ID NO: 258851 - RNA, 18 nt, Human
gauuacaggcgugagcca

SEQ ID NO: 258852 - RNA, 22 nt, Human
gauuacaggcgugagccaccgc

SEQ ID NO: 258853 - RNA, 23 nt, Human
gauuacaggcgugagccaccgca

SEQ ID NO: 258854 - RNA, 22 nt, Human
gcaaccucugccuccuggguuc

SEQ ID NO: 258855 - RNA, 20 nt, Human
gcagaaacagccccacguca

SEQ ID NO: 258856 - RNA, 18 nt, Human
gcagcaaggucaggccaa

SEQ ID NO: 258857 - RNA, 24 nt, Human
gccaagacaaggaggagcucuggc

SEQ ID NO: 258858 - RNA, 19 nt, Human
gcuagagugcaguggcgcg

SEQ ID NO: 258859 - RNA, 23 nt, Human
gcuggucuugaacuccugaccuc

SEQ ID NO: 258860 - RNA, 23 nt, Human
ggaaagauucugagaccugugga

SEQ ID NO: 258861 - RNA, 22 nt, Human
ggaagaucuuggagggcagugc

SEQ ID NO: 258862 - RNA, 24 nt, Human
ggcuggucuugaacuccugaccuc

SEQ ID NO: 258863 - RNA, 20 nt, Human
ggcuuuccucccccacuccc

SEQ ID NO: 258864 - RNA, 24 nt, Human
gggaagaucuuggagggcagugcu

SEQ ID NO: 258865 - RNA, 25 nt, Human
gggcagugcugccugggccgggccc

SEQ ID NO: 258866 - RNA, 22 nt, Human
gggguuucaccauguuggccag

SEQ ID NO: 258867 - RNA, 21 nt, Human
ggucaggccaaguggaggccc

SEQ ID NO: 258868 - RNA, 19 nt, Human
ggucuugaacuccugaccu

SEQ ID NO: 258869 - RNA, 23 nt, Human
guagagaugggguuucaccaugu

SEQ ID NO: 258870 - RNA, 26 nt, Human
guagguuucuccccaucuccagguuu

SEQ ID NO: 258871 - RNA, 24 nt, Human
gugauucgcccgccucggccuccc

SEQ ID NO: 258872 - RNA, 24 nt, Human
guggaagacuggagagagaaaugg

SEQ ID NO: 258873 - RNA, 20 nt, Human
guuugucuuccccacccccc

SEQ ID NO: 258874 - RNA, 22 nt, Human
guuuguuugugucugaccauca

SEQ ID NO: 258875 - RNA, 22 nt, Human
uaaagcaggcauguugcccagc

SEQ ID NO: 258876 - RNA, 24 nt, Human
uaauuguuuguauuuuuaguagag

SEQ ID NO: 258877 - RNA, 23 nt, Human
uacaggcgugagccaccgcaccc

SEQ ID NO: 258878 - RNA, 24 nt, Human
uacucugucacuccggcuagagug

SEQ ID NO: 258879 - RNA, 19 nt, Human
uagaagugugcuuaugaaa

SEQ ID NO: 258880 - RNA, 22 nt, Human
uagagaugggguuucaccaugu

SEQ ID NO: 258881 - RNA, 23 nt, Human
uagagugcaguggcgcgaucuca

SEQ ID NO: 258882 - RNA, 24 nt, Human
uagagugcaguggcgcgaucucag

SEQ ID NO: 258883 - RNA, 22 nt, Human
uagcuuguuuguuugugucuga

SEQ ID NO: 258884 - RNA, 25 nt, Human
uaggagaaaaggaugagaggaaggg

SEQ ID NO: 258885 - RNA, 19 nt, Human
uaggugcccaccacuaugc

SEQ ID NO: 258886 - RNA, 21 nt, Human
uaggugcccaccacuaugcuc

SEQ ID NO: 258887 - RNA, 24 nt, Human
uaguagagaugggguuucaccaug

SEQ ID NO: 258888 - RNA, 26 nt, Human
uaguagagaugggguuucaccauguu

SEQ ID NO: 258889 - RNA, 31 nt, Human
uauuauuuuuuauuuauuuauuuauuuauuu

SEQ ID NO: 258890 - RNA, 19 nt, Human
ucaagcgauucuccugccu

SEQ ID NO: 258891 - RNA, 24 nt, Human
ucacugcaaccucugccuccuggg

SEQ ID NO: 258892 - RNA, 25 nt, Human
ucacugcaaccucugccuccugggu

SEQ ID NO: 258893 - RNA, 27 nt, Human
ucacugcaaccucugccuccuggguuc

SEQ ID NO: 258894 - RNA, 24 nt, Human
ucccaaagugcugggauuacaggc

SEQ ID NO: 258895 - RNA, 20 nt, Human
uccccaaggacaaaucccug

SEQ ID NO: 258896 - RNA, 23 nt, Human
uccccaggucccuaguaggcugc

SEQ ID NO: 258897 - RNA, 18 nt, Human
ucccccacucccuccugg

SEQ ID NO: 258898 - RNA, 19 nt, Human
ucccugggcaaccaggcuc

SEQ ID NO: 258899 - RNA, 24 nt, Human
ucccugggcaaccaggcucuccuc

SEQ ID NO: 258900 - RNA, 25 nt, Human
ucccugggcaaccaggcucuccucc

SEQ ID NO: 258901 - RNA, 26 nt, Human
ucccugggcaaccaggcucuccucca

SEQ ID NO: 258902 - RNA, 18 nt, Human
uccugaaagugcaaauug

SEQ ID NO: 258903 - RNA, 19 nt, Human
uccuggggacagagagccc

SEQ ID NO: 258904 - RNA, 21 nt, Human
uccuggguucaagcgauucuc

SEQ ID NO: 258905 - RNA, 24 nt, Human
uccuggguucaagcgauucuccug

SEQ ID NO: 258906 - RNA, 18 nt, Human
ucggccucccaaagugcu

SEQ ID NO: 258907 - RNA, 24 nt, Human
ucuccugccucagccuccggagua

SEQ ID NO: 258908 - RNA, 18 nt, Human
ucuguagguuucucccca

SEQ ID NO: 258909 - RNA, 24 nt, Human
ucugucacuccggcuagagugcag

SEQ ID NO: 258910 - RNA, 19 nt, Human
ucuuacucugucacuccgg

SEQ ID NO: 258911 - RNA, 24 nt, Human
ucuuacucugucacuccggcuaga

SEQ ID NO: 258912 - RNA, 19 nt, Human
ucuuccccacccccccaga

SEQ ID NO: 258913 - RNA, 19 nt, Human
ucuugaacuccugaccucg

SEQ ID NO: 258914 - RNA, 21 nt, Human
ugaccaggguuugucuucccc

SEQ ID NO: 258915 - RNA, 18 nt, Human
ugagacagagucuuacuc

SEQ ID NO: 258916 - RNA, 19 nt, Human
ugagacagagucuuacucu

SEQ ID NO: 258917 - RNA, 22 nt, Human
ugagacagagucuuacucuguc

SEQ ID NO: 258918 - RNA, 21 nt, Human
ugauggagagaggggcaccug

SEQ ID NO: 258919 - RNA, 22 nt, Human
ugcaguggcgcgaucucagcuc

SEQ ID NO: 258920 - RNA, 24 nt, Human
ugccucagccuccggaguagcugg

SEQ ID NO: 258921 - RNA, 19 nt, Human
ugcugcagcugugcccgca

SEQ ID NO: 258922 - RNA, 24 nt, Human
ugcugggauuacaggcgugagcca

SEQ ID NO: 258923 - RNA, 18 nt, Human
uggaagaaacaaccacca

SEQ ID NO: 258924 - RNA, 19 nt, Human
uggaagaaacaaccaccau

SEQ ID NO: 258925 - RNA, 19 nt, Human
uggaagaaacaaccaccau

SEQ ID NO: 258926 - RNA, 24 nt, Human
uggaagaaacaaccaccauuugca

SEQ ID NO: 258927 - RNA, 25 nt, Human
uggaggcccuuggggugccgguagc

SEQ ID NO: 258928 - RNA, 19 nt, Human
uggcagagaccauccugug

SEQ ID NO: 258929 - RNA, 24 nt, Human
uggccaggcuggucuugaacuccu

SEQ ID NO: 258930 - RNA, 24 nt, Human
uggcgcgaucucagcucacugcaa

SEQ ID NO: 258931 - RNA, 18 nt, Human
ugggauuacaggcgugag

SEQ ID NO: 258932 - RNA, 19 nt, Human
ugggauuacaggcgugagc

SEQ ID NO: 258933 - RNA, 21 nt, Human
ugggauuacaggcgugagcca

SEQ ID NO: 258934 - RNA, 22 nt, Human
ugggauuacaggcgugagccac

SEQ ID NO: 258935 - RNA, 23 nt, Human
ugggauuacaggcgugagccacc

SEQ ID NO: 258936 - RNA, 24 nt, Human
ugggauuacaggcgugagccaccg

SEQ ID NO: 258937 - RNA, 24 nt, Human
ugggguuucaccauguuggccagg

SEQ ID NO: 258938 - RNA, 23 nt, Human
uggguucaagcgauucuccugcc

SEQ ID NO: 258939 - RNA, 24 nt, Human
uggguucaagcgauucuccugccu

SEQ ID NO: 258940 - RNA, 21 nt, Human
ugguauuauaggugcccacca

SEQ ID NO: 258941 - RNA, 23 nt, Human
ugucuuccccacccccccagagc

SEQ ID NO: 258942 - RNA, 18 nt, Human
uuaguagagaugggguuu

SEQ ID NO: 258943 - RNA, 22 nt, Human
uuaguagagaugggguuucacc

SEQ ID NO: 258944 - RNA, 24 nt, Human
uuaguagagaugggguuucaccau

SEQ ID NO: 258945 - RNA, 18 nt, Human
uuauuuauuuauuuauuu

SEQ ID NO: 258946 - RNA, 18 nt, Human
uuauuuauuuauuuauuu

SEQ ID NO: 258947 - RNA, 19 nt, Human
uuauuuauuuauuuauuua

SEQ ID NO: 258948 - RNA, 19 nt, Human
uuauuuauuuauuuauuua

SEQ ID NO: 258949 - RNA, 25 nt, Human
uuauuuauuuauuuauuuauuuauu

SEQ ID NO: 258950 - RNA, 25 nt, Human
uuauuuauuuauuuauuuauuuauu

SEQ ID NO: 258951 - RNA, 25 nt, Human
uuauuuauuuauuuauuuauuuauu

SEQ ID NO: 258952 - RNA, 25 nt, Human
uuauuuauuuauuuauuuauuuauu

SEQ ID NO: 258953 - RNA, 21 nt, Human
uucaagcgauucuccugccuc

SEQ ID NO: 258954 - RNA, 23 nt, Human
uucaagcgauucuccugccucag

SEQ ID NO: 258955 - RNA, 24 nt, Human
uucaagcgauucuccugccucagc

SEQ ID NO: 258956 - RNA, 20 nt, Human
uuccccaggucccuaguagg

SEQ ID NO: 258957 - RNA, 21 nt, Human
uucuaaagcaggcauguugcc

SEQ ID NO: 258958 - RNA, 19 nt, Human
uugaagggucuucuagggg

SEQ ID NO: 258959 - RNA, 23 nt, Human
uuguauuuuuaguagagaugggg

SEQ ID NO: 258960 - RNA, 20 nt, Human
uugugucugaccaucaagua

SEQ ID NO: 258961 - RNA, 24 nt, Human
uuguuuguauuuuuaguagagaug

SEQ ID NO: 258962 - RNA, 22 nt, Human
uuuauuuauuuauuuauuuauu

SEQ ID NO: 258963 - RNA, 24 nt, Human
uuucaccauguuggccaggcuggu

SEQ ID NO: 258964 - RNA, 24 nt, Human
uuucuccccaucuccagguuuggg

SEQ ID NO: 258965 - RNA, 18 nt, Human
uuugcuuccccagguccc

SEQ ID NO: 258966 - RNA, 19 nt, Human
uuuguauuuuuaguagaga

SEQ ID NO: 258967 - RNA, 24 nt, Human
uuuuuaguagagaugggguuucac

SEQ ID NO: 258968 - RNA, 23 nt, Human
aaagaaaaggaagauuuagauaa

SEQ ID NO: 258969 - RNA, 19 nt, Human
aacaaaauuacaauaacaa

SEQ ID NO: 258970 - RNA, 25 nt, Human
aacaauuuuuacauauguguaauau

SEQ ID NO: 258971 - RNA, 24 nt, Human
aacauacuucuuuacguauaugua

SEQ ID NO: 258972 - RNA, 19 nt, Human
aagaaaaggaagauuuaga

SEQ ID NO: 258973 - RNA, 19 nt, Human
acaguaacaacaacaaaaa

SEQ ID NO: 258974 - RNA, 22 nt, Human
acucaaggggacaaggacaccu

SEQ ID NO: 258975 - RNA, 22 nt, Human
aggaauaacaaaaguuaagccg

SEQ ID NO: 258976 - RNA, 23 nt, Human
aggaauaacaaaauuacaauaac

SEQ ID NO: 258977 - RNA, 24 nt, Human
aguaacaacaacaaaaaagaaaaa

SEQ ID NO: 258978 - RNA, 19 nt, Human
aucuuccaauuuucuuauu

SEQ ID NO: 258979 - RNA, 20 nt, Human
caagaggaggugauucugua

SEQ ID NO: 258980 - RNA, 19 nt, Human
cagacauuucuaaacaaaa

SEQ ID NO: 258981 - RNA, 21 nt, Human
cgcgcaacucaaggggacaag

SEQ ID NO: 258982 - RNA, 21 nt, Human
gaacacgacccgcgcaacuca

SEQ ID NO: 258983 - RNA, 22 nt, Human
gcgcaacucaaggggacaagga

SEQ ID NO: 258984 - RNA, 23 nt, Human
ggauuagggaauacauaaauugu

SEQ ID NO: 258985 - RNA, 23 nt, Human
uaacaacaacaaaaaagaaaaau

SEQ ID NO: 258986 - RNA, 19 nt, Human
uagaguacacaauuuucuu

SEQ ID NO: 258987 - RNA, 23 nt, Human
uauaguggagaaagggcauaaug

SEQ ID NO: 258988 - RNA, 19 nt, Human
uaucaagaaaaguguaaaa

SEQ ID NO: 258989 - RNA, 22 nt, Human
uauguauacauauuaugcuuag

SEQ ID NO: 258990 - RNA, 25 nt, Human
uauguauacauauuaugcuuaggag

SEQ ID NO: 258991 - RNA, 19 nt, Human
uauguguaauauguauaca

SEQ ID NO: 258992 - RNA, 24 nt, Human
ugauucuguaguccuucacauauc

SEQ ID NO: 258993 - RNA, 19 nt, Human
uguguaauauguauacaua

SEQ ID NO: 258994 - RNA, 22 nt, Human
uuuacaguaacaacaacaaaaa

SEQ ID NO: 258995 - RNA, 22 nt, Human
aaagcagacaaacaggcaaugu

SEQ ID NO: 258996 - RNA, 24 nt, Human
aaaugacuucuucaacacaaaagu

SEQ ID NO: 258997 - RNA, 18 nt, Human
acagucccaugacaaaaa

SEQ ID NO: 258998 - RNA, 22 nt, Human
agacaaacaggcaauguugaug

SEQ ID NO: 258999 - RNA, 20 nt, Human
agcagacaaacaggcaaugu

SEQ ID NO: 259000 - RNA, 21 nt, Human
caacaggaaagacugcauucg

SEQ ID NO: 259001 - RNA, 21 nt, Human
caagaccagaauuggaacuuc

SEQ ID NO: 259002 - RNA, 22 nt, Human
caggaaagacugcauucgggug

SEQ ID NO: 259003 - RNA, 22 nt, Human
ccuuaagagauucaaaagcaga

SEQ ID NO: 259004 - RNA, 19 nt, Human
cuuacaaacauccauccuu

SEQ ID NO: 259005 - RNA, 22 nt, Human
uaacugggaaaucaagaccaga

SEQ ID NO: 259006 - RNA, 23 nt, Human
uaacugggaaaucaagaccagaa

SEQ ID NO: 259007 - RNA, 21 nt, Human
uaagagauucaaaagcagaca

SEQ ID NO: 259008 - RNA, 20 nt, Human
uaagcaacaucuuacaaaca

SEQ ID NO: 259009 - RNA, 19 nt, Human
ucaaaagcagacaaacagg

SEQ ID NO: 259010 - RNA, 22 nt, Human
ucaaaagcagacaaacaggcaa

SEQ ID NO: 259011 - RNA, 22 nt, Human
ucaacacaaaaguuacccauag

SEQ ID NO: 259012 - RNA, 21 nt, Human
ucccaugacaaaaauggagau

SEQ ID NO: 259013 - RNA, 25 nt, Human
uguauuaagcaacaucuuacaaaca

SEQ ID NO: 259014 - RNA, 18 nt, Human
uucgggugaaagaacauc

SEQ ID NO: 259015 - RNA, 21 nt, Human
uuggaacuuccaaacguuuuu

SEQ ID NO: 259016 - RNA, 24 nt, Human
uuuguauuuaacagaacuugcaca

SEQ ID NO: 259017 - RNA, 24 nt, Human
aggcuggcauaugccaaagucagg

SEQ ID NO: 259018 - RNA, 21 nt, Human
ccaggcugagcacauggccuc

SEQ ID NO: 259019 - RNA, 21 nt, Human
ccccacacccacacacgaccc

SEQ ID NO: 259020 - RNA, 25 nt, Human
ccccacacccacacacgacccugcc

SEQ ID NO: 259021 - RNA, 24 nt, Human
ccugccuggcugcgagacaagggc

SEQ ID NO: 259022 - RNA, 21 nt, Human
ccuguggcaggaacaggcugg

SEQ ID NO: 259023 - RNA, 23 nt, Human
cggcaacguggccaggcugagca

SEQ ID NO: 259024 - RNA, 18 nt, Human
cguggccaggcugagcac

SEQ ID NO: 259025 - RNA, 21 nt, Human
cucccugcugucagccacugc

SEQ ID NO: 259026 - RNA, 22 nt, Human
cucgcccggccuaggcugcccc

SEQ ID NO: 259027 - RNA, 22 nt, Human
cugagcacauggccucccugcu

SEQ ID NO: 259028 - RNA, 20 nt, Human
cuggcagccccacacccaca

SEQ ID NO: 259029 - RNA, 20 nt, Human
gccacggagcagacuguaac

SEQ ID NO: 259030 - RNA, 19 nt, Human
gcuggcauaugccaaaguc

SEQ ID NO: 259031 - RNA, 21 nt, Human
ggccaggcugagcacauggcc

SEQ ID NO: 259032 - RNA, 24 nt, Human
ucagggcagcagcagcugcgucca

SEQ ID NO: 259033 - RNA, 22 nt, Human
ucccugcugucagccacugcag

SEQ ID NO: 259034 - RNA, 22 nt, Human
ugcguccaaccuggcagcccca

SEQ ID NO: 259035 - RNA, 21 nt, Human
uggccaggcugagcacauggc

SEQ ID NO: 259036 - RNA, 22 nt, Human
aaaaagaagccagcagagacaa

SEQ ID NO: 259037 - RNA, 23 nt, Human
aaagcagaagauacugaaaaagc

SEQ ID NO: 259038 - RNA, 25 nt, Human
aaagcagaagauacugaaaaagcaa

SEQ ID NO: 259039 - RNA, 20 nt, Human
aagaagccagcagagacaaa

SEQ ID NO: 259040 - RNA, 24 nt, Human
aagcagaagauacugaaaaagcaa

SEQ ID NO: 259041 - RNA, 27 nt, Human
aaugauggggaaacagaagggagggcc

SEQ ID NO: 259042 - RNA, 24 nt, Human
agaaacaauacagaauuaaauaac

SEQ ID NO: 259043 - RNA, 18 nt, Human
agugaaaccaaggauucu

SEQ ID NO: 259044 - RNA, 21 nt, Human
auaggaagaagagauguaaca

SEQ ID NO: 259045 - RNA, 23 nt, Human
augaagaacagcagugaaaccaa

SEQ ID NO: 259046 - RNA, 23 nt, Human
augagguaaagugacuaacagag

SEQ ID NO: 259047 - RNA, 27 nt, Human
auucuuucuucucucucucuuucaauu

SEQ ID NO: 259048 - RNA, 19 nt, Human
caaagcaguaagcaggaac

SEQ ID NO: 259049 - RNA, 18 nt, Human
caaauggacagggagggc

SEQ ID NO: 259050 - RNA, 19 nt, Human
caaccacauaacauggcau

SEQ ID NO: 259051 - RNA, 19 nt, Human
caaggauucuagcaaggcc

SEQ ID NO: 259052 - RNA, 19 nt, Human
caccaguaggagcccaagu

SEQ ID NO: 259053 - RNA, 19 nt, Human
cagaagauacugaaaaagc

SEQ ID NO: 259054 - RNA, 23 nt, Human
cagauggcaguaaaaagucgugg

SEQ ID NO: 259055 - RNA, 20 nt, Human
cauauuugccuccucugcua

SEQ ID NO: 259056 - RNA, 20 nt, Human
caucaacagaaaggcaaaag

SEQ ID NO: 259057 - RNA, 20 nt, Human
caucaacagaaaggcaaaag

SEQ ID NO: 259058 - RNA, 19 nt, Human
cauuccacuagcuggaaca

SEQ ID NO: 259059 - RNA, 21 nt, Human
cauugcuuuacaaaaucaagu

SEQ ID NO: 259060 - RNA, 19 nt, Human
ccccuuuuccuccugcuuu

SEQ ID NO: 259061 - RNA, 22 nt, Human
cgcucccaccucuuuugcucuu

SEQ ID NO: 259062 - RNA, 22 nt, Human
cucccaccucuuuugcucuuuc

SEQ ID NO: 259063 - RNA, 24 nt, Human
cucuugggauucaaacacugagua

SEQ ID NO: 259064 - RNA, 21 nt, Human
cucuuuugcucuuucaggucc

SEQ ID NO: 259065 - RNA, 21 nt, Human
cuucucucucucuuucaauuc

SEQ ID NO: 259066 - RNA, 21 nt, Human
gaagccagcagagacaaagca

SEQ ID NO: 259067 - RNA, 19 nt, Human
gagguaaagugacuaacag

SEQ ID NO: 259068 - RNA, 19 nt, Human
gagguccccaccaguagga

SEQ ID NO: 259069 - RNA, 20 nt, Human
gcuuuucucuugugucaaau

SEQ ID NO: 259070 - RNA, 20 nt, Human
ggauccuuaaggcuuucgcu

SEQ ID NO: 259071 - RNA, 22 nt, Human
uaacaucaacagaaaggcaaaa

SEQ ID NO: 259072 - RNA, 21 nt, Human
uaacauggcauugcuuuacaa

SEQ ID NO: 259073 - RNA, 21 nt, Human
uacuacaaauauaagaaacaa

SEQ ID NO: 259074 - RNA, 19 nt, Human
uacugaaaaagcaacuaau

SEQ ID NO: 259075 - RNA, 18 nt, Human
uagaagcacaugaagaac

SEQ ID NO: 259076 - RNA, 21 nt, Human
uagaagcacaugaagaacagc

SEQ ID NO: 259077 - RNA, 20 nt, Human
uagagcuaugugguaaauua

SEQ ID NO: 259078 - RNA, 25 nt, Human
uagagcuaugugguaaauuauuuuu

SEQ ID NO: 259079 - RNA, 21 nt, Human
uagcaaagcaguaagcaggaa

SEQ ID NO: 259080 - RNA, 22 nt, Human
uauucccuuuuuuuuucuggaa

SEQ ID NO: 259081 - RNA, 25 nt, Human
uauucuuucuucucucucucuuuca

SEQ ID NO: 259082 - RNA, 18 nt, Human
ucucucucucuuucaauu

SEQ ID NO: 259083 - RNA, 23 nt, Human
ucucucucuuucaauucuucccc

SEQ ID NO: 259084 - RNA, 21 nt, Human
ucuuucuucucucucucuuuc

SEQ ID NO: 259085 - RNA, 21 nt, Human
ugagagguaaacugacuuccu

SEQ ID NO: 259086 - RNA, 21 nt, Human
ugagcucagugcuccugauac

SEQ ID NO: 259087 - RNA, 23 nt, Human
ugcuauacaggaaaucuccuaaa

SEQ ID NO: 259088 - RNA, 21 nt, Human
ugcuauauauauauauaaaua

SEQ ID NO: 259089 - RNA, 21 nt, Human
uggauagacacagacaaagca

SEQ ID NO: 259090 - RNA, 19 nt, Human
uggaugagguaaagugacu

SEQ ID NO: 259091 - RNA, 22 nt, Human
uucccuuuuuuuuucuggaauu

SEQ ID NO: 259092 - RNA, 23 nt, Human
uucucuugugucaaauucaagua

SEQ ID NO: 259093 - RNA, 21 nt, Human
uugcucuuucagguccuuugg

SEQ ID NO: 259094 - RNA, 18 nt, Human
uuuccuccugcuuuucuc

SEQ ID NO: 259095 - RNA, 24 nt, Human
uuuuacuacaaauauaagaaacaa

SEQ ID NO: 259096 - RNA, 20 nt, Human
aaccuccucaccccacccug

SEQ ID NO: 259097 - RNA, 22 nt, Human
accagccccaucuccacucccu

SEQ ID NO: 259098 - RNA, 18 nt, Human
accuccucaccccacccc

SEQ ID NO: 259099 - RNA, 18 nt, Human
acucuacccccauccucu

SEQ ID NO: 259100 - RNA, 20 nt, Human
acucugccguccagacucag

SEQ ID NO: 259101 - RNA, 22 nt, Human
aggaucuggauccaucaaccau

SEQ ID NO: 259102 - RNA, 19 nt, Human
agggaagcagggaggcugg

SEQ ID NO: 259103 - RNA, 24 nt, Human
agucuuuauugucccaucuguucc

SEQ ID NO: 259104 - RNA, 18 nt, Human
caaaauuuuggcuuggga

SEQ ID NO: 259105 - RNA, 24 nt, Human
caaccagccccaucuccacucccu

SEQ ID NO: 259106 - RNA, 18 nt, Human
cacaccagcaggcuggcu

SEQ ID NO: 259107 - RNA, 19 nt, Human
cacucugccguccagacuc

SEQ ID NO: 259108 - RNA, 25 nt, Human
cacucugccguccagacucagucuu

SEQ ID NO: 259109 - RNA, 23 nt, Human
cagccgggcugagggagggaggc

SEQ ID NO: 259110 - RNA, 18 nt, Human
cagccucccagucccucc

SEQ ID NO: 259111 - RNA, 21 nt, Human
cagccucccagucccuccacu

SEQ ID NO: 259112 - RNA, 23 nt, Human
ccacuaaaagaaaacccuggcuc

SEQ ID NO: 259113 - RNA, 18 nt, Human
ccagagcaggaaccuccu

SEQ ID NO: 259114 - RNA, 22 nt, Human
ccagcaggcuggcucagauggg

SEQ ID NO: 259115 - RNA, 20 nt, Human
ccagccccaucuccacuccc

SEQ ID NO: 259116 - RNA, 24 nt, Human
ccagccccaucuccacucccuucc

SEQ ID NO: 259117 - RNA, 18 nt, Human
cccaccccagcacugggg

SEQ ID NO: 259118 - RNA, 19 nt, Human
cccauccucuccuuuucua

SEQ ID NO: 259119 - RNA, 20 nt, Human
cccccuucccccaccccagc

SEQ ID NO: 259120 - RNA, 24 nt, Human
ccuagaccugccagagcaggaacc

SEQ ID NO: 259121 - RNA, 19 nt, Human
cgaaagcacucaaauguca

SEQ ID NO: 259122 - RNA, 22 nt, Human
cuuacgaaagcacucaaauguc

SEQ ID NO: 259123 - RNA, 19 nt, Human
cuuccgccuagaccugcca

SEQ ID NO: 259124 - RNA, 20 nt, Human
ggaaccuccucaccccaccc

SEQ ID NO: 259125 - RNA, 19 nt, Human
gggagacucuacccccauc

SEQ ID NO: 259126 - RNA, 20 nt, Human
gggaggcuggaggacagggu

SEQ ID NO: 259127 - RNA, 18 nt, Human
gugcagaggaauggagga

SEQ ID NO: 259128 - RNA, 20 nt, Human
uaaaagaaaacccuggcuca

SEQ ID NO: 259129 - RNA, 18 nt, Human
uaguacauguacagggcu

SEQ ID NO: 259130 - RNA, 21 nt, Human
ucacugcagcagcaaccagcc

SEQ ID NO: 259131 - RNA, 18 nt, Human
uccacucugccguccaga

SEQ ID NO: 259132 - RNA, 24 nt, Human
ucccagccgggcugagggagggag

SEQ ID NO: 259133 - RNA, 18 nt, Human
ucccccuucccccacccc

SEQ ID NO: 259134 - RNA, 23 nt, Human
uccccucacugcagcagcaacca

SEQ ID NO: 259135 - RNA, 22 nt, Human
ucuuuauugucccaucuguucc

SEQ ID NO: 259136 - RNA, 18 nt, Human
ugagggagggaggcagcc

SEQ ID NO: 259137 - RNA, 21 nt, Human
ugagggagggaggcagccaca

SEQ ID NO: 259138 - RNA, 18 nt, Human
ugagguugggugaaugag

SEQ ID NO: 259139 - RNA, 19 nt, Human
ugagguugggugaaugagu

SEQ ID NO: 259140 - RNA, 19 nt, Human
uggcucagaaagucugcaa

SEQ ID NO: 259141 - RNA, 19 nt, Human
ugucccaucuguuccccuc

SEQ ID NO: 259142 - RNA, 19 nt, Human
uguuaaacagcuggaaauu

SEQ ID NO: 259143 - RNA, 20 nt, Human
aaaaacgagauucaccuaca

SEQ ID NO: 259144 - RNA, 22 nt, Human
aaacgagauucaccuacacaaa

SEQ ID NO: 259145 - RNA, 19 nt, Human
aagaagaaaagaaaaauga

SEQ ID NO: 259146 - RNA, 21 nt, Human
aagacccggcugaacacagca

SEQ ID NO: 259147 - RNA, 19 nt, Human
acaaaacauuagauaucuc

SEQ ID NO: 259148 - RNA, 24 nt, Human
agaagaaaagaaaaaugauguuag

SEQ ID NO: 259149 - RNA, 20 nt, Human
agaugagaaaaagaaacuua

SEQ ID NO: 259150 - RNA, 22 nt, Human
aggaaagcauuucuagaugaga

SEQ ID NO: 259151 - RNA, 19 nt, Human
agggguuggguugguucaa

SEQ ID NO: 259152 - RNA, 24 nt, Human
caaaacauuagauaucuccacaaa

SEQ ID NO: 259153 - RNA, 26 nt, Human
caaauaaaaacgagauucaccuacac

SEQ ID NO: 259154 - RNA, 23 nt, Human
caguaaggaaagcauuucuagau

SEQ ID NO: 259155 - RNA, 21 nt, Human
cauuucuagaugagaaaaaga

SEQ ID NO: 259156 - RNA, 20 nt, Human
cccuacaguuuugaagaccc

SEQ ID NO: 259157 - RNA, 22 nt, Human
ccuacaguuuugaagacccggc

SEQ ID NO: 259158 - RNA, 20 nt, Human
cucuuuaaguucacaaaaug

SEQ ID NO: 259159 - RNA, 22 nt, Human
ggcugaacacagcauaaaaauu

SEQ ID NO: 259160 - RNA, 21 nt, Human
ucacaaaaugcaagaagaaaa

SEQ ID NO: 259161 - RNA, 20 nt, Human
uccacaaauaaaaacgagau

SEQ ID NO: 259162 - RNA, 22 nt, Human
uccacaaauaaaaacgagauuc

SEQ ID NO: 259163 - RNA, 22 nt, Human
ucuuucuuuauacuaaccagcu

SEQ ID NO: 259164 - RNA, 19 nt, Human
ugacuacaaaacauuagau

SEQ ID NO: 259165 - RNA, 21 nt, Human
ugacuacaaaacauuagauau

SEQ ID NO: 259166 - RNA, 25 nt, Human
ugagcuagggguuggguugguucaa

SEQ ID NO: 259167 - RNA, 21 nt, Human
uguuagguugucaguaaggaa

SEQ ID NO: 259168 - RNA, 22 nt, Human
uuagguugucaguaaggaaagg

SEQ ID NO: 259169 - RNA, 22 nt, Human
uuucauccuaacuuacugaagc

SEQ ID NO: 259170 - RNA, 23 nt, Human
cacccugacacacucgaggccuc

SEQ ID NO: 259171 - RNA, 19 nt, Human
gaggcacaaacacccugac

SEQ ID NO: 259172 - RNA, 21 nt, Human
ugaggcacaaacacccugaca

SEQ ID NO: 259173 - RNA, 23 nt, Human
uguuaugaggcacaaacacccug

SEQ ID NO: 259174 - RNA, 23 nt, Human
aaaaacaaauaagauaaaaagaa

SEQ ID NO: 259175 - RNA, 25 nt, Human
aaaacaaauaagauaaaaagaauga

SEQ ID NO: 259176 - RNA, 18 nt, Human
aaccaaauaccugaccua

SEQ ID NO: 259177 - RNA, 18 nt, Human
aauguuuacaaaauaagu

SEQ ID NO: 259178 - RNA, 20 nt, Human
accugaccuauuacauccug

SEQ ID NO: 259179 - RNA, 18 nt, Human
acuauguacccacaaaau

SEQ ID NO: 259180 - RNA, 23 nt, Human
ccaaauaccugaccuauuacauc

SEQ ID NO: 259181 - RNA, 28 nt, Human
ccaaauaccugaccuauuacauccugua

SEQ ID NO: 259182 - RNA, 25 nt, Human
gagauaauagggaaauaccgguacc

SEQ ID NO: 259183 - RNA, 24 nt, Human
uaaaauuauacuauguauaaaaca

SEQ ID NO: 259184 - RNA, 21 nt, Human
uaaauauauacauguacuaug

SEQ ID NO: 259185 - RNA, 23 nt, Human
uaacagccucuuuccuaggaucu

SEQ ID NO: 259186 - RNA, 18 nt, Human
uauauacauguacuaugu

SEQ ID NO: 259187 - RNA, 25 nt, Human
ucaaaacaucucacauaccccguaa

SEQ ID NO: 259188 - RNA, 18 nt, Human
ucugcaaacuucgccuga

SEQ ID NO: 259189 - RNA, 21 nt, Human
ugagaauaacagccucuuucc

SEQ ID NO: 259190 - RNA, 19 nt, Human
ugagauaauagggaaauac

SEQ ID NO: 259191 - RNA, 23 nt, Human
ugaggggauggauaccucauucu

SEQ ID NO: 259192 - RNA, 22 nt, Human
ugaucuguacacacuuauucuc

SEQ ID NO: 259193 - RNA, 23 nt, Human
uguauaaaacagcaaucuauaug

SEQ ID NO: 259194 - RNA, 19 nt, Human
ugugucaaaacaucucaca

SEQ ID NO: 259195 - RNA, 24 nt, Human
uuuccuaggaucuucacugaucca

SEQ ID NO: 259196 - RNA, 22 nt, Human
aaacaacauaauaccauaaacu

SEQ ID NO: 259197 - RNA, 19 nt, Human
aaacauaaacauaagggca

SEQ ID NO: 259198 - RNA, 21 nt, Human
aaaguagauuuuuauuacaga

SEQ ID NO: 259199 - RNA, 20 nt, Human
aaaucuuuaggaagcagccc

SEQ ID NO: 259200 - RNA, 19 nt, Human
aaccugagguaaaaaaaau

SEQ ID NO: 259201 - RNA, 22 nt, Human
aagcagcccuguaacaauguac

SEQ ID NO: 259202 - RNA, 18 nt, Human
acuauauuaagagaaacc

SEQ ID NO: 259203 - RNA, 26 nt, Human
acucugaaugaauaccaagaagcaaa

SEQ ID NO: 259204 - RNA, 18 nt, Human
agcuccagaugcccugcu

SEQ ID NO: 259205 - RNA, 20 nt, Human
aggcauuuuuauucuugaua

SEQ ID NO: 259206 - RNA, 20 nt, Human
auuggcaguaguuuauguaa

SEQ ID NO: 259207 - RNA, 23 nt, Human
caacauaauaccauaaacugaca

SEQ ID NO: 259208 - RNA, 18 nt, Human
caacauccaucacacauc

SEQ ID NO: 259209 - RNA, 21 nt, Human
caagaagcaaaggauguacaa

SEQ ID NO: 259210 - RNA, 22 nt, Human
caaguaaacguuacaguauuaa

SEQ ID NO: 259211 - RNA, 21 nt, Human
cauaauaccauaaacugacaa

SEQ ID NO: 259212 - RNA, 23 nt, Human
cuccagaugcccugcugacuucc

SEQ ID NO: 259213 - RNA, 20 nt, Human
uaaaacaacauaauaccaua

SEQ ID NO: 259214 - RNA, 18 nt, Human
uaagagaaaccugaggua

SEQ ID NO: 259215 - RNA, 19 nt, Human
uaagagaaaccugagguaa

SEQ ID NO: 259216 - RNA, 24 nt, Human
uaccaagaagcaaaggauguacaa

SEQ ID NO: 259217 - RNA, 24 nt, Human
uagaucaggggcuaaaaauccacu

SEQ ID NO: 259218 - RNA, 20 nt, Human
uauuacagagcaaauuuuuc

SEQ ID NO: 259219 - RNA, 26 nt, Human
ugacauaauaaacauaaacauaaggg

SEQ ID NO: 259220 - RNA, 20 nt, Human
ugacuuccaccaagcacccc

SEQ ID NO: 259221 - RNA, 21 nt, Human
ugacuuccaccaagcaccccu

SEQ ID NO: 259222 - RNA, 23 nt, Human
ugagguaaaaaaaaucuuuagga

SEQ ID NO: 259223 - RNA, 21 nt, Human
ugcugacuuccaccaagcacc

SEQ ID NO: 259224 - RNA, 18 nt, Human
uggagaacuauauuaaga

SEQ ID NO: 259225 - RNA, 25 nt, Human
ugggaugagcuccagaugcccugcu

SEQ ID NO: 259226 - RNA, 23 nt, Human
uguacaacauccaucacacaucu

SEQ ID NO: 259227 - RNA, 22 nt, Human
uuccaccaagcaccccugggcc

SEQ ID NO: 259228 - RNA, 24 nt, Human
uuggcaguaguuuauguaagucaa

SEQ ID NO: 259229 - RNA, 18 nt, Human
uuuuuuuuuuuuuuuuug

SEQ ID NO: 259230 - RNA, 20 nt, Human
aaauuggagacagauacuau

SEQ ID NO: 259231 - RNA, 20 nt, Human
aggcuuauaaacaguacaaa

SEQ ID NO: 259232 - RNA, 18 nt, Human
caccgguucagggcaaga

SEQ ID NO: 259233 - RNA, 19 nt, Human
cagaggugcgcaaaacaug

SEQ ID NO: 259234 - RNA, 24 nt, Human
caguuaauuguaaaaggauaacac

SEQ ID NO: 259235 - RNA, 18 nt, Human
ccucuguuuauauuuccu

SEQ ID NO: 259236 - RNA, 19 nt, Human
cgaucuuccaaggcuuccu

SEQ ID NO: 259237 - RNA, 25 nt, Human
gaucuuccaaggcuuccugauuuaa

SEQ ID NO: 259238 - RNA, 19 nt, Human
gcgucaugcgaacugaacc

SEQ ID NO: 259239 - RNA, 21 nt, Human
guccuuuucuuuuguaaguuc

SEQ ID NO: 259240 - RNA, 18 nt, Human
uaaaaggauaacacuauu

SEQ ID NO: 259241 - RNA, 24 nt, Human
uaaauuggagacagauacuauuua

SEQ ID NO: 259242 - RNA, 24 nt, Human
uaauuauacauuagugcaaacaaa

SEQ ID NO: 259243 - RNA, 23 nt, Human
uacaaaauaguuugccuuuucug

SEQ ID NO: 259244 - RNA, 19 nt, Human
uacauuagugcaaacaaaa

SEQ ID NO: 259245 - RNA, 18 nt, Human
uagaaacaagcugcuucc

SEQ ID NO: 259246 - RNA, 21 nt, Human
uauaaaauagcaaguguaaga

SEQ ID NO: 259247 - RNA, 18 nt, Human
ucauagcuaacugauuua

SEQ ID NO: 259248 - RNA, 21 nt, Human
uccaaggcuuccugauuuaau

SEQ ID NO: 259249 - RNA, 20 nt, Human
uccaggagaaggcauccugc

SEQ ID NO: 259250 - RNA, 30 nt, Human
uccucuguuuauauuuccuuauucuugauu

SEQ ID NO: 259251 - RNA, 24 nt, Human
uguagaacaagucuauaaaauuga

SEQ ID NO: 259252 - RNA, 20 nt, Human
uuccugauuuaaucuugucu

SEQ ID NO: 259253 - RNA, 21 nt, Human
uucuuacuuugcucauuuccu

SEQ ID NO: 259254 - RNA, 22 nt, Human
uucuucacuccauuuggcaccg

SEQ ID NO: 259255 - RNA, 22 nt, Human
uuugcuguauauucaaaaucau

SEQ ID NO: 259256 - RNA, 21 nt, Human
aaaaaaaaaaaaaauuagcug

SEQ ID NO: 259257 - RNA, 23 nt, Human
aaacaaauaaaaaaaaccuacua

SEQ ID NO: 259258 - RNA, 22 nt, Human
aaaccggucucuccuaaaaaua

SEQ ID NO: 259259 - RNA, 24 nt, Human
aacacuuugggaggccaagguggg

SEQ ID NO: 259260 - RNA, 20 nt, Human
aacauggcaaaacccugucu

SEQ ID NO: 259261 - RNA, 21 nt, Human
aacauggcaaaacccugucuc

SEQ ID NO: 259262 - RNA, 23 nt, Human
aaucgcuugaacccggaggugga

SEQ ID NO: 259263 - RNA, 24 nt, Human
aauggcuugaacccgggaggcaga

SEQ ID NO: 259264 - RNA, 18 nt, Human
acagagugagacccuguc

SEQ ID NO: 259265 - RNA, 20 nt, Human
acagagugagacccugucuc

SEQ ID NO: 259266 - RNA, 23 nt, Human
acagagugagacccugucucaaa

SEQ ID NO: 259267 - RNA, 22 nt, Human
acaggcaaggcuccgucuaaaa

SEQ ID NO: 259268 - RNA, 24 nt, Human
acccugucucuacuaaaaauauga

SEQ ID NO: 259269 - RNA, 24 nt, Human
acgcuguacucccagcuacuuggg

SEQ ID NO: 259270 - RNA, 20 nt, Human
acuaucaugcaccaagcacu

SEQ ID NO: 259271 - RNA, 23 nt, Human
acugcacuccagucuggcaacag

SEQ ID NO: 259272 - RNA, 24 nt, Human
acugcagccugggugacagaguga

SEQ ID NO: 259273 - RNA, 22 nt, Human
agaagucucgagaguuuagcuc

SEQ ID NO: 259274 - RNA, 20 nt, Human
agagaggaaguaaaggagga

SEQ ID NO: 259275 - RNA, 27 nt, Human
agagaggaaguaaaggaggagggaccc

SEQ ID NO: 259276 - RNA, 24 nt, Human
agagguugcagugagccgagaucg

SEQ ID NO: 259277 - RNA, 24 nt, Human
agcacuuugggaggcagaggcagg

SEQ ID NO: 259278 - RNA, 24 nt, Human
agccugggcaacauggcaaaaccc

SEQ ID NO: 259279 - RNA, 22 nt, Human
agccugggugacagagugagac

SEQ ID NO: 259280 - RNA, 18 nt, Human
agcugugugugguggugu

SEQ ID NO: 259281 - RNA, 23 nt, Human
agcugugugugguggugugcgcc

SEQ ID NO: 259282 - RNA, 22 nt, Human
aggacaaauaaaucauguuccu

SEQ ID NO: 259283 - RNA, 19 nt, Human
aggagaagugaguagucag

SEQ ID NO: 259284 - RNA, 23 nt, Human
aggaguucaagaccagccugggc

SEQ ID NO: 259285 - RNA, 20 nt, Human
aggcaaggcuccgucuaaaa

SEQ ID NO: 259286 - RNA, 24 nt, Human
aggcacaagaaucgcuugaacccg

SEQ ID NO: 259287 - RNA, 21 nt, Human
aggcagaauggcuugaacccg

SEQ ID NO: 259288 - RNA, 22 nt, Human
aggcagaauggcuugaacccgg

SEQ ID NO: 259289 - RNA, 21 nt, Human
aggcagagguugcagugagcc

SEQ ID NO: 259290 - RNA, 24 nt, Human
aggcagagguugcagugagccgag

SEQ ID NO: 259291 - RNA, 18 nt, Human
aggcaggcggaucacgag

SEQ ID NO: 259292 - RNA, 26 nt, Human
aggcaggcggaucacgagaucagaua

SEQ ID NO: 259293 - RNA, 18 nt, Human
aggcaugguggcagacgc

SEQ ID NO: 259294 - RNA, 21 nt, Human
aggccaagguggguggaucac

SEQ ID NO: 259295 - RNA, 24 nt, Human
aggccgaggcacaagaaucgcuug

SEQ ID NO: 259296 - RNA, 19 nt, Human
aggcggaucacgagaucag

SEQ ID NO: 259297 - RNA, 21 nt, Human
aggcugaggcagaauggcuug

SEQ ID NO: 259298 - RNA, 25 nt, Human
agggggauggaggugaggucugggg

SEQ ID NO: 259299 - RNA, 24 nt, Human
agguggagguugcagugagcugag

SEQ ID NO: 259300 - RNA, 21 nt, Human
aguggcucaugccuguaaucc

SEQ ID NO: 259301 - RNA, 23 nt, Human
aguggcucaugccuguaauccua

SEQ ID NO: 259302 - RNA, 24 nt, Human
agugggucacaccuguaaucccag

SEQ ID NO: 259303 - RNA, 24 nt, Human
aucacccgagguuaggaguucaag

SEQ ID NO: 259304 - RNA, 24 nt, Human
aucgugccacugcacuccagucug

SEQ ID NO: 259305 - RNA, 19 nt, Human
augccuguaauccuaacac

SEQ ID NO: 259306 - RNA, 23 nt, Human
auugcacugcagccugggugaca

SEQ ID NO: 259307 - RNA, 22 nt, Human
caacauggcaaaacccugucuc

SEQ ID NO: 259308 - RNA, 24 nt, Human
caacauggcaaaacccugucucua

SEQ ID NO: 259309 - RNA, 21 nt, Human
caagguggguggaucacccga

SEQ ID NO: 259310 - RNA, 24 nt, Human
caagguggguggaucacccgaggu

SEQ ID NO: 259311 - RNA, 24 nt, Human
cacaccuguaaucccagcacuuug

SEQ ID NO: 259312 - RNA, 24 nt, Human
cacagugcuguaguagaugucuga

SEQ ID NO: 259313 - RNA, 23 nt, Human
cacccgagguuaggaguucaaga

SEQ ID NO: 259314 - RNA, 23 nt, Human
caccuguaaucccagcacuuugg

SEQ ID NO: 259315 - RNA, 24 nt, Human
caccuguaaucccagcacuuuggg

SEQ ID NO: 259316 - RNA, 18 nt, Human
cacugcacuccagucugg

SEQ ID NO: 259317 - RNA, 20 nt, Human
cacugcacuccagucuggca

SEQ ID NO: 259318 - RNA, 22 nt, Human
cacugcacuccagucuggcaac

SEQ ID NO: 259319 - RNA, 23 nt, Human
cacugcacuccagucuggcaaca

SEQ ID NO: 259320 - RNA, 24 nt, Human
cacugcacuccagucuggcaacag

SEQ ID NO: 259321 - RNA, 20 nt, Human
cacugcagccugggugacag

SEQ ID NO: 259322 - RNA, 23 nt, Human
cacugcagccugggugacagagu

SEQ ID NO: 259323 - RNA, 24 nt, Human
cacugcagccugggugacagagug

SEQ ID NO: 259324 - RNA, 25 nt, Human
cagaggcaggcggaucacgagauca

SEQ ID NO: 259325 - RNA, 24 nt, Human
cagcacuuugggaggcagaggcag

SEQ ID NO: 259326 - RNA, 26 nt, Human
cagcacuuugggaggcagaggcaggc

SEQ ID NO: 259327 - RNA, 22 nt, Human
cagccuugacaaaucuuacagc

SEQ ID NO: 259328 - RNA, 24 nt, Human
cagcuacuugggaggcugaggcag

SEQ ID NO: 259329 - RNA, 23 nt, Human
caguagaguaagaucagugcaau

SEQ ID NO: 259330 - RNA, 24 nt, Human
caugccuguaauccuaacacuuug

SEQ ID NO: 259331 - RNA, 19 nt, Human
cauugcacugcagccuggg

SEQ ID NO: 259332 - RNA, 24 nt, Human
cauugcacugcagccugggugaca

SEQ ID NO: 259333 - RNA, 25 nt, Human
cauugcacugcagccugggugacag

SEQ ID NO: 259334 - RNA, 21 nt, Human
ccaagcacuacucuaggugcu

SEQ ID NO: 259335 - RNA, 19 nt, Human
ccacugcacuccagucugg

SEQ ID NO: 259336 - RNA, 19 nt, Human
ccacugcacuccagucugg

SEQ ID NO: 259337 - RNA, 20 nt, Human
ccacugcacuccagucuggc

SEQ ID NO: 259338 - RNA, 23 nt, Human
ccacugcacuccagucuggcaac

SEQ ID NO: 259339 - RNA, 20 nt, Human
ccauugcacugcagccuggg

SEQ ID NO: 259340 - RNA, 21 nt, Human
ccauugcacugcagccugggu

SEQ ID NO: 259341 - RNA, 24 nt, Human
ccauugcacugcagccugggugac

SEQ ID NO: 259342 - RNA, 23 nt, Human
cccgagguuaggaguucaagacc

SEQ ID NO: 259343 - RNA, 20 nt, Human
cccggagguggagguugcag

SEQ ID NO: 259344 - RNA, 24 nt, Human
cccugucucaaacaaauaaaaaaa

SEQ ID NO: 259345 - RNA, 24 nt, Human
ccugccuuagcccauccucccuuc

SEQ ID NO: 259346 - RNA, 22 nt, Human
ccuggccaacguggugaaaacc

SEQ ID NO: 259347 - RNA, 23 nt, Human
ccuggccaacguggugaaaaccg

SEQ ID NO: 259348 - RNA, 22 nt, Human
ccugggcaacauggcaaaaccc

SEQ ID NO: 259349 - RNA, 24 nt, Human
ccugggcaacauggcaaaacccug

SEQ ID NO: 259350 - RNA, 20 nt, Human
ccugggugacagagugagac

SEQ ID NO: 259351 - RNA, 22 nt, Human
ccuguaaucccagcuacuaggg

SEQ ID NO: 259352 - RNA, 24 nt, Human
cgagaccauccuggccaacguggu

SEQ ID NO: 259353 - RNA, 24 nt, Human
cgagaucgugccacugcacuccag

SEQ ID NO: 259354 - RNA, 24 nt, Human
cgaggcacaagaaucgcuugaacc

SEQ ID NO: 259355 - RNA, 23 nt, Human
cgccuguaaucccagcuacuagg

SEQ ID NO: 259356 - RNA, 24 nt, Human
cgccuguaaucccagcuacuaggg

SEQ ID NO: 259357 - RNA, 23 nt, Human
cgcuguacucccagcuacuuggg

SEQ ID NO: 259358 - RNA, 23 nt, Human
cggagguggagguugcagugagc

SEQ ID NO: 259359 - RNA, 24 nt, Human
cgggaggcagagguugcagugagc

SEQ ID NO: 259360 - RNA, 20 nt, Human
cgucuaaaaaaaaaaaaaaa

SEQ ID NO: 259361 - RNA, 20 nt, Human
cuaaaaaaaaaaaaaaaaaa

SEQ ID NO: 259362 - RNA, 19 nt, Human
cuaacacuuugggaggcca

SEQ ID NO: 259363 - RNA, 24 nt, Human
cucaugccuguaauccuaacacuu

SEQ ID NO: 259364 - RNA, 21 nt, Human
cugguuuuaugucagcagcag

SEQ ID NO: 259365 - RNA, 24 nt, Human
gacagagugagacccugucucaaa

SEQ ID NO: 259366 - RNA, 22 nt, Human
gaggcaggaccaagguaggaaa

SEQ ID NO: 259367 - RNA, 23 nt, Human
gagguugcagugagcugagaucg

SEQ ID NO: 259368 - RNA, 23 nt, Human
gaucacccgagguuaggaguuca

SEQ ID NO: 259369 - RNA, 24 nt, Human
gaucacccgagguuaggaguucaa

SEQ ID NO: 259370 - RNA, 24 nt, Human
gccaacguggugaaaaccggucuc

SEQ ID NO: 259371 - RNA, 24 nt, Human
gccauugcacugcagccuggguga

SEQ ID NO: 259372 - RNA, 20 nt, Human
gccgagaucgugccacugca

SEQ ID NO: 259373 - RNA, 18 nt, Human
gcgcagugggucacaccu

SEQ ID NO: 259374 - RNA, 21 nt, Human
ggaaguguggggaaguggagg

SEQ ID NO: 259375 - RNA, 21 nt, Human
ggacaaauaaaucauguuccu

SEQ ID NO: 259376 - RNA, 21 nt, Human
ggaggcugaggcagaauggcu

SEQ ID NO: 259377 - RNA, 22 nt, Human
ggagguugcagugagcugagau

SEQ ID NO: 259378 - RNA, 23 nt, Human
ggagguugcagugagcugagauc

SEQ ID NO: 259379 - RNA, 24 nt, Human
ggagguugcagugagcugagaucg

SEQ ID NO: 259380 - RNA, 21 nt, Human
ggaucacgagaucagauaucg

SEQ ID NO: 259381 - RNA, 27 nt, Human
ggcaaggcuccgucuaaaaaaaaaaaa

SEQ ID NO: 259382 - RNA, 22 nt, Human
gggaggccgaggcacaagaauc

SEQ ID NO: 259383 - RNA, 24 nt, Human
gggcagacagagggggauggaggu

SEQ ID NO: 259384 - RNA, 24 nt, Human
gggcgcaguggcucaugccuguaa

SEQ ID NO: 259385 - RNA, 19 nt, Human
gguggagguugcagugagc

SEQ ID NO: 259386 - RNA, 24 nt, Human
gguggugugcgccuguaaucccag

SEQ ID NO: 259387 - RNA, 21 nt, Human
guaaacaguuaguugcauaaa

SEQ ID NO: 259388 - RNA, 24 nt, Human
gucagccuugacaaaucuuacagc

SEQ ID NO: 259389 - RNA, 20 nt, Human
guccugguuuuaugucagca

SEQ ID NO: 259390 - RNA, 20 nt, Human
guggagguugcagugagcug

SEQ ID NO: 259391 - RNA, 24 nt, Human
guggugugcgccuguaaucccagc

SEQ ID NO: 259392 - RNA, 24 nt, Human
guugcagugagccgagaucgugcc

SEQ ID NO: 259393 - RNA, 19 nt, Human
guugcagugagcugagauc

SEQ ID NO: 259394 - RNA, 24 nt, Human
uaacacuuugggaggccaaggugg

SEQ ID NO: 259395 - RNA, 18 nt, Human
uacuagggaggccgaggc

SEQ ID NO: 259396 - RNA, 22 nt, Human
uagcucuguccagggaacuggg

SEQ ID NO: 259397 - RNA, 20 nt, Human
uaggggaacuaauugaagua

SEQ ID NO: 259398 - RNA, 23 nt, Human
uaucccuguuuuacagaugaaaa

SEQ ID NO: 259399 - RNA, 18 nt, Human
ucaacauauaguaaaggc

SEQ ID NO: 259400 - RNA, 23 nt, Human
ucacaccuguaaucccagcacuu

SEQ ID NO: 259401 - RNA, 23 nt, Human
ucacgagaucagauaucgagacc

SEQ ID NO: 259402 - RNA, 23 nt, Human
ucagccgggcgcaguggcucaug

SEQ ID NO: 259403 - RNA, 18 nt, Human
ucagugcaaugaagccua

SEQ ID NO: 259404 - RNA, 22 nt, Human
uccgucuaaaaaaaaaaaaaaa

SEQ ID NO: 259405 - RNA, 25 nt, Human
uccgucuaaaaaaaaaaaaaaaaaa

SEQ ID NO: 259406 - RNA, 23 nt, Human
ucgcuugaacccggagguggagg

SEQ ID NO: 259407 - RNA, 23 nt, Human
ucgugccacugcacuccagucug

SEQ ID NO: 259408 - RNA, 21 nt, Human
ucucuacuaaaaauaugaaaa

SEQ ID NO: 259409 - RNA, 19 nt, Human
ucugagcuagagauaagaa

SEQ ID NO: 259410 - RNA, 21 nt, Human
ugaaaaaacuaaggcucaaag

SEQ ID NO: 259411 - RNA, 27 nt, Human
ugaaaaaacuaaggcucaaagacauua

SEQ ID NO: 259412 - RNA, 22 nt, Human
ugacagagugagacccugucuc

SEQ ID NO: 259413 - RNA, 22 nt, Human
ugagccgagaucgugccacugc

SEQ ID NO: 259414 - RNA, 22 nt, Human
ugagcugagaucgcgccauugc

SEQ ID NO: 259415 - RNA, 21 nt, Human
ugaggcagaauggcuugaacc

SEQ ID NO: 259416 - RNA, 22 nt, Human
ugaggcagaauggcuugaaccc

SEQ ID NO: 259417 - RNA, 21 nt, Human
ugagggcagacagagggggau

SEQ ID NO: 259418 - RNA, 22 nt, Human
ugaggugcacuuugccugggca

SEQ ID NO: 259419 - RNA, 23 nt, Human
ugcaaugaagccuaauugugagg

SEQ ID NO: 259420 - RNA, 22 nt, Human
ugcacugcagccugggugacag

SEQ ID NO: 259421 - RNA, 24 nt, Human
ugcacugcagccugggugacagag

SEQ ID NO: 259422 - RNA, 24 nt, Human
ugcagccugggugacagagugaga

SEQ ID NO: 259423 - RNA, 23 nt, Human
ugccuguaauccuaacacuuugg

SEQ ID NO: 259424 - RNA, 23 nt, Human
ugccuguaauccuaacacuuugg

SEQ ID NO: 259425 - RNA, 24 nt, Human
ugccuguaauccuaacacuuuggg

SEQ ID NO: 259426 - RNA, 20 nt, Human
ugccuguggagaaagggucc

SEQ ID NO: 259427 - RNA, 23 nt, Human
ugccuuagcccauccucccuuca

SEQ ID NO: 259428 - RNA, 21 nt, Human
uggaauggucaacauauagua

SEQ ID NO: 259429 - RNA, 18 nt, Human
uggagguugcagugagcu

SEQ ID NO: 259430 - RNA, 24 nt, Human
uggaucacccgagguuaggaguuc

SEQ ID NO: 259431 - RNA, 19 nt, Human
uggccaacguggugaaaac

SEQ ID NO: 259432 - RNA, 19 nt, Human
uggcucaugccuguaaucc

SEQ ID NO: 259433 - RNA, 24 nt, Human
uggcucaugccuguaauccuaaca

SEQ ID NO: 259434 - RNA, 20 nt, Human
uggcuugaacccgggaggca

SEQ ID NO: 259435 - RNA, 19 nt, Human
ugggaaguguggggaagug

SEQ ID NO: 259436 - RNA, 18 nt, Human
ugggaggcagaggcaggc

SEQ ID NO: 259437 - RNA, 19 nt, Human
ugggaggcagaggcaggcg

SEQ ID NO: 259438 - RNA, 24 nt, Human
ugggaggcagaggcaggcggauca

SEQ ID NO: 259439 - RNA, 23 nt, Human
ugggaggccaagguggguggauc

SEQ ID NO: 259440 - RNA, 24 nt, Human
ugggaggccaagguggguggauca

SEQ ID NO: 259441 - RNA, 18 nt, Human
ugggaggcugaggcagaa

SEQ ID NO: 259442 - RNA, 21 nt, Human
ugggaggcugaggcagaaugg

SEQ ID NO: 259443 - RNA, 19 nt, Human
uggggcugugcgcaguggg

SEQ ID NO: 259444 - RNA, 22 nt, Human
uggggugcuguuauuaucccug

SEQ ID NO: 259445 - RNA, 22 nt, Human
ugggucacaccuguaaucccag

SEQ ID NO: 259446 - RNA, 24 nt, Human
ugggucacaccuguaaucccagca

SEQ ID NO: 259447 - RNA, 21 nt, Human
ugggugacagagugagacccu

SEQ ID NO: 259448 - RNA, 24 nt, Human
uggguggaucacccgagguuagga

SEQ ID NO: 259449 - RNA, 24 nt, Human
ugguggugugcgccuguaauccca

SEQ ID NO: 259450 - RNA, 21 nt, Human
uggugugcgccuguaauccca

SEQ ID NO: 259451 - RNA, 24 nt, Human
uggugugcgccuguaaucccagcu

SEQ ID NO: 259452 - RNA, 20 nt, Human
uguggagaaaggguccuggu

SEQ ID NO: 259453 - RNA, 18 nt, Human
uguggggguaggguaggg

SEQ ID NO: 259454 - RNA, 19 nt, Human
uuacuuagauuaucucaau

SEQ ID NO: 259455 - RNA, 18 nt, Human
uuagcuggggcugugcgc

SEQ ID NO: 259456 - RNA, 22 nt, Human
uuagcugugugugguggugugc

SEQ ID NO: 259457 - RNA, 24 nt, Human
uuagcugugugugguggugugcgc

SEQ ID NO: 259458 - RNA, 22 nt, Human
uucuccgccacugugugccugc

SEQ ID NO: 259459 - RNA, 23 nt, Human
uugaacccggagguggagguugc

SEQ ID NO: 259460 - RNA, 25 nt, Human
uugaaggccuacuaucaugcaccaa

SEQ ID NO: 259461 - RNA, 21 nt, Human
uugacaucaaagaggagagag

SEQ ID NO: 259462 - RNA, 18 nt, Human
uugcagugagccgagauc

SEQ ID NO: 259463 - RNA, 22 nt, Human
uugcagugagccgagaucgugc

SEQ ID NO: 259464 - RNA, 18 nt, Human
uugcagugagcugagauc

SEQ ID NO: 259465 - RNA, 19 nt, Human
uugcagugagcugagaucg

SEQ ID NO: 259466 - RNA, 20 nt, Human
uugcagugagcugagaucgc

SEQ ID NO: 259467 - RNA, 22 nt, Human
uugcagugagcugagaucgcgc

SEQ ID NO: 259468 - RNA, 20 nt, Human
uugggaggcugaggcagaau

SEQ ID NO: 259469 - RNA, 21 nt, Human
uuuggaauggucaacauauag

SEQ ID NO: 259470 - RNA, 27 nt, Human
aagaaaccaugacagauggugggcacc

SEQ ID NO: 259471 - RNA, 21 nt, Human
aagaaccagaggauacaagug

SEQ ID NO: 259472 - RNA, 23 nt, Human
aauaaaugguacagaaagggcaa

SEQ ID NO: 259473 - RNA, 24 nt, Human
acaagugggcccuccaagaaacca

SEQ ID NO: 259474 - RNA, 21 nt, Human
acacacacgcaugaaaagcca

SEQ ID NO: 259475 - RNA, 19 nt, Human
acacacucacauaaauggc

SEQ ID NO: 259476 - RNA, 23 nt, Human
acauacacauaacccaugaaaca

SEQ ID NO: 259477 - RNA, 20 nt, Human
acugguccagcucugcuaac

SEQ ID NO: 259478 - RNA, 22 nt, Human
agauauaccccucacugcugca

SEQ ID NO: 259479 - RNA, 21 nt, Human
agauggcaucuugguaucucu

SEQ ID NO: 259480 - RNA, 18 nt, Human
agcaagaaaucaggguga

SEQ ID NO: 259481 - RNA, 21 nt, Human
agcuuccaaggaccccaccuc

SEQ ID NO: 259482 - RNA, 24 nt, Human
aggaagaaaacucuuguuuaagga

SEQ ID NO: 259483 - RNA, 23 nt, Human
aggcagucuaguuccugagcugu

SEQ ID NO: 259484 - RNA, 22 nt, Human
aggugcucaauaaaugaagaac

SEQ ID NO: 259485 - RNA, 24 nt, Human
agucuaguuccugagcugugcucc

SEQ ID NO: 259486 - RNA, 18 nt, Human
aguuccugagcugugcuc

SEQ ID NO: 259487 - RNA, 19 nt, Human
caacuggccagcccagaua

SEQ ID NO: 259488 - RNA, 21 nt, Human
caagugggcccuccaagaaac

SEQ ID NO: 259489 - RNA, 24 nt, Human
cacaaacacacacucacauaaaug

SEQ ID NO: 259490 - RNA, 22 nt, Human
cacugcucucuuauccccuugc

SEQ ID NO: 259491 - RNA, 19 nt, Human
cagaggauacaagugggcc

SEQ ID NO: 259492 - RNA, 27 nt, Human
cagcacaaacacacacucacauaaaug

SEQ ID NO: 259493 - RNA, 22 nt, Human
cagcccagcugcagcuggcuua

SEQ ID NO: 259494 - RNA, 21 nt, Human
cagcuggcuuaucccuccaag

SEQ ID NO: 259495 - RNA, 22 nt, Human
caggauuggaacccaggcaguc

SEQ ID NO: 259496 - RNA, 29 nt, Human
cauguucagacaacacacacgcauggugu

SEQ ID NO: 259497 - RNA, 22 nt, Human
cccagaacagggcugggcucau

SEQ ID NO: 259498 - RNA, 18 nt, Human
ccccuuuguaccucagcc

SEQ ID NO: 259499 - RNA, 18 nt, Human
cccuugccagcugcuguc

SEQ ID NO: 259500 - RNA, 18 nt, Human
ccuuuauuaucauaaaca

SEQ ID NO: 259501 - RNA, 20 nt, Human
cucacugcugcacccccuua

SEQ ID NO: 259502 - RNA, 20 nt, Human
cuccaaggcaccacuggucc

SEQ ID NO: 259503 - RNA, 23 nt, Human
cucuuauccccuugccagcugcu

SEQ ID NO: 259504 - RNA, 18 nt, Human
cugcacccccuuaccugg

SEQ ID NO: 259505 - RNA, 24 nt, Human
cugcucaaucccccuuuguaccuc

SEQ ID NO: 259506 - RNA, 18 nt, Human
cugcugcacccccuuacc

SEQ ID NO: 259507 - RNA, 23 nt, Human
cugcugccuuccacauacucagu

SEQ ID NO: 259508 - RNA, 20 nt, Human
gacaacacacacgcaugaaa

SEQ ID NO: 259509 - RNA, 18 nt, Human
gcacccccuuaccuggcc

SEQ ID NO: 259510 - RNA, 23 nt, Human
gggagccauggccugagccuggc

SEQ ID NO: 259511 - RNA, 20 nt, Human
guaucucuuucuugccucua

SEQ ID NO: 259512 - RNA, 23 nt, Human
uaacccaugaaacacuccccaug

SEQ ID NO: 259513 - RNA, 18 nt, Human
uaagucaaccacacagcc

SEQ ID NO: 259514 - RNA, 19 nt, Human
uaauuugcucaaggucaca

SEQ ID NO: 259515 - RNA, 21 nt, Human
uaguuccugagcugugcuccu

SEQ ID NO: 259516 - RNA, 24 nt, Human
uauggauaaagccagaccuccuug

SEQ ID NO: 259517 - RNA, 23 nt, Human
ucaaccacacagcccagcugcag

SEQ ID NO: 259518 - RNA, 21 nt, Human
ucagggugaggaagaaaaagg

SEQ ID NO: 259519 - RNA, 19 nt, Human
uccaaggaccccaccuccc

SEQ ID NO: 259520 - RNA, 18 nt, Human
ucccccuuuguaccucag

SEQ ID NO: 259521 - RNA, 19 nt, Human
uccugggcugcucaauccc

SEQ ID NO: 259522 - RNA, 19 nt, Human
ucuccugggcugcucaauc

SEQ ID NO: 259523 - RNA, 18 nt, Human
ucucuuauccccuugcca

SEQ ID NO: 259524 - RNA, 24 nt, Human
ugaauaagcaagaaaucaggguug

SEQ ID NO: 259525 - RNA, 26 nt, Human
ugacagauguaauuuacaaggaagaa

SEQ ID NO: 259526 - RNA, 22 nt, Human
uggccugagccuggcuggcugg

SEQ ID NO: 259527 - RNA, 22 nt, Human
uucgcacauacaugagcacaca

SEQ ID NO: 259528 - RNA, 22 nt, Human
aaaagacaaaugaaauacccag

SEQ ID NO: 259529 - RNA, 19 nt, Human
aagaagacugaaccuuacu

SEQ ID NO: 259530 - RNA, 23 nt, Human
acaaaacuaguuggagcagcccu

SEQ ID NO: 259531 - RNA, 24 nt, Human
acuggaacgcaagacagggcaguc

SEQ ID NO: 259532 - RNA, 19 nt, Human
agacagggcagcgcuggga

SEQ ID NO: 259533 - RNA, 24 nt, Human
agagcuggaagcugacacaaaacu

SEQ ID NO: 259534 - RNA, 18 nt, Human
agcugacacaaaacuagu

SEQ ID NO: 259535 - RNA, 25 nt, Human
agcuggaacacuggaacgcaagaca

SEQ ID NO: 259536 - RNA, 19 nt, Human
cacaaaacuaguuggagca

SEQ ID NO: 259537 - RNA, 19 nt, Human
caggagccugagcaagaag

SEQ ID NO: 259538 - RNA, 19 nt, Human
ccaaaugcuggagaggggc

SEQ ID NO: 259539 - RNA, 21 nt, Human
ccaaaugcuggagaggggcau

SEQ ID NO: 259540 - RNA, 22 nt, Human
ccaaaugcuggagaggggcaua

SEQ ID NO: 259541 - RNA, 21 nt, Human
cugacacaaaacuaguuggag

SEQ ID NO: 259542 - RNA, 23 nt, Human
cuucaggagccugagcaagaaga

SEQ ID NO: 259543 - RNA, 22 nt, Human
gacagggcagcgcugggaauga

SEQ ID NO: 259544 - RNA, 20 nt, Human
gacagggcccggggccugcg

SEQ ID NO: 259545 - RNA, 18 nt, Human
gcccggggccugcggggc

SEQ ID NO: 259546 - RNA, 19 nt, Human
gcccuguuugucuuaaagc

SEQ ID NO: 259547 - RNA, 19 nt, Human
gcggggcugcggagaaggc

SEQ ID NO: 259548 - RNA, 19 nt, Human
gcugcggagaaggcgggag

SEQ ID NO: 259549 - RNA, 19 nt, Human
gcuggaacacuggaacgca

SEQ ID NO: 259550 - RNA, 19 nt, Human
gcugggaaugacagggccc

SEQ ID NO: 259551 - RNA, 19 nt, Human
ggaacacuggaacgcaaga

SEQ ID NO: 259552 - RNA, 24 nt, Human
ggccugcggggcugcggagaaggc

SEQ ID NO: 259553 - RNA, 23 nt, Human
gggcugcggagaaggcgggagac

SEQ ID NO: 259554 - RNA, 19 nt, Human
uacuucuuacccccaauuu

SEQ ID NO: 259555 - RNA, 21 nt, Human
uagaaaguugcaguuaaaaac

SEQ ID NO: 259556 - RNA, 19 nt, Human
ucgcagaagcuggaacacu

SEQ ID NO: 259557 - RNA, 21 nt, Human
ucgcagaagcuggaacacugg

SEQ ID NO: 259558 - RNA, 21 nt, Human
ucuaucaggagaaucaacccu

SEQ ID NO: 259559 - RNA, 19 nt, Human
ugaaauacccagcauauac

SEQ ID NO: 259560 - RNA, 21 nt, Human
ugaaccuuacuggcugaauua

SEQ ID NO: 259561 - RNA, 22 nt, Human
ugacacaaaacuaguuggagca

SEQ ID NO: 259562 - RNA, 18 nt, Human
ugagcaagaagacugaac

SEQ ID NO: 259563 - RNA, 22 nt, Human
ugagcaagaagacugaaccuua

SEQ ID NO: 259564 - RNA, 26 nt, Human
ugcuuuugcugugcaucacccuugau

SEQ ID NO: 259565 - RNA, 19 nt, Human
uggagaggggcauacagug

SEQ ID NO: 259566 - RNA, 20 nt, Human
uggagaggggcauacagugg

SEQ ID NO: 259567 - RNA, 23 nt, Human
uuagagggaugggguccauugcu

SEQ ID NO: 259568 - RNA, 24 nt, Human
uuagagggaugggguccauugcuu

SEQ ID NO: 259569 - RNA, 20 nt, Human
uugaagguuucccuagagca

SEQ ID NO: 259570 - RNA, 20 nt, Human
aaaaccaaucagugagaaaa

SEQ ID NO: 259571 - RNA, 21 nt, Human
aaacaccccauuuccuuccca

SEQ ID NO: 259572 - RNA, 20 nt, Human
aaaggagcugggagcugcag

SEQ ID NO: 259573 - RNA, 21 nt, Human
aaaucuggagaaacuucggca

SEQ ID NO: 259574 - RNA, 19 nt, Human
aaccaaucagugagaaaac

SEQ ID NO: 259575 - RNA, 22 nt, Human
aacccccagaaaggggccccaa

SEQ ID NO: 259576 - RNA, 30 nt, Human
aagaaaaccaaucagugagaaaacucaagg

SEQ ID NO: 259577 - RNA, 24 nt, Human
aagagugaccuccaaaacaaaacc

SEQ ID NO: 259578 - RNA, 23 nt, Human
aagcagcugcaacaacagaucuu

SEQ ID NO: 259579 - RNA, 20 nt, Human
aagcagcuuuucucuucucu

SEQ ID NO: 259580 - RNA, 22 nt, Human
aagcccaggcucccaagguccc

SEQ ID NO: 259581 - RNA, 23 nt, Human
aaggaccgagcagcaucugcccu

SEQ ID NO: 259582 - RNA, 21 nt, Human
aagguccccucugcacuccuc

SEQ ID NO: 259583 - RNA, 22 nt, Human
aagugacccuauagccucaggu

SEQ ID NO: 259584 - RNA, 23 nt, Human
acacacacacacacgcacgugca

SEQ ID NO: 259585 - RNA, 20 nt, Human
acacacacgcacgugcacac

SEQ ID NO: 259586 - RNA, 20 nt, Human
accaccacccgggccugccu

SEQ ID NO: 259587 - RNA, 22 nt, Human
accaccacccgggccugccugg

SEQ ID NO: 259588 - RNA, 18 nt, Human
accauguggucccaaagc

SEQ ID NO: 259589 - RNA, 19 nt, Human
acccagccccagcccuguu

SEQ ID NO: 259590 - RNA, 18 nt, Human
accccaugaaugcccacc

SEQ ID NO: 259591 - RNA, 24 nt, Human
accccauuuccuucccacucccuu

SEQ ID NO: 259592 - RNA, 33 nt, Human
accugacacacacacacacacacgcacguggug

SEQ ID NO: 259593 - RNA, 19 nt, Human
acgcacacacauacacaca

SEQ ID NO: 259594 - RNA, 19 nt, Human
acucugacuccuccagccu

SEQ ID NO: 259595 - RNA, 22 nt, Human
acugacuaagggaaaagaggag

SEQ ID NO: 259596 - RNA, 24 nt, Human
agaaaacaccccauuuccuuccca

SEQ ID NO: 259597 - RNA, 25 nt, Human
agaaaaccaaauggaccaaggucaa

SEQ ID NO: 259598 - RNA, 24 nt, Human
agacagaaaaccaaauggaccaag

SEQ ID NO: 259599 - RNA, 22 nt, Human
agacagaaaaccaaauggacug

SEQ ID NO: 259600 - RNA, 22 nt, Human
agacaggagggaagggccccag

SEQ ID NO: 259601 - RNA, 27 nt, Human
agacaggagggaagggccccaggccug

SEQ ID NO: 259602 - RNA, 19 nt, Human
agaccgagaagagacagga

SEQ ID NO: 259603 - RNA, 23 nt, Human
agagucauagagcuguggugggg

SEQ ID NO: 259604 - RNA, 18 nt, Human
agaucuuccccugccucu

SEQ ID NO: 259605 - RNA, 19 nt, Human
agccaaagaccaggugaac

SEQ ID NO: 259606 - RNA, 22 nt, Human
agccccuagcuccgggcggcuc

SEQ ID NO: 259607 - RNA, 21 nt, Human
aggaaaaagaaagaaaaccaa

SEQ ID NO: 259608 - RNA, 21 nt, Human
aggaaauggcaagugacccua

SEQ ID NO: 259609 - RNA, 21 nt, Human
aggagcugggagcugcagugc

SEQ ID NO: 259610 - RNA, 19 nt, Human
aggagggaagggccccagg

SEQ ID NO: 259611 - RNA, 23 nt, Human
aggcaagggcucugaaacgucuc

SEQ ID NO: 259612 - RNA, 23 nt, Human
agggaggagacaucaggaaagga

SEQ ID NO: 259613 - RNA, 18 nt, Human
agggccccaggccugccc

SEQ ID NO: 259614 - RNA, 21 nt, Human
augguaggguccucacucucu

SEQ ID NO: 259615 - RNA, 18 nt, Human
caaauggaccaaggucaa

SEQ ID NO: 259616 - RNA, 18 nt, Human
caacccagccccagcccu

SEQ ID NO: 259617 - RNA, 21 nt, Human
caagaaaacaccccauuuccu

SEQ ID NO: 259618 - RNA, 21 nt, Human
caaggaaaaagaaagaaaacc

SEQ ID NO: 259619 - RNA, 20 nt, Human
cacaaccuggugccagaggc

SEQ ID NO: 259620 - RNA, 19 nt, Human
cacaagguaccccaugaau

SEQ ID NO: 259621 - RNA, 27 nt, Human
cacaagguaccccaugaaugcccaccu

SEQ ID NO: 259622 - RNA, 24 nt, Human
cacacaaccuggugccagaggcac

SEQ ID NO: 259623 - RNA, 26 nt, Human
cacacacacacacacacgcacgugca

SEQ ID NO: 259624 - RNA, 23 nt, Human
cacacacacacacgcacgugcac

SEQ ID NO: 259625 - RNA, 22 nt, Human
cacacagugguucaggggccag

SEQ ID NO: 259626 - RNA, 31 nt, Human
cacgcacgugcacacgcacacacauacacag

SEQ ID NO: 259627 - RNA, 26 nt, Human
cacuuggaagaacugggaggcacaag

SEQ ID NO: 259628 - RNA, 20 nt, Human
cagcagcccugaugcaagug

SEQ ID NO: 259629 - RNA, 21 nt, Human
cagcaucugcccugcgacccu

SEQ ID NO: 259630 - RNA, 23 nt, Human
cagcaucugcccugcgacccugu

SEQ ID NO: 259631 - RNA, 23 nt, Human
caggacacauuggagaaaucugg

SEQ ID NO: 259632 - RNA, 18 nt, Human
caggagugggcagcaccu

SEQ ID NO: 259633 - RNA, 22 nt, Human
caggucagcaagaaaacacccc

SEQ ID NO: 259634 - RNA, 21 nt, Human
caggugccgaacaugcacgug

SEQ ID NO: 259635 - RNA, 26 nt, Human
ccaaaacaaaacccuuugcuuccucc

SEQ ID NO: 259636 - RNA, 21 nt, Human
ccaagguccccucugcacucc

SEQ ID NO: 259637 - RNA, 26 nt, Human
ccaccacccgggccugccuggcugcc

SEQ ID NO: 259638 - RNA, 19 nt, Human
ccacccgggccugccuggc

SEQ ID NO: 259639 - RNA, 22 nt, Human
ccacccgggccugccuggcugc

SEQ ID NO: 259640 - RNA, 23 nt, Human
ccagccuggcccuguggggagca

SEQ ID NO: 259641 - RNA, 21 nt, Human
ccagcgggccacacauucccc

SEQ ID NO: 259642 - RNA, 18 nt, Human
ccaucagagaugaugguc

SEQ ID NO: 259643 - RNA, 21 nt, Human
ccauccugccccuaccugggc

SEQ ID NO: 259644 - RNA, 21 nt, Human
cccaaagagugaccuccaaaa

SEQ ID NO: 259645 - RNA, 19 nt, Human
cccaaauuaaaccugacac

SEQ ID NO: 259646 - RNA, 26 nt, Human
cccagccccagcccuguuccgguucc

SEQ ID NO: 259647 - RNA, 18 nt, Human
ccccaaagagugaccucc

SEQ ID NO: 259648 - RNA, 22 nt, Human
ccccaugaaugcccaccucccu

SEQ ID NO: 259649 - RNA, 22 nt, Human
ccccuaccugggcugagcccac

SEQ ID NO: 259650 - RNA, 22 nt, Human
ccccuaccugggcugagcccac

SEQ ID NO: 259651 - RNA, 24 nt, Human
cccuauagccucaggucagcaaga

SEQ ID NO: 259652 - RNA, 20 nt, Human
cccuccauccugccccuacc

SEQ ID NO: 259653 - RNA, 19 nt, Human
cccucugaggacaggcucc

SEQ ID NO: 259654 - RNA, 18 nt, Human
cccuguggggagcagggc

SEQ ID NO: 259655 - RNA, 19 nt, Human
cccuugagcaucccuagca

SEQ ID NO: 259656 - RNA, 22 nt, Human
ccuagcagugaaggugccauga

SEQ ID NO: 259657 - RNA, 20 nt, Human
ccucccuggcagugcacgcc

SEQ ID NO: 259658 - RNA, 20 nt, Human
ccucccuggcagugcacgcc

SEQ ID NO: 259659 - RNA, 21 nt, Human
ccugcugggagcuguuaccca

SEQ ID NO: 259660 - RNA, 24 nt, Human
ccuggaccuggcuagacagaaaac

SEQ ID NO: 259661 - RNA, 21 nt, Human
ccuggcccuguggggagcagg

SEQ ID NO: 259662 - RNA, 18 nt, Human
ccuucaagcccaggcucc

SEQ ID NO: 259663 - RNA, 23 nt, Human
cuaccuggaccuggcuagacaga

SEQ ID NO: 259664 - RNA, 19 nt, Human
cucagcccuccauccugcc

SEQ ID NO: 259665 - RNA, 24 nt, Human
cuccauccugccccuaccugggcu

SEQ ID NO: 259666 - RNA, 18 nt, Human
cucccaagguccccucug

SEQ ID NO: 259667 - RNA, 25 nt, Human
cucccuuaggcugagggugaugcaa

SEQ ID NO: 259668 - RNA, 20 nt, Human
cuccuccuuagccccuccaa

SEQ ID NO: 259669 - RNA, 21 nt, Human
cucucacucugacuccuccag

SEQ ID NO: 259670 - RNA, 22 nt, Human
cucucuugaggucccucaaaua

SEQ ID NO: 259671 - RNA, 20 nt, Human
cucugugcugaagccagacc

SEQ ID NO: 259672 - RNA, 23 nt, Human
cugaaacgucucuccugcgcccc

SEQ ID NO: 259673 - RNA, 21 nt, Human
cugagcccacuggccccugcc

SEQ ID NO: 259674 - RNA, 18 nt, Human
cugcagcuguggccacua

SEQ ID NO: 259675 - RNA, 23 nt, Human
cugcagugcucugcagcuguggc

SEQ ID NO: 259676 - RNA, 20 nt, Human
cugcgccccgggaagccccu

SEQ ID NO: 259677 - RNA, 20 nt, Human
cuggggagggguggcagggg

SEQ ID NO: 259678 - RNA, 19 nt, Human
cugugggccauggagagcu

SEQ ID NO: 259679 - RNA, 19 nt, Human
gaccgagaagagacaggag

SEQ ID NO: 259680 - RNA, 23 nt, Human
gaggcacagacaggugccgaaca

SEQ ID NO: 259681 - RNA, 19 nt, Human
gcaacaacagaucuucccc

SEQ ID NO: 259682 - RNA, 20 nt, Human
gcagugcucugcagcugugg

SEQ ID NO: 259683 - RNA, 18 nt, Human
gccagaggcacagacagg

SEQ ID NO: 259684 - RNA, 21 nt, Human
gccccugccagccuggcccug

SEQ ID NO: 259685 - RNA, 22 nt, Human
gcugcagugcucugcagcugug

SEQ ID NO: 259686 - RNA, 25 nt, Human
gcuguggugggggcacacaccuguu

SEQ ID NO: 259687 - RNA, 18 nt, Human
ggagcagggcugaccugu

SEQ ID NO: 259688 - RNA, 21 nt, Human
ggcagaagcagcugcaacaac

SEQ ID NO: 259689 - RNA, 20 nt, Human
ggcagggagggagaacagag

SEQ ID NO: 259690 - RNA, 21 nt, Human
ggcagggggcagugugccuac

SEQ ID NO: 259691 - RNA, 19 nt, Human
gggagggguggcagggggc

SEQ ID NO: 259692 - RNA, 22 nt, Human
gggggcauuuaggguaggggga

SEQ ID NO: 259693 - RNA, 19 nt, Human
gguggguguggccagucca

SEQ ID NO: 259694 - RNA, 20 nt, Human
gguucuggguuucaacacag

SEQ ID NO: 259695 - RNA, 20 nt, Human
guacccaacccaucuccauc

SEQ ID NO: 259696 - RNA, 22 nt, Human
guaccccaugaaugcccaccuc

SEQ ID NO: 259697 - RNA, 19 nt, Human
gugagaagcuguggaugag

SEQ ID NO: 259698 - RNA, 23 nt, Human
gugcacacgcacacacauacaca

SEQ ID NO: 259699 - RNA, 20 nt, Human
gugcucugcagcuguggcca

SEQ ID NO: 259700 - RNA, 22 nt, Human
uaacagcagguugucacaggaa

SEQ ID NO: 259701 - RNA, 22 nt, Human
uaccugggcugagcccacuggc

SEQ ID NO: 259702 - RNA, 19 nt, Human
uagagcuguggugggggca

SEQ ID NO: 259703 - RNA, 21 nt, Human
uagcuuggcccucagagauau

SEQ ID NO: 259704 - RNA, 20 nt, Human
uaggguagggggacaauaag

SEQ ID NO: 259705 - RNA, 24 nt, Human
ucacagguuguccccucugaggac

SEQ ID NO: 259706 - RNA, 23 nt, Human
ucagcaagaaaacaccccauuuc

SEQ ID NO: 259707 - RNA, 18 nt, Human
ucaggagggggauggauu

SEQ ID NO: 259708 - RNA, 19 nt, Human
ucauuuggaucaagggggc

SEQ ID NO: 259709 - RNA, 19 nt, Human
uccaaggaaaaagaaagaa

SEQ ID NO: 259710 - RNA, 24 nt, Human
ucccaagguccccucugcacuccu

SEQ ID NO: 259711 - RNA, 26 nt, Human
ucccaagguccccucugcacuccucc

SEQ ID NO: 259712 - RNA, 19 nt, Human
ucccacucccuuaggcuga

SEQ ID NO: 259713 - RNA, 25 nt, Human
uccccaaguuauggcaggggggcau

SEQ ID NO: 259714 - RNA, 18 nt, Human
uccccccggaaggaaugc

SEQ ID NO: 259715 - RNA, 21 nt, Human
uccccugccucuacccucaaa

SEQ ID NO: 259716 - RNA, 22 nt, Human
ucccucaaauacaagaguccac

SEQ ID NO: 259717 - RNA, 20 nt, Human
uccugccccuaccugggcug

SEQ ID NO: 259718 - RNA, 24 nt, Human
uccugcgccccgggaagccccuag

SEQ ID NO: 259719 - RNA, 20 nt, Human
uccugggcauagcuuggccc

SEQ ID NO: 259720 - RNA, 21 nt, Human
ucggcagugagaagcugugga

SEQ ID NO: 259721 - RNA, 23 nt, Human
ucugcagcuguggccacuagcuc

SEQ ID NO: 259722 - RNA, 24 nt, Human
ucugugcugaagccagaccggggc

SEQ ID NO: 259723 - RNA, 20 nt, Human
ucuguuuauucuccuucccc

SEQ ID NO: 259724 - RNA, 24 nt, Human
ucuugaggucccucaaauacaaga

SEQ ID NO: 259725 - RNA, 21 nt, Human
ugaaggccagguacccaaccc

SEQ ID NO: 259726 - RNA, 21 nt, Human
ugaaggccagguacccaaccc

SEQ ID NO: 259727 - RNA, 22 nt, Human
ugaaggccagguacccaaccca

SEQ ID NO: 259728 - RNA, 26 nt, Human
ugacacacacacacacacacgcacgg

SEQ ID NO: 259729 - RNA, 19 nt, Human
ugagaggugggaggagucc

SEQ ID NO: 259730 - RNA, 23 nt, Human
ugcccugcgacccugucccuuuc

SEQ ID NO: 259731 - RNA, 20 nt, Human
ugccgaacaugcacguggaa

SEQ ID NO: 259732 - RNA, 20 nt, Human
ugccucuacccucaaauccc

SEQ ID NO: 259733 - RNA, 30 nt, Human
ugcuagguaccugggagggcuguggagugg

SEQ ID NO: 259734 - RNA, 24 nt, Human
uggaaccacagguuguacagacua

SEQ ID NO: 259735 - RNA, 20 nt, Human
uggaugguaggguccucacu

SEQ ID NO: 259736 - RNA, 25 nt, Human
uggcaccaggcuggcaccaccaccc

SEQ ID NO: 259737 - RNA, 21 nt, Human
uggcugacgcugcagcgaaga

SEQ ID NO: 259738 - RNA, 19 nt, Human
uggcugagggagggaacag

SEQ ID NO: 259739 - RNA, 23 nt, Human
ugggagcuguuacccaaggacag

SEQ ID NO: 259740 - RNA, 23 nt, Human
ugggaggaguccaggaauggggu

SEQ ID NO: 259741 - RNA, 21 nt, Human
ugggaggcacaaggguuuggg

SEQ ID NO: 259742 - RNA, 18 nt, Human
ugggagggcuguggagug

SEQ ID NO: 259743 - RNA, 21 nt, Human
ugggaucaggguauuauaaga

SEQ ID NO: 259744 - RNA, 20 nt, Human
ugggcacacagugguucagg

SEQ ID NO: 259745 - RNA, 21 nt, Human
ugguucaggggccagcuuugg

SEQ ID NO: 259746 - RNA, 26 nt, Human
uguauagucuaugcaaaugcaaauga

SEQ ID NO: 259747 - RNA, 18 nt, Human
ugucacagggcucagccc

SEQ ID NO: 259748 - RNA, 33 nt, Human
uuaaaccugacacacacacacacacacgcagug

SEQ ID NO: 259749 - RNA, 23 nt, Human
uucaacacagagugagccaaaga

SEQ ID NO: 259750 - RNA, 20 nt, Human
uuccaacccagccccagccu

SEQ ID NO: 259751 - RNA, 20 nt, Human
uuggagucugggaucagggu

SEQ ID NO: 259752 - RNA, 22 nt, Human
uuggaucaagggggcagaagca

SEQ ID NO: 259753 - RNA, 21 nt, Human
uuuacaaaacugcccucccca

SEQ ID NO: 259754 - RNA, 20 nt, Human
uuuccaaaggagcugggagc

SEQ ID NO: 259755 - RNA, 26 nt, Human
aaaaacaacagacaaaaaccaacaac

SEQ ID NO: 259756 - RNA, 26 nt, Human
aaacaacagacaaaaaccaacaacaa

SEQ ID NO: 259757 - RNA, 20 nt, Human
aaaugaaauguguuguuuuc

SEQ ID NO: 259758 - RNA, 22 nt, Human
aacaacagacaaaaaccaacaa

SEQ ID NO: 259759 - RNA, 20 nt, Human
aacagacaaaaaccaacaac

SEQ ID NO: 259760 - RNA, 25 nt, Human
aagcacuucaaaaaaaagguuaaga

SEQ ID NO: 259761 - RNA, 19 nt, Human
aagcauuguguggggugau

SEQ ID NO: 259762 - RNA, 20 nt, Human
aagcgucacuauguuuaaaa

SEQ ID NO: 259763 - RNA, 23 nt, Human
aauuuguggagaauucucucccu

SEQ ID NO: 259764 - RNA, 20 nt, Human
acagacaaaaaccaacaaca

SEQ ID NO: 259765 - RNA, 24 nt, Human
acucugcuuacuuuuuucagagag

SEQ ID NO: 259766 - RNA, 21 nt, Human
acucugggucuacauacuuuu

SEQ ID NO: 259767 - RNA, 19 nt, Human
agacaaaaaccaacaacaa

SEQ ID NO: 259768 - RNA, 19 nt, Human
agacaaaaaccaacaacaa

SEQ ID NO: 259769 - RNA, 27 nt, Human
agacaaaaaccaacaacaaccccgggg

SEQ ID NO: 259770 - RNA, 23 nt, Human
agagaggaaggaaauaaagcuaa

SEQ ID NO: 259771 - RNA, 21 nt, Human
agagucaucugguuucccaag

SEQ ID NO: 259772 - RNA, 21 nt, Human
aggaaggaaauaaagcuaaga

SEQ ID NO: 259773 - RNA, 29 nt, Human
aggaaggaaauaaagcuaagagggacccc

SEQ ID NO: 259774 - RNA, 23 nt, Human
caaaagggacaauggauggaaua

SEQ ID NO: 259775 - RNA, 23 nt, Human
caacaacaaacaagacuucccac

SEQ ID NO: 259776 - RNA, 21 nt, Human
cacuaccacccacaaaagaca

SEQ ID NO: 259777 - RNA, 28 nt, Human
cagacaaaaaccaacaacaaacaagacu

SEQ ID NO: 259778 - RNA, 22 nt, Human
cagccuuccagagaaaauuuac

SEQ ID NO: 259779 - RNA, 18 nt, Human
cagggagagucaucuggu

SEQ ID NO: 259780 - RNA, 25 nt, Human
cagugacguagccauaggguacccc

SEQ ID NO: 259781 - RNA, 21 nt, Human
ccaggcuguggacagagagga

SEQ ID NO: 259782 - RNA, 19 nt, Human
ccucccgaccucucccugc

SEQ ID NO: 259783 - RNA, 25 nt, Human
cguccagcuuggauguucugggaua

SEQ ID NO: 259784 - RNA, 22 nt, Human
cucugcuuacuuuuuucagaga

SEQ ID NO: 259785 - RNA, 23 nt, Human
cugcagauucuggaagaaggggg

SEQ ID NO: 259786 - RNA, 23 nt, Human
cuguguucucugagaccaggcug

SEQ ID NO: 259787 - RNA, 19 nt, Human
cuucccacuuauacucuuc

SEQ ID NO: 259788 - RNA, 20 nt, Human
gaagaaggggguggaggugg

SEQ ID NO: 259789 - RNA, 18 nt, Human
gaagugugccucagccuu

SEQ ID NO: 259790 - RNA, 20 nt, Human
gacaguggcuacuuaacuuu

SEQ ID NO: 259791 - RNA, 20 nt, Human
gccauaguuuugacagggag

SEQ ID NO: 259792 - RNA, 21 nt, Human
gcccacacucugggucuacau

SEQ ID NO: 259793 - RNA, 21 nt, Human
gggacaauggauggaauagaa

SEQ ID NO: 259794 - RNA, 20 nt, Human
ggggguggagguggguauug

SEQ ID NO: 259795 - RNA, 22 nt, Human
guccagcuuggauguucuggga

SEQ ID NO: 259796 - RNA, 18 nt, Human
gugaagugugccucagcc

SEQ ID NO: 259797 - RNA, 22 nt, Human
gugaagugugccucagccuucc

SEQ ID NO: 259798 - RNA, 27 nt, Human
uaaaaagcuuaaacauucugcgaauca

SEQ ID NO: 259799 - RNA, 19 nt, Human
uaaaauaggcagagaaccc

SEQ ID NO: 259800 - RNA, 22 nt, Human
uaaauuaaccacuaccacccac

SEQ ID NO: 259801 - RNA, 22 nt, Human
uaacaaaagggacaauggaugg

SEQ ID NO: 259802 - RNA, 21 nt, Human
uaagaugugcugaguguccuc

SEQ ID NO: 259803 - RNA, 20 nt, Human
uacuguguucucugagacca

SEQ ID NO: 259804 - RNA, 21 nt, Human
uagaacaaaucaaacaaagca

SEQ ID NO: 259805 - RNA, 18 nt, Human
uauuaccaggcaagcacu

SEQ ID NO: 259806 - RNA, 31 nt, Human
uauuaccaggcaagcacuucaaaaaaaaggg

SEQ ID NO: 259807 - RNA, 23 nt, Human
ucaaaaaaaagguuaagaucaac

SEQ ID NO: 259808 - RNA, 18 nt, Human
ucagggucagcuugccug

SEQ ID NO: 259809 - RNA, 21 nt, Human
ucccugaaggcaccacugcag

SEQ ID NO: 259810 - RNA, 22 nt, Human
ucugaggguauuuagaaagggg

SEQ ID NO: 259811 - RNA, 23 nt, Human
ugaaaaacaacagacaaaaacca

SEQ ID NO: 259812 - RNA, 24 nt, Human
ugaaaaacaacagacaaaaaccaa

SEQ ID NO: 259813 - RNA, 25 nt, Human
ugaaaaacaacagacaaaaaccaac

SEQ ID NO: 259814 - RNA, 19 nt, Human
ugaagacaggggaacuuca

SEQ ID NO: 259815 - RNA, 20 nt, Human
ugaagacaggggaacuucag

SEQ ID NO: 259816 - RNA, 24 nt, Human
ugacuacacaucuacuguguucuc

SEQ ID NO: 259817 - RNA, 20 nt, Human
ugaugguaaaaugagggagu

SEQ ID NO: 259818 - RNA, 24 nt, Human
uggaagaaggggguggaggugggu

SEQ ID NO: 259819 - RNA, 20 nt, Human
uggcagggacuggcuaggac

SEQ ID NO: 259820 - RNA, 23 nt, Human
uuaaaauaggcagagaacccguu

SEQ ID NO: 259821 - RNA, 20 nt, Human
uucaaaucaugauccaaaga

SEQ ID NO: 259822 - RNA, 19 nt, Human
uucccaagaucuagcacaa

SEQ ID NO: 259823 - RNA, 21 nt, Human
uuccucgagucccugaaggca

SEQ ID NO: 259824 - RNA, 24 nt, Human
uuggauaaaacaaguuagcuucca

SEQ ID NO: 259825 - RNA, 21 nt, Human
uuuuuuaggcccacacucugg

SEQ ID NO: 259826 - RNA, 18 nt, Human
uuuuuuuuuuuuaggccc

SEQ ID NO: 259827 - RNA, 21 nt, Human
uuuuuuuuuuuuuuuuuuagg

SEQ ID NO: 259828 - RNA, 26 nt, Human
aaaagaucaugugaaaucugcgaaag

SEQ ID NO: 259829 - RNA, 19 nt, Human
aaaaugggucaaauacugu

SEQ ID NO: 259830 - RNA, 22 nt, Human
aaacuccagcauuaaacaagaa

SEQ ID NO: 259831 - RNA, 22 nt, Human
aacauuauucauauuucuacca

SEQ ID NO: 259832 - RNA, 19 nt, Human
acacugcaagacuguaaac

SEQ ID NO: 259833 - RNA, 18 nt, Human
agauugcaacuauggauc

SEQ ID NO: 259834 - RNA, 20 nt, Human
agcugccaaagucaccucac

SEQ ID NO: 259835 - RNA, 19 nt, Human
caaagucaccucacugcuc

SEQ ID NO: 259836 - RNA, 23 nt, Human
cagucccacuggccaccagcucu

SEQ ID NO: 259837 - RNA, 22 nt, Human
cuaccacagcugcauaugaggu

SEQ ID NO: 259838 - RNA, 24 nt, Human
cuaccacagcugcauaugaggucg

SEQ ID NO: 259839 - RNA, 21 nt, Human
cucccugccggagcuucugaa

SEQ ID NO: 259840 - RNA, 21 nt, Human
cugcaagacuguaaacaugca

SEQ ID NO: 259841 - RNA, 23 nt, Human
uaaaauagguaaccacauaacca

SEQ ID NO: 259842 - RNA, 19 nt, Human
uacaguguuaaaacuccag

SEQ ID NO: 259843 - RNA, 18 nt, Human
uagguaaccacauaacca

SEQ ID NO: 259844 - RNA, 19 nt, Human
uagguaaccacauaaccau

SEQ ID NO: 259845 - RNA, 23 nt, Human
ugcuccuauccagacaaaagcug

SEQ ID NO: 259846 - RNA, 22 nt, Human
uuguuuuagauugcaacuaugg

SEQ ID NO: 259847 - RNA, 24 nt, Human
aaaaaacuauuagcaucaugagga

SEQ ID NO: 259848 - RNA, 18 nt, Human
aaagccauguauagagaa

SEQ ID NO: 259849 - RNA, 19 nt, Human
aaaugcaaaaacugucaaa

SEQ ID NO: 259850 - RNA, 21 nt, Human
aagaaccgcuaaagccaugua

SEQ ID NO: 259851 - RNA, 23 nt, Human
aaguuuuucacagagauacaacu

SEQ ID NO: 259852 - RNA, 22 nt, Human
acaaaguagcuucaacccaaag

SEQ ID NO: 259853 - RNA, 18 nt, Human
acagagauacaacuaagc

SEQ ID NO: 259854 - RNA, 23 nt, Human
aguagcuucaacccaaaguggca

SEQ ID NO: 259855 - RNA, 19 nt, Human
agugucgggcaguccuccu

SEQ ID NO: 259856 - RNA, 20 nt, Human
auccacaaagucugagcaag

SEQ ID NO: 259857 - RNA, 21 nt, Human
aucuuauccucaaucuugcug

SEQ ID NO: 259858 - RNA, 20 nt, Human
cauaaaaaugcaaaaacugu

SEQ ID NO: 259859 - RNA, 22 nt, Human
cauuuagaaucccaaaaugagg

SEQ ID NO: 259860 - RNA, 23 nt, Human
ccaaaaugaggcaagaaccgcua

SEQ ID NO: 259861 - RNA, 24 nt, Human
cuaacaaaguagcuucaacccaaa

SEQ ID NO: 259862 - RNA, 23 nt, Human
cucccauguauacaaaaaacuau

SEQ ID NO: 259863 - RNA, 24 nt, Human
cugauccacaaagucugagcaaaa

SEQ ID NO: 259864 - RNA, 24 nt, Human
gaacaccugccauucauaaaaaug

SEQ ID NO: 259865 - RNA, 22 nt, Human
gggaagcuaagugaguaaauca

SEQ ID NO: 259866 - RNA, 24 nt, Human
gggcaguccuccuauuggcaguuu

SEQ ID NO: 259867 - RNA, 20 nt, Human
gucaaaugugcuauccuccc

SEQ ID NO: 259868 - RNA, 21 nt, Human
guguauacaaguuuuucacag

SEQ ID NO: 259869 - RNA, 21 nt, Human
uaagcaaauacugccuugccc

SEQ ID NO: 259870 - RNA, 26 nt, Human
uaaugaacaccugccauucauaaaaa

SEQ ID NO: 259871 - RNA, 18 nt, Human
uagaaucccaaaaugagg

SEQ ID NO: 259872 - RNA, 20 nt, Human
uagaaucccaaaaugaggca

SEQ ID NO: 259873 - RNA, 19 nt, Human
uagcacagucauaggauac

SEQ ID NO: 259874 - RNA, 18 nt, Human
uauagagaauaaaggaug

SEQ ID NO: 259875 - RNA, 23 nt, Human
uauuagcaucaugaggaagaaac

SEQ ID NO: 259876 - RNA, 19 nt, Human
ucaacccaaaguggcacca

SEQ ID NO: 259877 - RNA, 20 nt, Human
ucaagccuaacaaaguagcu

SEQ ID NO: 259878 - RNA, 23 nt, Human
ucaagccuaacaaaguagcuuca

SEQ ID NO: 259879 - RNA, 25 nt, Human
ucaauacagauuauaaugaacaccu

SEQ ID NO: 259880 - RNA, 20 nt, Human
ucaauauuugugugagacau

SEQ ID NO: 259881 - RNA, 23 nt, Human
uccacaaagucugagcaaaaaaa

SEQ ID NO: 259882 - RNA, 25 nt, Human
uccacaaagucugagcaaaaaaaac

SEQ ID NO: 259883 - RNA, 23 nt, Human
ugaggcaagaaccgcuaaagcca

SEQ ID NO: 259884 - RNA, 21 nt, Human
ugagggaagggaagcuaagug

SEQ ID NO: 259885 - RNA, 18 nt, Human
ugauggcauuguguaucu

SEQ ID NO: 259886 - RNA, 22 nt, Human
ugugcucauacauaaaaaugca

SEQ ID NO: 259887 - RNA, 22 nt, Human
uuauacugcugccuuccaucuu

SEQ ID NO: 259888 - RNA, 21 nt, Human
uucaagagaucuaagaacaga

SEQ ID NO: 259889 - RNA, 23 nt, Human
uugccagaucaaguccaacaugc

SEQ ID NO: 259890 - RNA, 18 nt, Human
uuugccagaucaagucca

SEQ ID NO: 259891 - RNA, 22 nt, Human
uuuuuaggaaaguaucucugau

SEQ ID NO: 259892 - RNA, 27 nt, Human
accuucuuacagaaaucucuccugcug

SEQ ID NO: 259893 - RNA, 21 nt, Human
agaaagauuauccauacaaag

SEQ ID NO: 259894 - RNA, 20 nt, Human
agcugcuuaaaauggaaaug

SEQ ID NO: 259895 - RNA, 18 nt, Human
caccucagccgccuccgc

SEQ ID NO: 259896 - RNA, 21 nt, Human
cagaaaucucuccugcuguuu

SEQ ID NO: 259897 - RNA, 19 nt, Human
cagucacuuuuuaagaguu

SEQ ID NO: 259898 - RNA, 23 nt, Human
ccaaaucccuuucuucuccaaac

SEQ ID NO: 259899 - RNA, 18 nt, Human
ccgccgcugccgccgcuc

SEQ ID NO: 259900 - RNA, 25 nt, Human
ccgcgccgccgcugccgccgcuccc

SEQ ID NO: 259901 - RNA, 18 nt, Human
ccgcugccgccgcucccg

SEQ ID NO: 259902 - RNA, 18 nt, Human
ccgcugccgccgcucccg

SEQ ID NO: 259903 - RNA, 18 nt, Human
ccgcugcucucccucagc

SEQ ID NO: 259904 - RNA, 25 nt, Human
ccuccgcgccgccgcugccgccgcu

SEQ ID NO: 259905 - RNA, 24 nt, Human
ccuuuguuaccaaaucccuuucuu

SEQ ID NO: 259906 - RNA, 23 nt, Human
cgccgccgcugccgccgcucccg

SEQ ID NO: 259907 - RNA, 22 nt, Human
cuccccgccgccgcugcucucc

SEQ ID NO: 259908 - RNA, 23 nt, Human
cuccccgccgccgcugcucuccc

SEQ ID NO: 259909 - RNA, 18 nt, Human
cuccgcgccgccgcugcc

SEQ ID NO: 259910 - RNA, 28 nt, Human
gccgccuccgcgccgccgcugccgccgg

SEQ ID NO: 259911 - RNA, 23 nt, Human
gcuccccgccgccgcugcucucc

SEQ ID NO: 259912 - RNA, 19 nt, Human
uaaaauggaaauggcuguc

SEQ ID NO: 259913 - RNA, 26 nt, Human
uaccaaaucccuuucuucuccaaacu

SEQ ID NO: 259914 - RNA, 22 nt, Human
ucccucagccacaggcgccgcc

SEQ ID NO: 259915 - RNA, 18 nt, Human
uccgcgccgccgcugccg

SEQ ID NO: 259916 - RNA, 21 nt, Human
uccgcgccgccgcugccgccg

SEQ ID NO: 259917 - RNA, 19 nt, Human
ucgcuccccgccgccgcug

SEQ ID NO: 259918 - RNA, 18 nt, Human
ucucccucagccacaggc

SEQ ID NO: 259919 - RNA, 20 nt, Human
ucucuccugcuguuuagcug

SEQ ID NO: 259920 - RNA, 23 nt, Human
ucugcaaacucguggcucguagu

SEQ ID NO: 259921 - RNA, 19 nt, Human
uuuuuuuuuuuuuugcuuc

SEQ ID NO: 259922 - RNA, 19 nt, Human
uuuuuuuuuuuuuuugcuu

SEQ ID NO: 259923 - RNA, 26 nt, Human
aaaacagaaaggaggcggggccccag

SEQ ID NO: 259924 - RNA, 21 nt, Human
aaacagaaaggaggcggggcc

SEQ ID NO: 259925 - RNA, 24 nt, Human
aaacagaaaggaggcggggcccca

SEQ ID NO: 259926 - RNA, 18 nt, Human
accaggccaggcauugcu

SEQ ID NO: 259927 - RNA, 21 nt, Human
accugaguugagugaagaaac

SEQ ID NO: 259928 - RNA, 24 nt, Human
agcuguccccuccucccgcccccc

SEQ ID NO: 259929 - RNA, 19 nt, Human
ccaggccaggcauugcugg

SEQ ID NO: 259930 - RNA, 19 nt, Human
ccccaaaugccaccugagu

SEQ ID NO: 259931 - RNA, 19 nt, Human
cccccgcggcgcggcgccc

SEQ ID NO: 259932 - RNA, 24 nt, Human
cccccgcggcgcggcgcccccucc

SEQ ID NO: 259933 - RNA, 20 nt, Human
ccccgcgcccgcagcugucc

SEQ ID NO: 259934 - RNA, 24 nt, Human
ccccgcgcccgcagcuguccccuc

SEQ ID NO: 259935 - RNA, 18 nt, Human
cccgcagcuguccccucc

SEQ ID NO: 259936 - RNA, 22 nt, Human
cccgcggcgcggcgcccccucc

SEQ ID NO: 259937 - RNA, 25 nt, Human
ccgcgcccgcagcuguccccuccuc

SEQ ID NO: 259938 - RNA, 21 nt, Human
ccucaaaaauaaaacagaaag

SEQ ID NO: 259939 - RNA, 24 nt, Human
ccucaaaaauaaaacagaaaggag

SEQ ID NO: 259940 - RNA, 22 nt, Human
ccucccgccccuacuggcagcc

SEQ ID NO: 259941 - RNA, 24 nt, Human
ccucccgccccuacuggcagccaa

SEQ ID NO: 259942 - RNA, 22 nt, Human
cggaguuguggccucccuccuc

SEQ ID NO: 259943 - RNA, 18 nt, Human
cggcuuccuggcuccgcc

SEQ ID NO: 259944 - RNA, 24 nt, Human
cggggccccagcucagcaccaggu

SEQ ID NO: 259945 - RNA, 21 nt, Human
cuccgccuuuccucccgcccc

SEQ ID NO: 259946 - RNA, 24 nt, Human
cucucuuggugaaagcagaagcug

SEQ ID NO: 259947 - RNA, 27 nt, Human
gaggcggggccccagcuccccaagggg

SEQ ID NO: 259948 - RNA, 25 nt, Human
gcagaagcggagcuaccaggccagg

SEQ ID NO: 259949 - RNA, 21 nt, Human
gcgcggcgcccccuccccgcg

SEQ ID NO: 259950 - RNA, 24 nt, Human
gcgggcccgggucucggacucccg

SEQ ID NO: 259951 - RNA, 21 nt, Human
guuauuuuauuuccucaaaaa

SEQ ID NO: 259952 - RNA, 19 nt, Human
ucggaguuguggccucccu

SEQ ID NO: 259953 - RNA, 22 nt, Human
ugaagaaacacucucuugguga

SEQ ID NO: 259954 - RNA, 24 nt, Human
ugaagaaacacucucuuggugaaa

SEQ ID NO: 259955 - RNA, 21 nt, Human
ugaguugagugaagaaacacu

SEQ ID NO: 259956 - RNA, 22 nt, Human
ugaguugagugaagaaacacuc

SEQ ID NO: 259957 - RNA, 23 nt, Human
uggcagccaacaagucaacggaa

SEQ ID NO: 259958 - RNA, 24 nt, Human
uggcccccgcggcgcggcgccccc

SEQ ID NO: 259959 - RNA, 18 nt, Human
uggcuccgccauggcccc

SEQ ID NO: 259960 - RNA, 20 nt, Human
uuccuggcuccgccauggcc

SEQ ID NO: 259961 - RNA, 18 nt, Human
uuuuuuaucacuugguua

SEQ ID NO: 259962 - RNA, 26 nt, Human
uuuuuuuuuuuuuuaucacuugguua

SEQ ID NO: 259963 - RNA, 20 nt, Human
uuuuuuuuuuuuuuuuuauc

SEQ ID NO: 259964 - RNA, 22 nt, Human
aacccaaccccguggaaacugg

SEQ ID NO: 259965 - RNA, 25 nt, Human
aagaagccuaggcaggguuagagua

SEQ ID NO: 259966 - RNA, 23 nt, Human
aagcugcaucacugcaagguggg

SEQ ID NO: 259967 - RNA, 23 nt, Human
agagugaagaggggcauugcagg

SEQ ID NO: 259968 - RNA, 22 nt, Human
agcuggagcuacaagaagccua

SEQ ID NO: 259969 - RNA, 23 nt, Human
auggagugccuaguauguggugg

SEQ ID NO: 259970 - RNA, 23 nt, Human
caacccaaccccguggaaacugg

SEQ ID NO: 259971 - RNA, 18 nt, Human
cuggagcuacaagaagcc

SEQ ID NO: 259972 - RNA, 20 nt, Human
cuuaagcucugaccggcaac

SEQ ID NO: 259973 - RNA, 22 nt, Human
cuuaagcucugaccggcaaccc

SEQ ID NO: 259974 - RNA, 21 nt, Human
gagugccuaguaugugguggg

SEQ ID NO: 259975 - RNA, 19 nt, Human
gcuggagcuacaagaagcc

SEQ ID NO: 259976 - RNA, 21 nt, Human
gguaugcccacuuugaggagg

SEQ ID NO: 259977 - RNA, 18 nt, Human
uaagcucugaccggcaac

SEQ ID NO: 259978 - RNA, 22 nt, Human
uaagcucugaccggcaacccaa

SEQ ID NO: 259979 - RNA, 18 nt, Human
uccugagcgccgagccuc

SEQ ID NO: 259980 - RNA, 19 nt, Human
ugaagaguggggaugagug

SEQ ID NO: 259981 - RNA, 21 nt, Human
ugaagaguggggaugaguggc

SEQ ID NO: 259982 - RNA, 21 nt, Human
ugcugggauauggguguaaag

SEQ ID NO: 259983 - RNA, 21 nt, Human
ugggaauaagacuauuaucaa

SEQ ID NO: 259984 - RNA, 18 nt, Human
ugucuaugaagagugggg

SEQ ID NO: 259985 - RNA, 23 nt, Human
uuccagggucaagcugcaucacu

SEQ ID NO: 259986 - RNA, 21 nt, Human
agaauggauuaaaaaauaaaa

SEQ ID NO: 259987 - RNA, 20 nt, Human
agaccuggagucccagaaca

SEQ ID NO: 259988 - RNA, 19 nt, Human
agcaggccggagcuccggg

SEQ ID NO: 259989 - RNA, 24 nt, Human
agccacaugacgucauugguccuc

SEQ ID NO: 259990 - RNA, 21 nt, Human
auggagcuggggaaugaauuc

SEQ ID NO: 259991 - RNA, 24 nt, Human
caaaguggucagggggaaccaaug

SEQ ID NO: 259992 - RNA, 20 nt, Human
caggcccaucauguucuuga

SEQ ID NO: 259993 - RNA, 20 nt, Human
cagggggaaccaaugcuaua

SEQ ID NO: 259994 - RNA, 19 nt, Human
caucucaaagggaggugag

SEQ ID NO: 259995 - RNA, 25 nt, Human
cauuuguuuuuccugcuuuuuguuu

SEQ ID NO: 259996 - RNA, 19 nt, Human
ccaccccuaacccccgauc

SEQ ID NO: 259997 - RNA, 19 nt, Human
ccccccauuucccauuugu

SEQ ID NO: 259998 - RNA, 21 nt, Human
ccccccauuucccauuuguuu

SEQ ID NO: 259999 - RNA, 22 nt, Human
ccccccgcccccccauuuccca

SEQ ID NO: 260000 - RNA, 22 nt, Human
cccccgaucccccgcccggccc

SEQ ID NO: 260001 - RNA, 20 nt, Human
cccccgcccccccauuuccc

SEQ ID NO: 260002 - RNA, 22 nt, Human
cccccucccccacucccugacc

SEQ ID NO: 260003 - RNA, 23 nt, Human
cccccucccccacucccugaccu

SEQ ID NO: 260004 - RNA, 19 nt, Human
ccccgcccccccauuuccc

SEQ ID NO: 260005 - RNA, 21 nt, Human
cccugcucuggcagggccugg

SEQ ID NO: 260006 - RNA, 21 nt, Human
ccuuuggcggacuccaccccu

SEQ ID NO: 260007 - RNA, 21 nt, Human
cggacuccaccccuaaccccc

SEQ ID NO: 260008 - RNA, 22 nt, Human
cgggcucugcucauccuuucgu

SEQ ID NO: 260009 - RNA, 21 nt, Human
cucaagaccuggagucccaga

SEQ ID NO: 260010 - RNA, 20 nt, Human
cuuccucccccccgcccccc

SEQ ID NO: 260011 - RNA, 21 nt, Human
gagggcguuuuugaggcuggu

SEQ ID NO: 260012 - RNA, 19 nt, Human
gcaaagagggaaagcaccu

SEQ ID NO: 260013 - RNA, 22 nt, Human
gcaaagagggaaagcaccuaga

SEQ ID NO: 260014 - RNA, 27 nt, Human
gcucugcucauccuuucguagcuccaa

SEQ ID NO: 260015 - RNA, 21 nt, Human
ggagccuaggucccccugcuc

SEQ ID NO: 260016 - RNA, 22 nt, Human
ggaggugagggcagggcagggc

SEQ ID NO: 260017 - RNA, 23 nt, Human
ggaggugagggcagggcagggcg

SEQ ID NO: 260018 - RNA, 19 nt, Human
ggcagggccuggggugggg

SEQ ID NO: 260019 - RNA, 20 nt, Human
gggaggugagggcagggcag

SEQ ID NO: 260020 - RNA, 21 nt, Human
gggccuggggugggggggugg

SEQ ID NO: 260021 - RNA, 20 nt, Human
ggggagcaaagagggaaagc

SEQ ID NO: 260022 - RNA, 22 nt, Human
gugggguugagaaagugccucg

SEQ ID NO: 260023 - RNA, 20 nt, Human
uaacccccgaucccccgccc

SEQ ID NO: 260024 - RNA, 22 nt, Human
uauacagaauguagaaaaaucc

SEQ ID NO: 260025 - RNA, 30 nt, Human
ucccccugcucuggcagggccugggguggg

SEQ ID NO: 260026 - RNA, 23 nt, Human
uccugcuuuuuguuugguuguuu

SEQ ID NO: 260027 - RNA, 24 nt, Human
ucuggaaugaaacuuacaucucaa

SEQ ID NO: 260028 - RNA, 22 nt, Human
ucuuaaggcucauuugcccccu

SEQ ID NO: 260029 - RNA, 21 nt, Human
ugaauugcaaaagccacauga

SEQ ID NO: 260030 - RNA, 18 nt, Human
ugagaagaaauauacaga

SEQ ID NO: 260031 - RNA, 18 nt, Human
ugagaagaaauauacaga

SEQ ID NO: 260032 - RNA, 22 nt, Human
ugagaagaaauauacagaaugu

SEQ ID NO: 260033 - RNA, 21 nt, Human
ugagcacagguaaacaaacaa

SEQ ID NO: 260034 - RNA, 21 nt, Human
ugagggcagggcagggcgggg

SEQ ID NO: 260035 - RNA, 22 nt, Human
ugcucauccuuucguagcucca

SEQ ID NO: 260036 - RNA, 22 nt, Human
uggcagggccuggggugggggg

SEQ ID NO: 260037 - RNA, 20 nt, Human
ugggugcucuggguauuagc

SEQ ID NO: 260038 - RNA, 22 nt, Human
uguaagggcagaggaugagcac

SEQ ID NO: 260039 - RNA, 24 nt, Human
ugucucucuccucaagaccuggag

SEQ ID NO: 260040 - RNA, 20 nt, Human
uucccauuuguuuuuccugc

SEQ ID NO: 260041 - RNA, 22 nt, Human
uucccauuuguuuuuccugcuu

SEQ ID NO: 260042 - RNA, 23 nt, Human
uucugcugggggacuugacagca

SEQ ID NO: 260043 - RNA, 20 nt, Human
uugcccccucccccacuccc

SEQ ID NO: 260044 - RNA, 18 nt, Human
uuuguuuuuccugcuuuu

SEQ ID NO: 260045 - RNA, 18 nt, Human
uuuuuuuuuuuuuuucug

SEQ ID NO: 260046 - RNA, 18 nt, Human
uuuuuuuuuuuuuuucug

SEQ ID NO: 260047 - RNA, 20 nt, Human
aaagaaaacaaucacauuga

SEQ ID NO: 260048 - RNA, 19 nt, Human
aacgaggccccccaacugc

SEQ ID NO: 260049 - RNA, 24 nt, Human
aagaaaacaaucacauugaacuaa

SEQ ID NO: 260050 - RNA, 18 nt, Human
aagauucucagcugccuu

SEQ ID NO: 260051 - RNA, 24 nt, Human
acaggacaaagaacacauuugcaa

SEQ ID NO: 260052 - RNA, 19 nt, Human
agcugacaucagcuaccca

SEQ ID NO: 260053 - RNA, 18 nt, Human
auaaaaacugguaaaaga

SEQ ID NO: 260054 - RNA, 21 nt, Human
ccaguacaauucaguacucau

SEQ ID NO: 260055 - RNA, 24 nt, Human
ccaguacaauucaguacucauuuu

SEQ ID NO: 260056 - RNA, 21 nt, Human
cccaacugccucuccaccuag

SEQ ID NO: 260057 - RNA, 22 nt, Human
ccccccaacugccucuccaccu

SEQ ID NO: 260058 - RNA, 28 nt, Human
ccuguaaaacucucuugggggaaacaag

SEQ ID NO: 260059 - RNA, 19 nt, Human
cugccuuauucuucugcac

SEQ ID NO: 260060 - RNA, 20 nt, Human
gcaaaacaacgaggcccccc

SEQ ID NO: 260061 - RNA, 22 nt, Human
gcaaaacaacgaggccccccaa

SEQ ID NO: 260062 - RNA, 22 nt, Human
uaaaagagaaaacugacuacau

SEQ ID NO: 260063 - RNA, 22 nt, Human
uaaguacauccaguuaugcaaa

SEQ ID NO: 260064 - RNA, 24 nt, Human
ucuccugauggacaggagggcgga

SEQ ID NO: 260065 - RNA, 18 nt, Human
ugaaaauaucuugccagg

SEQ ID NO: 260066 - RNA, 21 nt, Human
ugacaucagcuacccaucacu

SEQ ID NO: 260067 - RNA, 20 nt, Human
ugcacauguacaaauaaagu

SEQ ID NO: 260068 - RNA, 22 nt, Human
ugccaggcuagaaaacaagcaa

SEQ ID NO: 260069 - RNA, 23 nt, Human
ugccuuauucuucugcacaugua

SEQ ID NO: 260070 - RNA, 20 nt, Human
uggaguggaaauaaaaacug

SEQ ID NO: 260071 - RNA, 24 nt, Human
uuaucuaaguacauccaguuaugc

SEQ ID NO: 260072 - RNA, 19 nt, Human
uucaaauaucucagaaucg

SEQ ID NO: 260073 - RNA, 24 nt, Human
uuuugggagcuccuuaaaauaugc

SEQ ID NO: 260074 - RNA, 20 nt, Human
aaaaaaacaaggugaaucaa

SEQ ID NO: 260075 - RNA, 25 nt, Human
aaaugucagaaaaugcacucgauuc

SEQ ID NO: 260076 - RNA, 26 nt, Human
aaaugucagaaaaugcacucgauucc

SEQ ID NO: 260077 - RNA, 21 nt, Human
acaaccagguuaaaaaaacaa

SEQ ID NO: 260078 - RNA, 26 nt, Human
agcuuguaacauuuucauuuuuccug

SEQ ID NO: 260079 - RNA, 24 nt, Human
augguagcuuuauuuuaaucuuua

SEQ ID NO: 260080 - RNA, 24 nt, Human
cacaaucgcgacccaaggcugucu

SEQ ID NO: 260081 - RNA, 28 nt, Human
cagaaaaugcacucgauuccccugaaag

SEQ ID NO: 260082 - RNA, 28 nt, Human
cagaaaaugcacucgauuccccugaaag

SEQ ID NO: 260083 - RNA, 21 nt, Human
cagguuaaaaaaacaagguga

SEQ ID NO: 260084 - RNA, 21 nt, Human
cccacaaucgcgacccaaggc

SEQ ID NO: 260085 - RNA, 21 nt, Human
cccacaaucgcgacccaaggc

SEQ ID NO: 260086 - RNA, 25 nt, Human
cccacaaucgcgacccaaggcuguc

SEQ ID NO: 260087 - RNA, 23 nt, Human
ccccacaaucgcgacccaaggcu

SEQ ID NO: 260088 - RNA, 24 nt, Human
cucuuagcuuguaacauuuucauu

SEQ ID NO: 260089 - RNA, 19 nt, Human
cugcuggacucuucgaagc

SEQ ID NO: 260090 - RNA, 22 nt, Human
ggaaacaauacuuaaaaucuua

SEQ ID NO: 260091 - RNA, 21 nt, Human
ggacucuucgaagccccacaa

SEQ ID NO: 260092 - RNA, 19 nt, Human
uaaaaucuuaaacuguaaa

SEQ ID NO: 260093 - RNA, 27 nt, Human
uaaacucuuagcuuguaacauuuucau

SEQ ID NO: 260094 - RNA, 21 nt, Human
uaaucuuuacucaagagugau

SEQ ID NO: 260095 - RNA, 21 nt, Human
ucuccaagaaccccuggguac

SEQ ID NO: 260096 - RNA, 21 nt, Human
ucuccaagaaccccuggguac

SEQ ID NO: 260097 - RNA, 23 nt, Human
ucuuacuuauggaguuaugcuca

SEQ ID NO: 260098 - RNA, 21 nt, Human
uguaaaaugguagcuuuauuu

SEQ ID NO: 260099 - RNA, 24 nt, Human
uguaaaaugguagcuuuauuuuaa

SEQ ID NO: 260100 - RNA, 20 nt, Human
uguaacauuuucauuuuucc

SEQ ID NO: 260101 - RNA, 21 nt, Human
uucgaagccccacaaucgcga

SEQ ID NO: 260102 - RNA, 19 nt, Human
aggugucgggacugcucug

SEQ ID NO: 260103 - RNA, 19 nt, Human
cacagcugcccaccugggg

SEQ ID NO: 260104 - RNA, 19 nt, Human
cacagcugcccaccugggg

SEQ ID NO: 260105 - RNA, 19 nt, Human
cacggcccgaaccagcugg

SEQ ID NO: 260106 - RNA, 21 nt, Human
ccacagcugcccaccuggggc

SEQ ID NO: 260107 - RNA, 21 nt, Human
ccacagcugcccaccuggggc

SEQ ID NO: 260108 - RNA, 19 nt, Human
ccccgccgcgggucgcugc

SEQ ID NO: 260109 - RNA, 19 nt, Human
ccgccgcgggucgcugcuc

SEQ ID NO: 260110 - RNA, 23 nt, Human
gggacugcucugccacagcugcc

SEQ ID NO: 260111 - RNA, 20 nt, Human
ggggcgcgucccugcuggcc

SEQ ID NO: 260112 - RNA, 20 nt, Human
ggggcgcgucccugcuggcc

SEQ ID NO: 260113 - RNA, 19 nt, Human
ucugccacagcugcccacc

SEQ ID NO: 260114 - RNA, 19 nt, Human
ucugccacagcugcccacc

SEQ ID NO: 260115 - RNA, 20 nt, Human
ugccacagcugcccaccugg

SEQ ID NO: 260116 - RNA, 20 nt, Human
ugccacagcugcccaccugg

SEQ ID NO: 260117 - RNA, 21 nt, Human
uggggcgcgucccugcuggcc

SEQ ID NO: 260118 - RNA, 21 nt, Human
uggggcgcgucccugcuggcc

SEQ ID NO: 260119 - RNA, 23 nt, Human
ugucgggacugcucugccacagc

SEQ ID NO: 260120 - RNA, 21 nt, Human
aaaagaacaggccaagauagg

SEQ ID NO: 260121 - RNA, 21 nt, Human
aacaaaacaggccaaggugga

SEQ ID NO: 260122 - RNA, 21 nt, Human
aacagagugagacuccgucuc

SEQ ID NO: 260123 - RNA, 24 nt, Human
aacagagugagacuccgucucaaa

SEQ ID NO: 260124 - RNA, 18 nt, Human
aacaggccaagguggacc

SEQ ID NO: 260125 - RNA, 23 nt, Human
aacaggccaagguggaccaggca

SEQ ID NO: 260126 - RNA, 19 nt, Human
aacauggugaaaccccauc

SEQ ID NO: 260127 - RNA, 20 nt, Human
aacauggugaaaccccaucu

SEQ ID NO: 260128 - RNA, 20 nt, Human
aacauggugaaaccccaucu

SEQ ID NO: 260129 - RNA, 21 nt, Human
aacauggugaaaccccaucuc

SEQ ID NO: 260130 - RNA, 24 nt, Human
aacgcuuugggaggccaagguggg

SEQ ID NO: 260131 - RNA, 20 nt, Human
aagcaaggccugaccccaaa

SEQ ID NO: 260132 - RNA, 21 nt, Human
aagcaaggccugaccccaaag

SEQ ID NO: 260133 - RNA, 19 nt, Human
aagccagcacuauccuugg

SEQ ID NO: 260134 - RNA, 24 nt, Human
aagccagcacuauccuuggggaca

SEQ ID NO: 260135 - RNA, 25 nt, Human
aaggugggcggaucacuucgaguca

SEQ ID NO: 260136 - RNA, 20 nt, Human
aagugcccaguggcucugcc

SEQ ID NO: 260137 - RNA, 21 nt, Human
acacccaccucccuccuccug

SEQ ID NO: 260138 - RNA, 24 nt, Human
acagagugagacuccgucucaaaa

SEQ ID NO: 260139 - RNA, 24 nt, Human
accaaacaagaucuggccuagagc

SEQ ID NO: 260140 - RNA, 28 nt, Human
acccaccucccuccuccugaggcccccu

SEQ ID NO: 260141 - RNA, 24 nt, Human
accccaucucuacuaaaaauacaa

SEQ ID NO: 260142 - RNA, 20 nt, Human
acucugugccccagugccag

SEQ ID NO: 260143 - RNA, 18 nt, Human
acugcacuccacccuggg

SEQ ID NO: 260144 - RNA, 24 nt, Human
acugcacuccacccugggcaacag

SEQ ID NO: 260145 - RNA, 24 nt, Human
acuucgagucaggaguuugagacc

SEQ ID NO: 260146 - RNA, 21 nt, Human
agaaaaacaaaacaggccaag

SEQ ID NO: 260147 - RNA, 22 nt, Human
agagaagcagcccagaguucag

SEQ ID NO: 260148 - RNA, 23 nt, Human
agagcaaaggcuuggggguauuu

SEQ ID NO: 260149 - RNA, 21 nt, Human
agcacuauccuuggggacacc

SEQ ID NO: 260150 - RNA, 22 nt, Human
agccuggccaacauggugaaac

SEQ ID NO: 260151 - RNA, 24 nt, Human
agccuggccaacauggugaaaccc

SEQ ID NO: 260152 - RNA, 23 nt, Human
aggaacugaaagcugucuuagcc

SEQ ID NO: 260153 - RNA, 20 nt, Human
aggaguuugagaccagccug

SEQ ID NO: 260154 - RNA, 20 nt, Human
aggcacauggcucaugccua

SEQ ID NO: 260155 - RNA, 21 nt, Human
aggccaaggugggcggaucac

SEQ ID NO: 260156 - RNA, 22 nt, Human
aggccagcaagucuggucugca

SEQ ID NO: 260157 - RNA, 24 nt, Human
aggcugaggcaggagaaucccuug

SEQ ID NO: 260158 - RNA, 19 nt, Human
aggcugcagggggaugucc

SEQ ID NO: 260159 - RNA, 20 nt, Human
agggcagagaccaaguuggg

SEQ ID NO: 260160 - RNA, 19 nt, Human
agguggaaguugcagugag

SEQ ID NO: 260161 - RNA, 24 nt, Human
agguggaaguugcagugagccaag

SEQ ID NO: 260162 - RNA, 24 nt, Human
aucacuucgagucaggaguuugag

SEQ ID NO: 260163 - RNA, 24 nt, Human
aucaugccacugcacuccacccug

SEQ ID NO: 260164 - RNA, 22 nt, Human
aucccaacgcuuugggaggcca

SEQ ID NO: 260165 - RNA, 22 nt, Human
augccacugcacuccacccugg

SEQ ID NO: 260166 - RNA, 22 nt, Human
auggcucaugccuauaauccca

SEQ ID NO: 260167 - RNA, 18 nt, Human
auuccugccugcaaaccc

SEQ ID NO: 260168 - RNA, 25 nt, Human
caaaaaacaaaaaagaacaggccaa

SEQ ID NO: 260169 - RNA, 19 nt, Human
caaaaaagaacaggccaag

SEQ ID NO: 260170 - RNA, 24 nt, Human
caacauggugaaaccccaucucua

SEQ ID NO: 260171 - RNA, 24 nt, Human
caacgcuuugggaggccaaggugg

SEQ ID NO: 260172 - RNA, 18 nt, Human
caaggugggcggaucacu

SEQ ID NO: 260173 - RNA, 19 nt, Human
caccugcaccaaacaagau

SEQ ID NO: 260174 - RNA, 23 nt, Human
cacuccacccugggcaacagagu

SEQ ID NO: 260175 - RNA, 23 nt, Human
cacugcacuccacccugggcaac

SEQ ID NO: 260176 - RNA, 24 nt, Human
cacugcacuccacccugggcaaca

SEQ ID NO: 260177 - RNA, 21 nt, Human
cacuguacuuugaacagaaga

SEQ ID NO: 260178 - RNA, 20 nt, Human
cacuugaaaauggaauggaa

SEQ ID NO: 260179 - RNA, 24 nt, Human
cagcuacucaagaggcugaggcag

SEQ ID NO: 260180 - RNA, 19 nt, Human
caggcacauggcucaugcc

SEQ ID NO: 260181 - RNA, 22 nt, Human
caggccuuuggccccugggagg

SEQ ID NO: 260182 - RNA, 20 nt, Human
caggguggggucucaggccu

SEQ ID NO: 260183 - RNA, 24 nt, Human
caugccuauaaucccaacgcuuug

SEQ ID NO: 260184 - RNA, 19 nt, Human
ccaaggaaagaaaaacaaa

SEQ ID NO: 260185 - RNA, 24 nt, Human
ccaaggaaagaaaaacaaaacagg

SEQ ID NO: 260186 - RNA, 28 nt, Human
ccaaggaaagaaaaacaaaacaggccaa

SEQ ID NO: 260187 - RNA, 23 nt, Human
ccacagggcaugcugacaagcag

SEQ ID NO: 260188 - RNA, 21 nt, Human
ccacugcacuccacccugggc

SEQ ID NO: 260189 - RNA, 23 nt, Human
ccacugcacuccacccugggcaa

SEQ ID NO: 260190 - RNA, 24 nt, Human
ccacugcacuccacccugggcaac

SEQ ID NO: 260191 - RNA, 23 nt, Human
ccagccuugauugcaggucagaa

SEQ ID NO: 260192 - RNA, 20 nt, Human
cccaaggaaagaaaaacaaa

SEQ ID NO: 260193 - RNA, 21 nt, Human
cccaaggaaagaaaaacaaaa

SEQ ID NO: 260194 - RNA, 23 nt, Human
cccgagucaucuguguucuccau

SEQ ID NO: 260195 - RNA, 20 nt, Human
ccuagagcaaaggcuugggg

SEQ ID NO: 260196 - RNA, 22 nt, Human
ccuauaaucccaacgcuuuggg

SEQ ID NO: 260197 - RNA, 20 nt, Human
ccuccuaccucucuaucaga

SEQ ID NO: 260198 - RNA, 18 nt, Human
ccugcaaaccccucccca

SEQ ID NO: 260199 - RNA, 23 nt, Human
ccuggccaacauggugaaacccc

SEQ ID NO: 260200 - RNA, 24 nt, Human
ccuggccaacauggugaaacccca

SEQ ID NO: 260201 - RNA, 22 nt, Human
ccugggcaacagagugagacuc

SEQ ID NO: 260202 - RNA, 19 nt, Human
ccuguaaucccagcuacuc

SEQ ID NO: 260203 - RNA, 22 nt, Human
ccuguaaucccagcuacucaag

SEQ ID NO: 260204 - RNA, 20 nt, Human
ccuugauugcaggucagaag

SEQ ID NO: 260205 - RNA, 22 nt, Human
ccuugcuguggcuguacacuug

SEQ ID NO: 260206 - RNA, 23 nt, Human
ccuuguggucaggccagcaaguc

SEQ ID NO: 260207 - RNA, 19 nt, Human
cgccuguaaucccagcuac

SEQ ID NO: 260208 - RNA, 24 nt, Human
cggaucacuucgagucaggaguuu

SEQ ID NO: 260209 - RNA, 21 nt, Human
cuagaauuugaauugcugagc

SEQ ID NO: 260210 - RNA, 24 nt, Human
cucaugccuauaaucccaacgcuu

SEQ ID NO: 260211 - RNA, 23 nt, Human
cucccuuguggucaggccagcaa

SEQ ID NO: 260212 - RNA, 23 nt, Human
cuggccaacauggugaaacccca

SEQ ID NO: 260213 - RNA, 24 nt, Human
cuggugaucccuauuuggucuccc

SEQ ID NO: 260214 - RNA, 20 nt, Human
cuguauccccugucucaggg

SEQ ID NO: 260215 - RNA, 19 nt, Human
gaacaggccaagauaggag

SEQ ID NO: 260216 - RNA, 19 nt, Human
gaaguugcagugagccaag

SEQ ID NO: 260217 - RNA, 24 nt, Human
gaucacuucgagucaggaguuuga

SEQ ID NO: 260218 - RNA, 22 nt, Human
gaucuccaagacccaugcccga

SEQ ID NO: 260219 - RNA, 23 nt, Human
gauuaggaagaugugcccauuuu

SEQ ID NO: 260220 - RNA, 24 nt, Human
gccaacauggugaaaccccaucuc

SEQ ID NO: 260221 - RNA, 20 nt, Human
gccaagaucaugccacugca

SEQ ID NO: 260222 - RNA, 24 nt, Human
gccacugcacuccacccugggcaa

SEQ ID NO: 260223 - RNA, 20 nt, Human
gccugcaaaccccuccccag

SEQ ID NO: 260224 - RNA, 20 nt, Human
gcuccuugcuguggcuguac

SEQ ID NO: 260225 - RNA, 18 nt, Human
ggaacagugaccaagaac

SEQ ID NO: 260226 - RNA, 20 nt, Human
ggaaguugcagugagccaag

SEQ ID NO: 260227 - RNA, 24 nt, Human
ggaaguugcagugagccaagauca

SEQ ID NO: 260228 - RNA, 22 nt, Human
ggaucacuucgagucaggaguu

SEQ ID NO: 260229 - RNA, 18 nt, Human
ggcagagaccaaguuggg

SEQ ID NO: 260230 - RNA, 21 nt, Human
ggccuuuggccccugugacuc

SEQ ID NO: 260231 - RNA, 24 nt, Human
ggcugugguggugggcgccuguaa

SEQ ID NO: 260232 - RNA, 24 nt, Human
gggaugggauggcagggugaaagg

SEQ ID NO: 260233 - RNA, 21 nt, Human
gggcagagaccaaguugggga

SEQ ID NO: 260234 - RNA, 21 nt, Human
ggggcaggguggggucucagg

SEQ ID NO: 260235 - RNA, 24 nt, Human
gguggugggcgccuguaaucccag

SEQ ID NO: 260236 - RNA, 18 nt, Human
gugggcacucugugcccc

SEQ ID NO: 260237 - RNA, 20 nt, Human
guugggaugggauggcaggg

SEQ ID NO: 260238 - RNA, 22 nt, Human
guuucuguauccccugucucag

SEQ ID NO: 260239 - RNA, 25 nt, Human
uaaaaauacaaaaauuagcaggcug

SEQ ID NO: 260240 - RNA, 24 nt, Human
ucacuucgagucaggaguuugaga

SEQ ID NO: 260241 - RNA, 21 nt, Human
ucagggcagagaccaaguugg

SEQ ID NO: 260242 - RNA, 21 nt, Human
ucagugcccugcuucagggca

SEQ ID NO: 260243 - RNA, 23 nt, Human
ucaugccacugcacuccacccug

SEQ ID NO: 260244 - RNA, 24 nt, Human
ucccuugaucccagagguggaagu

SEQ ID NO: 260245 - RNA, 24 nt, Human
ucccuuguggucaggccagcaagu

SEQ ID NO: 260246 - RNA, 18 nt, Human
ucucaaaaaacaaaaaag

SEQ ID NO: 260247 - RNA, 18 nt, Human
ucucaggggcuccaacac

SEQ ID NO: 260248 - RNA, 24 nt, Human
ucuccuuuaugcaagcaaggccug

SEQ ID NO: 260249 - RNA, 23 nt, Human
ucucuacuaaaaauacaaaaauu

SEQ ID NO: 260250 - RNA, 26 nt, Human
ucugcaauggaacagugaccaagaac

SEQ ID NO: 260251 - RNA, 19 nt, Human
ugaaaccccaucucuacua

SEQ ID NO: 260252 - RNA, 23 nt, Human
ugaacagaagaucuccaagaccc

SEQ ID NO: 260253 - RNA, 22 nt, Human
ugacaagcaggcugcucggcug

SEQ ID NO: 260254 - RNA, 20 nt, Human
ugaccaagaacgugccuccu

SEQ ID NO: 260255 - RNA, 23 nt, Human
ugagaccagccuggccaacaugg

SEQ ID NO: 260256 - RNA, 24 nt, Human
ugagaccagccuggccaacauggu

SEQ ID NO: 260257 - RNA, 18 nt, Human
ugaggcaggagaaucccu

SEQ ID NO: 260258 - RNA, 24 nt, Human
ugaggcaggagaaucccuugaucc

SEQ ID NO: 260259 - RNA, 19 nt, Human
ugaguucccagccacuccc

SEQ ID NO: 260260 - RNA, 23 nt, Human
ugcaagcaaggccugaccccaaa

SEQ ID NO: 260261 - RNA, 25 nt, Human
ugcacuccacccugggcaacagagu

SEQ ID NO: 260262 - RNA, 18 nt, Human
ugcccaguggcucugccc

SEQ ID NO: 260263 - RNA, 20 nt, Human
ugcccugugcuaccuucccc

SEQ ID NO: 260264 - RNA, 21 nt, Human
ugcccugugcuaccuuccccu

SEQ ID NO: 260265 - RNA, 19 nt, Human
ugccugcaaaccccucccc

SEQ ID NO: 260266 - RNA, 25 nt, Human
ugccugcaaaccccuccccagccuu

SEQ ID NO: 260267 - RNA, 24 nt, Human
uggccaacauggugaaaccccauc

SEQ ID NO: 260268 - RNA, 21 nt, Human
uggcucaugccuauaauccca

SEQ ID NO: 260269 - RNA, 19 nt, Human
ugggaggccaaggugggcg

SEQ ID NO: 260270 - RNA, 24 nt, Human
ugggaggccaaggugggcggauca

SEQ ID NO: 260271 - RNA, 19 nt, Human
ugggaugggauggcagggu

SEQ ID NO: 260272 - RNA, 24 nt, Human
ugggcggaucacuucgagucagga

SEQ ID NO: 260273 - RNA, 24 nt, Human
uggggagucaggaacugaaagcug

SEQ ID NO: 260274 - RNA, 23 nt, Human
ugggggcaggguggggucucagg

SEQ ID NO: 260275 - RNA, 25 nt, Human
ugggggcaggguggggucucaggcc

SEQ ID NO: 260276 - RNA, 21 nt, Human
uggugggguuugugucacaga

SEQ ID NO: 260277 - RNA, 24 nt, Human
ugguggugggcgccuguaauccca

SEQ ID NO: 260278 - RNA, 20 nt, Human
uuagcaggcugugguggugg

SEQ ID NO: 260279 - RNA, 22 nt, Human
uuagcaggcugugguggugggc

SEQ ID NO: 260280 - RNA, 23 nt, Human
uucgagucaggaguuugagacca

SEQ ID NO: 260281 - RNA, 20 nt, Human
uugcagugagccaagaucau

SEQ ID NO: 260282 - RNA, 23 nt, Human
uugcauuaacaauuggugggguu

SEQ ID NO: 260283 - RNA, 20 nt, Human
uuugggggcagggugggguc

SEQ ID NO: 260284 - RNA, 21 nt, Human
aaaagguccuucaggccaccc

SEQ ID NO: 260285 - RNA, 22 nt, Human
aaauaccucuauaggucuaacc

SEQ ID NO: 260286 - RNA, 19 nt, Human
accgauccgcaaaugcucc

SEQ ID NO: 260287 - RNA, 19 nt, Human
aggaaaaagugaccgaucc

SEQ ID NO: 260288 - RNA, 19 nt, Human
cacaggaccuaaaggugag

SEQ ID NO: 260289 - RNA, 20 nt, Human
caccccucuaaacacaggag

SEQ ID NO: 260290 - RNA, 27 nt, Human
caggagccaaggguguugacagaaaac

SEQ ID NO: 260291 - RNA, 20 nt, Human
caggauuccaccgaccucac

SEQ ID NO: 260292 - RNA, 20 nt, Human
caucacaagcgccagggucu

SEQ ID NO: 260293 - RNA, 24 nt, Human
ccagcagaaaagguccuucaggcc

SEQ ID NO: 260294 - RNA, 22 nt, Human
ccccucuaaacacaggagccaa

SEQ ID NO: 260295 - RNA, 21 nt, Human
ccccuucccagcagagggcag

SEQ ID NO: 260296 - RNA, 21 nt, Human
cccgagggcccaaccacucuc

SEQ ID NO: 260297 - RNA, 19 nt, Human
cccucuaaacacaggagcc

SEQ ID NO: 260298 - RNA, 22 nt, Human
ccucacaggaccuaaaggugag

SEQ ID NO: 260299 - RNA, 23 nt, Human
ccucaugcugcuaacagaaaguc

SEQ ID NO: 260300 - RNA, 22 nt, Human
ccugugguaggggauaagagac

SEQ ID NO: 260301 - RNA, 22 nt, Human
cucagaaaggaggaaaaaguga

SEQ ID NO: 260302 - RNA, 22 nt, Human
cugccaccugggccgucccugu

SEQ ID NO: 260303 - RNA, 24 nt, Human
gaagaggcggagccaggacuugaa

SEQ ID NO: 260304 - RNA, 22 nt, Human
gaguggcugccucuagaggcgg

SEQ ID NO: 260305 - RNA, 18 nt, Human
gcuccccgauccgcucuc

SEQ ID NO: 260306 - RNA, 20 nt, Human
gcugccucuagaggcgcaaa

SEQ ID NO: 260307 - RNA, 23 nt, Human
ggaaaaagugaccgauccgcaaa

SEQ ID NO: 260308 - RNA, 20 nt, Human
ggcugccucuagaggcgcaa

SEQ ID NO: 260309 - RNA, 22 nt, Human
gggauaagagacucagaaagga

SEQ ID NO: 260310 - RNA, 20 nt, Human
guugacagaggggcacccuu

SEQ ID NO: 260311 - RNA, 19 nt, Human
ucaggccaccccucuaaac

SEQ ID NO: 260312 - RNA, 19 nt, Human
uccaugaguggcugccucu

SEQ ID NO: 260313 - RNA, 21 nt, Human
ucccucacaggaccuaaaggu

SEQ ID NO: 260314 - RNA, 23 nt, Human
ucccucuauaggucuaaccacag

SEQ ID NO: 260315 - RNA, 19 nt, Human
uccgcaaaugcuccccgag

SEQ ID NO: 260316 - RNA, 23 nt, Human
uccuucaggccaccccucuaaac

SEQ ID NO: 260317 - RNA, 18 nt, Human
ucggaggacccuguggca

SEQ ID NO: 260318 - RNA, 19 nt, Human
ucugcaggggcgcccagcc

SEQ ID NO: 260319 - RNA, 20 nt, Human
ugaauccaugaguggcugcc

SEQ ID NO: 260320 - RNA, 19 nt, Human
ugaccgauccgcaaaugcu

SEQ ID NO: 260321 - RNA, 18 nt, Human
uggcagccaggagcggaa

SEQ ID NO: 260322 - RNA, 21 nt, Human
uggcagccaggagcggaaggu

SEQ ID NO: 260323 - RNA, 21 nt, Human
uggcugccucuagaggcgcaa

SEQ ID NO: 260324 - RNA, 22 nt, Human
uguugacagaggggcacccuuu

SEQ ID NO: 260325 - RNA, 23 nt, Human
uucccgagggcccaaccacucuc

SEQ ID NO: 260326 - RNA, 18 nt, Human
uuuuuuacaucacaagcg

SEQ ID NO: 260327 - RNA, 23 nt, Human
aaacaaaauauucuuaucaggcg

SEQ ID NO: 260328 - RNA, 24 nt, Human
aaagggcugggauuacaggcguga

SEQ ID NO: 260329 - RNA, 21 nt, Human
aaaguuccccacuuccuacuu

SEQ ID NO: 260330 - RNA, 21 nt, Human
aaccuauuuaccuccccagac

SEQ ID NO: 260331 - RNA, 18 nt, Human
aaggucuuugcaaauguu

SEQ ID NO: 260332 - RNA, 19 nt, Human
aaguagcugggacuacagg

SEQ ID NO: 260333 - RNA, 20 nt, Human
aaguagcugggacuacaggu

SEQ ID NO: 260334 - RNA, 26 nt, Human
aaguagcugggacuacaggugacugc

SEQ ID NO: 260335 - RNA, 19 nt, Human
aaguuccccacuuccuacu

SEQ ID NO: 260336 - RNA, 18 nt, Human
acgggguuucacuauguu

SEQ ID NO: 260337 - RNA, 23 nt, Human
acgggguuucacuauguuggcca

SEQ ID NO: 260338 - RNA, 24 nt, Human
acgggguuucacuauguuggccag

SEQ ID NO: 260339 - RNA, 18 nt, Human
acuauguuggccaggcug

SEQ ID NO: 260340 - RNA, 23 nt, Human
acugauuuuuuucaguccaucug

SEQ ID NO: 260341 - RNA, 25 nt, Human
aggcgaauaaaucuaauguaaaacc

SEQ ID NO: 260342 - RNA, 24 nt, Human
agggcugggauuacaggcgugagc

SEQ ID NO: 260343 - RNA, 20 nt, Human
agugcacuggugcgaucucg

SEQ ID NO: 260344 - RNA, 24 nt, Human
agugcacuggugcgaucucggcuc

SEQ ID NO: 260345 - RNA, 19 nt, Human
auacugcaucgugggauag

SEQ ID NO: 260346 - RNA, 18 nt, Human
auuaaggcuggaugaaaa

SEQ ID NO: 260347 - RNA, 20 nt, Human
auucugcugucaaauuugga

SEQ ID NO: 260348 - RNA, 19 nt, Human
caaaaucuaccaguuacuc

SEQ ID NO: 260349 - RNA, 24 nt, Human
caaagggcugggauuacaggcgug

SEQ ID NO: 260350 - RNA, 18 nt, Human
caaauagaaggagcauau

SEQ ID NO: 260351 - RNA, 28 nt, Human
caagcgauucuccugccucauccuccca

SEQ ID NO: 260352 - RNA, 22 nt, Human
caccaaggcuggagugcacugg

SEQ ID NO: 260353 - RNA, 24 nt, Human
caccucggccucccaaagggcugg

SEQ ID NO: 260354 - RNA, 21 nt, Human
cacuauguuggccaggcuggu

SEQ ID NO: 260355 - RNA, 24 nt, Human
cacuauguuggccaggcuggucuc

SEQ ID NO: 260356 - RNA, 21 nt, Human
cacugcaaccuccgccuccca

SEQ ID NO: 260357 - RNA, 18 nt, Human
cacuuauaauuucccugu

SEQ ID NO: 260358 - RNA, 19 nt, Human
cagacugauuuuuuucagu

SEQ ID NO: 260359 - RNA, 22 nt, Human
cagcagaaacaaaauauucuua

SEQ ID NO: 260360 - RNA, 24 nt, Human
cagcagaaacaaaauauucuuauc

SEQ ID NO: 260361 - RNA, 21 nt, Human
cauaccaagucacuuaauuau

SEQ ID NO: 260362 - RNA, 24 nt, Human
cauugugcucugugucugccugag

SEQ ID NO: 260363 - RNA, 20 nt, Human
ccaaagggcugggauuacag

SEQ ID NO: 260364 - RNA, 22 nt, Human
ccaaagggcugggauuacaggc

SEQ ID NO: 260365 - RNA, 23 nt, Human
ccaaagggcugggauuacaggcg

SEQ ID NO: 260366 - RNA, 24 nt, Human
ccaaagggcugggauuacaggcgu

SEQ ID NO: 260367 - RNA, 22 nt, Human
ccaacuguaacuauuaagaaug

SEQ ID NO: 260368 - RNA, 23 nt, Human
ccaguagccccuuaacaaaaccu

SEQ ID NO: 260369 - RNA, 18 nt, Human
ccauucucuuucucuaaa

SEQ ID NO: 260370 - RNA, 23 nt, Human
cccaaguagcugggacuacaggu

SEQ ID NO: 260371 - RNA, 24 nt, Human
cccaaguagcugggacuacaggug

SEQ ID NO: 260372 - RNA, 23 nt, Human
cccaccucggccucccaaagggc

SEQ ID NO: 260373 - RNA, 23 nt, Human
cccagguucaagcgauucuccug

SEQ ID NO: 260374 - RNA, 23 nt, Human
ccccaaaaucaaagccaaaaaau

SEQ ID NO: 260375 - RNA, 24 nt, Human
ccccauuaucuugauaaguaccua

SEQ ID NO: 260376 - RNA, 21 nt, Human
ccccuuaacaaaaccuuggcc

SEQ ID NO: 260377 - RNA, 23 nt, Human
cccuuugucuccccaaaaucaaa

SEQ ID NO: 260378 - RNA, 24 nt, Human
ccgccucccagguucaagcgauuc

SEQ ID NO: 260379 - RNA, 25 nt, Human
ccuagagguccugguaaaccagggu

SEQ ID NO: 260380 - RNA, 24 nt, Human
ccucccagguucaagcgauucucc

SEQ ID NO: 260381 - RNA, 21 nt, Human
ccugucaccuuuuaaucuugg

SEQ ID NO: 260382 - RNA, 24 nt, Human
cgggguuucacuauguuggccagg

SEQ ID NO: 260383 - RNA, 22 nt, Human
cuacugacuucgugaucugccc

SEQ ID NO: 260384 - RNA, 24 nt, Human
cucacugcaaccuccgccucccag

SEQ ID NO: 260385 - RNA, 23 nt, Human
cucaugcacaauacucaugugug

SEQ ID NO: 260386 - RNA, 23 nt, Human
cugcaaccuccgccucccagguu

SEQ ID NO: 260387 - RNA, 24 nt, Human
cugcaaccuccgccucccagguuc

SEQ ID NO: 260388 - RNA, 25 nt, Human
cugccucauccucccaaguagcugg

SEQ ID NO: 260389 - RNA, 23 nt, Human
cugucaaauuuggagaaacaaaa

SEQ ID NO: 260390 - RNA, 21 nt, Human
cuuggccuucuggauccuugg

SEQ ID NO: 260391 - RNA, 22 nt, Human
gacuucgugaucugcccaccuc

SEQ ID NO: 260392 - RNA, 24 nt, Human
gacuucgugaucugcccaccucgg

SEQ ID NO: 260393 - RNA, 24 nt, Human
gagacgggguuucacuauguuggc

SEQ ID NO: 260394 - RNA, 18 nt, Human
gauuacaggcgugagccc

SEQ ID NO: 260395 - RNA, 21 nt, Human
gauuacaggcgugagccuccg

SEQ ID NO: 260396 - RNA, 18 nt, Human
gcucccauucucuuucuc

SEQ ID NO: 260397 - RNA, 22 nt, Human
ggagucuaucauaucuacaaau

SEQ ID NO: 260398 - RNA, 23 nt, Human
gggguuucacuauguuggccagg

SEQ ID NO: 260399 - RNA, 23 nt, Human
guaacuauuaagaaugcuaaaaa

SEQ ID NO: 260400 - RNA, 23 nt, Human
guagagacgggguuucacuaugu

SEQ ID NO: 260401 - RNA, 24 nt, Human
gugaucugcccaccucggccuccc

SEQ ID NO: 260402 - RNA, 21 nt, Human
guggaguugcuuaucacugug

SEQ ID NO: 260403 - RNA, 20 nt, Human
uaaaaccagcaggcugugga

SEQ ID NO: 260404 - RNA, 24 nt, Human
uaaaucuaauguaaaaccagcagg

SEQ ID NO: 260405 - RNA, 25 nt, Human
uaagaaugcuaaaaaaaaaaaaaaa

SEQ ID NO: 260406 - RNA, 18 nt, Human
uaauacauaugugugugu

SEQ ID NO: 260407 - RNA, 18 nt, Human
uaauuuaggucuauuugu

SEQ ID NO: 260408 - RNA, 30 nt, Human
uaauuuuuuuuuuguauuuuuaguagagaa

SEQ ID NO: 260409 - RNA, 24 nt, Human
uacaggugacugccaccacaccca

SEQ ID NO: 260410 - RNA, 20 nt, Human
uaccuaaaucuugcaugcca

SEQ ID NO: 260411 - RNA, 21 nt, Human
uacuauaaaaggcagguaggg

SEQ ID NO: 260412 - RNA, 21 nt, Human
uacuauacaacuguaaagaua

SEQ ID NO: 260413 - RNA, 20 nt, Human
uacucaugcacaauacucau

SEQ ID NO: 260414 - RNA, 20 nt, Human
uacuuaggcuaaaaacauaa

SEQ ID NO: 260415 - RNA, 22 nt, Human
uagagacgggguuucacuaugu

SEQ ID NO: 260416 - RNA, 18 nt, Human
uagcuuagcuucacuucu

SEQ ID NO: 260417 - RNA, 20 nt, Human
uaggcuaaaaacauaaacua

SEQ ID NO: 260418 - RNA, 22 nt, Human
uaggguggggcaacucucagaa

SEQ ID NO: 260419 - RNA, 24 nt, Human
uaguagagacgggguuucacuaug

SEQ ID NO: 260420 - RNA, 24 nt, Human
uaguguaaguaauacauaugugug

SEQ ID NO: 260421 - RNA, 22 nt, Human
uauacaacuguaaagauauaga

SEQ ID NO: 260422 - RNA, 22 nt, Human
uauggagcaagaaauuaaggcu

SEQ ID NO: 260423 - RNA, 23 nt, Human
uauguuggccaggcuggucucaa

SEQ ID NO: 260424 - RNA, 24 nt, Human
uauguuggccaggcuggucucaaa

SEQ ID NO: 260425 - RNA, 22 nt, Human
ucacuauguuggccaggcuggu

SEQ ID NO: 260426 - RNA, 19 nt, Human
ucacugcaaccuccgccuc

SEQ ID NO: 260427 - RNA, 24 nt, Human
ucacugcaaccuccgccucccagg

SEQ ID NO: 260428 - RNA, 25 nt, Human
ucacugcaaccuccgccucccaggu

SEQ ID NO: 260429 - RNA, 27 nt, Human
ucacugcaaccuccgccucccagguuc

SEQ ID NO: 260430 - RNA, 22 nt, Human
ucagccagccuucuuuuuuucu

SEQ ID NO: 260431 - RNA, 23 nt, Human
ucauuuacucaugcacaauacuc

SEQ ID NO: 260432 - RNA, 19 nt, Human
ucccaaagggcugggauua

SEQ ID NO: 260433 - RNA, 23 nt, Human
ucccaaagggcugggauuacagg

SEQ ID NO: 260434 - RNA, 24 nt, Human
ucccaaagggcugggauuacaggc

SEQ ID NO: 260435 - RNA, 23 nt, Human
ucccaaguagcugggacuacagg

SEQ ID NO: 260436 - RNA, 21 nt, Human
ucccagguucaagcgauucuc

SEQ ID NO: 260437 - RNA, 24 nt, Human
ucccagguucaagcgauucuccug

SEQ ID NO: 260438 - RNA, 24 nt, Human
ucccauugucaccaaggcuggagu

SEQ ID NO: 260439 - RNA, 19 nt, Human
uccccaaaaucaaagccaa

SEQ ID NO: 260440 - RNA, 23 nt, Human
uccccaaaaucaaagccaaaaaa

SEQ ID NO: 260441 - RNA, 18 nt, Human
ucccuuugucuccccaaa

SEQ ID NO: 260442 - RNA, 21 nt, Human
uccuagagguccugguaaacc

SEQ ID NO: 260443 - RNA, 18 nt, Human
ucuacaguuucacaaugc

SEQ ID NO: 260444 - RNA, 22 nt, Human
ucucuuauaaugacaccaaacc

SEQ ID NO: 260445 - RNA, 23 nt, Human
ugaaaagguguucauucaguggu

SEQ ID NO: 260446 - RNA, 23 nt, Human
ugacuucgugaucugcccaccuc

SEQ ID NO: 260447 - RNA, 22 nt, Human
ugagaauacauaaggaggucac

SEQ ID NO: 260448 - RNA, 23 nt, Human
ugagaauggaaaaccucaggccc

SEQ ID NO: 260449 - RNA, 19 nt, Human
ugagccuccgcgcccgacc

SEQ ID NO: 260450 - RNA, 24 nt, Human
ugaucugcccaccucggccuccca

SEQ ID NO: 260451 - RNA, 23 nt, Human
ugccucauccucccaaguagcug

SEQ ID NO: 260452 - RNA, 24 nt, Human
ugccucauccucccaaguagcugg

SEQ ID NO: 260453 - RNA, 18 nt, Human
uggagugcacuggugcga

SEQ ID NO: 260454 - RNA, 24 nt, Human
uggagugcacuggugcgaucucgg

SEQ ID NO: 260455 - RNA, 26 nt, Human
uggaugguacaaaucaugcccaacug

SEQ ID NO: 260456 - RNA, 21 nt, Human
uggccaggcuggucucaaacu

SEQ ID NO: 260457 - RNA, 19 nt, Human
uggccuucuggauccuugg

SEQ ID NO: 260458 - RNA, 21 nt, Human
uggcugcauuucccuuugucu

SEQ ID NO: 260459 - RNA, 18 nt, Human
ugggacuacaggugacug

SEQ ID NO: 260460 - RNA, 21 nt, Human
ugggacuacaggugacugcca

SEQ ID NO: 260461 - RNA, 22 nt, Human
ugggacuacaggugacugccac

SEQ ID NO: 260462 - RNA, 24 nt, Human
ugggacuacaggugacugccacca

SEQ ID NO: 260463 - RNA, 18 nt, Human
ugggauuacaggcgugag

SEQ ID NO: 260464 - RNA, 19 nt, Human
ugggauuacaggcgugagc

SEQ ID NO: 260465 - RNA, 19 nt, Human
ugggauuacaggcgugagc

SEQ ID NO: 260466 - RNA, 20 nt, Human
ugggauuacaggcgugagcc

SEQ ID NO: 260467 - RNA, 23 nt, Human
ugggauuacaggcgugagccucc

SEQ ID NO: 260468 - RNA, 24 nt, Human
ugggauuacaggcgugagccuccg

SEQ ID NO: 260469 - RNA, 20 nt, Human
uguaaaaccagcaggcugug

SEQ ID NO: 260470 - RNA, 20 nt, Human
uguauuggaugucaucaggc

SEQ ID NO: 260471 - RNA, 21 nt, Human
uguauuuuuaguagagacggg

SEQ ID NO: 260472 - RNA, 18 nt, Human
ugugacuaauacucucag

SEQ ID NO: 260473 - RNA, 19 nt, Human
uguuaacaaaaucuaccag

SEQ ID NO: 260474 - RNA, 18 nt, Human
uuaguagagacgggguuu

SEQ ID NO: 260475 - RNA, 21 nt, Human
uuaguagagacgggguuucac

SEQ ID NO: 260476 - RNA, 21 nt, Human
uuaguagagacgggguuucac

SEQ ID NO: 260477 - RNA, 24 nt, Human
uuaguagagacgggguuucacuau

SEQ ID NO: 260478 - RNA, 21 nt, Human
uucaagcgauucuccugccuc

SEQ ID NO: 260479 - RNA, 24 nt, Human
uucaagcgauucuccugccucauc

SEQ ID NO: 260480 - RNA, 20 nt, Human
uucacuucuaucucaaaaua

SEQ ID NO: 260481 - RNA, 24 nt, Human
uuucacuauguuggccaggcuggu

SEQ ID NO: 260482 - RNA, 24 nt, Human
uuucagccagccuucuuuuuuucu

SEQ ID NO: 260483 - RNA, 23 nt, Human
uuugugaaauguuaaucucugca

SEQ ID NO: 260484 - RNA, 24 nt, Human
uuuuuaguagagacgggguuucac

SEQ ID NO: 260485 - RNA, 22 nt, Human
uuuuuguauuuuuaguagagaa

SEQ ID NO: 260486 - RNA, 21 nt, Human
uuuuuuguauuuuuaguagag

SEQ ID NO: 260487 - RNA, 24 nt, Human
uuuuuuguauuuuuaguagagacg

SEQ ID NO: 260488 - RNA, 25 nt, Human
aaagacuagaaaucauuguagacaa

SEQ ID NO: 260489 - RNA, 25 nt, Human
aagagacagugaagggagauacagc

SEQ ID NO: 260490 - RNA, 24 nt, Human
acauuuuauuaaggaaaaaguaau

SEQ ID NO: 260491 - RNA, 23 nt, Human
accaaccuaaaaacaaaucucaa

SEQ ID NO: 260492 - RNA, 20 nt, Human
acuuuaagagaguugcagaa

SEQ ID NO: 260493 - RNA, 21 nt, Human
agacugauaccccuuuuucuu

SEQ ID NO: 260494 - RNA, 23 nt, Human
aggaaaaaguaauaugaacagaa

SEQ ID NO: 260495 - RNA, 28 nt, Human
cauuucuaacuuuaagagaguugcagaa

SEQ ID NO: 260496 - RNA, 21 nt, Human
ccagcauguaguagugguaau

SEQ ID NO: 260497 - RNA, 20 nt, Human
ccuuugccagcauguaguag

SEQ ID NO: 260498 - RNA, 21 nt, Human
cuaaaaacaaaucucaaacac

SEQ ID NO: 260499 - RNA, 19 nt, Human
ggaagagacagugaaggga

SEQ ID NO: 260500 - RNA, 25 nt, Human
uacagccaucauuagcgaccaaccu

SEQ ID NO: 260501 - RNA, 18 nt, Human
uaggaagagacagugaag

SEQ ID NO: 260502 - RNA, 23 nt, Human
ucuuuguuccuuuggcaccucua

SEQ ID NO: 260503 - RNA, 24 nt, Human
ugcaaguaguuuuucuccaugaga

SEQ ID NO: 260504 - RNA, 22 nt, Human
uuuuuuguuucuaaugacauuu

SEQ ID NO: 260505 - RNA, 18 nt, Human
uuuuuuuuuuuuuguuuc

SEQ ID NO: 260506 - RNA, 24 nt, Human
uuuuuuuuuuuuuuuuguuucuaa

SEQ ID NO: 260507 - RNA, 18 nt, Human
uuuuuuuuuuuuuuuuug

SEQ ID NO: 260508 - RNA, 22 nt, Human
uuuuuuuuuuuuuuuuuuguuu

SEQ ID NO: 260509 - RNA, 18 nt, Human
aaaaaaggaaacagaaaa

SEQ ID NO: 260510 - RNA, 20 nt, Human
aaaaagccuauccaaggaac

SEQ ID NO: 260511 - RNA, 22 nt, Human
aaaaaggaaacagaaaacagaa

SEQ ID NO: 260512 - RNA, 24 nt, Human
aaaaaggaaacagaaaacagaaga

SEQ ID NO: 260513 - RNA, 25 nt, Human
aaaagaagaagcgugacaacacaag

SEQ ID NO: 260514 - RNA, 19 nt, Human
aaaagccuauccaaggaac

SEQ ID NO: 260515 - RNA, 21 nt, Human
aaacagaaaacagaagaaauc

SEQ ID NO: 260516 - RNA, 24 nt, Human
aaaggaaacagaaaacagaagaaa

SEQ ID NO: 260517 - RNA, 21 nt, Human
aagaagcgugacaacacaagc

SEQ ID NO: 260518 - RNA, 18 nt, Human
aauggcuacauucucuac

SEQ ID NO: 260519 - RNA, 19 nt, Human
acucauucugccuuucuuc

SEQ ID NO: 260520 - RNA, 20 nt, Human
acucuaagaaugugccacaa

SEQ ID NO: 260521 - RNA, 20 nt, Human
agagauguggugcguaugug

SEQ ID NO: 260522 - RNA, 20 nt, Human
aggugcagucucccugguug

SEQ ID NO: 260523 - RNA, 22 nt, Human
aguucagugggugcaguuuguu

SEQ ID NO: 260524 - RNA, 21 nt, Human
augacaaaaaaaaauacuaua

SEQ ID NO: 260525 - RNA, 23 nt, Human
caaaagaagaagcgugacaacac

SEQ ID NO: 260526 - RNA, 24 nt, Human
caaaagaagaagcgugacaacaca

SEQ ID NO: 260527 - RNA, 22 nt, Human
caccaaaaacguagauguggaa

SEQ ID NO: 260528 - RNA, 20 nt, Human
cagaguaccucaagaaauga

SEQ ID NO: 260529 - RNA, 19 nt, Human
cagucauauaucuuuucca

SEQ ID NO: 260530 - RNA, 21 nt, Human
cauucugccuuucuucagugu

SEQ ID NO: 260531 - RNA, 18 nt, Human
ccucaagaaaugaaaguc

SEQ ID NO: 260532 - RNA, 23 nt, Human
cucaaaacuccugagucuccaag

SEQ ID NO: 260533 - RNA, 19 nt, Human
cucaagaaaugaaagucag

SEQ ID NO: 260534 - RNA, 20 nt, Human
cucaagaaaugaaagucagc

SEQ ID NO: 260535 - RNA, 22 nt, Human
cucccugguugcugauggagaa

SEQ ID NO: 260536 - RNA, 26 nt, Human
gaaacagaaaacagaagaagggaccc

SEQ ID NO: 260537 - RNA, 21 nt, Human
gaagcuaugaacacuaauguu

SEQ ID NO: 260538 - RNA, 21 nt, Human
gacaacacaagcugcuacaau

SEQ ID NO: 260539 - RNA, 25 nt, Human
gauguggaauaaaaaaaagauagaa

SEQ ID NO: 260540 - RNA, 18 nt, Human
gauguggugcguaugugc

SEQ ID NO: 260541 - RNA, 21 nt, Human
gcaaaagggacuccaccaaaa

SEQ ID NO: 260542 - RNA, 25 nt, Human
gcaaaagggacuccaccaaaaacgu

SEQ ID NO: 260543 - RNA, 18 nt, Human
ggcuacauucucuacauu

SEQ ID NO: 260544 - RNA, 22 nt, Human
ggguguuggcuauuuagagcuu

SEQ ID NO: 260545 - RNA, 20 nt, Human
guggaauaaaaaaaagauag

SEQ ID NO: 260546 - RNA, 18 nt, Human
gugugguaacucuaagaa

SEQ ID NO: 260547 - RNA, 22 nt, Human
uaaaaagccuauccaaggaaca

SEQ ID NO: 260548 - RNA, 19 nt, Human
uaaauggaauggguucugu

SEQ ID NO: 260549 - RNA, 19 nt, Human
uaagaaugugccacaaugu

SEQ ID NO: 260550 - RNA, 23 nt, Human
uauuuagagcuucccucaugggg

SEQ ID NO: 260551 - RNA, 20 nt, Human
uccugagucuccaaggccuc

SEQ ID NO: 260552 - RNA, 22 nt, Human
ucucaagggcugauuuggaugc

SEQ ID NO: 260553 - RNA, 20 nt, Human
ugcaaaagggacuccaccaa

SEQ ID NO: 260554 - RNA, 24 nt, Human
ugcagaguaccucaagaaaugaaa

SEQ ID NO: 260555 - RNA, 23 nt, Human
uggagaaaaugacaaaaaaaaau

SEQ ID NO: 260556 - RNA, 23 nt, Human
uuaaaacaaugaugcaaaaggga

SEQ ID NO: 260557 - RNA, 22 nt, Human
uuggcuauuuagagcuucccuc

SEQ ID NO: 260558 - RNA, 20 nt, Human
uuucuucaguguaagaaagu

SEQ ID NO: 260559 - RNA, 20 nt, Human
aaaaucccugagccuuaacc

SEQ ID NO: 260560 - RNA, 24 nt, Human
aaagaaauauaucuguccuuccau

SEQ ID NO: 260561 - RNA, 19 nt, Human
aaggauagagucagucaaa

SEQ ID NO: 260562 - RNA, 21 nt, Human
acuuuacaguuucccauuguc

SEQ ID NO: 260563 - RNA, 18 nt, Human
agaaauauaucuguccuu

SEQ ID NO: 260564 - RNA, 18 nt, Human
aguaaugaucauagaagu

SEQ ID NO: 260565 - RNA, 19 nt, Human
caugcucucagaauuaagg

SEQ ID NO: 260566 - RNA, 24 nt, Human
cauuuacauaucagggcaugugug

SEQ ID NO: 260567 - RNA, 19 nt, Human
cccugagccuuaacccucc

SEQ ID NO: 260568 - RNA, 22 nt, Human
ccugagccuuaacccucccauc

SEQ ID NO: 260569 - RNA, 21 nt, Human
cucauuuuucuuccuacuggg

SEQ ID NO: 260570 - RNA, 23 nt, Human
cuuccauacccacgacacacaaa

SEQ ID NO: 260571 - RNA, 18 nt, Human
gaaauaaaaucccugagc

SEQ ID NO: 260572 - RNA, 21 nt, Human
gagccuuaacccucccaucuc

SEQ ID NO: 260573 - RNA, 18 nt, Human
gauuauaccgccuuccuu

SEQ ID NO: 260574 - RNA, 19 nt, Human
ggccuuauucuuuaguucu

SEQ ID NO: 260575 - RNA, 23 nt, Human
gguaauaagugacaguuucagaa

SEQ ID NO: 260576 - RNA, 19 nt, Human
ggucaaauauucaugcucu

SEQ ID NO: 260577 - RNA, 22 nt, Human
guuucacauuuucuuuuuauuu

SEQ ID NO: 260578 - RNA, 21 nt, Human
uaacccucagagcaaccgaca

SEQ ID NO: 260579 - RNA, 18 nt, Human
uacagaugaggaaaaaua

SEQ ID NO: 260580 - RNA, 26 nt, Human
uacccacgacacacaaauaggauuua

SEQ ID NO: 260581 - RNA, 20 nt, Human
uaggauuuauaguuaggaga

SEQ ID NO: 260582 - RNA, 22 nt, Human
uccaagaaugccuaaagaaaua

SEQ ID NO: 260583 - RNA, 22 nt, Human
uccagcaguucacugaaauaaa

SEQ ID NO: 260584 - RNA, 23 nt, Human
uccagcaguucacugaaauaaaa

SEQ ID NO: 260585 - RNA, 24 nt, Human
ucccaaguccaccuugucgcaagg

SEQ ID NO: 260586 - RNA, 23 nt, Human
ugaaauaaaaucccugagccuua

SEQ ID NO: 260587 - RNA, 18 nt, Human
ugucucauuuuucuuccu

SEQ ID NO: 260588 - RNA, 19 nt, Human
uucagaauuugaacccaga

SEQ ID NO: 260589 - RNA, 21 nt, Human
uuuacagaugaggaaaaauag

SEQ ID NO: 260590 - RNA, 21 nt, Human
uuuacaguuucccauuguccu

SEQ ID NO: 260591 - RNA, 18 nt, Human
uuuauaguuaggagagaa

SEQ ID NO: 260592 - RNA, 25 nt, Human
uuuuuuuuuuuuuuuuuuguuguuu

SEQ ID NO: 260593 - RNA, 27 nt, Human
uuuuuuuuuuuuuuuuuuuuuuugggg

SEQ ID NO: 260594 - RNA, 20 nt, Human
aaagcacuuugguccccaua

SEQ ID NO: 260595 - RNA, 18 nt, Human
aacuucuaguacucucga

SEQ ID NO: 260596 - RNA, 20 nt, Human
aagcaggagaaggaaaaagg

SEQ ID NO: 260597 - RNA, 18 nt, Human
agaagggaaaggaagaag

SEQ ID NO: 260598 - RNA, 19 nt, Human
aggaagaagaugaaauaga

SEQ ID NO: 260599 - RNA, 22 nt, Human
aggaagaagaugaaauagaaaa

SEQ ID NO: 260600 - RNA, 27 nt, Human
aggaagaagaugaaauagaagggaccc

SEQ ID NO: 260601 - RNA, 24 nt, Human
aggcucuugugucacagucagcau

SEQ ID NO: 260602 - RNA, 21 nt, Human
aggugcucgaaucucucuccu

SEQ ID NO: 260603 - RNA, 24 nt, Human
auaaaaacaaacguauuuaacaaa

SEQ ID NO: 260604 - RNA, 23 nt, Human
auuucauuccuauaucgagacau

SEQ ID NO: 260605 - RNA, 24 nt, Human
cagcagaaaaggugcucgaaucuc

SEQ ID NO: 260606 - RNA, 22 nt, Human
caguaucgaaguuggauacugg

SEQ ID NO: 260607 - RNA, 23 nt, Human
cucgaaucucucuccuuuuaauu

SEQ ID NO: 260608 - RNA, 24 nt, Human
gaaaagcaggagaaggaaaaaggg

SEQ ID NO: 260609 - RNA, 25 nt, Human
gaaaagcaggagaaggaaaaaggga

SEQ ID NO: 260610 - RNA, 18 nt, Human
gaaagaaaagcaggagaa

SEQ ID NO: 260611 - RNA, 23 nt, Human
ggggagauggccaugcaucucca

SEQ ID NO: 260612 - RNA, 23 nt, Human
uaaaaacaaacguauuuaacaaa

SEQ ID NO: 260613 - RNA, 18 nt, Human
uaaaugggagggaaguau

SEQ ID NO: 260614 - RNA, 19 nt, Human
uauacacacacaguucaua

SEQ ID NO: 260615 - RNA, 23 nt, Human
uauguugcacauuuccauauaug

SEQ ID NO: 260616 - RNA, 18 nt, Human
uccagggaaaaaaaugag

SEQ ID NO: 260617 - RNA, 19 nt, Human
uccagggaaaaaaaugaga

SEQ ID NO: 260618 - RNA, 24 nt, Human
ucucuauacacacacaguucauaa

SEQ ID NO: 260619 - RNA, 21 nt, Human
ugggagaagggaaaggaagaa

SEQ ID NO: 260620 - RNA, 24 nt, Human
uguaaugccuuuauauaaaguucu

SEQ ID NO: 260621 - RNA, 23 nt, Human
uuuuuuauugcuucuaauuugau

SEQ ID NO: 260622 - RNA, 24 nt, Human
uuuuuuuuuuuuauugcuucuaau

SEQ ID NO: 260623 - RNA, 24 nt, Human
aaggagaugacuuaguugguacuu

SEQ ID NO: 260624 - RNA, 20 nt, Human
uaauuugaaaggagaugacu

SEQ ID NO: 260625 - RNA, 22 nt, Human
ugaaaggagaugacuuaguugg

SEQ ID NO: 260626 - RNA, 24 nt, Human
ugaaaggagaugacuuaguuggua

SEQ ID NO: 260627 - RNA, 18 nt, Human
aaagagacuagugguugu

SEQ ID NO: 260628 - RNA, 24 nt, Human
aaaggcaaacgaauuuuaagauca

SEQ ID NO: 260629 - RNA, 19 nt, Human
aacacagugcagggauaag

SEQ ID NO: 260630 - RNA, 20 nt, Human
aauacuauuaaagagacuag

SEQ ID NO: 260631 - RNA, 21 nt, Human
agcuuuaaaaaggcaaacgaa

SEQ ID NO: 260632 - RNA, 21 nt, Human
aucucgugauuggcugguugu

SEQ ID NO: 260633 - RNA, 19 nt, Human
cagcugaguccucagaagc

SEQ ID NO: 260634 - RNA, 24 nt, Human
caggccagucauuuaacuucccag

SEQ ID NO: 260635 - RNA, 24 nt, Human
caucacaaugcaaaugcccuccca

SEQ ID NO: 260636 - RNA, 25 nt, Human
caucugcuuuucuucucugucuucc

SEQ ID NO: 260637 - RNA, 26 nt, Human
ccagagucucauucccuucgcugacc

SEQ ID NO: 260638 - RNA, 22 nt, Human
cugacaaaauaggaagauugaa

SEQ ID NO: 260639 - RNA, 23 nt, Human
gguuccagcugaguccucagaag

SEQ ID NO: 260640 - RNA, 24 nt, Human
gguuguggcagaaauuguuucugc

SEQ ID NO: 260641 - RNA, 21 nt, Human
ucauucccuucgcugacaaaa

SEQ ID NO: 260642 - RNA, 22 nt, Human
uccaucacaaugcaaaugcccu

SEQ ID NO: 260643 - RNA, 19 nt, Human
ucccagagucucauucccu

SEQ ID NO: 260644 - RNA, 21 nt, Human
ucucaugauuaacuauuuuca

SEQ ID NO: 260645 - RNA, 22 nt, Human
ucugucuuccaucacaaugcaa

SEQ ID NO: 260646 - RNA, 25 nt, Human
ugaauuuucagcuuaucagcuacuc

SEQ ID NO: 260647 - RNA, 20 nt, Human
ugacaaaauaggaagauuga

SEQ ID NO: 260648 - RNA, 18 nt, Human
ugacauacucaacacagu

SEQ ID NO: 260649 - RNA, 22 nt, Human
ugguuccagcugaguccucaga

SEQ ID NO: 260650 - RNA, 22 nt, Human
uguguaaaugcccuuuaccaag

SEQ ID NO: 260651 - RNA, 20 nt, Human
uuaaagagacuagugguugu

SEQ ID NO: 260652 - RNA, 23 nt, Human
uucucagucccaucaacgguuuc

SEQ ID NO: 260653 - RNA, 23 nt, Human
uugccaucugcuuuucuucucug

SEQ ID NO: 260654 - RNA, 26 nt, Human
uuguggcagaaauuguuucugcuuau

SEQ ID NO: 260655 - RNA, 19 nt, Human
aagucuaaucacacuugac

SEQ ID NO: 260656 - RNA, 18 nt, Human
accuucugcucaguuuac

SEQ ID NO: 260657 - RNA, 19 nt, Human
auaauacagaaacagccug

SEQ ID NO: 260658 - RNA, 23 nt, Human
ccaaagcaguuuauaaaguuuau

SEQ ID NO: 260659 - RNA, 24 nt, Human
cugguccugugugcuguggcuggg

SEQ ID NO: 260660 - RNA, 21 nt, Human
cugguccugugugcuguggga

SEQ ID NO: 260661 - RNA, 19 nt, Human
gaucagcucaccucugggg

SEQ ID NO: 260662 - RNA, 18 nt, Human
gccugguccugugugcug

SEQ ID NO: 260663 - RNA, 20 nt, Human
gguccugugugcuguggcug

SEQ ID NO: 260664 - RNA, 18 nt, Human
uaucaccuucugcucagu

SEQ ID NO: 260665 - RNA, 20 nt, Human
uaucuaaaauggcagagauu

SEQ ID NO: 260666 - RNA, 22 nt, Human
uccugugugcuguggcugggga

SEQ ID NO: 260667 - RNA, 21 nt, Human
ugaggaaauuauuuucaagag

SEQ ID NO: 260668 - RNA, 20 nt, Human
uuucaggaaagucuaaucac

SEQ ID NO: 260669 - RNA, 25 nt, Human
acaaacagugggagagaccgguacc

SEQ ID NO: 260670 - RNA, 26 nt, Human
acgaaugugugugugccaaggcccca

SEQ ID NO: 260671 - RNA, 21 nt, Human
aggccccagaggcuggaugcc

SEQ ID NO: 260672 - RNA, 24 nt, Human
agugaagauugaaugucuagauau

SEQ ID NO: 260673 - RNA, 24 nt, Human
aucuguuuaaaaucucugucuucu

SEQ ID NO: 260674 - RNA, 20 nt, Human
cagugaaagaugcuuccaga

SEQ ID NO: 260675 - RNA, 24 nt, Human
caguugggugguaggguuagaagg

SEQ ID NO: 260676 - RNA, 18 nt, Human
ccagcagccacguaucuc

SEQ ID NO: 260677 - RNA, 22 nt, Human
cccagaaagggaggaggacuuc

SEQ ID NO: 260678 - RNA, 19 nt, Human
ccccagaggcuggaugccu

SEQ ID NO: 260679 - RNA, 19 nt, Human
cuggaugcccacauaugug

SEQ ID NO: 260680 - RNA, 20 nt, Human
cuggaugcccacauaugugc

SEQ ID NO: 260681 - RNA, 22 nt, Human
gaaugcacaauugaaagaguga

SEQ ID NO: 260682 - RNA, 21 nt, Human
gaggcuggaugcccacauaug

SEQ ID NO: 260683 - RNA, 20 nt, Human
ggaccuuguuuuuuuuccug

SEQ ID NO: 260684 - RNA, 22 nt, Human
gguuauggaagcccagaaaggg

SEQ ID NO: 260685 - RNA, 18 nt, Human
gucccagugaaagaugcu

SEQ ID NO: 260686 - RNA, 20 nt, Human
uacuggggccaguugggugg

SEQ ID NO: 260687 - RNA, 19 nt, Human
ucccucuugguuaacaucu

SEQ ID NO: 260688 - RNA, 22 nt, Human
uccgaaguccucuauuuccugg

SEQ ID NO: 260689 - RNA, 23 nt, Human
ucucuugauccuauuccuuuucu

SEQ ID NO: 260690 - RNA, 24 nt, Human
ugaaugcacaauugaaagagugaa

SEQ ID NO: 260691 - RNA, 20 nt, Human
ugagagaaugaauguacugg

SEQ ID NO: 260692 - RNA, 26 nt, Human
ugagaguacaaacagugggagagacg

SEQ ID NO: 260693 - RNA, 23 nt, Human
ugcugcuuagagcucaguuucau

SEQ ID NO: 260694 - RNA, 26 nt, Human
ugcuguggggaccuuguuuuuuuucc

SEQ ID NO: 260695 - RNA, 24 nt, Human
ugugugugccaaggccccagaggc

SEQ ID NO: 260696 - RNA, 27 nt, Human
uguuccucuaacccacaagcucacaug

SEQ ID NO: 260697 - RNA, 24 nt, Human
uugaaugucuagauauuuguuccu

SEQ ID NO: 260698 - RNA, 23 nt, Human
uugguuaacaucuguuuaaaauc

SEQ ID NO: 260699 - RNA, 24 nt, Human
uuuccuagacugaauugaagaaug

SEQ ID NO: 260700 - RNA, 20 nt, Human
uuuuuuuuuuuuuuuuuugg

SEQ ID NO: 260701 - RNA, 24 nt, Human
aagcgcccccggcggggcccgggc

SEQ ID NO: 260702 - RNA, 18 nt, Human
acaccgaagcugcucuuc

SEQ ID NO: 260703 - RNA, 19 nt, Human
accccaaggccuccggcac

SEQ ID NO: 260704 - RNA, 23 nt, Human
accuuuucaaaacugggggauga

SEQ ID NO: 260705 - RNA, 23 nt, Human
acgcccagugccccaacuuccau

SEQ ID NO: 260706 - RNA, 21 nt, Human
agacagacagacggacacgca

SEQ ID NO: 260707 - RNA, 21 nt, Human
agagagucagcaaggccuggg

SEQ ID NO: 260708 - RNA, 23 nt, Human
agagucaggcucgccuggccucc

SEQ ID NO: 260709 - RNA, 20 nt, Human
agcagcaccugcagcccagu

SEQ ID NO: 260710 - RNA, 19 nt, Human
aggagcaagacagguaaca

SEQ ID NO: 260711 - RNA, 20 nt, Human
aggaggggugaguggcaggg

SEQ ID NO: 260712 - RNA, 18 nt, Human
aggccuggggacagaggg

SEQ ID NO: 260713 - RNA, 24 nt, Human
aggcgccgggcagcucacgccacu

SEQ ID NO: 260714 - RNA, 21 nt, Human
agggcaggcgccgggcagcuc

SEQ ID NO: 260715 - RNA, 20 nt, Human
aggggagcgugcagcccacu

SEQ ID NO: 260716 - RNA, 22 nt, Human
aggggcagcugccagggggcuu

SEQ ID NO: 260717 - RNA, 18 nt, Human
aggggcugagugauggcc

SEQ ID NO: 260718 - RNA, 21 nt, Human
agucagacgcccagugcccca

SEQ ID NO: 260719 - RNA, 23 nt, Human
agucagcaaggccugggccagga

SEQ ID NO: 260720 - RNA, 20 nt, Human
agugaagcaucucaaggcug

SEQ ID NO: 260721 - RNA, 21 nt, Human
auccucaaucagaucccaccg

SEQ ID NO: 260722 - RNA, 28 nt, Human
caagcagccagcccggugcuguaaugac

SEQ ID NO: 260723 - RNA, 20 nt, Human
cacacgugcccccgccaacc

SEQ ID NO: 260724 - RNA, 21 nt, Human
caccauguggcgggcaggggg

SEQ ID NO: 260725 - RNA, 23 nt, Human
cacccccaccccaccccgccgcc

SEQ ID NO: 260726 - RNA, 21 nt, Human
cacccgcaccggccucccugu

SEQ ID NO: 260727 - RNA, 25 nt, Human
caccgaagcugcucuucugagcccu

SEQ ID NO: 260728 - RNA, 21 nt, Human
caccugcagcccagugggggc

SEQ ID NO: 260729 - RNA, 21 nt, Human
cacggcccacacgugcccccg

SEQ ID NO: 260730 - RNA, 18 nt, Human
cacuccaggggacagggc

SEQ ID NO: 260731 - RNA, 20 nt, Human
cacuccuucucgcugaccuu

SEQ ID NO: 260732 - RNA, 22 nt, Human
cacuucccuggucacuugggca

SEQ ID NO: 260733 - RNA, 22 nt, Human
cagaugcaccuggugaugugug

SEQ ID NO: 260734 - RNA, 18 nt, Human
cagcaccugcagcccagu

SEQ ID NO: 260735 - RNA, 18 nt, Human
cagcccaagccacggccc

SEQ ID NO: 260736 - RNA, 19 nt, Human
cagcucagagagucagcaa

SEQ ID NO: 260737 - RNA, 19 nt, Human
cagcugccagggggcuugg

SEQ ID NO: 260738 - RNA, 21 nt, Human
cagcugccagggggcuuggag

SEQ ID NO: 260739 - RNA, 22 nt, Human
cagugcagccuccccacaaccu

SEQ ID NO: 260740 - RNA, 27 nt, Human
cauacacauggacacacacacacuucc

SEQ ID NO: 260741 - RNA, 18 nt, Human
ccaagccacggcccacac

SEQ ID NO: 260742 - RNA, 22 nt, Human
ccagcccaagccacggcccaca

SEQ ID NO: 260743 - RNA, 19 nt, Human
ccagcccggugccugcaga

SEQ ID NO: 260744 - RNA, 18 nt, Human
ccaggaggggugaguggc

SEQ ID NO: 260745 - RNA, 22 nt, Human
ccagugggggcggggguggcgu

SEQ ID NO: 260746 - RNA, 22 nt, Human
ccaguggggguggugagggguc

SEQ ID NO: 260747 - RNA, 28 nt, Human
cccaagccacggcccacacgugcccccg

SEQ ID NO: 260748 - RNA, 20 nt, Human
cccacacgugcccccgccaa

SEQ ID NO: 260749 - RNA, 18 nt, Human
cccacccccaccccaccc

SEQ ID NO: 260750 - RNA, 27 nt, Human
cccacccccaccccaccccgccgccaa

SEQ ID NO: 260751 - RNA, 19 nt, Human
cccacugggcuccucugca

SEQ ID NO: 260752 - RNA, 22 nt, Human
ccccaaggccuccggcacugag

SEQ ID NO: 260753 - RNA, 18 nt, Human
ccccaccccgccgccaag

SEQ ID NO: 260754 - RNA, 18 nt, Human
cccccgccccgcccccgc

SEQ ID NO: 260755 - RNA, 22 nt, Human
cccccgccccgcccccgccucc

SEQ ID NO: 260756 - RNA, 26 nt, Human
cccccgccccgcccccgccucccggg

SEQ ID NO: 260757 - RNA, 19 nt, Human
ccccgccccgcccccgccu

SEQ ID NO: 260758 - RNA, 21 nt, Human
ccccgcgcgcugcgcccccgc

SEQ ID NO: 260759 - RNA, 22 nt, Human
cccgcacccgcaccggccuccc

SEQ ID NO: 260760 - RNA, 21 nt, Human
cccgggcggaucagguucccg

SEQ ID NO: 260761 - RNA, 18 nt, Human
cccuaggcccccuggcuc

SEQ ID NO: 260762 - RNA, 21 nt, Human
cccuaggcccccuggcucagc

SEQ ID NO: 260763 - RNA, 23 nt, Human
cccucagcuccuccaccagacuc

SEQ ID NO: 260764 - RNA, 19 nt, Human
ccgccccgcccccgccucc

SEQ ID NO: 260765 - RNA, 24 nt, Human
ccgccccgcccccgccucccgggc

SEQ ID NO: 260766 - RNA, 22 nt, Human
ccgcgcgcugcgcccccgcccc

SEQ ID NO: 260767 - RNA, 22 nt, Human
ccucccaccuccccagcucaga

SEQ ID NO: 260768 - RNA, 22 nt, Human
ccuccggcacugagaaccccac

SEQ ID NO: 260769 - RNA, 27 nt, Human
ccuggcccccaccccaaggccuccggc

SEQ ID NO: 260770 - RNA, 21 nt, Human
ccuggcgcuggccacucauuu

SEQ ID NO: 260771 - RNA, 18 nt, Human
ccugucaaggccaggccu

SEQ ID NO: 260772 - RNA, 19 nt, Human
ccuugcucuucagcugugg

SEQ ID NO: 260773 - RNA, 21 nt, Human
ccuugcucuucagcuguggac

SEQ ID NO: 260774 - RNA, 23 nt, Human
cgcaccggccucccugucucgca

SEQ ID NO: 260775 - RNA, 18 nt, Human
cgccaaccuuccuucugg

SEQ ID NO: 260776 - RNA, 19 nt, Human
cgcccccgccucccgggcg

SEQ ID NO: 260777 - RNA, 18 nt, Human
cggagggcagcggcgagg

SEQ ID NO: 260778 - RNA, 22 nt, Human
cggcggggcccgggcccugcgc

SEQ ID NO: 260779 - RNA, 22 nt, Human
cuccagugcagccuccccacaa

SEQ ID NO: 260780 - RNA, 22 nt, Human
cugcacaccgaagcugcucuuc

SEQ ID NO: 260781 - RNA, 18 nt, Human
cugccagggggcuuggag

SEQ ID NO: 260782 - RNA, 20 nt, Human
cuggcugcuccgcccgccug

SEQ ID NO: 260783 - RNA, 23 nt, Human
cugggcuccucugcaagugcgag

SEQ ID NO: 260784 - RNA, 24 nt, Human
cuuaggagcagggcagggguaggg

SEQ ID NO: 260785 - RNA, 18 nt, Human
cuugcuuagaccuuuuca

SEQ ID NO: 260786 - RNA, 19 nt, Human
gacagggccgauggggaug

SEQ ID NO: 260787 - RNA, 20 nt, Human
gagaugaagacgccucccuc

SEQ ID NO: 260788 - RNA, 22 nt, Human
gagggaggccccuucccuuguu

SEQ ID NO: 260789 - RNA, 23 nt, Human
gaguggagucucaucaggccccu

SEQ ID NO: 260790 - RNA, 22 nt, Human
gcccacccccaccccaccccgc

SEQ ID NO: 260791 - RNA, 23 nt, Human
gccccaacuuccaugcacacaca

SEQ ID NO: 260792 - RNA, 25 nt, Human
gcccggugccugcagaugcaccugg

SEQ ID NO: 260793 - RNA, 22 nt, Human
gccuggggacagagggucaugu

SEQ ID NO: 260794 - RNA, 18 nt, Human
gcgccggccccuccccgc

SEQ ID NO: 260795 - RNA, 18 nt, Human
gcggggcccgggcccugc

SEQ ID NO: 260796 - RNA, 22 nt, Human
gcggggguggcgugagaggggg

SEQ ID NO: 260797 - RNA, 23 nt, Human
gcucccucccucagcuccuccac

SEQ ID NO: 260798 - RNA, 22 nt, Human
gcugcccacccccaccccaccc

SEQ ID NO: 260799 - RNA, 19 nt, Human
ggacacacacacacuuccc

SEQ ID NO: 260800 - RNA, 18 nt, Human
ggacagggccgaugggga

SEQ ID NO: 260801 - RNA, 20 nt, Human
ggacccuggaguuuucuacc

SEQ ID NO: 260802 - RNA, 20 nt, Human
ggagggcagcggcgaggaag

SEQ ID NO: 260803 - RNA, 21 nt, Human
ggcuggugggcagcgggucgc

SEQ ID NO: 260804 - RNA, 19 nt, Human
gggacagggccgaugggga

SEQ ID NO: 260805 - RNA, 22 nt, Human
gggacggaaaugacuugggggc

SEQ ID NO: 260806 - RNA, 20 nt, Human
gggcaggggguccaggugcu

SEQ ID NO: 260807 - RNA, 20 nt, Human
gggcccugcgcgcuggcugg

SEQ ID NO: 260808 - RNA, 21 nt, Human
gggggggacggaaaugacuug

SEQ ID NO: 260809 - RNA, 24 nt, Human
gggguccgacaugauggcuggugg

SEQ ID NO: 260810 - RNA, 22 nt, Human
gggguggugggagggccugggg

SEQ ID NO: 260811 - RNA, 19 nt, Human
ggguaggggcugagugaug

SEQ ID NO: 260812 - RNA, 19 nt, Human
gggucgcgcggagggcagc

SEQ ID NO: 260813 - RNA, 18 nt, Human
ggguggggagggagucag

SEQ ID NO: 260814 - RNA, 22 nt, Human
gguaacaggaagcaggaaggga

SEQ ID NO: 260815 - RNA, 24 nt, Human
gguggugggagggccugggggggg

SEQ ID NO: 260816 - RNA, 20 nt, Human
guggcaggggacccuggagu

SEQ ID NO: 260817 - RNA, 21 nt, Human
guggcaggggacccuggaguu

SEQ ID NO: 260818 - RNA, 21 nt, Human
guggcagggguggcuggcugg

SEQ ID NO: 260819 - RNA, 22 nt, Human
guuucugcauuugaaacauuua

SEQ ID NO: 260820 - RNA, 19 nt, Human
uacacauggacacacacac

SEQ ID NO: 260821 - RNA, 18 nt, Human
ucaaggccaggccugggg

SEQ ID NO: 260822 - RNA, 18 nt, Human
ucagcugaaugaaugggg

SEQ ID NO: 260823 - RNA, 21 nt, Human
ucagguucccgcacccgcacc

SEQ ID NO: 260824 - RNA, 23 nt, Human
ucagugggugcucucaccccugc

SEQ ID NO: 260825 - RNA, 18 nt, Human
ucauacacuccuucucgc

SEQ ID NO: 260826 - RNA, 23 nt, Human
ucauacacuccuucucgcugacc

SEQ ID NO: 260827 - RNA, 20 nt, Human
uccaugcacacacacucaca

SEQ ID NO: 260828 - RNA, 21 nt, Human
uccccgcgcgcugcgcccccg

SEQ ID NO: 260829 - RNA, 23 nt, Human
uccucucuuggguggggagggag

SEQ ID NO: 260830 - RNA, 21 nt, Human
uccuuuuuauccucaaucaga

SEQ ID NO: 260831 - RNA, 22 nt, Human
ucgcugaccuucuccuggcugc

SEQ ID NO: 260832 - RNA, 21 nt, Human
ucucaaggcugggaugcugcu

SEQ ID NO: 260833 - RNA, 23 nt, Human
ucugcaagugcgaggccuggccc

SEQ ID NO: 260834 - RNA, 19 nt, Human
ucuugguuuuggcaaaaac

SEQ ID NO: 260835 - RNA, 23 nt, Human
ugaaacgaacaauuuuucaaagu

SEQ ID NO: 260836 - RNA, 23 nt, Human
ugaaugaaugggggaggaagggc

SEQ ID NO: 260837 - RNA, 18 nt, Human
ugagauaaaggcacuuuc

SEQ ID NO: 260838 - RNA, 22 nt, Human
ugagauaaaggcacuuucugcu

SEQ ID NO: 260839 - RNA, 19 nt, Human
ugcccacccccaccccacc

SEQ ID NO: 260840 - RNA, 19 nt, Human
ugccccaacuuccaugcac

SEQ ID NO: 260841 - RNA, 21 nt, Human
ugcccugcaaagacagccccc

SEQ ID NO: 260842 - RNA, 23 nt, Human
ugccuguggcuccagugcagccu

SEQ ID NO: 260843 - RNA, 20 nt, Human
uggccacaccauguggcggg

SEQ ID NO: 260844 - RNA, 22 nt, Human
uggcccccaccccaaggccucc

SEQ ID NO: 260845 - RNA, 19 nt, Human
uggcucagcugaaugaaug

SEQ ID NO: 260846 - RNA, 21 nt, Human
uggcucagcugaaugaauggg

SEQ ID NO: 260847 - RNA, 22 nt, Human
uggcucccucccucagcuccuc

SEQ ID NO: 260848 - RNA, 23 nt, Human
uggcucccucccucagcuccucc

SEQ ID NO: 260849 - RNA, 19 nt, Human
uggcuggugggcagcgggu

SEQ ID NO: 260850 - RNA, 22 nt, Human
ugggcaggccacauggccuggg

SEQ ID NO: 260851 - RNA, 19 nt, Human
ugggccaaaccuagacacu

SEQ ID NO: 260852 - RNA, 20 nt, Human
ugggcccuggcgcuggccac

SEQ ID NO: 260853 - RNA, 22 nt, Human
ugggcugcauucuccccugggc

SEQ ID NO: 260854 - RNA, 22 nt, Human
uggggacagagggucaugucaa

SEQ ID NO: 260855 - RNA, 24 nt, Human
uggggacagagggugaggggccgg

SEQ ID NO: 260856 - RNA, 21 nt, Human
uggggagggagucagacgccc

SEQ ID NO: 260857 - RNA, 18 nt, Human
ugggggaggaagggcggg

SEQ ID NO: 260858 - RNA, 23 nt, Human
ugggggggggacggaaaugacuu

SEQ ID NO: 260859 - RNA, 19 nt, Human
ugggguggugggagggccu

SEQ ID NO: 260860 - RNA, 21 nt, Human
ugggguggugggagggccugg

SEQ ID NO: 260861 - RNA, 22 nt, Human
ugggguggugggagggccuggg

SEQ ID NO: 260862 - RNA, 25 nt, Human
ugggguggugggagggccugggggg

SEQ ID NO: 260863 - RNA, 21 nt, Human
ugggugcucucaccccugccu

SEQ ID NO: 260864 - RNA, 23 nt, Human
ugucauuuauacaaaaagacaaa

SEQ ID NO: 260865 - RNA, 25 nt, Human
ugugcaccugaguggagucucauca

SEQ ID NO: 260866 - RNA, 19 nt, Human
uguggacugugcaccccug

SEQ ID NO: 260867 - RNA, 22 nt, Human
uucaaaacugggggaugagggg

SEQ ID NO: 260868 - RNA, 24 nt, Human
uucugcauuugaaacauuuauuuc

SEQ ID NO: 260869 - RNA, 25 nt, Human
aaacaguccucaguuacagcucuca

SEQ ID NO: 260870 - RNA, 22 nt, Human
aaaugcgcgaccccacacccac

SEQ ID NO: 260871 - RNA, 22 nt, Human
agaaaaugcgcgaccccacacc

SEQ ID NO: 260872 - RNA, 21 nt, Human
auagcccaugggcacugacag

SEQ ID NO: 260873 - RNA, 22 nt, Human
gaaaaugcgcgaccccacaccc

SEQ ID NO: 260874 - RNA, 21 nt, Human
gaaaauguccucaaaguaaaa

SEQ ID NO: 260875 - RNA, 19 nt, Human
gaccccacacccacuaagc

SEQ ID NO: 260876 - RNA, 23 nt, Human
uugaagaaaaugcgcgaccccac

SEQ ID NO: 260877 - RNA, 24 nt, Human
aaagugcugggauuacaggcauga

SEQ ID NO: 260878 - RNA, 19 nt, Human
aagugcugggauuacaggc

SEQ ID NO: 260879 - RNA, 21 nt, Human
aagugcugggauuacaggcau

SEQ ID NO: 260880 - RNA, 26 nt, Human
aagugcugggauuacaggcaugagcc

SEQ ID NO: 260881 - RNA, 18 nt, Human
acaaauaaaaauaucaag

SEQ ID NO: 260882 - RNA, 22 nt, Human
accuuauuccuucugugcucua

SEQ ID NO: 260883 - RNA, 19 nt, Human
acuacaggugugcgccacc

SEQ ID NO: 260884 - RNA, 21 nt, Human
agacagaaacuugaaaaagac

SEQ ID NO: 260885 - RNA, 24 nt, Human
agagauucuccugccucagccucc

SEQ ID NO: 260886 - RNA, 24 nt, Human
aggaagacagaaacuugaaaaaga

SEQ ID NO: 260887 - RNA, 24 nt, Human
aggugaucugccuaccuuggccuc

SEQ ID NO: 260888 - RNA, 18 nt, Human
aguagcugggacuacagg

SEQ ID NO: 260889 - RNA, 20 nt, Human
agugcagugacgugaucucg

SEQ ID NO: 260890 - RNA, 24 nt, Human
agugcagugacgugaucucggcuc

SEQ ID NO: 260891 - RNA, 23 nt, Human
augggguuuugccauguuggcca

SEQ ID NO: 260892 - RNA, 24 nt, Human
augggguuuugccauguuggccag

SEQ ID NO: 260893 - RNA, 24 nt, Human
caaagugcugggauuacaggcaug

SEQ ID NO: 260894 - RNA, 22 nt, Human
caagagauucuccugccucagc

SEQ ID NO: 260895 - RNA, 22 nt, Human
caauuaucugaacugaaacaaa

SEQ ID NO: 260896 - RNA, 19 nt, Human
caccaugccuggccaauuc

SEQ ID NO: 260897 - RNA, 19 nt, Human
cacccuccaaaagcuuggg

SEQ ID NO: 260898 - RNA, 24 nt, Human
cauguuggccaggcuggucuugaa

SEQ ID NO: 260899 - RNA, 21 nt, Human
cauugcaaccuccgccuccca

SEQ ID NO: 260900 - RNA, 23 nt, Human
ccaaagugcugggauuacaggca

SEQ ID NO: 260901 - RNA, 24 nt, Human
ccaaagugcugggauuacaggcau

SEQ ID NO: 260902 - RNA, 19 nt, Human
ccauguuggccaggcuggu

SEQ ID NO: 260903 - RNA, 24 nt, Human
cccaaagugcugggauuacaggca

SEQ ID NO: 260904 - RNA, 22 nt, Human
cccaagcuggagugcagugacg

SEQ ID NO: 260905 - RNA, 21 nt, Human
cccagguucaagagauucucc

SEQ ID NO: 260906 - RNA, 24 nt, Human
ccggaguagcugggacuacaggug

SEQ ID NO: 260907 - RNA, 24 nt, Human
ccucccagguucaagagauucucc

SEQ ID NO: 260908 - RNA, 24 nt, Human
ccugaccucaggugaucugccuac

SEQ ID NO: 260909 - RNA, 24 nt, Human
cucagccuccggaguagcugggac

SEQ ID NO: 260910 - RNA, 24 nt, Human
cucaggugaucugccuaccuuggc

SEQ ID NO: 260911 - RNA, 19 nt, Human
cucauugcaaccuccgccu

SEQ ID NO: 260912 - RNA, 20 nt, Human
cucuguugcccaagcuggag

SEQ ID NO: 260913 - RNA, 23 nt, Human
cucuguugcccaagcuggagugc

SEQ ID NO: 260914 - RNA, 21 nt, Human
cugccagauucacccaguugc

SEQ ID NO: 260915 - RNA, 23 nt, Human
cugccucagccuccggaguagcu

SEQ ID NO: 260916 - RNA, 24 nt, Human
gaacugaaacaaauaaaaauauca

SEQ ID NO: 260917 - RNA, 24 nt, Human
gaccucaggugaucugccuaccuu

SEQ ID NO: 260918 - RNA, 23 nt, Human
gaccuuauuccuucugugcucua

SEQ ID NO: 260919 - RNA, 24 nt, Human
gacuacaggugugcgccaccaugc

SEQ ID NO: 260920 - RNA, 24 nt, Human
gaguagcugggacuacaggugugc

SEQ ID NO: 260921 - RNA, 20 nt, Human
gagugcagugacgugaucuc

SEQ ID NO: 260922 - RNA, 18 nt, Human
gauuacaggcaugagcca

SEQ ID NO: 260923 - RNA, 21 nt, Human
gauuacaggcaugagccacca

SEQ ID NO: 260924 - RNA, 24 nt, Human
gauuacaggcaugagccaccaugc

SEQ ID NO: 260925 - RNA, 20 nt, Human
gccauguuggccaggcuggu

SEQ ID NO: 260926 - RNA, 24 nt, Human
gccauguuggccaggcuggucuug

SEQ ID NO: 260927 - RNA, 20 nt, Human
gccucagccuccggaguagc

SEQ ID NO: 260928 - RNA, 23 nt, Human
gcuggucuugaacuccugaccuc

SEQ ID NO: 260929 - RNA, 24 nt, Human
ggacuacaggugugcgccaccaug

SEQ ID NO: 260930 - RNA, 24 nt, Human
ggauuacaggcaugagccaccaug

SEQ ID NO: 260931 - RNA, 24 nt, Human
ggcuggucuugaacuccugaccuc

SEQ ID NO: 260932 - RNA, 22 nt, Human
gggguuuugccauguuggccag

SEQ ID NO: 260933 - RNA, 22 nt, Human
ggguuuugccauguuggccagg

SEQ ID NO: 260934 - RNA, 19 nt, Human
ggucuugaacuccugaccu

SEQ ID NO: 260935 - RNA, 23 nt, Human
guaaagaugggguuuugccaugu

SEQ ID NO: 260936 - RNA, 21 nt, Human
gugugcgccaccaugcccagc

SEQ ID NO: 260937 - RNA, 22 nt, Human
uaaagaugggguuuugccaugu

SEQ ID NO: 260938 - RNA, 26 nt, Human
uaauuuuuucguauuuuuaguagaga

SEQ ID NO: 260939 - RNA, 22 nt, Human
uacaggcaugagccaccaugcc

SEQ ID NO: 260940 - RNA, 23 nt, Human
uacuguccauaaaauuuucuaau

SEQ ID NO: 260941 - RNA, 21 nt, Human
uaggaagacagaaacuugaaa

SEQ ID NO: 260942 - RNA, 24 nt, Human
uaguaaagaugggguuuugccaug

SEQ ID NO: 260943 - RNA, 21 nt, Human
uaguagagauguacuuuauau

SEQ ID NO: 260944 - RNA, 24 nt, Human
uaguagagauguacuuuauauuuu

SEQ ID NO: 260945 - RNA, 21 nt, Human
uauaucacccuccaaaagcuu

SEQ ID NO: 260946 - RNA, 22 nt, Human
uauucugccacuuaaggcuuua

SEQ ID NO: 260947 - RNA, 19 nt, Human
ucauugcaaccuccgccuc

SEQ ID NO: 260948 - RNA, 24 nt, Human
ucauugcaaccuccgccucccagg

SEQ ID NO: 260949 - RNA, 25 nt, Human
ucauugcaaccuccgccucccaggu

SEQ ID NO: 260950 - RNA, 24 nt, Human
ucccaaagugcugggauuacaggc

SEQ ID NO: 260951 - RNA, 21 nt, Human
ucccagguucaagagauucuc

SEQ ID NO: 260952 - RNA, 24 nt, Human
ucccagguucaagagauucuccug

SEQ ID NO: 260953 - RNA, 24 nt, Human
uccggaguagcugggacuacaggu

SEQ ID NO: 260954 - RNA, 24 nt, Human
ucuccugccucagccuccggagua

SEQ ID NO: 260955 - RNA, 24 nt, Human
ucuguugcccaagcuggagugcag

SEQ ID NO: 260956 - RNA, 23 nt, Human
ucuugaacuccugaccucaggug

SEQ ID NO: 260957 - RNA, 23 nt, Human
ucuugcucuguugcccaagcugg

SEQ ID NO: 260958 - RNA, 24 nt, Human
ucuugcucuguugcccaagcugga

SEQ ID NO: 260959 - RNA, 22 nt, Human
ucuuuucuuuuuucuuuuuuga

SEQ ID NO: 260960 - RNA, 24 nt, Human
ugaaaaagacugucuucagaaaaa

SEQ ID NO: 260961 - RNA, 24 nt, Human
ugaaacaaauaaaaauaucaagua

SEQ ID NO: 260962 - RNA, 18 nt, Human
ugaaugaaugacaaauaa

SEQ ID NO: 260963 - RNA, 18 nt, Human
ugaccucaggugaucugc

SEQ ID NO: 260964 - RNA, 19 nt, Human
ugaccucaggugaucugcc

SEQ ID NO: 260965 - RNA, 20 nt, Human
ugaccucaggugaucugccu

SEQ ID NO: 260966 - RNA, 22 nt, Human
ugagauggagucuugcucuguu

SEQ ID NO: 260967 - RNA, 24 nt, Human
ugaucugccuaccuuggccuccca

SEQ ID NO: 260968 - RNA, 24 nt, Human
ugccauguuggccaggcuggucuu

SEQ ID NO: 260969 - RNA, 27 nt, Human
ugccauguuggccaggcuggucuugaa

SEQ ID NO: 260970 - RNA, 23 nt, Human
ugcccaagcuggagugcagugac

SEQ ID NO: 260971 - RNA, 24 nt, Human
ugccucagccuccggaguagcugg

SEQ ID NO: 260972 - RNA, 22 nt, Human
uggagaguuauuuuguacaguu

SEQ ID NO: 260973 - RNA, 19 nt, Human
uggagugcagugacgugau

SEQ ID NO: 260974 - RNA, 24 nt, Human
uggagugcagugacgugaucucgg

SEQ ID NO: 260975 - RNA, 24 nt, Human
uggccaggcuggucuugaacuccu

SEQ ID NO: 260976 - RNA, 21 nt, Human
ugggacuacaggugugcgcca

SEQ ID NO: 260977 - RNA, 22 nt, Human
ugggacuacaggugugcgccac

SEQ ID NO: 260978 - RNA, 24 nt, Human
ugggacuacaggugugcgccacca

SEQ ID NO: 260979 - RNA, 25 nt, Human
ugggacuacaggugugcgccaccau

SEQ ID NO: 260980 - RNA, 18 nt, Human
ugggauuacaggcaugag

SEQ ID NO: 260981 - RNA, 22 nt, Human
ugggauuacaggcaugagccac

SEQ ID NO: 260982 - RNA, 23 nt, Human
ugggauuacaggcaugagccacc

SEQ ID NO: 260983 - RNA, 24 nt, Human
ugggauuacaggcaugagccacca

SEQ ID NO: 260984 - RNA, 25 nt, Human
ugggauuacaggcaugagccaccau

SEQ ID NO: 260985 - RNA, 24 nt, Human
ugggguuuugccauguuggccagg

SEQ ID NO: 260986 - RNA, 20 nt, Human
uguucuugguggauaaacug

SEQ ID NO: 260987 - RNA, 18 nt, Human
uuaguaaagaugggguuu

SEQ ID NO: 260988 - RNA, 22 nt, Human
uuaguaaagaugggguuuugcc

SEQ ID NO: 260989 - RNA, 24 nt, Human
uuaguaaagaugggguuuugccau

SEQ ID NO: 260990 - RNA, 23 nt, Human
uucaagagauucuccugccucag

SEQ ID NO: 260991 - RNA, 23 nt, Human
uugcaaccuccgccucccagguu

SEQ ID NO: 260992 - RNA, 24 nt, Human
uugcaaccuccgccucccagguuc

SEQ ID NO: 260993 - RNA, 24 nt, Human
uugccauguuggccaggcuggucu

SEQ ID NO: 260994 - RNA, 18 nt, Human
uugcccaagcuggagugc

SEQ ID NO: 260995 - RNA, 18 nt, Human
uuggccucccaaagugcu

SEQ ID NO: 260996 - RNA, 21 nt, Human
uuuucguauuuuuaguagaga

SEQ ID NO: 260997 - RNA, 23 nt, Human
uuuugccauguuggccaggcugg

SEQ ID NO: 260998 - RNA, 21 nt, Human
uuuuuaguaaagaugggguuu

SEQ ID NO: 260999 - RNA, 21 nt, Human
uuuuuaguaaagaugggguuu

SEQ ID NO: 261000 - RNA, 21 nt, Human
uuuuucguauuuuuaguagag

SEQ ID NO: 261001 - RNA, 24 nt, Human
uuuuucguauuuuuaguagagaug

SEQ ID NO: 261002 - RNA, 24 nt, Human
uuuuucuuuuuugagauggagucu

SEQ ID NO: 261003 - RNA, 24 nt, Human
uuuuugagauggagucuugcucug

SEQ ID NO: 261004 - RNA, 20 nt, Human
uuuuuuuuuuauagcaagua

SEQ ID NO: 261005 - RNA, 19 nt, Human
cccaaaccuucccugaccc

SEQ ID NO: 261006 - RNA, 23 nt, Human
cccaaaccuucccugacccgaga

SEQ ID NO: 261007 - RNA, 21 nt, Human
gcgaccccuccaguagcccaa

SEQ ID NO: 261008 - RNA, 18 nt, Human
uagcccaacuacagaagc

SEQ ID NO: 261009 - RNA, 20 nt, Human
ucuaaggagaaaaauaaauu

SEQ ID NO: 261010 - RNA, 19 nt, Human
ugacccgagaaguaugagg

SEQ ID NO: 261011 - RNA, 23 nt, Human
ugagcgaccccuccaguagccca

SEQ ID NO: 261012 - RNA, 27 nt, Human
uuauuuuccuuaucucuaaccuucagg

SEQ ID NO: 261013 - RNA, 19 nt, Human
uuguauuuucuccuaacau

SEQ ID NO: 261014 - RNA, 18 nt, Human
accgacagccggcaaggc

SEQ ID NO: 261015 - RNA, 21 nt, Human
acggagcuccuaaaagcaccg

SEQ ID NO: 261016 - RNA, 19 nt, Human
gacagccggcaaggcccaa

SEQ ID NO: 261017 - RNA, 23 nt, Human
gaucauaauguugucugaauuua

SEQ ID NO: 261018 - RNA, 19 nt, Human
uaaaagcaccgcaucuacc

SEQ ID NO: 261019 - RNA, 20 nt, Human
uaauguugucugaauuuacc

SEQ ID NO: 261020 - RNA, 24 nt, Human
aaaaaaaaaaaaaaaaaaaaggga

SEQ ID NO: 261021 - RNA, 25 nt, Human
aaaaaaaaaaaaaaaaaagggaaag

SEQ ID NO: 261022 - RNA, 21 nt, Human
aaaaaaaaaaagggaaagggu

SEQ ID NO: 261023 - RNA, 23 nt, Human
aaaaaagguuucuuuaaacaaaa

SEQ ID NO: 261024 - RNA, 20 nt, Human
aaaagccuuuuggggagggg

SEQ ID NO: 261025 - RNA, 20 nt, Human
aaagggaaaggguaaaggag

SEQ ID NO: 261026 - RNA, 20 nt, Human
aagcagggccgggagagggg

SEQ ID NO: 261027 - RNA, 23 nt, Human
acaaaaaaaaaaaaaaaaaaaaa

SEQ ID NO: 261028 - RNA, 23 nt, Human
acacuuuguucucagcugguggg

SEQ ID NO: 261029 - RNA, 21 nt, Human
agaaacaggggaggggggagc

SEQ ID NO: 261030 - RNA, 24 nt, Human
agaaacaggggaggggggagcccc

SEQ ID NO: 261031 - RNA, 25 nt, Human
agcggagcggcggcggcggcggcgg

SEQ ID NO: 261032 - RNA, 18 nt, Human
agcggcggcggcggcggc

SEQ ID NO: 261033 - RNA, 23 nt, Human
agcggcggcggcggcggcggcgg

SEQ ID NO: 261034 - RNA, 19 nt, Human
aggcucccuccgccuucac

SEQ ID NO: 261035 - RNA, 25 nt, Human
agggauggaccagagggcuggggug

SEQ ID NO: 261036 - RNA, 22 nt, Human
aggggacagaaacaggggaggg

SEQ ID NO: 261037 - RNA, 18 nt, Human
aggggagggggcggcggc

SEQ ID NO: 261038 - RNA, 21 nt, Human
aggggcggguggggauggggg

SEQ ID NO: 261039 - RNA, 18 nt, Human
aggggugggcacaucacc

SEQ ID NO: 261040 - RNA, 22 nt, Human
caaaauaaauaaaagcagggcc

SEQ ID NO: 261041 - RNA, 24 nt, Human
cagcuaugcacaaauccaaaagcc

SEQ ID NO: 261042 - RNA, 21 nt, Human
cagggccgggagaggggcggg

SEQ ID NO: 261043 - RNA, 22 nt, Human
caggggagggggcggcggcugc

SEQ ID NO: 261044 - RNA, 22 nt, Human
cccagauagacacuuuguucuc

SEQ ID NO: 261045 - RNA, 23 nt, Human
ccccgaggggucuuagagagggg

SEQ ID NO: 261046 - RNA, 22 nt, Human
ccccugcggccuggggcuucac

SEQ ID NO: 261047 - RNA, 21 nt, Human
ccccuugcccccugcggccug

SEQ ID NO: 261048 - RNA, 19 nt, Human
ccuggccccuugcccccug

SEQ ID NO: 261049 - RNA, 21 nt, Human
ccuugcccccugcggccuggg

SEQ ID NO: 261050 - RNA, 21 nt, Human
ccuuuuggggagggggcgguc

SEQ ID NO: 261051 - RNA, 23 nt, Human
cgcgggcggcgcgggcagcggag

SEQ ID NO: 261052 - RNA, 21 nt, Human
cggcacggagggagggaugga

SEQ ID NO: 261053 - RNA, 22 nt, Human
cggccuggggcuucacauucac

SEQ ID NO: 261054 - RNA, 19 nt, Human
cggcggcggcggcggcgcu

SEQ ID NO: 261055 - RNA, 22 nt, Human
cuaauccaaaauaaauaaaagc

SEQ ID NO: 261056 - RNA, 21 nt, Human
cuccccgcagcccugcccucc

SEQ ID NO: 261057 - RNA, 22 nt, Human
cucggccuggccuccccgcagc

SEQ ID NO: 261058 - RNA, 21 nt, Human
cugcaggcuggggcgcuccug

SEQ ID NO: 261059 - RNA, 21 nt, Human
gagaggggugggcacaucacc

SEQ ID NO: 261060 - RNA, 23 nt, Human
gagggaggcggccaggggcccac

SEQ ID NO: 261061 - RNA, 23 nt, Human
gaggucucccgcccccucgcugg

SEQ ID NO: 261062 - RNA, 18 nt, Human
gcacaaauccaaaagccu

SEQ ID NO: 261063 - RNA, 24 nt, Human
gcacaaauccaaaagccuuuuggg

SEQ ID NO: 261064 - RNA, 19 nt, Human
gcagggccgggagaggggc

SEQ ID NO: 261065 - RNA, 19 nt, Human
gcccccucgcuggcucacu

SEQ ID NO: 261066 - RNA, 19 nt, Human
gcggcgcgggcagcggagc

SEQ ID NO: 261067 - RNA, 21 nt, Human
gcggcggcggcggcgcucggc

SEQ ID NO: 261068 - RNA, 20 nt, Human
gcggcggcggcggcggcggc

SEQ ID NO: 261069 - RNA, 20 nt, Human
gcggcggcggcggcggcggc

SEQ ID NO: 261070 - RNA, 20 nt, Human
gcggcggcggcggcggcggc

SEQ ID NO: 261071 - RNA, 24 nt, Human
gcggcggcggcggcggcggcgcuc

SEQ ID NO: 261072 - RNA, 23 nt, Human
gcggcggcggcggcggcggcggc

SEQ ID NO: 261073 - RNA, 24 nt, Human
gcggcggcggcggcggcggcggcg

SEQ ID NO: 261074 - RNA, 20 nt, Human
gcucccuccgccuucacucc

SEQ ID NO: 261075 - RNA, 20 nt, Human
gcuggggugggcaaccggcu

SEQ ID NO: 261076 - RNA, 22 nt, Human
ggaaaggguaaaggaggggaaa

SEQ ID NO: 261077 - RNA, 19 nt, Human
ggacagaaacaggggaggg

SEQ ID NO: 261078 - RNA, 19 nt, Human
ggacagaaacaggggaggg

SEQ ID NO: 261079 - RNA, 23 nt, Human
ggacagaaacaggggagggggga

SEQ ID NO: 261080 - RNA, 20 nt, Human
ggaccagagggcuggggugg

SEQ ID NO: 261081 - RNA, 21 nt, Human
ggagggagggauggaccagag

SEQ ID NO: 261082 - RNA, 23 nt, Human
ggagggauggaccagagggcugg

SEQ ID NO: 261083 - RNA, 18 nt, Human
ggcaggcaguagcggguc

SEQ ID NO: 261084 - RNA, 20 nt, Human
ggcaggggccgggcccgggg

SEQ ID NO: 261085 - RNA, 19 nt, Human
ggccgggagaggggcgggu

SEQ ID NO: 261086 - RNA, 21 nt, Human
ggccuggccuccccgcagccc

SEQ ID NO: 261087 - RNA, 20 nt, Human
ggcggcgcgggcagcggagc

SEQ ID NO: 261088 - RNA, 23 nt, Human
ggcggcggcggcggcggcggcgg

SEQ ID NO: 261089 - RNA, 19 nt, Human
ggcggguggggaugggggc

SEQ ID NO: 261090 - RNA, 19 nt, Human
gggagggggcgguccuagg

SEQ ID NO: 261091 - RNA, 19 nt, Human
gggaguugggggcaggcag

SEQ ID NO: 261092 - RNA, 18 nt, Human
gggcaccuggccccuugc

SEQ ID NO: 261093 - RNA, 23 nt, Human
gggcagcagggcaggggccgggc

SEQ ID NO: 261094 - RNA, 30 nt, Human
gggcagcggagcggcggcggcggcggcgac

SEQ ID NO: 261095 - RNA, 22 nt, Human
gggcaggggccgggcccgggga

SEQ ID NO: 261096 - RNA, 20 nt, Human
gggccgggagaggggcgggu

SEQ ID NO: 261097 - RNA, 23 nt, Human
gggccgggagaggggcggguggg

SEQ ID NO: 261098 - RNA, 19 nt, Human
gggcgcggcacggagggag

SEQ ID NO: 261099 - RNA, 24 nt, Human
gggcgcggcacggagggagggaug

SEQ ID NO: 261100 - RNA, 18 nt, Human
gggcggcgcgggcagcgg

SEQ ID NO: 261101 - RNA, 20 nt, Human
gggcggcgcgggcagcggag

SEQ ID NO: 261102 - RNA, 22 nt, Human
gggcgguccuaggggggcgcgg

SEQ ID NO: 261103 - RNA, 20 nt, Human
gggcuggggugggcaaccgg

SEQ ID NO: 261104 - RNA, 20 nt, Human
ggggagggggcgguccuagg

SEQ ID NO: 261105 - RNA, 21 nt, Human
uaaacaaaaaaaaaaaaaaaa

SEQ ID NO: 261106 - RNA, 21 nt, Human
uaugcacaaauccaaaagccu

SEQ ID NO: 261107 - RNA, 21 nt, Human
ucacaguauuuacauaugaua

SEQ ID NO: 261108 - RNA, 23 nt, Human
uccaaaauaaauaaaagcagggc

SEQ ID NO: 261109 - RNA, 18 nt, Human
uccagggcuggagggagg

SEQ ID NO: 261110 - RNA, 20 nt, Human
uccaggggcucggccuggcc

SEQ ID NO: 261111 - RNA, 22 nt, Human
uccgccuucacuccagcuaugc

SEQ ID NO: 261112 - RNA, 23 nt, Human
ucucccgcccccucgcuggcuca

SEQ ID NO: 261113 - RNA, 24 nt, Human
ucuuuaaacaaaaaaaaaaaaaaa

SEQ ID NO: 261114 - RNA, 26 nt, Human
ugaggggacagaaacaggggaggggg

SEQ ID NO: 261115 - RNA, 22 nt, Human
uggccuccccgcagcccugccc

SEQ ID NO: 261116 - RNA, 22 nt, Human
uggggagggggcgguccuaggg

SEQ ID NO: 261117 - RNA, 18 nt, Human
aaaaaagaaaggcugagg

SEQ ID NO: 261118 - RNA, 18 nt, Human
aaaauuuucccagcugac

SEQ ID NO: 261119 - RNA, 19 nt, Human
aaacaaaaagcuaaacaac

SEQ ID NO: 261120 - RNA, 27 nt, Human
aaacaaaaagcuaaacaacccauuagc

SEQ ID NO: 261121 - RNA, 18 nt, Human
aaacaacagagccccaag

SEQ ID NO: 261122 - RNA, 22 nt, Human
aaacauuccagcucaaaaucaa

SEQ ID NO: 261123 - RNA, 26 nt, Human
aaaggcugaggaaacagcccaguccu

SEQ ID NO: 261124 - RNA, 23 nt, Human
aaauaaagagacaaugugguucu

SEQ ID NO: 261125 - RNA, 20 nt, Human
aacaaaaagcuaaacaaccc

SEQ ID NO: 261126 - RNA, 19 nt, Human
aagauacaccuacuggggc

SEQ ID NO: 261127 - RNA, 18 nt, Human
aagcaaaugcauagcugc

SEQ ID NO: 261128 - RNA, 22 nt, Human
aagcaaaugcauagcugcaaau

SEQ ID NO: 261129 - RNA, 26 nt, Human
aagcuguuuuaaaaaagcaccugauu

SEQ ID NO: 261130 - RNA, 19 nt, Human
aaguagcugggacuauagg

SEQ ID NO: 261131 - RNA, 20 nt, Human
aaguagcugggacuauaggu

SEQ ID NO: 261132 - RNA, 24 nt, Human
aauaacaucaacaaucugaaacga

SEQ ID NO: 261133 - RNA, 19 nt, Human
acaaucaacaagucagacc

SEQ ID NO: 261134 - RNA, 26 nt, Human
acacauuuuuggcagucaagggugga

SEQ ID NO: 261135 - RNA, 22 nt, Human
acagagacagaguacaaagaaa

SEQ ID NO: 261136 - RNA, 18 nt, Human
acagcugcagccucccaa

SEQ ID NO: 261137 - RNA, 19 nt, Human
accugauucauggcaccug

SEQ ID NO: 261138 - RNA, 22 nt, Human
accuggaacuaugccaccaaca

SEQ ID NO: 261139 - RNA, 21 nt, Human
acuaaaccuuuuuggacagag

SEQ ID NO: 261140 - RNA, 25 nt, Human
acuauauugcccaggcugaucuuga

SEQ ID NO: 261141 - RNA, 22 nt, Human
acuucagucuuuucuucaauau

SEQ ID NO: 261142 - RNA, 19 nt, Human
agaaagcaggcagcaugac

SEQ ID NO: 261143 - RNA, 20 nt, Human
agaaagcaggcagcaugaca

SEQ ID NO: 261144 - RNA, 26 nt, Human
agacaaauagauuagugguugucagg

SEQ ID NO: 261145 - RNA, 21 nt, Human
agacagaguacaaagaaaaca

SEQ ID NO: 261146 - RNA, 23 nt, Human
agacagaguccacaccaggcaac

SEQ ID NO: 261147 - RNA, 23 nt, Human
agcugcagccucccaaguagcug

SEQ ID NO: 261148 - RNA, 20 nt, Human
aggcaaccugcagcgcuucu

SEQ ID NO: 261149 - RNA, 24 nt, Human
agguauguggauuauaucucaauc

SEQ ID NO: 261150 - RNA, 23 nt, Human
agucucacaggcaugaaccacug

SEQ ID NO: 261151 - RNA, 21 nt, Human
aucaagcuguuuuaaaaaagc

SEQ ID NO: 261152 - RNA, 23 nt, Human
aucacacgcacuguacacacaca

SEQ ID NO: 261153 - RNA, 19 nt, Human
aucucaaucaagcuguuuu

SEQ ID NO: 261154 - RNA, 18 nt, Human
augggguuucacuauauu

SEQ ID NO: 261155 - RNA, 24 nt, Human
augggguuucacuauauugcccag

SEQ ID NO: 261156 - RNA, 20 nt, Human
caacaagucagaccuuucuc

SEQ ID NO: 261157 - RNA, 23 nt, Human
caacucaaacaacagagccccaa

SEQ ID NO: 261158 - RNA, 21 nt, Human
caagauacaccuacuggggca

SEQ ID NO: 261159 - RNA, 19 nt, Human
cacaaggaaaugggcaccu

SEQ ID NO: 261160 - RNA, 19 nt, Human
cacaucaucacaccuggcu

SEQ ID NO: 261161 - RNA, 23 nt, Human
caccaggcaaccugcagcgcuuc

SEQ ID NO: 261162 - RNA, 21 nt, Human
caccugaacacagaauggcac

SEQ ID NO: 261163 - RNA, 20 nt, Human
caccuuguuaguuauucacc

SEQ ID NO: 261164 - RNA, 27 nt, Human
cacuauauugcccaggcugaucuugaa

SEQ ID NO: 261165 - RNA, 20 nt, Human
cacucgcgccuugguggggu

SEQ ID NO: 261166 - RNA, 19 nt, Human
cacugcagucuuagacucu

SEQ ID NO: 261167 - RNA, 18 nt, Human
cagagcacccuguauuug

SEQ ID NO: 261168 - RNA, 21 nt, Human
cagagccccaaggugggcauu

SEQ ID NO: 261169 - RNA, 20 nt, Human
cagcaugacagcacuuugga

SEQ ID NO: 261170 - RNA, 23 nt, Human
cagccacagccacagcugcagcc

SEQ ID NO: 261171 - RNA, 24 nt, Human
cagccugcgagcagcugagcucug

SEQ ID NO: 261172 - RNA, 21 nt, Human
caggcucgaagcacagcacuu

SEQ ID NO: 261173 - RNA, 23 nt, Human
caguugcucuuacagaaccaaca

SEQ ID NO: 261174 - RNA, 24 nt, Human
caucaacaaucugaaacgaagaaa

SEQ ID NO: 261175 - RNA, 25 nt, Human
cauuacacaacaaaguauagcugua

SEQ ID NO: 261176 - RNA, 18 nt, Human
cauuuuacagaaagggaa

SEQ ID NO: 261177 - RNA, 19 nt, Human
cauuuuacagaaagggaac

SEQ ID NO: 261178 - RNA, 20 nt, Human
cauuuugaaugcuucauuag

SEQ ID NO: 261179 - RNA, 23 nt, Human
ccacagcugcagccucccaagua

SEQ ID NO: 261180 - RNA, 19 nt, Human
cccaaguagcugggacuau

SEQ ID NO: 261181 - RNA, 22 nt, Human
cccaaguagcugggacuauagg

SEQ ID NO: 261182 - RNA, 22 nt, Human
ccucaagcgauccgccagcuuu

SEQ ID NO: 261183 - RNA, 23 nt, Human
ccuccugccccagucucacaggc

SEQ ID NO: 261184 - RNA, 18 nt, Human
ccucuaaaauacuuugag

SEQ ID NO: 261185 - RNA, 18 nt, Human
ccuggaacccagagcgcc

SEQ ID NO: 261186 - RNA, 21 nt, Human
ccuggaacccagagcgccaaa

SEQ ID NO: 261187 - RNA, 18 nt, Human
ccuggccucaagugaucc

SEQ ID NO: 261188 - RNA, 21 nt, Human
ccuggccucaagugauccucc

SEQ ID NO: 261189 - RNA, 22 nt, Human
ccuggccucaagugauccuccu

SEQ ID NO: 261190 - RNA, 23 nt, Human
ccuggccucaagugauccuccug

SEQ ID NO: 261191 - RNA, 18 nt, Human
cgcggugggggagggcgg

SEQ ID NO: 261192 - RNA, 26 nt, Human
cucaagugauccuccugccccagucu

SEQ ID NO: 261193 - RNA, 23 nt, Human
cucacugcagucuuagacucugg

SEQ ID NO: 261194 - RNA, 20 nt, Human
cugccuccccugcugcugac

SEQ ID NO: 261195 - RNA, 19 nt, Human
cugcgcugcaaucugcgcc

SEQ ID NO: 261196 - RNA, 20 nt, Human
cugcugccaucaacuuucca

SEQ ID NO: 261197 - RNA, 21 nt, Human
cugcugcccaucuaucccagc

SEQ ID NO: 261198 - RNA, 23 nt, Human
cugcugcccaucuaucccagcuu

SEQ ID NO: 261199 - RNA, 18 nt, Human
cuguuuccaccuccacac

SEQ ID NO: 261200 - RNA, 20 nt, Human
cuuccaucucuggaguuggg

SEQ ID NO: 261201 - RNA, 24 nt, Human
cuuuaagagaugggguuucacuau

SEQ ID NO: 261202 - RNA, 18 nt, Human
gacaggauguacacaagg

SEQ ID NO: 261203 - RNA, 22 nt, Human
gagaugggguuucacuauauug

SEQ ID NO: 261204 - RNA, 20 nt, Human
gaggaaacagcccaguccug

SEQ ID NO: 261205 - RNA, 18 nt, Human
gaguauucuuacuuugau

SEQ ID NO: 261206 - RNA, 23 nt, Human
gcaaugcuuucuuuagaucacca

SEQ ID NO: 261207 - RNA, 24 nt, Human
gcaaugcuuucuuuagaucaccaa

SEQ ID NO: 261208 - RNA, 20 nt, Human
gccagguguuucaacuuucu

SEQ ID NO: 261209 - RNA, 19 nt, Human
gcgaggcuccggggcgggc

SEQ ID NO: 261210 - RNA, 23 nt, Human
gcgggcgggggcggggaggcggu

SEQ ID NO: 261211 - RNA, 18 nt, Human
gcuacacaauacauagaa

SEQ ID NO: 261212 - RNA, 22 nt, Human
gcucuguuuccaccuccacaca

SEQ ID NO: 261213 - RNA, 23 nt, Human
gcugaucuugaacuccuggccuc

SEQ ID NO: 261214 - RNA, 19 nt, Human
gcuuccaucucuggaguug

SEQ ID NO: 261215 - RNA, 29 nt, Human
ggaagaacagggcacaggucauacacaag

SEQ ID NO: 261216 - RNA, 24 nt, Human
ggacaggcaugcaagcugccuccc

SEQ ID NO: 261217 - RNA, 19 nt, Human
ggcaaaaaagaaaggcuga

SEQ ID NO: 261218 - RNA, 22 nt, Human
ggccucaagugauccuccugcc

SEQ ID NO: 261219 - RNA, 21 nt, Human
ggcgggggcggggaggcggug

SEQ ID NO: 261220 - RNA, 24 nt, Human
ggcugaucuugaacuccuggccuc

SEQ ID NO: 261221 - RNA, 20 nt, Human
gggcacaggucauacacaag

SEQ ID NO: 261222 - RNA, 18 nt, Human
gggcgaggcuccggggcg

SEQ ID NO: 261223 - RNA, 26 nt, Human
gggcgggcgggggcggggaggcggug

SEQ ID NO: 261224 - RNA, 21 nt, Human
gggcgggggcggggaggcggu

SEQ ID NO: 261225 - RNA, 22 nt, Human
gggcuaagaggaggugagaaga

SEQ ID NO: 261226 - RNA, 20 nt, Human
guuucuuuuuuggaguggug

SEQ ID NO: 261227 - RNA, 23 nt, Human
uaagaaaggcaaugcuuucuuua

SEQ ID NO: 261228 - RNA, 22 nt, Human
uacaaagaaaacaaaaagcuaa

SEQ ID NO: 261229 - RNA, 20 nt, Human
uacagaaagggaaccauaac

SEQ ID NO: 261230 - RNA, 23 nt, Human
uacagcaaaucaaccugugugua

SEQ ID NO: 261231 - RNA, 24 nt, Human
uacagcaaaucaaccuguguguau

SEQ ID NO: 261232 - RNA, 23 nt, Human
uacagcacucgcgccuugguggg

SEQ ID NO: 261233 - RNA, 18 nt, Human
uacagcuccagaaagcag

SEQ ID NO: 261234 - RNA, 18 nt, Human
uagaaggaccccugaagg

SEQ ID NO: 261235 - RNA, 20 nt, Human
uagaaguuagaucaggaaaa

SEQ ID NO: 261236 - RNA, 24 nt, Human
uagaauggagagacuacagagaca

SEQ ID NO: 261237 - RNA, 20 nt, Human
uagaucaccaaaaauaacau

SEQ ID NO: 261238 - RNA, 23 nt, Human
uauauugcccaggcugaucuuga

SEQ ID NO: 261239 - RNA, 24 nt, Human
uauauugcccaggcugaucuugaa

SEQ ID NO: 261240 - RNA, 19 nt, Human
ucaauaucgauucccucua

SEQ ID NO: 261241 - RNA, 20 nt, Human
ucaauuugcucacaaguggu

SEQ ID NO: 261242 - RNA, 31 nt, Human
ucacacgcacuguacacacacacauguagug

SEQ ID NO: 261243 - RNA, 23 nt, Human
ucacugcagucuuagacucuggg

SEQ ID NO: 261244 - RNA, 19 nt, Human
ucagaggaacugcuuaaug

SEQ ID NO: 261245 - RNA, 23 nt, Human
ucaggcgagcuacagcuuuucuu

SEQ ID NO: 261246 - RNA, 28 nt, Human
ucauccuuguuuucacuacagucagagg

SEQ ID NO: 261247 - RNA, 21 nt, Human
uccacacagugugccggggga

SEQ ID NO: 261248 - RNA, 24 nt, Human
ucccaaguagcugggacuauaggu

SEQ ID NO: 261249 - RNA, 18 nt, Human
ucugggaucuuucugccu

SEQ ID NO: 261250 - RNA, 21 nt, Human
ucuugaacuccuggccucaag

SEQ ID NO: 261251 - RNA, 22 nt, Human
ucuuuaagagaugggguuucac

SEQ ID NO: 261252 - RNA, 25 nt, Human
ugacacaaucaacaagucagaccuu

SEQ ID NO: 261253 - RNA, 23 nt, Human
ugacuuccuaacucacugagccc

SEQ ID NO: 261254 - RNA, 19 nt, Human
ugaggaaacagcccagucc

SEQ ID NO: 261255 - RNA, 22 nt, Human
ugaggaaacagcccaguccugc

SEQ ID NO: 261256 - RNA, 19 nt, Human
ugccaccaacacugagcug

SEQ ID NO: 261257 - RNA, 24 nt, Human
ugcccaggcugaucuugaacuccu

SEQ ID NO: 261258 - RNA, 24 nt, Human
ugccgggggacaggcaugcaagcu

SEQ ID NO: 261259 - RNA, 21 nt, Human
ugcucacaagugguagaguga

SEQ ID NO: 261260 - RNA, 23 nt, Human
uggacaugggaaucacacgcacu

SEQ ID NO: 261261 - RNA, 19 nt, Human
uggcagaacauacagaaaa

SEQ ID NO: 261262 - RNA, 22 nt, Human
uggcagucaaggguggaaggau

SEQ ID NO: 261263 - RNA, 23 nt, Human
uggcccaaugagagcucacugca

SEQ ID NO: 261264 - RNA, 18 nt, Human
uggccucaagugauccuc

SEQ ID NO: 261265 - RNA, 20 nt, Human
uggccucaagugauccuccu

SEQ ID NO: 261266 - RNA, 23 nt, Human
uggccucaagugauccuccugcc

SEQ ID NO: 261267 - RNA, 22 nt, Human
ugggacuauaggugcacaucau

SEQ ID NO: 261268 - RNA, 24 nt, Human
ugggacuauaggugcacaucauca

SEQ ID NO: 261269 - RNA, 20 nt, Human
ugggaucuuucugccuuuuu

SEQ ID NO: 261270 - RNA, 18 nt, Human
ugggaugacuuuugggag

SEQ ID NO: 261271 - RNA, 21 nt, Human
ugggcaacucaaacaacagag

SEQ ID NO: 261272 - RNA, 24 nt, Human
ugggguuucacuauauugcccagg

SEQ ID NO: 261273 - RNA, 18 nt, Human
uguacacacacacaugua

SEQ ID NO: 261274 - RNA, 19 nt, Human
ugucuuagauuucacagcc

SEQ ID NO: 261275 - RNA, 24 nt, Human
ugugucgcccaggcucgacugcag

SEQ ID NO: 261276 - RNA, 30 nt, Human
uuaaaaacagucuuuuuaaaaauuuucccu

SEQ ID NO: 261277 - RNA, 21 nt, Human
uuauucaaagggcuucucuua

SEQ ID NO: 261278 - RNA, 21 nt, Human
uucaacuuucuacagcuccag

SEQ ID NO: 261279 - RNA, 19 nt, Human
uucacagagagggaaccgu

SEQ ID NO: 261280 - RNA, 24 nt, Human
uuccauuucacacauuuuuggcag

SEQ ID NO: 261281 - RNA, 19 nt, Human
uucccacaaauggcagaac

SEQ ID NO: 261282 - RNA, 19 nt, Human
uuccuugccaucacagaug

SEQ ID NO: 261283 - RNA, 19 nt, Human
uugaagcucugguucuucu

SEQ ID NO: 261284 - RNA, 20 nt, Human
uugauauuuaugaggggugu

SEQ ID NO: 261285 - RNA, 24 nt, Human
uugcgcuguggguaaagacccacc

SEQ ID NO: 261286 - RNA, 30 nt, Human
uuuaaaaauuuucccagcugacccuuuucu

SEQ ID NO: 261287 - RNA, 18 nt, Human
uuucacagagagggaacc

SEQ ID NO: 261288 - RNA, 30 nt, Human
uuucccaacaauaacaucaacaaucugagg

SEQ ID NO: 261289 - RNA, 19 nt, Human
uuucccagcugacccuuuu

SEQ ID NO: 261290 - RNA, 23 nt, Human
uuuuuuuuuuuuuuuuuuaacag

SEQ ID NO: 261291 - RNA, 20 nt, Human
agggagggaggcaccguggg

SEQ ID NO: 261292 - RNA, 20 nt, Human
agggagggaggcaccguggg

SEQ ID NO: 261293 - RNA, 23 nt, Human
agggcuggggccagcaagggagu

SEQ ID NO: 261294 - RNA, 22 nt, Human
cccgugccugcuccuggccagg

SEQ ID NO: 261295 - RNA, 22 nt, Human
cgcgucacagcagacgggagug

SEQ ID NO: 261296 - RNA, 22 nt, Human
cgcgucacagcagacgggagug

SEQ ID NO: 261297 - RNA, 21 nt, Human
gcagacgggaguggccggcca

SEQ ID NO: 261298 - RNA, 24 nt, Human
gugccugcuccuggccaggcggga

SEQ ID NO: 261299 - RNA, 19 nt, Human
uccccagcagggcuggggc

SEQ ID NO: 261300 - RNA, 22 nt, Human
ucucuugggguggaacggggau

SEQ ID NO: 261301 - RNA, 24 nt, Human
ucuugggguggaacggggaucacc

SEQ ID NO: 261302 - RNA, 26 nt, Human
ugccugcuccuggccaggcggggauc

SEQ ID NO: 261303 - RNA, 21 nt, Human
aaaaggacacacauauucaag

SEQ ID NO: 261304 - RNA, 21 nt, Human
aaaaggacacacauauucaag

SEQ ID NO: 261305 - RNA, 21 nt, Human
aggccuggccugggagcccug

SEQ ID NO: 261306 - RNA, 21 nt, Human
aggccuggccugggagcccug

SEQ ID NO: 261307 - RNA, 20 nt, Human
caaugcauacauaaauuaua

SEQ ID NO: 261308 - RNA, 20 nt, Human
caaugcauacauaaauuaua

SEQ ID NO: 261309 - RNA, 19 nt, Human
cauauucaaguguuugcuc

SEQ ID NO: 261310 - RNA, 19 nt, Human
cauauucaaguguuugcuc

SEQ ID NO: 261311 - RNA, 23 nt, Human
gccugggagcccugugccuacua

SEQ ID NO: 261312 - RNA, 23 nt, Human
gccugggagcccugugccuacua

SEQ ID NO: 261313 - RNA, 19 nt, Human
ugccuacuagaagcacauu

SEQ ID NO: 261314 - RNA, 20 nt, Human
uguuuuguauucuuuauaau

SEQ ID NO: 261315 - RNA, 20 nt, Human
uguuuuguauucuuuauaau

SEQ ID NO: 261316 - RNA, 25 nt, Human
aaaaacccaaaaaguacacaaaaaa

SEQ ID NO: 261317 - RNA, 31 nt, Human
aaagaagaagagcacacaugagacagagaag

SEQ ID NO: 261318 - RNA, 22 nt, Human
aacacuccaaccguguaaaucu

SEQ ID NO: 261319 - RNA, 20 nt, Human
aacagagaagagaaaggagg

SEQ ID NO: 261320 - RNA, 18 nt, Human
aacccuggggagaagaca

SEQ ID NO: 261321 - RNA, 22 nt, Human
aaccuuuucccccagccucccu

SEQ ID NO: 261322 - RNA, 24 nt, Human
aagggaggaggggucccuagaggc

SEQ ID NO: 261323 - RNA, 22 nt, Human
aaguagcucugagaggggaaga

SEQ ID NO: 261324 - RNA, 18 nt, Human
aaucaaguggaaaguacc

SEQ ID NO: 261325 - RNA, 19 nt, Human
acaaaaaaccccugaauac

SEQ ID NO: 261326 - RNA, 20 nt, Human
acaauagaauggccaaugcc

SEQ ID NO: 261327 - RNA, 22 nt, Human
acagugguaggggagaggaggg

SEQ ID NO: 261328 - RNA, 21 nt, Human
acucuaaacgggaugggaggg

SEQ ID NO: 261329 - RNA, 19 nt, Human
agacagugguaggggagag

SEQ ID NO: 261330 - RNA, 24 nt, Human
agaccuaaaaccccuagcagggaa

SEQ ID NO: 261331 - RNA, 21 nt, Human
agagaccuaaaaccccuagca

SEQ ID NO: 261332 - RNA, 21 nt, Human
agagcaaggggugggggugug

SEQ ID NO: 261333 - RNA, 19 nt, Human
agaguccugauggggcugg

SEQ ID NO: 261334 - RNA, 22 nt, Human
agaugccaaggcugggauggcu

SEQ ID NO: 261335 - RNA, 20 nt, Human
agcaaggaaggcagaaauca

SEQ ID NO: 261336 - RNA, 22 nt, Human
agcacaguaugaguuaggugag

SEQ ID NO: 261337 - RNA, 18 nt, Human
aggaaaaagggaggaggg

SEQ ID NO: 261338 - RNA, 18 nt, Human
agggaagugggugggggc

SEQ ID NO: 261339 - RNA, 20 nt, Human
agggaagugggugggggcua

SEQ ID NO: 261340 - RNA, 18 nt, Human
agggaggaggggucccua

SEQ ID NO: 261341 - RNA, 20 nt, Human
agggaggaggggucccuaga

SEQ ID NO: 261342 - RNA, 23 nt, Human
agggaggaggggucccuagaggc

SEQ ID NO: 261343 - RNA, 19 nt, Human
aggggagaggaggggagcu

SEQ ID NO: 261344 - RNA, 23 nt, Human
agggggaauugagggaggcucua

SEQ ID NO: 261345 - RNA, 20 nt, Human
aguggggggugguggccagg

SEQ ID NO: 261346 - RNA, 21 nt, Human
agugguaggggagaggagggg

SEQ ID NO: 261347 - RNA, 24 nt, Human
aguguggggacaaggaaaaaggga

SEQ ID NO: 261348 - RNA, 18 nt, Human
auagaauggccaaugccc

SEQ ID NO: 261349 - RNA, 20 nt, Human
auagagcucacuuuagaccg

SEQ ID NO: 261350 - RNA, 22 nt, Human
auaggacaacaguaaguguaag

SEQ ID NO: 261351 - RNA, 19 nt, Human
augcuccuggguugagagc

SEQ ID NO: 261352 - RNA, 18 nt, Human
augcuuuccagguguggg

SEQ ID NO: 261353 - RNA, 25 nt, Human
auugccccacaauuccagguuucaa

SEQ ID NO: 261354 - RNA, 23 nt, Human
caaaggcagcggaguuggcgaag

SEQ ID NO: 261355 - RNA, 19 nt, Human
caaggucaggcacagagug

SEQ ID NO: 261356 - RNA, 22 nt, Human
caauuccagguuucaauuuagc

SEQ ID NO: 261357 - RNA, 21 nt, Human
cacaauagaauggccaaugcc

SEQ ID NO: 261358 - RNA, 21 nt, Human
cacugcauggugggacaggau

SEQ ID NO: 261359 - RNA, 20 nt, Human
cagaauccccagcagcucuc

SEQ ID NO: 261360 - RNA, 21 nt, Human
cagaggcagggcccagucacc

SEQ ID NO: 261361 - RNA, 24 nt, Human
cagaugacaucacuaauacugaaa

SEQ ID NO: 261362 - RNA, 21 nt, Human
cagcaaugcacacaagacucc

SEQ ID NO: 261363 - RNA, 18 nt, Human
caggagcuauggcccaag

SEQ ID NO: 261364 - RNA, 24 nt, Human
caggauggccccuugaggacugaa

SEQ ID NO: 261365 - RNA, 27 nt, Human
caggcuucucucaccauacucagcuuu

SEQ ID NO: 261366 - RNA, 19 nt, Human
ccaagggacagaacagcug

SEQ ID NO: 261367 - RNA, 20 nt, Human
ccagggggaauugagggagg

SEQ ID NO: 261368 - RNA, 23 nt, Human
ccauaggacaacaguaaguguaa

SEQ ID NO: 261369 - RNA, 20 nt, Human
ccauucauuugcccagggaa

SEQ ID NO: 261370 - RNA, 19 nt, Human
ccauuucccccauccaccc

SEQ ID NO: 261371 - RNA, 20 nt, Human
cccacaauuccagguuucaa

SEQ ID NO: 261372 - RNA, 24 nt, Human
cccccaaucguuacaaagccuaaa

SEQ ID NO: 261373 - RNA, 26 nt, Human
cccccagccucccuaaggguaaguua

SEQ ID NO: 261374 - RNA, 23 nt, Human
ccccuccaaaaacaauuuuuaaa

SEQ ID NO: 261375 - RNA, 22 nt, Human
ccccuugaggacugaacccugg

SEQ ID NO: 261376 - RNA, 19 nt, Human
cccuagaggcugggugccu

SEQ ID NO: 261377 - RNA, 25 nt, Human
ccgcauaacacuccaaccguguaaa

SEQ ID NO: 261378 - RNA, 21 nt, Human
ccuacuccacacuugacuccc

SEQ ID NO: 261379 - RNA, 22 nt, Human
ccuacuggcaucaagcucuaga

SEQ ID NO: 261380 - RNA, 21 nt, Human
ccuggguugagagcaaggggu

SEQ ID NO: 261381 - RNA, 22 nt, Human
ccuugaggacugaacccugggg

SEQ ID NO: 261382 - RNA, 25 nt, Human
cuaaccuuuucccccagccucccua

SEQ ID NO: 261383 - RNA, 22 nt, Human
cuagcuuccaaccuacuccaca

SEQ ID NO: 261384 - RNA, 18 nt, Human
cuccaagggacagaacag

SEQ ID NO: 261385 - RNA, 22 nt, Human
cuuccaaccuacuccacacuug

SEQ ID NO: 261386 - RNA, 22 nt, Human
cuucuacucagccuugccacaa

SEQ ID NO: 261387 - RNA, 18 nt, Human
cuuggaucagggcacagg

SEQ ID NO: 261388 - RNA, 18 nt, Human
gaauccccagcagcucuc

SEQ ID NO: 261389 - RNA, 24 nt, Human
gaccgcauaacacuccaaccguga

SEQ ID NO: 261390 - RNA, 20 nt, Human
gagagcaaggggugggggug

SEQ ID NO: 261391 - RNA, 24 nt, Human
gagagcaaggggugggggugugga

SEQ ID NO: 261392 - RNA, 21 nt, Human
gaggcucuaagcuaggggcac

SEQ ID NO: 261393 - RNA, 22 nt, Human
ggaggcucuaagcuaggggcac

SEQ ID NO: 261394 - RNA, 20 nt, Human
ggcauuugcaaaaucaagug

SEQ ID NO: 261395 - RNA, 19 nt, Human
ggccagaauccccagcagc

SEQ ID NO: 261396 - RNA, 20 nt, Human
ggggagaggaggggagcuag

SEQ ID NO: 261397 - RNA, 22 nt, Human
ggggagaggaggggagcuagcu

SEQ ID NO: 261398 - RNA, 18 nt, Human
ggggggugguggccaggg

SEQ ID NO: 261399 - RNA, 18 nt, Human
gggugggggcuaaggggc

SEQ ID NO: 261400 - RNA, 20 nt, Human
gggugggggcuaaggggcua

SEQ ID NO: 261401 - RNA, 19 nt, Human
ggguggggguguggaaggg

SEQ ID NO: 261402 - RNA, 20 nt, Human
ggguggggguguggaaggga

SEQ ID NO: 261403 - RNA, 19 nt, Human
gguggggguguggaaggga

SEQ ID NO: 261404 - RNA, 18 nt, Human
gguuuacagcuccaaggg

SEQ ID NO: 261405 - RNA, 21 nt, Human
gugaaggucuugaaggcacca

SEQ ID NO: 261406 - RNA, 21 nt, Human
gugaguuagguguaggagugu

SEQ ID NO: 261407 - RNA, 21 nt, Human
guggcggcaaaggcagcggag

SEQ ID NO: 261408 - RNA, 19 nt, Human
guggggacaaggaaaaagg

SEQ ID NO: 261409 - RNA, 21 nt, Human
guggggacaaggaaaaaggga

SEQ ID NO: 261410 - RNA, 22 nt, Human
uaaaguaaugaggccaaaauca

SEQ ID NO: 261411 - RNA, 22 nt, Human
uacacaaaaaaccccugaauac

SEQ ID NO: 261412 - RNA, 20 nt, Human
uacuccacacuugacuccca

SEQ ID NO: 261413 - RNA, 22 nt, Human
uacugacuuuaaggcagcuauu

SEQ ID NO: 261414 - RNA, 24 nt, Human
uagaaacaaaaaugacugaacauc

SEQ ID NO: 261415 - RNA, 20 nt, Human
uagaauggccaaugcccuuc

SEQ ID NO: 261416 - RNA, 23 nt, Human
uagaccgcauaacacuccaaccg

SEQ ID NO: 261417 - RNA, 22 nt, Human
uaguauguuuggugaaggucuu

SEQ ID NO: 261418 - RNA, 25 nt, Human
uaugaccuauagugacagaugacau

SEQ ID NO: 261419 - RNA, 22 nt, Human
uauguuuggugaaggucuugaa

SEQ ID NO: 261420 - RNA, 19 nt, Human
ucaguagaguacauaauac

SEQ ID NO: 261421 - RNA, 24 nt, Human
ucauuugcccagggaagugggugg

SEQ ID NO: 261422 - RNA, 21 nt, Human
uccaaccuacuccacacuuga

SEQ ID NO: 261423 - RNA, 23 nt, Human
uccaagggacagaacagcuggug

SEQ ID NO: 261424 - RNA, 24 nt, Human
uccaagggacagaacagcuggugu

SEQ ID NO: 261425 - RNA, 18 nt, Human
uccagguuucaauuuagc

SEQ ID NO: 261426 - RNA, 22 nt, Human
ucccauggcuacauuaaaugcu

SEQ ID NO: 261427 - RNA, 19 nt, Human
ucccuaaggguaaguuacu

SEQ ID NO: 261428 - RNA, 31 nt, Human
ucccuagaccgcauaacacuccaaccguguu

SEQ ID NO: 261429 - RNA, 21 nt, Human
uccuggguugagagcaagggg

SEQ ID NO: 261430 - RNA, 20 nt, Human
ucucucaccauacucagcuu

SEQ ID NO: 261431 - RNA, 23 nt, Human
ugaaauagaacauggauugagca

SEQ ID NO: 261432 - RNA, 22 nt, Human
ugaagcagggaggggcagaucc

SEQ ID NO: 261433 - RNA, 27 nt, Human
ugaauacaaaaucuaaccuuuuccccc

SEQ ID NO: 261434 - RNA, 18 nt, Human
ugacagaugacaucacua

SEQ ID NO: 261435 - RNA, 21 nt, Human
ugacaucacuaauacugaaag

SEQ ID NO: 261436 - RNA, 23 nt, Human
ugaccuauagugacagaugacau

SEQ ID NO: 261437 - RNA, 19 nt, Human
ugagagcaagggguggggg

SEQ ID NO: 261438 - RNA, 21 nt, Human
ugagagcaaggggugggggug

SEQ ID NO: 261439 - RNA, 21 nt, Human
ugagcuaauucacagcaaugc

SEQ ID NO: 261440 - RNA, 23 nt, Human
ugcauggugggacaggauggccc

SEQ ID NO: 261441 - RNA, 19 nt, Human
ugccaaggcugggauggcu

SEQ ID NO: 261442 - RNA, 19 nt, Human
ugccaaggcugggauggcu

SEQ ID NO: 261443 - RNA, 21 nt, Human
ugccaaggcugggauggcugu

SEQ ID NO: 261444 - RNA, 25 nt, Human
ugccaaggcugggauggcuguggag

SEQ ID NO: 261445 - RNA, 18 nt, Human
ugcuuuccaggugugggg

SEQ ID NO: 261446 - RNA, 22 nt, Human
uggaaaguaccucuaggcugga

SEQ ID NO: 261447 - RNA, 21 nt, Human
uggaauaauaaguaaggggua

SEQ ID NO: 261448 - RNA, 18 nt, Human
uggcugagcuuuugggua

SEQ ID NO: 261449 - RNA, 18 nt, Human
ugggacaggauggccccu

SEQ ID NO: 261450 - RNA, 18 nt, Human
uggggcuggcugagcuuu

SEQ ID NO: 261451 - RNA, 20 nt, Human
uggggggugguggccagggg

SEQ ID NO: 261452 - RNA, 23 nt, Human
ugggugggggcuaaggggcuagg

SEQ ID NO: 261453 - RNA, 24 nt, Human
ugggugggggcuaaggggcuaggu

SEQ ID NO: 261454 - RNA, 18 nt, Human
uggguugagagcaagggg

SEQ ID NO: 261455 - RNA, 25 nt, Human
uggguugagagcaaggggugggggu

SEQ ID NO: 261456 - RNA, 22 nt, Human
ugguaaaguaaugaggccaaaa

SEQ ID NO: 261457 - RNA, 18 nt, Human
ugguaggggagaggaggg

SEQ ID NO: 261458 - RNA, 25 nt, Human
uggugaaggucuugaaggcaccauu

SEQ ID NO: 261459 - RNA, 19 nt, Human
uguggaagggacuaggcca

SEQ ID NO: 261460 - RNA, 18 nt, Human
uguggagcaggagcuaug

SEQ ID NO: 261461 - RNA, 20 nt, Human
uuaaaugcuuggcaugacuc

SEQ ID NO: 261462 - RNA, 24 nt, Human
uuuggaggggagugaugagaaggg

SEQ ID NO: 261463 - RNA, 21 nt, Human
aaaaagaaaaaaaaaaagccc

SEQ ID NO: 261464 - RNA, 22 nt, Human
aaaaaugcauuuucaguaggcu

SEQ ID NO: 261465 - RNA, 19 nt, Human
aaaaaugcugagauacaca

SEQ ID NO: 261466 - RNA, 23 nt, Human
aaaagaaaaaaaaaaagcccuug

SEQ ID NO: 261467 - RNA, 19 nt, Human
aaagaacucucauauuauc

SEQ ID NO: 261468 - RNA, 21 nt, Human
aaagacgcaccccccaccccc

SEQ ID NO: 261469 - RNA, 20 nt, Human
aaaugauucuuucagaaacc

SEQ ID NO: 261470 - RNA, 22 nt, Human
aaaugcaauucaacauuccaaa

SEQ ID NO: 261471 - RNA, 21 nt, Human
aaccacauauugguaauugag

SEQ ID NO: 261472 - RNA, 23 nt, Human
aagaagagcaaaaaauuguaauc

SEQ ID NO: 261473 - RNA, 23 nt, Human
aagacgcaccccccacccccccc

SEQ ID NO: 261474 - RNA, 21 nt, Human
aagcccuugacucagucuuua

SEQ ID NO: 261475 - RNA, 22 nt, Human
aagcucgacuacacuucaaaac

SEQ ID NO: 261476 - RNA, 21 nt, Human
aauacaaaaaggauuuuuaga

SEQ ID NO: 261477 - RNA, 23 nt, Human
aauacuaauaguuaauacuaaca

SEQ ID NO: 261478 - RNA, 24 nt, Human
acacagcaguucuccuagaaccca

SEQ ID NO: 261479 - RNA, 20 nt, Human
acagaggcauaccaucuaga

SEQ ID NO: 261480 - RNA, 22 nt, Human
acgcaccccccacccccccccc

SEQ ID NO: 261481 - RNA, 24 nt, Human
acgcaccccccacccccccccccg

SEQ ID NO: 261482 - RNA, 28 nt, Human
acuaaagacgcaccccccaccccccccc

SEQ ID NO: 261483 - RNA, 22 nt, Human
acuaaauagauuacaaagacaa

SEQ ID NO: 261484 - RNA, 23 nt, Human
acuaaauagauuacaaagacaag

SEQ ID NO: 261485 - RNA, 19 nt, Human
acugguaugcauuucuauu

SEQ ID NO: 261486 - RNA, 20 nt, Human
agaaaaagaaaaaaaaaaag

SEQ ID NO: 261487 - RNA, 22 nt, Human
agaaagcagcacugauuuaucc

SEQ ID NO: 261488 - RNA, 23 nt, Human
agaaagcagcacugauuuaucca

SEQ ID NO: 261489 - RNA, 19 nt, Human
agaaauacuaccaaaccac

SEQ ID NO: 261490 - RNA, 18 nt, Human
agaacaaggcucugucuc

SEQ ID NO: 261491 - RNA, 22 nt, Human
agaagagcaaaaaauuguaauc

SEQ ID NO: 261492 - RNA, 24 nt, Human
agaauucauucucuuaaccacaaa

SEQ ID NO: 261493 - RNA, 23 nt, Human
agacagaaaguguacauucagaa

SEQ ID NO: 261494 - RNA, 23 nt, Human
agacaucccaaacaggcugauaa

SEQ ID NO: 261495 - RNA, 20 nt, Human
agacgcaccccccacccccc

SEQ ID NO: 261496 - RNA, 24 nt, Human
agacgcaccccccacccccccccc

SEQ ID NO: 261497 - RNA, 21 nt, Human
agacuccaaacaguugaaacc

SEQ ID NO: 261498 - RNA, 20 nt, Human
agcaauauaguauuaacaac

SEQ ID NO: 261499 - RNA, 21 nt, Human
agcaccagggaccaggagaga

SEQ ID NO: 261500 - RNA, 19 nt, Human
agcaugggagcagaggccc

SEQ ID NO: 261501 - RNA, 24 nt, Human
aggaaagaagaguugugaaaaugu

SEQ ID NO: 261502 - RNA, 27 nt, Human
aggcccaaacagcaccagggaccagga

SEQ ID NO: 261503 - RNA, 18 nt, Human
aguacuagcaauaguacu

SEQ ID NO: 261504 - RNA, 19 nt, Human
auaggcacugaucucagac

SEQ ID NO: 261505 - RNA, 19 nt, Human
auaggcacugauuucagac

SEQ ID NO: 261506 - RNA, 22 nt, Human
augacaguucuccuagaaccca

SEQ ID NO: 261507 - RNA, 21 nt, Human
auuguguucuagacucuaggu

SEQ ID NO: 261508 - RNA, 22 nt, Human
caaaugauucuuucagaaacca

SEQ ID NO: 261509 - RNA, 23 nt, Human
caaaugcaauucaacauuccaaa

SEQ ID NO: 261510 - RNA, 23 nt, Human
caagaaaaagaaaaaaaaaaagc

SEQ ID NO: 261511 - RNA, 20 nt, Human
caauacaguauuaacaaccc

SEQ ID NO: 261512 - RNA, 26 nt, Human
caauagaacaaggcucugucucuuaa

SEQ ID NO: 261513 - RNA, 22 nt, Human
cacaaaaggaucuuggaaguca

SEQ ID NO: 261514 - RNA, 22 nt, Human
cacaacaacccugugagguagg

SEQ ID NO: 261515 - RNA, 21 nt, Human
cacccccccccccgcccuuug

SEQ ID NO: 261516 - RNA, 20 nt, Human
cagagccucacacaaguguu

SEQ ID NO: 261517 - RNA, 19 nt, Human
cagaggcacugaucucaga

SEQ ID NO: 261518 - RNA, 21 nt, Human
cagcaauauaguauuaacaac

SEQ ID NO: 261519 - RNA, 21 nt, Human
cagcaguucuccuagaaccca

SEQ ID NO: 261520 - RNA, 19 nt, Human
cauaacaaacuaaacuucc

SEQ ID NO: 261521 - RNA, 22 nt, Human
caucccuaucucugguugagaa

SEQ ID NO: 261522 - RNA, 19 nt, Human
caugaagaaaggaaaugac

SEQ ID NO: 261523 - RNA, 24 nt, Human
cauucagaauucauucucuuaacc

SEQ ID NO: 261524 - RNA, 25 nt, Human
cauucagaauucauucucuuaacca

SEQ ID NO: 261525 - RNA, 19 nt, Human
cauugcgcaugagcaaagc

SEQ ID NO: 261526 - RNA, 26 nt, Human
ccacuucucucucuuuacaauugaaa

SEQ ID NO: 261527 - RNA, 21 nt, Human
cccauaggcacugauuucaga

SEQ ID NO: 261528 - RNA, 24 nt, Human
cccaugcauaccacuuacgcauag

SEQ ID NO: 261529 - RNA, 20 nt, Human
cccccacccccccccccgcc

SEQ ID NO: 261530 - RNA, 22 nt, Human
ccccccacccccccccccgccc

SEQ ID NO: 261531 - RNA, 18 nt, Human
cccccccccgcccuuugg

SEQ ID NO: 261532 - RNA, 25 nt, Human
ccuguaaucuaaaauauuauuuggg

SEQ ID NO: 261533 - RNA, 23 nt, Human
cuagaaucuuaauaguaugaauc

SEQ ID NO: 261534 - RNA, 20 nt, Human
cuaguacuagcaauaguacu

SEQ ID NO: 261535 - RNA, 19 nt, Human
cucauaguauuucagcauc

SEQ ID NO: 261536 - RNA, 22 nt, Human
cucauauguccugcuuucaauu

SEQ ID NO: 261537 - RNA, 19 nt, Human
cucaugacaguucuccuag

SEQ ID NO: 261538 - RNA, 19 nt, Human
cugguacaugaagaaagga

SEQ ID NO: 261539 - RNA, 23 nt, Human
cugguaugcauuucuauuacccu

SEQ ID NO: 261540 - RNA, 20 nt, Human
cuguuuuuuuuaauggaaca

SEQ ID NO: 261541 - RNA, 28 nt, Human
cuucagaauucuguuauuucucauuuga

SEQ ID NO: 261542 - RNA, 21 nt, Human
gaaccaaagucauuuggagga

SEQ ID NO: 261543 - RNA, 21 nt, Human
gaagagcaaaaaauuguaauc

SEQ ID NO: 261544 - RNA, 21 nt, Human
gaagucaguugugcagaugac

SEQ ID NO: 261545 - RNA, 19 nt, Human
gaccaggagagaaggccau

SEQ ID NO: 261546 - RNA, 20 nt, Human
gacgcaccccccaccccccc

SEQ ID NO: 261547 - RNA, 24 nt, Human
gcaccccccacccccccccccgcc

SEQ ID NO: 261548 - RNA, 19 nt, Human
gcagagaacugaggacugg

SEQ ID NO: 261549 - RNA, 21 nt, Human
gcugugagucuaccacuuggu

SEQ ID NO: 261550 - RNA, 20 nt, Human
gcuuuaauaucaacugcugg

SEQ ID NO: 261551 - RNA, 20 nt, Human
gggugagaacacagcaguuc

SEQ ID NO: 261552 - RNA, 25 nt, Human
guaaaaaucaaaugaaaaacaaaug

SEQ ID NO: 261553 - RNA, 21 nt, Human
gugaagggccuuuuaaugaga

SEQ ID NO: 261554 - RNA, 22 nt, Human
uaaaaccagagacaauuaucuc

SEQ ID NO: 261555 - RNA, 22 nt, Human
uaaaagacuccaaacaguugaa

SEQ ID NO: 261556 - RNA, 22 nt, Human
uaaaauaguaagcaugaaggug

SEQ ID NO: 261557 - RNA, 25 nt, Human
uaaagaaagcagcacugauuuaucc

SEQ ID NO: 261558 - RNA, 23 nt, Human
uaaagacgcaccccccacccccc

SEQ ID NO: 261559 - RNA, 19 nt, Human
uaacaaacuaaacuuccug

SEQ ID NO: 261560 - RNA, 20 nt, Human
uaacaaacuaaacuuccugu

SEQ ID NO: 261561 - RNA, 23 nt, Human
uaauagcaauaguacuaguacua

SEQ ID NO: 261562 - RNA, 20 nt, Human
uaauaguaauaguacuauua

SEQ ID NO: 261563 - RNA, 18 nt, Human
uacaacacgggaaccaaa

SEQ ID NO: 261564 - RNA, 20 nt, Human
uacacaaguuauugcacauu

SEQ ID NO: 261565 - RNA, 19 nt, Human
uacacagaggcauaccauc

SEQ ID NO: 261566 - RNA, 20 nt, Human
uacuauugacaacccauagg

SEQ ID NO: 261567 - RNA, 19 nt, Human
uacucaugacaguucuccu

SEQ ID NO: 261568 - RNA, 21 nt, Human
uagaacaaggcucugucucuu

SEQ ID NO: 261569 - RNA, 18 nt, Human
uagagagaaaccaaaaau

SEQ ID NO: 261570 - RNA, 22 nt, Human
uaggggagagaggugauggugg

SEQ ID NO: 261571 - RNA, 19 nt, Human
uagggugagaacacagcag

SEQ ID NO: 261572 - RNA, 22 nt, Human
uaguccagccugugcaauagaa

SEQ ID NO: 261573 - RNA, 23 nt, Human
uaguuaauacuaacaguuaacac

SEQ ID NO: 261574 - RNA, 24 nt, Human
uauccagcccuguuccucccccaa

SEQ ID NO: 261575 - RNA, 25 nt, Human
uaucuaauacacaaguuauugcaca

SEQ ID NO: 261576 - RNA, 20 nt, Human
uauuagaaaauuccauuuaa

SEQ ID NO: 261577 - RNA, 24 nt, Human
ucaauggguggcagagaacugagg

SEQ ID NO: 261578 - RNA, 22 nt, Human
ucagacaucccaaacaggcuga

SEQ ID NO: 261579 - RNA, 26 nt, Human
uccuguaaucuaaaauauuauuuggg

SEQ ID NO: 261580 - RNA, 19 nt, Human
ucuaaaauauuauuugggc

SEQ ID NO: 261581 - RNA, 21 nt, Human
ucugcauaccuauccagcccu

SEQ ID NO: 261582 - RNA, 24 nt, Human
ugaaaaacaaauggauuuuuccua

SEQ ID NO: 261583 - RNA, 19 nt, Human
ugaaacaucacucuuccaa

SEQ ID NO: 261584 - RNA, 20 nt, Human
ugaaaugaccagguaauaca

SEQ ID NO: 261585 - RNA, 22 nt, Human
ugaaaugaccagguaauacaug

SEQ ID NO: 261586 - RNA, 20 nt, Human
ugacaagaaaaauaagcucc

SEQ ID NO: 261587 - RNA, 21 nt, Human
ugacaguucuccuagaaccca

SEQ ID NO: 261588 - RNA, 19 nt, Human
ugacuggacugaacuuagu

SEQ ID NO: 261589 - RNA, 22 nt, Human
ugagaagguaaaauaagaauca

SEQ ID NO: 261590 - RNA, 22 nt, Human
ugagacagaaaguguacauuca

SEQ ID NO: 261591 - RNA, 18 nt, Human
ugccagagaaaaucagca

SEQ ID NO: 261592 - RNA, 22 nt, Human
ugcccaagcucgacuacacuuc

SEQ ID NO: 261593 - RNA, 21 nt, Human
ugcguguaguccagccugugc

SEQ ID NO: 261594 - RNA, 20 nt, Human
ugcugccagagaaaaucagc

SEQ ID NO: 261595 - RNA, 24 nt, Human
uggaaaauaagaagaugagaaggu

SEQ ID NO: 261596 - RNA, 21 nt, Human
uggaaagagaccaguauucau

SEQ ID NO: 261597 - RNA, 22 nt, Human
uggaacaaaugcaauucaacau

SEQ ID NO: 261598 - RNA, 21 nt, Human
uggcagagaacugaggacugg

SEQ ID NO: 261599 - RNA, 18 nt, Human
ugggagcagaggcccaaa

SEQ ID NO: 261600 - RNA, 22 nt, Human
ugggauacuuaaaauuuacacc

SEQ ID NO: 261601 - RNA, 20 nt, Human
uggguggcagagaacugagg

SEQ ID NO: 261602 - RNA, 25 nt, Human
ugguagcagaggaugucccgcccaa

SEQ ID NO: 261603 - RNA, 22 nt, Human
uguaaaaccagagacaauuauc

SEQ ID NO: 261604 - RNA, 23 nt, Human
ugucucuuaaaacaagaaaaaga

SEQ ID NO: 261605 - RNA, 23 nt, Human
uuaaaacaagaaaaagaaaaaaa

SEQ ID NO: 261606 - RNA, 22 nt, Human
uuaacagugucauaguacuagu

SEQ ID NO: 261607 - RNA, 20 nt, Human
uuacuggguuucaggguagc

SEQ ID NO: 261608 - RNA, 23 nt, Human
uuacuugauccucacaacaaccc

SEQ ID NO: 261609 - RNA, 21 nt, Human
uuagcucuguaaaaccagaga

SEQ ID NO: 261610 - RNA, 21 nt, Human
uucaaaauguucaauucagca

SEQ ID NO: 261611 - RNA, 20 nt, Human
uucagaauaugaaaaaaugc

SEQ ID NO: 261612 - RNA, 19 nt, Human
uucauaaaagacuccaaac

SEQ ID NO: 261613 - RNA, 18 nt, Human
uuggaaagagaccaguau

SEQ ID NO: 261614 - RNA, 22 nt, Human
uuggagcagcccuccaguccgu

SEQ ID NO: 261615 - RNA, 21 nt, Human
uuuggaggagucacaaaagga

SEQ ID NO: 261616 - RNA, 20 nt, Human
uuuuuguuugaaaugaccag

SEQ ID NO: 261617 - RNA, 22 nt, Human
uccccaaggcauauggcaucaa

SEQ ID NO: 261618 - RNA, 21 nt, Human
aggcagccuugggguuagcuc

SEQ ID NO: 261619 - RNA, 21 nt, Human
auaaauacauguugcaggacu

SEQ ID NO: 261620 - RNA, 22 nt, Human
cacugugcccagaagacagggu

SEQ ID NO: 261621 - RNA, 21 nt, Human
cagaagacaggguccacagca

SEQ ID NO: 261622 - RNA, 26 nt, Human
cagaagacaggguccacagcaggcac

SEQ ID NO: 261623 - RNA, 21 nt, Human
cagguccagcccaagaacuaa

SEQ ID NO: 261624 - RNA, 22 nt, Human
cauuuguuccuuuauugguuca

SEQ ID NO: 261625 - RNA, 22 nt, Human
ccucugaaaguuaaagggcagg

SEQ ID NO: 261626 - RNA, 25 nt, Human
ccucugaaaguuaaagggcaggaac

SEQ ID NO: 261627 - RNA, 20 nt, Human
guguggucacugcugagucc

SEQ ID NO: 261628 - RNA, 21 nt, Human
uagcucaaggcagcuaagcag

SEQ ID NO: 261629 - RNA, 19 nt, Human
ucaagggucaguguuggug

SEQ ID NO: 261630 - RNA, 24 nt, Human
uccacugugcccagaagacagggu

SEQ ID NO: 261631 - RNA, 21 nt, Human
ugcucuggccuggcauggccc

SEQ ID NO: 261632 - RNA, 22 nt, Human
uggccuggcauggcccagaggc

SEQ ID NO: 261633 - RNA, 26 nt, Human
uggccuggcauggcccagaggcagcc

SEQ ID NO: 261634 - RNA, 18 nt, Human
aacacaucuguguuuucc

SEQ ID NO: 261635 - RNA, 23 nt, Human
acuucggagagugaacucaggga

SEQ ID NO: 261636 - RNA, 22 nt, Human
agcagccggggccaugcagagc

SEQ ID NO: 261637 - RNA, 18 nt, Human
agccgggcccccccuucu

SEQ ID NO: 261638 - RNA, 21 nt, Human
aggacagggaaaagcuaugca

SEQ ID NO: 261639 - RNA, 22 nt, Human
caaagaggugaaacuggagcag

SEQ ID NO: 261640 - RNA, 24 nt, Human
cagagccgggcccccccuucugcc

SEQ ID NO: 261641 - RNA, 18 nt, Human
cagcagccggggccaugc

SEQ ID NO: 261642 - RNA, 18 nt, Human
caugcagagccgggcccc

SEQ ID NO: 261643 - RNA, 22 nt, Human
cccacagguggggaccugggac

SEQ ID NO: 261644 - RNA, 20 nt, Human
cccgccccuccccagcaggc

SEQ ID NO: 261645 - RNA, 22 nt, Human
cccgccccuccccagcaggcca

SEQ ID NO: 261646 - RNA, 21 nt, Human
ccgccccuccccagcaggcca

SEQ ID NO: 261647 - RNA, 22 nt, Human
ccgcgcgcgccucccgccccuc

SEQ ID NO: 261648 - RNA, 22 nt, Human
ccggcgugcugggccuggccuc

SEQ ID NO: 261649 - RNA, 22 nt, Human
ccucaguuuccccaucuuuaac

SEQ ID NO: 261650 - RNA, 18 nt, Human
ccucccgccccuccccag

SEQ ID NO: 261651 - RNA, 20 nt, Human
ccuccggucgcugccgccgc

SEQ ID NO: 261652 - RNA, 18 nt, Human
cgggcaugggcuccgggc

SEQ ID NO: 261653 - RNA, 25 nt, Human
cucauuuccaaaaucgucagacacc

SEQ ID NO: 261654 - RNA, 23 nt, Human
cuccccagcaggccagcuccggc

SEQ ID NO: 261655 - RNA, 18 nt, Human
cuuaaauuuuccaaugga

SEQ ID NO: 261656 - RNA, 21 nt, Human
cuucugccgcagcacuggcca

SEQ ID NO: 261657 - RNA, 23 nt, Human
gaagaagcuaggauucaucuucc

SEQ ID NO: 261658 - RNA, 20 nt, Human
gauuucucugcgcuuuucuu

SEQ ID NO: 261659 - RNA, 19 nt, Human
gcagagccgggcccccccu

SEQ ID NO: 261660 - RNA, 19 nt, Human
ggcgugcugggccuggccu

SEQ ID NO: 261661 - RNA, 27 nt, Human
gggcuccgggcgggcugggagcgacaa

SEQ ID NO: 261662 - RNA, 21 nt, Human
gugaggguuaaagggaaggcg

SEQ ID NO: 261663 - RNA, 22 nt, Human
uaaauuuuccaauggaagaagc

SEQ ID NO: 261664 - RNA, 19 nt, Human
uacagcaccagggcuggag

SEQ ID NO: 261665 - RNA, 24 nt, Human
uagucuuuuuuuucucuuuucuuu

SEQ ID NO: 261666 - RNA, 23 nt, Human
ucagacaccgauuucucugcgcu

SEQ ID NO: 261667 - RNA, 24 nt, Human
ucagcagccggggccaugcagagc

SEQ ID NO: 261668 - RNA, 18 nt, Human
ucccgcgcgcgccucccg

SEQ ID NO: 261669 - RNA, 19 nt, Human
ucccgcgcgcgccucccgc

SEQ ID NO: 261670 - RNA, 22 nt, Human
ucccgcgcgcgccucccgcccc

SEQ ID NO: 261671 - RNA, 23 nt, Human
ucccgcgcgcgccucccgccccu

SEQ ID NO: 261672 - RNA, 20 nt, Human
ucccugccccccagagcaaa

SEQ ID NO: 261673 - RNA, 21 nt, Human
ucucugcccucaguuucccca

SEQ ID NO: 261674 - RNA, 22 nt, Human
ucugcgcuuuucuugccuggug

SEQ ID NO: 261675 - RNA, 21 nt, Human
ucuguguuuucccugcccccc

SEQ ID NO: 261676 - RNA, 18 nt, Human
ucuuuuuuuuuuuuuuuu

SEQ ID NO: 261677 - RNA, 18 nt, Human
ugccgcagcacuggccag

SEQ ID NO: 261678 - RNA, 19 nt, Human
ugccgccgcgcaggcagag

SEQ ID NO: 261679 - RNA, 23 nt, Human
uggcccacagguggggaccuggg

SEQ ID NO: 261680 - RNA, 19 nt, Human
uggccucuagcucuguuca

SEQ ID NO: 261681 - RNA, 18 nt, Human
uggugucaggacagggaa

SEQ ID NO: 261682 - RNA, 22 nt, Human
uuccuggcuggcuagucuuuuu

SEQ ID NO: 261683 - RNA, 26 nt, Human
uuuuuuuuuuuuugagauuguucuca

SEQ ID NO: 261684 - RNA, 18 nt, Human
uuuuuuuuuuuuuuuuug

SEQ ID NO: 261685 - RNA, 25 nt, Human
aaaaaaggaaaaacuuuaaaaauau

SEQ ID NO: 261686 - RNA, 23 nt, Human
aaauuguacaagcacccuuucaa

SEQ ID NO: 261687 - RNA, 23 nt, Human
aacauguaaaaaaguauauaaaa

SEQ ID NO: 261688 - RNA, 24 nt, Human
aauaaaauauaucaaauuguacaa

SEQ ID NO: 261689 - RNA, 29 nt, Human
aauaaucucuccauaucuaauauuuucuu

SEQ ID NO: 261690 - RNA, 18 nt, Human
aauguaccuaguauuucu

SEQ ID NO: 261691 - RNA, 23 nt, Human
aauuacuaaacccccacccaaau

SEQ ID NO: 261692 - RNA, 22 nt, Human
acuaaacccccacccaaaucac

SEQ ID NO: 261693 - RNA, 21 nt, Human
agaaaauuacuaaacccccac

SEQ ID NO: 261694 - RNA, 21 nt, Human
agagggagaggaaacccuuug

SEQ ID NO: 261695 - RNA, 19 nt, Human
agcacccuuucaaagggau

SEQ ID NO: 261696 - RNA, 21 nt, Human
aggaaacccuuugaaacaagc

SEQ ID NO: 261697 - RNA, 22 nt, Human
auaaagguauaccggagggagg

SEQ ID NO: 261698 - RNA, 20 nt, Human
auuuuauuauauauauauau

SEQ ID NO: 261699 - RNA, 23 nt, Human
caacagguuuuaacauuuuacuc

SEQ ID NO: 261700 - RNA, 22 nt, Human
cagccuugagaagaauuaggaa

SEQ ID NO: 261701 - RNA, 18 nt, Human
cauaaaaaccaucagagc

SEQ ID NO: 261702 - RNA, 22 nt, Human
cauaaaaaccaucagagccaau

SEQ ID NO: 261703 - RNA, 24 nt, Human
cauugugucuguuucuuuguuuuc

SEQ ID NO: 261704 - RNA, 20 nt, Human
ccaaaucaccuuugcaaucu

SEQ ID NO: 261705 - RNA, 18 nt, Human
ccaagucaaaacauggcu

SEQ ID NO: 261706 - RNA, 18 nt, Human
ccccccaacauguaaaaa

SEQ ID NO: 261707 - RNA, 21 nt, Human
cccuuucaaagggauaaaggu

SEQ ID NO: 261708 - RNA, 23 nt, Human
cuaaacccccacccaaaucaccu

SEQ ID NO: 261709 - RNA, 22 nt, Human
cuaauuuucuaccucaccucca

SEQ ID NO: 261710 - RNA, 28 nt, Human
cucccgacgcgcgacuccgcuggcaacc

SEQ ID NO: 261711 - RNA, 26 nt, Human
cuuucuggaucuacuaauuguucaag

SEQ ID NO: 261712 - RNA, 24 nt, Human
gaaaauacaacaaauggacuuaca

SEQ ID NO: 261713 - RNA, 18 nt, Human
gaaauaugaugugucccc

SEQ ID NO: 261714 - RNA, 24 nt, Human
gauaacucuucaauaaaauauauc

SEQ ID NO: 261715 - RNA, 20 nt, Human
ggcgguggggggcgggggag

SEQ ID NO: 261716 - RNA, 18 nt, Human
gggacagauggacaggaa

SEQ ID NO: 261717 - RNA, 21 nt, Human
gggggcgggggagagauagga

SEQ ID NO: 261718 - RNA, 20 nt, Human
gguggggggcgggggagaga

SEQ ID NO: 261719 - RNA, 21 nt, Human
gugcauugugucuguuucuuu

SEQ ID NO: 261720 - RNA, 21 nt, Human
guggagagggagaggaaaccc

SEQ ID NO: 261721 - RNA, 19 nt, Human
guggggcgguggggggcgg

SEQ ID NO: 261722 - RNA, 21 nt, Human
uaauaaguuuaggacauacaa

SEQ ID NO: 261723 - RNA, 21 nt, Human
uacaagcacccuuucaaaggg

SEQ ID NO: 261724 - RNA, 21 nt, Human
uacacacacagagaaagcaua

SEQ ID NO: 261725 - RNA, 20 nt, Human
uacacagugucuuuugggaa

SEQ ID NO: 261726 - RNA, 22 nt, Human
uaccagggaacuuaaugggcug

SEQ ID NO: 261727 - RNA, 23 nt, Human
uaccucaccuccaggcagucuca

SEQ ID NO: 261728 - RNA, 22 nt, Human
uacuaaacccccacccaaauca

SEQ ID NO: 261729 - RNA, 24 nt, Human
uauaucaaauuguacaagcacccu

SEQ ID NO: 261730 - RNA, 20 nt, Human
ugaaacaagcauccaucaug

SEQ ID NO: 261731 - RNA, 21 nt, Human
ugagauauagaaaaaaagcac

SEQ ID NO: 261732 - RNA, 21 nt, Human
uggcugguacugccuucgugg

SEQ ID NO: 261733 - RNA, 23 nt, Human
uggggcgguggggggcgggggag

SEQ ID NO: 261734 - RNA, 20 nt, Human
ugugguggggcggugggggg

SEQ ID NO: 261735 - RNA, 21 nt, Human
ugugguggggcgguggggggc

SEQ ID NO: 261736 - RNA, 22 nt, Human
uuaagcagaaaauuacuaaacc

SEQ ID NO: 261737 - RNA, 24 nt, Human
uuauauuuuauuauauauauauau

SEQ ID NO: 261738 - RNA, 22 nt, Human
uucaaagggauaaagguauacc

SEQ ID NO: 261739 - RNA, 25 nt, Human
uucucugcccuacguagcucccgac

SEQ ID NO: 261740 - RNA, 24 nt, Human
uugaauaaucucuccauaucuaau

SEQ ID NO: 261741 - RNA, 24 nt, Human
uuugcaaauaauuugucucccucu

SEQ ID NO: 261742 - RNA, 23 nt, Human
aaacaaaaaauccuagauuuuac

SEQ ID NO: 261743 - RNA, 20 nt, Human
aagcgagaagggaagaggca

SEQ ID NO: 261744 - RNA, 23 nt, Human
aagcgagaagggaagaggcagug

SEQ ID NO: 261745 - RNA, 25 nt, Human
agaaaaaagggaauguagcaaaggg

SEQ ID NO: 261746 - RNA, 19 nt, Human
aggcagugggugcacgugg

SEQ ID NO: 261747 - RNA, 23 nt, Human
aggcagugggugcacguggaagg

SEQ ID NO: 261748 - RNA, 21 nt, Human
cagaaaaaagggaauguagca

SEQ ID NO: 261749 - RNA, 18 nt, Human
ccaagcgagaagggaaga

SEQ ID NO: 261750 - RNA, 18 nt, Human
cgagaagggaagaggcag

SEQ ID NO: 261751 - RNA, 18 nt, Human
ggucacucuauuuguacu

SEQ ID NO: 261752 - RNA, 24 nt, Human
guagcaaaaaacaaaaaauccuag

SEQ ID NO: 261753 - RNA, 20 nt, Human
uagcaaaaaacaaaaaaucc

SEQ ID NO: 261754 - RNA, 22 nt, Human
uagcaaaaaacaaaaaauccua

SEQ ID NO: 261755 - RNA, 22 nt, Human
uagcaaaaaacaaaaaauccua

SEQ ID NO: 261756 - RNA, 23 nt, Human
uagcaaaaaacaaaaaauccuag

SEQ ID NO: 261757 - RNA, 24 nt, Human
uagcaaaaaacaaaaaauccuaga

SEQ ID NO: 261758 - RNA, 25 nt, Human
agaaaaaaaggaauguagcaaauga

SEQ ID NO: 261759 - RNA, 21 nt, Human
cagaaaaaaaggaauguagca

SEQ ID NO: 261760 - RNA, 23 nt, Human
uguagaaaaaaaaaaccucggau

SEQ ID NO: 261761 - RNA, 18 nt, Human
uuguagaaaaaaaaaacc

SEQ ID NO: 261762 - RNA, 23 nt, Human
uuuuuuuuuuuuuuuuuuucaag

SEQ ID NO: 261763 - RNA, 21 nt, Human
caucugagagcacagcugucc

SEQ ID NO: 261764 - RNA, 24 nt, Human
ggagaagcaggaguucccgaucaa

SEQ ID NO: 261765 - RNA, 22 nt, Human
ggguuguacaaaaaaaaaaaaa

SEQ ID NO: 261766 - RNA, 18 nt, Human
uacaaaaaaaaaaaaaaa

SEQ ID NO: 261767 - RNA, 19 nt, Human
uagcaaacgggucaggguc

SEQ ID NO: 261768 - RNA, 31 nt, Human
ucaggguuguacaaaaaaaaaaaaaaaaaaa

SEQ ID NO: 261769 - RNA, 25 nt, Human
ucauagaaaaaaagauguagcaaac

SEQ ID NO: 261770 - RNA, 26 nt, Human
uguacaaaaaaaaaaaaaaaaaaaau

SEQ ID NO: 261771 - RNA, 26 nt, Human
uuguacaaaaaaaaaaaaaaaaaaaa

SEQ ID NO: 261772 - RNA, 28 nt, Human
uuguacaaaaaaaaaaaaaaaaaaaauc

SEQ ID NO: 261773 - RNA, 21 nt, Human
agccaccuggcacuaucucca

SEQ ID NO: 261774 - RNA, 22 nt, Human
cgaggagagcagcagcuggagg

SEQ ID NO: 261775 - RNA, 25 nt, Human
cuggaggcggugaacgggcuucuuc

SEQ ID NO: 261776 - RNA, 23 nt, Human
gggaaagggaacaccaggaacac

SEQ ID NO: 261777 - RNA, 21 nt, Human
uccaaggucagcagggaaagg

SEQ ID NO: 261778 - RNA, 27 nt, Human
aaaaaaaaaaaaaaagacauggcagga

SEQ ID NO: 261779 - RNA, 19 nt, Human
aaaaaaaaagacauggcag

SEQ ID NO: 261780 - RNA, 20 nt, Human
aaaaaaaagacauggcagug

SEQ ID NO: 261781 - RNA, 23 nt, Human
aaaaaaaagacauggcagugcaa

SEQ ID NO: 261782 - RNA, 24 nt, Human
aaaaaacccuccccccaaaacugu

SEQ ID NO: 261783 - RNA, 24 nt, Human
aaaaacccuccccccaaaacuguc

SEQ ID NO: 261784 - RNA, 18 nt, Human
aaacagcuuuuuauuugu

SEQ ID NO: 261785 - RNA, 23 nt, Human
aacaagcucggcuccugccaggc

SEQ ID NO: 261786 - RNA, 19 nt, Human
aaccccuccagggacacac

SEQ ID NO: 261787 - RNA, 23 nt, Human
aacccuccccccaaaacugucca

SEQ ID NO: 261788 - RNA, 22 nt, Human
acccccgcccccgcggaguccc

SEQ ID NO: 261789 - RNA, 21 nt, Human
accucucagcccaccucccuu

SEQ ID NO: 261790 - RNA, 24 nt, Human
acucacuugcucucuuccuuaauu

SEQ ID NO: 261791 - RNA, 20 nt, Human
agaaaacagcuuuuuauuug

SEQ ID NO: 261792 - RNA, 22 nt, Human
agaagcugaagaaaacagcuuu

SEQ ID NO: 261793 - RNA, 22 nt, Human
agacauggcagugcacgccccc

SEQ ID NO: 261794 - RNA, 22 nt, Human
agcguggccugggguugaugcc

SEQ ID NO: 261795 - RNA, 22 nt, Human
aggaaagagcgagcguggccug

SEQ ID NO: 261796 - RNA, 22 nt, Human
agggagguuugggugcccuggg

SEQ ID NO: 261797 - RNA, 22 nt, Human
agggguccgggaggcucgcggg

SEQ ID NO: 261798 - RNA, 24 nt, Human
agggguccgggaggcucgcggggg

SEQ ID NO: 261799 - RNA, 18 nt, Human
aggugguaacaccagagg

SEQ ID NO: 261800 - RNA, 18 nt, Human
aucuguuuacucuucccc

SEQ ID NO: 261801 - RNA, 20 nt, Human
auuaaaaaacccucccccca

SEQ ID NO: 261802 - RNA, 27 nt, Human
caagucucgaggugguaacaccagagg

SEQ ID NO: 261803 - RNA, 23 nt, Human
cacccucuaccucucagcccacc

SEQ ID NO: 261804 - RNA, 20 nt, Human
caccggacagaaagagaaac

SEQ ID NO: 261805 - RNA, 20 nt, Human
cagagccaggcuccagcuac

SEQ ID NO: 261806 - RNA, 23 nt, Human
cagcuacccccgcccccgcggag

SEQ ID NO: 261807 - RNA, 18 nt, Human
cauggcagugcacgcccc

SEQ ID NO: 261808 - RNA, 27 nt, Human
ccaauuaggaaaaaaaaaaaaaaaaaa

SEQ ID NO: 261809 - RNA, 21 nt, Human
cccccaaaacuguccaagaca

SEQ ID NO: 261810 - RNA, 20 nt, Human
ccccccaaaacaggcuaggu

SEQ ID NO: 261811 - RNA, 23 nt, Human
ccccccaaaacaggcuagguucc

SEQ ID NO: 261812 - RNA, 23 nt, Human
cccuccccauccccuuucacaaa

SEQ ID NO: 261813 - RNA, 20 nt, Human
ccgccgccgccuccggccgc

SEQ ID NO: 261814 - RNA, 18 nt, Human
ccgccgccuccggccgca

SEQ ID NO: 261815 - RNA, 20 nt, Human
ccguucccgccgccgccucc

SEQ ID NO: 261816 - RNA, 21 nt, Human
ccguucccgccgccgccuccg

SEQ ID NO: 261817 - RNA, 18 nt, Human
cgaggcaaagccccgaac

SEQ ID NO: 261818 - RNA, 22 nt, Human
cgcagccggcaccuccgcugcc

SEQ ID NO: 261819 - RNA, 22 nt, Human
cgcccaaccccuccagggacac

SEQ ID NO: 261820 - RNA, 18 nt, Human
cgcgguucaucccggccc

SEQ ID NO: 261821 - RNA, 22 nt, Human
cggaacaagcucggcuccugcc

SEQ ID NO: 261822 - RNA, 21 nt, Human
cggacaccggacagaaagaga

SEQ ID NO: 261823 - RNA, 19 nt, Human
cggccgcagggaaggcuug

SEQ ID NO: 261824 - RNA, 26 nt, Human
cggcucgaggcaaagccccgaacggg

SEQ ID NO: 261825 - RNA, 23 nt, Human
cucacuugcucucuuccuuaauu

SEQ ID NO: 261826 - RNA, 20 nt, Human
cugagaacuggcguacaaaa

SEQ ID NO: 261827 - RNA, 19 nt, Human
cugccucagccgucgcggu

SEQ ID NO: 261828 - RNA, 22 nt, Human
gaaagagcgagcguggccuggg

SEQ ID NO: 261829 - RNA, 19 nt, Human
gaagaaaacagcuuuuuau

SEQ ID NO: 261830 - RNA, 20 nt, Human
gacagaaagagaaaccccca

SEQ ID NO: 261831 - RNA, 22 nt, Human
gacagaaagagaaacccccaau

SEQ ID NO: 261832 - RNA, 19 nt, Human
gagggggaggggagggaag

SEQ ID NO: 261833 - RNA, 18 nt, Human
gcaaagccccgaacggug

SEQ ID NO: 261834 - RNA, 21 nt, Human
gcagccggcaccuccgcugcc

SEQ ID NO: 261835 - RNA, 24 nt, Human
gccgcagcuaucgccucacucccg

SEQ ID NO: 261836 - RNA, 18 nt, Human
gccguucccgccgccgcc

SEQ ID NO: 261837 - RNA, 19 nt, Human
ggaggggagggaaggaaag

SEQ ID NO: 261838 - RNA, 22 nt, Human
ggaggggagggaaggaaagagc

SEQ ID NO: 261839 - RNA, 19 nt, Human
ggccguucccgccgccgcc

SEQ ID NO: 261840 - RNA, 21 nt, Human
gggguugaugccagcuuaggg

SEQ ID NO: 261841 - RNA, 19 nt, Human
guccggacaccggacagaa

SEQ ID NO: 261842 - RNA, 21 nt, Human
guggguccuaccccccaaaac

SEQ ID NO: 261843 - RNA, 18 nt, Human
guuuacucuuccccuccc

SEQ ID NO: 261844 - RNA, 23 nt, Human
guuuacucuuccccuccccaucc

SEQ ID NO: 261845 - RNA, 19 nt, Human
uaaaaaacccuccccccaa

SEQ ID NO: 261846 - RNA, 24 nt, Human
uaaaaaacccuccccccaaaacug

SEQ ID NO: 261847 - RNA, 26 nt, Human
uacaaaaggcagagggggaggggagg

SEQ ID NO: 261848 - RNA, 22 nt, Human
uacccccgcccccgcggagucc

SEQ ID NO: 261849 - RNA, 24 nt, Human
uacccccgcccccgcggaguccca

SEQ ID NO: 261850 - RNA, 24 nt, Human
uagguucccacaugggccaaguuc

SEQ ID NO: 261851 - RNA, 18 nt, Human
ucagcccaccucccuucc

SEQ ID NO: 261852 - RNA, 24 nt, Human
ucccggcccgcgcugucgccgccg

SEQ ID NO: 261853 - RNA, 20 nt, Human
uccgggaggcucgcgggggc

SEQ ID NO: 261854 - RNA, 21 nt, Human
ucgaggugguaacaccagagg

SEQ ID NO: 261855 - RNA, 19 nt, Human
ucgcgguucaucccggccc

SEQ ID NO: 261856 - RNA, 23 nt, Human
ucucgaggugguaacaccagagg

SEQ ID NO: 261857 - RNA, 21 nt, Human
ucuguuuacucuuccccuccc

SEQ ID NO: 261858 - RNA, 23 nt, Human
ucuguuuacucuuccccucccca

SEQ ID NO: 261859 - RNA, 24 nt, Human
uuaaaaaauuaaaaaacccucccc

SEQ ID NO: 261860 - RNA, 19 nt, Human
uuaauucacuccucacucc

SEQ ID NO: 261861 - RNA, 19 nt, Human
uuaauucacuccucacucc

SEQ ID NO: 261862 - RNA, 22 nt, Human
uuaggaaaaaaaaaaaaaaaaa

SEQ ID NO: 261863 - RNA, 23 nt, Human
uuccugcagucuguccuccaucg

SEQ ID NO: 261864 - RNA, 21 nt, Human
aaaaauuaucccaguaucccu

SEQ ID NO: 261865 - RNA, 19 nt, Human
aagggcaugaaagcugcau

SEQ ID NO: 261866 - RNA, 19 nt, Human
aaguagagauuacccucca

SEQ ID NO: 261867 - RNA, 18 nt, Human
acccuccacccuuuauug

SEQ ID NO: 261868 - RNA, 22 nt, Human
agaaaaaugugaagacacagaa

SEQ ID NO: 261869 - RNA, 18 nt, Human
agagucccauuucuuccu

SEQ ID NO: 261870 - RNA, 18 nt, Human
aggacauugaaauaugca

SEQ ID NO: 261871 - RNA, 19 nt, Human
aggagucucuaauacacac

SEQ ID NO: 261872 - RNA, 22 nt, Human
aggcaagggcaugaaagcugca

SEQ ID NO: 261873 - RNA, 25 nt, Human
agggggagaagagaauggugggguu

SEQ ID NO: 261874 - RNA, 21 nt, Human
aucccaguaucccucccccaa

SEQ ID NO: 261875 - RNA, 19 nt, Human
auggugggguuuuuuuuuu

SEQ ID NO: 261876 - RNA, 22 nt, Human
cccuccagaaauacuguaccaa

SEQ ID NO: 261877 - RNA, 18 nt, Human
cucuuugauaggcaaggg

SEQ ID NO: 261878 - RNA, 22 nt, Human
cugugccaaccucacugcgcgg

SEQ ID NO: 261879 - RNA, 18 nt, Human
gaagacacagaaagauuc

SEQ ID NO: 261880 - RNA, 18 nt, Human
gagaagagaauggugggg

SEQ ID NO: 261881 - RNA, 22 nt, Human
gagcaaccgugucuuuuuagga

SEQ ID NO: 261882 - RNA, 18 nt, Human
gggaaaggaaucugcagu

SEQ ID NO: 261883 - RNA, 18 nt, Human
ggggagaagagaauggug

SEQ ID NO: 261884 - RNA, 22 nt, Human
ggggagaagagaauggugggga

SEQ ID NO: 261885 - RNA, 21 nt, Human
guagaguucccagcaccaaag

SEQ ID NO: 261886 - RNA, 19 nt, Human
gucuugucuuucuuacaac

SEQ ID NO: 261887 - RNA, 26 nt, Human
gugggguuuuuuuuuucccccuuaaa

SEQ ID NO: 261888 - RNA, 21 nt, Human
uaagacauaauuuaccuccaa

SEQ ID NO: 261889 - RNA, 19 nt, Human
uaauagggggagaagagaa

SEQ ID NO: 261890 - RNA, 27 nt, Human
uacacacaaugucuugucuuucuuaca

SEQ ID NO: 261891 - RNA, 20 nt, Human
uacaccuagcuuuucucaga

SEQ ID NO: 261892 - RNA, 20 nt, Human
uagaaaaaugugaagacaca

SEQ ID NO: 261893 - RNA, 23 nt, Human
uagaaaaaugugaagacacagaa

SEQ ID NO: 261894 - RNA, 19 nt, Human
uaggcaagggcaugaaagc

SEQ ID NO: 261895 - RNA, 22 nt, Human
uaguacuauaaaaugcuaccau

SEQ ID NO: 261896 - RNA, 20 nt, Human
uaucccaguaucccuccccc

SEQ ID NO: 261897 - RNA, 25 nt, Human
ugaagacacagaaagauuggagacc

SEQ ID NO: 261898 - RNA, 20 nt, Human
uguaugcaucucugauaugg

SEQ ID NO: 261899 - RNA, 23 nt, Human
ugucuugucuuucuuacaacaua

SEQ ID NO: 261900 - RNA, 21 nt, Human
uuaaaauaucagauaccauaa

SEQ ID NO: 261901 - RNA, 25 nt, Human
uuaccaaauugcccuccagaaauac

SEQ ID NO: 261902 - RNA, 19 nt, Human
uugcccuccagaaauacug

SEQ ID NO: 261903 - RNA, 19 nt, Human
uuuagcagaauaaagaugu

SEQ ID NO: 261904 - RNA, 19 nt, Human
uuuuuuuuaaaaagcaagc

SEQ ID NO: 261905 - RNA, 24 nt, Human
uuuuuuuuuuuuaaaaagcaagcu

SEQ ID NO: 261906 - RNA, 23 nt, Human
aaaaaaaauucuguuuauuguaa

SEQ ID NO: 261907 - RNA, 24 nt, Human
aaacauauaaaaauaacuuuaaaa

SEQ ID NO: 261908 - RNA, 24 nt, Human
aaauauaguaacacuuuacaaaau

SEQ ID NO: 261909 - RNA, 21 nt, Human
acacuuuacaaaauauguauc

SEQ ID NO: 261910 - RNA, 23 nt, Human
cccccaacuuuaggucucggcuu

SEQ ID NO: 261911 - RNA, 25 nt, Human
ugaaauucuuuagaaauauaacauc

SEQ ID NO: 261912 - RNA, 19 nt, Human
uuaaagagaaugauuaugu

SEQ ID NO: 261913 - RNA, 21 nt, Human
aacccacucccuccccccagg

SEQ ID NO: 261914 - RNA, 26 nt, Human
aacccagaggugaucggguggagccc

SEQ ID NO: 261915 - RNA, 19 nt, Human
acagaacaaaggagcauau

SEQ ID NO: 261916 - RNA, 26 nt, Human
acagaguacguccgccugcggccccc

SEQ ID NO: 261917 - RNA, 23 nt, Human
acccacucccuccccccaggccc

SEQ ID NO: 261918 - RNA, 18 nt, Human
acccugggccacucaagc

SEQ ID NO: 261919 - RNA, 23 nt, Human
acgugagcccggggugagccgag

SEQ ID NO: 261920 - RNA, 22 nt, Human
acuuuuguagcugacuuuuuuu

SEQ ID NO: 261921 - RNA, 20 nt, Human
agagcgccgccucccugccg

SEQ ID NO: 261922 - RNA, 25 nt, Human
agagguagcugggagguaagaaggu

SEQ ID NO: 261923 - RNA, 19 nt, Human
agaguuguuauccauguag

SEQ ID NO: 261924 - RNA, 19 nt, Human
agaguuguuauccauguag

SEQ ID NO: 261925 - RNA, 21 nt, Human
agauacccucuuggugaaccc

SEQ ID NO: 261926 - RNA, 20 nt, Human
agcugggagguaagaaggug

SEQ ID NO: 261927 - RNA, 19 nt, Human
aggagcugcucucuucucu

SEQ ID NO: 261928 - RNA, 22 nt, Human
aggcaaaagcuuaagcaacagc

SEQ ID NO: 261929 - RNA, 19 nt, Human
agguaagaaggugacuugg

SEQ ID NO: 261930 - RNA, 25 nt, Human
auaaaacaaaauaaaauaaaaccuu

SEQ ID NO: 261931 - RNA, 19 nt, Human
augacccuugcuaaacuuc

SEQ ID NO: 261932 - RNA, 19 nt, Human
augcugcuaggagcugcuc

SEQ ID NO: 261933 - RNA, 23 nt, Human
caaaagagcgucccccuggcuca

SEQ ID NO: 261934 - RNA, 23 nt, Human
caccgcccuccgccccgacggcc

SEQ ID NO: 261935 - RNA, 23 nt, Human
cacucccuccccccaggcccaag

SEQ ID NO: 261936 - RNA, 23 nt, Human
cacucgaaccgaaguuaugaggc

SEQ ID NO: 261937 - RNA, 22 nt, Human
cagaacaaaggagcauaucuuc

SEQ ID NO: 261938 - RNA, 19 nt, Human
caggcccaagggugggugc

SEQ ID NO: 261939 - RNA, 25 nt, Human
caucccgggccgaggucacucgaac

SEQ ID NO: 261940 - RNA, 20 nt, Human
ccaaauacugaacagaacaa

SEQ ID NO: 261941 - RNA, 20 nt, Human
ccagagcgccgccucccugc

SEQ ID NO: 261942 - RNA, 21 nt, Human
ccauguagcgcuccuccgggu

SEQ ID NO: 261943 - RNA, 19 nt, Human
ccccagagcgccgccuccc

SEQ ID NO: 261944 - RNA, 23 nt, Human
ccccagagcgccgccucccugcc

SEQ ID NO: 261945 - RNA, 18 nt, Human
cccccacauccucuccug

SEQ ID NO: 261946 - RNA, 19 nt, Human
cccccaggcccaagggugg

SEQ ID NO: 261947 - RNA, 22 nt, Human
cccccaggcccaagggugggug

SEQ ID NO: 261948 - RNA, 21 nt, Human
ccccccaggcccaaggguggg

SEQ ID NO: 261949 - RNA, 24 nt, Human
cccccuggcucaagaggccggcgu

SEQ ID NO: 261950 - RNA, 18 nt, Human
cccggaccgcggccggcc

SEQ ID NO: 261951 - RNA, 18 nt, Human
cccuccccccaggcccaa

SEQ ID NO: 261952 - RNA, 19 nt, Human
cccuccccccaggcccaag

SEQ ID NO: 261953 - RNA, 23 nt, Human
ccgacggccacgccugccccaaa

SEQ ID NO: 261954 - RNA, 19 nt, Human
ccgacggccacgccugccu

SEQ ID NO: 261955 - RNA, 19 nt, Human
ccggaagugguccagggag

SEQ ID NO: 261956 - RNA, 19 nt, Human
ccuuggugaucagggcauc

SEQ ID NO: 261957 - RNA, 25 nt, Human
cgccugcggccccagagcgccgccu

SEQ ID NO: 261958 - RNA, 23 nt, Human
cggccggccaccgcccuccgccc

SEQ ID NO: 261959 - RNA, 20 nt, Human
cgggggcugugacuuggaaa

SEQ ID NO: 261960 - RNA, 18 nt, Human
cggggugagccgaggggc

SEQ ID NO: 261961 - RNA, 18 nt, Human
cuaagcaugaauauaaug

SEQ ID NO: 261962 - RNA, 22 nt, Human
cucuaaaucaguaccaaguccu

SEQ ID NO: 261963 - RNA, 18 nt, Human
cugccgcccccgccgccc

SEQ ID NO: 261964 - RNA, 23 nt, Human
cugccgcccccgccgcccggccu

SEQ ID NO: 261965 - RNA, 22 nt, Human
gaaggugcugacuuuuguggga

SEQ ID NO: 261966 - RNA, 20 nt, Human
gaccgcggccggccaccgcc

SEQ ID NO: 261967 - RNA, 19 nt, Human
gagcagcacuucagaagaa

SEQ ID NO: 261968 - RNA, 18 nt, Human
gagcccccacauccucuc

SEQ ID NO: 261969 - RNA, 27 nt, Human
gagucaauuucaaguuacggauccuga

SEQ ID NO: 261970 - RNA, 19 nt, Human
gccaccgcccuccgccccg

SEQ ID NO: 261971 - RNA, 19 nt, Human
gggugggugcacugcagua

SEQ ID NO: 261972 - RNA, 21 nt, Human
guccagggagaguuguacgag

SEQ ID NO: 261973 - RNA, 24 nt, Human
uaaaaccuuaacuguuuugggacu

SEQ ID NO: 261974 - RNA, 22 nt, Human
uaaaugaugcuguaucugccac

SEQ ID NO: 261975 - RNA, 22 nt, Human
uaagugcuuuuguugacuugcu

SEQ ID NO: 261976 - RNA, 18 nt, Human
uaccuggccugaagaguc

SEQ ID NO: 261977 - RNA, 18 nt, Human
uauauuacauucuacaua

SEQ ID NO: 261978 - RNA, 18 nt, Human
uccaauucuagcccugcu

SEQ ID NO: 261979 - RNA, 20 nt, Human
uccaggucucccacccuggg

SEQ ID NO: 261980 - RNA, 24 nt, Human
ucccagguccagccgaugaugucc

SEQ ID NO: 261981 - RNA, 21 nt, Human
ucccugccgcccccgccgccc

SEQ ID NO: 261982 - RNA, 21 nt, Human
ucuagcccugcuuuucuccac

SEQ ID NO: 261983 - RNA, 20 nt, Human
ugaacagaacaaaggagcau

SEQ ID NO: 261984 - RNA, 18 nt, Human
ugaauauaauguuucuug

SEQ ID NO: 261985 - RNA, 18 nt, Human
ugaauauaauguuucuug

SEQ ID NO: 261986 - RNA, 18 nt, Human
ugagcaguuuuucaaccc

SEQ ID NO: 261987 - RNA, 18 nt, Human
ugagccgaggggcauccc

SEQ ID NO: 261988 - RNA, 18 nt, Human
ugcauagauggcauauuc

SEQ ID NO: 261989 - RNA, 22 nt, Human
ugcuuucugccuacguaaccuc

SEQ ID NO: 261990 - RNA, 19 nt, Human
ugggagaaggaaaggcagg

SEQ ID NO: 261991 - RNA, 21 nt, Human
ugggagaaggaaaggcaggug

SEQ ID NO: 261992 - RNA, 23 nt, Human
ugggagguaagaaggugacuugg

SEQ ID NO: 261993 - RNA, 21 nt, Human
ugggauucaucagaucccagg

SEQ ID NO: 261994 - RNA, 23 nt, Human
ugucgucuuaaagggcugucccc

SEQ ID NO: 261995 - RNA, 21 nt, Human
uuaagcaacagcuccuguacu

SEQ ID NO: 261996 - RNA, 22 nt, Human
uuagcgggcgggcaaaaugggc

SEQ ID NO: 261997 - RNA, 23 nt, Human
uucacuugcaguauucuucauga

SEQ ID NO: 261998 - RNA, 20 nt, Human
uugcugcagggcaaauaagc

SEQ ID NO: 261999 - RNA, 21 nt, Human
aaauuaaucacuucugcaaaa

SEQ ID NO: 262000 - RNA, 24 nt, Human
acaguuccugagaauuaaaaacau

SEQ ID NO: 262001 - RNA, 27 nt, Human
acucuuauaaaaggaagaaauagagac

SEQ ID NO: 262002 - RNA, 24 nt, Human
agaaauagagacuuuacuaaagga

SEQ ID NO: 262003 - RNA, 18 nt, Human
agcaauuccagaagggua

SEQ ID NO: 262004 - RNA, 22 nt, Human
caaagccaccuuuuaacuuccu

SEQ ID NO: 262005 - RNA, 19 nt, Human
caaucuuuuuuuacaggcc

SEQ ID NO: 262006 - RNA, 24 nt, Human
cacucugaccuccucuuuuggcuc

SEQ ID NO: 262007 - RNA, 19 nt, Human
cacuguaguucgcuuuuac

SEQ ID NO: 262008 - RNA, 19 nt, Human
cauuccuuggcucaaggug

SEQ ID NO: 262009 - RNA, 19 nt, Human
ccuccagaaaggcuggaga

SEQ ID NO: 262010 - RNA, 23 nt, Human
cuccugaacugcacccauccacu

SEQ ID NO: 262011 - RNA, 18 nt, Human
cuuuuaaagaucccuaca

SEQ ID NO: 262012 - RNA, 19 nt, Human
gagaaucuguuuccuugcc

SEQ ID NO: 262013 - RNA, 23 nt, Human
gcucaaggugucuuccuccuuca

SEQ ID NO: 262014 - RNA, 20 nt, Human
uaggcccuccaaaguaauuc

SEQ ID NO: 262015 - RNA, 23 nt, Human
uauacaggaucacucugaccucc

SEQ ID NO: 262016 - RNA, 19 nt, Human
ucaaggugucuuccuccuu

SEQ ID NO: 262017 - RNA, 24 nt, Human
ucccuacaauuauauuaggcccuc

SEQ ID NO: 262018 - RNA, 22 nt, Human
ugacucagugguuuaaaacaag

SEQ ID NO: 262019 - RNA, 21 nt, Human
ugucuuccuccuucaaagcca

SEQ ID NO: 262020 - RNA, 20 nt, Human
uguggcauaacauauucaca

SEQ ID NO: 262021 - RNA, 24 nt, Human
uucacaguuccugagaauuaaaaa

SEQ ID NO: 262022 - RNA, 21 nt, Human
aaaacuccugcccgauccaca

SEQ ID NO: 262023 - RNA, 21 nt, Human
aaaagaaggcagaccaccaaa

SEQ ID NO: 262024 - RNA, 18 nt, Human
aaaugacaacaccaucuc

SEQ ID NO: 262025 - RNA, 18 nt, Human
aaccaggaaggcaaggac

SEQ ID NO: 262026 - RNA, 19 nt, Human
aagaaggcagaccaccaaa

SEQ ID NO: 262027 - RNA, 22 nt, Human
aagcccuggcaaccaaccgaga

SEQ ID NO: 262028 - RNA, 22 nt, Human
aagcugccuagggccucugcag

SEQ ID NO: 262029 - RNA, 23 nt, Human
aagcugccuauuugugcugaagc

SEQ ID NO: 262030 - RNA, 21 nt, Human
aauaaagaaaauacgucugaa

SEQ ID NO: 262031 - RNA, 19 nt, Human
acaaaacagcgauguuccc

SEQ ID NO: 262032 - RNA, 21 nt, Human
accaaacagcacuggccauaa

SEQ ID NO: 262033 - RNA, 18 nt, Human
agacagcagucaacaagc

SEQ ID NO: 262034 - RNA, 22 nt, Human
agcaagggucuggccuuccaag

SEQ ID NO: 262035 - RNA, 18 nt, Human
agccagaucaaccccaca

SEQ ID NO: 262036 - RNA, 25 nt, Human
aggaagaaaauaccauuaaaaagaa

SEQ ID NO: 262037 - RNA, 19 nt, Human
aucaaccccacagccugug

SEQ ID NO: 262038 - RNA, 25 nt, Human
augacaacaagcaaaagugacauac

SEQ ID NO: 262039 - RNA, 19 nt, Human
caaaaugcagcccuucugc

SEQ ID NO: 262040 - RNA, 25 nt, Human
caaauuucugacccaugauggcaau

SEQ ID NO: 262041 - RNA, 23 nt, Human
caacacacugaaaacuccugccc

SEQ ID NO: 262042 - RNA, 26 nt, Human
cacaaagaccccagugcaagcgaugg

SEQ ID NO: 262043 - RNA, 23 nt, Human
cacacgucaucaacagacagcag

SEQ ID NO: 262044 - RNA, 19 nt, Human
cacccuuucauuuagaauu

SEQ ID NO: 262045 - RNA, 21 nt, Human
cagauugauggaaaccacacc

SEQ ID NO: 262046 - RNA, 19 nt, Human
cagccugugagccaggccu

SEQ ID NO: 262047 - RNA, 27 nt, Human
caguagauuucuucauccuucaaauuu

SEQ ID NO: 262048 - RNA, 18 nt, Human
ccacaaagaccccagugc

SEQ ID NO: 262049 - RNA, 21 nt, Human
cccaaggaaaauucacugcga

SEQ ID NO: 262050 - RNA, 19 nt, Human
cccugagcaccaccaacac

SEQ ID NO: 262051 - RNA, 20 nt, Human
ccgcuuuucccagaggugag

SEQ ID NO: 262052 - RNA, 24 nt, Human
ccuccugcucacccgcuuuuccca

SEQ ID NO: 262053 - RNA, 23 nt, Human
ccucucugauggagcaaggguug

SEQ ID NO: 262054 - RNA, 21 nt, Human
cgucugaaaggugaggauuuc

SEQ ID NO: 262055 - RNA, 19 nt, Human
cugagcaccaccaacacua

SEQ ID NO: 262056 - RNA, 24 nt, Human
cugcaagcccuggcaaccaaccga

SEQ ID NO: 262057 - RNA, 20 nt, Human
cugcccgauccacaaagacc

SEQ ID NO: 262058 - RNA, 20 nt, Human
gaaaccacacccuuucauuu

SEQ ID NO: 262059 - RNA, 23 nt, Human
gagcaagggucuggccuuccaag

SEQ ID NO: 262060 - RNA, 24 nt, Human
gagcaccaccaacacuaagcacaa

SEQ ID NO: 262061 - RNA, 26 nt, Human
gaggaagaaaauaccauuaaaaagaa

SEQ ID NO: 262062 - RNA, 24 nt, Human
gccuuugccacugcccucucugau

SEQ ID NO: 262063 - RNA, 24 nt, Human
ggaaaauucacugcgaucugcaag

SEQ ID NO: 262064 - RNA, 21 nt, Human
ggacaaaacagcgauguuccc

SEQ ID NO: 262065 - RNA, 21 nt, Human
ggagcaacacccaacacacug

SEQ ID NO: 262066 - RNA, 25 nt, Human
ggccuuaagcugccuauuugugcug

SEQ ID NO: 262067 - RNA, 20 nt, Human
gggcagcaucagauugaugg

SEQ ID NO: 262068 - RNA, 22 nt, Human
guaccucaugccuccugcucac

SEQ ID NO: 262069 - RNA, 25 nt, Human
guugcuagagccugcuuugcacaca

SEQ ID NO: 262070 - RNA, 22 nt, Human
uaaaaagaaggcagaccaccaa

SEQ ID NO: 262071 - RNA, 20 nt, Human
uaaccuuaguuuccaaguuc

SEQ ID NO: 262072 - RNA, 19 nt, Human
uaggacaaaacagcgaugu

SEQ ID NO: 262073 - RNA, 24 nt, Human
ucaaaagacacauaggaaggagca

SEQ ID NO: 262074 - RNA, 25 nt, Human
ucacuggccuuugccacugcccucu

SEQ ID NO: 262075 - RNA, 19 nt, Human
ucugcaagcccuggcaacc

SEQ ID NO: 262076 - RNA, 24 nt, Human
ucugcaagcccuggcaaccaaggu

SEQ ID NO: 262077 - RNA, 19 nt, Human
ucugcagagccagaucaac

SEQ ID NO: 262078 - RNA, 23 nt, Human
ugaaaggugaggauuucaaacag

SEQ ID NO: 262079 - RNA, 23 nt, Human
ugaagcgggcugcagaacgaccc

SEQ ID NO: 262080 - RNA, 20 nt, Human
ugagaaaugaaaacguaaug

SEQ ID NO: 262081 - RNA, 18 nt, Human
ugagccaggccuuaagcu

SEQ ID NO: 262082 - RNA, 20 nt, Human
ugcaagcccuggcaaccaac

SEQ ID NO: 262083 - RNA, 25 nt, Human
ugcagccaaacaguucacuuauaac

SEQ ID NO: 262084 - RNA, 18 nt, Human
ugccuagggccucugcag

SEQ ID NO: 262085 - RNA, 21 nt, Human
ugccuagggccucugcagagc

SEQ ID NO: 262086 - RNA, 18 nt, Human
ugcucagcccaguuguga

SEQ ID NO: 262087 - RNA, 20 nt, Human
uguuguuuuuuuuguuuuuu

SEQ ID NO: 262088 - RNA, 19 nt, Human
uucacugcgaucugcaagc

SEQ ID NO: 262089 - RNA, 20 nt, Human
uuccaaagaauaguuccuua

SEQ ID NO: 262090 - RNA, 21 nt, Human
uuguuguuuuuuuuguuuuuu

SEQ ID NO: 262091 - RNA, 21 nt, Human
uuuuuuuuguuuuuuguuuuu

SEQ ID NO: 262092 - RNA, 22 nt, Human
aaaaggaaacggaaauccagaa

SEQ ID NO: 262093 - RNA, 23 nt, Human
aaacggaaauccagaagggucaa

SEQ ID NO: 262094 - RNA, 23 nt, Human
aaacggaaauccagaaggguccu

SEQ ID NO: 262095 - RNA, 21 nt, Human
aaagcuucuccaaugucauac

SEQ ID NO: 262096 - RNA, 24 nt, Human
aauccagaagggucaaaaaagcuu

SEQ ID NO: 262097 - RNA, 25 nt, Human
acagaaaaggaaacggaaauccaga

SEQ ID NO: 262098 - RNA, 21 nt, Human
ccccgggccccuggauucugc

SEQ ID NO: 262099 - RNA, 23 nt, Human
ccccgggccccuggauucugcuc

SEQ ID NO: 262100 - RNA, 21 nt, Human
ccccuggauucugcucgugcc

SEQ ID NO: 262101 - RNA, 23 nt, Human
cuacagccccgggccccuggauu

SEQ ID NO: 262102 - RNA, 22 nt, Human
gaaauccagaagggucaaaaaa

SEQ ID NO: 262103 - RNA, 24 nt, Human
gaaucuacagccccgggccccugg

SEQ ID NO: 262104 - RNA, 18 nt, Human
uaauggcagucaagacua

SEQ ID NO: 262105 - RNA, 21 nt, Human
ugaguuauuuacauuuuuaau

SEQ ID NO: 262106 - RNA, 22 nt, Human
uuuccggaucuuccaagcuccu

SEQ ID NO: 262107 - RNA, 24 nt, Human
uuuuccggaucuuccaagcuccuc

SEQ ID NO: 262108 - RNA, 22 nt, Human
aaaacaaacaagaaaccauuag

SEQ ID NO: 262109 - RNA, 20 nt, Human
aaaacacccgcgggcugcgg

SEQ ID NO: 262110 - RNA, 18 nt, Human
aaacaaacaagaaaccau

SEQ ID NO: 262111 - RNA, 21 nt, Human
aaguagaaacacagaagaaac

SEQ ID NO: 262112 - RNA, 20 nt, Human
acaacagcccauccggagaa

SEQ ID NO: 262113 - RNA, 23 nt, Human
acacagaagaaacuggauaauuu

SEQ ID NO: 262114 - RNA, 18 nt, Human
acagaaccaaaagcguca

SEQ ID NO: 262115 - RNA, 22 nt, Human
accugcuuaccuugauuucaac

SEQ ID NO: 262116 - RNA, 21 nt, Human
agaagauucugcaaaguugcu

SEQ ID NO: 262117 - RNA, 18 nt, Human
agacaaaaucaacaugca

SEQ ID NO: 262118 - RNA, 22 nt, Human
aggagcuccccgccgucgcugu

SEQ ID NO: 262119 - RNA, 18 nt, Human
aguaaacucccugggccc

SEQ ID NO: 262120 - RNA, 23 nt, Human
aucccgggguacuccccccgagg

SEQ ID NO: 262121 - RNA, 20 nt, Human
caaacaaugcucaggccaug

SEQ ID NO: 262122 - RNA, 19 nt, Human
caacaugcauucacacuuu

SEQ ID NO: 262123 - RNA, 21 nt, Human
caacauucucugagaggaaga

SEQ ID NO: 262124 - RNA, 19 nt, Human
cagaaccaaaagcgucaac

SEQ ID NO: 262125 - RNA, 24 nt, Human
caggcgggcggcugcggggccugc

SEQ ID NO: 262126 - RNA, 24 nt, Human
caggggagccugguuguugcugca

SEQ ID NO: 262127 - RNA, 19 nt, Human
caguaguucucuagagauu

SEQ ID NO: 262128 - RNA, 29 nt, Human
caucuuugcuuuacaacagaaccaaaagg

SEQ ID NO: 262129 - RNA, 19 nt, Human
ccaccugcuuaccuugauu

SEQ ID NO: 262130 - RNA, 25 nt, Human
ccagagcaacauucuccuccuacgg

SEQ ID NO: 262131 - RNA, 18 nt, Human
cccaggacuaugggaacc

SEQ ID NO: 262132 - RNA, 18 nt, Human
ccccaggggcaaaacacc

SEQ ID NO: 262133 - RNA, 19 nt, Human
ccccauugccugcgucucc

SEQ ID NO: 262134 - RNA, 23 nt, Human
ccccgccgucgcugucgcccccc

SEQ ID NO: 262135 - RNA, 18 nt, Human
ccccuaaacauccuuucu

SEQ ID NO: 262136 - RNA, 18 nt, Human
cccugggcccagggaugc

SEQ ID NO: 262137 - RNA, 19 nt, Human
cccugggcccagggaugca

SEQ ID NO: 262138 - RNA, 20 nt, Human
cgcugucgccccccgcgagc

SEQ ID NO: 262139 - RNA, 19 nt, Human
cggggggccuuagaaagac

SEQ ID NO: 262140 - RNA, 23 nt, Human
cguugcaggcgggcggcugcggg

SEQ ID NO: 262141 - RNA, 23 nt, Human
cucaggccaugcaccuccucaga

SEQ ID NO: 262142 - RNA, 23 nt, Human
cucccaggacuaugggaacccaa

SEQ ID NO: 262143 - RNA, 23 nt, Human
cuccccgccgucgcugucgcccc

SEQ ID NO: 262144 - RNA, 19 nt, Human
cucugaguaaacucccugg

SEQ ID NO: 262145 - RNA, 19 nt, Human
cugcucugcccuccgccgc

SEQ ID NO: 262146 - RNA, 20 nt, Human
gaacuugcaacaggauuccu

SEQ ID NO: 262147 - RNA, 21 nt, Human
gaagauucugcaaaguugcuu

SEQ ID NO: 262148 - RNA, 27 nt, Human
gagaacagcaggaggcauccgguaccc

SEQ ID NO: 262149 - RNA, 19 nt, Human
gcagagcagccuccagagc

SEQ ID NO: 262150 - RNA, 21 nt, Human
gcccagggaugcaggggagcc

SEQ ID NO: 262151 - RNA, 22 nt, Human
gcccagggaugcaggggagccu

SEQ ID NO: 262152 - RNA, 21 nt, Human
gcuccccgccgucgcugucgc

SEQ ID NO: 262153 - RNA, 20 nt, Human
gcucugcccuccgccgcccu

SEQ ID NO: 262154 - RNA, 21 nt, Human
ggccuuagaaagacugacagu

SEQ ID NO: 262155 - RNA, 19 nt, Human
ggggagccugguuguugcu

SEQ ID NO: 262156 - RNA, 22 nt, Human
ggguuuucaugcagagcagccu

SEQ ID NO: 262157 - RNA, 21 nt, Human
uaauuugaaaaacaaacaaga

SEQ ID NO: 262158 - RNA, 22 nt, Human
uacaacaauaauuauggagaag

SEQ ID NO: 262159 - RNA, 26 nt, Human
uaucacaacagcccauccggagaacc

SEQ ID NO: 262160 - RNA, 20 nt, Human
uccccgaggagcuccccgcc

SEQ ID NO: 262161 - RNA, 21 nt, Human
uccccgccgucgcugucgccc

SEQ ID NO: 262162 - RNA, 22 nt, Human
ucccgggguacuccccgaggag

SEQ ID NO: 262163 - RNA, 20 nt, Human
uccucugggccagacaaaca

SEQ ID NO: 262164 - RNA, 19 nt, Human
ucuagacuaagacaaaauc

SEQ ID NO: 262165 - RNA, 18 nt, Human
ucucccaggacuauggga

SEQ ID NO: 262166 - RNA, 22 nt, Human
ugcagagcagccuccagagcaa

SEQ ID NO: 262167 - RNA, 27 nt, Human
ugcccuccgccgcccugcagacacucu

SEQ ID NO: 262168 - RNA, 19 nt, Human
ugggaccaugggaacuugc

SEQ ID NO: 262169 - RNA, 22 nt, Human
ugggaggcuccuucgcaggacc

SEQ ID NO: 262170 - RNA, 19 nt, Human
uguugcugcagagccagcc

SEQ ID NO: 262171 - RNA, 23 nt, Human
uuccccuaaacauccuuucuaaa

SEQ ID NO: 262172 - RNA, 22 nt, Human
uucgcaggacccaggcgcccca

SEQ ID NO: 262173 - RNA, 21 nt, Human
uugccugcgucucccgggggg

SEQ ID NO: 262174 - RNA, 23 nt, Human
uuuaagugguaucacaacagccc

SEQ ID NO: 262175 - RNA, 24 nt, Human
uuuuuuuuuuuuuucgacauugga

SEQ ID NO: 262176 - RNA, 24 nt, Human
uuuuuuuuuuuuuuuuucgacauu

SEQ ID NO: 262177 - RNA, 27 nt, Human
uuuuuuuuuuuuuuuuuuuuuucgggg

SEQ ID NO: 262178 - RNA, 23 nt, Human
aaaaauuuguagaaccaguuuuu

SEQ ID NO: 262179 - RNA, 23 nt, Human
aaaacaaaacaaccugaaaaagc

SEQ ID NO: 262180 - RNA, 18 nt, Human
aaaacauuuucuaccccu

SEQ ID NO: 262181 - RNA, 23 nt, Human
aaacaaaacaaccugaaaaagca

SEQ ID NO: 262182 - RNA, 24 nt, Human
aaacaaaacaaccugaaaaagcaa

SEQ ID NO: 262183 - RNA, 19 nt, Human
aaagcaaacggccugguac

SEQ ID NO: 262184 - RNA, 18 nt, Human
aaaugccccaaaugaaag

SEQ ID NO: 262185 - RNA, 20 nt, Human
accgccguugccaggcugcu

SEQ ID NO: 262186 - RNA, 19 nt, Human
agaaugucuaauaaaauuu

SEQ ID NO: 262187 - RNA, 25 nt, Human
agauagcaaauagaacugugcauuu

SEQ ID NO: 262188 - RNA, 22 nt, Human
aggugucaggguuuuccaaaac

SEQ ID NO: 262189 - RNA, 23 nt, Human
aggugucaggguuuuccaaaacc

SEQ ID NO: 262190 - RNA, 20 nt, Human
auuugcgaaaacauuccccu

SEQ ID NO: 262191 - RNA, 18 nt, Human
caagaguuuaagauuaug

SEQ ID NO: 262192 - RNA, 24 nt, Human
cacaauacuucaagaauacgcuca

SEQ ID NO: 262193 - RNA, 21 nt, Human
cauuaaaaaguuuucaugaaa

SEQ ID NO: 262194 - RNA, 22 nt, Human
ccacucaugaugguauaaaagc

SEQ ID NO: 262195 - RNA, 23 nt, Human
ccauauuaguuauaaauaguccu

SEQ ID NO: 262196 - RNA, 21 nt, Human
ccccuaagcagcaggaugcuc

SEQ ID NO: 262197 - RNA, 24 nt, Human
ccccuaagcagcaggaugcucccg

SEQ ID NO: 262198 - RNA, 23 nt, Human
ccgccguugccaggcugcucggc

SEQ ID NO: 262199 - RNA, 18 nt, Human
cgccguugccaggcugcu

SEQ ID NO: 262200 - RNA, 20 nt, Human
cuacuuuuuacaaaugcccc

SEQ ID NO: 262201 - RNA, 22 nt, Human
cucaugcauccaagacgguagc

SEQ ID NO: 262202 - RNA, 24 nt, Human
cuuaauucauugaaaacaaaacca

SEQ ID NO: 262203 - RNA, 19 nt, Human
cuucucuggaaaauuaggg

SEQ ID NO: 262204 - RNA, 23 nt, Human
cuuuuaggcuauuaguauuagcu

SEQ ID NO: 262205 - RNA, 19 nt, Human
gagaccaauuaaacuauga

SEQ ID NO: 262206 - RNA, 18 nt, Human
gaggggaagccaacacca

SEQ ID NO: 262207 - RNA, 21 nt, Human
gcccugucaguuuuuuaaaaa

SEQ ID NO: 262208 - RNA, 22 nt, Human
guuucaauuaagccccccccau

SEQ ID NO: 262209 - RNA, 23 nt, Human
uaaaacaaaacaaccugaaaaag

SEQ ID NO: 262210 - RNA, 26 nt, Human
uaaaacaaaacaaccugaaaaagcaa

SEQ ID NO: 262211 - RNA, 27 nt, Human
uaaaacaaaacaaccugaaaaagcaaa

SEQ ID NO: 262212 - RNA, 21 nt, Human
uaagcagcuucaggaaaaucc

SEQ ID NO: 262213 - RNA, 20 nt, Human
uaaugcggugccaggguccc

SEQ ID NO: 262214 - RNA, 20 nt, Human
uacaucuggggcacugauuu

SEQ ID NO: 262215 - RNA, 22 nt, Human
uacuacuguauuugagaugucu

SEQ ID NO: 262216 - RNA, 19 nt, Human
uacuucaagaauacgcuca

SEQ ID NO: 262217 - RNA, 21 nt, Human
uagcaauagcucaugcaucca

SEQ ID NO: 262218 - RNA, 23 nt, Human
uagcuuuuacaaauauacuuaau

SEQ ID NO: 262219 - RNA, 23 nt, Human
uccaaaaccucaucucagcuccu

SEQ ID NO: 262220 - RNA, 23 nt, Human
uccacaaacauauauccccuuug

SEQ ID NO: 262221 - RNA, 26 nt, Human
ucuuucaaaaacugcuuuuuaaaggu

SEQ ID NO: 262222 - RNA, 23 nt, Human
ugaaaaacucaucuauacagcua

SEQ ID NO: 262223 - RNA, 20 nt, Human
ugaauuaguucagauagcaa

SEQ ID NO: 262224 - RNA, 21 nt, Human
ugacuagagcaacauuugcga

SEQ ID NO: 262225 - RNA, 21 nt, Human
ugagaugucuuacuugggaga

SEQ ID NO: 262226 - RNA, 19 nt, Human
ugagcucaauuugguuuug

SEQ ID NO: 262227 - RNA, 21 nt, Human
ugagcuggacugacuagagca

SEQ ID NO: 262228 - RNA, 22 nt, Human
ugcauccaagacgguagcccua

SEQ ID NO: 262229 - RNA, 20 nt, Human
ugcauuuaaaauuucacuua

SEQ ID NO: 262230 - RNA, 19 nt, Human
uggcaauuacuuaaacacc

SEQ ID NO: 262231 - RNA, 24 nt, Human
uggggaggggaagccaacaccauu

SEQ ID NO: 262232 - RNA, 22 nt, Human
uggggcacugauuucuaaggau

SEQ ID NO: 262233 - RNA, 20 nt, Human
ugggguggggaggggaagcc

SEQ ID NO: 262234 - RNA, 19 nt, Human
ugugcauuuaaaauuucac

SEQ ID NO: 262235 - RNA, 21 nt, Human
uguuucaauuaagcccccccc

SEQ ID NO: 262236 - RNA, 25 nt, Human
uuaaaaauauaaaaauaggcuucuc

SEQ ID NO: 262237 - RNA, 21 nt, Human
uuccgaauuuuaggcaagcuc

SEQ ID NO: 262238 - RNA, 24 nt, Human
uucuuguaauauguauucuagaag

SEQ ID NO: 262239 - RNA, 20 nt, Human
uugccaggcugcucggcugc

SEQ ID NO: 262240 - RNA, 22 nt, Human
uugguuuuggcaguaacaugca

SEQ ID NO: 262241 - RNA, 23 nt, Human
uuucacauuuggauucaucuuag

SEQ ID NO: 262242 - RNA, 25 nt, Human
uuugccacaacccgaaaaccauucc

SEQ ID NO: 262243 - RNA, 18 nt, Human
uuugcgaaaacauucccc

SEQ ID NO: 262244 - RNA, 20 nt, Human
uuuuccaaaaccucaucuca

SEQ ID NO: 262245 - RNA, 18 nt, Human
aaaaaagaccagggagca

SEQ ID NO: 262246 - RNA, 21 nt, Human
aaacaguucugcgcuaggaac

SEQ ID NO: 262247 - RNA, 25 nt, Human
acagagccccccccagccuccgcca

SEQ ID NO: 262248 - RNA, 23 nt, Human
aggaacauacaaaggaaaaugac

SEQ ID NO: 262249 - RNA, 19 nt, Human
auguuauuuuauuaccgau

SEQ ID NO: 262250 - RNA, 24 nt, Human
cacuccaggcaccagcucccccca

SEQ ID NO: 262251 - RNA, 20 nt, Human
cagagccccccccagccucc

SEQ ID NO: 262252 - RNA, 23 nt, Human
cagagccccccccagccuccgcc

SEQ ID NO: 262253 - RNA, 20 nt, Human
cagaugagacaaauacaaua

SEQ ID NO: 262254 - RNA, 19 nt, Human
cagcuuauuuccaucccuu

SEQ ID NO: 262255 - RNA, 20 nt, Human
caggugaggugcacagggcc

SEQ ID NO: 262256 - RNA, 20 nt, Human
cauacaaaggaaaaugaccc

SEQ ID NO: 262257 - RNA, 23 nt, Human
cccgaggaggccuccugccgccc

SEQ ID NO: 262258 - RNA, 19 nt, Human
cccgccgccgccgccgccg

SEQ ID NO: 262259 - RNA, 21 nt, Human
ccgccgcccucgcagcccgcc

SEQ ID NO: 262260 - RNA, 22 nt, Human
ccgccgccgccgccgccgccgg

SEQ ID NO: 262261 - RNA, 21 nt, Human
ccugccgcccgccggccccgg

SEQ ID NO: 262262 - RNA, 24 nt, Human
cgccggccccggguucgggccccc

SEQ ID NO: 262263 - RNA, 21 nt, Human
cggccccggguucgggccccc

SEQ ID NO: 262264 - RNA, 18 nt, Human
cggcgguggcgccccccu

SEQ ID NO: 262265 - RNA, 22 nt, Human
cuccacgcugggcugccgggag

SEQ ID NO: 262266 - RNA, 25 nt, Human
cuuguaaucucuggacacauuuucu

SEQ ID NO: 262267 - RNA, 22 nt, Human
gacagagccccccccagccucc

SEQ ID NO: 262268 - RNA, 20 nt, Human
gauccugugggacuguccag

SEQ ID NO: 262269 - RNA, 22 nt, Human
gauccugugggacuguccaggg

SEQ ID NO: 262270 - RNA, 20 nt, Human
gccccggguucgggcccccg

SEQ ID NO: 262271 - RNA, 19 nt, Human
gccggcgguggcgcccccc

SEQ ID NO: 262272 - RNA, 23 nt, Human
gcgguggcgccccccgcggcccg

SEQ ID NO: 262273 - RNA, 26 nt, Human
ggcgguggcgccccccgcggcccgag

SEQ ID NO: 262274 - RNA, 23 nt, Human
guagcagcuauaagcuguuuaca

SEQ ID NO: 262275 - RNA, 25 nt, Human
uaaaaaagaccagggagcaaacaua

SEQ ID NO: 262276 - RNA, 23 nt, Human
uaaaacaaaaauugcuuagauaa

SEQ ID NO: 262277 - RNA, 24 nt, Human
uaaaucacauaaaguuaguuacuu

SEQ ID NO: 262278 - RNA, 18 nt, Human
uacaaaggaaaaugaccc

SEQ ID NO: 262279 - RNA, 18 nt, Human
uacaccauucaacaugug

SEQ ID NO: 262280 - RNA, 20 nt, Human
uacacuuacuuacuuaaaac

SEQ ID NO: 262281 - RNA, 18 nt, Human
uacagugcaacagaugag

SEQ ID NO: 262282 - RNA, 22 nt, Human
uagaaacaguucugcgcuagga

SEQ ID NO: 262283 - RNA, 20 nt, Human
uaggguccugcugacagagc

SEQ ID NO: 262284 - RNA, 22 nt, Human
ucaacaugugauccugugggac

SEQ ID NO: 262285 - RNA, 28 nt, Human
ucccuuagagccuuguaaucccaaaccg

SEQ ID NO: 262286 - RNA, 27 nt, Human
ucccuuagagccuuguaaucccaaacg

SEQ ID NO: 262287 - RNA, 29 nt, Human
ucgcagcccgccgccgccgccgccgccgg

SEQ ID NO: 262288 - RNA, 20 nt, Human
ucgggcccccgccgcccucg

SEQ ID NO: 262289 - RNA, 20 nt, Human
ucuccucuaggguccugcug

SEQ ID NO: 262290 - RNA, 23 nt, Human
ucugcgcuaggaacauacaaagg

SEQ ID NO: 262291 - RNA, 19 nt, Human
ugaaccugaaaucugacua

SEQ ID NO: 262292 - RNA, 20 nt, Human
uguccagggucuccacgcug

SEQ ID NO: 262293 - RNA, 19 nt, Human
uuagaaacaguucugcgcu

SEQ ID NO: 262294 - RNA, 19 nt, Human
uucaaguuguuuuagaaac

SEQ ID NO: 262295 - RNA, 23 nt, Human
uugacgcacaguaaacauucaau

SEQ ID NO: 262296 - RNA, 27 nt, Human
aaaaaagaaaaaccuagaauggagaaa

SEQ ID NO: 262297 - RNA, 24 nt, Human
aaaaguugagguaugcagagacua

SEQ ID NO: 262298 - RNA, 19 nt, Human
aaauaggaauuagucacaa

SEQ ID NO: 262299 - RNA, 21 nt, Human
aaauuacaccugcacaaccaa

SEQ ID NO: 262300 - RNA, 19 nt, Human
aacuucccaaaggaagaga

SEQ ID NO: 262301 - RNA, 22 nt, Human
aagugaucaagguaaaucaguu

SEQ ID NO: 262302 - RNA, 19 nt, Human
aauacaucuuuuacaugca

SEQ ID NO: 262303 - RNA, 23 nt, Human
aauugggcuaaucugaagggcau

SEQ ID NO: 262304 - RNA, 18 nt, Human
aauuuuguaacccuaauc

SEQ ID NO: 262305 - RNA, 22 nt, Human
acagaauucagaaaaaauguca

SEQ ID NO: 262306 - RNA, 19 nt, Human
accagcaccaaacucuuac

SEQ ID NO: 262307 - RNA, 21 nt, Human
agaaauggcaacuuuggacaa

SEQ ID NO: 262308 - RNA, 23 nt, Human
agaggaagguggggaugucagag

SEQ ID NO: 262309 - RNA, 19 nt, Human
agagugcaccgcgccugua

SEQ ID NO: 262310 - RNA, 22 nt, Human
agcauugguacguaaaaguuga

SEQ ID NO: 262311 - RNA, 18 nt, Human
agcgccggcccgggaggg

SEQ ID NO: 262312 - RNA, 24 nt, Human
aggaaucugcagauuacaugaggc

SEQ ID NO: 262313 - RNA, 21 nt, Human
aggcaggaaucugcagauuac

SEQ ID NO: 262314 - RNA, 26 nt, Human
aggcaggaaucugcagauuacaugag

SEQ ID NO: 262315 - RNA, 23 nt, Human
aguaagauuuuuaaauacuucuu

SEQ ID NO: 262316 - RNA, 20 nt, Human
aguagaaagcuuaauuuuua

SEQ ID NO: 262317 - RNA, 23 nt, Human
agucaaauguuucuaccagcacc

SEQ ID NO: 262318 - RNA, 19 nt, Human
auagaaauuuccucacugc

SEQ ID NO: 262319 - RNA, 22 nt, Human
auagaaauuuccucacugcaag

SEQ ID NO: 262320 - RNA, 24 nt, Human
aucaguuacugaaaaaaagaaaaa

SEQ ID NO: 262321 - RNA, 26 nt, Human
aucaguuacugaaaaaaagaaaaacc

SEQ ID NO: 262322 - RNA, 20 nt, Human
augaugccccugaucuuaca

SEQ ID NO: 262323 - RNA, 21 nt, Human
caagaacaaaguuuaaaaguc

SEQ ID NO: 262324 - RNA, 19 nt, Human
caagacaagugaaauacac

SEQ ID NO: 262325 - RNA, 20 nt, Human
caagacaagugaaauacacu

SEQ ID NO: 262326 - RNA, 18 nt, Human
caagacagacugaaccaa

SEQ ID NO: 262327 - RNA, 22 nt, Human
caagacagacugaaccaaagug

SEQ ID NO: 262328 - RNA, 21 nt, Human
caagaccaagagggaggcuaa

SEQ ID NO: 262329 - RNA, 26 nt, Human
cacaagacagacugaaccaaaguggg

SEQ ID NO: 262330 - RNA, 19 nt, Human
cacacaagacaagugaaau

SEQ ID NO: 262331 - RNA, 26 nt, Human
cacugcgcagcucagacgccggcugg

SEQ ID NO: 262332 - RNA, 18 nt, Human
cagcacagggaaaggcug

SEQ ID NO: 262333 - RNA, 22 nt, Human
cagugcuaugggggcacagagg

SEQ ID NO: 262334 - RNA, 20 nt, Human
caucuggucuuggggaaagg

SEQ ID NO: 262335 - RNA, 23 nt, Human
ccaaaggaagagaugaugccuaa

SEQ ID NO: 262336 - RNA, 19 nt, Human
cccaagugcauguacucca

SEQ ID NO: 262337 - RNA, 21 nt, Human
cccacacacaccagugguaua

SEQ ID NO: 262338 - RNA, 22 nt, Human
ccggaagcggccauguuccccc

SEQ ID NO: 262339 - RNA, 21 nt, Human
ccggcaucgacucuccgugcu

SEQ ID NO: 262340 - RNA, 18 nt, Human
ccuccucccucccuccca

SEQ ID NO: 262341 - RNA, 25 nt, Human
ccugcacaaccaauagacauacgaa

SEQ ID NO: 262342 - RNA, 19 nt, Human
cggcccgggagggagaccg

SEQ ID NO: 262343 - RNA, 19 nt, Human
cggcucccagggugagggg

SEQ ID NO: 262344 - RNA, 21 nt, Human
cgggagggaugaaggaccaga

SEQ ID NO: 262345 - RNA, 22 nt, Human
cucagcagagaagugguagggu

SEQ ID NO: 262346 - RNA, 19 nt, Human
cuccccuucauuuuccccc

SEQ ID NO: 262347 - RNA, 22 nt, Human
cuguaggcugcugggcagcggg

SEQ ID NO: 262348 - RNA, 18 nt, Human
gaaaaaaaagaaauggca

SEQ ID NO: 262349 - RNA, 18 nt, Human
gaagcggagggcggagug

SEQ ID NO: 262350 - RNA, 19 nt, Human
gaccggggccgcagucagg

SEQ ID NO: 262351 - RNA, 23 nt, Human
gaggaaaauggcagaugcauuug

SEQ ID NO: 262352 - RNA, 18 nt, Human
gagggggucuggugaagc

SEQ ID NO: 262353 - RNA, 22 nt, Human
gcacagggaaaggcugaagcag

SEQ ID NO: 262354 - RNA, 19 nt, Human
gcggagggcggagugcuac

SEQ ID NO: 262355 - RNA, 25 nt, Human
ggaaaaaaaagaaauggcaacuuug

SEQ ID NO: 262356 - RNA, 25 nt, Human
ggagggcggagugcuacggaccggg

SEQ ID NO: 262357 - RNA, 21 nt, Human
ggagguggcggcucccagggu

SEQ ID NO: 262358 - RNA, 20 nt, Human
ggcacagaggaaggugggga

SEQ ID NO: 262359 - RNA, 20 nt, Human
ggcaggggcagcacagggaa

SEQ ID NO: 262360 - RNA, 18 nt, Human
gggcacagaggaaggugg

SEQ ID NO: 262361 - RNA, 19 nt, Human
gggccgcagucaggccagc

SEQ ID NO: 262362 - RNA, 22 nt, Human
ggggaaaaaaaagaaauggcaa

SEQ ID NO: 262363 - RNA, 18 nt, Human
ggggaaagggagguggcg

SEQ ID NO: 262364 - RNA, 20 nt, Human
ggggaugucagagaaggcag

SEQ ID NO: 262365 - RNA, 24 nt, Human
gguguugguuaaggaaaaaugggu

SEQ ID NO: 262366 - RNA, 23 nt, Human
uaaaauaucuuucaugauguuuc

SEQ ID NO: 262367 - RNA, 18 nt, Human
uaaagugacugaacuuuc

SEQ ID NO: 262368 - RNA, 19 nt, Human
uaaaugcccuguuaaaaag

SEQ ID NO: 262369 - RNA, 21 nt, Human
uaaggaaaaauggguacaaac

SEQ ID NO: 262370 - RNA, 21 nt, Human
uacuucacuuaagccaccugc

SEQ ID NO: 262371 - RNA, 24 nt, Human
uacuucacuuaagccaccugcacu

SEQ ID NO: 262372 - RNA, 24 nt, Human
uacuuggaguagaaagcuuaauuu

SEQ ID NO: 262373 - RNA, 26 nt, Human
uagaauaaaauagacaucagagucaa

SEQ ID NO: 262374 - RNA, 26 nt, Human
uagaauggagaaagggauaucaaaug

SEQ ID NO: 262375 - RNA, 22 nt, Human
uauguagaauaaaauagacauc

SEQ ID NO: 262376 - RNA, 24 nt, Human
uauguuuacagacuugugguagac

SEQ ID NO: 262377 - RNA, 22 nt, Human
uauuccuccucccucccuccca

SEQ ID NO: 262378 - RNA, 22 nt, Human
ucagaaaaaaugucaauccuag

SEQ ID NO: 262379 - RNA, 25 nt, Human
ucccccaagcacaucuauaaggccu

SEQ ID NO: 262380 - RNA, 26 nt, Human
ucccccagagugcaccgcgccuguag

SEQ ID NO: 262381 - RNA, 20 nt, Human
uccgugcuggcuguguccgg

SEQ ID NO: 262382 - RNA, 21 nt, Human
uccucacugcaagaccaagag

SEQ ID NO: 262383 - RNA, 23 nt, Human
ucuagaaaauaggaauuagucac

SEQ ID NO: 262384 - RNA, 18 nt, Human
ucuggggaaaaaaaagaa

SEQ ID NO: 262385 - RNA, 19 nt, Human
ucuuuggauacuuaaaaga

SEQ ID NO: 262386 - RNA, 21 nt, Human
ucuuuggauacuuaaaagauu

SEQ ID NO: 262387 - RNA, 18 nt, Human
ugaacagcagaguagcau

SEQ ID NO: 262388 - RNA, 21 nt, Human
ugaaguggaugcaaguauguu

SEQ ID NO: 262389 - RNA, 23 nt, Human
ugaggcaauugugaacagcagag

SEQ ID NO: 262390 - RNA, 23 nt, Human
ugagggggucuggugaagcggga

SEQ ID NO: 262391 - RNA, 20 nt, Human
ugauuuggguguugguuaag

SEQ ID NO: 262392 - RNA, 22 nt, Human
ugcacaaccaauagacauacga

SEQ ID NO: 262393 - RNA, 18 nt, Human
ugccacagaauuucagug

SEQ ID NO: 262394 - RNA, 22 nt, Human
ugccacagaauuucaguguugg

SEQ ID NO: 262395 - RNA, 21 nt, Human
ugcugggcagcgggaagaccc

SEQ ID NO: 262396 - RNA, 19 nt, Human
uggggaaagggagguggcg

SEQ ID NO: 262397 - RNA, 18 nt, Human
ugggggcacagaggaagg

SEQ ID NO: 262398 - RNA, 23 nt, Human
ugguaguagcgguauacacagug

SEQ ID NO: 262399 - RNA, 18 nt, Human
ugugguaucaggccaaga

SEQ ID NO: 262400 - RNA, 24 nt, Human
uucaaauaagguuauguuuacaga

SEQ ID NO: 262401 - RNA, 25 nt, Human
uucucacuauaagcuauuuauacag

SEQ ID NO: 262402 - RNA, 29 nt, Human
uugccuuuuaauagaaacuuguucccacu

SEQ ID NO: 262403 - RNA, 24 nt, Human
uuuaauauuaccagaugccaaaaa

SEQ ID NO: 262404 - RNA, 24 nt, Human
uuucacacaauuaccaaagaaauc

SEQ ID NO: 262405 - RNA, 19 nt, Human
uuuccaaauauuucugggg

SEQ ID NO: 262406 - RNA, 21 nt, Human
uuuuuaauuacugauuugcua

SEQ ID NO: 262407 - RNA, 24 nt, Human
aaacauuuugaccagucuguacuc

SEQ ID NO: 262408 - RNA, 22 nt, Human
aaccuaacucuucuccaaccuu

SEQ ID NO: 262409 - RNA, 19 nt, Human
aagaaacaagccaucccuc

SEQ ID NO: 262410 - RNA, 20 nt, Human
aagacaaucugggucaaguu

SEQ ID NO: 262411 - RNA, 22 nt, Human
aagauuacaaagcacaaaccua

SEQ ID NO: 262412 - RNA, 18 nt, Human
aagcauggccuccccaag

SEQ ID NO: 262413 - RNA, 24 nt, Human
aaggagcccaagacaaucuggguc

SEQ ID NO: 262414 - RNA, 23 nt, Human
aaguggcccuucacugcuggcca

SEQ ID NO: 262415 - RNA, 18 nt, Human
acaagugcccacucagac

SEQ ID NO: 262416 - RNA, 24 nt, Human
acagcaggcagcucggcaguuaca

SEQ ID NO: 262417 - RNA, 20 nt, Human
acaggugguuccacgcuccc

SEQ ID NO: 262418 - RNA, 21 nt, Human
acccaggugugucugggcuca

SEQ ID NO: 262419 - RNA, 24 nt, Human
acugcauaaacauuuugaccaguc

SEQ ID NO: 262420 - RNA, 21 nt, Human
agacagccaggaguggcaaag

SEQ ID NO: 262421 - RNA, 23 nt, Human
agacagccaggaguggcaaaggg

SEQ ID NO: 262422 - RNA, 22 nt, Human
agagaagaggagaaaggcugau

SEQ ID NO: 262423 - RNA, 20 nt, Human
agcaccagggaagccuucug

SEQ ID NO: 262424 - RNA, 21 nt, Human
agccaggaguggcaaaggggg

SEQ ID NO: 262425 - RNA, 22 nt, Human
aggccccagaauggggacccag

SEQ ID NO: 262426 - RNA, 25 nt, Human
agucuggauuucccugugcuggcug

SEQ ID NO: 262427 - RNA, 22 nt, Human
agugcccacucagacagccagg

SEQ ID NO: 262428 - RNA, 21 nt, Human
aucaaaaaagagcuaagagcu

SEQ ID NO: 262429 - RNA, 22 nt, Human
aucuacaauccaguggugcauc

SEQ ID NO: 262430 - RNA, 18 nt, Human
augccaagauuacaaagc

SEQ ID NO: 262431 - RNA, 24 nt, Human
caaaaaaugaaaaauauaggagca

SEQ ID NO: 262432 - RNA, 22 nt, Human
caaaccuaacucuucuccaacc

SEQ ID NO: 262433 - RNA, 26 nt, Human
caagaacuuuuucuacuaggagguuu

SEQ ID NO: 262434 - RNA, 21 nt, Human
cacacccaggcaugcacagaa

SEQ ID NO: 262435 - RNA, 27 nt, Human
cacacccaggcaugcacagaaccaccu

SEQ ID NO: 262436 - RNA, 24 nt, Human
cacagaaccaccuuccugagacac

SEQ ID NO: 262437 - RNA, 26 nt, Human
cacagccuggcccaggaaagcagccc

SEQ ID NO: 262438 - RNA, 21 nt, Human
caccauccucccacccggaag

SEQ ID NO: 262439 - RNA, 24 nt, Human
caccaugauccacccugucaccag

SEQ ID NO: 262440 - RNA, 21 nt, Human
caccccaccaggcucccugcc

SEQ ID NO: 262441 - RNA, 20 nt, Human
cacugcuggccagcagccag

SEQ ID NO: 262442 - RNA, 24 nt, Human
cacuguacaucagacccaagaaac

SEQ ID NO: 262443 - RNA, 23 nt, Human
cagaauggggacccagguguguc

SEQ ID NO: 262444 - RNA, 19 nt, Human
cagcagcaaaggguuccca

SEQ ID NO: 262445 - RNA, 23 nt, Human
cagcuuggccacugcccacccag

SEQ ID NO: 262446 - RNA, 18 nt, Human
caggcaugcacagaacca

SEQ ID NO: 262447 - RNA, 18 nt, Human
caggugguuccacgcucc

SEQ ID NO: 262448 - RNA, 21 nt, Human
caucccucagugucacgugac

SEQ ID NO: 262449 - RNA, 21 nt, Human
ccaagagggagggcaggcaca

SEQ ID NO: 262450 - RNA, 24 nt, Human
ccacacccaggcaugcacagaacc

SEQ ID NO: 262451 - RNA, 22 nt, Human
ccaccccaccaggcucccugcc

SEQ ID NO: 262452 - RNA, 22 nt, Human
cccaagacaaucugggucaagu

SEQ ID NO: 262453 - RNA, 20 nt, Human
cccacaccuaccuccacaaa

SEQ ID NO: 262454 - RNA, 23 nt, Human
cccaggaaagcagcccccugaaa

SEQ ID NO: 262455 - RNA, 18 nt, Human
cccaggugugucugggcu

SEQ ID NO: 262456 - RNA, 22 nt, Human
ccccaccaggcucccugccagg

SEQ ID NO: 262457 - RNA, 19 nt, Human
cccccuccgccaccccacc

SEQ ID NO: 262458 - RNA, 18 nt, Human
ccccucgccugccucaaa

SEQ ID NO: 262459 - RNA, 24 nt, Human
cccuaguccucaccaugauccacc

SEQ ID NO: 262460 - RNA, 18 nt, Human
cccugaaaguaaaaggag

SEQ ID NO: 262461 - RNA, 21 nt, Human
ccucuuggcaccugucacuag

SEQ ID NO: 262462 - RNA, 20 nt, Human
ccugucauaggaacagcagc

SEQ ID NO: 262463 - RNA, 24 nt, Human
cgaggcccuccacggcacagucuc

SEQ ID NO: 262464 - RNA, 24 nt, Human
cgcugggcagcgccugagccgcug

SEQ ID NO: 262465 - RNA, 20 nt, Human
cggcuacccacucccagccc

SEQ ID NO: 262466 - RNA, 19 nt, Human
cuccaaccuuccccacacc

SEQ ID NO: 262467 - RNA, 19 nt, Human
cucccacccggaagaaaca

SEQ ID NO: 262468 - RNA, 19 nt, Human
cucccagccccucgccugc

SEQ ID NO: 262469 - RNA, 18 nt, Human
cuccgccaccccaccagg

SEQ ID NO: 262470 - RNA, 18 nt, Human
cuccuggcucugaccacc

SEQ ID NO: 262471 - RNA, 28 nt, Human
cuccuggcucugaccaccauccucccac

SEQ ID NO: 262472 - RNA, 22 nt, Human
cucucuucuuucccuuauggug

SEQ ID NO: 262473 - RNA, 21 nt, Human
cugaccaccauccucccaccc

SEQ ID NO: 262474 - RNA, 18 nt, Human
cugcccagguugaguggg

SEQ ID NO: 262475 - RNA, 21 nt, Human
cuggcccaggaaagcagcccc

SEQ ID NO: 262476 - RNA, 20 nt, Human
cuggcugaggaagagauugu

SEQ ID NO: 262477 - RNA, 22 nt, Human
cugggccacgccuuaaccacac

SEQ ID NO: 262478 - RNA, 24 nt, Human
cugggccacgccuuaaccacaccc

SEQ ID NO: 262479 - RNA, 23 nt, Human
gacaaaaaaugaaaaauauagga

SEQ ID NO: 262480 - RNA, 24 nt, Human
gaggauggaaaagguagggaggga

SEQ ID NO: 262481 - RNA, 19 nt, Human
gagugggccugucauagga

SEQ ID NO: 262482 - RNA, 23 nt, Human
gaugacacagaauguggaaaaga

SEQ ID NO: 262483 - RNA, 26 nt, Human
ggaaaugcacaaucuucaauuagacc

SEQ ID NO: 262484 - RNA, 23 nt, Human
ggaagaggaauacagggcagggc

SEQ ID NO: 262485 - RNA, 22 nt, Human
ggaagucagagacgugcucaga

SEQ ID NO: 262486 - RNA, 20 nt, Human
ggagcacugacugacuccuc

SEQ ID NO: 262487 - RNA, 22 nt, Human
ggcacagucucccccuccgcca

SEQ ID NO: 262488 - RNA, 23 nt, Human
ggcagugcucuuggggaauaugc

SEQ ID NO: 262489 - RNA, 21 nt, Human
gggaagaggaauacagggcag

SEQ ID NO: 262490 - RNA, 21 nt, Human
gggacccaggugugucugggc

SEQ ID NO: 262491 - RNA, 19 nt, Human
gggcagugcucuuggggaa

SEQ ID NO: 262492 - RNA, 20 nt, Human
gggccucucggucugcccag

SEQ ID NO: 262493 - RNA, 20 nt, Human
ggggaauaugcuuccagccu

SEQ ID NO: 262494 - RNA, 22 nt, Human
guacaggugguuccacgcuccc

SEQ ID NO: 262495 - RNA, 21 nt, Human
gucaagcauggccuccccaag

SEQ ID NO: 262496 - RNA, 20 nt, Human
gucugcccagguugaguggg

SEQ ID NO: 262497 - RNA, 23 nt, Human
gugccucucccuccaaacaucag

SEQ ID NO: 262498 - RNA, 21 nt, Human
ucagcagagucaagcauggcc

SEQ ID NO: 262499 - RNA, 20 nt, Human
ucagccucauuuauccaucu

SEQ ID NO: 262500 - RNA, 19 nt, Human
ucaucgaucaaaaaagagc

SEQ ID NO: 262501 - RNA, 18 nt, Human
uccaaagugcacgggccu

SEQ ID NO: 262502 - RNA, 23 nt, Human
uccacggcacagucucccccucc

SEQ ID NO: 262503 - RNA, 24 nt, Human
uccaucaaaaaaaaaaaaaauuaa

SEQ ID NO: 262504 - RNA, 22 nt, Human
uccccacaccuaccuccacaaa

SEQ ID NO: 262505 - RNA, 23 nt, Human
uccccagcagcaaaggguuccca

SEQ ID NO: 262506 - RNA, 23 nt, Human
ucccugaccuuaccccuaguccu

SEQ ID NO: 262507 - RNA, 25 nt, Human
ucuaaaguauuuacuucuugcuuug

SEQ ID NO: 262508 - RNA, 18 nt, Human
ucugauguggcgguggcg

SEQ ID NO: 262509 - RNA, 20 nt, Human
ucuggaacccugagucugga

SEQ ID NO: 262510 - RNA, 26 nt, Human
ucuggaacccugagucuggauuuccc

SEQ ID NO: 262511 - RNA, 23 nt, Human
ucuuccaucaaaaaaaaaaaaaa

SEQ ID NO: 262512 - RNA, 21 nt, Human
ucuucuccaaccuuccccaca

SEQ ID NO: 262513 - RNA, 22 nt, Human
ugacaaaaaaugaaaaauauag

SEQ ID NO: 262514 - RNA, 24 nt, Human
ugacaaaaaaugaaaaauauagga

SEQ ID NO: 262515 - RNA, 21 nt, Human
ugacacagaauguggaaaaga

SEQ ID NO: 262516 - RNA, 25 nt, Human
ugacacagaauguggaaaagaacua

SEQ ID NO: 262517 - RNA, 20 nt, Human
ugaccuuaccccuaguccuc

SEQ ID NO: 262518 - RNA, 19 nt, Human
ugagggugggaagugcuac

SEQ ID NO: 262519 - RNA, 20 nt, Human
ugaugcccagggcagugcuc

SEQ ID NO: 262520 - RNA, 22 nt, Human
ugccaagauuacaaagcacaaa

SEQ ID NO: 262521 - RNA, 26 nt, Human
ugccaagauuacaaagcacaaaccua

SEQ ID NO: 262522 - RNA, 21 nt, Human
ugcccagguugagugggccug

SEQ ID NO: 262523 - RNA, 21 nt, Human
ugcccugaaucuccucaaggc

SEQ ID NO: 262524 - RNA, 23 nt, Human
ugccuggacugagagcaccaggg

SEQ ID NO: 262525 - RNA, 27 nt, Human
ugccuggacugagagcaccagggaagc

SEQ ID NO: 262526 - RNA, 19 nt, Human
ugcuacacagccuggccca

SEQ ID NO: 262527 - RNA, 19 nt, Human
ugcucccuuuuccaggggc

SEQ ID NO: 262528 - RNA, 22 nt, Human
uggagaguuacgguuccuccuu

SEQ ID NO: 262529 - RNA, 18 nt, Human
uggcucugaccaccaucc

SEQ ID NO: 262530 - RNA, 18 nt, Human
uggcuuucuucccugcuc

SEQ ID NO: 262531 - RNA, 19 nt, Human
ugggaagugcuacacagcc

SEQ ID NO: 262532 - RNA, 22 nt, Human
uguacagcuauggagaguuacg

SEQ ID NO: 262533 - RNA, 26 nt, Human
ugugcuggcugaggaagagauuguuu

SEQ ID NO: 262534 - RNA, 25 nt, Human
uguggaaaagaacuacacccuguuu

SEQ ID NO: 262535 - RNA, 24 nt, Human
uuaccgugugccucucccuccaaa

SEQ ID NO: 262536 - RNA, 23 nt, Human
uuuaccgugugccucucccucca

SEQ ID NO: 262537 - RNA, 20 nt, Human
uuucagcagagucaagcaug

SEQ ID NO: 262538 - RNA, 18 nt, Human
aaaacaaaacaaaaaauc

SEQ ID NO: 262539 - RNA, 23 nt, Human
aaacaaaacaaggcugaccagaa

SEQ ID NO: 262540 - RNA, 26 nt, Human
aaccacaaaauaagaaucaauggaau

SEQ ID NO: 262541 - RNA, 21 nt, Human
aaccagaguugaauacaagaa

SEQ ID NO: 262542 - RNA, 21 nt, Human
aagaagaaaaauaaugcucca

SEQ ID NO: 262543 - RNA, 24 nt, Human
aauacaaaaguggggcaggcuaaa

SEQ ID NO: 262544 - RNA, 22 nt, Human
acaaaauaagaaucaauggaau

SEQ ID NO: 262545 - RNA, 21 nt, Human
acacuaugcaaauugccuaau

SEQ ID NO: 262546 - RNA, 25 nt, Human
acacuuccaaacacacugaacauaa

SEQ ID NO: 262547 - RNA, 25 nt, Human
accauacggcuacagaaacagggcu

SEQ ID NO: 262548 - RNA, 22 nt, Human
agaagaaaaacaaaacaaaaaa

SEQ ID NO: 262549 - RNA, 21 nt, Human
agcgacagagagcaagcggga

SEQ ID NO: 262550 - RNA, 18 nt, Human
agcguguguggaccgaga

SEQ ID NO: 262551 - RNA, 21 nt, Human
auauaaacacacaaauauaug

SEQ ID NO: 262552 - RNA, 24 nt, Human
aucauugcagaaaaaacucuauga

SEQ ID NO: 262553 - RNA, 23 nt, Human
caaaccccgcggccucccggggg

SEQ ID NO: 262554 - RNA, 26 nt, Human
caaauaccacucauuucuuacagaac

SEQ ID NO: 262555 - RNA, 21 nt, Human
caagaagaaaaauaaugcucc

SEQ ID NO: 262556 - RNA, 18 nt, Human
caccauguuauuuaaauu

SEQ ID NO: 262557 - RNA, 24 nt, Human
cacccccagcaguaaugagagcac

SEQ ID NO: 262558 - RNA, 18 nt, Human
cagaaaaaacucuaugag

SEQ ID NO: 262559 - RNA, 19 nt, Human
cagaagauucuaaaaccac

SEQ ID NO: 262560 - RNA, 18 nt, Human
cagccacagaagauucua

SEQ ID NO: 262561 - RNA, 19 nt, Human
cagcgcccccugcuggagg

SEQ ID NO: 262562 - RNA, 19 nt, Human
cagucugcuuuugccaaca

SEQ ID NO: 262563 - RNA, 29 nt, Human
caugcuauacacuuccaaacacacugaac

SEQ ID NO: 262564 - RNA, 23 nt, Human
ccaaaaguuuuugaguaaacuga

SEQ ID NO: 262565 - RNA, 19 nt, Human
cccgggggacucggggcag

SEQ ID NO: 262566 - RNA, 28 nt, Human
ccuacuguuaaacccuaaaagguuuucc

SEQ ID NO: 262567 - RNA, 22 nt, Human
cggaucccacagcgcccccugc

SEQ ID NO: 262568 - RNA, 24 nt, Human
cggaucccacagcgcccccugcug

SEQ ID NO: 262569 - RNA, 22 nt, Human
cggcuacagaaacagggcggug

SEQ ID NO: 262570 - RNA, 22 nt, Human
cgucaacggcgcaggugcagcc

SEQ ID NO: 262571 - RNA, 18 nt, Human
cuaaaaccacaaucagug

SEQ ID NO: 262572 - RNA, 22 nt, Human
cuaaaaccacaaucagugacug

SEQ ID NO: 262573 - RNA, 25 nt, Human
cucagaacaguuuuagagcuuuagc

SEQ ID NO: 262574 - RNA, 18 nt, Human
cucccgggggacucgggg

SEQ ID NO: 262575 - RNA, 24 nt, Human
cucccgggggacucggggcaggca

SEQ ID NO: 262576 - RNA, 20 nt, Human
cugccggccccgguggcguc

SEQ ID NO: 262577 - RNA, 21 nt, Human
cugcuuuugccaacauauacc

SEQ ID NO: 262578 - RNA, 20 nt, Human
cuguacuucccuuuuuuauu

SEQ ID NO: 262579 - RNA, 24 nt, Human
cuuguacugcaaucauugcagaaa

SEQ ID NO: 262580 - RNA, 22 nt, Human
gaacagcaacucauugagcaau

SEQ ID NO: 262581 - RNA, 19 nt, Human
gagcaagcgggaacucccu

SEQ ID NO: 262582 - RNA, 23 nt, Human
gagcaagcgggaacucccuccac

SEQ ID NO: 262583 - RNA, 19 nt, Human
gcgcaggugcagccgguga

SEQ ID NO: 262584 - RNA, 18 nt, Human
gcuggaggaggccgguac

SEQ ID NO: 262585 - RNA, 21 nt, Human
ggaacucccuccaccagccag

SEQ ID NO: 262586 - RNA, 18 nt, Human
ggaucccacagcgccccc

SEQ ID NO: 262587 - RNA, 20 nt, Human
guagcaugcacccccagcag

SEQ ID NO: 262588 - RNA, 18 nt, Human
uaaaaccacaaucaguga

SEQ ID NO: 262589 - RNA, 21 nt, Human
uaaacgugaacaguguacuuc

SEQ ID NO: 262590 - RNA, 21 nt, Human
uaaauacaucaaauaccacuc

SEQ ID NO: 262591 - RNA, 21 nt, Human
uaaauaucacuaaaaggcaaa

SEQ ID NO: 262592 - RNA, 28 nt, Human
uaacauaaaucauaaacgucaauucacu

SEQ ID NO: 262593 - RNA, 23 nt, Human
uaagauaauaaaccagaguugaa

SEQ ID NO: 262594 - RNA, 18 nt, Human
uacaaaaguggggcaggc

SEQ ID NO: 262595 - RNA, 20 nt, Human
uacaaacaaaacaaggcuga

SEQ ID NO: 262596 - RNA, 24 nt, Human
uacagaccauccucacaauaaucc

SEQ ID NO: 262597 - RNA, 18 nt, Human
uaccauacggcuacagaa

SEQ ID NO: 262598 - RNA, 26 nt, Human
uaccauacggcuacagaaacagggcg

SEQ ID NO: 262599 - RNA, 21 nt, Human
uagaaacacuuccccaaaccc

SEQ ID NO: 262600 - RNA, 22 nt, Human
uagaaacacuuccccaaacccc

SEQ ID NO: 262601 - RNA, 19 nt, Human
uagugcauuucuguugcug

SEQ ID NO: 262602 - RNA, 19 nt, Human
uaguuauuauccuuccuuc

SEQ ID NO: 262603 - RNA, 22 nt, Human
uaucuguacuucccuuuuuuau

SEQ ID NO: 262604 - RNA, 22 nt, Human
uaugcuuacagaccauccucac

SEQ ID NO: 262605 - RNA, 23 nt, Human
ucaaauguagcacuaaacaaauu

SEQ ID NO: 262606 - RNA, 18 nt, Human
ucacuaguguacagugca

SEQ ID NO: 262607 - RNA, 22 nt, Human
ucagccacagaagauucuaaaa

SEQ ID NO: 262608 - RNA, 18 nt, Human
ucagccggcagccggucu

SEQ ID NO: 262609 - RNA, 22 nt, Human
ucagugacuggaacaccaaggc

SEQ ID NO: 262610 - RNA, 19 nt, Human
uccaggaacagcaacucau

SEQ ID NO: 262611 - RNA, 22 nt, Human
uccauauauaaaagacagucaa

SEQ ID NO: 262612 - RNA, 23 nt, Human
ucuauauuuaacaagaagaaaaa

SEQ ID NO: 262613 - RNA, 24 nt, Human
ucuccuagaaacacuuccccaaac

SEQ ID NO: 262614 - RNA, 25 nt, Human
ucuccuagaaacacuuccccaaacc

SEQ ID NO: 262615 - RNA, 22 nt, Human
ugaaagaaauaaagccaaccac

SEQ ID NO: 262616 - RNA, 18 nt, Human
ugaaugucauuccuugcu

SEQ ID NO: 262617 - RNA, 23 nt, Human
ugaccagaagaaaaacaaaacaa

SEQ ID NO: 262618 - RNA, 19 nt, Human
ugacuucaaaauucaugca

SEQ ID NO: 262619 - RNA, 19 nt, Human
ugaucagaauaaaccuuca

SEQ ID NO: 262620 - RNA, 23 nt, Human
ugcaaucauugcagaaaaaacuc

SEQ ID NO: 262621 - RNA, 21 nt, Human
ugcuccacauagaaaugacuu

SEQ ID NO: 262622 - RNA, 20 nt, Human
uggaacaccaaggcacaaaa

SEQ ID NO: 262623 - RNA, 22 nt, Human
uggaacaccaaggcacaaaaac

SEQ ID NO: 262624 - RNA, 24 nt, Human
uggaacaccaaggcacaaaaacuu

SEQ ID NO: 262625 - RNA, 24 nt, Human
uggcaaaaugaaaucuuucccaga

SEQ ID NO: 262626 - RNA, 21 nt, Human
uggcugaauuaacauaaauca

SEQ ID NO: 262627 - RNA, 23 nt, Human
ugucugccggccccgguggcguc

SEQ ID NO: 262628 - RNA, 19 nt, Human
ugugcuuauacguauucaa

SEQ ID NO: 262629 - RNA, 21 nt, Human
uguuguaggcuguaaaacuua

SEQ ID NO: 262630 - RNA, 21 nt, Human
uuauagugcauuucuguugcu

SEQ ID NO: 262631 - RNA, 27 nt, Human
uucaagaaaucaauauucuaagcugua

SEQ ID NO: 262632 - RNA, 21 nt, Human
uugguuaugcuuacagaccau

SEQ ID NO: 262633 - RNA, 18 nt, Human
uuucucaguccaccugug

SEQ ID NO: 262634 - RNA, 20 nt, Human
uuuguuucuuguuuuuugga

SEQ ID NO: 262635 - RNA, 23 nt, Human
uuuuauagugcauuucuguugcu

SEQ ID NO: 262636 - RNA, 24 nt, Human
uuuuuggucugaaaaagauguuua

SEQ ID NO: 262637 - RNA, 21 nt, Human
aaaauaaggaacaaccaaaaa

SEQ ID NO: 262638 - RNA, 19 nt, Human
aacaguaaccaaacaaguu

SEQ ID NO: 262639 - RNA, 19 nt, Human
agaagccaaaagauaagac

SEQ ID NO: 262640 - RNA, 18 nt, Human
augaugugugccguggcc

SEQ ID NO: 262641 - RNA, 19 nt, Human
cacugaaucuuaagaggcu

SEQ ID NO: 262642 - RNA, 21 nt, Human
cugaagccggacaggggcugg

SEQ ID NO: 262643 - RNA, 18 nt, Human
gaacugagccacaaacca

SEQ ID NO: 262644 - RNA, 22 nt, Human
ggaaaagcauuuuauuauaacc

SEQ ID NO: 262645 - RNA, 22 nt, Human
uaaccaaacaaguugaccuaaa

SEQ ID NO: 262646 - RNA, 21 nt, Human
uaagaggcuuucaugaagccu

SEQ ID NO: 262647 - RNA, 26 nt, Human
uauaauaguaagaaaggacaggaaau

SEQ ID NO: 262648 - RNA, 19 nt, Human
ucacacuuuccagaaaaaa

SEQ ID NO: 262649 - RNA, 21 nt, Human
uccaaguacagggaaguucau

SEQ ID NO: 262650 - RNA, 21 nt, Human
ugugccguggccgauuuggga

SEQ ID NO: 262651 - RNA, 19 nt, Human
uguggaacugagccacaaa

SEQ ID NO: 262652 - RNA, 24 nt, Human
uucacacuuuccagaaaaaaauua

SEQ ID NO: 262653 - RNA, 23 nt, Human
uucauagaagccaaaagauaaga

SEQ ID NO: 262654 - RNA, 19 nt, Human
aaaaaacacacaauaaaac

SEQ ID NO: 262655 - RNA, 25 nt, Human
aaaaagcucagcuguauuaacagac

SEQ ID NO: 262656 - RNA, 22 nt, Human
aaaacugauaccauaagaaagu

SEQ ID NO: 262657 - RNA, 25 nt, Human
aaacaacaacaacaacaacaacaac

SEQ ID NO: 262658 - RNA, 20 nt, Human
aaacaacaauguucuucuga

SEQ ID NO: 262659 - RNA, 23 nt, Human
aaacacacauacacauauaaacc

SEQ ID NO: 262660 - RNA, 23 nt, Human
aaacucccucacaaguuuccacc

SEQ ID NO: 262661 - RNA, 20 nt, Human
aaagugcugggauuacaggc

SEQ ID NO: 262662 - RNA, 23 nt, Human
aaagugcugggauuacaggcgua

SEQ ID NO: 262663 - RNA, 25 nt, Human
aacaacaacaacaaaacuuuaucag

SEQ ID NO: 262664 - RNA, 22 nt, Human
aacacacaauaaaacacacaua

SEQ ID NO: 262665 - RNA, 26 nt, Human
aagcaauaaaaucccaccccuaaauc

SEQ ID NO: 262666 - RNA, 20 nt, Human
aagcagugggagucacuucu

SEQ ID NO: 262667 - RNA, 20 nt, Human
aaggaagaugcuguggacag

SEQ ID NO: 262668 - RNA, 19 nt, Human
aagggcacaaggagagaac

SEQ ID NO: 262669 - RNA, 19 nt, Human
aagugcugggauuacaggc

SEQ ID NO: 262670 - RNA, 19 nt, Human
aagugcugggauuacaggc

SEQ ID NO: 262671 - RNA, 24 nt, Human
aaucacuuuaaaaucuugcuuuga

SEQ ID NO: 262672 - RNA, 23 nt, Human
acaacaacaacaacaaaacuuua

SEQ ID NO: 262673 - RNA, 19 nt, Human
acaacaacaacaacaacaa

SEQ ID NO: 262674 - RNA, 19 nt, Human
acaacaacaacaacaacaa

SEQ ID NO: 262675 - RNA, 21 nt, Human
acaacaacaacaacaacaaaa

SEQ ID NO: 262676 - RNA, 22 nt, Human
acaacaacaacaacaacaacaa

SEQ ID NO: 262677 - RNA, 24 nt, Human
acaacaacaacaacaacaacaaaa

SEQ ID NO: 262678 - RNA, 30 nt, Human
acacaccaccacaccaggcuaaugggaguu

SEQ ID NO: 262679 - RNA, 28 nt, Human
acacagcucuaaagcaggggggaacgcc

SEQ ID NO: 262680 - RNA, 18 nt, Human
acagcaaagaaaguaagu

SEQ ID NO: 262681 - RNA, 21 nt, Human
acaggcgcccgccaccacacc

SEQ ID NO: 262682 - RNA, 18 nt, Human
acaggcguaagccaccau

SEQ ID NO: 262683 - RNA, 23 nt, Human
accguuuuuggauuugggaaaac

SEQ ID NO: 262684 - RNA, 24 nt, Human
accucaugauccgcccgccuuggc

SEQ ID NO: 262685 - RNA, 23 nt, Human
acgcaggaaucugauuaucccuc

SEQ ID NO: 262686 - RNA, 20 nt, Human
acugcaagcucugccucccg

SEQ ID NO: 262687 - RNA, 19 nt, Human
acugcagccucaaccuccu

SEQ ID NO: 262688 - RNA, 23 nt, Human
agaaaagccuccuucauauacaa

SEQ ID NO: 262689 - RNA, 21 nt, Human
agaacaguaccacauucgaca

SEQ ID NO: 262690 - RNA, 21 nt, Human
agaauuucagagggucucuuc

SEQ ID NO: 262691 - RNA, 21 nt, Human
agacaaaaagagaagaaaaca

SEQ ID NO: 262692 - RNA, 18 nt, Human
agcaaagaaaguaaguca

SEQ ID NO: 262693 - RNA, 18 nt, Human
agccagggaaccgagccc

SEQ ID NO: 262694 - RNA, 21 nt, Human
aggcacacaccaccacaccag

SEQ ID NO: 262695 - RNA, 25 nt, Human
aggcuggagugcaguggugcgaucu

SEQ ID NO: 262696 - RNA, 24 nt, Human
agggauccuucugccucagcuuuc

SEQ ID NO: 262697 - RNA, 18 nt, Human
aguaaacucucaucagaa

SEQ ID NO: 262698 - RNA, 18 nt, Human
aguagcugggacuacagg

SEQ ID NO: 262699 - RNA, 20 nt, Human
agugcaguggugcgaucucg

SEQ ID NO: 262700 - RNA, 23 nt, Human
agugcaguggugcgaucucggcu

SEQ ID NO: 262701 - RNA, 24 nt, Human
agugcaguggugcgaucucggcuc

SEQ ID NO: 262702 - RNA, 18 nt, Human
agugcugggauuacaggc

SEQ ID NO: 262703 - RNA, 19 nt, Human
auagacuagcagagcauga

SEQ ID NO: 262704 - RNA, 24 nt, Human
auagcucacugcagccucaaccuc

SEQ ID NO: 262705 - RNA, 21 nt, Human
auauuacaaacaauauuaaaa

SEQ ID NO: 262706 - RNA, 19 nt, Human
auccgcccgccuuggccuc

SEQ ID NO: 262707 - RNA, 24 nt, Human
auggaaaugguuuuaaagauuacu

SEQ ID NO: 262708 - RNA, 19 nt, Human
augucuuggccagacaaac

SEQ ID NO: 262709 - RNA, 24 nt, Human
auuaaaaaaaaaaaaaguacuuau

SEQ ID NO: 262710 - RNA, 22 nt, Human
caaaaagcaauaaaaucccacc

SEQ ID NO: 262711 - RNA, 20 nt, Human
caaaacuuuaucagauguac

SEQ ID NO: 262712 - RNA, 22 nt, Human
caaagaaauguuuaaaaauccc

SEQ ID NO: 262713 - RNA, 21 nt, Human
caaagcaaauuugcaaaaggc

SEQ ID NO: 262714 - RNA, 21 nt, Human
caaaucaauagagccaaagca

SEQ ID NO: 262715 - RNA, 23 nt, Human
caaaugaagguagaaguaauuuu

SEQ ID NO: 262716 - RNA, 23 nt, Human
caaauuaaaaaaacacacaauaa

SEQ ID NO: 262717 - RNA, 20 nt, Human
caaccuguaaacagaucuga

SEQ ID NO: 262718 - RNA, 21 nt, Human
caagaaaauaaagaaaacuga

SEQ ID NO: 262719 - RNA, 22 nt, Human
caagggauccuucugccucagc

SEQ ID NO: 262720 - RNA, 27 nt, Human
caaucuugagacaaaaagagaagaaaa

SEQ ID NO: 262721 - RNA, 22 nt, Human
caauuaaaacaacaacaacaac

SEQ ID NO: 262722 - RNA, 22 nt, Human
cacacaauaaaacacacauaca

SEQ ID NO: 262723 - RNA, 19 nt, Human
cacacaccaccacaccagg

SEQ ID NO: 262724 - RNA, 20 nt, Human
cacacaccaccacaccaggc

SEQ ID NO: 262725 - RNA, 31 nt, Human
cacacaccaccacaccaggcuaaugggaguu

SEQ ID NO: 262726 - RNA, 22 nt, Human
cacaccauucuccugccucagc

SEQ ID NO: 262727 - RNA, 21 nt, Human
cacacuaagaacaguaccacu

SEQ ID NO: 262728 - RNA, 23 nt, Human
cacagguucacaauauggaaacc

SEQ ID NO: 262729 - RNA, 21 nt, Human
caccaggcuaaugggagucac

SEQ ID NO: 262730 - RNA, 23 nt, Human
caccaguaacaauucucaaucag

SEQ ID NO: 262731 - RNA, 20 nt, Human
caccauucucuucauucaag

SEQ ID NO: 262732 - RNA, 24 nt, Human
caccguguuagccaggauggucuc

SEQ ID NO: 262733 - RNA, 23 nt, Human
cacugcaagcucugccucccggg

SEQ ID NO: 262734 - RNA, 19 nt, Human
cacugcagccucaaccucc

SEQ ID NO: 262735 - RNA, 19 nt, Human
cacuucuggcuuuuucuuu

SEQ ID NO: 262736 - RNA, 24 nt, Human
cagccucaaccuccuaggcucaag

SEQ ID NO: 262737 - RNA, 20 nt, Human
cagccuccugaguagcuggg

SEQ ID NO: 262738 - RNA, 20 nt, Human
cagugggagucacuucuggc

SEQ ID NO: 262739 - RNA, 21 nt, Human
cauaaaccaaauacugacuga

SEQ ID NO: 262740 - RNA, 24 nt, Human
caugauacugauuuuuuauuuaac

SEQ ID NO: 262741 - RNA, 26 nt, Human
ccaaaaaagcuucagguuuuuaaaaa

SEQ ID NO: 262742 - RNA, 20 nt, Human
ccaaagugcugggauuacag

SEQ ID NO: 262743 - RNA, 22 nt, Human
ccaaagugcugggauuacaggc

SEQ ID NO: 262744 - RNA, 22 nt, Human
ccaaagugcugggauuacaggc

SEQ ID NO: 262745 - RNA, 24 nt, Human
ccaaagugcugggauuacaggcgu

SEQ ID NO: 262746 - RNA, 26 nt, Human
ccacaaacauuuggaguugcaggcau

SEQ ID NO: 262747 - RNA, 21 nt, Human
ccagacaacuacacgaguuau

SEQ ID NO: 262748 - RNA, 19 nt, Human
ccauuuucaaaggcuucuc

SEQ ID NO: 262749 - RNA, 18 nt, Human
cccaauuaaaacaacaac

SEQ ID NO: 262750 - RNA, 18 nt, Human
cccacaaaauuucauccu

SEQ ID NO: 262751 - RNA, 20 nt, Human
ccccacaaaauuucauccuu

SEQ ID NO: 262752 - RNA, 22 nt, Human
cccgccuuggccucccaaagug

SEQ ID NO: 262753 - RNA, 20 nt, Human
cccgcggccggagccaggga

SEQ ID NO: 262754 - RNA, 19 nt, Human
cccuuuuuuuaaaccacca

SEQ ID NO: 262755 - RNA, 19 nt, Human
ccuaggcucaagggauccu

SEQ ID NO: 262756 - RNA, 20 nt, Human
ccuaggcucaagggauccuu

SEQ ID NO: 262757 - RNA, 24 nt, Human
ccucccggguucacaccauucucc

SEQ ID NO: 262758 - RNA, 20 nt, Human
ccugaaaccagacaacuaca

SEQ ID NO: 262759 - RNA, 23 nt, Human
ccugaguagcugggacuacaggc

SEQ ID NO: 262760 - RNA, 23 nt, Human
ccugaguagcugggacuacaggc

SEQ ID NO: 262761 - RNA, 22 nt, Human
ccuggaaaguucucugaaccuc

SEQ ID NO: 262762 - RNA, 21 nt, Human
ccuucugccucagcuuuccua

SEQ ID NO: 262763 - RNA, 24 nt, Human
ccuuucgcccaggcuggagugcag

SEQ ID NO: 262764 - RNA, 24 nt, Human
cgcccaggcuggagugcaguggug

SEQ ID NO: 262765 - RNA, 23 nt, Human
cuaauuuuuuguauuuuuaguag

SEQ ID NO: 262766 - RNA, 30 nt, Human
cucaaaguucaaagaaauguuuaaaaaucc

SEQ ID NO: 262767 - RNA, 18 nt, Human
cucaagggauccuucugc

SEQ ID NO: 262768 - RNA, 24 nt, Human
cucacugcaagcucugccucccgg

SEQ ID NO: 262769 - RNA, 21 nt, Human
cucacugcagccucaaccucc

SEQ ID NO: 262770 - RNA, 24 nt, Human
cucagccuccugaguagcugggac

SEQ ID NO: 262771 - RNA, 24 nt, Human
cucagcuuuccuaguggcugggac

SEQ ID NO: 262772 - RNA, 24 nt, Human
cucccccgcggccggagccaggga

SEQ ID NO: 262773 - RNA, 21 nt, Human
cucccggguucacaccauucu

SEQ ID NO: 262774 - RNA, 24 nt, Human
cuccugaccucaugauccgcccgc

SEQ ID NO: 262775 - RNA, 24 nt, Human
cucgcucuguugcucaggcuggag

SEQ ID NO: 262776 - RNA, 21 nt, Human
cugaaaccagacaacuacacg

SEQ ID NO: 262777 - RNA, 19 nt, Human
cugaccguuuuuggauuug

SEQ ID NO: 262778 - RNA, 23 nt, Human
cugccucagccuccugaguagcu

SEQ ID NO: 262779 - RNA, 19 nt, Human
cuuucgcccaggcuggagu

SEQ ID NO: 262780 - RNA, 23 nt, Human
cuuuuccaugauacugauuuuuu

SEQ ID NO: 262781 - RNA, 18 nt, Human
gacaaaccggccaaccca

SEQ ID NO: 262782 - RNA, 20 nt, Human
gaccucaugauccgcccgcc

SEQ ID NO: 262783 - RNA, 18 nt, Human
gacuguauguauaugugu

SEQ ID NO: 262784 - RNA, 21 nt, Human
gagaagaaaagccuccuucau

SEQ ID NO: 262785 - RNA, 20 nt, Human
gaguagcugggacuacaggc

SEQ ID NO: 262786 - RNA, 19 nt, Human
gaucauagcucacugcagc

SEQ ID NO: 262787 - RNA, 18 nt, Human
gauuacaggcguaagcca

SEQ ID NO: 262788 - RNA, 21 nt, Human
gauuacaggcguaagccacca

SEQ ID NO: 262789 - RNA, 22 nt, Human
gauuacaggcguaagccaccau

SEQ ID NO: 262790 - RNA, 18 nt, Human
gcccaauuaaaacaacaa

SEQ ID NO: 262791 - RNA, 19 nt, Human
gcccaggcuggagugcagu

SEQ ID NO: 262792 - RNA, 20 nt, Human
gcccaggcuggagugcagug

SEQ ID NO: 262793 - RNA, 23 nt, Human
gcccaggcuggagugcaguggug

SEQ ID NO: 262794 - RNA, 24 nt, Human
gcccaugugaaagaauaagcagua

SEQ ID NO: 262795 - RNA, 18 nt, Human
gcccauuucugguccagg

SEQ ID NO: 262796 - RNA, 21 nt, Human
gccgaucaacagaagcagugg

SEQ ID NO: 262797 - RNA, 21 nt, Human
gccgcagggaaguagcggaaa

SEQ ID NO: 262798 - RNA, 18 nt, Human
gccggagccagggaaccg

SEQ ID NO: 262799 - RNA, 18 nt, Human
gccucaaccuccuaggcu

SEQ ID NO: 262800 - RNA, 24 nt, Human
gccucagcuuuccuaguggcuggg

SEQ ID NO: 262801 - RNA, 22 nt, Human
gccuuggccucccaaagugcug

SEQ ID NO: 262802 - RNA, 19 nt, Human
gcgaucauagcucacugca

SEQ ID NO: 262803 - RNA, 18 nt, Human
gcuugcuuucuucccauu

SEQ ID NO: 262804 - RNA, 18 nt, Human
ggaaaugguuuuaaagau

SEQ ID NO: 262805 - RNA, 18 nt, Human
ggagccagggaaccgagc

SEQ ID NO: 262806 - RNA, 24 nt, Human
ggauuacaggcguaagccaccaug

SEQ ID NO: 262807 - RNA, 24 nt, Human
gggauccuucugccucagcuuucc

SEQ ID NO: 262808 - RNA, 23 nt, Human
gggcaaucugcuugcucacucau

SEQ ID NO: 262809 - RNA, 18 nt, Human
ggguuuucaccguguuag

SEQ ID NO: 262810 - RNA, 20 nt, Human
ggucucgaucuccugaccuc

SEQ ID NO: 262811 - RNA, 20 nt, Human
gucacuucuggcuuuuucuu

SEQ ID NO: 262812 - RNA, 24 nt, Human
gucucgcucuguugcucaggcugg

SEQ ID NO: 262813 - RNA, 24 nt, Human
uaaaacaaaaagcaauaaaauccc

SEQ ID NO: 262814 - RNA, 18 nt, Human
uaaaacaacaacaacaac

SEQ ID NO: 262815 - RNA, 23 nt, Human
uaaaaugagcaaugucaccaaac

SEQ ID NO: 262816 - RNA, 23 nt, Human
uaacaggccacaugaaacauggu

SEQ ID NO: 262817 - RNA, 22 nt, Human
uaacauaaaccaaauacugacu

SEQ ID NO: 262818 - RNA, 23 nt, Human
uaauuuuuuguauuuuuaguaga

SEQ ID NO: 262819 - RNA, 31 nt, Human
uacaaauuaaaaaaacacacaauaaaacacc

SEQ ID NO: 262820 - RNA, 18 nt, Human
uacaagcagcauuugaaa

SEQ ID NO: 262821 - RNA, 23 nt, Human
uacaagcagcauuugaaacacau

SEQ ID NO: 262822 - RNA, 22 nt, Human
uacacacuaagaacaguaccac

SEQ ID NO: 262823 - RNA, 22 nt, Human
uacaggcgcccgccaccacacc

SEQ ID NO: 262824 - RNA, 24 nt, Human
uacaggcguaagccaccaugccca

SEQ ID NO: 262825 - RNA, 23 nt, Human
uacguaucuccuguauaaaaacc

SEQ ID NO: 262826 - RNA, 22 nt, Human
uacugaaccacaaacauuugga

SEQ ID NO: 262827 - RNA, 19 nt, Human
uagauuguugucucaguga

SEQ ID NO: 262828 - RNA, 24 nt, Human
uagcucacugcagccucaaccucc

SEQ ID NO: 262829 - RNA, 25 nt, Human
uagcuugauuauaauaaauuaacuc

SEQ ID NO: 262830 - RNA, 22 nt, Human
uauauucauaaacuucccccuc

SEQ ID NO: 262831 - RNA, 18 nt, Human
uaucccagauuaaggucg

SEQ ID NO: 262832 - RNA, 18 nt, Human
uaugcucaaaaccugaaa

SEQ ID NO: 262833 - RNA, 20 nt, Human
uaugcucaaaaccugaaaac

SEQ ID NO: 262834 - RNA, 22 nt, Human
uauguauaugugugugugcgua

SEQ ID NO: 262835 - RNA, 27 nt, Human
uauuauugucccccccaagucuucuca

SEQ ID NO: 262836 - RNA, 20 nt, Human
uauugcccauuucuggucca

SEQ ID NO: 262837 - RNA, 21 nt, Human
ucaaacagcuaucccugaaac

SEQ ID NO: 262838 - RNA, 19 nt, Human
ucaaaggcagcucuccgau

SEQ ID NO: 262839 - RNA, 24 nt, Human
ucaccguguuagccaggauggucu

SEQ ID NO: 262840 - RNA, 18 nt, Human
ucacugcaagcucugccu

SEQ ID NO: 262841 - RNA, 18 nt, Human
ucacugcaagcucugccu

SEQ ID NO: 262842 - RNA, 24 nt, Human
ucacugcaagcucugccucccggg

SEQ ID NO: 262843 - RNA, 19 nt, Human
ucacugcagccucaaccuc

SEQ ID NO: 262844 - RNA, 23 nt, Human
ucacugcagccucaaccuccuag

SEQ ID NO: 262845 - RNA, 24 nt, Human
ucacugcagccucaaccuccuagg

SEQ ID NO: 262846 - RNA, 21 nt, Human
ucagagggucucuucugggac

SEQ ID NO: 262847 - RNA, 23 nt, Human
ucagccuccugaguagcugggac

SEQ ID NO: 262848 - RNA, 18 nt, Human
ucagguuuuuaaaaacau

SEQ ID NO: 262849 - RNA, 23 nt, Human
ucccaaaaagacuguggacugug

SEQ ID NO: 262850 - RNA, 24 nt, Human
ucccaaagugcugggauuacaggc

SEQ ID NO: 262851 - RNA, 24 nt, Human
ucccaccccuaaaucaggccucaa

SEQ ID NO: 262852 - RNA, 21 nt, Human
ucccggguucacaccauucuc

SEQ ID NO: 262853 - RNA, 24 nt, Human
ucccggguucacaccauucuccug

SEQ ID NO: 262854 - RNA, 19 nt, Human
ucccuccaugaccagaccu

SEQ ID NO: 262855 - RNA, 26 nt, Human
ucccuccaugaccagaccuaauacaa

SEQ ID NO: 262856 - RNA, 18 nt, Human
uccuaggcucaagggauc

SEQ ID NO: 262857 - RNA, 24 nt, Human
uccuaguggcugggacuauaggca

SEQ ID NO: 262858 - RNA, 24 nt, Human
uccugaguagcugggacuacaggc

SEQ ID NO: 262859 - RNA, 18 nt, Human
uccuugcgaagggugcga

SEQ ID NO: 262860 - RNA, 24 nt, Human
ucgcccaggcuggagugcaguggu

SEQ ID NO: 262861 - RNA, 24 nt, Human
ucgcucuguugcucaggcuggagu

SEQ ID NO: 262862 - RNA, 22 nt, Human
ucuaaagccuucacuucaaggc

SEQ ID NO: 262863 - RNA, 22 nt, Human
ucuagaagugggcaaauaccaa

SEQ ID NO: 262864 - RNA, 19 nt, Human
ucucgcucuguugcucagg

SEQ ID NO: 262865 - RNA, 22 nt, Human
ucucgcucuguugcucaggcug

SEQ ID NO: 262866 - RNA, 23 nt, Human
ucucgcucuguugcucaggcugg

SEQ ID NO: 262867 - RNA, 24 nt, Human
ucucgcucuguugcucaggcugga

SEQ ID NO: 262868 - RNA, 20 nt, Human
ucucugaaccucuucaguuc

SEQ ID NO: 262869 - RNA, 18 nt, Human
ucucuucugggacuauug

SEQ ID NO: 262870 - RNA, 24 nt, Human
ucugccucagcuuuccuaguggcu

SEQ ID NO: 262871 - RNA, 22 nt, Human
ucuguugcucaggcuggagugg

SEQ ID NO: 262872 - RNA, 23 nt, Human
ucuucugauuaaaaaaaaaaaaa

SEQ ID NO: 262873 - RNA, 22 nt, Human
ucuugcccuuucgcccaggcug

SEQ ID NO: 262874 - RNA, 23 nt, Human
ucuugcccuuucgcccaggcugg

SEQ ID NO: 262875 - RNA, 24 nt, Human
ucuugcccuuucgcccaggcugga

SEQ ID NO: 262876 - RNA, 24 nt, Human
ugaaacacaaauggcauuaaauag

SEQ ID NO: 262877 - RNA, 24 nt, Human
ugaaucaaagacuaaaaccccaca

SEQ ID NO: 262878 - RNA, 20 nt, Human
ugacaggcccuaacaggcca

SEQ ID NO: 262879 - RNA, 19 nt, Human
ugacugaaucaaagacuaa

SEQ ID NO: 262880 - RNA, 20 nt, Human
ugagaauagauuucagcuuc

SEQ ID NO: 262881 - RNA, 22 nt, Human
ugagacaaaaagagaagaaaac

SEQ ID NO: 262882 - RNA, 24 nt, Human
ugagacccuaaguuuucuuggaaa

SEQ ID NO: 262883 - RNA, 23 nt, Human
ugagcaaugucaccaaacagaaa

SEQ ID NO: 262884 - RNA, 24 nt, Human
ugccaccauucucuucauucaagu

SEQ ID NO: 262885 - RNA, 24 nt, Human
ugcccuuucgcccaggcuggagug

SEQ ID NO: 262886 - RNA, 24 nt, Human
ugccucagccuccugaguagcugg

SEQ ID NO: 262887 - RNA, 24 nt, Human
ugccucagcuuuccuaguggcugg

SEQ ID NO: 262888 - RNA, 21 nt, Human
ugcucaggcuggaguggacug

SEQ ID NO: 262889 - RNA, 24 nt, Human
ugcucaggcuggaguggacugaug

SEQ ID NO: 262890 - RNA, 24 nt, Human
ugcugggauuacaggcguaagcca

SEQ ID NO: 262891 - RNA, 18 nt, Human
uggagaguggacacagag

SEQ ID NO: 262892 - RNA, 18 nt, Human
uggagucuugcccuuucg

SEQ ID NO: 262893 - RNA, 23 nt, Human
uggagugcaguggugcgaucucg

SEQ ID NO: 262894 - RNA, 24 nt, Human
uggagugcaguggugcgaucucgg

SEQ ID NO: 262895 - RNA, 21 nt, Human
uggauuaccaaauaacacuuc

SEQ ID NO: 262896 - RNA, 19 nt, Human
uggccagacaaacacaggc

SEQ ID NO: 262897 - RNA, 29 nt, Human
uggccgaucaacagaagcagugggagucc

SEQ ID NO: 262898 - RNA, 21 nt, Human
ugggacuacaggcgcccgcca

SEQ ID NO: 262899 - RNA, 22 nt, Human
ugggacuacaggcgcccgccac

SEQ ID NO: 262900 - RNA, 24 nt, Human
ugggacuacaggcgcccgccacca

SEQ ID NO: 262901 - RNA, 24 nt, Human
ugggacuauaggcacacaccacca

SEQ ID NO: 262902 - RNA, 18 nt, Human
ugggaucugacaugaaug

SEQ ID NO: 262903 - RNA, 18 nt, Human
ugggauuacaggcguaag

SEQ ID NO: 262904 - RNA, 22 nt, Human
ugggauuacaggcguaagccac

SEQ ID NO: 262905 - RNA, 24 nt, Human
ugggauuacaggcguaagccacca

SEQ ID NO: 262906 - RNA, 25 nt, Human
ugggauuacaggcguaagccaccau

SEQ ID NO: 262907 - RNA, 24 nt, Human
uggguuuucaccguguuagccagg

SEQ ID NO: 262908 - RNA, 18 nt, Human
uggucagaguguuuaaaa

SEQ ID NO: 262909 - RNA, 20 nt, Human
uguacaacucaguuuuauua

SEQ ID NO: 262910 - RNA, 20 nt, Human
uguauaaaaaccagcuuuca

SEQ ID NO: 262911 - RNA, 19 nt, Human
uguauguauaugugugugu

SEQ ID NO: 262912 - RNA, 20 nt, Human
uguauguauaugugugugug

SEQ ID NO: 262913 - RNA, 24 nt, Human
uguguagccuuugcuacaaggcug

SEQ ID NO: 262914 - RNA, 23 nt, Human
uguuguuuucauucauucuaucu

SEQ ID NO: 262915 - RNA, 25 nt, Human
uguuuacagugagccucauuaucuu

SEQ ID NO: 262916 - RNA, 22 nt, Human
uuacaagcagcauuugaaacac

SEQ ID NO: 262917 - RNA, 20 nt, Human
uuagcucaacacacagcucu

SEQ ID NO: 262918 - RNA, 22 nt, Human
uuaguagacauggguuuucacc

SEQ ID NO: 262919 - RNA, 24 nt, Human
uuaguagacauggguuuucaccgu

SEQ ID NO: 262920 - RNA, 24 nt, Human
uuauauucauaaacuucccccucc

SEQ ID NO: 262921 - RNA, 18 nt, Human
uucauucuaucuagaagu

SEQ ID NO: 262922 - RNA, 24 nt, Human
uuccuaguggcugggacuauaggc

SEQ ID NO: 262923 - RNA, 26 nt, Human
uugaacaaucccuaauuauaaauuaa

SEQ ID NO: 262924 - RNA, 22 nt, Human
uugcuagucaauuuuuaaaaaa

SEQ ID NO: 262925 - RNA, 20 nt, Human
uugcucaggcuggaguggac

SEQ ID NO: 262926 - RNA, 18 nt, Human
uuggccucccaaagugcu

SEQ ID NO: 262927 - RNA, 18 nt, Human
uuuagcucaacacacagc

SEQ ID NO: 262928 - RNA, 22 nt, Human
uuuaucagauguacugaaugac

SEQ ID NO: 262929 - RNA, 18 nt, Human
uuucacacaacgcagagc

SEQ ID NO: 262930 - RNA, 19 nt, Human
uuucaccguguuagccagg

SEQ ID NO: 262931 - RNA, 21 nt, Human
uuucagagggucucuucuggg

SEQ ID NO: 262932 - RNA, 24 nt, Human
uuucuuuacuuagacacagggucu

SEQ ID NO: 262933 - RNA, 22 nt, Human
uuuguuaaaaugagcaauguca

SEQ ID NO: 262934 - RNA, 18 nt, Human
uuuuguauuuuuaguaga

SEQ ID NO: 262935 - RNA, 24 nt, Human
uuuuuaguagacauggguuuucac

SEQ ID NO: 262936 - RNA, 19 nt, Human
uuuuuguauuuuuaguaga

SEQ ID NO: 262937 - RNA, 24 nt, Human
aaagugcugagauuacagguguga

SEQ ID NO: 262938 - RNA, 20 nt, Human
aacauguaacucuccauaca

SEQ ID NO: 262939 - RNA, 20 nt, Human
aaccucugccucuggggcuc

SEQ ID NO: 262940 - RNA, 18 nt, Human
aacucugccagcugaaag

SEQ ID NO: 262941 - RNA, 19 nt, Human
aagaagaaugcaauuaccc

SEQ ID NO: 262942 - RNA, 19 nt, Human
aagugcugagauuacaggu

SEQ ID NO: 262943 - RNA, 18 nt, Human
acuaguagauuggagggg

SEQ ID NO: 262944 - RNA, 25 nt, Human
acucucaccccagcccugaaccgca

SEQ ID NO: 262945 - RNA, 22 nt, Human
agauuacaggugugagcgacug

SEQ ID NO: 262946 - RNA, 22 nt, Human
agcucagaaacuauggcagcag

SEQ ID NO: 262947 - RNA, 20 nt, Human
aggcacucaccccacuuuca

SEQ ID NO: 262948 - RNA, 21 nt, Human
aggcacucaccccacuuucau

SEQ ID NO: 262949 - RNA, 22 nt, Human
agguaaaaguuggaaguuuccu

SEQ ID NO: 262950 - RNA, 23 nt, Human
aggugugagcgacugugcccggc

SEQ ID NO: 262951 - RNA, 21 nt, Human
aguagcugggauuacaggcgu

SEQ ID NO: 262952 - RNA, 23 nt, Human
aguagcugggauuacaggcgugu

SEQ ID NO: 262953 - RNA, 22 nt, Human
aucauguugccccagggugguc

SEQ ID NO: 262954 - RNA, 18 nt, Human
augggauuucaucauguu

SEQ ID NO: 262955 - RNA, 19 nt, Human
augggauuucaucauguug

SEQ ID NO: 262956 - RNA, 25 nt, Human
augggauuucaucauguugccccag

SEQ ID NO: 262957 - RNA, 25 nt, Human
auuuaugaccaugaguauagcuacc

SEQ ID NO: 262958 - RNA, 24 nt, Human
caaagugcugagauuacaggugug

SEQ ID NO: 262959 - RNA, 20 nt, Human
caccacaaccucugccucug

SEQ ID NO: 262960 - RNA, 24 nt, Human
caccccagcccugaaccgcauucc

SEQ ID NO: 262961 - RNA, 24 nt, Human
caccucagccucccaaagugcuga

SEQ ID NO: 262962 - RNA, 20 nt, Human
cagggccaucgcccgccucg

SEQ ID NO: 262963 - RNA, 20 nt, Human
cagucuccugaguagcuggg

SEQ ID NO: 262964 - RNA, 21 nt, Human
ccaaagugcugagauuacagg

SEQ ID NO: 262965 - RNA, 21 nt, Human
ccaaagugcugagauuacagg

SEQ ID NO: 262966 - RNA, 24 nt, Human
ccaaagugcugagauuacaggugu

SEQ ID NO: 262967 - RNA, 22 nt, Human
ccacaaccucugccucuggggc

SEQ ID NO: 262968 - RNA, 25 nt, Human
ccaucgcccgccucguccgcccgcc

SEQ ID NO: 262969 - RNA, 21 nt, Human
ccucuggggcucaagggauuc

SEQ ID NO: 262970 - RNA, 23 nt, Human
ccucuggggcucaagggauucuc

SEQ ID NO: 262971 - RNA, 23 nt, Human
ccugaguagcugggauuacaggc

SEQ ID NO: 262972 - RNA, 24 nt, Human
ccugaguagcugggauuacaggcg

SEQ ID NO: 262973 - RNA, 19 nt, Human
cgcgucccggccgcagggc

SEQ ID NO: 262974 - RNA, 23 nt, Human
cggccuaugauuuaguucuuuau

SEQ ID NO: 262975 - RNA, 23 nt, Human
cuaacucagucuccugaguagcu

SEQ ID NO: 262976 - RNA, 24 nt, Human
cuaacucagucuccugaguagcug

SEQ ID NO: 262977 - RNA, 19 nt, Human
cucaagggauucuccuaac

SEQ ID NO: 262978 - RNA, 20 nt, Human
cucaagggauucuccuaacu

SEQ ID NO: 262979 - RNA, 18 nt, Human
cucaccccacuuucauug

SEQ ID NO: 262980 - RNA, 24 nt, Human
cucagucuccugaguagcugggau

SEQ ID NO: 262981 - RNA, 21 nt, Human
cucccaaagugcugagauuac

SEQ ID NO: 262982 - RNA, 22 nt, Human
cugaguagcugggauuacaggc

SEQ ID NO: 262983 - RNA, 24 nt, Human
cugaguagcugggauuacaggcgu

SEQ ID NO: 262984 - RNA, 20 nt, Human
cuucaaaaagugaagaagaa

SEQ ID NO: 262985 - RNA, 24 nt, Human
gaacucaguugaucugcccaccuc

SEQ ID NO: 262986 - RNA, 24 nt, Human
gaaguuuccuccaccacucugcuu

SEQ ID NO: 262987 - RNA, 18 nt, Human
gagaugggauuucaucau

SEQ ID NO: 262988 - RNA, 24 nt, Human
gagaugggauuucaucauguugcc

SEQ ID NO: 262989 - RNA, 20 nt, Human
gaguagcugggauuacaggc

SEQ ID NO: 262990 - RNA, 25 nt, Human
gaguagcugggauuacaggcgugug

SEQ ID NO: 262991 - RNA, 23 nt, Human
gauuacaggcgugugcaccaugc

SEQ ID NO: 262992 - RNA, 24 nt, Human
gauuacaggugugagcgacugugc

SEQ ID NO: 262993 - RNA, 20 nt, Human
gcccgcccgaccacuuguua

SEQ ID NO: 262994 - RNA, 22 nt, Human
ggauucuccuaacucagucucc

SEQ ID NO: 262995 - RNA, 23 nt, Human
guaauaagaggcacucaccccac

SEQ ID NO: 262996 - RNA, 18 nt, Human
guagcugggauuacaggc

SEQ ID NO: 262997 - RNA, 18 nt, Human
guagcugggauuacaggc

SEQ ID NO: 262998 - RNA, 18 nt, Human
guauuuuuuuagagaugg

SEQ ID NO: 262999 - RNA, 23 nt, Human
gugaagaagaaugcaauuacccc

SEQ ID NO: 263000 - RNA, 20 nt, Human
uaacucagucuccugaguag

SEQ ID NO: 263001 - RNA, 23 nt, Human
uaauuuuuuguauuuuuuuagag

SEQ ID NO: 263002 - RNA, 24 nt, Human
uaauuuuuuguauuuuuuuagaga

SEQ ID NO: 263003 - RNA, 20 nt, Human
uagagaugggauuucaucau

SEQ ID NO: 263004 - RNA, 22 nt, Human
ucaccacaaccucugccucugg

SEQ ID NO: 263005 - RNA, 23 nt, Human
ucaccacaaccucugccucuggg

SEQ ID NO: 263006 - RNA, 18 nt, Human
ucagccucccaaagugcu

SEQ ID NO: 263007 - RNA, 23 nt, Human
ucagucuccugaguagcugggau

SEQ ID NO: 263008 - RNA, 18 nt, Human
uccauacauucuguacuu

SEQ ID NO: 263009 - RNA, 23 nt, Human
ucccaaagugcugagauuacagg

SEQ ID NO: 263010 - RNA, 21 nt, Human
ucccagacaucugucaagagc

SEQ ID NO: 263011 - RNA, 22 nt, Human
uccccugaaugcauucagcagc

SEQ ID NO: 263012 - RNA, 24 nt, Human
uccugaguagcugggauuacaggc

SEQ ID NO: 263013 - RNA, 23 nt, Human
ucguccgcccgcccgaccacuug

SEQ ID NO: 263014 - RNA, 21 nt, Human
ucugcccaccucagccuccca

SEQ ID NO: 263015 - RNA, 19 nt, Human
ugagauuacaggugugagc

SEQ ID NO: 263016 - RNA, 19 nt, Human
ugagauuacaggugugagc

SEQ ID NO: 263017 - RNA, 21 nt, Human
ugagauuacaggugugagcga

SEQ ID NO: 263018 - RNA, 22 nt, Human
ugagauuacaggugugagcgac

SEQ ID NO: 263019 - RNA, 24 nt, Human
ugagauuacaggugugagcgacug

SEQ ID NO: 263020 - RNA, 23 nt, Human
ugagccauuaacugauuuauguu

SEQ ID NO: 263021 - RNA, 23 nt, Human
ugaucugcccaccucagccuccc

SEQ ID NO: 263022 - RNA, 24 nt, Human
ugaucugcccaccucagccuccca

SEQ ID NO: 263023 - RNA, 23 nt, Human
ugauuuauguucagccuuucccu

SEQ ID NO: 263024 - RNA, 22 nt, Human
ugcaauuaccccuuuuguggca

SEQ ID NO: 263025 - RNA, 22 nt, Human
ugcaugcacaacuuguaauaua

SEQ ID NO: 263026 - RNA, 19 nt, Human
ugccccaggguggucucaa

SEQ ID NO: 263027 - RNA, 25 nt, Human
ugcuagaagucuucaaaaagugaag

SEQ ID NO: 263028 - RNA, 20 nt, Human
ugcugagauuacagguguga

SEQ ID NO: 263029 - RNA, 18 nt, Human
uggaauguacuggcgcga

SEQ ID NO: 263030 - RNA, 24 nt, Human
uggaauguacuggcgcgaucucgg

SEQ ID NO: 263031 - RNA, 24 nt, Human
uggcgcgaucucggcucaccacaa

SEQ ID NO: 263032 - RNA, 18 nt, Human
ugggauuacaggcgugug

SEQ ID NO: 263033 - RNA, 23 nt, Human
ugggauuacaggcgugugcacca

SEQ ID NO: 263034 - RNA, 24 nt, Human
ugggauuacaggcgugugcaccau

SEQ ID NO: 263035 - RNA, 25 nt, Human
ugggauuucaucauguugccccagg

SEQ ID NO: 263036 - RNA, 21 nt, Human
ugugcaccaugcccagauaau

SEQ ID NO: 263037 - RNA, 18 nt, Human
uuacaggcgugugcacca

SEQ ID NO: 263038 - RNA, 21 nt, Human
uugguugugguugugauuguu

SEQ ID NO: 263039 - RNA, 20 nt, Human
uuugugguguugguuguggu

SEQ ID NO: 263040 - RNA, 20 nt, Human
uuuuuguauuuuuuuagaga

SEQ ID NO: 263041 - RNA, 23 nt, Human
uuuuuuguauuuuuuuagagaug

SEQ ID NO: 263042 - RNA, 25 nt, Human
uuuuuuuuuuuugggcagagucuca

SEQ ID NO: 263043 - RNA, 21 nt, Human
uuuuuuuuuuuuuugggcaga

SEQ ID NO: 263044 - RNA, 18 nt, Human
uuuuuuuuuuuuuuuuug

SEQ ID NO: 263045 - RNA, 20 nt, Human
aaauccccaagacaccacca

SEQ ID NO: 263046 - RNA, 23 nt, Human
aagcagccaggaggccaaggcag

SEQ ID NO: 263047 - RNA, 19 nt, Human
aaggcaggaggaugagggu

SEQ ID NO: 263048 - RNA, 23 nt, Human
accaaauccccaagacaccacca

SEQ ID NO: 263049 - RNA, 22 nt, Human
agaaagcagccaggaggccaag

SEQ ID NO: 263050 - RNA, 19 nt, Human
agccaggaggccaaggcag

SEQ ID NO: 263051 - RNA, 25 nt, Human
caaauccccaagacaccaccaagag

SEQ ID NO: 263052 - RNA, 22 nt, Human
caaggcaggaggaugaggguca

SEQ ID NO: 263053 - RNA, 19 nt, Human
caccgcgcggccccggacu

SEQ ID NO: 263054 - RNA, 19 nt, Human
caccugccccaccugaggc

SEQ ID NO: 263055 - RNA, 23 nt, Human
cagcagacucucucccaccauuu

SEQ ID NO: 263056 - RNA, 19 nt, Human
ccccaagacaccaccaaga

SEQ ID NO: 263057 - RNA, 23 nt, Human
ccgcgcggccccggacagccgca

SEQ ID NO: 263058 - RNA, 18 nt, Human
ccugugagcaucuccugg

SEQ ID NO: 263059 - RNA, 21 nt, Human
ccuugcagcagacucucuccc

SEQ ID NO: 263060 - RNA, 18 nt, Human
ccuugcuaacaggaagag

SEQ ID NO: 263061 - RNA, 21 nt, Human
cguugaugggcugcuuguccc

SEQ ID NO: 263062 - RNA, 19 nt, Human
cucucucccaccauuucau

SEQ ID NO: 263063 - RNA, 20 nt, Human
gaggccaaggcaggaggaug

SEQ ID NO: 263064 - RNA, 23 nt, Human
gcccuuguaguuaccaaguucca

SEQ ID NO: 263065 - RNA, 21 nt, Human
ggggagaaagcagccaggagg

SEQ ID NO: 263066 - RNA, 23 nt, Human
guccuacugaccucucucuuuca

SEQ ID NO: 263067 - RNA, 22 nt, Human
guccuguggccugugagcaucu

SEQ ID NO: 263068 - RNA, 20 nt, Human
uccuggaucagccugaaccc

SEQ ID NO: 263069 - RNA, 18 nt, Human
ucucccgcgcugugcuuu

SEQ ID NO: 263070 - RNA, 23 nt, Human
ucugcaccugccccaccugaggc

SEQ ID NO: 263071 - RNA, 20 nt, Human
ugagaaggaguugggcucuu

SEQ ID NO: 263072 - RNA, 24 nt, Human
ugcaccaaauccccaagacaccac

SEQ ID NO: 263073 - RNA, 21 nt, Human
ugccuggucucacccuugcag

SEQ ID NO: 263074 - RNA, 19 nt, Human
uggccugugagcaucuccu

SEQ ID NO: 263075 - RNA, 22 nt, Human
uggcguugaugggcugcuuguc

SEQ ID NO: 263076 - RNA, 20 nt, Human
uggggcugugaugccaacag

SEQ ID NO: 263077 - RNA, 27 nt, Human
acaauaacagagacauaaauauuaauu

SEQ ID NO: 263078 - RNA, 22 nt, Human
acuuuuuuuuuuuuuuuuuuuu

SEQ ID NO: 263079 - RNA, 20 nt, Human
agccuugucccuucucccug

SEQ ID NO: 263080 - RNA, 22 nt, Human
ccaaauuugaucaaacugcagu

SEQ ID NO: 263081 - RNA, 22 nt, Human
ccugggcccccaacuccaaaaa

SEQ ID NO: 263082 - RNA, 19 nt, Human
ccuugucccuucucccugg

SEQ ID NO: 263083 - RNA, 19 nt, Human
gagauuugagagagguaua

SEQ ID NO: 263084 - RNA, 19 nt, Human
gguuuuguuuuuauuuuug

SEQ ID NO: 263085 - RNA, 22 nt, Human
uaaaagccuugucccuucuccc

SEQ ID NO: 263086 - RNA, 22 nt, Human
uaacaagucuuuuaaaagccuu

SEQ ID NO: 263087 - RNA, 24 nt, Human
uaacaagucuuuuaaaagccuugu

SEQ ID NO: 263088 - RNA, 22 nt, Human
uaacagagacauaaauauuaau

SEQ ID NO: 263089 - RNA, 23 nt, Human
uaagaacguuguugaaagcguca

SEQ ID NO: 263090 - RNA, 21 nt, Human
uaccaaaugagauuugagaga

SEQ ID NO: 263091 - RNA, 25 nt, Human
uacugcauauacccaaauuugauca

SEQ ID NO: 263092 - RNA, 27 nt, Human
uauacauugaucaaaaauuguugaaac

SEQ ID NO: 263093 - RNA, 19 nt, Human
uccagugcccagcuaggag

SEQ ID NO: 263094 - RNA, 20 nt, Human
uccucaacugcauccagugc

SEQ ID NO: 263095 - RNA, 18 nt, Human
ugaugauucaaaaugacg

SEQ ID NO: 263096 - RNA, 22 nt, Human
ugucccuucucccugggccccc

SEQ ID NO: 263097 - RNA, 24 nt, Human
ugugugguuuuguuuuuauuuuug

SEQ ID NO: 263098 - RNA, 22 nt, Human
uuccugauuagggaacguguuu

SEQ ID NO: 263099 - RNA, 24 nt, Human
uucucccugggcccccaacuccaa

SEQ ID NO: 263100 - RNA, 18 nt, Human
uuuuuuuuuuuuuuccug

SEQ ID NO: 263101 - RNA, 25 nt, Human
uuuuuuuuuuuuuuccugauuaggg

SEQ ID NO: 263102 - RNA, 23 nt, Human
uuuuuuuuuuuuuuuuccugauu

SEQ ID NO: 263103 - RNA, 23 nt, Human
aaaaaaaccaaaacaaaacaaaa

SEQ ID NO: 263104 - RNA, 23 nt, Human
aaaaaaccaaaacaaaacaaaac

SEQ ID NO: 263105 - RNA, 21 nt, Human
aaaaaauguuaaccacccuua

SEQ ID NO: 263106 - RNA, 23 nt, Human
aaaaagaugacaugguugaguuu

SEQ ID NO: 263107 - RNA, 23 nt, Human
aaaacaaaacaaaacaaaaaaaa

SEQ ID NO: 263108 - RNA, 19 nt, Human
aaacaaaacaaaacaaaaa

SEQ ID NO: 263109 - RNA, 22 nt, Human
aaacagaaaaaagcagguugag

SEQ ID NO: 263110 - RNA, 23 nt, Human
aaaccaaaacaaaacaaaacaaa

SEQ ID NO: 263111 - RNA, 26 nt, Human
aaaccaaaacaaaacaaaacaaaaaa

SEQ ID NO: 263112 - RNA, 21 nt, Human
aaagacgacuaaguggccucc

SEQ ID NO: 263113 - RNA, 19 nt, Human
aacacagugaaauccuguc

SEQ ID NO: 263114 - RNA, 20 nt, Human
aacacagugaaauccugucu

SEQ ID NO: 263115 - RNA, 21 nt, Human
aacacagugaaauccugucuc

SEQ ID NO: 263116 - RNA, 21 nt, Human
aacaucuauuuauuuaaaagc

SEQ ID NO: 263117 - RNA, 27 nt, Human
aaccaaaacaaaacaaaacaaaaaaaa

SEQ ID NO: 263118 - RNA, 25 nt, Human
aaccaggacuccaauguuaccuucu

SEQ ID NO: 263119 - RNA, 23 nt, Human
aaccugcucaauccuggaaacaa

SEQ ID NO: 263120 - RNA, 18 nt, Human
aacuuucucuccucauuu

SEQ ID NO: 263121 - RNA, 18 nt, Human
aagacccugcuccucuac

SEQ ID NO: 263122 - RNA, 22 nt, Human
aagaggaaaaaaagacgacuaa

SEQ ID NO: 263123 - RNA, 21 nt, Human
aagcaagaucauaacgucugc

SEQ ID NO: 263124 - RNA, 22 nt, Human
aagcagguaagugucagccaga

SEQ ID NO: 263125 - RNA, 22 nt, Human
aagcagguugacuugcuuugaa

SEQ ID NO: 263126 - RNA, 22 nt, Human
aagcauggcugcuugaccacac

SEQ ID NO: 263127 - RNA, 20 nt, Human
aagggccacgccagccagcg

SEQ ID NO: 263128 - RNA, 18 nt, Human
aaggucccaaaaaaacag

SEQ ID NO: 263129 - RNA, 23 nt, Human
aaugccuaccucugcaccaugac

SEQ ID NO: 263130 - RNA, 24 nt, Human
acaaaacaaaacaaaaaaaauguu

SEQ ID NO: 263131 - RNA, 24 nt, Human
acagagccagacucugucucaaaa

SEQ ID NO: 263132 - RNA, 24 nt, Human
acagcgccuguuuuccaggcacug

SEQ ID NO: 263133 - RNA, 22 nt, Human
accaggucauuuugcaaagguc

SEQ ID NO: 263134 - RNA, 19 nt, Human
acccugcucacugcucuuc

SEQ ID NO: 263135 - RNA, 20 nt, Human
accugcucaauccuggaaac

SEQ ID NO: 263136 - RNA, 21 nt, Human
acgcaaggucccaaaaaaaca

SEQ ID NO: 263137 - RNA, 18 nt, Human
agaaaaaagcagguugaa

SEQ ID NO: 263138 - RNA, 18 nt, Human
agagccagacucugucuc

SEQ ID NO: 263139 - RNA, 22 nt, Human
agcagguugacuugcuuugaaa

SEQ ID NO: 263140 - RNA, 18 nt, Human
agcauuuugggaggcuga

SEQ ID NO: 263141 - RNA, 24 nt, Human
agcauuuugggaggcugagguggg

SEQ ID NO: 263142 - RNA, 20 nt, Human
agccgggugugguggugggc

SEQ ID NO: 263143 - RNA, 24 nt, Human
agccugggcgacagagccagacuc

SEQ ID NO: 263144 - RNA, 18 nt, Human
agcgcccuagggccucuc

SEQ ID NO: 263145 - RNA, 22 nt, Human
aggcacugcaggaagacccugc

SEQ ID NO: 263146 - RNA, 27 nt, Human
aggcaggagaauggcaugaacccagga

SEQ ID NO: 263147 - RNA, 24 nt, Human
aggcggagcuugcuaugagccgag

SEQ ID NO: 263148 - RNA, 24 nt, Human
aggcucgguggcucacgccuguaa

SEQ ID NO: 263149 - RNA, 19 nt, Human
aggcugaggcaggagaaug

SEQ ID NO: 263150 - RNA, 21 nt, Human
aggcugaggugggcagaucac

SEQ ID NO: 263151 - RNA, 19 nt, Human
agggagugguccuuccugu

SEQ ID NO: 263152 - RNA, 24 nt, Human
aggugggcagaucacgaggucggg

SEQ ID NO: 263153 - RNA, 21 nt, Human
auaaaaaaggcaaaaaaaaaa

SEQ ID NO: 263154 - RNA, 20 nt, Human
auauucuuugguuuugcuug

SEQ ID NO: 263155 - RNA, 24 nt, Human
auugcgccccugcacuccagccug

SEQ ID NO: 263156 - RNA, 24 nt, Human
auuuugggaggcugaggugggcag

SEQ ID NO: 263157 - RNA, 21 nt, Human
caaaacaaaacaaaacaaaaa

SEQ ID NO: 263158 - RNA, 20 nt, Human
caacugguacugucagaccc

SEQ ID NO: 263159 - RNA, 24 nt, Human
caagaccauccuggcuaacacagu

SEQ ID NO: 263160 - RNA, 31 nt, Human
caauaaaaucuguuggaauuuccauugaaaa

SEQ ID NO: 263161 - RNA, 24 nt, Human
caccuguagucccagcuacucugg

SEQ ID NO: 263162 - RNA, 24 nt, Human
cacgccuguaaucccagcauuuug

SEQ ID NO: 263163 - RNA, 20 nt, Human
cacugcucuucacgcaaggu

SEQ ID NO: 263164 - RNA, 21 nt, Human
cacuguaaaaacagaaaaaag

SEQ ID NO: 263165 - RNA, 21 nt, Human
cacuuguaagccuaccaggag

SEQ ID NO: 263166 - RNA, 24 nt, Human
cagcauuuugggaggcugaggugg

SEQ ID NO: 263167 - RNA, 22 nt, Human
caucaagaauaaaaaaggcaaa

SEQ ID NO: 263168 - RNA, 20 nt, Human
cauccaagaaaaagaugaca

SEQ ID NO: 263169 - RNA, 21 nt, Human
caugaacccaggaggcggagc

SEQ ID NO: 263170 - RNA, 23 nt, Human
ccacuuugccuuuauuuuuuaua

SEQ ID NO: 263171 - RNA, 23 nt, Human
ccagccuuuagaaaacgaggucu

SEQ ID NO: 263172 - RNA, 19 nt, Human
ccccgaaagcccgcagcgc

SEQ ID NO: 263173 - RNA, 24 nt, Human
ccccugcacuccagccugggcgac

SEQ ID NO: 263174 - RNA, 19 nt, Human
cccgcagcgcccuagggcc

SEQ ID NO: 263175 - RNA, 22 nt, Human
cccgcagcgcccuagggccucu

SEQ ID NO: 263176 - RNA, 20 nt, Human
cccgggucuuuugacgccuc

SEQ ID NO: 263177 - RNA, 19 nt, Human
cccugcacuccagccuggg

SEQ ID NO: 263178 - RNA, 19 nt, Human
cccugcacuccagccuggg

SEQ ID NO: 263179 - RNA, 20 nt, Human
cccugcacuccagccugggc

SEQ ID NO: 263180 - RNA, 24 nt, Human
cccugcacuccagccugggcgaca

SEQ ID NO: 263181 - RNA, 23 nt, Human
ccggccaggcucgguggcucacg

SEQ ID NO: 263182 - RNA, 19 nt, Human
ccucccuugcuucuucguc

SEQ ID NO: 263183 - RNA, 27 nt, Human
ccuccuaguggccacaugcaagaguuu

SEQ ID NO: 263184 - RNA, 24 nt, Human
ccugcacuccagccugggcgacag

SEQ ID NO: 263185 - RNA, 22 nt, Human
ccuggcuaacacagugaaaucc

SEQ ID NO: 263186 - RNA, 24 nt, Human
ccuggcuaacacagugaaauccug

SEQ ID NO: 263187 - RNA, 22 nt, Human
ccuguagucccagcuacucugg

SEQ ID NO: 263188 - RNA, 23 nt, Human
ccuguagucccagcuacucugga

SEQ ID NO: 263189 - RNA, 18 nt, Human
cgcaugccuuuugccaaa

SEQ ID NO: 263190 - RNA, 24 nt, Human
cgccuguaaucccagcauuuuggg

SEQ ID NO: 263191 - RNA, 24 nt, Human
cgucuucauccuucgaaucaaacc

SEQ ID NO: 263192 - RNA, 24 nt, Human
cucaaaaaaaaaaaaccaaaacaa

SEQ ID NO: 263193 - RNA, 21 nt, Human
cucacgccuguaaucccagca

SEQ ID NO: 263194 - RNA, 21 nt, Human
cucacgccuguaaucccagca

SEQ ID NO: 263195 - RNA, 21 nt, Human
cucagaaugccuaccucugca

SEQ ID NO: 263196 - RNA, 19 nt, Human
cuccuucauauuuagaagc

SEQ ID NO: 263197 - RNA, 21 nt, Human
cucuccuucauauuuagaagc

SEQ ID NO: 263198 - RNA, 23 nt, Human
cucugucucaaaaaaaaaaaacc

SEQ ID NO: 263199 - RNA, 20 nt, Human
cugauaccuuuauaaucuug

SEQ ID NO: 263200 - RNA, 25 nt, Human
cugcacuccagccugggcgacagag

SEQ ID NO: 263201 - RNA, 18 nt, Human
cuggcuaacacagugaaa

SEQ ID NO: 263202 - RNA, 24 nt, Human
cuggcuaacacagugaaauccugu

SEQ ID NO: 263203 - RNA, 20 nt, Human
cugucuucagucugucccca

SEQ ID NO: 263204 - RNA, 27 nt, Human
cuuccgaagagaacagagcuacaccuu

SEQ ID NO: 263205 - RNA, 22 nt, Human
cuugaguuuuaacagaauugac

SEQ ID NO: 263206 - RNA, 22 nt, Human
gaacagagcuacaccuuccccg

SEQ ID NO: 263207 - RNA, 18 nt, Human
gaacccugcucacugcuc

SEQ ID NO: 263208 - RNA, 23 nt, Human
gaaucaaaccaggacuccaaugu

SEQ ID NO: 263209 - RNA, 24 nt, Human
gacagagccagacucugucucaaa

SEQ ID NO: 263210 - RNA, 26 nt, Human
gacccugcuccucuacaagguuccac

SEQ ID NO: 263211 - RNA, 23 nt, Human
gaccugauaccuuuauaaucuug

SEQ ID NO: 263212 - RNA, 23 nt, Human
gagauugcgccccugcacuccag

SEQ ID NO: 263213 - RNA, 24 nt, Human
gcaaauuuuugaaauaacugcaag

SEQ ID NO: 263214 - RNA, 27 nt, Human
gcaagaguuugcuggacauacaggugg

SEQ ID NO: 263215 - RNA, 24 nt, Human
gcacuccagccugggcgacagagc

SEQ ID NO: 263216 - RNA, 22 nt, Human
gcaggagaauggcaugaaccca

SEQ ID NO: 263217 - RNA, 22 nt, Human
gccccugcacuccagccugggc

SEQ ID NO: 263218 - RNA, 24 nt, Human
gccccugcacuccagccugggcga

SEQ ID NO: 263219 - RNA, 23 nt, Human
gcccuagggccucucucggggcu

SEQ ID NO: 263220 - RNA, 19 nt, Human
gcgccccugcacuccagcc

SEQ ID NO: 263221 - RNA, 24 nt, Human
gcuaacacagugaaauccugucuc

SEQ ID NO: 263222 - RNA, 24 nt, Human
ggagcuugcuaugagccgagauug

SEQ ID NO: 263223 - RNA, 25 nt, Human
ggcaccuguagucccagcuacucug

SEQ ID NO: 263224 - RNA, 21 nt, Human
ggcagaucacgaggucgggag

SEQ ID NO: 263225 - RNA, 21 nt, Human
ggcucacgccuguaaucccag

SEQ ID NO: 263226 - RNA, 20 nt, Human
gggcaccuguagucccagcu

SEQ ID NO: 263227 - RNA, 23 nt, Human
gguggcucacgccuguaauccca

SEQ ID NO: 263228 - RNA, 24 nt, Human
gguggcucacgccuguaaucccag

SEQ ID NO: 263229 - RNA, 24 nt, Human
gguggugggcaccuguagucccag

SEQ ID NO: 263230 - RNA, 20 nt, Human
guagucuucacuauuuuucu

SEQ ID NO: 263231 - RNA, 21 nt, Human
gugguccuuccuguccccacu

SEQ ID NO: 263232 - RNA, 18 nt, Human
uaaaaugccccauuuuuc

SEQ ID NO: 263233 - RNA, 21 nt, Human
uaaaaugguaagaaaugagug

SEQ ID NO: 263234 - RNA, 23 nt, Human
uaaauagucuucgaaaaccagaa

SEQ ID NO: 263235 - RNA, 21 nt, Human
uaaauccauagaucaauuuua

SEQ ID NO: 263236 - RNA, 21 nt, Human
uaacacagugaaauccugucu

SEQ ID NO: 263237 - RNA, 22 nt, Human
uaacacagugaaauccugucuc

SEQ ID NO: 263238 - RNA, 24 nt, Human
uaacacagugaaauccugucucua

SEQ ID NO: 263239 - RNA, 22 nt, Human
uaacagaauugacuuaaccauc

SEQ ID NO: 263240 - RNA, 19 nt, Human
uaacuuucucuccucauuu

SEQ ID NO: 263241 - RNA, 20 nt, Human
uaagaaaugagugacuuuau

SEQ ID NO: 263242 - RNA, 21 nt, Human
uaccaggaggaaccagaacag

SEQ ID NO: 263243 - RNA, 19 nt, Human
uacucuggaggcugaggca

SEQ ID NO: 263244 - RNA, 25 nt, Human
uauaguaaacacuuguaagccuacc

SEQ ID NO: 263245 - RNA, 23 nt, Human
uauuuuguaaaaacacaaaaaau

SEQ ID NO: 263246 - RNA, 30 nt, Human
ucaaaaaaaaaaaaccaaaacaaaacaaag

SEQ ID NO: 263247 - RNA, 18 nt, Human
ucacgaggucgggagauc

SEQ ID NO: 263248 - RNA, 24 nt, Human
ucacgaggucgggagaucaagacc

SEQ ID NO: 263249 - RNA, 21 nt, Human
ucacgccuguaaucccagcau

SEQ ID NO: 263250 - RNA, 23 nt, Human
ucagagcccagcugagaaccugc

SEQ ID NO: 263251 - RNA, 21 nt, Human
uccaacuccgcacgggauauc

SEQ ID NO: 263252 - RNA, 19 nt, Human
uccaagaaaaagaugacau

SEQ ID NO: 263253 - RNA, 24 nt, Human
uccagccugggcgacagagccaga

SEQ ID NO: 263254 - RNA, 20 nt, Human
ucccaaaaaaacagcgccug

SEQ ID NO: 263255 - RNA, 18 nt, Human
uccccugcucagaaugcc

SEQ ID NO: 263256 - RNA, 21 nt, Human
uccucauuuccuuuuuguuuc

SEQ ID NO: 263257 - RNA, 23 nt, Human
ucgcgucgcggggggacugcgga

SEQ ID NO: 263258 - RNA, 23 nt, Human
ucuaauuauucaccuauuuuccu

SEQ ID NO: 263259 - RNA, 30 nt, Human
ucuaggcccuuauuuuguuccccuggucgg

SEQ ID NO: 263260 - RNA, 18 nt, Human
ucucaaaaaaaaaaaacc

SEQ ID NO: 263261 - RNA, 23 nt, Human
ucugcagccauuuaguccagccu

SEQ ID NO: 263262 - RNA, 19 nt, Human
ucuguccccaucucagagg

SEQ ID NO: 263263 - RNA, 20 nt, Human
ucugucucaaaaaaaaaaaa

SEQ ID NO: 263264 - RNA, 24 nt, Human
ucuuugguuuugcuuguuuuuggg

SEQ ID NO: 263265 - RNA, 26 nt, Human
ugacaagcaagcagugagcgcaugcc

SEQ ID NO: 263266 - RNA, 18 nt, Human
ugacaugguugaguuuga

SEQ ID NO: 263267 - RNA, 21 nt, Human
ugagccgagauugcgccccug

SEQ ID NO: 263268 - RNA, 22 nt, Human
ugagccgagauugcgccccugc

SEQ ID NO: 263269 - RNA, 21 nt, Human
ugaggaucaucaagaauaaaa

SEQ ID NO: 263270 - RNA, 23 nt, Human
ugaggcaggagaauggcaugaac

SEQ ID NO: 263271 - RNA, 24 nt, Human
ugaggcaggagaauggcaugaacc

SEQ ID NO: 263272 - RNA, 25 nt, Human
ugaggcaggagaauggcaugaaccc

SEQ ID NO: 263273 - RNA, 26 nt, Human
ugaggugggcagaucacgaggucggg

SEQ ID NO: 263274 - RNA, 21 nt, Human
ugagugacuuuaugcugccca

SEQ ID NO: 263275 - RNA, 23 nt, Human
ugaguuugaggcuuguugcuuga

SEQ ID NO: 263276 - RNA, 24 nt, Human
ugaguuugaggcuuguugcuugag

SEQ ID NO: 263277 - RNA, 25 nt, Human
ugcccagaaagcauggcugcuugac

SEQ ID NO: 263278 - RNA, 18 nt, Human
ugcucacugcucuucacg

SEQ ID NO: 263279 - RNA, 24 nt, Human
ugcuccugucccuuccacuuccuc

SEQ ID NO: 263280 - RNA, 18 nt, Human
uggagcacgugcuuucuu

SEQ ID NO: 263281 - RNA, 21 nt, Human
uggcaucuaccuaugugcucc

SEQ ID NO: 263282 - RNA, 21 nt, Human
uggccuccuagauuccacugu

SEQ ID NO: 263283 - RNA, 22 nt, Human
uggcucacgccuguaaucccag

SEQ ID NO: 263284 - RNA, 24 nt, Human
uggcucacgccuguaaucccagca

SEQ ID NO: 263285 - RNA, 20 nt, Human
ugggaggcugaggugggcag

SEQ ID NO: 263286 - RNA, 24 nt, Human
ugggaggcugaggugggcagauca

SEQ ID NO: 263287 - RNA, 18 nt, Human
ugggaguuggaagcaaga

SEQ ID NO: 263288 - RNA, 22 nt, Human
uggugggcaccuguagucccag

SEQ ID NO: 263289 - RNA, 24 nt, Human
ugguggugggcaccuguaguccca

SEQ ID NO: 263290 - RNA, 20 nt, Human
ugucacagggucacacuucu

SEQ ID NO: 263291 - RNA, 19 nt, Human
uguccccaaccucuccuuc

SEQ ID NO: 263292 - RNA, 21 nt, Human
ugucuugacaauaaaacuugg

SEQ ID NO: 263293 - RNA, 18 nt, Human
uuagccgggugugguggu

SEQ ID NO: 263294 - RNA, 24 nt, Human
uuagccgggugugguggugggcac

SEQ ID NO: 263295 - RNA, 21 nt, Human
uuccacuuccuccuucugugg

SEQ ID NO: 263296 - RNA, 19 nt, Human
uuccucagggguacggaaa

SEQ ID NO: 263297 - RNA, 22 nt, Human
uuccuugaggaucaucaagaau

SEQ ID NO: 263298 - RNA, 24 nt, Human
uugcuuuuuuccuuaauauuuucu

SEQ ID NO: 263299 - RNA, 25 nt, Human
uugggaggcugaggugggcagauca

SEQ ID NO: 263300 - RNA, 20 nt, Human
uugggcccaauaaaaauagg

SEQ ID NO: 263301 - RNA, 24 nt, Human
uugugguccuaauucauauuuccc

SEQ ID NO: 263302 - RNA, 21 nt, Human
uuuccugcccuaaggcuuuuu

SEQ ID NO: 263303 - RNA, 21 nt, Human
uuuuccaggcacugcaggaag

SEQ ID NO: 263304 - RNA, 21 nt, Human
uuuuuuuuuuaauagcauagu

SEQ ID NO: 263305 - RNA, 22 nt, Human
agaaaaagaagaauacacguua

SEQ ID NO: 263306 - RNA, 23 nt, Human
auguguucuuaaagcuguaauuu

SEQ ID NO: 263307 - RNA, 18 nt, Human
cauaaugauuuccaagcu

SEQ ID NO: 263308 - RNA, 24 nt, Human
cucagcaucuaagaaaaagaagaa

SEQ ID NO: 263309 - RNA, 19 nt, Human
uauauuuauguguaaugug

SEQ ID NO: 263310 - RNA, 19 nt, Human
uuuccaagcuucagucugc

SEQ ID NO: 263311 - RNA, 23 nt, Human
aaaaauacaauauauauuagaac

SEQ ID NO: 263312 - RNA, 27 nt, Human
aaacucaaaaaugugccaagcagcagg

SEQ ID NO: 263313 - RNA, 27 nt, Human
agccuuugcauggaaggacagagucuc

SEQ ID NO: 263314 - RNA, 24 nt, Human
agggacugaaggcugccuuuagcu

SEQ ID NO: 263315 - RNA, 23 nt, Human
agguuuggcacuaguaaagcuga

SEQ ID NO: 263316 - RNA, 19 nt, Human
agucaaaaaagcuuaaucc

SEQ ID NO: 263317 - RNA, 21 nt, Human
auaacagauaugcucuacaug

SEQ ID NO: 263318 - RNA, 18 nt, Human
aucaggaaguuuuguuau

SEQ ID NO: 263319 - RNA, 23 nt, Human
caaaaaugugccaagcagcagaa

SEQ ID NO: 263320 - RNA, 19 nt, Human
cacuggggaaucuaaaaau

SEQ ID NO: 263321 - RNA, 23 nt, Human
cagcagaaauaaaaggagugaaa

SEQ ID NO: 263322 - RNA, 19 nt, Human
caggaccaauagaaagcuc

SEQ ID NO: 263323 - RNA, 22 nt, Human
ccaaucuccacuccauguccuu

SEQ ID NO: 263324 - RNA, 20 nt, Human
cccaagcuaucaaauaaaaa

SEQ ID NO: 263325 - RNA, 21 nt, Human
cccaggaccaauagaaagcuc

SEQ ID NO: 263326 - RNA, 21 nt, Human
gagcucaaggcaacagggcaa

SEQ ID NO: 263327 - RNA, 18 nt, Human
gcacaacgcgacuuccac

SEQ ID NO: 263328 - RNA, 18 nt, Human
gccaagcagcagaaauaa

SEQ ID NO: 263329 - RNA, 21 nt, Human
ggaaaacucaaaaaugugcca

SEQ ID NO: 263330 - RNA, 19 nt, Human
ggaaucuaaaaauccaagg

SEQ ID NO: 263331 - RNA, 21 nt, Human
ggcaacagggcaauuugggga

SEQ ID NO: 263332 - RNA, 24 nt, Human
ggcacuguaagucacaagaaugag

SEQ ID NO: 263333 - RNA, 26 nt, Human
uaaaaaaaaguaauggugauagauaa

SEQ ID NO: 263334 - RNA, 22 nt, Human
uaaaaauaaaucccucuguagg

SEQ ID NO: 263335 - RNA, 23 nt, Human
uaaaaauaaaucccucuguaggc

SEQ ID NO: 263336 - RNA, 24 nt, Human
uaaaaauccaaggauacuaacuaa

SEQ ID NO: 263337 - RNA, 19 nt, Human
uaaauccauaugcccagag

SEQ ID NO: 263338 - RNA, 21 nt, Human
uaaugugggaaaacucaaaaa

SEQ ID NO: 263339 - RNA, 18 nt, Human
uacaauauauauuagaac

SEQ ID NO: 263340 - RNA, 28 nt, Human
uagaacaguggagaaagauuaucauaac

SEQ ID NO: 263341 - RNA, 22 nt, Human
uauaacagggaauuagacacug

SEQ ID NO: 263342 - RNA, 22 nt, Human
uaugccauuucuuucagaucuu

SEQ ID NO: 263343 - RNA, 18 nt, Human
ucaaaaaagcuuaauccu

SEQ ID NO: 263344 - RNA, 21 nt, Human
ucagaagagcucaaggcaaca

SEQ ID NO: 263345 - RNA, 18 nt, Human
ucauggagacaaauaaug

SEQ ID NO: 263346 - RNA, 21 nt, Human
ucauggagacaaauaaugugg

SEQ ID NO: 263347 - RNA, 19 nt, Human
uccagcacacugcuugagu

SEQ ID NO: 263348 - RNA, 22 nt, Human
ugccuuuagcucagaagagcuc

SEQ ID NO: 263349 - RNA, 18 nt, Human
uggcacuaguaaagcuga

SEQ ID NO: 263350 - RNA, 19 nt, Human
uggcacuguaagucacaag

SEQ ID NO: 263351 - RNA, 20 nt, Human
uggcacuguaagucacaaga

SEQ ID NO: 263352 - RNA, 18 nt, Human
ugggaaaacucaaaaaug

SEQ ID NO: 263353 - RNA, 20 nt, Human
ugugaaguucucugggaagu

SEQ ID NO: 263354 - RNA, 24 nt, Human
uuggcacuaguaaagcugacuuuu

SEQ ID NO: 263355 - RNA, 20 nt, Human
uuggggagagucacaggcac

SEQ ID NO: 263356 - RNA, 18 nt, Human
uuucaggaagccuuugca

SEQ ID NO: 263357 - RNA, 24 nt, Human
uuucucaaaaggaucaaaagccuu

SEQ ID NO: 263358 - RNA, 26 nt, Human
agaaaaaccagucuugggagcgugag

SEQ ID NO: 263359 - RNA, 20 nt, Human
aggaggcacgggggccucug

SEQ ID NO: 263360 - RNA, 23 nt, Human
ccucuggaaugcaugagaguaga

SEQ ID NO: 263361 - RNA, 20 nt, Human
uggcagcaccccguguccgg

SEQ ID NO: 263362 - RNA, 22 nt, Human
acacugagaaguguccgagaaa

SEQ ID NO: 263363 - RNA, 23 nt, Human
acacugagaaguguccgagaaau

SEQ ID NO: 263364 - RNA, 20 nt, Human
accacaacacuucccaggca

SEQ ID NO: 263365 - RNA, 23 nt, Human
accugaacucccagcucaccagc

SEQ ID NO: 263366 - RNA, 22 nt, Human
agcagcccaccugaacucccag

SEQ ID NO: 263367 - RNA, 19 nt, Human
agcucagcgggcgacgugc

SEQ ID NO: 263368 - RNA, 18 nt, Human
aggaggcugugagcagcc

SEQ ID NO: 263369 - RNA, 21 nt, Human
caaacagggugcaggggcucu

SEQ ID NO: 263370 - RNA, 18 nt, Human
caccagcccaaacagggu

SEQ ID NO: 263371 - RNA, 23 nt, Human
cagcccaccugaacucccagcuc

SEQ ID NO: 263372 - RNA, 19 nt, Human
ccaccacaacacuucccag

SEQ ID NO: 263373 - RNA, 19 nt, Human
ccagcccaaacagggugca

SEQ ID NO: 263374 - RNA, 23 nt, Human
cccaccugaacucccagcucacc

SEQ ID NO: 263375 - RNA, 23 nt, Human
ccccaccacaacacuucccaggc

SEQ ID NO: 263376 - RNA, 19 nt, Human
ccucugaaggaggcuguga

SEQ ID NO: 263377 - RNA, 24 nt, Human
cugaacucccagcucaccagccca

SEQ ID NO: 263378 - RNA, 24 nt, Human
gcucucugggccaguccuccuggg

SEQ ID NO: 263379 - RNA, 21 nt, Human
ggagcccccaccacaacacuu

SEQ ID NO: 263380 - RNA, 20 nt, Human
ggcugcuugagagguggagc

SEQ ID NO: 263381 - RNA, 20 nt, Human
gguggggagggggcagaaca

SEQ ID NO: 263382 - RNA, 22 nt, Human
ucucagggcucucugggccagu

SEQ ID NO: 263383 - RNA, 22 nt, Human
ugaacucccagcucaccagccc

SEQ ID NO: 263384 - RNA, 23 nt, Human
ugagcagcccaccugaacuccca

SEQ ID NO: 263385 - RNA, 20 nt, Human
ugagcccucaggggcccaca

SEQ ID NO: 263386 - RNA, 19 nt, Human
ugaguggaguggaauggca

SEQ ID NO: 263387 - RNA, 18 nt, Human
ugcaggggcucuggcccu

SEQ ID NO: 263388 - RNA, 19 nt, Human
uggcccugaagaaccugag

SEQ ID NO: 263389 - RNA, 21 nt, Human
uugguggggccucugaaggag

SEQ ID NO: 263390 - RNA, 24 nt, Human
agacaggggugccgaggcuucugg

SEQ ID NO: 263391 - RNA, 19 nt, Human
agcccccagccuuccccag

SEQ ID NO: 263392 - RNA, 18 nt, Human
aggcaggggacuggccaa

SEQ ID NO: 263393 - RNA, 23 nt, Human
aggcaggggacuggccaagucug

SEQ ID NO: 263394 - RNA, 22 nt, Human
agggccugacuucggucuccuc

SEQ ID NO: 263395 - RNA, 19 nt, Human
cagcccccagccuucccca

SEQ ID NO: 263396 - RNA, 19 nt, Human
cagcucagagcaggaccgg

SEQ ID NO: 263397 - RNA, 20 nt, Human
ccccggaggcuugugguggg

SEQ ID NO: 263398 - RNA, 21 nt, Human
gagcacaggcaggggacuggc

SEQ ID NO: 263399 - RNA, 23 nt, Human
gauggagaggcuuacagccccca

SEQ ID NO: 263400 - RNA, 26 nt, Human
ggagaggcuuacagcccccagccuuc

SEQ ID NO: 263401 - RNA, 22 nt, Human
gggcucuguguuugcagcucuc

SEQ ID NO: 263402 - RNA, 18 nt, Human
ggggagccacccaggagg

SEQ ID NO: 263403 - RNA, 24 nt, Human
ggugccgaggcuucugggagucug

SEQ ID NO: 263404 - RNA, 23 nt, Human
ggugggcucuguguuugcagcuc

SEQ ID NO: 263405 - RNA, 24 nt, Human
uucagggccugacuucggucuccu

SEQ ID NO: 263406 - RNA, 18 nt, Human
uucugggagucuggaagc

SEQ ID NO: 263407 - RNA, 20 nt, Human
aaccaccgaugaauggacag

SEQ ID NO: 263408 - RNA, 20 nt, Human
aagaaacaggcaguagggaa

SEQ ID NO: 263409 - RNA, 18 nt, Human
aagaacagcaggagccug

SEQ ID NO: 263410 - RNA, 24 nt, Human
acugaggauuucagggcucagagu

SEQ ID NO: 263411 - RNA, 23 nt, Human
agaaaauaagaaccagggccaga

SEQ ID NO: 263412 - RNA, 18 nt, Human
agaacagcaggagccugg

SEQ ID NO: 263413 - RNA, 22 nt, Human
agacacagaggcuaucuauacc

SEQ ID NO: 263414 - RNA, 24 nt, Human
agagaggggggaggaggggaaucg

SEQ ID NO: 263415 - RNA, 19 nt, Human
agagcaagagaaacgggga

SEQ ID NO: 263416 - RNA, 19 nt, Human
agagcaagagaaacgggga

SEQ ID NO: 263417 - RNA, 21 nt, Human
agagggcaggagaugggaugg

SEQ ID NO: 263418 - RNA, 20 nt, Human
agcaagagaugcagcaggga

SEQ ID NO: 263419 - RNA, 26 nt, Human
agccaaucuuccccgccaaggagacu

SEQ ID NO: 263420 - RNA, 21 nt, Human
aggagggaggauuuagggcug

SEQ ID NO: 263421 - RNA, 19 nt, Human
aggcagaggggagggagau

SEQ ID NO: 263422 - RNA, 20 nt, Human
agggagagaggggggaggag

SEQ ID NO: 263423 - RNA, 20 nt, Human
aggggggaggaggggaaucc

SEQ ID NO: 263424 - RNA, 18 nt, Human
aggucagggggagucggg

SEQ ID NO: 263425 - RNA, 20 nt, Human
aguaaaaugugaggugaugg

SEQ ID NO: 263426 - RNA, 20 nt, Human
augaagugcuggugcccaca

SEQ ID NO: 263427 - RNA, 20 nt, Human
auggggcugcaggcugccuc

SEQ ID NO: 263428 - RNA, 22 nt, Human
auggggcugcaggcugccucca

SEQ ID NO: 263429 - RNA, 19 nt, Human
caaagccaaucuuccccgc

SEQ ID NO: 263430 - RNA, 20 nt, Human
caagagaugcagcagggagu

SEQ ID NO: 263431 - RNA, 18 nt, Human
cacaguggaagagccugg

SEQ ID NO: 263432 - RNA, 23 nt, Human
cagaguaggaccgagaauugacc

SEQ ID NO: 263433 - RNA, 25 nt, Human
cagcagcugggguauuuagggcugg

SEQ ID NO: 263434 - RNA, 27 nt, Human
cagcagcugggguauuuagggcugggg

SEQ ID NO: 263435 - RNA, 19 nt, Human
cagcugggguauuuagggc

SEQ ID NO: 263436 - RNA, 25 nt, Human
cagcugggguauuuagggcuggggg

SEQ ID NO: 263437 - RNA, 19 nt, Human
caggaugugaggagaggag

SEQ ID NO: 263438 - RNA, 23 nt, Human
cagggagagaggggggaggaggg

SEQ ID NO: 263439 - RNA, 24 nt, Human
ccacccacggggcuccagggguug

SEQ ID NO: 263440 - RNA, 20 nt, Human
ccagggccagagaccaggug

SEQ ID NO: 263441 - RNA, 22 nt, Human
cccacaagggaugagguuucug

SEQ ID NO: 263442 - RNA, 22 nt, Human
cccacccacggggcuccagggg

SEQ ID NO: 263443 - RNA, 21 nt, Human
cccugcccccacccacggggc

SEQ ID NO: 263444 - RNA, 25 nt, Human
cggggcuccaggggugagagaaagg

SEQ ID NO: 263445 - RNA, 24 nt, Human
cucuauauugugcacauggagacc

SEQ ID NO: 263446 - RNA, 24 nt, Human
cugaggcucguuacugacuugccc

SEQ ID NO: 263447 - RNA, 21 nt, Human
cugcaggcugccuccagguuc

SEQ ID NO: 263448 - RNA, 22 nt, Human
cuuuuuacaauaaacucuauau

SEQ ID NO: 263449 - RNA, 25 nt, Human
gaaccagggccagagaccaggugaa

SEQ ID NO: 263450 - RNA, 19 nt, Human
gaagggaaugaggaggagg

SEQ ID NO: 263451 - RNA, 20 nt, Human
gaagggaaugaggaggaggg

SEQ ID NO: 263452 - RNA, 20 nt, Human
gacuggggugcaggauggau

SEQ ID NO: 263453 - RNA, 23 nt, Human
gagagcaagagaugcagcaggga

SEQ ID NO: 263454 - RNA, 21 nt, Human
gagaugggauggggcugcagg

SEQ ID NO: 263455 - RNA, 23 nt, Human
gaggagggaggauuuagggcugg

SEQ ID NO: 263456 - RNA, 22 nt, Human
gaggaggggaaucggaggggau

SEQ ID NO: 263457 - RNA, 22 nt, Human
gagggggcugccuuuccuuggg

SEQ ID NO: 263458 - RNA, 21 nt, Human
gagguaguaaaaugugaggug

SEQ ID NO: 263459 - RNA, 21 nt, Human
gaguugacaccagggagagag

SEQ ID NO: 263460 - RNA, 19 nt, Human
gauacaaggaaugagagca

SEQ ID NO: 263461 - RNA, 19 nt, Human
gauacaaggaaugagagca

SEQ ID NO: 263462 - RNA, 21 nt, Human
gaugugcugacuguggaguag

SEQ ID NO: 263463 - RNA, 19 nt, Human
gcugggggaguaggggcag

SEQ ID NO: 263464 - RNA, 23 nt, Human
gcugggugauggggaggaacagc

SEQ ID NO: 263465 - RNA, 24 nt, Human
ggaaugagagcaagagaaacgggg

SEQ ID NO: 263466 - RNA, 24 nt, Human
ggaaugagagcaagagaaacgggg

SEQ ID NO: 263467 - RNA, 23 nt, Human
ggaauugagcaacggggugaggg

SEQ ID NO: 263468 - RNA, 24 nt, Human
ggaauugagcaacggggugagggg

SEQ ID NO: 263469 - RNA, 22 nt, Human
ggagaaggaugggauuuggggg

SEQ ID NO: 263470 - RNA, 22 nt, Human
ggagaggagggaggauuuaggg

SEQ ID NO: 263471 - RNA, 23 nt, Human
ggagaggagggaggauuuagggc

SEQ ID NO: 263472 - RNA, 19 nt, Human
ggaggagggagacugaggg

SEQ ID NO: 263473 - RNA, 21 nt, Human
ggagggagacugagggggcug

SEQ ID NO: 263474 - RNA, 24 nt, Human
ggauacaaggaaugagagcaagag

SEQ ID NO: 263475 - RNA, 20 nt, Human
ggauggguuuaaaaggcaga

SEQ ID NO: 263476 - RNA, 25 nt, Human
ggcaggagaugggaugggggggacc

SEQ ID NO: 263477 - RNA, 21 nt, Human
ggcagggcggaggggguggug

SEQ ID NO: 263478 - RNA, 22 nt, Human
ggcaguagggaauugagagaaa

SEQ ID NO: 263479 - RNA, 23 nt, Human
ggccagagaccaggugaaggacg

SEQ ID NO: 263480 - RNA, 24 nt, Human
ggccagagaccaggugaaggacga

SEQ ID NO: 263481 - RNA, 20 nt, Human
ggcugggggaguaggggcag

SEQ ID NO: 263482 - RNA, 18 nt, Human
gggaaugaggaggaggga

SEQ ID NO: 263483 - RNA, 19 nt, Human
gggagagguggugcccaca

SEQ ID NO: 263484 - RNA, 26 nt, Human
gggaggauuuagggcugggggacugg

SEQ ID NO: 263485 - RNA, 24 nt, Human
gggauggguuuaaaaggcagaggg

SEQ ID NO: 263486 - RNA, 27 nt, Human
gggcaggagaugggaugggggggaccc

SEQ ID NO: 263487 - RNA, 18 nt, Human
gggcagggcggagggggu

SEQ ID NO: 263488 - RNA, 22 nt, Human
gggcagggcggaggggguggug

SEQ ID NO: 263489 - RNA, 24 nt, Human
gggcggaggggguggugaaggggc

SEQ ID NO: 263490 - RNA, 21 nt, Human
ggggaaucggaggggaugggu

SEQ ID NO: 263491 - RNA, 18 nt, Human
ggggacuggggugcagga

SEQ ID NO: 263492 - RNA, 20 nt, Human
ggggaggaggggaaucggag

SEQ ID NO: 263493 - RNA, 25 nt, Human
ggggguggugaaggggccccgcagg

SEQ ID NO: 263494 - RNA, 26 nt, Human
gggugaggggggaauuaggagcuggg

SEQ ID NO: 263495 - RNA, 25 nt, Human
ggguggugaaggggccccgcagggc

SEQ ID NO: 263496 - RNA, 24 nt, Human
ggugauggcaguuguggaugugcu

SEQ ID NO: 263497 - RNA, 18 nt, Human
gucaaaaggggaggacgu

SEQ ID NO: 263498 - RNA, 20 nt, Human
gucgggaugucuguacucag

SEQ ID NO: 263499 - RNA, 22 nt, Human
gugaaggacgugaggauuggag

SEQ ID NO: 263500 - RNA, 18 nt, Human
gugaggugauggcaguug

SEQ ID NO: 263501 - RNA, 22 nt, Human
guuacaggugugggagucaccg

SEQ ID NO: 263502 - RNA, 20 nt, Human
uaagaaccagggccagagac

SEQ ID NO: 263503 - RNA, 18 nt, Human
uacaggaaugcuguaccc

SEQ ID NO: 263504 - RNA, 21 nt, Human
uagggcugggggaguaggggc

SEQ ID NO: 263505 - RNA, 18 nt, Human
ucagccaaguuggaagga

SEQ ID NO: 263506 - RNA, 20 nt, Human
ucaguggguauagagggaaa

SEQ ID NO: 263507 - RNA, 20 nt, Human
uccagguggguuucagccaa

SEQ ID NO: 263508 - RNA, 24 nt, Human
uccagguucaaaguaagaaacagg

SEQ ID NO: 263509 - RNA, 22 nt, Human
ucuguacuuuggauggagggag

SEQ ID NO: 263510 - RNA, 23 nt, Human
ugaaauggacgcaaugcagaccc

SEQ ID NO: 263511 - RNA, 25 nt, Human
ugaacugcgucuccagguggguuuc

SEQ ID NO: 263512 - RNA, 19 nt, Human
ugaaggacgugaggauugg

SEQ ID NO: 263513 - RNA, 19 nt, Human
ugaauggacaggcucagaa

SEQ ID NO: 263514 - RNA, 22 nt, Human
ugagagaaaggggugaauggag

SEQ ID NO: 263515 - RNA, 20 nt, Human
ugagagcaagagaugcagca

SEQ ID NO: 263516 - RNA, 24 nt, Human
ugaggaaacugaggcucguuacug

SEQ ID NO: 263517 - RNA, 19 nt, Human
ugaggaggagggagacuga

SEQ ID NO: 263518 - RNA, 23 nt, Human
ugaggaggagggagacugagggg

SEQ ID NO: 263519 - RNA, 21 nt, Human
ugaggugauggcaguugugga

SEQ ID NO: 263520 - RNA, 21 nt, Human
ugagguuucuguacuuuggau

SEQ ID NO: 263521 - RNA, 19 nt, Human
ugauggggaggaacagcag

SEQ ID NO: 263522 - RNA, 23 nt, Human
ugcccaagaacagcaggagccug

SEQ ID NO: 263523 - RNA, 21 nt, Human
ugcuagggaccaggaugugag

SEQ ID NO: 263524 - RNA, 19 nt, Human
uggaagggaaugaggagga

SEQ ID NO: 263525 - RNA, 22 nt, Human
ugggauuugggggaacagucuc

SEQ ID NO: 263526 - RNA, 19 nt, Human
ugggguuacagguguggga

SEQ ID NO: 263527 - RNA, 24 nt, Human
ugggguuacaggugugggagucac

SEQ ID NO: 263528 - RNA, 24 nt, Human
uggugcccacaagggaugagguuu

SEQ ID NO: 263529 - RNA, 24 nt, Human
uguagucaaugaagugcuggugcc

SEQ ID NO: 263530 - RNA, 20 nt, Human
ugugaggagaggagggagga

SEQ ID NO: 263531 - RNA, 23 nt, Human
uuacaggugugggagucaccgca

SEQ ID NO: 263532 - RNA, 22 nt, Human
uuagggcugggggaguaggggc

SEQ ID NO: 263533 - RNA, 20 nt, Human
uuaggucagggggagucggg

SEQ ID NO: 263534 - RNA, 20 nt, Human
uucagggcucagaguuaccg

SEQ ID NO: 263535 - RNA, 23 nt, Human
uugaaauggacgcaaugcagacc

SEQ ID NO: 263536 - RNA, 23 nt, Human
uugcaggugaggaaacugaggcu

SEQ ID NO: 263537 - RNA, 21 nt, Human
uuguagucaaugaagugcugg

SEQ ID NO: 263538 - RNA, 22 nt, Human
aaacaggggugaaguuggaagg

SEQ ID NO: 263539 - RNA, 19 nt, Human
aaagggccccagagggagc

SEQ ID NO: 263540 - RNA, 18 nt, Human
aaagucccccuggcuccc

SEQ ID NO: 263541 - RNA, 21 nt, Human
aagaggacaaaagagggcggg

SEQ ID NO: 263542 - RNA, 21 nt, Human
aagcagcggcugucagugaag

SEQ ID NO: 263543 - RNA, 19 nt, Human
aaguuguucccagccagga

SEQ ID NO: 263544 - RNA, 20 nt, Human
aauggcgccuuaaaugugcg

SEQ ID NO: 263545 - RNA, 20 nt, Human
aauggcgccuuaaaugugcg

SEQ ID NO: 263546 - RNA, 21 nt, Human
aauggcgccuuaaaugugcgg

SEQ ID NO: 263547 - RNA, 21 nt, Human
aauggcgccuuaaaugugcgg

SEQ ID NO: 263548 - RNA, 24 nt, Human
acacuugcagccagccaccuccag

SEQ ID NO: 263549 - RNA, 21 nt, Human
acagccuucagucaccuuccc

SEQ ID NO: 263550 - RNA, 20 nt, Human
acaggaaagagcuccccaga

SEQ ID NO: 263551 - RNA, 25 nt, Human
accccagaagcgcaggaccacgaac

SEQ ID NO: 263552 - RNA, 21 nt, Human
acgcugcacgugccagccuuc

SEQ ID NO: 263553 - RNA, 22 nt, Human
acuaccccaccaggaaagaaaa

SEQ ID NO: 263554 - RNA, 19 nt, Human
acugcagcccuuggaggcc

SEQ ID NO: 263555 - RNA, 18 nt, Human
agaaaggcccgcaugucc

SEQ ID NO: 263556 - RNA, 21 nt, Human
agaagcgcaggaccacgaacg

SEQ ID NO: 263557 - RNA, 24 nt, Human
agaauggggaagaaagggccccag

SEQ ID NO: 263558 - RNA, 20 nt, Human
agacgugagcccguccccuc

SEQ ID NO: 263559 - RNA, 20 nt, Human
agagcuccccagagccgcac

SEQ ID NO: 263560 - RNA, 24 nt, Human
agcacagcccacguggggccgccu

SEQ ID NO: 263561 - RNA, 22 nt, Human
agcagacgugagcccguccccu

SEQ ID NO: 263562 - RNA, 21 nt, Human
agcccguagaacugcagcccu

SEQ ID NO: 263563 - RNA, 18 nt, Human
agcccuuggaggccugag

SEQ ID NO: 263564 - RNA, 19 nt, Human
agcggcagcaccagcucug

SEQ ID NO: 263565 - RNA, 19 nt, Human
agcugcagcacacgccucc

SEQ ID NO: 263566 - RNA, 19 nt, Human
aggacaaaagagggcgggg

SEQ ID NO: 263567 - RNA, 18 nt, Human
aggagaccugguuccagc

SEQ ID NO: 263568 - RNA, 18 nt, Human
aggccgcccagggcccca

SEQ ID NO: 263569 - RNA, 18 nt, Human
aggccucagagccguugc

SEQ ID NO: 263570 - RNA, 21 nt, Human
aggccucgcagcccuucccag

SEQ ID NO: 263571 - RNA, 19 nt, Human
aggcggcuggcccgaacca

SEQ ID NO: 263572 - RNA, 23 nt, Human
aggcugcuggagcgguacugagc

SEQ ID NO: 263573 - RNA, 27 nt, Human
agggccccagagggagcgaccuugggg

SEQ ID NO: 263574 - RNA, 19 nt, Human
agggcggguacugauugag

SEQ ID NO: 263575 - RNA, 23 nt, Human
aggggcugccccugucccaccag

SEQ ID NO: 263576 - RNA, 25 nt, Human
agucugggagauguagcaguggccu

SEQ ID NO: 263577 - RNA, 21 nt, Human
agugaaggcuggggggcaggu

SEQ ID NO: 263578 - RNA, 23 nt, Human
aguggaaaagcaucuccucaggg

SEQ ID NO: 263579 - RNA, 21 nt, Human
aguggcgggagggaugggagg

SEQ ID NO: 263580 - RNA, 22 nt, Human
aguugguggccugggcugagcc

SEQ ID NO: 263581 - RNA, 30 nt, Human
augaacucgugugugugugugugugugugg

SEQ ID NO: 263582 - RNA, 30 nt, Human; identical to SEQ ID NO: 263581

SEQ ID NO: 263583 - RNA, 19 nt, Human
augaaguugguggccuggg

SEQ ID NO: 263584 - RNA, 21 nt, Human
cacaguccugggcuggagugc

SEQ ID NO: 263585 - RNA, 19 nt, Human
cacaucgcgcacgucuucc

SEQ ID NO: 263586 - RNA, 23 nt, Human
caccagcucuguggcuccaguuc

SEQ ID NO: 263587 - RNA, 22 nt, Human
cacccuuuucucuccucagccc

SEQ ID NO: 263588 - RNA, 24 nt, Human
cacgucguuccugggcuccucacu

SEQ ID NO: 263589 - RNA, 19 nt, Human
cacguucagggcugucaca

SEQ ID NO: 263590 - RNA, 18 nt, Human
cacugggcaggugcuggc

SEQ ID NO: 263591 - RNA, 21 nt, Human
cagagccgcacagugccgccc

SEQ ID NO: 263592 - RNA, 19 nt, Human
cagagucugggagauguag

SEQ ID NO: 263593 - RNA, 19 nt, Human
cagcaagaggccgcccagg

SEQ ID NO: 263594 - RNA, 21 nt, Human
cagcccagagucugggagaug

SEQ ID NO: 263595 - RNA, 22 nt, Human
cagcugccuacugccgaggccc

SEQ ID NO: 263596 - RNA, 21 nt, Human
caggagaccugguuccagccc

SEQ ID NO: 263597 - RNA, 22 nt, Human
cagggccccaaagaagagggag

SEQ ID NO: 263598 - RNA, 19 nt, Human
cagggcgauaccucuccca

SEQ ID NO: 263599 - RNA, 25 nt, Human
caugcucaggugcucacagugcucg

SEQ ID NO: 263600 - RNA, 24 nt, Human
cauuccagcggcagcaccagcucu

SEQ ID NO: 263601 - RNA, 19 nt, Human
ccaccgaggcguugaccuc

SEQ ID NO: 263602 - RNA, 22 nt, Human
ccacgcuaaucacccuuuucuc

SEQ ID NO: 263603 - RNA, 24 nt, Human
ccacuuggcuguugcggagaaagg

SEQ ID NO: 263604 - RNA, 19 nt, Human
ccagagugaauggcuccag

SEQ ID NO: 263605 - RNA, 21 nt, Human
ccagcagcaagaggccgccca

SEQ ID NO: 263606 - RNA, 24 nt, Human
cccacuaccccaccaggaaagaaa

SEQ ID NO: 263607 - RNA, 23 nt, Human
ccccaccccacuaccccaccagg

SEQ ID NO: 263608 - RNA, 18 nt, Human
ccccagaagcgcaggacc

SEQ ID NO: 263609 - RNA, 23 nt, Human
ccccagagggagcgaccuugggg

SEQ ID NO: 263610 - RNA, 21 nt, Human
ccccagcugggccaccgaggc

SEQ ID NO: 263611 - RNA, 21 nt, Human
ccccaggggcugccccugucc

SEQ ID NO: 263612 - RNA, 25 nt, Human
ccccaggggcugccccugucccacc

SEQ ID NO: 263613 - RNA, 21 nt, Human
cccccagcccauugaaggugu

SEQ ID NO: 263614 - RNA, 21 nt, Human
ccccggagcaaccccagaagc

SEQ ID NO: 263615 - RNA, 23 nt, Human
ccccggagcaaccccagaagcgc

SEQ ID NO: 263616 - RNA, 20 nt, Human
cccgacccccagcagcaaga

SEQ ID NO: 263617 - RNA, 18 nt, Human
cccgcauguccagggucc

SEQ ID NO: 263618 - RNA, 19 nt, Human
cccgucacacuugcagcca

SEQ ID NO: 263619 - RNA, 19 nt, Human
cccuggggaagcuccacgg

SEQ ID NO: 263620 - RNA, 23 nt, Human
ccgggccccgagggcgguacugg

SEQ ID NO: 263621 - RNA, 20 nt, Human
ccucagggcucccuggggga

SEQ ID NO: 263622 - RNA, 20 nt, Human
ccugggcuggagugcagaug

SEQ ID NO: 263623 - RNA, 21 nt, Human
ccuggguccucuccucccucc

SEQ ID NO: 263624 - RNA, 22 nt, Human
cgcaguagcggccgaaggugcc

SEQ ID NO: 263625 - RNA, 20 nt, Human
cgccuccaccaccgcggcca

SEQ ID NO: 263626 - RNA, 19 nt, Human
cggcucaggaggacuccgg

SEQ ID NO: 263627 - RNA, 20 nt, Human
cgucgaagcuggcggaggcc

SEQ ID NO: 263628 - RNA, 20 nt, Human
cgucuugggccccgaccagc

SEQ ID NO: 263629 - RNA, 21 nt, Human
cgugugugugugugugugugu

SEQ ID NO: 263630 - RNA, 21 nt, Human
cgugugugugugugugugugu

SEQ ID NO: 263631 - RNA, 23 nt, Human
cgugugugugugugugugugugu

SEQ ID NO: 263632 - RNA, 23 nt, Human
cgugugugugugugugugugugu

SEQ ID NO: 263633 - RNA, 20 nt, Human
cucagccccaccccacuacc

SEQ ID NO: 263634 - RNA, 19 nt, Human
cuccucccuccccaggggc

SEQ ID NO: 263635 - RNA, 21 nt, Human
cugcagaaucgauucguucca

SEQ ID NO: 263636 - RNA, 23 nt, Human
cugcagcggggcccacugggcag

SEQ ID NO: 263637 - RNA, 20 nt, Human
cugccaggucauuccaaagu

SEQ ID NO: 263638 - RNA, 18 nt, Human
cuggccccggagcaaccc

SEQ ID NO: 263639 - RNA, 19 nt, Human
cuggcggaggaguggagga

SEQ ID NO: 263640 - RNA, 22 nt, Human
cuguggcuccaguuccugggcc

SEQ ID NO: 263641 - RNA, 23 nt, Human
cuucaaggcaaggccucagcuga

SEQ ID NO: 263642 - RNA, 24 nt, Human
gaagaggacaaaagagggcggggc

SEQ ID NO: 263643 - RNA, 21 nt, Human
gaaggcagcuggucauuccuc

SEQ ID NO: 263644 - RNA, 22 nt, Human
gacagccuucagucaccuuccc

SEQ ID NO: 263645 - RNA, 19 nt, Human
gcagaccacaguccugggc

SEQ ID NO: 263646 - RNA, 18 nt, Human
gcaggaccacgaacgucc

SEQ ID NO: 263647 - RNA, 25 nt, Human
gccccaccccacuaccccaccagga

SEQ ID NO: 263648 - RNA, 23 nt, Human
gcccccgucacacuugcagccag

SEQ ID NO: 263649 - RNA, 19 nt, Human
gccccuuguaggcuucaau

SEQ ID NO: 263650 - RNA, 20 nt, Human
gccgcucugggggcuguaga

SEQ ID NO: 263651 - RNA, 24 nt, Human
gccucagagccguugcggcucagg

SEQ ID NO: 263652 - RNA, 21 nt, Human
gcucugggggcuguagaccag

SEQ ID NO: 263653 - RNA, 23 nt, Human
gcuggagugcagaugccaagcca

SEQ ID NO: 263654 - RNA, 18 nt, Human
gcuggcacuggccuccau

SEQ ID NO: 263655 - RNA, 21 nt, Human
ggaacaagggcaggagaccug

SEQ ID NO: 263656 - RNA, 18 nt, Human
ggaagaggacaaaagagg

SEQ ID NO: 263657 - RNA, 18 nt, Human
ggagcgaccuuggggcug

SEQ ID NO: 263658 - RNA, 22 nt, Human
ggaggagacaugggggaauggg

SEQ ID NO: 263659 - RNA, 19 nt, Human
ggccaucaccacauuauga

SEQ ID NO: 263660 - RNA, 19 nt, Human
ggcccaggcugcuggagcg

SEQ ID NO: 263661 - RNA, 23 nt, Human
ggcuggcggaggaguggaggaug

SEQ ID NO: 263662 - RNA, 21 nt, Human
ggcugggacaucagugggcug

SEQ ID NO: 263663 - RNA, 23 nt, Human
gggaagaauggggaagaaagggc

SEQ ID NO: 263664 - RNA, 20 nt, Human
gggaagaggacaaaagaggg

SEQ ID NO: 263665 - RNA, 20 nt, Human
gggcccaggcugcuggagcg

SEQ ID NO: 263666 - RNA, 21 nt, Human
gggcgggaggcuggcggagga

SEQ ID NO: 263667 - RNA, 19 nt, Human
gggcugagccagucugggc

SEQ ID NO: 263668 - RNA, 18 nt, Human
gucacacuggaaaugggu

SEQ ID NO: 263669 - RNA, 23 nt, Human
gucaccuucccuuuuccagucuc

SEQ ID NO: 263670 - RNA, 18 nt, Human
gugaagcugcacagcugc

SEQ ID NO: 263671 - RNA, 20 nt, Human
gugaagcugcacagcugccu

SEQ ID NO: 263672 - RNA, 23 nt, Human
uaacugacaccauccaagguggu

SEQ ID NO: 263673 - RNA, 21 nt, Human
uaagaacgccuccaccaccgc

SEQ ID NO: 263674 - RNA, 18 nt, Human
uaccucucccacacuggc

SEQ ID NO: 263675 - RNA, 19 nt, Human
uauaagaacgccuccacca

SEQ ID NO: 263676 - RNA, 19 nt, Human
uauguagcacagcccacgu

SEQ ID NO: 263677 - RNA, 25 nt, Human
ucacccuuuucucuccucagcccca

SEQ ID NO: 263678 - RNA, 19 nt, Human
ucagugaaggcuggggggc

SEQ ID NO: 263679 - RNA, 21 nt, Human
ucccaaaagcaauggcgccuc

SEQ ID NO: 263680 - RNA, 21 nt, Human
ucccaaaagcaauggcgccuc

SEQ ID NO: 263681 - RNA, 21 nt, Human
ucccaguauucauucuccuug

SEQ ID NO: 263682 - RNA, 21 nt, Human
ucccaguauucauucuccuug

SEQ ID NO: 263683 - RNA, 20 nt, Human
ucccuggggaagcuccacgg

SEQ ID NO: 263684 - RNA, 20 nt, Human
ucccugggggaaugguggag

SEQ ID NO: 263685 - RNA, 19 nt, Human
uccgagaugaccauccagu

SEQ ID NO: 263686 - RNA, 21 nt, Human
uccucacaggcauccucggag

SEQ ID NO: 263687 - RNA, 24 nt, Human
uccucagccccaccccacuacccc

SEQ ID NO: 263688 - RNA, 18 nt, Human
ucgaagcuggcggaggcc

SEQ ID NO: 263689 - RNA, 19 nt, Human
ucgaagcuggcggaggccu

SEQ ID NO: 263690 - RNA, 21 nt, Human
ucggugcagcugucucugagc

SEQ ID NO: 263691 - RNA, 20 nt, Human
ucucaaagagcuccaagucg

SEQ ID NO: 263692 - RNA, 19 nt, Human
ucuccgaaggggccaggga

SEQ ID NO: 263693 - RNA, 18 nt, Human
ugaagucguccucuggau

SEQ ID NO: 263694 - RNA, 18 nt, Human
ugaaucagcguggucugc

SEQ ID NO: 263695 - RNA, 23 nt, Human
ugaaucagcguggucugccccuu

SEQ ID NO: 263696 - RNA, 21 nt, Human
ugacggggcccaggcugcugg

SEQ ID NO: 263697 - RNA, 20 nt, Human
ugagcaagagcuggaugacu

SEQ ID NO: 263698 - RNA, 20 nt, Human
ugagcugaguggcgggaggg

SEQ ID NO: 263699 - RNA, 24 nt, Human
ugaggugagucuugaggucggaac

SEQ ID NO: 263700 - RNA, 24 nt, Human
ugaggugagucuugaggucggaac

SEQ ID NO: 263701 - RNA, 25 nt, Human
ugaguagaaaacaggggugaaguug

SEQ ID NO: 263702 - RNA, 20 nt, Human
ugaguuggaauucaggaauc

SEQ ID NO: 263703 - RNA, 24 nt, Human
ugaguuggaauucaggaaucuauc

SEQ ID NO: 263704 - RNA, 22 nt, Human
ugcagccagccaccuccaggga

SEQ ID NO: 263705 - RNA, 22 nt, Human
ugccaaggacgcugcacgugcc

SEQ ID NO: 263706 - RNA, 22 nt, Human
ugcggcaaaagucccccuggcu

SEQ ID NO: 263707 - RNA, 24 nt, Human
ugcuagaaucuccagagugaaugg

SEQ ID NO: 263708 - RNA, 19 nt, Human
ugcugccaggaacaagggc

SEQ ID NO: 263709 - RNA, 20 nt, Human
ugcuucucaucagccugagc

SEQ ID NO: 263710 - RNA, 26 nt, Human
uggaaaugggugggccacccuccucu

SEQ ID NO: 263711 - RNA, 19 nt, Human
uggaacuccgagaugacca

SEQ ID NO: 263712 - RNA, 23 nt, Human
uggaaggcagcuggucauuccuc

SEQ ID NO: 263713 - RNA, 20 nt, Human
uggacugaaguuguucccag

SEQ ID NO: 263714 - RNA, 18 nt, Human
uggaggccugaguuggaa

SEQ ID NO: 263715 - RNA, 23 nt, Human
uggaggccugaguuggaauucag

SEQ ID NO: 263716 - RNA, 27 nt, Human
uggagugcagaugccaagccaaucuug

SEQ ID NO: 263717 - RNA, 28 nt, Human
uggagugcagaugccaagccaaucuugg

SEQ ID NO: 263718 - RNA, 22 nt, Human
uggccugggcugagccagucug

SEQ ID NO: 263719 - RNA, 22 nt, Human
ugggaacaggucacacuggaaa

SEQ ID NO: 263720 - RNA, 25 nt, Human
ugggaggagacaugggggaauggga

SEQ ID NO: 263721 - RNA, 22 nt, Human
ugggcaggugcuggcacuggcc

SEQ ID NO: 263722 - RNA, 18 nt, Human
ugggggaaugggaacagg

SEQ ID NO: 263723 - RNA, 21 nt, Human
ugggggccuguauguagcaca

SEQ ID NO: 263724 - RNA, 24 nt, Human
ugggggccuguauguagcacagcc

SEQ ID NO: 263725 - RNA, 23 nt, Human
uggggguccccgaacauccaggc

SEQ ID NO: 263726 - RNA, 18 nt, Human
uggguccucuccucccuc

SEQ ID NO: 263727 - RNA, 19 nt, Human
uguaacugacaccauccaa

SEQ ID NO: 263728 - RNA, 24 nt, Human
ugucacagucugguuauccagcag

SEQ ID NO: 263729 - RNA, 19 nt, Human
ugugucugcgugaggaccc

SEQ ID NO: 263730 - RNA, 19 nt, Human
ugugucugcgugaggaccc

SEQ ID NO: 263731 - RNA, 22 nt, Human
ugugugcacgcgcgcgugcaca

SEQ ID NO: 263732 - RNA, 22 nt, Human
ugugugcacgcgcgcgugcaca

SEQ ID NO: 263733 - RNA, 22 nt, Human
ugugugcacgcgcgcgugcaca

SEQ ID NO: 263734 - RNA, 25 nt, Human
ugugugugugcacgcgcgcgugcag

SEQ ID NO: 263735 - RNA, 18 nt, Human
ugugugugugugcacgcg

SEQ ID NO: 263736 - RNA, 18 nt, Human
ugugugugugugcacgcg

SEQ ID NO: 263737 - RNA, 18 nt, Human
ugugugugugugugcacg

SEQ ID NO: 263738 - RNA, 18 nt, Human
ugugugugugugugcacg

SEQ ID NO: 263739 - RNA, 18 nt, Human
ugugugugugugugugug

SEQ ID NO: 263740 - RNA, 18 nt, Human
ugugugugugugugugug

SEQ ID NO: 263741 - RNA, 24 nt, Human
uucaaggcaaggccucagcugagu

SEQ ID NO: 263742 - RNA, 20 nt, Human
uuccagacccccaggagccc

SEQ ID NO: 263743 - RNA, 23 nt, Human
uuccugggccaacugccaaggac

SEQ ID NO: 263744 - RNA, 22 nt, Human
uuccugggcuccucacuccucc

SEQ ID NO: 263745 - RNA, 18 nt, Human
uuccuggguccucuccuc

SEQ ID NO: 263746 - RNA, 21 nt, Human
uucuagguugacaguuggacu

SEQ ID NO: 263747 - RNA, 19 nt, Human
uuggcacuucuugcuagaa

SEQ ID NO: 263748 - RNA, 19 nt, Human
uuuccagucucccaaaagc

SEQ ID NO: 263749 - RNA, 22 nt, Human
caugaucagacaaugcacaucc

SEQ ID NO: 263750 - RNA, 27 nt, Human
ccccucacccuucuggggccgguuuca

SEQ ID NO: 263751 - RNA, 22 nt, Human
ccgcagaggaggcccaagguuu

SEQ ID NO: 263752 - RNA, 22 nt, Human
cuggggccgguuucacccacgg

SEQ ID NO: 263753 - RNA, 21 nt, Human
gacaaugcacauccuggcucc

SEQ ID NO: 263754 - RNA, 22 nt, Human
gacuccugaguggcgcccuccc

SEQ ID NO: 263755 - RNA, 19 nt, Human
gaggaggcccaagguuuuc

SEQ ID NO: 263756 - RNA, 18 nt, Human
gccccucacccuucuggg

SEQ ID NO: 263757 - RNA, 21 nt, Human
ggccgguuucacccacggggu

SEQ ID NO: 263758 - RNA, 20 nt, Human
gggcagcaggagcacggagc

SEQ ID NO: 263759 - RNA, 25 nt, Human
gggcagcaggagcacggagcgcggg

SEQ ID NO: 263760 - RNA, 18 nt, Human
gggggugugagcuguucc

SEQ ID NO: 263761 - RNA, 18 nt, Human
gugagcuguucccagagu

SEQ ID NO: 263762 - RNA, 24 nt, Human
uggcuccagguggacagagcaugg

SEQ ID NO: 263763 - RNA, 19 nt, Human
aagugcugacaagccgcaa

SEQ ID NO: 263764 - RNA, 20 nt, Human
acaaccucucccuccauccg

SEQ ID NO: 263765 - RNA, 21 nt, Human
acagccuuguacccgcccucu

SEQ ID NO: 263766 - RNA, 25 nt, Human
accucagcgaccuucgccccagcca

SEQ ID NO: 263767 - RNA, 19 nt, Human
acuuucguguccuccucca

SEQ ID NO: 263768 - RNA, 20 nt, Human
agaagggacuacaugggccc

SEQ ID NO: 263769 - RNA, 22 nt, Human
agacugaggccaagugggcagg

SEQ ID NO: 263770 - RNA, 18 nt, Human
agaggguguccgggaucc

SEQ ID NO: 263771 - RNA, 19 nt, Human
agcacaaccucucccucca

SEQ ID NO: 263772 - RNA, 18 nt, Human
agcagcacuugagcggcg

SEQ ID NO: 263773 - RNA, 20 nt, Human
agcagcagcagcgcacccag

SEQ ID NO: 263774 - RNA, 21 nt, Human
agccagaaggucauguucggc

SEQ ID NO: 263775 - RNA, 18 nt, Human
agccagcagcagcagcgc

SEQ ID NO: 263776 - RNA, 20 nt, Human
agccuuggggcuggggcucc

SEQ ID NO: 263777 - RNA, 18 nt, Human
agccuuguacccgcccuc

SEQ ID NO: 263778 - RNA, 19 nt, Human
agcgagaccuccagugccc

SEQ ID NO: 263779 - RNA, 19 nt, Human
agcgagaccuccagugccc

SEQ ID NO: 263780 - RNA, 23 nt, Human
agcgggcaaggucggccuguugg

SEQ ID NO: 263781 - RNA, 25 nt, Human
aggaaggucauggggcuggggacac

SEQ ID NO: 263782 - RNA, 23 nt, Human
aggacggcgaggccaaggagagc

SEQ ID NO: 263783 - RNA, 23 nt, Human
aggggagauggcaguaugugccc

SEQ ID NO: 263784 - RNA, 21 nt, Human
agggucccugggagggcucag

SEQ ID NO: 263785 - RNA, 19 nt, Human
aggucauggggcuggggac

SEQ ID NO: 263786 - RNA, 22 nt, Human
aggucauggggcuggggacacu

SEQ ID NO: 263787 - RNA, 22 nt, Human
aggugcugguucccacaccggg

SEQ ID NO: 263788 - RNA, 22 nt, Human
aggugcugguucccauaccggg

SEQ ID NO: 263789 - RNA, 22 nt, Human
aggugcugguucccauacuggg

SEQ ID NO: 263790 - RNA, 19 nt, Human
agguggggagacugaggcc

SEQ ID NO: 263791 - RNA, 22 nt, Human
agucacuggcaccugcugucau

SEQ ID NO: 263792 - RNA, 23 nt, Human
aguggugcugguccagggcccag

SEQ ID NO: 263793 - RNA, 22 nt, Human
aucaccaccgggcgcaucguag

SEQ ID NO: 263794 - RNA, 21 nt, Human
auggggcuggggacacuccug

SEQ ID NO: 263795 - RNA, 23 nt, Human
caaccucugcguagaaggcuccc

SEQ ID NO: 263796 - RNA, 22 nt, Human
cacaaccucucccuccauccgg

SEQ ID NO: 263797 - RNA, 18 nt, Human
caccagcagccagaaggu

SEQ ID NO: 263798 - RNA, 21 nt, Human
caccccuaggccuccuggucu

SEQ ID NO: 263799 - RNA, 19 nt, Human
cacccuuaucuccuugguc

SEQ ID NO: 263800 - RNA, 18 nt, Human
caccugaagauggggugc

SEQ ID NO: 263801 - RNA, 20 nt, Human
cacugaguagcgggcaaggu

SEQ ID NO: 263802 - RNA, 22 nt, Human
cagaagggacuacaugggcccc

SEQ ID NO: 263803 - RNA, 24 nt, Human
cagaagggacuacaugggcccccg

SEQ ID NO: 263804 - RNA, 21 nt, Human
cagcagcagcagcgcacccag

SEQ ID NO: 263805 - RNA, 26 nt, Human
cagccugcaguugcgucucggggaug

SEQ ID NO: 263806 - RNA, 27 nt, Human
cagccugcaguugcgucucggggauga

SEQ ID NO: 263807 - RNA, 23 nt, Human
cagcgcacccagcaccccgcccu

SEQ ID NO: 263808 - RNA, 22 nt, Human
cagcgccacgcgccacggugcc

SEQ ID NO: 263809 - RNA, 25 nt, Human
caggcaccgaggcacagggcagaag

SEQ ID NO: 263810 - RNA, 21 nt, Human
cagggucaaccaaggggcuca

SEQ ID NO: 263811 - RNA, 23 nt, Human
caucguagggacccccaccccuc

SEQ ID NO: 263812 - RNA, 19 nt, Human
cauggggcuggggacacuc

SEQ ID NO: 263813 - RNA, 22 nt, Human
ccaccccuccccgcgcccucgc

SEQ ID NO: 263814 - RNA, 18 nt, Human
ccacuggguguggcuggu

SEQ ID NO: 263815 - RNA, 22 nt, Human
ccagcagcagcagcgcacccag

SEQ ID NO: 263816 - RNA, 23 nt, Human
ccagcagcagcagcgcacccagc

SEQ ID NO: 263817 - RNA, 18 nt, Human
ccagcgccacgcgccacg

SEQ ID NO: 263818 - RNA, 20 nt, Human
ccaguuggccuuguggucag

SEQ ID NO: 263819 - RNA, 19 nt, Human
cccccagcgcgccucaguc

SEQ ID NO: 263820 - RNA, 25 nt, Human
cccccagcgcgccucaguccagguu

SEQ ID NO: 263821 - RNA, 18 nt, Human
ccccggagugucccgcac

SEQ ID NO: 263822 - RNA, 25 nt, Human
cccggagugucccgcaccagcagcc

SEQ ID NO: 263823 - RNA, 19 nt, Human
cccggggaccccccgggug

SEQ ID NO: 263824 - RNA, 20 nt, Human
ccgggcaggagcugagaggg

SEQ ID NO: 263825 - RNA, 18 nt, Human
ccgguccagccucagggc

SEQ ID NO: 263826 - RNA, 24 nt, Human
ccucagaggcugagaaggggcagc

SEQ ID NO: 263827 - RNA, 19 nt, Human
ccuccgaggggccgccacc

SEQ ID NO: 263828 - RNA, 25 nt, Human
ccucgcccucaucgccgcugccgga

SEQ ID NO: 263829 - RNA, 19 nt, Human
ccucucccuccauccggaa

SEQ ID NO: 263830 - RNA, 21 nt, Human
ccucuggccgccgcuccuugg

SEQ ID NO: 263831 - RNA, 22 nt, Human
ccugagccuggauccucagagg

SEQ ID NO: 263832 - RNA, 23 nt, Human
ccugagccuggauccucagaggc

SEQ ID NO: 263833 - RNA, 21 nt, Human
ccuuggggcuggggcuccgga

SEQ ID NO: 263834 - RNA, 19 nt, Human
ccuuggucaggauggaccu

SEQ ID NO: 263835 - RNA, 22 nt, Human
cgaccacgucugccuccguccc

SEQ ID NO: 263836 - RNA, 24 nt, Human
cgauaugugauggccgaguugagg

SEQ ID NO: 263837 - RNA, 18 nt, Human
cgcgaggccaaggagagc

SEQ ID NO: 263838 - RNA, 22 nt, Human
cgcugccggagucacuggcgcc

SEQ ID NO: 263839 - RNA, 22 nt, Human
cggagcuuugccagagcagcac

SEQ ID NO: 263840 - RNA, 22 nt, Human
cggagcuuugccagagcagcac

SEQ ID NO: 263841 - RNA, 19 nt, Human
cggcgaggccaaggagagc

SEQ ID NO: 263842 - RNA, 19 nt, Human
cgggaucccccgagcccca

SEQ ID NO: 263843 - RNA, 21 nt, Human
cggguccugagccuggauccu

SEQ ID NO: 263844 - RNA, 20 nt, Human
cgguccagccucagggcggg

SEQ ID NO: 263845 - RNA, 19 nt, Human
cggugccagaggucaccgu

SEQ ID NO: 263846 - RNA, 19 nt, Human
cguagaaguccaggggccg

SEQ ID NO: 263847 - RNA, 22 nt, Human
cguccagcacugacacgaacac

SEQ ID NO: 263848 - RNA, 19 nt, Human
cguugagaacgaccacguc

SEQ ID NO: 263849 - RNA, 24 nt, Human
cucaggccacacggcgcacccacc

SEQ ID NO: 263850 - RNA, 22 nt, Human
cuccaacccaagcauguagauu

SEQ ID NO: 263851 - RNA, 22 nt, Human
cuccacggugaccugggucacu

SEQ ID NO: 263852 - RNA, 24 nt, Human
cucccgccugugccaguguggugg

SEQ ID NO: 263853 - RNA, 19 nt, Human
cuccuccacccuuaucucc

SEQ ID NO: 263854 - RNA, 20 nt, Human
cucuggcuuugggagcagcg

SEQ ID NO: 263855 - RNA, 21 nt, Human
cugagcuugaaugcagacgua

SEQ ID NO: 263856 - RNA, 19 nt, Human
cugcagucaccguccugcc

SEQ ID NO: 263857 - RNA, 18 nt, Human
cugcgcuccaacccaagc

SEQ ID NO: 263858 - RNA, 18 nt, Human
cuggccgccgcuccuugg

SEQ ID NO: 263859 - RNA, 18 nt, Human
cuggggacacuccuggcc

SEQ ID NO: 263860 - RNA, 19 nt, Human
cuggggaggcagggccggg

SEQ ID NO: 263861 - RNA, 21 nt, Human
cugugccucccccagagcugg

SEQ ID NO: 263862 - RNA, 18 nt, Human
cugugcugugcccccacc

SEQ ID NO: 263863 - RNA, 18 nt, Human
cugugcugugcccccacc

SEQ ID NO: 263864 - RNA, 18 nt, Human
cugugcuguguccccacc

SEQ ID NO: 263865 - RNA, 22 nt, Human
gaagggacuacaugggcccccg

SEQ ID NO: 263866 - RNA, 23 nt, Human
gaaggucauggggcuggggacac

SEQ ID NO: 263867 - RNA, 22 nt, Human
gaccggcuucugccaagggggc

SEQ ID NO: 263868 - RNA, 21 nt, Human
gaccugggucacugaguagcg

SEQ ID NO: 263869 - RNA, 19 nt, Human
gagaaggugcagggcagga

SEQ ID NO: 263870 - RNA, 20 nt, Human
gagcagcacuugagccgggg

SEQ ID NO: 263871 - RNA, 20 nt, Human
gagcagcacuugagcggcgg

SEQ ID NO: 263872 - RNA, 22 nt, Human
gagguugguggccucagaguug

SEQ ID NO: 263873 - RNA, 19 nt, Human
gauccucagaggcugagaa

SEQ ID NO: 263874 - RNA, 20 nt, Human
gcacccagcaccccgcccag

SEQ ID NO: 263875 - RNA, 18 nt, Human
gcaggcgcuggcccaggg

SEQ ID NO: 263876 - RNA, 24 nt, Human
gccagaggucaccguguugugggc

SEQ ID NO: 263877 - RNA, 23 nt, Human
gccagcagcagcagcgcacccag

SEQ ID NO: 263878 - RNA, 20 nt, Human
gccguggggcuuccgccagc

SEQ ID NO: 263879 - RNA, 21 nt, Human
gccuccgucccgauguccucg

SEQ ID NO: 263880 - RNA, 26 nt, Human
gcucugggggaagcggggcgggcucc

SEQ ID NO: 263881 - RNA, 21 nt, Human
gcugccggagucacuggcgcc

SEQ ID NO: 263882 - RNA, 21 nt, Human
gcugguucccacaccgggggg

SEQ ID NO: 263883 - RNA, 21 nt, Human
gcugguucccauaccgggggg

SEQ ID NO: 263884 - RNA, 24 nt, Human
ggaacgccugguugucaaagccuu

SEQ ID NO: 263885 - RNA, 24 nt, Human
ggacaaggacgcgaggccaaggag

SEQ ID NO: 263886 - RNA, 18 nt, Human
ggacgagguugguggccu

SEQ ID NO: 263887 - RNA, 22 nt, Human
ggaggugcugguucccacaccg

SEQ ID NO: 263888 - RNA, 22 nt, Human
ggaggugcugguucccauaccg

SEQ ID NO: 263889 - RNA, 21 nt, Human
ggaguggcugguuggugggag

SEQ ID NO: 263890 - RNA, 20 nt, Human
ggaucccuugaugguucugg

SEQ ID NO: 263891 - RNA, 19 nt, Human
ggcaggagcugagagggug

SEQ ID NO: 263892 - RNA, 20 nt, Human
ggcaggguguuuacugcugc

SEQ ID NO: 263893 - RNA, 20 nt, Human
ggccaaggagagccagcagc

SEQ ID NO: 263894 - RNA, 23 nt, Human
ggcccaguuguuccuccagccuc

SEQ ID NO: 263895 - RNA, 19 nt, Human
ggccggggggugcgggcuc

SEQ ID NO: 263896 - RNA, 19 nt, Human
ggcugggggagcgagaccu

SEQ ID NO: 263897 - RNA, 19 nt, Human
ggcugggggagcgagaccu

SEQ ID NO: 263898 - RNA, 23 nt, Human
gggaguggcugguuggugggagg

SEQ ID NO: 263899 - RNA, 20 nt, Human
gggcaggagcugagagggug

SEQ ID NO: 263900 - RNA, 26 nt, Human
gggcaggagcugagaggguguccggg

SEQ ID NO: 263901 - RNA, 20 nt, Human
gggcaggcgcuggcccaggg

SEQ ID NO: 263902 - RNA, 26 nt, Human
gggcaucggugccuccgcgggcuugg

SEQ ID NO: 263903 - RNA, 21 nt, Human
ggggaaugugucucucacccc

SEQ ID NO: 263904 - RNA, 19 nt, Human
ggggauggggggacaucug

SEQ ID NO: 263905 - RNA, 18 nt, Human
ggggcuggggcuccggag

SEQ ID NO: 263906 - RNA, 19 nt, Human
ggggucuguacugugcccc

SEQ ID NO: 263907 - RNA, 19 nt, Human
ggggucugugcugugcccc

SEQ ID NO: 263908 - RNA, 19 nt, Human
ggggucugugcugugcccc

SEQ ID NO: 263909 - RNA, 19 nt, Human
ggggucugugcugugcccc

SEQ ID NO: 263910 - RNA, 21 nt, Human
gggucggaggcugggggagcg

SEQ ID NO: 263911 - RNA, 21 nt, Human
gggucggaggcugggggagcg

SEQ ID NO: 263912 - RNA, 20 nt, Human
gggucgugcguggggcuggg

SEQ ID NO: 263913 - RNA, 18 nt, Human
ggucacaggcaccgaggc

SEQ ID NO: 263914 - RNA, 19 nt, Human
gguugguggccucagaguu

SEQ ID NO: 263915 - RNA, 19 nt, Human
guccagggcccaguuguuc

SEQ ID NO: 263916 - RNA, 20 nt, Human
guccgggaucccccgagccc

SEQ ID NO: 263917 - RNA, 19 nt, Human
guccucgccaaaccagaca

SEQ ID NO: 263918 - RNA, 21 nt, Human
gucuggguggaugaugaaugu

SEQ ID NO: 263919 - RNA, 24 nt, Human
gugcccgugcggcugggggagagg

SEQ ID NO: 263920 - RNA, 24 nt, Human
gugcccgugcggcugggggagagg

SEQ ID NO: 263921 - RNA, 19 nt, Human
gugccuccgcucugacaca

SEQ ID NO: 263922 - RNA, 19 nt, Human
gugguugguuggugggagg

SEQ ID NO: 263923 - RNA, 19 nt, Human
guugguggccucagaguug

SEQ ID NO: 263924 - RNA, 18 nt, Human
uagaaggcucccgccugu

SEQ ID NO: 263925 - RNA, 23 nt, Human
uagcugggucaccaaugugccuc

SEQ ID NO: 263926 - RNA, 24 nt, Human
uagggaaagugcugacaagccgca

SEQ ID NO: 263927 - RNA, 18 nt, Human
ucacaggcaccgaggcac

SEQ ID NO: 263928 - RNA, 20 nt, Human
ucacuggcaccugcugucau

SEQ ID NO: 263929 - RNA, 23 nt, Human
ucacuuucguguccuccuccacc

SEQ ID NO: 263930 - RNA, 25 nt, Human
ucaguccaggucacugggcagggug

SEQ ID NO: 263931 - RNA, 18 nt, Human
uccaccaccgagaagcgc

SEQ ID NO: 263932 - RNA, 22 nt, Human
uccacguccagggugggcgcgu

SEQ ID NO: 263933 - RNA, 18 nt, Human
uccagcacugacacgaac

SEQ ID NO: 263934 - RNA, 21 nt, Human
uccagcacugacacgaacacc

SEQ ID NO: 263935 - RNA, 25 nt, Human
uccagcccacugccagaaggagggg

SEQ ID NO: 263936 - RNA, 18 nt, Human
ucccugggagggcucagg

SEQ ID NO: 263937 - RNA, 18 nt, Human
ucccugggagggcucagg

SEQ ID NO: 263938 - RNA, 20 nt, Human
ucccugggagggcucagggg

SEQ ID NO: 263939 - RNA, 27 nt, Human
uccucagaggcugagaaggggcagcug

SEQ ID NO: 263940 - RNA, 24 nt, Human
uccugagccuggauccucagaggc

SEQ ID NO: 263941 - RNA, 20 nt, Human
ucgccaaaccagacagccuu

SEQ ID NO: 263942 - RNA, 20 nt, Human
ucugcagucaccguccugcc

SEQ ID NO: 263943 - RNA, 21 nt, Human
ucuggcuuugggagcagcgag

SEQ ID NO: 263944 - RNA, 22 nt, Human
ucugggcaugggcgcccagccu

SEQ ID NO: 263945 - RNA, 21 nt, Human
ugacaagccgcaagggauccc

SEQ ID NO: 263946 - RNA, 18 nt, Human
ugacacagcagcugagcc

SEQ ID NO: 263947 - RNA, 21 nt, Human
ugaccugggucacugaguagc

SEQ ID NO: 263948 - RNA, 22 nt, Human
ugagaaggggcagcugcauccu

SEQ ID NO: 263949 - RNA, 19 nt, Human
ugagagguuccuggcuuug

SEQ ID NO: 263950 - RNA, 24 nt, Human
ugagccuggauccucagaggcuga

SEQ ID NO: 263951 - RNA, 22 nt, Human
ugcagggcaggaaccacggggg

SEQ ID NO: 263952 - RNA, 18 nt, Human
ugccaagggggcucccgc

SEQ ID NO: 263953 - RNA, 18 nt, Human
ugccaagggggcucccgc

SEQ ID NO: 263954 - RNA, 22 nt, Human
ugccgcggucuccguccucagc

SEQ ID NO: 263955 - RNA, 21 nt, Human
ugccuccgucccgauguccuc

SEQ ID NO: 263956 - RNA, 21 nt, Human
ugcugugcccccaccgggugu

SEQ ID NO: 263957 - RNA, 21 nt, Human
ugcugugcccccaccgggugu

SEQ ID NO: 263958 - RNA, 21 nt, Human
ugcuguuuucugcacccgggg

SEQ ID NO: 263959 - RNA, 19 nt, Human
uggaaaggaauuaauggug

SEQ ID NO: 263960 - RNA, 21 nt, Human
uggaggggggcuccuguucgg

SEQ ID NO: 263961 - RNA, 20 nt, Human
uggaguucacuuucgugucc

SEQ ID NO: 263962 - RNA, 19 nt, Human
uggauguagacaggucugc

SEQ ID NO: 263963 - RNA, 21 nt, Human
uggcaguaugugccccguggg

SEQ ID NO: 263964 - RNA, 24 nt, Human
uggcucuggggucuguacugugcc

SEQ ID NO: 263965 - RNA, 26 nt, Human
uggcugguuggugggaggugcugguu

SEQ ID NO: 263966 - RNA, 26 nt, Human
uggcugguuggugggaggugcugguu

SEQ ID NO: 263967 - RNA, 25 nt, Human
uggcugguuggugggaggugcuguu

SEQ ID NO: 263968 - RNA, 19 nt, Human
ugggagcagcgaggggaau

SEQ ID NO: 263969 - RNA, 21 nt, Human
ugggagggcucagggggucug

SEQ ID NO: 263970 - RNA, 23 nt, Human
ugggcaggcgcuggcccaggguc

SEQ ID NO: 263971 - RNA, 21 nt, Human
uggggagacugaggccaagug

SEQ ID NO: 263972 - RNA, 21 nt, Human
uggggaggcagggccgggggg

SEQ ID NO: 263973 - RNA, 18 nt, Human
uggggcuggggacgggcg

SEQ ID NO: 263974 - RNA, 18 nt, Human
ugggggaagcggggcggg

SEQ ID NO: 263975 - RNA, 25 nt, Human
ugguccagcccacugccagaaggag

SEQ ID NO: 263976 - RNA, 18 nt, Human
uggucuggcuccugcuca

SEQ ID NO: 263977 - RNA, 18 nt, Human
ugguuggugggaggugcu

SEQ ID NO: 263978 - RNA, 18 nt, Human
ugguuggugggaggugcu

SEQ ID NO: 263979 - RNA, 18 nt, Human
ugguuggugggaggugcu

SEQ ID NO: 263980 - RNA, 21 nt, Human
ugguuggugggaggugcuguu

SEQ ID NO: 263981 - RNA, 21 nt, Human
ugguugucaaagccuuggggc

SEQ ID NO: 263982 - RNA, 19 nt, Human
ugucaaagccuuggggcug

SEQ ID NO: 263983 - RNA, 20 nt, Human
ugucaaagccuuggggcugg

SEQ ID NO: 263984 - RNA, 20 nt, Human
uguccuccuccacccuuauc

SEQ ID NO: 263985 - RNA, 19 nt, Human
uguggacgagguugguggc

SEQ ID NO: 263986 - RNA, 19 nt, Human
uguggcugguuggugggag

SEQ ID NO: 263987 - RNA, 19 nt, Human
uguggcugguuggugggag

SEQ ID NO: 263988 - RNA, 19 nt, Human
uguggugguggucagcaca

SEQ ID NO: 263989 - RNA, 18 nt, Human
uguugugggccucaaccu

SEQ ID NO: 263990 - RNA, 19 nt, Human
uuaaaggggaauucggggg

SEQ ID NO: 263991 - RNA, 19 nt, Human
uuccuggcucuggggucug

SEQ ID NO: 263992 - RNA, 19 nt, Human
uuccuggcucuggggucug

SEQ ID NO: 263993 - RNA, 23 nt, Human
uuccuggcucuggggucuguacu

SEQ ID NO: 263994 - RNA, 19 nt, Human
uuccuggcuuuggggucug

SEQ ID NO: 263995 - RNA, 24 nt, Human
uucguguccuccuccacccuuauc

SEQ ID NO: 263996 - RNA, 18 nt, Human
uugcccgagucugggugg

SEQ ID NO: 263997 - RNA, 21 nt, Human
uuuccuggaggguguagaaca

SEQ ID NO: 263998 - RNA, 23 nt, Human
uuuuuuuuuuuuucauuuggaaa

SEQ ID NO: 263999 - RNA, 24 nt, Human
uuuuuuuuuuuuuucgggagccuu

SEQ ID NO: 264000 - RNA, 18 nt, Human
uuuuuuuuuuuuuugggu

SEQ ID NO: 264001 - RNA, 23 nt, Human
uuuuuuuuuuuuuuggguuucgg

SEQ ID NO: 264002 - RNA, 23 nt, Human
uuuuuuuuuuuuuuuuggguuuc

SEQ ID NO: 264003 - RNA, 22 nt, Human
uuuuuuuuuuuuuuuuucauuu

SEQ ID NO: 264004 - RNA, 26 nt, Human
uuuuuuuuuuuuuuuuuuuuuucggg

SEQ ID NO: 264005 - RNA, 22 nt, Human
aagcagcuuuguuuaaaaacca

SEQ ID NO: 264006 - RNA, 20 nt, Human
acacuuagauucuaauugua

SEQ ID NO: 264007 - RNA, 24 nt, Human
accccaaaagauguuguuaaaagg

SEQ ID NO: 264008 - RNA, 21 nt, Human
acugacuccaucucccugacc

SEQ ID NO: 264009 - RNA, 19 nt, Human
acuuagauucuaauuguac

SEQ ID NO: 264010 - RNA, 24 nt, Human
agaccgagggcaggaccguugaga

SEQ ID NO: 264011 - RNA, 20 nt, Human
aggcaggcagcgggcgcuuc

SEQ ID NO: 264012 - RNA, 24 nt, Human
cacuggaccagaugguaucccugg

SEQ ID NO: 264013 - RNA, 21 nt, Human
caugacacauauggcugcaaa

SEQ ID NO: 264014 - RNA, 18 nt, Human
caugagcccgagggcggg

SEQ ID NO: 264015 - RNA, 21 nt, Human
ccagggcggggcgggggaaga

SEQ ID NO: 264016 - RNA, 18 nt, Human
ccaggugcuaagcagcuu

SEQ ID NO: 264017 - RNA, 19 nt, Human
ccccacugacuccaucucc

SEQ ID NO: 264018 - RNA, 21 nt, Human
ccccacugacuccaucucccu

SEQ ID NO: 264019 - RNA, 21 nt, Human
ccgccaguucuggagucggga

SEQ ID NO: 264020 - RNA, 22 nt, Human
ccgccaugagcccgagggcggg

SEQ ID NO: 264021 - RNA, 18 nt, Human
cgcccucccaccccugcg

SEQ ID NO: 264022 - RNA, 25 nt, Human
cgccucgucccgccacucggucaau

SEQ ID NO: 264023 - RNA, 20 nt, Human
cgcugcucuaagugguuggu

SEQ ID NO: 264024 - RNA, 19 nt, Human
cggcaguggguaccgucgg

SEQ ID NO: 264025 - RNA, 22 nt, Human
cuaagcagcuuuguuuaaaaac

SEQ ID NO: 264026 - RNA, 22 nt, Human
cucccugaccagggaauuccag

SEQ ID NO: 264027 - RNA, 24 nt, Human
cucgucccgccacucggucagcca

SEQ ID NO: 264028 - RNA, 19 nt, Human
cuggaccagaugguauccc

SEQ ID NO: 264029 - RNA, 20 nt, Human
cuggcccagggcggggcggg

SEQ ID NO: 264030 - RNA, 23 nt, Human
cuucuacaugacacauauggcug

SEQ ID NO: 264031 - RNA, 19 nt, Human
gaccggggccgccaugagc

SEQ ID NO: 264032 - RNA, 19 nt, Human
gccaugagcccgagggccg

SEQ ID NO: 264033 - RNA, 20 nt, Human
gcggccgcccucccaccccu

SEQ ID NO: 264034 - RNA, 21 nt, Human
gcuagccuggguugggggaca

SEQ ID NO: 264035 - RNA, 18 nt, Human
ggacugggacgccgccag

SEQ ID NO: 264036 - RNA, 18 nt, Human
ggcuggcuagccuggguu

SEQ ID NO: 264037 - RNA, 18 nt, Human
gggacaggcaggcagcgg

SEQ ID NO: 264038 - RNA, 21 nt, Human
ggguugggggacagacggggg

SEQ ID NO: 264039 - RNA, 24 nt, Human
gguugggggacagacgggggcugg

SEQ ID NO: 264040 - RNA, 26 nt, Human
uaaaaggcuggcuagccuggguuggg

SEQ ID NO: 264041 - RNA, 21 nt, Human
uaaaauagauuccaagcugca

SEQ ID NO: 264042 - RNA, 23 nt, Human
uagauuccaagcugcaaugcccc

SEQ ID NO: 264043 - RNA, 20 nt, Human
uagccuggguugggggacaa

SEQ ID NO: 264044 - RNA, 21 nt, Human
ucccgccacucggucagccag

SEQ ID NO: 264045 - RNA, 21 nt, Human
uccuaaggaaauuuuauuuga

SEQ ID NO: 264046 - RNA, 21 nt, Human
ugaaauacgaagcgcgugcgg

SEQ ID NO: 264047 - RNA, 23 nt, Human
ugacauaaaauagauuccaagcu

SEQ ID NO: 264048 - RNA, 21 nt, Human
ugaccagggaauuccaggugc

SEQ ID NO: 264049 - RNA, 21 nt, Human
ugaccagggaauuccaggugc

SEQ ID NO: 264050 - RNA, 21 nt, Human
ugagcccucugcacuccuaag

SEQ ID NO: 264051 - RNA, 24 nt, Human
ugccugcugcgggucgccucgucc

SEQ ID NO: 264052 - RNA, 20 nt, Human
ugcucuaagugguuggucag

SEQ ID NO: 264053 - RNA, 18 nt, Human
uggcccagggcggggcgg

SEQ ID NO: 264054 - RNA, 22 nt, Human
ugggggacagacgggggcuggg

SEQ ID NO: 264055 - RNA, 22 nt, Human
uugaugaggaccaacuggugac

SEQ ID NO: 264056 - RNA, 19 nt, Human
uugggggacagacgggggc

SEQ ID NO: 264057 - RNA, 19 nt, Human
uuucccaaugagcccucug

SEQ ID NO: 264058 - RNA, 24 nt, Human
uuuuuuuuuuuuuuuuggguuuca

SEQ ID NO: 264059 - RNA, 24 nt, Human
uuuuuuuuuuuuuuuuuuggguuu

SEQ ID NO: 264060 - RNA, 23 nt, Human
uuuuuuuuuuuuuuuuuuugggu

SEQ ID NO: 264061 - RNA, 26 nt, Human
uuuuuuuuuuuuuuuuuuuuuuuggg

SEQ ID NO: 264062 - RNA, 24 nt, Human
aauucuuaauauaaaaaugaaaga

SEQ ID NO: 264063 - RNA, 27 nt, Human
agacaaaagcuaaaacaaaagggaccc

SEQ ID NO: 264064 - RNA, 22 nt, Human
agacaauguaaugcuaaacuga

SEQ ID NO: 264065 - RNA, 21 nt, Human
agguauuuuaaaguaaagcuu

SEQ ID NO: 264066 - RNA, 19 nt, Human
cauggaaacacccaauaga

SEQ ID NO: 264067 - RNA, 20 nt, Human
uaauaaauacaucaccauga

SEQ ID NO: 264068 - RNA, 20 nt, Human
uaccauuguccagaguucuu

SEQ ID NO: 264069 - RNA, 23 nt, Human
uauguacauacuuauagcauggu

SEQ ID NO: 264070 - RNA, 23 nt, Human
ucaaggaaaguacaaaucaggua

SEQ ID NO: 264071 - RNA, 19 nt, Human
uguuauagagaguauagag

SEQ ID NO: 264072 - RNA, 26 nt, Human
uuaauauaaaaaugaaagagauuuau

SEQ ID NO: 264073 - RNA, 21 nt, Human
uuuuuuuuuuucaagauaggu

SEQ ID NO: 264074 - RNA, 24 nt, Human
uuuuuuuuuuuuuuuuuuuucaag

SEQ ID NO: 264075 - RNA, 20 nt, Human
agggaaugggggcuuucaga

SEQ ID NO: 264076 - RNA, 24 nt, Human
cccgcagcuuccgacggugagcgg

SEQ ID NO: 264077 - RNA, 20 nt, Human
ccgacggugagcggcuuccc

SEQ ID NO: 264078 - RNA, 21 nt, Human
gggaaugggggcuuucagagg

SEQ ID NO: 264079 - RNA, 26 nt, Human
uaacaacaggauucucagggaauggg

SEQ ID NO: 264080 - RNA, 26 nt, Human
ucccagagguagccuucaaagccucu

SEQ ID NO: 264081 - RNA, 19 nt, Human
aagcagaugggacuguggg

SEQ ID NO: 264082 - RNA, 18 nt, Human
aagggaaggccacaccaa

SEQ ID NO: 264083 - RNA, 23 nt, Human
aaggggcaucuggguggggcugc

SEQ ID NO: 264084 - RNA, 25 nt, Human
agaugggacugugggagcuucaggg

SEQ ID NO: 264085 - RNA, 20 nt, Human
aggaagaacacaggccaagg

SEQ ID NO: 264086 - RNA, 23 nt, Human
agggaggggcgacaagggguagg

SEQ ID NO: 264087 - RNA, 22 nt, Human
caaaaucuuuuuauuccccauu

SEQ ID NO: 264088 - RNA, 19 nt, Human
caaggcgggggccugaagc

SEQ ID NO: 264089 - RNA, 26 nt, Human
cacaggccaaggcgggggccugaagc

SEQ ID NO: 264090 - RNA, 21 nt, Human
cagcccccagaauaauccaga

SEQ ID NO: 264091 - RNA, 25 nt, Human
cagcccccagaauaauccagaaagg

SEQ ID NO: 264092 - RNA, 19 nt, Human
cagggaagcagcccuucuc

SEQ ID NO: 264093 - RNA, 22 nt, Human
ccaaggcgggggccugaagcag

SEQ ID NO: 264094 - RNA, 25 nt, Human
ccagaaaggggcaucuggguggggc

SEQ ID NO: 264095 - RNA, 22 nt, Human
cccaccgcugggacugcagagc

SEQ ID NO: 264096 - RNA, 19 nt, Human
cccaucccgcuagguagaa

SEQ ID NO: 264097 - RNA, 25 nt, Human
cccuccuaggccuccugcucggcug

SEQ ID NO: 264098 - RNA, 21 nt, Human
ccgaagccggagcagcucccc

SEQ ID NO: 264099 - RNA, 18 nt, Human
ccgccgccccuccgcgcc

SEQ ID NO: 264100 - RNA, 21 nt, Human
ccgccgccgccgccuccccgg

SEQ ID NO: 264101 - RNA, 19 nt, Human
ccgccgccgccuccccggc

SEQ ID NO: 264102 - RNA, 27 nt, Human
ccgccgccgccuccccggccgccgccc

SEQ ID NO: 264103 - RNA, 18 nt, Human
ccgccgccuccccggccg

SEQ ID NO: 264104 - RNA, 24 nt, Human
ccgccgccuccccggccgccgccc

SEQ ID NO: 264105 - RNA, 20 nt, Human
ccgccuccgggacagccccu

SEQ ID NO: 264106 - RNA, 18 nt, Human
ccugccgccgccgccgcc

SEQ ID NO: 264107 - RNA, 25 nt, Human
cggaagaaagugcauauaaacccug

SEQ ID NO: 264108 - RNA, 21 nt, Human
cggcuggggccucuccagcag

SEQ ID NO: 264109 - RNA, 29 nt, Human
cuccgcgccgaagccggagcagcuccccc

SEQ ID NO: 264110 - RNA, 19 nt, Human
cuggcccugagagacaggg

SEQ ID NO: 264111 - RNA, 22 nt, Human
gaagaacacaggccaaggcggg

SEQ ID NO: 264112 - RNA, 21 nt, Human
gaagcagaugggacuguggga

SEQ ID NO: 264113 - RNA, 23 nt, Human
gaccaugccucccuaggucccac

SEQ ID NO: 264114 - RNA, 18 nt, Human
gacugcagagcuuggcug

SEQ ID NO: 264115 - RNA, 24 nt, Human
gaugcagagggcagaccaugccuc

SEQ ID NO: 264116 - RNA, 25 nt, Human
gcaggugcucugggagggaggggcg

SEQ ID NO: 264117 - RNA, 20 nt, Human
gcccaccgccuccgggacag

SEQ ID NO: 264118 - RNA, 21 nt, Human
gccgccgccgccgccuccccg

SEQ ID NO: 264119 - RNA, 22 nt, Human
ggcuggggccucuccagcagug

SEQ ID NO: 264120 - RNA, 22 nt, Human
gggaaggccacaccaagugcug

SEQ ID NO: 264121 - RNA, 21 nt, Human
gggaaggcuuccuggaggagg

SEQ ID NO: 264122 - RNA, 21 nt, Human
gggacugcagagcuuggcugg

SEQ ID NO: 264123 - RNA, 20 nt, Human
ggguaggggaaggcuuccug

SEQ ID NO: 264124 - RNA, 18 nt, Human
uccagcagugucaggagc

SEQ ID NO: 264125 - RNA, 23 nt, Human
uccagcagugucaggagcugggc

SEQ ID NO: 264126 - RNA, 25 nt, Human
uccagcagugucaggagcugggcgc

SEQ ID NO: 264127 - RNA, 24 nt, Human
ucccugaaaagggagagagaaggc

SEQ ID NO: 264128 - RNA, 21 nt, Human
uccgggacagccccuggggga

SEQ ID NO: 264129 - RNA, 19 nt, Human
uccugccgccgccgccgcc

SEQ ID NO: 264130 - RNA, 23 nt, Human
uccugccgccgccgccgccuccc

SEQ ID NO: 264131 - RNA, 18 nt, Human
ucuccgggaaccaggccc

SEQ ID NO: 264132 - RNA, 20 nt, Human
ucuggagucucagaggaccc

SEQ ID NO: 264133 - RNA, 25 nt, Human
ugccaucuuuuccacaaaccucuca

SEQ ID NO: 264134 - RNA, 24 nt, Human
ugggagggaggggcgacaaggggu

SEQ ID NO: 264135 - RNA, 18 nt, Human
uuuaaccaggcccaccgc

SEQ ID NO: 264136 - RNA, 25 nt, Human
uuuuccacaaaccucucagguacag

SEQ ID NO: 264137 - RNA, 24 nt, Human
aacuuccauuguauuaaucaggag

SEQ ID NO: 264138 - RNA, 21 nt, Human
aagaagaugaaucuagaagug

SEQ ID NO: 264139 - RNA, 18 nt, Human
agcaucuagaagugcagg

SEQ ID NO: 264140 - RNA, 20 nt, Human
caagaagaugaaucuagaag

SEQ ID NO: 264141 - RNA, 21 nt, Human
caucuagaagugcagguagcu

SEQ ID NO: 264142 - RNA, 20 nt, Human
cuuuuuuuuuuuuuuuuugg

SEQ ID NO: 264143 - RNA, 18 nt, Human
ggugacuccuaagcccag

SEQ ID NO: 264144 - RNA, 18 nt, Human
ggugacuccuaagcccag

SEQ ID NO: 264145 - RNA, 27 nt, Human
uagaagugcagguagcugcaacaaacg

SEQ ID NO: 264146 - RNA, 27 nt, Human
uagaagugcagguagcugcaacaaacg

SEQ ID NO: 264147 - RNA, 21 nt, Human
uaggugggggagacgacacag

SEQ ID NO: 264148 - RNA, 20 nt, Human
ugacuccuaagcccagggcu

SEQ ID NO: 264149 - RNA, 20 nt, Human
ugacuccuaagcccagggcu

SEQ ID NO: 264150 - RNA, 23 nt, Human
ugcccagaaacuuccauuguauu

SEQ ID NO: 264151 - RNA, 21 nt, Human
uggaaacuuuuuuuuuuuuuu

SEQ ID NO: 264152 - RNA, 23 nt, Human
uggaaacuuuuuuuuuuuuuuuu

SEQ ID NO: 264153 - RNA, 24 nt, Human
uggaaacuuuuuuuuuuuuuuuuu

SEQ ID NO: 264154 - RNA, 29 nt, Human
ugguaggugggggagacgacaacaacggu

SEQ ID NO: 264155 - RNA, 19 nt, Human
uuuuuuuuuuuuuugccca

SEQ ID NO: 264156 - RNA, 23 nt, Human
uuuuuuuuuuuuuuuuugcccag

SEQ ID NO: 264157 - RNA, 21 nt, Human
aacugcgguccaaggcggucc

SEQ ID NO: 264158 - RNA, 26 nt, Human
agaaggggagagcugcaagguggagc

SEQ ID NO: 264159 - RNA, 18 nt, Human
agagagaggagacagggc

SEQ ID NO: 264160 - RNA, 23 nt, Human
aggaauacagagaaggggagagc

SEQ ID NO: 264161 - RNA, 20 nt, Human
agguggagcgauucugaggg

SEQ ID NO: 264162 - RNA, 22 nt, Human
agguggagcgauucugagggcu

SEQ ID NO: 264163 - RNA, 19 nt, Human
cacggcacucaugcuccua

SEQ ID NO: 264164 - RNA, 20 nt, Human
caguguggccacagaauucc

SEQ ID NO: 264165 - RNA, 20 nt, Human
ccugcgcagugcuggagugc

SEQ ID NO: 264166 - RNA, 21 nt, Human
ccuguagccuccgacccagaa

SEQ ID NO: 264167 - RNA, 22 nt, Human
ccuguagccuccgacccagaac

SEQ ID NO: 264168 - RNA, 21 nt, Human
cggcuaacggauaagcagaga

SEQ ID NO: 264169 - RNA, 19 nt, Human
cgguccaaggcggucccug

SEQ ID NO: 264170 - RNA, 21 nt, Human
cggucccugcgcagugcugga

SEQ ID NO: 264171 - RNA, 20 nt, Human
cuacccgggaacgggggcag

SEQ ID NO: 264172 - RNA, 20 nt, Human
cuccuuggaaugguggcugg

SEQ ID NO: 264173 - RNA, 20 nt, Human
gaaaaucccuuucccaguac

SEQ ID NO: 264174 - RNA, 18 nt, Human
gaaaccaaacugcucuca

SEQ ID NO: 264175 - RNA, 19 nt, Human
gaaaugaguuuauuacaga

SEQ ID NO: 264176 - RNA, 21 nt, Human
gaagacagcauccuucaaucc

SEQ ID NO: 264177 - RNA, 19 nt, Human
gagcugggugagcaggugg

SEQ ID NO: 264178 - RNA, 21 nt, Human
gcugaaaaucccuuucccagu

SEQ ID NO: 264179 - RNA, 22 nt, Human
gcugugauguucagcauguguc

SEQ ID NO: 264180 - RNA, 21 nt, Human
ggcgcgagggaggcgugucca

SEQ ID NO: 264181 - RNA, 20 nt, Human
ggcuaacggauaagcagaga

SEQ ID NO: 264182 - RNA, 21 nt, Human
gggagagcugcaagguggagc

SEQ ID NO: 264183 - RNA, 21 nt, Human
gggagucuuccuguagccucc

SEQ ID NO: 264184 - RNA, 18 nt, Human
gggcgcgagggaggcgug

SEQ ID NO: 264185 - RNA, 22 nt, Human
gguggggcucugucuucaugcu

SEQ ID NO: 264186 - RNA, 22 nt, Human
uaaaacacuggguuugugaagg

SEQ ID NO: 264187 - RNA, 20 nt, Human
uacagagagaggagacaggg

SEQ ID NO: 264188 - RNA, 20 nt, Human
uacccgggaacgggggcaga

SEQ ID NO: 264189 - RNA, 24 nt, Human
uagaaaccaaacugcucucacagc

SEQ ID NO: 264190 - RNA, 19 nt, Human
uagccuccgacccagaacc

SEQ ID NO: 264191 - RNA, 21 nt, Human
uauccagucugacuacugagc

SEQ ID NO: 264192 - RNA, 20 nt, Human
ucacagagcuguucuccugc

SEQ ID NO: 264193 - RNA, 18 nt, Human
ugagcugggugagcaggu

SEQ ID NO: 264194 - RNA, 20 nt, Human
ugagcugggugagcaggugg

SEQ ID NO: 264195 - RNA, 18 nt, Human
ugaggaaauaagcuguga

SEQ ID NO: 264196 - RNA, 23 nt, Human
uggcuggauggcggcguucuuca

SEQ ID NO: 264197 - RNA, 20 nt, Human
ugggugagcaggugggcggc

SEQ ID NO: 264198 - RNA, 28 nt, Human
uuucagggagugggagucuuccuguaau

SEQ ID NO: 264199 - RNA, 19 nt, Human
aaacaaccacaggcaucgc

SEQ ID NO: 264200 - RNA, 20 nt, Human
aacacaaugacagugaacca

SEQ ID NO: 264201 - RNA, 19 nt, Human
aaccacaggcaucgccgcc

SEQ ID NO: 264202 - RNA, 19 nt, Human
aagaaaacaaccacaggca

SEQ ID NO: 264203 - RNA, 23 nt, Human
aagaagaaaagagaaucacucag

SEQ ID NO: 264204 - RNA, 23 nt, Human
aagcagggggcauggccacugga

SEQ ID NO: 264205 - RNA, 19 nt, Human
aaggucagggaagagcugg

SEQ ID NO: 264206 - RNA, 23 nt, Human
acaaaagaagaauuugacccaga

SEQ ID NO: 264207 - RNA, 19 nt, Human
acaagaaaacaaccacagg

SEQ ID NO: 264208 - RNA, 18 nt, Human
agaaaagagaaucacuca

SEQ ID NO: 264209 - RNA, 18 nt, Human
agagcugagccugugugg

SEQ ID NO: 264210 - RNA, 21 nt, Human
agcugggugguggagagagcu

SEQ ID NO: 264211 - RNA, 19 nt, Human
agggaagagcuggguggug

SEQ ID NO: 264212 - RNA, 19 nt, Human
aggucagggaagagcuggg

SEQ ID NO: 264213 - RNA, 24 nt, Human
aggucagggaagagcuggguggug

SEQ ID NO: 264214 - RNA, 27 nt, Human
agugacagaagaguuugguggauuacc

SEQ ID NO: 264215 - RNA, 22 nt, Human
auacaaaagaagaauuugaccc

SEQ ID NO: 264216 - RNA, 23 nt, Human
caaauuagcgaagaaugauagca

SEQ ID NO: 264217 - RNA, 22 nt, Human
caggcuccuuucuggcggggga

SEQ ID NO: 264218 - RNA, 20 nt, Human
cagguaucuccaucacuuuu

SEQ ID NO: 264219 - RNA, 21 nt, Human
caucccuucgugaaggucagg

SEQ ID NO: 264220 - RNA, 21 nt, Human
ccaugggaagcagggggcaug

SEQ ID NO: 264221 - RNA, 18 nt, Human
cccuucgugaaggucagg

SEQ ID NO: 264222 - RNA, 20 nt, Human
cgcacaagaaaacaaccaca

SEQ ID NO: 264223 - RNA, 22 nt, Human
cggcuaacagucacuaaauguc

SEQ ID NO: 264224 - RNA, 22 nt, Human
cgugaaggucagggaagagcug

SEQ ID NO: 264225 - RNA, 23 nt, Human
cgugaaggucagggaagagcugg

SEQ ID NO: 264226 - RNA, 18 nt, Human
cucuggggucucauaauc

SEQ ID NO: 264227 - RNA, 23 nt, Human
cucuucaagacuuaacagaacaa

SEQ ID NO: 264228 - RNA, 23 nt, Human
cugcaccgacuccccuuagaaug

SEQ ID NO: 264229 - RNA, 21 nt, Human
gaaacacaaugacagugaacc

SEQ ID NO: 264230 - RNA, 20 nt, Human
gccccaaagcagaagcggca

SEQ ID NO: 264231 - RNA, 23 nt, Human
ggaucugaaagggaccggcuaac

SEQ ID NO: 264232 - RNA, 20 nt, Human
gggggcauggccacuggauc

SEQ ID NO: 264233 - RNA, 21 nt, Human
gugguggagagagcugagccu

SEQ ID NO: 264234 - RNA, 18 nt, Human
uaacagucacuaaauguc

SEQ ID NO: 264235 - RNA, 22 nt, Human
uacacagcacucauucguucag

SEQ ID NO: 264236 - RNA, 23 nt, Human
uacaguagagauggacacugaua

SEQ ID NO: 264237 - RNA, 24 nt, Human
uagcaguaucuuaggacacuguaa

SEQ ID NO: 264238 - RNA, 21 nt, Human
uaggacacuguaacugugugc

SEQ ID NO: 264239 - RNA, 22 nt, Human
ucaagacuuaacagaacaaugg

SEQ ID NO: 264240 - RNA, 20 nt, Human
ucacucaggcuccuuucugg

SEQ ID NO: 264241 - RNA, 19 nt, Human
ucagggaagagcugggugg

SEQ ID NO: 264242 - RNA, 18 nt, Human
ucucccugucagagcugg

SEQ ID NO: 264243 - RNA, 19 nt, Human
ugagcaauagccucaggua

SEQ ID NO: 264244 - RNA, 23 nt, Human
ugaguacgcacaagaaaacaacc

SEQ ID NO: 264245 - RNA, 20 nt, Human
ugauagugacagaagaguuu

SEQ ID NO: 264246 - RNA, 24 nt, Human
ugcuacgggacccaaggacuggag

SEQ ID NO: 264247 - RNA, 22 nt, Human
ugcugcaggugcugugcaggag

SEQ ID NO: 264248 - RNA, 20 nt, Human
uggagagagcugagccugug

SEQ ID NO: 264249 - RNA, 24 nt, Human
uggagagccaucccuucgugaagg

SEQ ID NO: 264250 - RNA, 23 nt, Human
uggagaggcugggaaacacaaug

SEQ ID NO: 264251 - RNA, 18 nt, Human
ugggaaacacaaugacag

SEQ ID NO: 264252 - RNA, 22 nt, Human
ugggugguggagagagcugagc

SEQ ID NO: 264253 - RNA, 22 nt, Human
ugugugcuacgggacccaagga

SEQ ID NO: 264254 - RNA, 25 nt, Human
uucucugcuacuuggcaccuccgau

SEQ ID NO: 264255 - RNA, 21 nt, Human
uuggccccaaagcagaagcgg

SEQ ID NO: 264256 - RNA, 25 nt, Human
aaaaaaaaaaaauaauaauaaagga

SEQ ID NO: 264257 - RNA, 25 nt, Human
aaaaaaaaaaaauaauaauaaagga

SEQ ID NO: 264258 - RNA, 24 nt, Human
aaaaaaaaaaauaauaauaaagga

SEQ ID NO: 264259 - RNA, 24 nt, Human
aaaaaaaaaaauaauaauaaagga

SEQ ID NO: 264260 - RNA, 23 nt, Human
aaacauaaaauaaaacuacagga

SEQ ID NO: 264261 - RNA, 23 nt, Human
aaacauaaaauaaaacuacagga

SEQ ID NO: 264262 - RNA, 23 nt, Human
aagagaaagaggauggcaucucc

SEQ ID NO: 264263 - RNA, 23 nt, Human
aagagaaagaggauggcaucucc

SEQ ID NO: 264264 - RNA, 27 nt, Human
aagggcagcaggauggagagguggcag

SEQ ID NO: 264265 - RNA, 27 nt, Human
aagggcagcaggauggagagguggcag

SEQ ID NO: 264266 - RNA, 26 nt, Human
aaucugaaauaaaaaugcugcugugg

SEQ ID NO: 264267 - RNA, 26 nt, Human
aaucugaaauaaaaaugcugcugugg

SEQ ID NO: 264268 - RNA, 18 nt, Human
acccuuuuguucaaguau

SEQ ID NO: 264269 - RNA, 18 nt, Human
acccuuuuguucaaguau

SEQ ID NO: 264270 - RNA, 21 nt, Human
agaaaagagaaagaggauggc

SEQ ID NO: 264271 - RNA, 21 nt, Human
agaaaagagaaagaggauggc

SEQ ID NO: 264272 - RNA, 19 nt, Human
agaaaauuucacacaaguu

SEQ ID NO: 264273 - RNA, 18 nt, Human
agagagagacugccugua

SEQ ID NO: 264274 - RNA, 18 nt, Human
agagagagacugccugua

SEQ ID NO: 264275 - RNA, 19 nt, Human
agauaucagaugguuaaaa

SEQ ID NO: 264276 - RNA, 19 nt, Human
agauaucagaugguuaaaa

SEQ ID NO: 264277 - RNA, 22 nt, Human
agauaucagaugguuaaaagcu

SEQ ID NO: 264278 - RNA, 22 nt, Human
agauaucagaugguuaaaagcu

SEQ ID NO: 264279 - RNA, 19 nt, Human
agccagggguaaggucucc

SEQ ID NO: 264280 - RNA, 19 nt, Human
agccagggguaaggucucc

SEQ ID NO: 264281 - RNA, 21 nt, Human
aggaaggguucauaaccccau

SEQ ID NO: 264282 - RNA, 21 nt, Human
aggaaggguucauaaccccau

SEQ ID NO: 264283 - RNA, 18 nt, Human
aggcggcuacggccgggc

SEQ ID NO: 264284 - RNA, 19 nt, Human
aguuuuuauuuugcuuuua

SEQ ID NO: 264285 - RNA, 19 nt, Human
aguuuuuauuuugcuuuua

SEQ ID NO: 264286 - RNA, 23 nt, Human
auaaaauaaaacuacaggacuga

SEQ ID NO: 264287 - RNA, 23 nt, Human
auaaaauaaaacuacaggacuga

SEQ ID NO: 264288 - RNA, 21 nt, Human
auaaaggauugaucauccaca

SEQ ID NO: 264289 - RNA, 21 nt, Human
auaaaggauugaucauccaca

SEQ ID NO: 264290 - RNA, 21 nt, Human
augauuuuuuuccccaugugu

SEQ ID NO: 264291 - RNA, 21 nt, Human
augauuuuuuuccccaugugu

SEQ ID NO: 264292 - RNA, 22 nt, Human
auguggccuaagggcagcagga

SEQ ID NO: 264293 - RNA, 22 nt, Human
auguggccuaagggcagcagga

SEQ ID NO: 264294 - RNA, 22 nt, Human
auuucacacaaguuuucugcug

SEQ ID NO: 264295 - RNA, 22 nt, Human
auuucacacaaguuuucugcug

SEQ ID NO: 264296 - RNA, 20 nt, Human
cacaaguuuucugcugccau

SEQ ID NO: 264297 - RNA, 22 nt, Human
cacacaaguuuucugcugccau

SEQ ID NO: 264298 - RNA, 18 nt, Human
caccugcacagugggacu

SEQ ID NO: 264299 - RNA, 18 nt, Human
caccugcacagugggacu

SEQ ID NO: 264300 - RNA, 20 nt, Human
cagagcaugaaaugagcuuu

SEQ ID NO: 264301 - RNA, 20 nt, Human
cagagcaugaaaugagcuuu

SEQ ID NO: 264302 - RNA, 21 nt, Human
cagcgccggggcccgcccccu

SEQ ID NO: 264303 - RNA, 24 nt, Human
caggacugaaauuaacaauccauu

SEQ ID NO: 264304 - RNA, 24 nt, Human
caggacugaaauuaacaauccauu

SEQ ID NO: 264305 - RNA, 23 nt, Human
caggaggcgccgcaggcggcuac

SEQ ID NO: 264306 - RNA, 23 nt, Human
caucuccaauguccucuucucaa

SEQ ID NO: 264307 - RNA, 23 nt, Human
caucuccaauguccucuucucaa

SEQ ID NO: 264308 - RNA, 26 nt, Human
ccacgcagacaaagaggcacauggag

SEQ ID NO: 264309 - RNA, 26 nt, Human
ccacgcagacaaagaggcacauggag

SEQ ID NO: 264310 - RNA, 27 nt, Human
ccagcucggccgcggcucggcgcgcuc

SEQ ID NO: 264311 - RNA, 18 nt, Human
cccauguggccuaagggc

SEQ ID NO: 264312 - RNA, 18 nt, Human
cccauguggccuaagggc

SEQ ID NO: 264313 - RNA, 24 nt, Human
ccccaauccauacucauaggccuu

SEQ ID NO: 264314 - RNA, 24 nt, Human
ccccaauccauacucauaggccuu

SEQ ID NO: 264315 - RNA, 21 nt, Human
ccccauccuuaaaugugucua

SEQ ID NO: 264316 - RNA, 21 nt, Human
ccccauccuuaaaugugucua

SEQ ID NO: 264317 - RNA, 19 nt, Human
ccccugccgccccagccgc

SEQ ID NO: 264318 - RNA, 21 nt, Human
ccccugccgccccagccgcgc

SEQ ID NO: 264319 - RNA, 18 nt, Human
ccccugccucugcccccu

SEQ ID NO: 264320 - RNA, 18 nt, Human
cccgcccccucccgcccc

SEQ ID NO: 264321 - RNA, 21 nt, Human
cccgccgugccgcgggcagcc

SEQ ID NO: 264322 - RNA, 19 nt, Human
ccgcaggcggcuacggccg

SEQ ID NO: 264323 - RNA, 19 nt, Human
ccgccccugccucugcccc

SEQ ID NO: 264324 - RNA, 18 nt, Human
ccgccgccccugccgccc

SEQ ID NO: 264325 - RNA, 21 nt, Human
ccgccgccccugccgccccag

SEQ ID NO: 264326 - RNA, 19 nt, Human
ccgcgccagccgcgcccgc

SEQ ID NO: 264327 - RNA, 21 nt, Human
ccgcgccagccgcgcccgccg

SEQ ID NO: 264328 - RNA, 18 nt, Human
ccgcgcccgccgugccgc

SEQ ID NO: 264329 - RNA, 22 nt, Human
ccuagcccagaccucauucauu

SEQ ID NO: 264330 - RNA, 18 nt, Human
ccucccgccccugccucu

SEQ ID NO: 264331 - RNA, 20 nt, Human
ccucccgccccugccucugc

SEQ ID NO: 264332 - RNA, 21 nt, Human
ccucuccgcacucccuucucg

SEQ ID NO: 264333 - RNA, 18 nt, Human
ccugccucugcccccugg

SEQ ID NO: 264334 - RNA, 23 nt, Human
cgaccggcgccucuccgcacucc

SEQ ID NO: 264335 - RNA, 21 nt, Human
cgcacucccuucucgggccga

SEQ ID NO: 264336 - RNA, 23 nt, Human
cgccccugccgccccagccgcgc

SEQ ID NO: 264337 - RNA, 20 nt, Human
cggcgcgcucuccgccgccc

SEQ ID NO: 264338 - RNA, 22 nt, Human
cggcgcgcucuccgccgccccu

SEQ ID NO: 264339 - RNA, 21 nt, Human
cgggagcagcgccggggcccg

SEQ ID NO: 264340 - RNA, 25 nt, Human
cuaccuagcccagaccucauucauu

SEQ ID NO: 264341 - RNA, 22 nt, Human
cuccaauguccucuucucaauc

SEQ ID NO: 264342 - RNA, 22 nt, Human
cuccaauguccucuucucaauc

SEQ ID NO: 264343 - RNA, 18 nt, Human
cucuccgccgccccugcc

SEQ ID NO: 264344 - RNA, 20 nt, Human
cucucgggggcuggcagauu

SEQ ID NO: 264345 - RNA, 24 nt, Human
cugcgugcacaacucuucugaccc

SEQ ID NO: 264346 - RNA, 24 nt, Human
cugcgugcacaacucuucugaccc

SEQ ID NO: 264347 - RNA, 20 nt, Human
gaaaauggaagcaaaucuuu

SEQ ID NO: 264348 - RNA, 20 nt, Human
gaccuuggccugcuaaucug

SEQ ID NO: 264349 - RNA, 20 nt, Human
gaccuuggccugcuaaucug

SEQ ID NO: 264350 - RNA, 22 nt, Human
gaggcgccgcaggcggcuacgg

SEQ ID NO: 264351 - RNA, 18 nt, Human
gcugcuguggcucagacc

SEQ ID NO: 264352 - RNA, 18 nt, Human
gcugcuguggcucagacc

SEQ ID NO: 264353 - RNA, 21 nt, Human
gcuguggcucagaccuuggcc

SEQ ID NO: 264354 - RNA, 21 nt, Human
gcuguggcucagaccuuggcc

SEQ ID NO: 264355 - RNA, 21 nt, Human
ggaaaauggaagcaaaucuuu

SEQ ID NO: 264356 - RNA, 22 nt, Human
ggaaaauggaagcaaaucuuua

SEQ ID NO: 264357 - RNA, 21 nt, Human
ggccgacaggaggcgccgcag

SEQ ID NO: 264358 - RNA, 18 nt, Human
ggcucggcgcgcucuccg

SEQ ID NO: 264359 - RNA, 19 nt, Human
gggcgggccagcucggccg

SEQ ID NO: 264360 - RNA, 22 nt, Human
ggggcccgcccccucccgcccc

SEQ ID NO: 264361 - RNA, 23 nt, Human
ggggcgggagcagcgccggggcc

SEQ ID NO: 264362 - RNA, 22 nt, Human
ggguaguuaaauuauuuaaagu

SEQ ID NO: 264363 - RNA, 22 nt, Human
ggguaguuaaauuauuuaaagu

SEQ ID NO: 264364 - RNA, 24 nt, Human
gugcacaacucuucugacccacgc

SEQ ID NO: 264365 - RNA, 24 nt, Human
gugcacaacucuucugacccacgc

SEQ ID NO: 264366 - RNA, 21 nt, Human
gugcaggcuagaaauuucacu

SEQ ID NO: 264367 - RNA, 21 nt, Human
gugcaggcuagaaauuucacu

SEQ ID NO: 264368 - RNA, 18 nt, Human
uaaaaacaaaaauagcau

SEQ ID NO: 264369 - RNA, 18 nt, Human
uaaaaacaaaaauagcau

SEQ ID NO: 264370 - RNA, 22 nt, Human
uaaagcuuuuuuuuuuuuuuaa

SEQ ID NO: 264371 - RNA, 22 nt, Human
uaacaauccauuaaaaucagca

SEQ ID NO: 264372 - RNA, 22 nt, Human
uaacaauccauuaaaaucagca

SEQ ID NO: 264373 - RNA, 20 nt, Human
uaaggucuccaagaggccuu

SEQ ID NO: 264374 - RNA, 20 nt, Human
uaaggucuccaagaggccuu

SEQ ID NO: 264375 - RNA, 19 nt, Human
uaaguaauuaaggguaguu

SEQ ID NO: 264376 - RNA, 19 nt, Human
uaaguaauuaaggguaguu

SEQ ID NO: 264377 - RNA, 23 nt, Human
uagcaccugcacagugggacugu

SEQ ID NO: 264378 - RNA, 23 nt, Human
uagcaccugcacagugggacugu

SEQ ID NO: 264379 - RNA, 19 nt, Human
uaggaaaauggaagcaaau

SEQ ID NO: 264380 - RNA, 24 nt, Human
uaggaaaauggaagcaaaucuuua

SEQ ID NO: 264381 - RNA, 23 nt, Human
uaucauuaucaaaugcugcauca

SEQ ID NO: 264382 - RNA, 23 nt, Human
uaucauuaucaaaugcugcauca

SEQ ID NO: 264383 - RNA, 21 nt, Human
uauccaagauuaauaccugau

SEQ ID NO: 264384 - RNA, 21 nt, Human
uauccaagauuaauaccugau

SEQ ID NO: 264385 - RNA, 20 nt, Human
uaucuaaacauaaaauaaaa

SEQ ID NO: 264386 - RNA, 20 nt, Human
uaucuaaacauaaaauaaaa

SEQ ID NO: 264387 - RNA, 21 nt, Human
ucaagaaaauuucacacaagu

SEQ ID NO: 264388 - RNA, 21 nt, Human
ucaagaaaauuucacacaagu

SEQ ID NO: 264389 - RNA, 19 nt, Human
ucacacaaguuuucugcug

SEQ ID NO: 264390 - RNA, 19 nt, Human
ucacacaaguuuucugcug

SEQ ID NO: 264391 - RNA, 23 nt, Human
ucacacuaugaaguugacuuaga

SEQ ID NO: 264392 - RNA, 26 nt, Human
ucauaaagcuuuuuuuuuuuuuuaag

SEQ ID NO: 264393 - RNA, 21 nt, Human
uccaagauuaauaccugauuu

SEQ ID NO: 264394 - RNA, 21 nt, Human
uccaagauuaauaccugauuu

SEQ ID NO: 264395 - RNA, 23 nt, Human
uccaagauuaauaccugauuuuc

SEQ ID NO: 264396 - RNA, 23 nt, Human
uccaagauuaauaccugauuuuc

SEQ ID NO: 264397 - RNA, 18 nt, Human
uccacaggcuucaugaua

SEQ ID NO: 264398 - RNA, 18 nt, Human
uccacaggcuucaugaua

SEQ ID NO: 264399 - RNA, 22 nt, Human
ucccauguggccuaagggcagc

SEQ ID NO: 264400 - RNA, 22 nt, Human
ucccauguggccuaagggcagc

SEQ ID NO: 264401 - RNA, 18 nt, Human
ucccuuucaaaaggcuuc

SEQ ID NO: 264402 - RNA, 19 nt, Human
ucccuuucaaaaggcuuca

SEQ ID NO: 264403 - RNA, 21 nt, Human
ucggcgcgcucuccgccgccc

SEQ ID NO: 264404 - RNA, 23 nt, Human
ucgggggcuggcagauuccguag

SEQ ID NO: 264405 - RNA, 21 nt, Human
ucuccgccgccccugccgccc

SEQ ID NO: 264406 - RNA, 21 nt, Human
ucugaauauuuguucuccuug

SEQ ID NO: 264407 - RNA, 21 nt, Human
ucugaauauuuguucuccuug

SEQ ID NO: 264408 - RNA, 20 nt, Human
ugaaaaucauaaagcuuuuu

SEQ ID NO: 264409 - RNA, 18 nt, Human
ugacuuagacuugggugc

SEQ ID NO: 264410 - RNA, 20 nt, Human
ugaggaagagagagacugcc

SEQ ID NO: 264411 - RNA, 20 nt, Human
ugaggaagagagagacugcc

SEQ ID NO: 264412 - RNA, 24 nt, Human
ugaggaagagagagacugccugua

SEQ ID NO: 264413 - RNA, 18 nt, Human
ugagguguuuuaucauua

SEQ ID NO: 264414 - RNA, 18 nt, Human
ugagguguuuuaucauua

SEQ ID NO: 264415 - RNA, 24 nt, Human
ugcauggacugcucccauguggcc

SEQ ID NO: 264416 - RNA, 24 nt, Human
ugcauggacugcucccauguggcc

SEQ ID NO: 264417 - RNA, 26 nt, Human
ugccgccccagccgcgccagccgcgc

SEQ ID NO: 264418 - RNA, 18 nt, Human
ugcgacgggcgggcgggc

SEQ ID NO: 264419 - RNA, 21 nt, Human
ugcuaaauaugguugucuuua

SEQ ID NO: 264420 - RNA, 21 nt, Human
ugcuaaauaugguugucuuua

SEQ ID NO: 264421 - RNA, 19 nt, Human
uggcaucuccaauguccuc

SEQ ID NO: 264422 - RNA, 19 nt, Human
uggcaucuccaauguccuc

SEQ ID NO: 264423 - RNA, 18 nt, Human
uggcucagaccuuggccu

SEQ ID NO: 264424 - RNA, 18 nt, Human
uggcucagaccuuggccu

SEQ ID NO: 264425 - RNA, 20 nt, Human
ugguuuguuuaccucucccc

SEQ ID NO: 264426 - RNA, 26 nt, Human
ugguuuguuuaccucuccccgcgagc

SEQ ID NO: 264427 - RNA, 21 nt, Human
uguaggaaaauggaagcaaau

SEQ ID NO: 264428 - RNA, 23 nt, Human
uguccucuucucaaucaacucaa

SEQ ID NO: 264429 - RNA, 23 nt, Human
uguccucuucucaaucaacucaa

SEQ ID NO: 264430 - RNA, 24 nt, Human
uguggccuaagggcagcaggaugg

SEQ ID NO: 264431 - RNA, 24 nt, Human
uguggccuaagggcagcaggaugg

SEQ ID NO: 264432 - RNA, 25 nt, Human
uguuuuguuuuguuuuguuuuaauu

SEQ ID NO: 264433 - RNA, 20 nt, Human
uuagaagaaaauaacauuac

SEQ ID NO: 264434 - RNA, 20 nt, Human
uuagaagaaaauaacauuac

SEQ ID NO: 264435 - RNA, 21 nt, Human
uucaugauaaacugucccagg

SEQ ID NO: 264436 - RNA, 21 nt, Human
uucaugauaaacugucccagg

SEQ ID NO: 264437 - RNA, 19 nt, Human
uuccuuuuggcccccccaa

SEQ ID NO: 264438 - RNA, 19 nt, Human
uuccuuuuggcccccccaa

SEQ ID NO: 264439 - RNA, 18 nt, Human
uugcagggcggacgccuc

SEQ ID NO: 264440 - RNA, 23 nt, Human
uuuaaagaggagacugcaucaug

SEQ ID NO: 264441 - RNA, 20 nt, Human
uuucacacaaguuuucugcu

SEQ ID NO: 264442 - RNA, 20 nt, Human
uuucacacaaguuuucugcu

SEQ ID NO: 264443 - RNA, 18 nt, Human
uuuguuuuguuuuguuuu

SEQ ID NO: 264444 - RNA, 19 nt, Human
uuuguuuuguuuuguuuug

SEQ ID NO: 264445 - RNA, 20 nt, Human
uuuucuugucuuuucauucg

SEQ ID NO: 264446 - RNA, 20 nt, Human
uuuucuugucuuuucauucg

SEQ ID NO: 264447 - RNA, 21 nt, Human
aaauagguucuucucccauuc

SEQ ID NO: 264448 - RNA, 20 nt, Human
aacaaaaauagguucuucuc

SEQ ID NO: 264449 - RNA, 22 nt, Human
aacacacaucucccaaaaaaga

SEQ ID NO: 264450 - RNA, 19 nt, Human
aaccacaguuucugucucc

SEQ ID NO: 264451 - RNA, 19 nt, Human
aagaagacuucauucaacu

SEQ ID NO: 264452 - RNA, 19 nt, Human
aagaccauagcagcaaaaa

SEQ ID NO: 264453 - RNA, 21 nt, Human
acaaaaauagguucuucuccc

SEQ ID NO: 264454 - RNA, 20 nt, Human
acaaaacauagaacaucaac

SEQ ID NO: 264455 - RNA, 22 nt, Human
acaaaacauagaacaucaacaa

SEQ ID NO: 264456 - RNA, 19 nt, Human
accgcaccgggcugccgcc

SEQ ID NO: 264457 - RNA, 22 nt, Human
agaacucccaaauuauaaaaca

SEQ ID NO: 264458 - RNA, 24 nt, Human
agaccauagcagcaaaaaacguuu

SEQ ID NO: 264459 - RNA, 21 nt, Human
agcaagcuaacagaaaacuca

SEQ ID NO: 264460 - RNA, 24 nt, Human
augcacuuggugcugcucucaacu

SEQ ID NO: 264461 - RNA, 19 nt, Human
caaaaaagaagugcaacgc

SEQ ID NO: 264462 - RNA, 24 nt, Human
caacaaaaauagguucuucuccca

SEQ ID NO: 264463 - RNA, 19 nt, Human
caacaauaacaaaaaaacc

SEQ ID NO: 264464 - RNA, 21 nt, Human
caacaauaacaaaaaaaccac

SEQ ID NO: 264465 - RNA, 23 nt, Human
caacuguuguaccacaacaaaaa

SEQ ID NO: 264466 - RNA, 19 nt, Human
caauaacaaaaaaaccaca

SEQ ID NO: 264467 - RNA, 24 nt, Human
caauaacaaaaaaaccacaauaaa

SEQ ID NO: 264468 - RNA, 31 nt, Human
caauaacaaaaaaaccacaauaaaaaaugcc

SEQ ID NO: 264469 - RNA, 25 nt, Human
caccaaguuucuuuucuuucugucc

SEQ ID NO: 264470 - RNA, 22 nt, Human
cagaacucccaaauuauaaaac

SEQ ID NO: 264471 - RNA, 22 nt, Human
cagagucucccaaacaaguuuu

SEQ ID NO: 264472 - RNA, 23 nt, Human
cagagucucccaaacaaguuuuc

SEQ ID NO: 264473 - RNA, 22 nt, Human
caggggaugcggaucaaaugca

SEQ ID NO: 264474 - RNA, 24 nt, Human
caucaacaacacacaucucccaaa

SEQ ID NO: 264475 - RNA, 20 nt, Human
cauucaacuaaaugcacuug

SEQ ID NO: 264476 - RNA, 18 nt, Human
ccaagaagacuucauuca

SEQ ID NO: 264477 - RNA, 19 nt, Human
ccgcggggaccgcaccggg

SEQ ID NO: 264478 - RNA, 18 nt, Human
ccgcugcccgccgccugc

SEQ ID NO: 264479 - RNA, 18 nt, Human
ccgcugcccgccgccugc

SEQ ID NO: 264480 - RNA, 20 nt, Human
ccgcugcccgccgccugccu

SEQ ID NO: 264481 - RNA, 21 nt, Human
ccgcugcccgccgccugccug

SEQ ID NO: 264482 - RNA, 19 nt, Human
ccucccgcugcccgccgcc

SEQ ID NO: 264483 - RNA, 22 nt, Human
ccucccgcugcccgccgccugc

SEQ ID NO: 264484 - RNA, 23 nt, Human
cucccauucaugaaaaguuucau

SEQ ID NO: 264485 - RNA, 22 nt, Human
cugccgccucccgcugcccgcc

SEQ ID NO: 264486 - RNA, 20 nt, Human
cuguuguaccacaacaaaaa

SEQ ID NO: 264487 - RNA, 19 nt, Human
gaaaaccauaaugcuuuuc

SEQ ID NO: 264488 - RNA, 20 nt, Human
gccgccucccgcugcccgcc

SEQ ID NO: 264489 - RNA, 18 nt, Human
ggcgcggcgggcgcgggg

SEQ ID NO: 264490 - RNA, 22 nt, Human
uaaaaaaugcagagucucccaa

SEQ ID NO: 264491 - RNA, 20 nt, Human
uaaagcaagcuaacagaaaa

SEQ ID NO: 264492 - RNA, 20 nt, Human
uaaaugagcauuuacaaucu

SEQ ID NO: 264493 - RNA, 19 nt, Human
uaaaugcacuuggugcugc

SEQ ID NO: 264494 - RNA, 19 nt, Human
uaacagaaaacucauaaaa

SEQ ID NO: 264495 - RNA, 21 nt, Human
uaccuucaaugucauuaacca

SEQ ID NO: 264496 - RNA, 19 nt, Human
uagaaaccacaggggaugc

SEQ ID NO: 264497 - RNA, 21 nt, Human
uauuaagucuacacuuagagu

SEQ ID NO: 264498 - RNA, 19 nt, Human
ucccaaacaaguuuucaaa

SEQ ID NO: 264499 - RNA, 26 nt, Human
uccccaguugcaaacacaggauccau

SEQ ID NO: 264500 - RNA, 20 nt, Human
ucccgcugcccgccgccugc

SEQ ID NO: 264501 - RNA, 23 nt, Human
ucuacugccccucugauacuagc

SEQ ID NO: 264502 - RNA, 19 nt, Human
ucuucucccauucaugaaa

SEQ ID NO: 264503 - RNA, 26 nt, Human
ugaaguguucugaaaaccauaaugcu

SEQ ID NO: 264504 - RNA, 18 nt, Human
ugccgccucccgcugccc

SEQ ID NO: 264505 - RNA, 19 nt, Human
ugguacaauaaauguaccu

SEQ ID NO: 264506 - RNA, 21 nt, Human
ugucauuaaccauaaaugagc

SEQ ID NO: 264507 - RNA, 23 nt, Human
uuaaagcaagcuaacagaaaacu

SEQ ID NO: 264508 - RNA, 19 nt, Human
uuacugauuuuuaaaaaua

SEQ ID NO: 264509 - RNA, 24 nt, Human
uucaaaaaacccaucacaggaaaa

SEQ ID NO: 264510 - RNA, 21 nt, Human
uucauuuggcauuuacaaaau

SEQ ID NO: 264511 - RNA, 18 nt, Human
aaaaaaaaaaaaauaggc

SEQ ID NO: 264512 - RNA, 23 nt, Human
acaccagagcccuggacauggcc

SEQ ID NO: 264513 - RNA, 19 nt, Human
acagcaaaaaagccugggg

SEQ ID NO: 264514 - RNA, 24 nt, Human
acagcaaaaaagccugggggcaaa

SEQ ID NO: 264515 - RNA, 19 nt, Human
acaucaacaugcaccaacc

SEQ ID NO: 264516 - RNA, 20 nt, Human
accaacccaggcaaacacca

SEQ ID NO: 264517 - RNA, 18 nt, Human
agagagaagccaaauaua

SEQ ID NO: 264518 - RNA, 18 nt, Human
agccuccucuuccuuccg

SEQ ID NO: 264519 - RNA, 20 nt, Human
aggcagauggaggcaggggc

SEQ ID NO: 264520 - RNA, 21 nt, Human
aggcaggggcugaggggggcc

SEQ ID NO: 264521 - RNA, 20 nt, Human
auggucacaccugccugcag

SEQ ID NO: 264522 - RNA, 20 nt, Human
caaacaccagagcccuggac

SEQ ID NO: 264523 - RNA, 19 nt, Human
caacccaggcaaacaccag

SEQ ID NO: 264524 - RNA, 21 nt, Human
cacaucaacaugcaccaaccc

SEQ ID NO: 264525 - RNA, 25 nt, Human
caccugccugcagccagcacaucaa

SEQ ID NO: 264526 - RNA, 23 nt, Human
cagagucuuaagagagaagccaa

SEQ ID NO: 264527 - RNA, 24 nt, Human
caggcggcaacagccacccucccc

SEQ ID NO: 264528 - RNA, 18 nt, Human
caugcaccaacccaggca

SEQ ID NO: 264529 - RNA, 18 nt, Human
cauggcccuggagccagg

SEQ ID NO: 264530 - RNA, 25 nt, Human
cccccugguggcucccucacagcaa

SEQ ID NO: 264531 - RNA, 18 nt, Human
cccugggacccccgcagg

SEQ ID NO: 264532 - RNA, 19 nt, Human
ccucacagcaaaaaagccu

SEQ ID NO: 264533 - RNA, 27 nt, Human
ccuggagccaggaucccagcccagaac

SEQ ID NO: 264534 - RNA, 19 nt, Human
cgccacacucaccgaaaca

SEQ ID NO: 264535 - RNA, 20 nt, Human
cucacagcaaaaaagccugg

SEQ ID NO: 264536 - RNA, 20 nt, Human
cugcacccugggacccccgc

SEQ ID NO: 264537 - RNA, 21 nt, Human
gcaaaaaagccugggggcaaa

SEQ ID NO: 264538 - RNA, 18 nt, Human
gcaacagccacccucccc

SEQ ID NO: 264539 - RNA, 18 nt, Human
gccuuagaaacagcuugc

SEQ ID NO: 264540 - RNA, 22 nt, Human
ggaggcaggggcugaggggggc

SEQ ID NO: 264541 - RNA, 24 nt, Human
ggaggcaggggcugaggggggccc

SEQ ID NO: 264542 - RNA, 22 nt, Human
ggaggucucugcacccugggac

SEQ ID NO: 264543 - RNA, 24 nt, Human
ggcaggcggcaacagccacccucc

SEQ ID NO: 264544 - RNA, 24 nt, Human
ucaugguuuuaaaaaaaaaaaaau

SEQ ID NO: 264545 - RNA, 18 nt, Human
uccccaguggcagcgccu

SEQ ID NO: 264546 - RNA, 27 nt, Human
ucccucacagcaaaaaagccugggggc

SEQ ID NO: 264547 - RNA, 23 nt, Human
uccgccacacucaccgaaacacg

SEQ ID NO: 264548 - RNA, 26 nt, Human
uccucuuguaaaugaagaaauaaacc

SEQ ID NO: 264549 - RNA, 25 nt, Human
ugaagaaauaaaccuauuuaaauca

SEQ ID NO: 264550 - RNA, 22 nt, Human
ugcaccaacccaggcaaacacc

SEQ ID NO: 264551 - RNA, 25 nt, Human
ugcagccagcacaucaacaugcacc

SEQ ID NO: 264552 - RNA, 18 nt, Human
ugcccgggcaggcggcaa

SEQ ID NO: 264553 - RNA, 19 nt, Human
uggcucaggcugugcuugc

SEQ ID NO: 264554 - RNA, 20 nt, Human
uggcucaggcugugcuugcc

SEQ ID NO: 264555 - RNA, 20 nt, Human
ugggggcaaagagguggcag

SEQ ID NO: 264556 - RNA, 19 nt, Human
uggggguggggaggucucu

SEQ ID NO: 264557 - RNA, 20 nt, Human
ugguuuuaaaaaaaaaaaaa

SEQ ID NO: 264558 - RNA, 24 nt, Human
uguaaaugaagaaauaaaccuauu

SEQ ID NO: 264559 - RNA, 21 nt, Human
uuaaaaaaaaaaaaauaggcg

SEQ ID NO: 264560 - RNA, 25 nt, Human
uuuaaaaaaaaaaaaauaggcgucu

SEQ ID NO: 264561 - RNA, 23 nt, Human
uuuaaaucacccccugguggcuc

SEQ ID NO: 264562 - RNA, 22 nt, Human
aaaaacuagcaaguagauuuaa

SEQ ID NO: 264563 - RNA, 21 nt, Human
aaacaacaacaacaaaaaacc

SEQ ID NO: 264564 - RNA, 24 nt, Human
aaacaacuaauugagaaaaauuuc

SEQ ID NO: 264565 - RNA, 19 nt, Human
aaauaaauacauuuaacac

SEQ ID NO: 264566 - RNA, 19 nt, Human
aaauagcuuaaaacccuuu

SEQ ID NO: 264567 - RNA, 22 nt, Human
aacauacuuaaacaugcuaaga

SEQ ID NO: 264568 - RNA, 18 nt, Human
aacuaauucaauaacccu

SEQ ID NO: 264569 - RNA, 22 nt, Human
aagaagaaauaaaauaagugca

SEQ ID NO: 264570 - RNA, 22 nt, Human
aaguagauuuaaauagcuuaaa

SEQ ID NO: 264571 - RNA, 19 nt, Human
aauuuacaaaguucuccug

SEQ ID NO: 264572 - RNA, 27 nt, Human
acaacaacaaaaaaccauuaugugcua

SEQ ID NO: 264573 - RNA, 25 nt, Human
acagagcagaaaaucuuaaccugcu

SEQ ID NO: 264574 - RNA, 22 nt, Human
accaacuucuuuaauuuaucau

SEQ ID NO: 264575 - RNA, 21 nt, Human
acuaauucaauaacccucuga

SEQ ID NO: 264576 - RNA, 20 nt, Human
agaaaaaacucuuuuuugaa

SEQ ID NO: 264577 - RNA, 23 nt, Human
agaccaucuuuuuggcccauauu

SEQ ID NO: 264578 - RNA, 25 nt, Human
agcaacaaagcaguuaacugaagga

SEQ ID NO: 264579 - RNA, 19 nt, Human
aggcugggcggggacgcgg

SEQ ID NO: 264580 - RNA, 23 nt, Human
agggaccaagguaccauauuauu

SEQ ID NO: 264581 - RNA, 18 nt, Human
aguuaacuugagaacuug

SEQ ID NO: 264582 - RNA, 21 nt, Human
auaaaaacagacuucuuuccu

SEQ ID NO: 264583 - RNA, 24 nt, Human
auacaccuaucuauaacaaaacug

SEQ ID NO: 264584 - RNA, 22 nt, Human
caaacagagcagaaaaucuuaa

SEQ ID NO: 264585 - RNA, 18 nt, Human
caacaacaacaaaaaacc

SEQ ID NO: 264586 - RNA, 21 nt, Human
caacauacuuaaacaugcuaa

SEQ ID NO: 264587 - RNA, 23 nt, Human
caacauauaucuugugaagaaaa

SEQ ID NO: 264588 - RNA, 24 nt, Human
caagaagaaauaaaauaagugcaa

SEQ ID NO: 264589 - RNA, 23 nt, Human
caauuuagucaggguaauugcug

SEQ ID NO: 264590 - RNA, 19 nt, Human
cacaaaacucaauuuaguc

SEQ ID NO: 264591 - RNA, 18 nt, Human
cacacagugcaaguggug

SEQ ID NO: 264592 - RNA, 18 nt, Human
cagcauacuucaggagug

SEQ ID NO: 264593 - RNA, 23 nt, Human
cauauauacucauacaccuaucu

SEQ ID NO: 264594 - RNA, 22 nt, Human
cauucuauuauuuucccaucuu

SEQ ID NO: 264595 - RNA, 22 nt, Human
cccuuaagugacuuacuagcuu

SEQ ID NO: 264596 - RNA, 21 nt, Human
ccuguccuccucuucugucca

SEQ ID NO: 264597 - RNA, 25 nt, Human
ccuguccuccucuucuguccaggaa

SEQ ID NO: 264598 - RNA, 22 nt, Human
cuaagcauuaaaauacuuagua

SEQ ID NO: 264599 - RNA, 18 nt, Human
cuaccacaaaagcaaaua

SEQ ID NO: 264600 - RNA, 20 nt, Human
cuaucuaccccuuaagugac

SEQ ID NO: 264601 - RNA, 18 nt, Human
cuccuacauacuguacaa

SEQ ID NO: 264602 - RNA, 24 nt, Human
cugaaaaaaaaaacaaaaaauuag

SEQ ID NO: 264603 - RNA, 28 nt, Human
cuucucacuauauauauauauaaauaua

SEQ ID NO: 264604 - RNA, 23 nt, Human
cuuucugccaucgaugcuggcac

SEQ ID NO: 264605 - RNA, 24 nt, Human
gaccaccccccgauauaauuuaaa

SEQ ID NO: 264606 - RNA, 22 nt, Human
gcaggcugggcggggacgcggg

SEQ ID NO: 264607 - RNA, 21 nt, Human
gcauaggagcaggcugggcgg

SEQ ID NO: 264608 - RNA, 24 nt, Human
gccaucuuucucuacacugcuugc

SEQ ID NO: 264609 - RNA, 19 nt, Human
gugaagaaaauauaugaga

SEQ ID NO: 264610 - RNA, 23 nt, Human
uaaaaacaacaacaacaaaaaac

SEQ ID NO: 264611 - RNA, 24 nt, Human
uaaaacuuucugccaucgaugcug

SEQ ID NO: 264612 - RNA, 21 nt, Human
uaaaauaagugcaaacacuua

SEQ ID NO: 264613 - RNA, 21 nt, Human
uaaaauaugcaaaaacuagca

SEQ ID NO: 264614 - RNA, 22 nt, Human
uaaagaccaucuuuuuggccca

SEQ ID NO: 264615 - RNA, 23 nt, Human
uaaauaucuacauuuaagcuuua

SEQ ID NO: 264616 - RNA, 19 nt, Human
uaaauuauaaaaacagacu

SEQ ID NO: 264617 - RNA, 20 nt, Human
uacaaaguucuccugcuccu

SEQ ID NO: 264618 - RNA, 22 nt, Human
uacauuaaaaacaacaacaaca

SEQ ID NO: 264619 - RNA, 26 nt, Human
uacauuaaaaacaacaacaacaaaaa

SEQ ID NO: 264620 - RNA, 18 nt, Human
uaccacaaaagcaaauaa

SEQ ID NO: 264621 - RNA, 21 nt, Human
uacuacuguuucauacuuaaa

SEQ ID NO: 264622 - RNA, 22 nt, Human
uagaaagcaaucaacauacuua

SEQ ID NO: 264623 - RNA, 19 nt, Human
uauaaauauauauauauau

SEQ ID NO: 264624 - RNA, 20 nt, Human
uauauaaauauauauauaua

SEQ ID NO: 264625 - RNA, 20 nt, Human
uauauaaauauauauauaua

SEQ ID NO: 264626 - RNA, 22 nt, Human
uauauauaaauauauauauaua

SEQ ID NO: 264627 - RNA, 20 nt, Human
uauuuuuuaaacaaaaugca

SEQ ID NO: 264628 - RNA, 19 nt, Human
ucaguccuuccuggaagua

SEQ ID NO: 264629 - RNA, 21 nt, Human
ucaguccuuccuggaaguaac

SEQ ID NO: 264630 - RNA, 21 nt, Human
ucauacuuaaagucaaaauua

SEQ ID NO: 264631 - RNA, 24 nt, Human
uccaauaagcccagacuuauccac

SEQ ID NO: 264632 - RNA, 19 nt, Human
uccaggaagauuucuuuac

SEQ ID NO: 264633 - RNA, 20 nt, Human
uccauauaucacaaaacuca

SEQ ID NO: 264634 - RNA, 26 nt, Human
ucccuuguccauuuuacucuguucca

SEQ ID NO: 264635 - RNA, 20 nt, Human
ucugaacuaauucaauaacc

SEQ ID NO: 264636 - RNA, 18 nt, Human
ugaaagaaacucagagga

SEQ ID NO: 264637 - RNA, 21 nt, Human
ugaaugcuuuuuguuuucagu

SEQ ID NO: 264638 - RNA, 25 nt, Human
ugacagcacaccauuauaugacugg

SEQ ID NO: 264639 - RNA, 21 nt, Human
ugcaaacacuuaauacaugca

SEQ ID NO: 264640 - RNA, 24 nt, Human
ugcaacugaagcaacuguuguaac

SEQ ID NO: 264641 - RNA, 18 nt, Human
ugcaagugguggucgcuc

SEQ ID NO: 264642 - RNA, 25 nt, Human
ugcuccuacauacuguacaauacau

SEQ ID NO: 264643 - RNA, 22 nt, Human
uggaaguaguuuggcaauuucu

SEQ ID NO: 264644 - RNA, 24 nt, Human
ugguuucacuaagugaaauuucug

SEQ ID NO: 264645 - RNA, 19 nt, Human
uguuuucaguacuaugcuc

SEQ ID NO: 264646 - RNA, 21 nt, Human
uuaaaacccuuuuaggucuac

SEQ ID NO: 264647 - RNA, 22 nt, Human
uuaaaacuuucugccaucgaug

SEQ ID NO: 264648 - RNA, 21 nt, Human
uuaggauaauuuaaugcucaa

SEQ ID NO: 264649 - RNA, 22 nt, Human
uuaggucuacuguucaagagcu

SEQ ID NO: 264650 - RNA, 20 nt, Human
uuaguacauuuuuagaacua

SEQ ID NO: 264651 - RNA, 18 nt, Human
uuaguuaacuugagaacu

SEQ ID NO: 264652 - RNA, 25 nt, Human
uuaucuauuuaucaauaaggcauag

SEQ ID NO: 264653 - RNA, 25 nt, Human
uucacuucucacuauauauauauau

SEQ ID NO: 264654 - RNA, 20 nt, Human
uucaggaguggagagggaga

SEQ ID NO: 264655 - RNA, 22 nt, Human
uuccagaguuucuucaguccuu

SEQ ID NO: 264656 - RNA, 19 nt, Human
uuuaaaacuuucugccauc

SEQ ID NO: 264657 - RNA, 25 nt, Human
uuuccaugcaaguauggcugcuaca

SEQ ID NO: 264658 - RNA, 23 nt, Human
uuucugaacuaauucaauaaccc

SEQ ID NO: 264659 - RNA, 25 nt, Human
aaaugcaccaagagagggugagcac

SEQ ID NO: 264660 - RNA, 20 nt, Human
aacagggcagcacauggccc

SEQ ID NO: 264661 - RNA, 21 nt, Human
aacagggcagcacauggcccu

SEQ ID NO: 264662 - RNA, 18 nt, Human
aagagagggugagcacag

SEQ ID NO: 264663 - RNA, 19 nt, Human
aagcagggucugagaugag

SEQ ID NO: 264664 - RNA, 23 nt, Human
aagcugacggagcucccuguggc

SEQ ID NO: 264665 - RNA, 20 nt, Human
aaugggcucgugacacccuc

SEQ ID NO: 264666 - RNA, 23 nt, Human
acagacccccucugcccccacaa

SEQ ID NO: 264667 - RNA, 24 nt, Human
acccccucugcccccacaaccccu

SEQ ID NO: 264668 - RNA, 20 nt, Human
agagagggugagcacaggag

SEQ ID NO: 264669 - RNA, 21 nt, Human
agcacauggcccuguugccuc

SEQ ID NO: 264670 - RNA, 22 nt, Human
agcccggagcgggagccgggcc

SEQ ID NO: 264671 - RNA, 18 nt, Human
agcgggagccgggccggg

SEQ ID NO: 264672 - RNA, 22 nt, Human
caaaaaaaugcaccaagagagg

SEQ ID NO: 264673 - RNA, 22 nt, Human
caacagggcagcacauggcccu

SEQ ID NO: 264674 - RNA, 20 nt, Human
caccaggagccgcccacagc

SEQ ID NO: 264675 - RNA, 23 nt, Human
caccugaaugacucucagauuca

SEQ ID NO: 264676 - RNA, 19 nt, Human
cagagcccggagcgggagc

SEQ ID NO: 264677 - RNA, 18 nt, Human
caggagcaccccuggcca

SEQ ID NO: 264678 - RNA, 22 nt, Human
caggagccgcccacagcugggc

SEQ ID NO: 264679 - RNA, 22 nt, Human
cccccacaaccccuguaaacau

SEQ ID NO: 264680 - RNA, 21 nt, Human
cccccucugcccccacaaccc

SEQ ID NO: 264681 - RNA, 21 nt, Human
ccccgggccgcgcucgaaggc

SEQ ID NO: 264682 - RNA, 23 nt, Human
ccccucugcccccacaaccccug

SEQ ID NO: 264683 - RNA, 21 nt, Human
ccccuggccacaucccccauc

SEQ ID NO: 264684 - RNA, 22 nt, Human
ccccuguaaacaugagaauggg

SEQ ID NO: 264685 - RNA, 18 nt, Human
cccuguugccuccaccug

SEQ ID NO: 264686 - RNA, 19 nt, Human
ccgcgcucgcccgcccgcc

SEQ ID NO: 264687 - RNA, 25 nt, Human
ccggagcgggagccgggccgggguc

SEQ ID NO: 264688 - RNA, 18 nt, Human
ccggcagagcccggagcg

SEQ ID NO: 264689 - RNA, 24 nt, Human
ccgggccggggucaggacccgggc

SEQ ID NO: 264690 - RNA, 20 nt, Human
ccuggccacaucccccaucc

SEQ ID NO: 264691 - RNA, 22 nt, Human
cggggucaggacccgggcugcu

SEQ ID NO: 264692 - RNA, 18 nt, Human
cuccgggccccgggccgc

SEQ ID NO: 264693 - RNA, 22 nt, Human
cuccgggccccgggccgcgcuc

SEQ ID NO: 264694 - RNA, 20 nt, Human
cugguggcagaaggcucccu

SEQ ID NO: 264695 - RNA, 20 nt, Human
gagccgggccggggucagga

SEQ ID NO: 264696 - RNA, 21 nt, Human
gcaccaagagagggugagcac

SEQ ID NO: 264697 - RNA, 18 nt, Human
gccacaucccccauccua

SEQ ID NO: 264698 - RNA, 18 nt, Human
gccggcagagcccggagc

SEQ ID NO: 264699 - RNA, 23 nt, Human
ggaggggcugguggcagaaggcu

SEQ ID NO: 264700 - RNA, 18 nt, Human
ggcagaaggcucccugca

SEQ ID NO: 264701 - RNA, 25 nt, Human
ggcugguggcagaaggcucccugca

SEQ ID NO: 264702 - RNA, 19 nt, Human
gggucaggacccgggcugc

SEQ ID NO: 264703 - RNA, 21 nt, Human
ggucaggacccgggcugcucc

SEQ ID NO: 264704 - RNA, 23 nt, Human
ucaccugaaugacucucagauuc

SEQ ID NO: 264705 - RNA, 18 nt, Human
ucaggacccgggcugcuc

SEQ ID NO: 264706 - RNA, 19 nt, Human
ugagaaugggcucgugaca

SEQ ID NO: 264707 - RNA, 26 nt, Human
ugagaaugggcucgugacacccucaa

SEQ ID NO: 264708 - RNA, 22 nt, Human
ugagagucuggggaggggcugg

SEQ ID NO: 264709 - RNA, 24 nt, Human
ugcccccacaaccccuguaaacau

SEQ ID NO: 264710 - RNA, 22 nt, Human
uggaacuuuguuguuagcacca

SEQ ID NO: 264711 - RNA, 19 nt, Human
uggcagaaggcucccugca

SEQ ID NO: 264712 - RNA, 21 nt, Human
uggcagaaggcucccugcagg

SEQ ID NO: 264713 - RNA, 19 nt, Human
ugggagaagcugacggagc

SEQ ID NO: 264714 - RNA, 25 nt, Human
ugggagaagcugacggagcucccug

SEQ ID NO: 264715 - RNA, 23 nt, Human
uggggagggaaccaggcagaccu

SEQ ID NO: 264716 - RNA, 22 nt, Human
ugguggcagaaggcucccugca

SEQ ID NO: 264717 - RNA, 19 nt, Human
uuccaaaaaaaugcaccaa

SEQ ID NO: 264718 - RNA, 21 nt, Human
aaagcagcagagugcagagag

SEQ ID NO: 264719 - RNA, 19 nt, Human
acaguagccaggcccuccc

SEQ ID NO: 264720 - RNA, 21 nt, Human
accacacuugggggccuggug

SEQ ID NO: 264721 - RNA, 24 nt, Human
agacaguagccaggcccucccuca

SEQ ID NO: 264722 - RNA, 18 nt, Human
aggaaagaaaaagaccac

SEQ ID NO: 264723 - RNA, 19 nt, Human
caaagcagcagagugcaga

SEQ ID NO: 264724 - RNA, 22 nt, Human
cagaaggagagcccaccuuaga

SEQ ID NO: 264725 - RNA, 22 nt, Human
caguagccaggcccucccucag

SEQ ID NO: 264726 - RNA, 18 nt, Human
ccacgacuaguugacaga

SEQ ID NO: 264727 - RNA, 21 nt, Human
cccuccacgacuaguugacag

SEQ ID NO: 264728 - RNA, 20 nt, Human
gacaguagccaggcccuccc

SEQ ID NO: 264729 - RNA, 23 nt, Human
gacuaguugacagaaaccccaca

SEQ ID NO: 264730 - RNA, 21 nt, Human
gaggagucugcagaaggagag

SEQ ID NO: 264731 - RNA, 19 nt, Human
gagucuccuucccuccacg

SEQ ID NO: 264732 - RNA, 23 nt, Human
ggcaaacuuuuuuuuuuuuuuuu

SEQ ID NO: 264733 - RNA, 19 nt, Human
ggggccuggugggaaaaca

SEQ ID NO: 264734 - RNA, 19 nt, Human
gguacgccuugcaagagga

SEQ ID NO: 264735 - RNA, 21 nt, Human
uagccaggcccucccucagua

SEQ ID NO: 264736 - RNA, 24 nt, Human
uagccaggcccucccucaguauuc

SEQ ID NO: 264737 - RNA, 21 nt, Human
uauuccucaggauugcuugag

SEQ ID NO: 264738 - RNA, 18 nt, Human
ucaaagcagcagagugca

SEQ ID NO: 264739 - RNA, 21 nt, Human
ucaaagcagcagagugcagag

SEQ ID NO: 264740 - RNA, 21 nt, Human
uccacgacuaguugacagaaa

SEQ ID NO: 264741 - RNA, 23 nt, Human
ucgcagauaugaaucaauuaugu

SEQ ID NO: 264742 - RNA, 19 nt, Human
ugacagaaaccccacaggc

SEQ ID NO: 264743 - RNA, 21 nt, Human
uggagguacgccuugcaagag

SEQ ID NO: 264744 - RNA, 26 nt, Human
ugggcaaacuuuuuuuuuuuuuuuuu

SEQ ID NO: 264745 - RNA, 21 nt, Human
uucaaagcagcagagugcaga

SEQ ID NO: 264746 - RNA, 19 nt, Human
uuccucaggauugcuugag

SEQ ID NO: 264747 - RNA, 22 nt, Human
uuuaaagagucuccuucccucc

SEQ ID NO: 264748 - RNA, 21 nt, Human
uuucaaccagauuucaaagca

SEQ ID NO: 264749 - RNA, 24 nt, Human
uuuuuuuuguuugcaauuuuuaau

SEQ ID NO: 264750 - RNA, 20 nt, Human
uuuuuuuuuuuuuuuucucu

SEQ ID NO: 264751 - RNA, 22 nt, Human
cacaguccugggagguugggga

SEQ ID NO: 264752 - RNA, 20 nt, Human
caguccugggagguugggga

SEQ ID NO: 264753 - RNA, 21 nt, Human
cgaaaacuccagaaagaacac

SEQ ID NO: 264754 - RNA, 25 nt, Human
gaaaacuccagaaagaacacagucc

SEQ ID NO: 264755 - RNA, 21 nt, Human
ucagcgaaaacuccagaaaga

SEQ ID NO: 264756 - RNA, 18 nt, Human
uuggcagguaggggacag

SEQ ID NO: 264757 - RNA, 24 nt, Human
aacuccgcagggcacuccaaucuc

SEQ ID NO: 264758 - RNA, 24 nt, Human
aaucucugcgccuuccagcacccc

SEQ ID NO: 264759 - RNA, 24 nt, Human
accagccucuggggaagggaggcc

SEQ ID NO: 264760 - RNA, 22 nt, Human
aggcugcagcaccuggcucuca

SEQ ID NO: 264761 - RNA, 22 nt, Human
caccccuugagcccaguuaguc

SEQ ID NO: 264762 - RNA, 19 nt, Human
cccuugagcccaguuaguc

SEQ ID NO: 264763 - RNA, 23 nt, Human
ccucaggcugcagcaccuggcuc

SEQ ID NO: 264764 - RNA, 22 nt, Human
ccugaguucuggacaccagccu

SEQ ID NO: 264765 - RNA, 20 nt, Human
cuggccuggggccuaccagg

SEQ ID NO: 264766 - RNA, 23 nt, Human
gaguuugacuguaggccuggugg

SEQ ID NO: 264767 - RNA, 20 nt, Human
gggaggccagcagguaccag

SEQ ID NO: 264768 - RNA, 20 nt, Human
ggggaagggaggccagcagg

SEQ ID NO: 264769 - RNA, 18 nt, Human
uccagcaccccuugagcc

SEQ ID NO: 264770 - RNA, 20 nt, Human
ucucaucacagccuccuccc

SEQ ID NO: 264771 - RNA, 26 nt, Human
ugagugcuucccacccagagugcaac

SEQ ID NO: 264772 - RNA, 18 nt, Human
ugaguucuggacaccagc

SEQ ID NO: 264773 - RNA, 22 nt, Human
uggaagcgggggucuugggcau

SEQ ID NO: 264774 - RNA, 22 nt, Human
uggacaccagccucuggggaag

SEQ ID NO: 264775 - RNA, 20 nt, Human
uucccacccagagugcaacu

SEQ ID NO: 264776 - RNA, 18 nt, Human
aaaaaaauccagcgucua

SEQ ID NO: 264777 - RNA, 26 nt, Human
aaaaaaauccagcgucuaagcagcug

SEQ ID NO: 264778 - RNA, 23 nt, Human
aaaguucuuuuaugcccaaaguc

SEQ ID NO: 264779 - RNA, 21 nt, Human
agaaaaaaaaaagaugguaag

SEQ ID NO: 264780 - RNA, 19 nt, Human
aggcaggaggggagccagg

SEQ ID NO: 264781 - RNA, 21 nt, Human
auaaagccccgaaaaccggcu

SEQ ID NO: 264782 - RNA, 21 nt, Human
auggcuaaaucuuucagucuc

SEQ ID NO: 264783 - RNA, 19 nt, Human
auugcucaggacauuucug

SEQ ID NO: 264784 - RNA, 20 nt, Human
caaggguugcggaccgcugg

SEQ ID NO: 264785 - RNA, 23 nt, Human
cagcgcgaucccucccuccguuc

SEQ ID NO: 264786 - RNA, 24 nt, Human
ccagggacggccggggcccggcgg

SEQ ID NO: 264787 - RNA, 19 nt, Human
cccgcucgcucccucugcc

SEQ ID NO: 264788 - RNA, 23 nt, Human
cccucccuccguucuuuuuuccc

SEQ ID NO: 264789 - RNA, 18 nt, Human
cccuccguucuuuuuucc

SEQ ID NO: 264790 - RNA, 19 nt, Human
ccggcgguggcggccgcga

SEQ ID NO: 264791 - RNA, 21 nt, Human
ccggcgguggcggccgcgagc

SEQ ID NO: 264792 - RNA, 22 nt, Human
ccugcccuucucgaggcaggag

SEQ ID NO: 264793 - RNA, 21 nt, Human
cgcucgcucccucugccucuc

SEQ ID NO: 264794 - RNA, 23 nt, Human
cucgaggcaggaggggagccagg

SEQ ID NO: 264795 - RNA, 21 nt, Human
cucugagaagcccugcccuuc

SEQ ID NO: 264796 - RNA, 22 nt, Human
gaaaaaaauccagcgucuaagc

SEQ ID NO: 264797 - RNA, 21 nt, Human
gccaagccucugagaagcccu

SEQ ID NO: 264798 - RNA, 18 nt, Human
gggagagucgcguccuug

SEQ ID NO: 264799 - RNA, 26 nt, Human
ggggaaguguccccaaaugggcagaa

SEQ ID NO: 264800 - RNA, 18 nt, Human
guuccagugcaaagugcc

SEQ ID NO: 264801 - RNA, 19 nt, Human
uaaagccccgaaaaccggc

SEQ ID NO: 264802 - RNA, 21 nt, Human
uaagcagcugcaaggagagcc

SEQ ID NO: 264803 - RNA, 22 nt, Human
uccacuacccgaaaaaaaucca

SEQ ID NO: 264804 - RNA, 23 nt, Human
uccccaaaugggcagaauagccu

SEQ ID NO: 264805 - RNA, 23 nt, Human
uccuggcagcggcggggaagugu

SEQ ID NO: 264806 - RNA, 20 nt, Human
ucuuuuuucccgccaagccu

SEQ ID NO: 264807 - RNA, 26 nt, Human
uggccugggggaucaagcgggagggc

SEQ ID NO: 264808 - RNA, 19 nt, Human
uuaaaaacaauucuuaaau

SEQ ID NO: 264809 - RNA, 21 nt, Human
uucguggaugcggcaaggguu

SEQ ID NO: 264810 - RNA, 23 nt, Human
acagcggcagcggcguagcuggc

SEQ ID NO: 264811 - RNA, 20 nt, Human
cagcggcagcggcguagcug

SEQ ID NO: 264812 - RNA, 23 nt, Human
aaauggucguguaaaaguuauuc

SEQ ID NO: 264813 - RNA, 20 nt, Human
aagaugccagaauaagaaca

SEQ ID NO: 264814 - RNA, 21 nt, Human
aagccucaguuuuuccaucug

SEQ ID NO: 264815 - RNA, 25 nt, Human
acccccuucaaucccuuacagucca

SEQ ID NO: 264816 - RNA, 20 nt, Human
accuggagcggaccggcucc

SEQ ID NO: 264817 - RNA, 20 nt, Human
agaaagcuggagcugacuug

SEQ ID NO: 264818 - RNA, 19 nt, Human
agcaagaaggacacuuuuc

SEQ ID NO: 264819 - RNA, 19 nt, Human
aggggccagugaauauuug

SEQ ID NO: 264820 - RNA, 19 nt, Human
agggggagcaagaaggaca

SEQ ID NO: 264821 - RNA, 24 nt, Human
aguaaagccaacuggagaccuagg

SEQ ID NO: 264822 - RNA, 21 nt, Human
aguggugguggggaggcacga

SEQ ID NO: 264823 - RNA, 25 nt, Human
aguggugguggggaggcacgagaag

SEQ ID NO: 264824 - RNA, 23 nt, Human
caaacuguuuaccaacacaccca

SEQ ID NO: 264825 - RNA, 23 nt, Human
caaaguaggggccagugaauauu

SEQ ID NO: 264826 - RNA, 23 nt, Human
caacacacccacgugccagacag

SEQ ID NO: 264827 - RNA, 24 nt, Human
caagaaggacacuuuuccaucuca

SEQ ID NO: 264828 - RNA, 21 nt, Human
cacaaagaccccaaacaucaa

SEQ ID NO: 264829 - RNA, 18 nt, Human
cacacacgcacaugcgcg

SEQ ID NO: 264830 - RNA, 18 nt, Human
cagcaaggcaagguguag

SEQ ID NO: 264831 - RNA, 18 nt, Human
cagccgcccgccaccugg

SEQ ID NO: 264832 - RNA, 19 nt, Human
cagccgcccgccaccugga

SEQ ID NO: 264833 - RNA, 18 nt, Human
caucaaggaagaggugcc

SEQ ID NO: 264834 - RNA, 19 nt, Human
caucaaggaagaggugccu

SEQ ID NO: 264835 - RNA, 20 nt, Human
caucucaggacaaacagcaa

SEQ ID NO: 264836 - RNA, 25 nt, Human
cauucuucccucccugucucaggga

SEQ ID NO: 264837 - RNA, 18 nt, Human
ccaaacaucaaggaagag

SEQ ID NO: 264838 - RNA, 24 nt, Human
ccaacccucaccucaaaucccuug

SEQ ID NO: 264839 - RNA, 22 nt, Human
ccacaaagaccccaaacaucaa

SEQ ID NO: 264840 - RNA, 22 nt, Human
ccagcacacacgcacaugcgcg

SEQ ID NO: 264841 - RNA, 25 nt, Human
ccagugaauauuuguugaaugccag

SEQ ID NO: 264842 - RNA, 22 nt, Human
ccccuucaaucccuuacagucc

SEQ ID NO: 264843 - RNA, 19 nt, Human
ccuaaaagcuacagugagc

SEQ ID NO: 264844 - RNA, 24 nt, Human
ccucgcuccagccgcccgccaccu

SEQ ID NO: 264845 - RNA, 27 nt, Human
ccucgcuccagccgcccgccaccugga

SEQ ID NO: 264846 - RNA, 28 nt, Human
cggcagccagcacacacgcacaugcgcg

SEQ ID NO: 264847 - RNA, 21 nt, Human
cggcucggggcagcccggcag

SEQ ID NO: 264848 - RNA, 19 nt, Human
cuaagcgccaacccucacc

SEQ ID NO: 264849 - RNA, 25 nt, Human
cucaaaucccuuguccccuggggcu

SEQ ID NO: 264850 - RNA, 23 nt, Human
cucggcuucuucucccccuaggg

SEQ ID NO: 264851 - RNA, 21 nt, Human
cuggaguucuacugccuugac

SEQ ID NO: 264852 - RNA, 24 nt, Human
cuuacaguccaaccccaguauugu

SEQ ID NO: 264853 - RNA, 23 nt, Human
gaagaggggcuggcuagauggca

SEQ ID NO: 264854 - RNA, 18 nt, Human
gcagcaaaaaaacuucag

SEQ ID NO: 264855 - RNA, 22 nt, Human
gccaacccucaccucaaauccc

SEQ ID NO: 264856 - RNA, 18 nt, Human
gcuucuucucccccuagg

SEQ ID NO: 264857 - RNA, 21 nt, Human
ggagaggagggccuggaguuc

SEQ ID NO: 264858 - RNA, 18 nt, Human
ggagcagcugacgcugga

SEQ ID NO: 264859 - RNA, 22 nt, Human
gggagugugaguuuccuaggga

SEQ ID NO: 264860 - RNA, 20 nt, Human
ggguguggaggucuaagaug

SEQ ID NO: 264861 - RNA, 23 nt, Human
uaaaaguuauuccuaaaagcuac

SEQ ID NO: 264862 - RNA, 23 nt, Human
uaaaguaaagccaacuggagacc

SEQ ID NO: 264863 - RNA, 24 nt, Human
uaagauaagcuaccacaaagaccc

SEQ ID NO: 264864 - RNA, 21 nt, Human
uaagcuaccacaaagacccca

SEQ ID NO: 264865 - RNA, 28 nt, Human
uacaguccaaccccaguauuguccucuu

SEQ ID NO: 264866 - RNA, 22 nt, Human
uaccaacacacccacgugccag

SEQ ID NO: 264867 - RNA, 26 nt, Human
uaccacaaagaccccaaacaucaagg

SEQ ID NO: 264868 - RNA, 21 nt, Human
uagcccacagauugccacaaa

SEQ ID NO: 264869 - RNA, 18 nt, Human
uauccuauuuuuucucuc

SEQ ID NO: 264870 - RNA, 23 nt, Human
uccaaacuguuuaccaacacacc

SEQ ID NO: 264871 - RNA, 23 nt, Human
uccaaccccaguauuguccucuc

SEQ ID NO: 264872 - RNA, 21 nt, Human
uccaggauuucucacgggugu

SEQ ID NO: 264873 - RNA, 20 nt, Human
ucccuuguccccuggggcuc

SEQ ID NO: 264874 - RNA, 22 nt, Human
ucccuuguccccuggggcucca

SEQ ID NO: 264875 - RNA, 19 nt, Human
ucuaagccucaguuuuucc

SEQ ID NO: 264876 - RNA, 21 nt, Human
ucuacaaaaauauccucucca

SEQ ID NO: 264877 - RNA, 20 nt, Human
ucucagggaugcacgagugg

SEQ ID NO: 264878 - RNA, 23 nt, Human
ucugcccucagcgagguugcacc

SEQ ID NO: 264879 - RNA, 19 nt, Human
ugaguuuccuagggaaaga

SEQ ID NO: 264880 - RNA, 21 nt, Human
ugaguuuccuagggaaagagg

SEQ ID NO: 264881 - RNA, 20 nt, Human
ugccccagucugcccucagc

SEQ ID NO: 264882 - RNA, 22 nt, Human
ugccuugaccccagcauguagc

SEQ ID NO: 264883 - RNA, 24 nt, Human
ugccuugaccccagcauguagccc

SEQ ID NO: 264884 - RNA, 25 nt, Human
uggagcauuggggaagaggggcugg

SEQ ID NO: 264885 - RNA, 22 nt, Human
uggagcggaccggcuccccgcc

SEQ ID NO: 264886 - RNA, 22 nt, Human
uggcuagauggcagaaagcugg

SEQ ID NO: 264887 - RNA, 24 nt, Human
uggcuagauggcagaaagcuggag

SEQ ID NO: 264888 - RNA, 20 nt, Human
ugggauggagcauuggggaa

SEQ ID NO: 264889 - RNA, 18 nt, Human
ugucacuagccacagucu

SEQ ID NO: 264890 - RNA, 20 nt, Human
uguggaggucuaagaugcca

SEQ ID NO: 264891 - RNA, 21 nt, Human
uuuuuuuuuuuuuuuuuccag

SEQ ID NO: 264892 - RNA, 23 nt, Human
uuuuuuuuuuuuuuuuuuccagg

SEQ ID NO: 264893 - RNA, 24 nt, Human
aaaaagaaaacuugugucuuuuua

SEQ ID NO: 264894 - RNA, 19 nt, Human
aaacacaccaggaggcaag

SEQ ID NO: 264895 - RNA, 24 nt, Human
aaaggugccagaaaacacaaagca

SEQ ID NO: 264896 - RNA, 19 nt, Human
aaggugccagaaaacacaa

SEQ ID NO: 264897 - RNA, 24 nt, Human
aaucgcuugaacccgggaggcaga

SEQ ID NO: 264898 - RNA, 21 nt, Human
aauguggugaaaccccaucuc

SEQ ID NO: 264899 - RNA, 19 nt, Human
acaccaggaggcaagucca

SEQ ID NO: 264900 - RNA, 21 nt, Human
acccacaugacaagcugcggg

SEQ ID NO: 264901 - RNA, 23 nt, Human
accccaucucuacuaaaaauaca

SEQ ID NO: 264902 - RNA, 20 nt, Human
acuguccagaguguccugcu

SEQ ID NO: 264903 - RNA, 22 nt, Human
acuuuccccaggccccaggcua

SEQ ID NO: 264904 - RNA, 23 nt, Human
agaaaacuucagagaggcccaga

SEQ ID NO: 264905 - RNA, 18 nt, Human
agaaaguucccucacuca

SEQ ID NO: 264906 - RNA, 22 nt, Human
agagagagcuggguuucaaagu

SEQ ID NO: 264907 - RNA, 21 nt, Human
agagccagcaagcuccuugga

SEQ ID NO: 264908 - RNA, 23 nt, Human
agagccagcaagcuccuuggaga

SEQ ID NO: 264909 - RNA, 18 nt, Human
agagguugcagugagccg

SEQ ID NO: 264910 - RNA, 23 nt, Human
agagguugcagugagccgagauc

SEQ ID NO: 264911 - RNA, 24 nt, Human
agagguugcagugagccgagauca

SEQ ID NO: 264912 - RNA, 22 nt, Human
agaguugagacuccgucucaaa

SEQ ID NO: 264913 - RNA, 19 nt, Human
agcauugagagugggagga

SEQ ID NO: 264914 - RNA, 22 nt, Human
agccaggaagaccccaagucuc

SEQ ID NO: 264915 - RNA, 19 nt, Human
agccuggccaaugugguga

SEQ ID NO: 264916 - RNA, 22 nt, Human
agccuggccaauguggugaaac

SEQ ID NO: 264917 - RNA, 24 nt, Human
agccuggccaauguggugaaaccc

SEQ ID NO: 264918 - RNA, 26 nt, Human
agccugggcgacaagaguugagacuc

SEQ ID NO: 264919 - RNA, 23 nt, Human
agcuaggcgugguggcaggcgcc

SEQ ID NO: 264920 - RNA, 23 nt, Human
aggaacaaguuuucaugguucua

SEQ ID NO: 264921 - RNA, 18 nt, Human
aggaggucaagaccagcc

SEQ ID NO: 264922 - RNA, 21 nt, Human
aggcagagguugcagugagcc

SEQ ID NO: 264923 - RNA, 24 nt, Human
aggcagagguugcagugagccgag

SEQ ID NO: 264924 - RNA, 22 nt, Human
aggcagcuugugugucuccugg

SEQ ID NO: 264925 - RNA, 24 nt, Human
aggcaggagaaucgcuugaacccg

SEQ ID NO: 264926 - RNA, 24 nt, Human
aggcaguggaucaccuaggucagg

SEQ ID NO: 264927 - RNA, 24 nt, Human
aggcucaggcaggagaaucgcuug

SEQ ID NO: 264928 - RNA, 20 nt, Human
aggcuggagcccccaacaac

SEQ ID NO: 264929 - RNA, 23 nt, Human
agggaagagagagagcuggguuu

SEQ ID NO: 264930 - RNA, 22 nt, Human
agggcuugggaacuuuccccag

SEQ ID NO: 264931 - RNA, 21 nt, Human
aggugccagaaaacacaaagc

SEQ ID NO: 264932 - RNA, 20 nt, Human
auaauauauacauauauaca

SEQ ID NO: 264933 - RNA, 20 nt, Human
auacauacauauauauauac

SEQ ID NO: 264934 - RNA, 20 nt, Human
auacauacauauauauauac

SEQ ID NO: 264935 - RNA, 25 nt, Human
auauauacauacauauauauauaca

SEQ ID NO: 264936 - RNA, 30 nt, Human
auauauacauauauacauacauauauauag

SEQ ID NO: 264937 - RNA, 30 nt, Human; identical to SEQ ID NO: 264936

SEQ ID NO: 264938 - RNA, 25 nt, Human
auauauacauauauacauauauaca

SEQ ID NO: 264939 - RNA, 25 nt, Human
auauauacauauauacauauauaca

SEQ ID NO: 264940 - RNA, 25 nt, Human
auauauacauauauacauauauaca

SEQ ID NO: 264941 - RNA, 24 nt, Human
aucaugccauuaaccuccagccug

SEQ ID NO: 264942 - RNA, 20 nt, Human
caaaggugccagaaaacaca

SEQ ID NO: 264943 - RNA, 25 nt, Human
caacagcucuccagaaaacuucaga

SEQ ID NO: 264944 - RNA, 24 nt, Human
caagaccagccuggccaauguggu

SEQ ID NO: 264945 - RNA, 22 nt, Human
caagucucugagcuuguuuuca

SEQ ID NO: 264946 - RNA, 24 nt, Human
caauguggugaaaccccaucucua

SEQ ID NO: 264947 - RNA, 21 nt, Human
cacacacgcgcacaacggcca

SEQ ID NO: 264948 - RNA, 23 nt, Human
caccaccuguugcauaccaucug

SEQ ID NO: 264949 - RNA, 21 nt, Human
caccccagagacauccuuucc

SEQ ID NO: 264950 - RNA, 28 nt, Human
caccccagagacauccuuuccuagccua

SEQ ID NO: 264951 - RNA, 18 nt, Human
caccugggcagggauuga

SEQ ID NO: 264952 - RNA, 23 nt, Human
cacucccauaagucagggaagag

SEQ ID NO: 264953 - RNA, 22 nt, Human
cagaaaacacaaagcacuccca

SEQ ID NO: 264954 - RNA, 24 nt, Human
cagaaaacuucagagaggcccaga

SEQ ID NO: 264955 - RNA, 19 nt, Human
cagaaguuacccacaugac

SEQ ID NO: 264956 - RNA, 18 nt, Human
cagcauugagagugggag

SEQ ID NO: 264957 - RNA, 26 nt, Human
cagcucuccagaaaacuucagagagg

SEQ ID NO: 264958 - RNA, 23 nt, Human
caggaagaccccaagucuccuca

SEQ ID NO: 264959 - RNA, 21 nt, Human
cauaacagaggcagaaugaga

SEQ ID NO: 264960 - RNA, 18 nt, Human
cauacauauauauauaca

SEQ ID NO: 264961 - RNA, 18 nt, Human
cauacauauauauauaca

SEQ ID NO: 264962 - RNA, 18 nt, Human
cauacauauauauauaca

SEQ ID NO: 264963 - RNA, 18 nt, Human
cauacauauauauauaca

SEQ ID NO: 264964 - RNA, 19 nt, Human
cauauauacauacauauau

SEQ ID NO: 264965 - RNA, 19 nt, Human
cauauauacauacauauau

SEQ ID NO: 264966 - RNA, 19 nt, Human
cauauauacauacauauau

SEQ ID NO: 264967 - RNA, 19 nt, Human
cauauauacauacauauau

SEQ ID NO: 264968 - RNA, 20 nt, Human
caugccauuaaccuccagcc

SEQ ID NO: 264969 - RNA, 24 nt, Human
cauuaaccuccagccugggcgaca

SEQ ID NO: 264970 - RNA, 22 nt, Human
cauugcauaacagaggcagaau

SEQ ID NO: 264971 - RNA, 25 nt, Human
ccaaaggugccagaaaacacaaagc

SEQ ID NO: 264972 - RNA, 24 nt, Human
ccaccaccuguugcauaccaucug

SEQ ID NO: 264973 - RNA, 22 nt, Human
ccaggccccaggcuaagaccca

SEQ ID NO: 264974 - RNA, 24 nt, Human
ccaucugucagccuuuucuuugga

SEQ ID NO: 264975 - RNA, 23 nt, Human
ccauuaaccuccagccugggcga

SEQ ID NO: 264976 - RNA, 21 nt, Human
cccacaugacaagcugcgggu

SEQ ID NO: 264977 - RNA, 23 nt, Human
ccccaggccccaggcuaagaccc

SEQ ID NO: 264978 - RNA, 23 nt, Human
ccuccagccugggcgacaagagu

SEQ ID NO: 264979 - RNA, 23 nt, Human
ccuccagcugggggcagcagggc

SEQ ID NO: 264980 - RNA, 21 nt, Human
ccugcgaucccagcuacucgg

SEQ ID NO: 264981 - RNA, 23 nt, Human
ccuggccaauguggugaaacccc

SEQ ID NO: 264982 - RNA, 24 nt, Human
ccuggccaauguggugaaacccca

SEQ ID NO: 264983 - RNA, 22 nt, Human
cgagaucaugccauuaaccucc

SEQ ID NO: 264984 - RNA, 19 nt, Human
cgagggcccaagcguggcu

SEQ ID NO: 264985 - RNA, 23 nt, Human
cgccugcgaucccagcuacucgg

SEQ ID NO: 264986 - RNA, 24 nt, Human
cgggaggcagagguugcagugagc

SEQ ID NO: 264987 - RNA, 18 nt, Human
cuacuaaaaauacagaaa

SEQ ID NO: 264988 - RNA, 18 nt, Human
cucaaaaaaaaaaaaaaa

SEQ ID NO: 264989 - RNA, 24 nt, Human
cuccacacacgcgcacaacggcca

SEQ ID NO: 264990 - RNA, 27 nt, Human
cuccgucucaaaaaaaaaaaaaaaaau

SEQ ID NO: 264991 - RNA, 23 nt, Human
cugagaagccaaaggugccagaa

SEQ ID NO: 264992 - RNA, 21 nt, Human
cugcggguuggugacuuuccc

SEQ ID NO: 264993 - RNA, 22 nt, Human
cuggagcagacuaguuccccuc

SEQ ID NO: 264994 - RNA, 22 nt, Human
cuggagcccccaacaacaucca

SEQ ID NO: 264995 - RNA, 21 nt, Human
cuuuggagauagugagccagg

SEQ ID NO: 264996 - RNA, 23 nt, Human
gagaaucgcuugaacccgggagg

SEQ ID NO: 264997 - RNA, 18 nt, Human
gagacaaagucccuugug

SEQ ID NO: 264998 - RNA, 25 nt, Human
gaggcaggcaccuggauuccccaag

SEQ ID NO: 264999 - RNA, 23 nt, Human
gaucaccuaggucaggaggucaa

SEQ ID NO: 265000 - RNA, 24 nt, Human
gaugagaggcaggugcgaaagaga

SEQ ID NO: 265001 - RNA, 24 nt, Human
gccaauguggugaaaccccaucuc

SEQ ID NO: 265002 - RNA, 22 nt, Human
gccagggcuugggaacuuuccc

SEQ ID NO: 265003 - RNA, 22 nt, Human
gccauuaaccuccagccugggc

SEQ ID NO: 265004 - RNA, 19 nt, Human
gccuaaaguucauguagag

SEQ ID NO: 265005 - RNA, 21 nt, Human
gcugcaaucgauucugcaauc

SEQ ID NO: 265006 - RNA, 19 nt, Human
gcuggugcgagggcccaag

SEQ ID NO: 265007 - RNA, 18 nt, Human
gcuguagaacccauugca

SEQ ID NO: 265008 - RNA, 19 nt, Human
ggaagagagagagcugggu

SEQ ID NO: 265009 - RNA, 21 nt, Human
gggaagagagagagcuggguu

SEQ ID NO: 265010 - RNA, 20 nt, Human
gggcgacaagaguugagacu

SEQ ID NO: 265011 - RNA, 22 nt, Human
ggucaggaggucaagaccagcc

SEQ ID NO: 265012 - RNA, 19 nt, Human
ggugacuuucccagacugg

SEQ ID NO: 265013 - RNA, 20 nt, Human
gugccagaaaacacaaagca

SEQ ID NO: 265014 - RNA, 22 nt, Human
guggagcacuggaugaguccca

SEQ ID NO: 265015 - RNA, 24 nt, Human
uaaaacacaccaggaggcaagucc

SEQ ID NO: 265016 - RNA, 20 nt, Human
uacaaguuacuaaaggggag

SEQ ID NO: 265017 - RNA, 20 nt, Human
uacauacauauauauauaca

SEQ ID NO: 265018 - RNA, 20 nt, Human
uacauacauauauauauaca

SEQ ID NO: 265019 - RNA, 20 nt, Human
uacauacauauauauauaca

SEQ ID NO: 265020 - RNA, 20 nt, Human
uacauacauauauauauaca

SEQ ID NO: 265021 - RNA, 19 nt, Human
uacauauauacauauauac

SEQ ID NO: 265022 - RNA, 19 nt, Human
uacauauauacauauauac

SEQ ID NO: 265023 - RNA, 19 nt, Human
uacauauauacauauauac

SEQ ID NO: 265024 - RNA, 28 nt, Human
uacauauauacauauauacauacauaua

SEQ ID NO: 265025 - RNA, 21 nt, Human
uacauauauauauacauauau

SEQ ID NO: 265026 - RNA, 24 nt, Human
uacauauauauauacauauauaca

SEQ ID NO: 265027 - RNA, 24 nt, Human
uacauauauauauacauauauaca

SEQ ID NO: 265028 - RNA, 24 nt, Human
uacauauauauauacauauauaca

SEQ ID NO: 265029 - RNA, 18 nt, Human
uauacauacauauauaua

SEQ ID NO: 265030 - RNA, 18 nt, Human
uauacauacauauauaua

SEQ ID NO: 265031 - RNA, 18 nt, Human
uauacauacauauauaua

SEQ ID NO: 265032 - RNA, 22 nt, Human
uauacauacauauauauauaca

SEQ ID NO: 265033 - RNA, 22 nt, Human
uauacauacauauauauauaca

SEQ ID NO: 265034 - RNA, 22 nt, Human
uauacauacauauauauauaca

SEQ ID NO: 265035 - RNA, 22 nt, Human
uauacauacauauauauauaca

SEQ ID NO: 265036 - RNA, 22 nt, Human
uauacauacauauauauauaca

SEQ ID NO: 265037 - RNA, 23 nt, Human
uauacauacauauauauauacau

SEQ ID NO: 265038 - RNA, 23 nt, Human
uauacauacauauauauauacau

SEQ ID NO: 265039 - RNA, 18 nt, Human
uauauacauacauauaua

SEQ ID NO: 265040 - RNA, 18 nt, Human
uauauacauacauauaua

SEQ ID NO: 265041 - RNA, 18 nt, Human
uauauacauacauauaua

SEQ ID NO: 265042 - RNA, 18 nt, Human
uauauacauacauauaua

SEQ ID NO: 265043 - RNA, 19 nt, Human
uauauacauacauauauau

SEQ ID NO: 265044 - RNA, 19 nt, Human
uauauacauacauauauau

SEQ ID NO: 265045 - RNA, 19 nt, Human
uauauacauacauauauau

SEQ ID NO: 265046 - RNA, 20 nt, Human
uauauacauacauauauaua

SEQ ID NO: 265047 - RNA, 24 nt, Human
uauauacauacauauauauauaca

SEQ ID NO: 265048 - RNA, 24 nt, Human
uauauacauacauauauauauaca

SEQ ID NO: 265049 - RNA, 24 nt, Human
uauauacauacauauauauauaca

SEQ ID NO: 265050 - RNA, 25 nt, Human
uauauacauacauauauauauacau

SEQ ID NO: 265051 - RNA, 25 nt, Human
uauauacauacauauauauauacau

SEQ ID NO: 265052 - RNA, 24 nt, Human
uauauacauauauacauacauaua

SEQ ID NO: 265053 - RNA, 24 nt, Human
uauauacauauauacauacauaua

SEQ ID NO: 265054 - RNA, 29 nt, Human
uauauacauauauacauacauauauauag

SEQ ID NO: 265055 - RNA, 29 nt, Human
uauauacauauauacauacauauauauag

SEQ ID NO: 265056 - RNA, 24 nt, Human
uauauacauauauacauauauaca

SEQ ID NO: 265057 - RNA, 24 nt, Human
uauauacauauauacauauauaca

SEQ ID NO: 265058 - RNA, 24 nt, Human
uauauacauauauacauauauaca

SEQ ID NO: 265059 - RNA, 18 nt, Human
uauauauacauauauaca

SEQ ID NO: 265060 - RNA, 18 nt, Human
uauauauacauauauaca

SEQ ID NO: 265061 - RNA, 18 nt, Human
uauauauacauauauaca

SEQ ID NO: 265062 - RNA, 20 nt, Human
uauauauauacauauauaca

SEQ ID NO: 265063 - RNA, 20 nt, Human
uauauauauacauauauaca

SEQ ID NO: 265064 - RNA, 20 nt, Human
uauauauauacauauauaca

SEQ ID NO: 265065 - RNA, 22 nt, Human
ucaaaaagaaaacuugugucuu

SEQ ID NO: 265066 - RNA, 24 nt, Human
ucaaggauugagaugagaggcagg

SEQ ID NO: 265067 - RNA, 24 nt, Human
ucaggcaggagaaucgcuugaacc

SEQ ID NO: 265068 - RNA, 24 nt, Human
ucagggaagagagagagcuggguu

SEQ ID NO: 265069 - RNA, 23 nt, Human
uccacacacgcgcacaacggcca

SEQ ID NO: 265070 - RNA, 24 nt, Human
uccccaggccccaggcuaagaccc

SEQ ID NO: 265071 - RNA, 26 nt, Human
uccccaggccccaggcuaagacccau

SEQ ID NO: 265072 - RNA, 23 nt, Human
uccgucucaaaaaaaaaaaaaaa

SEQ ID NO: 265073 - RNA, 25 nt, Human
uccgucucaaaaaaaaaaaaaaaaa

SEQ ID NO: 265074 - RNA, 18 nt, Human
ucgcuugaacccgggagg

SEQ ID NO: 265075 - RNA, 22 nt, Human
ucuccagaaaacuucagagagg

SEQ ID NO: 265076 - RNA, 19 nt, Human
ugaaaccccaucucuacua

SEQ ID NO: 265077 - RNA, 20 nt, Human
ugaagacagaaaguucccuc

SEQ ID NO: 265078 - RNA, 18 nt, Human
ugagagugggaggaaggg

SEQ ID NO: 265079 - RNA, 18 nt, Human
ugagccgagaucaugcca

SEQ ID NO: 265080 - RNA, 23 nt, Human
ugaguucaugagccagggcuugg

SEQ ID NO: 265081 - RNA, 21 nt, Human
ugcaagccuuuauauuguuug

SEQ ID NO: 265082 - RNA, 18 nt, Human
ugcagagccagcaagcuc

SEQ ID NO: 265083 - RNA, 20 nt, Human
ugcagagccagcaagcuccu

SEQ ID NO: 265084 - RNA, 21 nt, Human
ugcagaguccagcuggggcaa

SEQ ID NO: 265085 - RNA, 18 nt, Human
ugcauaacagaggcagaa

SEQ ID NO: 265086 - RNA, 19 nt, Human
ugcauaccaucugucagcc

SEQ ID NO: 265087 - RNA, 19 nt, Human
ugccagaaaacacaaagca

SEQ ID NO: 265088 - RNA, 18 nt, Human
uggaucaccuaggucagg

SEQ ID NO: 265089 - RNA, 23 nt, Human
uggaucaccuaggucaggagguc

SEQ ID NO: 265090 - RNA, 24 nt, Human
uggccaauguggugaaaccccauc

SEQ ID NO: 265091 - RNA, 19 nt, Human
uggcuaagcagagcuccug

SEQ ID NO: 265092 - RNA, 22 nt, Human
uggcuaagcagagcuccuggag

SEQ ID NO: 265093 - RNA, 18 nt, Human
uggcugcagagccagcaa

SEQ ID NO: 265094 - RNA, 19 nt, Human
uggcugcagagccagcaag

SEQ ID NO: 265095 - RNA, 21 nt, Human
uggcuugcuugcucacgcagc

SEQ ID NO: 265096 - RNA, 19 nt, Human
ugggaggaagggggucaga

SEQ ID NO: 265097 - RNA, 21 nt, Human
ugggaggaagggggucagcca

SEQ ID NO: 265098 - RNA, 25 nt, Human
ugggaggaagggggucagccaacau

SEQ ID NO: 265099 - RNA, 19 nt, Human
uggugaaaccccaucucua

SEQ ID NO: 265100 - RNA, 18 nt, Human
uuagcuaggcgugguggc

SEQ ID NO: 265101 - RNA, 24 nt, Human
uuagcuaggcgugguggcaggcgc

SEQ ID NO: 265102 - RNA, 20 nt, Human
uuccuccaggcuggagcccc

SEQ ID NO: 265103 - RNA, 20 nt, Human
uugcagugagccgagaucau

SEQ ID NO: 265104 - RNA, 21 nt, Human
uugcagugagccgagaucaug

SEQ ID NO: 265105 - RNA, 23 nt, Human
uugcagugagccgagaucaugcc

SEQ ID NO: 265106 - RNA, 19 nt, Human
uugcaucaccccagagaca

SEQ ID NO: 265107 - RNA, 23 nt, Human
uuggccucaagggccccucagaa

SEQ ID NO: 265108 - RNA, 21 nt, Human
aaacuuggaacacacaaggug

SEQ ID NO: 265109 - RNA, 22 nt, Human
aaaguaaaccaacauucuuaau

SEQ ID NO: 265110 - RNA, 20 nt, Human
aaaucaaaaugugcaaagug

SEQ ID NO: 265111 - RNA, 18 nt, Human
aaccgacagacacaccgg

SEQ ID NO: 265112 - RNA, 22 nt, Human
acacuggugguccuacugccca

SEQ ID NO: 265113 - RNA, 24 nt, Human
acaguacauaacagagauuaacaa

SEQ ID NO: 265114 - RNA, 18 nt, Human
acccagagccgaacucga

SEQ ID NO: 265115 - RNA, 21 nt, Human
agagccgaacucgacagggga

SEQ ID NO: 265116 - RNA, 19 nt, Human
agcagaaccccacacuggu

SEQ ID NO: 265117 - RNA, 23 nt, Human
aggaagaaacaggcuaggaaaaa

SEQ ID NO: 265118 - RNA, 21 nt, Human
aggcuaggaaaaaggcauaua

SEQ ID NO: 265119 - RNA, 21 nt, Human
agguggaggaggcugcagggc

SEQ ID NO: 265120 - RNA, 24 nt, Human
auacaaaacaugcuccucaaacau

SEQ ID NO: 265121 - RNA, 20 nt, Human
caaagugcuauaagaugcag

SEQ ID NO: 265122 - RNA, 19 nt, Human
caaaguggcagugacuguc

SEQ ID NO: 265123 - RNA, 23 nt, Human
caaggucccagcagaaccccaca

SEQ ID NO: 265124 - RNA, 22 nt, Human
cagaaccccacacugguggucc

SEQ ID NO: 265125 - RNA, 18 nt, Human
caggaagaaacaggcuag

SEQ ID NO: 265126 - RNA, 18 nt, Human
caggcucuccaagguccc

SEQ ID NO: 265127 - RNA, 18 nt, Human
ccagaggcucccaaccgu

SEQ ID NO: 265128 - RNA, 21 nt, Human
ccgacagacacaccggagccu

SEQ ID NO: 265129 - RNA, 26 nt, Human
ccggccggcgacugagggcuucuuuc

SEQ ID NO: 265130 - RNA, 19 nt, Human
cgaacucgacaggggaccg

SEQ ID NO: 265131 - RNA, 18 nt, Human
cgcggaaggcgggggccg

SEQ ID NO: 265132 - RNA, 24 nt, Human
cggcgccgaccuccaacacugcaa

SEQ ID NO: 265133 - RNA, 18 nt, Human
cugcaaccgacagacaca

SEQ ID NO: 265134 - RNA, 22 nt, Human
cugcuggaacuuaagcaccauu

SEQ ID NO: 265135 - RNA, 22 nt, Human
gaagaaacaggcuaggaaaaag

SEQ ID NO: 265136 - RNA, 21 nt, Human
gaggaggcugcagggccaccc

SEQ ID NO: 265137 - RNA, 22 nt, Human
gccccagaggcucccaaccguc

SEQ ID NO: 265138 - RNA, 18 nt, Human
gccccguucguuuuaaua

SEQ ID NO: 265139 - RNA, 24 nt, Human
ggaaaaaggcauauauauauagua

SEQ ID NO: 265140 - RNA, 23 nt, Human
ggugagguggaggaggcugcagg

SEQ ID NO: 265141 - RNA, 18 nt, Human
uacaguacuuagguauga

SEQ ID NO: 265142 - RNA, 19 nt, Human
uacccaggauguauacaaa

SEQ ID NO: 265143 - RNA, 24 nt, Human
uaguaaauuucuuuacaaaaguuu

SEQ ID NO: 265144 - RNA, 22 nt, Human
uauacaaaacaugcuccucaaa

SEQ ID NO: 265145 - RNA, 19 nt, Human
ucaaaacuuucacaacuca

SEQ ID NO: 265146 - RNA, 21 nt, Human
ucaaagugcuauaagaugcag

SEQ ID NO: 265147 - RNA, 27 nt, Human
ucaaugguauuuacagaaauguucccc

SEQ ID NO: 265148 - RNA, 22 nt, Human
uccaacacugcaaccgacagac

SEQ ID NO: 265149 - RNA, 21 nt, Human
uccaaggucccagcagaaccc

SEQ ID NO: 265150 - RNA, 23 nt, Human
ucuacucaaaacuuucacaacuc

SEQ ID NO: 265151 - RNA, 21 nt, Human
ucuaugcaccaaacaugaaca

SEQ ID NO: 265152 - RNA, 23 nt, Human
ugcaaccgacagacacaccggag

SEQ ID NO: 265153 - RNA, 21 nt, Human
ugcccacccagagccgaacuc

SEQ ID NO: 265154 - RNA, 18 nt, Human
uggcaaaccccuuaugug

SEQ ID NO: 265155 - RNA, 19 nt, Human
uggccgcaaaagccaccuc

SEQ ID NO: 265156 - RNA, 22 nt, Human
ugggaugcaggcucuccaaggu

SEQ ID NO: 265157 - RNA, 22 nt, Human
ugguauuuacagaaauguuccc

SEQ ID NO: 265158 - RNA, 20 nt, Human
ugguccuacugcccacccag

SEQ ID NO: 265159 - RNA, 20 nt, Human
uggugguccuacugcccacc

SEQ ID NO: 265160 - RNA, 23 nt, Human
uuaauaccgggggugcuuccuuc

SEQ ID NO: 265161 - RNA, 20 nt, Human
uuauguaucagcgucauacu

SEQ ID NO: 265162 - RNA, 20 nt, Human
uucaaaaagugauaaaguaa

SEQ ID NO: 265163 - RNA, 20 nt, Human
uuuacagaaauguuccccag

SEQ ID NO: 265164 - RNA, 21 nt, Human
uuuacagaaauguuccccaga

SEQ ID NO: 265165 - RNA, 24 nt, Human
uuuuuuuuuuuuuuuuuuaauuuu

SEQ ID NO: 265166 - RNA, 23 nt, Human
aaacugcuuccccaccugcccug

SEQ ID NO: 265167 - RNA, 19 nt, Human
aaagauaugcauuuucuau

SEQ ID NO: 265168 - RNA, 20 nt, Human
aaaugccucaacaagaucau

SEQ ID NO: 265169 - RNA, 19 nt, Human
aacugcuuccccaccugcc

SEQ ID NO: 265170 - RNA, 22 nt, Human
aacugcuuccccaccugcccug

SEQ ID NO: 265171 - RNA, 20 nt, Human
aagagaaaaggaauagauga

SEQ ID NO: 265172 - RNA, 23 nt, Human
aaugaguagggacacaagagaaa

SEQ ID NO: 265173 - RNA, 21 nt, Human
acaaaacauguagaagaugcc

SEQ ID NO: 265174 - RNA, 20 nt, Human
acagccagcucucccgcagc

SEQ ID NO: 265175 - RNA, 20 nt, Human
acaugucuguacauauaugu

SEQ ID NO: 265176 - RNA, 20 nt, Human
accauggcaccuucucccca

SEQ ID NO: 265177 - RNA, 19 nt, Human
acccagagcuaugcuucac

SEQ ID NO: 265178 - RNA, 20 nt, Human
accuagcuguuccugggagc

SEQ ID NO: 265179 - RNA, 20 nt, Human
accuugcuccagccuggcug

SEQ ID NO: 265180 - RNA, 18 nt, Human
agacaccuaagaccaugg

SEQ ID NO: 265181 - RNA, 25 nt, Human
agacagauacacacacacccagggc

SEQ ID NO: 265182 - RNA, 26 nt, Human
agacagauacacacacacccagggcc

SEQ ID NO: 265183 - RNA, 18 nt, Human
agagcugagcuggcucug

SEQ ID NO: 265184 - RNA, 18 nt, Human
agaugugugaauggcuca

SEQ ID NO: 265185 - RNA, 18 nt, Human
agcaacagccagcucucc

SEQ ID NO: 265186 - RNA, 20 nt, Human
agcaacagccagcucucccg

SEQ ID NO: 265187 - RNA, 19 nt, Human
aggaggcagggcagaagua

SEQ ID NO: 265188 - RNA, 27 nt, Human
aggcagacagauacacacacacccagg

SEQ ID NO: 265189 - RNA, 23 nt, Human
aggcauccugacagguggaaaug

SEQ ID NO: 265190 - RNA, 21 nt, Human
auaguguccuggcugauaauc

SEQ ID NO: 265191 - RNA, 20 nt, Human
auauaugugugugucuguau

SEQ ID NO: 265192 - RNA, 23 nt, Human
augaaaagcagcccaagcugcuc

SEQ ID NO: 265193 - RNA, 18 nt, Human
augugugugucuguaugu

SEQ ID NO: 265194 - RNA, 21 nt, Human
caagagaaaaggaauagauga

SEQ ID NO: 265195 - RNA, 18 nt, Human
caagauggggucuccuug

SEQ ID NO: 265196 - RNA, 19 nt, Human
cacugguuccaugcaggac

SEQ ID NO: 265197 - RNA, 24 nt, Human
cagacaccuaagaccauggcaccu

SEQ ID NO: 265198 - RNA, 22 nt, Human
cagcaguggccagcauguaguc

SEQ ID NO: 265199 - RNA, 21 nt, Human
cagccaagccuggucuccccc

SEQ ID NO: 265200 - RNA, 19 nt, Human
cagccuggcugaaagugga

SEQ ID NO: 265201 - RNA, 19 nt, Human
caggacaugaaaugugaug

SEQ ID NO: 265202 - RNA, 20 nt, Human
cagggacaugguuaggcucc

SEQ ID NO: 265203 - RNA, 20 nt, Human
caugcaggacaugaaaugug

SEQ ID NO: 265204 - RNA, 20 nt, Human
cauguaguccagcaacagcc

SEQ ID NO: 265205 - RNA, 23 nt, Human
ccacaagcuuuggggcaggaggc

SEQ ID NO: 265206 - RNA, 18 nt, Human
ccagcaacagccagcucu

SEQ ID NO: 265207 - RNA, 21 nt, Human
ccagcagugucguggucacag

SEQ ID NO: 265208 - RNA, 18 nt, Human
cccauuaggaaauaaggc

SEQ ID NO: 265209 - RNA, 26 nt, Human
ccuaagaccauggcaccuucucccca

SEQ ID NO: 265210 - RNA, 21 nt, Human
ccuccuacaacgaaaggagga

SEQ ID NO: 265211 - RNA, 24 nt, Human
ccuugggcugggccaaacugcuuc

SEQ ID NO: 265212 - RNA, 22 nt, Human
cgcagccaagccuggucucccc

SEQ ID NO: 265213 - RNA, 22 nt, Human
cucagagcugagcuggcucugc

SEQ ID NO: 265214 - RNA, 21 nt, Human
cucauccccagaacucauacu

SEQ ID NO: 265215 - RNA, 18 nt, Human
cuccagccuggcugaaag

SEQ ID NO: 265216 - RNA, 20 nt, Human
cuccagccuggcugaaagug

SEQ ID NO: 265217 - RNA, 24 nt, Human
cuccagccuggcugaaaguggagc

SEQ ID NO: 265218 - RNA, 19 nt, Human
cugcagguggcccagggag

SEQ ID NO: 265219 - RNA, 18 nt, Human
cuguccuggggcacagac

SEQ ID NO: 265220 - RNA, 18 nt, Human
cuuagucucagcuggucc

SEQ ID NO: 265221 - RNA, 21 nt, Human
cuucuuagucucagcuggucc

SEQ ID NO: 265222 - RNA, 22 nt, Human
gaaggagagagggagagaacag

SEQ ID NO: 265223 - RNA, 19 nt, Human
gaccauggcaccuucuccc

SEQ ID NO: 265224 - RNA, 18 nt, Human
gagagcaugaccacaggc

SEQ ID NO: 265225 - RNA, 19 nt, Human
gagagggagagaacagcug

SEQ ID NO: 265226 - RNA, 18 nt, Human
gagcugagcuggcucugc

SEQ ID NO: 265227 - RNA, 19 nt, Human
gccucagcgcggucggguc

SEQ ID NO: 265228 - RNA, 20 nt, Human
gcuacucucuguucucccca

SEQ ID NO: 265229 - RNA, 18 nt, Human
ggaaggagagagggagag

SEQ ID NO: 265230 - RNA, 21 nt, Human
ggaaggaggaaguggaauggg

SEQ ID NO: 265231 - RNA, 18 nt, Human
gggaaagcucucugcagg

SEQ ID NO: 265232 - RNA, 20 nt, Human
gggcacagacaccuaagacc

SEQ ID NO: 265233 - RNA, 22 nt, Human
guaaggcaaucaagguacaaag

SEQ ID NO: 265234 - RNA, 23 nt, Human
guacaugucuguacauauaugug

SEQ ID NO: 265235 - RNA, 19 nt, Human
guagagcacagauuccucc

SEQ ID NO: 265236 - RNA, 18 nt, Human
uaaaguauaaauugcucu

SEQ ID NO: 265237 - RNA, 23 nt, Human
uacagugacucauccccagaacu

SEQ ID NO: 265238 - RNA, 24 nt, Human
uacauauaugugugugucuguaug

SEQ ID NO: 265239 - RNA, 20 nt, Human
uaugugugugucuguaugug

SEQ ID NO: 265240 - RNA, 21 nt, Human
ucagagcugagcuggcucugc

SEQ ID NO: 265241 - RNA, 18 nt, Human
ucaguaggcaucacugug

SEQ ID NO: 265242 - RNA, 18 nt, Human
ucauuguugugugaguuu

SEQ ID NO: 265243 - RNA, 18 nt, Human
uccagaguuugguuucaa

SEQ ID NO: 265244 - RNA, 20 nt, Human
uccagcugcugcagacgugu

SEQ ID NO: 265245 - RNA, 18 nt, Human
ucccaccuagcuguuccu

SEQ ID NO: 265246 - RNA, 21 nt, Human
uccccaccugcccugugggga

SEQ ID NO: 265247 - RNA, 21 nt, Human
ucccccaggagacccagagcu

SEQ ID NO: 265248 - RNA, 23 nt, Human
ucccucagugaugggacuuuccu

SEQ ID NO: 265249 - RNA, 19 nt, Human
uccuggcugauaauccagc

SEQ ID NO: 265250 - RNA, 18 nt, Human
ucucaugccagguggagc

SEQ ID NO: 265251 - RNA, 24 nt, Human
ucucccgcagccaagccuggucuc

SEQ ID NO: 265252 - RNA, 21 nt, Human
ucuccuugggcugggccaaac

SEQ ID NO: 265253 - RNA, 18 nt, Human
ucugcagguggcccaggg

SEQ ID NO: 265254 - RNA, 22 nt, Human
ucugcaguucauuguuguguga

SEQ ID NO: 265255 - RNA, 23 nt, Human
ucugcaguucauuguugugugag

SEQ ID NO: 265256 - RNA, 20 nt, Human
ucuguacauauaugugugug

SEQ ID NO: 265257 - RNA, 18 nt, Human
ugaaagaugcagaugaga

SEQ ID NO: 265258 - RNA, 20 nt, Human
ugaccacaggcauccugaca

SEQ ID NO: 265259 - RNA, 24 nt, Human
ugaggaaacugagggugaagaugu

SEQ ID NO: 265260 - RNA, 18 nt, Human
ugccucaacaagaucaug

SEQ ID NO: 265261 - RNA, 19 nt, Human
ugcucaggcgagucucuug

SEQ ID NO: 265262 - RNA, 24 nt, Human
ugcucaggcgagucucuuggggac

SEQ ID NO: 265263 - RNA, 21 nt, Human
ugcuccagccuggcugaaagu

SEQ ID NO: 265264 - RNA, 23 nt, Human
uggaagaagcugccccagcagug

SEQ ID NO: 265265 - RNA, 20 nt, Human
uggaaugggcggugugcaga

SEQ ID NO: 265266 - RNA, 21 nt, Human
uggaaugggcggugugcagag

SEQ ID NO: 265267 - RNA, 19 nt, Human
uggcucagagcugagcugg

SEQ ID NO: 265268 - RNA, 19 nt, Human
ugggaaagcucucugcagg

SEQ ID NO: 265269 - RNA, 21 nt, Human
uggguccuuuccagaguuugg

SEQ ID NO: 265270 - RNA, 22 nt, Human
uguaugcuggugccugugugug

SEQ ID NO: 265271 - RNA, 18 nt, Human
ugucguggucacagcagu

SEQ ID NO: 265272 - RNA, 20 nt, Human
ugucguggucacagcagugg

SEQ ID NO: 265273 - RNA, 22 nt, Human
ugugcagaggcacugaagcauc

SEQ ID NO: 265274 - RNA, 22 nt, Human
uguggggaaggaggaaguggaa

SEQ ID NO: 265275 - RNA, 23 nt, Human
uguucuccccaucccacuccuca

SEQ ID NO: 265276 - RNA, 21 nt, Human
uuuuuuuuuuuuuuuccaagg

SEQ ID NO: 265277 - RNA, 18 nt, Human
aaaggagacggcgacaaa

SEQ ID NO: 265278 - RNA, 18 nt, Human
aaaggcaacgagcagaag

SEQ ID NO: 265279 - RNA, 20 nt, Human
aaaugcccaaaccccugagc

SEQ ID NO: 265280 - RNA, 19 nt, Human
aaccacuuggcacacagga

SEQ ID NO: 265281 - RNA, 23 nt, Human
aagaaugggagaaaggagaagga

SEQ ID NO: 265282 - RNA, 20 nt, Human
aagaggagaggguaggagag

SEQ ID NO: 265283 - RNA, 28 nt, Human
aagcacagcagggaggagaccgguaccc

SEQ ID NO: 265284 - RNA, 21 nt, Human
aagcguccagaaaucacacag

SEQ ID NO: 265285 - RNA, 24 nt, Human
aaggaagaggagaggguaggagag

SEQ ID NO: 265286 - RNA, 20 nt, Human
aaugggagaaaggagaagga

SEQ ID NO: 265287 - RNA, 25 nt, Human
accuggacccgagucacccagcagc

SEQ ID NO: 265288 - RNA, 20 nt, Human
acucugcucagaucccacca

SEQ ID NO: 265289 - RNA, 27 nt, Human
agaaaaccagggacccuggagccuggg

SEQ ID NO: 265290 - RNA, 18 nt, Human
agaaggaagaggagaggg

SEQ ID NO: 265291 - RNA, 24 nt, Human
agacggcgacaaaaaugcccaaac

SEQ ID NO: 265292 - RNA, 21 nt, Human
agaggaaacuuggaacuuagg

SEQ ID NO: 265293 - RNA, 23 nt, Human
agaggguaggagaguugggagag

SEQ ID NO: 265294 - RNA, 24 nt, Human
aggcagggaagaaugggagaaagg

SEQ ID NO: 265295 - RNA, 19 nt, Human
aggccucaguuuccucauc

SEQ ID NO: 265296 - RNA, 25 nt, Human
agggaaggagccagacgcuguccua

SEQ ID NO: 265297 - RNA, 22 nt, Human
agggaggagacagagcccaaag

SEQ ID NO: 265298 - RNA, 23 nt, Human
aggguaggagaguugggagagga

SEQ ID NO: 265299 - RNA, 26 nt, Human
agguggggaaaaagucagcuucaggu

SEQ ID NO: 265300 - RNA, 21 nt, Human
aguuguuagagguguuaagcg

SEQ ID NO: 265301 - RNA, 21 nt, Human
augcauuucagaggccccacc

SEQ ID NO: 265302 - RNA, 20 nt, Human
caaaggcaacgagcagaagc

SEQ ID NO: 265303 - RNA, 22 nt, Human
caagcauacuuuccugcuuugu

SEQ ID NO: 265304 - RNA, 19 nt, Human
cacagaaaaccagggaccc

SEQ ID NO: 265305 - RNA, 20 nt, Human
cacagaaaaccagggacccu

SEQ ID NO: 265306 - RNA, 18 nt, Human
cacagugucuggaugcau

SEQ ID NO: 265307 - RNA, 20 nt, Human
cagagcucagcaggugguga

SEQ ID NO: 265308 - RNA, 22 nt, Human
cagcagccaaagcaaagagaga

SEQ ID NO: 265309 - RNA, 21 nt, Human
cagcagggaggagacagagcc

SEQ ID NO: 265310 - RNA, 24 nt, Human
cagcaugaugucacagaaaaccag

SEQ ID NO: 265311 - RNA, 22 nt, Human
caguacaggcgccucacucucc

SEQ ID NO: 265312 - RNA, 20 nt, Human
caugaugucacagaaaacca

SEQ ID NO: 265313 - RNA, 21 nt, Human
cauugcacaaugucuccaggg

SEQ ID NO: 265314 - RNA, 24 nt, Human
cauugcacaaugucuccaggggcu

SEQ ID NO: 265315 - RNA, 21 nt, Human
ccacucacuuggccucuccca

SEQ ID NO: 265316 - RNA, 21 nt, Human
ccagcugagaaaaugaccaga

SEQ ID NO: 265317 - RNA, 23 nt, Human
ccccacucacuuggccucuccca

SEQ ID NO: 265318 - RNA, 20 nt, Human
cccgcccucuguccaaggug

SEQ ID NO: 265319 - RNA, 22 nt, Human
cggcgacaaaaaugcccaaacc

SEQ ID NO: 265320 - RNA, 23 nt, Human
cuaggccucaguuuccucaucug

SEQ ID NO: 265321 - RNA, 24 nt, Human
cucagcagguggugaggcaccugg

SEQ ID NO: 265322 - RNA, 21 nt, Human
cuccaggggcuaccaccaaug

SEQ ID NO: 265323 - RNA, 25 nt, Human
cuccaggggcuaccaccaaugcccc

SEQ ID NO: 265324 - RNA, 23 nt, Human
cucuucacugagcccaaaggccu

SEQ ID NO: 265325 - RNA, 21 nt, Human
cuuacauccggccugcuccuc

SEQ ID NO: 265326 - RNA, 21 nt, Human
gaagaggagaggguaggagag

SEQ ID NO: 265327 - RNA, 22 nt, Human
gagaggguaggagaguugggag

SEQ ID NO: 265328 - RNA, 20 nt, Human
gagcccaaaggagacggcga

SEQ ID NO: 265329 - RNA, 26 nt, Human
gagggagacccuggacgccuggcuuu

SEQ ID NO: 265330 - RNA, 23 nt, Human
gccaccucacuccagauaaacuc

SEQ ID NO: 265331 - RNA, 20 nt, Human
gccuuagauuucucccugga

SEQ ID NO: 265332 - RNA, 20 nt, Human
ggacccgagucacccagcag

SEQ ID NO: 265333 - RNA, 19 nt, Human
ggagaaggaagaggagagg

SEQ ID NO: 265334 - RNA, 22 nt, Human
ggaggagacagagcccaaagga

SEQ ID NO: 265335 - RNA, 20 nt, Human
ggcuaccaccaaugccccag

SEQ ID NO: 265336 - RNA, 21 nt, Human
gguaggagaguugggagagga

SEQ ID NO: 265337 - RNA, 19 nt, Human
uaagaaccuuacauucuga

SEQ ID NO: 265338 - RNA, 22 nt, Human
ucagaggccccaccagucuagg

SEQ ID NO: 265339 - RNA, 22 nt, Human
uccaagguggggaaaaagucag

SEQ ID NO: 265340 - RNA, 20 nt, Human
ucccaagcauacuuuccugc

SEQ ID NO: 265341 - RNA, 24 nt, Human
ucccagcaccuggcucaugccugc

SEQ ID NO: 265342 - RNA, 24 nt, Human
uccccagcagccaaagcaaagaga

SEQ ID NO: 265343 - RNA, 22 nt, Human
ucccuggaaaauggggagaaaa

SEQ ID NO: 265344 - RNA, 24 nt, Human
ucugcucagaucccaccaagaacc

SEQ ID NO: 265345 - RNA, 20 nt, Human
ugaaagcacuggguucagug

SEQ ID NO: 265346 - RNA, 26 nt, Human
ugaaagcacuggguucaguggggaug

SEQ ID NO: 265347 - RNA, 22 nt, Human
ugaacaggccaucccugaggcc

SEQ ID NO: 265348 - RNA, 24 nt, Human
ugacguggcuggauuuagggucug

SEQ ID NO: 265349 - RNA, 18 nt, Human
ugcguguccucccagccu

SEQ ID NO: 265350 - RNA, 19 nt, Human
uggcuuugggcugauuccc

SEQ ID NO: 265351 - RNA, 19 nt, Human
ugggagaaaggagaaggaa

SEQ ID NO: 265352 - RNA, 18 nt, Human
ugggagggccaugcaaca

SEQ ID NO: 265353 - RNA, 19 nt, Human
uggggauggcaucucccgc

SEQ ID NO: 265354 - RNA, 20 nt, Human
uguagggauguggguucgcg

SEQ ID NO: 265355 - RNA, 19 nt, Human
ugucuccaggggcuaccac

SEQ ID NO: 265356 - RNA, 24 nt, Human
uuaggcaacuuguugagcuucucu

SEQ ID NO: 265357 - RNA, 22 nt, Human
uucaggugagggagacccugga

SEQ ID NO: 265358 - RNA, 18 nt, Human
uuucagaggccccaccag

SEQ ID NO: 265359 - RNA, 24 nt, Human
aaagaaaaaaauaaagcucuaaac

SEQ ID NO: 265360 - RNA, 26 nt, Human
aaauauauacauuaggcaguauuaua

SEQ ID NO: 265361 - RNA, 23 nt, Human
aauacacuuucuuauaaaguggc

SEQ ID NO: 265362 - RNA, 28 nt, Human
agaggcaggcggugcaccucccaagggg

SEQ ID NO: 265363 - RNA, 19 nt, Human
aucaauggcccccuaucag

SEQ ID NO: 265364 - RNA, 22 nt, Human
caaagaauaauaaagaagaaga

SEQ ID NO: 265365 - RNA, 19 nt, Human
caccuggacggcagcgaga

SEQ ID NO: 265366 - RNA, 18 nt, Human
cuccuggaagaagucaua

SEQ ID NO: 265367 - RNA, 22 nt, Human
gagaaaagaaauaguuaaauau

SEQ ID NO: 265368 - RNA, 24 nt, Human
gagaaaagaaauaguuaaauauau

SEQ ID NO: 265369 - RNA, 19 nt, Human
gcaguauuauauuuuuauu

SEQ ID NO: 265370 - RNA, 23 nt, Human
guccuguguauuaggcccuccug

SEQ ID NO: 265371 - RNA, 25 nt, Human
guugucuugguuugggacuuuuuga

SEQ ID NO: 265372 - RNA, 22 nt, Human
uaagcaaagaauaauaaagaag

SEQ ID NO: 265373 - RNA, 21 nt, Human
uaauguuuuaaagaaaaaaau

SEQ ID NO: 265374 - RNA, 18 nt, Human
uacaagaaaagaucaaaa

SEQ ID NO: 265375 - RNA, 24 nt, Human
uaguuaaauauauuuaaaauucca

SEQ ID NO: 265376 - RNA, 18 nt, Human
uauauauauguauauaua

SEQ ID NO: 265377 - RNA, 23 nt, Human
uauuuauaauauauauauaugua

SEQ ID NO: 265378 - RNA, 21 nt, Human
uccaaaauuucuuauaucuug

SEQ ID NO: 265379 - RNA, 20 nt, Human
ucuaaacaccagagacauuu

SEQ ID NO: 265380 - RNA, 20 nt, Human
ugaagccuucuucguccugu

SEQ ID NO: 265381 - RNA, 23 nt, Human
ugagaggcaggcggugcaccugg

SEQ ID NO: 265382 - RNA, 18 nt, Human
ugucuugguuugggacuu

SEQ ID NO: 265383 - RNA, 19 nt, Human
uuugaagccuucuucgucc

SEQ ID NO: 265384 - RNA, 24 nt, Human
aaacaaaaacaaaaugaggcuaga

SEQ ID NO: 265385 - RNA, 29 nt, Human
aaacaaaaacaaaaugaggcuagaccuag

SEQ ID NO: 265386 - RNA, 23 nt, Human
aaacaaaaugaggcuagaccuaa

SEQ ID NO: 265387 - RNA, 23 nt, Human
aacaaaaacaaaaugaggcuaga

SEQ ID NO: 265388 - RNA, 22 nt, Human
aacaaaaugaggcuagaccuaa

SEQ ID NO: 265389 - RNA, 18 nt, Human
aauaaaagcccaaagccg

SEQ ID NO: 265390 - RNA, 20 nt, Human
acaaaaugaggcuagaccua

SEQ ID NO: 265391 - RNA, 22 nt, Human
auaaaaccaaccaaacaaaaac

SEQ ID NO: 265392 - RNA, 24 nt, Human
cagauuucgcaauuuucgcaacuu

SEQ ID NO: 265393 - RNA, 21 nt, Human
cagcaacuuuucggucugggu

SEQ ID NO: 265394 - RNA, 18 nt, Human
ccaaccaaacaaaaacaa

SEQ ID NO: 265395 - RNA, 21 nt, Human
uaccaggauccucgcacauuu

SEQ ID NO: 265396 - RNA, 22 nt, Human
uaccccuaacauuaaaugcaac

SEQ ID NO: 265397 - RNA, 19 nt, Human
uacguaaaaaaagaaagug

SEQ ID NO: 265398 - RNA, 26 nt, Human
uacguaaaaaaagaaagugcuaaacu

SEQ ID NO: 265399 - RNA, 18 nt, Human
uccaaaaaaauaaaagcc

SEQ ID NO: 265400 - RNA, 22 nt, Human
uccaaaaaaauaaaagcccaaa

SEQ ID NO: 265401 - RNA, 21 nt, Human
ucccuuucagcaacuuuucgg

SEQ ID NO: 265402 - RNA, 21 nt, Human
uccuuggccucugacucgauc

SEQ ID NO: 265403 - RNA, 21 nt, Human
uucuccuccuuggccucugac

SEQ ID NO: 265404 - RNA, 21 nt, Human
uugugaaugugucuccuuccc

SEQ ID NO: 265405 - RNA, 23 nt, Human
uuucccacuucagacaggaauug

SEQ ID NO: 265406 - RNA, 22 nt, Human
aaagucauaaguacaaaaugga

SEQ ID NO: 265407 - RNA, 19 nt, Human
caaaauggagugacaaaga

SEQ ID NO: 265408 - RNA, 21 nt, Human
gugacaaagauuuucacauuu

SEQ ID NO: 265409 - RNA, 28 nt, Human
uuugugcauuucuuuggucaccuuucag

SEQ ID NO: 265410 - RNA, 22 nt, Human
aacucuacguccuccagaccuu

SEQ ID NO: 265411 - RNA, 26 nt, Human
aagcacagucaggguguaaacagugc

SEQ ID NO: 265412 - RNA, 26 nt, Human
aagcacagucaggguguaaacagugc

SEQ ID NO: 265413 - RNA, 26 nt, Human
aagcacagucaggguguaaacagugc

SEQ ID NO: 265414 - RNA, 24 nt, Human
accuugaauacagggguaguaggg

SEQ ID NO: 265415 - RNA, 24 nt, Human
accuugaauacagggguaguaggg

SEQ ID NO: 265416 - RNA, 19 nt, Human
acuacguugcccaggcugg

SEQ ID NO: 265417 - RNA, 20 nt, Human
acuacguugcccaggcugga

SEQ ID NO: 265418 - RNA, 20 nt, Human
acuacguugcccaggcugga

SEQ ID NO: 265419 - RNA, 26 nt, Human
acuacguugcccaggcuggagggugg

SEQ ID NO: 265420 - RNA, 26 nt, Human
acuacguugcccaggcuggagggugg

SEQ ID NO: 265421 - RNA, 18 nt, Human
agacagggucucuguugc

SEQ ID NO: 265422 - RNA, 18 nt, Human
agacagggucucuguugc

SEQ ID NO: 265423 - RNA, 26 nt, Human
aggagagggggaaagaauucucaaag

SEQ ID NO: 265424 - RNA, 26 nt, Human
aggagagggggaaagaauucucaaag

SEQ ID NO: 265425 - RNA, 26 nt, Human
aggagagggggaaagaauucucaaag

SEQ ID NO: 265426 - RNA, 24 nt, Human
agggucucuguugcccaggcugga

SEQ ID NO: 265427 - RNA, 24 nt, Human
agggucucuguugcccaggcugga

SEQ ID NO: 265428 - RNA, 22 nt, Human
agguuuuacuacguugcccagg

SEQ ID NO: 265429 - RNA, 22 nt, Human
agguuuuacuacguugcccagg

SEQ ID NO: 265430 - RNA, 23 nt, Human
aguagcugggaccacaggugugu

SEQ ID NO: 265431 - RNA, 23 nt, Human
aguagcugggaccacaggugugu

SEQ ID NO: 265432 - RNA, 18 nt, Human
auagcucauugcagccuc

SEQ ID NO: 265433 - RNA, 18 nt, Human
auagcucauugcagccuc

SEQ ID NO: 265434 - RNA, 24 nt, Human
cacagguguguaccaccacgccca

SEQ ID NO: 265435 - RNA, 24 nt, Human
cacagguguguaccaccacgccca

SEQ ID NO: 265436 - RNA, 20 nt, Human
cagccucgaaguccugggcu

SEQ ID NO: 265437 - RNA, 19 nt, Human
cagggucucuguugcccag

SEQ ID NO: 265438 - RNA, 19 nt, Human
cagggucucuguugcccag

SEQ ID NO: 265439 - RNA, 24 nt, Human
cauuccugcuccccuccgugggag

SEQ ID NO: 265440 - RNA, 24 nt, Human
cauuccugcuccccuccgugggag

SEQ ID NO: 265441 - RNA, 24 nt, Human
cauuccugcuccccuccgugggag

SEQ ID NO: 265442 - RNA, 18 nt, Human
ccaggagagggggaaaga

SEQ ID NO: 265443 - RNA, 18 nt, Human
ccaggagagggggaaaga

SEQ ID NO: 265444 - RNA, 18 nt, Human
ccaggagagggggaaaga

SEQ ID NO: 265445 - RNA, 18 nt, Human
ccagggaccgguuaccgu

SEQ ID NO: 265446 - RNA, 18 nt, Human
ccagggaccgguuaccgu

SEQ ID NO: 265447 - RNA, 18 nt, Human
ccagggaccgguuaccgu

SEQ ID NO: 265448 - RNA, 22 nt, Human
ccagggaccgguuaccguggau

SEQ ID NO: 265449 - RNA, 22 nt, Human
ccagggaccgguuaccguggau

SEQ ID NO: 265450 - RNA, 22 nt, Human
ccagggaccgguuaccguggau

SEQ ID NO: 265451 - RNA, 20 nt, Human
cccauuucggugacuuucuc

SEQ ID NO: 265452 - RNA, 20 nt, Human
cccauuucggugacuuucuc

SEQ ID NO: 265453 - RNA, 20 nt, Human
cccauuucggugacuuucuc

SEQ ID NO: 265454 - RNA, 19 nt, Human
ccuggcucagccucccuag

SEQ ID NO: 265455 - RNA, 20 nt, Human
ccuggcucagccucccuagu

SEQ ID NO: 265456 - RNA, 19 nt, Human
cuacguugcccaggcugga

SEQ ID NO: 265457 - RNA, 24 nt, Human
cucagccucccuaguagcugggac

SEQ ID NO: 265458 - RNA, 24 nt, Human
cucagccucccuaguagcugggac

SEQ ID NO: 265459 - RNA, 21 nt, Human
cucauugcagccucgaagucc

SEQ ID NO: 265460 - RNA, 21 nt, Human
cucauugcagccucgaagucc

SEQ ID NO: 265461 - RNA, 24 nt, Human
cucccuaguagcugggaccacagg

SEQ ID NO: 265462 - RNA, 24 nt, Human
cucccuaguagcugggaccacagg

SEQ ID NO: 265463 - RNA, 19 nt, Human
cucuguugcccaggcugga

SEQ ID NO: 265464 - RNA, 19 nt, Human
cucuguugcccaggcugga

SEQ ID NO: 265465 - RNA, 22 nt, Human
cugggcuggagcguucuuccug

SEQ ID NO: 265466 - RNA, 22 nt, Human
cugggcuggagcguucuuccug

SEQ ID NO: 265467 - RNA, 19 nt, Human
gagaggaaacuggauggcg

SEQ ID NO: 265468 - RNA, 20 nt, Human
gaggggugucugugauauuu

SEQ ID NO: 265469 - RNA, 20 nt, Human
gaggggugucugugauauuu

SEQ ID NO: 265470 - RNA, 24 nt, Human
gcacaauccauugauagaacugga

SEQ ID NO: 265471 - RNA, 24 nt, Human
gcacaauccauugauagaacugga

SEQ ID NO: 265472 - RNA, 20 nt, Human
gcagccucgaaguccugggc

SEQ ID NO: 265473 - RNA, 20 nt, Human
gcagccucgaaguccugggc

SEQ ID NO: 265474 - RNA, 19 nt, Human
gcccaggcuggagugcaau

SEQ ID NO: 265475 - RNA, 19 nt, Human
gcccaggcuggagugcaau

SEQ ID NO: 265476 - RNA, 20 nt, Human
ggagaggaaacuggauggcg

SEQ ID NO: 265477 - RNA, 28 nt, Human
gggacuaguggagaggaaaccgguaccc

SEQ ID NO: 265478 - RNA, 20 nt, Human
ggguggugguggugguggug

SEQ ID NO: 265479 - RNA, 20 nt, Human
ggguggugguggugguggug

SEQ ID NO: 265480 - RNA, 24 nt, Human
ggucucuguugcccaggcuggagu

SEQ ID NO: 265481 - RNA, 25 nt, Human
gguuuuuuuuguuuguuuguuuugg

SEQ ID NO: 265482 - RNA, 21 nt, Human
gucucuguugcccaggcugga

SEQ ID NO: 265483 - RNA, 21 nt, Human
gucucuguugcccaggcugga

SEQ ID NO: 265484 - RNA, 24 nt, Human
gucucuguugcccaggcuggagug

SEQ ID NO: 265485 - RNA, 24 nt, Human
gucucuguugcccaggcuggagug

SEQ ID NO: 265486 - RNA, 23 nt, Human
guugagacagggucucuguugcc

SEQ ID NO: 265487 - RNA, 20 nt, Human
uaaacagaauugccagggac

SEQ ID NO: 265488 - RNA, 20 nt, Human
uaaacagaauugccagggac

SEQ ID NO: 265489 - RNA, 20 nt, Human
uaaacagaauugccagggac

SEQ ID NO: 265490 - RNA, 18 nt, Human
uacagggguaguaggggu

SEQ ID NO: 265491 - RNA, 18 nt, Human
uacagggguaguaggggu

SEQ ID NO: 265492 - RNA, 18 nt, Human
uacguugcccaggcugga

SEQ ID NO: 265493 - RNA, 18 nt, Human
uacguugcccaggcugga

SEQ ID NO: 265494 - RNA, 24 nt, Human
uacguugcccaggcuggagggugg

SEQ ID NO: 265495 - RNA, 24 nt, Human
uacguugcccaggcuggagggugg

SEQ ID NO: 265496 - RNA, 22 nt, Human
uacuacguugcccaggcuggag

SEQ ID NO: 265497 - RNA, 22 nt, Human
uacuacguugcccaggcuggag

SEQ ID NO: 265498 - RNA, 24 nt, Human
uagcucauugcagccucgaagucc

SEQ ID NO: 265499 - RNA, 24 nt, Human
uagcucauugcagccucgaagucc

SEQ ID NO: 265500 - RNA, 25 nt, Human
uaguagcugggaccacaggugugua

SEQ ID NO: 265501 - RNA, 25 nt, Human
uaguagcugggaccacaggugugua

SEQ ID NO: 265502 - RNA, 19 nt, Human
uaguagggguggugguggu

SEQ ID NO: 265503 - RNA, 19 nt, Human
uaguagggguggugguggu

SEQ ID NO: 265504 - RNA, 18 nt, Human
uaguggagaggaaacugg

SEQ ID NO: 265505 - RNA, 24 nt, Human
ucauugcagccucgaaguccuggg

SEQ ID NO: 265506 - RNA, 24 nt, Human
ucauugcagccucgaaguccuggg

SEQ ID NO: 265507 - RNA, 22 nt, Human
ucccuaguagcugggaccacag

SEQ ID NO: 265508 - RNA, 22 nt, Human
ucccuaguagcugggaccacag

SEQ ID NO: 265509 - RNA, 18 nt, Human
ucucuguugcccaggcug

SEQ ID NO: 265510 - RNA, 22 nt, Human
ucucuguugcccaggcuggagu

SEQ ID NO: 265511 - RNA, 23 nt, Human
ucucuguugcccaggcuggagug

SEQ ID NO: 265512 - RNA, 23 nt, Human
ucucuguugcccaggcuggagug

SEQ ID NO: 265513 - RNA, 27 nt, Human
ucucuguugcccaggcuggagugcaau

SEQ ID NO: 265514 - RNA, 27 nt, Human
ucucuguugcccaggcuggagugcaau

SEQ ID NO: 265515 - RNA, 18 nt, Human
ucuguugcccaggcugga

SEQ ID NO: 265516 - RNA, 24 nt, Human
ucuguugcccaggcuggagugcaa

SEQ ID NO: 265517 - RNA, 24 nt, Human
ucuguugcccaggcuggagugcaa

SEQ ID NO: 265518 - RNA, 20 nt, Human
ucuuacaucauacaaacuuc

SEQ ID NO: 265519 - RNA, 20 nt, Human
ucuuacaucauacaaacuuc

SEQ ID NO: 265520 - RNA, 21 nt, Human
ugagaaguuggaaagguuugc

SEQ ID NO: 265521 - RNA, 21 nt, Human
ugagaaguuggaaagguuugc

SEQ ID NO: 265522 - RNA, 21 nt, Human
ugagaaguuggaaagguuugc

SEQ ID NO: 265523 - RNA, 24 nt, Human
ugagguuuuacuacguugcccagg

SEQ ID NO: 265524 - RNA, 24 nt, Human
ugagguuuuacuacguugcccagg

SEQ ID NO: 265525 - RNA, 18 nt, Human
ugcccaggcuggagggug

SEQ ID NO: 265526 - RNA, 18 nt, Human
ugcccaggcuggagggug

SEQ ID NO: 265527 - RNA, 21 nt, Human
ugcccaggcuggaggguggug

SEQ ID NO: 265528 - RNA, 21 nt, Human
ugcccaggcuggaggguggug

SEQ ID NO: 265529 - RNA, 18 nt, Human
ugcccaggcuggagugca

SEQ ID NO: 265530 - RNA, 18 nt, Human
ugcccaggcuggagugca

SEQ ID NO: 265531 - RNA, 21 nt, Human
ugcccaggcuggagugcaaug

SEQ ID NO: 265532 - RNA, 21 nt, Human
ugcccaggcuggagugcaaug

SEQ ID NO: 265533 - RNA, 22 nt, Human
ugcccaggcuggagugcaauga

SEQ ID NO: 265534 - RNA, 22 nt, Human
ugcccaggcuggagugcaauga

SEQ ID NO: 265535 - RNA, 24 nt, Human
ugcccaggcuggagugcaaugaug

SEQ ID NO: 265536 - RNA, 24 nt, Human
ugcccaggcuggagugcaaugaug

SEQ ID NO: 265537 - RNA, 18 nt, Human
uggaaagguuugcagguu

SEQ ID NO: 265538 - RNA, 20 nt, Human
uggcucagccucccuaguag

SEQ ID NO: 265539 - RNA, 20 nt, Human
uggcucagccucccuaguag

SEQ ID NO: 265540 - RNA, 24 nt, Human
uggcucagccucccuaguagcugg

SEQ ID NO: 265541 - RNA, 24 nt, Human
uggcucagccucccuaguagcugg

SEQ ID NO: 265542 - RNA, 21 nt, Human
ugggaccacagguguguacca

SEQ ID NO: 265543 - RNA, 21 nt, Human
ugggaccacagguguguacca

SEQ ID NO: 265544 - RNA, 24 nt, Human
ugggaccacagguguguaccacca

SEQ ID NO: 265545 - RNA, 24 nt, Human
ugggaccacagguguguaccacca

SEQ ID NO: 265546 - RNA, 20 nt, Human
uggugguggugguggugguc

SEQ ID NO: 265547 - RNA, 20 nt, Human
uggugguggugguggugguc

SEQ ID NO: 265548 - RNA, 20 nt, Human
uguaaacagugcagcauucc

SEQ ID NO: 265549 - RNA, 20 nt, Human
uguaaacagugcagcauucc

SEQ ID NO: 265550 - RNA, 20 nt, Human
uguaaacagugcagcauucc

SEQ ID NO: 265551 - RNA, 21 nt, Human
uguaaacagugcagcauuccu

SEQ ID NO: 265552 - RNA, 21 nt, Human
uguaaacagugcagcauuccu

SEQ ID NO: 265553 - RNA, 21 nt, Human
uguaaacagugcagcauuccu

SEQ ID NO: 265554 - RNA, 19 nt, Human
uguguaccaccacgcccag

SEQ ID NO: 265555 - RNA, 19 nt, Human
uguguaccaccacgcccag

SEQ ID NO: 265556 - RNA, 21 nt, Human
uguguaccaccacgcccagcu

SEQ ID NO: 265557 - RNA, 19 nt, Human
ugugucuguguuuccuguu

SEQ ID NO: 265558 - RNA, 19 nt, Human
ugugucuguguuuccuguu

SEQ ID NO: 265559 - RNA, 20 nt, Human
uguugcccaggcuggagugc

SEQ ID NO: 265560 - RNA, 20 nt, Human
uguugcccaggcuggagugc

SEQ ID NO: 265561 - RNA, 22 nt, Human
uuacuacguugcccaggcugga

SEQ ID NO: 265562 - RNA, 22 nt, Human
uuacuacguugcccaggcugga

SEQ ID NO: 265563 - RNA, 21 nt, Human
uuccauugaagucugcgucuc

SEQ ID NO: 265564 - RNA, 23 nt, Human
uucuuguauagaugagguuuuac

SEQ ID NO: 265565 - RNA, 23 nt, Human
uucuuguauagaugagguuuuac

SEQ ID NO: 265566 - RNA, 18 nt, Human
uugagacagggucucugu

SEQ ID NO: 265567 - RNA, 20 nt, Human
uugagacagggucucuguug

SEQ ID NO: 265568 - RNA, 22 nt, Human
uugagacagggucucuguugcc

SEQ ID NO: 265569 - RNA, 23 nt, Human
uugcagccucgaaguccugggcu

SEQ ID NO: 265570 - RNA, 18 nt, Human
uugcccaggcuggagugc

SEQ ID NO: 265571 - RNA, 22 nt, Human
uuguuuguuuguuuugguuuuu

SEQ ID NO: 265572 - RNA, 22 nt, Human
uuguuuguuuguuuugguuuuu

SEQ ID NO: 265573 - RNA, 20 nt, Human
uuuaagcacagucagggugu

SEQ ID NO: 265574 - RNA, 20 nt, Human
uuuaagcacagucagggugu

SEQ ID NO: 265575 - RNA, 20 nt, Human
uuuaagcacagucagggugu

SEQ ID NO: 265576 - RNA, 23 nt, Human
uuuuacuacguugcccaggcugg

SEQ ID NO: 265577 - RNA, 23 nt, Human
uuuuacuacguugcccaggcugg

SEQ ID NO: 265578 - RNA, 24 nt, Human
uuuuacuacguugcccaggcugga

SEQ ID NO: 265579 - RNA, 24 nt, Human
uuuuacuacguugcccaggcugga

SEQ ID NO: 265580 - RNA, 21 nt, Human
uuuuuuuguuuguuuguuuug

SEQ ID NO: 265581 - RNA, 20 nt, Human
acugcagagggcuucuuggu

SEQ ID NO: 265582 - RNA, 19 nt, Human
agagggcuucuugguuccc

SEQ ID NO: 265583 - RNA, 20 nt, Human
auuucucacacauuuucccu

SEQ ID NO: 265584 - RNA, 19 nt, Human
caggaauaaagcgucuucc

SEQ ID NO: 265585 - RNA, 26 nt, Human
cccuccacucucucggagguguccca

SEQ ID NO: 265586 - RNA, 18 nt, Human
cugcagagggcuucuugg

SEQ ID NO: 265587 - RNA, 22 nt, Human
ugacagucaguguccuucagga

SEQ ID NO: 265588 - RNA, 20 nt, Human
uugguucccaagugacaguc

SEQ ID NO: 265589 - RNA, 20 nt, Human
cagagggaaaugaccaaaga

SEQ ID NO: 265590 - RNA, 21 nt, Human
ucuucagucauuccauggcau

SEQ ID NO: 265591 - RNA, 21 nt, Human
aagcaaaguuuauugcaugug

SEQ ID NO: 265592 - RNA, 18 nt, Human
acagcaacagccaggaga

SEQ ID NO: 265593 - RNA, 23 nt, Human
agaagacagcaacagccaggaga

SEQ ID NO: 265594 - RNA, 24 nt, Human
auuaaguaucaauggucaggaauc

SEQ ID NO: 265595 - RNA, 18 nt, Human
caagaaaauauacauuuu

SEQ ID NO: 265596 - RNA, 22 nt, Human
cagaagacagcaacagccagga

SEQ ID NO: 265597 - RNA, 19 nt, Human
cagcugagagucccaccug

SEQ ID NO: 265598 - RNA, 18 nt, Human
cuccugcuccagaagggc

SEQ ID NO: 265599 - RNA, 21 nt, Human
ggagaucccagaccuccgccc

SEQ ID NO: 265600 - RNA, 23 nt, Human
uaucuucuguccugcuccugcuc

SEQ ID NO: 265601 - RNA, 26 nt, Human
uccugcuccugcuccagaagggcugg

SEQ ID NO: 265602 - RNA, 24 nt, Human
ucuguccugcuccugcuccagaag

SEQ ID NO: 265603 - RNA, 19 nt, Human
ugagagucccaccugcagg

SEQ ID NO: 265604 - RNA, 19 nt, Human
ugcaugugaaaaagaguca

SEQ ID NO: 265605 - RNA, 18 nt, Human
uggacauuaaguaucaau

SEQ ID NO: 265606 - RNA, 18 nt, Human
uuugcauaucuucugucc

SEQ ID NO: 265607 - RNA, 19 nt, Human
acaggacagugacaaagaa

SEQ ID NO: 265608 - RNA, 27 nt, Human
agaagguggcaggcucaaagcagacaa

SEQ ID NO: 265609 - RNA, 22 nt, Human
cagacaacuacuucaagaauuu

SEQ ID NO: 265610 - RNA, 25 nt, Human
cucaaagcagacaacuacuucaaga

SEQ ID NO: 265611 - RNA, 20 nt, Human
cuuuggucacauuuucuuuc

SEQ ID NO: 265612 - RNA, 24 nt, Human
ucaaagcagacaacuacuucaaga

SEQ ID NO: 265613 - RNA, 19 nt, Human
ugcauuucuuuggucacau

SEQ ID NO: 265614 - RNA, 19 nt, Human
agaugggcucaggcagagu

SEQ ID NO: 265615 - RNA, 26 nt, Human
aggacagaugggcucaggcagaguuu

SEQ ID NO: 265616 - RNA, 19 nt, Human
gacagaugggcucaggcag

SEQ ID NO: 265617 - RNA, 19 nt, Human
uggcaggaaggacagaugg

SEQ ID NO: 265618 - RNA, 23 nt, Human
uggcaggaaggacagaugggcuc

SEQ ID NO: 265619 - RNA, 21 nt, Human
aggggaccugagagcagcagg

SEQ ID NO: 265620 - RNA, 19 nt, Human
cacaggcuccagcaugggg

SEQ ID NO: 265621 - RNA, 19 nt, Human
ccagggcugagcagaucaa

SEQ ID NO: 265622 - RNA, 23 nt, Human
cccaaggagcuguuacacaggcu

SEQ ID NO: 265623 - RNA, 27 nt, Human
gagagcagcagggaaagaccgguaccc

SEQ ID NO: 265624 - RNA, 22 nt, Human
gggaccugagagcagcagggaa

SEQ ID NO: 265625 - RNA, 21 nt, Human
ggggccaaggccugcagggga

SEQ ID NO: 265626 - RNA, 20 nt, Human
uacacaggcuccagcauggg

SEQ ID NO: 265627 - RNA, 28 nt, Human
ucuacagaugaggaaaggggccaaggcc

SEQ ID NO: 265628 - RNA, 20 nt, Human
ugagagcagcagggaaagac

SEQ ID NO: 265629 - RNA, 21 nt, Human
ugagagcagcagggaaagaca

SEQ ID NO: 265630 - RNA, 18 nt, Human
agcaagugaccaaaaaua

SEQ ID NO: 265631 - RNA, 24 nt, Human
ccaaaaauagcacauuuugugccu

SEQ ID NO: 265632 - RNA, 18 nt, Human
gcaagugaccaaaaauag

SEQ ID NO: 265633 - RNA, 21 nt, Human
uaaagcaagugaccaaaaaua

SEQ ID NO: 265634 - RNA, 24 nt, Human
aaugaugguaaacagaucuggaga

SEQ ID NO: 265635 - RNA, 20 nt, Human
aauucagagaaaaacugaag

SEQ ID NO: 265636 - RNA, 18 nt, Human
agagaaaaacugaagaug

SEQ ID NO: 265637 - RNA, 24 nt, Human
agauugcuuuguuuuccugaauga

SEQ ID NO: 265638 - RNA, 21 nt, Human
agucuugaaccguccagauug

SEQ ID NO: 265639 - RNA, 19 nt, Human
ccagauugcuuuguuuucc

SEQ ID NO: 265640 - RNA, 19 nt, Human
gaagaggauggugguuggg

SEQ ID NO: 265641 - RNA, 24 nt, Human
gaauucaauucagagaaaaacuga

SEQ ID NO: 265642 - RNA, 23 nt, Human
ggaguuccuccaaaagaaccuuu

SEQ ID NO: 265643 - RNA, 22 nt, Human
gucuugaagauggacccagagu

SEQ ID NO: 265644 - RNA, 21 nt, Human
gugguuggguugauccacagc

SEQ ID NO: 265645 - RNA, 24 nt, Human
uaaguuuccagccagucuuccuaa

SEQ ID NO: 265646 - RNA, 18 nt, Human
uauucuucucaucuagag

SEQ ID NO: 265647 - RNA, 20 nt, Human
uauuuuauucuucucaucua

SEQ ID NO: 265648 - RNA, 22 nt, Human
ucaauucagagaaaaacugaag

SEQ ID NO: 265649 - RNA, 21 nt, Human
ucuggagaguuugucaugggu

SEQ ID NO: 265650 - RNA, 18 nt, Human
ugaagauggacccagagu

SEQ ID NO: 265651 - RNA, 21 nt, Human
ugcuuguucuugagagcucca

SEQ ID NO: 265652 - RNA, 19 nt, Human
uggaagaggauggugguug

SEQ ID NO: 265653 - RNA, 25 nt, Human
uggaagaggauggugguuggguuga

SEQ ID NO: 265654 - RNA, 20 nt, Human
uguauaaaaauucagggagu

SEQ ID NO: 265655 - RNA, 24 nt, Human
uucaauucagagaaaaacugaaga

SEQ ID NO: 265656 - RNA, 21 nt, Human
uuuccugaaugaugguaaaca

SEQ ID NO: 265657 - RNA, 18 nt, Human
uuuuuuuuaaaagggugg

SEQ ID NO: 265658 - RNA, 25 nt, Human
aaauaaccccaugaccgcuuuuggc

SEQ ID NO: 265659 - RNA, 21 nt, Human
aacaauaaauacuuccucccc

SEQ ID NO: 265660 - RNA, 19 nt, Human
aagaauuccacacuccgcc

SEQ ID NO: 265661 - RNA, 18 nt, Human
aaggacccagcacugccu

SEQ ID NO: 265662 - RNA, 22 nt, Human
aaggcccccccaccccaugccg

SEQ ID NO: 265663 - RNA, 22 nt, Human
accaccuaaggcccccccaccc

SEQ ID NO: 265664 - RNA, 18 nt, Human
agaauuccacacuccgcc

SEQ ID NO: 265665 - RNA, 20 nt, Human
agcccagggcgcagcagcga

SEQ ID NO: 265666 - RNA, 20 nt, Human
aggcccccccaccccaugcc

SEQ ID NO: 265667 - RNA, 22 nt, Human
caaagacgagcccagggcgcag

SEQ ID NO: 265668 - RNA, 22 nt, Human
caccaccuaaggcccccccacc

SEQ ID NO: 265669 - RNA, 25 nt, Human
caccaccuaaggcccccccacccca

SEQ ID NO: 265670 - RNA, 24 nt, Human
caccuaaggcccccccaccccaug

SEQ ID NO: 265671 - RNA, 24 nt, Human
cacuccgcccagcucucugcagcc

SEQ ID NO: 265672 - RNA, 23 nt, Human
cacucugcaaagacgagcccagg

SEQ ID NO: 265673 - RNA, 20 nt, Human
caugccguucuucugaagua

SEQ ID NO: 265674 - RNA, 27 nt, Human
ccaccuaaggcccccccaccccaugcc

SEQ ID NO: 265675 - RNA, 25 nt, Human
ccccaccccaugccguucuucugaa

SEQ ID NO: 265676 - RNA, 19 nt, Human
ccuaaggcccccccacccc

SEQ ID NO: 265677 - RNA, 23 nt, Human
ccucuggauggauuuccaacugu

SEQ ID NO: 265678 - RNA, 19 nt, Human
cgaaguacccauagccacc

SEQ ID NO: 265679 - RNA, 21 nt, Human
cgugaccaaauacacgaccuc

SEQ ID NO: 265680 - RNA, 21 nt, Human
cucucugcagcccaggaacaa

SEQ ID NO: 265681 - RNA, 19 nt, Human
gagggcagggaccacucug

SEQ ID NO: 265682 - RNA, 22 nt, Human
ggcaccaccuaaggccccccca

SEQ ID NO: 265683 - RNA, 21 nt, Human
ggccacgaaguacccauagcc

SEQ ID NO: 265684 - RNA, 19 nt, Human
uaaaaauaaccccaugacc

SEQ ID NO: 265685 - RNA, 21 nt, Human
uauuggaacauggccucugga

SEQ ID NO: 265686 - RNA, 24 nt, Human
ugaggcgggcaccaccuaaggccc

SEQ ID NO: 265687 - RNA, 22 nt, Human
ugagggcagggaccacucugca

SEQ ID NO: 265688 - RNA, 21 nt, Human
ugcaaagacgagcccagggcc

SEQ ID NO: 265689 - RNA, 21 nt, Human
uggaaaggacccagcacugcc

SEQ ID NO: 265690 - RNA, 24 nt, Human
uggaaaggacccagcacugccucc

SEQ ID NO: 265691 - RNA, 26 nt, Human
uggaaaggacccagcacugccucccg

SEQ ID NO: 265692 - RNA, 25 nt, Human
uggagguggauaaauggggcagcca

SEQ ID NO: 265693 - RNA, 18 nt, Human
aaccacguggagaggucc

SEQ ID NO: 265694 - RNA, 19 nt, Human
caggagucuugguaaggcu

SEQ ID NO: 265695 - RNA, 20 nt, Human
ccccuccuucccacgacucc

SEQ ID NO: 265696 - RNA, 19 nt, Human
cccugggcuuccugggcac

SEQ ID NO: 265697 - RNA, 22 nt, Human
cuccuucccacgacuccaggcc

SEQ ID NO: 265698 - RNA, 23 nt, Human
gcacagccugagaggggccagag

SEQ ID NO: 265699 - RNA, 24 nt, Human
uaagcacagccugagaggggccag

SEQ ID NO: 265700 - RNA, 18 nt, Human
uacagagagggaugugga

SEQ ID NO: 265701 - RNA, 20 nt, Human
ucacacaugggagaugagac

SEQ ID NO: 265702 - RNA, 21 nt, Human
uccaaggguuuuugcaggagu

SEQ ID NO: 265703 - RNA, 21 nt, Human
ugagaggggccagagacggca

SEQ ID NO: 265704 - RNA, 23 nt, Human
uucccugggcuuccugggcacga

SEQ ID NO: 265705 - RNA, 26 nt, Human
aagccaagggccaggcaccuggaaga

SEQ ID NO: 265706 - RNA, 23 nt, Human
aaucccagagcccagccuggccg

SEQ ID NO: 265707 - RNA, 20 nt, Human
cagaaucccagagcccagcc

SEQ ID NO: 265708 - RNA, 20 nt, Human
caucucagcucacccagccg

SEQ ID NO: 265709 - RNA, 18 nt, Human
ccagccuggccguguuag

SEQ ID NO: 265710 - RNA, 19 nt, Human
cccagagcccagccuggcc

SEQ ID NO: 265711 - RNA, 20 nt, Human
ccuggccguguuagagcugu

SEQ ID NO: 265712 - RNA, 21 nt, Human
cgaggacuccaucucagcuca

SEQ ID NO: 265713 - RNA, 18 nt, Human
cuaagaagaaaccgagag

SEQ ID NO: 265714 - RNA, 18 nt, Human
cucagcucacccagccgg

SEQ ID NO: 265715 - RNA, 22 nt, Human
gagugaucuaagaagaaaccga

SEQ ID NO: 265716 - RNA, 25 nt, Human
gcuaaagccaagggccaggcaccug

SEQ ID NO: 265717 - RNA, 25 nt, Human
uaagaagaaaccgagagacguggcg

SEQ ID NO: 265718 - RNA, 22 nt, Human
uauggcuaaagccaagggccag

SEQ ID NO: 265719 - RNA, 20 nt, Human
ucccagagcccagccuggcc

SEQ ID NO: 265720 - RNA, 24 nt, Human
uggcagaggagugaucuaagaaga

SEQ ID NO: 265721 - RNA, 24 nt, Human
uggggcagugguguggugauaagu

SEQ ID NO: 265722 - RNA, 21 nt, Human
ugguauggcuaaagccaaggg

SEQ ID NO: 265723 - RNA, 22 nt, Human
cccagggccccaggucuugccc

SEQ ID NO: 265724 - RNA, 21 nt, Human
cugcuucugccugcuuugaug

SEQ ID NO: 265725 - RNA, 21 nt, Human
cuugcccaucuuaagcuccug

SEQ ID NO: 265726 - RNA, 23 nt, Human
gcccagggccccaggucuugccc

SEQ ID NO: 265727 - RNA, 24 nt, Human
uaagcuccugcuuggucccccagg

SEQ ID NO: 265728 - RNA, 18 nt, Human
ucagacuccggcugccac

SEQ ID NO: 265729 - RNA, 21 nt, Human
ucuuaagcuccugcuuggucc

SEQ ID NO: 265730 - RNA, 21 nt, Human
ugcccaucuuaagcuccugcu

SEQ ID NO: 265731 - RNA, 23 nt, Human
aaaaacccuuuauuauaauaaac

SEQ ID NO: 265732 - RNA, 18 nt, Human
aaaaagcagauaaaaaua

SEQ ID NO: 265733 - RNA, 23 nt, Human
aaaaagcagauaaaaauagaaug

SEQ ID NO: 265734 - RNA, 21 nt, Human
aaaaagcuuugaaugcgcuaa

SEQ ID NO: 265735 - RNA, 20 nt, Human
aaacaaggucaacaugagac

SEQ ID NO: 265736 - RNA, 24 nt, Human
aaacaguggaaaagaaaaaaaaag

SEQ ID NO: 265737 - RNA, 23 nt, Human
aaagcaacugcaggcugagacag

SEQ ID NO: 265738 - RNA, 22 nt, Human
aaagguugggggcaaggcauga

SEQ ID NO: 265739 - RNA, 21 nt, Human
aacaaggucaacaugagacaa

SEQ ID NO: 265740 - RNA, 21 nt, Human
aacacacauauacgccacaca

SEQ ID NO: 265741 - RNA, 19 nt, Human
aacagcacaaauaagaauc

SEQ ID NO: 265742 - RNA, 18 nt, Human
aaccuugcucugcucagc

SEQ ID NO: 265743 - RNA, 20 nt, Human
aaccuugcucugcucagcac

SEQ ID NO: 265744 - RNA, 19 nt, Human
aagcaaaaggaaaaauacu

SEQ ID NO: 265745 - RNA, 21 nt, Human
aagcaaaaggaaaaauacugg

SEQ ID NO: 265746 - RNA, 29 nt, Human
aagcaaaaggaaaaauacugggggacccc

SEQ ID NO: 265747 - RNA, 23 nt, Human
aaguaauuuuaaauugguucuua

SEQ ID NO: 265748 - RNA, 22 nt, Human
aauggaagauaacauaagacua

SEQ ID NO: 265749 - RNA, 23 nt, Human
aauggaauggggccuggaacuga

SEQ ID NO: 265750 - RNA, 23 nt, Human
acaaacaguggaaaagaaaaaaa

SEQ ID NO: 265751 - RNA, 21 nt, Human
acaaagguuauauucugaaca

SEQ ID NO: 265752 - RNA, 22 nt, Human
acacacagaggaaauguauuag

SEQ ID NO: 265753 - RNA, 28 nt, Human
acacaugcacacacacaacauacacgca

SEQ ID NO: 265754 - RNA, 18 nt, Human
acagcauugcccguuuuc

SEQ ID NO: 265755 - RNA, 18 nt, Human
acaggaaaggcguccuga

SEQ ID NO: 265756 - RNA, 18 nt, Human
acaggaaaggcguccuga

SEQ ID NO: 265757 - RNA, 24 nt, Human
acaguggaaaagaaaaaaaaagua

SEQ ID NO: 265758 - RNA, 22 nt, Human
agagaagcagcuguucccugga

SEQ ID NO: 265759 - RNA, 22 nt, Human
agagaauggaauggggccugga

SEQ ID NO: 265760 - RNA, 21 nt, Human
agcgaacccaaccuugcucug

SEQ ID NO: 265761 - RNA, 18 nt, Human
aggggcugcagggaguag

SEQ ID NO: 265762 - RNA, 18 nt, Human
aggguuggacucaggcgu

SEQ ID NO: 265763 - RNA, 20 nt, Human
aggucaaguucuuuggagag

SEQ ID NO: 265764 - RNA, 26 nt, Human
augcacacacacaacauacacgcaca

SEQ ID NO: 265765 - RNA, 24 nt, Human
augcacacacacaacauacacggg

SEQ ID NO: 265766 - RNA, 22 nt, Human
auggaauggggccuggaacuga

SEQ ID NO: 265767 - RNA, 23 nt, Human
caaacaguggaaaagaaaaaaaa

SEQ ID NO: 265768 - RNA, 21 nt, Human
caacaugagacaaaaacccuu

SEQ ID NO: 265769 - RNA, 25 nt, Human
caagagaacauuaacacaauuccaa

SEQ ID NO: 265770 - RNA, 26 nt, Human
caaggaccuccugagagccgagguuc

SEQ ID NO: 265771 - RNA, 24 nt, Human
caaggauuuuuuuuuucccauggg

SEQ ID NO: 265772 - RNA, 21 nt, Human
cacaacauacacgcacacaaa

SEQ ID NO: 265773 - RNA, 30 nt, Human
cacacaacauacacgcacacaaagguuaua

SEQ ID NO: 265774 - RNA, 24 nt, Human
cacacacacagaggaaauguauua

SEQ ID NO: 265775 - RNA, 26 nt, Human
cacauuuaagaagaaaaauauggaac

SEQ ID NO: 265776 - RNA, 18 nt, Human
cagcagaggcagccgggc

SEQ ID NO: 265777 - RNA, 19 nt, Human
cagcagaggcagccgggcu

SEQ ID NO: 265778 - RNA, 21 nt, Human
cagcagaggcagccgggcucu

SEQ ID NO: 265779 - RNA, 18 nt, Human
caugaaaaauauuguaac

SEQ ID NO: 265780 - RNA, 21 nt, Human
cccaaccuugcucugcucagc

SEQ ID NO: 265781 - RNA, 19 nt, Human
cccagauaaauauuugguu

SEQ ID NO: 265782 - RNA, 21 nt, Human
ccuggaacaaggaccuccuga

SEQ ID NO: 265783 - RNA, 21 nt, Human
cgccacacaugcacacacaca

SEQ ID NO: 265784 - RNA, 23 nt, Human
cguccugaagcucucggcuggga

SEQ ID NO: 265785 - RNA, 23 nt, Human
cguccugaagcucucggcuggga

SEQ ID NO: 265786 - RNA, 23 nt, Human
cuagcagcaaaaagcagauaaaa

SEQ ID NO: 265787 - RNA, 24 nt, Human
cuggaacugaugugugcguuaaug

SEQ ID NO: 265788 - RNA, 23 nt, Human
cuguuguuuguuguggcaacugg

SEQ ID NO: 265789 - RNA, 23 nt, Human
cuguuguuuguuguggcaacugg

SEQ ID NO: 265790 - RNA, 19 nt, Human
cuuagaaacugcuuuucuc

SEQ ID NO: 265791 - RNA, 19 nt, Human
gaagcuccugaaguugcuc

SEQ ID NO: 265792 - RNA, 19 nt, Human
gaagcuccugaaguugcuc

SEQ ID NO: 265793 - RNA, 23 nt, Human
gagcugauauucuauaacagcac

SEQ ID NO: 265794 - RNA, 22 nt, Human
gaggagauuccaaaguacaugg

SEQ ID NO: 265795 - RNA, 23 nt, Human
gauguucagagaauggaaugggg

SEQ ID NO: 265796 - RNA, 23 nt, Human
gcaaaaagcagauaaaaauagaa

SEQ ID NO: 265797 - RNA, 19 nt, Human
gcugggaagcuccugaagu

SEQ ID NO: 265798 - RNA, 19 nt, Human
gcugggaagcuccugaagu

SEQ ID NO: 265799 - RNA, 22 nt, Human
ggcugcagggaguagagcccag

SEQ ID NO: 265800 - RNA, 21 nt, Human
gguagugcgaggggcugcagg

SEQ ID NO: 265801 - RNA, 24 nt, Human
uaaaccaagagaacauuaacacaa

SEQ ID NO: 265802 - RNA, 22 nt, Human
uaaagcaacugcaggcugagac

SEQ ID NO: 265803 - RNA, 25 nt, Human
uacacacacacacagaggaaaugua

SEQ ID NO: 265804 - RNA, 26 nt, Human
uauaaagcaacugcaggcugagacag

SEQ ID NO: 265805 - RNA, 18 nt, Human
uauaacagcacaaauaag

SEQ ID NO: 265806 - RNA, 26 nt, Human
uauacgccacacaugcacacacacag

SEQ ID NO: 265807 - RNA, 19 nt, Human
ucaaaauucuaauguugau

SEQ ID NO: 265808 - RNA, 20 nt, Human
ucagugugucagaagauguu

SEQ ID NO: 265809 - RNA, 18 nt, Human
uccaaaguacauggaguu

SEQ ID NO: 265810 - RNA, 22 nt, Human
ucccuaaaugaaaucuagcugc

SEQ ID NO: 265811 - RNA, 24 nt, Human
ucccuaaaugaaaucuagcugcac

SEQ ID NO: 265812 - RNA, 24 nt, Human
ucggcugggaagcuccugaaguug

SEQ ID NO: 265813 - RNA, 24 nt, Human
ucggcugggaagcuccugaaguug

SEQ ID NO: 265814 - RNA, 19 nt, Human
ucuggaaaauagacacgag

SEQ ID NO: 265815 - RNA, 18 nt, Human
ucuguuucaucguggcca

SEQ ID NO: 265816 - RNA, 22 nt, Human
ucuucucuguuguuuguugugg

SEQ ID NO: 265817 - RNA, 22 nt, Human
ucuucucuguuguuuguugugg

SEQ ID NO: 265818 - RNA, 20 nt, Human
ugaaacuagcagcaaaaagc

SEQ ID NO: 265819 - RNA, 18 nt, Human
ugaagcucucggcuggga

SEQ ID NO: 265820 - RNA, 18 nt, Human
ugaagcucucggcuggga

SEQ ID NO: 265821 - RNA, 22 nt, Human
ugcaaagaggggauaaguuuag

SEQ ID NO: 265822 - RNA, 19 nt, Human
ugccagaggagcgaaccca

SEQ ID NO: 265823 - RNA, 21 nt, Human
ugcgaggggcugcagggagua

SEQ ID NO: 265824 - RNA, 20 nt, Human
uggaaaauagacacgagggu

SEQ ID NO: 265825 - RNA, 19 nt, Human
uggguucuuaaccaaaugu

SEQ ID NO: 265826 - RNA, 23 nt, Human
ugguuugguuacuuucucucuaa

SEQ ID NO: 265827 - RNA, 19 nt, Human
ugucccugguuccagcugg

SEQ ID NO: 265828 - RNA, 21 nt, Human
ugugucagaagauguucagag

SEQ ID NO: 265829 - RNA, 28 nt, Human
uguuacacacacacacagaggaaaugua

SEQ ID NO: 265830 - RNA, 18 nt, Human
uguugauacuguguagga

SEQ ID NO: 265831 - RNA, 21 nt, Human
uucagagaauggaauggggcc

SEQ ID NO: 265832 - RNA, 24 nt, Human
uucccuggaacaaggaccuccuga

SEQ ID NO: 265833 - RNA, 24 nt, Human
uucucuguuguuuguuguggcaac

SEQ ID NO: 265834 - RNA, 24 nt, Human
uucucuguuguuuguuguggcaac

SEQ ID NO: 265835 - RNA, 22 nt, Human
uugauacuguguaggauugcac

SEQ ID NO: 265836 - RNA, 23 nt, Human
uugaugcacauuuaagaagaaaa

SEQ ID NO: 265837 - RNA, 20 nt, Human
uugucccugguuccagcugg

SEQ ID NO: 265838 - RNA, 25 nt, Human
uuucuggaaaauagacacgaggguu

SEQ ID NO: 265839 - RNA, 23 nt, Human
aaagacgaggagcuggggaggga

SEQ ID NO: 265840 - RNA, 19 nt, Human
aaccacagaagcccuacau

SEQ ID NO: 265841 - RNA, 19 nt, Human
agacgaggagcuggggagg

SEQ ID NO: 265842 - RNA, 21 nt, Human
aggagcuggggagggaaccgg

SEQ ID NO: 265843 - RNA, 18 nt, Human
aggcggcucacaucgggg

SEQ ID NO: 265844 - RNA, 19 nt, Human
aggcugcccuggggaucug

SEQ ID NO: 265845 - RNA, 19 nt, Human
aucaucugaggccaugggu

SEQ ID NO: 265846 - RNA, 19 nt, Human
augggggcguggggagccc

SEQ ID NO: 265847 - RNA, 22 nt, Human
cacuguguggcugcguccaggc

SEQ ID NO: 265848 - RNA, 19 nt, Human
caucaucugaggccaugga

SEQ ID NO: 265849 - RNA, 25 nt, Human
cauccacaaccacagaagcccuaca

SEQ ID NO: 265850 - RNA, 21 nt, Human
caugcugagaccccccagcca

SEQ ID NO: 265851 - RNA, 20 nt, Human
cauggcacuccagcuaggag

SEQ ID NO: 265852 - RNA, 19 nt, Human
ccacagaagcccuacaugc

SEQ ID NO: 265853 - RNA, 23 nt, Human
ccacagaagcccuacaugcugag

SEQ ID NO: 265854 - RNA, 27 nt, Human
ccaggccacacuccgaggcggcucaca

SEQ ID NO: 265855 - RNA, 19 nt, Human
ccauggcacuccagcuagg

SEQ ID NO: 265856 - RNA, 24 nt, Human
ccauggcacuccagcuaggaggag

SEQ ID NO: 265857 - RNA, 22 nt, Human
cccaccaggagccucccaucca

SEQ ID NO: 265858 - RNA, 22 nt, Human
ccccggccacuguguggcugcg

SEQ ID NO: 265859 - RNA, 21 nt, Human
cccggccacuguguggcugcg

SEQ ID NO: 265860 - RNA, 26 nt, Human
ccucccagccuggcacagccuugucc

SEQ ID NO: 265861 - RNA, 24 nt, Human
ccucccauccacaaccacagaagc

SEQ ID NO: 265862 - RNA, 23 nt, Human
cuccugggccugcugaccccauc

SEQ ID NO: 265863 - RNA, 20 nt, Human
cucugucuucccuggcagcu

SEQ ID NO: 265864 - RNA, 28 nt, Human
cugggccagauggugugggcucggccuu

SEQ ID NO: 265865 - RNA, 25 nt, Human
cugggccugcugaccccaucaucug

SEQ ID NO: 265866 - RNA, 23 nt, Human
cuuggcuucuccccucccccucc

SEQ ID NO: 265867 - RNA, 21 nt, Human
gaaggugggugggggccagcc

SEQ ID NO: 265868 - RNA, 21 nt, Human
gagccucccagccuggcacag

SEQ ID NO: 265869 - RNA, 24 nt, Human
gagccucccagccuggcacagccu

SEQ ID NO: 265870 - RNA, 21 nt, Human
gaggcugcccuggggaucugg

SEQ ID NO: 265871 - RNA, 24 nt, Human
gaugggggccccgagugguugggu

SEQ ID NO: 265872 - RNA, 23 nt, Human
gccuggagucugggguguggccg

SEQ ID NO: 265873 - RNA, 20 nt, Human
gcuucuccccucccccucca

SEQ ID NO: 265874 - RNA, 18 nt, Human
ggagccucccauccacaa

SEQ ID NO: 265875 - RNA, 21 nt, Human
ggaguggggagguggcggggg

SEQ ID NO: 265876 - RNA, 22 nt, Human
ggcaaagcaggggucaccacgg

SEQ ID NO: 265877 - RNA, 19 nt, Human
ggcuguguggcuucagccc

SEQ ID NO: 265878 - RNA, 25 nt, Human
gggaaccgggagcggcuucaacggg

SEQ ID NO: 265879 - RNA, 22 nt, Human
ggggccagccugggccagaugg

SEQ ID NO: 265880 - RNA, 24 nt, Human
ggggguggucuccugugucccuug

SEQ ID NO: 265881 - RNA, 18 nt, Human
ggguugggccggcuuggc

SEQ ID NO: 265882 - RNA, 23 nt, Human
uacaaggcacaagcugagagcag

SEQ ID NO: 265883 - RNA, 18 nt, Human
uccccucccccuccacca

SEQ ID NO: 265884 - RNA, 23 nt, Human
ucccuuggcuucuccccuccccc

SEQ ID NO: 265885 - RNA, 25 nt, Human
ucucccaguggggcaaagcaggggu

SEQ ID NO: 265886 - RNA, 19 nt, Human
ugacccccaagaugggggc

SEQ ID NO: 265887 - RNA, 26 nt, Human
ugacccccaagaugggggccccuccu

SEQ ID NO: 265888 - RNA, 19 nt, Human
ugagaccccccagccaugg

SEQ ID NO: 265889 - RNA, 25 nt, Human
ugagaccccccagccauggcacucc

SEQ ID NO: 265890 - RNA, 24 nt, Human
ugagagcagacuggaggcugcccc

SEQ ID NO: 265891 - RNA, 19 nt, Human
ugaggcaagcucgggggug

SEQ ID NO: 265892 - RNA, 20 nt, Human
uggaggcugccccauggccu

SEQ ID NO: 265893 - RNA, 20 nt, Human
uggcagcugggccuuaggaa

SEQ ID NO: 265894 - RNA, 19 nt, Human
uggccuuccuaauucuccu

SEQ ID NO: 265895 - RNA, 24 nt, Human
uggcugccuuuucuggccuucugg

SEQ ID NO: 265896 - RNA, 21 nt, Human
uggcuucuccccucccccucc

SEQ ID NO: 265897 - RNA, 18 nt, Human
uggggagggaaccgggag

SEQ ID NO: 265898 - RNA, 21 nt, Human
uggggagggaaccgggagcgg

SEQ ID NO: 265899 - RNA, 24 nt, Human
uggggagggaaccgggagcggcuu

SEQ ID NO: 265900 - RNA, 23 nt, Human
ugggggccccgagugguuggguu

SEQ ID NO: 265901 - RNA, 21 nt, Human
uucuccccucccccuccacca

SEQ ID NO: 265902 - RNA, 26 nt, Human
uugguggucgcaaggaaggugggugg

SEQ ID NO: 265903 - RNA, 20 nt, Human
aaaagaugaaacaaagaaaa

SEQ ID NO: 265904 - RNA, 18 nt, Human
aaacaauggagucaacac

SEQ ID NO: 265905 - RNA, 22 nt, Human
aagcuaaccuuccaaguaacac

SEQ ID NO: 265906 - RNA, 19 nt, Human
aaggcaguucccuucagua

SEQ ID NO: 265907 - RNA, 21 nt, Human
aagucccuaacucgcccgucc

SEQ ID NO: 265908 - RNA, 23 nt, Human
aaugauagaagcuaaccuuccaa

SEQ ID NO: 265909 - RNA, 18 nt, Human
acagagaaugccccccuu

SEQ ID NO: 265910 - RNA, 26 nt, Human
acaugcacgaacaggcaagcacguac

SEQ ID NO: 265911 - RNA, 19 nt, Human
acuccagcucaaacacacu

SEQ ID NO: 265912 - RNA, 22 nt, Human
acucccucaccuucccucagau

SEQ ID NO: 265913 - RNA, 19 nt, Human
agacaugaaagacuccaaa

SEQ ID NO: 265914 - RNA, 19 nt, Human
agcaaagacaggaaaaucc

SEQ ID NO: 265915 - RNA, 21 nt, Human
agcaaagacaggaaaauccag

SEQ ID NO: 265916 - RNA, 18 nt, Human
agcuuccagaaagccugg

SEQ ID NO: 265917 - RNA, 23 nt, Human
agcuuccagaaagccugggcagc

SEQ ID NO: 265918 - RNA, 19 nt, Human
aggaucaaugaaggcggcc

SEQ ID NO: 265919 - RNA, 21 nt, Human
agguagcaaagacaggugggc

SEQ ID NO: 265920 - RNA, 22 nt, Human
auuaaaauauacagacugugua

SEQ ID NO: 265921 - RNA, 24 nt, Human
caaacccaagucccuaacucgccc

SEQ ID NO: 265922 - RNA, 25 nt, Human
caagucccuaacucgcccgucccga

SEQ ID NO: 265923 - RNA, 22 nt, Human
cacacuguccccucgagcucuc

SEQ ID NO: 265924 - RNA, 22 nt, Human
caccuucccucagauucgggga

SEQ ID NO: 265925 - RNA, 24 nt, Human
caccuuuuguucgcccaaacccaa

SEQ ID NO: 265926 - RNA, 22 nt, Human
cacguacacuuaaaagaugaaa

SEQ ID NO: 265927 - RNA, 22 nt, Human
cacucccgaggacgcgcgcccg

SEQ ID NO: 265928 - RNA, 18 nt, Human
cacuggagccagccuagg

SEQ ID NO: 265929 - RNA, 21 nt, Human
cacuggagccagccuaggcca

SEQ ID NO: 265930 - RNA, 18 nt, Human
cagaagggggaaaggcag

SEQ ID NO: 265931 - RNA, 18 nt, Human
cagccuaggccagagggu

SEQ ID NO: 265932 - RNA, 22 nt, Human
cagcucaaacacacuguccccu

SEQ ID NO: 265933 - RNA, 19 nt, Human
caguagcacaguuacgguc

SEQ ID NO: 265934 - RNA, 20 nt, Human
cauuacacauccuuuuuccc

SEQ ID NO: 265935 - RNA, 20 nt, Human
cauucuuguucuaaaaccag

SEQ ID NO: 265936 - RNA, 28 nt, Human
cauucuuguucuaaaaccagcacuggag

SEQ ID NO: 265937 - RNA, 19 nt, Human
ccagcucaaacacacuguc

SEQ ID NO: 265938 - RNA, 19 nt, Human
cccaaacccaagucccuaa

SEQ ID NO: 265939 - RNA, 22 nt, Human
cccaaacccaagucccuaacuc

SEQ ID NO: 265940 - RNA, 22 nt, Human
cccgcagcacuccagcucaaac

SEQ ID NO: 265941 - RNA, 21 nt, Human
ccgcagcacuccagcucaaac

SEQ ID NO: 265942 - RNA, 25 nt, Human
cucagaccagaagcuuccagaaagc

SEQ ID NO: 265943 - RNA, 22 nt, Human
cuggagccagccuaggccagag

SEQ ID NO: 265944 - RNA, 23 nt, Human
cuguccccucgagcucuccaucc

SEQ ID NO: 265945 - RNA, 20 nt, Human
gacucgcggaagucagcgcc

SEQ ID NO: 265946 - RNA, 19 nt, Human
gagcucuccaucccccuuc

SEQ ID NO: 265947 - RNA, 21 nt, Human
gcacuccagcucaaacacacu

SEQ ID NO: 265948 - RNA, 25 nt, Human
gcggcaggcaaaaggauccucggag

SEQ ID NO: 265949 - RNA, 23 nt, Human
gcgugguuccuccccuccuuuuu

SEQ ID NO: 265950 - RNA, 23 nt, Human
gcucuccaucccccuucccacuc

SEQ ID NO: 265951 - RNA, 20 nt, Human
gcucuguuaagucuccccca

SEQ ID NO: 265952 - RNA, 18 nt, Human
ggagccagcuguugaaga

SEQ ID NO: 265953 - RNA, 19 nt, Human
ggcaguucccuucaguagc

SEQ ID NO: 265954 - RNA, 21 nt, Human
uaaaagaugaaacaaagaaaa

SEQ ID NO: 265955 - RNA, 24 nt, Human
uaacaauugagacuauagcucugc

SEQ ID NO: 265956 - RNA, 26 nt, Human
uaagaguaguaaagcuuuggaaacug

SEQ ID NO: 265957 - RNA, 19 nt, Human
uaaugucaggguccuuuga

SEQ ID NO: 265958 - RNA, 19 nt, Human
uacacauccuuuuucccuu

SEQ ID NO: 265959 - RNA, 24 nt, Human
uacaccauuacacauccuuuuucc

SEQ ID NO: 265960 - RNA, 18 nt, Human
uacagacuguguacacca

SEQ ID NO: 265961 - RNA, 20 nt, Human
uagaagcuaaccuuccaagu

SEQ ID NO: 265962 - RNA, 21 nt, Human
uagugcaucauugacagagaa

SEQ ID NO: 265963 - RNA, 19 nt, Human
uauccagaaugauagaagc

SEQ ID NO: 265964 - RNA, 19 nt, Human
uaugaacacaugcacgaac

SEQ ID NO: 265965 - RNA, 19 nt, Human
ucaaaauacagcaaagaca

SEQ ID NO: 265966 - RNA, 21 nt, Human
ucaccuucccucagauucggg

SEQ ID NO: 265967 - RNA, 25 nt, Human
uccaaaaugacuucauucuuguucu

SEQ ID NO: 265968 - RNA, 18 nt, Human
uccagaaagccugggcag

SEQ ID NO: 265969 - RNA, 24 nt, Human
uccagcucaaacacacuguccccu

SEQ ID NO: 265970 - RNA, 25 nt, Human
ucccacucccucaccuucccucaga

SEQ ID NO: 265971 - RNA, 24 nt, Human
uccccucgagcucuccaucccccu

SEQ ID NO: 265972 - RNA, 22 nt, Human
uccccugcugccaucgcccggu

SEQ ID NO: 265973 - RNA, 22 nt, Human
ucccucagaccagaagcuucca

SEQ ID NO: 265974 - RNA, 21 nt, Human
ucgcccaaacccaagucccua

SEQ ID NO: 265975 - RNA, 19 nt, Human
ucuggucauaaaugcugau

SEQ ID NO: 265976 - RNA, 20 nt, Human
ugaacacaugcacgaacaga

SEQ ID NO: 265977 - RNA, 23 nt, Human
ugaacacaugcacgaacaggcaa

SEQ ID NO: 265978 - RNA, 21 nt, Human
ugagaaaggcugcccgcagca

SEQ ID NO: 265979 - RNA, 22 nt, Human
ugagccaacaaacaguuuugca

SEQ ID NO: 265980 - RNA, 21 nt, Human
uggcagacuuugcuacaugua

SEQ ID NO: 265981 - RNA, 23 nt, Human
ugggauaaaauauguguguauua

SEQ ID NO: 265982 - RNA, 21 nt, Human
ugggcauggcacacuggagcc

SEQ ID NO: 265983 - RNA, 21 nt, Human
uguguacaccauuacacaucc

SEQ ID NO: 265984 - RNA, 22 nt, Human
uguguguauuaaagccucagca

SEQ ID NO: 265985 - RNA, 20 nt, Human
uuaaaucuuuuagacaugaa

SEQ ID NO: 265986 - RNA, 19 nt, Human
uucaaaauacagcaaagac

SEQ ID NO: 265987 - RNA, 23 nt, Human
uucugugagccaacaaacaguuu

SEQ ID NO: 265988 - RNA, 18 nt, Human
uuuggaaacugugcagac

SEQ ID NO: 265989 - RNA, 22 nt, Human
aaccaaagaccagaaauccagg

SEQ ID NO: 265990 - RNA, 19 nt, Human
aacuccugccuccucccuc

SEQ ID NO: 265991 - RNA, 19 nt, Human
aagaaggcuuuucccaaac

SEQ ID NO: 265992 - RNA, 26 nt, Human
accaaaggcagaggccaguucaucug

SEQ ID NO: 265993 - RNA, 18 nt, Human
acuuggagacacagggac

SEQ ID NO: 265994 - RNA, 21 nt, Human
agacccugaguaaaccaaagg

SEQ ID NO: 265995 - RNA, 28 nt, Human
agauacagcagggaauaaaccgguaccc

SEQ ID NO: 265996 - RNA, 18 nt, Human
aggcaggaguuaggggca

SEQ ID NO: 265997 - RNA, 19 nt, Human
aggcaggaguuaggggcag

SEQ ID NO: 265998 - RNA, 21 nt, Human
aggcaggaguuaggggcaggg

SEQ ID NO: 265999 - RNA, 25 nt, Human
aggcaggaguuaggggcagggucug

SEQ ID NO: 266000 - RNA, 21 nt, Human
aggcauccuccuagguucugg

SEQ ID NO: 266001 - RNA, 19 nt, Human
aggcucuggccccuuacag

SEQ ID NO: 266002 - RNA, 18 nt, Human
agguacuggagggcuggg

SEQ ID NO: 266003 - RNA, 22 nt, Human
agguacuggagggcugggggcu

SEQ ID NO: 266004 - RNA, 25 nt, Human
aguuaggggcagggucugcaauggg

SEQ ID NO: 266005 - RNA, 22 nt, Human
auagccagugaaucaggggccu

SEQ ID NO: 266006 - RNA, 24 nt, Human
aucagacccugaguaaaccggcgc

SEQ ID NO: 266007 - RNA, 24 nt, Human
caaagaccagaaauccaggcugac

SEQ ID NO: 266008 - RNA, 24 nt, Human
cacagaaauaaccaaagaccagaa

SEQ ID NO: 266009 - RNA, 20 nt, Human
cacgguuggcccagcagagc

SEQ ID NO: 266010 - RNA, 26 nt, Human
cagacccugaguaaaccaaaggcaga

SEQ ID NO: 266011 - RNA, 21 nt, Human
caucugggcaacugguguggg

SEQ ID NO: 266012 - RNA, 22 nt, Human
caugguccugccuucugcucca

SEQ ID NO: 266013 - RNA, 21 nt, Human
ccauggagaaauggcugccag

SEQ ID NO: 266014 - RNA, 19 nt, Human
cccgcggcuggacacgcgg

SEQ ID NO: 266015 - RNA, 22 nt, Human
ccucaugguccugccuucugcu

SEQ ID NO: 266016 - RNA, 23 nt, Human
ccuccugccuccucuuagugucc

SEQ ID NO: 266017 - RNA, 23 nt, Human
ccugcucucuacagggccugggg

SEQ ID NO: 266018 - RNA, 18 nt, Human
cgcggccuccucgggcug

SEQ ID NO: 266019 - RNA, 21 nt, Human
cucaugguccugccuucugcu

SEQ ID NO: 266020 - RNA, 18 nt, Human
cucccuuguaccacucuc

SEQ ID NO: 266021 - RNA, 19 nt, Human
cuguggccugcuccccgcc

SEQ ID NO: 266022 - RNA, 22 nt, Human
cuuacucucuguuaggcauccu

SEQ ID NO: 266023 - RNA, 21 nt, Human
cuuagcaaacuccuacucauc

SEQ ID NO: 266024 - RNA, 21 nt, Human
gagggcggauccauaauucau

SEQ ID NO: 266025 - RNA, 22 nt, Human
gcagcucaguguuauggggaag

SEQ ID NO: 266026 - RNA, 22 nt, Human
gcggauccauaauucaucuccu

SEQ ID NO: 266027 - RNA, 22 nt, Human
ggcccaucaagugauggggguc

SEQ ID NO: 266028 - RNA, 21 nt, Human
gggauggucuguucauagcca

SEQ ID NO: 266029 - RNA, 22 nt, Human
gggccgagccaggauuccggga

SEQ ID NO: 266030 - RNA, 23 nt, Human
gggccuaagguaacuccaacucc

SEQ ID NO: 266031 - RNA, 24 nt, Human
guggcugccugcucucuacagggc

SEQ ID NO: 266032 - RNA, 19 nt, Human
guucuguggccugcucccc

SEQ ID NO: 266033 - RNA, 21 nt, Human
uaaaccaaaggcagaggccag

SEQ ID NO: 266034 - RNA, 19 nt, Human
uaaccaaagaccagaaauc

SEQ ID NO: 266035 - RNA, 23 nt, Human
uaaccaaagaccagaaauccagg

SEQ ID NO: 266036 - RNA, 20 nt, Human
uacucucuguuaggcauccu

SEQ ID NO: 266037 - RNA, 24 nt, Human
uccaacaucagacccugaguaaac

SEQ ID NO: 266038 - RNA, 24 nt, Human
uccauaauucaucuccucuagagc

SEQ ID NO: 266039 - RNA, 23 nt, Human
uccuacucaucuuucaaaacuca

SEQ ID NO: 266040 - RNA, 20 nt, Human
uccuccaaggcucuggcccc

SEQ ID NO: 266041 - RNA, 25 nt, Human
uccuccugccuccucuuaguguccu

SEQ ID NO: 266042 - RNA, 19 nt, Human
ucuacagggccuggggccg

SEQ ID NO: 266043 - RNA, 26 nt, Human
ucugcuccacugcacagugggccaga

SEQ ID NO: 266044 - RNA, 21 nt, Human
ucuggaauguuuauccugcug

SEQ ID NO: 266045 - RNA, 21 nt, Human
ucuguucauagccagugaauc

SEQ ID NO: 266046 - RNA, 22 nt, Human
ucuuccaucuauucuuagcaaa

SEQ ID NO: 266047 - RNA, 18 nt, Human
ugaaucaggggccuaagg

SEQ ID NO: 266048 - RNA, 20 nt, Human
ugaguaaaccaaaggcagag

SEQ ID NO: 266049 - RNA, 25 nt, Human
ugcaauggguacauggcaggaggcc

SEQ ID NO: 266050 - RNA, 19 nt, Human
uggcccuggguggcguggg

SEQ ID NO: 266051 - RNA, 21 nt, Human
ugggccagacuuuugaaaguu

SEQ ID NO: 266052 - RNA, 22 nt, Human
uggggaagggaggcccagcccc

SEQ ID NO: 266053 - RNA, 19 nt, Human
uggguggcguggggagggc

SEQ ID NO: 266054 - RNA, 21 nt, Human
uguaagggcuaggguguggag

SEQ ID NO: 266055 - RNA, 23 nt, Human
uucagugauuucucugaggccac

SEQ ID NO: 266056 - RNA, 20 nt, Human
uucuggcagaagguacugga

SEQ ID NO: 266057 - RNA, 21 nt, Human
uucuggcagaagguacuggag

SEQ ID NO: 266058 - RNA, 19 nt, Human
aaaaaggcugcccuccucu

SEQ ID NO: 266059 - RNA, 22 nt, Human
accuuuccaagccacauguuuu

SEQ ID NO: 266060 - RNA, 18 nt, Human
acuguccuuggagaaugg

SEQ ID NO: 266061 - RNA, 24 nt, Human
ccaagccaugcgccacgaucagag

SEQ ID NO: 266062 - RNA, 20 nt, Human
cccaggauggagagguggcu

SEQ ID NO: 266063 - RNA, 19 nt, Human
cccuccucuugccaguguc

SEQ ID NO: 266064 - RNA, 21 nt, Human
ccuggccccaggauggagagg

SEQ ID NO: 266065 - RNA, 22 nt, Human
cucuugccaguguccacucuuc

SEQ ID NO: 266066 - RNA, 18 nt, Human
cugcauggugcccccucc

SEQ ID NO: 266067 - RNA, 22 nt, Human
gaggcugcggguuggaggaagc

SEQ ID NO: 266068 - RNA, 19 nt, Human
ggaccuuuccaagccacau

SEQ ID NO: 266069 - RNA, 20 nt, Human
ggcagagggggauuagugcu

SEQ ID NO: 266070 - RNA, 23 nt, Human
gggcagagggggauuagugcugg

SEQ ID NO: 266071 - RNA, 22 nt, Human
ggugcaaggaagcugggaaaaa

SEQ ID NO: 266072 - RNA, 21 nt, Human
uccauggugcaaggaagcugg

SEQ ID NO: 266073 - RNA, 21 nt, Human
ugacaggaauggggcauaaga

SEQ ID NO: 266074 - RNA, 18 nt, Human
ugcagagaggcugcgggu

SEQ ID NO: 266075 - RNA, 22 nt, Human
uggaggaagcuacuuuuggagg

SEQ ID NO: 266076 - RNA, 19 nt, Human
uucaggaggaagcaacugc

SEQ ID NO: 266077 - RNA, 19 nt, Human
uugggacaaggguccucuu

SEQ ID NO: 266078 - RNA, 21 nt, Human
aaacacugaccagaaaaaaca

SEQ ID NO: 266079 - RNA, 23 nt, Human
aaacagaaaagcuagaaacaaag

SEQ ID NO: 266080 - RNA, 22 nt, Human
aaacagaaaagcuagaaacaau

SEQ ID NO: 266081 - RNA, 19 nt, Human
aaaccccuaggucucaacc

SEQ ID NO: 266082 - RNA, 24 nt, Human
aaccucugccuccaagcgauucuc

SEQ ID NO: 266083 - RNA, 23 nt, Human
aagaaucccaaaugaagccaaca

SEQ ID NO: 266084 - RNA, 18 nt, Human
aagcaccccaaacagaaa

SEQ ID NO: 266085 - RNA, 23 nt, Human
aagcaccccaaacagaaaagcua

SEQ ID NO: 266086 - RNA, 24 nt, Human
aagcaccccaaacagaaaagcuag

SEQ ID NO: 266087 - RNA, 31 nt, Human
aagcaccccaaacagaaaagcuagaaacaag

SEQ ID NO: 266088 - RNA, 19 nt, Human
aagccaaucccagauaagg

SEQ ID NO: 266089 - RNA, 25 nt, Human
aagcgauucuccugccucagccucc

SEQ ID NO: 266090 - RNA, 25 nt, Human
aaggaucagcaaagacacagugagc

SEQ ID NO: 266091 - RNA, 19 nt, Human
aaguaguugggauuauagg

SEQ ID NO: 266092 - RNA, 21 nt, Human
aaguguugggauuauaggugu

SEQ ID NO: 266093 - RNA, 23 nt, Human
aaguguugggauuauagguguga

SEQ ID NO: 266094 - RNA, 26 nt, Human
aaguguugggauuauaggugugagcc

SEQ ID NO: 266095 - RNA, 18 nt, Human
acaggguuuugccauguu

SEQ ID NO: 266096 - RNA, 21 nt, Human
acaggguuuugccauguuggc

SEQ ID NO: 266097 - RNA, 24 nt, Human
acaggguuuugccauguuggccag

SEQ ID NO: 266098 - RNA, 24 nt, Human
accccaaacagaaaagcuagaaac

SEQ ID NO: 266099 - RNA, 24 nt, Human
acccgggcuggagugcaguggcgu

SEQ ID NO: 266100 - RNA, 18 nt, Human
accugccuccgccucccu

SEQ ID NO: 266101 - RNA, 20 nt, Human
acucugucaccaaguucuga

SEQ ID NO: 266102 - RNA, 18 nt, Human
agacaggguuuugccaug

SEQ ID NO: 266103 - RNA, 21 nt, Human
agagaagcaccccaaacagaa

SEQ ID NO: 266104 - RNA, 23 nt, Human
agagaagcaccccaaacagaaaa

SEQ ID NO: 266105 - RNA, 19 nt, Human
agcaaagacacagugagcu

SEQ ID NO: 266106 - RNA, 25 nt, Human
agcaaagacacagugagcuccacaa

SEQ ID NO: 266107 - RNA, 18 nt, Human
agcaccccaaacagaaaa

SEQ ID NO: 266108 - RNA, 24 nt, Human
agcgauucuccugccucagccucc

SEQ ID NO: 266109 - RNA, 21 nt, Human
aggucccugccaccacgccca

SEQ ID NO: 266110 - RNA, 21 nt, Human
aggugugagccaccacgccca

SEQ ID NO: 266111 - RNA, 18 nt, Human
aguaagugaaugaaugaa

SEQ ID NO: 266112 - RNA, 22 nt, Human
aguagagacaggguuuugccau

SEQ ID NO: 266113 - RNA, 19 nt, Human
agugcaguggcgugaccuc

SEQ ID NO: 266114 - RNA, 20 nt, Human
agugcaguggcgugaccucg

SEQ ID NO: 266115 - RNA, 23 nt, Human
agugcaguggcgugaccucggcu

SEQ ID NO: 266116 - RNA, 24 nt, Human
agugcaguggcgugaccucggcuc

SEQ ID NO: 266117 - RNA, 24 nt, Human
auugucacccgggcuggagugcag

SEQ ID NO: 266118 - RNA, 24 nt, Human
auuuuuauauuuuuaguagagaca

SEQ ID NO: 266119 - RNA, 21 nt, Human
caagaaucccaaaugaagcca

SEQ ID NO: 266120 - RNA, 22 nt, Human
caagcgauucuccugccucagc

SEQ ID NO: 266121 - RNA, 21 nt, Human
caaucccagauaagguauuau

SEQ ID NO: 266122 - RNA, 24 nt, Human
caaucucacuuccuuugcugaagg

SEQ ID NO: 266123 - RNA, 27 nt, Human
caccccaaacagaaaagcuagaaacaa

SEQ ID NO: 266124 - RNA, 24 nt, Human
cacccgggcuggagugcaguggcg

SEQ ID NO: 266125 - RNA, 18 nt, Human
cacugcaaccucugccuc

SEQ ID NO: 266126 - RNA, 26 nt, Human
cagcaaagacacagugagcuccacag

SEQ ID NO: 266127 - RNA, 24 nt, Human
caggguuuugccauguuggccagg

SEQ ID NO: 266128 - RNA, 24 nt, Human
cauguuggccaggcuagucucgaa

SEQ ID NO: 266129 - RNA, 22 nt, Human
cauuacuuucuccaggccuaca

SEQ ID NO: 266130 - RNA, 19 nt, Human
cauugcaggcacucgagga

SEQ ID NO: 266131 - RNA, 22 nt, Human
ccaaacagaaaagcuagaaaca

SEQ ID NO: 266132 - RNA, 20 nt, Human
ccaccacgcccagcuaauuu

SEQ ID NO: 266133 - RNA, 19 nt, Human
ccauguuggccaggcuagu

SEQ ID NO: 266134 - RNA, 22 nt, Human
ccauguuggccaggcuagucuc

SEQ ID NO: 266135 - RNA, 23 nt, Human
ccauguuggccaggcuagucucg

SEQ ID NO: 266136 - RNA, 22 nt, Human
cccaaguaguugggauuauagg

SEQ ID NO: 266137 - RNA, 23 nt, Human
cccaaguaguugggauuauaggu

SEQ ID NO: 266138 - RNA, 22 nt, Human
cccauugcaggcacucgaggag

SEQ ID NO: 266139 - RNA, 25 nt, Human
ccccuuauuguccccauccagggac

SEQ ID NO: 266140 - RNA, 23 nt, Human
ccuaaguguugggauuauaggug

SEQ ID NO: 266141 - RNA, 24 nt, Human
ccuaaguguugggauuauaggugu

SEQ ID NO: 266142 - RNA, 20 nt, Human
ccucucacagggaagaaaaa

SEQ ID NO: 266143 - RNA, 21 nt, Human
ccugaccugaggugauccacc

SEQ ID NO: 266144 - RNA, 23 nt, Human
ccugaccugaggugauccaccug

SEQ ID NO: 266145 - RNA, 24 nt, Human
ccugccucagccucccaaguaguu

SEQ ID NO: 266146 - RNA, 18 nt, Human
cuaggucucaaccacuga

SEQ ID NO: 266147 - RNA, 24 nt, Human
cucacugcaaccucugccuccaag

SEQ ID NO: 266148 - RNA, 24 nt, Human
cucagccucccaaguaguugggau

SEQ ID NO: 266149 - RNA, 24 nt, Human
cucugccuccaagcgauucuccug

SEQ ID NO: 266150 - RNA, 24 nt, Human
cugaccagaaaaaacacuugcauu

SEQ ID NO: 266151 - RNA, 19 nt, Human
cugcaaccucugccuccaa

SEQ ID NO: 266152 - RNA, 20 nt, Human
cugcaaccucugccuccaag

SEQ ID NO: 266153 - RNA, 21 nt, Human
cugcaaccucugccuccaagc

SEQ ID NO: 266154 - RNA, 25 nt, Human
cuuuuuuacuuucuuauuuuagggg

SEQ ID NO: 266155 - RNA, 18 nt, Human
gaagcaccccaaacagaa

SEQ ID NO: 266156 - RNA, 19 nt, Human
gaagucccccugaacugac

SEQ ID NO: 266157 - RNA, 19 nt, Human
gacaggguuuugccauguu

SEQ ID NO: 266158 - RNA, 19 nt, Human
gaccucggcucacugcaac

SEQ ID NO: 266159 - RNA, 24 nt, Human
gaccugaggugauccaccugccuc

SEQ ID NO: 266160 - RNA, 22 nt, Human
gagcucaaggaagucccccuga

SEQ ID NO: 266161 - RNA, 18 nt, Human
gauuauaggugugagcca

SEQ ID NO: 266162 - RNA, 21 nt, Human
gauuauaggugugagccacca

SEQ ID NO: 266163 - RNA, 22 nt, Human
gauuauaggugugagccaccac

SEQ ID NO: 266164 - RNA, 24 nt, Human
gcaaaacacugaccagaaaaaaca

SEQ ID NO: 266165 - RNA, 24 nt, Human
gcgauucuccugccucagccuccc

SEQ ID NO: 266166 - RNA, 19 nt, Human
gcuggagugcaguggcgug

SEQ ID NO: 266167 - RNA, 21 nt, Human
gcuugcccauugcaggcacuc

SEQ ID NO: 266168 - RNA, 22 nt, Human
ggguuuugccauguuggccagg

SEQ ID NO: 266169 - RNA, 21 nt, Human
ggugaaacuucagagcucaag

SEQ ID NO: 266170 - RNA, 23 nt, Human
guagagacaggguuuugccaugu

SEQ ID NO: 266171 - RNA, 24 nt, Human
gugauccaccugccuccgccuccc

SEQ ID NO: 266172 - RNA, 19 nt, Human
guggcccagcacacggcuc

SEQ ID NO: 266173 - RNA, 24 nt, Human
uaauuuuuauauuuuuaguagaga

SEQ ID NO: 266174 - RNA, 24 nt, Human
uagaacaagaaucccaaaugaagc

SEQ ID NO: 266175 - RNA, 22 nt, Human
uagagacaggguuuugccaugu

SEQ ID NO: 266176 - RNA, 19 nt, Human
uaggucccugccaccacgc

SEQ ID NO: 266177 - RNA, 24 nt, Human
uaguagagacaggguuuugccaug

SEQ ID NO: 266178 - RNA, 22 nt, Human
ucacccgggcuggagugcagug

SEQ ID NO: 266179 - RNA, 20 nt, Human
ucacucugacucuugcaucc

SEQ ID NO: 266180 - RNA, 19 nt, Human
ucacugcaaccucugccuc

SEQ ID NO: 266181 - RNA, 23 nt, Human
ucacugcaaccucugccuccaag

SEQ ID NO: 266182 - RNA, 24 nt, Human
uccaagcgauucuccugccucagc

SEQ ID NO: 266183 - RNA, 23 nt, Human
ucccaaguaguugggauuauagg

SEQ ID NO: 266184 - RNA, 24 nt, Human
ucccaaguaguugggauuauaggu

SEQ ID NO: 266185 - RNA, 18 nt, Human
uccccauccagggacaga

SEQ ID NO: 266186 - RNA, 24 nt, Human
uccccauccagggacagaucccuc

SEQ ID NO: 266187 - RNA, 18 nt, Human
ucccccugaacugacccc

SEQ ID NO: 266188 - RNA, 23 nt, Human
ucccuaaguguugggauuauagg

SEQ ID NO: 266189 - RNA, 19 nt, Human
ucuccugccucagccuccc

SEQ ID NO: 266190 - RNA, 24 nt, Human
ucuuguauugucacccgggcugga

SEQ ID NO: 266191 - RNA, 25 nt, Human
ucuuguauugucacccgggcuggag

SEQ ID NO: 266192 - RNA, 21 nt, Human
ugaaugaaguauacacaaaug

SEQ ID NO: 266193 - RNA, 20 nt, Human
ugaccagaaaaaacacuugc

SEQ ID NO: 266194 - RNA, 24 nt, Human
ugaccugaggugauccaccugccu

SEQ ID NO: 266195 - RNA, 20 nt, Human
ugagccaccacgcccagccc

SEQ ID NO: 266196 - RNA, 22 nt, Human
ugcaaaacacugaccagaaaaa

SEQ ID NO: 266197 - RNA, 24 nt, Human
ugcaaaacacugaccagaaaaaac

SEQ ID NO: 266198 - RNA, 20 nt, Human
ugcaaaacacugaccagaag

SEQ ID NO: 266199 - RNA, 20 nt, Human
ugcaguggcgugaccucggc

SEQ ID NO: 266200 - RNA, 24 nt, Human
ugccauguuggccaggcuagucuc

SEQ ID NO: 266201 - RNA, 24 nt, Human
ugccucagccucccaaguaguugg

SEQ ID NO: 266202 - RNA, 24 nt, Human
ugccuccaagcgauucuccugccu

SEQ ID NO: 266203 - RNA, 24 nt, Human
ugcuuuaggaaucauuacuuucuc

SEQ ID NO: 266204 - RNA, 23 nt, Human
uggagugcaguggcgugaccucg

SEQ ID NO: 266205 - RNA, 24 nt, Human
uggagugcaguggcgugaccucgg

SEQ ID NO: 266206 - RNA, 24 nt, Human
uggccaggcuagucucgaauuccu

SEQ ID NO: 266207 - RNA, 24 nt, Human
ugggauuauaggucccugccacca

SEQ ID NO: 266208 - RNA, 18 nt, Human
ugggauuauaggugugag

SEQ ID NO: 266209 - RNA, 19 nt, Human
ugggauuauaggugugagc

SEQ ID NO: 266210 - RNA, 22 nt, Human
ugggauuauaggugugagccac

SEQ ID NO: 266211 - RNA, 23 nt, Human
ugggauuauaggugugagccacc

SEQ ID NO: 266212 - RNA, 24 nt, Human
ugggauuauaggugugagccacca

SEQ ID NO: 266213 - RNA, 24 nt, Human
ugucaccaaguucugaaucuccca

SEQ ID NO: 266214 - RNA, 24 nt, Human
uuaguagagacaggguuuugccau

SEQ ID NO: 266215 - RNA, 18 nt, Human
uugcauuuuguuuuuuaa

SEQ ID NO: 266216 - RNA, 24 nt, Human
uugccauguuggccaggcuagucu

SEQ ID NO: 266217 - RNA, 21 nt, Human
uugggauuauaggugugagcc

SEQ ID NO: 266218 - RNA, 24 nt, Human
uuguauugucacccgggcuggagu

SEQ ID NO: 266219 - RNA, 23 nt, Human
uuuauauuuuuaguagagacagg

SEQ ID NO: 266220 - RNA, 24 nt, Human
uuuauauuuuuaguagagacaggg

SEQ ID NO: 266221 - RNA, 19 nt, Human
uuuuaagaaggucuuucua

SEQ ID NO: 266222 - RNA, 21 nt, Human
uuuuuaguagagacaggguuu

SEQ ID NO: 266223 - RNA, 21 nt, Human
uuuuuaguagagacaggguuu

SEQ ID NO: 266224 - RNA, 20 nt, Human
uuuuuauauuuuuaguagag

SEQ ID NO: 266225 - RNA, 24 nt, Human
aaaccugcaacacgaggcccuugg

SEQ ID NO: 266226 - RNA, 19 nt, Human
aaagugcugggguuacagg

SEQ ID NO: 266227 - RNA, 24 nt, Human
aaagugcugggguuacaggcguga

SEQ ID NO: 266228 - RNA, 21 nt, Human
aaccucagagaaaaccucagc

SEQ ID NO: 266229 - RNA, 19 nt, Human
aagaagggggcaggcaagg

SEQ ID NO: 266230 - RNA, 18 nt, Human
aagacaugauguggguuu

SEQ ID NO: 266231 - RNA, 19 nt, Human
aagugcugggguuacaggc

SEQ ID NO: 266232 - RNA, 26 nt, Human
aagugcugggguuacaggcgugagcc

SEQ ID NO: 266233 - RNA, 21 nt, Human
aagugucagcagugggcugag

SEQ ID NO: 266234 - RNA, 24 nt, Human
aauuuuguauuuuuacuagaggcg

SEQ ID NO: 266235 - RNA, 21 nt, Human
accugccguaugaccgugggc

SEQ ID NO: 266236 - RNA, 18 nt, Human
agaaaagcaaagcauugg

SEQ ID NO: 266237 - RNA, 20 nt, Human
agaaagaagggggcaggcaa

SEQ ID NO: 266238 - RNA, 20 nt, Human
agacagaaagacaaggugcc

SEQ ID NO: 266239 - RNA, 24 nt, Human
agacagaaagacaaggugccaagg

SEQ ID NO: 266240 - RNA, 18 nt, Human
agacagguaaacagacag

SEQ ID NO: 266241 - RNA, 26 nt, Human
agacagguaaacagacagaagggacc

SEQ ID NO: 266242 - RNA, 20 nt, Human
agagggcaccagagcccagc

SEQ ID NO: 266243 - RNA, 21 nt, Human
agcaaaaguucccuucucuca

SEQ ID NO: 266244 - RNA, 23 nt, Human
agcagggagaagcagcagaagga

SEQ ID NO: 266245 - RNA, 19 nt, Human
agcugggcagcccccaggc

SEQ ID NO: 266246 - RNA, 22 nt, Human
agcugggcagcccccaggcccu

SEQ ID NO: 266247 - RNA, 23 nt, Human
aggcagcugggcagcccccaggc

SEQ ID NO: 266248 - RNA, 24 nt, Human
aggucagguuggucucgaaauccu

SEQ ID NO: 266249 - RNA, 23 nt, Human
aggugggcuucggggugucccug

SEQ ID NO: 266250 - RNA, 19 nt, Human
aguagcugggauuagaggc

SEQ ID NO: 266251 - RNA, 24 nt, Human
aguagggcuggcauggcucgcucu

SEQ ID NO: 266252 - RNA, 24 nt, Human
agugauucuccugccucagccucc

SEQ ID NO: 266253 - RNA, 20 nt, Human
agugcagugguguacucuug

SEQ ID NO: 266254 - RNA, 23 nt, Human
agugcagugguguacucuuggcu

SEQ ID NO: 266255 - RNA, 24 nt, Human
agugcagugguguacucuuggcuc

SEQ ID NO: 266256 - RNA, 18 nt, Human
aguggcagugaggcacgc

SEQ ID NO: 266257 - RNA, 21 nt, Human
aguuucuccauguaggucagg

SEQ ID NO: 266258 - RNA, 25 nt, Human
auaaagcaucaaaaaaaccucagag

SEQ ID NO: 266259 - RNA, 24 nt, Human
auagaggcagcugggcagccccca

SEQ ID NO: 266260 - RNA, 26 nt, Human
auccugaccucagguuaucugcccgu

SEQ ID NO: 266261 - RNA, 24 nt, Human
caaagugcugggguuacaggcgug

SEQ ID NO: 266262 - RNA, 21 nt, Human
caaccucucggcuacauuccu

SEQ ID NO: 266263 - RNA, 19 nt, Human
caaggccagccccgucccc

SEQ ID NO: 266264 - RNA, 20 nt, Human
caagugauucuccugccuca

SEQ ID NO: 266265 - RNA, 22 nt, Human
caagugauucuccugccucagc

SEQ ID NO: 266266 - RNA, 22 nt, Human
caccaccaugcccggcuaauuu

SEQ ID NO: 266267 - RNA, 22 nt, Human
cacccgaaccccgucacugccc

SEQ ID NO: 266268 - RNA, 19 nt, Human
cacuccugggguagcuccu

SEQ ID NO: 266269 - RNA, 23 nt, Human
cacugcaaccuccacuucccggg

SEQ ID NO: 266270 - RNA, 20 nt, Human
cacugccucaaacugggaug

SEQ ID NO: 266271 - RNA, 20 nt, Human
cagagcccagcccacacaac

SEQ ID NO: 266272 - RNA, 24 nt, Human
cagagcccagcccacacaaccucu

SEQ ID NO: 266273 - RNA, 24 nt, Human
cagcacugccucaaacugggauga

SEQ ID NO: 266274 - RNA, 23 nt, Human
cagcagugggcugagacccccag

SEQ ID NO: 266275 - RNA, 24 nt, Human
cagcugggcagcccccaggcccuu

SEQ ID NO: 266276 - RNA, 25 nt, Human
caggaggugggagauugcagguggg

SEQ ID NO: 266277 - RNA, 19 nt, Human
cagggagacagguaaacag

SEQ ID NO: 266278 - RNA, 18 nt, Human
cauucuuaaggcagaaag

SEQ ID NO: 266279 - RNA, 19 nt, Human
cauugggcguugggagggu

SEQ ID NO: 266280 - RNA, 20 nt, Human
ccaaagugcugggguuacag

SEQ ID NO: 266281 - RNA, 22 nt, Human
ccaaagugcugggguuacaggc

SEQ ID NO: 266282 - RNA, 22 nt, Human
ccaaagugcugggguuacaggc

SEQ ID NO: 266283 - RNA, 24 nt, Human
ccaaagugcugggguuacaggcgu

SEQ ID NO: 266284 - RNA, 22 nt, Human
ccaccugguggcucccagggcc

SEQ ID NO: 266285 - RNA, 23 nt, Human
ccauguaggucagguuggucucg

SEQ ID NO: 266286 - RNA, 19 nt, Human
cccaggcuggagugcagug

SEQ ID NO: 266287 - RNA, 20 nt, Human
cccaggcuggagugcagugg

SEQ ID NO: 266288 - RNA, 18 nt, Human
ccccacgcucccaugcca

SEQ ID NO: 266289 - RNA, 24 nt, Human
ccccacuccagcacugccucaaaa

SEQ ID NO: 266290 - RNA, 25 nt, Human
ccccacuccagcacugccucaaaag

SEQ ID NO: 266291 - RNA, 23 nt, Human
cccccaggcccuugaggguagga

SEQ ID NO: 266292 - RNA, 19 nt, Human
cccgaguagcugggauuag

SEQ ID NO: 266293 - RNA, 23 nt, Human
cccggguucaagugauucuccuc

SEQ ID NO: 266294 - RNA, 23 nt, Human
cccggguucaagugauucuccug

SEQ ID NO: 266295 - RNA, 18 nt, Human
cccgucuccgccucccaa

SEQ ID NO: 266296 - RNA, 24 nt, Human
cccuugaggguaggagcagggaga

SEQ ID NO: 266297 - RNA, 22 nt, Human
ccgcuccucccaaggccagccc

SEQ ID NO: 266298 - RNA, 24 nt, Human
ccgucuccgccucccaaagugcug

SEQ ID NO: 266299 - RNA, 20 nt, Human
ccuauaaagcaucaaaaaaa

SEQ ID NO: 266300 - RNA, 23 nt, Human
ccugccucagccucccgaguagc

SEQ ID NO: 266301 - RNA, 18 nt, Human
ccuggcucugggaguggc

SEQ ID NO: 266302 - RNA, 21 nt, Human
ccuggcuuuccuauugcugug

SEQ ID NO: 266303 - RNA, 20 nt, Human
cgaaccccgucacugcccag

SEQ ID NO: 266304 - RNA, 24 nt, Human
cgcucuguugcccaggcuggagug

SEQ ID NO: 266305 - RNA, 24 nt, Human
cggagucucgcucuguugcccagg

SEQ ID NO: 266306 - RNA, 23 nt, Human
cggaguuucuccauguaggucag

SEQ ID NO: 266307 - RNA, 22 nt, Human
cggccuggcccacuccuggggu

SEQ ID NO: 266308 - RNA, 23 nt, Human
cgugcaccaccaugcccggcuaa

SEQ ID NO: 266309 - RNA, 24 nt, Human
cucacugcaaccuccacuucccgg

SEQ ID NO: 266310 - RNA, 23 nt, Human
cucagccucccgaguagcuggga

SEQ ID NO: 266311 - RNA, 24 nt, Human
cucgcucuguugcccaggcuggag

SEQ ID NO: 266312 - RNA, 21 nt, Human
cucucaaauauuuggcaucgg

SEQ ID NO: 266313 - RNA, 23 nt, Human
cucuguugcccaggcuggagugc

SEQ ID NO: 266314 - RNA, 23 nt, Human
cugcaaccuccacuucccggguu

SEQ ID NO: 266315 - RNA, 19 nt, Human
cugcccggccggccuggcg

SEQ ID NO: 266316 - RNA, 22 nt, Human
cugcccggccggccuggcgccc

SEQ ID NO: 266317 - RNA, 23 nt, Human
cugccucagccucccgaguagcu

SEQ ID NO: 266318 - RNA, 18 nt, Human
cuggaaguucgagucuuu

SEQ ID NO: 266319 - RNA, 21 nt, Human
cuucccggguucaagugauuc

SEQ ID NO: 266320 - RNA, 24 nt, Human
cuucccggguucaagugauucucc

SEQ ID NO: 266321 - RNA, 18 nt, Human
gaaagaagggggcaggca

SEQ ID NO: 266322 - RNA, 24 nt, Human
gaccucagguuaucugcccgucuc

SEQ ID NO: 266323 - RNA, 21 nt, Human
gaggacaguaaaagggcguuc

SEQ ID NO: 266324 - RNA, 20 nt, Human
gaggcggaguuucuccaugu

SEQ ID NO: 266325 - RNA, 24 nt, Human
gauuagaggcgugcaccaccaugc

SEQ ID NO: 266326 - RNA, 22 nt, Human
gcaaccuccacuucccggguuc

SEQ ID NO: 266327 - RNA, 19 nt, Human
gcaucaaaaaaaccucaga

SEQ ID NO: 266328 - RNA, 19 nt, Human
gccuuccggggcccucuuc

SEQ ID NO: 266329 - RNA, 25 nt, Human
gcuggagucagggaaaacacaucca

SEQ ID NO: 266330 - RNA, 23 nt, Human
ggacaguaaaagggcguucuuuu

SEQ ID NO: 266331 - RNA, 23 nt, Human
ggagucucgcucuguugcccagg

SEQ ID NO: 266332 - RNA, 20 nt, Human
ggaugaucucucagcgucuu

SEQ ID NO: 266333 - RNA, 23 nt, Human
ggauugcagaagugucagcagug

SEQ ID NO: 266334 - RNA, 25 nt, Human
ggcaggaggugggagauuggggacc

SEQ ID NO: 266335 - RNA, 24 nt, Human
ggcccuggcuuuccuauugcugug

SEQ ID NO: 266336 - RNA, 22 nt, Human
ggcguucuuuuuuuuuuuuuuu

SEQ ID NO: 266337 - RNA, 20 nt, Human
ggcucgcucuggcccuggcu

SEQ ID NO: 266338 - RNA, 20 nt, Human
ggcugcaaaagaugcagaug

SEQ ID NO: 266339 - RNA, 18 nt, Human
ggcuggaugaucucucag

SEQ ID NO: 266340 - RNA, 20 nt, Human
gggaagagggcaccagagcc

SEQ ID NO: 266341 - RNA, 19 nt, Human
gggcaggaggugggagauu

SEQ ID NO: 266342 - RNA, 22 nt, Human
gggcaggcaaggguggucucag

SEQ ID NO: 266343 - RNA, 22 nt, Human
gggccagaaaaggcccuacauc

SEQ ID NO: 266344 - RNA, 20 nt, Human
ggguagcuccuggccccugc

SEQ ID NO: 266345 - RNA, 24 nt, Human
ggguuacaggcgugagccaccaug

SEQ ID NO: 266346 - RNA, 22 nt, Human
ggguucaagugauucuccugcc

SEQ ID NO: 266347 - RNA, 18 nt, Human
gguuacaggcgugagcca

SEQ ID NO: 266348 - RNA, 24 nt, Human
gguuacaggcgugagccaccaugc

SEQ ID NO: 266349 - RNA, 24 nt, Human
gugauucuccugccucagccuccc

SEQ ID NO: 266350 - RNA, 24 nt, Human
uaaacagacagaaagacaaggugc

SEQ ID NO: 266351 - RNA, 22 nt, Human
uaagacggagucucgcucuguu

SEQ ID NO: 266352 - RNA, 22 nt, Human
uaaggagaccacauuggcaaac

SEQ ID NO: 266353 - RNA, 23 nt, Human
uaauuuuguauuuuuacuagagg

SEQ ID NO: 266354 - RNA, 24 nt, Human
uacaggcgugagccaccaugccca

SEQ ID NO: 266355 - RNA, 24 nt, Human
uagcuccuggccccugcugcuccc

SEQ ID NO: 266356 - RNA, 24 nt, Human
uaggagcagggagaagcagcagaa

SEQ ID NO: 266357 - RNA, 18 nt, Human
uauaaagcaucaaaaaaa

SEQ ID NO: 266358 - RNA, 19 nt, Human
ucaagugauucuccugccu

SEQ ID NO: 266359 - RNA, 24 nt, Human
ucacugcaaccuccacuucccggg

SEQ ID NO: 266360 - RNA, 25 nt, Human
ucacugcaaccuccacuucccgggu

SEQ ID NO: 266361 - RNA, 18 nt, Human
ucagagugggcugcaaaa

SEQ ID NO: 266362 - RNA, 20 nt, Human
ucagccucccgaguagcugg

SEQ ID NO: 266363 - RNA, 18 nt, Human
uccacuguguccuugggu

SEQ ID NO: 266364 - RNA, 24 nt, Human
ucccaaagugcugggguuacaggc

SEQ ID NO: 266365 - RNA, 18 nt, Human
ucccaugccagggagggg

SEQ ID NO: 266366 - RNA, 24 nt, Human
ucccgaguagcugggauuagaggc

SEQ ID NO: 266367 - RNA, 21 nt, Human
ucccggguucaagugauucuc

SEQ ID NO: 266368 - RNA, 24 nt, Human
ucccggguucaagugauucuccug

SEQ ID NO: 266369 - RNA, 19 nt, Human
uccuggccagggaagaggg

SEQ ID NO: 266370 - RNA, 21 nt, Human
uccuugggugggaaauggcuu

SEQ ID NO: 266371 - RNA, 24 nt, Human
ucgcucuguugcccaggcuggagu

SEQ ID NO: 266372 - RNA, 24 nt, Human
ucuccugccucagccucccgagua

SEQ ID NO: 266373 - RNA, 19 nt, Human
ucucgcucuguugcccagg

SEQ ID NO: 266374 - RNA, 23 nt, Human
ucucgcucuguugcccaggcugg

SEQ ID NO: 266375 - RNA, 24 nt, Human
ucucgcucuguugcccaggcugga

SEQ ID NO: 266376 - RNA, 26 nt, Human
ucucgcucuguugcccaggcuggagu

SEQ ID NO: 266377 - RNA, 27 nt, Human
ucucgcucuguugcccaggcuggagug

SEQ ID NO: 266378 - RNA, 18 nt, Human
ucuguugcccaggcugga

SEQ ID NO: 266379 - RNA, 24 nt, Human
ucuguugcccaggcuggagugcag

SEQ ID NO: 266380 - RNA, 20 nt, Human
ucuugguuuuguggcaaccu

SEQ ID NO: 266381 - RNA, 18 nt, Human
ugaccucagguuaucugc

SEQ ID NO: 266382 - RNA, 24 nt, Human
ugaccucagguuaucugcccgucu

SEQ ID NO: 266383 - RNA, 23 nt, Human
ugaggaagggcugccaucuuggu

SEQ ID NO: 266384 - RNA, 23 nt, Human
ugaggacaguaaaagggcguucu

SEQ ID NO: 266385 - RNA, 20 nt, Human
ugauucuccugccucagccu

SEQ ID NO: 266386 - RNA, 22 nt, Human
ugcagugguguacucuuggcuc

SEQ ID NO: 266387 - RNA, 18 nt, Human
ugcccaggcuggagugca

SEQ ID NO: 266388 - RNA, 21 nt, Human
ugcccaggcuggagugcagug

SEQ ID NO: 266389 - RNA, 24 nt, Human
ugcccaggcuggagugcaguggug

SEQ ID NO: 266390 - RNA, 23 nt, Human
ugcccggcuaauuuuguauuuuu

SEQ ID NO: 266391 - RNA, 19 nt, Human
ugccguaugaccgugggca

SEQ ID NO: 266392 - RNA, 18 nt, Human
ugccucaaacugggauga

SEQ ID NO: 266393 - RNA, 24 nt, Human
ugccucagccucccgaguagcugg

SEQ ID NO: 266394 - RNA, 21 nt, Human
ugcucccucaagagagggaug

SEQ ID NO: 266395 - RNA, 21 nt, Human
ugcucuguaacaucaaggggc

SEQ ID NO: 266396 - RNA, 20 nt, Human
uggagugcagugguguacuc

SEQ ID NO: 266397 - RNA, 21 nt, Human
uggagugcagugguguacucu

SEQ ID NO: 266398 - RNA, 24 nt, Human
uggagugcagugguguacucuugg

SEQ ID NO: 266399 - RNA, 21 nt, Human
uggaugaucucucagcgucuu

SEQ ID NO: 266400 - RNA, 22 nt, Human
uggcagugaggcacgcugagga

SEQ ID NO: 266401 - RNA, 22 nt, Human
uggcauggcucgcucuggcccu

SEQ ID NO: 266402 - RNA, 20 nt, Human
uggcccacuccugggguagc

SEQ ID NO: 266403 - RNA, 19 nt, Human
ugggaggguccagugggcg

SEQ ID NO: 266404 - RNA, 19 nt, Human
ugggaguggcagugaggca

SEQ ID NO: 266405 - RNA, 24 nt, Human
ugggauuagaggcgugcaccacca

SEQ ID NO: 266406 - RNA, 25 nt, Human
ugggauuagaggcgugcaccaccau

SEQ ID NO: 266407 - RNA, 18 nt, Human
ugggguuacaggcgugag

SEQ ID NO: 266408 - RNA, 22 nt, Human
ugggguuacaggcgugagccac

SEQ ID NO: 266409 - RNA, 23 nt, Human
ugggguuacaggcgugagccacc

SEQ ID NO: 266410 - RNA, 24 nt, Human
ugggguuacaggcgugagccacca

SEQ ID NO: 266411 - RNA, 25 nt, Human
ugggguuacaggcgugagccaccau

SEQ ID NO: 266412 - RNA, 24 nt, Human
uguacucuuggcucacugcaaccu

SEQ ID NO: 266413 - RNA, 22 nt, Human
ugucaucccaaggccuggacuc

SEQ ID NO: 266414 - RNA, 19 nt, Human
uguccuggccagggaagag

SEQ ID NO: 266415 - RNA, 23 nt, Human
uguccuugggugggaaauggcuu

SEQ ID NO: 266416 - RNA, 21 nt, Human
ugugcgggcaagcugucuguc

SEQ ID NO: 266417 - RNA, 19 nt, Human
uuacaggcgugagccacca

SEQ ID NO: 266418 - RNA, 26 nt, Human
uuauggggcucccuggcucugggagu

SEQ ID NO: 266419 - RNA, 21 nt, Human
uucaagugauucuccugccuc

SEQ ID NO: 266420 - RNA, 23 nt, Human
uucaagugauucuccugccucag

SEQ ID NO: 266421 - RNA, 24 nt, Human
uucaagugauucuccugccucagc

SEQ ID NO: 266422 - RNA, 21 nt, Human
uucuuuuuuuuuuuuuuuaag

SEQ ID NO: 266423 - RNA, 24 nt, Human
uugcccaggcuggagugcaguggu

SEQ ID NO: 266424 - RNA, 18 nt, Human
uugggcaucugucuucug

SEQ ID NO: 266425 - RNA, 21 nt, Human
uugguugccuuccggggcccu

SEQ ID NO: 266426 - RNA, 19 nt, Human
uuuuguauuuuuacuagag

SEQ ID NO: 266427 - RNA, 25 nt, Human
uuuuuuuuuuuuaagacggagucuc

SEQ ID NO: 266428 - RNA, 22 nt, Human
uuuuuuuuuuuuuuaagacgga

SEQ ID NO: 266429 - RNA, 18 nt, Human
aaagaacccaaacccagg

SEQ ID NO: 266430 - RNA, 18 nt, Human
aaagaacccaaacccagg

SEQ ID NO: 266431 - RNA, 18 nt, Human
aagaacccaaacccaggc

SEQ ID NO: 266432 - RNA, 21 nt, Human
aagaacccaaacccaggcccu

SEQ ID NO: 266433 - RNA, 21 nt, Human
aaggguucccaaggacaggau

SEQ ID NO: 266434 - RNA, 19 nt, Human
aagugcuuguccuguggcc

SEQ ID NO: 266435 - RNA, 22 nt, Human
aauaaguggaaggagagaggaa

SEQ ID NO: 266436 - RNA, 19 nt, Human
acaccgagacggagacggc

SEQ ID NO: 266437 - RNA, 18 nt, Human
accaaaccauaaaauugc

SEQ ID NO: 266438 - RNA, 18 nt, Human
acccaaacccaggcccuc

SEQ ID NO: 266439 - RNA, 24 nt, Human
acucugcuggaugggcuguuccgc

SEQ ID NO: 266440 - RNA, 25 nt, Human
acucugcuggaugggcuguuccgcu

SEQ ID NO: 266441 - RNA, 22 nt, Human
acuguccucuccagagcggugg

SEQ ID NO: 266442 - RNA, 21 nt, Human
agagaggaaguuccaguuaga

SEQ ID NO: 266443 - RNA, 24 nt, Human
agcaacccugcaaacggugaaagu

SEQ ID NO: 266444 - RNA, 18 nt, Human
agcgcgggggcucaggug

SEQ ID NO: 266445 - RNA, 21 nt, Human
agcgggaggugguccagaggg

SEQ ID NO: 266446 - RNA, 19 nt, Human
aggaaguuccaguuagaug

SEQ ID NO: 266447 - RNA, 27 nt, Human
aggcacaggaggcugcacacaggcacu

SEQ ID NO: 266448 - RNA, 22 nt, Human
aggcuccccucauccucucacc

SEQ ID NO: 266449 - RNA, 18 nt, Human
agggauggggagugggca

SEQ ID NO: 266450 - RNA, 19 nt, Human
auaccaaaggcagaaaacc

SEQ ID NO: 266451 - RNA, 23 nt, Human
auccccaccccuucccucugcag

SEQ ID NO: 266452 - RNA, 24 nt, Human
caaacccaggcccuccuccugccc

SEQ ID NO: 266453 - RNA, 19 nt, Human
caaggcaccauccaaaggc

SEQ ID NO: 266454 - RNA, 19 nt, Human
caaggcaccauccaaaggc

SEQ ID NO: 266455 - RNA, 24 nt, Human
cagagugggguccugcauccccac

SEQ ID NO: 266456 - RNA, 18 nt, Human
cagcagcagggaggacac

SEQ ID NO: 266457 - RNA, 21 nt, Human
cagcagcuggggcucaguggg

SEQ ID NO: 266458 - RNA, 21 nt, Human
cagcccaggggucugggcggg

SEQ ID NO: 266459 - RNA, 23 nt, Human
cagcgggaggugguccaggacca

SEQ ID NO: 266460 - RNA, 18 nt, Human
caggacucggaguguggc

SEQ ID NO: 266461 - RNA, 21 nt, Human
caggaggcugcacacaggcac

SEQ ID NO: 266462 - RNA, 19 nt, Human
caggccccaaggggccgug

SEQ ID NO: 266463 - RNA, 25 nt, Human
caggccccaaggggccguguagagg

SEQ ID NO: 266464 - RNA, 21 nt, Human
caggcccuccuccugcccucc

SEQ ID NO: 266465 - RNA, 21 nt, Human
cagggucagcagcagggagga

SEQ ID NO: 266466 - RNA, 20 nt, Human
cauuacaucaagagaacccc

SEQ ID NO: 266467 - RNA, 19 nt, Human
ccaaggcaccauccaaagg

SEQ ID NO: 266468 - RNA, 22 nt, Human
ccaaggcaccauccaaaggcug

SEQ ID NO: 266469 - RNA, 21 nt, Human
ccacagccacaggcugcgagu

SEQ ID NO: 266470 - RNA, 19 nt, Human
cccagccucuacuucccuc

SEQ ID NO: 266471 - RNA, 21 nt, Human
cccaggacucggaguguggcc

SEQ ID NO: 266472 - RNA, 21 nt, Human
ccccaccccuucccucugcag

SEQ ID NO: 266473 - RNA, 22 nt, Human
ccccacgcugugcugcugcccc

SEQ ID NO: 266474 - RNA, 27 nt, Human
cccccucauccucucaccacaugccug

SEQ ID NO: 266475 - RNA, 27 nt, Human
ccccucauccucucaccacaugccuga

SEQ ID NO: 266476 - RNA, 24 nt, Human
ccccucauccucucaccgcauggg

SEQ ID NO: 266477 - RNA, 23 nt, Human
cccgacaguuuccgcuccucccg

SEQ ID NO: 266478 - RNA, 19 nt, Human
cccgcgaugagcucgggag

SEQ ID NO: 266479 - RNA, 18 nt, Human
cccuaaauuccugauccu

SEQ ID NO: 266480 - RNA, 22 nt, Human
cccucaaggccuucucagcagc

SEQ ID NO: 266481 - RNA, 18 nt, Human
cccucgcagcagguuucu

SEQ ID NO: 266482 - RNA, 18 nt, Human
cccugggugaggcacagg

SEQ ID NO: 266483 - RNA, 18 nt, Human
cccuggugggggccuugg

SEQ ID NO: 266484 - RNA, 20 nt, Human
ccgcauggggcauuugcucc

SEQ ID NO: 266485 - RNA, 20 nt, Human
ccucacccuggcagcucccc

SEQ ID NO: 266486 - RNA, 24 nt, Human
ccucauugucuacaaucaugcccg

SEQ ID NO: 266487 - RNA, 27 nt, Human
ccuccagccuuugacaggcaacucauu

SEQ ID NO: 266488 - RNA, 23 nt, Human
ccucccccucauccucucaccac

SEQ ID NO: 266489 - RNA, 20 nt, Human
ccuccuccugcccuccagcc

SEQ ID NO: 266490 - RNA, 21 nt, Human
ccucuggggugagauuggucu

SEQ ID NO: 266491 - RNA, 21 nt, Human
ccugagcuggguccccagggc

SEQ ID NO: 266492 - RNA, 18 nt, Human
ccugcauccccaccccuu

SEQ ID NO: 266493 - RNA, 21 nt, Human
ccugcauccccaccccuuccc

SEQ ID NO: 266494 - RNA, 24 nt, Human
ccuggcugaggggcugggagcucu

SEQ ID NO: 266495 - RNA, 20 nt, Human
ccuucucggccggcgcggcu

SEQ ID NO: 266496 - RNA, 22 nt, Human
ccuucucggccggcgcggcucc

SEQ ID NO: 266497 - RNA, 22 nt, Human
ccuuuccccucagcgcccggga

SEQ ID NO: 266498 - RNA, 22 nt, Human
cgcacccgacaguuuccgcucc

SEQ ID NO: 266499 - RNA, 22 nt, Human
cgccgaacucugagcagagccu

SEQ ID NO: 266500 - RNA, 20 nt, Human
cggggagggggcgcgcacgc

SEQ ID NO: 266501 - RNA, 21 nt, Human
cguaggcuccccucauccucu

SEQ ID NO: 266502 - RNA, 22 nt, Human
cucaccuugggcaagagaggug

SEQ ID NO: 266503 - RNA, 19 nt, Human
cucagcagcuggggcucag

SEQ ID NO: 266504 - RNA, 21 nt, Human
cuccagccuuugacaggcaac

SEQ ID NO: 266505 - RNA, 22 nt, Human
cucccucccccucauccucuca

SEQ ID NO: 266506 - RNA, 19 nt, Human
cucugcccacuccaccuga

SEQ ID NO: 266507 - RNA, 22 nt, Human
cucuugcaccucugcccacucc

SEQ ID NO: 266508 - RNA, 22 nt, Human
cugccgggcgcuguaggggccg

SEQ ID NO: 266509 - RNA, 22 nt, Human
cuggcagugcucccuggcacca

SEQ ID NO: 266510 - RNA, 21 nt, Human
cuggcucaccuugggcaagag

SEQ ID NO: 266511 - RNA, 19 nt, Human
cuggcuccuggcugagggg

SEQ ID NO: 266512 - RNA, 26 nt, Human
cuggugggggccuuggugggguaguc

SEQ ID NO: 266513 - RNA, 21 nt, Human
cuucccgucaucccgugucuu

SEQ ID NO: 266514 - RNA, 20 nt, Human
cuuguccuguggccucagcc

SEQ ID NO: 266515 - RNA, 21 nt, Human
gaaggagagaggaaguuccag

SEQ ID NO: 266516 - RNA, 18 nt, Human
gaccacagccacaggcug

SEQ ID NO: 266517 - RNA, 19 nt, Human
gagaacccccucauugucu

SEQ ID NO: 266518 - RNA, 19 nt, Human
gagaccggguuguugggac

SEQ ID NO: 266519 - RNA, 18 nt, Human
gaggaaagaacccaaacc

SEQ ID NO: 266520 - RNA, 20 nt, Human
gaggggcuggcccugugggu

SEQ ID NO: 266521 - RNA, 24 nt, Human
gagguggcuauggggcucccgcag

SEQ ID NO: 266522 - RNA, 24 nt, Human
gagucucccaggggagaaccuggg

SEQ ID NO: 266523 - RNA, 20 nt, Human
gauaccaaaggcagaaaacc

SEQ ID NO: 266524 - RNA, 21 nt, Human
gauaccaaaggcagaaaacca

SEQ ID NO: 266525 - RNA, 28 nt, Human
gauaccaaaggcagaaaaccaggaagga

SEQ ID NO: 266526 - RNA, 21 nt, Human
gaucauacccuaaauuccuga

SEQ ID NO: 266527 - RNA, 20 nt, Human
gcacuugguggguucugccg

SEQ ID NO: 266528 - RNA, 22 nt, Human
gcacuugguggguucugccggc

SEQ ID NO: 266529 - RNA, 24 nt, Human
gccacggggcauccgcaccaacua

SEQ ID NO: 266530 - RNA, 19 nt, Human
gcgggggcucaggugggcg

SEQ ID NO: 266531 - RNA, 20 nt, Human
gcucccagccucuacuuccc

SEQ ID NO: 266532 - RNA, 19 nt, Human
gcuggcggcugggaguugg

SEQ ID NO: 266533 - RNA, 20 nt, Human
gcuuuggcuggcggcuggga

SEQ ID NO: 266534 - RNA, 22 nt, Human
ggaaggagagaggaaguuccag

SEQ ID NO: 266535 - RNA, 24 nt, Human
ggacucacucugcuggaugggcug

SEQ ID NO: 266536 - RNA, 21 nt, Human
ggcagugcucccuggcaccag

SEQ ID NO: 266537 - RNA, 18 nt, Human
ggcccuccuccugcccuc

SEQ ID NO: 266538 - RNA, 18 nt, Human
ggccggggcgaggccgcg

SEQ ID NO: 266539 - RNA, 22 nt, Human
ggcuaaggggcccaaggcacca

SEQ ID NO: 266540 - RNA, 23 nt, Human
ggcugccgggcgcuguaggggcc

SEQ ID NO: 266541 - RNA, 24 nt, Human
ggcugggaggaaagaacccaaacc

SEQ ID NO: 266542 - RNA, 20 nt, Human
gggaaggcaggagaaguguc

SEQ ID NO: 266543 - RNA, 21 nt, Human
gggaaggcaggagaagugucu

SEQ ID NO: 266544 - RNA, 22 nt, Human
gggaccguggacaguaaggaaa

SEQ ID NO: 266545 - RNA, 19 nt, Human
gggcaugagaccggguugu

SEQ ID NO: 266546 - RNA, 19 nt, Human
gggcauggguugggaggca

SEQ ID NO: 266547 - RNA, 22 nt, Human
gggcgcuguaggggccgggaca

SEQ ID NO: 266548 - RNA, 19 nt, Human
gggcucaggugggcgcgcu

SEQ ID NO: 266549 - RNA, 18 nt, Human
ggggaagguggucucaga

SEQ ID NO: 266550 - RNA, 23 nt, Human
ggggucugggcggggcaccaggg

SEQ ID NO: 266551 - RNA, 23 nt, Human
ggguuguugggaccacucugggg

SEQ ID NO: 266552 - RNA, 23 nt, Human
ggucugggcggggcaccaggguc

SEQ ID NO: 266553 - RNA, 22 nt, Human
guagagggcggggugggcaucc

SEQ ID NO: 266554 - RNA, 24 nt, Human
guagagggcggggugggcauccug

SEQ ID NO: 266555 - RNA, 23 nt, Human
gucagaggcccuggugggggccu

SEQ ID NO: 266556 - RNA, 22 nt, Human
guccuguggccucagcugggag

SEQ ID NO: 266557 - RNA, 20 nt, Human
gucuggacgucagcccaggg

SEQ ID NO: 266558 - RNA, 25 nt, Human
gugggggccuugguggcaaagggag

SEQ ID NO: 266559 - RNA, 22 nt, Human
uaaaggcaccauccaguugccu

SEQ ID NO: 266560 - RNA, 21 nt, Human
uaaaguuaauuuacuggaaaa

SEQ ID NO: 266561 - RNA, 19 nt, Human
uaagaggaccacagccaca

SEQ ID NO: 266562 - RNA, 20 nt, Human
uaagaggaccacagccacag

SEQ ID NO: 266563 - RNA, 21 nt, Human
uaaggggcccaaggcaccauc

SEQ ID NO: 266564 - RNA, 20 nt, Human
uacggggagggggcgcgcac

SEQ ID NO: 266565 - RNA, 20 nt, Human
uagagggcggggugggcauc

SEQ ID NO: 266566 - RNA, 24 nt, Human
uaggguuccugacccaaguguggu

SEQ ID NO: 266567 - RNA, 25 nt, Human
ucagcgcccgggacacgugaccgag

SEQ ID NO: 266568 - RNA, 24 nt, Human
ucaguacaucccucucuugcaccu

SEQ ID NO: 266569 - RNA, 22 nt, Human
uccaggugcucugacuugaccu

SEQ ID NO: 266570 - RNA, 24 nt, Human
ucccgugucuugaccccgcccuug

SEQ ID NO: 266571 - RNA, 18 nt, Human
ucccucucuugcaccucu

SEQ ID NO: 266572 - RNA, 19 nt, Human
ucccugagcugggucccca

SEQ ID NO: 266573 - RNA, 23 nt, Human
ucuguggcaggacgggaagaagc

SEQ ID NO: 266574 - RNA, 23 nt, Human
ugacccaaguguggugacagcag

SEQ ID NO: 266575 - RNA, 23 nt, Human
ugagaaaggguucccaaggacag

SEQ ID NO: 266576 - RNA, 18 nt, Human
ugagcucgggaggggccg

SEQ ID NO: 266577 - RNA, 21 nt, Human
ugagcucgggaggggccgggg

SEQ ID NO: 266578 - RNA, 22 nt, Human
ugaggaaauaaguggaaggaga

SEQ ID NO: 266579 - RNA, 21 nt, Human
ugcacacaggcacuugguggg

SEQ ID NO: 266580 - RNA, 24 nt, Human
ugcacacaggcacuugguggguuc

SEQ ID NO: 266581 - RNA, 20 nt, Human
ugcaccucugcccacuccag

SEQ ID NO: 266582 - RNA, 22 nt, Human
ugcuaaucugggcugagggcac

SEQ ID NO: 266583 - RNA, 23 nt, Human
ugcugcugccccgcuuccugcuu

SEQ ID NO: 266584 - RNA, 19 nt, Human
uggaugggcuguuccgcuu

SEQ ID NO: 266585 - RNA, 24 nt, Human
uggcaaaacuaugaguguugcuaa

SEQ ID NO: 266586 - RNA, 22 nt, Human
uggcaagcuggcagugcucccu

SEQ ID NO: 266587 - RNA, 23 nt, Human
uggcaagcuggcagugcucccug

SEQ ID NO: 266588 - RNA, 22 nt, Human
uggccgggcuccgggccaggcc

SEQ ID NO: 266589 - RNA, 24 nt, Human
uggccucagcugggaggcccuggc

SEQ ID NO: 266590 - RNA, 21 nt, Human
ugggaggcccuggcgcugggg

SEQ ID NO: 266591 - RNA, 24 nt, Human
ugggcagaaacuggcaagcuggca

SEQ ID NO: 266592 - RNA, 20 nt, Human
ugggcauccuggccuggccu

SEQ ID NO: 266593 - RNA, 21 nt, Human
uggggcuaaggggcccaaggc

SEQ ID NO: 266594 - RNA, 20 nt, Human
uggggcucaguggggaaggu

SEQ ID NO: 266595 - RNA, 22 nt, Human
uguaaagcaacaaguuugagga

SEQ ID NO: 266596 - RNA, 22 nt, Human
uguccaggugcucugacuugac

SEQ ID NO: 266597 - RNA, 19 nt, Human
uguccuguggccucagcug

SEQ ID NO: 266598 - RNA, 18 nt, Human
ugucuaguguaaagcaac

SEQ ID NO: 266599 - RNA, 23 nt, Human
uguggccgggcuccgggccaggc

SEQ ID NO: 266600 - RNA, 19 nt, Human
uuccugcuucccgucaucc

SEQ ID NO: 266601 - RNA, 23 nt, Human
uugcugggcagaaacuggcaagc

SEQ ID NO: 266602 - RNA, 22 nt, Human
uugggaagcagggauggggagu

SEQ ID NO: 266603 - RNA, 20 nt, Human
aaaccuaccuuaugaaugag

SEQ ID NO: 266604 - RNA, 18 nt, Human
aaauguacaugcuugaaa

SEQ ID NO: 266605 - RNA, 18 nt, Human
aagaguccacucguacuc

SEQ ID NO: 266606 - RNA, 20 nt, Human
acccuuggcacguacauggg

SEQ ID NO: 266607 - RNA, 21 nt, Human
acuuauggagugauacucccu

SEQ ID NO: 266608 - RNA, 18 nt, Human
agagaaaucaaagccagc

SEQ ID NO: 266609 - RNA, 20 nt, Human
agaggggacuccauccaggc

SEQ ID NO: 266610 - RNA, 20 nt, Human
agcaggcggggcgcaugcug

SEQ ID NO: 266611 - RNA, 22 nt, Human
aggcgggauuggcggugcuagg

SEQ ID NO: 266612 - RNA, 24 nt, Human
aggcucccgaacacccaagcacuc

SEQ ID NO: 266613 - RNA, 21 nt, Human
aggugagggcgagacggcggc

SEQ ID NO: 266614 - RNA, 21 nt, Human
aggugagggcgagacggcggc

SEQ ID NO: 266615 - RNA, 19 nt, Human
augcugcggagggcaagag

SEQ ID NO: 266616 - RNA, 27 nt, Human
caaaaacaggcucccgaacacccaagc

SEQ ID NO: 266617 - RNA, 26 nt, Human
caacccagccuuuucaguguccuccu

SEQ ID NO: 266618 - RNA, 20 nt, Human
caagagagaugaaagaaaug

SEQ ID NO: 266619 - RNA, 18 nt, Human
cacccaagcacucacagg

SEQ ID NO: 266620 - RNA, 21 nt, Human
cacccaagcacucacaggagc

SEQ ID NO: 266621 - RNA, 25 nt, Human
caccuacagccauucucuaggccug

SEQ ID NO: 266622 - RNA, 21 nt, Human
cacuccucuuucuucggcccc

SEQ ID NO: 266623 - RNA, 23 nt, Human
cacuuguccucucaccagguuua

SEQ ID NO: 266624 - RNA, 20 nt, Human
cagaauagcuccaggccuug

SEQ ID NO: 266625 - RNA, 24 nt, Human
cagagggcggguccucccugaagg

SEQ ID NO: 266626 - RNA, 24 nt, Human
cagcaggaccagcccccagccccu

SEQ ID NO: 266627 - RNA, 19 nt, Human
caggaccagcccccagccc

SEQ ID NO: 266628 - RNA, 28 nt, Human
ccaaaaacaggcucccgaacacccaagc

SEQ ID NO: 266629 - RNA, 18 nt, Human
ccagagaaaucaaagcca

SEQ ID NO: 266630 - RNA, 20 nt, Human
ccagagaaaucaaagccagc

SEQ ID NO: 266631 - RNA, 18 nt, Human
cccccagccccugaccug

SEQ ID NO: 266632 - RNA, 22 nt, Human
ccccucaccuggucugugccug

SEQ ID NO: 266633 - RNA, 22 nt, Human
cccugaaggaagguggcagaga

SEQ ID NO: 266634 - RNA, 21 nt, Human
cccugccucacuccucuuucu

SEQ ID NO: 266635 - RNA, 22 nt, Human
cccugccucacuccucuuucuu

SEQ ID NO: 266636 - RNA, 19 nt, Human
cccugggcucagcaggcca

SEQ ID NO: 266637 - RNA, 23 nt, Human
ccuacagccauucucuaggccug

SEQ ID NO: 266638 - RNA, 25 nt, Human
ccuccgccaaaaacaggcucccgaa

SEQ ID NO: 266639 - RNA, 28 nt, Human
ccucgcuccccugccucacuccucuuuc

SEQ ID NO: 266640 - RNA, 22 nt, Human
ccugaccugcuuggcggcccug

SEQ ID NO: 266641 - RNA, 20 nt, Human
ccugauggucccggcaaagu

SEQ ID NO: 266642 - RNA, 20 nt, Human
cgcgucuucgccgggucccg

SEQ ID NO: 266643 - RNA, 21 nt, Human
cggcccaggugaguccgaugc

SEQ ID NO: 266644 - RNA, 22 nt, Human
cggccccuuaauccguacuccu

SEQ ID NO: 266645 - RNA, 20 nt, Human
cggggcgcaugcugcggagg

SEQ ID NO: 266646 - RNA, 20 nt, Human
cucauuguggauuguaaggg

SEQ ID NO: 266647 - RNA, 19 nt, Human
cuccauggggaagguacca

SEQ ID NO: 266648 - RNA, 19 nt, Human
cuccucuuucuucggcccc

SEQ ID NO: 266649 - RNA, 20 nt, Human
cugcagggacugaccuagaa

SEQ ID NO: 266650 - RNA, 22 nt, Human
cugccucacuccucuuucuucg

SEQ ID NO: 266651 - RNA, 23 nt, Human
cuggagcuccucugccccaugug

SEQ ID NO: 266652 - RNA, 22 nt, Human
cuucaaaaguugguuccccucc

SEQ ID NO: 266653 - RNA, 19 nt, Human
cuuggagaagcaauugcuc

SEQ ID NO: 266654 - RNA, 22 nt, Human
gacccagagaaaucaaagccag

SEQ ID NO: 266655 - RNA, 21 nt, Human
gacugaccuagaaagcaguga

SEQ ID NO: 266656 - RNA, 22 nt, Human
gagggcggguccucccugaagg

SEQ ID NO: 266657 - RNA, 22 nt, Human
gcaaaguguaaaccagugcccc

SEQ ID NO: 266658 - RNA, 18 nt, Human
gccucgcuccccugccuc

SEQ ID NO: 266659 - RNA, 21 nt, Human
gcgggauuggcggugcuaggu

SEQ ID NO: 266660 - RNA, 21 nt, Human
ggcaagaguccacucguacuc

SEQ ID NO: 266661 - RNA, 19 nt, Human
ggcggcccugauggucccg

SEQ ID NO: 266662 - RNA, 20 nt, Human
gguuuuguccuccugguucc

SEQ ID NO: 266663 - RNA, 22 nt, Human
gguuuuguccuccugguuccua

SEQ ID NO: 266664 - RNA, 20 nt, Human
gucugugccuggagcuccuc

SEQ ID NO: 266665 - RNA, 20 nt, Human
uacagcauuuaacacaaacc

SEQ ID NO: 266666 - RNA, 21 nt, Human
uauagggaaagaguugagaag

SEQ ID NO: 266667 - RNA, 23 nt, Human
uauccccucaccuggucugugcc

SEQ ID NO: 266668 - RNA, 22 nt, Human
ucaaagccagcaggaccagccc

SEQ ID NO: 266669 - RNA, 19 nt, Human
ucacuuguccucucaccag

SEQ ID NO: 266670 - RNA, 25 nt, Human
ucacuuguccucucaccagguuuaa

SEQ ID NO: 266671 - RNA, 19 nt, Human
uccacucguacucgccgcu

SEQ ID NO: 266672 - RNA, 20 nt, Human
ucccgaacacccaagcacuc

SEQ ID NO: 266673 - RNA, 23 nt, Human
ucccgaacacccaagcacucaca

SEQ ID NO: 266674 - RNA, 22 nt, Human
ucccugaaggaagguggcagag

SEQ ID NO: 266675 - RNA, 24 nt, Human
uccguaguuggaaaaaagcagagc

SEQ ID NO: 266676 - RNA, 25 nt, Human
ucgccgggucccgcugccggggaaa

SEQ ID NO: 266677 - RNA, 24 nt, Human
ucugcagagggcggguccucccuu

SEQ ID NO: 266678 - RNA, 18 nt, Human
ugaccuagaaagcaguga

SEQ ID NO: 266679 - RNA, 18 nt, Human
ugccucacuccucuuucu

SEQ ID NO: 266680 - RNA, 23 nt, Human
ugccuggagcuccucugccccau

SEQ ID NO: 266681 - RNA, 24 nt, Human
uggaaaaaagcagagcacaucuuu

SEQ ID NO: 266682 - RNA, 21 nt, Human
uggaauacuacuuaguacauu

SEQ ID NO: 266683 - RNA, 24 nt, Human
uggugguuuuguccuccugguucc

SEQ ID NO: 266684 - RNA, 25 nt, Human
uuaacacaaaccaauaugggcccag

SEQ ID NO: 266685 - RNA, 19 nt, Human
uuguccucucaccagguuu

SEQ ID NO: 266686 - RNA, 23 nt, Human
uuuguccuccugguuccuaugaa

SEQ ID NO: 266687 - RNA, 22 nt, Human
aaagagaaggcaguaucccagg

SEQ ID NO: 266688 - RNA, 23 nt, Human
aaagagaaggcaguaucccaggg

SEQ ID NO: 266689 - RNA, 23 nt, Human
aaggaccccccccuccccaacug

SEQ ID NO: 266690 - RNA, 20 nt, Human
accuggugacccagggccug

SEQ ID NO: 266691 - RNA, 18 nt, Human
agaaugggcagcaggugu

SEQ ID NO: 266692 - RNA, 20 nt, Human
aggaagaccagggcccaggg

SEQ ID NO: 266693 - RNA, 18 nt, Human
aggacuggacuuuuaggc

SEQ ID NO: 266694 - RNA, 22 nt, Human
aggcaguaucccagggcccagc

SEQ ID NO: 266695 - RNA, 22 nt, Human
aguggaagcgcuccuugcugcc

SEQ ID NO: 266696 - RNA, 24 nt, Human
auguuggaggaagaccagggccca

SEQ ID NO: 266697 - RNA, 19 nt, Human
caacugugccuggcacuuu

SEQ ID NO: 266698 - RNA, 24 nt, Human
ccccuccccaacugugccuggcac

SEQ ID NO: 266699 - RNA, 22 nt, Human
cucugcuucacguuguggcucu

SEQ ID NO: 266700 - RNA, 23 nt, Human
cugcagcagugaccuggugaccc

SEQ ID NO: 266701 - RNA, 18 nt, Human
cugugccuggcacuuugc

SEQ ID NO: 266702 - RNA, 25 nt, Human
cuuguuaaggaccccccccucccca

SEQ ID NO: 266703 - RNA, 25 nt, Human
gccaacagcacaggacucaagaccc

SEQ ID NO: 266704 - RNA, 25 nt, Human
ggaccccccccuccccaacugugcc

SEQ ID NO: 266705 - RNA, 23 nt, Human
ggcagauaggcgggcgaaagaga

SEQ ID NO: 266706 - RNA, 24 nt, Human
ggcagcaggugugauguuggagga

SEQ ID NO: 266707 - RNA, 20 nt, Human
gggcccaggggcgggggcug

SEQ ID NO: 266708 - RNA, 25 nt, Human
guuaaggaccccccccuccccaacu

SEQ ID NO: 266709 - RNA, 18 nt, Human
ucacguuguggcucugcc

SEQ ID NO: 266710 - RNA, 28 nt, Human
ugacacacacagaaauggagaaugggca

SEQ ID NO: 266711 - RNA, 19 nt, Human
ugacccagggccugggcag

SEQ ID NO: 266712 - RNA, 22 nt, Human
ugaccuggugacccagggccug

SEQ ID NO: 266713 - RNA, 22 nt, Human
ugauguuggaggaagaccaggg

SEQ ID NO: 266714 - RNA, 19 nt, Human
ugccuggcacuuugccaac

SEQ ID NO: 266715 - RNA, 24 nt, Human
uggacuuuuaggcuauugcagccc

SEQ ID NO: 266716 - RNA, 18 nt, Human
uggcacuuugccaacagc

SEQ ID NO: 266717 - RNA, 21 nt, Human
uuaaggaccccccccucccca

SEQ ID NO: 266718 - RNA, 19 nt, Human
aaaagaacaaagugauaga

SEQ ID NO: 266719 - RNA, 21 nt, Human
aaaggaagagaaagagcaagc

SEQ ID NO: 266720 - RNA, 18 nt, Human
aaauucuccccaccccuc

SEQ ID NO: 266721 - RNA, 21 nt, Human
aacuggcgggcuggugagaaa

SEQ ID NO: 266722 - RNA, 23 nt, Human
aagagcaagcuugagaugaaaua

SEQ ID NO: 266723 - RNA, 23 nt, Human
agaaagagcaagcuugagaugaa

SEQ ID NO: 266724 - RNA, 23 nt, Human
agagcaagcuugagaugaaauac

SEQ ID NO: 266725 - RNA, 18 nt, Human
agagggguuggcgagauc

SEQ ID NO: 266726 - RNA, 21 nt, Human
agcaagcuugagaugaaauac

SEQ ID NO: 266727 - RNA, 22 nt, Human
cagucaccccaaaugagagagg

SEQ ID NO: 266728 - RNA, 22 nt, Human
caucuucgaaauucuccccacc

SEQ ID NO: 266729 - RNA, 22 nt, Human
ccaaaacuuugaauacuguguc

SEQ ID NO: 266730 - RNA, 25 nt, Human
ccacaggagucacaaaaaaaaagaa

SEQ ID NO: 266731 - RNA, 18 nt, Human
ccaggcugcacuggggcc

SEQ ID NO: 266732 - RNA, 26 nt, Human
ccccaccccucccgggcuuuuuucuc

SEQ ID NO: 266733 - RNA, 19 nt, Human
ccccgcaggcuccagcgcc

SEQ ID NO: 266734 - RNA, 20 nt, Human
ccgacggcggugacugccuc

SEQ ID NO: 266735 - RNA, 23 nt, Human
ccgacggcggugacugccucguu

SEQ ID NO: 266736 - RNA, 18 nt, Human
ccgcagcuucagugccug

SEQ ID NO: 266737 - RNA, 23 nt, Human
ccgggcuuuuuucucuaagauuc

SEQ ID NO: 266738 - RNA, 18 nt, Human
cuccccaccccucccggg

SEQ ID NO: 266739 - RNA, 24 nt, Human
cugggcgggaagccgggcgccucc

SEQ ID NO: 266740 - RNA, 20 nt, Human
cuucgaaauucuccccaccc

SEQ ID NO: 266741 - RNA, 18 nt, Human
gaaauucuccccaccccu

SEQ ID NO: 266742 - RNA, 23 nt, Human
gaaauucuccccaccccucccgg

SEQ ID NO: 266743 - RNA, 27 nt, Human
gaaauucuccccaccccucccgggcuu

SEQ ID NO: 266744 - RNA, 24 nt, Human
gcagcuucagugccugcuggugcc

SEQ ID NO: 266745 - RNA, 23 nt, Human
gcccugggccugggcgggaagcc

SEQ ID NO: 266746 - RNA, 22 nt, Human
gccgcagcuucagugccugcug

SEQ ID NO: 266747 - RNA, 23 nt, Human
gccugcuggugccagccccagag

SEQ ID NO: 266748 - RNA, 22 nt, Human
ggcgcaguggaguccacaggag

SEQ ID NO: 266749 - RNA, 18 nt, Human
gggaacaaggacaggguu

SEQ ID NO: 266750 - RNA, 21 nt, Human
gggaacaaggacaggguugcc

SEQ ID NO: 266751 - RNA, 20 nt, Human
gggcuggugagaaaggaggg

SEQ ID NO: 266752 - RNA, 18 nt, Human
gggggagguuucccgagg

SEQ ID NO: 266753 - RNA, 22 nt, Human
ggugcgggaguuccgagagaga

SEQ ID NO: 266754 - RNA, 23 nt, Human
uaaaaaccguuagcaaagcuuga

SEQ ID NO: 266755 - RNA, 27 nt, Human
uaacaaugcucagacgccaaaacuuuu

SEQ ID NO: 266756 - RNA, 18 nt, Human
uacuguguccaggcugca

SEQ ID NO: 266757 - RNA, 22 nt, Human
ucccaggcgcaguggaguccac

SEQ ID NO: 266758 - RNA, 18 nt, Human
uccccaccccucccgggc

SEQ ID NO: 266759 - RNA, 19 nt, Human
uccccaccccucccgggcu

SEQ ID NO: 266760 - RNA, 20 nt, Human
uccuuauuucuuuacggggg

SEQ ID NO: 266761 - RNA, 23 nt, Human
ugaaauacaucuucgaaauucuc

SEQ ID NO: 266762 - RNA, 19 nt, Human
ugagggccgagcgcagcag

SEQ ID NO: 266763 - RNA, 23 nt, Human
ugcacuggggcccugggccuggg

SEQ ID NO: 266764 - RNA, 23 nt, Human
uggcgggcuggugagaaaggagg

SEQ ID NO: 266765 - RNA, 21 nt, Human
ugggccugggcgggaagccgg

SEQ ID NO: 266766 - RNA, 19 nt, Human
uucuccccaccccucccgg

SEQ ID NO: 266767 - RNA, 22 nt, Human
uucuccccaccccucccgggcu

SEQ ID NO: 266768 - RNA, 22 nt, Human
uuggccccugcugccccgcagg

SEQ ID NO: 266769 - RNA, 21 nt, Human
uuuuucucuaagauucaaccg

SEQ ID NO: 266770 - RNA, 20 nt, Human
aacauuccuuuaauaucucu

SEQ ID NO: 266771 - RNA, 22 nt, Human
acucacuggaaauaauggguuc

SEQ ID NO: 266772 - RNA, 20 nt, Human
agggagcagggcagggcagg

SEQ ID NO: 266773 - RNA, 22 nt, Human
auaacacagcacgaaagagccu

SEQ ID NO: 266774 - RNA, 18 nt, Human
auugccaguuuauuucuu

SEQ ID NO: 266775 - RNA, 20 nt, Human
cagcacgaaagagccuaucu

SEQ ID NO: 266776 - RNA, 18 nt, Human
cagggccgggcggggagg

SEQ ID NO: 266777 - RNA, 26 nt, Human
cagggccgggcggggagggccgcgcg

SEQ ID NO: 266778 - RNA, 23 nt, Human
cagugcuaaggauuuaaaauaaa

SEQ ID NO: 266779 - RNA, 21 nt, Human
ccauucaaacucagugcuaag

SEQ ID NO: 266780 - RNA, 23 nt, Human
ccccgcgcgccuacgccccccgc

SEQ ID NO: 266781 - RNA, 20 nt, Human
cccgcgcgccuacgcccccc

SEQ ID NO: 266782 - RNA, 25 nt, Human
ccuccuuuccuuccucccuuccccc

SEQ ID NO: 266783 - RNA, 18 nt, Human
ccuuccucccuuccuucc

SEQ ID NO: 266784 - RNA, 21 nt, Human
cgcccgagcggacuaggaagc

SEQ ID NO: 266785 - RNA, 19 nt, Human
cgccuacgccccccgccug

SEQ ID NO: 266786 - RNA, 20 nt, Human
cgcgagcgcuccaccugccu

SEQ ID NO: 266787 - RNA, 21 nt, Human
cggggcggggcggggcggggc

SEQ ID NO: 266788 - RNA, 22 nt, Human
cuacgccccccgccugugcgga

SEQ ID NO: 266789 - RNA, 19 nt, Human
gacacauuuuucuccuccu

SEQ ID NO: 266790 - RNA, 22 nt, Human
gccccgcgcgccuacgcccccc

SEQ ID NO: 266791 - RNA, 24 nt, Human
gcgcggggcggggcggggcggggc

SEQ ID NO: 266792 - RNA, 19 nt, Human
gggcagggcagggccgggc

SEQ ID NO: 266793 - RNA, 20 nt, Human
gggcagggcagggccgggcg

SEQ ID NO: 266794 - RNA, 23 nt, Human
gggcggggagggccgcgcggggc

SEQ ID NO: 266795 - RNA, 18 nt, Human
gggcggggcggggcgccu

SEQ ID NO: 266796 - RNA, 18 nt, Human
ggggagggccgcgcgggg

SEQ ID NO: 266797 - RNA, 19 nt, Human
uaaaauaaaugcugccagc

SEQ ID NO: 266798 - RNA, 23 nt, Human
uaaaugcugccagcugaagacac

SEQ ID NO: 266799 - RNA, 21 nt, Human
ucuuugaaccaguuuaacaau

SEQ ID NO: 266800 - RNA, 21 nt, Human
ugauauguacucaauggagac

SEQ ID NO: 266801 - RNA, 19 nt, Human
uguaaacucacgguaccua

SEQ ID NO: 266802 - RNA, 24 nt, Human
uuaaaaauguauuuucaguaacuc

SEQ ID NO: 266803 - RNA, 22 nt, Human
uuacuaaacugacaugauaugu

SEQ ID NO: 266804 - RNA, 18 nt, Human
aaacaucagaauaugccc

SEQ ID NO: 266805 - RNA, 26 nt, Human
aacacacauugugcuagcaaagaaaa

SEQ ID NO: 266806 - RNA, 18 nt, Human
aacaugauuauggaaugg

SEQ ID NO: 266807 - RNA, 20 nt, Human
aagaauauucugacagcaac

SEQ ID NO: 266808 - RNA, 18 nt, Human
acaauuaccaaaaccuca

SEQ ID NO: 266809 - RNA, 19 nt, Human
acuaaauacaaggauuucu

SEQ ID NO: 266810 - RNA, 22 nt, Human
agaaaagcaaaucugugcugga

SEQ ID NO: 266811 - RNA, 23 nt, Human
agaaaagcaaaucugugcuggau

SEQ ID NO: 266812 - RNA, 21 nt, Human
agagaauaaugagaguuuugg

SEQ ID NO: 266813 - RNA, 21 nt, Human
agauguuggaagcagaacacu

SEQ ID NO: 266814 - RNA, 23 nt, Human
aggcaggugcgcggcggcggggc

SEQ ID NO: 266815 - RNA, 23 nt, Human
aucaguuauguaaaacaagcacu

SEQ ID NO: 266816 - RNA, 22 nt, Human
auuaccaaaaccucaaaggcca

SEQ ID NO: 266817 - RNA, 25 nt, Human
caaaaaagacacuaggaauuucuua

SEQ ID NO: 266818 - RNA, 23 nt, Human
caaaaccucaaaggccaaaaaag

SEQ ID NO: 266819 - RNA, 21 nt, Human
caaaagccgugauuaauaaaa

SEQ ID NO: 266820 - RNA, 18 nt, Human
caaagaaaagcaaaucug

SEQ ID NO: 266821 - RNA, 19 nt, Human
caaaggccaaaaaagacac

SEQ ID NO: 266822 - RNA, 20 nt, Human
caaauucaccaaaagccgug

SEQ ID NO: 266823 - RNA, 18 nt, Human
caauacuaacagcacaca

SEQ ID NO: 266824 - RNA, 22 nt, Human
caauuaccaaaaccucaaaggc

SEQ ID NO: 266825 - RNA, 26 nt, Human
caauuaccaaaaccucaaaggccaaa

SEQ ID NO: 266826 - RNA, 21 nt, Human
cacacacccuaccuaaguacc

SEQ ID NO: 266827 - RNA, 20 nt, Human
caccuaaaaccuauuuccuu

SEQ ID NO: 266828 - RNA, 20 nt, Human
cacuaugccaccuaaaaccu

SEQ ID NO: 266829 - RNA, 21 nt, Human
cacugcaaaggaggaaaaaaa

SEQ ID NO: 266830 - RNA, 20 nt, Human
cagaacacuuacuaaaucaa

SEQ ID NO: 266831 - RNA, 21 nt, Human
cagaauacaucaaauacauua

SEQ ID NO: 266832 - RNA, 19 nt, Human
caguuaagccacuaugcca

SEQ ID NO: 266833 - RNA, 22 nt, Human
cauugugcuagcaaagaaaagc

SEQ ID NO: 266834 - RNA, 23 nt, Human
ccucaaaggccaaaaaagacacu

SEQ ID NO: 266835 - RNA, 22 nt, Human
cuacaauuaccaaaaccucaaa

SEQ ID NO: 266836 - RNA, 24 nt, Human
cuccuguuuccacuauccacuguc

SEQ ID NO: 266837 - RNA, 22 nt, Human
cugaauuacaaagcuuaugaaa

SEQ ID NO: 266838 - RNA, 19 nt, Human
gguccaaaauuugcuacca

SEQ ID NO: 266839 - RNA, 20 nt, Human
uaaaauacaacaaaacuccu

SEQ ID NO: 266840 - RNA, 21 nt, Human
uaaaauuaucaguuauguaaa

SEQ ID NO: 266841 - RNA, 24 nt, Human
uaaaucaaugaaacaacuuggaca

SEQ ID NO: 266842 - RNA, 19 nt, Human
uaacagcacacaaagaaaa

SEQ ID NO: 266843 - RNA, 18 nt, Human
uaccauggcaaaggcucc

SEQ ID NO: 266844 - RNA, 21 nt, Human
uaguaccucuuaucacagaau

SEQ ID NO: 266845 - RNA, 25 nt, Human
uaugaaacaggucuacaauuaccaa

SEQ ID NO: 266846 - RNA, 19 nt, Human
uauucugacagcaacacac

SEQ ID NO: 266847 - RNA, 21 nt, Human
uauuugaauucaguccaguua

SEQ ID NO: 266848 - RNA, 18 nt, Human
ucaauacuaacagcacac

SEQ ID NO: 266849 - RNA, 24 nt, Human
uccaaaaaugucugaaaaugucua

SEQ ID NO: 266850 - RNA, 23 nt, Human
ugaaacaaaacuuaucucaaaac

SEQ ID NO: 266851 - RNA, 24 nt, Human
ugaaacaaaacuuaucucaaaacu

SEQ ID NO: 266852 - RNA, 26 nt, Human
ugaaggaggauccacgaucuccuguu

SEQ ID NO: 266853 - RNA, 23 nt, Human
ugagaagugaugagggccaguga

SEQ ID NO: 266854 - RNA, 21 nt, Human
uggaagcagaacacuuacuaa

SEQ ID NO: 266855 - RNA, 23 nt, Human
uggaaugguuaaaucugggggca

SEQ ID NO: 266856 - RNA, 24 nt, Human
uggcaaaggaugagaaacaucaga

SEQ ID NO: 266857 - RNA, 19 nt, Human
uguaaaacaagcacuuacu

SEQ ID NO: 266858 - RNA, 21 nt, Human
uguaaaacaagcacuuacuaa

SEQ ID NO: 266859 - RNA, 26 nt, Human
ugucugaaaaugucuauaaaguacac

SEQ ID NO: 266860 - RNA, 25 nt, Human
uugaaacaaaacuuaucucaaaacu

SEQ ID NO: 266861 - RNA, 19 nt, Human
uugaaucaauacuaacagc

SEQ ID NO: 266862 - RNA, 19 nt, Human
uuggacaagauucugauac

SEQ ID NO: 266863 - RNA, 25 nt, Human
uuuauuacuccaguuauaugguacu

SEQ ID NO: 266864 - RNA, 19 nt, Human
aaacacacguccccucuuc

SEQ ID NO: 266865 - RNA, 22 nt, Human
aaacaggagacacaucuaagga

SEQ ID NO: 266866 - RNA, 19 nt, Human
agcaggggcccagcauuca

SEQ ID NO: 266867 - RNA, 19 nt, Human
aggaaguugcauggugggg

SEQ ID NO: 266868 - RNA, 18 nt, Human
aggagacacaucuaagga

SEQ ID NO: 266869 - RNA, 18 nt, Human
aggcauggaaccagcacc

SEQ ID NO: 266870 - RNA, 22 nt, Human
aggcgucccucugggucuuucc

SEQ ID NO: 266871 - RNA, 23 nt, Human
agugguggcuggccagcccagcc

SEQ ID NO: 266872 - RNA, 21 nt, Human
auaagucuuccccagcugcag

SEQ ID NO: 266873 - RNA, 21 nt, Human
cacggaggacucaggaagcug

SEQ ID NO: 266874 - RNA, 22 nt, Human
cacgggcccagccagucugcaa

SEQ ID NO: 266875 - RNA, 18 nt, Human
cagcugccaccugcacgg

SEQ ID NO: 266876 - RNA, 22 nt, Human
cagcugcccacucucagugacc

SEQ ID NO: 266877 - RNA, 23 nt, Human
caggcauggaaccagcaccuccc

SEQ ID NO: 266878 - RNA, 18 nt, Human
cagugaccugccagccug

SEQ ID NO: 266879 - RNA, 23 nt, Human
caucagaggcccaguugguauag

SEQ ID NO: 266880 - RNA, 19 nt, Human
ccagcccagccucgcugcc

SEQ ID NO: 266881 - RNA, 18 nt, Human
ccagcugcccacucucag

SEQ ID NO: 266882 - RNA, 19 nt, Human
cccaagucaggagcuccug

SEQ ID NO: 266883 - RNA, 23 nt, Human
ccgggauggcauaagucuucccc

SEQ ID NO: 266884 - RNA, 20 nt, Human
ccugaacccacugcugccuc

SEQ ID NO: 266885 - RNA, 21 nt, Human
ccugaacccacugcugccucg

SEQ ID NO: 266886 - RNA, 19 nt, Human
cucccucaucccaccugca

SEQ ID NO: 266887 - RNA, 21 nt, Human
cucugggucuuucccuuccuc

SEQ ID NO: 266888 - RNA, 21 nt, Human
cucugugugugucucuugucu

SEQ ID NO: 266889 - RNA, 18 nt, Human
cuggggcccagcugccca

SEQ ID NO: 266890 - RNA, 21 nt, Human
gagcaggcauggaaccagcac

SEQ ID NO: 266891 - RNA, 19 nt, Human
gaucaggguagacuugagc

SEQ ID NO: 266892 - RNA, 23 nt, Human
gauccagucccuucgguuucaga

SEQ ID NO: 266893 - RNA, 25 nt, Human
gcacaguucuggggcccagcugccc

SEQ ID NO: 266894 - RNA, 23 nt, Human
ggcccaguugguauagucagugg

SEQ ID NO: 266895 - RNA, 23 nt, Human
ggggcccagcugcccacucucag

SEQ ID NO: 266896 - RNA, 19 nt, Human
gucaggagcuccugcugcc

SEQ ID NO: 266897 - RNA, 24 nt, Human
uaucccagugguacacagaaaguc

SEQ ID NO: 266898 - RNA, 20 nt, Human
uaugcccugaggugaucagg

SEQ ID NO: 266899 - RNA, 23 nt, Human
ucacacugcaauauagaaaagug

SEQ ID NO: 266900 - RNA, 19 nt, Human
ucacaggcucucacaaccg

SEQ ID NO: 266901 - RNA, 19 nt, Human
ucacuggaagaacaucaga

SEQ ID NO: 266902 - RNA, 18 nt, Human
ucaggaagcugggucacg

SEQ ID NO: 266903 - RNA, 18 nt, Human
ucaggagcuccugcugcc

SEQ ID NO: 266904 - RNA, 18 nt, Human
ucaucccaccugcagauc

SEQ ID NO: 266905 - RNA, 21 nt, Human
ucccucugggucuuucccuuc

SEQ ID NO: 266906 - RNA, 21 nt, Human
ucucagugaccugccagccug

SEQ ID NO: 266907 - RNA, 18 nt, Human
ucucuugucucucacucu

SEQ ID NO: 266908 - RNA, 18 nt, Human
ugagcaggggcccagcau

SEQ ID NO: 266909 - RNA, 22 nt, Human
ugagcaggggcccagcauucac

SEQ ID NO: 266910 - RNA, 20 nt, Human
ugcaaacacacguccccucu

SEQ ID NO: 266911 - RNA, 23 nt, Human
ugcaaacacacguccccucuucc

SEQ ID NO: 266912 - RNA, 25 nt, Human
ugccaccugcacggaggacucagga

SEQ ID NO: 266913 - RNA, 23 nt, Human
uggcuccaagucucguucuaggc

SEQ ID NO: 266914 - RNA, 22 nt, Human
ugguauagucagugguggcugg

SEQ ID NO: 266915 - RNA, 21 nt, Human
uucaaaguauggagagcuaga

SEQ ID NO: 266916 - RNA, 23 nt, Human
aaaaaucucaauucaaauacaac

SEQ ID NO: 266917 - RNA, 22 nt, Human
aaauacaacagccaaggcacag

SEQ ID NO: 266918 - RNA, 23 nt, Human
aacugacccaaauccccaggccc

SEQ ID NO: 266919 - RNA, 20 nt, Human
acaacugacccaaauccccc

SEQ ID NO: 266920 - RNA, 23 nt, Human
acagccaaggcacagcuggcacc

SEQ ID NO: 266921 - RNA, 28 nt, Human
acgcagccccaaaggugaggggaacgcc

SEQ ID NO: 266922 - RNA, 20 nt, Human
auccccaggcccuagguggc

SEQ ID NO: 266923 - RNA, 20 nt, Human
caacagccaaggcacagcug

SEQ ID NO: 266924 - RNA, 25 nt, Human
caacagccaaggcacagcuggcacc

SEQ ID NO: 266925 - RNA, 25 nt, Human
caauauccccccuaguucaacaccc

SEQ ID NO: 266926 - RNA, 24 nt, Human
cagcaauauccccccuaguucaac

SEQ ID NO: 266927 - RNA, 21 nt, Human
cagcaggcuuucugcuucuuu

SEQ ID NO: 266928 - RNA, 22 nt, Human
ccaaaggcuuuugcuuucacgg

SEQ ID NO: 266929 - RNA, 23 nt, Human
ccacucuguagccacggagggac

SEQ ID NO: 266930 - RNA, 22 nt, Human
ccauccccagcaggcuuucugc

SEQ ID NO: 266931 - RNA, 22 nt, Human
cccuagcuccuaacuaucccaa

SEQ ID NO: 266932 - RNA, 22 nt, Human
cgccgcgguggccaccgcagcc

SEQ ID NO: 266933 - RNA, 18 nt, Human
cuacaacugacccaaauc

SEQ ID NO: 266934 - RNA, 19 nt, Human
cuaguucaacacccaccuu

SEQ ID NO: 266935 - RNA, 19 nt, Human
cuuucugcuucugcaggag

SEQ ID NO: 266936 - RNA, 24 nt, Human
gaagcugccuuccacccuccgccc

SEQ ID NO: 266937 - RNA, 27 nt, Human
gaagggaaaagagggugggggagaggg

SEQ ID NO: 266938 - RNA, 19 nt, Human
gagggugggggagaggcaa

SEQ ID NO: 266939 - RNA, 21 nt, Human
gcaauauccccccuaguucaa

SEQ ID NO: 266940 - RNA, 18 nt, Human
gggggagaggcaacuaca

SEQ ID NO: 266941 - RNA, 22 nt, Human
gguggccaccgcagcccccucc

SEQ ID NO: 266942 - RNA, 21 nt, Human
ggugggggagaggcaacuaca

SEQ ID NO: 266943 - RNA, 20 nt, Human
uaacucgggcuccgccgcgg

SEQ ID NO: 266944 - RNA, 18 nt, Human
uagcuccuaacuaucccu

SEQ ID NO: 266945 - RNA, 19 nt, Human
ucccaaaauaaacccaagg

SEQ ID NO: 266946 - RNA, 18 nt, Human
ucuguagccacggaggga

SEQ ID NO: 266947 - RNA, 19 nt, Human
ucuguagccacggagggac

SEQ ID NO: 266948 - RNA, 24 nt, Human
ugaugaaacgcagccccaaaggug

SEQ ID NO: 266949 - RNA, 18 nt, Human
ugggaagggaaaagaggg

SEQ ID NO: 266950 - RNA, 20 nt, Human
ugucagaaaugagagggucc

SEQ ID NO: 266951 - RNA, 23 nt, Human
uucaaaugucagaaaugagaggg

SEQ ID NO: 266952 - RNA, 22 nt, Human
uuuuuuuuuuuguuuuugcuuu

SEQ ID NO: 266953 - RNA, 18 nt, Human
uuuuuuuuuuuuuuuuug

SEQ ID NO: 266954 - RNA, 25 nt, Human
uuuuuuuuuuuuuuuuuuguuuuuu

SEQ ID NO: 266955 - RNA, 21 nt, Human
aaccauguaacaugcaagagc

SEQ ID NO: 266956 - RNA, 21 nt, Human
aacuguauucuaucugaagca

SEQ ID NO: 266957 - RNA, 25 nt, Human
aacuguauucuaucugaagcauuag

SEQ ID NO: 266958 - RNA, 20 nt, Human
aagcauuagaagccaacugu

SEQ ID NO: 266959 - RNA, 21 nt, Human
agcaaugguuuucaggaagaa

SEQ ID NO: 266960 - RNA, 22 nt, Human
caauguaaaggguuaugugaga

SEQ ID NO: 266961 - RNA, 18 nt, Human
cagaggcuuggugaggcu

SEQ ID NO: 266962 - RNA, 22 nt, Human
cagccugcuccccccaggagcc

SEQ ID NO: 266963 - RNA, 23 nt, Human
caggaagaaacuauuaugccuua

SEQ ID NO: 266964 - RNA, 19 nt, Human
caucuccuucugccauugc

SEQ ID NO: 266965 - RNA, 23 nt, Human
cccaaaucacaagaaaacuugaa

SEQ ID NO: 266966 - RNA, 23 nt, Human
ccccaaaucacaagaaaacuuga

SEQ ID NO: 266967 - RNA, 23 nt, Human
ccccaggagcccugagcaucucc

SEQ ID NO: 266968 - RNA, 20 nt, Human
cccucagacuacaauuccug

SEQ ID NO: 266969 - RNA, 20 nt, Human
cccuggcuggcuggcucucc

SEQ ID NO: 266970 - RNA, 23 nt, Human
ccuggcuggcuggcucucccuuc

SEQ ID NO: 266971 - RNA, 20 nt, Human
ccuucagccugcucccccca

SEQ ID NO: 266972 - RNA, 21 nt, Human
ccuucugccauugccuguacu

SEQ ID NO: 266973 - RNA, 21 nt, Human
cuugaacuaugucauuaaaca

SEQ ID NO: 266974 - RNA, 19 nt, Human
gcccugagcaucuccuucu

SEQ ID NO: 266975 - RNA, 21 nt, Human
gcccugagcaucuccuucuga

SEQ ID NO: 266976 - RNA, 23 nt, Human
uauucugcuuccuuuagaaguua

SEQ ID NO: 266977 - RNA, 19 nt, Human
ucuacgcccucagacuaca

SEQ ID NO: 266978 - RNA, 19 nt, Human
ugaaauugucuacgcccuc

SEQ ID NO: 266979 - RNA, 22 nt, Human
ugaauaguuagauggugaccau

SEQ ID NO: 266980 - RNA, 24 nt, Human
ugacagaagauaaaggauauuuau

SEQ ID NO: 266981 - RNA, 21 nt, Human
ugagcaucuccuucugccauu

SEQ ID NO: 266982 - RNA, 22 nt, Human
ugccugggcccuggcuggcugg

SEQ ID NO: 266983 - RNA, 19 nt, Human
ugccuguacagcuuggagg

SEQ ID NO: 266984 - RNA, 23 nt, Human
uggaaagcagucaaagcugccug

SEQ ID NO: 266985 - RNA, 20 nt, Human
ugugguaaccauguaacaug

SEQ ID NO: 266986 - RNA, 19 nt, Human
uuccugaauaguuagaugg

SEQ ID NO: 266987 - RNA, 21 nt, Human
uuuuuuuuuuuuuuuuugggu

SEQ ID NO: 266988 - RNA, 21 nt, Human
uuuuuuuuuuuuuuuuuuggg

SEQ ID NO: 266989 - RNA, 19 nt, Human
aaaccgcgcuguguccuug

SEQ ID NO: 266990 - RNA, 29 nt, Human
aaccuagccccucaagguucagcucuggu

SEQ ID NO: 266991 - RNA, 23 nt, Human
aaugcccacccacugucccccac

SEQ ID NO: 266992 - RNA, 18 nt, Human
accacacaccaugccuca

SEQ ID NO: 266993 - RNA, 24 nt, Human
acccuaggggcaccaucccucggg

SEQ ID NO: 266994 - RNA, 22 nt, Human
acggguuggggguggguuacgg

SEQ ID NO: 266995 - RNA, 20 nt, Human
auaaauacagccccaggggc

SEQ ID NO: 266996 - RNA, 24 nt, Human
cacacaccaugccucagagauaaa

SEQ ID NO: 266997 - RNA, 18 nt, Human
cacccacugucccccacc

SEQ ID NO: 266998 - RNA, 20 nt, Human
cacgcccccccaaauaaccg

SEQ ID NO: 266999 - RNA, 22 nt, Human
cacugggucucacgccccccca

SEQ ID NO: 267000 - RNA, 23 nt, Human
cacugucccccaccccucccucu

SEQ ID NO: 267001 - RNA, 24 nt, Human
caggaauagauuacaaaaguauua

SEQ ID NO: 267002 - RNA, 23 nt, Human
ccaagcggcagagaguggccgga

SEQ ID NO: 267003 - RNA, 18 nt, Human
ccacugucccccaccccu

SEQ ID NO: 267004 - RNA, 21 nt, Human
cccaaauaaccggugcauccc

SEQ ID NO: 267005 - RNA, 18 nt, Human
cccacccacuguccccca

SEQ ID NO: 267006 - RNA, 19 nt, Human
ccccaaauaaccggugcau

SEQ ID NO: 267007 - RNA, 19 nt, Human
ccccaccccucccucuccu

SEQ ID NO: 267008 - RNA, 19 nt, Human
cccccaccccucccucucc

SEQ ID NO: 267009 - RNA, 18 nt, Human
cccuguagcaccacacac

SEQ ID NO: 267010 - RNA, 19 nt, Human
ccuguggggcgggggcgga

SEQ ID NO: 267011 - RNA, 22 nt, Human
ccuugcccuguggggcgggggc

SEQ ID NO: 267012 - RNA, 18 nt, Human
cgagggacccuaggggca

SEQ ID NO: 267013 - RNA, 21 nt, Human
cgagggucucacccccauggg

SEQ ID NO: 267014 - RNA, 20 nt, Human
cggcagagaguggccggaac

SEQ ID NO: 267015 - RNA, 23 nt, Human
cucaagagaggucgcuuuuaaag

SEQ ID NO: 267016 - RNA, 23 nt, Human
cucacgcccccccaaauaaccgg

SEQ ID NO: 267017 - RNA, 23 nt, Human
cuggcgguggcgcggcacggucc

SEQ ID NO: 267018 - RNA, 21 nt, Human
gaaugcccacccacugucccc

SEQ ID NO: 267019 - RNA, 18 nt, Human
gagcgcccgcggcucgcc

SEQ ID NO: 267020 - RNA, 18 nt, Human
gcccaacccaagcggcag

SEQ ID NO: 267021 - RNA, 18 nt, Human
gccccaggggcuccugcu

SEQ ID NO: 267022 - RNA, 18 nt, Human
ggcauuuaaguucaaucu

SEQ ID NO: 267023 - RNA, 21 nt, Human
gggcagggcuuaggucugcga

SEQ ID NO: 267024 - RNA, 18 nt, Human
gugguccugaaccgggaa

SEQ ID NO: 267025 - RNA, 19 nt, Human
uaaauacagccccaggggc

SEQ ID NO: 267026 - RNA, 21 nt, Human
ucaguucucccgccucuccua

SEQ ID NO: 267027 - RNA, 18 nt, Human
ucccccaccccucccucu

SEQ ID NO: 267028 - RNA, 22 nt, Human
ucccucgggcgggugggcggcc

SEQ ID NO: 267029 - RNA, 26 nt, Human
ucccuguagcaccacacaccaugccu

SEQ ID NO: 267030 - RNA, 18 nt, Human
uccuggcgguggcgcggc

SEQ ID NO: 267031 - RNA, 22 nt, Human
ucucccgccucuccuaccucaa

SEQ ID NO: 267032 - RNA, 24 nt, Human
ucuuuugggcgcgagggacccuag

SEQ ID NO: 267033 - RNA, 21 nt, Human
ugaaugcccacccacuguccc

SEQ ID NO: 267034 - RNA, 25 nt, Human
ugcccuguggggcgggggcggaaac

SEQ ID NO: 267035 - RNA, 21 nt, Human
ugccucagagauaaauacagc

SEQ ID NO: 267036 - RNA, 19 nt, Human
uggaaaaaaccgcgcugug

SEQ ID NO: 267037 - RNA, 19 nt, Human
uggcccaccgaggaacacg

SEQ ID NO: 267038 - RNA, 18 nt, Human
uggccggaacuuucugcc

SEQ ID NO: 267039 - RNA, 26 nt, Human
uguggggcgggggcggaaacuucagu

SEQ ID NO: 267040 - RNA, 28 nt, Human
uguguccuugcccuguggggagugcccu

SEQ ID NO: 267041 - RNA, 21 nt, Human
aaaaaaaaaaaaaauacaaaa

SEQ ID NO: 267042 - RNA, 22 nt, Human
aaaaaaaaaaaaaauacaaaac

SEQ ID NO: 267043 - RNA, 27 nt, Human
aaacaaaacaaaacauaaaaccacugg

SEQ ID NO: 267044 - RNA, 22 nt, Human
aaacaacacacgaaacaaaaca

SEQ ID NO: 267045 - RNA, 21 nt, Human
aacaauggcaaaaccacacaa

SEQ ID NO: 267046 - RNA, 22 nt, Human
aagaaaucacccccaagaggcc

SEQ ID NO: 267047 - RNA, 21 nt, Human
aagagaccagaacaggagacg

SEQ ID NO: 267048 - RNA, 19 nt, Human
aaggcuuguuccugccacc

SEQ ID NO: 267049 - RNA, 22 nt, Human
aaugcuuuguuaacaaaagaaa

SEQ ID NO: 267050 - RNA, 20 nt, Human
acaaaacaaaacauaaaacc

SEQ ID NO: 267051 - RNA, 18 nt, Human
acaaacaacacacgaaac

SEQ ID NO: 267052 - RNA, 18 nt, Human
acaauggcaaaaccacac

SEQ ID NO: 267053 - RNA, 19 nt, Human
acacacgaaacaaaacaaa

SEQ ID NO: 267054 - RNA, 22 nt, Human
acaggagaccuuggucggaugg

SEQ ID NO: 267055 - RNA, 20 nt, Human
acauggaugaggaaggggau

SEQ ID NO: 267056 - RNA, 18 nt, Human
acccccaagaggccccaa

SEQ ID NO: 267057 - RNA, 23 nt, Human
acccccaagaggccccaaccccu

SEQ ID NO: 267058 - RNA, 22 nt, Human
accccuuuucccugccuguccc

SEQ ID NO: 267059 - RNA, 24 nt, Human
accccuuuucccugccuguccccg

SEQ ID NO: 267060 - RNA, 21 nt, Human
agcaaaaaaaaaaaaaaaaaa

SEQ ID NO: 267061 - RNA, 22 nt, Human
agcccccaagcuccagcagccc

SEQ ID NO: 267062 - RNA, 18 nt, Human
agccuggcuuaggaggcc

SEQ ID NO: 267063 - RNA, 19 nt, Human
agcuccugaguuugccccc

SEQ ID NO: 267064 - RNA, 18 nt, Human
aggaaggggauagucugg

SEQ ID NO: 267065 - RNA, 23 nt, Human
aggccccaaccccuuuucccugc

SEQ ID NO: 267066 - RNA, 22 nt, Human
agggacuugggaacagagggcu

SEQ ID NO: 267067 - RNA, 18 nt, Human
aguggcaucuguggccag

SEQ ID NO: 267068 - RNA, 23 nt, Human
auaaaaccacuggaagguuccca

SEQ ID NO: 267069 - RNA, 18 nt, Human
auggcaccccagagcugg

SEQ ID NO: 267070 - RNA, 19 nt, Human
caaaacaaaacauaaaacc

SEQ ID NO: 267071 - RNA, 19 nt, Human
caaaacaauggcaaaacca

SEQ ID NO: 267072 - RNA, 18 nt, Human
cacacaaugcuuuguuaa

SEQ ID NO: 267073 - RNA, 27 nt, Human
cacacgaaacaaaacaaaacauaaaac

SEQ ID NO: 267074 - RNA, 24 nt, Human
cacgaaacaaaacaaaacauaaaa

SEQ ID NO: 267075 - RNA, 20 nt, Human
cagcccagccacuggcaucu

SEQ ID NO: 267076 - RNA, 21 nt, Human
cagcccccaagcuccagcagc

SEQ ID NO: 267077 - RNA, 24 nt, Human
cagcccccaagcuccagcagcccc

SEQ ID NO: 267078 - RNA, 25 nt, Human
ccaaauaaguuagcaaaaaaaaaaa

SEQ ID NO: 267079 - RNA, 31 nt, Human
ccaaauaaguuagcaaaaaaaaaaaaaaaaa

SEQ ID NO: 267080 - RNA, 21 nt, Human
ccagaacaggagacgugcaca

SEQ ID NO: 267081 - RNA, 18 nt, Human
cccagcccagccacuggc

SEQ ID NO: 267082 - RNA, 23 nt, Human
ccccaagaggccccaaccccuuu

SEQ ID NO: 267083 - RNA, 19 nt, Human
ccccaagcuccagcagccc

SEQ ID NO: 267084 - RNA, 22 nt, Human
cccccagggacuugggaacaga

SEQ ID NO: 267085 - RNA, 21 nt, Human
ccccuucuucucucucaauuc

SEQ ID NO: 267086 - RNA, 21 nt, Human
ccccuuuucccugccuguccc

SEQ ID NO: 267087 - RNA, 22 nt, Human
ccucuccccuucuucucucuca

SEQ ID NO: 267088 - RNA, 19 nt, Human
ccugccaccagcccccaag

SEQ ID NO: 267089 - RNA, 21 nt, Human
ccugccaccagcccccaagcu

SEQ ID NO: 267090 - RNA, 24 nt, Human
ccuuacauggaugaggaaggggau

SEQ ID NO: 267091 - RNA, 23 nt, Human
cgggaagagaccagaacaggaga

SEQ ID NO: 267092 - RNA, 19 nt, Human
cuccugaguuugcccccug

SEQ ID NO: 267093 - RNA, 21 nt, Human
cugggggguggguuaaccuua

SEQ ID NO: 267094 - RNA, 23 nt, Human
cuguggccagcuuggggggcucg

SEQ ID NO: 267095 - RNA, 18 nt, Human
cuucucucucaauucagg

SEQ ID NO: 267096 - RNA, 23 nt, Human
gaaacaaaacaaaacauaaaacc

SEQ ID NO: 267097 - RNA, 23 nt, Human
gcaaaaaaaaaaaaaaaaaaaaa

SEQ ID NO: 267098 - RNA, 21 nt, Human
ggccuauggcaccccagagcu

SEQ ID NO: 267099 - RNA, 19 nt, Human
ggcgcucugguccccugcu

SEQ ID NO: 267100 - RNA, 25 nt, Human
ggcuguuccucuccccuucuucucu

SEQ ID NO: 267101 - RNA, 19 nt, Human
gggggcucgcaaggaugcc

SEQ ID NO: 267102 - RNA, 27 nt, Human
uaaaaaaggaaauccaaauaaguuagc

SEQ ID NO: 267103 - RNA, 18 nt, Human
uaacaaaagaaaucaccc

SEQ ID NO: 267104 - RNA, 18 nt, Human
uacaaaacaauggcaaaa

SEQ ID NO: 267105 - RNA, 23 nt, Human
uacaaacaacacacgaaacaaaa

SEQ ID NO: 267106 - RNA, 24 nt, Human
ucacccccaagaggccccaacccc

SEQ ID NO: 267107 - RNA, 24 nt, Human
uccaaauaaguuagcaaaaaaaaa

SEQ ID NO: 267108 - RNA, 21 nt, Human
ucccaauauucacugcaaaag

SEQ ID NO: 267109 - RNA, 19 nt, Human
uccccugcuuuaccucccu

SEQ ID NO: 267110 - RNA, 18 nt, Human
ucgggaagagaccagaac

SEQ ID NO: 267111 - RNA, 24 nt, Human
ugccaccagcccccaagcuccagc

SEQ ID NO: 267112 - RNA, 22 nt, Human
ugcccucuccucuaaggaggca

SEQ ID NO: 267113 - RNA, 21 nt, Human
ugccuguccccggcaacuuca

SEQ ID NO: 267114 - RNA, 18 nt, Human
uggcaccccagagcuggc

SEQ ID NO: 267115 - RNA, 22 nt, Human
uggccccccagggacuugggaa

SEQ ID NO: 267116 - RNA, 25 nt, Human
uggcuuccuagcaucagggcagccu

SEQ ID NO: 267117 - RNA, 26 nt, Human
ugggaacagagggcuguuccucuccc

SEQ ID NO: 267118 - RNA, 21 nt, Human
uguccccggcaacuucagcac

SEQ ID NO: 267119 - RNA, 26 nt, Human
uguuccucuccccuucuucucucuca

SEQ ID NO: 267120 - RNA, 23 nt, Human
uuccugccaccagcccccaagcu

SEQ ID NO: 267121 - RNA, 19 nt, Human
aaagcaagagaaaacaagc

SEQ ID NO: 267122 - RNA, 22 nt, Human
aaugcaaaaaucaaaagcacaa

SEQ ID NO: 267123 - RNA, 24 nt, Human
acccaugugcccacacccgugaaa

SEQ ID NO: 267124 - RNA, 19 nt, Human
agaaaggaaaauugcaagg

SEQ ID NO: 267125 - RNA, 18 nt, Human
agacagaaaggaaaauug

SEQ ID NO: 267126 - RNA, 23 nt, Human
agacagaaaggaaaauugcaagg

SEQ ID NO: 267127 - RNA, 19 nt, Human
agagaagcacgguggcuuc

SEQ ID NO: 267128 - RNA, 19 nt, Human
augcuucaaagccucgaca

SEQ ID NO: 267129 - RNA, 20 nt, Human
caaaagcacaaugugugauc

SEQ ID NO: 267130 - RNA, 22 nt, Human
caaaugcaaaaaucaaaagcac

SEQ ID NO: 267131 - RNA, 27 nt, Human
caagagaaaacaagcuuaaccagguaa

SEQ ID NO: 267132 - RNA, 23 nt, Human
cacaugcugcacacguccaggug

SEQ ID NO: 267133 - RNA, 26 nt, Human
caccaaaugcaaaaaucaaaagcaca

SEQ ID NO: 267134 - RNA, 23 nt, Human
ccaaaugcaaaaaucaaaagcac

SEQ ID NO: 267135 - RNA, 21 nt, Human
ccacacccaugugcccacacc

SEQ ID NO: 267136 - RNA, 21 nt, Human
ccacacccgugaaaaugcuag

SEQ ID NO: 267137 - RNA, 22 nt, Human
ccacaugcugcacacguccagg

SEQ ID NO: 267138 - RNA, 23 nt, Human
cccacucucugucaggcaucugc

SEQ ID NO: 267139 - RNA, 18 nt, Human
ccuaaagcaagagaaaac

SEQ ID NO: 267140 - RNA, 23 nt, Human
cgacagccaggauuucagagaug

SEQ ID NO: 267141 - RNA, 18 nt, Human
cgccacaugcugcacacg

SEQ ID NO: 267142 - RNA, 20 nt, Human
cucccagacagaaaggaaaa

SEQ ID NO: 267143 - RNA, 23 nt, Human
cugccaacccacucucugucagg

SEQ ID NO: 267144 - RNA, 20 nt, Human
gccagcugcucauuuggaac

SEQ ID NO: 267145 - RNA, 22 nt, Human
uaaccagguaacacaugcuuca

SEQ ID NO: 267146 - RNA, 18 nt, Human
uauuuucccaucuccagg

SEQ ID NO: 267147 - RNA, 23 nt, Human
ucacacagagaccgccacaugcu

SEQ ID NO: 267148 - RNA, 21 nt, Human
ucagcccacacaggacaccac

SEQ ID NO: 267149 - RNA, 20 nt, Human
ucaggcaucugccgucuacc

SEQ ID NO: 267150 - RNA, 21 nt, Human
ucuacccucguguaaauacac

SEQ ID NO: 267151 - RNA, 19 nt, Human
ucugucaggcaucugccgu

SEQ ID NO: 267152 - RNA, 24 nt, Human
ucuuguggaaaacauuagcuuucu

SEQ ID NO: 267153 - RNA, 20 nt, Human
ugcaaaaaucaaaagcacaa

SEQ ID NO: 267154 - RNA, 21 nt, Human
ugcacacguccaggugccaca

SEQ ID NO: 267155 - RNA, 22 nt, Human
ugccacacccaugugcccacac

SEQ ID NO: 267156 - RNA, 18 nt, Human
uggaacaagcacacagca

SEQ ID NO: 267157 - RNA, 18 nt, Human
uuuuuuuuuuuuuuuuug

SEQ ID NO: 267158 - RNA, 24 nt, Human
uuuuuuuuuuuuuuuuugauuuuu

SEQ ID NO: 267159 - RNA, 23 nt, Human
aaugaugcaaaucagaggaggaa

SEQ ID NO: 267160 - RNA, 18 nt, Human
accuagagccugagaucc

SEQ ID NO: 267161 - RNA, 20 nt, Human
acugagacccuggaaccaag

SEQ ID NO: 267162 - RNA, 22 nt, Human
agcugggcaggcgugggggcag

SEQ ID NO: 267163 - RNA, 18 nt, Human
aggauacuggauuaacaa

SEQ ID NO: 267164 - RNA, 18 nt, Human
aguuuauugacuguuacu

SEQ ID NO: 267165 - RNA, 20 nt, Human
caaaucagaggaggaaacac

SEQ ID NO: 267166 - RNA, 23 nt, Human
caguggucagcucucccuggggu

SEQ ID NO: 267167 - RNA, 28 nt, Human
cauucccucuccaaauuggagccagaga

SEQ ID NO: 267168 - RNA, 20 nt, Human
cauugcaccuagagccugag

SEQ ID NO: 267169 - RNA, 18 nt, Human
ccauaaacgagcagguuc

SEQ ID NO: 267170 - RNA, 24 nt, Human
cccuggaaccaagaucccucccuc

SEQ ID NO: 267171 - RNA, 23 nt, Human
ccugggguccagcagcuuuggag

SEQ ID NO: 267172 - RNA, 24 nt, Human
cuccaaauuggagccagagagggg

SEQ ID NO: 267173 - RNA, 19 nt, Human
cucccugggguccagcagc

SEQ ID NO: 267174 - RNA, 25 nt, Human
cucuccuuuuucccuccauucccau

SEQ ID NO: 267175 - RNA, 23 nt, Human
cugcucagcauucccucuccaaa

SEQ ID NO: 267176 - RNA, 20 nt, Human
cuggaaccaagaucccuccc

SEQ ID NO: 267177 - RNA, 20 nt, Human
gagggaaaaggccuuuggga

SEQ ID NO: 267178 - RNA, 19 nt, Human
gaucccucccuccuugccc

SEQ ID NO: 267179 - RNA, 21 nt, Human
gcugggcaggcgugggggcag

SEQ ID NO: 267180 - RNA, 23 nt, Human
ggaguaaaggauggaaagguaga

SEQ ID NO: 267181 - RNA, 19 nt, Human
ggggcagcacuggcagugg

SEQ ID NO: 267182 - RNA, 18 nt, Human
gguccagcagcuuuggag

SEQ ID NO: 267183 - RNA, 23 nt, Human
uccuuuuucccuccauucccaua

SEQ ID NO: 267184 - RNA, 23 nt, Human
ucgggcaguggucagcucucccu

SEQ ID NO: 267185 - RNA, 22 nt, Human
ucugcccagggacuccccuuca

SEQ ID NO: 267186 - RNA, 24 nt, Human
ugagacccuggaaccaagaucccu

SEQ ID NO: 267187 - RNA, 19 nt, Human
ugagcgcaagcagcucaaa

SEQ ID NO: 267188 - RNA, 20 nt, Human
ugaugcaaaucagaggagga

SEQ ID NO: 267189 - RNA, 21 nt, Human
ugcccagggacuccccuucac

SEQ ID NO: 267190 - RNA, 18 nt, Human
ugcccggaggcucaggaa

SEQ ID NO: 267191 - RNA, 22 nt, Human
uggcagugggggagggaaguug

SEQ ID NO: 267192 - RNA, 22 nt, Human
ugggggcagcacuggcaguggg

SEQ ID NO: 267193 - RNA, 23 nt, Human
uuuuuuuuuuuuuuuuucauuuu

SEQ ID NO: 267194 - RNA, 21 nt, Human
acacuuugauauuuccuuugu

SEQ ID NO: 267195 - RNA, 23 nt, Human
acgccugcccggccagccuccgg

SEQ ID NO: 267196 - RNA, 23 nt, Human
agucaggaacaguuuaucuucau

SEQ ID NO: 267197 - RNA, 21 nt, Human
caaaauaguauaaagucagga

SEQ ID NO: 267198 - RNA, 21 nt, Human
caagaauaagcuagcugauca

SEQ ID NO: 267199 - RNA, 22 nt, Human
caccacgccugcccggccagcc

SEQ ID NO: 267200 - RNA, 23 nt, Human
caugguaaacauucacuuuaugc

SEQ ID NO: 267201 - RNA, 24 nt, Human
cccggccagccuccgggagcccgc

SEQ ID NO: 267202 - RNA, 21 nt, Human
ccgggauggcagcggcuuugc

SEQ ID NO: 267203 - RNA, 18 nt, Human
ccuccgggagcccgcugg

SEQ ID NO: 267204 - RNA, 21 nt, Human
ccuccgggauggcagcggcuu

SEQ ID NO: 267205 - RNA, 23 nt, Human
ccugcccggccagccuccgggag

SEQ ID NO: 267206 - RNA, 19 nt, Human
cugcccggccagccuccgg

SEQ ID NO: 267207 - RNA, 20 nt, Human
gagcccgcuggcugggcccu

SEQ ID NO: 267208 - RNA, 24 nt, Human
gagcccgcuggcugggcccuccgg

SEQ ID NO: 267209 - RNA, 19 nt, Human
gagggacccgggccgcggc

SEQ ID NO: 267210 - RNA, 21 nt, Human
ggcuugaaaaacacuuugaua

SEQ ID NO: 267211 - RNA, 22 nt, Human
gucaggaacaguuuaucuucau

SEQ ID NO: 267212 - RNA, 27 nt, Human
uaaaaaaaguacacaagaauaagcuag

SEQ ID NO: 267213 - RNA, 22 nt, Human
uaacaggcuugaaaaacacuuu

SEQ ID NO: 267214 - RNA, 18 nt, Human
uccacgcgcgguagccgu

SEQ ID NO: 267215 - RNA, 22 nt, Human
uccgggagcccgcuggcugggc

SEQ ID NO: 267216 - RNA, 18 nt, Human
uccgggauggcagcggcu

SEQ ID NO: 267217 - RNA, 20 nt, Human
ugcccggccagccuccggga

SEQ ID NO: 267218 - RNA, 22 nt, Human
ugcccggccagccuccgggagc

SEQ ID NO: 267219 - RNA, 21 nt, Human
uuaaaaagcugagguuauaga

SEQ ID NO: 267220 - RNA, 25 nt, Human
cccgcgcacgaugccguguccaccg

SEQ ID NO: 267221 - RNA, 20 nt, Human
cugcgugcugcccucuuccc

SEQ ID NO: 267222 - RNA, 18 nt, Human
gcccggcgcucggcgccu

SEQ ID NO: 267223 - RNA, 23 nt, Human
ugcgugcugcccucuuccccgcg

SEQ ID NO: 267224 - RNA, 18 nt, Human
ugcugcccucuuccccgc

SEQ ID NO: 267225 - RNA, 25 nt, Human
accaagcugcaguuacuccuuugag

SEQ ID NO: 267226 - RNA, 21 nt, Human
ucaaaccaagcugcaguuacu

SEQ ID NO: 267227 - RNA, 18 nt, Human
ugcaguuacuccuuugag

SEQ ID NO: 267228 - RNA, 21 nt, Human
uuacuccuuugagacaccaaa

SEQ ID NO: 267229 - RNA, 25 nt, Human
uuccaacaagaagccauaagguacc

SEQ ID NO: 267230 - RNA, 19 nt, Human
uuucaaaccaagcugcagu

SEQ ID NO: 267231 - RNA, 23 nt, Human
uuuuuuuuuuuuuuuuuuuucca

SEQ ID NO: 267232 - RNA, 24 nt, Human
uuuuuuuuuuuuuuuuuuuuuccu

SEQ ID NO: 267233 - RNA, 23 nt, Human
aaaagccaaucacaugauccaug

SEQ ID NO: 267234 - RNA, 26 nt, Human
aacucauuucccacaaagccuuccug

SEQ ID NO: 267235 - RNA, 22 nt, Human
aagaaagagcggaggggcgggg

SEQ ID NO: 267236 - RNA, 21 nt, Human
aagaggguuuacgcuuggaca

SEQ ID NO: 267237 - RNA, 18 nt, Human
aagcugcaggaccuggga

SEQ ID NO: 267238 - RNA, 21 nt, Human
acagcaggggcagcuccuggg

SEQ ID NO: 267239 - RNA, 21 nt, Human
accauacccuaaauacaagga

SEQ ID NO: 267240 - RNA, 21 nt, Human
acccuguacuuaaccaguaaa

SEQ ID NO: 267241 - RNA, 26 nt, Human
accgcagagcccccucccaccgcacu

SEQ ID NO: 267242 - RNA, 22 nt, Human
accuugcguccaaacaagucug

SEQ ID NO: 267243 - RNA, 18 nt, Human
acgucugaaaagcacugg

SEQ ID NO: 267244 - RNA, 23 nt, Human
agaaaaaggcagccacuggcuua

SEQ ID NO: 267245 - RNA, 22 nt, Human
agaaagagcggaggggcggggc

SEQ ID NO: 267246 - RNA, 23 nt, Human
agaaguagggguugggguggagc

SEQ ID NO: 267247 - RNA, 24 nt, Human
agaaugaagggugaagagauaggg

SEQ ID NO: 267248 - RNA, 19 nt, Human
agagcccccucccaccgca

SEQ ID NO: 267249 - RNA, 20 nt, Human
agagcccccucccaccgcac

SEQ ID NO: 267250 - RNA, 21 nt, Human
agcaagacaggcaagaaccca

SEQ ID NO: 267251 - RNA, 22 nt, Human
agcacuaugaacaagacccaaa

SEQ ID NO: 267252 - RNA, 20 nt, Human
agcaggcugaggugcuggcc

SEQ ID NO: 267253 - RNA, 18 nt, Human
aggaggggccagacgaug

SEQ ID NO: 267254 - RNA, 24 nt, Human
aggcaagaacccaucauuccuuca

SEQ ID NO: 267255 - RNA, 18 nt, Human
aggccuggggagcagaga

SEQ ID NO: 267256 - RNA, 21 nt, Human
aggggacugcugggcagagca

SEQ ID NO: 267257 - RNA, 22 nt, Human
aggguuuacgcuuggacagggc

SEQ ID NO: 267258 - RNA, 18 nt, Human
auagaggugagauuugaa

SEQ ID NO: 267259 - RNA, 19 nt, Human
augcacggaggggcaggcc

SEQ ID NO: 267260 - RNA, 20 nt, Human
auggucucaacucauuuccc

SEQ ID NO: 267261 - RNA, 20 nt, Human
caaagcaagacaggcaagaa

SEQ ID NO: 267262 - RNA, 23 nt, Human
caaagcaagacaggcaagaacca

SEQ ID NO: 267263 - RNA, 23 nt, Human
caaagcaagacaggcaagaaccc

SEQ ID NO: 267264 - RNA, 25 nt, Human
caacucccaaguccauggucucaac

SEQ ID NO: 267265 - RNA, 21 nt, Human
caacuccuggacagguuugug

SEQ ID NO: 267266 - RNA, 25 nt, Human
caacuccuggacagguuuguggaca

SEQ ID NO: 267267 - RNA, 18 nt, Human
caaucaggcacccccagg

SEQ ID NO: 267268 - RNA, 22 nt, Human
cacauggaaguagaggccagga

SEQ ID NO: 267269 - RNA, 23 nt, Human
caccaagaaagagcggaggggcg

SEQ ID NO: 267270 - RNA, 24 nt, Human
caccacagccugucacauguccca

SEQ ID NO: 267271 - RNA, 23 nt, Human
caccauacccuaaauacaaggac

SEQ ID NO: 267272 - RNA, 24 nt, Human
cacuuuggaaaaggaggggccaga

SEQ ID NO: 267273 - RNA, 21 nt, Human
cagagaaccuccccacuugcc

SEQ ID NO: 267274 - RNA, 19 nt, Human
cagcaccccguguagugcc

SEQ ID NO: 267275 - RNA, 22 nt, Human
cagcuuccgaggaccugaccag

SEQ ID NO: 267276 - RNA, 25 nt, Human
caggcucaacucuggcccccaacuc

SEQ ID NO: 267277 - RNA, 23 nt, Human
ccaaaaccgcagagcccccuccc

SEQ ID NO: 267278 - RNA, 24 nt, Human
ccaaagcaagacaggcaagaaccc

SEQ ID NO: 267279 - RNA, 28 nt, Human
ccaacucccaaguccauggucucaacuc

SEQ ID NO: 267280 - RNA, 19 nt, Human
ccacaaagccuuccuggag

SEQ ID NO: 267281 - RNA, 21 nt, Human
ccagaaaauacuccuugggca

SEQ ID NO: 267282 - RNA, 18 nt, Human
ccagggaagacaagugcc

SEQ ID NO: 267283 - RNA, 20 nt, Human
cccacaaagccuuccuggag

SEQ ID NO: 267284 - RNA, 26 nt, Human
cccaggacaaaaggaaaacuuauaca

SEQ ID NO: 267285 - RNA, 24 nt, Human
ccccaaaaccgcagagcccccucc

SEQ ID NO: 267286 - RNA, 18 nt, Human
ccccagccaucacuuccc

SEQ ID NO: 267287 - RNA, 19 nt, Human
cccccaacucccaagucca

SEQ ID NO: 267288 - RNA, 20 nt, Human
cccccaacucccaaguccau

SEQ ID NO: 267289 - RNA, 19 nt, Human
cccugggcaugccaaggcu

SEQ ID NO: 267290 - RNA, 20 nt, Human
cccugggcaugccaaggcuc

SEQ ID NO: 267291 - RNA, 28 nt, Human
cccuggguccccaaaaccgcagagcccc

SEQ ID NO: 267292 - RNA, 20 nt, Human
ccguguagugccaccagagu

SEQ ID NO: 267293 - RNA, 21 nt, Human
ccuucagaaauacgaaacaac

SEQ ID NO: 267294 - RNA, 21 nt, Human
ccuuggcuaaaagaggagggc

SEQ ID NO: 267295 - RNA, 21 nt, Human
cgaaacaacgugucuuggaug

SEQ ID NO: 267296 - RNA, 21 nt, Human
cgcccgggcucagaaaaaggc

SEQ ID NO: 267297 - RNA, 20 nt, Human
cgcccuggguccccaaaacc

SEQ ID NO: 267298 - RNA, 23 nt, Human
cgccuucggccccgcccgggcuc

SEQ ID NO: 267299 - RNA, 22 nt, Human
cggaccaaagcaagacaggcaa

SEQ ID NO: 267300 - RNA, 21 nt, Human
cggaggggcggggcugcggca

SEQ ID NO: 267301 - RNA, 21 nt, Human
cggcaggcuccggacuuccag

SEQ ID NO: 267302 - RNA, 21 nt, Human
cuaagaaacgucugaaaagca

SEQ ID NO: 267303 - RNA, 23 nt, Human
cucucuaccauuuuauuuuugua

SEQ ID NO: 267304 - RNA, 21 nt, Human
cucugccacuagcucucucca

SEQ ID NO: 267305 - RNA, 18 nt, Human
cuguccuaaguuucucaa

SEQ ID NO: 267306 - RNA, 19 nt, Human
cuuggccucauuguguugu

SEQ ID NO: 267307 - RNA, 24 nt, Human
gaaaaaggcagccacuggcuuaag

SEQ ID NO: 267308 - RNA, 23 nt, Human
gaccucacacccucugcagugcu

SEQ ID NO: 267309 - RNA, 19 nt, Human
gacucagcuuccgaggacc

SEQ ID NO: 267310 - RNA, 19 nt, Human
gagcucaggaggcuggcga

SEQ ID NO: 267311 - RNA, 23 nt, Human
gaggcuggcgaguugcucagcaa

SEQ ID NO: 267312 - RNA, 23 nt, Human
gauaugaaccuccuuugcagcca

SEQ ID NO: 267313 - RNA, 24 nt, Human
gauuugaauccagcaccccgugua

SEQ ID NO: 267314 - RNA, 20 nt, Human
gcaagacaggcaagaaccca

SEQ ID NO: 267315 - RNA, 20 nt, Human
gcagagcccccucccaccgc

SEQ ID NO: 267316 - RNA, 23 nt, Human
gcagcacagugcaaggccugggg

SEQ ID NO: 267317 - RNA, 24 nt, Human
gcauauguaaguuuuuacaccaua

SEQ ID NO: 267318 - RNA, 24 nt, Human
gcauguuuguugaaagaaugaagg

SEQ ID NO: 267319 - RNA, 20 nt, Human
gccccauccccagccaucac

SEQ ID NO: 267320 - RNA, 19 nt, Human
gcccuggguccccaaaacc

SEQ ID NO: 267321 - RNA, 22 nt, Human
gcuagcucggccgcccucaacc

SEQ ID NO: 267322 - RNA, 19 nt, Human
gcuuggacagggcauagaa

SEQ ID NO: 267323 - RNA, 20 nt, Human
ggacaaaaggaaaacuuaua

SEQ ID NO: 267324 - RNA, 20 nt, Human
ggacagguuuguggacacau

SEQ ID NO: 267325 - RNA, 22 nt, Human
ggacagguuuguggacacaucu

SEQ ID NO: 267326 - RNA, 24 nt, Human
ggaccaaagcaagacaggcaagaa

SEQ ID NO: 267327 - RNA, 23 nt, Human
ggcacccccaggacaaaaggaaa

SEQ ID NO: 267328 - RNA, 19 nt, Human
ggcaggcuccggacuucca

SEQ ID NO: 267329 - RNA, 21 nt, Human
gggaagacaagugcccuguag

SEQ ID NO: 267330 - RNA, 19 nt, Human
gggacugcugggcagagca

SEQ ID NO: 267331 - RNA, 19 nt, Human
gggagucccgagggccuac

SEQ ID NO: 267332 - RNA, 18 nt, Human
gggcagagcacaagcugc

SEQ ID NO: 267333 - RNA, 18 nt, Human
gggcauggagcucaggag

SEQ ID NO: 267334 - RNA, 23 nt, Human
gucuguauuuaacugaaaaaaaa

SEQ ID NO: 267335 - RNA, 18 nt, Human
uaacaaaaugugcauaug

SEQ ID NO: 267336 - RNA, 18 nt, Human
uacaaucuucuggucacu

SEQ ID NO: 267337 - RNA, 27 nt, Human
uacggaccaaagcaagacaggcaagaa

SEQ ID NO: 267338 - RNA, 19 nt, Human
uaggaucaaucaggcaccc

SEQ ID NO: 267339 - RNA, 22 nt, Human
uaggaucaaucaggcaccccca

SEQ ID NO: 267340 - RNA, 19 nt, Human
uaugaacaagacccaaagg

SEQ ID NO: 267341 - RNA, 19 nt, Human
uauuacaacuacuugauua

SEQ ID NO: 267342 - RNA, 23 nt, Human
ucaacucauuucccacaaagccu

SEQ ID NO: 267343 - RNA, 19 nt, Human
ucacaugauccaugggcau

SEQ ID NO: 267344 - RNA, 19 nt, Human
ucaccaucaccacugccag

SEQ ID NO: 267345 - RNA, 21 nt, Human
ucacuuuggaaaaggaggggc

SEQ ID NO: 267346 - RNA, 19 nt, Human
uccaaaggggagagccacc

SEQ ID NO: 267347 - RNA, 21 nt, Human
uccagcaccccguguagugcc

SEQ ID NO: 267348 - RNA, 18 nt, Human
uccauauuacaacuacuu

SEQ ID NO: 267349 - RNA, 19 nt, Human
uccauggucucaacucauu

SEQ ID NO: 267350 - RNA, 20 nt, Human
ucccacaaagccuuccugga

SEQ ID NO: 267351 - RNA, 23 nt, Human
uccccaaaaccgcagagcccccu

SEQ ID NO: 267352 - RNA, 19 nt, Human
uccuuaggaagagggacag

SEQ ID NO: 267353 - RNA, 18 nt, Human
ucgaaaacuuccaaaucc

SEQ ID NO: 267354 - RNA, 23 nt, Human
ucucugccacuagcucucuccaa

SEQ ID NO: 267355 - RNA, 25 nt, Human
ucugcagugcugggagucccgaggg

SEQ ID NO: 267356 - RNA, 23 nt, Human
ugaacaagacccaaaggcagagc

SEQ ID NO: 267357 - RNA, 22 nt, Human
ugaccugagggagccaaggucu

SEQ ID NO: 267358 - RNA, 18 nt, Human
ugauccaugggcauuccu

SEQ ID NO: 267359 - RNA, 21 nt, Human
ugcaaggccuggggcacuggg

SEQ ID NO: 267360 - RNA, 20 nt, Human
ugccccaaaagaaguuucca

SEQ ID NO: 267361 - RNA, 20 nt, Human
ugccugaacagcacuaugaa

SEQ ID NO: 267362 - RNA, 19 nt, Human
ugcugggagucccgagggc

SEQ ID NO: 267363 - RNA, 21 nt, Human
uggaaaaggaggggccagacg

SEQ ID NO: 267364 - RNA, 21 nt, Human
uggcccccaacucccaagucc

SEQ ID NO: 267365 - RNA, 19 nt, Human
ugggcauuccuggcaagag

SEQ ID NO: 267366 - RNA, 24 nt, Human
uggguccccaaaaccgcagagccc

SEQ ID NO: 267367 - RNA, 19 nt, Human
ugggugcuccugcauucaa

SEQ ID NO: 267368 - RNA, 18 nt, Human
uggugccaccacagccug

SEQ ID NO: 267369 - RNA, 20 nt, Human
uguaacaaaaugugcauaug

SEQ ID NO: 267370 - RNA, 21 nt, Human
uguccuaaguuucucaacagc

SEQ ID NO: 267371 - RNA, 24 nt, Human
uguguugggcucuggaagcuaaga

SEQ ID NO: 267372 - RNA, 20 nt, Human
uuaagacacaacuccuggac

SEQ ID NO: 267373 - RNA, 19 nt, Human
uuaccccuguccuuaggaa

SEQ ID NO: 267374 - RNA, 24 nt, Human
uugaaagaaugaagggugaagaga

SEQ ID NO: 267375 - RNA, 20 nt, Human
uuucccacaaagccuuccug

SEQ ID NO: 267376 - RNA, 23 nt, Human
uuucccacaaagccuuccuggag

SEQ ID NO: 267377 - RNA, 20 nt, Human
uuuuuacaccauacccuaaa

SEQ ID NO: 267378 - RNA, 22 nt, Human
aagcccgggcucagggccagga

SEQ ID NO: 267379 - RNA, 20 nt, Human
acaguacuuuaaucccacac

SEQ ID NO: 267380 - RNA, 26 nt, Human
acuuuggguggugguggagggcaggu

SEQ ID NO: 267381 - RNA, 19 nt, Human
agagcgccuucggguaaaa

SEQ ID NO: 267382 - RNA, 24 nt, Human
auccccccaggucagaccccacca

SEQ ID NO: 267383 - RNA, 20 nt, Human
cacgcgguggggagcgugug

SEQ ID NO: 267384 - RNA, 22 nt, Human
cacguggacccgaaggcuaagc

SEQ ID NO: 267385 - RNA, 25 nt, Human
cagcugccgccuccggccacgugga

SEQ ID NO: 267386 - RNA, 23 nt, Human
cagggccgaaggggacccgcugg

SEQ ID NO: 267387 - RNA, 21 nt, Human
ccaauccccccaggucagacc

SEQ ID NO: 267388 - RNA, 22 nt, Human
ccccccaggucagaccccacca

SEQ ID NO: 267389 - RNA, 20 nt, Human
cgcaaauaacuuccauccaa

SEQ ID NO: 267390 - RNA, 27 nt, Human
cggcuuccggguaccaggauacucccu

SEQ ID NO: 267391 - RNA, 22 nt, Human
cguggacccgaaggcuaagccc

SEQ ID NO: 267392 - RNA, 19 nt, Human
cugccgccuccggccacgu

SEQ ID NO: 267393 - RNA, 22 nt, Human
cuguccagcucugggcccugga

SEQ ID NO: 267394 - RNA, 20 nt, Human
cuuuaaucccacacuuuggg

SEQ ID NO: 267395 - RNA, 18 nt, Human
gccuccggccacguggac

SEQ ID NO: 267396 - RNA, 21 nt, Human
gcgugugaccccggcuccagg

SEQ ID NO: 267397 - RNA, 21 nt, Human
ggaauuagcggaaaacaaggc

SEQ ID NO: 267398 - RNA, 18 nt, Human
ggagggcaggucauuucc

SEQ ID NO: 267399 - RNA, 21 nt, Human
gggccaggagucgcggcuucc

SEQ ID NO: 267400 - RNA, 19 nt, Human
guggggcggcccgcgucca

SEQ ID NO: 267401 - RNA, 19 nt, Human
uaacuuccauccaaccauc

SEQ ID NO: 267402 - RNA, 21 nt, Human
uaagcccgggcucagggccag

SEQ ID NO: 267403 - RNA, 23 nt, Human
uaccaggauacucccuugggggc

SEQ ID NO: 267404 - RNA, 19 nt, Human
ucauuucccuccaaucccc

SEQ ID NO: 267405 - RNA, 19 nt, Human
uccccccaggucagacccc

SEQ ID NO: 267406 - RNA, 18 nt, Human
ucccuugggggcgucucg

SEQ ID NO: 267407 - RNA, 21 nt, Human
ugcgggucccgcgacggccag

SEQ ID NO: 267408 - RNA, 27 nt, Human
uggaaagaaaacaguacuuuaauccca

SEQ ID NO: 267409 - RNA, 24 nt, Human
uggaauuagcggaaaacaaggccc

SEQ ID NO: 267410 - RNA, 20 nt, Human
uggggagcgugugaccccgg

SEQ ID NO: 267411 - RNA, 19 nt, Human
uguccagcucugggcccug

SEQ ID NO: 267412 - RNA, 22 nt, Human
uucccuccaauccccccagguc

SEQ ID NO: 267413 - RNA, 18 nt, Human
cugcgcaugcgcuucacu

SEQ ID NO: 267414 - RNA, 22 nt, Human
uagcaggaccuccgcgaccacc

SEQ ID NO: 267415 - RNA, 22 nt, Human
ucaauggaaauaguggauuuuu

SEQ ID NO: 267416 - RNA, 18 nt, Human
uccgcgaccacccgcugc

SEQ ID NO: 267417 - RNA, 20 nt, Human
ugaacccagguguccugggg

SEQ ID NO: 267418 - RNA, 23 nt, Human
ugggugugaacccaggugucccc

SEQ ID NO: 267419 - RNA, 22 nt, Human
uuuuuuuuuuuuuuuucaaugg

SEQ ID NO: 267420 - RNA, 21 nt, Human
aaacaugaccaaaggacauca

SEQ ID NO: 267421 - RNA, 25 nt, Human
aaacucuaccagggagaccgcgcga

SEQ ID NO: 267422 - RNA, 19 nt, Human
aaaucaacacuguguagca

SEQ ID NO: 267423 - RNA, 21 nt, Human
aacacuguguagcaccaaacu

SEQ ID NO: 267424 - RNA, 20 nt, Human
aagguagaacacaauacaaa

SEQ ID NO: 267425 - RNA, 21 nt, Human
acaaacucuaccagggagacc

SEQ ID NO: 267426 - RNA, 18 nt, Human
accagagaugggcagaaa

SEQ ID NO: 267427 - RNA, 21 nt, Human
acuaccaagaaaccacaaaaa

SEQ ID NO: 267428 - RNA, 20 nt, Human
agcggagcuggagcugggga

SEQ ID NO: 267429 - RNA, 25 nt, Human
agcgguggcggcaaggccucucccu

SEQ ID NO: 267430 - RNA, 23 nt, Human
agguggcagcggcaguggaggcu

SEQ ID NO: 267431 - RNA, 21 nt, Human
aguggcggcggcggaggcccg

SEQ ID NO: 267432 - RNA, 22 nt, Human
aguguucagguuacaggucagg

SEQ ID NO: 267433 - RNA, 19 nt, Human
aguuucacagcuacagucu

SEQ ID NO: 267434 - RNA, 24 nt, Human
auagaauaaacuggcacuuagaca

SEQ ID NO: 267435 - RNA, 19 nt, Human
augaagugaucauuuucag

SEQ ID NO: 267436 - RNA, 21 nt, Human
auuuguuucaguuaacaauuc

SEQ ID NO: 267437 - RNA, 23 nt, Human
caaacuaaugaaggcacagcuag

SEQ ID NO: 267438 - RNA, 21 nt, Human
caaaggacaucacaaaaauca

SEQ ID NO: 267439 - RNA, 20 nt, Human
caagaaaccacaaaaacuug

SEQ ID NO: 267440 - RNA, 19 nt, Human
caagcagauuuaaacccuu

SEQ ID NO: 267441 - RNA, 24 nt, Human
cacuauaugucacauacacaaggu

SEQ ID NO: 267442 - RNA, 18 nt, Human
cacuguguagcaccaaac

SEQ ID NO: 267443 - RNA, 19 nt, Human
cagaggccggcgcugaggu

SEQ ID NO: 267444 - RNA, 23 nt, Human
cagcagcggcgcagagcggagcu

SEQ ID NO: 267445 - RNA, 25 nt, Human
cagcggcgcagagcggagcuggagc

SEQ ID NO: 267446 - RNA, 27 nt, Human
ccuacaaacucuaccagggagaccgcc

SEQ ID NO: 267447 - RNA, 27 nt, Human
cgauggcagcagcggcgcagagcggag

SEQ ID NO: 267448 - RNA, 20 nt, Human
cuugcaagccuacaaacucu

SEQ ID NO: 267449 - RNA, 21 nt, Human
cuuuagauaauugacaacagc

SEQ ID NO: 267450 - RNA, 23 nt, Human
gaaucaaauguggucuuuucaca

SEQ ID NO: 267451 - RNA, 19 nt, Human
gaccaaaggacaucacaaa

SEQ ID NO: 267452 - RNA, 22 nt, Human
gaccgcgcgaccagagaugggc

SEQ ID NO: 267453 - RNA, 20 nt, Human
gagaugggcagaaaaugacu

SEQ ID NO: 267454 - RNA, 19 nt, Human
gagcuggggaugcagaggc

SEQ ID NO: 267455 - RNA, 26 nt, Human
gaguggcggcggcggaggcccgggcu

SEQ ID NO: 267456 - RNA, 22 nt, Human
gcaguggaggcuugggcgacag

SEQ ID NO: 267457 - RNA, 22 nt, Human
gcgaccagagaugggcagaaaa

SEQ ID NO: 267458 - RNA, 19 nt, Human
gcggaggcccgggcugcgg

SEQ ID NO: 267459 - RNA, 20 nt, Human
gcggcggcggaggcccgggc

SEQ ID NO: 267460 - RNA, 19 nt, Human
ggagcuggggaugcagagg

SEQ ID NO: 267461 - RNA, 18 nt, Human
ggcagcggcaguggaggc

SEQ ID NO: 267462 - RNA, 18 nt, Human
ggcggcggcggaggcccg

SEQ ID NO: 267463 - RNA, 20 nt, Human
gggcgacagcgguggcggca

SEQ ID NO: 267464 - RNA, 19 nt, Human
gggcugcggagguggcagc

SEQ ID NO: 267465 - RNA, 21 nt, Human
guggcagcggcgauggcagca

SEQ ID NO: 267466 - RNA, 20 nt, Human
guggcggcggcggaggcccg

SEQ ID NO: 267467 - RNA, 18 nt, Human
uaacagaaacaugaccaa

SEQ ID NO: 267468 - RNA, 21 nt, Human
uacaagaacaugaaaaacagu

SEQ ID NO: 267469 - RNA, 26 nt, Human
uagcaaacuaaugaaggcacagcuag

SEQ ID NO: 267470 - RNA, 18 nt, Human
uauguuauauuaacaccu

SEQ ID NO: 267471 - RNA, 19 nt, Human
ucacggaugcuugaguggc

SEQ ID NO: 267472 - RNA, 24 nt, Human
ugaaagggaagguagaacacaaua

SEQ ID NO: 267473 - RNA, 19 nt, Human
ugaccaaaggacaucacaa

SEQ ID NO: 267474 - RNA, 18 nt, Human
ugccgagauguaccgcag

SEQ ID NO: 267475 - RNA, 22 nt, Human
ugcuuuagauaauugacaacag

SEQ ID NO: 267476 - RNA, 18 nt, Human
uggcagcggcaguggagg

SEQ ID NO: 267477 - RNA, 19 nt, Human
uggcagcggcaguggaggc

SEQ ID NO: 267478 - RNA, 22 nt, Human
uggcggcggcggaggcccgggc

SEQ ID NO: 267479 - RNA, 19 nt, Human
ugggcuggaaaaaagaaaa

SEQ ID NO: 267480 - RNA, 30 nt, Human
uguuucaguuaacaauucugacaguuucaa

SEQ ID NO: 267481 - RNA, 20 nt, Human
uuauuuauuuuagguugcaa

SEQ ID NO: 267482 - RNA, 19 nt, Human
uucacauuagauguaugcu

SEQ ID NO: 267483 - RNA, 25 nt, Human
uugaguggcggcggcggaggcccuu

SEQ ID NO: 267484 - RNA, 24 nt, Human
uuuagauaauugacaacagcuuac

SEQ ID NO: 267485 - RNA, 23 nt, Human
uuucaaggcuguaugaaucugcu

SEQ ID NO: 267486 - RNA, 18 nt, Human
cgccguggccuccaacaa

SEQ ID NO: 267487 - RNA, 21 nt, Human
gccgaggcuccuagcuccucu

SEQ ID NO: 267488 - RNA, 21 nt, Human
ggcaguggcggcgacccuagc

SEQ ID NO: 267489 - RNA, 21 nt, Human
ggcaguggcggcgacccuagc

SEQ ID NO: 267490 - RNA, 20 nt, Human
ucacgccuccugcggcagug

SEQ ID NO: 267491 - RNA, 19 nt, Human
ucgcucgcuuuggggcugc

SEQ ID NO: 267492 - RNA, 18 nt, Human
uuuuuauccccucacgcc

SEQ ID NO: 267493 - RNA, 24 nt, Human
aaaaagcaaaacuuuccucuaaga

SEQ ID NO: 267494 - RNA, 22 nt, Human
aaagaacauauucagaugccaa

SEQ ID NO: 267495 - RNA, 24 nt, Human
aaauaccccuucagacgggucccu

SEQ ID NO: 267496 - RNA, 20 nt, Human
aacaaaaaggacauaaaaac

SEQ ID NO: 267497 - RNA, 22 nt, Human
aacaaaaaggacauaaaaacac

SEQ ID NO: 267498 - RNA, 19 nt, Human
aacaacacaaaaagcaaag

SEQ ID NO: 267499 - RNA, 22 nt, Human
aacagaucuugugauaugugug

SEQ ID NO: 267500 - RNA, 22 nt, Human
aacaucauuccaauacuacuua

SEQ ID NO: 267501 - RNA, 22 nt, Human
aaccccacuuuucucucugauc

SEQ ID NO: 267502 - RNA, 18 nt, Human
aagacaaaacuaaagagg

SEQ ID NO: 267503 - RNA, 21 nt, Human
aagcguaugucuaaaguacaa

SEQ ID NO: 267504 - RNA, 19 nt, Human
aaggacauaaaaacacgug

SEQ ID NO: 267505 - RNA, 24 nt, Human
aaguagaaacaaacuacuuaaaac

SEQ ID NO: 267506 - RNA, 18 nt, Human
aagugacccucuaauuga

SEQ ID NO: 267507 - RNA, 19 nt, Human
aauauaaaucauuuaacua

SEQ ID NO: 267508 - RNA, 24 nt, Human
aaucacaggauaacaaaaauagaa

SEQ ID NO: 267509 - RNA, 22 nt, Human
acaaaaaggacauaaaaacacg

SEQ ID NO: 267510 - RNA, 21 nt, Human
acaaagguuugcauuuggaca

SEQ ID NO: 267511 - RNA, 23 nt, Human
acaaucaaguccccugagaaaca

SEQ ID NO: 267512 - RNA, 19 nt, Human
accccacuuuucucucugg

SEQ ID NO: 267513 - RNA, 18 nt, Human
acccucccucuggcggcc

SEQ ID NO: 267514 - RNA, 24 nt, Human
acggaacaacacaaaaagcaaagg

SEQ ID NO: 267515 - RNA, 23 nt, Human
acuaaagaggaguuagcugcaug

SEQ ID NO: 267516 - RNA, 24 nt, Human
acuacagugcaccuguagucccag

SEQ ID NO: 267517 - RNA, 24 nt, Human
acuguccuaaacuaaacacacauu

SEQ ID NO: 267518 - RNA, 19 nt, Human
agaaaacgcuggggguucu

SEQ ID NO: 267519 - RNA, 20 nt, Human
agaacacaccaccucaacgu

SEQ ID NO: 267520 - RNA, 18 nt, Human
agagcuuccugcucuacc

SEQ ID NO: 267521 - RNA, 19 nt, Human
agaggacucaagcugcaga

SEQ ID NO: 267522 - RNA, 23 nt, Human
agauaaucuauccagcccugacc

SEQ ID NO: 267523 - RNA, 22 nt, Human
agcaacacagacuuggcgagcu

SEQ ID NO: 267524 - RNA, 21 nt, Human
aggaaugagauucugaaguac

SEQ ID NO: 267525 - RNA, 19 nt, Human
aggcaggucacgggggcau

SEQ ID NO: 267526 - RNA, 20 nt, Human
aggcaggucacgggggcaug

SEQ ID NO: 267527 - RNA, 22 nt, Human
aggcaggucacgggggcaugcu

SEQ ID NO: 267528 - RNA, 21 nt, Human
aggcuccacaaauaccaauga

SEQ ID NO: 267529 - RNA, 18 nt, Human
agugcaccuguaguccca

SEQ ID NO: 267530 - RNA, 20 nt, Human
aguucaaacacauaagccaa

SEQ ID NO: 267531 - RNA, 18 nt, Human
auacaggacauuccugua

SEQ ID NO: 267532 - RNA, 21 nt, Human
auacuacuuacuacuaccuga

SEQ ID NO: 267533 - RNA, 19 nt, Human
aucacaggauaacaaaaau

SEQ ID NO: 267534 - RNA, 23 nt, Human
aucuucuggcaggucucuucuag

SEQ ID NO: 267535 - RNA, 22 nt, Human
augaacuaacuccagauuugcu

SEQ ID NO: 267536 - RNA, 19 nt, Human
auuaaauaaaaaagaacuc

SEQ ID NO: 267537 - RNA, 22 nt, Human
auuccuguaccacauucacccc

SEQ ID NO: 267538 - RNA, 25 nt, Human
caaacuacuuaaaaccagaggacuc

SEQ ID NO: 267539 - RNA, 24 nt, Human
caaagcacagagaaaaugcaaagc

SEQ ID NO: 267540 - RNA, 18 nt, Human
caacacaaaaagcaaaga

SEQ ID NO: 267541 - RNA, 23 nt, Human
caagaugaacaggagccucuccu

SEQ ID NO: 267542 - RNA, 24 nt, Human
caagcuauaaaaauguugccacaa

SEQ ID NO: 267543 - RNA, 22 nt, Human
caagcugcagaaccacuccuca

SEQ ID NO: 267544 - RNA, 21 nt, Human
caaguacuuccagaaagcucc

SEQ ID NO: 267545 - RNA, 21 nt, Human
caaguagaaacaaacuacuua

SEQ ID NO: 267546 - RNA, 21 nt, Human
caauacuacuuacuacuaccu

SEQ ID NO: 267547 - RNA, 20 nt, Human
cacaaaaagcaaagaaacua

SEQ ID NO: 267548 - RNA, 23 nt, Human
cacaaaaucaggagaaacaauaa

SEQ ID NO: 267549 - RNA, 22 nt, Human
cacaacaaaauguuacaaacau

SEQ ID NO: 267550 - RNA, 23 nt, Human
cacagcaacacagacuuggcgag

SEQ ID NO: 267551 - RNA, 24 nt, Human
caccaaaaaugaaaacaucauucc

SEQ ID NO: 267552 - RNA, 24 nt, Human
cacccccaguaguggggacuacag

SEQ ID NO: 267553 - RNA, 27 nt, Human
caccuguagucccaguagaugcucuga

SEQ ID NO: 267554 - RNA, 21 nt, Human
cagcacagaacacaccaccuc

SEQ ID NO: 267555 - RNA, 21 nt, Human
caggcuaugccaauuaaaaua

SEQ ID NO: 267556 - RNA, 21 nt, Human
caguaguggggacuacagugc

SEQ ID NO: 267557 - RNA, 20 nt, Human
caugccacaaagacaaaaac

SEQ ID NO: 267558 - RNA, 23 nt, Human
cauuaccacaagaugaacaggag

SEQ ID NO: 267559 - RNA, 18 nt, Human
ccaacauauuccaccagc

SEQ ID NO: 267560 - RNA, 18 nt, Human
ccacaaagacaaaaacau

SEQ ID NO: 267561 - RNA, 22 nt, Human
ccagaaaaagagaaaaauucca

SEQ ID NO: 267562 - RNA, 22 nt, Human
cccaccucaugcaugucaccac

SEQ ID NO: 267563 - RNA, 22 nt, Human
cccauaaagaucacuugacccu

SEQ ID NO: 267564 - RNA, 22 nt, Human
cccccaguaguggggacuacag

SEQ ID NO: 267565 - RNA, 21 nt, Human
ccccggaacuggucccagugu

SEQ ID NO: 267566 - RNA, 24 nt, Human
ccuacagacccuggcuauucuaaa

SEQ ID NO: 267567 - RNA, 21 nt, Human
ccucacaccccauuuucacaa

SEQ ID NO: 267568 - RNA, 21 nt, Human
ccucuagaagacagccagcuc

SEQ ID NO: 267569 - RNA, 18 nt, Human
ccucuggcggccgcaggg

SEQ ID NO: 267570 - RNA, 20 nt, Human
ccugcagucgacccuuggcc

SEQ ID NO: 267571 - RNA, 21 nt, Human
ccugcagucgacccuuggccu

SEQ ID NO: 267572 - RNA, 22 nt, Human
cuagucacuagcaccaucaaaa

SEQ ID NO: 267573 - RNA, 23 nt, Human
cuaugaacuaacuccagauuugc

SEQ ID NO: 267574 - RNA, 23 nt, Human
cuccagaaaaagagaaaaauucc

SEQ ID NO: 267575 - RNA, 18 nt, Human
cucuccuucauucauuuc

SEQ ID NO: 267576 - RNA, 24 nt, Human
cugcuggguuaagucuggcaacac

SEQ ID NO: 267577 - RNA, 18 nt, Human
cuggcccuucccacuucc

SEQ ID NO: 267578 - RNA, 22 nt, Human
cuguccuuggcuggcccuuccc

SEQ ID NO: 267579 - RNA, 18 nt, Human
cuuuccugcuacuuucuc

SEQ ID NO: 267580 - RNA, 19 nt, Human
gaacucacacaagcuauaa

SEQ ID NO: 267581 - RNA, 21 nt, Human
gcaauacaaacaagugacccu

SEQ ID NO: 267582 - RNA, 21 nt, Human
gcagucgacccuuggccugga

SEQ ID NO: 267583 - RNA, 27 nt, Human
gccacaaagacaaaaacagcagggacu

SEQ ID NO: 267584 - RNA, 23 nt, Human
gcuaaaguacaagaauuguacca

SEQ ID NO: 267585 - RNA, 19 nt, Human
ggaaacaaaaccccacuuu

SEQ ID NO: 267586 - RNA, 24 nt, Human
ggaaaguguauaaacaugaaaaua

SEQ ID NO: 267587 - RNA, 23 nt, Human
ggaacaacacaaaaagcaaagaa

SEQ ID NO: 267588 - RNA, 19 nt, Human
gucacagcacagaacacac

SEQ ID NO: 267589 - RNA, 20 nt, Human
gucacuagcaccaucaaaau

SEQ ID NO: 267590 - RNA, 22 nt, Human
gugaaauauuaaaaacaaaaau

SEQ ID NO: 267591 - RNA, 21 nt, Human
guguguguguguaaacgcgug

SEQ ID NO: 267592 - RNA, 20 nt, Human
uaaaaaaaaauaccccuuca

SEQ ID NO: 267593 - RNA, 21 nt, Human
uaaaaaagaacucacacaagc

SEQ ID NO: 267594 - RNA, 25 nt, Human
uaaaaacaaaaauuaauucuuaacc

SEQ ID NO: 267595 - RNA, 22 nt, Human
uaaaaauguugccacaaaaagc

SEQ ID NO: 267596 - RNA, 22 nt, Human
uaaacacgacagaguucaaaca

SEQ ID NO: 267597 - RNA, 23 nt, Human
uaaagaacauauucagaugccaa

SEQ ID NO: 267598 - RNA, 18 nt, Human
uaacaaaaauagaaauga

SEQ ID NO: 267599 - RNA, 22 nt, Human
uaagacaaaacuaaagaggagu

SEQ ID NO: 267600 - RNA, 23 nt, Human
uaaguggucagaccagaagauuc

SEQ ID NO: 267601 - RNA, 18 nt, Human
uaauaggaucaaguucau

SEQ ID NO: 267602 - RNA, 28 nt, Human
uacacaggccgucuggcucauaugcaac

SEQ ID NO: 267603 - RNA, 20 nt, Human
uacagacccuggcuauucua

SEQ ID NO: 267604 - RNA, 21 nt, Human
uaccucuagaagacagccagc

SEQ ID NO: 267605 - RNA, 18 nt, Human
uacucaaguccaacaaaa

SEQ ID NO: 267606 - RNA, 18 nt, Human
uacuucucagaaaacgcu

SEQ ID NO: 267607 - RNA, 20 nt, Human
uagcauacggaacaacacaa

SEQ ID NO: 267608 - RNA, 24 nt, Human
uauagucacagcacagaacacacc

SEQ ID NO: 267609 - RNA, 25 nt, Human
uauguguguguguguaaacgcgugu

SEQ ID NO: 267610 - RNA, 18 nt, Human
uauucagaugccaaagca

SEQ ID NO: 267611 - RNA, 20 nt, Human
uccacaaauaccaaugaaau

SEQ ID NO: 267612 - RNA, 22 nt, Human
uccucguggccaccugaugugg

SEQ ID NO: 267613 - RNA, 20 nt, Human
uccugcuacuuucucuuucu

SEQ ID NO: 267614 - RNA, 21 nt, Human
ucuauagucacagcacagaac

SEQ ID NO: 267615 - RNA, 20 nt, Human
ucucaaacaaccugcagucg

SEQ ID NO: 267616 - RNA, 25 nt, Human
ucuccagaaaaagagaaaaauucca

SEQ ID NO: 267617 - RNA, 19 nt, Human
ucuuuuuuuuaaucuucug

SEQ ID NO: 267618 - RNA, 20 nt, Human
ugacccucuaauugacacaa

SEQ ID NO: 267619 - RNA, 23 nt, Human
ugauucuuuucaugugaaauauu

SEQ ID NO: 267620 - RNA, 20 nt, Human
ugcaugucaccaccauaacu

SEQ ID NO: 267621 - RNA, 20 nt, Human
ugccacaaagacaaaaacau

SEQ ID NO: 267622 - RNA, 23 nt, Human
ugccacccccaguaguggggacu

SEQ ID NO: 267623 - RNA, 18 nt, Human
ugccccagagcaacucag

SEQ ID NO: 267624 - RNA, 19 nt, Human
ugcgcccaggcgccuuaac

SEQ ID NO: 267625 - RNA, 23 nt, Human
uggcccuucccacuuccuuuccu

SEQ ID NO: 267626 - RNA, 22 nt, Human
uggcuggcccuucccacuuccu

SEQ ID NO: 267627 - RNA, 21 nt, Human
ugggguucuugcccacuuggg

SEQ ID NO: 267628 - RNA, 19 nt, Human
uggugcauauacuuugguu

SEQ ID NO: 267629 - RNA, 18 nt, Human
ugucaucagugaagcucc

SEQ ID NO: 267630 - RNA, 21 nt, Human
ugugauaugugugugugugua

SEQ ID NO: 267631 - RNA, 21 nt, Human
uguguguguguaaacgcgugu

SEQ ID NO: 267632 - RNA, 22 nt, Human
uguguguguguaaacgcgugug

SEQ ID NO: 267633 - RNA, 20 nt, Human
uguugccacaaaaagcaaaa

SEQ ID NO: 267634 - RNA, 23 nt, Human
uguugccacaaaaagcaaaacuu

SEQ ID NO: 267635 - RNA, 24 nt, Human
uuaaagaacauauucagaugccaa

SEQ ID NO: 267636 - RNA, 21 nt, Human
uuaaauccacaaaaucaggag

SEQ ID NO: 267637 - RNA, 20 nt, Human
uuaauaggaucaaguucaug

SEQ ID NO: 267638 - RNA, 24 nt, Human
uuagcugcaugccacaaagacaaa

SEQ ID NO: 267639 - RNA, 21 nt, Human
uucacuuugacacucauccau

SEQ ID NO: 267640 - RNA, 23 nt, Human
uuccaguugagagccaccaaaaa

SEQ ID NO: 267641 - RNA, 21 nt, Human
uuccuuuccugcuacuuucuc

SEQ ID NO: 267642 - RNA, 23 nt, Human
uucugaaguacuucucagaaaac

SEQ ID NO: 267643 - RNA, 22 nt, Human
uugacccuaagacaaaacuaaa

SEQ ID NO: 267644 - RNA, 21 nt, Human
uuugcacaccacuaacugggc

SEQ ID NO: 267645 - RNA, 19 nt, Human
uuuggcugguuguaggaua

SEQ ID NO: 267646 - RNA, 24 nt, Human
aaacaaaaaaaaggaagauucugg

SEQ ID NO: 267647 - RNA, 18 nt, Human
aaacagaaagagaaaccc

SEQ ID NO: 267648 - RNA, 19 nt, Human
aaacagaaagagaaacccc

SEQ ID NO: 267649 - RNA, 20 nt, Human
aaacagaaagagaaacccca

SEQ ID NO: 267650 - RNA, 24 nt, Human
aaacagaaagagaaaccccaauga

SEQ ID NO: 267651 - RNA, 30 nt, Human
aaacagaaagagaaaccccaaugaaacaaa

SEQ ID NO: 267652 - RNA, 24 nt, Human
aaccccaaugaaacaaaaaaaagg

SEQ ID NO: 267653 - RNA, 23 nt, Human
aauuaccaggaaagagggaaaau

SEQ ID NO: 267654 - RNA, 20 nt, Human
agaaagaaaaacagaaagag

SEQ ID NO: 267655 - RNA, 22 nt, Human
agaaagaaaaacagaaagagaa

SEQ ID NO: 267656 - RNA, 21 nt, Human
aucacuaaaaaacucucccca

SEQ ID NO: 267657 - RNA, 19 nt, Human
auuaagauuccagcuacaa

SEQ ID NO: 267658 - RNA, 18 nt, Human
caaugaaacaaaaaaaag

SEQ ID NO: 267659 - RNA, 20 nt, Human
cacagauuagaucuaaggac

SEQ ID NO: 267660 - RNA, 18 nt, Human
caccauaaucuaaaauug

SEQ ID NO: 267661 - RNA, 23 nt, Human
cagaaagauaaguuacuggagua

SEQ ID NO: 267662 - RNA, 22 nt, Human
cagccuauugagaauacaugac

SEQ ID NO: 267663 - RNA, 22 nt, Human
ccaaugaaacaaaaaaaaggaa

SEQ ID NO: 267664 - RNA, 20 nt, Human
ccaggaaagagggaaaauca

SEQ ID NO: 267665 - RNA, 18 nt, Human
cuaaaucugaaaugaagc

SEQ ID NO: 267666 - RNA, 22 nt, Human
cugaaaugaagccauucaguaa

SEQ ID NO: 267667 - RNA, 21 nt, Human
gauuccagcuacaauuucuuu

SEQ ID NO: 267668 - RNA, 19 nt, Human
uaaggacauggugggggca

SEQ ID NO: 267669 - RNA, 23 nt, Human
uagaaagaaaaacagaaagagaa

SEQ ID NO: 267670 - RNA, 23 nt, Human
uagcacagauuagaucuaaggac

SEQ ID NO: 267671 - RNA, 18 nt, Human
uaucuuacaccauaaucu

SEQ ID NO: 267672 - RNA, 27 nt, Human
uauugccaauuucuucccccaagauuu

SEQ ID NO: 267673 - RNA, 24 nt, Human
uccaaggacacagacugcaacacc

SEQ ID NO: 267674 - RNA, 19 nt, Human
uccccgaacuuuguuuccc

SEQ ID NO: 267675 - RNA, 23 nt, Human
ugaaucacuaaaaaacucucccc

SEQ ID NO: 267676 - RNA, 19 nt, Human
ugaauuauacauacauaua

SEQ ID NO: 267677 - RNA, 22 nt, Human
ugacaaccuuaauaucacuuga

SEQ ID NO: 267678 - RNA, 18 nt, Human
ugcugggaauacagccua

SEQ ID NO: 267679 - RNA, 21 nt, Human
uggaguaucuuacaccauaau

SEQ ID NO: 267680 - RNA, 24 nt, Human
uguuauuaagauuccagcuacaau

SEQ ID NO: 267681 - RNA, 18 nt, Human
uucaguaagccugcugug

SEQ ID NO: 267682 - RNA, 25 nt, Human
uucauaaucuuuccuccacgcuucu

SEQ ID NO: 267683 - RNA, 18 nt, Human
uucccgaacuuaagaaaa

SEQ ID NO: 267684 - RNA, 25 nt, Human
uugaauaaaaugaauaacuuggaua

SEQ ID NO: 267685 - RNA, 22 nt, Human
uuucuuuuuuaaagagccuguu

SEQ ID NO: 267686 - RNA, 21 nt, Human
uuuuccccgaacuuuguuucc

SEQ ID NO: 267687 - RNA, 21 nt, Human
aaaagcuuucuagcauaaauc

SEQ ID NO: 267688 - RNA, 19 nt, Human
aagguaaggguacagaaga

SEQ ID NO: 267689 - RNA, 18 nt, Human
aagucacuuuuguggaca

SEQ ID NO: 267690 - RNA, 20 nt, Human
acauccaggcugcagcuggg

SEQ ID NO: 267691 - RNA, 20 nt, Human
agacucucuuuggaggacuc

SEQ ID NO: 267692 - RNA, 27 nt, Human
caaccaggaacuagacugaaugcaauc

SEQ ID NO: 267693 - RNA, 24 nt, Human
cccuagacucucuuuggaggacuc

SEQ ID NO: 267694 - RNA, 22 nt, Human
cucacagugccccuggccugcc

SEQ ID NO: 267695 - RNA, 23 nt, Human
cuccugaagcugcuuugcccucc

SEQ ID NO: 267696 - RNA, 21 nt, Human
cucucccagcacuuccuucag

SEQ ID NO: 267697 - RNA, 20 nt, Human
cugcuuugcccuccuuugca

SEQ ID NO: 267698 - RNA, 22 nt, Human
cuugaauucuggaucccuucag

SEQ ID NO: 267699 - RNA, 22 nt, Human
gaggacucccaagggcuccuga

SEQ ID NO: 267700 - RNA, 18 nt, Human
gaggugccagggauuuau

SEQ ID NO: 267701 - RNA, 21 nt, Human
gcaaccaggaacuagacugaa

SEQ ID NO: 267702 - RNA, 23 nt, Human
gccugccuucuguguucuucuac

SEQ ID NO: 267703 - RNA, 19 nt, Human
gggaaccugacuuaaguca

SEQ ID NO: 267704 - RNA, 20 nt, Human
gguuugggggaaccugacuu

SEQ ID NO: 267705 - RNA, 19 nt, Human
gucuggacacacuuuggag

SEQ ID NO: 267706 - RNA, 19 nt, Human
guuugugguuauguuucuu

SEQ ID NO: 267707 - RNA, 20 nt, Human
uaaguugaaaguagguugau

SEQ ID NO: 267708 - RNA, 19 nt, Human
uacagaagauacaugauag

SEQ ID NO: 267709 - RNA, 22 nt, Human
ucaaaauaagguaaggguacag

SEQ ID NO: 267710 - RNA, 24 nt, Human
ucaacaauaaaccaacauuaaaag

SEQ ID NO: 267711 - RNA, 21 nt, Human
ucugguuugggggaaccugac

SEQ ID NO: 267712 - RNA, 21 nt, Human
ucuuccuggcuugaauucugg

SEQ ID NO: 267713 - RNA, 21 nt, Human
ucuuuggaggacucccaaggg

SEQ ID NO: 267714 - RNA, 23 nt, Human
ugaaaguagguugaucuucaguu

SEQ ID NO: 267715 - RNA, 21 nt, Human
ugacuuaagucacuuuugugg

SEQ ID NO: 267716 - RNA, 19 nt, Human
ugacuuaguaggaggucug

SEQ ID NO: 267717 - RNA, 21 nt, Human
uggaguugcaguucacaucca

SEQ ID NO: 267718 - RNA, 21 nt, Human
uugaugucuaggauuuucuuc

SEQ ID NO: 267719 - RNA, 18 nt, Human
uugccuugagucuggaca

SEQ ID NO: 267720 - RNA, 19 nt, Human
acucugcuucccaagauaa

SEQ ID NO: 267721 - RNA, 20 nt, Human
caaccaggaacuaggcugaa

SEQ ID NO: 267722 - RNA, 27 nt, Human
caaccaggaacuaggcugaaugcaauc

SEQ ID NO: 267723 - RNA, 22 nt, Human
cagcaaccaggaacuaggcuga

SEQ ID NO: 267724 - RNA, 26 nt, Human
cagcaaccaggaacuaggcugaaugc

SEQ ID NO: 267725 - RNA, 30 nt, Human
gugaggguagagaggauaucugauagcacc

SEQ ID NO: 267726 - RNA, 18 nt, Human
ucacaggccauccuuaaa

SEQ ID NO: 267727 - RNA, 25 nt, Human
uuagugaguugggugauacauuaga

SEQ ID NO: 267728 - RNA, 21 nt, Human
uugauguuuaggauuuucuuc

SEQ ID NO: 267729 - RNA, 23 nt, Human
aaucucuaaguccaggagacaga

SEQ ID NO: 267730 - RNA, 19 nt, Human
acugucaccacaagagccu

SEQ ID NO: 267731 - RNA, 22 nt, Human
cagacugucaccacaagagccu

SEQ ID NO: 267732 - RNA, 22 nt, Human
cagagcuaggccucccugcacg

SEQ ID NO: 267733 - RNA, 20 nt, Human
ccaauacacacagaaagaga

SEQ ID NO: 267734 - RNA, 22 nt, Human
cugaauggauucuauucugacc

SEQ ID NO: 267735 - RNA, 24 nt, Human
uccagggagcuucagcucucagcc

SEQ ID NO: 267736 - RNA, 26 nt, Human
ucuauucugaccaauacacacagaaa

SEQ ID NO: 267737 - RNA, 24 nt, Human
uggcauccaggagauaccgucugg

SEQ ID NO: 267738 - RNA, 19 nt, Human
uuuuuuuuuuugaauggac

SEQ ID NO: 267739 - RNA, 21 nt, Human
uuuuuuuuuuuuuugaaugga

SEQ ID NO: 267740 - RNA, 22 nt, Human
uuuuuuuuuuuuuuuugaaugg

SEQ ID NO: 267741 - RNA, 18 nt, Human
uuuuuuuuuuuuuuuuug

SEQ ID NO: 267742 - RNA, 19 nt, Human
aaaaaaaaaccugauucau

SEQ ID NO: 267743 - RNA, 22 nt, Human
aaaaaaacaaaccccaggcagg

SEQ ID NO: 267744 - RNA, 21 nt, Human
aaaaagaaaaacagaacaaga

SEQ ID NO: 267745 - RNA, 22 nt, Human
aaaaagaugccaagagacaaac

SEQ ID NO: 267746 - RNA, 22 nt, Human
aaaacaaugacaaaaaaaacaa

SEQ ID NO: 267747 - RNA, 18 nt, Human
aaaacagaaacaaacaac

SEQ ID NO: 267748 - RNA, 20 nt, Human
aaaacccugaucauuaaaac

SEQ ID NO: 267749 - RNA, 18 nt, Human
aaaagaaaaacagaacaa

SEQ ID NO: 267750 - RNA, 19 nt, Human
aaaauuggccuaacuguag

SEQ ID NO: 267751 - RNA, 24 nt, Human
aaacaaacaacucaaaaauuuacc

SEQ ID NO: 267752 - RNA, 19 nt, Human
aaacaaugacaaaaaaaac

SEQ ID NO: 267753 - RNA, 21 nt, Human
aaacagaaacaaacaacucaa

SEQ ID NO: 267754 - RNA, 19 nt, Human
aaacugagcaggaccaaac

SEQ ID NO: 267755 - RNA, 23 nt, Human
aaacugagcaggaccaaaccaaa

SEQ ID NO: 267756 - RNA, 23 nt, Human
aaagguuucaaacaauauuggca

SEQ ID NO: 267757 - RNA, 21 nt, Human
aaccucaugacaaaugaaaau

SEQ ID NO: 267758 - RNA, 18 nt, Human
aaccuguucuccaaagua

SEQ ID NO: 267759 - RNA, 20 nt, Human
aacuugaguucuccuaauga

SEQ ID NO: 267760 - RNA, 25 nt, Human
aagagagagagaggaggggaggagg

SEQ ID NO: 267761 - RNA, 21 nt, Human
aagcagggauaguguugaaaa

SEQ ID NO: 267762 - RNA, 23 nt, Human
aaggggagaagagaaugacaaga

SEQ ID NO: 267763 - RNA, 29 nt, Human
aaugcaaaagauggaauaaaagggacccc

SEQ ID NO: 267764 - RNA, 24 nt, Human
aaugcggugaggagaagaggaggg

SEQ ID NO: 267765 - RNA, 20 nt, Human
acaaaaaaaacaaaccccag

SEQ ID NO: 267766 - RNA, 19 nt, Human
acaaaaccaguaaggcauc

SEQ ID NO: 267767 - RNA, 22 nt, Human
acaaagucacuuuguaaaaggu

SEQ ID NO: 267768 - RNA, 20 nt, Human
acagcaacaaggcaaaacaa

SEQ ID NO: 267769 - RNA, 22 nt, Human
accggaagcuggggcggggacg

SEQ ID NO: 267770 - RNA, 18 nt, Human
acgcuggagguguuggug

SEQ ID NO: 267771 - RNA, 20 nt, Human
acuagaucaaaacagcaaac

SEQ ID NO: 267772 - RNA, 21 nt, Human
acuagaucaaaacagcaaacc

SEQ ID NO: 267773 - RNA, 24 nt, Human
agaaaggaagaaacucaaccucau

SEQ ID NO: 267774 - RNA, 22 nt, Human
agaaauagaagaaaugcaaaag

SEQ ID NO: 267775 - RNA, 23 nt, Human
agaaaucuuaggguuuggccccc

SEQ ID NO: 267776 - RNA, 18 nt, Human
agaagagaaugacaagag

SEQ ID NO: 267777 - RNA, 20 nt, Human
agaagagaaugacaagagag

SEQ ID NO: 267778 - RNA, 20 nt, Human
agacaacccugcuucccgaa

SEQ ID NO: 267779 - RNA, 23 nt, Human
agagagagagaggaggggaggag

SEQ ID NO: 267780 - RNA, 18 nt, Human
agagagaggaggggagga

SEQ ID NO: 267781 - RNA, 25 nt, Human
agagaggaggggaggaggaagggga

SEQ ID NO: 267782 - RNA, 23 nt, Human
agagcaggcgccgggccucccaa

SEQ ID NO: 267783 - RNA, 22 nt, Human
agaggaggggaggaggaagggg

SEQ ID NO: 267784 - RNA, 20 nt, Human
agcccuagcaggaggaggcg

SEQ ID NO: 267785 - RNA, 19 nt, Human
agcucuaaggcuguggcug

SEQ ID NO: 267786 - RNA, 23 nt, Human
aggaggggaggaggaaggggagg

SEQ ID NO: 267787 - RNA, 18 nt, Human
aggauggaaacauaccgu

SEQ ID NO: 267788 - RNA, 22 nt, Human
aggcaaaacaauaauuaaagua

SEQ ID NO: 267789 - RNA, 25 nt, Human
aggcagcuggcccgggaugccugca

SEQ ID NO: 267790 - RNA, 23 nt, Human
aggggagaagagaaugacaagag

SEQ ID NO: 267791 - RNA, 19 nt, Human
agguaggaagagagagaga

SEQ ID NO: 267792 - RNA, 19 nt, Human
aguacaaaaccaguaaggc

SEQ ID NO: 267793 - RNA, 19 nt, Human
agucuggagggucugugcu

SEQ ID NO: 267794 - RNA, 27 nt, Human
auagguaggaagagagagagaggaggg

SEQ ID NO: 267795 - RNA, 25 nt, Human
aucagaaaggaagaaacucaaccuc

SEQ ID NO: 267796 - RNA, 19 nt, Human
augacaaaaaaaacaaacc

SEQ ID NO: 267797 - RNA, 20 nt, Human
augacuuuuuagcccuguuu

SEQ ID NO: 267798 - RNA, 24 nt, Human
auuaaaacagagacaccuucacug

SEQ ID NO: 267799 - RNA, 21 nt, Human
caaaaaaaacaaaccccaggc

SEQ ID NO: 267800 - RNA, 23 nt, Human
caaaaaaaacaaaccccaggcag

SEQ ID NO: 267801 - RNA, 20 nt, Human
caaaacagaaacaaacaacu

SEQ ID NO: 267802 - RNA, 20 nt, Human
caaaagauggaauaaaaacc

SEQ ID NO: 267803 - RNA, 21 nt, Human
caaaagauggaauaaaaaccc

SEQ ID NO: 267804 - RNA, 20 nt, Human
caaaaugcagcacuuuaauc

SEQ ID NO: 267805 - RNA, 19 nt, Human
caaagcaagcacccugguu

SEQ ID NO: 267806 - RNA, 21 nt, Human
caacaaaguaaaaguccccaa

SEQ ID NO: 267807 - RNA, 20 nt, Human
caacagaagguagugcaguu

SEQ ID NO: 267808 - RNA, 18 nt, Human
caacuagaucaaaacagc

SEQ ID NO: 267809 - RNA, 24 nt, Human
caaggcaaaacaauaauuaaagua

SEQ ID NO: 267810 - RNA, 23 nt, Human
caaugacaaaaaaaacaaacccc

SEQ ID NO: 267811 - RNA, 18 nt, Human
cacagcaacaaggcaaaa

SEQ ID NO: 267812 - RNA, 20 nt, Human
cacaguacgcgaguguagua

SEQ ID NO: 267813 - RNA, 25 nt, Human
cacaguguuugcagaaaaaaaaaaa

SEQ ID NO: 267814 - RNA, 26 nt, Human
caccaccagcggcuaaaaaaaaaauc

SEQ ID NO: 267815 - RNA, 26 nt, Human
caccagcggcuaaaaaaaaaaucccc

SEQ ID NO: 267816 - RNA, 22 nt, Human
cacccagaugacuaaugaaggc

SEQ ID NO: 267817 - RNA, 23 nt, Human
cacccaggucgaggcugaaggac

SEQ ID NO: 267818 - RNA, 20 nt, Human
caccccuaaugaaacuuaaa

SEQ ID NO: 267819 - RNA, 25 nt, Human
cacccugguuagcaccaguucuccc

SEQ ID NO: 267820 - RNA, 27 nt, Human
caccuggacggaugcugccgccggggg

SEQ ID NO: 267821 - RNA, 19 nt, Human
cacuccgucacucacucuc

SEQ ID NO: 267822 - RNA, 22 nt, Human
cagaaggaaagagacacaugcc

SEQ ID NO: 267823 - RNA, 18 nt, Human
cagagcaggcgccgggcc

SEQ ID NO: 267824 - RNA, 21 nt, Human
caggaccaaaccaaaacucaa

SEQ ID NO: 267825 - RNA, 24 nt, Human
caggaccaaaccaaaacucaacuc

SEQ ID NO: 267826 - RNA, 18 nt, Human
cagggauaguguugaaaa

SEQ ID NO: 267827 - RNA, 19 nt, Human
cauggggcaugauguccag

SEQ ID NO: 267828 - RNA, 19 nt, Human
cauuucaauuauggccugu

SEQ ID NO: 267829 - RNA, 18 nt, Human
ccaaaacucaacuccugc

SEQ ID NO: 267830 - RNA, 26 nt, Human
ccaaagcaagcacccugguuagcacc

SEQ ID NO: 267831 - RNA, 19 nt, Human
ccacucccaccccaccccu

SEQ ID NO: 267832 - RNA, 24 nt, Human
ccagcagaucauuggcaaauccaa

SEQ ID NO: 267833 - RNA, 22 nt, Human
ccaggcaggcacgacacuuaug

SEQ ID NO: 267834 - RNA, 19 nt, Human
ccagucucuucugucucug

SEQ ID NO: 267835 - RNA, 20 nt, Human
ccauggcucacccacauguc

SEQ ID NO: 267836 - RNA, 22 nt, Human
cccacucccaccccaccccuaa

SEQ ID NO: 267837 - RNA, 23 nt, Human
cccacucccaccccaccccuaau

SEQ ID NO: 267838 - RNA, 21 nt, Human
cccaggucgaggcugaaggac

SEQ ID NO: 267839 - RNA, 22 nt, Human
cccaggucggggaacucgaagc

SEQ ID NO: 267840 - RNA, 24 nt, Human
cccccagcccuagcaggaggaggc

SEQ ID NO: 267841 - RNA, 23 nt, Human
ccccuuuucuuuucaaagaggaa

SEQ ID NO: 267842 - RNA, 22 nt, Human
cccuggcagcggcggcgggggc

SEQ ID NO: 267843 - RNA, 19 nt, Human
ccgcaggcagcuggcccgg

SEQ ID NO: 267844 - RNA, 27 nt, Human
ccugcacccaggucgaggccggggucc

SEQ ID NO: 267845 - RNA, 21 nt, Human
ccuggacccaggagggaaguc

SEQ ID NO: 267846 - RNA, 20 nt, Human
ccugucccacucccaccccc

SEQ ID NO: 267847 - RNA, 19 nt, Human
cgaaaagaaccuaaaaaau

SEQ ID NO: 267848 - RNA, 20 nt, Human
cgaaacuuuaggaaggacac

SEQ ID NO: 267849 - RNA, 20 nt, Human
cgcuggagguguuggugugu

SEQ ID NO: 267850 - RNA, 22 nt, Human
cggcuaaaaaaaaaauccccag

SEQ ID NO: 267851 - RNA, 18 nt, Human
cgggaugggaauggggga

SEQ ID NO: 267852 - RNA, 22 nt, Human
cgggcgagcgcgccuuuggggu

SEQ ID NO: 267853 - RNA, 19 nt, Human
cucacaccucuccugggug

SEQ ID NO: 267854 - RNA, 23 nt, Human
cucacaccucuccuggguggccu

SEQ ID NO: 267855 - RNA, 22 nt, Human
cucaugacaaaugaaaauuaaa

SEQ ID NO: 267856 - RNA, 21 nt, Human
cucuaaggcuguggcuggggg

SEQ ID NO: 267857 - RNA, 21 nt, Human
cugguacaaucaucagcuuua

SEQ ID NO: 267858 - RNA, 23 nt, Human
cuguggccggcugugugggaggg

SEQ ID NO: 267859 - RNA, 18 nt, Human
cuguguuuccgacuuugc

SEQ ID NO: 267860 - RNA, 20 nt, Human
cuuuggggugccgggauggg

SEQ ID NO: 267861 - RNA, 21 nt, Human
gaaaagaaccuaaaaaaugga

SEQ ID NO: 267862 - RNA, 20 nt, Human
gaaaaggcaaaauggaagca

SEQ ID NO: 267863 - RNA, 18 nt, Human
gaaacaacuagaucaaaa

SEQ ID NO: 267864 - RNA, 21 nt, Human
gaacucgaagcaaucgggcga

SEQ ID NO: 267865 - RNA, 23 nt, Human
gaaggaagcgguccgcaggcagc

SEQ ID NO: 267866 - RNA, 19 nt, Human
gaaggacacggaguuguga

SEQ ID NO: 267867 - RNA, 20 nt, Human
gacaaaaaaaacaaacccca

SEQ ID NO: 267868 - RNA, 26 nt, Human
gacacacucacacccagaugacuaau

SEQ ID NO: 267869 - RNA, 18 nt, Human
gagacccagucuggaggg

SEQ ID NO: 267870 - RNA, 19 nt, Human
gaggauggaaacauaccgu

SEQ ID NO: 267871 - RNA, 21 nt, Human
gaggggaggaggaaggggagg

SEQ ID NO: 267872 - RNA, 21 nt, Human
gcaaaauggaagcauuuccga

SEQ ID NO: 267873 - RNA, 18 nt, Human
gcagcggcggcgggggcg

SEQ ID NO: 267874 - RNA, 22 nt, Human
gcccaccaccagcggcuaaaaa

SEQ ID NO: 267875 - RNA, 21 nt, Human
gccgggucucacaccucuccu

SEQ ID NO: 267876 - RNA, 22 nt, Human
gcgcucaggggcugccgccucu

SEQ ID NO: 267877 - RNA, 20 nt, Human
gcggugaggagaagaggagg

SEQ ID NO: 267878 - RNA, 21 nt, Human
gcggugaggagaagaggaggg

SEQ ID NO: 267879 - RNA, 20 nt, Human
gcucugggcgcucaggggcu

SEQ ID NO: 267880 - RNA, 26 nt, Human
ggaaaaaaaaaucuucaaaaaucaau

SEQ ID NO: 267881 - RNA, 18 nt, Human
ggaaaacaaugacaaaaa

SEQ ID NO: 267882 - RNA, 23 nt, Human
ggaagcauuuccgauagagcccu

SEQ ID NO: 267883 - RNA, 20 nt, Human
ggaaggaagcgguccgcagg

SEQ ID NO: 267884 - RNA, 23 nt, Human
ggaggaggaaggggagggaggau

SEQ ID NO: 267885 - RNA, 23 nt, Human
ggaggggaggaggaaggggaggg

SEQ ID NO: 267886 - RNA, 23 nt, Human
gggagaagagaaugacaagagag

SEQ ID NO: 267887 - RNA, 23 nt, Human
ggggagaagagaaugacaagaga

SEQ ID NO: 267888 - RNA, 21 nt, Human
gggugaugugggggaugcagg

SEQ ID NO: 267889 - RNA, 21 nt, Human
gguaaccuguucuccaaagua

SEQ ID NO: 267890 - RNA, 18 nt, Human
gguccgcaggcagcuggc

SEQ ID NO: 267891 - RNA, 23 nt, Human
ggugaccgcaucaccccaccgga

SEQ ID NO: 267892 - RNA, 22 nt, Human
gucuggagggucugugcugagg

SEQ ID NO: 267893 - RNA, 18 nt, Human
gugaggagaagaggaggg

SEQ ID NO: 267894 - RNA, 26 nt, Human
gugcuucucuguguuuccgacuuugc

SEQ ID NO: 267895 - RNA, 20 nt, Human
uaaaacagagacaccuucac

SEQ ID NO: 267896 - RNA, 18 nt, Human
uaaaguaaaaauaugacc

SEQ ID NO: 267897 - RNA, 19 nt, Human
uaagcaucaaacaacaaag

SEQ ID NO: 267898 - RNA, 21 nt, Human
uacaacaaagaucuaggcaag

SEQ ID NO: 267899 - RNA, 23 nt, Human
uagaacaaguaucagcaagguca

SEQ ID NO: 267900 - RNA, 21 nt, Human
uagaacaagucucacuauaca

SEQ ID NO: 267901 - RNA, 24 nt, Human
uagaucaaaacagcaaaccuucca

SEQ ID NO: 267902 - RNA, 21 nt, Human
uaugguaagaaacuaaaaaaa

SEQ ID NO: 267903 - RNA, 22 nt, Human
uauuaaaaagaaaaacagaaca

SEQ ID NO: 267904 - RNA, 21 nt, Human
ucaaaaaucaaugcaucagaa

SEQ ID NO: 267905 - RNA, 23 nt, Human
ucaaaauuggccuaacuguagaa

SEQ ID NO: 267906 - RNA, 25 nt, Human
ucaacggcgaugauccuuucccgag

SEQ ID NO: 267907 - RNA, 18 nt, Human
ucacuccgucacucacuc

SEQ ID NO: 267908 - RNA, 20 nt, Human
ucauguugguucugaggaaa

SEQ ID NO: 267909 - RNA, 21 nt, Human
ucccaccccaccccuaaugaa

SEQ ID NO: 267910 - RNA, 19 nt, Human
ucccacucccaccccaccc

SEQ ID NO: 267911 - RNA, 24 nt, Human
ucccacucccaccccaccccuaau

SEQ ID NO: 267912 - RNA, 18 nt, Human
ucccgagaaguaucuuca

SEQ ID NO: 267913 - RNA, 21 nt, Human
ucggguaaggaaagcaccauu

SEQ ID NO: 267914 - RNA, 23 nt, Human
ucgggucaaacucuuaugguaag

SEQ ID NO: 267915 - RNA, 19 nt, Human
ucguccagacggggcuucu

SEQ ID NO: 267916 - RNA, 27 nt, Human
ucucacuccgucacucacucucacgga

SEQ ID NO: 267917 - RNA, 18 nt, Human
ucucugggaagcucaugg

SEQ ID NO: 267918 - RNA, 24 nt, Human
ucucugggaagcucauggcaggau

SEQ ID NO: 267919 - RNA, 20 nt, Human
ucucuuuacaaaacagaaac

SEQ ID NO: 267920 - RNA, 20 nt, Human
ucugucucucuuuucauuuc

SEQ ID NO: 267921 - RNA, 21 nt, Human
ucugugcugaggggaagccgu

SEQ ID NO: 267922 - RNA, 21 nt, Human
ucuuggcaguuugggaagaga

SEQ ID NO: 267923 - RNA, 18 nt, Human
ucuugguucugaaccugg

SEQ ID NO: 267924 - RNA, 21 nt, Human
ugaagacacagcagacugggu

SEQ ID NO: 267925 - RNA, 22 nt, Human
ugaagugagcaguuucggguca

SEQ ID NO: 267926 - RNA, 20 nt, Human
ugacacuaaaguaaaaauau

SEQ ID NO: 267927 - RNA, 19 nt, Human
ugacagccacauccacucg

SEQ ID NO: 267928 - RNA, 19 nt, Human
ugaggagggccacccuuca

SEQ ID NO: 267929 - RNA, 23 nt, Human
ugaggauggacaacuaaaaacca

SEQ ID NO: 267930 - RNA, 19 nt, Human
ugauccuuucccgagaagu

SEQ ID NO: 267931 - RNA, 22 nt, Human
ugcaaaagauggaauaaaaacc

SEQ ID NO: 267932 - RNA, 20 nt, Human
ugcugagacuaaagcaggga

SEQ ID NO: 267933 - RNA, 18 nt, Human
uggaaacaacuagaucaa

SEQ ID NO: 267934 - RNA, 21 nt, Human
uggaagcauuuccgauagagc

SEQ ID NO: 267935 - RNA, 19 nt, Human
uggaaggaagcgguccgca

SEQ ID NO: 267936 - RNA, 19 nt, Human
uggcaaauccaaaaaccuc

SEQ ID NO: 267937 - RNA, 18 nt, Human
uggcacggcucugagacc

SEQ ID NO: 267938 - RNA, 19 nt, Human
uggcagcggcggcgggggc

SEQ ID NO: 267939 - RNA, 21 nt, Human
uggcuagaaaaaauucaucaa

SEQ ID NO: 267940 - RNA, 18 nt, Human
uggcugggggcuggcuca

SEQ ID NO: 267941 - RNA, 21 nt, Human
ugggaaggucagcaccgaaga

SEQ ID NO: 267942 - RNA, 19 nt, Human
uggguggccuuucaagagc

SEQ ID NO: 267943 - RNA, 22 nt, Human
uggguggccuuucaagagcucu

SEQ ID NO: 267944 - RNA, 27 nt, Human
ugguaagaaacuaaaaaaagaugccaa

SEQ ID NO: 267945 - RNA, 21 nt, Human
uggucacaggcuaaauauaug

SEQ ID NO: 267946 - RNA, 21 nt, Human
ugguucugaaccuggacccag

SEQ ID NO: 267947 - RNA, 24 nt, Human
uguaaaaggugagugacacuaaag

SEQ ID NO: 267948 - RNA, 21 nt, Human
uguccaguuggguugucagcu

SEQ ID NO: 267949 - RNA, 22 nt, Human
ugugaagugagcaguuucgggu

SEQ ID NO: 267950 - RNA, 20 nt, Human
uguggcugggggcuggcuca

SEQ ID NO: 267951 - RNA, 18 nt, Human
ugugggaaaggggagaag

SEQ ID NO: 267952 - RNA, 23 nt, Human
uguuccugucccacucccacccc

SEQ ID NO: 267953 - RNA, 19 nt, Human
uguugaagacacagcagac

SEQ ID NO: 267954 - RNA, 22 nt, Human
uucagaaauagaagaaaugcaa

SEQ ID NO: 267955 - RNA, 25 nt, Human
uucauauaucagaaggaaagagaca

SEQ ID NO: 267956 - RNA, 18 nt, Human
uucuuggcaguuugggaa

SEQ ID NO: 267957 - RNA, 25 nt, Human
uugcagaaaaaaaaaaaaaaaaacc

SEQ ID NO: 267958 - RNA, 25 nt, Human
uuggccuaacuguagaaaaggcaaa

SEQ ID NO: 267959 - RNA, 19 nt, Human
uuuaccauacuuuguaaug

SEQ ID NO: 267960 - RNA, 24 nt, Human
uuugcagaaaaaaaaaaaaaaaaa

SEQ ID NO: 267961 - RNA, 18 nt, Human
aaaaacacacaaaguaaa

SEQ ID NO: 267962 - RNA, 25 nt, Human
aaaaaccaggaccucaucccuaagc

SEQ ID NO: 267963 - RNA, 20 nt, Human
aaaagaauaacuucaguuau

SEQ ID NO: 267964 - RNA, 26 nt, Human
aaagaaacuaagcuauucaagaacca

SEQ ID NO: 267965 - RNA, 18 nt, Human
aaagaagaaacaugaaga

SEQ ID NO: 267966 - RNA, 21 nt, Human
aaagaagaaacaugaagaaag

SEQ ID NO: 267967 - RNA, 26 nt, Human
aaaugucaaaaauuacugauggagcc

SEQ ID NO: 267968 - RNA, 24 nt, Human
aacaugguuacaauagcuuaagga

SEQ ID NO: 267969 - RNA, 19 nt, Human
aacccuuucauacaagcug

SEQ ID NO: 267970 - RNA, 23 nt, Human
aacuaagcuauucaagaaccaaa

SEQ ID NO: 267971 - RNA, 20 nt, Human
aagaacccauuaucuuguuu

SEQ ID NO: 267972 - RNA, 19 nt, Human
aagaagaaacaugaagaaa

SEQ ID NO: 267973 - RNA, 20 nt, Human
aagaagaaacaugaagaaag

SEQ ID NO: 267974 - RNA, 19 nt, Human
aagaggcuggaaaugggau

SEQ ID NO: 267975 - RNA, 22 nt, Human
acgagaaccuaaaagaauaacu

SEQ ID NO: 267976 - RNA, 20 nt, Human
acucuggaagagauguccag

SEQ ID NO: 267977 - RNA, 22 nt, Human
aggugcugggaaguuauuacuu

SEQ ID NO: 267978 - RNA, 18 nt, Human
agguggauaacaaauaag

SEQ ID NO: 267979 - RNA, 24 nt, Human
auauugcuuacagccuggugauga

SEQ ID NO: 267980 - RNA, 23 nt, Human
aucccuaagcccccuuucugcug

SEQ ID NO: 267981 - RNA, 19 nt, Human
auuguuguaauaaaguuug

SEQ ID NO: 267982 - RNA, 20 nt, Human
auuucacucagaagggauga

SEQ ID NO: 267983 - RNA, 25 nt, Human
caaaauggcaaauaauggcuuagua

SEQ ID NO: 267984 - RNA, 19 nt, Human
caaauaauggcuuaguauc

SEQ ID NO: 267985 - RNA, 25 nt, Human
caauaaacaacaauauaugaaauaa

SEQ ID NO: 267986 - RNA, 19 nt, Human
cagcuugaaaagaggcugg

SEQ ID NO: 267987 - RNA, 24 nt, Human
cauaaauacaaacaacagugaaga

SEQ ID NO: 267988 - RNA, 21 nt, Human
ccaaaacaucuccuaauucau

SEQ ID NO: 267989 - RNA, 22 nt, Human
ccagauguuaaguauccuccca

SEQ ID NO: 267990 - RNA, 20 nt, Human
ccagugggauaacucuggaa

SEQ ID NO: 267991 - RNA, 20 nt, Human
cgagaaccuaaaagaauaac

SEQ ID NO: 267992 - RNA, 19 nt, Human
cgcccaugacuccuauuua

SEQ ID NO: 267993 - RNA, 20 nt, Human
cucccaauucuaagcuacaa

SEQ ID NO: 267994 - RNA, 21 nt, Human
gaaaaaacacacaaaguaaaa

SEQ ID NO: 267995 - RNA, 19 nt, Human
gagaaccuaaaagaauaac

SEQ ID NO: 267996 - RNA, 19 nt, Human
gggauaacucuggaagaga

SEQ ID NO: 267997 - RNA, 19 nt, Human
gugaaaaaacacacaaagu

SEQ ID NO: 267998 - RNA, 18 nt, Human
uaaaaugguugcugacua

SEQ ID NO: 267999 - RNA, 19 nt, Human
uaaauaaaugacugcgagu

SEQ ID NO: 268000 - RNA, 24 nt, Human
uaaggaacaugcaaguuguaacuc

SEQ ID NO: 268001 - RNA, 24 nt, Human
uacaaacaacagugaagaaggaau

SEQ ID NO: 268002 - RNA, 23 nt, Human
uacaagaaaaaccaggaccucau

SEQ ID NO: 268003 - RNA, 21 nt, Human
uacuacagaacuaacgcccau

SEQ ID NO: 268004 - RNA, 25 nt, Human
uauacaaagaagaaacaugaagaaa

SEQ ID NO: 268005 - RNA, 19 nt, Human
uauccaaaauauuucacca

SEQ ID NO: 268006 - RNA, 20 nt, Human
uauccaaaugcuuuaugagc

SEQ ID NO: 268007 - RNA, 23 nt, Human
uauggaaaaucauuugauagcca

SEQ ID NO: 268008 - RNA, 18 nt, Human
ucauacaagcuguguccu

SEQ ID NO: 268009 - RNA, 22 nt, Human
ucauagugugaaugcaccuguu

SEQ ID NO: 268010 - RNA, 19 nt, Human
uccacaauaaaauuaagaa

SEQ ID NO: 268011 - RNA, 20 nt, Human
uccacaauaaaauuaagaaa

SEQ ID NO: 268012 - RNA, 23 nt, Human
uccccauaauuucagaauuucau

SEQ ID NO: 268013 - RNA, 20 nt, Human
ucccuaagcccccuuucugc

SEQ ID NO: 268014 - RNA, 20 nt, Human
ucuuugcaauaaaacauggu

SEQ ID NO: 268015 - RNA, 23 nt, Human
ugacacauccuacaaccuuuucu

SEQ ID NO: 268016 - RNA, 19 nt, Human
ugagcaaauuucacucaga

SEQ ID NO: 268017 - RNA, 21 nt, Human
ugccuuuccaugcagcacuug

SEQ ID NO: 268018 - RNA, 23 nt, Human
ugcucucagcuuuaacuuggcuu

SEQ ID NO: 268019 - RNA, 19 nt, Human
uggaagagauguccaggug

SEQ ID NO: 268020 - RNA, 23 nt, Human
uggaagagauguccaggugcugg

SEQ ID NO: 268021 - RNA, 24 nt, Human
uggaagagauguccaggugcuggg

SEQ ID NO: 268022 - RNA, 19 nt, Human
uggagcccaaauucaaccc

SEQ ID NO: 268023 - RNA, 19 nt, Human
uguccaggugcugggaagu

SEQ ID NO: 268024 - RNA, 19 nt, Human
ugugacacauccuacaacc

SEQ ID NO: 268025 - RNA, 20 nt, Human
uguuuuuuuuuuuuuuucuc

SEQ ID NO: 268026 - RNA, 22 nt, Human
uguuuuuuuuuuuuuuucucag

SEQ ID NO: 268027 - RNA, 28 nt, Human
uguuuuuuuuuuuuuuucucagcuugaa

SEQ ID NO: 268028 - RNA, 21 nt, Human
uucaacccuuucauacaagcu

SEQ ID NO: 268029 - RNA, 22 nt, Human
uugauuuccaacucacacacau

SEQ ID NO: 268030 - RNA, 24 nt, Human
uuuccaugcagcacuugugcucuc

SEQ ID NO: 268031 - RNA, 26 nt, Human
uuuuuuuuuuuuuucucagcuugauu

SEQ ID NO: 268032 - RNA, 19 nt, Human
aaaaaagaacccugaucca

SEQ ID NO: 268033 - RNA, 18 nt, Human
aaaacauuguaacuuaaa

SEQ ID NO: 268034 - RNA, 24 nt, Human
aaacacauuuaaaaaugaaaaaaa

SEQ ID NO: 268035 - RNA, 21 nt, Human
aaagaaaacagucaagccaca

SEQ ID NO: 268036 - RNA, 24 nt, Human
aaagaugcaaugacaaagccugaa

SEQ ID NO: 268037 - RNA, 22 nt, Human
aaaucacuugucaauaaaguuu

SEQ ID NO: 268038 - RNA, 22 nt, Human
aagaaaacaaucucaccauuuc

SEQ ID NO: 268039 - RNA, 22 nt, Human
aagcagccagaacuuggaagua

SEQ ID NO: 268040 - RNA, 23 nt, Human
agaacccugauccauaauucacc

SEQ ID NO: 268041 - RNA, 22 nt, Human
agacuugaaaaucacuugucaa

SEQ ID NO: 268042 - RNA, 22 nt, Human
agagaaaaaauaucaaacaaaa

SEQ ID NO: 268043 - RNA, 24 nt, Human
agagaaaaaauaucaaacaaaaga

SEQ ID NO: 268044 - RNA, 26 nt, Human
agagaaaaaauaucaaacaaaagaaa

SEQ ID NO: 268045 - RNA, 20 nt, Human
agaucacaaauauaaaaaua

SEQ ID NO: 268046 - RNA, 21 nt, Human
agaugcuuacuaggaaguuuu

SEQ ID NO: 268047 - RNA, 24 nt, Human
agauuuggaaggugagagugaugu

SEQ ID NO: 268048 - RNA, 21 nt, Human
agcuggaguuccaccugcaag

SEQ ID NO: 268049 - RNA, 25 nt, Human
agucuuuaccuuacguauauuuaga

SEQ ID NO: 268050 - RNA, 20 nt, Human
cagaauaucugaaaucuugg

SEQ ID NO: 268051 - RNA, 23 nt, Human
cagcauaauggaaaagaaaaaau

SEQ ID NO: 268052 - RNA, 18 nt, Human
cagccagaacuuggaagu

SEQ ID NO: 268053 - RNA, 19 nt, Human
ccaaugucuguucccuagg

SEQ ID NO: 268054 - RNA, 23 nt, Human
ccauauguuccaccagcuucacu

SEQ ID NO: 268055 - RNA, 19 nt, Human
cccuaggaaggcugagaag

SEQ ID NO: 268056 - RNA, 20 nt, Human
ccuccauuccucacuguucc

SEQ ID NO: 268057 - RNA, 22 nt, Human
ccugauccauaauucacaacau

SEQ ID NO: 268058 - RNA, 23 nt, Human
cucaaaacagacacccacccagc

SEQ ID NO: 268059 - RNA, 25 nt, Human
cucaaaacagacacccacccagcuc

SEQ ID NO: 268060 - RNA, 19 nt, Human
cucaguaagaccaccaaaa

SEQ ID NO: 268061 - RNA, 23 nt, Human
cucccuugcagcuggaguuccac

SEQ ID NO: 268062 - RNA, 24 nt, Human
cuggucucaaugccuguaguagaa

SEQ ID NO: 268063 - RNA, 22 nt, Human
cuucuauucaucaaaagacaua

SEQ ID NO: 268064 - RNA, 23 nt, Human
gacuagguguaauaucucaauac

SEQ ID NO: 268065 - RNA, 20 nt, Human
gaguaucaugaauuuuuuuc

SEQ ID NO: 268066 - RNA, 20 nt, Human
gaguuccaccugcaagcagc

SEQ ID NO: 268067 - RNA, 22 nt, Human
gcucacccaaugucuguucccu

SEQ ID NO: 268068 - RNA, 22 nt, Human
ggaaaaaaagaacccugaucca

SEQ ID NO: 268069 - RNA, 25 nt, Human
ggaaaagaaaaaauauuaaaaacau

SEQ ID NO: 268070 - RNA, 27 nt, Human
uaaaaaagcaagguguagaacacugca

SEQ ID NO: 268071 - RNA, 21 nt, Human
uaaaaacugcuauaguagggc

SEQ ID NO: 268072 - RNA, 25 nt, Human
uaaaauggagaccauauguuccacc

SEQ ID NO: 268073 - RNA, 24 nt, Human
uaaagaaaacagucaagccacaga

SEQ ID NO: 268074 - RNA, 27 nt, Human
uaaagaaaacagucaagccacagacua

SEQ ID NO: 268075 - RNA, 23 nt, Human
uaaauaagcucaaaacagacacc

SEQ ID NO: 268076 - RNA, 26 nt, Human
uaaauaagcucaaaacagacacccac

SEQ ID NO: 268077 - RNA, 22 nt, Human
uaaauugacaaauauaaaaacu

SEQ ID NO: 268078 - RNA, 24 nt, Human
uaauaugcccugucaauucuacuu

SEQ ID NO: 268079 - RNA, 19 nt, Human
uacuuuauaaguaggaaaa

SEQ ID NO: 268080 - RNA, 20 nt, Human
uaggacucuaaauaagcuca

SEQ ID NO: 268081 - RNA, 22 nt, Human
uaguagggcagucuuccuuaga

SEQ ID NO: 268082 - RNA, 24 nt, Human
uauuaagagacucaaaugacucca

SEQ ID NO: 268083 - RNA, 22 nt, Human
ucaaaacagacacccacccagc

SEQ ID NO: 268084 - RNA, 21 nt, Human
ucacaaauauaaaaauauaaa

SEQ ID NO: 268085 - RNA, 19 nt, Human
ucacuugucaauaaaguuu

SEQ ID NO: 268086 - RNA, 22 nt, Human
ucauucauuauauucauaaauu

SEQ ID NO: 268087 - RNA, 20 nt, Human
uccacauggucuucaguuuc

SEQ ID NO: 268088 - RNA, 19 nt, Human
ugaaaaaagacauucauug

SEQ ID NO: 268089 - RNA, 18 nt, Human
ugaaacaucacuacacac

SEQ ID NO: 268090 - RNA, 25 nt, Human
ugaagucuccacauggucuucaguu

SEQ ID NO: 268091 - RNA, 21 nt, Human
ugaauauauuuuugaacacag

SEQ ID NO: 268092 - RNA, 21 nt, Human
ugaggaaaggauaauucuuuc

SEQ ID NO: 268093 - RNA, 20 nt, Human
ugcaaugacaaagccugaaa

SEQ ID NO: 268094 - RNA, 21 nt, Human
ugccuguaguagaaauugcag

SEQ ID NO: 268095 - RNA, 22 nt, Human
uggaaggugagagugauguaga

SEQ ID NO: 268096 - RNA, 23 nt, Human
uguaugggggaaaaaaagaaccc

SEQ ID NO: 268097 - RNA, 22 nt, Human
ugucaauucuacuucuaaagua

SEQ ID NO: 268098 - RNA, 24 nt, Human
uguuacauacaaaagaaucaaagu

SEQ ID NO: 268099 - RNA, 20 nt, Human
uuagaauuuugaacugugac

SEQ ID NO: 268100 - RNA, 21 nt, Human
uucccuaggaaggcugagaag

SEQ ID NO: 268101 - RNA, 19 nt, Human
uucuguuuacaagggaagu

SEQ ID NO: 268102 - RNA, 18 nt, Human
uugaugaagucuccacau

SEQ ID NO: 268103 - RNA, 21 nt, Human
uuggaaguaaguuaauuuggu

SEQ ID NO: 268104 - RNA, 19 nt, Human
uuggaaugguuaaaaagga

SEQ ID NO: 268105 - RNA, 21 nt, Human
uuguaugggggaaaaaaagaa

SEQ ID NO: 268106 - RNA, 19 nt, Human
uuuuccauggcuucuuuuu

SEQ ID NO: 268107 - RNA, 18 nt, Human
uuuugaacacagacuuga

SEQ ID NO: 268108 - RNA, 20 nt, Human
aaacaaaagccccuugaagc

SEQ ID NO: 268109 - RNA, 22 nt, Human
aaacagcaguagcagcagcagc

SEQ ID NO: 268110 - RNA, 22 nt, Human
aaagacacgcauauuagcucaa

SEQ ID NO: 268111 - RNA, 20 nt, Human
aacacagcaaugacaaugaa

SEQ ID NO: 268112 - RNA, 21 nt, Human
aagaagaaucaaaagggaaca

SEQ ID NO: 268113 - RNA, 18 nt, Human
aaggcgucacggaggaag

SEQ ID NO: 268114 - RNA, 19 nt, Human
aagggcagagcccaggcag

SEQ ID NO: 268115 - RNA, 25 nt, Human
aagucauauauaaaaaccuggaggu

SEQ ID NO: 268116 - RNA, 19 nt, Human
aagucuguccaugcucucc

SEQ ID NO: 268117 - RNA, 21 nt, Human
aauagccucaccccagagggu

SEQ ID NO: 268118 - RNA, 24 nt, Human
aaugacaaugaacagcccagcaga

SEQ ID NO: 268119 - RNA, 21 nt, Human
acaauucgauuggugggcgca

SEQ ID NO: 268120 - RNA, 22 nt, Human
acccagucugccuucugugucu

SEQ ID NO: 268121 - RNA, 27 nt, Human
agaacagagacauuagaauaaaaagaa

SEQ ID NO: 268122 - RNA, 23 nt, Human
agaagaagugcaagauuuaacag

SEQ ID NO: 268123 - RNA, 23 nt, Human
agaccgcacaggggacggcauca

SEQ ID NO: 268124 - RNA, 21 nt, Human
agcagacucaagucauauaua

SEQ ID NO: 268125 - RNA, 24 nt, Human
aggaacuaggacuucgauucagag

SEQ ID NO: 268126 - RNA, 20 nt, Human
agugggcccccauggggaaa

SEQ ID NO: 268127 - RNA, 19 nt, Human
aguugucuuacuucacaau

SEQ ID NO: 268128 - RNA, 23 nt, Human
aucacaggcugguuuuauuuggg

SEQ ID NO: 268129 - RNA, 24 nt, Human
auuagugcucacuaaacaugcauu

SEQ ID NO: 268130 - RNA, 20 nt, Human
caaacaaaagccccuugaag

SEQ ID NO: 268131 - RNA, 20 nt, Human
caaauauacccacuagggac

SEQ ID NO: 268132 - RNA, 23 nt, Human
caacuaguguaaaccugugaaaa

SEQ ID NO: 268133 - RNA, 20 nt, Human
caagcagcucuacaauucga

SEQ ID NO: 268134 - RNA, 18 nt, Human
caauauguuauauacagc

SEQ ID NO: 268135 - RNA, 26 nt, Human
caaugacaaugaacagcccagcagag

SEQ ID NO: 268136 - RNA, 21 nt, Human
caaugggcugcugggccugag

SEQ ID NO: 268137 - RNA, 18 nt, Human
cacaauaggcaacaagau

SEQ ID NO: 268138 - RNA, 19 nt, Human
caccagaccaaacagcaac

SEQ ID NO: 268139 - RNA, 23 nt, Human
cagcaaugacaaugaacagccca

SEQ ID NO: 268140 - RNA, 19 nt, Human
cagcaguagcagcagcagc

SEQ ID NO: 268141 - RNA, 18 nt, Human
cagcuccugagcacugcc

SEQ ID NO: 268142 - RNA, 19 nt, Human
caggggacggcaucaccau

SEQ ID NO: 268143 - RNA, 19 nt, Human
cauacaaagaccuuccugg

SEQ ID NO: 268144 - RNA, 20 nt, Human
ccagaccaaacagcaacuca

SEQ ID NO: 268145 - RNA, 19 nt, Human
ccaggacagggacuauuuc

SEQ ID NO: 268146 - RNA, 20 nt, Human
ccccauggggaaauguccca

SEQ ID NO: 268147 - RNA, 24 nt, Human
cccccgagucuuacguuuuagaac

SEQ ID NO: 268148 - RNA, 18 nt, Human
cccuggaggaagacuagg

SEQ ID NO: 268149 - RNA, 22 nt, Human
ccucuaggcauggccacucugg

SEQ ID NO: 268150 - RNA, 23 nt, Human
ccucuaggcauggccacucugga

SEQ ID NO: 268151 - RNA, 21 nt, Human
cgcacaggggacggcaucacc

SEQ ID NO: 268152 - RNA, 21 nt, Human
cuaaaaacagucuucuggaau

SEQ ID NO: 268153 - RNA, 19 nt, Human
cuaaugcugucaaugggcu

SEQ ID NO: 268154 - RNA, 21 nt, Human
cuaccaccugcucugcaucug

SEQ ID NO: 268155 - RNA, 24 nt, Human
cucaaaauuucacccuauggauuu

SEQ ID NO: 268156 - RNA, 21 nt, Human
cucaacuaguguaaaccugug

SEQ ID NO: 268157 - RNA, 18 nt, Human
cuccucacuccagcucua

SEQ ID NO: 268158 - RNA, 18 nt, Human
cucuccacaagcacacug

SEQ ID NO: 268159 - RNA, 23 nt, Human
cugaacacagcaaugacaaugaa

SEQ ID NO: 268160 - RNA, 20 nt, Human
cuggcucccuaaccaugcac

SEQ ID NO: 268161 - RNA, 21 nt, Human
cuugcccaugucuuuaugaug

SEQ ID NO: 268162 - RNA, 23 nt, Human
gaaaccacagacacacuugccca

SEQ ID NO: 268163 - RNA, 23 nt, Human
gaaauagaagucugcauucaaag

SEQ ID NO: 268164 - RNA, 18 nt, Human
gaacacagcaaugacaau

SEQ ID NO: 268165 - RNA, 21 nt, Human
gagcacggcaauggaaaauac

SEQ ID NO: 268166 - RNA, 24 nt, Human
gaggggagugggcccccaugggga

SEQ ID NO: 268167 - RNA, 21 nt, Human
gauucuccauaggggggccuu

SEQ ID NO: 268168 - RNA, 21 nt, Human
gcaauggaaaauacuuuugga

SEQ ID NO: 268169 - RNA, 20 nt, Human
gcagccccuggaaacagcag

SEQ ID NO: 268170 - RNA, 20 nt, Human
ggaagagaggggagugggcc

SEQ ID NO: 268171 - RNA, 23 nt, Human
ggauucuccauaggggggccuug

SEQ ID NO: 268172 - RNA, 21 nt, Human
ggcaaguuuugguacagaacc

SEQ ID NO: 268173 - RNA, 23 nt, Human
gggaauccagcauccggugccau

SEQ ID NO: 268174 - RNA, 21 nt, Human
gggcagagcccaggcagguuu

SEQ ID NO: 268175 - RNA, 23 nt, Human
guagcagcagcagcaagguccag

SEQ ID NO: 268176 - RNA, 18 nt, Human
guuuuauuugggacagaa

SEQ ID NO: 268177 - RNA, 21 nt, Human
uaacaguccaugcucugcagc

SEQ ID NO: 268178 - RNA, 22 nt, Human
uaauuuggucugcauuacccaa

SEQ ID NO: 268179 - RNA, 18 nt, Human
uaccauacaaauuuggau

SEQ ID NO: 268180 - RNA, 19 nt, Human
uacuugucgauugguacau

SEQ ID NO: 268181 - RNA, 18 nt, Human
uagcugagccaucuuuuu

SEQ ID NO: 268182 - RNA, 20 nt, Human
uauuccaggccuggcucccu

SEQ ID NO: 268183 - RNA, 25 nt, Human
ucaaagagcacggcaauggaaaaua

SEQ ID NO: 268184 - RNA, 19 nt, Human
ucacuucuggaaauagaag

SEQ ID NO: 268185 - RNA, 23 nt, Human
ucagcucacucagaagaagugca

SEQ ID NO: 268186 - RNA, 20 nt, Human
uccaaggaacagaguggguc

SEQ ID NO: 268187 - RNA, 21 nt, Human
uccaugcucuccacaagcaca

SEQ ID NO: 268188 - RNA, 26 nt, Human
uccccugucauacauguuaacauucc

SEQ ID NO: 268189 - RNA, 22 nt, Human
ucccuuugcuaacuacuugcaa

SEQ ID NO: 268190 - RNA, 19 nt, Human
uccugugcuccaauugucc

SEQ ID NO: 268191 - RNA, 18 nt, Human
ucgauucagagcagggaa

SEQ ID NO: 268192 - RNA, 24 nt, Human
ucuccuggucaugaugucucucuu

SEQ ID NO: 268193 - RNA, 18 nt, Human
ucugcagccccuggaaac

SEQ ID NO: 268194 - RNA, 19 nt, Human
ucuucuggaauaagauugu

SEQ ID NO: 268195 - RNA, 22 nt, Human
ucuuucuggaauagccggagac

SEQ ID NO: 268196 - RNA, 20 nt, Human
ugaaaaaauagcugagccau

SEQ ID NO: 268197 - RNA, 22 nt, Human
ugaaauguucacagcuuagaaa

SEQ ID NO: 268198 - RNA, 22 nt, Human
ugacuuccaaacaagacagaca

SEQ ID NO: 268199 - RNA, 19 nt, Human
ugaggcaugcaguccucug

SEQ ID NO: 268200 - RNA, 18 nt, Human
uggaagugucggcauuca

SEQ ID NO: 268201 - RNA, 24 nt, Human
uggaagugucggcauucaucagcc

SEQ ID NO: 268202 - RNA, 23 nt, Human
uggaauagccucaccccagaggg

SEQ ID NO: 268203 - RNA, 20 nt, Human
uggcaaaaaaaaaaaaaaau

SEQ ID NO: 268204 - RNA, 26 nt, Human
uggcucccuaaccaugcacauagauu

SEQ ID NO: 268205 - RNA, 18 nt, Human
ugggaaguuccaagaaug

SEQ ID NO: 268206 - RNA, 24 nt, Human
uguaaaccugugaaaaaauagcug

SEQ ID NO: 268207 - RNA, 18 nt, Human
ugucccacuaccaccugc

SEQ ID NO: 268208 - RNA, 18 nt, Human
ugugguuccucuucuuug

SEQ ID NO: 268209 - RNA, 21 nt, Human
uucacaauaagcuacuaaaaa

SEQ ID NO: 268210 - RNA, 22 nt, Human
uucagagcagggaaaaguggga

SEQ ID NO: 268211 - RNA, 19 nt, Human
uucaucagccugcaugugg

SEQ ID NO: 268212 - RNA, 21 nt, Human
uuccaaacaagacagacauuc

SEQ ID NO: 268213 - RNA, 18 nt, Human
uuggaaaccacagacaca

SEQ ID NO: 268214 - RNA, 18 nt, Human
uugguucuuuuuggucua

SEQ ID NO: 268215 - RNA, 22 nt, Human
uuucuccuggucaugaugucuc

SEQ ID NO: 268216 - RNA, 18 nt, Human
uuucugcugccaauuaca

SEQ ID NO: 268217 - RNA, 21 nt, Human
uuuuggaauauguuaccauuu

SEQ ID NO: 268218 - RNA, 18 nt, Human
accagaaacuagccuaga

SEQ ID NO: 268219 - RNA, 23 nt, Human
auucugugccccccccccugcag

SEQ ID NO: 268220 - RNA, 18 nt, Human
ccaggcugaguaugauua

SEQ ID NO: 268221 - RNA, 21 nt, Human
ccggguaccaugguuuuuuuu

SEQ ID NO: 268222 - RNA, 24 nt, Human
cugcagcgaguguggacggcggcu

SEQ ID NO: 268223 - RNA, 19 nt, Human
gagcgacagaccuaggggc

SEQ ID NO: 268224 - RNA, 20 nt, Human
gcgugugugugucuguggug

SEQ ID NO: 268225 - RNA, 25 nt, Human
gugcgugugugugucugugguguug

SEQ ID NO: 268226 - RNA, 21 nt, Human
gugugugugugcgugugugug

SEQ ID NO: 268227 - RNA, 23 nt, Human
gugugugugugugcgugugugug

SEQ ID NO: 268228 - RNA, 20 nt, Human
guuuuuuuuuuuuuuuguuu

SEQ ID NO: 268229 - RNA, 25 nt, Human
uaccaugguuuuuuuuuuuuuuugu

SEQ ID NO: 268230 - RNA, 24 nt, Human
uagaauugugugugugugugcgug

SEQ ID NO: 268231 - RNA, 20 nt, Human
ucacuuuuuauuuugaucuu

SEQ ID NO: 268232 - RNA, 21 nt, Human
ucacuuuuuauuuugaucuuu

SEQ ID NO: 268233 - RNA, 22 nt, Human
ucacuuuuuauuuugaucuuug

SEQ ID NO: 268234 - RNA, 21 nt, Human
ugccagcggcagccgagcugc

SEQ ID NO: 268235 - RNA, 21 nt, Human
uggcugggagggauguucuug

SEQ ID NO: 268236 - RNA, 18 nt, Human
ugugccccccccccugca

SEQ ID NO: 268237 - RNA, 22 nt, Human
ugugccccccccccugcagcga

SEQ ID NO: 268238 - RNA, 21 nt, Human
ugugugcgugugugugucugu

SEQ ID NO: 268239 - RNA, 20 nt, Human
ugugugugugugcgugugug

SEQ ID NO: 268240 - RNA, 21 nt, Human
ugugugugugugugcgugugu

SEQ ID NO: 268241 - RNA, 21 nt, Human
ugugugugugugugcgugugu

SEQ ID NO: 268242 - RNA, 22 nt, Human
uucugugccccccccccugcag

SEQ ID NO: 268243 - RNA, 20 nt, Human
uuguuuguuuguuuugucuu

SEQ ID NO: 268244 - RNA, 20 nt, Human
uuuuuguuuguuuguuuugu

SEQ ID NO: 268245 - RNA, 20 nt, Human
aaaccaaaccaaccaccaaa

SEQ ID NO: 268246 - RNA, 21 nt, Human
aacaaaauuaacaacaacagc

SEQ ID NO: 268247 - RNA, 21 nt, Human
aacaacaacagcaacaacaaa

SEQ ID NO: 268248 - RNA, 26 nt, Human
aacaacaacagcaacaacaacaacaa

SEQ ID NO: 268249 - RNA, 21 nt, Human
aacaacagcaacaacaacaac

SEQ ID NO: 268250 - RNA, 18 nt, Human
aagcuccuucaucuugaa

SEQ ID NO: 268251 - RNA, 20 nt, Human
aagguggucauauucugucc

SEQ ID NO: 268252 - RNA, 23 nt, Human
aaucaauguugaaaaugcacuga

SEQ ID NO: 268253 - RNA, 18 nt, Human
aaugaccuaacugcuuug

SEQ ID NO: 268254 - RNA, 22 nt, Human
acaacaacaauaacaaaaggga

SEQ ID NO: 268255 - RNA, 23 nt, Human
acaacaacaauaacaaaagggaa

SEQ ID NO: 268256 - RNA, 19 nt, Human
acagcaacaacaacaacaa

SEQ ID NO: 268257 - RNA, 25 nt, Human
acagcaacaacaacaacaauaacaa

SEQ ID NO: 268258 - RNA, 25 nt, Human
acaggaacgcaaggagagauuuccg

SEQ ID NO: 268259 - RNA, 21 nt, Human
accaaauuaaacacagccaaa

SEQ ID NO: 268260 - RNA, 20 nt, Human
acuucagucuaucaaaaauc

SEQ ID NO: 268261 - RNA, 18 nt, Human
agagagacacacccagag

SEQ ID NO: 268262 - RNA, 20 nt, Human
agagagacacacccagagca

SEQ ID NO: 268263 - RNA, 30 nt, Human
agcaacaacaacaacaauaacaaaagggaa

SEQ ID NO: 268264 - RNA, 19 nt, Human
aggacucauacacaugcag

SEQ ID NO: 268265 - RNA, 21 nt, Human
auaacccuaacaaaagauauu

SEQ ID NO: 268266 - RNA, 22 nt, Human
augcagggccuucuuacacaug

SEQ ID NO: 268267 - RNA, 23 nt, Human
auuagccaauuauauuuaauggu

SEQ ID NO: 268268 - RNA, 21 nt, Human
caaaccaaaccaaccaccaaa

SEQ ID NO: 268269 - RNA, 23 nt, Human
caaacgaagguggucauauucug

SEQ ID NO: 268270 - RNA, 18 nt, Human
caacaacaacaacaauaa

SEQ ID NO: 268271 - RNA, 22 nt, Human
caacaacagcaacaacaacaac

SEQ ID NO: 268272 - RNA, 23 nt, Human
caacaacagcaacaacaacaaca

SEQ ID NO: 268273 - RNA, 26 nt, Human
caacagcaacaacaacaacaauaaca

SEQ ID NO: 268274 - RNA, 22 nt, Human
caaccaccaaauuaaacacagc

SEQ ID NO: 268275 - RNA, 20 nt, Human
caacuuauggcaaagacacu

SEQ ID NO: 268276 - RNA, 21 nt, Human
caagacaccauauugauauug

SEQ ID NO: 268277 - RNA, 18 nt, Human
caagccccuguaauauug

SEQ ID NO: 268278 - RNA, 22 nt, Human
cacaaacaaacuaauucaagua

SEQ ID NO: 268279 - RNA, 21 nt, Human
caccauauugauauuguuccc

SEQ ID NO: 268280 - RNA, 21 nt, Human
cagguuucugcaauguuaaaa

SEQ ID NO: 268281 - RNA, 25 nt, Human
cauacacaugcagggccuucuuaca

SEQ ID NO: 268282 - RNA, 22 nt, Human
ccaaauuaaacacagccaaaua

SEQ ID NO: 268283 - RNA, 23 nt, Human
ccaaauuaaacacagccaaauaa

SEQ ID NO: 268284 - RNA, 23 nt, Human
ccaaccaccaaauuaaacacagc

SEQ ID NO: 268285 - RNA, 21 nt, Human
ccaagcuagaaguuucccaag

SEQ ID NO: 268286 - RNA, 22 nt, Human
ccucugggagcuugcauagcuu

SEQ ID NO: 268287 - RNA, 18 nt, Human
ccuuuggaacgcauuccc

SEQ ID NO: 268288 - RNA, 18 nt, Human
cucaagguuaauaaaccu

SEQ ID NO: 268289 - RNA, 21 nt, Human
cucauacacaugcagggccuu

SEQ ID NO: 268290 - RNA, 22 nt, Human
cuuuucuucagaauacgccaga

SEQ ID NO: 268291 - RNA, 18 nt, Human
gacaccauauugauauug

SEQ ID NO: 268292 - RNA, 18 nt, Human
gaguucuccaaaguuuuc

SEQ ID NO: 268293 - RNA, 24 nt, Human
gcaacaacaacaacaauaacaaaa

SEQ ID NO: 268294 - RNA, 18 nt, Human
gcaauccaaauacucuuc

SEQ ID NO: 268295 - RNA, 24 nt, Human
gcucaacguuuuuuuuccuuaacc

SEQ ID NO: 268296 - RNA, 21 nt, Human
gcuucauggacacuuuacuaa

SEQ ID NO: 268297 - RNA, 22 nt, Human
ggaauggauccaugggccagga

SEQ ID NO: 268298 - RNA, 22 nt, Human
guauuugaacacuaaagacuug

SEQ ID NO: 268299 - RNA, 25 nt, Human
uaacaaaauuaacaacaacagcaac

SEQ ID NO: 268300 - RNA, 24 nt, Human
uaacaacaacagcaacaacaacaa

SEQ ID NO: 268301 - RNA, 25 nt, Human
uaacaacaacagcaacaacaacaac

SEQ ID NO: 268302 - RNA, 19 nt, Human
uaagcuccuucaucuugaa

SEQ ID NO: 268303 - RNA, 24 nt, Human
uagaacauccggaauagaacacau

SEQ ID NO: 268304 - RNA, 19 nt, Human
uagcuagaacauccggaau

SEQ ID NO: 268305 - RNA, 24 nt, Human
uaggacucauacacaugcagggcc

SEQ ID NO: 268306 - RNA, 18 nt, Human
ucacucuauuaccucugg

SEQ ID NO: 268307 - RNA, 22 nt, Human
ucaugugucacucuauuaccuc

SEQ ID NO: 268308 - RNA, 23 nt, Human
uccagcccuggagagagaccgga

SEQ ID NO: 268309 - RNA, 19 nt, Human
ucuguccugcuguagccag

SEQ ID NO: 268310 - RNA, 22 nt, Human
ucuguccugcuguagccagaaa

SEQ ID NO: 268311 - RNA, 24 nt, Human
ugaaaaugcacugaaucauaacuu

SEQ ID NO: 268312 - RNA, 20 nt, Human
ugaaguauuugaacacuaaa

SEQ ID NO: 268313 - RNA, 22 nt, Human
ugaggauaugauuugaaguauu

SEQ ID NO: 268314 - RNA, 21 nt, Human
ugcuccaauauuccuuuggaa

SEQ ID NO: 268315 - RNA, 20 nt, Human
ugcuucauggacacuuuacu

SEQ ID NO: 268316 - RNA, 20 nt, Human
ugucacucuauuaccucugg

SEQ ID NO: 268317 - RNA, 24 nt, Human
uuaaacacagccaaauaaagcaaa

SEQ ID NO: 268318 - RNA, 23 nt, Human
uugaaaaugcacugaaucauaac

SEQ ID NO: 268319 - RNA, 24 nt, Human
uugaaguauuugaacacuaaagac

SEQ ID NO: 268320 - RNA, 24 nt, Human
uugcacaaacaaacuaauucaagu

SEQ ID NO: 268321 - RNA, 21 nt, Human
uugcuccaauauuccuuugga

SEQ ID NO: 268322 - RNA, 23 nt, Human
uuugaagcugagggcagaaauca

SEQ ID NO: 268323 - RNA, 22 nt, Human
aaugcacuggaaagaggaaguc

SEQ ID NO: 268324 - RNA, 21 nt, Human
acacuggacaaugaggucaca

SEQ ID NO: 268325 - RNA, 19 nt, Human
agggauggugaggacacag

SEQ ID NO: 268326 - RNA, 18 nt, Human
cacuggaaagaggaaguc

SEQ ID NO: 268327 - RNA, 21 nt, Human
cagaaccaccaaccugugcca

SEQ ID NO: 268328 - RNA, 22 nt, Human
caugcacacaugcucacagaau

SEQ ID NO: 268329 - RNA, 22 nt, Human
ccuuaaaugcacuggaaagagg

SEQ ID NO: 268330 - RNA, 22 nt, Human
gacacagacacacugauguccc

SEQ ID NO: 268331 - RNA, 19 nt, Human
gauggugaggacacaggga

SEQ ID NO: 268332 - RNA, 22 nt, Human
ggcccagcggcucccugcagcc

SEQ ID NO: 268333 - RNA, 18 nt, Human
gggaaugugacugagggg

SEQ ID NO: 268334 - RNA, 24 nt, Human
gggcccagcggcucccugcagcca

SEQ ID NO: 268335 - RNA, 28 nt, Human
ucacaugcaugcaugcacacaugcucac

SEQ ID NO: 268336 - RNA, 21 nt, Human
ucagggauggugaggacacag

SEQ ID NO: 268337 - RNA, 23 nt, Human
ucgaggaaggacgcugggaucca

SEQ ID NO: 268338 - RNA, 23 nt, Human
ugacagaaccaccaaccugugcc

SEQ ID NO: 268339 - RNA, 27 nt, Human
ugaggucacaugcaugcaugcacacag

SEQ ID NO: 268340 - RNA, 22 nt, Human
ugcaugcacacaugcucacaga

SEQ ID NO: 268341 - RNA, 18 nt, Human
ugugccagaggugcggga

SEQ ID NO: 268342 - RNA, 21 nt, Human
aacuaggaggccaagagagcu

SEQ ID NO: 268343 - RNA, 20 nt, Human
acagggaauaaauaguuaac

SEQ ID NO: 268344 - RNA, 20 nt, Human
agaaacaggaauauuuguac

SEQ ID NO: 268345 - RNA, 18 nt, Human
agguagaaacuaggaggc

SEQ ID NO: 268346 - RNA, 18 nt, Human
augaugauagguuuuuuu

SEQ ID NO: 268347 - RNA, 20 nt, Human
caagccaaaaacagccugaa

SEQ ID NO: 268348 - RNA, 19 nt, Human
cacucagagcaagaaacag

SEQ ID NO: 268349 - RNA, 25 nt, Human
cacuuuuccucuccccuaacuccuc

SEQ ID NO: 268350 - RNA, 19 nt, Human
cagaagggugcuaaaucuu

SEQ ID NO: 268351 - RNA, 23 nt, Human
cagccugaaggcugaaagacuag

SEQ ID NO: 268352 - RNA, 19 nt, Human
caguauacagcagaagggu

SEQ ID NO: 268353 - RNA, 21 nt, Human
caguauacagcagaagggugc

SEQ ID NO: 268354 - RNA, 20 nt, Human
ccacuuuuccucuccccuaa

SEQ ID NO: 268355 - RNA, 18 nt, Human
ccagacacuuccauccac

SEQ ID NO: 268356 - RNA, 20 nt, Human
ccuccauucaccugucccca

SEQ ID NO: 268357 - RNA, 20 nt, Human
ccuguccccaucuccucacc

SEQ ID NO: 268358 - RNA, 18 nt, Human
cuccauucaccugucccc

SEQ ID NO: 268359 - RNA, 21 nt, Human
gagagcuucaagccaaaaaca

SEQ ID NO: 268360 - RNA, 22 nt, Human
gagccaauuacaguaaugguuc

SEQ ID NO: 268361 - RNA, 24 nt, Human
ggaauaaauaguuaacacuuccaa

SEQ ID NO: 268362 - RNA, 24 nt, Human
uacaguaaugguucagaaacagga

SEQ ID NO: 268363 - RNA, 18 nt, Human
uacuucaagccuuaagag

SEQ ID NO: 268364 - RNA, 21 nt, Human
uaggaggccaagagagcuuca

SEQ ID NO: 268365 - RNA, 20 nt, Human
uauugugguaugacacagaa

SEQ ID NO: 268366 - RNA, 21 nt, Human
uccauccacuuuuccucuccc

SEQ ID NO: 268367 - RNA, 18 nt, Human
uccccaucuccucaccca

SEQ ID NO: 268368 - RNA, 19 nt, Human
ucuucagcuuuguaguuug

SEQ ID NO: 268369 - RNA, 20 nt, Human
ugcaccaaauguacagcuug

SEQ ID NO: 268370 - RNA, 23 nt, Human
uggguacucacaucauugucuag

SEQ ID NO: 268371 - RNA, 20 nt, Human
uugugguaugacacagaaaa

SEQ ID NO: 268372 - RNA, 22 nt, Human
uuuguacuuacuccuugggccu

SEQ ID NO: 268373 - RNA, 23 nt, Human
agucccaggcugaguucaccucu

SEQ ID NO: 268374 - RNA, 23 nt, Human
cagccacccugcgucucgucuca

SEQ ID NO: 268375 - RNA, 21 nt, Human
cagccgaaccagaucccccuc

SEQ ID NO: 268376 - RNA, 23 nt, Human
cagccgaaccagaucccccucag

SEQ ID NO: 268377 - RNA, 22 nt, Human
ccagccagucccaggcugaguu

SEQ ID NO: 268378 - RNA, 23 nt, Human
ccagccagucccaggcugaguuc

SEQ ID NO: 268379 - RNA, 18 nt, Human
ccaggagcugccuuuggg

SEQ ID NO: 268380 - RNA, 23 nt, Human
cccagggagcagguggagagucu

SEQ ID NO: 268381 - RNA, 24 nt, Human
cccccucagcgucccgguaauuca

SEQ ID NO: 268382 - RNA, 20 nt, Human
cccucagcgucccgguaauu

SEQ ID NO: 268383 - RNA, 19 nt, Human
ccuugugagcuccagcagg

SEQ ID NO: 268384 - RNA, 22 nt, Human
cgccuugugagcuccagcaggu

SEQ ID NO: 268385 - RNA, 21 nt, Human
cgucucgucucagccuguggu

SEQ ID NO: 268386 - RNA, 23 nt, Human
cucacugcuccagggacaccguc

SEQ ID NO: 268387 - RNA, 21 nt, Human
cucucacuuccuccagccacc

SEQ ID NO: 268388 - RNA, 19 nt, Human
cugccuuuggggaggcuca

SEQ ID NO: 268389 - RNA, 18 nt, Human
cuguaguuguccuucugc

SEQ ID NO: 268390 - RNA, 24 nt, Human
gacagcagccgaaccagauccccc

SEQ ID NO: 268391 - RNA, 24 nt, Human
gagcugaagguuuuugcugguguc

SEQ ID NO: 268392 - RNA, 24 nt, Human
gaguccccaggagcugccuuuggg

SEQ ID NO: 268393 - RNA, 22 nt, Human
gccuuuggggaggcucaggccu

SEQ ID NO: 268394 - RNA, 20 nt, Human
gucucgucucagccuguggu

SEQ ID NO: 268395 - RNA, 20 nt, Human
ucucucuggaacucccgccu

SEQ ID NO: 268396 - RNA, 25 nt, Human
ucugcccauccucccagguuuuccu

SEQ ID NO: 268397 - RNA, 21 nt, Human
ugagagcugaagguuuuugcu

SEQ ID NO: 268398 - RNA, 21 nt, Human
ugccuuuggggaggcucaggc

SEQ ID NO: 268399 - RNA, 21 nt, Human
ugggaggggaggccacgagcc

SEQ ID NO: 268400 - RNA, 27 nt, Human
ugggaguccccaggagcugccuuuggg

SEQ ID NO: 268401 - RNA, 23 nt, Human
ugugcagcuuccaggggaagagg

SEQ ID NO: 268402 - RNA, 24 nt, Human
uuugcugguguccccucacugcuc

SEQ ID NO: 268403 - RNA, 21 nt, Human
uuuggggaggcucaggccugc

SEQ ID NO: 268404 - RNA, 23 nt, Human
uuuggggaggcucaggccugcuu

SEQ ID NO: 268405 - RNA, 21 nt, Human
aggccgggcgggcagcuccac

SEQ ID NO: 268406 - RNA, 25 nt, Human
cucugccacaaggccgggcgggcag

SEQ ID NO: 268407 - RNA, 20 nt, Human
gggcgggcagcuccaccgug

SEQ ID NO: 268408 - RNA, 19 nt, Human
ggggcccgggaggcgagug

SEQ ID NO: 268409 - RNA, 22 nt, Human
uccaccguggggcccgggaggc

SEQ ID NO: 268410 - RNA, 21 nt, Human
uccccgcgggaggagccucug

SEQ ID NO: 268411 - RNA, 23 nt, Human
uggggcccgggaggcgagugugg

SEQ ID NO: 268412 - RNA, 20 nt, Human
aagaaaccaaugaucagaaa

SEQ ID NO: 268413 - RNA, 23 nt, Human
acaaaacuuuuucaggucuuaag

SEQ ID NO: 268414 - RNA, 21 nt, Human
acacacagaugaauacuauaa

SEQ ID NO: 268415 - RNA, 23 nt, Human
accaaugaucagaaaauacaacc

SEQ ID NO: 268416 - RNA, 20 nt, Human
aggcuuuauacaagcaacaa

SEQ ID NO: 268417 - RNA, 19 nt, Human
agguaaaaccaaggcaaca

SEQ ID NO: 268418 - RNA, 24 nt, Human
aguacaaccauauuaagaaaccaa

SEQ ID NO: 268419 - RNA, 22 nt, Human
aucacuaucuaaaauaaucacu

SEQ ID NO: 268420 - RNA, 22 nt, Human
caaaacuuuuucaggucuuaag

SEQ ID NO: 268421 - RNA, 24 nt, Human
caaccauauuaagaaaccaaugau

SEQ ID NO: 268422 - RNA, 22 nt, Human
caaugaucagaaaauacaaccg

SEQ ID NO: 268423 - RNA, 21 nt, Human
cagaaaauacaaccguaugaa

SEQ ID NO: 268424 - RNA, 22 nt, Human
cagcagcccgcgccccggcagc

SEQ ID NO: 268425 - RNA, 19 nt, Human
cccauggcccucgcgcccc

SEQ ID NO: 268426 - RNA, 21 nt, Human
ccccaaucccgcgccggcgac

SEQ ID NO: 268427 - RNA, 20 nt, Human
ccccacccccggcgcucucc

SEQ ID NO: 268428 - RNA, 27 nt, Human
cccgcagcagcccgcgccccggcagcc

SEQ ID NO: 268429 - RNA, 19 nt, Human
cccgcccgcgaccuccgcc

SEQ ID NO: 268430 - RNA, 24 nt, Human
cccgccgcccuuccgcccccaccc

SEQ ID NO: 268431 - RNA, 19 nt, Human
cccgcgccggcgacagagc

SEQ ID NO: 268432 - RNA, 27 nt, Human
cccgcggccuucgcagcagccucucuc

SEQ ID NO: 268433 - RNA, 18 nt, Human
ccgccgccgccggccgcc

SEQ ID NO: 268434 - RNA, 22 nt, Human
ccuccccucccgcccgcgaccc

SEQ ID NO: 268435 - RNA, 24 nt, Human
ccuccugccuuccgcccgccgccc

SEQ ID NO: 268436 - RNA, 25 nt, Human
ccuuccgcccccacccccggcgcuc

SEQ ID NO: 268437 - RNA, 20 nt, Human
ccuuccgcccgccgcccuuc

SEQ ID NO: 268438 - RNA, 25 nt, Human
cgcagcagccucucucgggccuccu

SEQ ID NO: 268439 - RNA, 19 nt, Human
cgcccuuccgcccccaccc

SEQ ID NO: 268440 - RNA, 21 nt, Human
cgcccuuccgcccccaccccc

SEQ ID NO: 268441 - RNA, 20 nt, Human
cggcagccuccugccuuccg

SEQ ID NO: 268442 - RNA, 20 nt, Human
cuaaugccaacagggcacca

SEQ ID NO: 268443 - RNA, 21 nt, Human
cuaaugccaacagggcaccau

SEQ ID NO: 268444 - RNA, 20 nt, Human
cucccgcagcagcccgcgcc

SEQ ID NO: 268445 - RNA, 23 nt, Human
gccccuucucccgcagcagcccg

SEQ ID NO: 268446 - RNA, 23 nt, Human
gccgccgccgccggccgccucgg

SEQ ID NO: 268447 - RNA, 22 nt, Human
gcuggugccgccgccgccgccg

SEQ ID NO: 268448 - RNA, 25 nt, Human
ggagccccuucucccgcagcagccc

SEQ ID NO: 268449 - RNA, 22 nt, Human
guacaaccauauuaagaaacca

SEQ ID NO: 268450 - RNA, 21 nt, Human
uaaaaccaaggcaacaaaaau

SEQ ID NO: 268451 - RNA, 23 nt, Human
uaaaaccaaggcaacaaaaaugc

SEQ ID NO: 268452 - RNA, 20 nt, Human
uaaaguagaaauguauucau

SEQ ID NO: 268453 - RNA, 18 nt, Human
uaacaucacagaaaugca

SEQ ID NO: 268454 - RNA, 24 nt, Human
uaacaucacagaaaugcacaucca

SEQ ID NO: 268455 - RNA, 19 nt, Human
uaagaaaccaaugaucaga

SEQ ID NO: 268456 - RNA, 21 nt, Human
uacagguaaaaccaaggcaac

SEQ ID NO: 268457 - RNA, 24 nt, Human
uauaggaauaaucucagugaauuc

SEQ ID NO: 268458 - RNA, 22 nt, Human
ucaacaguugauaaaugucuaa

SEQ ID NO: 268459 - RNA, 20 nt, Human
ucagaaauaaacaagcaaag

SEQ ID NO: 268460 - RNA, 22 nt, Human
uccacaaaacuuuuucaggucu

SEQ ID NO: 268461 - RNA, 20 nt, Human
ucgggccuccuccccucccg

SEQ ID NO: 268462 - RNA, 24 nt, Human
ucuaauacuaagcaguucuuuaac

SEQ ID NO: 268463 - RNA, 25 nt, Human
ucuacagguaaaaccaaggcaacaa

SEQ ID NO: 268464 - RNA, 23 nt, Human
ucucccgcagcagcccgcgcccc

SEQ ID NO: 268465 - RNA, 24 nt, Human
ugaaagaaauuuauaauccacaaa

SEQ ID NO: 268466 - RNA, 18 nt, Human
ugaaauaauuuacacaca

SEQ ID NO: 268467 - RNA, 18 nt, Human
ugaucagaaaauacaacc

SEQ ID NO: 268468 - RNA, 20 nt, Human
ugaucagaaaauacaaccgu

SEQ ID NO: 268469 - RNA, 19 nt, Human
ugccuuccgcccgccgccc

SEQ ID NO: 268470 - RNA, 21 nt, Human
uggcccucgcgccccaauccc

SEQ ID NO: 268471 - RNA, 21 nt, Human
ugggaaaugaucugcuucuaa

SEQ ID NO: 268472 - RNA, 22 nt, Human
uuaaauguuauacaguguuaca

SEQ ID NO: 268473 - RNA, 25 nt, Human
uuccgcccgccgcccuuccgccccc

SEQ ID NO: 268474 - RNA, 18 nt, Human
aagaagccaagcgacggc

SEQ ID NO: 268475 - RNA, 21 nt, Human
agggaaagcagagggacagaa

SEQ ID NO: 268476 - RNA, 18 nt, Human
agguaacaguaaaaaccc

SEQ ID NO: 268477 - RNA, 23 nt, Human
agguaacaguaaaaaccccagag

SEQ ID NO: 268478 - RNA, 23 nt, Human
augaaacaauauaaauucaaaac

SEQ ID NO: 268479 - RNA, 20 nt, Human
cacgguauugcccuugaaau

SEQ ID NO: 268480 - RNA, 22 nt, Human
cagaagaagccaagcgacggcg

SEQ ID NO: 268481 - RNA, 22 nt, Human
ugaagcggacaaguggcgcaga

SEQ ID NO: 268482 - RNA, 24 nt, Human
ugaagcggacaaguggcgcagaug

SEQ ID NO: 268483 - RNA, 21 nt, Human
uggaauguccucagaaggcuc

SEQ ID NO: 268484 - RNA, 18 nt, Human
cgaccugaagaauggcug

SEQ ID NO: 268485 - RNA, 19 nt, Human
ugcuccaaaugcuacgacc

SEQ ID NO: 268486 - RNA, 23 nt, Human
uuaaauuucacauuccuuuaaaa

SEQ ID NO: 268487 - RNA, 19 nt, Human
uuuuuuuuuuuuuugcucc

SEQ ID NO: 268488 - RNA, 20 nt, Human
uuuuuuuuuuuuuugcucca

SEQ ID NO: 268489 - RNA, 18 nt, Human
uuuuuuuuuuuuuuuuug

SEQ ID NO: 268490 - RNA, 20 nt, Human
uuuuuuuuuuuuuuuuugcu

SEQ ID NO: 268491 - RNA, 20 nt, Human
aaaaugccuacaucuaaaca

SEQ ID NO: 268492 - RNA, 22 nt, Human
aaaauuaaaaugccuacaucua

SEQ ID NO: 268493 - RNA, 19 nt, Human
aaagcauuauugcucuacc

SEQ ID NO: 268494 - RNA, 20 nt, Human
aaaggucauauuuacaaaaa

SEQ ID NO: 268495 - RNA, 18 nt, Human
aacacuccaugucuccag

SEQ ID NO: 268496 - RNA, 22 nt, Human
aacagcagaaaagugguagggg

SEQ ID NO: 268497 - RNA, 19 nt, Human
aacucaacaccauuaguaa

SEQ ID NO: 268498 - RNA, 23 nt, Human
aaggcagaaaaaagugacacaaa

SEQ ID NO: 268499 - RNA, 23 nt, Human
aauucacagacauucagaaaccc

SEQ ID NO: 268500 - RNA, 23 nt, Human
acacacacacacacacacauaca

SEQ ID NO: 268501 - RNA, 23 nt, Human
acacacacacacacacauacaca

SEQ ID NO: 268502 - RNA, 25 nt, Human
acacacacacacacauacacacaca

SEQ ID NO: 268503 - RNA, 23 nt, Human
acacacacacauacacacacaca

SEQ ID NO: 268504 - RNA, 23 nt, Human
acacacacauacacacacacaca

SEQ ID NO: 268505 - RNA, 22 nt, Human
acacagaacuacuacaccugaa

SEQ ID NO: 268506 - RNA, 18 nt, Human
acacagcccaugaauugc

SEQ ID NO: 268507 - RNA, 19 nt, Human
acagagcaacucaacacca

SEQ ID NO: 268508 - RNA, 24 nt, Human
acagcugagcagacaccagaaacc

SEQ ID NO: 268509 - RNA, 18 nt, Human
accauauaggcaaagggu

SEQ ID NO: 268510 - RNA, 18 nt, Human
accccucccccaggccac

SEQ ID NO: 268511 - RNA, 18 nt, Human
accugguucuuccucugu

SEQ ID NO: 268512 - RNA, 21 nt, Human
agaaucaccaauuccacugga

SEQ ID NO: 268513 - RNA, 23 nt, Human
agcaccauucuauuucuccccac

SEQ ID NO: 268514 - RNA, 25 nt, Human
agcagacaccagaaaccacaccaag

SEQ ID NO: 268515 - RNA, 19 nt, Human
agcugguccuuucuuccaa

SEQ ID NO: 268516 - RNA, 20 nt, Human
aggcagaaaaaagugacaca

SEQ ID NO: 268517 - RNA, 20 nt, Human
aggcugggggguggggaagg

SEQ ID NO: 268518 - RNA, 33 nt, Human
auaauuaaacauacacacacacacacacacagu

SEQ ID NO: 268519 - RNA, 23 nt, Human
auacacacacacacacacacaua

SEQ ID NO: 268520 - RNA, 21 nt, Human
auacugcaacuagagaaacca

SEQ ID NO: 268521 - RNA, 21 nt, Human
aucaccaauuccacuggacaa

SEQ ID NO: 268522 - RNA, 20 nt, Human
aucacuuaaaauacccuuga

SEQ ID NO: 268523 - RNA, 19 nt, Human
aucucauuuccuuucugca

SEQ ID NO: 268524 - RNA, 31 nt, Human
auuaaacauacacacacacacacacacauag

SEQ ID NO: 268525 - RNA, 24 nt, Human
caaaaaacauuucuguuuugaaca

SEQ ID NO: 268526 - RNA, 22 nt, Human
caaaggauguucaagcaguuua

SEQ ID NO: 268527 - RNA, 24 nt, Human
caaaugacaucacuuaaaauaccc

SEQ ID NO: 268528 - RNA, 25 nt, Human
caauacugcaacuagagaaaccaga

SEQ ID NO: 268529 - RNA, 20 nt, Human
cacacacacacacacacaua

SEQ ID NO: 268530 - RNA, 26 nt, Human
cacacacacacacacacauacacaca

SEQ ID NO: 268531 - RNA, 19 nt, Human
cacacacacacacacauac

SEQ ID NO: 268532 - RNA, 28 nt, Human
cacacacacacacacauacacacacaca

SEQ ID NO: 268533 - RNA, 21 nt, Human
cacacacacacacagcccaug

SEQ ID NO: 268534 - RNA, 24 nt, Human
cacacacacacauacacacacaca

SEQ ID NO: 268535 - RNA, 28 nt, Human
cacacacacacauacacacacacacaca

SEQ ID NO: 268536 - RNA, 29 nt, Human
cacacacauacacacacacacacagccca

SEQ ID NO: 268537 - RNA, 22 nt, Human
cacacauacacacacacacaca

SEQ ID NO: 268538 - RNA, 20 nt, Human
caccaguacuuuaaaaaaaa

SEQ ID NO: 268539 - RNA, 19 nt, Human
cacuggacaaagggucaac

SEQ ID NO: 268540 - RNA, 23 nt, Human
cagaaaccacaccaaggauucua

SEQ ID NO: 268541 - RNA, 24 nt, Human
cagcugagcagacaccagaaacca

SEQ ID NO: 268542 - RNA, 19 nt, Human
caggccacaaaagucaagg

SEQ ID NO: 268543 - RNA, 18 nt, Human
caguaccuggccuugggu

SEQ ID NO: 268544 - RNA, 22 nt, Human
cauauaggcaaagggugacacc

SEQ ID NO: 268545 - RNA, 21 nt, Human
caugacaguuccuggagguga

SEQ ID NO: 268546 - RNA, 21 nt, Human
ccaaaugaauuaacccagaua

SEQ ID NO: 268547 - RNA, 24 nt, Human
cccacacacauaacuuaaagaagg

SEQ ID NO: 268548 - RNA, 22 nt, Human
cccaccuacguguauuuaagag

SEQ ID NO: 268549 - RNA, 22 nt, Human
cccaggccacaaaagucaaggg

SEQ ID NO: 268550 - RNA, 27 nt, Human
cccccaaauuaacaaagugcuuaguuc

SEQ ID NO: 268551 - RNA, 20 nt, Human
ccucaccacacagcuuacug

SEQ ID NO: 268552 - RNA, 25 nt, Human
ccucccgccgccauuuuccucgcag

SEQ ID NO: 268553 - RNA, 20 nt, Human
ccuuaagagguccuggugca

SEQ ID NO: 268554 - RNA, 24 nt, Human
cgaggcaucuaaggcuggggggug

SEQ ID NO: 268555 - RNA, 23 nt, Human
cuacguguauuuaagagauuuug

SEQ ID NO: 268556 - RNA, 25 nt, Human
cuagagaaaccagauauucuaaucu

SEQ ID NO: 268557 - RNA, 20 nt, Human
cuauuucuccccacacacau

SEQ ID NO: 268558 - RNA, 23 nt, Human
cucagcccgcagccgccgccggc

SEQ ID NO: 268559 - RNA, 19 nt, Human
cuccuaaaggggaugaaaa

SEQ ID NO: 268560 - RNA, 19 nt, Human
cucuugauucuuccaaugu

SEQ ID NO: 268561 - RNA, 18 nt, Human
cugaguccaccauccagc

SEQ ID NO: 268562 - RNA, 22 nt, Human
cuugauucuuccaauguucucu

SEQ ID NO: 268563 - RNA, 20 nt, Human
gaaaagcacaggccacuaca

SEQ ID NO: 268564 - RNA, 26 nt, Human
gacaccagaaaccacaccaaggauuc

SEQ ID NO: 268565 - RNA, 21 nt, Human
gagaaagccuagggcaaauaa

SEQ ID NO: 268566 - RNA, 26 nt, Human
gcaaggcagaaaaaagugacacaaaa

SEQ ID NO: 268567 - RNA, 18 nt, Human
gccuuggguuuucagaag

SEQ ID NO: 268568 - RNA, 21 nt, Human
gcuuaaaauccaguccugcuc

SEQ ID NO: 268569 - RNA, 19 nt, Human
ggacauaaugaaagcauca

SEQ ID NO: 268570 - RNA, 21 nt, Human
ggccacaaaagucaagggaug

SEQ ID NO: 268571 - RNA, 19 nt, Human
ggccuuggguuuucagaag

SEQ ID NO: 268572 - RNA, 19 nt, Human
gggcagaagagggaggggu

SEQ ID NO: 268573 - RNA, 21 nt, Human
ggugucaaagagaggcaacag

SEQ ID NO: 268574 - RNA, 20 nt, Human
guacuuuaaaaaaaaaaauc

SEQ ID NO: 268575 - RNA, 19 nt, Human
gugcucaguuagacugugg

SEQ ID NO: 268576 - RNA, 24 nt, Human
guuuucggauuuacaaucuuucuu

SEQ ID NO: 268577 - RNA, 26 nt, Human
uaaaauacccuugauggagcucaaag

SEQ ID NO: 268578 - RNA, 26 nt, Human
uaacacguaaguguaggcaaaaacca

SEQ ID NO: 268579 - RNA, 23 nt, Human
uaacuuaaagaagggucagauac

SEQ ID NO: 268580 - RNA, 22 nt, Human
uaagagcaccauucuauuucuc

SEQ ID NO: 268581 - RNA, 18 nt, Human
uaaguguaggcaaaaacc

SEQ ID NO: 268582 - RNA, 20 nt, Human
uacacacacacacacacaca

SEQ ID NO: 268583 - RNA, 24 nt, Human
uacacacacacacacagcccaugg

SEQ ID NO: 268584 - RNA, 20 nt, Human
uacaggacaugaauggcaaa

SEQ ID NO: 268585 - RNA, 22 nt, Human
uacuuaagaaauaacugacacu

SEQ ID NO: 268586 - RNA, 21 nt, Human
uagcagagaccucugaaauuc

SEQ ID NO: 268587 - RNA, 24 nt, Human
uaggagguggaaugccaaaaaaca

SEQ ID NO: 268588 - RNA, 21 nt, Human
uagggggcagaagagggaggg

SEQ ID NO: 268589 - RNA, 19 nt, Human
ucacauuaguagaaugagg

SEQ ID NO: 268590 - RNA, 22 nt, Human
ucagaaacccaauuccgucaac

SEQ ID NO: 268591 - RNA, 21 nt, Human
uccaagauggaugccuggaac

SEQ ID NO: 268592 - RNA, 20 nt, Human
uccucccgccgccauuuucc

SEQ ID NO: 268593 - RNA, 18 nt, Human
ucggaaacucgccgcuca

SEQ ID NO: 268594 - RNA, 24 nt, Human
ucuaaacaaauaaucucuuuaaaa

SEQ ID NO: 268595 - RNA, 20 nt, Human
ucuccccacacacauaacuu

SEQ ID NO: 268596 - RNA, 23 nt, Human
ucuuccucugucuccaaacagga

SEQ ID NO: 268597 - RNA, 23 nt, Human
ugaaaaagagacagacugaccug

SEQ ID NO: 268598 - RNA, 22 nt, Human
ugaaguauuacaggacaugaau

SEQ ID NO: 268599 - RNA, 18 nt, Human
ugaccuacaaaaaaaggu

SEQ ID NO: 268600 - RNA, 18 nt, Human
ugagcagacaccagaaac

SEQ ID NO: 268601 - RNA, 20 nt, Human
ugagcagacaccagaaacca

SEQ ID NO: 268602 - RNA, 20 nt, Human
ugauacacagcagaaggagg

SEQ ID NO: 268603 - RNA, 18 nt, Human
ugauggagcucaaagcug

SEQ ID NO: 268604 - RNA, 19 nt, Human
ugauggagcucaaagcugg

SEQ ID NO: 268605 - RNA, 19 nt, Human
ugauuccuucccaauaauc

SEQ ID NO: 268606 - RNA, 19 nt, Human
ugcaacuagagaaaccaga

SEQ ID NO: 268607 - RNA, 22 nt, Human
uggaaugccaaaaaacauuucu

SEQ ID NO: 268608 - RNA, 22 nt, Human
uggcuagcaaggcagaaaaaag

SEQ ID NO: 268609 - RNA, 24 nt, Human
ugguagaggaauuuuuaaaaaauu

SEQ ID NO: 268610 - RNA, 19 nt, Human
uggucucugaguccaccau

SEQ ID NO: 268611 - RNA, 22 nt, Human
uuaaaaugccuacaucuaaaca

SEQ ID NO: 268612 - RNA, 22 nt, Human
uuaaauaaagugcacucagcug

SEQ ID NO: 268613 - RNA, 21 nt, Human
uuaguucugguagaggaauuu

SEQ ID NO: 268614 - RNA, 23 nt, Human
uucacuauucccucaagaccuca

SEQ ID NO: 268615 - RNA, 21 nt, Human
uuccucgcagcucagcuuuaa

SEQ ID NO: 268616 - RNA, 18 nt, Human
uugguaggggaaagaggg

SEQ ID NO: 268617 - RNA, 20 nt, Human
uugguaggggaaagagggca

SEQ ID NO: 268618 - RNA, 21 nt, Human
aaacaguaacucauaaucuga

SEQ ID NO: 268619 - RNA, 25 nt, Human
aaacaucaguaguuuucacaaagcu

SEQ ID NO: 268620 - RNA, 21 nt, Human
aacugaaucaccucagcauga

SEQ ID NO: 268621 - RNA, 20 nt, Human
aagaaacuacagagcugcaa

SEQ ID NO: 268622 - RNA, 23 nt, Human
aagaacucuagugaagcuguaug

SEQ ID NO: 268623 - RNA, 18 nt, Human
aagaagcuuaauaguuuc

SEQ ID NO: 268624 - RNA, 20 nt, Human
aagaauaauguagaacuaac

SEQ ID NO: 268625 - RNA, 24 nt, Human
aagcgacaggcugcuuuaccccug

SEQ ID NO: 268626 - RNA, 21 nt, Human
aaggcacaaguguugaaaacg

SEQ ID NO: 268627 - RNA, 20 nt, Human
aagguccccgagcccgggcc

SEQ ID NO: 268628 - RNA, 25 nt, Human
aaguguugaaaacggccuguucacu

SEQ ID NO: 268629 - RNA, 19 nt, Human
acacaggaugcaccaauua

SEQ ID NO: 268630 - RNA, 24 nt, Human
accccaaggcacaaguguugaaaa

SEQ ID NO: 268631 - RNA, 22 nt, Human
accccacuucucuccuacacag

SEQ ID NO: 268632 - RNA, 23 nt, Human
acuaacaaaagaaaacccacagc

SEQ ID NO: 268633 - RNA, 18 nt, Human
agcccgggccucgucccg

SEQ ID NO: 268634 - RNA, 20 nt, Human
agcugcccggcaagcgacag

SEQ ID NO: 268635 - RNA, 19 nt, Human
aggcacaaguguugaaaac

SEQ ID NO: 268636 - RNA, 23 nt, Human
aggcaggagaagaacuaagcuaa

SEQ ID NO: 268637 - RNA, 26 nt, Human
aggcaggagaagaacuaaggggaccc

SEQ ID NO: 268638 - RNA, 26 nt, Human
auagugauuaauguaaauuauauuuu

SEQ ID NO: 268639 - RNA, 22 nt, Human
caaaauucaucaaugcaaaaga

SEQ ID NO: 268640 - RNA, 23 nt, Human
cacaaagcuucaaugaacacccc

SEQ ID NO: 268641 - RNA, 22 nt, Human
cagaaagacaaaauuugcagua

SEQ ID NO: 268642 - RNA, 20 nt, Human
cagacccagaaacacaaaga

SEQ ID NO: 268643 - RNA, 19 nt, Human
cagcagaaaggcugcucaa

SEQ ID NO: 268644 - RNA, 20 nt, Human
cagcaugaauaaacagcauu

SEQ ID NO: 268645 - RNA, 21 nt, Human
caggagaagaacuaagcuaau

SEQ ID NO: 268646 - RNA, 24 nt, Human
ccacgcgucacacggcaacuccag

SEQ ID NO: 268647 - RNA, 24 nt, Human
ccaggugucaagcucagcuuccau

SEQ ID NO: 268648 - RNA, 22 nt, Human
gaaacacaaagauuuggcaagc

SEQ ID NO: 268649 - RNA, 21 nt, Human
gcccggcaagcgacaggcugc

SEQ ID NO: 268650 - RNA, 20 nt, Human
gucaaaaauugccaagauua

SEQ ID NO: 268651 - RNA, 18 nt, Human
gugaaaaagacguccaca

SEQ ID NO: 268652 - RNA, 24 nt, Human
uaaaauguuucauaauuaaugucc

SEQ ID NO: 268653 - RNA, 21 nt, Human
uaacaaaagaaaacccacagc

SEQ ID NO: 268654 - RNA, 22 nt, Human
uacacaggaugcaccaauuauc

SEQ ID NO: 268655 - RNA, 23 nt, Human
uacugaguccuucuaaagagcuc

SEQ ID NO: 268656 - RNA, 19 nt, Human
uagaacaggaaaauaauua

SEQ ID NO: 268657 - RNA, 23 nt, Human
ucaaugaacaccccaaggcacaa

SEQ ID NO: 268658 - RNA, 20 nt, Human
ucagaccacuaacaaaagaa

SEQ ID NO: 268659 - RNA, 23 nt, Human
ucagcuuccauuuacacaggaug

SEQ ID NO: 268660 - RNA, 19 nt, Human
ucaguaguuuucacaaagc

SEQ ID NO: 268661 - RNA, 18 nt, Human
ucccgcccacgcgucaca

SEQ ID NO: 268662 - RNA, 20 nt, Human
ucccuacuuaaaagcaccag

SEQ ID NO: 268663 - RNA, 19 nt, Human
ucuggaaagcagcaaagau

SEQ ID NO: 268664 - RNA, 24 nt, Human
ugaaaaagacguccacaaagaugc

SEQ ID NO: 268665 - RNA, 21 nt, Human
ugaagaauaauguagaacuaa

SEQ ID NO: 268666 - RNA, 23 nt, Human
ugaccagguuaauuuuuuugugc

SEQ ID NO: 268667 - RNA, 18 nt, Human
ugaguuuaagugaagaau

SEQ ID NO: 268668 - RNA, 22 nt, Human
ugcuccucacaggccaggucac

SEQ ID NO: 268669 - RNA, 23 nt, Human
uggaaagcagcaaagauaucuua

SEQ ID NO: 268670 - RNA, 18 nt, Human
uggaaaggcuccuuacau

SEQ ID NO: 268671 - RNA, 21 nt, Human
uggcaaugacauuuugggacc

SEQ ID NO: 268672 - RNA, 27 nt, Human
uguaagaaggagggaacugaaucaccu

SEQ ID NO: 268673 - RNA, 18 nt, Human
ugucaagcucagcuucca

SEQ ID NO: 268674 - RNA, 20 nt, Human
uucaaaauuaggcaggagaa

SEQ ID NO: 268675 - RNA, 20 nt, Human
uugggaccaugaaguuuccc

SEQ ID NO: 268676 - RNA, 18 nt, Human
uuuaaggagacugagaaa

SEQ ID NO: 268677 - RNA, 22 nt, Human
uuuaucccuacuuaaaagcacc

SEQ ID NO: 268678 - RNA, 26 nt, Human
uuucauaauuaaugucaaaaauugcc

SEQ ID NO: 268679 - RNA, 19 nt, Human
uuuuuuuuuuuuuuuuugu

SEQ ID NO: 268680 - RNA, 22 nt, Human
uuuuuuuuuuuuuuuuuugugg

SEQ ID NO: 268681 - RNA, 21 nt, Human
aaaaaaaaugaaacuggaccc

SEQ ID NO: 268682 - RNA, 21 nt, Human
aaaaaauggcaaaacaagccc

SEQ ID NO: 268683 - RNA, 19 nt, Human
aaaaaugaaacuggacccg

SEQ ID NO: 268684 - RNA, 20 nt, Human
aaaacuaguaacauuuauaa

SEQ ID NO: 268685 - RNA, 19 nt, Human
aaacaacaguagguauucc

SEQ ID NO: 268686 - RNA, 20 nt, Human
aaacuacaccacacuugaca

SEQ ID NO: 268687 - RNA, 24 nt, Human
aaacucuauuacucugccaaaaaa

SEQ ID NO: 268688 - RNA, 20 nt, Human
aaagaucuaaccauugaaaa

SEQ ID NO: 268689 - RNA, 20 nt, Human
aaagauugauaaaguugaua

SEQ ID NO: 268690 - RNA, 24 nt, Human
aacaaauacauccaaaaaggguuc

SEQ ID NO: 268691 - RNA, 18 nt, Human
aacaaauacauccaaaac

SEQ ID NO: 268692 - RNA, 18 nt, Human
aacaugaugaaaccccau

SEQ ID NO: 268693 - RNA, 19 nt, Human
aacaugaugaaaccccauc

SEQ ID NO: 268694 - RNA, 22 nt, Human
aacaugaugaaaccccaucccc

SEQ ID NO: 268695 - RNA, 18 nt, Human
aacauggcgaaaccccgc

SEQ ID NO: 268696 - RNA, 20 nt, Human
aacauggcgaaaccccgccu

SEQ ID NO: 268697 - RNA, 21 nt, Human
aacauggcgaaaccccgccuc

SEQ ID NO: 268698 - RNA, 21 nt, Human
aacccaauaaaaaaaauggca

SEQ ID NO: 268699 - RNA, 19 nt, Human
aacugggaaaugacaucug

SEQ ID NO: 268700 - RNA, 18 nt, Human
aagcaacaggccaggcgc

SEQ ID NO: 268701 - RNA, 23 nt, Human
aagcagcagugcuucauaaggac

SEQ ID NO: 268702 - RNA, 21 nt, Human
acaaaagaagauauggacaau

SEQ ID NO: 268703 - RNA, 24 nt, Human
acaaaagaagauauggacaauaua

SEQ ID NO: 268704 - RNA, 20 nt, Human
acaacaguagguauuccaga

SEQ ID NO: 268705 - RNA, 19 nt, Human
acacuccagaacaauagac

SEQ ID NO: 268706 - RNA, 24 nt, Human
acagagcaagacuucaucucaaaa

SEQ ID NO: 268707 - RNA, 24 nt, Human
acagagcgagacccugccucaaaa

SEQ ID NO: 268708 - RNA, 24 nt, Human
acaggccaggcgcaguggcucaca

SEQ ID NO: 268709 - RNA, 28 nt, Human
acaguuaccacacaguacacuccagaac

SEQ ID NO: 268710 - RNA, 20 nt, Human
accacacuugacagcuuugc

SEQ ID NO: 268711 - RNA, 20 nt, Human
accacaguuaccacacagua

SEQ ID NO: 268712 - RNA, 24 nt, Human
accacaguuaccacacaguacacu

SEQ ID NO: 268713 - RNA, 18 nt, Human
acccuguacucuaggcug

SEQ ID NO: 268714 - RNA, 18 nt, Human
acugcacuccagccucgg

SEQ ID NO: 268715 - RNA, 24 nt, Human
acugcacuccagccucggugacag

SEQ ID NO: 268716 - RNA, 26 nt, Human
acugcacuccagccucggugacagag

SEQ ID NO: 268717 - RNA, 18 nt, Human
acugcacuccagccuggg

SEQ ID NO: 268718 - RNA, 19 nt, Human
acugcacuccagccugggc

SEQ ID NO: 268719 - RNA, 21 nt, Human
acugcacuccagccugggcga

SEQ ID NO: 268720 - RNA, 22 nt, Human
acugcacuccagccugggcgac

SEQ ID NO: 268721 - RNA, 24 nt, Human
acugcacuccagccugggcgacag

SEQ ID NO: 268722 - RNA, 26 nt, Human
acugcacuccagccugggcgacagag

SEQ ID NO: 268723 - RNA, 19 nt, Human
acugguccauuucuacaac

SEQ ID NO: 268724 - RNA, 28 nt, Human
acuucaucucaaaaaaaaaaaaaaaaaa

SEQ ID NO: 268725 - RNA, 24 nt, Human
acuugaggucaggaguuugagacc

SEQ ID NO: 268726 - RNA, 18 nt, Human
acuuuguggacugcuuga

SEQ ID NO: 268727 - RNA, 26 nt, Human
agaaaacuucaaaaucucuuucuuaa

SEQ ID NO: 268728 - RNA, 21 nt, Human
agacggagguuacaaugagcc

SEQ ID NO: 268729 - RNA, 24 nt, Human
agacggagguuacaaugagccgag

SEQ ID NO: 268730 - RNA, 26 nt, Human
agacggguggaucacuugaggucagg

SEQ ID NO: 268731 - RNA, 25 nt, Human
agacuccaccaaaaagagcucacaa

SEQ ID NO: 268732 - RNA, 20 nt, Human
agaucagggguuggcaaaug

SEQ ID NO: 268733 - RNA, 23 nt, Human
agcagggcaugguggcgcaugcc

SEQ ID NO: 268734 - RNA, 23 nt, Human
agccaggcgugguggcacaugcc

SEQ ID NO: 268735 - RNA, 21 nt, Human
agcccagcagccaaaucaaaa

SEQ ID NO: 268736 - RNA, 24 nt, Human
agccuggccaacaugaugaaaccc

SEQ ID NO: 268737 - RNA, 22 nt, Human
agccugggcaacauggcgaaac

SEQ ID NO: 268738 - RNA, 24 nt, Human
agccugggcaacauggcgaaaccc

SEQ ID NO: 268739 - RNA, 24 nt, Human
agccugggcgacagagcaagacuu

SEQ ID NO: 268740 - RNA, 20 nt, Human
aggaguuugagaccagccug

SEQ ID NO: 268741 - RNA, 22 nt, Human
aggcaagagaaucacuugaacc

SEQ ID NO: 268742 - RNA, 24 nt, Human
aggcaagagaaucacuugaaccug

SEQ ID NO: 268743 - RNA, 24 nt, Human
aggcgcaguggcucacaccuguaa

SEQ ID NO: 268744 - RNA, 22 nt, Human
aggcgugguggcacaugccugc

SEQ ID NO: 268745 - RNA, 23 nt, Human
aggcgugguggcacaugccugca

SEQ ID NO: 268746 - RNA, 24 nt, Human
aggcugaggcaagagaaucacuug

SEQ ID NO: 268747 - RNA, 24 nt, Human
agguugaggcugcagugagccgag

SEQ ID NO: 268748 - RNA, 20 nt, Human
agguugccaguuugcaaccu

SEQ ID NO: 268749 - RNA, 24 nt, Human
aguagcucacaccuguaaucccag

SEQ ID NO: 268750 - RNA, 22 nt, Human
aguccugcuuuccccauugcac

SEQ ID NO: 268751 - RNA, 24 nt, Human
aguggcucacaccuguaaucccag

SEQ ID NO: 268752 - RNA, 21 nt, Human
auaauggcauuagcuccuuuc

SEQ ID NO: 268753 - RNA, 22 nt, Human
aucccagcacucuaggaggcca

SEQ ID NO: 268754 - RNA, 23 nt, Human
aucgcgccacugcacuccagccu

SEQ ID NO: 268755 - RNA, 20 nt, Human
augccugcagucccagccac

SEQ ID NO: 268756 - RNA, 24 nt, Human
auggcacgacugcacuccagccug

SEQ ID NO: 268757 - RNA, 22 nt, Human
auguucuaggugccaagcacug

SEQ ID NO: 268758 - RNA, 22 nt, Human
auucacacacaguacuuccacc

SEQ ID NO: 268759 - RNA, 21 nt, Human
caaaaaaugcaaaaaauagca

SEQ ID NO: 268760 - RNA, 22 nt, Human
caaaaacuacaccacacuugac

SEQ ID NO: 268761 - RNA, 24 nt, Human
caaaaagagcucacaauuugaaag

SEQ ID NO: 268762 - RNA, 22 nt, Human
caaauuagagguugaacaucca

SEQ ID NO: 268763 - RNA, 25 nt, Human
caacaacaaaggauuaauaaucaga

SEQ ID NO: 268764 - RNA, 25 nt, Human
caacacucagcccaacucucaccau

SEQ ID NO: 268765 - RNA, 27 nt, Human
caacccaauaaaaaaaauggcaaaaca

SEQ ID NO: 268766 - RNA, 24 nt, Human
caagacggguggaucacuugaggu

SEQ ID NO: 268767 - RNA, 26 nt, Human
caagacggguggaucacuugagguca

SEQ ID NO: 268768 - RNA, 21 nt, Human
caagacuucaucucaaaaaaa

SEQ ID NO: 268769 - RNA, 19 nt, Human
caauacaucauuaggagau

SEQ ID NO: 268770 - RNA, 24 nt, Human
caauuugaaagcaagccccauuca

SEQ ID NO: 268771 - RNA, 21 nt, Human
cacaauuugaaagcaagcccc

SEQ ID NO: 268772 - RNA, 22 nt, Human
cacacaguacuuccacggcaca

SEQ ID NO: 268773 - RNA, 19 nt, Human
cacaccuguaaucccagca

SEQ ID NO: 268774 - RNA, 24 nt, Human
cacaccuguaaucccagcacuuug

SEQ ID NO: 268775 - RNA, 18 nt, Human
caccuguaaucccagcac

SEQ ID NO: 268776 - RNA, 18 nt, Human
caccuguaaucccagcac

SEQ ID NO: 268777 - RNA, 19 nt, Human
caccuguaaucccagcacu

SEQ ID NO: 268778 - RNA, 20 nt, Human
caccuguaaucccagcacuc

SEQ ID NO: 268779 - RNA, 24 nt, Human
cacuccagccucggugacagagcg

SEQ ID NO: 268780 - RNA, 23 nt, Human
cacuccagccugggcgacagagc

SEQ ID NO: 268781 - RNA, 19 nt, Human
cacugcacuccagccucgg

SEQ ID NO: 268782 - RNA, 19 nt, Human
cacugcacuccagccucgg

SEQ ID NO: 268783 - RNA, 23 nt, Human
cacugcacuccagccucggugac

SEQ ID NO: 268784 - RNA, 24 nt, Human
cacugcacuccagccucggugaca

SEQ ID NO: 268785 - RNA, 25 nt, Human
cacugcacuccagccucggugacag

SEQ ID NO: 268786 - RNA, 21 nt, Human
cacuucccauguuuuccccug

SEQ ID NO: 268787 - RNA, 23 nt, Human
cacuugaggucaggaguuugaga

SEQ ID NO: 268788 - RNA, 21 nt, Human
cagcacucuaggaggccaaga

SEQ ID NO: 268789 - RNA, 19 nt, Human
cagcagugcuucauaagga

SEQ ID NO: 268790 - RNA, 21 nt, Human
cagcagugcuucauaaggacc

SEQ ID NO: 268791 - RNA, 20 nt, Human
cagccaaaucaaaauucugc

SEQ ID NO: 268792 - RNA, 24 nt, Human
cagccaaaucaaaauucugcuuaa

SEQ ID NO: 268793 - RNA, 22 nt, Human
cagccaggcgugguggcacaug

SEQ ID NO: 268794 - RNA, 23 nt, Human
caggcugggcacaguagcucaca

SEQ ID NO: 268795 - RNA, 19 nt, Human
cagguacacagagcauggg

SEQ ID NO: 268796 - RNA, 20 nt, Human
caggugcugaggaaucagaa

SEQ ID NO: 268797 - RNA, 20 nt, Human
caucaucuucuaguccagag

SEQ ID NO: 268798 - RNA, 20 nt, Human
ccacacuugacagcuuugca

SEQ ID NO: 268799 - RNA, 21 nt, Human
ccacuaaaaacacaaaaauca

SEQ ID NO: 268800 - RNA, 20 nt, Human
ccacugcacuccagccucgg

SEQ ID NO: 268801 - RNA, 20 nt, Human
ccacugcacuccagccucgg

SEQ ID NO: 268802 - RNA, 21 nt, Human
ccacugcacuccagccucggu

SEQ ID NO: 268803 - RNA, 24 nt, Human
ccacugcacuccagccucggugac

SEQ ID NO: 268804 - RNA, 22 nt, Human
ccagcccaaagggcagagccaa

SEQ ID NO: 268805 - RNA, 20 nt, Human
ccauugcacuuuaugaaaca

SEQ ID NO: 268806 - RNA, 25 nt, Human
cccaauaaaaaaaauggcaaaacaa

SEQ ID NO: 268807 - RNA, 21 nt, Human
cccauccccacuaaaaacaca

SEQ ID NO: 268808 - RNA, 21 nt, Human
cccgccucuacaaaaaaugca

SEQ ID NO: 268809 - RNA, 25 nt, Human
ccgccucuacaaaaaaugcaaaaag

SEQ ID NO: 268810 - RNA, 24 nt, Human
ccuggccaacaugaugaaacccca

SEQ ID NO: 268811 - RNA, 23 nt, Human
ccugggcaacauggcgaaacccc

SEQ ID NO: 268812 - RNA, 24 nt, Human
ccugggcaacauggcgaaaccccg

SEQ ID NO: 268813 - RNA, 21 nt, Human
ccugggcgacagagcaagacu

SEQ ID NO: 268814 - RNA, 19 nt, Human
ccuuaaagacugaggcgca

SEQ ID NO: 268815 - RNA, 22 nt, Human
ccuuacacuacacauaagaauc

SEQ ID NO: 268816 - RNA, 24 nt, Human
cgacugcacuccagccugggcgac

SEQ ID NO: 268817 - RNA, 26 nt, Human
cgccacugcacuccagccucggugac

SEQ ID NO: 268818 - RNA, 24 nt, Human
cggguggaucacuugaggucagga

SEQ ID NO: 268819 - RNA, 18 nt, Human
cuaaaguacagcuaauau

SEQ ID NO: 268820 - RNA, 22 nt, Human
cuaaggcagccccuaaaacuaa

SEQ ID NO: 268821 - RNA, 18 nt, Human
cucaaaaaaaaaaaaaaa

SEQ ID NO: 268822 - RNA, 18 nt, Human
cucaaaaaaaaaaaaaaa

SEQ ID NO: 268823 - RNA, 23 nt, Human
cucacaaaacccuaugagauuac

SEQ ID NO: 268824 - RNA, 22 nt, Human
cucacaccuguaaucccagcac

SEQ ID NO: 268825 - RNA, 23 nt, Human
cucacaccuguaaucccagcacu

SEQ ID NO: 268826 - RNA, 24 nt, Human
cucacaccuguaaucccagcacuc

SEQ ID NO: 268827 - RNA, 24 nt, Human
cucacaccuguaaucccagcacuu

SEQ ID NO: 268828 - RNA, 19 nt, Human
cugcagguacacagagcag

SEQ ID NO: 268829 - RNA, 22 nt, Human
cugcagugagccgagaucgcgc

SEQ ID NO: 268830 - RNA, 24 nt, Human
cugucuuuuaugucugcugacacc

SEQ ID NO: 268831 - RNA, 18 nt, Human
cuuaagaacucucugacc

SEQ ID NO: 268832 - RNA, 21 nt, Human
cuugaacuucaacucgcaaca

SEQ ID NO: 268833 - RNA, 18 nt, Human
gaaaugugaaaacuagua

SEQ ID NO: 268834 - RNA, 18 nt, Human
gacaacccaauaaaaaaa

SEQ ID NO: 268835 - RNA, 22 nt, Human
gacagcuuugcaaugguuucca

SEQ ID NO: 268836 - RNA, 21 nt, Human
gacccgaccuuacacuacaca

SEQ ID NO: 268837 - RNA, 21 nt, Human
gacggguggaucacuugaggu

SEQ ID NO: 268838 - RNA, 24 nt, Human
gacugcacuccagccugggcgaca

SEQ ID NO: 268839 - RNA, 23 nt, Human
gagaaucacuugaaccugggaga

SEQ ID NO: 268840 - RNA, 20 nt, Human
gagaccagccuggccaacau

SEQ ID NO: 268841 - RNA, 23 nt, Human
gagaucgcgccacugcacuccag

SEQ ID NO: 268842 - RNA, 24 nt, Human
gaggcugcagugagccgagaucgg

SEQ ID NO: 268843 - RNA, 23 nt, Human
gaggugggaggguugcuugagcc

SEQ ID NO: 268844 - RNA, 24 nt, Human
gaggugggaggguugcuugagccc

SEQ ID NO: 268845 - RNA, 22 nt, Human
gauaaucuaaggcagccccuaa

SEQ ID NO: 268846 - RNA, 24 nt, Human
gaucacuugaggucaggaguuuga

SEQ ID NO: 268847 - RNA, 23 nt, Human
gcaagagaaucacuugaaccugg

SEQ ID NO: 268848 - RNA, 24 nt, Human
gcacuccagccucggugacagagc

SEQ ID NO: 268849 - RNA, 24 nt, Human
gcacuccagccugggcgacagagc

SEQ ID NO: 268850 - RNA, 23 nt, Human
gcaugggaggugggaggguugcu

SEQ ID NO: 268851 - RNA, 22 nt, Human
gccaacaugaugaaaccccauc

SEQ ID NO: 268852 - RNA, 24 nt, Human
gcccaggagguugaggcugcagug

SEQ ID NO: 268853 - RNA, 20 nt, Human
gccgagaucgcgccacugca

SEQ ID NO: 268854 - RNA, 18 nt, Human
gcgcaguggcucacaccu

SEQ ID NO: 268855 - RNA, 21 nt, Human
gcugcagugagccgagaucgc

SEQ ID NO: 268856 - RNA, 24 nt, Human
gcuugagcccaggagguugaggcu

SEQ ID NO: 268857 - RNA, 18 nt, Human
ggaggugggaggguugcu

SEQ ID NO: 268858 - RNA, 22 nt, Human
ggaucacuugaggucaggaguu

SEQ ID NO: 268859 - RNA, 19 nt, Human
ggcaaaacaagcccgagca

SEQ ID NO: 268860 - RNA, 22 nt, Human
gggaggguugcuugagcccagg

SEQ ID NO: 268861 - RNA, 24 nt, Human
gggcacaguagcucacaccuguaa

SEQ ID NO: 268862 - RNA, 19 nt, Human
ggucaggaguuugagacca

SEQ ID NO: 268863 - RNA, 24 nt, Human
guaauccagcccaaagggcagagc

SEQ ID NO: 268864 - RNA, 21 nt, Human
guuccagacuagccugggcaa

SEQ ID NO: 268865 - RNA, 21 nt, Human
uaaaaacacaaaaaucagcca

SEQ ID NO: 268866 - RNA, 25 nt, Human
uaaaagacaacccaauaaaaaaaaa

SEQ ID NO: 268867 - RNA, 23 nt, Human
uaaaauaagcaacaggccaggcg

SEQ ID NO: 268868 - RNA, 23 nt, Human
uaaaauaagcaacaggccaggcg

SEQ ID NO: 268869 - RNA, 26 nt, Human
uaaccaaaaacuacaccaaccccggg

SEQ ID NO: 268870 - RNA, 19 nt, Human
uaaccaaaaacuacaccac

SEQ ID NO: 268871 - RNA, 21 nt, Human
uaaggcagccccuaaaacuaa

SEQ ID NO: 268872 - RNA, 18 nt, Human
uaauaucuaccaacaaca

SEQ ID NO: 268873 - RNA, 21 nt, Human
uacacuccagaacaauagacc

SEQ ID NO: 268874 - RNA, 24 nt, Human
uacauagggaaaaaaaaugaaacu

SEQ ID NO: 268875 - RNA, 24 nt, Human
uaccacaaaagaagauauggacaa

SEQ ID NO: 268876 - RNA, 18 nt, Human
uaccacacaguacacucc

SEQ ID NO: 268877 - RNA, 25 nt, Human
uacucaacucugcuauugguaccac

SEQ ID NO: 268878 - RNA, 21 nt, Human
uacuuccacggcacaauacau

SEQ ID NO: 268879 - RNA, 22 nt, Human
uagcucacaccuguaaucccag

SEQ ID NO: 268880 - RNA, 24 nt, Human
uagcucacaccuguaaucccagca

SEQ ID NO: 268881 - RNA, 22 nt, Human
uagcuccuuggaagcaucuccu

SEQ ID NO: 268882 - RNA, 24 nt, Human
uaggaggccaagacggguggauca

SEQ ID NO: 268883 - RNA, 22 nt, Human
uauaaagaauaauugcaggcug

SEQ ID NO: 268884 - RNA, 24 nt, Human
uauacauagggaaaaaaaaugaaa

SEQ ID NO: 268885 - RNA, 21 nt, Human
uaucaagucgcaguccugcuu

SEQ ID NO: 268886 - RNA, 23 nt, Human
ucacgcucuguugccugggcugg

SEQ ID NO: 268887 - RNA, 24 nt, Human
ucacgcucuguugccugggcugga

SEQ ID NO: 268888 - RNA, 18 nt, Human
ucacuugaaccugggaga

SEQ ID NO: 268889 - RNA, 25 nt, Human
ucacuugaaccugggagacggaggu

SEQ ID NO: 268890 - RNA, 19 nt, Human
ucacuugaggucaggaguu

SEQ ID NO: 268891 - RNA, 18 nt, Human
ucagcaagcagcagugcu

SEQ ID NO: 268892 - RNA, 23 nt, Human
ucagccaggcgugguggcacaug

SEQ ID NO: 268893 - RNA, 22 nt, Human
ucaucucaaaaaaaaaaaaaaa

SEQ ID NO: 268894 - RNA, 22 nt, Human
uccaacacucaaacacauagau

SEQ ID NO: 268895 - RNA, 23 nt, Human
uccaacacucaaacacauagauc

SEQ ID NO: 268896 - RNA, 26 nt, Human
uccacggcacaauacaucauuaggag

SEQ ID NO: 268897 - RNA, 23 nt, Human
uccagaauauaaagaauaauugc

SEQ ID NO: 268898 - RNA, 23 nt, Human
uccagccucggugacagagcgag

SEQ ID NO: 268899 - RNA, 24 nt, Human
uccagccucggugacagagcgaga

SEQ ID NO: 268900 - RNA, 24 nt, Human
uccagccugggcgacagagcaaga

SEQ ID NO: 268901 - RNA, 18 nt, Human
uccaucucugagucuucc

SEQ ID NO: 268902 - RNA, 18 nt, Human
ucccagccacuugggagg

SEQ ID NO: 268903 - RNA, 22 nt, Human
ucucugucacgacuacucaacu

SEQ ID NO: 268904 - RNA, 23 nt, Human
ucugccaaaaaaaccuuuucacc

SEQ ID NO: 268905 - RNA, 25 nt, Human
ucugccaaaaaaaccuuuucacccu

SEQ ID NO: 268906 - RNA, 22 nt, Human
ucuguaauaucuaccaacaaca

SEQ ID NO: 268907 - RNA, 21 nt, Human
ucuguaccaggugcugaggaa

SEQ ID NO: 268908 - RNA, 23 nt, Human
ucuuaauuuuuaucauuuaucca

SEQ ID NO: 268909 - RNA, 21 nt, Human
ugaaaaccaaauuaauuuggc

SEQ ID NO: 268910 - RNA, 19 nt, Human
ugaaaccccauccccacua

SEQ ID NO: 268911 - RNA, 22 nt, Human
ugaaaccccauccccacuaaaa

SEQ ID NO: 268912 - RNA, 20 nt, Human
ugacauagauaguugugcuu

SEQ ID NO: 268913 - RNA, 18 nt, Human
ugaccacucucagaaaag

SEQ ID NO: 268914 - RNA, 18 nt, Human
ugagaagauugcuuuugc

SEQ ID NO: 268915 - RNA, 23 nt, Human
ugagaccagccuggccaacauga

SEQ ID NO: 268916 - RNA, 22 nt, Human
ugagacggagucacgcucuguu

SEQ ID NO: 268917 - RNA, 22 nt, Human
ugagcccaggagguugaggcug

SEQ ID NO: 268918 - RNA, 21 nt, Human
ugagccccugcucuguaccag

SEQ ID NO: 268919 - RNA, 22 nt, Human
ugagccgagaucgcgccacugc

SEQ ID NO: 268920 - RNA, 18 nt, Human
ugaggcaagagaaucacu

SEQ ID NO: 268921 - RNA, 20 nt, Human
ugaggcaagagaaucacuug

SEQ ID NO: 268922 - RNA, 24 nt, Human
ugaggcaagagaaucacuugaacc

SEQ ID NO: 268923 - RNA, 24 nt, Human
ugaggcaagagaaucacuugaacc

SEQ ID NO: 268924 - RNA, 18 nt, Human
ugaggucaggaguuugag

SEQ ID NO: 268925 - RNA, 20 nt, Human
ugccaaaaaaaccuuuucac

SEQ ID NO: 268926 - RNA, 20 nt, Human
ugccaucacugacugauaua

SEQ ID NO: 268927 - RNA, 21 nt, Human
ugccaucacugacugauauaa

SEQ ID NO: 268928 - RNA, 22 nt, Human
ugcccccacuacugcuauucac

SEQ ID NO: 268929 - RNA, 23 nt, Human
ugccugcagucccagccacuugg

SEQ ID NO: 268930 - RNA, 24 nt, Human
ugccugcagucccagccacuuggg

SEQ ID NO: 268931 - RNA, 23 nt, Human
ugcuacagaaguucucugcaaaa

SEQ ID NO: 268932 - RNA, 18 nt, Human
ugcugacaccucugauuu

SEQ ID NO: 268933 - RNA, 24 nt, Human
ugcugcagguacacagagcauggg

SEQ ID NO: 268934 - RNA, 24 nt, Human
ugcuguugacagaucuuccaauuu

SEQ ID NO: 268935 - RNA, 24 nt, Human
uggaauccuccaaaauacuaucac

SEQ ID NO: 268936 - RNA, 24 nt, Human
uggacugcuugagcucaggaguuc

SEQ ID NO: 268937 - RNA, 23 nt, Human
uggaucacuugaggucaggaguu

SEQ ID NO: 268938 - RNA, 24 nt, Human
uggaucacuugaggucaggaguuu

SEQ ID NO: 268939 - RNA, 26 nt, Human
uggaucacuugaggucaggaguuuga

SEQ ID NO: 268940 - RNA, 21 nt, Human
uggcaaaacaagcccgagcau

SEQ ID NO: 268941 - RNA, 24 nt, Human
uggcaaauguuuuuguaaagagua

SEQ ID NO: 268942 - RNA, 21 nt, Human
uggcucacaccuguaauccca

SEQ ID NO: 268943 - RNA, 22 nt, Human
uggcucacaccuguaaucccag

SEQ ID NO: 268944 - RNA, 24 nt, Human
uggcucacaccuguaaucccagca

SEQ ID NO: 268945 - RNA, 20 nt, Human
ugggaggcugaggcaagaga

SEQ ID NO: 268946 - RNA, 24 nt, Human
ugggaggcugaggcaagagaauca

SEQ ID NO: 268947 - RNA, 24 nt, Human
ugguggcacaugccugcaguccca

SEQ ID NO: 268948 - RNA, 24 nt, Human
ugguggcgcaugccuguggucuca

SEQ ID NO: 268949 - RNA, 23 nt, Human
uuaaaauaagcaacaggccaggc

SEQ ID NO: 268950 - RNA, 23 nt, Human
uuaaagaucuaaccauugaaaac

SEQ ID NO: 268951 - RNA, 23 nt, Human
uuauccuuaaagacugaggcgca

SEQ ID NO: 268952 - RNA, 24 nt, Human
uucacugguccauuucuacaacaa

SEQ ID NO: 268953 - RNA, 26 nt, Human
uugauacuaaaauucagaacuuuuua

SEQ ID NO: 268954 - RNA, 18 nt, Human
uugcuugagcccaggagg

SEQ ID NO: 268955 - RNA, 24 nt, Human
uugcuugagcccaggagguugagg

SEQ ID NO: 268956 - RNA, 27 nt, Human
uuggcaaauguuuuuguaaggagaagc

SEQ ID NO: 268957 - RNA, 25 nt, Human
uugggaggcugaggcaagagaauca

SEQ ID NO: 268958 - RNA, 23 nt, Human
aaaggagagcugccccugccccu

SEQ ID NO: 268959 - RNA, 20 nt, Human
aagccaauuccagaugaagc

SEQ ID NO: 268960 - RNA, 18 nt, Human
acaccagccugggcaaca

SEQ ID NO: 268961 - RNA, 24 nt, Human
accucgucucuacaaaaaauacaa

SEQ ID NO: 268962 - RNA, 22 nt, Human
acucagaaggcugaaccugcag

SEQ ID NO: 268963 - RNA, 24 nt, Human
acugagcccaggaguuugacacca

SEQ ID NO: 268964 - RNA, 18 nt, Human
acugcacuccagccuggg

SEQ ID NO: 268965 - RNA, 19 nt, Human
acugcacuccagccugggc

SEQ ID NO: 268966 - RNA, 20 nt, Human
acugcacuccagccugggcg

SEQ ID NO: 268967 - RNA, 21 nt, Human
acugcacuccagccugggcgg

SEQ ID NO: 268968 - RNA, 23 nt, Human
acugcacuccagccugggcggua

SEQ ID NO: 268969 - RNA, 24 nt, Human
agacugagacagaaggauugcuug

SEQ ID NO: 268970 - RNA, 22 nt, Human
agagcugccccugccccugccc

SEQ ID NO: 268971 - RNA, 18 nt, Human
agccugggcaacauggug

SEQ ID NO: 268972 - RNA, 23 nt, Human
agccugggcaacauggugggacc

SEQ ID NO: 268973 - RNA, 23 nt, Human
agccugggcaacauggugggacc

SEQ ID NO: 268974 - RNA, 24 nt, Human
agccugggcaacauggugggaccu

SEQ ID NO: 268975 - RNA, 22 nt, Human
agcugccccugccccugccccc

SEQ ID NO: 268976 - RNA, 22 nt, Human
aggaaaguucuagaaaaagucu

SEQ ID NO: 268977 - RNA, 22 nt, Human
aggaagacaugccaaaugucuc

SEQ ID NO: 268978 - RNA, 24 nt, Human
aggcagcucugacguacgcagccc

SEQ ID NO: 268979 - RNA, 22 nt, Human
aggguguuaagccaauuccaga

SEQ ID NO: 268980 - RNA, 24 nt, Human
aguagcucacgccuguaauuccag

SEQ ID NO: 268981 - RNA, 24 nt, Human
agugaaaaagauaauucaaaagga

SEQ ID NO: 268982 - RNA, 24 nt, Human
aucauggcacugcacuccagccug

SEQ ID NO: 268983 - RNA, 19 nt, Human
auugcuugaacucagaagg

SEQ ID NO: 268984 - RNA, 24 nt, Human
caacauggugggaccucgucucua

SEQ ID NO: 268985 - RNA, 23 nt, Human
cacgccuguaauuccagcacuug

SEQ ID NO: 268986 - RNA, 18 nt, Human
cacuccagccugggcggu

SEQ ID NO: 268987 - RNA, 19 nt, Human
cacugcacuccagccuggg

SEQ ID NO: 268988 - RNA, 19 nt, Human
cacugcacuccagccuggg

SEQ ID NO: 268989 - RNA, 20 nt, Human
cacugcacuccagccugggc

SEQ ID NO: 268990 - RNA, 20 nt, Human
cacugcacuccagccugggc

SEQ ID NO: 268991 - RNA, 21 nt, Human
cacugcacuccagccugggcg

SEQ ID NO: 268992 - RNA, 23 nt, Human
cacugcacuccagccugggcggu

SEQ ID NO: 268993 - RNA, 24 nt, Human
cacugcacuccagccugggcggua

SEQ ID NO: 268994 - RNA, 22 nt, Human
cagaaggcugaaccugcaguga

SEQ ID NO: 268995 - RNA, 22 nt, Human
cagcccggcaucgggucuggcg

SEQ ID NO: 268996 - RNA, 22 nt, Human
cagccuccgcuuggcuucuuuc

SEQ ID NO: 268997 - RNA, 21 nt, Human
cagcucugacguacgcagccc

SEQ ID NO: 268998 - RNA, 18 nt, Human
caucgggucuggcgggac

SEQ ID NO: 268999 - RNA, 22 nt, Human
caucugaauauuuugaccacuc

SEQ ID NO: 269000 - RNA, 18 nt, Human
cccaccuaaagccccagc

SEQ ID NO: 269001 - RNA, 18 nt, Human
cccccgcgcuucuccagc

SEQ ID NO: 269002 - RNA, 20 nt, Human
cccccgcgcuucuccagccc

SEQ ID NO: 269003 - RNA, 21 nt, Human
ccccgaagagcuucugucgcc

SEQ ID NO: 269004 - RNA, 19 nt, Human
ccccugcccccgccuaucc

SEQ ID NO: 269005 - RNA, 23 nt, Human
ccccuuggccacugaucccccga

SEQ ID NO: 269006 - RNA, 19 nt, Human
cccgcaagcccuggaugag

SEQ ID NO: 269007 - RNA, 24 nt, Human
ccgaggggccacgggaaggggcgg

SEQ ID NO: 269008 - RNA, 21 nt, Human
ccugggcaacauggugggacc

SEQ ID NO: 269009 - RNA, 23 nt, Human
ccugggcgguaaaagugagaucc

SEQ ID NO: 269010 - RNA, 25 nt, Human
cgaagagcuucugucgccgcucuag

SEQ ID NO: 269011 - RNA, 22 nt, Human
cgccgcucuaggguaaaggaga

SEQ ID NO: 269012 - RNA, 23 nt, Human
cgccuguaauuccagcacuuggg

SEQ ID NO: 269013 - RNA, 20 nt, Human
cggaggccgcgcgcguccgg

SEQ ID NO: 269014 - RNA, 18 nt, Human
cggcccccgcgcuucucc

SEQ ID NO: 269015 - RNA, 24 nt, Human
cgguaaaagugagauccugucucc

SEQ ID NO: 269016 - RNA, 19 nt, Human
cggugucacccccaucgcg

SEQ ID NO: 269017 - RNA, 25 nt, Human
cgguguggcagugcccaccuaaagc

SEQ ID NO: 269018 - RNA, 18 nt, Human
cuaaagccccagcuacug

SEQ ID NO: 269019 - RNA, 18 nt, Human
cuagaaaaagucuaaaua

SEQ ID NO: 269020 - RNA, 24 nt, Human
cucacgccuguaauuccagcacuu

SEQ ID NO: 269021 - RNA, 23 nt, Human
cuccuauauuacaaaauauauug

SEQ ID NO: 269022 - RNA, 18 nt, Human
cugccccugccccugccc

SEQ ID NO: 269023 - RNA, 19 nt, Human
cugccccugccccugcccc

SEQ ID NO: 269024 - RNA, 22 nt, Human
cuggagacuuaaaacaggccuc

SEQ ID NO: 269025 - RNA, 19 nt, Human
cugggagcggcggaggccg

SEQ ID NO: 269026 - RNA, 21 nt, Human
gaaaaagauaauucaaaagga

SEQ ID NO: 269027 - RNA, 18 nt, Human
gacaccagccugggcaac

SEQ ID NO: 269028 - RNA, 20 nt, Human
gagcugccccugccccugcc

SEQ ID NO: 269029 - RNA, 21 nt, Human
gcacugcacuccagccugggc

SEQ ID NO: 269030 - RNA, 24 nt, Human
gcacugcacuccagccugggcggu

SEQ ID NO: 269031 - RNA, 19 nt, Human
gcagccuccgcuuggcuuc

SEQ ID NO: 269032 - RNA, 22 nt, Human
gcccaggaguuugacaccagcc

SEQ ID NO: 269033 - RNA, 24 nt, Human
gcgguaaaagugagauccugucuc

SEQ ID NO: 269034 - RNA, 21 nt, Human
gggacugggagcggcggaggc

SEQ ID NO: 269035 - RNA, 24 nt, Human
gggcacaguagcucacgccuguaa

SEQ ID NO: 269036 - RNA, 22 nt, Human
gggucgcgccugccgggccucc

SEQ ID NO: 269037 - RNA, 21 nt, Human
gggucuggcgggacugggagc

SEQ ID NO: 269038 - RNA, 21 nt, Human
uaaagccccagcuacugagga

SEQ ID NO: 269039 - RNA, 24 nt, Human
uaaggcugggcacaguagcucacg

SEQ ID NO: 269040 - RNA, 21 nt, Human
uagaaaaagucuaaauaaaug

SEQ ID NO: 269041 - RNA, 24 nt, Human
uagcucacgccuguaauuccagca

SEQ ID NO: 269042 - RNA, 22 nt, Human
ucacgccuguaauuccagcacu

SEQ ID NO: 269043 - RNA, 20 nt, Human
ucaucugaauauuuugaccc

SEQ ID NO: 269044 - RNA, 25 nt, Human
uccagccugggcgguaaaagugaga

SEQ ID NO: 269045 - RNA, 23 nt, Human
ugagacagaaggauugcuugaac

SEQ ID NO: 269046 - RNA, 19 nt, Human
ugagauggggggacugacu

SEQ ID NO: 269047 - RNA, 21 nt, Human
ugagauggggggacugacuga

SEQ ID NO: 269048 - RNA, 24 nt, Human
ugagauggggggacugacugagcc

SEQ ID NO: 269049 - RNA, 23 nt, Human
ugagcccaggaguuugacaccag

SEQ ID NO: 269050 - RNA, 19 nt, Human
ugaucuuuuguccucgcac

SEQ ID NO: 269051 - RNA, 19 nt, Human
ugcccaccuaaagccccag

SEQ ID NO: 269052 - RNA, 23 nt, Human
uggcagugcccaccuaaagcccc

SEQ ID NO: 269053 - RNA, 23 nt, Human
uggcgggacugggagcggcggag

SEQ ID NO: 269054 - RNA, 21 nt, Human
uggggagggugagaugggggg

SEQ ID NO: 269055 - RNA, 26 nt, Human
ugucacaauggaaauuuuacaaacac

SEQ ID NO: 269056 - RNA, 18 nt, Human
uguccgcccccuuggcca

SEQ ID NO: 269057 - RNA, 23 nt, Human
uucggaggaauccgccgugcaaa

SEQ ID NO: 269058 - RNA, 26 nt, Human
uuuuuugcuuucauugccauuuuaau

SEQ ID NO: 269059 - RNA, 23 nt, Human
uuuuuuuuuuuuuuuugcuuuca

SEQ ID NO: 269060 - RNA, 23 nt, Human
uuuuuuuuuuuuuuuuuugcuuu

SEQ ID NO: 269061 - RNA, 20 nt, Human
uuuuuuuuuuuuuuuuuugg

SEQ ID NO: 269062 - RNA, 21 nt, Human
aaaauauacccuguaaaccaa

SEQ ID NO: 269063 - RNA, 20 nt, Human
acagcagcaguaauacuggg

SEQ ID NO: 269064 - RNA, 21 nt, Human
acccuguaaaccaacacauca

SEQ ID NO: 269065 - RNA, 23 nt, Human
acucaggggcuccuuccuugguu

SEQ ID NO: 269066 - RNA, 21 nt, Human
agaacgacguguguaaaugac

SEQ ID NO: 269067 - RNA, 23 nt, Human
agaauaccaccacccugcgcaaa

SEQ ID NO: 269068 - RNA, 24 nt, Human
aggcaguggcguggaggugcgugg

SEQ ID NO: 269069 - RNA, 23 nt, Human
aggcggagggagggcgcgggggc

SEQ ID NO: 269070 - RNA, 19 nt, Human
agggagggaggacacagcg

SEQ ID NO: 269071 - RNA, 21 nt, Human
agggagggaggacacagcggg

SEQ ID NO: 269072 - RNA, 27 nt, Human
agguaucaaaaauauacccuguaaacc

SEQ ID NO: 269073 - RNA, 19 nt, Human
agucuguggggaccggaac

SEQ ID NO: 269074 - RNA, 21 nt, Human
agucuguggggaccggaacga

SEQ ID NO: 269075 - RNA, 25 nt, Human
caaaagcacagcagcaguuggagac

SEQ ID NO: 269076 - RNA, 20 nt, Human
caaauggcggccacagaaua

SEQ ID NO: 269077 - RNA, 23 nt, Human
caacacaucauuuacaucugccu

SEQ ID NO: 269078 - RNA, 20 nt, Human
caccgcccgcccccccccgc

SEQ ID NO: 269079 - RNA, 20 nt, Human
cacugggggcuggacagggc

SEQ ID NO: 269080 - RNA, 23 nt, Human
ccaaggaagggagggagggagga

SEQ ID NO: 269081 - RNA, 18 nt, Human
ccagcaaucucguuggcu

SEQ ID NO: 269082 - RNA, 21 nt, Human
ccccaggccgcaccuggcccu

SEQ ID NO: 269083 - RNA, 21 nt, Human
cccccaggccgcaccuggccc

SEQ ID NO: 269084 - RNA, 23 nt, Human
cccccaggccgcaccuggcccuu

SEQ ID NO: 269085 - RNA, 20 nt, Human
ccccggccccuuccccuccc

SEQ ID NO: 269086 - RNA, 22 nt, Human
cccggccccuuccccucccuuc

SEQ ID NO: 269087 - RNA, 20 nt, Human
cccugcgcaaauggcggcca

SEQ ID NO: 269088 - RNA, 20 nt, Human
ccgcccgcccccccccgccc

SEQ ID NO: 269089 - RNA, 23 nt, Human
ccggccccuuccccucccuuccc

SEQ ID NO: 269090 - RNA, 20 nt, Human
ccgugcccccuccccggccc

SEQ ID NO: 269091 - RNA, 25 nt, Human
ccucuugaacgguaagcagagauug

SEQ ID NO: 269092 - RNA, 20 nt, Human
ccugacaccgcccgcccccc

SEQ ID NO: 269093 - RNA, 22 nt, Human
ccuggcccuuuuguccgcccac

SEQ ID NO: 269094 - RNA, 24 nt, Human
ccuguggcucgcugggaccggggc

SEQ ID NO: 269095 - RNA, 21 nt, Human
cgcugggaccugacaccgccc

SEQ ID NO: 269096 - RNA, 23 nt, Human
cguaaaacaucugaauuaauuca

SEQ ID NO: 269097 - RNA, 18 nt, Human
cuccugcagggccguucc

SEQ ID NO: 269098 - RNA, 19 nt, Human
cuggggcagucugugggga

SEQ ID NO: 269099 - RNA, 23 nt, Human
cuucccaccgcugcggcaacgau

SEQ ID NO: 269100 - RNA, 22 nt, Human
cuucccgagcaccagguaaaca

SEQ ID NO: 269101 - RNA, 24 nt, Human
gaaaaaaacaguccaguccucgga

SEQ ID NO: 269102 - RNA, 18 nt, Human
gaagggagggagggagga

SEQ ID NO: 269103 - RNA, 24 nt, Human
gaagggagggagggaggacacagc

SEQ ID NO: 269104 - RNA, 27 nt, Human
gaggcaguggcguggaggucgagucuc

SEQ ID NO: 269105 - RNA, 21 nt, Human
gaggugcguggucauccugcu

SEQ ID NO: 269106 - RNA, 20 nt, Human
gagucuuaguuaaggcuuua

SEQ ID NO: 269107 - RNA, 20 nt, Human
gcccuggccgccugugugug

SEQ ID NO: 269108 - RNA, 19 nt, Human
ggagggagggaggacacag

SEQ ID NO: 269109 - RNA, 21 nt, Human
ggccacagaauacgcaucgaa

SEQ ID NO: 269110 - RNA, 18 nt, Human
gggaccugacaccgcccg

SEQ ID NO: 269111 - RNA, 20 nt, Human
gggaugggaggcggagggag

SEQ ID NO: 269112 - RNA, 22 nt, Human
gguaagcagagaucaaaagcac

SEQ ID NO: 269113 - RNA, 18 nt, Human
gucccuggccgcccuggc

SEQ ID NO: 269114 - RNA, 18 nt, Human
guguguggcugccacacg

SEQ ID NO: 269115 - RNA, 18 nt, Human
uaagcagagaucaaaagc

SEQ ID NO: 269116 - RNA, 19 nt, Human
uacuggguaaguccuuccu

SEQ ID NO: 269117 - RNA, 22 nt, Human
ucaggggcuccuuccuugguug

SEQ ID NO: 269118 - RNA, 20 nt, Human
uccagagcgcuaagcgggau

SEQ ID NO: 269119 - RNA, 24 nt, Human
uccagcaaucucguuggcuggggc

SEQ ID NO: 269120 - RNA, 19 nt, Human
uccccgcccccuugguccu

SEQ ID NO: 269121 - RNA, 21 nt, Human
uccccgcccccuugguccugc

SEQ ID NO: 269122 - RNA, 24 nt, Human
uccccucccuucccgagcaccagg

SEQ ID NO: 269123 - RNA, 19 nt, Human
ucccuggccgcccuggccg

SEQ ID NO: 269124 - RNA, 21 nt, Human
uccuugguugggggagucggc

SEQ ID NO: 269125 - RNA, 19 nt, Human
ucuuaguuaaggcuuuaga

SEQ ID NO: 269126 - RNA, 21 nt, Human
ugaaaaaaacaguccaguccu

SEQ ID NO: 269127 - RNA, 23 nt, Human
ugaacgguaagcagagaucaaaa

SEQ ID NO: 269128 - RNA, 22 nt, Human
ugacgagcaguccccgcccccu

SEQ ID NO: 269129 - RNA, 18 nt, Human
ugacuugguuuccagcaa

SEQ ID NO: 269130 - RNA, 26 nt, Human
ugacuugguuuccagcaaucucgacu

SEQ ID NO: 269131 - RNA, 21 nt, Human
ugcacagggccagcccggggc

SEQ ID NO: 269132 - RNA, 18 nt, Human
uggcguggaggugcgugg

SEQ ID NO: 269133 - RNA, 19 nt, Human
uggcuggggcagucugugg

SEQ ID NO: 269134 - RNA, 22 nt, Human
uggcuggggcagucugugggga

SEQ ID NO: 269135 - RNA, 21 nt, Human
uguguaaaugacagaauacca

SEQ ID NO: 269136 - RNA, 23 nt, Human
uuccuugguugggggagucggca

SEQ ID NO: 269137 - RNA, 23 nt, Human
uuggcuggggcagucugugggga

SEQ ID NO: 269138 - RNA, 21 nt, Human
uugguuccaaaugcauucggg

SEQ ID NO: 269139 - RNA, 19 nt, Human
uugguugggggagucggca

SEQ ID NO: 269140 - RNA, 19 nt, Human
uugguugggggagucggca

SEQ ID NO: 269141 - RNA, 24 nt, Human
uuugguuccaaaugcauucggggg

SEQ ID NO: 269142 - RNA, 18 nt, Human
uuuuuuuuuuuuuuuuug

SEQ ID NO: 269143 - RNA, 22 nt, Human
uuuuuuuuuuuuuuuuuuuggg

SEQ ID NO: 269144 - RNA, 21 nt, Human
aaaaagaauaaaggaaaaaga

SEQ ID NO: 269145 - RNA, 22 nt, Human
aaaaagacaaaaacaaaaauag

SEQ ID NO: 269146 - RNA, 18 nt, Human
aaacaggagcaagaagcu

SEQ ID NO: 269147 - RNA, 22 nt, Human
aaacaggagcaagaagcuucua

SEQ ID NO: 269148 - RNA, 22 nt, Human
aagaagcuucuauuuguaaucc

SEQ ID NO: 269149 - RNA, 19 nt, Human
aaggaaaaagacaaaaaca

SEQ ID NO: 269150 - RNA, 21 nt, Human
acacagggagcuguuuuauuu

SEQ ID NO: 269151 - RNA, 21 nt, Human
acagggcaggaaggaaaaagu

SEQ ID NO: 269152 - RNA, 23 nt, Human
acguggauaaccccugugucucc

SEQ ID NO: 269153 - RNA, 20 nt, Human
acugagcacugugggcugga

SEQ ID NO: 269154 - RNA, 21 nt, Human
acugcugagcuggcaagaaaa

SEQ ID NO: 269155 - RNA, 18 nt, Human
agaaagacagaaggcgaa

SEQ ID NO: 269156 - RNA, 20 nt, Human
agacaaaaacaaaaauagau

SEQ ID NO: 269157 - RNA, 22 nt, Human
agacaaaaacaaaaauagauau

SEQ ID NO: 269158 - RNA, 22 nt, Human
agacagaaggcgaaggagggac

SEQ ID NO: 269159 - RNA, 22 nt, Human
agcacugugggcuggagguggg

SEQ ID NO: 269160 - RNA, 21 nt, Human
agccacccccugccguagcca

SEQ ID NO: 269161 - RNA, 22 nt, Human
aggaaaaagacaaaaacaaaaa

SEQ ID NO: 269162 - RNA, 28 nt, Human
aggaaaaagacaaaaacaaaagggaccc

SEQ ID NO: 269163 - RNA, 18 nt, Human
aggaaggaaaaaguagaa

SEQ ID NO: 269164 - RNA, 18 nt, Human
aggggugggggugaggag

SEQ ID NO: 269165 - RNA, 20 nt, Human
agguccuccucuuucucuac

SEQ ID NO: 269166 - RNA, 25 nt, Human
agguggcuggguacagggguggggg

SEQ ID NO: 269167 - RNA, 19 nt, Human
agugguugugucccagugg

SEQ ID NO: 269168 - RNA, 26 nt, Human
aguuccacucuuuuauguuaauccca

SEQ ID NO: 269169 - RNA, 21 nt, Human
cacgcccacccuaaugugcca

SEQ ID NO: 269170 - RNA, 24 nt, Human
cagaaagacagaaggcgaaggaga

SEQ ID NO: 269171 - RNA, 22 nt, Human
cagaaggcgaaggagaccccga

SEQ ID NO: 269172 - RNA, 18 nt, Human
cagcacgcccacccuaau

SEQ ID NO: 269173 - RNA, 20 nt, Human
cagcacgcccacccuaaugu

SEQ ID NO: 269174 - RNA, 19 nt, Human
cagccccagagccaccccc

SEQ ID NO: 269175 - RNA, 24 nt, Human
caggagcaagaagcuucuauuugu

SEQ ID NO: 269176 - RNA, 23 nt, Human
caggggugggggugaggagcaga

SEQ ID NO: 269177 - RNA, 22 nt, Human
ccagagaugccccuguccucag

SEQ ID NO: 269178 - RNA, 20 nt, Human
ccaucagucaauacccacug

SEQ ID NO: 269179 - RNA, 24 nt, Human
cccacccgcagcacgcccacccua

SEQ ID NO: 269180 - RNA, 22 nt, Human
cccccguucggcuccugucugu

SEQ ID NO: 269181 - RNA, 22 nt, Human
cccccugccguagccaucuugc

SEQ ID NO: 269182 - RNA, 19 nt, Human
ccccugccguagccaucuu

SEQ ID NO: 269183 - RNA, 18 nt, Human
cccugcacaaaccugcua

SEQ ID NO: 269184 - RNA, 24 nt, Human
ccguucggcuccugucuuccucgg

SEQ ID NO: 269185 - RNA, 19 nt, Human
ccucucugcugagcggaag

SEQ ID NO: 269186 - RNA, 20 nt, Human
cgacuucccgggucagcccc

SEQ ID NO: 269187 - RNA, 19 nt, Human
cucucuaggcuaccacuga

SEQ ID NO: 269188 - RNA, 23 nt, Human
cucucugcugagcggaagccccc

SEQ ID NO: 269189 - RNA, 21 nt, Human
cuggguacaggggugggggug

SEQ ID NO: 269190 - RNA, 18 nt, Human
cuucccgggucagcccca

SEQ ID NO: 269191 - RNA, 21 nt, Human
gaagaggaaauggggaagggg

SEQ ID NO: 269192 - RNA, 21 nt, Human
gaagaggaaauggggaagggg

SEQ ID NO: 269193 - RNA, 19 nt, Human
gaaggcgaaggagaccccg

SEQ ID NO: 269194 - RNA, 22 nt, Human
gaagugaacugcugagcuggca

SEQ ID NO: 269195 - RNA, 22 nt, Human
gaggaaauggggaaggggugau

SEQ ID NO: 269196 - RNA, 21 nt, Human
gccccagagccacccccugcc

SEQ ID NO: 269197 - RNA, 18 nt, Human
ggggaaggggugauggga

SEQ ID NO: 269198 - RNA, 19 nt, Human
ggggaaggggugaugggaa

SEQ ID NO: 269199 - RNA, 19 nt, Human
gggugaugggaaaggggag

SEQ ID NO: 269200 - RNA, 21 nt, Human
guaaucccaaaaucuggcaug

SEQ ID NO: 269201 - RNA, 21 nt, Human
gucagccccagagccaccccc

SEQ ID NO: 269202 - RNA, 20 nt, Human
gucccagugggacagaugcu

SEQ ID NO: 269203 - RNA, 24 nt, Human
uaaaaaguacaacugagccggggc

SEQ ID NO: 269204 - RNA, 20 nt, Human
uaaucccaaaaucuggcaug

SEQ ID NO: 269205 - RNA, 20 nt, Human
uagggaguuaaacaggagca

SEQ ID NO: 269206 - RNA, 22 nt, Human
uauaucuuccucuccacugagu

SEQ ID NO: 269207 - RNA, 21 nt, Human
ucagccccagagccacccccu

SEQ ID NO: 269208 - RNA, 18 nt, Human
ucuauuuguaaucccaaa

SEQ ID NO: 269209 - RNA, 25 nt, Human
ucucugcugagcggaagcccccguu

SEQ ID NO: 269210 - RNA, 20 nt, Human
ucugagggccuggagaaagg

SEQ ID NO: 269211 - RNA, 21 nt, Human
ucuguggcccggagccuaaga

SEQ ID NO: 269212 - RNA, 21 nt, Human
ugagacaggcccagggagguu

SEQ ID NO: 269213 - RNA, 23 nt, Human
ugagacaggcccagggagguucc

SEQ ID NO: 269214 - RNA, 21 nt, Human
ugagcuggcaagaaaagcugg

SEQ ID NO: 269215 - RNA, 19 nt, Human
ugaguagagaaggaagagg

SEQ ID NO: 269216 - RNA, 19 nt, Human
ugccaucugagggccugga

SEQ ID NO: 269217 - RNA, 21 nt, Human
ugccccuguccucaggggcuc

SEQ ID NO: 269218 - RNA, 21 nt, Human
uggauaaccccugugucucca

SEQ ID NO: 269219 - RNA, 22 nt, Human
uggcaagaaaagcugggguccu

SEQ ID NO: 269220 - RNA, 23 nt, Human
uggcccggagccuaagagaccgg

SEQ ID NO: 269221 - RNA, 20 nt, Human
uggcuggguacagggguggg

SEQ ID NO: 269222 - RNA, 24 nt, Human
ugggaaggagacaguaggcucagc

SEQ ID NO: 269223 - RNA, 19 nt, Human
uguaguuugacccugacau

SEQ ID NO: 269224 - RNA, 21 nt, Human
ugucucuuuuggauaguucca

SEQ ID NO: 269225 - RNA, 20 nt, Human
uuaggguggguaacuaggga

SEQ ID NO: 269226 - RNA, 25 nt, Human
uuccacucuuuuauguuaaucccaa

SEQ ID NO: 269227 - RNA, 27 nt, Human
acagcccccucccccaggcagugccuu

SEQ ID NO: 269228 - RNA, 21 nt, Human
agccaggaacagcccccuccc

SEQ ID NO: 269229 - RNA, 21 nt, Human
agccggugcaagcccgggggu

SEQ ID NO: 269230 - RNA, 23 nt, Human
agcugggucggagagccuggggc

SEQ ID NO: 269231 - RNA, 23 nt, Human
aguaauggcuucugcgaaaagaa

SEQ ID NO: 269232 - RNA, 18 nt, Human
caaagggugccccauucc

SEQ ID NO: 269233 - RNA, 18 nt, Human
cagccaggaacagccccc

SEQ ID NO: 269234 - RNA, 20 nt, Human
cagcccccucccccaggcaa

SEQ ID NO: 269235 - RNA, 20 nt, Human
caggaacagcccccuccccc

SEQ ID NO: 269236 - RNA, 22 nt, Human
ccaggaacagcccccuccccca

SEQ ID NO: 269237 - RNA, 18 nt, Human
ccccugagcagccggccc

SEQ ID NO: 269238 - RNA, 19 nt, Human
ccccugagcagccggcccc

SEQ ID NO: 269239 - RNA, 21 nt, Human
cccggggguccaaaagggcgg

SEQ ID NO: 269240 - RNA, 24 nt, Human
cugcagccaggaacagcccccucc

SEQ ID NO: 269241 - RNA, 20 nt, Human
cuugugugaaugaaauggca

SEQ ID NO: 269242 - RNA, 19 nt, Human
gaacagcccccucccccag

SEQ ID NO: 269243 - RNA, 19 nt, Human
gagccucgccaccaccccc

SEQ ID NO: 269244 - RNA, 20 nt, Human
gccuggggcuuccccugagc

SEQ ID NO: 269245 - RNA, 25 nt, Human
ggccccacaccgcugcgagugcggu

SEQ ID NO: 269246 - RNA, 18 nt, Human
uagaagaucugucugugu

SEQ ID NO: 269247 - RNA, 21 nt, Human
uagaauucugcagccaggaac

SEQ ID NO: 269248 - RNA, 22 nt, Human
uagaauucugcagccaggaaca

SEQ ID NO: 269249 - RNA, 28 nt, Human
uagaauucugcagccaggaacagccccc

SEQ ID NO: 269250 - RNA, 23 nt, Human
ucgugagagcuagaauucugcag

SEQ ID NO: 269251 - RNA, 19 nt, Human
ucuagaagaucugucugug

SEQ ID NO: 269252 - RNA, 21 nt, Human
ucugcagccaggaacagcccc

SEQ ID NO: 269253 - RNA, 20 nt, Human
ugaaauggcaguuuccaaag

SEQ ID NO: 269254 - RNA, 23 nt, Human
ugggcuucccagcuuugcagccu

SEQ ID NO: 269255 - RNA, 21 nt, Human
uuccccugagcagccggcccc

SEQ ID NO: 269256 - RNA, 22 nt, Human
uucccucggcucuagaagaucu

SEQ ID NO: 269257 - RNA, 21 nt, Human
aaagacaauagaacuauaaac

SEQ ID NO: 269258 - RNA, 22 nt, Human
acaauaguacccaaaugaauac

SEQ ID NO: 269259 - RNA, 24 nt, Human
agagaauugucucauucccaacca

SEQ ID NO: 269260 - RNA, 27 nt, Human
agcacaaaagcgaaagcaccaaccaag

SEQ ID NO: 269261 - RNA, 21 nt, Human
agggccuugacuuuucuuggu

SEQ ID NO: 269262 - RNA, 22 nt, Human
caaaagcgaaagcaccaaccaa

SEQ ID NO: 269263 - RNA, 18 nt, Human
cacccccacccuuccaca

SEQ ID NO: 269264 - RNA, 21 nt, Human
caggagcagucuaccccaaca

SEQ ID NO: 269265 - RNA, 21 nt, Human
cauacauccuaaauacuacac

SEQ ID NO: 269266 - RNA, 18 nt, Human
cccacccccacccuucca

SEQ ID NO: 269267 - RNA, 24 nt, Human
cccacccccacccuuccacagccc

SEQ ID NO: 269268 - RNA, 20 nt, Human
ccuuccacagcccuggugag

SEQ ID NO: 269269 - RNA, 23 nt, Human
ccuuccacagcccuggugagggu

SEQ ID NO: 269270 - RNA, 22 nt, Human
cuaaauacuacacaauaguacc

SEQ ID NO: 269271 - RNA, 22 nt, Human
cucacacugagaccaguccagu

SEQ ID NO: 269272 - RNA, 21 nt, Human
cucauucccaaccauacugcu

SEQ ID NO: 269273 - RNA, 18 nt, Human
cucccuccgcggauuccu

SEQ ID NO: 269274 - RNA, 22 nt, Human
cugaauacuauaaugacccacc

SEQ ID NO: 269275 - RNA, 22 nt, Human
cugguacaaaaauccaagaaag

SEQ ID NO: 269276 - RNA, 19 nt, Human
gaaacuuucucaauguauu

SEQ ID NO: 269277 - RNA, 18 nt, Human
guaaagugugccaagugc

SEQ ID NO: 269278 - RNA, 27 nt, Human
uaaauacuacacaauaguacccaaaug

SEQ ID NO: 269279 - RNA, 22 nt, Human
uacacaauaguacccaaaugaa

SEQ ID NO: 269280 - RNA, 25 nt, Human
uacauauaaacaaacaugcauacag

SEQ ID NO: 269281 - RNA, 19 nt, Human
uagcacaaaagcgaaagca

SEQ ID NO: 269282 - RNA, 23 nt, Human
uaggaguaaucaugaguagcgau

SEQ ID NO: 269283 - RNA, 21 nt, Human
uauaaaagaauaagauggaaa

SEQ ID NO: 269284 - RNA, 24 nt, Human
uauaaugacccacccccacccuuc

SEQ ID NO: 269285 - RNA, 21 nt, Human
ucccauauaaaagaauaagau

SEQ ID NO: 269286 - RNA, 27 nt, Human
ucccauauaaaagaauaagauggaaac

SEQ ID NO: 269287 - RNA, 18 nt, Human
ucuggcaagggcagggcc

SEQ ID NO: 269288 - RNA, 18 nt, Human
ugcaggagcagucuaccc

SEQ ID NO: 269289 - RNA, 25 nt, Human
ugugccaagugcucacacugagacc

SEQ ID NO: 269290 - RNA, 18 nt, Human
uguuuaguaaagugugcc

SEQ ID NO: 269291 - RNA, 20 nt, Human
uuaaaaguuacacgugaaua

SEQ ID NO: 269292 - RNA, 21 nt, Human
uucccaaccauacugcuuugu

SEQ ID NO: 269293 - RNA, 20 nt, Human
uucccauaugaugugauuac

SEQ ID NO: 269294 - RNA, 18 nt, Human
uugcuggugacuucuucc

SEQ ID NO: 269295 - RNA, 18 nt, Human
uuucuugguuaggccggc

SEQ ID NO: 269296 - RNA, 18 nt, Human
uuuguuaaaaugauaaag

SEQ ID NO: 269297 - RNA, 27 nt, Human
aaaaaaaacaucaacaauaacagaaga

SEQ ID NO: 269298 - RNA, 20 nt, Human
aaaaacaucaacaauaacag

SEQ ID NO: 269299 - RNA, 19 nt, Human
aacaagcauguagagucuu

SEQ ID NO: 269300 - RNA, 24 nt, Human
aaccuuuagcagcaauggcaaccu

SEQ ID NO: 269301 - RNA, 23 nt, Human
aagaacagcagagggaggcagag

SEQ ID NO: 269302 - RNA, 27 nt, Human
aagaacagcagagggaggccgguaccc

SEQ ID NO: 269303 - RNA, 27 nt, Human
aagcuauagcacacccacaaauagauu

SEQ ID NO: 269304 - RNA, 23 nt, Human
aauaacagaagaugucccaggaa

SEQ ID NO: 269305 - RNA, 18 nt, Human
acacgcuuguguaugagg

SEQ ID NO: 269306 - RNA, 20 nt, Human
acgcuaaagcuauagcacac

SEQ ID NO: 269307 - RNA, 24 nt, Human
agaacagcagagggaggcagagga

SEQ ID NO: 269308 - RNA, 20 nt, Human
agcuauagcacacccacaaa

SEQ ID NO: 269309 - RNA, 23 nt, Human
aggaccaaaacacauuugaacca

SEQ ID NO: 269310 - RNA, 21 nt, Human
auaacagaagaugucccagga

SEQ ID NO: 269311 - RNA, 21 nt, Human
caauaacagaagaugucccag

SEQ ID NO: 269312 - RNA, 22 nt, Human
cagcaauggcaaccuuagacca

SEQ ID NO: 269313 - RNA, 23 nt, Human
cagcaauggcaaccuuagaccaa

SEQ ID NO: 269314 - RNA, 18 nt, Human
cagcagagggaggcagag

SEQ ID NO: 269315 - RNA, 19 nt, Human
cagucuuucccuggcuggu

SEQ ID NO: 269316 - RNA, 22 nt, Human
ccaaaagaaauuguaccagaga

SEQ ID NO: 269317 - RNA, 24 nt, Human
ccaaaagaaauuguaccagagaaa

SEQ ID NO: 269318 - RNA, 18 nt, Human
cccagcgugcaccaaaca

SEQ ID NO: 269319 - RNA, 20 nt, Human
ccuaggauccagucccguuc

SEQ ID NO: 269320 - RNA, 23 nt, Human
ccuccaggaccaaaacacauuug

SEQ ID NO: 269321 - RNA, 27 nt, Human
cguucagaagacaagccaggccaccau

SEQ ID NO: 269322 - RNA, 19 nt, Human
cuaaagcuauagcacaccc

SEQ ID NO: 269323 - RNA, 24 nt, Human
cuacaguugucccauccagaagcc

SEQ ID NO: 269324 - RNA, 21 nt, Human
cucaaaauuugagccuccagg

SEQ ID NO: 269325 - RNA, 21 nt, Human
cuccuaggauccagucccguu

SEQ ID NO: 269326 - RNA, 23 nt, Human
cugaauuguuggaaacccaaaca

SEQ ID NO: 269327 - RNA, 18 nt, Human
cugagagcuagaaagagg

SEQ ID NO: 269328 - RNA, 19 nt, Human
cugcucccuuacaaaauuu

SEQ ID NO: 269329 - RNA, 25 nt, Human
cuggaguuuugucuuacucuuugca

SEQ ID NO: 269330 - RNA, 19 nt, Human
cuuagaccaaaaugacaag

SEQ ID NO: 269331 - RNA, 26 nt, Human
gaaacccaaacagcauugagagccaa

SEQ ID NO: 269332 - RNA, 19 nt, Human
gacacgcuuguguaugagg

SEQ ID NO: 269333 - RNA, 23 nt, Human
gcacagcuuaggggaacgcaggg

SEQ ID NO: 269334 - RNA, 19 nt, Human
gcuccuuucuucucagacu

SEQ ID NO: 269335 - RNA, 26 nt, Human
ggaaacccaaacagcauugagagcca

SEQ ID NO: 269336 - RNA, 21 nt, Human
ggacaaguggauauuagagaa

SEQ ID NO: 269337 - RNA, 21 nt, Human
ggagaugggaacugcaaagaa

SEQ ID NO: 269338 - RNA, 21 nt, Human
gggcaggaucgggcugaagcu

SEQ ID NO: 269339 - RNA, 24 nt, Human
gggcaggaucgggcugaagcuuuc

SEQ ID NO: 269340 - RNA, 28 nt, Human
uaaaaaaaaacaucaacaauaacagaag

SEQ ID NO: 269341 - RNA, 22 nt, Human
uaaagcuauagcacacccacaa

SEQ ID NO: 269342 - RNA, 22 nt, Human
uaacucuuuucuugccagucuu

SEQ ID NO: 269343 - RNA, 21 nt, Human
uagaagaacagcagagggagg

SEQ ID NO: 269344 - RNA, 28 nt, Human
uagcagcaauggcaaccuuagaccaaaa

SEQ ID NO: 269345 - RNA, 24 nt, Human
uaggauccagucccguucaaggaa

SEQ ID NO: 269346 - RNA, 19 nt, Human
uauuacuagaauaugcaga

SEQ ID NO: 269347 - RNA, 24 nt, Human
ucaacaauaacagaagauguccca

SEQ ID NO: 269348 - RNA, 20 nt, Human
ucaguucgcuggcugugagu

SEQ ID NO: 269349 - RNA, 21 nt, Human
uccaaaguaaauucuucccca

SEQ ID NO: 269350 - RNA, 22 nt, Human
uccagcaucacauaaaagaauc

SEQ ID NO: 269351 - RNA, 19 nt, Human
ugacacgcuaaagcuauag

SEQ ID NO: 269352 - RNA, 22 nt, Human
ugagagccaagggggaaaaugc

SEQ ID NO: 269353 - RNA, 21 nt, Human
ugcaagucuuuaaaagucugc

SEQ ID NO: 269354 - RNA, 18 nt, Human
ugccagucuuucccuggc

SEQ ID NO: 269355 - RNA, 18 nt, Human
ugccagucuuucccuggc

SEQ ID NO: 269356 - RNA, 22 nt, Human
ugccagucuuucccuggcuggu

SEQ ID NO: 269357 - RNA, 21 nt, Human
ugccugaaucugaaaaugaac

SEQ ID NO: 269358 - RNA, 22 nt, Human
ugcugcacagcuuaggggaacg

SEQ ID NO: 269359 - RNA, 24 nt, Human
uggaaacccaaacagcauugagag

SEQ ID NO: 269360 - RNA, 19 nt, Human
uggaaauggcuucaccucc

SEQ ID NO: 269361 - RNA, 23 nt, Human
ugggaauaacucaaaauuugagc

SEQ ID NO: 269362 - RNA, 24 nt, Human
uguagagucuuuauuacuagaaua

SEQ ID NO: 269363 - RNA, 19 nt, Human
ugucaacaagcauguagag

SEQ ID NO: 269364 - RNA, 27 nt, Human
ugucaagaguuccagcaucacauaaaa

SEQ ID NO: 269365 - RNA, 22 nt, Human
uguuaguuauuuuaaugucagu

SEQ ID NO: 269366 - RNA, 18 nt, Human
uucccacuaaugcugaau

SEQ ID NO: 269367 - RNA, 18 nt, Human
uuuaugcugcuuuuacuu

SEQ ID NO: 269368 - RNA, 24 nt, Human
uuucugguugucauuguccuuuau

SEQ ID NO: 269369 - RNA, 20 nt, Human
uuuucccacuaaugcugaau

SEQ ID NO: 269370 - RNA, 22 nt, Human
uuuuuauuucaaaacgugggaa

SEQ ID NO: 269371 - RNA, 20 nt, Human
uuuuuuuuuuuuuuuuuugg

SEQ ID NO: 269372 - RNA, 20 nt, Human
aaaaugaaaaguacaaggca

SEQ ID NO: 269373 - RNA, 19 nt, Human
aaagcagaacuaaagccuu

SEQ ID NO: 269374 - RNA, 22 nt, Human
aaauaucucauuaagaaacucc

SEQ ID NO: 269375 - RNA, 20 nt, Human
aacacaacaacaaggaaucc

SEQ ID NO: 269376 - RNA, 22 nt, Human
aacacaacaacaaggaaucccu

SEQ ID NO: 269377 - RNA, 24 nt, Human
aacacaacaacaaggaaucccuua

SEQ ID NO: 269378 - RNA, 22 nt, Human
aaccaagcugggauccacagaa

SEQ ID NO: 269379 - RNA, 23 nt, Human
aacugcacuggaucucaacacaa

SEQ ID NO: 269380 - RNA, 24 nt, Human
aagauugaaaacuggauuuaagcc

SEQ ID NO: 269381 - RNA, 21 nt, Human
aagcaggagagggaaggaaag

SEQ ID NO: 269382 - RNA, 28 nt, Human
aagcaggagagggaaggaaaggggaccc

SEQ ID NO: 269383 - RNA, 23 nt, Human
aagcuuguuugcuucugcauuca

SEQ ID NO: 269384 - RNA, 20 nt, Human
aaucccaccuuuucccccuu

SEQ ID NO: 269385 - RNA, 21 nt, Human
accccgacaagagcaaagagu

SEQ ID NO: 269386 - RNA, 19 nt, Human
accucauuugucuccacca

SEQ ID NO: 269387 - RNA, 22 nt, Human
acuaaagccuucaaaaaccaug

SEQ ID NO: 269388 - RNA, 21 nt, Human
agaaagcagaacuaaagccuu

SEQ ID NO: 269389 - RNA, 21 nt, Human
agcugucgaagauugaaaacu

SEQ ID NO: 269390 - RNA, 18 nt, Human
aggaaacgggaagugggc

SEQ ID NO: 269391 - RNA, 24 nt, Human
aggaaucccuuacaucgaguaacc

SEQ ID NO: 269392 - RNA, 19 nt, Human
aggagaggcagaaagcaga

SEQ ID NO: 269393 - RNA, 22 nt, Human
aggcagaaagcagaacuaaagc

SEQ ID NO: 269394 - RNA, 20 nt, Human
aggcagggggcgaaaagggg

SEQ ID NO: 269395 - RNA, 21 nt, Human
aggcagggggcgaaaaggggc

SEQ ID NO: 269396 - RNA, 19 nt, Human
aggcaguaguacaggaacc

SEQ ID NO: 269397 - RNA, 19 nt, Human
aggcgcaguauggcaggca

SEQ ID NO: 269398 - RNA, 21 nt, Human
aggggugggagguuggggcug

SEQ ID NO: 269399 - RNA, 18 nt, Human
aguacaggaaccuggcag

SEQ ID NO: 269400 - RNA, 24 nt, Human
aucccaccuuuucccccuuccugu

SEQ ID NO: 269401 - RNA, 22 nt, Human
aucucauuaagaaacuccucug

SEQ ID NO: 269402 - RNA, 25 nt, Human
augucacuauuaccccccuccccaa

SEQ ID NO: 269403 - RNA, 23 nt, Human
auuuuugucuguaaagccaggag

SEQ ID NO: 269404 - RNA, 25 nt, Human
caaaauuccuggaaccaagcuggga

SEQ ID NO: 269405 - RNA, 19 nt, Human
cacaauaguuucccauccg

SEQ ID NO: 269406 - RNA, 18 nt, Human
cacagaaaucacaacugc

SEQ ID NO: 269407 - RNA, 18 nt, Human
cacccccaccccagugcu

SEQ ID NO: 269408 - RNA, 19 nt, Human
cacuggaucucaacacaac

SEQ ID NO: 269409 - RNA, 20 nt, Human
cagccaccgcuccccacgug

SEQ ID NO: 269410 - RNA, 18 nt, Human
cagcgccccgcggaagcc

SEQ ID NO: 269411 - RNA, 21 nt, Human
cagcgccccgcggaagccgag

SEQ ID NO: 269412 - RNA, 23 nt, Human
cagcgccccgcggaagccgaggg

SEQ ID NO: 269413 - RNA, 21 nt, Human
cagcuacugaguucacguucc

SEQ ID NO: 269414 - RNA, 24 nt, Human
ccaauuccacccccaccccagugc

SEQ ID NO: 269415 - RNA, 21 nt, Human
ccaccgccaccccgccuuugg

SEQ ID NO: 269416 - RNA, 24 nt, Human
ccaccuuuucccccuuccuguuuu

SEQ ID NO: 269417 - RNA, 21 nt, Human
ccagaaauccucgggucccag

SEQ ID NO: 269418 - RNA, 21 nt, Human
ccagcgccccgcggaagccga

SEQ ID NO: 269419 - RNA, 22 nt, Human
cccaacugcggggucccagaaa

SEQ ID NO: 269420 - RNA, 22 nt, Human
cccacgugaguucccaccccca

SEQ ID NO: 269421 - RNA, 23 nt, Human
cccacgugaguucccacccccac

SEQ ID NO: 269422 - RNA, 20 nt, Human
ccccaauuccacccccaccc

SEQ ID NO: 269423 - RNA, 21 nt, Human
ccccaauuccacccccacccc

SEQ ID NO: 269424 - RNA, 22 nt, Human
ccccagugcuccuacuccggcc

SEQ ID NO: 269425 - RNA, 20 nt, Human
cccccaccccgacaagagca

SEQ ID NO: 269426 - RNA, 23 nt, Human
cccccaccccgacaagagcaaag

SEQ ID NO: 269427 - RNA, 18 nt, Human
cccccuuccuguuuugcc

SEQ ID NO: 269428 - RNA, 22 nt, Human
ccccgcggaagccgagggcgga

SEQ ID NO: 269429 - RNA, 26 nt, Human
ccgcccagaaacgucaguggugcugc

SEQ ID NO: 269430 - RNA, 18 nt, Human
ccgggggcggcagcuggg

SEQ ID NO: 269431 - RNA, 24 nt, Human
cgcccagaaacgucaguggugcug

SEQ ID NO: 269432 - RNA, 21 nt, Human
cgccccgcggaagccgagggc

SEQ ID NO: 269433 - RNA, 18 nt, Human
cggccccugcaaggacac

SEQ ID NO: 269434 - RNA, 19 nt, Human
cgggaagugggcggcuggc

SEQ ID NO: 269435 - RNA, 19 nt, Human
cuccccacgugaguuccca

SEQ ID NO: 269436 - RNA, 24 nt, Human
cucuagccucgacaugaaucccac

SEQ ID NO: 269437 - RNA, 22 nt, Human
cucucacgccaccuggaaggcu

SEQ ID NO: 269438 - RNA, 19 nt, Human
cuggacuacuuccuccucc

SEQ ID NO: 269439 - RNA, 20 nt, Human
cuucaaaaaccaugaugccc

SEQ ID NO: 269440 - RNA, 22 nt, Human
cuucaaaaaccaugaugcccaa

SEQ ID NO: 269441 - RNA, 18 nt, Human
cuuuucccccuuccuguu

SEQ ID NO: 269442 - RNA, 22 nt, Human
cuuuucuacucaaggccaggga

SEQ ID NO: 269443 - RNA, 20 nt, Human
gaauauguauuccagaaucc

SEQ ID NO: 269444 - RNA, 18 nt, Human
gaccucauuugucuccac

SEQ ID NO: 269445 - RNA, 19 nt, Human
gaggauccaagaacgugac

SEQ ID NO: 269446 - RNA, 25 nt, Human
gaggauccaagaacgugaccggguu

SEQ ID NO: 269447 - RNA, 24 nt, Human
gagucauugccucucacgccaccu

SEQ ID NO: 269448 - RNA, 20 nt, Human
gaugcuagaaaaaucaagcu

SEQ ID NO: 269449 - RNA, 19 nt, Human
gcagaaagcagaacuaaag

SEQ ID NO: 269450 - RNA, 21 nt, Human
gccgcacuggccgcccagaaa

SEQ ID NO: 269451 - RNA, 21 nt, Human
ggaauauguauuccagaaucc

SEQ ID NO: 269452 - RNA, 24 nt, Human
ggaaucccuuacaucgaguaaccc

SEQ ID NO: 269453 - RNA, 18 nt, Human
ggagaggcagaaagcaga

SEQ ID NO: 269454 - RNA, 21 nt, Human
ggagagggcacccacguaaua

SEQ ID NO: 269455 - RNA, 18 nt, Human
ggccggggaggagggggc

SEQ ID NO: 269456 - RNA, 19 nt, Human
ggccggggaggagggggcc

SEQ ID NO: 269457 - RNA, 23 nt, Human
gggaagugggcggcuggccuucu

SEQ ID NO: 269458 - RNA, 23 nt, Human
gggccggggaggagggggccacu

SEQ ID NO: 269459 - RNA, 23 nt, Human
ggggaggagggggccacuacaga

SEQ ID NO: 269460 - RNA, 20 nt, Human
ggggugggagguuggggcug

SEQ ID NO: 269461 - RNA, 18 nt, Human
gguuggggcuguggagga

SEQ ID NO: 269462 - RNA, 20 nt, Human
guaauagaccucauuugucu

SEQ ID NO: 269463 - RNA, 23 nt, Human
gucccugcugucaccugccuaac

SEQ ID NO: 269464 - RNA, 18 nt, Human
gucucugagggaggggag

SEQ ID NO: 269465 - RNA, 24 nt, Human
uaaccccaauuccacccccacccc

SEQ ID NO: 269466 - RNA, 22 nt, Human
uaagaggaugcuagaaaaauca

SEQ ID NO: 269467 - RNA, 22 nt, Human
uaccccccuccccaaaugagaa

SEQ ID NO: 269468 - RNA, 27 nt, Human
uaccccccuccccaaaugagaaaagga

SEQ ID NO: 269469 - RNA, 26 nt, Human
uaugagaaaauccacggugagccaaa

SEQ ID NO: 269470 - RNA, 24 nt, Human
uauuaccccccuccccaaaugaga

SEQ ID NO: 269471 - RNA, 23 nt, Human
ucaguggugcugccccauucggc

SEQ ID NO: 269472 - RNA, 25 nt, Human
ucaguggugcugccccauucggccg

SEQ ID NO: 269473 - RNA, 24 nt, Human
ucaguggugcugccccauucggcg

SEQ ID NO: 269474 - RNA, 23 nt, Human
ucaguuaaagaggaaacgggaag

SEQ ID NO: 269475 - RNA, 21 nt, Human
uccacagaaaucacaacugca

SEQ ID NO: 269476 - RNA, 24 nt, Human
uccacggugagccaaaaugaaaag

SEQ ID NO: 269477 - RNA, 22 nt, Human
uccccgacuuuucuacucaagg

SEQ ID NO: 269478 - RNA, 19 nt, Human
uccuggaaccaagcuggga

SEQ ID NO: 269479 - RNA, 23 nt, Human
ucggcgaaagguuagggagcagg

SEQ ID NO: 269480 - RNA, 21 nt, Human
ucuaaggaaugcaaaacaaau

SEQ ID NO: 269481 - RNA, 18 nt, Human
ucuacucaaggccaggga

SEQ ID NO: 269482 - RNA, 24 nt, Human
ucucacgccaccuggaaggcugga

SEQ ID NO: 269483 - RNA, 19 nt, Human
ucugaggauccaagaacgu

SEQ ID NO: 269484 - RNA, 25 nt, Human
ugaccaaacuuccuaugagaaaauc

SEQ ID NO: 269485 - RNA, 22 nt, Human
ugagaaaaggauuuuguuuccg

SEQ ID NO: 269486 - RNA, 26 nt, Human
ugagaaaaggauuuuguuuccggaaa

SEQ ID NO: 269487 - RNA, 22 nt, Human
ugaggauccaagaacgugaccg

SEQ ID NO: 269488 - RNA, 18 nt, Human
ugagggaggggaggagag

SEQ ID NO: 269489 - RNA, 21 nt, Human
ugagggaggggaggagagugg

SEQ ID NO: 269490 - RNA, 22 nt, Human
ugccccauucggcgaaagguua

SEQ ID NO: 269491 - RNA, 25 nt, Human
ugccccauucggcgaaagguuaggg

SEQ ID NO: 269492 - RNA, 20 nt, Human
ugccgaggcuggcggcccag

SEQ ID NO: 269493 - RNA, 23 nt, Human
ugccucuagccucgacaugaauc

SEQ ID NO: 269494 - RNA, 21 nt, Human
ugcuccuacuccggccccugc

SEQ ID NO: 269495 - RNA, 24 nt, Human
uggaaggcuggacuacuuccuccu

SEQ ID NO: 269496 - RNA, 23 nt, Human
uggaauauguauuccagaauccu

SEQ ID NO: 269497 - RNA, 21 nt, Human
uggcucauguaucaggggugg

SEQ ID NO: 269498 - RNA, 23 nt, Human
ugucacuauuaccccccucccca

SEQ ID NO: 269499 - RNA, 20 nt, Human
uuaauggaagaggaugcgau

SEQ ID NO: 269500 - RNA, 22 nt, Human
uuaauggaagaggaugcgaugc

SEQ ID NO: 269501 - RNA, 23 nt, Human
uuacaucgaguaaccccaauucc

SEQ ID NO: 269502 - RNA, 21 nt, Human
uuaggcgcaguauggcaggca

SEQ ID NO: 269503 - RNA, 21 nt, Human
uucaaaaaccaugaugcccaa

SEQ ID NO: 269504 - RNA, 24 nt, Human
uucaaagcuuucuagaugcaccaa

SEQ ID NO: 269505 - RNA, 22 nt, Human
uucacguuccagcccagcuguc

SEQ ID NO: 269506 - RNA, 20 nt, Human
uuccggaaacuggaucagcu

SEQ ID NO: 269507 - RNA, 20 nt, Human
uucuucaaguuaacuacgua

SEQ ID NO: 269508 - RNA, 19 nt, Human
uuucucagccaccgcuccc

SEQ ID NO: 269509 - RNA, 23 nt, Human
aagcagcccagcccaagcuuagc

SEQ ID NO: 269510 - RNA, 18 nt, Human
aagccccaagcagcccag

SEQ ID NO: 269511 - RNA, 21 nt, Human
aagccccaagcagcccagccc

SEQ ID NO: 269512 - RNA, 22 nt, Human
acacugagcuaccaaaguuagu

SEQ ID NO: 269513 - RNA, 22 nt, Human
agcaaucaaagaucaaggucau

SEQ ID NO: 269514 - RNA, 22 nt, Human
agcaccaauccuuccccacacu

SEQ ID NO: 269515 - RNA, 26 nt, Human
agcagaaguugugggagacgggaggg

SEQ ID NO: 269516 - RNA, 21 nt, Human
agccaaacggccccaggcccc

SEQ ID NO: 269517 - RNA, 23 nt, Human
agccccaaauccccuccccuugc

SEQ ID NO: 269518 - RNA, 22 nt, Human
aggggggucagaagccccaggg

SEQ ID NO: 269519 - RNA, 23 nt, Human
agugcagccaaacggccccaggc

SEQ ID NO: 269520 - RNA, 22 nt, Human
aguugugggagacgggagggaa

SEQ ID NO: 269521 - RNA, 25 nt, Human
auggagccccagccccaaauccccu

SEQ ID NO: 269522 - RNA, 19 nt, Human
caacaaccucuuaccccuc

SEQ ID NO: 269523 - RNA, 22 nt, Human
caacaaccucuuaccccucagc

SEQ ID NO: 269524 - RNA, 23 nt, Human
caacuacaacaaccucuuacccc

SEQ ID NO: 269525 - RNA, 19 nt, Human
caagccccaagcagcccag

SEQ ID NO: 269526 - RNA, 19 nt, Human
caagcuuagcucccucccc

SEQ ID NO: 269527 - RNA, 19 nt, Human
cacucuagggcaacaaggg

SEQ ID NO: 269528 - RNA, 21 nt, Human
cacucuagggcaacaagggcc

SEQ ID NO: 269529 - RNA, 23 nt, Human
cacuggauguuuuuaucacaucc

SEQ ID NO: 269530 - RNA, 23 nt, Human
cacuuuagaugcacacugagcua

SEQ ID NO: 269531 - RNA, 19 nt, Human
cagccccaaauccccuccc

SEQ ID NO: 269532 - RNA, 22 nt, Human
caucucuuccaggagcuggggg

SEQ ID NO: 269533 - RNA, 22 nt, Human
ccaaauccccuccccuugcaaa

SEQ ID NO: 269534 - RNA, 25 nt, Human
ccaacucccauuccaacuuccuuuu

SEQ ID NO: 269535 - RNA, 26 nt, Human
ccaacucccauuccaacuuccuuuuu

SEQ ID NO: 269536 - RNA, 21 nt, Human
ccaauccuuccccacacucgu

SEQ ID NO: 269537 - RNA, 24 nt, Human
ccacacucguucacugcccgccaa

SEQ ID NO: 269538 - RNA, 18 nt, Human
cccaaauccccuccccuu

SEQ ID NO: 269539 - RNA, 24 nt, Human
cccaaauccccuccccuugcaaau

SEQ ID NO: 269540 - RNA, 21 nt, Human
ccccaaauccccuccccuugc

SEQ ID NO: 269541 - RNA, 24 nt, Human
ccccaaauccccuccccuugcaaa

SEQ ID NO: 269542 - RNA, 22 nt, Human
ccccaagcagcccagcccaagc

SEQ ID NO: 269543 - RNA, 20 nt, Human
ccccagccccaaauccccuc

SEQ ID NO: 269544 - RNA, 22 nt, Human
ccccagccccaaauccccuccc

SEQ ID NO: 269545 - RNA, 27 nt, Human
cccuaugccaagccccaagcagccccu

SEQ ID NO: 269546 - RNA, 18 nt, Human
cccuccacacauacuaca

SEQ ID NO: 269547 - RNA, 19 nt, Human
cccuccccagucccacuuu

SEQ ID NO: 269548 - RNA, 23 nt, Human
cccucuccaccuuaacaucaaaa

SEQ ID NO: 269549 - RNA, 18 nt, Human
ccuagaucaggacagagg

SEQ ID NO: 269550 - RNA, 19 nt, Human
ccugaggaccacuaaccca

SEQ ID NO: 269551 - RNA, 19 nt, Human
cggccccaggccccuuccu

SEQ ID NO: 269552 - RNA, 22 nt, Human
cucuccaccuuaacaucaaaau

SEQ ID NO: 269553 - RNA, 23 nt, Human
cucuccucucuuugcugcguccc

SEQ ID NO: 269554 - RNA, 21 nt, Human
gacgggagggcacccuccaca

SEQ ID NO: 269555 - RNA, 18 nt, Human
gagacgggagggcacccu

SEQ ID NO: 269556 - RNA, 19 nt, Human
gagcuaccaaaguuagugc

SEQ ID NO: 269557 - RNA, 25 nt, Human
gccccaggccccuuccuguugcccc

SEQ ID NO: 269558 - RNA, 18 nt, Human
ggacagaggaugcauaug

SEQ ID NO: 269559 - RNA, 22 nt, Human
ggagcuggggggaaucacgggu

SEQ ID NO: 269560 - RNA, 23 nt, Human
ggccccaggccccuuccuguugc

SEQ ID NO: 269561 - RNA, 26 nt, Human
gggcacccuccacacauacuacaggg

SEQ ID NO: 269562 - RNA, 21 nt, Human
guucacugcccgccaacuccc

SEQ ID NO: 269563 - RNA, 19 nt, Human
uaacaucaaaaugggggag

SEQ ID NO: 269564 - RNA, 25 nt, Human
uaacccaccagcaagucucccccug

SEQ ID NO: 269565 - RNA, 19 nt, Human
uaccaaaguuagugcagcc

SEQ ID NO: 269566 - RNA, 18 nt, Human
uagacaccuagaucagga

SEQ ID NO: 269567 - RNA, 18 nt, Human
uagcucccuccccagucc

SEQ ID NO: 269568 - RNA, 27 nt, Human
uaugccaagccccaagcagcccagccc

SEQ ID NO: 269569 - RNA, 21 nt, Human
ucacggguuaaaggucaaggu

SEQ ID NO: 269570 - RNA, 25 nt, Human
ucacugcccgccaacucccauucca

SEQ ID NO: 269571 - RNA, 23 nt, Human
uccacacauacuacagggggguc

SEQ ID NO: 269572 - RNA, 22 nt, Human
uccacccuaugccaagccccaa

SEQ ID NO: 269573 - RNA, 20 nt, Human
uccaccuuaacaucaaaaug

SEQ ID NO: 269574 - RNA, 23 nt, Human
uccauacccuucagaguccuaag

SEQ ID NO: 269575 - RNA, 22 nt, Human
uccccacacucguucacugccc

SEQ ID NO: 269576 - RNA, 19 nt, Human
ucccuaagagauauuagga

SEQ ID NO: 269577 - RNA, 19 nt, Human
ugacuuggggucucuccuc

SEQ ID NO: 269578 - RNA, 21 nt, Human
ugaggaccacuaacccaccag

SEQ ID NO: 269579 - RNA, 19 nt, Human
ugaucugcccuuuuucccu

SEQ ID NO: 269580 - RNA, 20 nt, Human
ugccaagccccaagcagccc

SEQ ID NO: 269581 - RNA, 20 nt, Human
uggcugggcuccuauuggcu

SEQ ID NO: 269582 - RNA, 23 nt, Human
ugggggaggaggagaauuuaggg

SEQ ID NO: 269583 - RNA, 24 nt, Human
ugggggaggaggagaauuuagggg

SEQ ID NO: 269584 - RNA, 21 nt, Human
uuuuuuuuuuuuuuuuuccga

SEQ ID NO: 269585 - RNA, 23 nt, Human
uuuuuuuuuuuuuuuuuccgauu

SEQ ID NO: 269586 - RNA, 27 nt, Human
uuuuuuuuuuuuuuuuuuuuuccgggg

SEQ ID NO: 269587 - RNA, 24 nt, Human
aaaaaaaaaaaaaaagacucugag

SEQ ID NO: 269588 - RNA, 25 nt, Human
aaacaaaagagaaugcaguggccua

SEQ ID NO: 269589 - RNA, 24 nt, Human
aaacacagacacgcgugcucgcac

SEQ ID NO: 269590 - RNA, 19 nt, Human
aacauggugaaacuccauc

SEQ ID NO: 269591 - RNA, 20 nt, Human
aacauggugaaacuccaucu

SEQ ID NO: 269592 - RNA, 21 nt, Human
aacauggugaaacuccaucuc

SEQ ID NO: 269593 - RNA, 19 nt, Human
aaggauggacuugcaaugg

SEQ ID NO: 269594 - RNA, 20 nt, Human
aagggggugggcaggcagag

SEQ ID NO: 269595 - RNA, 23 nt, Human
aaguuugcgccauugcacuccag

SEQ ID NO: 269596 - RNA, 18 nt, Human
aauacucucugucuggcu

SEQ ID NO: 269597 - RNA, 24 nt, Human
aaucgcuugaacccagggggcaga

SEQ ID NO: 269598 - RNA, 23 nt, Human
aaugacucaugccuguaauccca

SEQ ID NO: 269599 - RNA, 24 nt, Human
aaugacucaugccuguaaucccag

SEQ ID NO: 269600 - RNA, 23 nt, Human
acacaaacacagacacgcgugcu

SEQ ID NO: 269601 - RNA, 18 nt, Human
acagagucgggaucaaag

SEQ ID NO: 269602 - RNA, 20 nt, Human
acccugagcuuacaucucaa

SEQ ID NO: 269603 - RNA, 24 nt, Human
accugaggucaggaguuugagacc

SEQ ID NO: 269604 - RNA, 19 nt, Human
accuggacagggcuacccc

SEQ ID NO: 269605 - RNA, 18 nt, Human
acuccaucucuacuaaaa

SEQ ID NO: 269606 - RNA, 18 nt, Human
acuuagcuggguauggug

SEQ ID NO: 269607 - RNA, 20 nt, Human
agaaauucauuuggacagaa

SEQ ID NO: 269608 - RNA, 18 nt, Human
agagguugcagugagcca

SEQ ID NO: 269609 - RNA, 20 nt, Human
agagguugcagugagccaag

SEQ ID NO: 269610 - RNA, 24 nt, Human
agagguugcagugagccaaguuug

SEQ ID NO: 269611 - RNA, 20 nt, Human
agauguuggaauguuacagu

SEQ ID NO: 269612 - RNA, 24 nt, Human
agcacuuugggaggcugaggcagg

SEQ ID NO: 269613 - RNA, 20 nt, Human
agcagaggccuggcauuuug

SEQ ID NO: 269614 - RNA, 22 nt, Human
agccuggccaacauggugaaac

SEQ ID NO: 269615 - RNA, 24 nt, Human
agccuggccaacauggugaaacuc

SEQ ID NO: 269616 - RNA, 22 nt, Human
agccuggguaacagcgagacuc

SEQ ID NO: 269617 - RNA, 23 nt, Human
agcuggguaugguggcaggugcc

SEQ ID NO: 269618 - RNA, 20 nt, Human
aggaguuugagaccagccug

SEQ ID NO: 269619 - RNA, 23 nt, Human
aggcaggagaaucgcuugaaccc

SEQ ID NO: 269620 - RNA, 24 nt, Human
aggcaggagaaucgcuugaaccca

SEQ ID NO: 269621 - RNA, 18 nt, Human
aggcagguggaucaccug

SEQ ID NO: 269622 - RNA, 22 nt, Human
aggcagguggaucaccugaggu

SEQ ID NO: 269623 - RNA, 26 nt, Human
aggcagguggaucaccugaggucagg

SEQ ID NO: 269624 - RNA, 20 nt, Human
aggcugaggcaggagaaucg

SEQ ID NO: 269625 - RNA, 24 nt, Human
aggcugaggcaggagaaucgcuug

SEQ ID NO: 269626 - RNA, 21 nt, Human
aggcugaggcagguggaucac

SEQ ID NO: 269627 - RNA, 24 nt, Human
aggcugaggcagguggaucaccug

SEQ ID NO: 269628 - RNA, 18 nt, Human
agggggugggcaggcaga

SEQ ID NO: 269629 - RNA, 18 nt, Human
agggggugggcaggcaga

SEQ ID NO: 269630 - RNA, 22 nt, Human
agguggaucaccugaggucagg

SEQ ID NO: 269631 - RNA, 18 nt, Human
aguuaaagauaguagagg

SEQ ID NO: 269632 - RNA, 20 nt, Human
aucaccugaggucaggaguu

SEQ ID NO: 269633 - RNA, 19 nt, Human
augccuguaaucccagcac

SEQ ID NO: 269634 - RNA, 19 nt, Human
auggaagugguucuugggc

SEQ ID NO: 269635 - RNA, 20 nt, Human
auucccuuaaaaacaccauu

SEQ ID NO: 269636 - RNA, 21 nt, Human
auugcacuccagccuggguaa

SEQ ID NO: 269637 - RNA, 24 nt, Human
caacauggugaaacuccaucucua

SEQ ID NO: 269638 - RNA, 25 nt, Human
cacacaaacacagacacgcgugcuc

SEQ ID NO: 269639 - RNA, 22 nt, Human
cacagaacuaugcacacacaaa

SEQ ID NO: 269640 - RNA, 21 nt, Human
cacagacacgcgugcucgcac

SEQ ID NO: 269641 - RNA, 23 nt, Human
caccugaggucaggaguuugaga

SEQ ID NO: 269642 - RNA, 20 nt, Human
cacuccagccuggguaacag

SEQ ID NO: 269643 - RNA, 20 nt, Human
cacuccagccuggguaacag

SEQ ID NO: 269644 - RNA, 21 nt, Human
cacuccagccuggguaacagc

SEQ ID NO: 269645 - RNA, 21 nt, Human
cacucucugucacagaccuaa

SEQ ID NO: 269646 - RNA, 21 nt, Human
cagaagcacuacaagaaagcg

SEQ ID NO: 269647 - RNA, 21 nt, Human
cagcaauacucucugucuggc

SEQ ID NO: 269648 - RNA, 24 nt, Human
cagcacuuugggaggcugaggcag

SEQ ID NO: 269649 - RNA, 26 nt, Human
cagcacuuugggaggcugaggcaggu

SEQ ID NO: 269650 - RNA, 22 nt, Human
cagcagaauauauuccucccuu

SEQ ID NO: 269651 - RNA, 24 nt, Human
cagcgaugguucaugggcuuccag

SEQ ID NO: 269652 - RNA, 24 nt, Human
cagcuacucgggaggcugaggcag

SEQ ID NO: 269653 - RNA, 24 nt, Human
cagguggaucaccugaggucagga

SEQ ID NO: 269654 - RNA, 21 nt, Human
caguaauuaaaccacauucac

SEQ ID NO: 269655 - RNA, 23 nt, Human
caguagacaugaggcugaaaaca

SEQ ID NO: 269656 - RNA, 20 nt, Human
caugccuguaaucccagcac

SEQ ID NO: 269657 - RNA, 24 nt, Human
caugccuguaaucccagcacuuug

SEQ ID NO: 269658 - RNA, 19 nt, Human
cauugcacuccagccuggg

SEQ ID NO: 269659 - RNA, 21 nt, Human
cauugcacuccagccugggua

SEQ ID NO: 269660 - RNA, 22 nt, Human
cauugcacuccagccuggguaa

SEQ ID NO: 269661 - RNA, 24 nt, Human
cauugcacuccagccuggguaaca

SEQ ID NO: 269662 - RNA, 19 nt, Human
ccaggggaggagcaucugc

SEQ ID NO: 269663 - RNA, 18 nt, Human
ccauugcacuccagccug

SEQ ID NO: 269664 - RNA, 20 nt, Human
ccauugcacuccagccuggg

SEQ ID NO: 269665 - RNA, 21 nt, Human
ccauugcacuccagccugggu

SEQ ID NO: 269666 - RNA, 22 nt, Human
ccauugcacuccagccugggua

SEQ ID NO: 269667 - RNA, 23 nt, Human
ccauugcacuccagccuggguaa

SEQ ID NO: 269668 - RNA, 24 nt, Human
ccauugcacuccagccuggguaac

SEQ ID NO: 269669 - RNA, 21 nt, Human
cccccacccauuucuccccca

SEQ ID NO: 269670 - RNA, 22 nt, Human
cccccacccauuucucccccau

SEQ ID NO: 269671 - RNA, 19 nt, Human
ccccccacccauuucuccc

SEQ ID NO: 269672 - RNA, 22 nt, Human
ccugaggucaggaguuugagac

SEQ ID NO: 269673 - RNA, 23 nt, Human
ccuggccaacauggugaaacucc

SEQ ID NO: 269674 - RNA, 24 nt, Human
ccuggccaacauggugaaacucca

SEQ ID NO: 269675 - RNA, 20 nt, Human
ccuggguaacagcgagacuc

SEQ ID NO: 269676 - RNA, 22 nt, Human
ccuguaaucccagcacuuuggg

SEQ ID NO: 269677 - RNA, 19 nt, Human
ccuguagucucagcuacuc

SEQ ID NO: 269678 - RNA, 21 nt, Human
ccuguagucucagcuacucgg

SEQ ID NO: 269679 - RNA, 26 nt, Human
cgccauugcacuccagccuggguaac

SEQ ID NO: 269680 - RNA, 24 nt, Human
cgcgugcucgcacacacagagucg

SEQ ID NO: 269681 - RNA, 26 nt, Human
cgggaaaaagcuggcaagagaggaua

SEQ ID NO: 269682 - RNA, 24 nt, Human
cuaugcacacacaaacacagacac

SEQ ID NO: 269683 - RNA, 22 nt, Human
cucaagaauaaaucaguaacuc

SEQ ID NO: 269684 - RNA, 21 nt, Human
cucagcagaaagcaaacaguc

SEQ ID NO: 269685 - RNA, 24 nt, Human
cucaugccuguaaucccagcacuu

SEQ ID NO: 269686 - RNA, 21 nt, Human
cucccccaucuacaugcuuuu

SEQ ID NO: 269687 - RNA, 23 nt, Human
cuccccccacccauuucuccccc

SEQ ID NO: 269688 - RNA, 22 nt, Human
cucuauguaacaggcacccuuc

SEQ ID NO: 269689 - RNA, 27 nt, Human
cucugucucaaaaaaaaaaaaaaagac

SEQ ID NO: 269690 - RNA, 23 nt, Human
cuggccaacauggugaaacucca

SEQ ID NO: 269691 - RNA, 23 nt, Human
cugucugaaaagccccuucccaa

SEQ ID NO: 269692 - RNA, 21 nt, Human
cugugcuaagagaguccaguu

SEQ ID NO: 269693 - RNA, 18 nt, Human
cuucugcuacuggucaca

SEQ ID NO: 269694 - RNA, 23 nt, Human
gagaaucgcuugaacccaggggg

SEQ ID NO: 269695 - RNA, 18 nt, Human
gagcacgggaaaaagcug

SEQ ID NO: 269696 - RNA, 18 nt, Human
gagguugcagugagccaa

SEQ ID NO: 269697 - RNA, 24 nt, Human
gaguggucauuugaaggauggacu

SEQ ID NO: 269698 - RNA, 18 nt, Human
gauaacgagaguagagga

SEQ ID NO: 269699 - RNA, 24 nt, Human
gaucaccugaggucaggaguuuga

SEQ ID NO: 269700 - RNA, 19 nt, Human
gauuggcccuuucucuccu

SEQ ID NO: 269701 - RNA, 22 nt, Human
gcaggagaaucgcuugaaccca

SEQ ID NO: 269702 - RNA, 26 nt, Human
gccaaaccucuccccuuucugggaac

SEQ ID NO: 269703 - RNA, 24 nt, Human
gccaacauggugaaacuccaucuc

SEQ ID NO: 269704 - RNA, 19 nt, Human
gccauugcacuccagccug

SEQ ID NO: 269705 - RNA, 24 nt, Human
gccauugcacuccagccuggguaa

SEQ ID NO: 269706 - RNA, 21 nt, Human
gcugcucucuccugaaaucac

SEQ ID NO: 269707 - RNA, 23 nt, Human
ggagcaaugacucaugccuguaa

SEQ ID NO: 269708 - RNA, 22 nt, Human
ggaucaccugaggucaggaguu

SEQ ID NO: 269709 - RNA, 22 nt, Human
ggcaagagaggauauggagaga

SEQ ID NO: 269710 - RNA, 19 nt, Human
ggcagagguugcagugagc

SEQ ID NO: 269711 - RNA, 23 nt, Human
ggcagagguugcagugagccaag

SEQ ID NO: 269712 - RNA, 22 nt, Human
ggccaguuuacuggaugaaaug

SEQ ID NO: 269713 - RNA, 19 nt, Human
ggucaggaguuugagacca

SEQ ID NO: 269714 - RNA, 22 nt, Human
guaacagcgagacucugucuca

SEQ ID NO: 269715 - RNA, 24 nt, Human
guaacagcgagacucugucucaaa

SEQ ID NO: 269716 - RNA, 21 nt, Human
gucucaaaaaaaaaaaaaaag

SEQ ID NO: 269717 - RNA, 24 nt, Human
uaacagcgagacucugucucaaaa

SEQ ID NO: 269718 - RNA, 19 nt, Human
uacccaaccuagaaaucug

SEQ ID NO: 269719 - RNA, 20 nt, Human
uaccuggacagggcuacccc

SEQ ID NO: 269720 - RNA, 19 nt, Human
uagagagagguucaguggc

SEQ ID NO: 269721 - RNA, 21 nt, Human
uauacaaaaaagggggugggc

SEQ ID NO: 269722 - RNA, 23 nt, Human
uaugauuuuccacauuccucaaa

SEQ ID NO: 269723 - RNA, 26 nt, Human
uaugcacacacaaacacagacacgcg

SEQ ID NO: 269724 - RNA, 28 nt, Human
uaugcacacacaaacacagacacgcgug

SEQ ID NO: 269725 - RNA, 21 nt, Human
ucaaaaaaaaaaaaaaagacu

SEQ ID NO: 269726 - RNA, 19 nt, Human
ucaccugaggucaggaguu

SEQ ID NO: 269727 - RNA, 22 nt, Human
ucaugccuguaaucccagcacu

SEQ ID NO: 269728 - RNA, 21 nt, Human
uccagccuggguaacagcgag

SEQ ID NO: 269729 - RNA, 22 nt, Human
uccagccuggguaacagcgaga

SEQ ID NO: 269730 - RNA, 24 nt, Human
ucgggaggcugaggcaggagaauc

SEQ ID NO: 269731 - RNA, 22 nt, Human
ucuccacaauucucucacccuc

SEQ ID NO: 269732 - RNA, 22 nt, Human
ucucuacuaaaaauacauaacu

SEQ ID NO: 269733 - RNA, 18 nt, Human
ucugaaaagccccuuccc

SEQ ID NO: 269734 - RNA, 23 nt, Human
ucugucucaaaaaaaaaaaaaaa

SEQ ID NO: 269735 - RNA, 20 nt, Human
ucuugcuaugugguaguugg

SEQ ID NO: 269736 - RNA, 21 nt, Human
ugaaaacaacuuuaccuggac

SEQ ID NO: 269737 - RNA, 22 nt, Human
ugaaaacaacuuuaccuggaca

SEQ ID NO: 269738 - RNA, 21 nt, Human
ugacucaugccuguaauccca

SEQ ID NO: 269739 - RNA, 24 nt, Human
ugacucaugccuguaaucccagca

SEQ ID NO: 269740 - RNA, 21 nt, Human
ugagaaugcaaaauaaguccc

SEQ ID NO: 269741 - RNA, 23 nt, Human
ugagaccagccuggccaacaugg

SEQ ID NO: 269742 - RNA, 24 nt, Human
ugagaccagccuggccaacauggu

SEQ ID NO: 269743 - RNA, 23 nt, Human
ugaggaauggagacacacucucu

SEQ ID NO: 269744 - RNA, 20 nt, Human
ugaggcaggagaaucgcuug

SEQ ID NO: 269745 - RNA, 24 nt, Human
ugaggcaggagaaucgcuugaacc

SEQ ID NO: 269746 - RNA, 25 nt, Human
ugaggcaggagaaucgcuugaaccc

SEQ ID NO: 269747 - RNA, 20 nt, Human
ugaggcagguggaucaccug

SEQ ID NO: 269748 - RNA, 24 nt, Human
ugaggcagguggaucaccugaggu

SEQ ID NO: 269749 - RNA, 26 nt, Human
ugaggcagguggaucaccugagguca

SEQ ID NO: 269750 - RNA, 18 nt, Human
ugaggucaggaguuugag

SEQ ID NO: 269751 - RNA, 20 nt, Human
ugcaaacaaaagagaaugca

SEQ ID NO: 269752 - RNA, 22 nt, Human
ugcacuccagccuggguaacag

SEQ ID NO: 269753 - RNA, 22 nt, Human
ugcagcuuuauuuaauaaucug

SEQ ID NO: 269754 - RNA, 19 nt, Human
ugccuaauucccuuaaaaa

SEQ ID NO: 269755 - RNA, 23 nt, Human
ugccuguaaucccagcacuuugg

SEQ ID NO: 269756 - RNA, 23 nt, Human
ugccuguaaucccagcacuuugg

SEQ ID NO: 269757 - RNA, 24 nt, Human
ugccuguagucucagcuacucggg

SEQ ID NO: 269758 - RNA, 18 nt, Human
uggaagugguucuugggc

SEQ ID NO: 269759 - RNA, 26 nt, Human
uggaauguuacaguauggcauggaag

SEQ ID NO: 269760 - RNA, 19 nt, Human
uggauauguggaugucugg

SEQ ID NO: 269761 - RNA, 23 nt, Human
uggaucaccugaggucaggaguu

SEQ ID NO: 269762 - RNA, 24 nt, Human
uggaucaccugaggucaggaguuu

SEQ ID NO: 269763 - RNA, 27 nt, Human
uggaucaccugaggucaggaguuugag

SEQ ID NO: 269764 - RNA, 18 nt, Human
uggcaagagaggauaugg

SEQ ID NO: 269765 - RNA, 24 nt, Human
uggccaacauggugaaacuccauc

SEQ ID NO: 269766 - RNA, 18 nt, Human
ugggaggcugaggcaggu

SEQ ID NO: 269767 - RNA, 24 nt, Human
ugggaggcugaggcagguggauca

SEQ ID NO: 269768 - RNA, 21 nt, Human
ugggcaggcagagagaaugau

SEQ ID NO: 269769 - RNA, 24 nt, Human
ugguggcaggugccuguagucuca

SEQ ID NO: 269770 - RNA, 22 nt, Human
uguaaaaagucauacucuggca

SEQ ID NO: 269771 - RNA, 26 nt, Human
uguguaacccugagcuuaccggcgcc

SEQ ID NO: 269772 - RNA, 18 nt, Human
uguuaauggcuguuccuc

SEQ ID NO: 269773 - RNA, 21 nt, Human
uuacuggaugaaauguuauau

SEQ ID NO: 269774 - RNA, 24 nt, Human
uuagcuggguaugguggcaggugc

SEQ ID NO: 269775 - RNA, 23 nt, Human
uuaggccaaaccucuccccuuuc

SEQ ID NO: 269776 - RNA, 19 nt, Human
uuccagcagaauauauucc

SEQ ID NO: 269777 - RNA, 19 nt, Human
uugcagugagccaaguuuc

SEQ ID NO: 269778 - RNA, 22 nt, Human
uugcagugagccaaguuugcgc

SEQ ID NO: 269779 - RNA, 25 nt, Human
uugggaggcugaggcagguggauca

SEQ ID NO: 269780 - RNA, 24 nt, Human
uuugcgccauugcacuccagccug

SEQ ID NO: 269781 - RNA, 22 nt, Human
aacguucagucuggcuguggug

SEQ ID NO: 269782 - RNA, 22 nt, Human
aagugccccagggcgucagggc

SEQ ID NO: 269783 - RNA, 22 nt, Human
agccaggggcgcaguccacagg

SEQ ID NO: 269784 - RNA, 22 nt, Human
agcuccaggcaguggcgugagg

SEQ ID NO: 269785 - RNA, 23 nt, Human
agcuggccccuuggaagagccug

SEQ ID NO: 269786 - RNA, 18 nt, Human
aggcugggaguccucuug

SEQ ID NO: 269787 - RNA, 18 nt, Human
agugagggacagaaaaga

SEQ ID NO: 269788 - RNA, 24 nt, Human
caacaaauucacagagacuuagga

SEQ ID NO: 269789 - RNA, 18 nt, Human
cacaggaggagacacgag

SEQ ID NO: 269790 - RNA, 18 nt, Human
cacccucccauccagccu

SEQ ID NO: 269791 - RNA, 18 nt, Human
cagagcagaagugcccca

SEQ ID NO: 269792 - RNA, 19 nt, Human
cauggcaaacccccgcgug

SEQ ID NO: 269793 - RNA, 22 nt, Human
ccagaggacacuggacaggccc

SEQ ID NO: 269794 - RNA, 24 nt, Human
ccagccccaccagaccuccucaga

SEQ ID NO: 269795 - RNA, 21 nt, Human
ccaggaagcggccuccccagg

SEQ ID NO: 269796 - RNA, 26 nt, Human
ccaggcaguggcgugagguuccucuu

SEQ ID NO: 269797 - RNA, 19 nt, Human
ccaguccuuccucccagcc

SEQ ID NO: 269798 - RNA, 23 nt, Human
ccccgcgugguccugugcagagc

SEQ ID NO: 269799 - RNA, 22 nt, Human
ccccuacagccuggaggacagg

SEQ ID NO: 269800 - RNA, 22 nt, Human
ccgccugggugcucccccagcc

SEQ ID NO: 269801 - RNA, 19 nt, Human
ccggaggcccggccugccc

SEQ ID NO: 269802 - RNA, 23 nt, Human
ccuaccaggaagcggccucccca

SEQ ID NO: 269803 - RNA, 19 nt, Human
ccuaggacugacuccgggg

SEQ ID NO: 269804 - RNA, 19 nt, Human
ccucccauccagccuagga

SEQ ID NO: 269805 - RNA, 20 nt, Human
ccuccgagaccuuggccacc

SEQ ID NO: 269806 - RNA, 23 nt, Human
ccuccgagaccuuggccaccgga

SEQ ID NO: 269807 - RNA, 21 nt, Human
ccuggccuccgagaccuuggc

SEQ ID NO: 269808 - RNA, 20 nt, Human
ccugggugcucccccagccc

SEQ ID NO: 269809 - RNA, 21 nt, Human
ccugggugcucccccagcccc

SEQ ID NO: 269810 - RNA, 20 nt, Human
ccuuccucccagccaggggc

SEQ ID NO: 269811 - RNA, 20 nt, Human
ccuucugggggugcagggca

SEQ ID NO: 269812 - RNA, 21 nt, Human
cgagaaucguccacugaccaa

SEQ ID NO: 269813 - RNA, 18 nt, Human
cggaggcccggccugccc

SEQ ID NO: 269814 - RNA, 18 nt, Human
cggggcuaaggcggagcu

SEQ ID NO: 269815 - RNA, 24 nt, Human
cucccagccaggggcgcaguccac

SEQ ID NO: 269816 - RNA, 22 nt, Human
cucccccagccccaccagaccu

SEQ ID NO: 269817 - RNA, 18 nt, Human
cuccucagagucuugcuc

SEQ ID NO: 269818 - RNA, 22 nt, Human
cucuccuccccuacagccugga

SEQ ID NO: 269819 - RNA, 23 nt, Human
cuugcucauaagugugcagcugc

SEQ ID NO: 269820 - RNA, 21 nt, Human
gaggcugggaguccucuugag

SEQ ID NO: 269821 - RNA, 21 nt, Human
gagggggccacccucccaucc

SEQ ID NO: 269822 - RNA, 19 nt, Human
gcagacccagcggugggug

SEQ ID NO: 269823 - RNA, 18 nt, Human
gcagggcagcaggccaga

SEQ ID NO: 269824 - RNA, 22 nt, Human
gcaguccacaggcuggucacgc

SEQ ID NO: 269825 - RNA, 18 nt, Human
gccacccucccauccagc

SEQ ID NO: 269826 - RNA, 20 nt, Human
gccuccgagaccuuggccac

SEQ ID NO: 269827 - RNA, 18 nt, Human
ggacagaaaagagucucg

SEQ ID NO: 269828 - RNA, 19 nt, Human
ggacaggcccgggggugcu

SEQ ID NO: 269829 - RNA, 25 nt, Human
ggccaggcucuccuccccuacagcc

SEQ ID NO: 269830 - RNA, 21 nt, Human
ggcggaacacagugagggaca

SEQ ID NO: 269831 - RNA, 18 nt, Human
gggaguggaggaucuggg

SEQ ID NO: 269832 - RNA, 22 nt, Human
uaagugugcagcugcccugguc

SEQ ID NO: 269833 - RNA, 20 nt, Human
uaccccaaggccccacacag

SEQ ID NO: 269834 - RNA, 19 nt, Human
ucacaaacguucagucugg

SEQ ID NO: 269835 - RNA, 20 nt, Human
ucagggccuucugggggugc

SEQ ID NO: 269836 - RNA, 21 nt, Human
ucagggccuucugggggugca

SEQ ID NO: 269837 - RNA, 26 nt, Human
uccccuacagccuggaggacagggac

SEQ ID NO: 269838 - RNA, 22 nt, Human
uccuuccuuccuccgcgccccu

SEQ ID NO: 269839 - RNA, 25 nt, Human
ugacgacaggggacagucggcggaa

SEQ ID NO: 269840 - RNA, 22 nt, Human
ugcagggcagcaggccagagga

SEQ ID NO: 269841 - RNA, 24 nt, Human
ugcuugcagauccgccugggugcu

SEQ ID NO: 269842 - RNA, 20 nt, Human
uggaagagccuggcucgaaa

SEQ ID NO: 269843 - RNA, 19 nt, Human
uggacucccuccuaccagg

SEQ ID NO: 269844 - RNA, 20 nt, Human
uggccuccgagaccuuggcc

SEQ ID NO: 269845 - RNA, 19 nt, Human
uggcuaccccaaggcccca

SEQ ID NO: 269846 - RNA, 19 nt, Human
ugggaguggaggaucuggg

SEQ ID NO: 269847 - RNA, 24 nt, Human
ugggcccccaguccuuccucccag

SEQ ID NO: 269848 - RNA, 19 nt, Human
ugggggugcagggcagcag

SEQ ID NO: 269849 - RNA, 22 nt, Human
ugucaccauggcaaacccccgc

SEQ ID NO: 269850 - RNA, 21 nt, Human
uguccagucugucucccccgg

SEQ ID NO: 269851 - RNA, 21 nt, Human
acccucucauuccuccccacc

SEQ ID NO: 269852 - RNA, 19 nt, Human
acccuucccuucucagcca

SEQ ID NO: 269853 - RNA, 20 nt, Human
agguaccuagcacuauuaug

SEQ ID NO: 269854 - RNA, 22 nt, Human
agguagagggggaggggccagg

SEQ ID NO: 269855 - RNA, 23 nt, Human
auagccagguauagaauagauac

SEQ ID NO: 269856 - RNA, 21 nt, Human
ccauagcaaggggucccuccc

SEQ ID NO: 269857 - RNA, 18 nt, Human
ccauagccagguauagaa

SEQ ID NO: 269858 - RNA, 24 nt, Human
ccccuacacccugccuggacccuc

SEQ ID NO: 269859 - RNA, 23 nt, Human
cccugccuggacccucucauucc

SEQ ID NO: 269860 - RNA, 20 nt, Human
cccugcucuggaccugaccc

SEQ ID NO: 269861 - RNA, 18 nt, Human
ccugccuggacccucuca

SEQ ID NO: 269862 - RNA, 21 nt, Human
cuaauacauuccccuacaccc

SEQ ID NO: 269863 - RNA, 21 nt, Human
cuacacccugccuggacccuc

SEQ ID NO: 269864 - RNA, 24 nt, Human
cucucauuccuccccaccucccaa

SEQ ID NO: 269865 - RNA, 18 nt, Human
cuggacccucucauuccu

SEQ ID NO: 269866 - RNA, 20 nt, Human
gaccugacccuuagggaagc

SEQ ID NO: 269867 - RNA, 18 nt, Human
gagguagagggggagggg

SEQ ID NO: 269868 - RNA, 22 nt, Human
gccugggggcuacugagguaga

SEQ ID NO: 269869 - RNA, 22 nt, Human
ggaagccccuuuauuuguccca

SEQ ID NO: 269870 - RNA, 24 nt, Human
ggacccucucauuccuccccaccu

SEQ ID NO: 269871 - RNA, 19 nt, Human
ggaggaagggagggaggaa

SEQ ID NO: 269872 - RNA, 18 nt, Human
gggggaggaagggaggga

SEQ ID NO: 269873 - RNA, 18 nt, Human
ggucccucccaugcaagg

SEQ ID NO: 269874 - RNA, 25 nt, Human
uaauacauuccccuacacccugccu

SEQ ID NO: 269875 - RNA, 27 nt, Human
uacccuucccuucucagccaucucagg

SEQ ID NO: 269876 - RNA, 23 nt, Human
uagaauagauacacugcugcgga

SEQ ID NO: 269877 - RNA, 25 nt, Human
uagaauagauacacugcugcggaug

SEQ ID NO: 269878 - RNA, 18 nt, Human
uagcaaggggucccuccc

SEQ ID NO: 269879 - RNA, 18 nt, Human
uauuaaggacauuucuag

SEQ ID NO: 269880 - RNA, 22 nt, Human
ucauuccuccccaccucccaag

SEQ ID NO: 269881 - RNA, 18 nt, Human
uccuccccaccucccaag

SEQ ID NO: 269882 - RNA, 23 nt, Human
ucuaaucccccuugugggcccug

SEQ ID NO: 269883 - RNA, 21 nt, Human
ucucauuccuccccaccuccc

SEQ ID NO: 269884 - RNA, 23 nt, Human
ucucccauagccagguauagaau

SEQ ID NO: 269885 - RNA, 23 nt, Human
uggacccucucauuccuccccac

SEQ ID NO: 269886 - RNA, 18 nt, Human
uggcuaaaggggccauag

SEQ ID NO: 269887 - RNA, 24 nt, Human
ugucccagaacugugggaaaagga

SEQ ID NO: 269888 - RNA, 21 nt, Human
ugugggcccugcucuggaccu

SEQ ID NO: 269889 - RNA, 19 nt, Human
uuaaggacauuucuagccc

SEQ ID NO: 269890 - RNA, 24 nt, Human
uuaaggacauuucuagcccacagg

SEQ ID NO: 269891 - RNA, 22 nt, Human
auaaacacauuugcaugcuaca

SEQ ID NO: 269892 - RNA, 23 nt, Human
cacuacauaaacacauuugcaug

SEQ ID NO: 269893 - RNA, 22 nt, Human
ccccgcggucgcccgcgaggcg

SEQ ID NO: 269894 - RNA, 21 nt, Human
ccuaggccaaaacccuacuuc

SEQ ID NO: 269895 - RNA, 19 nt, Human
cucuucccagcaagccccg

SEQ ID NO: 269896 - RNA, 27 nt, Human
gccauaacugaguuauuuuuuucauca

SEQ ID NO: 269897 - RNA, 21 nt, Human
gccccguuaccuaggccaaaa

SEQ ID NO: 269898 - RNA, 25 nt, Human
gccccguuaccuaggccaaaacccu

SEQ ID NO: 269899 - RNA, 19 nt, Human
uaccuaggccaaaacccua

SEQ ID NO: 269900 - RNA, 19 nt, Human
uaggccaaaacccuacuuc

SEQ ID NO: 269901 - RNA, 23 nt, Human
ucugccccguuaccuaggccaaa

SEQ ID NO: 269902 - RNA, 21 nt, Human
ucuucccagcaagccccgcgg

SEQ ID NO: 269903 - RNA, 21 nt, Human
ugaaaggugaccuggcuucgc

SEQ ID NO: 269904 - RNA, 23 nt, Human
uggcuucgccucucuucccagca

SEQ ID NO: 269905 - RNA, 20 nt, Human
aaacaaugugcacaaccuga

SEQ ID NO: 269906 - RNA, 21 nt, Human
aaugugcacaaccugaaugac

SEQ ID NO: 269907 - RNA, 20 nt, Human
acagcagaccacuguuuucc

SEQ ID NO: 269908 - RNA, 20 nt, Human
acugugaugcagcuggagca

SEQ ID NO: 269909 - RNA, 25 nt, Human
agaaaaacaaugugcacaaccugaa

SEQ ID NO: 269910 - RNA, 25 nt, Human
cacuuuuauuucuggaagucagaag

SEQ ID NO: 269911 - RNA, 20 nt, Human
cagcagaccacuguuuucca

SEQ ID NO: 269912 - RNA, 22 nt, Human
caggggcugccgagagcuggcc

SEQ ID NO: 269913 - RNA, 20 nt, Human
cauuccaaaacaaagcuaaa

SEQ ID NO: 269914 - RNA, 19 nt, Human
cccccaacuccauuaccua

SEQ ID NO: 269915 - RNA, 22 nt, Human
gcugaaaccacaggggcugccg

SEQ ID NO: 269916 - RNA, 24 nt, Human
gcugaaaccacaggggcugccgag

SEQ ID NO: 269917 - RNA, 22 nt, Human
gcuggagcagaaggcggcccgg

SEQ ID NO: 269918 - RNA, 19 nt, Human
uacuacaggauggauugcu

SEQ ID NO: 269919 - RNA, 18 nt, Human
ucccccaacuccauuacc

SEQ ID NO: 269920 - RNA, 19 nt, Human
ugaaaccacaggggcugcc

SEQ ID NO: 269921 - RNA, 20 nt, Human
ugaaugacacagagcggcac

SEQ ID NO: 269922 - RNA, 18 nt, Human
ugcacaaccugaaugaca

SEQ ID NO: 269923 - RNA, 22 nt, Human
ugcauuauuuacccucccccga

SEQ ID NO: 269924 - RNA, 22 nt, Human
ugccgagagcuggccuuucaca

SEQ ID NO: 269925 - RNA, 19 nt, Human
uucccccaacuccauuacc

SEQ ID NO: 269926 - RNA, 22 nt, Human
uucuggaagucagaagaaaaac

SEQ ID NO: 269927 - RNA, 23 nt, Human
uuugcauuauuuacccucccccg

SEQ ID NO: 269928 - RNA, 21 nt, Human
uuugugagaccccuucuucca

SEQ ID NO: 269929 - RNA, 20 nt, Human
uuuuugugagaccccuucuu

SEQ ID NO: 269930 - RNA, 25 nt, Human
uuuuuuuuuucccauggaaacacuu

SEQ ID NO: 269931 - RNA, 23 nt, Human
agagcccaggcucuggggcuguu

SEQ ID NO: 269932 - RNA, 20 nt, Human
aggagaacacauuuuuuuca

SEQ ID NO: 269933 - RNA, 24 nt, Human
auaggagaacacauuuuuuucaca

SEQ ID NO: 269934 - RNA, 18 nt, Human
cccaggcucuggggcugu

SEQ ID NO: 269935 - RNA, 23 nt, Human
gaggacaagaacacccugagaaa

SEQ ID NO: 269936 - RNA, 23 nt, Human
gaggguagaugaggacaagaaca

SEQ ID NO: 269937 - RNA, 23 nt, Human
gcucuggggcuguugcucuuaau

SEQ ID NO: 269938 - RNA, 22 nt, Human
gcuuuaugaggaauaggagaac

SEQ ID NO: 269939 - RNA, 20 nt, Human
uacuaaguccagcagagccc

SEQ ID NO: 269940 - RNA, 18 nt, Human
uagaugaggacaagaaca

SEQ ID NO: 269941 - RNA, 23 nt, Human
uauauuaagcuacuuugccucag

SEQ ID NO: 269942 - RNA, 21 nt, Human
uauuaagcuacuuugccucag

SEQ ID NO: 269943 - RNA, 19 nt, Human
ugaugaggccagaauaaag

SEQ ID NO: 269944 - RNA, 20 nt, Human
ugccucagugguugcaccau

SEQ ID NO: 269945 - RNA, 21 nt, Human
ugccucagugguugcaccauu

SEQ ID NO: 269946 - RNA, 20 nt, Human
uuuuuuuuuuugaugaggcc

SEQ ID NO: 269947 - RNA, 21 nt, Human
uuuuuuuuuuuugaugaggcc

SEQ ID NO: 269948 - RNA, 22 nt, Human
uuuuuuuuuuuuuuugaugagg

SEQ ID NO: 269949 - RNA, 22 nt, Human
aaaauuucuccaauaaccugua

SEQ ID NO: 269950 - RNA, 23 nt, Human
aacacgcucuuaauauaacagaa

SEQ ID NO: 269951 - RNA, 21 nt, Human
aagaaaacagaguaaauggua

SEQ ID NO: 269952 - RNA, 24 nt, Human
aagcuugccaacuucuuucccuga

SEQ ID NO: 269953 - RNA, 23 nt, Human
aauuuuaucaccagccacuugug

SEQ ID NO: 269954 - RNA, 22 nt, Human
acagaaauaucaucuuugaaac

SEQ ID NO: 269955 - RNA, 19 nt, Human
acucugucacccuggaaac

SEQ ID NO: 269956 - RNA, 18 nt, Human
agcugagguuaaccauaa

SEQ ID NO: 269957 - RNA, 23 nt, Human
caacaaaaggaaaauuucuccaa

SEQ ID NO: 269958 - RNA, 18 nt, Human
caacccuuugggaacaau

SEQ ID NO: 269959 - RNA, 23 nt, Human
caacuugugugaguacuuuauaa

SEQ ID NO: 269960 - RNA, 20 nt, Human
cacaaaugcaacaaaaggaa

SEQ ID NO: 269961 - RNA, 25 nt, Human
cacgggccagaaaacuaacuuccac

SEQ ID NO: 269962 - RNA, 22 nt, Human
cauugaaaaucuguaggaauuu

SEQ ID NO: 269963 - RNA, 19 nt, Human
cccugaacagcauuugucu

SEQ ID NO: 269964 - RNA, 19 nt, Human
cgccacucugucacccugg

SEQ ID NO: 269965 - RNA, 22 nt, Human
cucagaccugcucaaucgacca

SEQ ID NO: 269966 - RNA, 23 nt, Human
cucugucacccuggaaacagcuu

SEQ ID NO: 269967 - RNA, 18 nt, Human
gaaauaucaucuuugaaa

SEQ ID NO: 269968 - RNA, 19 nt, Human
gacuauaagaaaacagagu

SEQ ID NO: 269969 - RNA, 18 nt, Human
gcauuugucuuguuuuga

SEQ ID NO: 269970 - RNA, 18 nt, Human
gccagaaaacuaacuucc

SEQ ID NO: 269971 - RNA, 27 nt, Human
guaccaagucaauuucuuuaacuguac

SEQ ID NO: 269972 - RNA, 24 nt, Human
uaaaauuaagacuauaagaaaaca

SEQ ID NO: 269973 - RNA, 19 nt, Human
uaaaugauguauugaaccc

SEQ ID NO: 269974 - RNA, 22 nt, Human
uaaccuuaagcuugccaacuuc

SEQ ID NO: 269975 - RNA, 24 nt, Human
uaaguaccaagucaauuucuuuaa

SEQ ID NO: 269976 - RNA, 19 nt, Human
uaauuaaggaccuuuccuu

SEQ ID NO: 269977 - RNA, 24 nt, Human
uauaauaaaauuaagacuauaaga

SEQ ID NO: 269978 - RNA, 24 nt, Human
uauaauacaguaacaacaaaauau

SEQ ID NO: 269979 - RNA, 19 nt, Human
uauauuagaaacguacugc

SEQ ID NO: 269980 - RNA, 19 nt, Human
ucaccaauuuuaacagucu

SEQ ID NO: 269981 - RNA, 21 nt, Human
ucacuuuucuugauuacaaaa

SEQ ID NO: 269982 - RNA, 21 nt, Human
uccacaaaugcaacaaaagga

SEQ ID NO: 269983 - RNA, 19 nt, Human
ucccugaacagcauuuguc

SEQ ID NO: 269984 - RNA, 19 nt, Human
ucucagaccugcucaaucg

SEQ ID NO: 269985 - RNA, 24 nt, Human
ugaaacaacuugugugaguacuuu

SEQ ID NO: 269986 - RNA, 21 nt, Human
ugacgcacaacccuuugggaa

SEQ ID NO: 269987 - RNA, 20 nt, Human
ugauuaagaaaauuaaaggc

SEQ ID NO: 269988 - RNA, 24 nt, Human
uuaacagucuccuacauauuuucu

SEQ ID NO: 269989 - RNA, 22 nt, Human
uucaaauauaauacaguaacaa

SEQ ID NO: 269990 - RNA, 21 nt, Human
uucaauaaugacuaaaauaaa

SEQ ID NO: 269991 - RNA, 20 nt, Human
uucacagaaauaucaucuuu

SEQ ID NO: 269992 - RNA, 18 nt, Human
uuuacagaaacucuaccu

SEQ ID NO: 269993 - RNA, 24 nt, Human
uuucuauaucacuuuucuugauua

SEQ ID NO: 269994 - RNA, 19 nt, Human
aacccaaggaaaacuagcc

SEQ ID NO: 269995 - RNA, 19 nt, Human
aagugucuaaucauagggg

SEQ ID NO: 269996 - RNA, 21 nt, Human
aauggaauucuaucacaaagu

SEQ ID NO: 269997 - RNA, 18 nt, Human
acagauggccuccuuccu

SEQ ID NO: 269998 - RNA, 19 nt, Human
acugacaugcaaggcucug

SEQ ID NO: 269999 - RNA, 22 nt, Human
agaacccaaggaaaacuagccc

SEQ ID NO: 270000 - RNA, 24 nt, Human
agagguacaccaggguuuccaaag

SEQ ID NO: 270001 - RNA, 23 nt, Human
agauggccuccuuccuuccuguu

SEQ ID NO: 270002 - RNA, 23 nt, Human
agccuuugcacauccauuuucuu

SEQ ID NO: 270003 - RNA, 21 nt, Human
aggcaaaaagaggcugcagaa

SEQ ID NO: 270004 - RNA, 21 nt, Human
aggcaaaaagaggcugcaggg

SEQ ID NO: 270005 - RNA, 18 nt, Human
aggguuuccaaagacagu

SEQ ID NO: 270006 - RNA, 22 nt, Human
auccauuuucuucagaacccaa

SEQ ID NO: 270007 - RNA, 20 nt, Human
auguguauaccaagguccca

SEQ ID NO: 270008 - RNA, 23 nt, Human
cacugagagguacaccaggguuu

SEQ ID NO: 270009 - RNA, 19 nt, Human
cagcugugcaccuaagcag

SEQ ID NO: 270010 - RNA, 22 nt, Human
caggaagagcuggcuaauuuua

SEQ ID NO: 270011 - RNA, 19 nt, Human
ccuuugcacauccauuuuc

SEQ ID NO: 270012 - RNA, 24 nt, Human
gaaaaauaauucaauccaauuuac

SEQ ID NO: 270013 - RNA, 22 nt, Human
gaacccaaggaaaacuagccca

SEQ ID NO: 270014 - RNA, 18 nt, Human
ggaaagaacaggugaugu

SEQ ID NO: 270015 - RNA, 18 nt, Human
gggaaagaacaggugaug

SEQ ID NO: 270016 - RNA, 20 nt, Human
uaaaauaguaucaacgugca

SEQ ID NO: 270017 - RNA, 21 nt, Human
uacaccaggguuuccaaagac

SEQ ID NO: 270018 - RNA, 23 nt, Human
uacaccaggguuuccaaagacag

SEQ ID NO: 270019 - RNA, 19 nt, Human
uaccaaggucccacuugcu

SEQ ID NO: 270020 - RNA, 21 nt, Human
uagcccaucuugacagcucua

SEQ ID NO: 270021 - RNA, 25 nt, Human
uauugaacagcugugcaccuaagca

SEQ ID NO: 270022 - RNA, 20 nt, Human
ucaagaaaagggaaagaaca

SEQ ID NO: 270023 - RNA, 23 nt, Human
ugacaugcaaggcucugagaaaa

SEQ ID NO: 270024 - RNA, 21 nt, Human
uucucuguguauauugaacag

SEQ ID NO: 270025 - RNA, 24 nt, Human
uugaacagcugugcaccuaagcag

SEQ ID NO: 270026 - RNA, 21 nt, Human
uuucuguucucuguguauauu

SEQ ID NO: 270027 - RNA, 22 nt, Human
uuugaacagauggccuccuucc

SEQ ID NO: 270028 - RNA, 22 nt, Human
uuuuuuuuuuuuuuuuuuucag

SEQ ID NO: 270029 - RNA, 24 nt, Human
aaaacuagaagugauaccugagcu

SEQ ID NO: 270030 - RNA, 19 nt, Human
cccuggaggaaauccaagg

SEQ ID NO: 270031 - RNA, 22 nt, Human
uuaaaguaaaacuagaagugau

SEQ ID NO: 270032 - RNA, 21 nt, Human
uuuuuuuuuuuuuuuuuuugg

SEQ ID NO: 270033 - RNA, 22 nt, Human
agccccgaccccgacgagaagc

SEQ ID NO: 270034 - RNA, 23 nt, Human
agccgcgucgcccccgucuccuu

SEQ ID NO: 270035 - RNA, 22 nt, Human
ccccgaccccgacgagaagccc

SEQ ID NO: 270036 - RNA, 24 nt, Human
gagaagcccucagccgcgucgccc

SEQ ID NO: 270037 - RNA, 18 nt, Human
gagugugggccacggacc

SEQ ID NO: 270038 - RNA, 19 nt, Human
gcugcagccccgaccccga

SEQ ID NO: 270039 - RNA, 19 nt, Human
aaaagacgccaaaaccaag

SEQ ID NO: 270040 - RNA, 18 nt, Human
aaagagaccgccuggcug

SEQ ID NO: 270041 - RNA, 21 nt, Human
accacaugggccgacccaaaa

SEQ ID NO: 270042 - RNA, 19 nt, Human
auccucuaaagagaccgcc

SEQ ID NO: 270043 - RNA, 24 nt, Human
cccaaaagacgccaaaaccaagag

SEQ ID NO: 270044 - RNA, 23 nt, Human
cgacccaaaagacgccaaaacca

SEQ ID NO: 270045 - RNA, 21 nt, Human
gccaaaaccaagagcugcuca

SEQ ID NO: 270046 - RNA, 19 nt, Human
guggaacuguguacaggau

SEQ ID NO: 270047 - RNA, 20 nt, Human
ucaaaccacaugggccgacc

SEQ ID NO: 270048 - RNA, 22 nt, Human
ugcucaaaccacaugggccgac

SEQ ID NO: 270049 - RNA, 27 nt, Human
aacacauacaauuuaaauacaagucca

SEQ ID NO: 270050 - RNA, 19 nt, Human
aagaaugccaaaauguguc

SEQ ID NO: 270051 - RNA, 22 nt, Human
aagaaugccaaaauguguccuc

SEQ ID NO: 270052 - RNA, 18 nt, Human
agacauucgucacuauca

SEQ ID NO: 270053 - RNA, 18 nt, Human
aucagaaucacucuguca

SEQ ID NO: 270054 - RNA, 21 nt, Human
caaagaguaaaacacauacaa

SEQ ID NO: 270055 - RNA, 22 nt, Human
caagaaugccaaaauguguccu

SEQ ID NO: 270056 - RNA, 21 nt, Human
cucucucagcaaagccaaagg

SEQ ID NO: 270057 - RNA, 26 nt, Human
ucacuaucaucugaguccucucucag

SEQ ID NO: 270058 - RNA, 22 nt, Human
ucagcaaagccaaagggucuga

SEQ ID NO: 270059 - RNA, 19 nt, Human
ucaucugaguccucucuca

SEQ ID NO: 270060 - RNA, 18 nt, Human
accuccguccgggucccg

SEQ ID NO: 270061 - RNA, 19 nt, Human
cagcaggggcacccacagc

SEQ ID NO: 270062 - RNA, 22 nt, Human
cagcaggggcacccacagcugc

SEQ ID NO: 270063 - RNA, 20 nt, Human
cagucauacagagccacacc

SEQ ID NO: 270064 - RNA, 18 nt, Human
cauacagagccacacagc

SEQ ID NO: 270065 - RNA, 23 nt, Human
ccacacagcaggggcacccacag

SEQ ID NO: 270066 - RNA, 22 nt, Human
ccuaggucgcccgcuacagagg

SEQ ID NO: 270067 - RNA, 23 nt, Human
cucccggacgcgcugcccuggcc

SEQ ID NO: 270068 - RNA, 24 nt, Human
cuggccucuaccuccguccggguc

SEQ ID NO: 270069 - RNA, 23 nt, Human
ggcggcgggcgcggacuccgcuc

SEQ ID NO: 270070 - RNA, 20 nt, Human
ucauacagagccacacagca

SEQ ID NO: 270071 - RNA, 24 nt, Human
ucccggacgcgcugcccuggccuc

SEQ ID NO: 270072 - RNA, 27 nt, Human
uuuuuuuuuuuuuuucagguugcaggg

SEQ ID NO: 270073 - RNA, 23 nt, Human
uuuuuuuuuuuuuuuuuuucagg

SEQ ID NO: 270074 - RNA, 19 nt, Human
aaacggagguuggucaccu

SEQ ID NO: 270075 - RNA, 22 nt, Human
aaccacuaugaugcuuccaggu

SEQ ID NO: 270076 - RNA, 18 nt, Human
agaaaagagaagggcggg

SEQ ID NO: 270077 - RNA, 23 nt, Human
aggaaagcggagaagccgcuuaa

SEQ ID NO: 270078 - RNA, 22 nt, Human
caaccggaaacggagguugguc

SEQ ID NO: 270079 - RNA, 20 nt, Human
caaccggagccaaccggaaa

SEQ ID NO: 270080 - RNA, 21 nt, Human
cacggcaggaaagcggagaag

SEQ ID NO: 270081 - RNA, 25 nt, Human
ccaaccggaaacggagguuggucac

SEQ ID NO: 270082 - RNA, 19 nt, Human
ccucucaggacacucaacu

SEQ ID NO: 270083 - RNA, 21 nt, Human
cucaacucugcaaccggagcc

SEQ ID NO: 270084 - RNA, 22 nt, Human
cucacggcaggaaagcggagaa

SEQ ID NO: 270085 - RNA, 23 nt, Human
gguaacagauacuguagaaaaga

SEQ ID NO: 270086 - RNA, 19 nt, Human
uacaugagggacgcuggaa

SEQ ID NO: 270087 - RNA, 20 nt, Human
uacuguagaaaagagaaggg

SEQ ID NO: 270088 - RNA, 25 nt, Human
ucugcaaccggagccaaccggaaac

SEQ ID NO: 270089 - RNA, 21 nt, Human
ucuguaagggauaaaccagac

SEQ ID NO: 270090 - RNA, 25 nt, Human
uggaagucgauuauuuucccaacug

SEQ ID NO: 270091 - RNA, 25 nt, Human
uggguuagagauuccugaaucaggu

SEQ ID NO: 270092 - RNA, 19 nt, Human
agcagccgagggucaccua

SEQ ID NO: 270093 - RNA, 20 nt, Human
aucccugcagcagccgaggg

SEQ ID NO: 270094 - RNA, 22 nt, Human
cugaaggcuuuuauuugacugg

SEQ ID NO: 270095 - RNA, 22 nt, Human
cugcagucgcugcagaucccug

SEQ ID NO: 270096 - RNA, 20 nt, Human
cugguccauagggugggggg

SEQ ID NO: 270097 - RNA, 21 nt, Human
gcugcagucgcugcagauccc

SEQ ID NO: 270098 - RNA, 25 nt, Human
ucccugcagcagccgagggucaccu

SEQ ID NO: 270099 - RNA, 19 nt, Human
uccuacccggaaccacccu

SEQ ID NO: 270100 - RNA, 19 nt, Human
ugacugguccauagggugg

SEQ ID NO: 270101 - RNA, 22 nt, Human
ugacugguccauaggguggggg

SEQ ID NO: 270102 - RNA, 23 nt, Human
ugacugguccauagggugggggg

SEQ ID NO: 270103 - RNA, 20 nt, Human
ugaggggccugaaggcuuuu

SEQ ID NO: 270104 - RNA, 24 nt, Human
uuuuugaggggccugaaggcuuuu

SEQ ID NO: 270105 - RNA, 21 nt, Human
uuuuuugaggggccugaaggc

SEQ ID NO: 270106 - RNA, 20 nt, Human
uuuuuuuuuugaggggccug

SEQ ID NO: 270107 - RNA, 19 nt, Human
uuuuuuuuuuuuugagggg

SEQ ID NO: 270108 - RNA, 22 nt, Human
uuuuuuuuuuuuuuuuugaggg

SEQ ID NO: 270109 - RNA, 22 nt, Human
cccaaaagcccacgaagccucc

SEQ ID NO: 270110 - RNA, 18 nt, Human
guccuaguuagaggaccc

SEQ ID NO: 270111 - RNA, 20 nt, Human
uagaggacccaaaagcccac

SEQ ID NO: 270112 - RNA, 23 nt, Human
uagaggacccaaaagcccacgaa

SEQ ID NO: 270113 - RNA, 18 nt, Human
uaggaaugagggaguccu

SEQ ID NO: 270114 - RNA, 21 nt, Human
uccuaguuagaggacccaaaa

SEQ ID NO: 270115 - RNA, 21 nt, Human
gaccuuccccggccgcgcgga

SEQ ID NO: 270116 - RNA, 21 nt, Human
gcugaccuuccccggccgcgc

SEQ ID NO: 270117 - RNA, 18 nt, Human
uuuccauuucacugauuu

SEQ ID NO: 270118 - RNA, 22 nt, Human
uuuuuuuuuuuuuuuuccauuu

SEQ ID NO: 270119 - RNA, 26 nt, Human
uuuuuuuuuuuuuuuuuuuuccauuu

SEQ ID NO: 270120 - RNA, 24 nt, Human
uuuuuuuuuuuuuuuuuuuuuccu

SEQ ID NO: 270121 - RNA, 23 nt, Human
aguauuuuuauuucuuuuuauuu

SEQ ID NO: 270122 - RNA, 25 nt, Human
cagcuacaaucacuauacggagcaa

SEQ ID NO: 270123 - RNA, 24 nt, Human
uauuucuuuuuauuuaaugaugca

SEQ ID NO: 270124 - RNA, 24 nt, Human
ucacauauaacuuuuucucucaca

SEQ ID NO: 270125 - RNA, 23 nt, Human
uccagaggaacagcuacaaucac

SEQ ID NO: 270126 - RNA, 24 nt, Human
ucucacauuuacaacucaacagau

SEQ ID NO: 270127 - RNA, 21 nt, Human
aaagaaauaaaccuguaaagg

SEQ ID NO: 270128 - RNA, 25 nt, Human
aaagaaauaaaccuguaaaggauca

SEQ ID NO: 270129 - RNA, 21 nt, Human
auaaaccuguaaaggaucacu

SEQ ID NO: 270130 - RNA, 21 nt, Human
aucaaugcuuuuaagagcauc

SEQ ID NO: 270131 - RNA, 22 nt, Human
caaaacugggauccuaguagaa

SEQ ID NO: 270132 - RNA, 26 nt, Human
ccccggagccgcggaggcuguucugc

SEQ ID NO: 270133 - RNA, 19 nt, Human
cugcggcaaaacugggauc

SEQ ID NO: 270134 - RNA, 23 nt, Human
uaaaccuguaaaggaucacugca

SEQ ID NO: 270135 - RNA, 18 nt, Human
ucacugcacuacaguugu

SEQ ID NO: 270136 - RNA, 18 nt, Human
uccauuaauuaucugcgg

SEQ ID NO: 270137 - RNA, 21 nt, Human
ucuccccggagccgcggaggc

SEQ ID NO: 270138 - RNA, 18 nt, Human
ugggauccuaguagaagc

SEQ ID NO: 270139 - RNA, 21 nt, Human
uuaaccuuuacacacaauaca

SEQ ID NO: 270140 - RNA, 18 nt, Human
uuaauuaucugcggcaaa

SEQ ID NO: 270141 - RNA, 23 nt, Human
uuuucaaacugcaaaguugauaa

SEQ ID NO: 270142 - RNA, 22 nt, Human
aagccgcccucuuggaagcugg

SEQ ID NO: 270143 - RNA, 23 nt, Human
acacacacacacacacacacaca

SEQ ID NO: 270144 - RNA, 23 nt, Human
acacacacacacacacacacaca

SEQ ID NO: 270145 - RNA, 23 nt, Human
acacacacacacacacacacaca

SEQ ID NO: 270146 - RNA, 23 nt, Human
acacacacacacacacacacaca

SEQ ID NO: 270147 - RNA, 23 nt, Human
acacacacacacacacacacaca

SEQ ID NO: 270148 - RNA, 28 nt, Human
acacacacacacacacacacacagaggc

SEQ ID NO: 270149 - RNA, 25 nt, Human
acauacacacacacacacacacagu

SEQ ID NO: 270150 - RNA, 25 nt, Human
acccucuuuucucaggcagcucacu

SEQ ID NO: 270151 - RNA, 20 nt, Human
agaagccaugguagguuaga

SEQ ID NO: 270152 - RNA, 23 nt, Human
aggcagcucacucaguccccuca

SEQ ID NO: 270153 - RNA, 19 nt, Human
aggcaggggggaucaaacg

SEQ ID NO: 270154 - RNA, 23 nt, Human
auacacacacacacacacacaca

SEQ ID NO: 270155 - RNA, 19 nt, Human
caaagggcagcaugaggga

SEQ ID NO: 270156 - RNA, 20 nt, Human
cacacacacacacacacaca

SEQ ID NO: 270157 - RNA, 20 nt, Human
cacacacacacacacacaca

SEQ ID NO: 270158 - RNA, 20 nt, Human
cacacacacacacacacaca

SEQ ID NO: 270159 - RNA, 20 nt, Human
cacacacacacacacacaca

SEQ ID NO: 270160 - RNA, 20 nt, Human
cacacacacacacacacaca

SEQ ID NO: 270161 - RNA, 20 nt, Human
cacacacacacacacacaca

SEQ ID NO: 270162 - RNA, 20 nt, Human
cacacacacacacacacaca

SEQ ID NO: 270163 - RNA, 22 nt, Human
cacacacacacacacacacaca

SEQ ID NO: 270164 - RNA, 22 nt, Human
cacacacacacacacacacaca

SEQ ID NO: 270165 - RNA, 22 nt, Human
cacacacacacacacacacaca

SEQ ID NO: 270166 - RNA, 26 nt, Human
cacacacacacacacacacacacaca

SEQ ID NO: 270167 - RNA, 19 nt, Human
cacagaaagccugacagcc

SEQ ID NO: 270168 - RNA, 18 nt, Human
cacagugaagccgcccuc

SEQ ID NO: 270169 - RNA, 19 nt, Human
cacagugaagccgcccucu

SEQ ID NO: 270170 - RNA, 31 nt, Human
cacgaacauacacacacacacacacacacag

SEQ ID NO: 270171 - RNA, 19 nt, Human
cagaagaagcugauaggca

SEQ ID NO: 270172 - RNA, 22 nt, Human
cagcgcgccuccuucuuggcuu

SEQ ID NO: 270173 - RNA, 19 nt, Human
cagcucacucaguccccuc

SEQ ID NO: 270174 - RNA, 23 nt, Human
cagcuccuggcuggcuuuucugu

SEQ ID NO: 270175 - RNA, 22 nt, Human
ccaauuuccagugaggaacagg

SEQ ID NO: 270176 - RNA, 25 nt, Human
ccagcgcgccuccuucuuggcuucu

SEQ ID NO: 270177 - RNA, 20 nt, Human
cccacagcuccuggcuggcu

SEQ ID NO: 270178 - RNA, 21 nt, Human
cccucagcccuggaaaccagc

SEQ ID NO: 270179 - RNA, 21 nt, Human
ccucacucucugccucuccug

SEQ ID NO: 270180 - RNA, 21 nt, Human
ccuggcuggcuuuucuguucc

SEQ ID NO: 270181 - RNA, 22 nt, Human
cuccggcugcagacugcgggaa

SEQ ID NO: 270182 - RNA, 18 nt, Human
cuguucccuacccucuuu

SEQ ID NO: 270183 - RNA, 20 nt, Human
gcucacucaguccccucagc

SEQ ID NO: 270184 - RNA, 22 nt, Human
ggguccugugacucggcuucac

SEQ ID NO: 270185 - RNA, 25 nt, Human
guguacacgaacauacacacacaca

SEQ ID NO: 270186 - RNA, 27 nt, Human
guguacacgaacauacacacacacaca

SEQ ID NO: 270187 - RNA, 20 nt, Human
uacacacacacacacacaca

SEQ ID NO: 270188 - RNA, 25 nt, Human
uacacacacacacacacacacacac

SEQ ID NO: 270189 - RNA, 18 nt, Human
ucacucucugccucuccu

SEQ ID NO: 270190 - RNA, 24 nt, Human
uccccucagcccuggaaaccagcc

SEQ ID NO: 270191 - RNA, 22 nt, Human
uccggguccugugacucggcuu

SEQ ID NO: 270192 - RNA, 23 nt, Human
ucgcacagugaagccgcccucuu

SEQ ID NO: 270193 - RNA, 22 nt, Human
ucucaggcagcucacucagucc

SEQ ID NO: 270194 - RNA, 25 nt, Human
ugagaaaagagaagccaugguaggu

SEQ ID NO: 270195 - RNA, 25 nt, Human
uggaagcuggcagggucggggucgc

SEQ ID NO: 270196 - RNA, 19 nt, Human
uggaagcuggcagggucgu

SEQ ID NO: 270197 - RNA, 20 nt, Human
uggaagcuggcagggucguu

SEQ ID NO: 270198 - RNA, 18 nt, Human
ugugcaugccggccaggc

SEQ ID NO: 270199 - RNA, 23 nt, Human
ugugcaugccggccaggcccuuu

SEQ ID NO: 270200 - RNA, 20 nt, Human
uuccagugaggaacaggcuc

SEQ ID NO: 270201 - RNA, 25 nt, Human
uuccagugaggaacaggcuccacag

SEQ ID NO: 270202 - RNA, 18 nt, Human
uuuuuuuuuuuuaggccu

SEQ ID NO: 270203 - RNA, 26 nt, Human
uuuuuuuuuuuuuuuuaggccuaggg

SEQ ID NO: 270204 - RNA, 23 nt, Human
uuuuuuuuuuuuuuuuuuuuagg

SEQ ID NO: 270205 - RNA, 21 nt, Human
gucuaggauccacaugcguuc

SEQ ID NO: 270206 - RNA, 24 nt, Human
uuuuuuuuuuuuaagucuaaguag

SEQ ID NO: 270207 - RNA, 18 nt, Human
gagauauagucagugcca

SEQ ID NO: 270208 - RNA, 22 nt, Human
uuuuuuuuuuuuuuuuguaguu

SEQ ID NO: 270209 - RNA, 19 nt, Human
cucgugcccuugacucuuc

SEQ ID NO: 270210 - RNA, 21 nt, Human
uacacacuuugacaaggaggu

SEQ ID NO: 270211 - RNA, 24 nt, Human
uaggauggagcaauccuuuauuuu

SEQ ID NO: 270212 - RNA, 27 nt, Human
uccaguggagaacagagaacaggaaaa

SEQ ID NO: 270213 - RNA, 22 nt, Human
ucucuggccgccgcuucagaac

SEQ ID NO: 270214 - RNA, 23 nt, Human
uucucuggccgccgcuucagaac

SEQ ID NO: 270215 - RNA, 25 nt, Human
uuuuuuuuuuuuuuuuuuuuuuagg

SEQ ID NO: 270216 - RNA, 22 nt, Human
acagcaacacccuuuauucagc

SEQ ID NO: 270217 - RNA, 19 nt, Human
agcaccaggaauacccuuc

SEQ ID NO: 270218 - RNA, 20 nt, Human
agcaccaggaauacccuucg

SEQ ID NO: 270219 - RNA, 27 nt, Human
cagcaacacccuuuauucagcaccagu

SEQ ID NO: 270220 - RNA, 18 nt, Human
cagcaccaggaauacccu

SEQ ID NO: 270221 - RNA, 23 nt, Human
cagcaccaggaauacccuucgca

SEQ ID NO: 270222 - RNA, 21 nt, Human
cgcacagaaccagcgagcuuc

SEQ ID NO: 270223 - RNA, 23 nt, Human
cggaaaugcucacaggaugcugc

SEQ ID NO: 270224 - RNA, 23 nt, Human
cgggacccccggcgugccacacg

SEQ ID NO: 270225 - RNA, 24 nt, Human
cuucgcacagaaccagcgagcuuc

SEQ ID NO: 270226 - RNA, 24 nt, Human
ucagccaugacagcaacacccuuu

SEQ ID NO: 270227 - RNA, 27 nt, Human
uccccgcggaaaugcucacaggaugcu

SEQ ID NO: 270228 - RNA, 23 nt, Human
uuuucagccaugacagcaacacc

SEQ ID NO: 270229 - RNA, 24 nt, Human
uuuuuuuuuuuuuuuuucagccau

SEQ ID NO: 270230 - RNA, 24 nt, Human
uuuuuuuuuuuuuuuuuuuuucag

SEQ ID NO: 270231 - RNA, 24 nt, Human
aggcuccggcggcggcggcggcgg

SEQ ID NO: 270232 - RNA, 21 nt, Human
cggcagcccgagggcagguuu

SEQ ID NO: 270233 - RNA, 19 nt, Human
cggcggcggcggcggcggc

SEQ ID NO: 270234 - RNA, 21 nt, Human
cucacgggacacaagcaggcu

SEQ ID NO: 270235 - RNA, 19 nt, Human
ggcuccggcggcggcggcg

SEQ ID NO: 270236 - RNA, 23 nt, Human
gggacacaagcaggcuggggaca

SEQ ID NO: 270237 - RNA, 18 nt, Human
ugacaaccucacgggaca

SEQ ID NO: 270238 - RNA, 21 nt, Human
uggcggcagcccgagggcagg

SEQ ID NO: 270239 - RNA, 21 nt, Human
uuuuuuuuuuuggcggcagcc

SEQ ID NO: 270240 - RNA, 18 nt, Human
uuuuuuuuuuuuuuuuug

SEQ ID NO: 270241 - RNA, 22 nt, Human
uuuuuuuuuuuuuuuuuggcgg

SEQ ID NO: 270242 - RNA, 22 nt, Human
uuuuuuuuuuuuuuuuuuuggc

SEQ ID NO: 270243 - RNA, 21 nt, Human
agcaggggcugcaggccggug

SEQ ID NO: 270244 - RNA, 19 nt, Human
ggcagcaggggcugcaggc

SEQ ID NO: 270245 - RNA, 24 nt, Human
gggaggcggaggcuacacuguagg

SEQ ID NO: 270246 - RNA, 22 nt, Human
ggggcugcaggccgguggggcg

SEQ ID NO: 270247 - RNA, 18 nt, Human
gguuuuauugggcagcag

SEQ ID NO: 270248 - RNA, 24 nt, Human
ugggcagcaggggcugcaggccgg

SEQ ID NO: 270249 - RNA, 23 nt, Human
uuauugggcagcaggggcugcag

SEQ ID NO: 270250 - RNA, 19 nt, Human
ccacauggauagacgcagg

SEQ ID NO: 270251 - RNA, 19 nt, Human
ucaccuucauagcacugag

SEQ ID NO: 270252 - RNA, 22 nt, Human
uccacauggauagacgcaggac

SEQ ID NO: 270253 - RNA, 21 nt, Human
uuggagggugggcagcacucg

SEQ ID NO: 270254 - RNA, 19 nt, Human
uuuuuuuuuuuggagggug

SEQ ID NO: 270255 - RNA, 18 nt, Human
uuuuuuuuuuuuggaggg

SEQ ID NO: 270256 - RNA, 19 nt, Human
uuuuuuuuuuuuuuggagg

SEQ ID NO: 270257 - RNA, 24 nt, Human
uuuuuuuuuuuuuuuuuuggaggg

SEQ ID NO: 270258 - RNA, 28 nt, Human
uuuuuuuuuuuuuuuuuuuuuuuggggg

SEQ ID NO: 270259 - RNA, 23 nt, Human
aaacaccgaaggccaccagccac

SEQ ID NO: 270260 - RNA, 25 nt, Human
aaacaccgaaggccaccagccacaa

SEQ ID NO: 270261 - RNA, 25 nt, Human
aagucugaagucaggguguuggcug

SEQ ID NO: 270262 - RNA, 22 nt, Human
aaugaacacccuuguuucucuu

SEQ ID NO: 270263 - RNA, 22 nt, Human
accagccacaacccggagggcg

SEQ ID NO: 270264 - RNA, 20 nt, Human
accgcggaaaaagauccaga

SEQ ID NO: 270265 - RNA, 22 nt, Human
agaauucuuccucaucuuucuc

SEQ ID NO: 270266 - RNA, 19 nt, Human
caaacccgaaacaccgaag

SEQ ID NO: 270267 - RNA, 20 nt, Human
cagaaccagcccuaccccgu

SEQ ID NO: 270268 - RNA, 20 nt, Human
caggaugcagugaagacggu

SEQ ID NO: 270269 - RNA, 21 nt, Human
caggcuuucagugggcugggg

SEQ ID NO: 270270 - RNA, 27 nt, Human
cccucugugggcuuguccagcaggagc

SEQ ID NO: 270271 - RNA, 19 nt, Human
cgaaacaccgaaggccacc

SEQ ID NO: 270272 - RNA, 18 nt, Human
cucaucuuucucuuggcu

SEQ ID NO: 270273 - RNA, 19 nt, Human
cucaucuuucucuuggcuu

SEQ ID NO: 270274 - RNA, 20 nt, Human
cugggccacgcuccuucuga

SEQ ID NO: 270275 - RNA, 20 nt, Human
cuugaauuauggccacauaa

SEQ ID NO: 270276 - RNA, 24 nt, Human
cuuguuucucuucccuuucugguc

SEQ ID NO: 270277 - RNA, 24 nt, Human
cuuucugcucaccaggcuuucagu

SEQ ID NO: 270278 - RNA, 18 nt, Human
gaaacaccgaaggccacc

SEQ ID NO: 270279 - RNA, 18 nt, Human
gaaaggaugaacauuagg

SEQ ID NO: 270280 - RNA, 20 nt, Human
gaagcugggcccucuguggg

SEQ ID NO: 270281 - RNA, 21 nt, Human
gagcaggagccguucaggaaa

SEQ ID NO: 270282 - RNA, 20 nt, Human
gccaaacccgaaacaccgaa

SEQ ID NO: 270283 - RNA, 21 nt, Human
gccaaacccgaaacaccgaag

SEQ ID NO: 270284 - RNA, 23 nt, Human
ggaaaaagauccagaaccagccc

SEQ ID NO: 270285 - RNA, 24 nt, Human
ggcuucugguguugccagcaaucc

SEQ ID NO: 270286 - RNA, 19 nt, Human
uaccgcggaaaaagaucca

SEQ ID NO: 270287 - RNA, 19 nt, Human
uaggcaaguacuuggaauc

SEQ ID NO: 270288 - RNA, 18 nt, Human
uauuuuugcacuccagga

SEQ ID NO: 270289 - RNA, 20 nt, Human
ucaggguguuggcugggcca

SEQ ID NO: 270290 - RNA, 23 nt, Human
uccuaccagugaaugaacacccu

SEQ ID NO: 270291 - RNA, 20 nt, Human
ucuagaggaaaggaugaaca

SEQ ID NO: 270292 - RNA, 24 nt, Human
ucucuucccuuucugcucaccagg

SEQ ID NO: 270293 - RNA, 22 nt, Human
ucucuuggcuucugguguugcc

SEQ ID NO: 270294 - RNA, 22 nt, Human
ucugcucaccaggcuuucagug

SEQ ID NO: 270295 - RNA, 21 nt, Human
ucugucuucucccuucucagg

SEQ ID NO: 270296 - RNA, 19 nt, Human
ugaacugccaaacccgaaa

SEQ ID NO: 270297 - RNA, 18 nt, Human
ugagugaacugccaaacc

SEQ ID NO: 270298 - RNA, 23 nt, Human
ugaguucuggaggccagaagucu

SEQ ID NO: 270299 - RNA, 21 nt, Human
uggauuuuauuuuugcacucc

SEQ ID NO: 270300 - RNA, 18 nt, Human
uggcugggccacgcuccu

SEQ ID NO: 270301 - RNA, 18 nt, Human
uggcuucugguguugccu

SEQ ID NO: 270302 - RNA, 18 nt, Human
ugggcuggggcuauuggc

SEQ ID NO: 270303 - RNA, 19 nt, Human
uuccucaucuuucucuugg

SEQ ID NO: 270304 - RNA, 20 nt, Human
uucugcucaccaggcuuuca

SEQ ID NO: 270305 - RNA, 22 nt, Human
uugcacuccaggaugcagugaa

SEQ ID NO: 270306 - RNA, 21 nt, Human
uuuuauuuuugcacuccagga

SEQ ID NO: 270307 - RNA, 20 nt, Human
uuuugcacuccaggaugcag

SEQ ID NO: 270308 - RNA, 20 nt, Human
aaagaagacuaugaaaagaa

SEQ ID NO: 270309 - RNA, 20 nt, Human
aacauguuuauaauggagaa

SEQ ID NO: 270310 - RNA, 18 nt, Human
aagacaaaagcaaagagc

SEQ ID NO: 270311 - RNA, 18 nt, Human
aagcagauuauaaugugc

SEQ ID NO: 270312 - RNA, 19 nt, Human
aaggaaaacuaugaaaaga

SEQ ID NO: 270313 - RNA, 24 nt, Human
aaggaaaacuaugaaaagacaaaa

SEQ ID NO: 270314 - RNA, 21 nt, Human
aaggaaaagcagauuauaaug

SEQ ID NO: 270315 - RNA, 23 nt, Human
aagugacaaacuauacaaggaaa

SEQ ID NO: 270316 - RNA, 23 nt, Human
aauuagaaauaauaagcauuagc

SEQ ID NO: 270317 - RNA, 22 nt, Human
acaaagaagacuaugaaaagaa

SEQ ID NO: 270318 - RNA, 21 nt, Human
accaaauaaauuuccucagca

SEQ ID NO: 270319 - RNA, 21 nt, Human
acuaugaaaagaauaaaggaa

SEQ ID NO: 270320 - RNA, 21 nt, Human
agaaauaauaagcauuagccg

SEQ ID NO: 270321 - RNA, 21 nt, Human
agaacccacagcuuaggcagc

SEQ ID NO: 270322 - RNA, 20 nt, Human
agaacuuagguaacagugga

SEQ ID NO: 270323 - RNA, 18 nt, Human
agagaacccacagcuuag

SEQ ID NO: 270324 - RNA, 23 nt, Human
aggcagcugaaggcagcaggaga

SEQ ID NO: 270325 - RNA, 24 nt, Human
auaauggagaaagacucuaggcac

SEQ ID NO: 270326 - RNA, 22 nt, Human
auuagaaauaauaagcauuagc

SEQ ID NO: 270327 - RNA, 22 nt, Human
caaaagcaaagagcauaaauua

SEQ ID NO: 270328 - RNA, 23 nt, Human
cacagaaauaauauugcagaagc

SEQ ID NO: 270329 - RNA, 24 nt, Human
cagaaaaaccauaggcagcuugag

SEQ ID NO: 270330 - RNA, 21 nt, Human
cagaaauaauauugcagaagc

SEQ ID NO: 270331 - RNA, 24 nt, Human
cagcaaaauacaaagaagacuaug

SEQ ID NO: 270332 - RNA, 20 nt, Human
caggagaugcccuaagugac

SEQ ID NO: 270333 - RNA, 24 nt, Human
cccacagcuuaggcagcugaaggc

SEQ ID NO: 270334 - RNA, 24 nt, Human
ccgaaacauugacugcaggaucug

SEQ ID NO: 270335 - RNA, 22 nt, Human
ccugcuucagagaacccacagc

SEQ ID NO: 270336 - RNA, 22 nt, Human
cuaccaaauaaauuuccucagc

SEQ ID NO: 270337 - RNA, 22 nt, Human
cugaaggcagcaggagaugccc

SEQ ID NO: 270338 - RNA, 23 nt, Human
cugaaggcagcaggagaugcccc

SEQ ID NO: 270339 - RNA, 21 nt, Human
cugcuucagagaacccacagc

SEQ ID NO: 270340 - RNA, 22 nt, Human
cuucagagaacccacagcuuag

SEQ ID NO: 270341 - RNA, 23 nt, Human
gaaaacuaugaaaagacaaaagc

SEQ ID NO: 270342 - RNA, 21 nt, Human
gaaaagacaaaagcaaagagc

SEQ ID NO: 270343 - RNA, 21 nt, Human
gagaacuuagguaacagugga

SEQ ID NO: 270344 - RNA, 20 nt, Human
gcagcaaaauacaaagaaga

SEQ ID NO: 270345 - RNA, 21 nt, Human
ggaaaaggugaacaucucugc

SEQ ID NO: 270346 - RNA, 19 nt, Human
ggucugagggaagaagccu

SEQ ID NO: 270347 - RNA, 19 nt, Human
uaaaggaaaagcagauuau

SEQ ID NO: 270348 - RNA, 22 nt, Human
uaaagugucuguucugcaacuu

SEQ ID NO: 270349 - RNA, 25 nt, Human
uaaaucacauugacacagaaaaacc

SEQ ID NO: 270350 - RNA, 18 nt, Human
uaagcauuagcaaucagc

SEQ ID NO: 270351 - RNA, 19 nt, Human
uaccauaaaucacauugac

SEQ ID NO: 270352 - RNA, 24 nt, Human
uaugaaaagacaaaagcaaagagc

SEQ ID NO: 270353 - RNA, 20 nt, Human
uauucugcuuuguaguuuua

SEQ ID NO: 270354 - RNA, 22 nt, Human
uauugcagaagcuuuuaaagug

SEQ ID NO: 270355 - RNA, 25 nt, Human
ucaaggcaaugggguuauuuucuuc

SEQ ID NO: 270356 - RNA, 18 nt, Human
uccugcuucagagaaccc

SEQ ID NO: 270357 - RNA, 24 nt, Human
ucuaaaccgaaacauugacugcag

SEQ ID NO: 270358 - RNA, 18 nt, Human
ucuguaaguccugcagac

SEQ ID NO: 270359 - RNA, 22 nt, Human
ugaaaagaauaaaggaaaagca

SEQ ID NO: 270360 - RNA, 25 nt, Human
ugaaaagaauaaaggaaaagcagau

SEQ ID NO: 270361 - RNA, 23 nt, Human
ugaaaagacaaaagcaaagagca

SEQ ID NO: 270362 - RNA, 22 nt, Human
ugaauuagaaauaauaagcauu

SEQ ID NO: 270363 - RNA, 23 nt, Human
ugaauuagaaauaauaagcauua

SEQ ID NO: 270364 - RNA, 19 nt, Human
ugaguuauggucugaggga

SEQ ID NO: 270365 - RNA, 20 nt, Human
ugcuucagagaacccacagc

SEQ ID NO: 270366 - RNA, 20 nt, Human
ugggguuauuuucuucccga

SEQ ID NO: 270367 - RNA, 23 nt, Human
uuagagguuuuauuaguugcugg

SEQ ID NO: 270368 - RNA, 23 nt, Human
uuccugcuucagagaacccacag

SEQ ID NO: 270369 - RNA, 19 nt, Human
uuuaaagugucuguucugc

SEQ ID NO: 270370 - RNA, 22 nt, Human
aaaagcaaaaaaaacggaaaag

SEQ ID NO: 270371 - RNA, 22 nt, Human
aaacagaagccaaacuguacaa

SEQ ID NO: 270372 - RNA, 19 nt, Human
aaacagauaugggguuuua

SEQ ID NO: 270373 - RNA, 27 nt, Human
aaaccaugaacacaauuagcagcacca

SEQ ID NO: 270374 - RNA, 21 nt, Human
aaagcucucccaccuccauau

SEQ ID NO: 270375 - RNA, 24 nt, Human
aaaggaaaccaugaacacaauuag

SEQ ID NO: 270376 - RNA, 22 nt, Human
aaaugcccuugcccaagccuca

SEQ ID NO: 270377 - RNA, 23 nt, Human
aacaacugccaacacuaccaaau

SEQ ID NO: 270378 - RNA, 23 nt, Human
aacauauaaggcagauaucccca

SEQ ID NO: 270379 - RNA, 22 nt, Human
aagagcauaaaaaggacuuaga

SEQ ID NO: 270380 - RNA, 26 nt, Human
aagcaaacagaagccaaacuguacaa

SEQ ID NO: 270381 - RNA, 19 nt, Human
aagcaucuuuucaaaguau

SEQ ID NO: 270382 - RNA, 21 nt, Human
aauccguuaaacacaggguug

SEQ ID NO: 270383 - RNA, 19 nt, Human
aaugggacugugaugcagu

SEQ ID NO: 270384 - RNA, 22 nt, Human
acagaauaauaaccacagaagc

SEQ ID NO: 270385 - RNA, 22 nt, Human
acagcuaagaaguuucaaacac

SEQ ID NO: 270386 - RNA, 19 nt, Human
accacagaagcaacauaca

SEQ ID NO: 270387 - RNA, 21 nt, Human
accagacuguccuucugccac

SEQ ID NO: 270388 - RNA, 26 nt, Human
acugcaaguguguaaacaauaacaag

SEQ ID NO: 270389 - RNA, 21 nt, Human
acuggcuucuguuacauuuuc

SEQ ID NO: 270390 - RNA, 21 nt, Human
agaauaauaaccacagaagca

SEQ ID NO: 270391 - RNA, 20 nt, Human
agagauucugggaaaacuac

SEQ ID NO: 270392 - RNA, 23 nt, Human
agauaccuguugccaaaccaaag

SEQ ID NO: 270393 - RNA, 25 nt, Human
agcaaacagaagccaaacuguacaa

SEQ ID NO: 270394 - RNA, 18 nt, Human
aggcagauauccccaaga

SEQ ID NO: 270395 - RNA, 22 nt, Human
agggaacaaggaaauuucucug

SEQ ID NO: 270396 - RNA, 18 nt, Human
aguggacagagaggggcu

SEQ ID NO: 270397 - RNA, 19 nt, Human
auaaaagagcauaaaaagg

SEQ ID NO: 270398 - RNA, 27 nt, Human
auaaccacagaagcaacauacaaugcc

SEQ ID NO: 270399 - RNA, 23 nt, Human
aucagucacccuuuuugcuucaa

SEQ ID NO: 270400 - RNA, 23 nt, Human
augacauuccuguuucauucccu

SEQ ID NO: 270401 - RNA, 24 nt, Human
auggagaggauaaggaaagacugu

SEQ ID NO: 270402 - RNA, 23 nt, Human
auucccuuaaaaaugauuuagaa

SEQ ID NO: 270403 - RNA, 21 nt, Human
caaaagaagacaccagaucau

SEQ ID NO: 270404 - RNA, 22 nt, Human
caaagcuguucaauggaacacc

SEQ ID NO: 270405 - RNA, 24 nt, Human
caaaggugggagggaagcacgugg

SEQ ID NO: 270406 - RNA, 25 nt, Human
caacucuauauaaauccacaaagaa

SEQ ID NO: 270407 - RNA, 21 nt, Human
caaguucaguuuauuuuugua

SEQ ID NO: 270408 - RNA, 21 nt, Human
cacacuucacuccuuaucuca

SEQ ID NO: 270409 - RNA, 23 nt, Human
caccuuuaauaucugaggagcau

SEQ ID NO: 270410 - RNA, 24 nt, Human
cagaaggguucaauagccaaucaa

SEQ ID NO: 270411 - RNA, 18 nt, Human
cagacuguccuucugcca

SEQ ID NO: 270412 - RNA, 22 nt, Human
cagaguuaagagaauuggcuug

SEQ ID NO: 270413 - RNA, 24 nt, Human
cagcaccaggcguccagacacaaa

SEQ ID NO: 270414 - RNA, 20 nt, Human
cagcauggagaggauaagga

SEQ ID NO: 270415 - RNA, 25 nt, Human
cagccaaacccccuuaaaagaaguc

SEQ ID NO: 270416 - RNA, 21 nt, Human
caggucacaguaaacggcaca

SEQ ID NO: 270417 - RNA, 23 nt, Human
caggucacaguaaacggcacaaa

SEQ ID NO: 270418 - RNA, 18 nt, Human
caucaaccacaauucuac

SEQ ID NO: 270419 - RNA, 21 nt, Human
caugaaggauucauuuugcca

SEQ ID NO: 270420 - RNA, 19 nt, Human
caugcacgagauaccuguu

SEQ ID NO: 270421 - RNA, 22 nt, Human
ccaagccucagcccuauuuagc

SEQ ID NO: 270422 - RNA, 24 nt, Human
cccaagccucagcccuauuuagcc

SEQ ID NO: 270423 - RNA, 22 nt, Human
cccacacuucacuccuuaucuc

SEQ ID NO: 270424 - RNA, 22 nt, Human
ccugcauuuauuuuuucaacuu

SEQ ID NO: 270425 - RNA, 20 nt, Human
ccuugcccaagccucagccc

SEQ ID NO: 270426 - RNA, 18 nt, Human
cucaagagagagaggauc

SEQ ID NO: 270427 - RNA, 19 nt, Human
cucaagagagagaggaucc

SEQ ID NO: 270428 - RNA, 22 nt, Human
cucuauauaaauccacaaagaa

SEQ ID NO: 270429 - RNA, 19 nt, Human
cugcaucuucuucaagaaa

SEQ ID NO: 270430 - RNA, 26 nt, Human
gacaaacaagaguaaucaaaaaggca

SEQ ID NO: 270431 - RNA, 18 nt, Human
gacccguacaucuuagca

SEQ ID NO: 270432 - RNA, 22 nt, Human
gagaaaauuugcucaaagauuc

SEQ ID NO: 270433 - RNA, 19 nt, Human
gagauucugggaaaacuac

SEQ ID NO: 270434 - RNA, 22 nt, Human
gagcauacuagacaaacaagag

SEQ ID NO: 270435 - RNA, 19 nt, Human
gauaugggguuuuaucacu

SEQ ID NO: 270436 - RNA, 22 nt, Human
gaucccuaaggccaccagucaa

SEQ ID NO: 270437 - RNA, 19 nt, Human
gauucugggaaaacuacuc

SEQ ID NO: 270438 - RNA, 20 nt, Human
gcaaaaaaaacggaaaagga

SEQ ID NO: 270439 - RNA, 22 nt, Human
gccaacacuaccaaauuauggc

SEQ ID NO: 270440 - RNA, 18 nt, Human
gccaaguugucuuaaaag

SEQ ID NO: 270441 - RNA, 18 nt, Human
gcccuugcccaagccuca

SEQ ID NO: 270442 - RNA, 24 nt, Human
gcuacacugcaaguguguaaacag

SEQ ID NO: 270443 - RNA, 20 nt, Human
gcucagcaauucauugcaug

SEQ ID NO: 270444 - RNA, 23 nt, Human
ggaaaacuacucagcucuaacac

SEQ ID NO: 270445 - RNA, 19 nt, Human
ggaagaagucggcauuuuc

SEQ ID NO: 270446 - RNA, 19 nt, Human
ggaagcacguggaaagugg

SEQ ID NO: 270447 - RNA, 22 nt, Human
gggugauuccaaagugacagcu

SEQ ID NO: 270448 - RNA, 23 nt, Human
gguccugacauucuguggaacug

SEQ ID NO: 270449 - RNA, 20 nt, Human
ggugcugcuuccuaaaugcu

SEQ ID NO: 270450 - RNA, 21 nt, Human
gugcuuguggaaacugugcuu

SEQ ID NO: 270451 - RNA, 18 nt, Human
guggcuagauuuccauuc

SEQ ID NO: 270452 - RNA, 18 nt, Human
gugugucuaauugucaaa

SEQ ID NO: 270453 - RNA, 19 nt, Human
uaaaaaggacuuagagauu

SEQ ID NO: 270454 - RNA, 25 nt, Human
uaaaagcaaaaaaaacggaaaagga

SEQ ID NO: 270455 - RNA, 24 nt, Human
uaaaauauuacuauagaauaggca

SEQ ID NO: 270456 - RNA, 18 nt, Human
uaaaucgcuuauuuacua

SEQ ID NO: 270457 - RNA, 21 nt, Human
uaacaacugccaacacuacca

SEQ ID NO: 270458 - RNA, 22 nt, Human
uaacagcaacuggauuacaaag

SEQ ID NO: 270459 - RNA, 21 nt, Human
uaaccagacuguccuucugcc

SEQ ID NO: 270460 - RNA, 27 nt, Human
uaaggaaagacuguggcacauuggaaa

SEQ ID NO: 270461 - RNA, 21 nt, Human
uaagugaaugccaccccguug

SEQ ID NO: 270462 - RNA, 21 nt, Human
uacaaaaauacauuucccaga

SEQ ID NO: 270463 - RNA, 22 nt, Human
uacacugcaaguguguaaacaa

SEQ ID NO: 270464 - RNA, 18 nt, Human
uaccagucagccuaggga

SEQ ID NO: 270465 - RNA, 22 nt, Human
uacuuugcucaagagagagagg

SEQ ID NO: 270466 - RNA, 18 nt, Human
uagagugcgaugcagcag

SEQ ID NO: 270467 - RNA, 18 nt, Human
uagaucccuaaggccacc

SEQ ID NO: 270468 - RNA, 24 nt, Human
uauaaggcagauauccccaagacc

SEQ ID NO: 270469 - RNA, 21 nt, Human
ucaacucuauauaaauccaca

SEQ ID NO: 270470 - RNA, 24 nt, Human
ucaauaauaggaacgcgcagugca

SEQ ID NO: 270471 - RNA, 21 nt, Human
ucagcccagaggucauuccuu

SEQ ID NO: 270472 - RNA, 22 nt, Human
ucaguuuucauugcgguucuua

SEQ ID NO: 270473 - RNA, 18 nt, Human
uccaaaaggcauggaaua

SEQ ID NO: 270474 - RNA, 19 nt, Human
uccagaauuugaauaccau

SEQ ID NO: 270475 - RNA, 19 nt, Human
uccauaccacagugcccuu

SEQ ID NO: 270476 - RNA, 22 nt, Human
uccauaccacagugcccuugag

SEQ ID NO: 270477 - RNA, 20 nt, Human
uccaugggcaguugauaacc

SEQ ID NO: 270478 - RNA, 19 nt, Human
uccuacaaggugcuugugg

SEQ ID NO: 270479 - RNA, 20 nt, Human
uccuuuuccauaccacagug

SEQ ID NO: 270480 - RNA, 25 nt, Human
ucuacaaaaauacauuucccagaag

SEQ ID NO: 270481 - RNA, 21 nt, Human
ucuccugagaugcuuaacauc

SEQ ID NO: 270482 - RNA, 20 nt, Human
ucucugaugacauuccuguu

SEQ ID NO: 270483 - RNA, 24 nt, Human
ucucuggugcucuggcagaaauug

SEQ ID NO: 270484 - RNA, 18 nt, Human
ucugaggagcaucccacu

SEQ ID NO: 270485 - RNA, 23 nt, Human
ugaaaacgagguacaucccuuga

SEQ ID NO: 270486 - RNA, 18 nt, Human
ugaacacaauuagcagca

SEQ ID NO: 270487 - RNA, 21 nt, Human
ugaaguucaucuuguguagug

SEQ ID NO: 270488 - RNA, 19 nt, Human
ugacucaaaagcaaaacgg

SEQ ID NO: 270489 - RNA, 21 nt, Human
ugagagaaaccagccaaaccc

SEQ ID NO: 270490 - RNA, 19 nt, Human
ugagcauagacuugggucc

SEQ ID NO: 270491 - RNA, 24 nt, Human
ugcaacaucuuguucaguuuuagu

SEQ ID NO: 270492 - RNA, 21 nt, Human
ugcacgagauaccuguugcca

SEQ ID NO: 270493 - RNA, 21 nt, Human
ugcccuugcccaagccucagc

SEQ ID NO: 270494 - RNA, 18 nt, Human
ugccugugugguguaugg

SEQ ID NO: 270495 - RNA, 22 nt, Human
ugcucucugugcuuggacauuu

SEQ ID NO: 270496 - RNA, 22 nt, Human
uggagaggauaaggaaagacug

SEQ ID NO: 270497 - RNA, 21 nt, Human
uggcguccuuuuccauaccac

SEQ ID NO: 270498 - RNA, 19 nt, Human
ugggaucaucaagagccuc

SEQ ID NO: 270499 - RNA, 27 nt, Human
uguaaaauaauggccaaguugucuuaa

SEQ ID NO: 270500 - RNA, 22 nt, Human
uguaaacaauaacaagaagaca

SEQ ID NO: 270501 - RNA, 24 nt, Human
uguaucaaacuguuccuugugcuu

SEQ ID NO: 270502 - RNA, 18 nt, Human
uguccuauauuuagucug

SEQ ID NO: 270503 - RNA, 24 nt, Human
uguggcacauuggaaaaaccagau

SEQ ID NO: 270504 - RNA, 19 nt, Human
uguguaaacaauaacaaga

SEQ ID NO: 270505 - RNA, 21 nt, Human
uguguuauuaaagaucacaca

SEQ ID NO: 270506 - RNA, 19 nt, Human
uuaaaaacagcacuuuggu

SEQ ID NO: 270507 - RNA, 18 nt, Human
uuaaaauuuuaggagacu

SEQ ID NO: 270508 - RNA, 23 nt, Human
uuacaauaggcauuuuaaauccc

SEQ ID NO: 270509 - RNA, 24 nt, Human
uuagaaaaagucuuguuccucauu

SEQ ID NO: 270510 - RNA, 21 nt, Human
uuagauuaucagaagcaaauc

SEQ ID NO: 270511 - RNA, 19 nt, Human
uuagcccacacuucacucc

SEQ ID NO: 270512 - RNA, 20 nt, Human
uucaacuuuaugucagugac

SEQ ID NO: 270513 - RNA, 19 nt, Human
uucagaaccuuuuaaaagu

SEQ ID NO: 270514 - RNA, 25 nt, Human
uucaucuuguguaguccgucucgac

SEQ ID NO: 270515 - RNA, 24 nt, Human
uucaugcacgagauaccuguugcc

SEQ ID NO: 270516 - RNA, 18 nt, Human
uugaucacaggucaaaca

SEQ ID NO: 270517 - RNA, 18 nt, Human
uuguagguuuguguacaa

SEQ ID NO: 270518 - RNA, 19 nt, Human
uuuaugcucagugaaucug

SEQ ID NO: 270519 - RNA, 18 nt, Human
uuucauugcgguucuuau

SEQ ID NO: 270520 - RNA, 22 nt, Human
uuuuagaaaaagucuuguuccu

SEQ ID NO: 270521 - RNA, 18 nt, Human
uuuugcuuuuucgguuuu

SEQ ID NO: 270522 - RNA, 20 nt, Human
aaaaacccaaaacaaacacc

SEQ ID NO: 270523 - RNA, 19 nt, Human
aaaacccaaaacaaacacc

SEQ ID NO: 270524 - RNA, 21 nt, Human
aaaacccaaaacaaacaccau

SEQ ID NO: 270525 - RNA, 20 nt, Human
aaacaguauuuuaaaaggca

SEQ ID NO: 270526 - RNA, 19 nt, Human
aaagacagcaugaaacaac

SEQ ID NO: 270527 - RNA, 25 nt, Human
aaaguacuuuuugcuuucucaucug

SEQ ID NO: 270528 - RNA, 25 nt, Human
aacaaaaauaauuuucacauuccau

SEQ ID NO: 270529 - RNA, 19 nt, Human
aaccuagaacacuuucccu

SEQ ID NO: 270530 - RNA, 20 nt, Human
aagaagauucguaacauaua

SEQ ID NO: 270531 - RNA, 20 nt, Human
aagcugacaacucuuacccc

SEQ ID NO: 270532 - RNA, 22 nt, Human
aagcugacaacucuuaccccag

SEQ ID NO: 270533 - RNA, 20 nt, Human
aagugugcaauaaauuuuga

SEQ ID NO: 270534 - RNA, 20 nt, Human
acaaaauaauaaauagcugc

SEQ ID NO: 270535 - RNA, 21 nt, Human
acaauggugaagacaaaacgc

SEQ ID NO: 270536 - RNA, 25 nt, Human
accccaacaaacuuaaaccaagaac

SEQ ID NO: 270537 - RNA, 20 nt, Human
accccagagcauagcacagc

SEQ ID NO: 270538 - RNA, 18 nt, Human
agaaaaaacugccuggca

SEQ ID NO: 270539 - RNA, 26 nt, Human
agaaggaauucuucuaacuacacuaa

SEQ ID NO: 270540 - RNA, 25 nt, Human
agacaaaacgcaggguacauuaauc

SEQ ID NO: 270541 - RNA, 21 nt, Human
agcauuauaaauaaaaaccca

SEQ ID NO: 270542 - RNA, 18 nt, Human
agccaggugugguggugc

SEQ ID NO: 270543 - RNA, 18 nt, Human
aggcaagagaaaggcuuu

SEQ ID NO: 270544 - RNA, 21 nt, Human
aggugugcuggaaccuagaac

SEQ ID NO: 270545 - RNA, 22 nt, Human
auacaagagguaaauguuaagg

SEQ ID NO: 270546 - RNA, 23 nt, Human
auauacagauauacacaugugua

SEQ ID NO: 270547 - RNA, 20 nt, Human
auguacauggucuuuaugua

SEQ ID NO: 270548 - RNA, 19 nt, Human
caaaaugcauuggcccaca

SEQ ID NO: 270549 - RNA, 23 nt, Human
caaaccggacgcgcucgcccccg

SEQ ID NO: 270550 - RNA, 21 nt, Human
caaacuuaaaccaagaaccag

SEQ ID NO: 270551 - RNA, 18 nt, Human
caagaaccagagguacuu

SEQ ID NO: 270552 - RNA, 21 nt, Human
cacaggguguguauauauaua

SEQ ID NO: 270553 - RNA, 20 nt, Human
cagaaauguuccuacuuccu

SEQ ID NO: 270554 - RNA, 21 nt, Human
cagcaaaccggacgcgcucgc

SEQ ID NO: 270555 - RNA, 22 nt, Human
cagcaugaaacaacuguguaaa

SEQ ID NO: 270556 - RNA, 27 nt, Human
cagcaugaaacaacuguguaaaugcaa

SEQ ID NO: 270557 - RNA, 20 nt, Human
caucucaaaaugcaucaaac

SEQ ID NO: 270558 - RNA, 23 nt, Human
ccagggcaggcaacuguggagga

SEQ ID NO: 270559 - RNA, 20 nt, Human
cccaacaaacuuaaaccaag

SEQ ID NO: 270560 - RNA, 22 nt, Human
ccccaacaaacuuaaaccaaga

SEQ ID NO: 270561 - RNA, 18 nt, Human
cccccgcccagggcaggc

SEQ ID NO: 270562 - RNA, 21 nt, Human
ccccuaaaccaugcugaugcu

SEQ ID NO: 270563 - RNA, 24 nt, Human
cccgcaguagaaugcauuugagac

SEQ ID NO: 270564 - RNA, 23 nt, Human
ccgcccagggcaggcaacugugg

SEQ ID NO: 270565 - RNA, 19 nt, Human
cggucagcacaaagcaccu

SEQ ID NO: 270566 - RNA, 23 nt, Human
cguuugaugaauacauguacaug

SEQ ID NO: 270567 - RNA, 26 nt, Human
cucacaggguguguauauauauauau

SEQ ID NO: 270568 - RNA, 23 nt, Human
cucaugcuuagauaguucacaaa

SEQ ID NO: 270569 - RNA, 24 nt, Human
cugaagcugacaacucuuacccca

SEQ ID NO: 270570 - RNA, 20 nt, Human
cugacggucagcacaaagca

SEQ ID NO: 270571 - RNA, 24 nt, Human
cugguugacaauggugaagacaaa

SEQ ID NO: 270572 - RNA, 21 nt, Human
cuguaaacauacauuuacuac

SEQ ID NO: 270573 - RNA, 18 nt, Human
gaacucuaaagccaggug

SEQ ID NO: 270574 - RNA, 26 nt, Human
gacaaaacgcaggguacauuaaucug

SEQ ID NO: 270575 - RNA, 21 nt, Human
gagcauagcacagcgcuaggc

SEQ ID NO: 270576 - RNA, 24 nt, Human
gagcauagcacagcgcuaggcacg

SEQ ID NO: 270577 - RNA, 19 nt, Human
gcaccuaacucuaaagaca

SEQ ID NO: 270578 - RNA, 18 nt, Human
gcccagggcaggcaacug

SEQ ID NO: 270579 - RNA, 20 nt, Human
ggacaaaauucacuauuuaa

SEQ ID NO: 270580 - RNA, 20 nt, Human
gggaugaaggucugcagcug

SEQ ID NO: 270581 - RNA, 22 nt, Human
guuuggaaaguagaaagugguu

SEQ ID NO: 270582 - RNA, 23 nt, Human
uaaaaacccaaaacaaacaccau

SEQ ID NO: 270583 - RNA, 18 nt, Human
uaaaaaugcgacuacaga

SEQ ID NO: 270584 - RNA, 22 nt, Human
uaaagccaggugugguggugcc

SEQ ID NO: 270585 - RNA, 22 nt, Human
uaaauaaaaacccaaaacaaac

SEQ ID NO: 270586 - RNA, 18 nt, Human
uaaauaauuguggcaaaa

SEQ ID NO: 270587 - RNA, 21 nt, Human
uaaauaauuguggcaaaaucc

SEQ ID NO: 270588 - RNA, 18 nt, Human
uaaauagcugcgaguagc

SEQ ID NO: 270589 - RNA, 21 nt, Human
uaacuacacuaaaauaugaaa

SEQ ID NO: 270590 - RNA, 23 nt, Human
uaauaaauagcugcgaguagcac

SEQ ID NO: 270591 - RNA, 24 nt, Human
uaaucuguaaacaugauaaacccu

SEQ ID NO: 270592 - RNA, 22 nt, Human
uaaucugugaauugcuuccccu

SEQ ID NO: 270593 - RNA, 22 nt, Human
uacaaaguacuuuuugcuuucu

SEQ ID NO: 270594 - RNA, 24 nt, Human
uaccccaacaaacuuaaaccaaga

SEQ ID NO: 270595 - RNA, 18 nt, Human
uaccccagagcauagcac

SEQ ID NO: 270596 - RNA, 18 nt, Human
uacuauuucuucaaaugc

SEQ ID NO: 270597 - RNA, 20 nt, Human
uacuucaguuugguuaaagg

SEQ ID NO: 270598 - RNA, 20 nt, Human
uaggauaugcaggcaagaga

SEQ ID NO: 270599 - RNA, 18 nt, Human
uauagguaacacacuuuc

SEQ ID NO: 270600 - RNA, 18 nt, Human
ucacaguuaucaucucag

SEQ ID NO: 270601 - RNA, 22 nt, Human
uccaaaguuuuuucccaaaaau

SEQ ID NO: 270602 - RNA, 20 nt, Human
uccuaaaucaccaagauacc

SEQ ID NO: 270603 - RNA, 25 nt, Human
ucucaugcuuagauaguucacaaac

SEQ ID NO: 270604 - RNA, 22 nt, Human
ucugcagcuggggacugguggc

SEQ ID NO: 270605 - RNA, 23 nt, Human
ucugcagcuggggacugguggca

SEQ ID NO: 270606 - RNA, 22 nt, Human
ucuguaaacaugauaaacccug

SEQ ID NO: 270607 - RNA, 25 nt, Human
ugaaaugcauuuguaauacaauuuu

SEQ ID NO: 270608 - RNA, 21 nt, Human
ugaagaaguaaacaguuuuuc

SEQ ID NO: 270609 - RNA, 21 nt, Human
ugaaggucugcagcuggggac

SEQ ID NO: 270610 - RNA, 21 nt, Human
ugcugaugcugugguguuugg

SEQ ID NO: 270611 - RNA, 20 nt, Human
uggaaaguagaaagugguuu

SEQ ID NO: 270612 - RNA, 27 nt, Human
uggaacuucugacaaucuggcauuaca

SEQ ID NO: 270613 - RNA, 18 nt, Human
uggaggaggaggaggaga

SEQ ID NO: 270614 - RNA, 21 nt, Human
uggaggaggaggaggagaagc

SEQ ID NO: 270615 - RNA, 21 nt, Human
uggcaaaauccuguuuuaaca

SEQ ID NO: 270616 - RNA, 22 nt, Human
uggcuagaaauauagguaacac

SEQ ID NO: 270617 - RNA, 21 nt, Human
ugggauaaggggcuguguugc

SEQ ID NO: 270618 - RNA, 22 nt, Human
uggugagauaucaaaccaggac

SEQ ID NO: 270619 - RNA, 26 nt, Human
uguaaacauacauuuacuacauagug

SEQ ID NO: 270620 - RNA, 20 nt, Human
uguauccauauuauuuauau

SEQ ID NO: 270621 - RNA, 20 nt, Human
uguguauauauauauauuua

SEQ ID NO: 270622 - RNA, 23 nt, Human
uucagcauuauaaauaaaaaccc

SEQ ID NO: 270623 - RNA, 18 nt, Human
uucaguuugguuaaagga

SEQ ID NO: 270624 - RNA, 22 nt, Human
uugcacaccugacuugacacaa

SEQ ID NO: 270625 - RNA, 24 nt, Human
uuucacaguuaucaucucaguagu

SEQ ID NO: 270626 - RNA, 20 nt, Human
aaaaaaaaaaaaaaugcuca

SEQ ID NO: 270627 - RNA, 25 nt, Human
aaaaaaccccaaaacaaaaacguaa

SEQ ID NO: 270628 - RNA, 23 nt, Human
aaaacaaaaccagauaugaccuc

SEQ ID NO: 270629 - RNA, 19 nt, Human
aaaaugucauugacauuaa

SEQ ID NO: 270630 - RNA, 19 nt, Human
aaacaggagacuaaacaga

SEQ ID NO: 270631 - RNA, 22 nt, Human
aaacaguuggugaggacagguc

SEQ ID NO: 270632 - RNA, 24 nt, Human
aaaugucucuacuacaaacagcaa

SEQ ID NO: 270633 - RNA, 24 nt, Human
aaauuuguacaaaaaaaccccaaa

SEQ ID NO: 270634 - RNA, 18 nt, Human
aacgcauacaaacaggag

SEQ ID NO: 270635 - RNA, 20 nt, Human
acaaaaaaaccccaaaacaa

SEQ ID NO: 270636 - RNA, 21 nt, Human
acaaaaccagauaugaccucc

SEQ ID NO: 270637 - RNA, 23 nt, Human
acaaaaccagauaugaccuccau

SEQ ID NO: 270638 - RNA, 18 nt, Human
agaggguggaggugucag

SEQ ID NO: 270639 - RNA, 23 nt, Human
agcagugccaaguuucauucaaa

SEQ ID NO: 270640 - RNA, 18 nt, Human
agcauuaaguccuccuga

SEQ ID NO: 270641 - RNA, 20 nt, Human
agcucagaggaucaagucaa

SEQ ID NO: 270642 - RNA, 19 nt, Human
aggaacucaagcugggacc

SEQ ID NO: 270643 - RNA, 19 nt, Human
agguccccccggucccgca

SEQ ID NO: 270644 - RNA, 23 nt, Human
agugcguggugaaggcucggcuc

SEQ ID NO: 270645 - RNA, 24 nt, Human
aucacuaccagguaauuuucaacc

SEQ ID NO: 270646 - RNA, 19 nt, Human
auggugugauuccuuucaa

SEQ ID NO: 270647 - RNA, 23 nt, Human
caaaaaaaccccaaaacaaaaac

SEQ ID NO: 270648 - RNA, 23 nt, Human
caaaaccagauaugaccuccaug

SEQ ID NO: 270649 - RNA, 18 nt, Human
caacccugucucaaaugu

SEQ ID NO: 270650 - RNA, 19 nt, Human
caacucaggcaguacacgg

SEQ ID NO: 270651 - RNA, 18 nt, Human
caagaggcacaacucagg

SEQ ID NO: 270652 - RNA, 22 nt, Human
caccagcagccagauucacaau

SEQ ID NO: 270653 - RNA, 24 nt, Human
cagaggcacaacauaaauagcauu

SEQ ID NO: 270654 - RNA, 19 nt, Human
cagaguacuucaaaaauaa

SEQ ID NO: 270655 - RNA, 19 nt, Human
cagcagccagauucacaau

SEQ ID NO: 270656 - RNA, 22 nt, Human
cagcagccagauucacaauuga

SEQ ID NO: 270657 - RNA, 25 nt, Human
ccaauaagaaaaaggaaccaacacu

SEQ ID NO: 270658 - RNA, 19 nt, Human
ccagcagccagauucacaa

SEQ ID NO: 270659 - RNA, 19 nt, Human
ccagcggcugugcugcggc

SEQ ID NO: 270660 - RNA, 21 nt, Human
cccccggucccgcacccuacc

SEQ ID NO: 270661 - RNA, 20 nt, Human
ccccgcgcggggucugaggc

SEQ ID NO: 270662 - RNA, 21 nt, Human
ccccggucccgcacccuaccc

SEQ ID NO: 270663 - RNA, 19 nt, Human
ccccucugccuccaggucc

SEQ ID NO: 270664 - RNA, 19 nt, Human
cccgcacccuacccugcgg

SEQ ID NO: 270665 - RNA, 20 nt, Human
ccugacugccccgacagggu

SEQ ID NO: 270666 - RNA, 19 nt, Human
ccugcagcugcucucugcc

SEQ ID NO: 270667 - RNA, 21 nt, Human
ccugcagcugcucucugccau

SEQ ID NO: 270668 - RNA, 21 nt, Human
ccugucucaaauguguuagaa

SEQ ID NO: 270669 - RNA, 19 nt, Human
cgguucuccccucugccuc

SEQ ID NO: 270670 - RNA, 19 nt, Human
cuacuacaaacagcaaaga

SEQ ID NO: 270671 - RNA, 21 nt, Human
cugccaucgccucugcaaaag

SEQ ID NO: 270672 - RNA, 24 nt, Human
cugccuccagguccccccgguccc

SEQ ID NO: 270673 - RNA, 18 nt, Human
cuguagguuuuuggacaa

SEQ ID NO: 270674 - RNA, 20 nt, Human
gaaauucucucaaaguacuu

SEQ ID NO: 270675 - RNA, 22 nt, Human
gaacuuggacgagugcguggug

SEQ ID NO: 270676 - RNA, 20 nt, Human
gaagaacaaccacccccggu

SEQ ID NO: 270677 - RNA, 19 nt, Human
gcagguacccucaguccuc

SEQ ID NO: 270678 - RNA, 24 nt, Human
gccagggcaggguaaaaacggcaa

SEQ ID NO: 270679 - RNA, 24 nt, Human
gccccgacagggucuaggacaaca

SEQ ID NO: 270680 - RNA, 19 nt, Human
gcgccccgcgcggggucug

SEQ ID NO: 270681 - RNA, 25 nt, Human
gcucagaggaucaagucaagucucu

SEQ ID NO: 270682 - RNA, 18 nt, Human
gcugugcugcggcgcgga

SEQ ID NO: 270683 - RNA, 23 nt, Human
ggacaggucuguaggcucagcuu

SEQ ID NO: 270684 - RNA, 23 nt, Human
guacaugagacaucuuuaaucau

SEQ ID NO: 270685 - RNA, 24 nt, Human
guagaggguggaggugucagagua

SEQ ID NO: 270686 - RNA, 24 nt, Human
gugcagguacccucaguccucugc

SEQ ID NO: 270687 - RNA, 20 nt, Human
uaaaagaugacuguacagcg

SEQ ID NO: 270688 - RNA, 18 nt, Human
uacaaaaaaaccccaaaa

SEQ ID NO: 270689 - RNA, 21 nt, Human
uacacguggaaaagaaucaaa

SEQ ID NO: 270690 - RNA, 18 nt, Human
uacuacaaacagcaaaga

SEQ ID NO: 270691 - RNA, 21 nt, Human
ucacuaccagguaauuuucaa

SEQ ID NO: 270692 - RNA, 20 nt, Human
uccccccggucccgcacccu

SEQ ID NO: 270693 - RNA, 22 nt, Human
uccuuuuuauguaacaaacaga

SEQ ID NO: 270694 - RNA, 20 nt, Human
ucgccucugcaaaagucugu

SEQ ID NO: 270695 - RNA, 22 nt, Human
ucucuacuacaaacagcaaaga

SEQ ID NO: 270696 - RNA, 19 nt, Human
ucugccacuaccagcucaa

SEQ ID NO: 270697 - RNA, 20 nt, Human
ucuuuuagaaaccucaggcc

SEQ ID NO: 270698 - RNA, 19 nt, Human
ugagcucagaggaucaagu

SEQ ID NO: 270699 - RNA, 24 nt, Human
ugauaaaaaaauaaaaacaaaacc

SEQ ID NO: 270700 - RNA, 18 nt, Human
ugcagguacccucagucc

SEQ ID NO: 270701 - RNA, 21 nt, Human
ugccacuaccagcucaauagc

SEQ ID NO: 270702 - RNA, 19 nt, Human
ugcucucugccaucgccuc

SEQ ID NO: 270703 - RNA, 25 nt, Human
ugggaaaggcaggaacucaagcugg

SEQ ID NO: 270704 - RNA, 24 nt, Human
uggugaaggcucggcuccagggac

SEQ ID NO: 270705 - RNA, 18 nt, Human
uguagaaaucuaccuucu

SEQ ID NO: 270706 - RNA, 18 nt, Human
ugucuguagguuuuugga

SEQ ID NO: 270707 - RNA, 24 nt, Human
uucaaaaugucucuacuacaaaca

SEQ ID NO: 270708 - RNA, 23 nt, Human
uucauugucauuagaaaggaugu

SEQ ID NO: 270709 - RNA, 21 nt, Human
uugaagaacaaccacccccga

SEQ ID NO: 270710 - RNA, 18 nt, Human
uugaagcaugcaacaggu

SEQ ID NO: 270711 - RNA, 21 nt, Human
uuucaaccaauaagaaaaagg

SEQ ID NO: 270712 - RNA, 25 nt, Human
aagacauccccccuuaagugacccc

SEQ ID NO: 270713 - RNA, 23 nt, Human
aagcugccaaucacaugcauuuu

SEQ ID NO: 270714 - RNA, 21 nt, Human
aaguccauuuuaaaugcaccg

SEQ ID NO: 270715 - RNA, 24 nt, Human
aauuucccagguacauacaauauc

SEQ ID NO: 270716 - RNA, 22 nt, Human
acaucucaagacauccccccuu

SEQ ID NO: 270717 - RNA, 18 nt, Human
acccccuuccaacagcuu

SEQ ID NO: 270718 - RNA, 24 nt, Human
acugugcaugucaacgagguucuc

SEQ ID NO: 270719 - RNA, 19 nt, Human
aucucaagacauccccccu

SEQ ID NO: 270720 - RNA, 23 nt, Human
cagcuuaggaaaucggcaaauuu

SEQ ID NO: 270721 - RNA, 18 nt, Human
cauccccccuuaagugac

SEQ ID NO: 270722 - RNA, 19 nt, Human
cauccccccuuaagugacc

SEQ ID NO: 270723 - RNA, 27 nt, Human
ccccaaagacugaggagggagcaccuc

SEQ ID NO: 270724 - RNA, 23 nt, Human
cugagcuugcaugcaguccccuc

SEQ ID NO: 270725 - RNA, 22 nt, Human
cuuugcauaauacaucucaaga

SEQ ID NO: 270726 - RNA, 19 nt, Human
guacauacaauaucaugca

SEQ ID NO: 270727 - RNA, 24 nt, Human
gucuggagcccccaugggagaacc

SEQ ID NO: 270728 - RNA, 18 nt, Human
gugcaugucaacgagguu

SEQ ID NO: 270729 - RNA, 19 nt, Human
uaaaauacaaugucuggag

SEQ ID NO: 270730 - RNA, 20 nt, Human
uacaauaucaugcauuugaa

SEQ ID NO: 270731 - RNA, 24 nt, Human
uaucaugcauuugaaucccccaaa

SEQ ID NO: 270732 - RNA, 27 nt, Human
ucauauggcuuaaccuuuugcaaugga

SEQ ID NO: 270733 - RNA, 18 nt, Human
ucucaagacauccccccu

SEQ ID NO: 270734 - RNA, 27 nt, Human
ucucccaugaacaaaaguccauuuuaa

SEQ ID NO: 270735 - RNA, 19 nt, Human
ugucuggagcccccauggg

SEQ ID NO: 270736 - RNA, 23 nt, Human
uucucccaugaacaaaaguccau

SEQ ID NO: 270737 - RNA, 26 nt, Human
aauaacagcauuuuuuuuuuuuuuuu

SEQ ID NO: 270738 - RNA, 27 nt, Human
agaaaaagugaaaauuguguuacucug

SEQ ID NO: 270739 - RNA, 20 nt, Human
auaaagacagaaaaagugaa

SEQ ID NO: 270740 - RNA, 21 nt, Human
auuucuaacugcucauucauu

SEQ ID NO: 270741 - RNA, 23 nt, Human
auuuuuuuuuuuuuuuucauuuu

SEQ ID NO: 270742 - RNA, 22 nt, Human
cacauccagaccuccccugccc

SEQ ID NO: 270743 - RNA, 21 nt, Human
cagaauagagagcucugggca

SEQ ID NO: 270744 - RNA, 25 nt, Human
cagccuucccagggaaagagaauaa

SEQ ID NO: 270745 - RNA, 21 nt, Human
cauaauucaguggccagugcc

SEQ ID NO: 270746 - RNA, 24 nt, Human
cccggccccaccuggaccgcucuu

SEQ ID NO: 270747 - RNA, 18 nt, Human
ccgggacucuucugaguu

SEQ ID NO: 270748 - RNA, 21 nt, Human
cuaucauaauuguccaucgcc

SEQ ID NO: 270749 - RNA, 22 nt, Human
cuggaccgcucuuccagaauag

SEQ ID NO: 270750 - RNA, 22 nt, Human
cuguuugaagaaggaggccccg

SEQ ID NO: 270751 - RNA, 22 nt, Human
gagcucugggcaagggcuugac

SEQ ID NO: 270752 - RNA, 18 nt, Human
gcauuugggaauagguua

SEQ ID NO: 270753 - RNA, 19 nt, Human
gccuggggagggcaugggg

SEQ ID NO: 270754 - RNA, 20 nt, Human
gcuccgggacucuucugagu

SEQ ID NO: 270755 - RNA, 18 nt, Human
gggagggcaugggggcag

SEQ ID NO: 270756 - RNA, 24 nt, Human
gggcaagggcuugaccacuccuuu

SEQ ID NO: 270757 - RNA, 23 nt, Human
uaaaugcacuuauuuggaaagga

SEQ ID NO: 270758 - RNA, 19 nt, Human
uacauaaagacagaaaaag

SEQ ID NO: 270759 - RNA, 24 nt, Human
uauagucaaguguuuacguguggc

SEQ ID NO: 270760 - RNA, 25 nt, Human
uauuuggaaaggaggggggcaguua

SEQ ID NO: 270761 - RNA, 22 nt, Human
uccuuuggaaaacagaaggcau

SEQ ID NO: 270762 - RNA, 22 nt, Human
ucuucugaguuucuuuggcugu

SEQ ID NO: 270763 - RNA, 18 nt, Human
uggaaaggaggggggcag

SEQ ID NO: 270764 - RNA, 23 nt, Human
uggaaaggaggggggcaguuuuu

SEQ ID NO: 270765 - RNA, 19 nt, Human
uggcuguuccggauguucc

SEQ ID NO: 270766 - RNA, 21 nt, Human
uggggagggcaugggggcagg

SEQ ID NO: 270767 - RNA, 18 nt, Human
aaaagaagaaagaaaaau

SEQ ID NO: 270768 - RNA, 26 nt, Human
aacauuuuguacaauaguugcugaag

SEQ ID NO: 270769 - RNA, 20 nt, Human
aagaauucuuuuauuuagug

SEQ ID NO: 270770 - RNA, 23 nt, Human
aagcccccgagcagcacugaccc

SEQ ID NO: 270771 - RNA, 21 nt, Human
aagugcggagcuccagggacc

SEQ ID NO: 270772 - RNA, 19 nt, Human
acugacccgccaccccuac

SEQ ID NO: 270773 - RNA, 19 nt, Human
cacucagucauuuaaaacu

SEQ ID NO: 270774 - RNA, 19 nt, Human
cagcacugacccgccaccc

SEQ ID NO: 270775 - RNA, 18 nt, Human
caggauuaaaagcccaac

SEQ ID NO: 270776 - RNA, 20 nt, Human
cccccgagcagcacugaccc

SEQ ID NO: 270777 - RNA, 21 nt, Human
cccccgagcagcacugacccg

SEQ ID NO: 270778 - RNA, 27 nt, Human
cccccgagcagcacugacccgccaccc

SEQ ID NO: 270779 - RNA, 21 nt, Human
cccgccaccccuacucgugcc

SEQ ID NO: 270780 - RNA, 18 nt, Human
cugaagaacaguaaaacc

SEQ ID NO: 270781 - RNA, 24 nt, Human
gaccaaauugcaucuaacuggguu

SEQ ID NO: 270782 - RNA, 19 nt, Human
gaccaggaacuccagggac

SEQ ID NO: 270783 - RNA, 23 nt, Human
gagaagcccccgagcagcacuga

SEQ ID NO: 270784 - RNA, 19 nt, Human
gauggagaagcccccgagc

SEQ ID NO: 270785 - RNA, 22 nt, Human
uaaaagcccaaccaagaaagua

SEQ ID NO: 270786 - RNA, 20 nt, Human
uaaacagaaaaaaaaaaaga

SEQ ID NO: 270787 - RNA, 20 nt, Human
uaacuggguuuucuaagcuc

SEQ ID NO: 270788 - RNA, 26 nt, Human
uaauauuauuuuuucucccaagauuu

SEQ ID NO: 270789 - RNA, 21 nt, Human
uauguucuuaaaagaagaaag

SEQ ID NO: 270790 - RNA, 22 nt, Human
ucacagugaugaauuuucacaa

SEQ ID NO: 270791 - RNA, 21 nt, Human
ucagugagugcuacucuuccu

SEQ ID NO: 270792 - RNA, 18 nt, Human
uccagggaccuggaugga

SEQ ID NO: 270793 - RNA, 20 nt, Human
uccagggaccuggauggaga

SEQ ID NO: 270794 - RNA, 26 nt, Human
ucuguuaaacagaaaaaaaaaaagaa

SEQ ID NO: 270795 - RNA, 19 nt, Human
ugaagaacaguaaaaccaa

SEQ ID NO: 270796 - RNA, 19 nt, Human
ugacaauuguaagcauacc

SEQ ID NO: 270797 - RNA, 21 nt, Human
ugacccgccaccccuacucgu

SEQ ID NO: 270798 - RNA, 18 nt, Human
ugcgcgccaagugcggag

SEQ ID NO: 270799 - RNA, 19 nt, Human
uuacauccuguacacagcu

SEQ ID NO: 270800 - RNA, 23 nt, Human
uucacaaagcuaacagauuugaa

SEQ ID NO: 270801 - RNA, 20 nt, Human
uugguaauauuacauccugu

SEQ ID NO: 270802 - RNA, 19 nt, Human
uuuaaaaucucagacuuaa

SEQ ID NO: 270803 - RNA, 19 nt, Human
aaaaaagagauauaaaaca

SEQ ID NO: 270804 - RNA, 21 nt, Human
aaaaaagagauauaaaacagu

SEQ ID NO: 270805 - RNA, 22 nt, Human
aaaagaaauacagcugcucaag

SEQ ID NO: 270806 - RNA, 23 nt, Human
aaacaaacaacagauuuguccuc

SEQ ID NO: 270807 - RNA, 24 nt, Human
aaacaaacaacagauuuguccuca

SEQ ID NO: 270808 - RNA, 19 nt, Human
aaagagaauaugaaagcca

SEQ ID NO: 270809 - RNA, 21 nt, Human
aacaauagcaggaauuaugac

SEQ ID NO: 270810 - RNA, 21 nt, Human
aacauggaaagacaacuaaua

SEQ ID NO: 270811 - RNA, 26 nt, Human
acaaaaccauuauguaaaaacauacu

SEQ ID NO: 270812 - RNA, 20 nt, Human
acagaagugaaaauguacua

SEQ ID NO: 270813 - RNA, 18 nt, Human
agccgggcccgggcggga

SEQ ID NO: 270814 - RNA, 19 nt, Human
aggcagccgggcccgggcg

SEQ ID NO: 270815 - RNA, 21 nt, Human
agggcagcgggcggcaacaag

SEQ ID NO: 270816 - RNA, 18 nt, Human
auuauucuguucugucca

SEQ ID NO: 270817 - RNA, 18 nt, Human
auugcuggggcccggccc

SEQ ID NO: 270818 - RNA, 21 nt, Human
caaagagaauaugaaagccaa

SEQ ID NO: 270819 - RNA, 23 nt, Human
caacaagaagcucgguucaugcc

SEQ ID NO: 270820 - RNA, 22 nt, Human
caauauaaaauuuucaauccag

SEQ ID NO: 270821 - RNA, 21 nt, Human
cccgagagggggcaguggggg

SEQ ID NO: 270822 - RNA, 18 nt, Human
ccggcccgcgacgacgcc

SEQ ID NO: 270823 - RNA, 19 nt, Human
ccucgaauacagaagugaa

SEQ ID NO: 270824 - RNA, 25 nt, Human
ccucuuauuaaacaacuaauaaaau

SEQ ID NO: 270825 - RNA, 19 nt, Human
cggcggcagcggcggguag

SEQ ID NO: 270826 - RNA, 23 nt, Human
cucacaaagagaauaugaaagcc

SEQ ID NO: 270827 - RNA, 20 nt, Human
cuguccaauuucuuuucugu

SEQ ID NO: 270828 - RNA, 21 nt, Human
cuuacaguacaugaagacaaa

SEQ ID NO: 270829 - RNA, 22 nt, Human
gaagugaaaauguacuauucaa

SEQ ID NO: 270830 - RNA, 25 nt, Human
gaagugaaaauguacuauucaagga

SEQ ID NO: 270831 - RNA, 20 nt, Human
gacuuugcuuacaaauugcu

SEQ ID NO: 270832 - RNA, 22 nt, Human
ggaugcggcggcagcggcgggu

SEQ ID NO: 270833 - RNA, 27 nt, Human
uaaaaacauacugauuuacaaagccaa

SEQ ID NO: 270834 - RNA, 20 nt, Human
uaaaaauaggucuuuaauuc

SEQ ID NO: 270835 - RNA, 19 nt, Human
uaaaauuucuuuccuagau

SEQ ID NO: 270836 - RNA, 20 nt, Human
uaauuuaucaacuacuccuu

SEQ ID NO: 270837 - RNA, 20 nt, Human
uacagaagugaaaauguacu

SEQ ID NO: 270838 - RNA, 24 nt, Human
uagaaaagaaauacagcugcucaa

SEQ ID NO: 270839 - RNA, 20 nt, Human
uaguaccuuaaaaaaauaaa

SEQ ID NO: 270840 - RNA, 23 nt, Human
uauuaugucauuuguuucuccua

SEQ ID NO: 270841 - RNA, 21 nt, Human
uccaaaaacuaaauggaccug

SEQ ID NO: 270842 - RNA, 19 nt, Human
ucccucgaauacagaagug

SEQ ID NO: 270843 - RNA, 24 nt, Human
ucccucgaauacagaagugaaaau

SEQ ID NO: 270844 - RNA, 23 nt, Human
ugaagacaaacuucaggagacaa

SEQ ID NO: 270845 - RNA, 24 nt, Human
uggaaaaauaaaucuaacaaaacc

SEQ ID NO: 270846 - RNA, 18 nt, Human
uggaaagacaacuaauau

SEQ ID NO: 270847 - RNA, 22 nt, Human
uggaaagacaacuaauaucuua

SEQ ID NO: 270848 - RNA, 24 nt, Human
uggcccagagucgggaugcggcgg

SEQ ID NO: 270849 - RNA, 22 nt, Human
ugggggcggcuguugaggcagc

SEQ ID NO: 270850 - RNA, 18 nt, Human
uguugaggcagccgggcc

SEQ ID NO: 270851 - RNA, 25 nt, Human
uuaguaccuuaaaaaaauaaaauuc

SEQ ID NO: 270852 - RNA, 22 nt, Human
uucauaaaauuucuuuccuaga

SEQ ID NO: 270853 - RNA, 23 nt, Human
uuuaaaacauggaaagacaacua

SEQ ID NO: 270854 - RNA, 23 nt, Human
uuuauaauuuaucaacuacuccu

SEQ ID NO: 270855 - RNA, 18 nt, Human
uuucuuuugugauccugc

SEQ ID NO: 270856 - RNA, 23 nt, Human
aaaagauaccaagaacuaaacug

SEQ ID NO: 270857 - RNA, 21 nt, Human
aagagaagacgacucaaguaa

SEQ ID NO: 270858 - RNA, 25 nt, Human
aaggcugggcagccuuuuggggaac

SEQ ID NO: 270859 - RNA, 20 nt, Human
aaguugcagaaccagaauuu

SEQ ID NO: 270860 - RNA, 20 nt, Human
acagguguacauuaauucuc

SEQ ID NO: 270861 - RNA, 20 nt, Human
accaagaacuaaacugaacc

SEQ ID NO: 270862 - RNA, 23 nt, Human
accaccugcccuuauugacccag

SEQ ID NO: 270863 - RNA, 24 nt, Human
agauaccaagaacuaaacugaacc

SEQ ID NO: 270864 - RNA, 23 nt, Human
agcuguucuaggcuaccaggugg

SEQ ID NO: 270865 - RNA, 19 nt, Human
aggugucaggaaucaccug

SEQ ID NO: 270866 - RNA, 19 nt, Human
agucuucacaguuaauccu

SEQ ID NO: 270867 - RNA, 21 nt, Human
aguuugugaagggugaguggc

SEQ ID NO: 270868 - RNA, 22 nt, Human
auacagguguacauuaauucuc

SEQ ID NO: 270869 - RNA, 18 nt, Human
caaauucugucugucagc

SEQ ID NO: 270870 - RNA, 19 nt, Human
caagcccaaagucacgcua

SEQ ID NO: 270871 - RNA, 20 nt, Human
caccacuccacggaaaaaaa

SEQ ID NO: 270872 - RNA, 20 nt, Human
cagaacggcuaagaaacuug

SEQ ID NO: 270873 - RNA, 24 nt, Human
cagcagccgcccggcccugggugu

SEQ ID NO: 270874 - RNA, 22 nt, Human
cagcugagauuguccacaacag

SEQ ID NO: 270875 - RNA, 22 nt, Human
cagcuugauugaaaagauaccc

SEQ ID NO: 270876 - RNA, 20 nt, Human
caggaaaggccuggucagug

SEQ ID NO: 270877 - RNA, 27 nt, Human
cagguggccacucgaagagaagacgac

SEQ ID NO: 270878 - RNA, 21 nt, Human
caggugucaggaaucaccuga

SEQ ID NO: 270879 - RNA, 22 nt, Human
cauuacaauccagauacagggg

SEQ ID NO: 270880 - RNA, 21 nt, Human
ccaagcccaaagucacgcuag

SEQ ID NO: 270881 - RNA, 20 nt, Human
ccacggaaaaaaaugauuuc

SEQ ID NO: 270882 - RNA, 21 nt, Human
ccacggaaaaaaaugauuucc

SEQ ID NO: 270883 - RNA, 19 nt, Human
ccacucgaagagaagacga

SEQ ID NO: 270884 - RNA, 19 nt, Human
ccagcgcugcucuugucug

SEQ ID NO: 270885 - RNA, 21 nt, Human
cccaaagucacgcuaggaagu

SEQ ID NO: 270886 - RNA, 22 nt, Human
cgagggcacgaacggcgcgcgg

SEQ ID NO: 270887 - RNA, 24 nt, Human
cgagggcacgaacggcgcgcgggc

SEQ ID NO: 270888 - RNA, 19 nt, Human
cgggcucggcugccgcugg

SEQ ID NO: 270889 - RNA, 18 nt, Human
cguggcucgcugaaccac

SEQ ID NO: 270890 - RNA, 22 nt, Human
cuaggaaguugcagaaccagaa

SEQ ID NO: 270891 - RNA, 24 nt, Human
cuuaacacugaucaugaaaugaac

SEQ ID NO: 270892 - RNA, 25 nt, Human
gaaacuugcccaagcccaaagucac

SEQ ID NO: 270893 - RNA, 20 nt, Human
gaggugacgaaguuccuggu

SEQ ID NO: 270894 - RNA, 23 nt, Human
gaguuuucuuagguucacauuua

SEQ ID NO: 270895 - RNA, 21 nt, Human
gccagccucacgagggcacga

SEQ ID NO: 270896 - RNA, 19 nt, Human
gccugugacacucuggccc

SEQ ID NO: 270897 - RNA, 21 nt, Human
gcgccccucccucagcugcuc

SEQ ID NO: 270898 - RNA, 18 nt, Human
gcuggcuuugauaaggca

SEQ ID NO: 270899 - RNA, 18 nt, Human
guggaguuuucuuagguu

SEQ ID NO: 270900 - RNA, 22 nt, Human
guggccagcgccccucccucag

SEQ ID NO: 270901 - RNA, 19 nt, Human
uaaggcaaaguggugcugg

SEQ ID NO: 270902 - RNA, 22 nt, Human
uaccaagaacuaaacugaaccc

SEQ ID NO: 270903 - RNA, 22 nt, Human
uaggaaguugcagaaccagaau

SEQ ID NO: 270904 - RNA, 19 nt, Human
ucacuggaggaauuacccu

SEQ ID NO: 270905 - RNA, 18 nt, Human
ucagugaaugccugcagg

SEQ ID NO: 270906 - RNA, 24 nt, Human
ucagugaaugccugcaggcagcag

SEQ ID NO: 270907 - RNA, 20 nt, Human
uccaggaaaggccuggucag

SEQ ID NO: 270908 - RNA, 22 nt, Human
ucccaugcuuccuucccaugga

SEQ ID NO: 270909 - RNA, 18 nt, Human
ucccucagcugcucugcc

SEQ ID NO: 270910 - RNA, 21 nt, Human
ucccucagcugcucugccuuc

SEQ ID NO: 270911 - RNA, 24 nt, Human
ucccucagcugcucugccuucagc

SEQ ID NO: 270912 - RNA, 24 nt, Human
uccgugguccauggacuucaguuu

SEQ ID NO: 270913 - RNA, 21 nt, Human
ucuccugcaagucuccuguua

SEQ ID NO: 270914 - RNA, 22 nt, Human
ucuccugcaagucuccuguuag

SEQ ID NO: 270915 - RNA, 21 nt, Human
ucuuagcuguucuaggcuacc

SEQ ID NO: 270916 - RNA, 21 nt, Human
ugaaaagauaccaagaacuaa

SEQ ID NO: 270917 - RNA, 24 nt, Human
ugaaaagauaccaagaacuaaacu

SEQ ID NO: 270918 - RNA, 19 nt, Human
ugaauucuaaguaacuccc

SEQ ID NO: 270919 - RNA, 19 nt, Human
ugaauucuaaguaacuccc

SEQ ID NO: 270920 - RNA, 24 nt, Human
ugauugaaaagauaccaagaacua

SEQ ID NO: 270921 - RNA, 23 nt, Human
ugccaagaagaugcuccugcuuc

SEQ ID NO: 270922 - RNA, 19 nt, Human
ugccagccucacgagggca

SEQ ID NO: 270923 - RNA, 22 nt, Human
ugcccgaugccagcgcugcucu

SEQ ID NO: 270924 - RNA, 19 nt, Human
ugcuggcuuugauaaggca

SEQ ID NO: 270925 - RNA, 19 nt, Human
uggagagacugucgggcug

SEQ ID NO: 270926 - RNA, 19 nt, Human
uggcccgcgggcggcugga

SEQ ID NO: 270927 - RNA, 19 nt, Human
ugggaacaagaaauaagga

SEQ ID NO: 270928 - RNA, 21 nt, Human
uggggaaccugcugaacccug

SEQ ID NO: 270929 - RNA, 25 nt, Human
ugguccauggacuucaguuugugaa

SEQ ID NO: 270930 - RNA, 23 nt, Human
uucccgaugccuuuugccuguga

SEQ ID NO: 270931 - RNA, 19 nt, Human
uucugucugucagcaaucc

SEQ ID NO: 270932 - RNA, 22 nt, Human
uuuccuccaggaaaggccuggu

SEQ ID NO: 270933 - RNA, 22 nt, Human
aagcaacaggaacuuuagaacu

SEQ ID NO: 270934 - RNA, 18 nt, Human
acuuugguuacacucuuc

SEQ ID NO: 270935 - RNA, 22 nt, Human
auuaaucuuaacaccagacaua

SEQ ID NO: 270936 - RNA, 21 nt, Human
caaagcacacuagcucugaaa

SEQ ID NO: 270937 - RNA, 23 nt, Human
cugaagcaacaggaacuuuagaa

SEQ ID NO: 270938 - RNA, 18 nt, Human
cuucaugaucuugcaugu

SEQ ID NO: 270939 - RNA, 21 nt, Human
uacuuucaauuacuuugguua

SEQ ID NO: 270940 - RNA, 18 nt, Human
uagaacucagcucgugcc

SEQ ID NO: 270941 - RNA, 21 nt, Human
uuaaucuuaacaccagacaua

SEQ ID NO: 270942 - RNA, 18 nt, Human
uuagaacucagcucgugc

SEQ ID NO: 270943 - RNA, 30 nt, Human
aaaaaaacaaaacaaacaaaaaaaccaagg

SEQ ID NO: 270944 - RNA, 24 nt, Human
aaaaggagcugagucucucucuau

SEQ ID NO: 270945 - RNA, 20 nt, Human
aaaaggcaaccuccgaaaca

SEQ ID NO: 270946 - RNA, 21 nt, Human
aaacaaaaaaaccaaacuacc

SEQ ID NO: 270947 - RNA, 24 nt, Human
aaacaaaacaaacaaaaaaaccaa

SEQ ID NO: 270948 - RNA, 23 nt, Human
aacaaaacaaacaaaaaaaccaa

SEQ ID NO: 270949 - RNA, 23 nt, Human
acaaaacaaacaaaaaaaccaaa

SEQ ID NO: 270950 - RNA, 24 nt, Human
acaaaacaaacaaaaaaaccaaac

SEQ ID NO: 270951 - RNA, 20 nt, Human
acaaaauaaauaaaaggagc

SEQ ID NO: 270952 - RNA, 19 nt, Human
agaucauuuaaauguauuu

SEQ ID NO: 270953 - RNA, 20 nt, Human
agggggcaccgaagcuaggu

SEQ ID NO: 270954 - RNA, 21 nt, Human
aguacacaaaauaaacccaaa

SEQ ID NO: 270955 - RNA, 23 nt, Human
augagcaaagugguagguccaaa

SEQ ID NO: 270956 - RNA, 20 nt, Human
caaaaaaaccaaacuaccga

SEQ ID NO: 270957 - RNA, 18 nt, Human
caaaaggcaaccuccgaa

SEQ ID NO: 270958 - RNA, 21 nt, Human
caaaaggcaaccuccgaaaca

SEQ ID NO: 270959 - RNA, 22 nt, Human
caaaaggcaaccuccgaaacac

SEQ ID NO: 270960 - RNA, 22 nt, Human
caaacaaaaaaaccaaacuacc

SEQ ID NO: 270961 - RNA, 25 nt, Human
caacaaaauaaauaaaaggagcuga

SEQ ID NO: 270962 - RNA, 23 nt, Human
caacaggcaacuuuauuuuagaa

SEQ ID NO: 270963 - RNA, 21 nt, Human
caaccuccgaaacaccguccu

SEQ ID NO: 270964 - RNA, 22 nt, Human
caccuagacuagguuagcaaga

SEQ ID NO: 270965 - RNA, 26 nt, Human
ccuccgaaacaccguccucaggugga

SEQ ID NO: 270966 - RNA, 19 nt, Human
gcuuggagccgccaaacuu

SEQ ID NO: 270967 - RNA, 22 nt, Human
guccucagguggaaacuuuggc

SEQ ID NO: 270968 - RNA, 22 nt, Human
uaaaaaaacaaaacaaacaaaa

SEQ ID NO: 270969 - RNA, 25 nt, Human
uaaaucaacaaaauaaauaaaagga

SEQ ID NO: 270970 - RNA, 26 nt, Human
uagcagggggcaccgaagcuaggugg

SEQ ID NO: 270971 - RNA, 19 nt, Human
uaguacacaaaauaaaccc

SEQ ID NO: 270972 - RNA, 26 nt, Human
ucaaccauuuaccaugagaucauuua

SEQ ID NO: 270973 - RNA, 23 nt, Human
uccaaaaggcaaccuccgaaaca

SEQ ID NO: 270974 - RNA, 19 nt, Human
uuaguacacaaaauaaacc

SEQ ID NO: 270975 - RNA, 20 nt, Human
aacgagcuuauacugaacaa

SEQ ID NO: 270976 - RNA, 20 nt, Human
acccaauuuaaguuuuaacu

SEQ ID NO: 270977 - RNA, 20 nt, Human
acgguauauacuguacgccc

SEQ ID NO: 270978 - RNA, 21 nt, Human
agguaagagaaauauuuauuu

SEQ ID NO: 270979 - RNA, 24 nt, Human
aguaauuuuccuuuugugauuuug

SEQ ID NO: 270980 - RNA, 21 nt, Human
caaaucacccaauuuaaguuu

SEQ ID NO: 270981 - RNA, 22 nt, Human
caagaacgagcuuauacugaac

SEQ ID NO: 270982 - RNA, 20 nt, Human
caauggagaaagcuccggga

SEQ ID NO: 270983 - RNA, 24 nt, Human
cacaagaacgagcuuauacugaac

SEQ ID NO: 270984 - RNA, 23 nt, Human
caccagugaagcuagaggcuuuc

SEQ ID NO: 270985 - RNA, 19 nt, Human
ccucuguuguaaaggcaga

SEQ ID NO: 270986 - RNA, 20 nt, Human
cuagaggcuuucacagaucc

SEQ ID NO: 270987 - RNA, 24 nt, Human
cugacauuuuauuucuugcaguga

SEQ ID NO: 270988 - RNA, 20 nt, Human
cuugaggucuaauuuugccc

SEQ ID NO: 270989 - RNA, 22 nt, Human
gacaauggagaaagcuccggga

SEQ ID NO: 270990 - RNA, 25 nt, Human
gaggcuuucacagauccaaugggcu

SEQ ID NO: 270991 - RNA, 21 nt, Human
gggcucaggcuuucuauccag

SEQ ID NO: 270992 - RNA, 23 nt, Human
guaaaacaaggaaauagggauga

SEQ ID NO: 270993 - RNA, 23 nt, Human
gucaagcuccacaaauuucauaa

SEQ ID NO: 270994 - RNA, 18 nt, Human
guuuuaacuucuuuuugg

SEQ ID NO: 270995 - RNA, 24 nt, Human
uaacauguuauagcuucuuugcuu

SEQ ID NO: 270996 - RNA, 22 nt, Human
uaacuucuuuuuggucuuuuaa

SEQ ID NO: 270997 - RNA, 22 nt, Human
uaaugaaagaacauucuuuuaa

SEQ ID NO: 270998 - RNA, 21 nt, Human
uagaaaauauuaaguaaccau

SEQ ID NO: 270999 - RNA, 24 nt, Human
uagaaaauauuaaguaaccaugcc

SEQ ID NO: 271000 - RNA, 24 nt, Human
uagggaugacuuuuccuguuagaa

SEQ ID NO: 271001 - RNA, 30 nt, Human
ucucccucuguuguaaaggcagagacuggg

SEQ ID NO: 271002 - RNA, 21 nt, Human
ucuuugcuuuacuucugaaaa

SEQ ID NO: 271003 - RNA, 18 nt, Human
ugaggaaccuaacugauu

SEQ ID NO: 271004 - RNA, 20 nt, Human
uuaaguaaccaugccugugc

SEQ ID NO: 271005 - RNA, 21 nt, Human
uucauucacugccugacauuu

SEQ ID NO: 271006 - RNA, 26 nt, Human
uugaggucuaauuuugccccaguaau

SEQ ID NO: 271007 - RNA, 21 nt, Human
aaaauaauaaaaaaagcuuac

SEQ ID NO: 271008 - RNA, 18 nt, Human
aaacaagccaaccccagg

SEQ ID NO: 271009 - RNA, 21 nt, Human
aaacagcaaugcaacauuucc

SEQ ID NO: 271010 - RNA, 27 nt, Human
aaaccaaaaaacaagccaaccccagga

SEQ ID NO: 271011 - RNA, 19 nt, Human
aacaagcagucaaauguca

SEQ ID NO: 271012 - RNA, 20 nt, Human
aaccaaaaaacaagccaacc

SEQ ID NO: 271013 - RNA, 22 nt, Human
aagccaaccccaggaacgaccc

SEQ ID NO: 271014 - RNA, 19 nt, Human
aaugaaaccaaaaaacaag

SEQ ID NO: 271015 - RNA, 21 nt, Human
accaaaaaacaagccaacccc

SEQ ID NO: 271016 - RNA, 20 nt, Human
accccaggaacgacccacac

SEQ ID NO: 271017 - RNA, 22 nt, Human
accccaggaacgacccacacug

SEQ ID NO: 271018 - RNA, 19 nt, Human
agaucuguaaucucacagu

SEQ ID NO: 271019 - RNA, 18 nt, Human
agguggccaugccuggag

SEQ ID NO: 271020 - RNA, 18 nt, Human
agucugcuggcucauucu

SEQ ID NO: 271021 - RNA, 21 nt, Human
auaaaaaaagcuuacaaacag

SEQ ID NO: 271022 - RNA, 21 nt, Human
auaauuggaacaagccggggc

SEQ ID NO: 271023 - RNA, 23 nt, Human
augaaaccaaaaaacaagccaac

SEQ ID NO: 271024 - RNA, 21 nt, Human
caaaaaacaagccaaccccag

SEQ ID NO: 271025 - RNA, 23 nt, Human
caaaaaacaagccaaccccagga

SEQ ID NO: 271026 - RNA, 20 nt, Human
caaagacacggccugaccac

SEQ ID NO: 271027 - RNA, 18 nt, Human
cacugucaaagacuuucc

SEQ ID NO: 271028 - RNA, 24 nt, Human
cagccggucccucgcugcaagcuc

SEQ ID NO: 271029 - RNA, 22 nt, Human
caggaacgacccacacugucaa

SEQ ID NO: 271030 - RNA, 20 nt, Human
cauucuguguucucaagugc

SEQ ID NO: 271031 - RNA, 21 nt, Human
ccaguccugcagaauaucagc

SEQ ID NO: 271032 - RNA, 19 nt, Human
ccccaggaacgacccacac

SEQ ID NO: 271033 - RNA, 22 nt, Human
cccgggcgccgcugcuccagcc

SEQ ID NO: 271034 - RNA, 24 nt, Human
ccuccuucccucccgcgcgccuca

SEQ ID NO: 271035 - RNA, 23 nt, Human
ccucgcugcaagcucggcucccg

SEQ ID NO: 271036 - RNA, 18 nt, Human
ccucuucccuggacacaa

SEQ ID NO: 271037 - RNA, 18 nt, Human
cgccgcggagcccuugcc

SEQ ID NO: 271038 - RNA, 19 nt, Human
cgcugcuccagcccagccc

SEQ ID NO: 271039 - RNA, 18 nt, Human
cggcucccgggcgccgcu

SEQ ID NO: 271040 - RNA, 26 nt, Human
cucagaauuaaaaaauaaaaaugaaa

SEQ ID NO: 271041 - RNA, 18 nt, Human
cuccagcccagcccggcc

SEQ ID NO: 271042 - RNA, 24 nt, Human
cucccgggcgccgcugcuccagcc

SEQ ID NO: 271043 - RNA, 22 nt, Human
cuggagccagcccuacacagag

SEQ ID NO: 271044 - RNA, 18 nt, Human
cuuccaggcugaccaggg

SEQ ID NO: 271045 - RNA, 24 nt, Human
gaaaccaaaaaacaagccaacccc

SEQ ID NO: 271046 - RNA, 25 nt, Human
gccaaccccaggaacgagggaacgc

SEQ ID NO: 271047 - RNA, 19 nt, Human
gccgcggagcccuugccuc

SEQ ID NO: 271048 - RNA, 20 nt, Human
gcucccgggcgccgcugcuc

SEQ ID NO: 271049 - RNA, 23 nt, Human
ggcagcgcgacagcgccgcggag

SEQ ID NO: 271050 - RNA, 24 nt, Human
guugcacuucucgccucuucccug

SEQ ID NO: 271051 - RNA, 25 nt, Human
uaaaaaaagcuuacaaacagcaaug

SEQ ID NO: 271052 - RNA, 20 nt, Human
uacaauuccuuguuuucaag

SEQ ID NO: 271053 - RNA, 18 nt, Human
ucacagcacaaagacacg

SEQ ID NO: 271054 - RNA, 18 nt, Human
ucccgcgcgccucagccg

SEQ ID NO: 271055 - RNA, 18 nt, Human
ucccgggcgccgcugcuc

SEQ ID NO: 271056 - RNA, 22 nt, Human
ucgcugcaagcucggcucccgg

SEQ ID NO: 271057 - RNA, 23 nt, Human
ucgcugcaagcucggcucccggg

SEQ ID NO: 271058 - RNA, 19 nt, Human
ucuguguucucaagugcug

SEQ ID NO: 271059 - RNA, 21 nt, Human
ucuguguucucaagugcuguc

SEQ ID NO: 271060 - RNA, 21 nt, Human
ucuuccaggcugaccagggga

SEQ ID NO: 271061 - RNA, 22 nt, Human
ugaaaccaaaaaacaagccaac

SEQ ID NO: 271062 - RNA, 22 nt, Human
ugcagguugcacuucucgccuc

SEQ ID NO: 271063 - RNA, 21 nt, Human
ugcuccagcccagcccggccc

SEQ ID NO: 271064 - RNA, 23 nt, Human
uuaaaaaauaaaaaugaaaccaa

SEQ ID NO: 271065 - RNA, 19 nt, Human
uuuggcccauggugcccag

SEQ ID NO: 271066 - RNA, 24 nt, Human
uuuuuuuuuuuuuuuuuuucaaug

SEQ ID NO: 271067 - RNA, 18 nt, Human
ccuggucccuggccucaa

SEQ ID NO: 271068 - RNA, 20 nt, Human
ccuucuccuucuugaaggcc

SEQ ID NO: 271069 - RNA, 19 nt, Human
cgauagcgagccuuauucc

SEQ ID NO: 271070 - RNA, 21 nt, Human
cgcccugacuccggacuucug

SEQ ID NO: 271071 - RNA, 23 nt, Human
cgcucuggcccugggcuggggac

SEQ ID NO: 271072 - RNA, 22 nt, Human
cucagcuucaaugcaguacuuc

SEQ ID NO: 271073 - RNA, 23 nt, Human
cugaugauuagggacuccccgga

SEQ ID NO: 271074 - RNA, 18 nt, Human
cugcugccgccccggcgc

SEQ ID NO: 271075 - RNA, 19 nt, Human
cugggcagaaucugucccc

SEQ ID NO: 271076 - RNA, 23 nt, Human
cuucucgggaaggccaguggcuc

SEQ ID NO: 271077 - RNA, 18 nt, Human
gagcagcacaauggggcu

SEQ ID NO: 271078 - RNA, 19 nt, Human
gagcagcacaauggggcug

SEQ ID NO: 271079 - RNA, 19 nt, Human
gagcucacggcuuuggucc

SEQ ID NO: 271080 - RNA, 22 nt, Human
gccucaaguucuucucugguca

SEQ ID NO: 271081 - RNA, 22 nt, Human
uagauuuaaucuguaacuauga

SEQ ID NO: 271082 - RNA, 18 nt, Human
uagcagcaauuauggaug

SEQ ID NO: 271083 - RNA, 23 nt, Human
uagcgagccuuauuccuugaccu

SEQ ID NO: 271084 - RNA, 21 nt, Human
uccccucaguucacagagguu

SEQ ID NO: 271085 - RNA, 20 nt, Human
ucgcucuggcccugggcugg

SEQ ID NO: 271086 - RNA, 19 nt, Human
ucggagcagcacaaugggg

SEQ ID NO: 271087 - RNA, 23 nt, Human
ucuccaaagaggcucucauccac

SEQ ID NO: 271088 - RNA, 18 nt, Human
ucuggucaggacauggga

SEQ ID NO: 271089 - RNA, 19 nt, Human
ucuguaacuaugaaauguc

SEQ ID NO: 271090 - RNA, 19 nt, Human
ugaaaugucuagguuagca

SEQ ID NO: 271091 - RNA, 20 nt, Human
ugaccuguuggaagcggcag

SEQ ID NO: 271092 - RNA, 18 nt, Human
ugaguucucggaccaugu

SEQ ID NO: 271093 - RNA, 19 nt, Human
ugcgauccaagcccaaagc

SEQ ID NO: 271094 - RNA, 18 nt, Human
uggaagcggcagaagagg

SEQ ID NO: 271095 - RNA, 21 nt, Human
uggggcugucgcucuggcccu

SEQ ID NO: 271096 - RNA, 23 nt, Human
ugucgcucuggcccugggcuggg

SEQ ID NO: 271097 - RNA, 20 nt, Human
uucacagagguagcuggcag

SEQ ID NO: 271098 - RNA, 20 nt, Human
uuccuucuccuucuugaagg

SEQ ID NO: 271099 - RNA, 24 nt, Human
uuugcgcucagcuucaaugcagua

SEQ ID NO: 271100 - RNA, 21 nt, Human
acacagcucacagcccaagag

SEQ ID NO: 271101 - RNA, 24 nt, Human
agaggaagggggaagccaggggcc

SEQ ID NO: 271102 - RNA, 19 nt, Human
agaggggugucuggggucc

SEQ ID NO: 271103 - RNA, 25 nt, Human
agcagcagccuuagaacugggaugc

SEQ ID NO: 271104 - RNA, 18 nt, Human
agcugguuuuggcuuggg

SEQ ID NO: 271105 - RNA, 20 nt, Human
aggaaacuggucggcugggg

SEQ ID NO: 271106 - RNA, 22 nt, Human
agggggaagccaggggcccauu

SEQ ID NO: 271107 - RNA, 22 nt, Human
agggggcuggccugcuauaggg

SEQ ID NO: 271108 - RNA, 19 nt, Human
agugcagacaucagcugcc

SEQ ID NO: 271109 - RNA, 19 nt, Human
aucccacccagcagaggaa

SEQ ID NO: 271110 - RNA, 21 nt, Human
caagaggaagucaguccugcu

SEQ ID NO: 271111 - RNA, 19 nt, Human
caaucccacccagcagagg

SEQ ID NO: 271112 - RNA, 22 nt, Human
cacagcucacagcccaagaggu

SEQ ID NO: 271113 - RNA, 23 nt, Human
cacccccagccucugucuggcuc

SEQ ID NO: 271114 - RNA, 18 nt, Human
cagaacacagcucacagc

SEQ ID NO: 271115 - RNA, 18 nt, Human
cagcccccaaucccaccc

SEQ ID NO: 271116 - RNA, 20 nt, Human
cagcccccaaucccacccag

SEQ ID NO: 271117 - RNA, 24 nt, Human
caggggcccauuugggggcccagc

SEQ ID NO: 271118 - RNA, 21 nt, Human
caucagcugcccagagagccc

SEQ ID NO: 271119 - RNA, 18 nt, Human
ccaagaggugggcagacc

SEQ ID NO: 271120 - RNA, 22 nt, Human
ccaaucccacccagcagaggaa

SEQ ID NO: 271121 - RNA, 19 nt, Human
cccaagaggugggcagacc

SEQ ID NO: 271122 - RNA, 22 nt, Human
cccagcagaggaagccaagguc

SEQ ID NO: 271123 - RNA, 19 nt, Human
ccgggacaagaggaaguca

SEQ ID NO: 271124 - RNA, 21 nt, Human
ccugcuauagggggcggaggu

SEQ ID NO: 271125 - RNA, 18 nt, Human
cucccugguccuggagag

SEQ ID NO: 271126 - RNA, 22 nt, Human
cucucuguccccugcccagagg

SEQ ID NO: 271127 - RNA, 23 nt, Human
cugugacuggagcugguuuuggc

SEQ ID NO: 271128 - RNA, 23 nt, Human
cuugcaaagggcaggcaugcuca

SEQ ID NO: 271129 - RNA, 20 nt, Human
gaagccaggggcccauuugg

SEQ ID NO: 271130 - RNA, 19 nt, Human
gaaggcgggaggaaagggc

SEQ ID NO: 271131 - RNA, 18 nt, Human
gacccaguccagcuguga

SEQ ID NO: 271132 - RNA, 21 nt, Human
gaggaaacuggucggcugggg

SEQ ID NO: 271133 - RNA, 19 nt, Human
gaggugggcagacccaguc

SEQ ID NO: 271134 - RNA, 18 nt, Human
gagucaccaagggacagg

SEQ ID NO: 271135 - RNA, 23 nt, Human
gcuccccgagccugugucucucu

SEQ ID NO: 271136 - RNA, 18 nt, Human
gcugugacuggagcuggu

SEQ ID NO: 271137 - RNA, 18 nt, Human
ggaaaugggaagaugcug

SEQ ID NO: 271138 - RNA, 24 nt, Human
ggaaggacagaacacagcucacag

SEQ ID NO: 271139 - RNA, 18 nt, Human
ggaaggcgggaggaaagg

SEQ ID NO: 271140 - RNA, 25 nt, Human
ggacagaacacagcucacagcccaa

SEQ ID NO: 271141 - RNA, 20 nt, Human
ggagacuggggaggaagggg

SEQ ID NO: 271142 - RNA, 21 nt, Human
ggagguggauuuuccacucau

SEQ ID NO: 271143 - RNA, 25 nt, Human
ggcuuccuugggaagcucagggaug

SEQ ID NO: 271144 - RNA, 19 nt, Human
gggaguggaggguggauag

SEQ ID NO: 271145 - RNA, 18 nt, Human
gggcagucacaggacauc

SEQ ID NO: 271146 - RNA, 18 nt, Human
uauugcuuuugguuuccu

SEQ ID NO: 271147 - RNA, 21 nt, Human
ucaaucccuccuggccccuua

SEQ ID NO: 271148 - RNA, 22 nt, Human
uccccgagccugugucucucug

SEQ ID NO: 271149 - RNA, 18 nt, Human
uccuggagaggaaacugg

SEQ ID NO: 271150 - RNA, 20 nt, Human
uccuugggaagcucagggau

SEQ ID NO: 271151 - RNA, 18 nt, Human
ucggcugggggauggggu

SEQ ID NO: 271152 - RNA, 18 nt, Human
ucuaggucagcugguggg

SEQ ID NO: 271153 - RNA, 21 nt, Human
ucuccccaggaccccuucucc

SEQ ID NO: 271154 - RNA, 21 nt, Human
ucucccuccgaugggaggaag

SEQ ID NO: 271155 - RNA, 18 nt, Human
ucucucuguccccugccc

SEQ ID NO: 271156 - RNA, 18 nt, Human
ucugccuucccucccucu

SEQ ID NO: 271157 - RNA, 18 nt, Human
ucugccuucccucccucu

SEQ ID NO: 271158 - RNA, 18 nt, Human
ucuguccccugcccagag

SEQ ID NO: 271159 - RNA, 22 nt, Human
ugacaaacuucuugguuuccag

SEQ ID NO: 271160 - RNA, 19 nt, Human
ugacuggagcugguuuugg

SEQ ID NO: 271161 - RNA, 22 nt, Human
ugcagaggggugucuggggucc

SEQ ID NO: 271162 - RNA, 19 nt, Human
ugcccagagagcccugggc

SEQ ID NO: 271163 - RNA, 20 nt, Human
ugcccagagagcccugggcu

SEQ ID NO: 271164 - RNA, 23 nt, Human
ugcccuugauugguugcucugcc

SEQ ID NO: 271165 - RNA, 22 nt, Human
ugcucugccuucccucccucuu

SEQ ID NO: 271166 - RNA, 20 nt, Human
uggcugcagaggggugucug

SEQ ID NO: 271167 - RNA, 19 nt, Human
ugggacuugcagcaggaga

SEQ ID NO: 271168 - RNA, 19 nt, Human
uggggaggaagggggcugg

SEQ ID NO: 271169 - RNA, 24 nt, Human
uggggaggaagggggcuggccugc

SEQ ID NO: 271170 - RNA, 18 nt, Human
ugggggauggggucggag

SEQ ID NO: 271171 - RNA, 21 nt, Human
uguccugcauggaguaggggu

SEQ ID NO: 271172 - RNA, 20 nt, Human
uuuugagucucacccugccc

SEQ ID NO: 271173 - RNA, 19 nt, Human
uuuuuuuuuuuuaaugggc

SEQ ID NO: 271174 - RNA, 23 nt, Human
uuuuuuuuuuuuuuuuuaauggg

SEQ ID NO: 271175 - RNA, 26 nt, Human
aaaaaaagaaaaaagaacaaccaaaa

SEQ ID NO: 271176 - RNA, 20 nt, Human
aaaaaaagaaaaaagaacac

SEQ ID NO: 271177 - RNA, 25 nt, Human
aaaaaagaaaaaagaacaaccaaaa

SEQ ID NO: 271178 - RNA, 18 nt, Human
aaaaagaaaaaagaacaa

SEQ ID NO: 271179 - RNA, 19 nt, Human
aaacaaacagucucuccca

SEQ ID NO: 271180 - RNA, 21 nt, Human
aaauguuacaacugguauaaa

SEQ ID NO: 271181 - RNA, 22 nt, Human
aagaaacacuggcagaauucca

SEQ ID NO: 271182 - RNA, 31 nt, Human
aauauauauauauacacacacacacacagug

SEQ ID NO: 271183 - RNA, 19 nt, Human
acaacugguauaaaguaac

SEQ ID NO: 271184 - RNA, 19 nt, Human
acacacacacacacacaua

SEQ ID NO: 271185 - RNA, 27 nt, Human
acacacacacacacacauacacacaca

SEQ ID NO: 271186 - RNA, 23 nt, Human
acacacacacacacauacacaca

SEQ ID NO: 271187 - RNA, 28 nt, Human
acacacacacacauacacacacauuuuu

SEQ ID NO: 271188 - RNA, 19 nt, Human
acuccuccuccccccuuuc

SEQ ID NO: 271189 - RNA, 25 nt, Human
agaaaaaagaacaaccaaaaacaau

SEQ ID NO: 271190 - RNA, 20 nt, Human
aggaagaaaaauacuuuaaa

SEQ ID NO: 271191 - RNA, 22 nt, Human
aggaagaaaaauacuuuaaaga

SEQ ID NO: 271192 - RNA, 22 nt, Human
aggcaaauaaguccacgucccc

SEQ ID NO: 271193 - RNA, 23 nt, Human
auaaaaaccuccucaggcuuaug

SEQ ID NO: 271194 - RNA, 23 nt, Human
auaaagcauuccaguugauaaaa

SEQ ID NO: 271195 - RNA, 19 nt, Human
auccagaauuaagagaaaa

SEQ ID NO: 271196 - RNA, 20 nt, Human
aucuguauaucuuuagcugc

SEQ ID NO: 271197 - RNA, 24 nt, Human
caaaccuuuccaaucaauccacac

SEQ ID NO: 271198 - RNA, 25 nt, Human
caaauuuuuaacacauuucauuguu

SEQ ID NO: 271199 - RNA, 24 nt, Human
caaccagacauuuuacuugaagac

SEQ ID NO: 271200 - RNA, 21 nt, Human
caauccacaccgagucagcgc

SEQ ID NO: 271201 - RNA, 19 nt, Human
cacacacacacacacauac

SEQ ID NO: 271202 - RNA, 24 nt, Human
cacgggcuuuucuucccagagcuc

SEQ ID NO: 271203 - RNA, 19 nt, Human
cagguuaaaugaauguaaa

SEQ ID NO: 271204 - RNA, 23 nt, Human
cagguuaaaugaauguaaaauga

SEQ ID NO: 271205 - RNA, 20 nt, Human
cauuccauguagguuuuggg

SEQ ID NO: 271206 - RNA, 21 nt, Human
cauuccauguagguuuugggu

SEQ ID NO: 271207 - RNA, 23 nt, Human
cauuuggauggaucuauuuacag

SEQ ID NO: 271208 - RNA, 18 nt, Human
cccuaugaugcuccccuu

SEQ ID NO: 271209 - RNA, 21 nt, Human
ccuccuccccccuuucaaaga

SEQ ID NO: 271210 - RNA, 22 nt, Human
ccuuuccaaucaauccacaccg

SEQ ID NO: 271211 - RNA, 21 nt, Human
cuacucucuuuuccucucuuu

SEQ ID NO: 271212 - RNA, 23 nt, Human
cugccauuaaaaaaagaaaaaag

SEQ ID NO: 271213 - RNA, 21 nt, Human
cuucccagagcucggccaccc

SEQ ID NO: 271214 - RNA, 24 nt, Human
cuuuaaaaaaaaaaaggacugcaa

SEQ ID NO: 271215 - RNA, 18 nt, Human
cuuuuccucucuuuuucu

SEQ ID NO: 271216 - RNA, 24 nt, Human
gaaacauuuuguaauaaaagauuc

SEQ ID NO: 271217 - RNA, 22 nt, Human
gaaagccaugaugaauccagaa

SEQ ID NO: 271218 - RNA, 19 nt, Human
gcaaggcuuagcaaagaaa

SEQ ID NO: 271219 - RNA, 19 nt, Human
gcugccauuaaaaaaagaa

SEQ ID NO: 271220 - RNA, 21 nt, Human
ggcaaauaaguccacgucccc

SEQ ID NO: 271221 - RNA, 21 nt, Human
ggccaaauauauuucacagaa

SEQ ID NO: 271222 - RNA, 26 nt, Human
uaaaaaaagaaaaaagaacaaccaaa

SEQ ID NO: 271223 - RNA, 22 nt, Human
uaaaaaauaccaggcuuaccau

SEQ ID NO: 271224 - RNA, 25 nt, Human
uaaaagcaaaugcuaaaaacuacuu

SEQ ID NO: 271225 - RNA, 18 nt, Human
uaaauaauucaagaaaau

SEQ ID NO: 271226 - RNA, 25 nt, Human
uaacaguaaucuguauaucuuuagc

SEQ ID NO: 271227 - RNA, 21 nt, Human
uaacccuaugaugcuccccuu

SEQ ID NO: 271228 - RNA, 21 nt, Human
uaauauggucaaauuuuuaac

SEQ ID NO: 271229 - RNA, 20 nt, Human
uacaacugguauaaaguaac

SEQ ID NO: 271230 - RNA, 25 nt, Human
uacacacacacacacacauacacac

SEQ ID NO: 271231 - RNA, 23 nt, Human
uacaucaagccauuucauggguc

SEQ ID NO: 271232 - RNA, 21 nt, Human
uacuuuaaagacaugccaauu

SEQ ID NO: 271233 - RNA, 19 nt, Human
uagcugccauuaaaaaaag

SEQ ID NO: 271234 - RNA, 23 nt, Human
uagcugccauuaaaaaaagaaaa

SEQ ID NO: 271235 - RNA, 27 nt, Human
uagcugccauuaaaaaaagaaaaaaga

SEQ ID NO: 271236 - RNA, 19 nt, Human
uaguaucauucauuuguac

SEQ ID NO: 271237 - RNA, 20 nt, Human
uauaaucgggcuuuuacucc

SEQ ID NO: 271238 - RNA, 25 nt, Human
uauacacacacacacacacauacac

SEQ ID NO: 271239 - RNA, 25 nt, Human
uauauacacacacacacacacauac

SEQ ID NO: 271240 - RNA, 31 nt, Human; identical to SEQ ID NO: 251951

SEQ ID NO: 271241 - RNA, 20 nt, Human
ucaaaccuuuccaaucaauc

SEQ ID NO: 271242 - RNA, 19 nt, Human
ucaaagaugaugaucccau

SEQ ID NO: 271243 - RNA, 20 nt, Human
ucaccagucuuuuuccaucu

SEQ ID NO: 271244 - RNA, 21 nt, Human
ucaccagucuuuuuccaucuu

SEQ ID NO: 271245 - RNA, 22 nt, Human
ucauucauuuguacagagaaau

SEQ ID NO: 271246 - RNA, 21 nt, Human
uccagaauuaagagaaaaccc

SEQ ID NO: 271247 - RNA, 23 nt, Human
ucccaaguacucccucaaaccuu

SEQ ID NO: 271248 - RNA, 21 nt, Human
ucccagagcucggccacccuc

SEQ ID NO: 271249 - RNA, 20 nt, Human
uccccucgagccuucuacaa

SEQ ID NO: 271250 - RNA, 20 nt, Human
uccuccuccccccuuucaaa

SEQ ID NO: 271251 - RNA, 20 nt, Human
ucuacaacuuacuacacgcc

SEQ ID NO: 271252 - RNA, 22 nt, Human
ugaaaaacaaacuaauauaaaa

SEQ ID NO: 271253 - RNA, 24 nt, Human
ugaaaaacaaacuaauauaaagca

SEQ ID NO: 271254 - RNA, 26 nt, Human
ugaaaaggcaucaaaguaaaaaaaua

SEQ ID NO: 271255 - RNA, 21 nt, Human
ugaggaauguacagugaaaaa

SEQ ID NO: 271256 - RNA, 21 nt, Human
ugcaaaccaaggcaaauaagu

SEQ ID NO: 271257 - RNA, 24 nt, Human
ugcagguauugcaaaccaaggcaa

SEQ ID NO: 271258 - RNA, 23 nt, Human
ugccauuaaaaaaagaaaaaaga

SEQ ID NO: 271259 - RNA, 23 nt, Human
uuaacagaaacauuuuguaauaa

SEQ ID NO: 271260 - RNA, 19 nt, Human
uucacagaauagucaacac

SEQ ID NO: 271261 - RNA, 22 nt, Human
uuccaaucaauccacaccgagu

SEQ ID NO: 271262 - RNA, 23 nt, Human
uugggugccaauguuaaaauuuc

SEQ ID NO: 271263 - RNA, 22 nt, Human
uuuaaucaggaagaaaaauacu

SEQ ID NO: 271264 - RNA, 19 nt, Human
uuucaugggucuuuacccu

SEQ ID NO: 271265 - RNA, 19 nt, Human
uuuguaauaaaagauucac

SEQ ID NO: 271266 - RNA, 21 nt, Human
uuuuuuuuuuuuuuuuaauag

SEQ ID NO: 271267 - RNA, 19 nt, Human
aaaccaaauauccugccau

SEQ ID NO: 271268 - RNA, 23 nt, Human
aacugucuuucaggcgucuccag

SEQ ID NO: 271269 - RNA, 21 nt, Human
aaggcagaguccugaaggcag

SEQ ID NO: 271270 - RNA, 21 nt, Human
acccguguuccugaaggcaga

SEQ ID NO: 271271 - RNA, 23 nt, Human
acccuggcagcuagacuccacag

SEQ ID NO: 271272 - RNA, 18 nt, Human
agcuagacuccacagagu

SEQ ID NO: 271273 - RNA, 22 nt, Human
aggaagugauuucccugguaaa

SEQ ID NO: 271274 - RNA, 19 nt, Human
aggcagagagggugguggg

SEQ ID NO: 271275 - RNA, 20 nt, Human
aggcagagaggguggugggg

SEQ ID NO: 271276 - RNA, 21 nt, Human
aggcagagagggugguggggc

SEQ ID NO: 271277 - RNA, 21 nt, Human
agucagucaugguggugcacc

SEQ ID NO: 271278 - RNA, 22 nt, Human
caagacaggaccaaucaauguc

SEQ ID NO: 271279 - RNA, 23 nt, Human
cacccuuaagcccgccccggucu

SEQ ID NO: 271280 - RNA, 21 nt, Human
ccaaauauccugccaucuggg

SEQ ID NO: 271281 - RNA, 18 nt, Human
ccccggucuggaggcccc

SEQ ID NO: 271282 - RNA, 22 nt, Human
cccugaguucacauugauucaa

SEQ ID NO: 271283 - RNA, 21 nt, Human
ccgcacugccgcgacccuggc

SEQ ID NO: 271284 - RNA, 22 nt, Human
cuagacuccacagagucgggag

SEQ ID NO: 271285 - RNA, 19 nt, Human
cugaaggcagaauaccccu

SEQ ID NO: 271286 - RNA, 20 nt, Human
cugaaggcagaguccugaag

SEQ ID NO: 271287 - RNA, 25 nt, Human
cuuaccgcaacaccaaagaggaggc

SEQ ID NO: 271288 - RNA, 23 nt, Human
gaggcagagagggugguggggcc

SEQ ID NO: 271289 - RNA, 20 nt, Human
ggcagagagggugguggggc

SEQ ID NO: 271290 - RNA, 19 nt, Human
ggccccgccgcgcuucccg

SEQ ID NO: 271291 - RNA, 25 nt, Human
uaaaggaagauggaacugucuuuca

SEQ ID NO: 271292 - RNA, 24 nt, Human
uauccugccaucuggggacuuuca

SEQ ID NO: 271293 - RNA, 18 nt, Human
ucacuagaccugcccaag

SEQ ID NO: 271294 - RNA, 22 nt, Human
uccagcagacccucuacagacc

SEQ ID NO: 271295 - RNA, 21 nt, Human
uccccaguucccugaguucac

SEQ ID NO: 271296 - RNA, 18 nt, Human
uccugaaggcagaauacc

SEQ ID NO: 271297 - RNA, 20 nt, Human
ucuacagacccguguuccug

SEQ ID NO: 271298 - RNA, 22 nt, Human
ucuacagacccguguuccugaa

SEQ ID NO: 271299 - RNA, 22 nt, Human
ucuacagcucacuagaccugcc

SEQ ID NO: 271300 - RNA, 19 nt, Human
ucuuaccgcaacaccaaag

SEQ ID NO: 271301 - RNA, 19 nt, Human
ugaaggcagaguccugaag

SEQ ID NO: 271302 - RNA, 23 nt, Human
ugaaggcagaguccugaaggcag

SEQ ID NO: 271303 - RNA, 19 nt, Human
ugacccggacccuuuaaag

SEQ ID NO: 271304 - RNA, 18 nt, Human
ugauugauagucaguccu

SEQ ID NO: 271305 - RNA, 23 nt, Human
ugcccaagacaggaccaaucaau

SEQ ID NO: 271306 - RNA, 18 nt, Human
ugccgcgacccuggcagc

SEQ ID NO: 271307 - RNA, 23 nt, Human
ugccgcgacccuggcagcuagac

SEQ ID NO: 271308 - RNA, 23 nt, Human
uggaaagacaguauucucagaug

SEQ ID NO: 271309 - RNA, 25 nt, Human
uuccugaaggcagaguccugaaggc

SEQ ID NO: 271310 - RNA, 18 nt, Human
aaaaggguguggauauuu

SEQ ID NO: 271311 - RNA, 22 nt, Human
aaaauggaacaaaucauacaga

SEQ ID NO: 271312 - RNA, 18 nt, Human
aaccugagguccagagag

SEQ ID NO: 271313 - RNA, 21 nt, Human
aagaggaaaggacugaucuaa

SEQ ID NO: 271314 - RNA, 22 nt, Human
aagcagaacuacaaggcuguag

SEQ ID NO: 271315 - RNA, 19 nt, Human
aaggaguagcugggccagg

SEQ ID NO: 271316 - RNA, 23 nt, Human
acacauccaagguccaaaagcaa

SEQ ID NO: 271317 - RNA, 18 nt, Human
acagagcgagacccuguc

SEQ ID NO: 271318 - RNA, 20 nt, Human
acagagcgagacccugucuc

SEQ ID NO: 271319 - RNA, 25 nt, Human
acagagcgagacccugucucuaaaa

SEQ ID NO: 271320 - RNA, 19 nt, Human
accacugcacuccagccug

SEQ ID NO: 271321 - RNA, 24 nt, Human
accacugcacuccagccuggguga

SEQ ID NO: 271322 - RNA, 22 nt, Human
acccuaauaaaugaacuucagc

SEQ ID NO: 271323 - RNA, 21 nt, Human
acuccuugagggcaaagacug

SEQ ID NO: 271324 - RNA, 22 nt, Human
acucucauuuuacagauggaaa

SEQ ID NO: 271325 - RNA, 24 nt, Human
acugcacuccagccugggugacag

SEQ ID NO: 271326 - RNA, 26 nt, Human
acugcacuccagccugggugacagag

SEQ ID NO: 271327 - RNA, 20 nt, Human
agaaaaacaaacuugagaga

SEQ ID NO: 271328 - RNA, 28 nt, Human
agaaaaacaaacuugagagaaacccaga

SEQ ID NO: 271329 - RNA, 21 nt, Human
agagaaacccagaagccugga

SEQ ID NO: 271330 - RNA, 19 nt, Human
agccccccucuccccagcc

SEQ ID NO: 271331 - RNA, 24 nt, Human
agcgcuuuggaaggccuacguggg

SEQ ID NO: 271332 - RNA, 20 nt, Human
aggaagagaagguaagcaga

SEQ ID NO: 271333 - RNA, 21 nt, Human
aggaagagaagguaagcagaa

SEQ ID NO: 271334 - RNA, 24 nt, Human
aggaguuggaggcuguggugagcu

SEQ ID NO: 271335 - RNA, 24 nt, Human
agugcucuuuccacugcaguagcu

SEQ ID NO: 271336 - RNA, 22 nt, Human
aguuggaggcuguggugagcug

SEQ ID NO: 271337 - RNA, 23 nt, Human
augaggaagagaagguaagcaga

SEQ ID NO: 271338 - RNA, 24 nt, Human
auugcaccacugcacuccagccug

SEQ ID NO: 271339 - RNA, 23 nt, Human
auuuucauuuugcucuuuggagg

SEQ ID NO: 271340 - RNA, 20 nt, Human
caagccaguggcagagccag

SEQ ID NO: 271341 - RNA, 24 nt, Human
caagccuuggacagacgacuccag

SEQ ID NO: 271342 - RNA, 20 nt, Human
caauacgcacuauuauccaa

SEQ ID NO: 271343 - RNA, 22 nt, Human
cacauccaagguccaaaagcaa

SEQ ID NO: 271344 - RNA, 20 nt, Human
caccacugcacuccagccug

SEQ ID NO: 271345 - RNA, 26 nt, Human
caccacugcacuccagccugggugac

SEQ ID NO: 271346 - RNA, 22 nt, Human
cacuccagccugggugacagag

SEQ ID NO: 271347 - RNA, 24 nt, Human
cacuccagccugggugacagagcg

SEQ ID NO: 271348 - RNA, 19 nt, Human
cacugcacuccagccuggg

SEQ ID NO: 271349 - RNA, 21 nt, Human
cacugcacuccagccugggug

SEQ ID NO: 271350 - RNA, 22 nt, Human
cacugcacuccagccuggguga

SEQ ID NO: 271351 - RNA, 23 nt, Human
cacugcacuccagccugggugac

SEQ ID NO: 271352 - RNA, 24 nt, Human
cacugcacuccagccugggugaca

SEQ ID NO: 271353 - RNA, 24 nt, Human
cacugcacuccagccugggugaca

SEQ ID NO: 271354 - RNA, 24 nt, Human
cagagcgagacccugucucuaaaa

SEQ ID NO: 271355 - RNA, 22 nt, Human
cagcgcuuuggaaggccuacgu

SEQ ID NO: 271356 - RNA, 24 nt, Human
cagcgcuuuggaaggccuacgugg

SEQ ID NO: 271357 - RNA, 23 nt, Human
caggaccacauccuugucuucca

SEQ ID NO: 271358 - RNA, 18 nt, Human
caggaguuggaggcugug

SEQ ID NO: 271359 - RNA, 20 nt, Human
caggcacuaugcuugucccc

SEQ ID NO: 271360 - RNA, 21 nt, Human
caggugacacauccaaggucc

SEQ ID NO: 271361 - RNA, 19 nt, Human
caguagcuucuguuaaccu

SEQ ID NO: 271362 - RNA, 20 nt, Human
caucaccccaacauauagcc

SEQ ID NO: 271363 - RNA, 23 nt, Human
caucagaguccuuuaugcagcca

SEQ ID NO: 271364 - RNA, 21 nt, Human
caugacaccugcuuguaaccu

SEQ ID NO: 271365 - RNA, 22 nt, Human
ccaacaucuacaaagucuccca

SEQ ID NO: 271366 - RNA, 28 nt, Human
ccaacaucuacaaagucucccaccagcu

SEQ ID NO: 271367 - RNA, 20 nt, Human
ccacugcacuccagccuggg

SEQ ID NO: 271368 - RNA, 20 nt, Human
ccacugcacuccagccuggg

SEQ ID NO: 271369 - RNA, 21 nt, Human
ccacugcacuccagccugggu

SEQ ID NO: 271370 - RNA, 21 nt, Human
ccacugcacuccagccugggu

SEQ ID NO: 271371 - RNA, 24 nt, Human
ccacugcacuccagccugggugac

SEQ ID NO: 271372 - RNA, 25 nt, Human
ccacugcacuccagccugggugaca

SEQ ID NO: 271373 - RNA, 23 nt, Human
ccagccaaagaggaaaggacuga

SEQ ID NO: 271374 - RNA, 25 nt, Human
ccaugacaccugcuuguaaccucac

SEQ ID NO: 271375 - RNA, 23 nt, Human
cccaacaucuacaaagucuccca

SEQ ID NO: 271376 - RNA, 23 nt, Human
ccccauaaacuggugaacuccuu

SEQ ID NO: 271377 - RNA, 20 nt, Human
ccccccucuccccagccaaa

SEQ ID NO: 271378 - RNA, 26 nt, Human
ccggaauuuaagccccccucucccca

SEQ ID NO: 271379 - RNA, 19 nt, Human
ccucuaggauagagagccu

SEQ ID NO: 271380 - RNA, 20 nt, Human
ccugggugacagagcgagac

SEQ ID NO: 271381 - RNA, 19 nt, Human
ccugguggcuuaugccuac

SEQ ID NO: 271382 - RNA, 23 nt, Human
ccugucucuaaaauauaacaauu

SEQ ID NO: 271383 - RNA, 18 nt, Human
ccuuccugccaugacacc

SEQ ID NO: 271384 - RNA, 18 nt, Human
cggaauuuaagccccccu

SEQ ID NO: 271385 - RNA, 20 nt, Human
cuagagaucuuccuaauggu

SEQ ID NO: 271386 - RNA, 19 nt, Human
cucacagguaaaggaguag

SEQ ID NO: 271387 - RNA, 25 nt, Human
gaacaaaucauacagaucuggucuu

SEQ ID NO: 271388 - RNA, 20 nt, Human
gagaaaucuuagaaccaaua

SEQ ID NO: 271389 - RNA, 18 nt, Human
gagagaaacccagaagcc

SEQ ID NO: 271390 - RNA, 18 nt, Human
gaggaugccuugagccca

SEQ ID NO: 271391 - RNA, 24 nt, Human
gaugccuugagcccaggaguugga

SEQ ID NO: 271392 - RNA, 24 nt, Human
gcacuccagccugggugacagagc

SEQ ID NO: 271393 - RNA, 19 nt, Human
gccuacaaucucagcgcuu

SEQ ID NO: 271394 - RNA, 18 nt, Human
ggaggcuguggugagcug

SEQ ID NO: 271395 - RNA, 22 nt, Human
ggaggcuguggugagcugugau

SEQ ID NO: 271396 - RNA, 24 nt, Human
ggaggcuguggugagcugugauug

SEQ ID NO: 271397 - RNA, 23 nt, Human
ggccugguggcuuaugccuacaa

SEQ ID NO: 271398 - RNA, 24 nt, Human
gguggcuuaugccuacaaucucag

SEQ ID NO: 271399 - RNA, 24 nt, Human
uaagcagaacuacaaggcuguaga

SEQ ID NO: 271400 - RNA, 23 nt, Human
uaagccccccucuccccagccaa

SEQ ID NO: 271401 - RNA, 19 nt, Human
uacauacauagauuuguca

SEQ ID NO: 271402 - RNA, 20 nt, Human
uacauacauagauuugucac

SEQ ID NO: 271403 - RNA, 24 nt, Human
uacucucauuuuacagauggaaac

SEQ ID NO: 271404 - RNA, 19 nt, Human
uagccccauaaacugguga

SEQ ID NO: 271405 - RNA, 27 nt, Human
uauauauaauuuauguguguguauaua

SEQ ID NO: 271406 - RNA, 25 nt, Human
uauauucauauauauaauuuaugug

SEQ ID NO: 271407 - RNA, 24 nt, Human
uaugccuacaaucucagcgcuuug

SEQ ID NO: 271408 - RNA, 22 nt, Human
uauguguguguauauacacaca

SEQ ID NO: 271409 - RNA, 25 nt, Human
uauguguguguauauacacacauuu

SEQ ID NO: 271410 - RNA, 27 nt, Human
ucagcccaucaucaggguaaugccacc

SEQ ID NO: 271411 - RNA, 20 nt, Human
ucaggagcuaccaucacccc

SEQ ID NO: 271412 - RNA, 20 nt, Human
uccacugcaguagcuaaggc

SEQ ID NO: 271413 - RNA, 28 nt, Human
uccagagaguucaggugacagcggaccg

SEQ ID NO: 271414 - RNA, 23 nt, Human
uccagccugggugacagagcgag

SEQ ID NO: 271415 - RNA, 24 nt, Human
uccagccugggugacagagcgaga

SEQ ID NO: 271416 - RNA, 23 nt, Human
uccccagccaaagaggaaaggac

SEQ ID NO: 271417 - RNA, 19 nt, Human
uccccugguuuccauuuug

SEQ ID NO: 271418 - RNA, 19 nt, Human
uccugagaaaaacaaacuu

SEQ ID NO: 271419 - RNA, 25 nt, Human
ucuaggauagagagccuacagaacu

SEQ ID NO: 271420 - RNA, 24 nt, Human
ucuccuugcaaaauaugaaaauga

SEQ ID NO: 271421 - RNA, 21 nt, Human
ucuggucuuccuuccugccau

SEQ ID NO: 271422 - RNA, 22 nt, Human
ugacagagcgagacccugucuc

SEQ ID NO: 271423 - RNA, 19 nt, Human
ugagaagaugagaaaucuu

SEQ ID NO: 271424 - RNA, 21 nt, Human
ugcaccacugcacuccagccu

SEQ ID NO: 271425 - RNA, 21 nt, Human
ugcagccaggacuuacugauc

SEQ ID NO: 271426 - RNA, 20 nt, Human
ugcucaauuccucuaggaua

SEQ ID NO: 271427 - RNA, 21 nt, Human
uggaacaaaucauacagaucu

SEQ ID NO: 271428 - RNA, 19 nt, Human
uggaggcuguggugagcug

SEQ ID NO: 271429 - RNA, 24 nt, Human
uggcuuaugccuacaaucucagcg

SEQ ID NO: 271430 - RNA, 24 nt, Human
ugguggcuuaugccuacaaucuca

SEQ ID NO: 271431 - RNA, 19 nt, Human
uguagacuucaguagcuuc

SEQ ID NO: 271432 - RNA, 18 nt, Human
ugugaaaagguaaguccc

SEQ ID NO: 271433 - RNA, 25 nt, Human
uguguauauacacacauuuacauac

SEQ ID NO: 271434 - RNA, 24 nt, Human
uuaucuguagacuucaguagcuuc

SEQ ID NO: 271435 - RNA, 26 nt, Human
uucagcccaucaucaggguaaugcca

SEQ ID NO: 271436 - RNA, 22 nt, Human
uucagugcucuuuccacugcag

SEQ ID NO: 271437 - RNA, 21 nt, Human
uuccaugggccuacacaaaua

SEQ ID NO: 271438 - RNA, 21 nt, Human
uuccucuaggauagagagccu

SEQ ID NO: 271439 - RNA, 21 nt, Human
uuucucgcucuucuagcccca

SEQ ID NO: 271440 - RNA, 23 nt, Human
aaaaaggcucuguccaugccccu

SEQ ID NO: 271441 - RNA, 18 nt, Human
aaaaggcucuguccaugc

SEQ ID NO: 271442 - RNA, 22 nt, Human
acccacagggcagacauuccac

SEQ ID NO: 271443 - RNA, 26 nt, Human
acccaccaccccccaugcccgcccag

SEQ ID NO: 271444 - RNA, 22 nt, Human
agagggagggagggagggagag

SEQ ID NO: 271445 - RNA, 21 nt, Human
agcccccucucggcuuccccc

SEQ ID NO: 271446 - RNA, 19 nt, Human
aggagcucggagaggcagg

SEQ ID NO: 271447 - RNA, 28 nt, Human
aggcagguaggcgagcaccaccccagag

SEQ ID NO: 271448 - RNA, 18 nt, Human
agggacagagagggaggg

SEQ ID NO: 271449 - RNA, 20 nt, Human
agggagggagggagaggccc

SEQ ID NO: 271450 - RNA, 22 nt, Human
cacccacagggcagacauucca

SEQ ID NO: 271451 - RNA, 20 nt, Human
cacccaccaccccccaugcc

SEQ ID NO: 271452 - RNA, 25 nt, Human
cacccaccaccccccaugcccgccc

SEQ ID NO: 271453 - RNA, 20 nt, Human
ccaccaccccccaugcccgc

SEQ ID NO: 271454 - RNA, 22 nt, Human
cccaccaccccccaugcccgcc

SEQ ID NO: 271455 - RNA, 18 nt, Human
ccccucucccccuccccc

SEQ ID NO: 271456 - RNA, 24 nt, Human
ccccuggcuggcacccaccacccc

SEQ ID NO: 271457 - RNA, 20 nt, Human
cccuggccgggcccacccac

SEQ ID NO: 271458 - RNA, 25 nt, Human
cccuggcuggcacccaccacccccc

SEQ ID NO: 271459 - RNA, 21 nt, Human
cgcccagaggcguauggcuuu

SEQ ID NO: 271460 - RNA, 22 nt, Human
cggcuucccccucucccccucc

SEQ ID NO: 271461 - RNA, 23 nt, Human
gagaggcccuggccgggcccacc

SEQ ID NO: 271462 - RNA, 20 nt, Human
gaggagcucggagaggcagg

SEQ ID NO: 271463 - RNA, 20 nt, Human
gagggagggagggagaggcc

SEQ ID NO: 271464 - RNA, 19 nt, Human
gagggagggagggagggag

SEQ ID NO: 271465 - RNA, 18 nt, Human
ggcagacauuccacuugc

SEQ ID NO: 271466 - RNA, 18 nt, Human
ggggagaagccccuggug

SEQ ID NO: 271467 - RNA, 20 nt, Human
uagaaaaaggcucuguccau

SEQ ID NO: 271468 - RNA, 22 nt, Human
uccacuugcacagaggggaggg

SEQ ID NO: 271469 - RNA, 24 nt, Human
uccacuugcacagaggggaggggg

SEQ ID NO: 271470 - RNA, 19 nt, Human
ucccccucucccccucccc

SEQ ID NO: 271471 - RNA, 24 nt, Human
ucuuuagaaaaaggcucuguccau

SEQ ID NO: 271472 - RNA, 21 nt, Human
ugccaagggacagagagggag

SEQ ID NO: 271473 - RNA, 20 nt, Human
uggcacccaccaccccccau

SEQ ID NO: 271474 - RNA, 20 nt, Human
uguccauuugccaagggaca

SEQ ID NO: 271475 - RNA, 24 nt, Human
uucagggugggggagaauugagga

SEQ ID NO: 271476 - RNA, 22 nt, Human
aaaaaaaaacaaaaacaaaaag

SEQ ID NO: 271477 - RNA, 25 nt, Human
aaaaaaaaacaaaaacaaaaagcca

SEQ ID NO: 271478 - RNA, 23 nt, Human
aaaaacaaaaagccaucugaggg

SEQ ID NO: 271479 - RNA, 21 nt, Human
aaaaacccaaaaccacaaacc

SEQ ID NO: 271480 - RNA, 26 nt, Human
aaaaagccaucugagggggcagaggg

SEQ ID NO: 271481 - RNA, 19 nt, Human
aaacaaaaacaaaaagcca

SEQ ID NO: 271482 - RNA, 23 nt, Human
aaacaaaaacaaaaagccaucug

SEQ ID NO: 271483 - RNA, 24 nt, Human
aaacaaaaacaaaaagccaucuga

SEQ ID NO: 271484 - RNA, 20 nt, Human
aaacaaacaaaaaaaaccca

SEQ ID NO: 271485 - RNA, 22 nt, Human
aaacaaacaaaaaaaacccaaa

SEQ ID NO: 271486 - RNA, 23 nt, Human
aaacaaacaaaaaaaacccaaaa

SEQ ID NO: 271487 - RNA, 23 nt, Human
aaacaaacaaaaaaaacccaaaa

SEQ ID NO: 271488 - RNA, 23 nt, Human
aaacaaacaaacaaaaaaaaccc

SEQ ID NO: 271489 - RNA, 26 nt, Human
aacaaaaaaaacccaaaaccacaaac

SEQ ID NO: 271490 - RNA, 21 nt, Human
aaccaugauaacccagcucug

SEQ ID NO: 271491 - RNA, 22 nt, Human
aacccaaaaccacaaaccaaau

SEQ ID NO: 271492 - RNA, 18 nt, Human
aacccuucuccccagccc

SEQ ID NO: 271493 - RNA, 19 nt, Human
aacccuucuccccagccca

SEQ ID NO: 271494 - RNA, 23 nt, Human
aacucaccuacaaacaaacaaac

SEQ ID NO: 271495 - RNA, 18 nt, Human
aagaaagagaagguaggc

SEQ ID NO: 271496 - RNA, 19 nt, Human
aagaacucccgagucacac

SEQ ID NO: 271497 - RNA, 21 nt, Human
aagcagcagccaccccugcac

SEQ ID NO: 271498 - RNA, 24 nt, Human
aagccaaccaugauaacccagcuc

SEQ ID NO: 271499 - RNA, 22 nt, Human
acaaacaaaaaaaacccaaaac

SEQ ID NO: 271500 - RNA, 26 nt, Human
acaaacaaaaaaaacccaaaaccaca

SEQ ID NO: 271501 - RNA, 25 nt, Human
acaaacaaacaaacaaaaaaaaccc

SEQ ID NO: 271502 - RNA, 19 nt, Human
acccacaccuccccaccca

SEQ ID NO: 271503 - RNA, 18 nt, Human
acccacugcaaggccagc

SEQ ID NO: 271504 - RNA, 22 nt, Human
accccccucuccccaaaccuuc

SEQ ID NO: 271505 - RNA, 20 nt, Human
accuacaaacaaacaaacaa

SEQ ID NO: 271506 - RNA, 22 nt, Human
agaagaccaacccuucucccca

SEQ ID NO: 271507 - RNA, 21 nt, Human
agaagguaggcauaggucaga

SEQ ID NO: 271508 - RNA, 23 nt, Human
agacauggcaugaggcugcagcc

SEQ ID NO: 271509 - RNA, 23 nt, Human
agagagacauggcaugaggcugc

SEQ ID NO: 271510 - RNA, 22 nt, Human
agaggcagcccuugccuccuca

SEQ ID NO: 271511 - RNA, 24 nt, Human
agagguaaugagaugauggcuucc

SEQ ID NO: 271512 - RNA, 23 nt, Human
agauuagggcaggcugagauccc

SEQ ID NO: 271513 - RNA, 21 nt, Human
agcacaaaggcccagccugag

SEQ ID NO: 271514 - RNA, 20 nt, Human
agcagcagccaccccugcac

SEQ ID NO: 271515 - RNA, 19 nt, Human
agccaggacaggauccucc

SEQ ID NO: 271516 - RNA, 20 nt, Human
aggaaaaguuuccaaaauga

SEQ ID NO: 271517 - RNA, 24 nt, Human
aggagcugggugcagagacgggag

SEQ ID NO: 271518 - RNA, 27 nt, Human
aggccagggcaggcagggcugagagga

SEQ ID NO: 271519 - RNA, 19 nt, Human
agggcaaaugagccuaaaa

SEQ ID NO: 271520 - RNA, 19 nt, Human
aggggcccagaaccuggag

SEQ ID NO: 271521 - RNA, 19 nt, Human
agggggcagagggcuggga

SEQ ID NO: 271522 - RNA, 21 nt, Human
agggggcuacgacucggccag

SEQ ID NO: 271523 - RNA, 23 nt, Human
agguguuagaggcagcccuugcc

SEQ ID NO: 271524 - RNA, 18 nt, Human
agugggagagagacaugg

SEQ ID NO: 271525 - RNA, 24 nt, Human
caaaaaaaaacaaaaacaaaaagc

SEQ ID NO: 271526 - RNA, 19 nt, Human
caaaaaaaacccaaaacca

SEQ ID NO: 271527 - RNA, 25 nt, Human
caaaaaaaacccaaaaccacaaacc

SEQ ID NO: 271528 - RNA, 19 nt, Human
caaaaacaaaaagccaucu

SEQ ID NO: 271529 - RNA, 22 nt, Human
caaacaaaaaaaacccaaaacc

SEQ ID NO: 271530 - RNA, 24 nt, Human
caaacaaaaaaaacccaaaaccac

SEQ ID NO: 271531 - RNA, 24 nt, Human
caaacaaacaaaaaaaacccaaaa

SEQ ID NO: 271532 - RNA, 21 nt, Human
caaaugagccuaaaauccacu

SEQ ID NO: 271533 - RNA, 25 nt, Human
caaccaccagccucucacccccagc

SEQ ID NO: 271534 - RNA, 18 nt, Human
caacccuucuccccagcc

SEQ ID NO: 271535 - RNA, 19 nt, Human
caaucacagcgacccaagu

SEQ ID NO: 271536 - RNA, 21 nt, Human
cacacagaaagccugccccuc

SEQ ID NO: 271537 - RNA, 19 nt, Human
cacacagcuggucaguggc

SEQ ID NO: 271538 - RNA, 22 nt, Human
cacacagcuggucaguggccag

SEQ ID NO: 271539 - RNA, 21 nt, Human
cacacccuuucccagguaccc

SEQ ID NO: 271540 - RNA, 22 nt, Human
cacccagggcccuggcccaucc

SEQ ID NO: 271541 - RNA, 23 nt, Human
caccuacaaacaaacaaacaaaa

SEQ ID NO: 271542 - RNA, 24 nt, Human
caccugagguaccuaagccaaccu

SEQ ID NO: 271543 - RNA, 23 nt, Human
cacugacagagguaaugagauga

SEQ ID NO: 271544 - RNA, 23 nt, Human
cacugcaaggccagcacaaaggc

SEQ ID NO: 271545 - RNA, 23 nt, Human
cagaagaccaacccuucucccca

SEQ ID NO: 271546 - RNA, 21 nt, Human
cagacaccuccuagaaaccug

SEQ ID NO: 271547 - RNA, 21 nt, Human
cagccaggacaggauccuccc

SEQ ID NO: 271548 - RNA, 23 nt, Human
cagccaggacaggauccuccccu

SEQ ID NO: 271549 - RNA, 30 nt, Human
cagccaggacaggauccuccccuucucagg

SEQ ID NO: 271550 - RNA, 20 nt, Human
cagccucugggaucccuggc

SEQ ID NO: 271551 - RNA, 24 nt, Human
caggacuaaaacccaugcccugcc

SEQ ID NO: 271552 - RNA, 19 nt, Human
caggggcccagaaccugga

SEQ ID NO: 271553 - RNA, 21 nt, Human
cagggucagugacuggguagu

SEQ ID NO: 271554 - RNA, 20 nt, Human
cagguagugggagagagaca

SEQ ID NO: 271555 - RNA, 25 nt, Human
caguggccaggacuaaaacccaugc

SEQ ID NO: 271556 - RNA, 24 nt, Human
caucagguagugggagagagacca

SEQ ID NO: 271557 - RNA, 25 nt, Human
ccacacacccacugcaaggccagca

SEQ ID NO: 271558 - RNA, 19 nt, Human
ccacauguccuggcucagg

SEQ ID NO: 271559 - RNA, 19 nt, Human
ccacccccuggcagcccuc

SEQ ID NO: 271560 - RNA, 22 nt, Human
ccagccucucacccccagcugc

SEQ ID NO: 271561 - RNA, 19 nt, Human
ccaggacgggaggcaacca

SEQ ID NO: 271562 - RNA, 22 nt, Human
ccagggaacccacaccucccca

SEQ ID NO: 271563 - RNA, 24 nt, Human
cccaaaaccacaaaccaaauaaau

SEQ ID NO: 271564 - RNA, 21 nt, Human
cccaacccucagccucuggga

SEQ ID NO: 271565 - RNA, 30 nt, Human
cccaacccucagccucugggaucccuggcc

SEQ ID NO: 271566 - RNA, 22 nt, Human
cccacacacccacugcaaggcc

SEQ ID NO: 271567 - RNA, 23 nt, Human
cccacacacccacugcaaggcca

SEQ ID NO: 271568 - RNA, 27 nt, Human
cccacacacccacugcaaggccagcac

SEQ ID NO: 271569 - RNA, 22 nt, Human
cccaggccagggcaggcagggc

SEQ ID NO: 271570 - RNA, 22 nt, Human
cccagggaacccacaccucccc

SEQ ID NO: 271571 - RNA, 19 nt, Human
cccagggcgguuguugagc

SEQ ID NO: 271572 - RNA, 19 nt, Human
cccagggucagugacuggg

SEQ ID NO: 271573 - RNA, 21 nt, Human
cccauaccgaagggcuacccc

SEQ ID NO: 271574 - RNA, 20 nt, Human
cccaugcccugccugccaca

SEQ ID NO: 271575 - RNA, 23 nt, Human
ccccaacccucagccucugggau

SEQ ID NO: 271576 - RNA, 20 nt, Human
ccccacacacaaaggcagca

SEQ ID NO: 271577 - RNA, 19 nt, Human
ccccagaacuuagagaacc

SEQ ID NO: 271578 - RNA, 21 nt, Human
ccccagaacuuagagaaccuc

SEQ ID NO: 271579 - RNA, 21 nt, Human
ccccccaacccucagccucug

SEQ ID NO: 271580 - RNA, 23 nt, Human
ccccccaacccucagccucuggg

SEQ ID NO: 271581 - RNA, 27 nt, Human
ccccccucuccccaaaccggguccuuc

SEQ ID NO: 271582 - RNA, 23 nt, Human
ccccccucuccccaaaccuucaa

SEQ ID NO: 271583 - RNA, 24 nt, Human
ccccucccucugcccggugauuug

SEQ ID NO: 271584 - RNA, 24 nt, Human
ccccuccuuauggaguuccaauuc

SEQ ID NO: 271585 - RNA, 20 nt, Human
ccccugggcaauggcaucca

SEQ ID NO: 271586 - RNA, 22 nt, Human
ccccugggcaauggcauccagc

SEQ ID NO: 271587 - RNA, 20 nt, Human
cccucagccucugggauccc

SEQ ID NO: 271588 - RNA, 18 nt, Human
cccucccugccugauacc

SEQ ID NO: 271589 - RNA, 20 nt, Human
cccugccugccacacagagg

SEQ ID NO: 271590 - RNA, 20 nt, Human
ccgaagggcuaccccugggc

SEQ ID NO: 271591 - RNA, 22 nt, Human
ccuacgaacaggcucccugccc

SEQ ID NO: 271592 - RNA, 22 nt, Human
ccuaggcccuggacagcacaag

SEQ ID NO: 271593 - RNA, 20 nt, Human
ccucagccacacccuuuccc

SEQ ID NO: 271594 - RNA, 21 nt, Human
ccugagguaccuaagccaagg

SEQ ID NO: 271595 - RNA, 20 nt, Human
ccugauaccccccucucccc

SEQ ID NO: 271596 - RNA, 19 nt, Human
ccuggcacaccacccccug

SEQ ID NO: 271597 - RNA, 23 nt, Human
ccuggcccacacuaggaacacug

SEQ ID NO: 271598 - RNA, 20 nt, Human
cggccuccucuccuccccuc

SEQ ID NO: 271599 - RNA, 21 nt, Human
cggccuccucuccuccccucc

SEQ ID NO: 271600 - RNA, 24 nt, Human
cuaaaacccaugcccugccugcca

SEQ ID NO: 271601 - RNA, 25 nt, Human
cuaaaacccaugcccugccugccac

SEQ ID NO: 271602 - RNA, 23 nt, Human
cuaaaauccacuccaugcugcac

SEQ ID NO: 271603 - RNA, 28 nt, Human
cuacaaacaaacaaacaaaaaaaaccca

SEQ ID NO: 271604 - RNA, 19 nt, Human
cuaggaacacuggcccucc

SEQ ID NO: 271605 - RNA, 20 nt, Human
cucugcagccuguccaugug

SEQ ID NO: 271606 - RNA, 20 nt, Human
cucugggugaccaucagccc

SEQ ID NO: 271607 - RNA, 25 nt, Human
cugagguccuggcacaccacccccu

SEQ ID NO: 271608 - RNA, 20 nt, Human
cugcccaggacgggaggcaa

SEQ ID NO: 271609 - RNA, 23 nt, Human
cugccugauaccccccucucccc

SEQ ID NO: 271610 - RNA, 23 nt, Human
cuggagcccucugcagccugucc

SEQ ID NO: 271611 - RNA, 24 nt, Human
cuggagcccucugcagccugucca

SEQ ID NO: 271612 - RNA, 20 nt, Human
cuggcccacacuaggaacac

SEQ ID NO: 271613 - RNA, 21 nt, Human
cuggcccaggaggaagggugc

SEQ ID NO: 271614 - RNA, 18 nt, Human
cuuggcccagggaaccca

SEQ ID NO: 271615 - RNA, 19 nt, Human
gaacccacaccuccccacc

SEQ ID NO: 271616 - RNA, 20 nt, Human
gaacccacaccuccccaccc

SEQ ID NO: 271617 - RNA, 22 nt, Human
gaacuuagagaaccuggaggug

SEQ ID NO: 271618 - RNA, 20 nt, Human
gacccaagugcacaagggaa

SEQ ID NO: 271619 - RNA, 20 nt, Human
gagcccucugcagccugucc

SEQ ID NO: 271620 - RNA, 18 nt, Human
gagggggcagagggcugg

SEQ ID NO: 271621 - RNA, 20 nt, Human
gaguaaaaaggcuggucuug

SEQ ID NO: 271622 - RNA, 22 nt, Human
gauccuccccuucucagccagg

SEQ ID NO: 271623 - RNA, 23 nt, Human
gauggaugcaaaaaaaaacaaaa

SEQ ID NO: 271624 - RNA, 19 nt, Human
gcaggagcugaggugcggu

SEQ ID NO: 271625 - RNA, 19 nt, Human
gcagggaacgaagaaagag

SEQ ID NO: 271626 - RNA, 20 nt, Human
gcaugcagagaggagcuggg

SEQ ID NO: 271627 - RNA, 18 nt, Human
gccagcccccgcucccuc

SEQ ID NO: 271628 - RNA, 18 nt, Human
gcccagaggaagguacau

SEQ ID NO: 271629 - RNA, 19 nt, Human
gcccggugauuugccucug

SEQ ID NO: 271630 - RNA, 20 nt, Human
gcccuggacagcacaagaua

SEQ ID NO: 271631 - RNA, 22 nt, Human
gccucucacccccagcugccau

SEQ ID NO: 271632 - RNA, 19 nt, Human
gccugagguccuggcacac

SEQ ID NO: 271633 - RNA, 23 nt, Human
gccugauaccccccucuccccaa

SEQ ID NO: 271634 - RNA, 24 nt, Human
gcuucaguuucccauguuuaauag

SEQ ID NO: 271635 - RNA, 26 nt, Human
ggaaggcuacagccaggacaggaucc

SEQ ID NO: 271636 - RNA, 18 nt, Human
ggacaggauccuccccuu

SEQ ID NO: 271637 - RNA, 21 nt, Human
ggagucaggggaagauacugc

SEQ ID NO: 271638 - RNA, 21 nt, Human
gggagagacagggagagugcg

SEQ ID NO: 271639 - RNA, 19 nt, Human
gggcccuggcccaucccag

SEQ ID NO: 271640 - RNA, 20 nt, Human
gguagggcuggguaugagcu

SEQ ID NO: 271641 - RNA, 21 nt, Human
ggugcagagacgggagagaca

SEQ ID NO: 271642 - RNA, 20 nt, Human
gugcagucucugauggaugc

SEQ ID NO: 271643 - RNA, 19 nt, Human
gugcggccuccucuccucc

SEQ ID NO: 271644 - RNA, 23 nt, Human
uacaaacaaacaaacaaaaaaaa

SEQ ID NO: 271645 - RNA, 24 nt, Human
uacaaacaaacaaacaaaaaaaac

SEQ ID NO: 271646 - RNA, 23 nt, Human
uacagccaggacaggauccuccc

SEQ ID NO: 271647 - RNA, 20 nt, Human
uaccccccucuccccaaacc

SEQ ID NO: 271648 - RNA, 24 nt, Human
uagggacccuggcagaagaccaac

SEQ ID NO: 271649 - RNA, 22 nt, Human
ucacacagaaagccugccccuc

SEQ ID NO: 271650 - RNA, 21 nt, Human
ucacagcgacccaagugcaca

SEQ ID NO: 271651 - RNA, 21 nt, Human
ucagcagguggggcgcucccu

SEQ ID NO: 271652 - RNA, 19 nt, Human
ucagccacacccuuuccca

SEQ ID NO: 271653 - RNA, 28 nt, Human
ucaguggccaggacuaaaaccggggucc

SEQ ID NO: 271654 - RNA, 23 nt, Human
uccaugugcccaucagguagugg

SEQ ID NO: 271655 - RNA, 22 nt, Human
ucccagguaccccacacacaaa

SEQ ID NO: 271656 - RNA, 24 nt, Human
uccccaaaccuucaagggcuucag

SEQ ID NO: 271657 - RNA, 22 nt, Human
uccccacccagggcccuggccc

SEQ ID NO: 271658 - RNA, 25 nt, Human
uccucagcugggacugggcugaagc

SEQ ID NO: 271659 - RNA, 19 nt, Human
uccuggcucagggcugcag

SEQ ID NO: 271660 - RNA, 28 nt, Human
ucucagccaggggcccagaaccuggagc

SEQ ID NO: 271661 - RNA, 24 nt, Human
ucuuagggacccuggcagaagacc

SEQ ID NO: 271662 - RNA, 26 nt, Human
ucuuagggacccuggcagaagaccaa

SEQ ID NO: 271663 - RNA, 20 nt, Human
ugacagagguaaugagauga

SEQ ID NO: 271664 - RNA, 23 nt, Human
ugagaugauggcuuccucccccc

SEQ ID NO: 271665 - RNA, 23 nt, Human
ugaggaagagaaggggccccacu

SEQ ID NO: 271666 - RNA, 20 nt, Human
ugaggcugcagccugcccag

SEQ ID NO: 271667 - RNA, 19 nt, Human
ugagggggcagagggcugg

SEQ ID NO: 271668 - RNA, 19 nt, Human
ugagggggcagagggcugg

SEQ ID NO: 271669 - RNA, 20 nt, Human
ugagggggcagagggcuggg

SEQ ID NO: 271670 - RNA, 18 nt, Human
ugaggugcggugugcgag

SEQ ID NO: 271671 - RNA, 20 nt, Human
ugcaaaaaaaaacaaaaaca

SEQ ID NO: 271672 - RNA, 21 nt, Human
ugcaaaaaaaaacaaaaacaa

SEQ ID NO: 271673 - RNA, 19 nt, Human
ugcacugacagagguaaug

SEQ ID NO: 271674 - RNA, 24 nt, Human
ugcccaggacgggaggcaaccacc

SEQ ID NO: 271675 - RNA, 21 nt, Human
ugcccagggcgguuguugagc

SEQ ID NO: 271676 - RNA, 21 nt, Human
ugccccgccaucacaaggucu

SEQ ID NO: 271677 - RNA, 21 nt, Human
ugccccucucucccgaaacaa

SEQ ID NO: 271678 - RNA, 23 nt, Human
ugccuccucaucuucccuacgaa

SEQ ID NO: 271679 - RNA, 23 nt, Human
ugccucugcccccucccugccug

SEQ ID NO: 271680 - RNA, 27 nt, Human
uggacuacagacaccuccuagaaaccc

SEQ ID NO: 271681 - RNA, 22 nt, Human
uggagucaggggaagauacugc

SEQ ID NO: 271682 - RNA, 19 nt, Human
uggcacaccacccccuggc

SEQ ID NO: 271683 - RNA, 20 nt, Human
uggcagaagaccaacccuuc

SEQ ID NO: 271684 - RNA, 23 nt, Human
uggcagcccucacggaagaacuc

SEQ ID NO: 271685 - RNA, 26 nt, Human
uggcauccagcgagaugauuggggca

SEQ ID NO: 271686 - RNA, 23 nt, Human
uggccaggacuaaaacccaugcc

SEQ ID NO: 271687 - RNA, 18 nt, Human
uggcccaucccaggugug

SEQ ID NO: 271688 - RNA, 19 nt, Human
uggcucagggcugcagcug

SEQ ID NO: 271689 - RNA, 21 nt, Human
uggcuuccuccccccaacccu

SEQ ID NO: 271690 - RNA, 23 nt, Human
uggcuuccuccccccaacccuca

SEQ ID NO: 271691 - RNA, 20 nt, Human
uggcuuguuccucagcuggg

SEQ ID NO: 271692 - RNA, 24 nt, Human
ugggacugggcugaagcccgagaa

SEQ ID NO: 271693 - RNA, 22 nt, Human
ugggcagggaacgaagaaagag

SEQ ID NO: 271694 - RNA, 23 nt, Human
ugguagggcuggguaugagcuuc

SEQ ID NO: 271695 - RNA, 22 nt, Human
ugugcgagugugcgcgcgcggg

SEQ ID NO: 271696 - RNA, 23 nt, Human
uucggcgcucgcgggugggggcg

SEQ ID NO: 271697 - RNA, 19 nt, Human
uuucuaggggcccagagga

SEQ ID NO: 271698 - RNA, 18 nt, Human
uuugccucugcccccucc

SEQ ID NO: 271699 - RNA, 22 nt, Human
aaacaaaauuacaguacagauc

SEQ ID NO: 271700 - RNA, 18 nt, Human
aaacacgacagucacugu

SEQ ID NO: 271701 - RNA, 26 nt, Human
aagcagcuugugauuuaaagaagggu

SEQ ID NO: 271702 - RNA, 23 nt, Human
aauuacaguacagaucgauucca

SEQ ID NO: 271703 - RNA, 23 nt, Human
acaacaaaauaauucagcauggg

SEQ ID NO: 271704 - RNA, 18 nt, Human
acccuggggccuccggac

SEQ ID NO: 271705 - RNA, 19 nt, Human
agauaauuaauacgaucug

SEQ ID NO: 271706 - RNA, 21 nt, Human
agauauaacucccaacauuaa

SEQ ID NO: 271707 - RNA, 20 nt, Human
agcacuuauucuggacugca

SEQ ID NO: 271708 - RNA, 21 nt, Human
agcagugauagucucauaacc

SEQ ID NO: 271709 - RNA, 25 nt, Human
aggcaacacaauaacuuucuaagca

SEQ ID NO: 271710 - RNA, 24 nt, Human
auacgaucugaauacagccacacc

SEQ ID NO: 271711 - RNA, 24 nt, Human
caaagggcugccuuuuguaaacac

SEQ ID NO: 271712 - RNA, 18 nt, Human
caauagcuucagauucuc

SEQ ID NO: 271713 - RNA, 21 nt, Human
caggauuacaaacaaaauuac

SEQ ID NO: 271714 - RNA, 18 nt, Human
cauuuuacaugcaauagc

SEQ ID NO: 271715 - RNA, 24 nt, Human
ccuccggacgccgugccuccugcg

SEQ ID NO: 271716 - RNA, 18 nt, Human
cuaaaaaguaacagugca

SEQ ID NO: 271717 - RNA, 19 nt, Human
cuugugcaaguaauguguu

SEQ ID NO: 271718 - RNA, 18 nt, Human
gcaauuuuuuuuuuuuuu

SEQ ID NO: 271719 - RNA, 26 nt, Human
gggaaagguaacaaguaguaaaaugc

SEQ ID NO: 271720 - RNA, 22 nt, Human
uaaaaucauggaaugcaaagga

SEQ ID NO: 271721 - RNA, 28 nt, Human
uaacaaguaguaaaaugcugguugaaaa

SEQ ID NO: 271722 - RNA, 23 nt, Human
uaacagugcaaauuguaugugau

SEQ ID NO: 271723 - RNA, 24 nt, Human
uaaggcaacacaauaacuuucuaa

SEQ ID NO: 271724 - RNA, 24 nt, Human
uaaggugaacaggaacuuugaucc

SEQ ID NO: 271725 - RNA, 18 nt, Human
uaauauguauauacaagc

SEQ ID NO: 271726 - RNA, 22 nt, Human
uaauucuacuuuucugauaugu

SEQ ID NO: 271727 - RNA, 19 nt, Human
uacaggauuacaaacaaaa

SEQ ID NO: 271728 - RNA, 27 nt, Human
uacaggauuacaaacaaaaggacauac

SEQ ID NO: 271729 - RNA, 24 nt, Human
uacaggauuacaaacaaaauuaca

SEQ ID NO: 271730 - RNA, 22 nt, Human
uacgaucugaauacagccacac

SEQ ID NO: 271731 - RNA, 23 nt, Human
uagaagagcuauagaaaauaaua

SEQ ID NO: 271732 - RNA, 22 nt, Human
uauguauauacaagcuugugca

SEQ ID NO: 271733 - RNA, 18 nt, Human
ucacuguaagcacagugg

SEQ ID NO: 271734 - RNA, 18 nt, Human
ucacuguaagcacagugg

SEQ ID NO: 271735 - RNA, 23 nt, Human
ucuuccaaaggcaguaaugacaa

SEQ ID NO: 271736 - RNA, 23 nt, Human
ugauauguugugauagggaaugu

SEQ ID NO: 271737 - RNA, 24 nt, Human
ugauauguugugauagggaaugua

SEQ ID NO: 271738 - RNA, 23 nt, Human
ugauuagauuuaggcucagauuu

SEQ ID NO: 271739 - RNA, 26 nt, Human
ugauucugguuuuuauuuuaggggga

SEQ ID NO: 271740 - RNA, 21 nt, Human
ugggaaagguaacaaguagua

SEQ ID NO: 271741 - RNA, 26 nt, Human
ugguugaaaaauauauauuuauauau

SEQ ID NO: 271742 - RNA, 22 nt, Human
uguaaacacgacagucacugua

SEQ ID NO: 271743 - RNA, 25 nt, Human
ugugcaauuuuuuuuuuuuuuuuuu

SEQ ID NO: 271744 - RNA, 18 nt, Human
uuuaagcuacuguacuaa

SEQ ID NO: 271745 - RNA, 23 nt, Human
uuuguaaacacgacagucacugu

SEQ ID NO: 271746 - RNA, 25 nt, Human
uuuguaaacacgacagucacuguaa

SEQ ID NO: 271747 - RNA, 25 nt, Human
uuuuuuuuuuuuuuuuuuacaauug

SEQ ID NO: 271748 - RNA, 26 nt, Human
uuuuuuuuuuuuuuuuuuacaauugg

SEQ ID NO: 271749 - RNA, 18 nt, Human
aaagaagggagccggccc

SEQ ID NO: 271750 - RNA, 23 nt, Human
aaaggcaaaagaaaaagaaggga

SEQ ID NO: 271751 - RNA, 21 nt, Human
aaauaauaaugagagggggaa

SEQ ID NO: 271752 - RNA, 24 nt, Human
aaggggagaggggaggggaggggg

SEQ ID NO: 271753 - RNA, 24 nt, Human
agagagaggggggagaagagggau

SEQ ID NO: 271754 - RNA, 20 nt, Human
agagaggggggagaagaggg

SEQ ID NO: 271755 - RNA, 20 nt, Human
agagaggggggagaagaggg

SEQ ID NO: 271756 - RNA, 21 nt, Human
agaggagucaaggggagaggg

SEQ ID NO: 271757 - RNA, 19 nt, Human
agaggggaggggagggggg

SEQ ID NO: 271758 - RNA, 18 nt, Human
agaggggggagaagaggg

SEQ ID NO: 271759 - RNA, 23 nt, Human
agaggucccuggagaagcacucc

SEQ ID NO: 271760 - RNA, 19 nt, Human
aggagggggaggaggaaac

SEQ ID NO: 271761 - RNA, 21 nt, Human
aggcggcgggcgccggcgucu

SEQ ID NO: 271762 - RNA, 19 nt, Human
agggagcccccggagagag

SEQ ID NO: 271763 - RNA, 19 nt, Human
agggggaggaggaaaccuc

SEQ ID NO: 271764 - RNA, 19 nt, Human
auccacuuccccucccgcc

SEQ ID NO: 271765 - RNA, 23 nt, Human
caauccacuuccccucccgccaa

SEQ ID NO: 271766 - RNA, 24 nt, Human
cagggagcccccggagagaggucc

SEQ ID NO: 271767 - RNA, 20 nt, Human
ccacagguaacaggacugcg

SEQ ID NO: 271768 - RNA, 20 nt, Human
ccacuuccccucccgccaaa

SEQ ID NO: 271769 - RNA, 21 nt, Human
ccauugcucagcugcccccuu

SEQ ID NO: 271770 - RNA, 21 nt, Human
ccccaggagagcggcaggacc

SEQ ID NO: 271771 - RNA, 24 nt, Human
ccccugggggaagcgaggccccug

SEQ ID NO: 271772 - RNA, 21 nt, Human
ccccuugcggagagagaaggc

SEQ ID NO: 271773 - RNA, 19 nt, Human
ccgcgcccggcgccggggu

SEQ ID NO: 271774 - RNA, 22 nt, Human
ccucaaggcggcgggcgccggc

SEQ ID NO: 271775 - RNA, 18 nt, Human
ccuggagaagcacuccuu

SEQ ID NO: 271776 - RNA, 20 nt, Human
cgccaaaauuaaaaucgcaa

SEQ ID NO: 271777 - RNA, 24 nt, Human
cggcgcccuaacuucuacccucuu

SEQ ID NO: 271778 - RNA, 23 nt, Human
cgggcaaaggcaaaagaaaaaga

SEQ ID NO: 271779 - RNA, 26 nt, Human
cucuucaagaaagagggagcgccugg

SEQ ID NO: 271780 - RNA, 23 nt, Human
cuuggccucucucuuuccucuca

SEQ ID NO: 271781 - RNA, 24 nt, Human
gaaugggggaggggugccuccagg

SEQ ID NO: 271782 - RNA, 21 nt, Human
gcccccggagagaggucccug

SEQ ID NO: 271783 - RNA, 20 nt, Human
gcgcugccccaggagagcgg

SEQ ID NO: 271784 - RNA, 25 nt, Human
gcgcugccccaggagagcggcagga

SEQ ID NO: 271785 - RNA, 20 nt, Human
gcggagacuggagguugggg

SEQ ID NO: 271786 - RNA, 19 nt, Human
ggagacuggagguuggggg

SEQ ID NO: 271787 - RNA, 20 nt, Human
ggaggagggggaggaggaaa

SEQ ID NO: 271788 - RNA, 23 nt, Human
ggagguugggggugagggcguuc

SEQ ID NO: 271789 - RNA, 22 nt, Human
ggcgggcaaaggcaaaagaaaa

SEQ ID NO: 271790 - RNA, 18 nt, Human
gggaggagggggaggagg

SEQ ID NO: 271791 - RNA, 18 nt, Human
gggcuccggcgcccuaac

SEQ ID NO: 271792 - RNA, 19 nt, Human
gggcuggggacaggggggg

SEQ ID NO: 271793 - RNA, 20 nt, Human
ggggagaggggaggggaggg

SEQ ID NO: 271794 - RNA, 21 nt, Human
ggggaggggagggggggaggg

SEQ ID NO: 271795 - RNA, 21 nt, Human
ggggaggggagggggggaggg

SEQ ID NO: 271796 - RNA, 24 nt, Human
ggggaggggagggggggagggggc

SEQ ID NO: 271797 - RNA, 21 nt, Human
ggggcuggggacagggggggc

SEQ ID NO: 271798 - RNA, 21 nt, Human
ggggcuggggacagggggggc

SEQ ID NO: 271799 - RNA, 24 nt, Human
ggggugccuccagggagcccccgg

SEQ ID NO: 271800 - RNA, 19 nt, Human
gggugccuccagggagccc

SEQ ID NO: 271801 - RNA, 18 nt, Human
gucaaggggagaggggag

SEQ ID NO: 271802 - RNA, 27 nt, Human
gucaaggggagaggggaggggagggag

SEQ ID NO: 271803 - RNA, 21 nt, Human
gugccuccagggagcccccgg

SEQ ID NO: 271804 - RNA, 20 nt, Human
ucaagaaagagggagcgccu

SEQ ID NO: 271805 - RNA, 26 nt, Human
ucaaggggagaggggaggggaggggg

SEQ ID NO: 271806 - RNA, 22 nt, Human
ucaauccacuuccccucccgcc

SEQ ID NO: 271807 - RNA, 25 nt, Human
ucccccaucuucagggagcgggggc

SEQ ID NO: 271808 - RNA, 20 nt, Human
ucccuggagaagcacuccuu

SEQ ID NO: 271809 - RNA, 20 nt, Human
uccucaaggcggcgggcgcc

SEQ ID NO: 271810 - RNA, 20 nt, Human
uccuugggagagaggaggag

SEQ ID NO: 271811 - RNA, 19 nt, Human
ugccccaggagagcggcag

SEQ ID NO: 271812 - RNA, 22 nt, Human
uggagguugggggugagggcgu

SEQ ID NO: 271813 - RNA, 22 nt, Human
uggagguugggggugagggcgu

SEQ ID NO: 271814 - RNA, 18 nt, Human
uggccucucucuuuccuc

SEQ ID NO: 271815 - RNA, 22 nt, Human
ugggggaagcgaggccccuggg

SEQ ID NO: 271816 - RNA, 20 nt, Human
ugggggcuggggacaggggg

SEQ ID NO: 271817 - RNA, 18 nt, Human
uguuuaaaaaaaggaaaa

SEQ ID NO: 271818 - RNA, 21 nt, Human
uguuuguuuaaaaaaaggaaa

SEQ ID NO: 271819 - RNA, 23 nt, Human
uucauuguucccccaucuucagg

SEQ ID NO: 271820 - RNA, 22 nt, Human
uuuuuuuuuuuuuuuuguaugu

SEQ ID NO: 271821 - RNA, 21 nt, Human
aaagggcaaggacagggaagg

SEQ ID NO: 271822 - RNA, 25 nt, Human
aaaguagaagaaaaaaaguuaaaga

SEQ ID NO: 271823 - RNA, 19 nt, Human
aagaaaaggcagcauuaaa

SEQ ID NO: 271824 - RNA, 21 nt, Human
agaagaaaaaaaguuaaagaa

SEQ ID NO: 271825 - RNA, 23 nt, Human
agaagaaaaaaaguuaaagaaaa

SEQ ID NO: 271826 - RNA, 24 nt, Human
aggaagugcagcauuacaacaugg

SEQ ID NO: 271827 - RNA, 19 nt, Human
aggcaaggagagggucugu

SEQ ID NO: 271828 - RNA, 21 nt, Human
aggcaaggagagggucugugg

SEQ ID NO: 271829 - RNA, 25 nt, Human
aggcaaggagagggucuguggagug

SEQ ID NO: 271830 - RNA, 22 nt, Human
agggggagagggaaagggggcg

SEQ ID NO: 271831 - RNA, 24 nt, Human
aguagaagaaaaaaaguuaaagaa

SEQ ID NO: 271832 - RNA, 19 nt, Human
caacauggcaaaccggaug

SEQ ID NO: 271833 - RNA, 24 nt, Human
ccggcgcccugggccgggaagagg

SEQ ID NO: 271834 - RNA, 21 nt, Human
gagagggaaagggggcguugg

SEQ ID NO: 271835 - RNA, 22 nt, Human
gagggggagagggaaagggggc

SEQ ID NO: 271836 - RNA, 20 nt, Human
gcguuggcaaggaggcuggg

SEQ ID NO: 271837 - RNA, 23 nt, Human
ggacagggaaggggucacuagug

SEQ ID NO: 271838 - RNA, 23 nt, Human
ggcggcggagggaagggugggcc

SEQ ID NO: 271839 - RNA, 23 nt, Human
gggggcggcggagggaagggugg

SEQ ID NO: 271840 - RNA, 27 nt, Human
ggggggcggcggagggaagggugggcc

SEQ ID NO: 271841 - RNA, 18 nt, Human
uaccagauacacgccaaa

SEQ ID NO: 271842 - RNA, 24 nt, Human
uagaagaaaaaaaguuaaagaaaa

SEQ ID NO: 271843 - RNA, 19 nt, Human
uauaaaacaggaagugcag

SEQ ID NO: 271844 - RNA, 18 nt, Human
uggcaacauggcaaaccg

SEQ ID NO: 271845 - RNA, 23 nt, Human
ugggccgggaagagggcggggag

SEQ ID NO: 271846 - RNA, 19 nt, Human
uuaaaaguuuccugaccuc

SEQ ID NO: 271847 - RNA, 21 nt, Human
aaaacaaagacucaggucaga

SEQ ID NO: 271848 - RNA, 19 nt, Human
aaacaaagacucaggucag

SEQ ID NO: 271849 - RNA, 18 nt, Human
acggucugggcugcgcgg

SEQ ID NO: 271850 - RNA, 24 nt, Human
aggcccgggacccucgcgccccac

SEQ ID NO: 271851 - RNA, 26 nt, Human
cacggaaacccccagccagcucccua

SEQ ID NO: 271852 - RNA, 18 nt, Human
cacucugagcccuuuagc

SEQ ID NO: 271853 - RNA, 20 nt, Human
cagguccugggguggcuggg

SEQ ID NO: 271854 - RNA, 19 nt, Human
caugggccgcgaggacccu

SEQ ID NO: 271855 - RNA, 26 nt, Human
cccacggaaacccccagccagcuccc

SEQ ID NO: 271856 - RNA, 23 nt, Human
ccccacggccugcacucugagcc

SEQ ID NO: 271857 - RNA, 20 nt, Human
ccuggaguugcugcacaggc

SEQ ID NO: 271858 - RNA, 20 nt, Human
cucgcgccccacggccugca

SEQ ID NO: 271859 - RNA, 18 nt, Human
cucuucacucagcugggg

SEQ ID NO: 271860 - RNA, 19 nt, Human
cugggguggcugggucacc

SEQ ID NO: 271861 - RNA, 20 nt, Human
gagcucccacggaaaccccc

SEQ ID NO: 271862 - RNA, 22 nt, Human
gccaugagagaaaucucuacag

SEQ ID NO: 271863 - RNA, 19 nt, Human
gcccgggacccucgcgccc

SEQ ID NO: 271864 - RNA, 20 nt, Human
gccugagcggaaaggggagu

SEQ ID NO: 271865 - RNA, 21 nt, Human
uccugggguggcugggucacc

SEQ ID NO: 271866 - RNA, 23 nt, Human
ugcacauaagaggggcugggcuc

SEQ ID NO: 271867 - RNA, 21 nt, Human
uggauggcucucuugauaucu

SEQ ID NO: 271868 - RNA, 22 nt, Human
uggcagguccugggguggcugg

SEQ ID NO: 271869 - RNA, 18 nt, Human
uggcucucuugauaucug

SEQ ID NO: 271870 - RNA, 21 nt, Human
aaacaaagaugcgagcaugcg

SEQ ID NO: 271871 - RNA, 23 nt, Human
aaacacacaacgcagggcugagc

SEQ ID NO: 271872 - RNA, 24 nt, Human
aaacguuccaaauguuggagacuc

SEQ ID NO: 271873 - RNA, 19 nt, Human
aaagagcugagaugacaga

SEQ ID NO: 271874 - RNA, 20 nt, Human
aaauguuggagacucauacu

SEQ ID NO: 271875 - RNA, 18 nt, Human
aagggaagcauguuacaa

SEQ ID NO: 271876 - RNA, 20 nt, Human
aaucacagcuccuggcuuuc

SEQ ID NO: 271877 - RNA, 19 nt, Human
aaugaaauguguuugcagu

SEQ ID NO: 271878 - RNA, 20 nt, Human
acaguccccugagaaaggcu

SEQ ID NO: 271879 - RNA, 19 nt, Human
acgugcagaccgacgggau

SEQ ID NO: 271880 - RNA, 24 nt, Human
agacagcugacacagacaucaaac

SEQ ID NO: 271881 - RNA, 23 nt, Human
agggaagcauguuacaaaagagc

SEQ ID NO: 271882 - RNA, 18 nt, Human
auaaauagaugccuagau

SEQ ID NO: 271883 - RNA, 28 nt, Human
auacuagaguccucucgcaaccggaggg

SEQ ID NO: 271884 - RNA, 23 nt, Human
auagaugccuagauauguacaca

SEQ ID NO: 271885 - RNA, 24 nt, Human
aucugaaaacacacaacgcagggg

SEQ ID NO: 271886 - RNA, 20 nt, Human
caaagacagcugacacagac

SEQ ID NO: 271887 - RNA, 21 nt, Human
cacagcuccuggcuuucuagg

SEQ ID NO: 271888 - RNA, 21 nt, Human
cagcaagagcagcgacuggag

SEQ ID NO: 271889 - RNA, 20 nt, Human
cagcaaggccuacacgaacc

SEQ ID NO: 271890 - RNA, 24 nt, Human
caggguacccagccgcagguggga

SEQ ID NO: 271891 - RNA, 22 nt, Human
cagguuccaaaacggaugccgg

SEQ ID NO: 271892 - RNA, 19 nt, Human
caugaaaggccccugcacg

SEQ ID NO: 271893 - RNA, 25 nt, Human
ccaguaaccuauugaugugcuauuc

SEQ ID NO: 271894 - RNA, 20 nt, Human
cccccgccuccccgccggcc

SEQ ID NO: 271895 - RNA, 18 nt, Human
ccccgccuccccgccggc

SEQ ID NO: 271896 - RNA, 20 nt, Human
ccccggugcccgcgcccugc

SEQ ID NO: 271897 - RNA, 20 nt, Human
cccggccaccucccuucugu

SEQ ID NO: 271898 - RNA, 20 nt, Human
ccgucugguaaccuacagcu

SEQ ID NO: 271899 - RNA, 22 nt, Human
ccuccaggugacacaguggucu

SEQ ID NO: 271900 - RNA, 18 nt, Human
ccucccccgccuccccgc

SEQ ID NO: 271901 - RNA, 25 nt, Human
ccuccugccuuuuuaaagcuggaaa

SEQ ID NO: 271902 - RNA, 21 nt, Human
ccugccuuuuuaaagcuggaa

SEQ ID NO: 271903 - RNA, 19 nt, Human
cgcgcguggcggggcccgg

SEQ ID NO: 271904 - RNA, 18 nt, Human
cgcggcggcggcggggag

SEQ ID NO: 271905 - RNA, 22 nt, Human
cgcucugccuccugccuuuuua

SEQ ID NO: 271906 - RNA, 21 nt, Human
cggcggggaguggagcggcgg

SEQ ID NO: 271907 - RNA, 22 nt, Human
cgggaagacagcccucgccccg

SEQ ID NO: 271908 - RNA, 23 nt, Human
cuagaguccucucgcagccuucc

SEQ ID NO: 271909 - RNA, 23 nt, Human
cucccccgccuccccgccggccc

SEQ ID NO: 271910 - RNA, 20 nt, Human
cuccgagcccugcccgcgcc

SEQ ID NO: 271911 - RNA, 23 nt, Human
cucgcagccuuccagcauucucu

SEQ ID NO: 271912 - RNA, 22 nt, Human
cucugccuccugccuuuuuaaa

SEQ ID NO: 271913 - RNA, 19 nt, Human
cugaagucagcauaccccu

SEQ ID NO: 271914 - RNA, 20 nt, Human
cugcuccuaaaaauacuccu

SEQ ID NO: 271915 - RNA, 20 nt, Human
cugguuaaauaaggcacuuc

SEQ ID NO: 271916 - RNA, 21 nt, Human
cuucacgguuacgugcagacc

SEQ ID NO: 271917 - RNA, 24 nt, Human
cuuuccgugagugagacacaagag

SEQ ID NO: 271918 - RNA, 23 nt, Human
gagcaugcgacuaugaacaagcc

SEQ ID NO: 271919 - RNA, 19 nt, Human
gagguucugagugguacca

SEQ ID NO: 271920 - RNA, 21 nt, Human
gcacggugggucucccgugcu

SEQ ID NO: 271921 - RNA, 20 nt, Human
gccggagccuccacccgcag

SEQ ID NO: 271922 - RNA, 19 nt, Human
gccgggugcaggguaccca

SEQ ID NO: 271923 - RNA, 22 nt, Human
gcgcgguggcuccgagcccugc

SEQ ID NO: 271924 - RNA, 19 nt, Human
gcugaagucagcauacccc

SEQ ID NO: 271925 - RNA, 18 nt, Human
gcugggaucuggcgcggc

SEQ ID NO: 271926 - RNA, 25 nt, Human
ggcauucagucaguuggagguucug

SEQ ID NO: 271927 - RNA, 18 nt, Human
gggaguggagcggcgggc

SEQ ID NO: 271928 - RNA, 24 nt, Human
ggggucgggucuccgggaagacag

SEQ ID NO: 271929 - RNA, 21 nt, Human
gggucuccgggaagacagccc

SEQ ID NO: 271930 - RNA, 18 nt, Human
guaaggcagcaggagugg

SEQ ID NO: 271931 - RNA, 22 nt, Human
guaauaagcaacuaauuguaca

SEQ ID NO: 271932 - RNA, 21 nt, Human
gugcccagcaaggccuacacg

SEQ ID NO: 271933 - RNA, 19 nt, Human
guggcuccgagcccugccc

SEQ ID NO: 271934 - RNA, 23 nt, Human
guguacgugacagcccaggaaac

SEQ ID NO: 271935 - RNA, 21 nt, Human
uaaaaauacuccuacaguagc

SEQ ID NO: 271936 - RNA, 27 nt, Human
uaacuacaaagacagcugacacagaca

SEQ ID NO: 271937 - RNA, 20 nt, Human
uaagcaacuaauuguacaga

SEQ ID NO: 271938 - RNA, 21 nt, Human
uacaaagacagcugacacaga

SEQ ID NO: 271939 - RNA, 22 nt, Human
uagaguccucucgcagccuucc

SEQ ID NO: 271940 - RNA, 24 nt, Human
uauauuacacuuagguugcauguu

SEQ ID NO: 271941 - RNA, 20 nt, Human
uauggaacaauagaucgcug

SEQ ID NO: 271942 - RNA, 22 nt, Human
uauguacacacaugcaaaugca

SEQ ID NO: 271943 - RNA, 26 nt, Human
uauguacacacaugcaaaugcaggcu

SEQ ID NO: 271944 - RNA, 21 nt, Human
ucaaaagucuuugucugcuga

SEQ ID NO: 271945 - RNA, 21 nt, Human
ucagucaguuggagguucuga

SEQ ID NO: 271946 - RNA, 23 nt, Human
uccauaagggggcauuaauuccc

SEQ ID NO: 271947 - RNA, 22 nt, Human
ucccgugcucagcccggccacc

SEQ ID NO: 271948 - RNA, 21 nt, Human
ucgcagccuuccagcauucuc

SEQ ID NO: 271949 - RNA, 21 nt, Human
ucucccuuccucccugcuuuc

SEQ ID NO: 271950 - RNA, 24 nt, Human
ucuguuauuauuuauacauaaaua

SEQ ID NO: 271951 - RNA, 24 nt, Human
ugaaacaaucaucuuauaacugaa

SEQ ID NO: 271952 - RNA, 22 nt, Human
ugaagucagcauaccccugcug

SEQ ID NO: 271953 - RNA, 24 nt, Human
ugacacagacaucaaacguuuccc

SEQ ID NO: 271954 - RNA, 18 nt, Human
ugacacaguggucucccu

SEQ ID NO: 271955 - RNA, 19 nt, Human
ugacacaguggucucccuu

SEQ ID NO: 271956 - RNA, 24 nt, Human
ugacacaguggucucccuuccucc

SEQ ID NO: 271957 - RNA, 22 nt, Human
ugacgcagggccgcgcucugcc

SEQ ID NO: 271958 - RNA, 23 nt, Human
ugacuucacagccggagccucca

SEQ ID NO: 271959 - RNA, 19 nt, Human
ugagacacaagagacgcga

SEQ ID NO: 271960 - RNA, 20 nt, Human
ugccagaagggcugggcgug

SEQ ID NO: 271961 - RNA, 24 nt, Human
uggaaaacaccucccccgccuccc

SEQ ID NO: 271962 - RNA, 24 nt, Human
uggaacaauagaucgcugcgagua

SEQ ID NO: 271963 - RNA, 18 nt, Human
uggagcggcgggcggagg

SEQ ID NO: 271964 - RNA, 21 nt, Human
uggagcggcgggcggaggcac

SEQ ID NO: 271965 - RNA, 18 nt, Human
uggcuccgagcccugccc

SEQ ID NO: 271966 - RNA, 20 nt, Human
uggcuuucuaggguccuccu

SEQ ID NO: 271967 - RNA, 21 nt, Human
ugggcgaggacacgucggcuc

SEQ ID NO: 271968 - RNA, 21 nt, Human
ugguuuucuuagaugaagcag

SEQ ID NO: 271969 - RNA, 24 nt, Human
ugucaugagaugacuucuccucca

SEQ ID NO: 271970 - RNA, 20 nt, Human
ugugaguucaguuuauuuau

SEQ ID NO: 271971 - RNA, 21 nt, Human
uguucagugacuucacagccg

SEQ ID NO: 271972 - RNA, 22 nt, Human
uucaggcagguuccauaagggg

SEQ ID NO: 271973 - RNA, 22 nt, Human
uugaaccccaggggugccagaa

SEQ ID NO: 271974 - RNA, 21 nt, Human
uuucuaauguugccgucuggu

SEQ ID NO: 271975 - RNA, 21 nt, Human
uuuuugguauugguuuucuua

SEQ ID NO: 271976 - RNA, 22 nt, Human
uuuuuuuuuuuuuuuuuuccag

SEQ ID NO: 271977 - RNA, 19 nt, Human
cagcggguccuggacgcgc

SEQ ID NO: 271978 - RNA, 26 nt, Human
ccccucgcaguggggcuggcggaggc

SEQ ID NO: 271979 - RNA, 21 nt, Human
cgacggcggcgcgagcuuccu

SEQ ID NO: 271980 - RNA, 21 nt, Human
cggcggcgacggcggcgcgag

SEQ ID NO: 271981 - RNA, 18 nt, Human
cgggaaggcugcggggcc

SEQ ID NO: 271982 - RNA, 18 nt, Human
cggggaagcugagcggcg

SEQ ID NO: 271983 - RNA, 21 nt, Human
gagcggcggcggcgacggcgg

SEQ ID NO: 271984 - RNA, 22 nt, Human
gcccggggaagcugagcggcgg

SEQ ID NO: 271985 - RNA, 21 nt, Human
gcggcggcggcgacggcggcg

SEQ ID NO: 271986 - RNA, 23 nt, Human
gcgggcgcggcuggcucugggac

SEQ ID NO: 271987 - RNA, 20 nt, Human
gcggggccgggggcgagggc

SEQ ID NO: 271988 - RNA, 25 nt, Human
gggaagcugagcggcgggacagagg

SEQ ID NO: 271989 - RNA, 21 nt, Human
gggcgggaaggcugcggggcc

SEQ ID NO: 271990 - RNA, 19 nt, Human
uggacgcgcccggggaagc

SEQ ID NO: 271991 - RNA, 18 nt, Human
aaacagaaaucugggaca

SEQ ID NO: 271992 - RNA, 26 nt, Human
aagcaaaguucauuuccccaaagcuc

SEQ ID NO: 271993 - RNA, 20 nt, Human
aagcacccaucauauaaaag

SEQ ID NO: 271994 - RNA, 18 nt, Human
agaccugaaggcugcaga

SEQ ID NO: 271995 - RNA, 19 nt, Human
agaccugaaggcugcagag

SEQ ID NO: 271996 - RNA, 23 nt, Human
agcggcggcagcagcuccucaac

SEQ ID NO: 271997 - RNA, 21 nt, Human
aggagagaaacaugcugagaa

SEQ ID NO: 271998 - RNA, 21 nt, Human
aggccugagguggaggaaugc

SEQ ID NO: 271999 - RNA, 21 nt, Human
aggcggcggcggcggcagcgg

SEQ ID NO: 272000 - RNA, 18 nt, Human
aggcugcagaguuggaaa

SEQ ID NO: 272001 - RNA, 21 nt, Human
caaaucaccaauccuagcuaa

SEQ ID NO: 272002 - RNA, 24 nt, Human
cacuccuggccccagaccugaagg

SEQ ID NO: 272003 - RNA, 18 nt, Human
cagcaccaggaaccgcag

SEQ ID NO: 272004 - RNA, 22 nt, Human
ccaaagcucaaacagccuaugc

SEQ ID NO: 272005 - RNA, 23 nt, Human
ccaauccuagcuaaguaaccagg

SEQ ID NO: 272006 - RNA, 22 nt, Human
ccagggugcugcagcuccuccu

SEQ ID NO: 272007 - RNA, 21 nt, Human
cccacaaauggugggucccac

SEQ ID NO: 272008 - RNA, 18 nt, Human
ccccaaagcucaaacagc

SEQ ID NO: 272009 - RNA, 25 nt, Human
ccccaaagcucaaacagccuaugcu

SEQ ID NO: 272010 - RNA, 20 nt, Human
ccccacaaaugguggguccc

SEQ ID NO: 272011 - RNA, 19 nt, Human
ccguuccgaaagcuggccg

SEQ ID NO: 272012 - RNA, 21 nt, Human
ccuccucaggcggcggcggcg

SEQ ID NO: 272013 - RNA, 21 nt, Human
ccuggccccagaccugaaggc

SEQ ID NO: 272014 - RNA, 24 nt, Human
cgagcagcaccaggaaccgcagcc

SEQ ID NO: 272015 - RNA, 20 nt, Human
cggcagcggcaagcggcggc

SEQ ID NO: 272016 - RNA, 22 nt, Human
cguggcccagggugcugcagcu

SEQ ID NO: 272017 - RNA, 23 nt, Human
cucgggaggggagccugccugcu

SEQ ID NO: 272018 - RNA, 23 nt, Human
cuucaugccgggccgcgcgggcc

SEQ ID NO: 272019 - RNA, 23 nt, Human
gcggcggcagcggcaagcggcgg

SEQ ID NO: 272020 - RNA, 26 nt, Human
gcggcggcagcggcaagcggcggcag

SEQ ID NO: 272021 - RNA, 18 nt, Human
gcuacuuuccccacaaau

SEQ ID NO: 272022 - RNA, 18 nt, Human
ggcggcggcggcggcagc

SEQ ID NO: 272023 - RNA, 21 nt, Human
ggugguggacacaaggcugca

SEQ ID NO: 272024 - RNA, 22 nt, Human
ucaccccugcuccuugggaaac

SEQ ID NO: 272025 - RNA, 25 nt, Human
uccaaggagagaaacaugcugagaa

SEQ ID NO: 272026 - RNA, 18 nt, Human
uccacggcaaacuuuccg

SEQ ID NO: 272027 - RNA, 21 nt, Human
uccguuccgaaagcuggccgc

SEQ ID NO: 272028 - RNA, 25 nt, Human
uccuaaauccagggacucaggacuc

SEQ ID NO: 272029 - RNA, 23 nt, Human
ugagaaguuggugguggacacaa

SEQ ID NO: 272030 - RNA, 18 nt, Human
ugcuacuuuccccacaaa

SEQ ID NO: 272031 - RNA, 20 nt, Human
ugcuccuguucuuuugccaa

SEQ ID NO: 272032 - RNA, 18 nt, Human
ugcugcagcuccuccuca

SEQ ID NO: 272033 - RNA, 18 nt, Human
uggcccagggugcugcag

SEQ ID NO: 272034 - RNA, 18 nt, Human
ugggaaacagaaaucugg

SEQ ID NO: 272035 - RNA, 24 nt, Human
uuccccacaaauggugggucccac

SEQ ID NO: 272036 - RNA, 23 nt, Human
uuggugguggacacaaggcugca

SEQ ID NO: 272037 - RNA, 19 nt, Human
agcccccaggucccggccu

SEQ ID NO: 272038 - RNA, 21 nt, Human
caggagcccccaggucccggc

SEQ ID NO: 272039 - RNA, 21 nt, Human
cgucgcugccgccucccucca

SEQ ID NO: 272040 - RNA, 24 nt, Human
cucccucccucccuuucucugaga

SEQ ID NO: 272041 - RNA, 23 nt, Human
cuccuccgucgcugccgccuccc

SEQ ID NO: 272042 - RNA, 22 nt, Human
cugcuguaucuucacccgggug

SEQ ID NO: 272043 - RNA, 24 nt, Human
cugcuguaucuucacccggguggc

SEQ ID NO: 272044 - RNA, 23 nt, Human
ggaggggggaguucaggaggcug

SEQ ID NO: 272045 - RNA, 24 nt, Human
ggccugggugggaggggggaguuc

SEQ ID NO: 272046 - RNA, 19 nt, Human
gggggaguucaggaggcug

SEQ ID NO: 272047 - RNA, 21 nt, Human
ucacccggguggcucccuccc

SEQ ID NO: 272048 - RNA, 23 nt, Human
ucacccggguggcucccucccuc

SEQ ID NO: 272049 - RNA, 23 nt, Human
uccuccgucgcugccgccucccu

SEQ ID NO: 272050 - RNA, 20 nt, Human
ugccgccucccuccagaagc

SEQ ID NO: 272051 - RNA, 23 nt, Human
ugggaggggggaguucaggaggc

SEQ ID NO: 272052 - RNA, 25 nt, Human
ugggaggggggaguucaggaggccg

SEQ ID NO: 272053 - RNA, 24 nt, Human
uugccaggugaugacaguucacgu

SEQ ID NO: 272054 - RNA, 22 nt, Human
acccugcuuuccuccucugucc

SEQ ID NO: 272055 - RNA, 20 nt, Human
accuuggaacuuccaaacac

SEQ ID NO: 272056 - RNA, 19 nt, Human
acuuguugccauugucauc

SEQ ID NO: 272057 - RNA, 19 nt, Human
agacagauuccagcccucc

SEQ ID NO: 272058 - RNA, 23 nt, Human
agacagauuccagcccucccuca

SEQ ID NO: 272059 - RNA, 24 nt, Human
agguggaggcuaaagaccugagga

SEQ ID NO: 272060 - RNA, 21 nt, Human
caaaaugcccacucuuuuccc

SEQ ID NO: 272061 - RNA, 22 nt, Human
caagguggaggcuaaagaccug

SEQ ID NO: 272062 - RNA, 20 nt, Human
cagcccucccucaaggcaag

SEQ ID NO: 272063 - RNA, 23 nt, Human
cagccuuuucuuuccaagaugau

SEQ ID NO: 272064 - RNA, 18 nt, Human
caucaggggucacccugc

SEQ ID NO: 272065 - RNA, 20 nt, Human
ccagcccucccucaaggcaa

SEQ ID NO: 272066 - RNA, 21 nt, Human
cccuaauacuuuuuacucccc

SEQ ID NO: 272067 - RNA, 18 nt, Human
cccucaaggcaagccucu

SEQ ID NO: 272068 - RNA, 20 nt, Human
cccucaaggcaagccucuuu

SEQ ID NO: 272069 - RNA, 21 nt, Human
cccugcuuuccuccucugucc

SEQ ID NO: 272070 - RNA, 24 nt, Human
ccuuuucuuuccaagaugaugaca

SEQ ID NO: 272071 - RNA, 24 nt, Human
gaaaucccaucagcaguuccaccc

SEQ ID NO: 272072 - RNA, 26 nt, Human
gaacacaccuuggaacuuccaaacac

SEQ ID NO: 272073 - RNA, 22 nt, Human
gcaacaucaggggucacccugc

SEQ ID NO: 272074 - RNA, 21 nt, Human
gcaguuccaccccucugggcc

SEQ ID NO: 272075 - RNA, 18 nt, Human
ggacucaggguuggggag

SEQ ID NO: 272076 - RNA, 23 nt, Human
gggacucaggguuggggaguacc

SEQ ID NO: 272077 - RNA, 18 nt, Human
uaaagaccugaggagccg

SEQ ID NO: 272078 - RNA, 24 nt, Human
uaauacuuuuuacucccccaaacu

SEQ ID NO: 272079 - RNA, 25 nt, Human
uagggcaacaucaggggucacccug

SEQ ID NO: 272080 - RNA, 23 nt, Human
ucagcuccuucugggacucaggg

SEQ ID NO: 272081 - RNA, 20 nt, Human
uccagguucccggaaagccc

SEQ ID NO: 272082 - RNA, 19 nt, Human
ucccccaaacuguuuuccu

SEQ ID NO: 272083 - RNA, 21 nt, Human
ucccucaaggcaagccucuuu

SEQ ID NO: 272084 - RNA, 27 nt, Human
ugcuuuccuccucuguccucaguuuua

SEQ ID NO: 272085 - RNA, 22 nt, Human
uguugccauugucauccucuuc

SEQ ID NO: 272086 - RNA, 20 nt, Human
uuacucccccaaacuguuuu

SEQ ID NO: 272087 - RNA, 21 nt, Human
uucuggucuagagaacucagc

SEQ ID NO: 272088 - RNA, 23 nt, Human
uuguugccauugucauccucuuc

SEQ ID NO: 272089 - RNA, 18 nt, Human
uuucuguuuugcuguguu

SEQ ID NO: 272090 - RNA, 18 nt, Human
uuuuuuuuuuuuuuucug

SEQ ID NO: 272091 - RNA, 19 nt, Human
uuuuuuuuuuuuuuucugu

SEQ ID NO: 272092 - RNA, 22 nt, Human
aaaaauaaaaucuacaaggaaa

SEQ ID NO: 272093 - RNA, 18 nt, Human
aaacccccuucuucccca

SEQ ID NO: 272094 - RNA, 23 nt, Human
aaagaaacccaaaaaagaaagca

SEQ ID NO: 272095 - RNA, 20 nt, Human
aacaccgccccuccccaccc

SEQ ID NO: 272096 - RNA, 23 nt, Human
aacaccgccccuccccaccccca

SEQ ID NO: 272097 - RNA, 24 nt, Human
aacaccgccccuccccacccccac

SEQ ID NO: 272098 - RNA, 19 nt, Human
aaccccguaccccacccug

SEQ ID NO: 272099 - RNA, 21 nt, Human
aaccccguaccccacccuggc

SEQ ID NO: 272100 - RNA, 20 nt, Human
aagaaacccaaaaaagaaag

SEQ ID NO: 272101 - RNA, 24 nt, Human
aagcacacccuguggagccaaggc

SEQ ID NO: 272102 - RNA, 23 nt, Human
acaccgccccuccccacccccac

SEQ ID NO: 272103 - RNA, 20 nt, Human
acacuagauucuccaucauu

SEQ ID NO: 272104 - RNA, 23 nt, Human
accccguaccccacccuggcaga

SEQ ID NO: 272105 - RNA, 20 nt, Human
acccuguggagccaaggcca

SEQ ID NO: 272106 - RNA, 20 nt, Human
acccuuugacucuaaaucuc

SEQ ID NO: 272107 - RNA, 22 nt, Human
agaaaaaucccaaguguucaca

SEQ ID NO: 272108 - RNA, 21 nt, Human
agaaacccaaaaaagaaagca

SEQ ID NO: 272109 - RNA, 20 nt, Human
agaaagaaacccaaaaaaga

SEQ ID NO: 272110 - RNA, 24 nt, Human
agauucuccaucauuccucugccu

SEQ ID NO: 272111 - RNA, 19 nt, Human
agcaacuccaccaccaccc

SEQ ID NO: 272112 - RNA, 21 nt, Human
agcccuaaaaaaaucaaagcg

SEQ ID NO: 272113 - RNA, 18 nt, Human
agcugccuguggcugaga

SEQ ID NO: 272114 - RNA, 25 nt, Human
aggcagucugugagggguggggaac

SEQ ID NO: 272115 - RNA, 19 nt, Human
aggcagugaaugacaugcg

SEQ ID NO: 272116 - RNA, 19 nt, Human
aggcccaccagucacucca

SEQ ID NO: 272117 - RNA, 21 nt, Human
aggggaggacggcauacacau

SEQ ID NO: 272118 - RNA, 27 nt, Human
agguccagguccagcccuucuccaguu

SEQ ID NO: 272119 - RNA, 22 nt, Human
agguccagguccagguccagcc

SEQ ID NO: 272120 - RNA, 22 nt, Human
agguccagguccagguccaggu

SEQ ID NO: 272121 - RNA, 21 nt, Human
auacagucacuuccucacuca

SEQ ID NO: 272122 - RNA, 20 nt, Human
auggccaaugauauccaaga

SEQ ID NO: 272123 - RNA, 22 nt, Human
caaaagacaaaucaaggccacu

SEQ ID NO: 272124 - RNA, 22 nt, Human
caaacccccuucuuccccaggc

SEQ ID NO: 272125 - RNA, 23 nt, Human
cacacccuguggagccaaggcca

SEQ ID NO: 272126 - RNA, 22 nt, Human
cacauucacuuucccuucucga

SEQ ID NO: 272127 - RNA, 21 nt, Human
caccccugccucacaggaaag

SEQ ID NO: 272128 - RNA, 24 nt, Human
cacccugugucuguguaccccacc

SEQ ID NO: 272129 - RNA, 19 nt, Human
caccggaccaggggaggac

SEQ ID NO: 272130 - RNA, 19 nt, Human
caccuucuaucccuacugc

SEQ ID NO: 272131 - RNA, 21 nt, Human
cacuagauucuccaucauucc

SEQ ID NO: 272132 - RNA, 19 nt, Human
cagagugucccgccuccuc

SEQ ID NO: 272133 - RNA, 24 nt, Human
cagcagguuacccuccucaguguc

SEQ ID NO: 272134 - RNA, 24 nt, Human
cagccagcagguuacccuccucag

SEQ ID NO: 272135 - RNA, 18 nt, Human
caggagccugugcgaagc

SEQ ID NO: 272136 - RNA, 20 nt, Human
caggcccuaagcccgagucc

SEQ ID NO: 272137 - RNA, 25 nt, Human
caggggaggacggcauacacaugca

SEQ ID NO: 272138 - RNA, 19 nt, Human
cagucacuccaaccugcug

SEQ ID NO: 272139 - RNA, 23 nt, Human
caguccacauacagucacuuccu

SEQ ID NO: 272140 - RNA, 19 nt, Human
cagugcuuccccccacccc

SEQ ID NO: 272141 - RNA, 24 nt, Human
caguguugugcugaauccugccug

SEQ ID NO: 272142 - RNA, 22 nt, Human
cauacacaugcaggcucugaug

SEQ ID NO: 272143 - RNA, 20 nt, Human
cauagcuccucuaccuccag

SEQ ID NO: 272144 - RNA, 19 nt, Human
caugucugccucccccagg

SEQ ID NO: 272145 - RNA, 20 nt, Human
cauuguaguccuggaaccau

SEQ ID NO: 272146 - RNA, 25 nt, Human
ccaaguguucacacaguuacacgga

SEQ ID NO: 272147 - RNA, 19 nt, Human
ccacccccauuucacuccc

SEQ ID NO: 272148 - RNA, 19 nt, Human
ccagaagaggaaggcugca

SEQ ID NO: 272149 - RNA, 20 nt, Human
ccagaccacauucacuuucc

SEQ ID NO: 272150 - RNA, 19 nt, Human
ccagagccaaccuuaaccu

SEQ ID NO: 272151 - RNA, 21 nt, Human
ccagcaacuccaccaccaccc

SEQ ID NO: 272152 - RNA, 19 nt, Human
cccaaaaaagaaagcagac

SEQ ID NO: 272153 - RNA, 23 nt, Human
cccaaaaaagaaagcagacgacg

SEQ ID NO: 272154 - RNA, 23 nt, Human
cccaccagucacuccaaccugcu

SEQ ID NO: 272155 - RNA, 21 nt, Human
cccacccccauuucacuccca

SEQ ID NO: 272156 - RNA, 22 nt, Human
ccccacccccacccugugucug

SEQ ID NO: 272157 - RNA, 23 nt, Human
ccccacccccauuucacucccac

SEQ ID NO: 272158 - RNA, 21 nt, Human
ccccagcuuacagaagagcuc

SEQ ID NO: 272159 - RNA, 21 nt, Human
cccccacccccauuucacucc

SEQ ID NO: 272160 - RNA, 22 nt, Human
cccccacccugugucuguguac

SEQ ID NO: 272161 - RNA, 19 nt, Human
ccccccacccccauuucac

SEQ ID NO: 272162 - RNA, 21 nt, Human
ccccccacccccauuucacuc

SEQ ID NO: 272163 - RNA, 19 nt, Human
ccccggggugaaauggggu

SEQ ID NO: 272164 - RNA, 19 nt, Human
ccccuccccacccccaccc

SEQ ID NO: 272165 - RNA, 19 nt, Human
ccccuccccacccccaccc

SEQ ID NO: 272166 - RNA, 24 nt, Human
cccguaccccacccuggcagaaca

SEQ ID NO: 272167 - RNA, 21 nt, Human
cccuaagcccgaguccagccc

SEQ ID NO: 272168 - RNA, 20 nt, Human
cccuauaagugaaacagggc

SEQ ID NO: 272169 - RNA, 25 nt, Human
ccgccgccaccgccggggccucggc

SEQ ID NO: 272170 - RNA, 23 nt, Human
ccgcugccuccacagcaggcccu

SEQ ID NO: 272171 - RNA, 20 nt, Human
ccgucuaaauggucuggccc

SEQ ID NO: 272172 - RNA, 24 nt, Human
ccuaaaaaaaucaaagcgcaagaa

SEQ ID NO: 272173 - RNA, 21 nt, Human
ccuauaagugaaacagggcac

SEQ ID NO: 272174 - RNA, 23 nt, Human
ccuccacagcaggcccuaagccc

SEQ ID NO: 272175 - RNA, 20 nt, Human
ccuccagcaacuccaccacc

SEQ ID NO: 272176 - RNA, 22 nt, Human
ccuccagcaacuccaccaccac

SEQ ID NO: 272177 - RNA, 24 nt, Human
ccuccccacccccacccugugucu

SEQ ID NO: 272178 - RNA, 21 nt, Human
ccucgccgccgccaccgccgg

SEQ ID NO: 272179 - RNA, 21 nt, Human
ccugugcgaagcuggggcugu

SEQ ID NO: 272180 - RNA, 23 nt, Human
ccuuccuuccuuccuucuauccc

SEQ ID NO: 272181 - RNA, 21 nt, Human
ccuuugcuccacauagcuccu

SEQ ID NO: 272182 - RNA, 23 nt, Human
cuacaaggaaaauaauuuauaaa

SEQ ID NO: 272183 - RNA, 22 nt, Human
cuaggcccaccagucacuccaa

SEQ ID NO: 272184 - RNA, 24 nt, Human
cucaaucuucuagaaagaaaccca

SEQ ID NO: 272185 - RNA, 24 nt, Human
cuccacaguccacauacagucacu

SEQ ID NO: 272186 - RNA, 20 nt, Human
cuccacauagcuccucuacc

SEQ ID NO: 272187 - RNA, 22 nt, Human
cuccagcaacuccaccaccacc

SEQ ID NO: 272188 - RNA, 27 nt, Human
cuccagcaacuccaccaccaccccugc

SEQ ID NO: 272189 - RNA, 23 nt, Human
cuccaucauuccucugccucaca

SEQ ID NO: 272190 - RNA, 22 nt, Human
cuccucuaccuccagcaacucc

SEQ ID NO: 272191 - RNA, 19 nt, Human
cuccuuuuuacucaacaca

SEQ ID NO: 272192 - RNA, 24 nt, Human
cucucagccugucauaugcacuuc

SEQ ID NO: 272193 - RNA, 18 nt, Human
cucucucuccccucuccc

SEQ ID NO: 272194 - RNA, 21 nt, Human
cugaaaguacaacuguuccua

SEQ ID NO: 272195 - RNA, 19 nt, Human
cugccaucacccuacccca

SEQ ID NO: 272196 - RNA, 19 nt, Human
cugugcgaagcuggggcug

SEQ ID NO: 272197 - RNA, 18 nt, Human
cuguguaccccacccccc

SEQ ID NO: 272198 - RNA, 24 nt, Human
cuucaaacccccuucuuccccagg

SEQ ID NO: 272199 - RNA, 19 nt, Human
cuuccccccacccccauuu

SEQ ID NO: 272200 - RNA, 18 nt, Human
cuucuaucccuacugcuc

SEQ ID NO: 272201 - RNA, 22 nt, Human
cuucucgacaccucaccucuga

SEQ ID NO: 272202 - RNA, 20 nt, Human
gaacauuuagcagcuuugaa

SEQ ID NO: 272203 - RNA, 20 nt, Human
gacuuucugccaccuucccu

SEQ ID NO: 272204 - RNA, 25 nt, Human
gagccaaccuuaaccuucccucuga

SEQ ID NO: 272205 - RNA, 24 nt, Human
gagccaaggccaaggacacacucc

SEQ ID NO: 272206 - RNA, 21 nt, Human
gagggcagcaguggcaaacag

SEQ ID NO: 272207 - RNA, 20 nt, Human
gauggauuuuuuuuuuuccu

SEQ ID NO: 272208 - RNA, 19 nt, Human
gcacucccagguucacacc

SEQ ID NO: 272209 - RNA, 19 nt, Human
gcacugccaucacccuacc

SEQ ID NO: 272210 - RNA, 23 nt, Human
gcccuaagcccgaguccagcccu

SEQ ID NO: 272211 - RNA, 20 nt, Human
gcccucgccgccgccaccgc

SEQ ID NO: 272212 - RNA, 22 nt, Human
gcucggcguccgccgcugccuc

SEQ ID NO: 272213 - RNA, 18 nt, Human
gcuuccccccacccccau

SEQ ID NO: 272214 - RNA, 20 nt, Human
ggaaaauaauuuauaaaagc

SEQ ID NO: 272215 - RNA, 20 nt, Human
ggaauccuggccagagccaa

SEQ ID NO: 272216 - RNA, 18 nt, Human
ggaccagaauguuuaugc

SEQ ID NO: 272217 - RNA, 21 nt, Human
ggagacaaugggagccucagc

SEQ ID NO: 272218 - RNA, 19 nt, Human
ggcaaagagaacauuuagc

SEQ ID NO: 272219 - RNA, 21 nt, Human
ggcccuaagcccgaguccagc

SEQ ID NO: 272220 - RNA, 21 nt, Human
gggaacacaaacaccggacca

SEQ ID NO: 272221 - RNA, 25 nt, Human
gggcagcaguggcaaacaguuaaaa

SEQ ID NO: 272222 - RNA, 18 nt, Human
guaccccacccuggcaga

SEQ ID NO: 272223 - RNA, 22 nt, Human
guccagguccucaagggcccac

SEQ ID NO: 272224 - RNA, 23 nt, Human
gugaaacagggcacaagcccuaa

SEQ ID NO: 272225 - RNA, 22 nt, Human
guggagccaaggccaaggacac

SEQ ID NO: 272226 - RNA, 19 nt, Human
guguuggggcccaguggcu

SEQ ID NO: 272227 - RNA, 21 nt, Human
uaaaaauaaaaucuacaagga

SEQ ID NO: 272228 - RNA, 21 nt, Human
uaagcccgaguccagcccucg

SEQ ID NO: 272229 - RNA, 21 nt, Human
uaagguuuauuuucuuuggcu

SEQ ID NO: 272230 - RNA, 20 nt, Human
uacacggagucuuuauggca

SEQ ID NO: 272231 - RNA, 22 nt, Human
uacuccagagccgggcaggggu

SEQ ID NO: 272232 - RNA, 18 nt, Human
uagaaagaaacccaaaaa

SEQ ID NO: 272233 - RNA, 21 nt, Human
uagaaagaaacccaaaaaaga

SEQ ID NO: 272234 - RNA, 22 nt, Human
uagcuccucuaccuccagcaac

SEQ ID NO: 272235 - RNA, 22 nt, Human
uagggugaggacccuguccguc

SEQ ID NO: 272236 - RNA, 18 nt, Human
ucacauuaguuguccucu

SEQ ID NO: 272237 - RNA, 21 nt, Human
ucacuuucccuucucgacacc

SEQ ID NO: 272238 - RNA, 22 nt, Human
ucagcucagggguggcuggagc

SEQ ID NO: 272239 - RNA, 25 nt, Human
uccacacuuaccagggggguuucca

SEQ ID NO: 272240 - RNA, 22 nt, Human
uccacaguccacauacagucac

SEQ ID NO: 272241 - RNA, 24 nt, Human
uccacauacagucacuuccucacu

SEQ ID NO: 272242 - RNA, 21 nt, Human
uccagguccucaagggcccac

SEQ ID NO: 272243 - RNA, 25 nt, Human
ucccagugauaagcccaguuguugg

SEQ ID NO: 272244 - RNA, 23 nt, Human
uccccacccccacccugugucug

SEQ ID NO: 272245 - RNA, 28 nt, Human
ucccccaggcagcccuccaggagccugu

SEQ ID NO: 272246 - RNA, 24 nt, Human
uccccgcuguagguccagguccag

SEQ ID NO: 272247 - RNA, 25 nt, Human
uccucagugucaaaccccguacccc

SEQ ID NO: 272248 - RNA, 23 nt, Human
uccuggccagagccaaccuuaac

SEQ ID NO: 272249 - RNA, 21 nt, Human
uccuucuaucccuccuucccc

SEQ ID NO: 272250 - RNA, 24 nt, Human
ucgggacagaggagaaaaauccca

SEQ ID NO: 272251 - RNA, 22 nt, Human
ucucaaagccaguguuggggcc

SEQ ID NO: 272252 - RNA, 23 nt, Human
ucuggggcagacgguacuccaga

SEQ ID NO: 272253 - RNA, 22 nt, Human
ucuuggugggcuucaaaccccc

SEQ ID NO: 272254 - RNA, 21 nt, Human
ucuuuggcuggagcuacaggc

SEQ ID NO: 272255 - RNA, 24 nt, Human
ucuuuggcuggagcuacaggccuu

SEQ ID NO: 272256 - RNA, 18 nt, Human
ucuuuuguuguugcuggg

SEQ ID NO: 272257 - RNA, 18 nt, Human
ugaaacagggcacaagcc

SEQ ID NO: 272258 - RNA, 18 nt, Human
ugagagcuuguguguuug

SEQ ID NO: 272259 - RNA, 24 nt, Human
ugauguuggggcuguugcaacaug

SEQ ID NO: 272260 - RNA, 20 nt, Human
ugccaucacccuaccccagc

SEQ ID NO: 272261 - RNA, 22 nt, Human
ugccucccccaggcagcccucc

SEQ ID NO: 272262 - RNA, 23 nt, Human
ugccugccucuuccuguacacug

SEQ ID NO: 272263 - RNA, 19 nt, Human
ugccuggaauccuggccag

SEQ ID NO: 272264 - RNA, 21 nt, Human
ugccuggaauccuggccagag

SEQ ID NO: 272265 - RNA, 20 nt, Human
uggagaagcugccuguggcu

SEQ ID NO: 272266 - RNA, 18 nt, Human
uggcaaggcagugaauga

SEQ ID NO: 272267 - RNA, 21 nt, Human
uggcaaggcagugaaugacau

SEQ ID NO: 272268 - RNA, 20 nt, Human
uggccacuuccacuccaccc

SEQ ID NO: 272269 - RNA, 19 nt, Human
ugugagggguggggaacac

SEQ ID NO: 272270 - RNA, 21 nt, Human
uguggagaagcugccuguggc

SEQ ID NO: 272271 - RNA, 19 nt, Human
uguggagccaaggccaagg

SEQ ID NO: 272272 - RNA, 18 nt, Human
uguuccuaacccagucca

SEQ ID NO: 272273 - RNA, 21 nt, Human
uguugcuggguuguguaauuu

SEQ ID NO: 272274 - RNA, 24 nt, Human
uucaaacccccuucuuccccaggc

SEQ ID NO: 272275 - RNA, 21 nt, Human
uuccagagaaacugcuuagcu

SEQ ID NO: 272276 - RNA, 18 nt, Human
uucccuuccucucacagg

SEQ ID NO: 272277 - RNA, 19 nt, Human
uuccuucucccuccuaagg

SEQ ID NO: 272278 - RNA, 18 nt, Human
uuuauaaaagcacucccc

SEQ ID NO: 272279 - RNA, 20 nt, Human
uuucccagugauaagcccag

SEQ ID NO: 272280 - RNA, 21 nt, Human
uuuccuguucacucuacccuu

SEQ ID NO: 272281 - RNA, 19 nt, Human
uuucggggggggggggggg

SEQ ID NO: 272282 - RNA, 19 nt, Human
uuuuuucgggggggggggg

SEQ ID NO: 272283 - RNA, 18 nt, Human
uuuuuuguguuuucccag

SEQ ID NO: 272284 - RNA, 19 nt, Human
uuuuuuuuuuccuucuccc

SEQ ID NO: 272285 - RNA, 22 nt, Human
uuuuuuuuuuccuucucccucc

SEQ ID NO: 272286 - RNA, 21 nt, Human
aaaaaacuagcucagaaaagg

SEQ ID NO: 272287 - RNA, 24 nt, Human
aaaaacuagcucagaaaaggucaa

SEQ ID NO: 272288 - RNA, 22 nt, Human
aaagugaaacuacugauucaac

SEQ ID NO: 272289 - RNA, 19 nt, Human
aacuagcucagaaaagguc

SEQ ID NO: 272290 - RNA, 21 nt, Human
aaugguguccuaagaaauugu

SEQ ID NO: 272291 - RNA, 23 nt, Human
acaaaaaaacuagcucagaaaag

SEQ ID NO: 272292 - RNA, 20 nt, Human
acugauucaacauacugaca

SEQ ID NO: 272293 - RNA, 29 nt, Human
agggcggcucugguggcggcggcggcggg

SEQ ID NO: 272294 - RNA, 22 nt, Human
cggcggcccuguuccggcugcc

SEQ ID NO: 272295 - RNA, 20 nt, Human
cggcucugguggcggcggcg

SEQ ID NO: 272296 - RNA, 24 nt, Human
gcggcggcggcggcgguggcggcu

SEQ ID NO: 272297 - RNA, 19 nt, Human
gcggcggcgguggcggcug

SEQ ID NO: 272298 - RNA, 20 nt, Human
gcggcggcgguggcggcugc

SEQ ID NO: 272299 - RNA, 23 nt, Human
ggcggcggcggcggcgguggcgg

SEQ ID NO: 272300 - RNA, 23 nt, Human
ggcggcggcggcgguggcggcug

SEQ ID NO: 272301 - RNA, 20 nt, Human
gguggcggcggcggcggcgg

SEQ ID NO: 272302 - RNA, 23 nt, Human
gguggcggcggcggcggcggugg

SEQ ID NO: 272303 - RNA, 25 nt, Human
gguggcggcggcggcggcgguggcg

SEQ ID NO: 272304 - RNA, 20 nt, Human
guggcggcggcggcggcggu

SEQ ID NO: 272305 - RNA, 18 nt, Human
uacaaaaaaacuagcuca

SEQ ID NO: 272306 - RNA, 23 nt, Human
uauaauaguacaaaaaaacuagc

SEQ ID NO: 272307 - RNA, 20 nt, Human
uggcggcggcggcggcggug

SEQ ID NO: 272308 - RNA, 21 nt, Human
uggcggcggcggcggcggugg

SEQ ID NO: 272309 - RNA, 25 nt, Human
uggcggcggcggcggcgguggcggc

SEQ ID NO: 272310 - RNA, 18 nt, Human
ugguggcggcggcggcgg

SEQ ID NO: 272311 - RNA, 24 nt, Human
uuaaagugaaacuacugauucaac

SEQ ID NO: 272312 - RNA, 25 nt, Human
uuaacagucauaauaauccuuuauu

SEQ ID NO: 272313 - RNA, 23 nt, Human
uuaguuuugcaauaauuucuuuu

SEQ ID NO: 272314 - RNA, 23 nt, Human
uuuauuaguaccagcucuuaaaa

SEQ ID NO: 272315 - RNA, 23 nt, Human
uuuuuuuuuuuuuuuuuuaacag

SEQ ID NO: 272316 - RNA, 20 nt, Human
aaggauggcugccaagaugg

SEQ ID NO: 272317 - RNA, 18 nt, Human
acauaauagaguccaucu

SEQ ID NO: 272318 - RNA, 22 nt, Human
agaguccaucuucaguuucuuc

SEQ ID NO: 272319 - RNA, 19 nt, Human
agauggaaagucuuacugg

SEQ ID NO: 272320 - RNA, 20 nt, Human
agcaguacuuaaagauacaa

SEQ ID NO: 272321 - RNA, 24 nt, Human
agugcuaacaaacuaaaugaaaau

SEQ ID NO: 272322 - RNA, 22 nt, Human
uaaaugaaaauaaggcuauuuu

SEQ ID NO: 272323 - RNA, 21 nt, Human
ugaaaaguuguggcuccccca

SEQ ID NO: 272324 - RNA, 26 nt, Human
ugaaaauaaggcuauuuugcauuuaa

SEQ ID NO: 272325 - RNA, 24 nt, Human
ugaaguccuaaacauuuguccaug

SEQ ID NO: 272326 - RNA, 19 nt, Human
ugauccccaguguuugcuc

SEQ ID NO: 272327 - RNA, 25 nt, Human
uuaaaauaguguuugaaaagcucac

SEQ ID NO: 272328 - RNA, 22 nt, Human
aaaaaaaaaaaaaucccaaaag

SEQ ID NO: 272329 - RNA, 23 nt, Human
aaaaaaaaaaaaaucccaaaagg

SEQ ID NO: 272330 - RNA, 27 nt, Human
aaaaacaaaacaaaacaacauuguuuc

SEQ ID NO: 272331 - RNA, 19 nt, Human
aaaaacaaaauugcuugaa

SEQ ID NO: 272332 - RNA, 19 nt, Human
aaaaagcaaaaauagcucc

SEQ ID NO: 272333 - RNA, 21 nt, Human
aaaacaaaacaaaacaacauu

SEQ ID NO: 272334 - RNA, 25 nt, Human
aaaacaaaacaacauuguuucgggg

SEQ ID NO: 272335 - RNA, 19 nt, Human
aaaacauaaaaagcaaaaa

SEQ ID NO: 272336 - RNA, 18 nt, Human
aaacaaaacaaaacaaca

SEQ ID NO: 272337 - RNA, 18 nt, Human
aaacaaacuaaaggaaca

SEQ ID NO: 272338 - RNA, 21 nt, Human
aaacaccuaaaacacacugcg

SEQ ID NO: 272339 - RNA, 21 nt, Human
aaagcaaaaauagcuccccuu

SEQ ID NO: 272340 - RNA, 20 nt, Human
aaauagagauaaccaguaaa

SEQ ID NO: 272341 - RNA, 18 nt, Human
aacaggaagucagugagc

SEQ ID NO: 272342 - RNA, 18 nt, Human
aacuuuuuuuuuuuuccc

SEQ ID NO: 272343 - RNA, 19 nt, Human
aagcagggucagcuuagug

SEQ ID NO: 272344 - RNA, 23 nt, Human
aagcccaaccauuuccagcacca

SEQ ID NO: 272345 - RNA, 21 nt, Human
aaggaaaaaaaacaaaacaaa

SEQ ID NO: 272346 - RNA, 20 nt, Human
aaggcacauugauauggaau

SEQ ID NO: 272347 - RNA, 21 nt, Human
aaggcacauugauauggaauu

SEQ ID NO: 272348 - RNA, 24 nt, Human
aaguauuuuaaaaaaaaaaaaauc

SEQ ID NO: 272349 - RNA, 21 nt, Human
aagugucuucccaagaauuuc

SEQ ID NO: 272350 - RNA, 21 nt, Human
acugcauuuucuuuuuccaau

SEQ ID NO: 272351 - RNA, 19 nt, Human
agaaaaaaaaaucaagccu

SEQ ID NO: 272352 - RNA, 18 nt, Human
agagggagagaggaagag

SEQ ID NO: 272353 - RNA, 27 nt, Human
agauaaccaguaaacaauuuucagaac

SEQ ID NO: 272354 - RNA, 23 nt, Human
agauguugaaacugacgauggcu

SEQ ID NO: 272355 - RNA, 22 nt, Human
agcugaacuuuaaccccgccua

SEQ ID NO: 272356 - RNA, 18 nt, Human
agggcugaaaaacauagu

SEQ ID NO: 272357 - RNA, 25 nt, Human
agggggcggcugcggcgccgcgcgg

SEQ ID NO: 272358 - RNA, 24 nt, Human
agugugggugagagaggagaaaga

SEQ ID NO: 272359 - RNA, 23 nt, Human
auugguuucaucauuauuauuau

SEQ ID NO: 272360 - RNA, 18 nt, Human
auuucaguuacuugauug

SEQ ID NO: 272361 - RNA, 23 nt, Human
auuuguuuuuuuguuuuuuuuuu

SEQ ID NO: 272362 - RNA, 18 nt, Human
caaagacaaacaccuaaa

SEQ ID NO: 272363 - RNA, 20 nt, Human
caaagacaaacaccuaaaac

SEQ ID NO: 272364 - RNA, 20 nt, Human
cacaaaaaaguacaaagaca

SEQ ID NO: 272365 - RNA, 23 nt, Human
cacaaaaaaguacaaagacaaac

SEQ ID NO: 272366 - RNA, 20 nt, Human
caccgcacagccgccgcccg

SEQ ID NO: 272367 - RNA, 19 nt, Human
caccgcaccgcacagccgc

SEQ ID NO: 272368 - RNA, 20 nt, Human
caccuguguggguaaauuca

SEQ ID NO: 272369 - RNA, 19 nt, Human
cacgucaccuaaugcucac

SEQ ID NO: 272370 - RNA, 24 nt, Human
cacuauacaugccuacuguacgcg

SEQ ID NO: 272371 - RNA, 23 nt, Human
cacuuuuuuuuguuuuuguuucu

SEQ ID NO: 272372 - RNA, 23 nt, Human
caugaaauacugugaaacagcca

SEQ ID NO: 272373 - RNA, 20 nt, Human
cccgcgccggcccggccggg

SEQ ID NO: 272374 - RNA, 20 nt, Human
cccgcucgcgccgccgccgc

SEQ ID NO: 272375 - RNA, 21 nt, Human
cccgcucgcgccgccgccgcg

SEQ ID NO: 272376 - RNA, 24 nt, Human
ccgcaccgcacagccgccgcccgc

SEQ ID NO: 272377 - RNA, 22 nt, Human
ccgcgccggcccggccgggugc

SEQ ID NO: 272378 - RNA, 20 nt, Human
ccgcgcgcccgccuccgccu

SEQ ID NO: 272379 - RNA, 22 nt, Human
ccuagaguuucccuacacuccc

SEQ ID NO: 272380 - RNA, 21 nt, Human
ccuccgcuagccacgucaccu

SEQ ID NO: 272381 - RNA, 20 nt, Human
cgccgcgcggccagccgggu

SEQ ID NO: 272382 - RNA, 20 nt, Human
cgccuccgcucugcaccgca

SEQ ID NO: 272383 - RNA, 19 nt, Human
cgcgcccgccuccgccucc

SEQ ID NO: 272384 - RNA, 18 nt, Human
cgcucugcaccgcaccgc

SEQ ID NO: 272385 - RNA, 19 nt, Human
cgcucugcaccgcaccgca

SEQ ID NO: 272386 - RNA, 23 nt, Human
cggccgggugcccgcgagcugcc

SEQ ID NO: 272387 - RNA, 21 nt, Human
cguuugggggugcaaacuuuu

SEQ ID NO: 272388 - RNA, 18 nt, Human
cuacuacaaaagauuuag

SEQ ID NO: 272389 - RNA, 19 nt, Human
cucagaauagcacugccac

SEQ ID NO: 272390 - RNA, 19 nt, Human
cuccgcuagccacgucacc

SEQ ID NO: 272391 - RNA, 24 nt, Human
cugugguuuuuuguguuuuuuuuu

SEQ ID NO: 272392 - RNA, 22 nt, Human
cuucaaauguuacaaagcccaa

SEQ ID NO: 272393 - RNA, 26 nt, Human
cuucaaauguuacaaagcccaaccaa

SEQ ID NO: 272394 - RNA, 24 nt, Human
gaaauacugugaaacagccaggcu

SEQ ID NO: 272395 - RNA, 21 nt, Human
gaaccaaaacaaacuaaagga

SEQ ID NO: 272396 - RNA, 21 nt, Human
gagagagagagagagagaagg

SEQ ID NO: 272397 - RNA, 18 nt, Human
gagcugaacuuuaacccc

SEQ ID NO: 272398 - RNA, 19 nt, Human
gaggagaaagagggagaga

SEQ ID NO: 272399 - RNA, 20 nt, Human
gaggagaaagagggagagag

SEQ ID NO: 272400 - RNA, 18 nt, Human
gagggagagaggaagaga

SEQ ID NO: 272401 - RNA, 18 nt, Human
gaggugugcgugagugug

SEQ ID NO: 272402 - RNA, 19 nt, Human
gccuagaguuucccuacac

SEQ ID NO: 272403 - RNA, 22 nt, Human
gccuagaguuucccuacacucc

SEQ ID NO: 272404 - RNA, 22 nt, Human
gcgccggcccggccgggugccc

SEQ ID NO: 272405 - RNA, 21 nt, Human
gcgugugcgucugggugugcg

SEQ ID NO: 272406 - RNA, 20 nt, Human
ggagggggugugggggaggg

SEQ ID NO: 272407 - RNA, 20 nt, Human
ggccgggugcccgcgagcug

SEQ ID NO: 272408 - RNA, 18 nt, Human
gggaagcaaaggggugcu

SEQ ID NO: 272409 - RNA, 24 nt, Human
gggaagcaaaggggugcuucgcug

SEQ ID NO: 272410 - RNA, 18 nt, Human
gggagggggcggcugcgg

SEQ ID NO: 272411 - RNA, 19 nt, Human
gggagggggcggcugcggc

SEQ ID NO: 272412 - RNA, 19 nt, Human
ggggagaaaaaaaaaucaa

SEQ ID NO: 272413 - RNA, 19 nt, Human
ggggagggggcggcugcgg

SEQ ID NO: 272414 - RNA, 20 nt, Human
ggggagggggcggcugcggc

SEQ ID NO: 272415 - RNA, 21 nt, Human
ggggagggggcggcugcggcg

SEQ ID NO: 272416 - RNA, 23 nt, Human
ggggagggggugugggggagggg

SEQ ID NO: 272417 - RNA, 19 nt, Human
ggggugcuucgcugucugg

SEQ ID NO: 272418 - RNA, 19 nt, Human
ggggugugggggagggggc

SEQ ID NO: 272419 - RNA, 18 nt, Human
gggugugggggagggggc

SEQ ID NO: 272420 - RNA, 24 nt, Human
ggucagcuuagugcuucacaguuu

SEQ ID NO: 272421 - RNA, 23 nt, Human
gugaaaggacuagaaaaacaaaa

SEQ ID NO: 272422 - RNA, 24 nt, Human
gugcuucacaguuugacugcuucu

SEQ ID NO: 272423 - RNA, 24 nt, Human
uaaaaacaaaauugcuugaagcag

SEQ ID NO: 272424 - RNA, 23 nt, Human
uaaauuguaaaaugcagcaacau

SEQ ID NO: 272425 - RNA, 24 nt, Human
uaagcaucuacagaucucagaaua

SEQ ID NO: 272426 - RNA, 28 nt, Human
uaaugcacucuacuuuauccuacauuaa

SEQ ID NO: 272427 - RNA, 25 nt, Human
uacaacagucccuaaaguauuuuaa

SEQ ID NO: 272428 - RNA, 21 nt, Human
uauaaaauuaacagauaccau

SEQ ID NO: 272429 - RNA, 23 nt, Human
uauaaaauuaacagauaccauga

SEQ ID NO: 272430 - RNA, 25 nt, Human
uauauaaaaauuaguuacuaacacu

SEQ ID NO: 272431 - RNA, 26 nt, Human
ucaaauaaaaaaaaauaaaagaaaaa

SEQ ID NO: 272432 - RNA, 21 nt, Human
ucacaaaaaaguacaaagaca

SEQ ID NO: 272433 - RNA, 18 nt, Human
ucccaaaagguuauggcc

SEQ ID NO: 272434 - RNA, 23 nt, Human
ucccuaacaaguacccuugaucu

SEQ ID NO: 272435 - RNA, 21 nt, Human
uccgcugauagugaaguugua

SEQ ID NO: 272436 - RNA, 24 nt, Human
ucggggagaaagaugaggagcaaa

SEQ ID NO: 272437 - RNA, 19 nt, Human
ucugcaccgcaccgcacag

SEQ ID NO: 272438 - RNA, 21 nt, Human
ucugggggaaaauaaaggaag

SEQ ID NO: 272439 - RNA, 24 nt, Human
ugaaaaacauaguuuaaaggcaag

SEQ ID NO: 272440 - RNA, 19 nt, Human
ugaaacagccaggcuccgu

SEQ ID NO: 272441 - RNA, 22 nt, Human
ugaagggcugaaaaacauaguu

SEQ ID NO: 272442 - RNA, 23 nt, Human
ugaagucgcaugggaagcaaagg

SEQ ID NO: 272443 - RNA, 21 nt, Human
ugacgauggcugacauaaaag

SEQ ID NO: 272444 - RNA, 18 nt, Human
ugagagaggagaaagagg

SEQ ID NO: 272445 - RNA, 22 nt, Human
ugcagcaccgacuuuggucaaa

SEQ ID NO: 272446 - RNA, 19 nt, Human
ugcagucugcuaagaaaaa

SEQ ID NO: 272447 - RNA, 21 nt, Human
ugccaccgaccguacaggaca

SEQ ID NO: 272448 - RNA, 18 nt, Human
ugccgcuccaugagcuga

SEQ ID NO: 272449 - RNA, 27 nt, Human
ugcgcuggguugagguugccgugcauc

SEQ ID NO: 272450 - RNA, 21 nt, Human
ugcgcuggguugagguugcgu

SEQ ID NO: 272451 - RNA, 20 nt, Human
ugcuguuuccauguacaagu

SEQ ID NO: 272452 - RNA, 21 nt, Human
ugcuugaagcagggucagcuu

SEQ ID NO: 272453 - RNA, 21 nt, Human
ugggggugcaaacuuuuuuuu

SEQ ID NO: 272454 - RNA, 23 nt, Human
ugggguaugcgugugcgucuggg

SEQ ID NO: 272455 - RNA, 25 nt, Human
ugggugagagaggagaaagagggaa

SEQ ID NO: 272456 - RNA, 18 nt, Human
uggucaaauaaaaaaaaa

SEQ ID NO: 272457 - RNA, 21 nt, Human
uguaaaaugcagcaacaucca

SEQ ID NO: 272458 - RNA, 22 nt, Human
uguaaaaugcagcaacauccaa

SEQ ID NO: 272459 - RNA, 22 nt, Human
ugucuuaaugcacucuacuuua

SEQ ID NO: 272460 - RNA, 24 nt, Human
uguuacaaagcccaaccauuucca

SEQ ID NO: 272461 - RNA, 22 nt, Human
uguuuuuguuuuuuguuuuuuu

SEQ ID NO: 272462 - RNA, 22 nt, Human
uuaaauagagauaaccaguaaa

SEQ ID NO: 272463 - RNA, 18 nt, Human
uuaaauguaagugcagca

SEQ ID NO: 272464 - RNA, 23 nt, Human
uuacuaacacuagaacaugcaga

SEQ ID NO: 272465 - RNA, 23 nt, Human
uuagucaugugcuuugauaacag

SEQ ID NO: 272466 - RNA, 19 nt, Human
uucaauagaggagcauguu

SEQ ID NO: 272467 - RNA, 19 nt, Human
uucaugaaauacugugaaa

SEQ ID NO: 272468 - RNA, 24 nt, Human
uucuaagcaucuacagaucucaga

SEQ ID NO: 272469 - RNA, 25 nt, Human
uuguuucggggagaaagaugaggag

SEQ ID NO: 272470 - RNA, 25 nt, Human
uuguuuuuguuuuuuguuuuuuuuu

SEQ ID NO: 272471 - RNA, 22 nt, Human
uuuaaccccgccuagaguuucc

SEQ ID NO: 272472 - RNA, 20 nt, Human
uuuaauuuccuucaguuuuu

SEQ ID NO: 272473 - RNA, 28 nt, Human
uuuguuuuuguuucugugguuuuuugug

SEQ ID NO: 272474 - RNA, 23 nt, Human
uuuuaaaaaaaaaaaaaucccaa

SEQ ID NO: 272475 - RNA, 23 nt, Human
uuuucagaacuuggaaguuuaaa

SEQ ID NO: 272476 - RNA, 21 nt, Human
uuuuuaaggcuugcuugugaa

SEQ ID NO: 272477 - RNA, 23 nt, Human
uuuuuguuuuuguuucugugguu

SEQ ID NO: 272478 - RNA, 21 nt, Human
uuuuuguuuuuguuuuuuguu

SEQ ID NO: 272479 - RNA, 23 nt, Human
uuuuuuuuguuuuuguuucugug

SEQ ID NO: 272480 - RNA, 20 nt, Human
aaaccaauaaaacuagcuua

SEQ ID NO: 272481 - RNA, 23 nt, Human
aagaaaaucuucgagaagcaaga

SEQ ID NO: 272482 - RNA, 19 nt, Human
aaucaggacggggcucugc

SEQ ID NO: 272483 - RNA, 25 nt, Human
acccagcaucucugacgccgccucc

SEQ ID NO: 272484 - RNA, 23 nt, Human
agacagaacaucuauuucccagc

SEQ ID NO: 272485 - RNA, 18 nt, Human
auccaugaauucccccuu

SEQ ID NO: 272486 - RNA, 25 nt, Human
caagaauacuaaaccaauaaaacua

SEQ ID NO: 272487 - RNA, 22 nt, Human
cacccagcaucucugacgccgc

SEQ ID NO: 272488 - RNA, 24 nt, Human
caccgcaacuucacaacaaaccca

SEQ ID NO: 272489 - RNA, 18 nt, Human
cacucggcgugcuagagu

SEQ ID NO: 272490 - RNA, 19 nt, Human
cacuuggaaaggaaccaag

SEQ ID NO: 272491 - RNA, 22 nt, Human
caugcagagagaacacuucacc

SEQ ID NO: 272492 - RNA, 23 nt, Human
ccaguccuccuuaaauagccaaa

SEQ ID NO: 272493 - RNA, 19 nt, Human
ccagucuuccucuuuuccu

SEQ ID NO: 272494 - RNA, 23 nt, Human
cccaagaaaaucuucgagaagca

SEQ ID NO: 272495 - RNA, 20 nt, Human
ccccaagggccugaaggacc

SEQ ID NO: 272496 - RNA, 22 nt, Human
ccuuucugccuuuguguuguuu

SEQ ID NO: 272497 - RNA, 23 nt, Human
cuaaaggcuacagagauuucauu

SEQ ID NO: 272498 - RNA, 21 nt, Human
cuuuuuucuuuuuuuccuuuu

SEQ ID NO: 272499 - RNA, 21 nt, Human
gacuucauguaacaaaggcua

SEQ ID NO: 272500 - RNA, 18 nt, Human
gagaacacuucaccuaca

SEQ ID NO: 272501 - RNA, 23 nt, Human
gcagagagaacacuucaccuaca

SEQ ID NO: 272502 - RNA, 18 nt, Human
ggcugcgaucuaccauca

SEQ ID NO: 272503 - RNA, 21 nt, Human
guaaacaacaagaauacuaaa

SEQ ID NO: 272504 - RNA, 23 nt, Human
guuuuuuuccuuuuuucuuuuuu

SEQ ID NO: 272505 - RNA, 19 nt, Human
uaacaaaggcuacguugca

SEQ ID NO: 272506 - RNA, 20 nt, Human
uaauccaugaauucccccuu

SEQ ID NO: 272507 - RNA, 18 nt, Human
uaauuuuggacauuggcc

SEQ ID NO: 272508 - RNA, 25 nt, Human
uagaggcauuucuuccauagagccu

SEQ ID NO: 272509 - RNA, 20 nt, Human
ucaggacggggcucugcgcu

SEQ ID NO: 272510 - RNA, 21 nt, Human
ucauagagacagaacaucuau

SEQ ID NO: 272511 - RNA, 21 nt, Human
uccuuaaauagccaaagauuc

SEQ ID NO: 272512 - RNA, 18 nt, Human
ugccuuuguguuguuuug

SEQ ID NO: 272513 - RNA, 23 nt, Human
ugcguaaacaacaagaauacuaa

SEQ ID NO: 272514 - RNA, 22 nt, Human
uguccuauuugacacuuggaaa

SEQ ID NO: 272515 - RNA, 24 nt, Human
uguuuuguccagucuuccucuuuu

SEQ ID NO: 272516 - RNA, 19 nt, Human
uugcuggucuauuaucuuc

SEQ ID NO: 272517 - RNA, 20 nt, Human
uugcuggucuauuaucuucu

SEQ ID NO: 272518 - RNA, 24 nt, Human
uuuacagucaucugagccccgcga

SEQ ID NO: 272519 - RNA, 25 nt, Human
uuuguguucaaacuguuuuuuuccu

SEQ ID NO: 272520 - RNA, 23 nt, Human
uuuuaagauuucaaacuggguua

SEQ ID NO: 272521 - RNA, 18 nt, Human
uuuuuuccuuuuuuuuuc

SEQ ID NO: 272522 - RNA, 19 nt, Human
acgugggccgggggccggc

SEQ ID NO: 272523 - RNA, 18 nt, Human
cccugggauuccugggac

SEQ ID NO: 272524 - RNA, 21 nt, Human
ccugggacgauggagaagggg

SEQ ID NO: 272525 - RNA, 18 nt, Human
cgggcugggagucggcag

SEQ ID NO: 272526 - RNA, 29 nt, Human
ggcugggagucggcagggguguucuuguu

SEQ ID NO: 272527 - RNA, 24 nt, Human
gggcugggagucggcagggguguu

SEQ ID NO: 272528 - RNA, 20 nt, Human
ugggacgauggagaaggggc

SEQ ID NO: 272529 - RNA, 23 nt, Human
ugucuuuuuggccgggcugggag

SEQ ID NO: 272530 - RNA, 23 nt, Human
uguguuuugucuuuuuggccggg

SEQ ID NO: 272531 - RNA, 18 nt, Human
uucuuguucacucuaauu

SEQ ID NO: 272532 - RNA, 24 nt, Human
uugucuuuuuggccgggcugggag

SEQ ID NO: 272533 - RNA, 23 nt, Human
uuuugucuuuuuggccgggcugg

SEQ ID NO: 272534 - RNA, 21 nt, Human
uuuuuuuuuucuucugccuuu

SEQ ID NO: 272535 - RNA, 29 nt, Human
uuuuuuuuuuuuuucuucugccuuuguuu

SEQ ID NO: 272536 - RNA, 23 nt, Human
uuuuuuuuuuuuuuucuucuggg

SEQ ID NO: 272537 - RNA, 18 nt, Human
aaaaagacaccaaacaga

SEQ ID NO: 272538 - RNA, 21 nt, Human
aaaaagacaccaaacagacaa

SEQ ID NO: 272539 - RNA, 23 nt, Human
aaaauggacugcucuauugcaaa

SEQ ID NO: 272540 - RNA, 20 nt, Human
acaacaugugcacaucacag

SEQ ID NO: 272541 - RNA, 24 nt, Human
aggcagagugauaacacaaucuaa

SEQ ID NO: 272542 - RNA, 19 nt, Human
ccaaacagacaacaugugc

SEQ ID NO: 272543 - RNA, 21 nt, Human
cucuuuaaaaacucugguuua

SEQ ID NO: 272544 - RNA, 21 nt, Human
cugggauaaauccgucaggcc

SEQ ID NO: 272545 - RNA, 19 nt, Human
cuguguuugucaccaaucc

SEQ ID NO: 272546 - RNA, 21 nt, Human
gacaucacagguccagugaaa

SEQ ID NO: 272547 - RNA, 19 nt, Human
gacuauacacaggcagagu

SEQ ID NO: 272548 - RNA, 22 nt, Human
uaacacaaucuaaucuucauca

SEQ ID NO: 272549 - RNA, 19 nt, Human
uagaacaacaaaaauaagg

SEQ ID NO: 272550 - RNA, 20 nt, Human
uccgucaggcuccuuauuga

SEQ ID NO: 272551 - RNA, 21 nt, Human
uccuucguuaucguguuccug

SEQ ID NO: 272552 - RNA, 21 nt, Human
ucgcauggacuaucugacuau

SEQ ID NO: 272553 - RNA, 19 nt, Human
ugaaaugacaucacagguc

SEQ ID NO: 272554 - RNA, 21 nt, Human
ugcacaaaaagacaccaaaca

SEQ ID NO: 272555 - RNA, 22 nt, Human
ugcacaaaaagacaccaaacag

SEQ ID NO: 272556 - RNA, 21 nt, Human
ugcccagcucuuacucaguag

SEQ ID NO: 272557 - RNA, 22 nt, Human
ugucaccaauccuuuauugaaa

SEQ ID NO: 272558 - RNA, 19 nt, Human
uguguuugucaccaauccu

SEQ ID NO: 272559 - RNA, 18 nt, Human
uuuuuuuuuuuuuuucug

SEQ ID NO: 272560 - RNA, 25 nt, Human
uuuuuuuuuuuuuuuuucuguguuu

SEQ ID NO: 272561 - RNA, 20 nt, Human
cccccuuucgaggaaccucu

SEQ ID NO: 272562 - RNA, 19 nt, Human
cgguggggcugggcugggc

SEQ ID NO: 272563 - RNA, 26 nt, Human
cuucucauuuuguuguuucuuuuguc

SEQ ID NO: 272564 - RNA, 18 nt, Human
ggcugggcugggcugggc

SEQ ID NO: 272565 - RNA, 18 nt, Human
gggcugggcugggcuggg

SEQ ID NO: 272566 - RNA, 19 nt, Human
gggcugggcugggcugggc

SEQ ID NO: 272567 - RNA, 20 nt, Human
ggggcgagggaggacgggag

SEQ ID NO: 272568 - RNA, 20 nt, Human
ggggcugggcugggcugggc

SEQ ID NO: 272569 - RNA, 24 nt, Human
ucaaaauuucuucuccccccuuuc

SEQ ID NO: 272570 - RNA, 23 nt, Human
ucucaaaauuucuucuccccccu

SEQ ID NO: 272571 - RNA, 19 nt, Human
ugggcugggcugggcuggg

SEQ ID NO: 272572 - RNA, 22 nt, Human
ugggcugggcugggcuggggga

SEQ ID NO: 272573 - RNA, 20 nt, Human
uggggcugggcugggcuggg

SEQ ID NO: 272574 - RNA, 24 nt, Human
uuguuguuucuuuugucgaucuuu

SEQ ID NO: 272575 - RNA, 25 nt, Human
aaauucauuuaugaaccaagaaagg

SEQ ID NO: 272576 - RNA, 21 nt, Human
aaccucauccccagaugcauc

SEQ ID NO: 272577 - RNA, 21 nt, Human
acagaaagcagcugugaucca

SEQ ID NO: 272578 - RNA, 21 nt, Human
agcagcagcuggcaaagcuua

SEQ ID NO: 272579 - RNA, 20 nt, Human
aggccgagggcugcggcggc

SEQ ID NO: 272580 - RNA, 22 nt, Human
aggccggagcccgggcgggccc

SEQ ID NO: 272581 - RNA, 23 nt, Human
aggccggagcccgggcgggcccg

SEQ ID NO: 272582 - RNA, 23 nt, Human
agggcccgcgguggccgcgggcg

SEQ ID NO: 272583 - RNA, 25 nt, Human
augacaacagaaagcagcugugauc

SEQ ID NO: 272584 - RNA, 23 nt, Human
caaguugaaaaggucucgaguua

SEQ ID NO: 272585 - RNA, 21 nt, Human
caaugacaacagaaagcagcu

SEQ ID NO: 272586 - RNA, 23 nt, Human
cagcagcagcuggcaaagcuuag

SEQ ID NO: 272587 - RNA, 22 nt, Human
cagcagcagcuggcaaagcuuc

SEQ ID NO: 272588 - RNA, 21 nt, Human
ccagcagcagcuggcaaagcu

SEQ ID NO: 272589 - RNA, 23 nt, Human
cccgagugcgggucggggcgagc

SEQ ID NO: 272590 - RNA, 22 nt, Human
cgagcgggagcgcggcggggcc

SEQ ID NO: 272591 - RNA, 20 nt, Human
cgcugggcuccgggagcggg

SEQ ID NO: 272592 - RNA, 20 nt, Human
cggcagggcccgcgguggcc

SEQ ID NO: 272593 - RNA, 19 nt, Human
cggccucggcggcgcuggg

SEQ ID NO: 272594 - RNA, 21 nt, Human
cggcgccgccuuacuggccgg

SEQ ID NO: 272595 - RNA, 18 nt, Human
cggcggcaggccggagcc

SEQ ID NO: 272596 - RNA, 20 nt, Human
cggcggggccugccggcugg

SEQ ID NO: 272597 - RNA, 20 nt, Human
cuccgggagcggggccggug

SEQ ID NO: 272598 - RNA, 22 nt, Human
cuggcgcgggugggcucucccu

SEQ ID NO: 272599 - RNA, 18 nt, Human
cuuuggaugcacuucagc

SEQ ID NO: 272600 - RNA, 20 nt, Human
gaaagcagcugugauccagc

SEQ ID NO: 272601 - RNA, 21 nt, Human
gagcggggccgguggcugcgu

SEQ ID NO: 272602 - RNA, 25 nt, Human
gcagcugugauccagcagcagcugg

SEQ ID NO: 272603 - RNA, 19 nt, Human
gcaggccgagggcugcggc

SEQ ID NO: 272604 - RNA, 18 nt, Human
gcccgagugcgggucggg

SEQ ID NO: 272605 - RNA, 20 nt, Human
gcgaguccgcguucggccuc

SEQ ID NO: 272606 - RNA, 18 nt, Human
gcgcggcggagggaacgg

SEQ ID NO: 272607 - RNA, 23 nt, Human
ggacaacagcaaugacaacagaa

SEQ ID NO: 272608 - RNA, 21 nt, Human
ggccgguggcugcgugcagga

SEQ ID NO: 272609 - RNA, 21 nt, Human
ggcggcgccgccuuacuggcc

SEQ ID NO: 272610 - RNA, 25 nt, Human
gggucggggcgagcgggagcgcggg

SEQ ID NO: 272611 - RNA, 24 nt, Human
guucggccuccuggcgcggguggg

SEQ ID NO: 272612 - RNA, 22 nt, Human
uaagcaaccucauccccagaug

SEQ ID NO: 272613 - RNA, 19 nt, Human
uaguaagcaaccucauccc

SEQ ID NO: 272614 - RNA, 24 nt, Human
uaguaagcaaccucauccccagau

SEQ ID NO: 272615 - RNA, 18 nt, Human
ucgccgggccgcuccggu

SEQ ID NO: 272616 - RNA, 21 nt, Human
ucucugagcaccuuuggaugc

SEQ ID NO: 272617 - RNA, 19 nt, Human
ugaaccaaacuaaaauuca

SEQ ID NO: 272618 - RNA, 21 nt, Human
ugaaccaagaaaggaagccaa

SEQ ID NO: 272619 - RNA, 24 nt, Human
uggcaaagcuuaguaagcaaccuc

SEQ ID NO: 272620 - RNA, 20 nt, Human
uggcugcgugcaggccgagg

SEQ ID NO: 272621 - RNA, 19 nt, Human
uugaaaaggucucgaguua

SEQ ID NO: 272622 - RNA, 21 nt, Human
acgcccgccuccuccagccgc

SEQ ID NO: 272623 - RNA, 21 nt, Human
aguggcuccggccagguucug

SEQ ID NO: 272624 - RNA, 22 nt, Human
auucgggguccuccccuuccca

SEQ ID NO: 272625 - RNA, 20 nt, Human
cgguggagagcgagauccgg

SEQ ID NO: 272626 - RNA, 19 nt, Human
cuccagccgccuguccggg

SEQ ID NO: 272627 - RNA, 21 nt, Human
cuccccuucccaugagaaucc

SEQ ID NO: 272628 - RNA, 20 nt, Human
cucugggcuaggcccggcuc

SEQ ID NO: 272629 - RNA, 18 nt, Human
ggaguugggcuuggccgg

SEQ ID NO: 272630 - RNA, 23 nt, Human
ggcuccggccagguucugcuucc

SEQ ID NO: 272631 - RNA, 20 nt, Human
uaguggcuccggccagguuc

SEQ ID NO: 272632 - RNA, 22 nt, Human
uaguggcuccggccagguucug

SEQ ID NO: 272633 - RNA, 19 nt, Human
uccuccccuucccaugaga

SEQ ID NO: 272634 - RNA, 21 nt, Human
ucucugggcuaggcccggcuc

SEQ ID NO: 272635 - RNA, 24 nt, Human
uucgggguccuccccuucccuaag

SEQ ID NO: 272636 - RNA, 24 nt, Human
acaaauauacaaguccauguucuu

SEQ ID NO: 272637 - RNA, 20 nt, Human
acccuuuaaauuuuuucuuc

SEQ ID NO: 272638 - RNA, 21 nt, Human
acgcuuaacacuccuggcugu

SEQ ID NO: 272639 - RNA, 27 nt, Human
agguaguaacuuuucaccggguggacc

SEQ ID NO: 272640 - RNA, 22 nt, Human
auaaccuucuccaaaaacccca

SEQ ID NO: 272641 - RNA, 25 nt, Human
auaaccuucuccaaaaaccccacaa

SEQ ID NO: 272642 - RNA, 23 nt, Human
caaaaaccccacaaaggugagga

SEQ ID NO: 272643 - RNA, 19 nt, Human
caaaaaguucacaaaagca

SEQ ID NO: 272644 - RNA, 19 nt, Human
caaaaugagggcugauccu

SEQ ID NO: 272645 - RNA, 22 nt, Human
caacaauacauuauguacacca

SEQ ID NO: 272646 - RNA, 21 nt, Human
cagguaguaacuuuucacccc

SEQ ID NO: 272647 - RNA, 23 nt, Human
caucacugaacgcuuaacacucc

SEQ ID NO: 272648 - RNA, 20 nt, Human
ccacuggggucagucacucg

SEQ ID NO: 272649 - RNA, 24 nt, Human
ccccacaucacugaacgcuuaaca

SEQ ID NO: 272650 - RNA, 18 nt, Human
cgagcugcgggcgcugcu

SEQ ID NO: 272651 - RNA, 18 nt, Human
cgcugcugcgggugcgcu

SEQ ID NO: 272652 - RNA, 19 nt, Human
gcaguguggauauaaguac

SEQ ID NO: 272653 - RNA, 23 nt, Human
gcgcugcugcgggugcgcugggc

SEQ ID NO: 272654 - RNA, 21 nt, Human
gcgcugggccgcgggcugcgc

SEQ ID NO: 272655 - RNA, 21 nt, Human
gggcugcgcgcugcuuccucg

SEQ ID NO: 272656 - RNA, 26 nt, Human
guacaaauauacaaguccauguucuu

SEQ ID NO: 272657 - RNA, 24 nt, Human
uaaccuucuccaaaaaccccacaa

SEQ ID NO: 272658 - RNA, 22 nt, Human
uacaaaaaguucacaaaagcaa

SEQ ID NO: 272659 - RNA, 22 nt, Human
uacaaguccauguucuuucagc

SEQ ID NO: 272660 - RNA, 24 nt, Human
uacacccuuuaaauuuuuucuucu

SEQ ID NO: 272661 - RNA, 20 nt, Human
uaccaaaauaauuaccaaca

SEQ ID NO: 272662 - RNA, 20 nt, Human
uaccaaaauaauuaccaaca

SEQ ID NO: 272663 - RNA, 18 nt, Human
ucagucacucgaagcaca

SEQ ID NO: 272664 - RNA, 23 nt, Human
uccaaaaaccccacaaaggugag

SEQ ID NO: 272665 - RNA, 25 nt, Human
uccaaaaaccccacaaaggugaggu

SEQ ID NO: 272666 - RNA, 24 nt, Human
uccccuacaaaaaguucacaaaag

SEQ ID NO: 272667 - RNA, 25 nt, Human
uccccuacaaaaaguucacaaaagc

SEQ ID NO: 272668 - RNA, 22 nt, Human
uccucgcuggggcgcuggcggg

SEQ ID NO: 272669 - RNA, 21 nt, Human
ucgaagcacaauaaauauaaa

SEQ ID NO: 272670 - RNA, 21 nt, Human
ucgcuggggcgcuggcgggcg

SEQ ID NO: 272671 - RNA, 22 nt, Human
ugauaaccuucuccaaaaaccc

SEQ ID NO: 272672 - RNA, 20 nt, Human
ugucacaggauaccacuggg

SEQ ID NO: 272673 - RNA, 20 nt, Human
ugugcaguguggauauaagu

SEQ ID NO: 272674 - RNA, 24 nt, Human
uguggauauaaguacacccuuuaa

SEQ ID NO: 272675 - RNA, 23 nt, Human
uucaaugaucuuucucguccccu

SEQ ID NO: 272676 - RNA, 25 nt, Human
uucaaugaucuuucucguccccuac

SEQ ID NO: 272677 - RNA, 22 nt, Human
uucaccccacaucacugaacgc

SEQ ID NO: 272678 - RNA, 21 nt, Human
uucuccaaaaaccccacaaag

SEQ ID NO: 272679 - RNA, 25 nt, Human
uucuuuuuucuuuuuuuagaaaaau

SEQ ID NO: 272680 - RNA, 20 nt, Human
uugacagguaguaacuuuuc

SEQ ID NO: 272681 - RNA, 19 nt, Human
cccccgccgccucaggggc

SEQ ID NO: 272682 - RNA, 24 nt, Human
cgccucaggggccccccgcagucg

SEQ ID NO: 272683 - RNA, 23 nt, Human
uuuuuuuuuuucagaacuagggu

SEQ ID NO: 272684 - RNA, 25 nt, Human
uuuuuuuuuuuuuucagaacuaggg

SEQ ID NO: 272685 - RNA, 24 nt, Human
uuuuuuuuuuuuuuuuuuuuucag

SEQ ID NO: 272686 - RNA, 21 nt, Human
aaguacccccagagccguagc

SEQ ID NO: 272687 - RNA, 24 nt, Human
acccauauccucugcugagcagca

SEQ ID NO: 272688 - RNA, 19 nt, Human
acccccagagccguagccc

SEQ ID NO: 272689 - RNA, 21 nt, Human
agaccugcccccgccccccca

SEQ ID NO: 272690 - RNA, 19 nt, Human
caaggagcagugguggcgg

SEQ ID NO: 272691 - RNA, 20 nt, Human
cagaccugcccccgcccccc

SEQ ID NO: 272692 - RNA, 23 nt, Human
cccauccuuucccuuacccuucc

SEQ ID NO: 272693 - RNA, 20 nt, Human
ccccaaguacccccagagcc

SEQ ID NO: 272694 - RNA, 19 nt, Human
ccccacccccacuuguuac

SEQ ID NO: 272695 - RNA, 22 nt, Human
ccccacccccacuuguuacaac

SEQ ID NO: 272696 - RNA, 18 nt, Human
cccccaaguacccccaga

SEQ ID NO: 272697 - RNA, 23 nt, Human
cccccaaguacccccagagccgu

SEQ ID NO: 272698 - RNA, 19 nt, Human
cccccagagccguagccca

SEQ ID NO: 272699 - RNA, 21 nt, Human
cccccgcccccccaaguaccc

SEQ ID NO: 272700 - RNA, 22 nt, Human
cccccgcccccccaaguacccc

SEQ ID NO: 272701 - RNA, 18 nt, Human
cccgcaccccccaccccc

SEQ ID NO: 272702 - RNA, 18 nt, Human
ccgcaccccccaccccca

SEQ ID NO: 272703 - RNA, 22 nt, Human
cggcagagucaaggagcagugg

SEQ ID NO: 272704 - RNA, 23 nt, Human
cugagcagcaccuggcucuuccu

SEQ ID NO: 272705 - RNA, 21 nt, Human
cuugugguccccauccuuucc

SEQ ID NO: 272706 - RNA, 21 nt, Human
gcaccccccacccccacuugu

SEQ ID NO: 272707 - RNA, 21 nt, Human
gcccgcaccccccacccccac

SEQ ID NO: 272708 - RNA, 22 nt, Human
gcucccacccauauccucugcu

SEQ ID NO: 272709 - RNA, 20 nt, Human
ggcccgcaccccccaccccc

SEQ ID NO: 272710 - RNA, 22 nt, Human
uacccccagagccguagcccaa

SEQ ID NO: 272711 - RNA, 22 nt, Human
ucugcugagcagcaccuggcuc

SEQ ID NO: 272712 - RNA, 23 nt, Human
uuaggaaacggcagagucaagga

SEQ ID NO: 272713 - RNA, 24 nt, Human
uuuuuuuuuuuuuugagaugugga

SEQ ID NO: 272714 - RNA, 27 nt, Human
uuuuuuuuuuuuuuuuuuuuuuugggg

SEQ ID NO: 272715 - RNA, 24 nt, Human
aaaguguugggauuacaggcguga

SEQ ID NO: 272716 - RNA, 21 nt, Human
aaguguugggauuacaggcgu

SEQ ID NO: 272717 - RNA, 26 nt, Human
aaguguugggauuacaggcgugagcc

SEQ ID NO: 272718 - RNA, 21 nt, Human
acaauagccaagcucuucuca

SEQ ID NO: 272719 - RNA, 23 nt, Human
acaggcuuccaccaccacgcccg

SEQ ID NO: 272720 - RNA, 18 nt, Human
acgggguuucaccauguu

SEQ ID NO: 272721 - RNA, 19 nt, Human
acgggguuucaccauguua

SEQ ID NO: 272722 - RNA, 20 nt, Human
acgggguuucaccauguuag

SEQ ID NO: 272723 - RNA, 24 nt, Human
acgggguuucaccauguuagccag

SEQ ID NO: 272724 - RNA, 20 nt, Human
acugcaagcuccgccucccg

SEQ ID NO: 272725 - RNA, 21 nt, Human
agcuccagguacuggugcugg

SEQ ID NO: 272726 - RNA, 25 nt, Human
aggcuggagugcaguggugcgaucu

SEQ ID NO: 272727 - RNA, 18 nt, Human
agggaaugugccagcucc

SEQ ID NO: 272728 - RNA, 19 nt, Human
aguagcugggacuacaggc

SEQ ID NO: 272729 - RNA, 19 nt, Human
aguagcugggacuacaggc

SEQ ID NO: 272730 - RNA, 23 nt, Human
aguagcugggacuacaggcuucc

SEQ ID NO: 272731 - RNA, 20 nt, Human
agugcaguggugcgaucucg

SEQ ID NO: 272732 - RNA, 23 nt, Human
agugcaguggugcgaucucggcu

SEQ ID NO: 272733 - RNA, 24 nt, Human
agugcaguggugcgaucucggcuc

SEQ ID NO: 272734 - RNA, 20 nt, Human
aguguccccuccagcuccuc

SEQ ID NO: 272735 - RNA, 24 nt, Human
caaaguguugggauuacaggcgug

SEQ ID NO: 272736 - RNA, 18 nt, Human
caccauguuagccaggau

SEQ ID NO: 272737 - RNA, 22 nt, Human
caccauguuagccaggaugguc

SEQ ID NO: 272738 - RNA, 24 nt, Human
caccauguuagccaggauggucuc

SEQ ID NO: 272739 - RNA, 22 nt, Human
cacgccauucuccugccucagc

SEQ ID NO: 272740 - RNA, 20 nt, Human
cacggcacagcccagagggu

SEQ ID NO: 272741 - RNA, 22 nt, Human
cagagggucgucagcgcgcucc

SEQ ID NO: 272742 - RNA, 21 nt, Human
cagcaaagcaucccucgacug

SEQ ID NO: 272743 - RNA, 22 nt, Human
ccaaaguguugggauuacaggc

SEQ ID NO: 272744 - RNA, 22 nt, Human
ccaaaguguugggauuacaggc

SEQ ID NO: 272745 - RNA, 24 nt, Human
ccaaaguguugggauuacaggcgu

SEQ ID NO: 272746 - RNA, 18 nt, Human
ccacaauagccaagcucu

SEQ ID NO: 272747 - RNA, 18 nt, Human
ccagagccucggcguagc

SEQ ID NO: 272748 - RNA, 23 nt, Human
ccagagccucggcguagcggcca

SEQ ID NO: 272749 - RNA, 21 nt, Human
ccaguguccccuccagcuccu

SEQ ID NO: 272750 - RNA, 19 nt, Human
ccaucucggccaggcgcuc

SEQ ID NO: 272751 - RNA, 19 nt, Human
cccaggcuggagugcagug

SEQ ID NO: 272752 - RNA, 24 nt, Human
ccggaguagcugggacuacaggcu

SEQ ID NO: 272753 - RNA, 20 nt, Human
ccugccagugcugcuccaga

SEQ ID NO: 272754 - RNA, 23 nt, Human
ccugccucagccuccggaguagc

SEQ ID NO: 272755 - RNA, 19 nt, Human
ccugugccugcagcaaagc

SEQ ID NO: 272756 - RNA, 19 nt, Human
cgccucccggguucacgcc

SEQ ID NO: 272757 - RNA, 22 nt, Human
cgcgcucccgaagcugcagcuc

SEQ ID NO: 272758 - RNA, 24 nt, Human
cgggguuucaccauguuagccagg

SEQ ID NO: 272759 - RNA, 24 nt, Human
cggucugucgcccaggcuggagug

SEQ ID NO: 272760 - RNA, 24 nt, Human
cucagccuccggaguagcugggac

SEQ ID NO: 272761 - RNA, 21 nt, Human
cucccggguucacgccauucu

SEQ ID NO: 272762 - RNA, 24 nt, Human
cuccugaccucgugauccgcccgc

SEQ ID NO: 272763 - RNA, 21 nt, Human
cucuucgcgccgcugcccggc

SEQ ID NO: 272764 - RNA, 23 nt, Human
cugccucagccuccggaguagcu

SEQ ID NO: 272765 - RNA, 24 nt, Human
cugguggcacagcgcggccucuuc

SEQ ID NO: 272766 - RNA, 20 nt, Human
cuuggcuuucgccuugcuca

SEQ ID NO: 272767 - RNA, 22 nt, Human
cuuggcuuucgccuugcucagc

SEQ ID NO: 272768 - RNA, 23 nt, Human
cuuggcuuucgccuugcucagcu

SEQ ID NO: 272769 - RNA, 20 nt, Human
gaccucgugauccgcccgcc

SEQ ID NO: 272770 - RNA, 21 nt, Human
gaccucgugauccgcccgccu

SEQ ID NO: 272771 - RNA, 23 nt, Human
gaccucgugauccgcccgccugg

SEQ ID NO: 272772 - RNA, 21 nt, Human
gacuggcaguggucauagaug

SEQ ID NO: 272773 - RNA, 24 nt, Human
gagacgggguuucaccauguuagc

SEQ ID NO: 272774 - RNA, 24 nt, Human
gaguagcugggacuacaggcuucc

SEQ ID NO: 272775 - RNA, 18 nt, Human
gauuacaggcgugagcca

SEQ ID NO: 272776 - RNA, 22 nt, Human
gauuacaggcgugagccaccgc

SEQ ID NO: 272777 - RNA, 22 nt, Human
gauuacaggcgugagccaccgc

SEQ ID NO: 272778 - RNA, 22 nt, Human
gcaaagcaucccucgacuggca

SEQ ID NO: 272779 - RNA, 20 nt, Human
gccaagcucuucucaaaggc

SEQ ID NO: 272780 - RNA, 19 nt, Human
gcccaggcuggagugcagu

SEQ ID NO: 272781 - RNA, 20 nt, Human
gcccaggcuggagugcagug

SEQ ID NO: 272782 - RNA, 23 nt, Human
gcccaggcuggagugcaguggug

SEQ ID NO: 272783 - RNA, 25 nt, Human
gccucccggguucacgccauucucc

SEQ ID NO: 272784 - RNA, 21 nt, Human
gccuugcucagcuggcgaagc

SEQ ID NO: 272785 - RNA, 23 nt, Human
ggagcucccccagcugguggcac

SEQ ID NO: 272786 - RNA, 24 nt, Human
ggauggucucgaucuccugaccuc

SEQ ID NO: 272787 - RNA, 22 nt, Human
ggccgaugguggcccaggcccu

SEQ ID NO: 272788 - RNA, 22 nt, Human
ggcuucggugaggguggggaaa

SEQ ID NO: 272789 - RNA, 23 nt, Human
gggguuucaccauguuagccagg

SEQ ID NO: 272790 - RNA, 24 nt, Human
gguuucaccauguuagccaggaug

SEQ ID NO: 272791 - RNA, 23 nt, Human
guagagacgggguuucaccaugu

SEQ ID NO: 272792 - RNA, 20 nt, Human
gugaggguggggaaaggcag

SEQ ID NO: 272793 - RNA, 24 nt, Human
uaauuuuugguauuuuuaguagag

SEQ ID NO: 272794 - RNA, 25 nt, Human
uaauuuuugguauuuuuaguagaga

SEQ ID NO: 272795 - RNA, 23 nt, Human
uacaggcgugagccaccgcgccc

SEQ ID NO: 272796 - RNA, 23 nt, Human
uacaggcuuccaccaccacgccc

SEQ ID NO: 272797 - RNA, 22 nt, Human
uagagacgggguuucaccaugu

SEQ ID NO: 272798 - RNA, 19 nt, Human
uagauguccaggugggugc

SEQ ID NO: 272799 - RNA, 24 nt, Human
uaguagagacgggguuucaccaug

SEQ ID NO: 272800 - RNA, 26 nt, Human
uaguagagacgggguuucaccauguu

SEQ ID NO: 272801 - RNA, 24 nt, Human
ucaccauguuagccaggauggucu

SEQ ID NO: 272802 - RNA, 18 nt, Human
ucacugcaagcuccgccu

SEQ ID NO: 272803 - RNA, 19 nt, Human
ucacugcaagcuccgccuc

SEQ ID NO: 272804 - RNA, 24 nt, Human
ucacugcaagcuccgccucccggg

SEQ ID NO: 272805 - RNA, 23 nt, Human
uccacaauagccaagcucuucuc

SEQ ID NO: 272806 - RNA, 24 nt, Human
ucccaaaguguugggauuacaggc

SEQ ID NO: 272807 - RNA, 20 nt, Human
ucccgaagcugcagcuccug

SEQ ID NO: 272808 - RNA, 21 nt, Human
ucccggguucacgccauucuc

SEQ ID NO: 272809 - RNA, 24 nt, Human
ucccggguucacgccauucuccug

SEQ ID NO: 272810 - RNA, 20 nt, Human
ucccugggccaguguccccu

SEQ ID NO: 272811 - RNA, 20 nt, Human
uccgaucuugcggugggcca

SEQ ID NO: 272812 - RNA, 24 nt, Human
uccggaguagcugggacuacaggc

SEQ ID NO: 272813 - RNA, 24 nt, Human
ucgcccaggcuggagugcaguggu

SEQ ID NO: 272814 - RNA, 24 nt, Human
ucggucugucgcccaggcuggagu

SEQ ID NO: 272815 - RNA, 24 nt, Human
ucuccugccucagccuccggagua

SEQ ID NO: 272816 - RNA, 23 nt, Human
ucucggucugucgcccaggcugg

SEQ ID NO: 272817 - RNA, 24 nt, Human
ucucggucugucgcccaggcugga

SEQ ID NO: 272818 - RNA, 24 nt, Human
ucugucgcccaggcuggagugcag

SEQ ID NO: 272819 - RNA, 19 nt, Human
ucuucgcgccgcugcccgg

SEQ ID NO: 272820 - RNA, 22 nt, Human
ugagacggagucucggucuguc

SEQ ID NO: 272821 - RNA, 22 nt, Human
ugcaguggugcgaucucggcuc

SEQ ID NO: 272822 - RNA, 24 nt, Human
ugccucagccuccggaguagcugg

SEQ ID NO: 272823 - RNA, 22 nt, Human
ugcggugggccacggcacagcc

SEQ ID NO: 272824 - RNA, 27 nt, Human
ugcuccagagccucggcguagcggcca

SEQ ID NO: 272825 - RNA, 23 nt, Human
uggagugcaguggugcgaucucg

SEQ ID NO: 272826 - RNA, 24 nt, Human
uggagugcaguggugcgaucucgg

SEQ ID NO: 272827 - RNA, 20 nt, Human
uggcccaggcccucugcagc

SEQ ID NO: 272828 - RNA, 21 nt, Human
uggcccaggcccucugcagcu

SEQ ID NO: 272829 - RNA, 18 nt, Human
uggcgaagcucgcccucg

SEQ ID NO: 272830 - RNA, 19 nt, Human
ugggacuacaggcuuccac

SEQ ID NO: 272831 - RNA, 21 nt, Human
ugggacuacaggcuuccacca

SEQ ID NO: 272832 - RNA, 24 nt, Human
ugggacuacaggcuuccaccacca

SEQ ID NO: 272833 - RNA, 18 nt, Human
ugggauuacaggcgugag

SEQ ID NO: 272834 - RNA, 19 nt, Human
ugggauuacaggcgugagc

SEQ ID NO: 272835 - RNA, 21 nt, Human
ugggauuacaggcgugagcca

SEQ ID NO: 272836 - RNA, 22 nt, Human
ugggauuacaggcgugagccac

SEQ ID NO: 272837 - RNA, 23 nt, Human
ugggauuacaggcgugagccacc

SEQ ID NO: 272838 - RNA, 24 nt, Human
ugggauuacaggcgugagccaccg

SEQ ID NO: 272839 - RNA, 19 nt, Human
ugggccaguguccccucca

SEQ ID NO: 272840 - RNA, 20 nt, Human
ugggccaguguccccuccag

SEQ ID NO: 272841 - RNA, 21 nt, Human
ugggugcggccgaugguggcc

SEQ ID NO: 272842 - RNA, 18 nt, Human
uuaguagagacgggguuu

SEQ ID NO: 272843 - RNA, 22 nt, Human
uuaguagagacgggguuucacc

SEQ ID NO: 272844 - RNA, 24 nt, Human
uuaguagagacgggguuucaccau

SEQ ID NO: 272845 - RNA, 20 nt, Human
uugcucagcuggcgaagcuc

SEQ ID NO: 272846 - RNA, 19 nt, Human
uuucaccauguuagccagg

SEQ ID NO: 272847 - RNA, 20 nt, Human
uuucaccauguuagccagga

SEQ ID NO: 272848 - RNA, 24 nt, Human
uuuuuaguagagacgggguuucac

SEQ ID NO: 272849 - RNA, 24 nt, Human
uuuuugguauuuuuaguagagacg

SEQ ID NO: 272850 - RNA, 25 nt, Human
uuuuuuuuuuuugagacggagucuc

SEQ ID NO: 272851 - RNA, 22 nt, Human
uuuuuuuuuuuuuugagacgga

SEQ ID NO: 272852 - RNA, 27 nt, Human
uuuuuuuuuuuuuuuuuuuuuuugggg

SEQ ID NO: 272853 - RNA, 20 nt, Human
aacauggcaaaaccccuucu

SEQ ID NO: 272854 - RNA, 21 nt, Human
aaccacuacccacgggucaga

SEQ ID NO: 272855 - RNA, 20 nt, Human
aacccgcagcccuucuccgg

SEQ ID NO: 272856 - RNA, 20 nt, Human
aagaaaaagaaggcauagaa

SEQ ID NO: 272857 - RNA, 21 nt, Human
aagaagaagaagagauggcug

SEQ ID NO: 272858 - RNA, 22 nt, Human
aagaagaagaagagauggcuga

SEQ ID NO: 272859 - RNA, 25 nt, Human
aagaagaagaagagauggcugaaga

SEQ ID NO: 272860 - RNA, 22 nt, Human
aagaagaagagauggcugaaga

SEQ ID NO: 272861 - RNA, 23 nt, Human
aagcaagaauuugcuucagcagc

SEQ ID NO: 272862 - RNA, 19 nt, Human
aagggcggggccacuccgc

SEQ ID NO: 272863 - RNA, 20 nt, Human
aaugggacaacagaagaagg

SEQ ID NO: 272864 - RNA, 18 nt, Human
acccaaaucugacaucag

SEQ ID NO: 272865 - RNA, 18 nt, Human
acccaaaucugacaucag

SEQ ID NO: 272866 - RNA, 18 nt, Human
agaagaagaagagauggc

SEQ ID NO: 272867 - RNA, 20 nt, Human
agaagaagaagagauggcug

SEQ ID NO: 272868 - RNA, 22 nt, Human
agaagaagaagagauggcugaa

SEQ ID NO: 272869 - RNA, 22 nt, Human
agaagaagaggaagaagaagaa

SEQ ID NO: 272870 - RNA, 25 nt, Human
agaagaagaggaagaagaagaagag

SEQ ID NO: 272871 - RNA, 22 nt, Human
agcacugucuucaggaaacugg

SEQ ID NO: 272872 - RNA, 22 nt, Human
aggaugaaggaauugaaaaaga

SEQ ID NO: 272873 - RNA, 20 nt, Human
aguacuuugggagguccagg

SEQ ID NO: 272874 - RNA, 18 nt, Human
auccuauccaucuucuuc

SEQ ID NO: 272875 - RNA, 20 nt, Human
caagaaccacgagcgauucc

SEQ ID NO: 272876 - RNA, 21 nt, Human
cacucccgcuccucaggugug

SEQ ID NO: 272877 - RNA, 20 nt, Human
cacuccucuuucacuucccu

SEQ ID NO: 272878 - RNA, 19 nt, Human
cacugaacaaggcuaagau

SEQ ID NO: 272879 - RNA, 22 nt, Human
cacugaacaaggcuaagaugag

SEQ ID NO: 272880 - RNA, 23 nt, Human
cacugcaacaucacggaauccua

SEQ ID NO: 272881 - RNA, 26 nt, Human
cagaagaagaggaagaagaagaagag

SEQ ID NO: 272882 - RNA, 27 nt, Human
cagaagaagaggaagaagaagaagaga

SEQ ID NO: 272883 - RNA, 24 nt, Human
cagaguuauaaaacagggauuuau

SEQ ID NO: 272884 - RNA, 19 nt, Human
cagaucuuaaaagaaaaag

SEQ ID NO: 272885 - RNA, 25 nt, Human
cagcagggcagcccgcacucgugcc

SEQ ID NO: 272886 - RNA, 24 nt, Human
cagguccucccucccguuauuucc

SEQ ID NO: 272887 - RNA, 24 nt, Human
caguacuuugggagguccaggcgg

SEQ ID NO: 272888 - RNA, 19 nt, Human
caucagaugacagggcugu

SEQ ID NO: 272889 - RNA, 21 nt, Human
ccacacggaccaaguuccaga

SEQ ID NO: 272890 - RNA, 22 nt, Human
cccccaguucuacuuuaucugc

SEQ ID NO: 272891 - RNA, 24 nt, Human
ccccucccgccggagaugagggga

SEQ ID NO: 272892 - RNA, 21 nt, Human
ccccuuccgcgcccggcuccc

SEQ ID NO: 272893 - RNA, 21 nt, Human
cccgcggggcggucgcggccg

SEQ ID NO: 272894 - RNA, 23 nt, Human
cccgcggggcggucgcggccgug

SEQ ID NO: 272895 - RNA, 18 nt, Human
ccgcgccccucccgccgg

SEQ ID NO: 272896 - RNA, 18 nt, Human
ccggccgcgggcucccag

SEQ ID NO: 272897 - RNA, 24 nt, Human
ccggcuccccuuccgcgccccucc

SEQ ID NO: 272898 - RNA, 24 nt, Human
ccuaacccgcagcccuucuccggc

SEQ ID NO: 272899 - RNA, 19 nt, Human
ccucccaggaggcaauccu

SEQ ID NO: 272900 - RNA, 23 nt, Human
ccucccguuauuuccaauucugg

SEQ ID NO: 272901 - RNA, 23 nt, Human
cgccgggccaucuccagcagauc

SEQ ID NO: 272902 - RNA, 21 nt, Human
cggcccccuaacccgcagccc

SEQ ID NO: 272903 - RNA, 18 nt, Human
cggcggcuccgggcccgg

SEQ ID NO: 272904 - RNA, 20 nt, Human
cggcuccgggcccggcuccc

SEQ ID NO: 272905 - RNA, 21 nt, Human
cgucucggaaaagcuucuggg

SEQ ID NO: 272906 - RNA, 26 nt, Human
cuagcgaacauggcaaaaccccuucu

SEQ ID NO: 272907 - RNA, 21 nt, Human
cucacgcuccacugcaacauc

SEQ ID NO: 272908 - RNA, 21 nt, Human
cucagcacugucuucaggaaa

SEQ ID NO: 272909 - RNA, 22 nt, Human
cucccagacgccgaggcuuccg

SEQ ID NO: 272910 - RNA, 25 nt, Human
cucucaggaggguauguauugggug

SEQ ID NO: 272911 - RNA, 21 nt, Human
cuggugccgcagcagggcagc

SEQ ID NO: 272912 - RNA, 22 nt, Human
cugucuucaggaaacuggggca

SEQ ID NO: 272913 - RNA, 23 nt, Human
cuucagaagaagaggaagaagaa

SEQ ID NO: 272914 - RNA, 19 nt, Human
gaagaagagccuauuagug

SEQ ID NO: 272915 - RNA, 20 nt, Human
gacgagcugcacugccaguu

SEQ ID NO: 272916 - RNA, 22 nt, Human
gcagggcagcccgcacucgugc

SEQ ID NO: 272917 - RNA, 19 nt, Human
gccgaggcuuccgcgcccc

SEQ ID NO: 272918 - RNA, 23 nt, Human
gccuauuagugggaaaaagucag

SEQ ID NO: 272919 - RNA, 24 nt, Human
gcuuaacuucucuuuuaaggauaa

SEQ ID NO: 272920 - RNA, 21 nt, Human
ggaaacuggggcagaaacugc

SEQ ID NO: 272921 - RNA, 20 nt, Human
ggaauccuauccaucuucuu

SEQ ID NO: 272922 - RNA, 18 nt, Human
ggagagcgcggcccaggc

SEQ ID NO: 272923 - RNA, 25 nt, Human
ggagaugaggggaagauguccgugu

SEQ ID NO: 272924 - RNA, 19 nt, Human
ggcccaggccggcccgcgg

SEQ ID NO: 272925 - RNA, 22 nt, Human
ggcccggcuccccuuccgcgcc

SEQ ID NO: 272926 - RNA, 22 nt, Human
ggcuccccuuccgcgccccucc

SEQ ID NO: 272927 - RNA, 24 nt, Human
gggucagaaugggacaacagaaga

SEQ ID NO: 272928 - RNA, 21 nt, Human
gucacugucccccaguucuac

SEQ ID NO: 272929 - RNA, 20 nt, Human
guccgccacucccgcuccuc

SEQ ID NO: 272930 - RNA, 19 nt, Human
gugcagaggguuuccaaag

SEQ ID NO: 272931 - RNA, 19 nt, Human
uaagaugaguucauucugc

SEQ ID NO: 272932 - RNA, 18 nt, Human
uaaucauuguugcucagg

SEQ ID NO: 272933 - RNA, 26 nt, Human
uacagaucacagaguuauaaaacagg

SEQ ID NO: 272934 - RNA, 19 nt, Human
uacuaagaacaacaauuug

SEQ ID NO: 272935 - RNA, 24 nt, Human
uagaucaaccacuacccacggguc

SEQ ID NO: 272936 - RNA, 18 nt, Human
uaggagaacgugcuggag

SEQ ID NO: 272937 - RNA, 20 nt, Human
ucaaaagguccgggugaucc

SEQ ID NO: 272938 - RNA, 24 nt, Human
ucacgcuccacugcaacaucacgg

SEQ ID NO: 272939 - RNA, 21 nt, Human
ucagaagaagaggaagaagaa

SEQ ID NO: 272940 - RNA, 24 nt, Human
ucagaagaagaggaagaagaagaa

SEQ ID NO: 272941 - RNA, 22 nt, Human
ucagaucuuaaaagaaaaagaa

SEQ ID NO: 272942 - RNA, 18 nt, Human
uccgccgggccaucucca

SEQ ID NO: 272943 - RNA, 19 nt, Human
uccgugucagggcucaagg

SEQ ID NO: 272944 - RNA, 22 nt, Human
uccucgggcagacuaacucugg

SEQ ID NO: 272945 - RNA, 23 nt, Human
uccugaaccgcgggcgccggccc

SEQ ID NO: 272946 - RNA, 18 nt, Human
ucucauaaucauuguugc

SEQ ID NO: 272947 - RNA, 22 nt, Human
ucucucauaaucauuguugcuc

SEQ ID NO: 272948 - RNA, 21 nt, Human
ucugcaguuuauauaaccuuc

SEQ ID NO: 272949 - RNA, 21 nt, Human
ucuucaggucacuguccccca

SEQ ID NO: 272950 - RNA, 19 nt, Human
ugagaggcugacaacauca

SEQ ID NO: 272951 - RNA, 21 nt, Human
ugaggaagggaagcuggacca

SEQ ID NO: 272952 - RNA, 22 nt, Human
ugaggaagggaagcuggaccag

SEQ ID NO: 272953 - RNA, 19 nt, Human
ugccaguuccuggugccgc

SEQ ID NO: 272954 - RNA, 23 nt, Human
ugcuggagagcucggaagccaug

SEQ ID NO: 272955 - RNA, 22 nt, Human
uggcauguuaacugcagaaggu

SEQ ID NO: 272956 - RNA, 25 nt, Human
uggcugauguuuccgcuucucgugg

SEQ ID NO: 272957 - RNA, 22 nt, Human
uggguccgccacucccgcuccu

SEQ ID NO: 272958 - RNA, 19 nt, Human
uggugcagugucuggguca

SEQ ID NO: 272959 - RNA, 21 nt, Human
uguauggaacuucucacaaaa

SEQ ID NO: 272960 - RNA, 18 nt, Human
ugucagggcucaaggccg

SEQ ID NO: 272961 - RNA, 24 nt, Human
uguggauucugaagacccaaaucu

SEQ ID NO: 272962 - RNA, 22 nt, Human
uguuuaggagacggagcuguag

SEQ ID NO: 272963 - RNA, 18 nt, Human
uucauauccgugguugaa

SEQ ID NO: 272964 - RNA, 23 nt, Human
uuugcuucgucagcaauugaagu

SEQ ID NO: 272965 - RNA, 22 nt, Human
uuuggcaauauuagagaaaauu

SEQ ID NO: 272966 - RNA, 27 nt, Human
uuuguggauucugaagacccaaaucug

SEQ ID NO: 272967 - RNA, 23 nt, Human
agacaaaggcuugcaacuucaau

SEQ ID NO: 272968 - RNA, 23 nt, Human
aggaggcuccagccgccgcugcc

SEQ ID NO: 272969 - RNA, 19 nt, Human
aggcuccagccgccgcugc

SEQ ID NO: 272970 - RNA, 21 nt, Human
aguugaucaauuuccuggaac

SEQ ID NO: 272971 - RNA, 25 nt, Human
aucagcuccaucacauggcgugggg

SEQ ID NO: 272972 - RNA, 21 nt, Human
augugucuccuugcaucaucc

SEQ ID NO: 272973 - RNA, 19 nt, Human
ccagccgccgcugccgccg

SEQ ID NO: 272974 - RNA, 22 nt, Human
ccaugggaaggagugggcugcu

SEQ ID NO: 272975 - RNA, 19 nt, Human
cccccaccagagggauaaa

SEQ ID NO: 272976 - RNA, 20 nt, Human
cccuccaagugagauuccug

SEQ ID NO: 272977 - RNA, 20 nt, Human
ccgaaacccaaucaggaggc

SEQ ID NO: 272978 - RNA, 18 nt, Human
ccgccgcugccgccgcca

SEQ ID NO: 272979 - RNA, 24 nt, Human
ccgccgcugccgccgccacugccg

SEQ ID NO: 272980 - RNA, 19 nt, Human
ccgcugccgccgccacugc

SEQ ID NO: 272981 - RNA, 24 nt, Human
cgaauccaugaaaugucaauguca

SEQ ID NO: 272982 - RNA, 21 nt, Human
cgcugcccgcgcugauuggcu

SEQ ID NO: 272983 - RNA, 19 nt, Human
cuccaguaccggacucccu

SEQ ID NO: 272984 - RNA, 24 nt, Human
cuccaguaccggacuccgaaaccc

SEQ ID NO: 272985 - RNA, 18 nt, Human
cuccgugccucgcucccc

SEQ ID NO: 272986 - RNA, 22 nt, Human
cugggguggcaugugucuccuu

SEQ ID NO: 272987 - RNA, 23 nt, Human
gaauccaugaaaugucaauguca

SEQ ID NO: 272988 - RNA, 21 nt, Human
gauuccuguccacucuggaga

SEQ ID NO: 272989 - RNA, 23 nt, Human
gcugcugcuuuccugauugcagu

SEQ ID NO: 272990 - RNA, 18 nt, Human
ggcuccagccgccgcugc

SEQ ID NO: 272991 - RNA, 20 nt, Human
ggcuccaguaccggacuccg

SEQ ID NO: 272992 - RNA, 21 nt, Human
gguggcaugugucuccuugca

SEQ ID NO: 272993 - RNA, 18 nt, Human
uaccggacuccgaaaccc

SEQ ID NO: 272994 - RNA, 18 nt, Human
uacugcugggguggcaug

SEQ ID NO: 272995 - RNA, 19 nt, Human
uacugcugggguggcaugu

SEQ ID NO: 272996 - RNA, 23 nt, Human
uccaguaccggacuccgaaaccc

SEQ ID NO: 272997 - RNA, 21 nt, Human
uccgaaacccaaucaggaggc

SEQ ID NO: 272998 - RNA, 22 nt, Human
uccgaaacccaaucaggaggcu

SEQ ID NO: 272999 - RNA, 19 nt, Human
uccuagaaggcugugaggu

SEQ ID NO: 273000 - RNA, 20 nt, Human
ugaaagaguaagacaaaggc

SEQ ID NO: 273001 - RNA, 20 nt, Human
ugaauacaaagcguccauuc

SEQ ID NO: 273002 - RNA, 20 nt, Human
ugacugaaagaguaagacaa

SEQ ID NO: 273003 - RNA, 19 nt, Human
ugcugggguggcauguguc

SEQ ID NO: 273004 - RNA, 21 nt, Human
uggaacagugagaaacaugac

SEQ ID NO: 273005 - RNA, 22 nt, Human
uggaacagugagaaacaugacc

SEQ ID NO: 273006 - RNA, 25 nt, Human
uggaagaguugaucaauuuccugga

SEQ ID NO: 273007 - RNA, 24 nt, Human
uuccaugggaaggagugggcugcu

SEQ ID NO: 273008 - RNA, 19 nt, Human
uuccuggaacagugagaaa

SEQ ID NO: 273009 - RNA, 18 nt, Human
caaugcagcccugguugg

SEQ ID NO: 273010 - RNA, 22 nt, Human
cuaaaaaggugucuaaucuuug

SEQ ID NO: 273011 - RNA, 18 nt, Human
uggugcugaagaacaccu

SEQ ID NO: 273012 - RNA, 18 nt, Human
ugucagaaccguguuguc

SEQ ID NO: 273013 - RNA, 23 nt, Human
aaaaaaaaaagaaaaacaaaagg

SEQ ID NO: 273014 - RNA, 25 nt, Human
aaaaaaaaaagaaaaacaaaaggag

SEQ ID NO: 273015 - RNA, 23 nt, Human
aaaaaagaaaaacaaaaggagaa

SEQ ID NO: 273016 - RNA, 23 nt, Human
aaaaagaaaaacaaaaggagaaa

SEQ ID NO: 273017 - RNA, 24 nt, Human
aaaaagaaaaacaaaaggagaaau

SEQ ID NO: 273018 - RNA, 25 nt, Human
aaacaaaaggagaaauauuucuuca

SEQ ID NO: 273019 - RNA, 22 nt, Human
aagaaaaacaaaaggagaaaga

SEQ ID NO: 273020 - RNA, 24 nt, Human
aagaaguggcaguaacaaacaaaa

SEQ ID NO: 273021 - RNA, 19 nt, Human
aagaguguggcaaugaauc

SEQ ID NO: 273022 - RNA, 18 nt, Human
acacucaacauauugaaa

SEQ ID NO: 273023 - RNA, 21 nt, Human
acagggauaaaucugucucuu

SEQ ID NO: 273024 - RNA, 25 nt, Human
agaaaaaaauggaaaaaaaggaaac

SEQ ID NO: 273025 - RNA, 26 nt, Human
agaaaaaaauggaaaaaaagggaccc

SEQ ID NO: 273026 - RNA, 19 nt, Human
agagaaaaaaauggaaaaa

SEQ ID NO: 273027 - RNA, 25 nt, Human
agccugcaggaggcgcugaggucgg

SEQ ID NO: 273028 - RNA, 23 nt, Human
caaaaaaaaaagaaaaacaaaag

SEQ ID NO: 273029 - RNA, 19 nt, Human
caaacaaaaaaaaaagaaa

SEQ ID NO: 273030 - RNA, 21 nt, Human
caagcaagauggcggccacgc

SEQ ID NO: 273031 - RNA, 19 nt, Human
caggaagagcaggagccgc

SEQ ID NO: 273032 - RNA, 22 nt, Human
caugcagcuugaaguccaugca

SEQ ID NO: 273033 - RNA, 20 nt, Human
cauuucaugcagcuugaagu

SEQ ID NO: 273034 - RNA, 18 nt, Human
ccaguguccuagccugca

SEQ ID NO: 273035 - RNA, 22 nt, Human
ccccuggggagauuugcuccua

SEQ ID NO: 273036 - RNA, 21 nt, Human
ccuuggccuugccagcucagg

SEQ ID NO: 273037 - RNA, 20 nt, Human
cugagggcagaacaacgugg

SEQ ID NO: 273038 - RNA, 23 nt, Human
cugaggucggccggguccucugg

SEQ ID NO: 273039 - RNA, 18 nt, Human
cugcucaggaguccagga

SEQ ID NO: 273040 - RNA, 26 nt, Human
gagaaaaaaauggaaaaaaaggaaac

SEQ ID NO: 273041 - RNA, 22 nt, Human
gcagaacaacguggcaagucuu

SEQ ID NO: 273042 - RNA, 20 nt, Human
gcggcggaggggagggggga

SEQ ID NO: 273043 - RNA, 24 nt, Human
ggaaaaaaaggaaacaaaaaauau

SEQ ID NO: 273044 - RNA, 18 nt, Human
ggcacaagcaagauggcg

SEQ ID NO: 273045 - RNA, 18 nt, Human
gggcacaagcaagauggc

SEQ ID NO: 273046 - RNA, 20 nt, Human
guagcagcuguucccagagu

SEQ ID NO: 273047 - RNA, 27 nt, Human
guggcaguaacaaacaaaaaaaaaaga

SEQ ID NO: 273048 - RNA, 21 nt, Human
gugggcagcaaacacacaaag

SEQ ID NO: 273049 - RNA, 22 nt, Human
uaacaaacaaaaaaaaaagaaa

SEQ ID NO: 273050 - RNA, 24 nt, Human
uaacaaacaaaaaaaaaagaaaaa

SEQ ID NO: 273051 - RNA, 24 nt, Human
ucagagcaagggauagggagagga

SEQ ID NO: 273052 - RNA, 22 nt, Human
uccaggaagagcaggagccgcc

SEQ ID NO: 273053 - RNA, 23 nt, Human
ucccugggagaaaagaguguggc

SEQ ID NO: 273054 - RNA, 20 nt, Human
uccugggucccugggagaaa

SEQ ID NO: 273055 - RNA, 20 nt, Human
uccuuagagaaaaaaaugga

SEQ ID NO: 273056 - RNA, 22 nt, Human
uccuuagagaaaaaaauggaaa

SEQ ID NO: 273057 - RNA, 27 nt, Human
uccuuagagaaaaaaauggaaaaaaag

SEQ ID NO: 273058 - RNA, 22 nt, Human
ugaauccacccacucuccacag

SEQ ID NO: 273059 - RNA, 22 nt, Human
ugcuggagaaucucggccccca

SEQ ID NO: 273060 - RNA, 24 nt, Human
uggcaaugaauccacccacucucc

SEQ ID NO: 273061 - RNA, 18 nt, Human
uggcaguaacaaacaaaa

SEQ ID NO: 273062 - RNA, 18 nt, Human
ugggagaaaagagugugg

SEQ ID NO: 273063 - RNA, 18 nt, Human
ugggagaaaagagugugg

SEQ ID NO: 273064 - RNA, 19 nt, Human
ugggagaaaagaguguggc

SEQ ID NO: 273065 - RNA, 20 nt, Human
ugggagaaaagaguguggca

SEQ ID NO: 273066 - RNA, 19 nt, Human
uggggaggaaggcugugcc

SEQ ID NO: 273067 - RNA, 20 nt, Human
uggggucagagcaagggauc

SEQ ID NO: 273068 - RNA, 19 nt, Human
uguccuuggccuugccagc

SEQ ID NO: 273069 - RNA, 21 nt, Human
uguccuuggccuugccagcuc

SEQ ID NO: 273070 - RNA, 24 nt, Human
uguccuuggccuugccagcucagg

SEQ ID NO: 273071 - RNA, 22 nt, Human
ugugcgucacggagcgcgcgcg

SEQ ID NO: 273072 - RNA, 22 nt, Human
uugcaccguuuccccggacgcg

SEQ ID NO: 273073 - RNA, 24 nt, Human
uugccuggggcuguauggcaaaaa

SEQ ID NO: 273074 - RNA, 23 nt, Human
uuuaaaaaauaaaagggaggugg

SEQ ID NO: 273075 - RNA, 22 nt, Human
aaagccgccacggcccccgccc

SEQ ID NO: 273076 - RNA, 22 nt, Human
aacgcaagaaagaggcuacugg

SEQ ID NO: 273077 - RNA, 19 nt, Human
aagaagcaggacagacaga

SEQ ID NO: 273078 - RNA, 21 nt, Human
accacagucagcacagagcaa

SEQ ID NO: 273079 - RNA, 18 nt, Human
acccagaagccccuuccu

SEQ ID NO: 273080 - RNA, 21 nt, Human
acgcgguccccuccgccccuc

SEQ ID NO: 273081 - RNA, 20 nt, Human
agaaaggagggccaggggag

SEQ ID NO: 273082 - RNA, 18 nt, Human
agagccccauccucuccc

SEQ ID NO: 273083 - RNA, 21 nt, Human
agccagaaaggagggccaggg

SEQ ID NO: 273084 - RNA, 27 nt, Human
agcuggacucuaggauacugagaccca

SEQ ID NO: 273085 - RNA, 18 nt, Human
aggaaagcagugaaggga

SEQ ID NO: 273086 - RNA, 23 nt, Human
aggacagaaggcgcuggaagcuc

SEQ ID NO: 273087 - RNA, 21 nt, Human
aggcaggacagaaggcgcugg

SEQ ID NO: 273088 - RNA, 18 nt, Human
aggcgcuggaagcucagc

SEQ ID NO: 273089 - RNA, 22 nt, Human
agggaagcuuggggagccuggg

SEQ ID NO: 273090 - RNA, 20 nt, Human
aucccaccucugccaccaaa

SEQ ID NO: 273091 - RNA, 18 nt, Human
caagugcagauggcuggg

SEQ ID NO: 273092 - RNA, 19 nt, Human
cacagcccgcgagacucaa

SEQ ID NO: 273093 - RNA, 24 nt, Human
caccccagcugugcuuccggggac

SEQ ID NO: 273094 - RNA, 22 nt, Human
cacccccgccuuggccugcacu

SEQ ID NO: 273095 - RNA, 22 nt, Human
cacccccgccuuggccugcacu

SEQ ID NO: 273096 - RNA, 18 nt, Human
caccuccauaccuuucca

SEQ ID NO: 273097 - RNA, 23 nt, Human
caccuccauaccuuuccagcuca

SEQ ID NO: 273098 - RNA, 18 nt, Human
caccuggccagcuagcug

SEQ ID NO: 273099 - RNA, 19 nt, Human
cagaagagccccauccucu

SEQ ID NO: 273100 - RNA, 21 nt, Human
cagcaaggcgcgcgcucccuc

SEQ ID NO: 273101 - RNA, 22 nt, Human
cagccaucucacccccgccuug

SEQ ID NO: 273102 - RNA, 22 nt, Human
cagcgggcagugaaucugagga

SEQ ID NO: 273103 - RNA, 18 nt, Human
cagcugccugaguacugg

SEQ ID NO: 273104 - RNA, 23 nt, Human
cagugaagggacugggcaggcag

SEQ ID NO: 273105 - RNA, 21 nt, Human
caucuccuccgcgacgcgguc

SEQ ID NO: 273106 - RNA, 19 nt, Human
caucuuggggcaggaaagc

SEQ ID NO: 273107 - RNA, 23 nt, Human
ccagcaaggcgcgcgcucccucc

SEQ ID NO: 273108 - RNA, 19 nt, Human
ccagcccugccccaucacc

SEQ ID NO: 273109 - RNA, 21 nt, Human
ccaggccagcaaggcgcgcgc

SEQ ID NO: 273110 - RNA, 21 nt, Human
ccaggucccccuucccuuccc

SEQ ID NO: 273111 - RNA, 19 nt, Human
ccccucguacgccccccgu

SEQ ID NO: 273112 - RNA, 20 nt, Human
cccggcgggggccgcagccg

SEQ ID NO: 273113 - RNA, 20 nt, Human
cccugccccaucaccucucc

SEQ ID NO: 273114 - RNA, 19 nt, Human
cccuggcaguucugauucu

SEQ ID NO: 273115 - RNA, 23 nt, Human
ccuccuuccuggccgguccccag

SEQ ID NO: 273116 - RNA, 24 nt, Human
ccugccccaucaccucuccagugu

SEQ ID NO: 273117 - RNA, 22 nt, Human
ccugggcugggcgcuuuaaagc

SEQ ID NO: 273118 - RNA, 22 nt, Human
ccuuccuggccgguccccagcc

SEQ ID NO: 273119 - RNA, 20 nt, Human
cgccagagccgccccacccc

SEQ ID NO: 273120 - RNA, 20 nt, Human
cgcggccagucguaggugga

SEQ ID NO: 273121 - RNA, 19 nt, Human
cgcgguccccuccgccccu

SEQ ID NO: 273122 - RNA, 23 nt, Human
cuaggauacugagacccagcccu

SEQ ID NO: 273123 - RNA, 18 nt, Human
cucacagucgcugcaggc

SEQ ID NO: 273124 - RNA, 22 nt, Human
cucccacugccugggauuccac

SEQ ID NO: 273125 - RNA, 20 nt, Human
cuccgcgacgcgguccccuc

SEQ ID NO: 273126 - RNA, 21 nt, Human
cucuaggauacugagacccag

SEQ ID NO: 273127 - RNA, 19 nt, Human
cugauucugcucccacugc

SEQ ID NO: 273128 - RNA, 19 nt, Human
cugccaccaaaacacucau

SEQ ID NO: 273129 - RNA, 21 nt, Human
cugcgccccgcagccgccaga

SEQ ID NO: 273130 - RNA, 19 nt, Human
gaagcaggacagacagaag

SEQ ID NO: 273131 - RNA, 18 nt, Human
gagacccagcccugcccc

SEQ ID NO: 273132 - RNA, 24 nt, Human
gagggcgggggccucugcugcugc

SEQ ID NO: 273133 - RNA, 19 nt, Human
gccgcugcgcccugcgccc

SEQ ID NO: 273134 - RNA, 22 nt, Human
gccgcugcgcccugcgccccgc

SEQ ID NO: 273135 - RNA, 25 nt, Human
gcggggcugggacccucagggcucg

SEQ ID NO: 273136 - RNA, 23 nt, Human
ggaaagcagugaagggacugggc

SEQ ID NO: 273137 - RNA, 24 nt, Human
ggacaaggaccaagaugcagggaa

SEQ ID NO: 273138 - RNA, 20 nt, Human
ggacagacagaagagcccca

SEQ ID NO: 273139 - RNA, 18 nt, Human
ggaugggggcugccgggc

SEQ ID NO: 273140 - RNA, 23 nt, Human
ggaugggggcugccgggcggggu

SEQ ID NO: 273141 - RNA, 24 nt, Human
ggcagugaaucugaggagcugugg

SEQ ID NO: 273142 - RNA, 18 nt, Human
ggccucacagucgcugca

SEQ ID NO: 273143 - RNA, 21 nt, Human
gggaagcuuggggagccuggg

SEQ ID NO: 273144 - RNA, 19 nt, Human
gggcagugaaucugaggag

SEQ ID NO: 273145 - RNA, 23 nt, Human
gguaaaaagaaacgcaagaaaga

SEQ ID NO: 273146 - RNA, 20 nt, Human
guucugauucugcucccacu

SEQ ID NO: 273147 - RNA, 25 nt, Human
uaaaaagaaacgcaagaaagaggcu

SEQ ID NO: 273148 - RNA, 21 nt, Human
uacaggccaacagacagacac

SEQ ID NO: 273149 - RNA, 20 nt, Human
uagagaggcacacagaacca

SEQ ID NO: 273150 - RNA, 23 nt, Human
ucacccccgccuuggccugcacu

SEQ ID NO: 273151 - RNA, 21 nt, Human
uccauaccuuuccagcucauc

SEQ ID NO: 273152 - RNA, 23 nt, Human
uccauaccuuuccagcucauccc

SEQ ID NO: 273153 - RNA, 19 nt, Human
uccccagccccuccccacc

SEQ ID NO: 273154 - RNA, 19 nt, Human
ucccccuucccuucccugg

SEQ ID NO: 273155 - RNA, 19 nt, Human
ugaaaagcaagccaucuug

SEQ ID NO: 273156 - RNA, 18 nt, Human
ugaagaagcaggacagac

SEQ ID NO: 273157 - RNA, 20 nt, Human
ugagccagaaaggagggccg

SEQ ID NO: 273158 - RNA, 24 nt, Human
ugcugcugccuucucuucucucca

SEQ ID NO: 273159 - RNA, 25 nt, Human
ugcuuccggggaccccgcuuggccg

SEQ ID NO: 273160 - RNA, 22 nt, Human
uggaggaaaagccacuccuucu

SEQ ID NO: 273161 - RNA, 22 nt, Human
uggccaaggggacaaggaccaa

SEQ ID NO: 273162 - RNA, 24 nt, Human
uggccaaggggacaaggaccaaga

SEQ ID NO: 273163 - RNA, 21 nt, Human
uggggcaggaaagcagugaag

SEQ ID NO: 273164 - RNA, 18 nt, Human
uggggugagggcgggggc

SEQ ID NO: 273165 - RNA, 20 nt, Human
uggggugagggcgggggccu

SEQ ID NO: 273166 - RNA, 18 nt, Human
ugucccggggacgcggag

SEQ ID NO: 273167 - RNA, 18 nt, Human
ugugaaaagcaagccauc

SEQ ID NO: 273168 - RNA, 22 nt, Human
uuccagcucaucccaccucugc

SEQ ID NO: 273169 - RNA, 24 nt, Human
uuggggcaggaaagcagugaaggg

SEQ ID NO: 273170 - RNA, 20 nt, Human
uuuuuauuuuuuagagaggc

SEQ ID NO: 273171 - RNA, 25 nt, Human
uuuuuuuuuuuuuuuuuuuauuuuu

SEQ ID NO: 273172 - RNA, 23 nt, Human
aaacucgcugcgcuccccuccgg

SEQ ID NO: 273173 - RNA, 18 nt, Human
aacucgcugcgcuccccu

SEQ ID NO: 273174 - RNA, 19 nt, Human
aacucgcugcgcuccccuc

SEQ ID NO: 273175 - RNA, 21 nt, Human
acgcuaugcaccucagugugg

SEQ ID NO: 273176 - RNA, 19 nt, Human
agggaggggcccaggagag

SEQ ID NO: 273177 - RNA, 20 nt, Human
agguagggaggggcccagga

SEQ ID NO: 273178 - RNA, 23 nt, Human
augauucuuuaaaacuguauaaa

SEQ ID NO: 273179 - RNA, 23 nt, Human
ccaaaacucgcugcgcuccccuc

SEQ ID NO: 273180 - RNA, 24 nt, Human
cgcugcgcuccccuccggcuccca

SEQ ID NO: 273181 - RNA, 18 nt, Human
cggacgcugagcugagcu

SEQ ID NO: 273182 - RNA, 21 nt, Human
gcacgaccacuggccaaaacu

SEQ ID NO: 273183 - RNA, 19 nt, Human
gcagggggagggagcgugu

SEQ ID NO: 273184 - RNA, 18 nt, Human
gcccaggagaguguagaa

SEQ ID NO: 273185 - RNA, 21 nt, Human
gggagggagcgugucggcagg

SEQ ID NO: 273186 - RNA, 20 nt, Human
gggcagggggagggagcgug

SEQ ID NO: 273187 - RNA, 19 nt, Human
uacagguugagguagggag

SEQ ID NO: 273188 - RNA, 21 nt, Human
uagggaggggcccaggagagu

SEQ ID NO: 273189 - RNA, 22 nt, Human
ugagguagggaggggcccagga

SEQ ID NO: 273190 - RNA, 22 nt, Human
uguauaaacuauaaauuaccau

SEQ ID NO: 273191 - RNA, 21 nt, Human
uuggacugcacgaccacuggc

SEQ ID NO: 273192 - RNA, 23 nt, Human
aaaacauacuugcaagccaccaa

SEQ ID NO: 273193 - RNA, 24 nt, Human
aaauacacccagacucugucccac

SEQ ID NO: 273194 - RNA, 23 nt, Human
aacaguccuuugcaggguugucu

SEQ ID NO: 273195 - RNA, 26 nt, Human
aagccaccaaacccccuccccaccug

SEQ ID NO: 273196 - RNA, 18 nt, Human
aagcucaggaaaaaacag

SEQ ID NO: 273197 - RNA, 19 nt, Human
aaggggaguaaaaaggggc

SEQ ID NO: 273198 - RNA, 24 nt, Human
aauuccuucuugccgcauucccac

SEQ ID NO: 273199 - RNA, 21 nt, Human
acaccugcuguggugggaggg

SEQ ID NO: 273200 - RNA, 21 nt, Human
accaggcccuaggcaagcauc

SEQ ID NO: 273201 - RNA, 19 nt, Human
acggggcaggggcaggguu

SEQ ID NO: 273202 - RNA, 24 nt, Human
agacagacgccagcuccagccucg

SEQ ID NO: 273203 - RNA, 19 nt, Human
agagaaaaaacucauggag

SEQ ID NO: 273204 - RNA, 19 nt, Human
agaggggcugagggagggu

SEQ ID NO: 273205 - RNA, 23 nt, Human
agcauuccuccacguguaagccc

SEQ ID NO: 273206 - RNA, 20 nt, Human
agcguggaaggcaaagcuga

SEQ ID NO: 273207 - RNA, 24 nt, Human
agcucaguucugccaggcgggccc

SEQ ID NO: 273208 - RNA, 20 nt, Human
agcuucgaaaaccccuccca

SEQ ID NO: 273209 - RNA, 21 nt, Human
aggagcucaguucugccaggc

SEQ ID NO: 273210 - RNA, 20 nt, Human
aggaggcaaggaggggaggu

SEQ ID NO: 273211 - RNA, 24 nt, Human
aggaggcaaggaggggaggugaua

SEQ ID NO: 273212 - RNA, 19 nt, Human
aggcaaaacagaacaggcc

SEQ ID NO: 273213 - RNA, 22 nt, Human
aggcaaaacagaacaggccagg

SEQ ID NO: 273214 - RNA, 19 nt, Human
aggcaagcaucccaucucc

SEQ ID NO: 273215 - RNA, 18 nt, Human
aggcaaggaggggaggug

SEQ ID NO: 273216 - RNA, 24 nt, Human
aggcaguggggaaggggugggggu

SEQ ID NO: 273217 - RNA, 21 nt, Human
agggaagcagcacccuuucca

SEQ ID NO: 273218 - RNA, 26 nt, Human
agggaggggguggaaaguccacugag

SEQ ID NO: 273219 - RNA, 22 nt, Human
aggggcugagggaggguugagg

SEQ ID NO: 273220 - RNA, 18 nt, Human
aggugcccaggugagggg

SEQ ID NO: 273221 - RNA, 19 nt, Human
aguaaaaaggggccccaga

SEQ ID NO: 273222 - RNA, 26 nt, Human
aguggggaaggggugggggucuggag

SEQ ID NO: 273223 - RNA, 20 nt, Human
auguggggcggggcgggggc

SEQ ID NO: 273224 - RNA, 20 nt, Human
caccaaacccccuccccacc

SEQ ID NO: 273225 - RNA, 21 nt, Human
cacgaaccccaaaccugacuc

SEQ ID NO: 273226 - RNA, 18 nt, Human
cacuucccccuaguacca

SEQ ID NO: 273227 - RNA, 22 nt, Human
cacuucccccuaguaccauccc

SEQ ID NO: 273228 - RNA, 22 nt, Human
cagcgcacagccugccuggggc

SEQ ID NO: 273229 - RNA, 23 nt, Human
cagcuccagccucggucggcagu

SEQ ID NO: 273230 - RNA, 21 nt, Human
caucgcaaccuucugggccca

SEQ ID NO: 273231 - RNA, 19 nt, Human
caucucagcucaaggggag

SEQ ID NO: 273232 - RNA, 20 nt, Human
cauggcccccagcugggggc

SEQ ID NO: 273233 - RNA, 19 nt, Human
cauggcccccuucuggcca

SEQ ID NO: 273234 - RNA, 23 nt, Human
ccaacuucaggcaaaacagaaca

SEQ ID NO: 273235 - RNA, 24 nt, Human
ccacacgggcugcacugacagggc

SEQ ID NO: 273236 - RNA, 18 nt, Human
ccaccaaacccccucccc

SEQ ID NO: 273237 - RNA, 22 nt, Human
ccacgaaccccaaaccugacuc

SEQ ID NO: 273238 - RNA, 21 nt, Human
ccaucucagcucaaggggagu

SEQ ID NO: 273239 - RNA, 22 nt, Human
cccaagagaaaaaacucaugga

SEQ ID NO: 273240 - RNA, 20 nt, Human
cccagacucugucccacucc

SEQ ID NO: 273241 - RNA, 27 nt, Human
ccccagaaccaaacacaacgauuauuu

SEQ ID NO: 273242 - RNA, 21 nt, Human
ccccagaaccaaacacaugcu

SEQ ID NO: 273243 - RNA, 24 nt, Human
cccccauauaugacaccugcugug

SEQ ID NO: 273244 - RNA, 28 nt, Human
ccccuaggcugauucuaggggccagugu

SEQ ID NO: 273245 - RNA, 18 nt, Human
ccccucaucacagguuga

SEQ ID NO: 273246 - RNA, 18 nt, Human
ccccucgcccucaggcaa

SEQ ID NO: 273247 - RNA, 23 nt, Human
ccccucgcccucaggcaaaccug

SEQ ID NO: 273248 - RNA, 26 nt, Human
ccgccucccgcggcagcgcucgacuu

SEQ ID NO: 273249 - RNA, 20 nt, Human
ccuaggcugauucuaggggc

SEQ ID NO: 273250 - RNA, 19 nt, Human
ccucauggcccccuucugg

SEQ ID NO: 273251 - RNA, 21 nt, Human
ccugccacccuccccucgccc

SEQ ID NO: 273252 - RNA, 18 nt, Human
cgcccucaggcaaaccug

SEQ ID NO: 273253 - RNA, 23 nt, Human
cucccagcucugacaagccuccg

SEQ ID NO: 273254 - RNA, 20 nt, Human
cuccccucaucacagguuga

SEQ ID NO: 273255 - RNA, 19 nt, Human
cuccuccugugugugugug

SEQ ID NO: 273256 - RNA, 25 nt, Human
cuccuccugugugugugugugcgug

SEQ ID NO: 273257 - RNA, 24 nt, Human
cucgauuccucccucugagucucu

SEQ ID NO: 273258 - RNA, 20 nt, Human
cugcacugacagggcugugg

SEQ ID NO: 273259 - RNA, 22 nt, Human
cugcgcugcgcuccagcgcccc

SEQ ID NO: 273260 - RNA, 21 nt, Human
cuuggucccugaccccuaggc

SEQ ID NO: 273261 - RNA, 21 nt, Human
gaaaaaacaguccuuugcagg

SEQ ID NO: 273262 - RNA, 19 nt, Human
gaacccugggcuggggagc

SEQ ID NO: 273263 - RNA, 21 nt, Human
gagcugggagaaauccccaca

SEQ ID NO: 273264 - RNA, 22 nt, Human
gaggaaaauaaauacacccaga

SEQ ID NO: 273265 - RNA, 22 nt, Human
gagggguccuuggucccugacc

SEQ ID NO: 273266 - RNA, 19 nt, Human
gcaggcaguggggaagggg

SEQ ID NO: 273267 - RNA, 26 nt, Human
gcaguggggaaggggugggggucugg

SEQ ID NO: 273268 - RNA, 21 nt, Human
gccaagcucaggaaaaaacag

SEQ ID NO: 273269 - RNA, 20 nt, Human
gccaccaaacccccucccca

SEQ ID NO: 273270 - RNA, 22 nt, Human
gccaccaaacccccuccccacc

SEQ ID NO: 273271 - RNA, 23 nt, Human
gccaccaaacccccuccccaccu

SEQ ID NO: 273272 - RNA, 22 nt, Human
gccccgggcaguauccagucuc

SEQ ID NO: 273273 - RNA, 22 nt, Human
gccgcauucccacacuggcccg

SEQ ID NO: 273274 - RNA, 21 nt, Human
gcggggcgggggcuccccggu

SEQ ID NO: 273275 - RNA, 20 nt, Human
gcucaaggggaguaaaaagg

SEQ ID NO: 273276 - RNA, 21 nt, Human
gcucaaggggaguaaaaaggg

SEQ ID NO: 273277 - RNA, 23 nt, Human
gcuccagcgcccccccugcccgc

SEQ ID NO: 273278 - RNA, 19 nt, Human
gcugugguuuuggggccug

SEQ ID NO: 273279 - RNA, 21 nt, Human
ggacaggaaguguggucagaa

SEQ ID NO: 273280 - RNA, 21 nt, Human
ggacucugagguccugcccag

SEQ ID NO: 273281 - RNA, 21 nt, Human
ggaggggguggaaaguccacu

SEQ ID NO: 273282 - RNA, 19 nt, Human
ggcaggggcaggguugggg

SEQ ID NO: 273283 - RNA, 19 nt, Human
ggcaguauccagucucagc

SEQ ID NO: 273284 - RNA, 25 nt, Human
ggcccagccaaccccauguuugcag

SEQ ID NO: 273285 - RNA, 20 nt, Human
ggcuccacagggguuggcug

SEQ ID NO: 273286 - RNA, 19 nt, Human
gggacaggcagagggaagc

SEQ ID NO: 273287 - RNA, 24 nt, Human
gggcaggcaguggggaaggggugg

SEQ ID NO: 273288 - RNA, 18 nt, Human
ggggaggugauaggaggg

SEQ ID NO: 273289 - RNA, 23 nt, Human
ggggcaggggcaggguuggggag

SEQ ID NO: 273290 - RNA, 22 nt, Human
ggggccaaaaggguuccaucuc

SEQ ID NO: 273291 - RNA, 21 nt, Human
gggggugcgggcuccacaggg

SEQ ID NO: 273292 - RNA, 23 nt, Human
gggggugggcugagcuucgaaaa

SEQ ID NO: 273293 - RNA, 19 nt, Human
ggggugcgggcuccacagg

SEQ ID NO: 273294 - RNA, 25 nt, Human
ggggugcgggcuccacagggguugg

SEQ ID NO: 273295 - RNA, 20 nt, Human
gggguggggggcaagagggg

SEQ ID NO: 273296 - RNA, 20 nt, Human
gguuggggaggcagcagggg

SEQ ID NO: 273297 - RNA, 23 nt, Human
guaaaaaggggccccagaaccaa

SEQ ID NO: 273298 - RNA, 20 nt, Human
gucccacuccccaggugccc

SEQ ID NO: 273299 - RNA, 19 nt, Human
gucuggagacagcguggaa

SEQ ID NO: 273300 - RNA, 31 nt, Human
gugugugugugugcgugugucuguguguugg

SEQ ID NO: 273301 - RNA, 21 nt, Human
guguugcaaggugaggggucc

SEQ ID NO: 273302 - RNA, 19 nt, Human
uaaaaaggggccccagaac

SEQ ID NO: 273303 - RNA, 20 nt, Human
uaaaaaggggccccagaacc

SEQ ID NO: 273304 - RNA, 23 nt, Human
uaaaacauacuugcaagccacca

SEQ ID NO: 273305 - RNA, 18 nt, Human
uaggaggguugcuggggg

SEQ ID NO: 273306 - RNA, 24 nt, Human
ucaucgcaaccuucuggggggccc

SEQ ID NO: 273307 - RNA, 21 nt, Human
uccacgaaccccaaaccugac

SEQ ID NO: 273308 - RNA, 22 nt, Human
uccacgaaccccaaaccugacu

SEQ ID NO: 273309 - RNA, 23 nt, Human
uccacugaggccucauggccccc

SEQ ID NO: 273310 - RNA, 19 nt, Human
ucccagaaggucaccugcc

SEQ ID NO: 273311 - RNA, 19 nt, Human
ucccagcucugacaagccu

SEQ ID NO: 273312 - RNA, 18 nt, Human
ucccugaccccuaggcug

SEQ ID NO: 273313 - RNA, 20 nt, Human
ucccugguguuggccccccc

SEQ ID NO: 273314 - RNA, 23 nt, Human
uccuagucccuuccacagggcug

SEQ ID NO: 273315 - RNA, 28 nt, Human
uccuuggucccugaccccuaggcugauu

SEQ ID NO: 273316 - RNA, 18 nt, Human
ucgcaaccuucugggccc

SEQ ID NO: 273317 - RNA, 21 nt, Human
ucgcaaccuucugggcccagc

SEQ ID NO: 273318 - RNA, 19 nt, Human
ucucuggggccuugucacu

SEQ ID NO: 273319 - RNA, 18 nt, Human
ucugacaagccuccgauc

SEQ ID NO: 273320 - RNA, 22 nt, Human
ucugccaggcgggcccccccca

SEQ ID NO: 273321 - RNA, 20 nt, Human
ucugggcccagccaacccca

SEQ ID NO: 273322 - RNA, 18 nt, Human
ucuggggccuugucacuu

SEQ ID NO: 273323 - RNA, 19 nt, Human
ucuguguguugcaagguga

SEQ ID NO: 273324 - RNA, 19 nt, Human
ugacaccugcugugguggg

SEQ ID NO: 273325 - RNA, 18 nt, Human
ugagagggacaggcagag

SEQ ID NO: 273326 - RNA, 20 nt, Human
ugagauggugacggggcagg

SEQ ID NO: 273327 - RNA, 18 nt, Human
ugaggggggugggcugag

SEQ ID NO: 273328 - RNA, 19 nt, Human
ugauaggaggguugcuggg

SEQ ID NO: 273329 - RNA, 19 nt, Human
ugcaagccaccaaaccccc

SEQ ID NO: 273330 - RNA, 22 nt, Human
ugcacugacagggcugugguuu

SEQ ID NO: 273331 - RNA, 21 nt, Human
ugccagccugcacuuggccuc

SEQ ID NO: 273332 - RNA, 19 nt, Human
ugccaggcgggcccccccc

SEQ ID NO: 273333 - RNA, 18 nt, Human
ugccugagagggacaggc

SEQ ID NO: 273334 - RNA, 19 nt, Human
ugcuccuagucccuuccac

SEQ ID NO: 273335 - RNA, 19 nt, Human
ugcuccuagucccuuccac

SEQ ID NO: 273336 - RNA, 19 nt, Human
ugcuguggugggaggggcu

SEQ ID NO: 273337 - RNA, 22 nt, Human
uggagccaugccacugauguca

SEQ ID NO: 273338 - RNA, 22 nt, Human
uggagggcagcagacuggagcc

SEQ ID NO: 273339 - RNA, 19 nt, Human
uggcagcugccccgggcag

SEQ ID NO: 273340 - RNA, 20 nt, Human
uggccugagauggugacggg

SEQ ID NO: 273341 - RNA, 20 nt, Human
uggcuucaagccauuuccca

SEQ ID NO: 273342 - RNA, 18 nt, Human
ugggagaaauccccacag

SEQ ID NO: 273343 - RNA, 21 nt, Human
ugggagaagggggcagguggc

SEQ ID NO: 273344 - RNA, 22 nt, Human
ugggagaagggggcagguggcc

SEQ ID NO: 273345 - RNA, 27 nt, Human
ugggaugccacccuuguuccccaaguu

SEQ ID NO: 273346 - RNA, 21 nt, Human
uggggaaggggugggggucug

SEQ ID NO: 273347 - RNA, 18 nt, Human
ugggggaacccugggcug

SEQ ID NO: 273348 - RNA, 22 nt, Human
ugggggugcgggcuccacaggg

SEQ ID NO: 273349 - RNA, 23 nt, Human
ugggguggggggcaagaggggcu

SEQ ID NO: 273350 - RNA, 24 nt, Human
ugggguggggggcaagaggggcug

SEQ ID NO: 273351 - RNA, 18 nt, Human
ugugggagaagggggcag

SEQ ID NO: 273352 - RNA, 20 nt, Human
uguggggcggggcgggggcu

SEQ ID NO: 273353 - RNA, 21 nt, Human
ugugugcgugugucugugugu

SEQ ID NO: 273354 - RNA, 21 nt, Human
ugugugugcgugugucugugu

SEQ ID NO: 273355 - RNA, 22 nt, Human
ugugugugugugcgugugucug

SEQ ID NO: 273356 - RNA, 20 nt, Human
ugugugugugugugcgugug

SEQ ID NO: 273357 - RNA, 20 nt, Human
ugugugugugugugcgugug

SEQ ID NO: 273358 - RNA, 21 nt, Human
ugugugugugugugcgugugu

SEQ ID NO: 273359 - RNA, 19 nt, Human
uucacaguguagaguccau

SEQ ID NO: 273360 - RNA, 21 nt, Human
uucacaguguagaguccaugg

SEQ ID NO: 273361 - RNA, 20 nt, Human
uucucuggcagcugccccgg

SEQ ID NO: 273362 - RNA, 19 nt, Human
uugaagacagacgccagcu

SEQ ID NO: 273363 - RNA, 22 nt, Human
uugcggacugauggggcugcgc

SEQ ID NO: 273364 - RNA, 20 nt, Human
uugcugggggucuggagcuc

SEQ ID NO: 273365 - RNA, 26 nt, Human
uuucccagaaggucaccugccacccu

SEQ ID NO: 273366 - RNA, 23 nt, Human
uuuccuccccucaucacagguug

SEQ ID NO: 273367 - RNA, 18 nt, Human
aaacagcgggaaucacag

SEQ ID NO: 273368 - RNA, 22 nt, Human
aaauagaagcuggcaacacaag

SEQ ID NO: 273369 - RNA, 22 nt, Human
aagacaaaggcaaggagagaga

SEQ ID NO: 273370 - RNA, 20 nt, Human
aaggcaaggagagagacuga

SEQ ID NO: 273371 - RNA, 24 nt, Human
acacaagacccacuugacacaugg

SEQ ID NO: 273372 - RNA, 19 nt, Human
accagcaggauucagagcc

SEQ ID NO: 273373 - RNA, 23 nt, Human
agccccucccuccagcuuucucc

SEQ ID NO: 273374 - RNA, 24 nt, Human
caaucuucaaauagaagcuggcaa

SEQ ID NO: 273375 - RNA, 23 nt, Human
cagcaaacggaucaguaaaggca

SEQ ID NO: 273376 - RNA, 21 nt, Human
cagcuuucuccccuuaccucc

SEQ ID NO: 273377 - RNA, 19 nt, Human
caggauucagagcccugau

SEQ ID NO: 273378 - RNA, 19 nt, Human
caggcaccaaaauggagga

SEQ ID NO: 273379 - RNA, 21 nt, Human
caugcaaaugggugaaacuac

SEQ ID NO: 273380 - RNA, 19 nt, Human
ccaauuaaagccccucccu

SEQ ID NO: 273381 - RNA, 19 nt, Human
ccagcuuucuccccuuacc

SEQ ID NO: 273382 - RNA, 24 nt, Human
cccccaaacccaccauuuuucguu

SEQ ID NO: 273383 - RNA, 22 nt, Human
ccccuuaccucccuucccccaa

SEQ ID NO: 273384 - RNA, 23 nt, Human
ccccuuaccucccuucccccaaa

SEQ ID NO: 273385 - RNA, 24 nt, Human
cccuccagcuuucuccccuuaccu

SEQ ID NO: 273386 - RNA, 23 nt, Human
ccuccaauuaaagccccucccuc

SEQ ID NO: 273387 - RNA, 20 nt, Human
ccucccuccagcuuucuccc

SEQ ID NO: 273388 - RNA, 22 nt, Human
cggggccuccaauuaaagcccc

SEQ ID NO: 273389 - RNA, 19 nt, Human
gaaauaacauaggguucac

SEQ ID NO: 273390 - RNA, 22 nt, Human
gagagagacugaaugcuuggug

SEQ ID NO: 273391 - RNA, 19 nt, Human
gcuggcaacacaagaccca

SEQ ID NO: 273392 - RNA, 23 nt, Human
ggaaauaacauaggguucacagc

SEQ ID NO: 273393 - RNA, 18 nt, Human
uaccucccuucccccaaa

SEQ ID NO: 273394 - RNA, 22 nt, Human
uaccucccuucccccaaaccca

SEQ ID NO: 273395 - RNA, 20 nt, Human
uagaaguuccgcgcguccuc

SEQ ID NO: 273396 - RNA, 19 nt, Human
uaggaaaaugcaaggaaaa

SEQ ID NO: 273397 - RNA, 26 nt, Human
uaucaaaggauuuuuuaauuucguuu

SEQ ID NO: 273398 - RNA, 18 nt, Human
ucccagagcuuugcaggc

SEQ ID NO: 273399 - RNA, 23 nt, Human
uccccuuaccucccuucccccaa

SEQ ID NO: 273400 - RNA, 26 nt, Human
ucuacggggccuccaauuaaagcccc

SEQ ID NO: 273401 - RNA, 19 nt, Human
ucuuucccagagcuuugca

SEQ ID NO: 273402 - RNA, 18 nt, Human
ugcaaggaaaaagaaaac

SEQ ID NO: 273403 - RNA, 21 nt, Human
ugcaaggaaaaagaaaacagc

SEQ ID NO: 273404 - RNA, 27 nt, Human
ugcaggcaccaaaauggaggaccgguc

SEQ ID NO: 273405 - RNA, 19 nt, Human
ugcuuggugcucugaccag

SEQ ID NO: 273406 - RNA, 25 nt, Human
uuaaagccccucccuccagcuuucu

SEQ ID NO: 273407 - RNA, 22 nt, Human
uucaaauagaagcuggcaacac

SEQ ID NO: 273408 - RNA, 27 nt, Human
uuugaacacaaguaagacaaaggcaag

SEQ ID NO: 273409 - RNA, 19 nt, Human
aaccccggaaggaacccag

SEQ ID NO: 273410 - RNA, 23 nt, Human
aaccccugccuccccagggccuc

SEQ ID NO: 273411 - RNA, 19 nt, Human
aagaaggagcaagaaaagg

SEQ ID NO: 273412 - RNA, 24 nt, Human
aagagagacccagcuagagcugcu

SEQ ID NO: 273413 - RNA, 18 nt, Human
aagaucugaggucuguau

SEQ ID NO: 273414 - RNA, 18 nt, Human
aagcaagagagacccagc

SEQ ID NO: 273415 - RNA, 23 nt, Human
aagcagaagugagauguggccca

SEQ ID NO: 273416 - RNA, 21 nt, Human
aagcagggaggaagcaagaga

SEQ ID NO: 273417 - RNA, 28 nt, Human
aagcagggaggaagcaagagagacccag

SEQ ID NO: 273418 - RNA, 24 nt, Human
aaggaaagagaaaaaaauguaaua

SEQ ID NO: 273419 - RNA, 20 nt, Human
aaggacauccaggagcccug

SEQ ID NO: 273420 - RNA, 22 nt, Human
aauaaaccccggaaggaaccca

SEQ ID NO: 273421 - RNA, 21 nt, Human
acacagcugaggucuguggug

SEQ ID NO: 273422 - RNA, 20 nt, Human
acaggaacaagauggacaga

SEQ ID NO: 273423 - RNA, 22 nt, Human
accaaguaagaucugaggucug

SEQ ID NO: 273424 - RNA, 23 nt, Human
acccagcuagagcugcugggagc

SEQ ID NO: 273425 - RNA, 18 nt, Human
accccagccuuccucccu

SEQ ID NO: 273426 - RNA, 19 nt, Human
acugagauuccccucacag

SEQ ID NO: 273427 - RNA, 19 nt, Human
agaccccuggggccugcuc

SEQ ID NO: 273428 - RNA, 23 nt, Human
agaggcaagggucacagggcagg

SEQ ID NO: 273429 - RNA, 21 nt, Human
agcaauaaaccccggaaggaa

SEQ ID NO: 273430 - RNA, 23 nt, Human
agcucuagaagucacugccacuu

SEQ ID NO: 273431 - RNA, 25 nt, Human
aggaaagagaaaaaaauguaauaag

SEQ ID NO: 273432 - RNA, 18 nt, Human
aggaacaagauggacaga

SEQ ID NO: 273433 - RNA, 19 nt, Human
aggaagcaagagagaccca

SEQ ID NO: 273434 - RNA, 18 nt, Human
aggagaagcuagaacaga

SEQ ID NO: 273435 - RNA, 19 nt, Human
agggagcacagaaaugcag

SEQ ID NO: 273436 - RNA, 23 nt, Human
agggggaggaagggggaggaagg

SEQ ID NO: 273437 - RNA, 25 nt, Human
agggggaggaagggggaggaagggu

SEQ ID NO: 273438 - RNA, 22 nt, Human
agggggaggaagggucgugggg

SEQ ID NO: 273439 - RNA, 23 nt, Human
agggguacacauugugggggugu

SEQ ID NO: 273440 - RNA, 24 nt, Human
agguuuuuguuuuuuuuuuucucu

SEQ ID NO: 273441 - RNA, 21 nt, Human
auaaaccccggaaggaaccca

SEQ ID NO: 273442 - RNA, 22 nt, Human
caaccccugccuccccagggcc

SEQ ID NO: 273443 - RNA, 22 nt, Human
caauaaaccccggaaggaaccc

SEQ ID NO: 273444 - RNA, 22 nt, Human
caccccucccucugggagcuug

SEQ ID NO: 273445 - RNA, 22 nt, Human
cagaaggaaucacacagagaua

SEQ ID NO: 273446 - RNA, 19 nt, Human
cagagugggcugagaugag

SEQ ID NO: 273447 - RNA, 20 nt, Human
cagauaggauacacagcuga

SEQ ID NO: 273448 - RNA, 24 nt, Human
cagauaggauacacagcugagguc

SEQ ID NO: 273449 - RNA, 19 nt, Human
cagcaauaaaccccggaag

SEQ ID NO: 273450 - RNA, 21 nt, Human
caggagaagcuagaacagaua

SEQ ID NO: 273451 - RNA, 23 nt, Human
caggcuggggagagaaaagaggc

SEQ ID NO: 273452 - RNA, 22 nt, Human
cagggccucaccccucugccaa

SEQ ID NO: 273453 - RNA, 24 nt, Human
cagggugccagucugaagccuaga

SEQ ID NO: 273454 - RNA, 19 nt, Human
cauccuccuugcguugggg

SEQ ID NO: 273455 - RNA, 19 nt, Human
ccaaccacacuagcaaaca

SEQ ID NO: 273456 - RNA, 24 nt, Human
ccagguacuggggccagccacacu

SEQ ID NO: 273457 - RNA, 22 nt, Human
cccaggagaauagcccucgagg

SEQ ID NO: 273458 - RNA, 19 nt, Human
ccccagggccucaccccuc

SEQ ID NO: 273459 - RNA, 18 nt, Human
ccccggaaggaacccagg

SEQ ID NO: 273460 - RNA, 22 nt, Human
ccccucugccaagcacugagag

SEQ ID NO: 273461 - RNA, 25 nt, Human
cccuccccaccccucccucugggag

SEQ ID NO: 273462 - RNA, 20 nt, Human
ccucugccaagcacugagag

SEQ ID NO: 273463 - RNA, 24 nt, Human
ccucugggugcucaaggcucaucc

SEQ ID NO: 273464 - RNA, 25 nt, Human
ccugcgcuauagugcgcaggugggg

SEQ ID NO: 273465 - RNA, 19 nt, Human
ccuggagcugggggaggag

SEQ ID NO: 273466 - RNA, 23 nt, Human
ccugugcccagggccuuugggac

SEQ ID NO: 273467 - RNA, 18 nt, Human
ccuucugcaaauacuccg

SEQ ID NO: 273468 - RNA, 23 nt, Human
cggaaggaacccaggagaauagu

SEQ ID NO: 273469 - RNA, 20 nt, Human
cucaccccucugccaagcac

SEQ ID NO: 273470 - RNA, 19 nt, Human
cuccccacucuaaccccag

SEQ ID NO: 273471 - RNA, 23 nt, Human
cucuaccccaaagugcacaacuc

SEQ ID NO: 273472 - RNA, 20 nt, Human
gaagaaggagcaagaaaagg

SEQ ID NO: 273473 - RNA, 21 nt, Human
gaaguagccaaauagcucaaa

SEQ ID NO: 273474 - RNA, 25 nt, Human
gaggagggagcacagaaaugcagug

SEQ ID NO: 273475 - RNA, 23 nt, Human
gaucaggauccccuccccacccc

SEQ ID NO: 273476 - RNA, 20 nt, Human
gcaaagggcaugcucacaca

SEQ ID NO: 273477 - RNA, 24 nt, Human
gcagcguugacagccccagucucc

SEQ ID NO: 273478 - RNA, 21 nt, Human
gcgguggaaaggggccccaga

SEQ ID NO: 273479 - RNA, 23 nt, Human
gcucacacacaccaggaguugaa

SEQ ID NO: 273480 - RNA, 22 nt, Human
gcucucugccugugcccagggc

SEQ ID NO: 273481 - RNA, 23 nt, Human
ggagaaaauugggacaguaggag

SEQ ID NO: 273482 - RNA, 18 nt, Human
ggagcuugaaagcuggug

SEQ ID NO: 273483 - RNA, 20 nt, Human
ggaggaagggggaggaaggg

SEQ ID NO: 273484 - RNA, 19 nt, Human
ggagggggaggaaggggga

SEQ ID NO: 273485 - RNA, 21 nt, Human
ggccucagcaauaaaccccgg

SEQ ID NO: 273486 - RNA, 21 nt, Human
ggcuggggagagaaaagaggc

SEQ ID NO: 273487 - RNA, 18 nt, Human
ggcuuaguaaagccagca

SEQ ID NO: 273488 - RNA, 23 nt, Human
gggaaguagccaaauagcucaaa

SEQ ID NO: 273489 - RNA, 20 nt, Human
gggaggaaccagugagggug

SEQ ID NO: 273490 - RNA, 21 nt, Human
gggaggaagggucgugggguc

SEQ ID NO: 273491 - RNA, 18 nt, Human
gggaugcaaccagaagga

SEQ ID NO: 273492 - RNA, 21 nt, Human
gggcaugcucacacacaccag

SEQ ID NO: 273493 - RNA, 24 nt, Human
gggcucucugccugugcccagggc

SEQ ID NO: 273494 - RNA, 22 nt, Human
ggggaggaagggggaggaaggg

SEQ ID NO: 273495 - RNA, 23 nt, Human
ggggaggaagggucguggggucu

SEQ ID NO: 273496 - RNA, 21 nt, Human
ggggccccagagaggcccggg

SEQ ID NO: 273497 - RNA, 18 nt, Human
ggggucucuucccuugcc

SEQ ID NO: 273498 - RNA, 19 nt, Human
gguggugggagggggagga

SEQ ID NO: 273499 - RNA, 21 nt, Human
gucacagggcaggcuggggag

SEQ ID NO: 273500 - RNA, 22 nt, Human
gucacagggcaggcuggggaga

SEQ ID NO: 273501 - RNA, 19 nt, Human
gucagagaaaggaagaggc

SEQ ID NO: 273502 - RNA, 23 nt, Human
gugagaucaggauccccucccca

SEQ ID NO: 273503 - RNA, 23 nt, Human
guggugggagggggaggaagggg

SEQ ID NO: 273504 - RNA, 22 nt, Human
guugacagccccagucuccucu

SEQ ID NO: 273505 - RNA, 21 nt, Human
uaaaccccggaaggaacccag

SEQ ID NO: 273506 - RNA, 22 nt, Human
uaaauaaauaaguaaauaaaua

SEQ ID NO: 273507 - RNA, 18 nt, Human
uaagcagggaggaagcaa

SEQ ID NO: 273508 - RNA, 19 nt, Human
uaaggcccuucauuccacu

SEQ ID NO: 273509 - RNA, 22 nt, Human
uaaguaaguccuagggccagga

SEQ ID NO: 273510 - RNA, 21 nt, Human
uaaguccuagggccaggagaa

SEQ ID NO: 273511 - RNA, 23 nt, Human
uaccaaguaagaucugaggucug

SEQ ID NO: 273512 - RNA, 21 nt, Human
uagaacagauaggauacacag

SEQ ID NO: 273513 - RNA, 21 nt, Human
uagaagaggcagcauucagug

SEQ ID NO: 273514 - RNA, 22 nt, Human
uagaaggacccugucaggggau

SEQ ID NO: 273515 - RNA, 22 nt, Human
uagagggcaacaauugggcauc

SEQ ID NO: 273516 - RNA, 22 nt, Human
uagagugucaggacagguggau

SEQ ID NO: 273517 - RNA, 19 nt, Human
uagugaccagcuuucuaga

SEQ ID NO: 273518 - RNA, 24 nt, Human
uauaaauaaauaaauaaauaagua

SEQ ID NO: 273519 - RNA, 21 nt, Human
uaucaggaagaggcaaggguc

SEQ ID NO: 273520 - RNA, 22 nt, Human
ucaaggaaagagaaaaaaaugu

SEQ ID NO: 273521 - RNA, 21 nt, Human
ucacacagagauaugugacac

SEQ ID NO: 273522 - RNA, 20 nt, Human
ucacagggcaggcuggggag

SEQ ID NO: 273523 - RNA, 20 nt, Human
ucagagaaaggaagaggccc

SEQ ID NO: 273524 - RNA, 25 nt, Human
ucaggacagguggaucuggggaaag

SEQ ID NO: 273525 - RNA, 22 nt, Human
ucaggauccccuccccaccccu

SEQ ID NO: 273526 - RNA, 20 nt, Human
ucagugagagagcuuggggg

SEQ ID NO: 273527 - RNA, 25 nt, Human
ucccagcuacugagauuccccucac

SEQ ID NO: 273528 - RNA, 23 nt, Human
uccccagggccucaccccucugc

SEQ ID NO: 273529 - RNA, 19 nt, Human
ucucuucccuugccaaagg

SEQ ID NO: 273530 - RNA, 20 nt, Human
ucugaagccuagaaggaccc

SEQ ID NO: 273531 - RNA, 18 nt, Human
ucuggggaaaggauaugg

SEQ ID NO: 273532 - RNA, 21 nt, Human
ucuguaugugcuaagccacag

SEQ ID NO: 273533 - RNA, 22 nt, Human
ugaaaauuuggacauaggggua

SEQ ID NO: 273534 - RNA, 24 nt, Human
ugaaagcuggugguggggggucgc

SEQ ID NO: 273535 - RNA, 22 nt, Human
ugaauaaauaaauaaauaaaua

SEQ ID NO: 273536 - RNA, 20 nt, Human
ugagagacugagaucuugga

SEQ ID NO: 273537 - RNA, 21 nt, Human
ugagagacugagaucuuggag

SEQ ID NO: 273538 - RNA, 20 nt, Human
ugagaucaggauccccuccc

SEQ ID NO: 273539 - RNA, 23 nt, Human
ugagaucaggauccccuccccac

SEQ ID NO: 273540 - RNA, 24 nt, Human
ugagaucaggauccccuccccacc

SEQ ID NO: 273541 - RNA, 23 nt, Human
ugagggugcugcacauuuucaga

SEQ ID NO: 273542 - RNA, 26 nt, Human
ugcauuuuuagagggcaacaauuggg

SEQ ID NO: 273543 - RNA, 18 nt, Human
ugccugggucagagaaag

SEQ ID NO: 273544 - RNA, 24 nt, Human
ugcugacccugcgcuauagugcgc

SEQ ID NO: 273545 - RNA, 19 nt, Human
uggaaaggggccccagaga

SEQ ID NO: 273546 - RNA, 20 nt, Human
uggaaguggugggcuuggcc

SEQ ID NO: 273547 - RNA, 18 nt, Human
uggagcugggggaggagc

SEQ ID NO: 273548 - RNA, 24 nt, Human
uggaguaggggcgcagaguugggg

SEQ ID NO: 273549 - RNA, 20 nt, Human
uggcaagcaaagggcaugcu

SEQ ID NO: 273550 - RNA, 18 nt, Human
uggcauggcuguacaggc

SEQ ID NO: 273551 - RNA, 19 nt, Human
uggcccacucguugccuga

SEQ ID NO: 273552 - RNA, 24 nt, Human
ugggaccagguaggauugucuagg

SEQ ID NO: 273553 - RNA, 22 nt, Human
ugggagccccucacucuacccc

SEQ ID NO: 273554 - RNA, 20 nt, Human
ugggagcuugaaagcuggug

SEQ ID NO: 273555 - RNA, 21 nt, Human
ugggagcuugaaagcuggugg

SEQ ID NO: 273556 - RNA, 19 nt, Human
ugggcuuggccagguacug

SEQ ID NO: 273557 - RNA, 22 nt, Human
ugggggcagacuccaagugugg

SEQ ID NO: 273558 - RNA, 19 nt, Human
ugguguggcaagcaaaggg

SEQ ID NO: 273559 - RNA, 23 nt, Human
ugugacacagaccccuggggccu

SEQ ID NO: 273560 - RNA, 19 nt, Human
uuccauggucagggugcca

SEQ ID NO: 273561 - RNA, 20 nt, Human
uuccauggucagggugccag

SEQ ID NO: 273562 - RNA, 21 nt, Human
uugacagccccagucuccucu

SEQ ID NO: 273563 - RNA, 18 nt, Human
uuggugcgagggaggagg

SEQ ID NO: 273564 - RNA, 23 nt, Human
uuucagagugggcugagaugagg

SEQ ID NO: 273565 - RNA, 21 nt, Human
aaacagaacaaaaacaacaca

SEQ ID NO: 273566 - RNA, 22 nt, Human
aaacagaacaaaaacaacacaa

SEQ ID NO: 273567 - RNA, 21 nt, Human
aacacaaaaauccagaaacca

SEQ ID NO: 273568 - RNA, 25 nt, Human
aacacaaaaauccagaaaccagauu

SEQ ID NO: 273569 - RNA, 24 nt, Human
aaggaugaaggauggcagagggaa

SEQ ID NO: 273570 - RNA, 22 nt, Human
aaguguccaccaaagaaagucc

SEQ ID NO: 273571 - RNA, 18 nt, Human
acaauagagaguagcuga

SEQ ID NO: 273572 - RNA, 26 nt, Human
acacaaccucaggggggagggaacgc

SEQ ID NO: 273573 - RNA, 19 nt, Human
acagaacacaugcuuccuc

SEQ ID NO: 273574 - RNA, 22 nt, Human
acagaacacaugcuuccucccc

SEQ ID NO: 273575 - RNA, 20 nt, Human
acaggggaagggcucucaga

SEQ ID NO: 273576 - RNA, 18 nt, Human
acuccaccaucucuguua

SEQ ID NO: 273577 - RNA, 19 nt, Human
agagggagggaggaaagga

SEQ ID NO: 273578 - RNA, 24 nt, Human
agcaacccuguaaaacagaacaaa

SEQ ID NO: 273579 - RNA, 22 nt, Human
aggauaaaaggaugaaggaugg

SEQ ID NO: 273580 - RNA, 18 nt, Human
agggagggaggaaaggaa

SEQ ID NO: 273581 - RNA, 19 nt, Human
aguagcugaaaauacuaca

SEQ ID NO: 273582 - RNA, 21 nt, Human
aucccccaagagcaaaugaaa

SEQ ID NO: 273583 - RNA, 20 nt, Human
augaaggauggcagagggag

SEQ ID NO: 273584 - RNA, 26 nt, Human
auggcagagggagggaggaaaggaag

SEQ ID NO: 273585 - RNA, 20 nt, Human
augguuguggguagggggag

SEQ ID NO: 273586 - RNA, 21 nt, Human
caacacaaaaauccagaaacc

SEQ ID NO: 273587 - RNA, 24 nt, Human
caacacaaaaauccagaaaccaga

SEQ ID NO: 273588 - RNA, 21 nt, Human
caaccucacagaacacaugcu

SEQ ID NO: 273589 - RNA, 24 nt, Human
caaguguccaccaaagaaaguccc

SEQ ID NO: 273590 - RNA, 18 nt, Human
cacaaaaauccagaaacc

SEQ ID NO: 273591 - RNA, 18 nt, Human
cacaacaggaagcuagug

SEQ ID NO: 273592 - RNA, 21 nt, Human
caccacaccccgcacacaaca

SEQ ID NO: 273593 - RNA, 22 nt, Human
cagaaaccagauuuaguacuac

SEQ ID NO: 273594 - RNA, 18 nt, Human
ccacaccccgcacacaac

SEQ ID NO: 273595 - RNA, 23 nt, Human
cccagcaccgcaaggacacggau

SEQ ID NO: 273596 - RNA, 22 nt, Human
ccccauggcucacccacccagg

SEQ ID NO: 273597 - RNA, 23 nt, Human
cccccaagagcaaaugaaacccc

SEQ ID NO: 273598 - RNA, 18 nt, Human
cccgcacacaacaggaag

SEQ ID NO: 273599 - RNA, 19 nt, Human
ccucaggggggaagcuggc

SEQ ID NO: 273600 - RNA, 20 nt, Human
ccugcagcacaucucuuugg

SEQ ID NO: 273601 - RNA, 23 nt, Human
ccuggcuccaucagcuuucuccu

SEQ ID NO: 273602 - RNA, 30 nt, Human
cuaacacagauaauaugauacacaaccucu

SEQ ID NO: 273603 - RNA, 23 nt, Human
cuccuggcucuuucugccuuuca

SEQ ID NO: 273604 - RNA, 24 nt, Human
cucucugagcuugucacucccgac

SEQ ID NO: 273605 - RNA, 21 nt, Human
cucuuugguaugcugcugccc

SEQ ID NO: 273606 - RNA, 19 nt, Human
cugcagcacaucucuuugg

SEQ ID NO: 273607 - RNA, 21 nt, Human
cuguuacagcuaccagccagg

SEQ ID NO: 273608 - RNA, 19 nt, Human
cuguuuaauuccaccacac

SEQ ID NO: 273609 - RNA, 22 nt, Human
cuuccuggaauccuucaugcca

SEQ ID NO: 273610 - RNA, 23 nt, Human
gacccacaugguggcaggacaca

SEQ ID NO: 273611 - RNA, 20 nt, Human
gacccaggucaacugcccca

SEQ ID NO: 273612 - RNA, 23 nt, Human
gaguagcugaaaauacuacaugc

SEQ ID NO: 273613 - RNA, 21 nt, Human
gccgaacaaccucacagaaca

SEQ ID NO: 273614 - RNA, 23 nt, Human
ggaagcuaguggcugaaagcugg

SEQ ID NO: 273615 - RNA, 19 nt, Human
ggaauccuucaugccagca

SEQ ID NO: 273616 - RNA, 18 nt, Human
gggaagggcucucagagc

SEQ ID NO: 273617 - RNA, 23 nt, Human
guacaucugacccacaugguggc

SEQ ID NO: 273618 - RNA, 20 nt, Human
uaaaaggaugaaggauggca

SEQ ID NO: 273619 - RNA, 18 nt, Human
uacaugcuaacacagaua

SEQ ID NO: 273620 - RNA, 18 nt, Human
uaccuaaucccccaagag

SEQ ID NO: 273621 - RNA, 22 nt, Human
uaccuaaucccccaagagcaaa

SEQ ID NO: 273622 - RNA, 19 nt, Human
uagagaguagcugaaaaua

SEQ ID NO: 273623 - RNA, 21 nt, Human
uagccgaacaaccucacagaa

SEQ ID NO: 273624 - RNA, 22 nt, Human
uagccgaacaaccucacagaac

SEQ ID NO: 273625 - RNA, 28 nt, Human
uauaacaauagagaguagcugaaaauac

SEQ ID NO: 273626 - RNA, 19 nt, Human
ucaacaucacauuaccaaa

SEQ ID NO: 273627 - RNA, 25 nt, Human
ucaacaucacauuaccaaaagcaaa

SEQ ID NO: 273628 - RNA, 18 nt, Human
ucagcuuucuccuggcuc

SEQ ID NO: 273629 - RNA, 24 nt, Human
uccaccaaagaaagucccauucac

SEQ ID NO: 273630 - RNA, 21 nt, Human
uccccaaaugauaccuaaucc

SEQ ID NO: 273631 - RNA, 20 nt, Human
ucccccaagagcaaaugaaa

SEQ ID NO: 273632 - RNA, 20 nt, Human
uccuuggacuccaccaucuc

SEQ ID NO: 273633 - RNA, 24 nt, Human
ucuccuggcucuuucugccuuuca

SEQ ID NO: 273634 - RNA, 24 nt, Human
ucucuugccggacaccgcgaggau

SEQ ID NO: 273635 - RNA, 22 nt, Human
ucucuuugguaugcugcugccc

SEQ ID NO: 273636 - RNA, 18 nt, Human
ucuuugguaugcugcugc

SEQ ID NO: 273637 - RNA, 23 nt, Human
ugaaugauucugugugccaggca

SEQ ID NO: 273638 - RNA, 20 nt, Human
ugauacacaaccucaggggg

SEQ ID NO: 273639 - RNA, 19 nt, Human
ugccaccacccugcuucug

SEQ ID NO: 273640 - RNA, 20 nt, Human
ugccuccggaguccugcagc

SEQ ID NO: 273641 - RNA, 23 nt, Human
uggaauccuucaugccagcauca

SEQ ID NO: 273642 - RNA, 24 nt, Human
uggcagagggagggaggaaauacg

SEQ ID NO: 273643 - RNA, 24 nt, Human
uggcaggacacaggggaagggcuc

SEQ ID NO: 273644 - RNA, 19 nt, Human
uggcagggagcacguggca

SEQ ID NO: 273645 - RNA, 21 nt, Human
uggcagggagcacguggcaga

SEQ ID NO: 273646 - RNA, 18 nt, Human
uguaaaacagaacaaaaa

SEQ ID NO: 273647 - RNA, 21 nt, Human
uguaaaacagaacaaaaacaa

SEQ ID NO: 273648 - RNA, 19 nt, Human
ugucuugguagucucuugc

SEQ ID NO: 273649 - RNA, 24 nt, Human
uuaauuccaccacaccccgcacac

SEQ ID NO: 273650 - RNA, 20 nt, Human
uuaccaaaagcaaacagcag

SEQ ID NO: 273651 - RNA, 23 nt, Human
uucaagacccaggucaacugccc

SEQ ID NO: 273652 - RNA, 20 nt, Human
aaaaagcagcgcaugaauau

SEQ ID NO: 273653 - RNA, 24 nt, Human
aaaaauccccuauucucaaauauc

SEQ ID NO: 273654 - RNA, 23 nt, Human
aaagguccuaggacacugggaug

SEQ ID NO: 273655 - RNA, 20 nt, Human
aagaagaaauucagagcacc

SEQ ID NO: 273656 - RNA, 23 nt, Human
aagaagaaauucagagcaccaaa

SEQ ID NO: 273657 - RNA, 25 nt, Human
acaaaugccaauauccuacugcuca

SEQ ID NO: 273658 - RNA, 20 nt, Human
acagcaacagagacuagaag

SEQ ID NO: 273659 - RNA, 21 nt, Human
accaaaugcccauagaucucu

SEQ ID NO: 273660 - RNA, 22 nt, Human
agaggaaggcggggauguaacc

SEQ ID NO: 273661 - RNA, 18 nt, Human
aggacuauaauaaagaag

SEQ ID NO: 273662 - RNA, 18 nt, Human
aggacuauaauaaagaag

SEQ ID NO: 273663 - RNA, 20 nt, Human
aggccggaggugagggacug

SEQ ID NO: 273664 - RNA, 21 nt, Human
aggcugggcugggucugggcc

SEQ ID NO: 273665 - RNA, 22 nt, Human
aggggugaggucaugguugagu

SEQ ID NO: 273666 - RNA, 21 nt, Human
aguggccacucagccagagga

SEQ ID NO: 273667 - RNA, 20 nt, Human
augcccauagaucucuagga

SEQ ID NO: 273668 - RNA, 23 nt, Human
cacugggaugggcauguaauccu

SEQ ID NO: 273669 - RNA, 28 nt, Human
cagcaacagagacuagaaccuuggaugc

SEQ ID NO: 273670 - RNA, 22 nt, Human
cagcaguggggcuaaagaccag

SEQ ID NO: 273671 - RNA, 22 nt, Human
caggcugggcugggucugggcc

SEQ ID NO: 273672 - RNA, 19 nt, Human
cauguaauccucacucagg

SEQ ID NO: 273673 - RNA, 19 nt, Human
ccagcaguggggcuaaaga

SEQ ID NO: 273674 - RNA, 24 nt, Human
cccgcggccaggacagaggaaggc

SEQ ID NO: 273675 - RNA, 18 nt, Human
cccuauucucaaauaucu

SEQ ID NO: 273676 - RNA, 24 nt, Human
ccuacaccuugaaauuccuaccau

SEQ ID NO: 273677 - RNA, 23 nt, Human
cuugaaauuccuaccauuggaca

SEQ ID NO: 273678 - RNA, 21 nt, Human
gcaaacccggucccgcggcca

SEQ ID NO: 273679 - RNA, 19 nt, Human
gcaguggggcuaaagacca

SEQ ID NO: 273680 - RNA, 23 nt, Human
gccagaggacacuuuucaaucug

SEQ ID NO: 273681 - RNA, 24 nt, Human
ggagggagaaaccaaggaggggug

SEQ ID NO: 273682 - RNA, 20 nt, Human
gggacaucaucuggugccag

SEQ ID NO: 273683 - RNA, 20 nt, Human
gggcucaggcugggcugggu

SEQ ID NO: 273684 - RNA, 19 nt, Human
ggguuggggguaggggugg

SEQ ID NO: 273685 - RNA, 21 nt, Human
gguagggguggaggguucugu

SEQ ID NO: 273686 - RNA, 22 nt, Human
gugggacaucaucuggugccag

SEQ ID NO: 273687 - RNA, 21 nt, Human
uaacucccaacuuuuccuagu

SEQ ID NO: 273688 - RNA, 26 nt, Human
uaagccuuuaacuaacaaaugccaau

SEQ ID NO: 273689 - RNA, 21 nt, Human
uaaggcacaucaaaaaaaucc

SEQ ID NO: 273690 - RNA, 24 nt, Human
uacuuggaaaggaaauaaggcacu

SEQ ID NO: 273691 - RNA, 19 nt, Human
uaggacuauaauaaagaag

SEQ ID NO: 273692 - RNA, 26 nt, Human
uauaauaaagaagaaauucagagcac

SEQ ID NO: 273693 - RNA, 24 nt, Human
ucaaaaaaauccccuauucucaaa

SEQ ID NO: 273694 - RNA, 22 nt, Human
ucaaagcgaggcugagcucaua

SEQ ID NO: 273695 - RNA, 24 nt, Human
ucagccagaggacacuuuucaauc

SEQ ID NO: 273696 - RNA, 18 nt, Human
ucauguggaggccggagg

SEQ ID NO: 273697 - RNA, 23 nt, Human
ucccgaacugcggucccgcaaac

SEQ ID NO: 273698 - RNA, 20 nt, Human
uccuuguguagggguggaga

SEQ ID NO: 273699 - RNA, 18 nt, Human
ugacaggacgguggguac

SEQ ID NO: 273700 - RNA, 20 nt, Human
ugaggucaugguugagugua

SEQ ID NO: 273701 - RNA, 24 nt, Human
uggaaaggaaauaaggcacucuug

SEQ ID NO: 273702 - RNA, 21 nt, Human
ugggaugggcauguaauccuc

SEQ ID NO: 273703 - RNA, 21 nt, Human
uggggcucaggcugggcuggg

SEQ ID NO: 273704 - RNA, 23 nt, Human
uggggcucaggcugggcuggguc

SEQ ID NO: 273705 - RNA, 19 nt, Human
uggggguagggguggaggg

SEQ ID NO: 273706 - RNA, 18 nt, Human
ugggucugggccuagugg

SEQ ID NO: 273707 - RNA, 20 nt, Human
uggugaggaacugaggagua

SEQ ID NO: 273708 - RNA, 24 nt, Human
uguaaccggacgccccuggcagcc

SEQ ID NO: 273709 - RNA, 24 nt, Human
uguggugggacaucaucuggugcc

SEQ ID NO: 273710 - RNA, 21 nt, Human
uguuggggcucaggcugggcu

SEQ ID NO: 273711 - RNA, 22 nt, Human
uguuguuggggcucaggcuggg

SEQ ID NO: 273712 - RNA, 24 nt, Human
uucccgaacugcggucccgcaaac

SEQ ID NO: 273713 - RNA, 20 nt, Human
uuggggguagggguggaggg

SEQ ID NO: 273714 - RNA, 19 nt, Human
uugguucugucauguggag

SEQ ID NO: 273715 - RNA, 24 nt, Human
aaacagauuuuauucaaucuuucc

SEQ ID NO: 273716 - RNA, 21 nt, Human
caaguuucagucccggaaacu

SEQ ID NO: 273717 - RNA, 23 nt, Human
caccagucccacugacucauguu

SEQ ID NO: 273718 - RNA, 20 nt, Human
ccggaaaugaugauacccuc

SEQ ID NO: 273719 - RNA, 23 nt, Human
ccggaaaugaugauacccucgaa

SEQ ID NO: 273720 - RNA, 21 nt, Human
gaagacacucucuggaagcac

SEQ ID NO: 273721 - RNA, 20 nt, Human
ggaaaugaugauacccucga

SEQ ID NO: 273722 - RNA, 19 nt, Human
uaaguuggcauccagcuga

SEQ ID NO: 273723 - RNA, 21 nt, Human
ucucuggaagcacaccagucc

SEQ ID NO: 273724 - RNA, 20 nt, Human
uggaagcacaccagucccac

SEQ ID NO: 273725 - RNA, 23 nt, Human
uuuccuagaguuuauaaugaaca

SEQ ID NO: 273726 - RNA, 22 nt, Human
agaggcuggggucaccaggggc

SEQ ID NO: 273727 - RNA, 22 nt, Human
aggcacuuuagaccagagccag

SEQ ID NO: 273728 - RNA, 22 nt, Human
agggagguggacaccucacagg

SEQ ID NO: 273729 - RNA, 23 nt, Human
aggucucugcagcuguccaguuc

SEQ ID NO: 273730 - RNA, 20 nt, Human
augugcagggagguggacac

SEQ ID NO: 273731 - RNA, 18 nt, Human
cagcuguccaguucugac

SEQ ID NO: 273732 - RNA, 24 nt, Human
cagggcaggcagcauccagggucc

SEQ ID NO: 273733 - RNA, 23 nt, Human
caguggccauccguagggccaaa

SEQ ID NO: 273734 - RNA, 19 nt, Human
caucuccuuguccuucugg

SEQ ID NO: 273735 - RNA, 22 nt, Human
ccagccugggcucuggcagucu

SEQ ID NO: 273736 - RNA, 28 nt, Human
ccauccguagggccaaaggcaguucugg

SEQ ID NO: 273737 - RNA, 19 nt, Human
ccccguggaggggguuggg

SEQ ID NO: 273738 - RNA, 24 nt, Human
ccucacagguauggcgacuccugg

SEQ ID NO: 273739 - RNA, 24 nt, Human
ccucugggcuauugugccagcccu

SEQ ID NO: 273740 - RNA, 22 nt, Human
ccucuugauggccaccaagccc

SEQ ID NO: 273741 - RNA, 21 nt, Human
ccuuguccuucuggaaugucc

SEQ ID NO: 273742 - RNA, 26 nt, Human
cugagacagaggcuggcccuggucac

SEQ ID NO: 273743 - RNA, 22 nt, Human
cuuguccuucuggaauguccug

SEQ ID NO: 273744 - RNA, 23 nt, Human
gaaguggacagaggcugggguca

SEQ ID NO: 273745 - RNA, 20 nt, Human
gaggggguugggcucugccc

SEQ ID NO: 273746 - RNA, 19 nt, Human
gcagcauccaggguccugg

SEQ ID NO: 273747 - RNA, 21 nt, Human
gccugggcucuggcagucugg

SEQ ID NO: 273748 - RNA, 21 nt, Human
gcugguccggggacauggugc

SEQ ID NO: 273749 - RNA, 21 nt, Human
ggaggcagggacgcuggugcu

SEQ ID NO: 273750 - RNA, 20 nt, Human
ggcacaggucucugcagcug

SEQ ID NO: 273751 - RNA, 20 nt, Human
ggcccacgggaggcagggac

SEQ ID NO: 273752 - RNA, 21 nt, Human
gggcacaggucucugcagcug

SEQ ID NO: 273753 - RNA, 19 nt, Human
gggguugggcucugcccgg

SEQ ID NO: 273754 - RNA, 18 nt, Human
ggugcagaugaggccagc

SEQ ID NO: 273755 - RNA, 23 nt, Human
ggugcugggacccccguggaggg

SEQ ID NO: 273756 - RNA, 22 nt, Human
gugcagggagguggacaccuca

SEQ ID NO: 273757 - RNA, 19 nt, Human
uagggccaaaggcaguucu

SEQ ID NO: 273758 - RNA, 18 nt, Human
uccuugagugggucgaga

SEQ ID NO: 273759 - RNA, 25 nt, Human
ucuccuuguccuucuggaauguccu

SEQ ID NO: 273760 - RNA, 20 nt, Human
ucucugggcacaggucucug

SEQ ID NO: 273761 - RNA, 22 nt, Human
ucucugggcacaggucucugca

SEQ ID NO: 273762 - RNA, 22 nt, Human
ugagacagaggcuggcccuggg

SEQ ID NO: 273763 - RNA, 18 nt, Human
ugagagacaagaguggcc

SEQ ID NO: 273764 - RNA, 24 nt, Human
ugcuguguguccuugagugggucg

SEQ ID NO: 273765 - RNA, 21 nt, Human
uggccaccaagcccaggcacu

SEQ ID NO: 273766 - RNA, 19 nt, Human
ugggagagggagagacauc

SEQ ID NO: 273767 - RNA, 24 nt, Human
ugggcacaggucucugcagcuguc

SEQ ID NO: 273768 - RNA, 23 nt, Human
uggggucaccaggggcaacccgg

SEQ ID NO: 273769 - RNA, 22 nt, Human
uggugcaggguauauacaaggu

SEQ ID NO: 273770 - RNA, 21 nt, Human
aagauauaugaaggccuaaaa

SEQ ID NO: 273771 - RNA, 24 nt, Human
aaggagguggagguguaggcagca

SEQ ID NO: 273772 - RNA, 19 nt, Human
accaagacagcaggaccag

SEQ ID NO: 273773 - RNA, 18 nt, Human
accagguggcccugcaga

SEQ ID NO: 273774 - RNA, 18 nt, Human
accguggugacgagguuu

SEQ ID NO: 273775 - RNA, 25 nt, Human
agaaggacuggaacuacacauuuaa

SEQ ID NO: 273776 - RNA, 23 nt, Human
agacagcaggaccaggagugcca

SEQ ID NO: 273777 - RNA, 20 nt, Human
agacaggauacagggugagg

SEQ ID NO: 273778 - RNA, 18 nt, Human
agagacucugcauagaag

SEQ ID NO: 273779 - RNA, 21 nt, Human
agagccaagacaaaaccaaga

SEQ ID NO: 273780 - RNA, 22 nt, Human
agaguccucccagagccaagac

SEQ ID NO: 273781 - RNA, 23 nt, Human
agcagggggagggaggcaggcag

SEQ ID NO: 273782 - RNA, 18 nt, Human
agccacuggacauacuac

SEQ ID NO: 273783 - RNA, 24 nt, Human
agcccugguggcggagcggggcgc

SEQ ID NO: 273784 - RNA, 20 nt, Human
aggaaggagggagggcagga

SEQ ID NO: 273785 - RNA, 22 nt, Human
aggagggacuuggcucagacug

SEQ ID NO: 273786 - RNA, 18 nt, Human
agggagaaggggaaggag

SEQ ID NO: 273787 - RNA, 24 nt, Human
agucacugaccccucccgccaccu

SEQ ID NO: 273788 - RNA, 27 nt, Human
caaaaccaagacagcaggaccaggagu

SEQ ID NO: 273789 - RNA, 18 nt, Human
caagacaaaaccaagaca

SEQ ID NO: 273790 - RNA, 26 nt, Human
caagacagcaggaccaggagugccac

SEQ ID NO: 273791 - RNA, 18 nt, Human
cacaaguuuuccuggaug

SEQ ID NO: 273792 - RNA, 18 nt, Human
caccccaccucuagccac

SEQ ID NO: 273793 - RNA, 18 nt, Human
cacccggucaggugggcg

SEQ ID NO: 273794 - RNA, 27 nt, Human
caccucuagccacuggacauacuaccu

SEQ ID NO: 273795 - RNA, 18 nt, Human
cagaguccucccagagcc

SEQ ID NO: 273796 - RNA, 25 nt, Human
cagcacaaguuuuccuggaugguag

SEQ ID NO: 273797 - RNA, 19 nt, Human
cagggaaaucagaaacuac

SEQ ID NO: 273798 - RNA, 21 nt, Human
caguuccaggcuuuucuccag

SEQ ID NO: 273799 - RNA, 19 nt, Human
ccaagacagcaggaccagg

SEQ ID NO: 273800 - RNA, 23 nt, Human
ccaauucuguauuccagauucca

SEQ ID NO: 273801 - RNA, 26 nt, Human
ccacacaccagguggcccugcagaau

SEQ ID NO: 273802 - RNA, 21 nt, Human
ccaggcuuuucuccagcagga

SEQ ID NO: 273803 - RNA, 19 nt, Human
ccaucagcaauuccagcac

SEQ ID NO: 273804 - RNA, 20 nt, Human
cccagagccaagacaaaacc

SEQ ID NO: 273805 - RNA, 25 nt, Human
cccagagccaagacaaaaccaagac

SEQ ID NO: 273806 - RNA, 22 nt, Human
ccccagagucacugaccccucc

SEQ ID NO: 273807 - RNA, 26 nt, Human
ccccagagucacugaccccucccgcc

SEQ ID NO: 273808 - RNA, 23 nt, Human
cccccaagcccugguggcggagc

SEQ ID NO: 273809 - RNA, 21 nt, Human
ccccucugggcagaaugucug

SEQ ID NO: 273810 - RNA, 24 nt, Human
ccccucugggcagaaugucugaac

SEQ ID NO: 273811 - RNA, 24 nt, Human
cccucccgccaccuccacacacca

SEQ ID NO: 273812 - RNA, 24 nt, Human
ccucccgccaccuccacacaccag

SEQ ID NO: 273813 - RNA, 19 nt, Human
ccuccggcucgcccgcccc

SEQ ID NO: 273814 - RNA, 20 nt, Human
ccuccucucuucccacccca

SEQ ID NO: 273815 - RNA, 24 nt, Human
ccuggccuccucucuucccacccc

SEQ ID NO: 273816 - RNA, 22 nt, Human
cucccaucccuuuccccagccc

SEQ ID NO: 273817 - RNA, 20 nt, Human
cucuucccaccccaccucua

SEQ ID NO: 273818 - RNA, 24 nt, Human
cugcagaaugaggguugggcugau

SEQ ID NO: 273819 - RNA, 19 nt, Human
cugccccuaaaucuuuccu

SEQ ID NO: 273820 - RNA, 22 nt, Human
cugcgcgcucugcgaccuuggc

SEQ ID NO: 273821 - RNA, 21 nt, Human
gaauucuaaguucuaccuucc

SEQ ID NO: 273822 - RNA, 19 nt, Human
gaccguggugacgagguuu

SEQ ID NO: 273823 - RNA, 25 nt, Human
gacuuggcucagacuguccagcaag

SEQ ID NO: 273824 - RNA, 20 nt, Human
gagccaagacaaaaccaaga

SEQ ID NO: 273825 - RNA, 26 nt, Human
gccaagccacucuccaucugucuagu

SEQ ID NO: 273826 - RNA, 19 nt, Human
gcccgcccccucacucacc

SEQ ID NO: 273827 - RNA, 20 nt, Human
gcgcgaauaaacuccacccc

SEQ ID NO: 273828 - RNA, 24 nt, Human
gcucccaucccuuuccccagcccc

SEQ ID NO: 273829 - RNA, 21 nt, Human
ggaaggagguggagguguagg

SEQ ID NO: 273830 - RNA, 22 nt, Human
ggaaggccccgcccccaagccc

SEQ ID NO: 273831 - RNA, 18 nt, Human
gggcaggagagacucugc

SEQ ID NO: 273832 - RNA, 19 nt, Human
gggggagggaggcaggcag

SEQ ID NO: 273833 - RNA, 23 nt, Human
gggggagggaggcaggcagggaa

SEQ ID NO: 273834 - RNA, 21 nt, Human
guggcccugcagaaugagggu

SEQ ID NO: 273835 - RNA, 19 nt, Human
guuccaggcuuuucuccag

SEQ ID NO: 273836 - RNA, 21 nt, Human
uaaacuccaccccuccggcuc

SEQ ID NO: 273837 - RNA, 21 nt, Human
uacuucuagcagggggaggga

SEQ ID NO: 273838 - RNA, 18 nt, Human
uagcagggggagggaggc

SEQ ID NO: 273839 - RNA, 21 nt, Human
uagccacuggacauacuaccu

SEQ ID NO: 273840 - RNA, 24 nt, Human
uaggaaccucucuucaaguggucu

SEQ ID NO: 273841 - RNA, 21 nt, Human
ucaaguggucuuuugucaucu

SEQ ID NO: 273842 - RNA, 24 nt, Human
ucacugaccccucccgccaccucc

SEQ ID NO: 273843 - RNA, 20 nt, Human
uccacacaccagguggcccu

SEQ ID NO: 273844 - RNA, 19 nt, Human
uccaucagcaauuccagca

SEQ ID NO: 273845 - RNA, 22 nt, Human
uccaucagcaauuccagcacaa

SEQ ID NO: 273846 - RNA, 25 nt, Human
ucccaccccaccucuagccacugga

SEQ ID NO: 273847 - RNA, 25 nt, Human
uccccagccccucugggcagaaugu

SEQ ID NO: 273848 - RNA, 21 nt, Human
uccuggcucccaucccuuucc

SEQ ID NO: 273849 - RNA, 19 nt, Human
ucgcccgcccccucacuca

SEQ ID NO: 273850 - RNA, 24 nt, Human
ucuccagcaggagggacuuggcuc

SEQ ID NO: 273851 - RNA, 18 nt, Human
ucugaacugagcacugcc

SEQ ID NO: 273852 - RNA, 25 nt, Human
ucuuuccuggcucccaucccuuucc

SEQ ID NO: 273853 - RNA, 19 nt, Human
ugaauucuaaguucuaccu

SEQ ID NO: 273854 - RNA, 19 nt, Human
ugaccccucccgccaccuc

SEQ ID NO: 273855 - RNA, 19 nt, Human
ugaccccucccgccaccuc

SEQ ID NO: 273856 - RNA, 19 nt, Human
ugagggagaaggggaagga

SEQ ID NO: 273857 - RNA, 23 nt, Human
ugagggagaaggggaaggaggug

SEQ ID NO: 273858 - RNA, 23 nt, Human
ugcagaaugaggguugggcugau

SEQ ID NO: 273859 - RNA, 18 nt, Human
ugccacugucugucgggg

SEQ ID NO: 273860 - RNA, 23 nt, Human
ugccccuaaaucuuuccuggcuc

SEQ ID NO: 273861 - RNA, 22 nt, Human
uggcaagcccuuugcccacucu

SEQ ID NO: 273862 - RNA, 21 nt, Human
uggcccaguggaaaccaggga

SEQ ID NO: 273863 - RNA, 22 nt, Human
uggccuggccuccucucuuccc

SEQ ID NO: 273864 - RNA, 20 nt, Human
uggcucagacuguccagcaa

SEQ ID NO: 273865 - RNA, 19 nt, Human
uggcucccaucccuuuccc

SEQ ID NO: 273866 - RNA, 19 nt, Human
ugucuccugccccuaaauc

SEQ ID NO: 273867 - RNA, 23 nt, Human
ugucugaaccuccuccugaccgu

SEQ ID NO: 273868 - RNA, 24 nt, Human
uguuuuuuuguuuuggcaguucca

SEQ ID NO: 273869 - RNA, 22 nt, Human
uuacgugucugucuccugcccc

SEQ ID NO: 273870 - RNA, 23 nt, Human
uuagaagauauaugaaggccuaa

SEQ ID NO: 273871 - RNA, 18 nt, Human
uuccuggcucccaucccu

SEQ ID NO: 273872 - RNA, 21 nt, Human
uuguuuccaucagcaauucca

SEQ ID NO: 273873 - RNA, 23 nt, Human
uuguuuuuuuguuuuggcaguuc

SEQ ID NO: 273874 - RNA, 20 nt, Human
uuuuuuguuuuggcaguucc

SEQ ID NO: 273875 - RNA, 31 nt, Human
aaaaaaaccacacacacacacacacacacag

SEQ ID NO: 273876 - RNA, 18 nt, Human
aaaaaaccacacacacac

SEQ ID NO: 273877 - RNA, 31 nt, Human
aaaaaccacacacacacacacacacacacag

SEQ ID NO: 273878 - RNA, 21 nt, Human
aaaacaggaggacgggagaga

SEQ ID NO: 273879 - RNA, 19 nt, Human
aaaagaaaugaggcuucua

SEQ ID NO: 273880 - RNA, 20 nt, Human
aaaaugccccucccacuuuc

SEQ ID NO: 273881 - RNA, 19 nt, Human
aaaccccgcgagagucggg

SEQ ID NO: 273882 - RNA, 24 nt, Human
aaagaaaugaggcuucuagggccu

SEQ ID NO: 273883 - RNA, 20 nt, Human
aaccacccaaagccaugaaa

SEQ ID NO: 273884 - RNA, 21 nt, Human
aaccauuuuuggugccaguga

SEQ ID NO: 273885 - RNA, 19 nt, Human
aacgccgucuccuccccca

SEQ ID NO: 273886 - RNA, 19 nt, Human
aacugaauuccgccaacaa

SEQ ID NO: 273887 - RNA, 20 nt, Human
aagccccccaaauagucaaa

SEQ ID NO: 273888 - RNA, 18 nt, Human
acaagccugaaguaauac

SEQ ID NO: 273889 - RNA, 23 nt, Human
acacacacacacacacacacaca

SEQ ID NO: 273890 - RNA, 23 nt, Human
acacacacacacacacacacaca

SEQ ID NO: 273891 - RNA, 23 nt, Human
acacacacacacacacacacaca

SEQ ID NO: 273892 - RNA, 23 nt, Human
acacacacacacacacacacaca

SEQ ID NO: 273893 - RNA, 23 nt, Human
accaaaaauuaccaagcaccaaa

SEQ ID NO: 273894 - RNA, 20 nt, Human
accacacacacacacacaca

SEQ ID NO: 273895 - RNA, 22 nt, Human
accacacacacacacacacaca

SEQ ID NO: 273896 - RNA, 24 nt, Human
accacacacacacacacacacaca

SEQ ID NO: 273897 - RNA, 18 nt, Human
accccagagccacugccu

SEQ ID NO: 273898 - RNA, 20 nt, Human
acccuguuuucauaccuucu

SEQ ID NO: 273899 - RNA, 23 nt, Human
acccuguuuucauaccuucuuug

SEQ ID NO: 273900 - RNA, 22 nt, Human
agaaagcacugccacugcagcc

SEQ ID NO: 273901 - RNA, 20 nt, Human
agagugaaauagacuuaaaa

SEQ ID NO: 273902 - RNA, 18 nt, Human
agcaaagaacugaauucc

SEQ ID NO: 273903 - RNA, 22 nt, Human
agcaaagaacugaauuccgcca

SEQ ID NO: 273904 - RNA, 22 nt, Human
agccacugccuuauacuccugg

SEQ ID NO: 273905 - RNA, 19 nt, Human
agcuaaucuccagaacccg

SEQ ID NO: 273906 - RNA, 20 nt, Human
aggguggugcugagcucuac

SEQ ID NO: 273907 - RNA, 19 nt, Human
agguggcggcaagagcugg

SEQ ID NO: 273908 - RNA, 22 nt, Human
aguaguaauauucuccuuugca

SEQ ID NO: 273909 - RNA, 23 nt, Human
aguggaaauaggaaaaacaugcu

SEQ ID NO: 273910 - RNA, 22 nt, Human
auaccuucuuugggugauaguu

SEQ ID NO: 273911 - RNA, 18 nt, Human
auagagugaaauagacuu

SEQ ID NO: 273912 - RNA, 22 nt, Human
auagagugaaauagacuuaaaa

SEQ ID NO: 273913 - RNA, 19 nt, Human
aucccucuuccccugucuc

SEQ ID NO: 273914 - RNA, 20 nt, Human
auguuacuuuugaaguccau

SEQ ID NO: 273915 - RNA, 23 nt, Human
caaccuuuggaaaccuuuaauau

SEQ ID NO: 273916 - RNA, 21 nt, Human
caagcaccaaagcaugaaggg

SEQ ID NO: 273917 - RNA, 22 nt, Human
cacaagccugaaguaauacaga

SEQ ID NO: 273918 - RNA, 22 nt, Human
cacaaguugaacgcugcagcag

SEQ ID NO: 273919 - RNA, 20 nt, Human
cacacacacacacacacaca

SEQ ID NO: 273920 - RNA, 20 nt, Human
cacacacacacacacacaca

SEQ ID NO: 273921 - RNA, 20 nt, Human
cacacacacacacacacaca

SEQ ID NO: 273922 - RNA, 20 nt, Human
cacacacacacacacacaca

SEQ ID NO: 273923 - RNA, 20 nt, Human
cacacacacacacacacaca

SEQ ID NO: 273924 - RNA, 20 nt, Human
cacacacacacacacacaca

SEQ ID NO: 273925 - RNA, 20 nt, Human
cacacacacacacacacaca

SEQ ID NO: 273926 - RNA, 22 nt, Human
cacacacacacacacacacaca

SEQ ID NO: 273927 - RNA, 22 nt, Human
cacacacacacacacacacaca

SEQ ID NO: 273928 - RNA, 26 nt, Human
cacacacacacacacacacacacaca

SEQ ID NO: 273929 - RNA, 26 nt, Human
cacacacacacacacacacacacaca

SEQ ID NO: 273930 - RNA, 26 nt, Human
cacacacacacacacacacacacaca

SEQ ID NO: 273931 - RNA, 26 nt, Human
cacacacacacacacacacacacaca

SEQ ID NO: 273932 - RNA, 26 nt, Human
cacacacacacacacacacacacaca

SEQ ID NO: 273933 - RNA, 27 nt, Human
cacacacacacacacacacacacacua

SEQ ID NO: 273934 - RNA, 27 nt, Human
cacacacacacacacacacuaguuuuu

SEQ ID NO: 273935 - RNA, 24 nt, Human
caccaaaaauuaccaagcaccaaa

SEQ ID NO: 273936 - RNA, 23 nt, Human
cagaauaaaccauuuuuggugcc

SEQ ID NO: 273937 - RNA, 21 nt, Human
cagaauuugaaaaugccccuc

SEQ ID NO: 273938 - RNA, 20 nt, Human
cagcaauagaaaacuaauag

SEQ ID NO: 273939 - RNA, 25 nt, Human
cagccuuuaagacccugagcagaga

SEQ ID NO: 273940 - RNA, 21 nt, Human
caggccgggccucccaaugcc

SEQ ID NO: 273941 - RNA, 22 nt, Human
caguggaaauaggaaaaacaug

SEQ ID NO: 273942 - RNA, 23 nt, Human
ccaaaaauuaccaagcaccaaag

SEQ ID NO: 273943 - RNA, 21 nt, Human
ccacacacacacacacacaca

SEQ ID NO: 273944 - RNA, 23 nt, Human
ccaguaacaauuaagaagugucu

SEQ ID NO: 273945 - RNA, 25 nt, Human
ccccagagccacugccuuauacucc

SEQ ID NO: 273946 - RNA, 21 nt, Human
ccccgcgagagucgggacaaa

SEQ ID NO: 273947 - RNA, 21 nt, Human
cccucccuccaccaaggguug

SEQ ID NO: 273948 - RNA, 23 nt, Human
ccugugguaggguggugcugagc

SEQ ID NO: 273949 - RNA, 22 nt, Human
cgagagucgggacaaauaccgc

SEQ ID NO: 273950 - RNA, 21 nt, Human
cggaacgccgucuccuccccc

SEQ ID NO: 273951 - RNA, 24 nt, Human
cuccaccaaggguugucagcuccc

SEQ ID NO: 273952 - RNA, 18 nt, Human
cucccuccaacugagggc

SEQ ID NO: 273953 - RNA, 19 nt, Human
cugcagccaaaccccaacg

SEQ ID NO: 273954 - RNA, 22 nt, Human
cuguccuuuuccauggagaaaa

SEQ ID NO: 273955 - RNA, 23 nt, Human
cugucucuugcaccugggucagg

SEQ ID NO: 273956 - RNA, 23 nt, Human
cugugggcuugagcuaaucauau

SEQ ID NO: 273957 - RNA, 19 nt, Human
gaacgccgucuccuccccc

SEQ ID NO: 273958 - RNA, 20 nt, Human
gaacugaauuccgccaacaa

SEQ ID NO: 273959 - RNA, 19 nt, Human
gaagugucuauuuuugaaa

SEQ ID NO: 273960 - RNA, 19 nt, Human
gaauccagccacacugugc

SEQ ID NO: 273961 - RNA, 18 nt, Human
gaccaccuuacccuguuu

SEQ ID NO: 273962 - RNA, 19 nt, Human
gauaugaagcaugagaaag

SEQ ID NO: 273963 - RNA, 29 nt, Human
gcaccaaaaauuaccaagcaccaaagcaa

SEQ ID NO: 273964 - RNA, 18 nt, Human
gcagauucuuccccagag

SEQ ID NO: 273965 - RNA, 20 nt, Human
gccugugguaggguggugcu

SEQ ID NO: 273966 - RNA, 21 nt, Human
gccuuuaacaguucuccuuca

SEQ ID NO: 273967 - RNA, 20 nt, Human
gcgagagucgggacaaauac

SEQ ID NO: 273968 - RNA, 19 nt, Human
gcuggccuccagccugagc

SEQ ID NO: 273969 - RNA, 20 nt, Human
ggaaaaacaggcaaaaagaa

SEQ ID NO: 273970 - RNA, 21 nt, Human
ggaaggcugguuugaagcugg

SEQ ID NO: 273971 - RNA, 19 nt, Human
ggccgggccucccaaugcc

SEQ ID NO: 273972 - RNA, 23 nt, Human
gggcacccucccuccaccaaggg

SEQ ID NO: 273973 - RNA, 19 nt, Human
gguccaauuauuuuuggag

SEQ ID NO: 273974 - RNA, 19 nt, Human
ggugcugagcucuacauca

SEQ ID NO: 273975 - RNA, 26 nt, Human
uaaaaaauaacuucaaaauguagaac

SEQ ID NO: 273976 - RNA, 23 nt, Human
uaaaaagaacauaaaauaguaag

SEQ ID NO: 273977 - RNA, 21 nt, Human
uaaaauaguaaguccucagag

SEQ ID NO: 273978 - RNA, 23 nt, Human
uaaaauaguaaguccucagagac

SEQ ID NO: 273979 - RNA, 18 nt, Human
uaacggaacgccgucucc

SEQ ID NO: 273980 - RNA, 23 nt, Human
uaacuggauuaaacuggcacuaa

SEQ ID NO: 273981 - RNA, 19 nt, Human
uaauguacuuucugucuau

SEQ ID NO: 273982 - RNA, 21 nt, Human
uacauuucuuaagcuaaguug

SEQ ID NO: 273983 - RNA, 22 nt, Human
uagaaaacuaauacacugccca

SEQ ID NO: 273984 - RNA, 21 nt, Human
uagagugaaauagacuuaaaa

SEQ ID NO: 273985 - RNA, 22 nt, Human
uagagugaaauagacuuaaaau

SEQ ID NO: 273986 - RNA, 21 nt, Human
uaggguggugcugagcucuac

SEQ ID NO: 273987 - RNA, 21 nt, Human
uagucaaagugaagacagcuc

SEQ ID NO: 273988 - RNA, 23 nt, Human
uauaaauauuuggccgccuuuaa

SEQ ID NO: 273989 - RNA, 22 nt, Human
uauaucugugggcuugagcuaa

SEQ ID NO: 273990 - RNA, 19 nt, Human
uaugaauuucuucugcaua

SEQ ID NO: 273991 - RNA, 20 nt, Human
uaugaugaccacuuuccuaa

SEQ ID NO: 273992 - RNA, 20 nt, Human
uaugccccuaaaacaggagg

SEQ ID NO: 273993 - RNA, 19 nt, Human
uauguacaagacucuaugu

SEQ ID NO: 273994 - RNA, 20 nt, Human
ucaaagaaguuaggaaugaa

SEQ ID NO: 273995 - RNA, 19 nt, Human
ucacacagcaauagaaaac

SEQ ID NO: 273996 - RNA, 22 nt, Human
uccaugaaggaauguuguccug

SEQ ID NO: 273997 - RNA, 22 nt, Human
ucccaaugccacgcuaaacccc

SEQ ID NO: 273998 - RNA, 23 nt, Human
ucccaaugccacgcuaaaccccg

SEQ ID NO: 273999 - RNA, 19 nt, Human
ucccccaggccgggccucc

SEQ ID NO: 274000 - RNA, 23 nt, Human
uccccgugagcagaagagaaagc

SEQ ID NO: 274001 - RNA, 18 nt, Human
uccccugucucuugcacc

SEQ ID NO: 274002 - RNA, 21 nt, Human
uccccugucucuugcaccugg

SEQ ID NO: 274003 - RNA, 25 nt, Human
uccccugucucuugcaccuggguca

SEQ ID NO: 274004 - RNA, 18 nt, Human
ucccucuuccccugucuc

SEQ ID NO: 274005 - RNA, 21 nt, Human
ucuagggccuaucuuuucugg

SEQ ID NO: 274006 - RNA, 21 nt, Human
ucucuuacugccaauccugcc

SEQ ID NO: 274007 - RNA, 26 nt, Human
ucugaaugcauuuuuuuccugcugaa

SEQ ID NO: 274008 - RNA, 23 nt, Human
ugaaaauauguaauuuaugcuau

SEQ ID NO: 274009 - RNA, 24 nt, Human
ugaauuccgccaacaaccugaaug

SEQ ID NO: 274010 - RNA, 20 nt, Human
ugagaugagacaguacuccc

SEQ ID NO: 274011 - RNA, 21 nt, Human
ugagaugggcaguuauugccc

SEQ ID NO: 274012 - RNA, 21 nt, Human
ugagcuaaucauaugccccua

SEQ ID NO: 274013 - RNA, 19 nt, Human
ugagucagcugcaggucac

SEQ ID NO: 274014 - RNA, 19 nt, Human
ugccacgcuaaaccccgcg

SEQ ID NO: 274015 - RNA, 18 nt, Human
ugccacugcagccaaacc

SEQ ID NO: 274016 - RNA, 22 nt, Human
ugccacugcagccaaaccccaa

SEQ ID NO: 274017 - RNA, 23 nt, Human
ugccacugcagccaaaccccaac

SEQ ID NO: 274018 - RNA, 22 nt, Human
ugccagauauuuacaaauaaga

SEQ ID NO: 274019 - RNA, 18 nt, Human
uggaggaaccacccaaag

SEQ ID NO: 274020 - RNA, 19 nt, Human
uggaggaaccacccaaagc

SEQ ID NO: 274021 - RNA, 20 nt, Human
uggccuaaguccuguuuucu

SEQ ID NO: 274022 - RNA, 19 nt, Human
uggugccagugauuuuguc

SEQ ID NO: 274023 - RNA, 19 nt, Human
ugucacacagcaauagaaa

SEQ ID NO: 274024 - RNA, 22 nt, Human
uguccugccaacccuuauuuca

SEQ ID NO: 274025 - RNA, 18 nt, Human
ugugccagacucaugagc

SEQ ID NO: 274026 - RNA, 28 nt, Human
uucaaaguaaagauuaaaaaaaaaaacc

SEQ ID NO: 274027 - RNA, 21 nt, Human
uucaagggcacccucccucca

SEQ ID NO: 274028 - RNA, 24 nt, Human
uuggcaguuucugcuuggguucug

SEQ ID NO: 274029 - RNA, 25 nt, Human
uuugaaaaugccccucccacuuuca

SEQ ID NO: 274030 - RNA, 21 nt, Human
uuugaaguccauucuucacuc

SEQ ID NO: 274031 - RNA, 19 nt, Human
uuuguauucaguauccagu

SEQ ID NO: 274032 - RNA, 19 nt, Human
uuuuaaauucuucucccca

SEQ ID NO: 274033 - RNA, 18 nt, Human
aaacauaaauacgggugg

SEQ ID NO: 274034 - RNA, 22 nt, Human
aaacauaaauacgggugggugc

SEQ ID NO: 274035 - RNA, 23 nt, Human
aaucgccgccacaaacucucccg

SEQ ID NO: 274036 - RNA, 20 nt, Human
agagucagggagcuguugag

SEQ ID NO: 274037 - RNA, 20 nt, Human
agggagcuguugagguggga

SEQ ID NO: 274038 - RNA, 23 nt, Human
aggggacucagggucauguuggg

SEQ ID NO: 274039 - RNA, 25 nt, Human
caagaacaaacgcgcgugggacaga

SEQ ID NO: 274040 - RNA, 21 nt, Human
cagcagguagcgcugagcaca

SEQ ID NO: 274041 - RNA, 22 nt, Human
cagcgccaggugggcggcagaa

SEQ ID NO: 274042 - RNA, 19 nt, Human
caggagaggcgggaccagg

SEQ ID NO: 274043 - RNA, 22 nt, Human
ccaggggacucagggucauguu

SEQ ID NO: 274044 - RNA, 23 nt, Human
cccacggccccuggcagcuuccc

SEQ ID NO: 274045 - RNA, 21 nt, Human
ccccacgagagucagggagcu

SEQ ID NO: 274046 - RNA, 19 nt, Human
cccgcgcacccgucggcca

SEQ ID NO: 274047 - RNA, 19 nt, Human
cccgggcgcccggcccugg

SEQ ID NO: 274048 - RNA, 20 nt, Human
cccugcgugcccgagcucag

SEQ ID NO: 274049 - RNA, 20 nt, Human
ccgccgcccgcccgcgcacc

SEQ ID NO: 274050 - RNA, 22 nt, Human
ccgccgcccgcccgcgcacccg

SEQ ID NO: 274051 - RNA, 20 nt, Human
cggccccuggcagcuucccu

SEQ ID NO: 274052 - RNA, 21 nt, Human
cggccccuggcagcuucccug

SEQ ID NO: 274053 - RNA, 24 nt, Human
cgugcgcaagaacaaacgcgcgug

SEQ ID NO: 274054 - RNA, 21 nt, Human
cugcaggaucacucauugcac

SEQ ID NO: 274055 - RNA, 22 nt, Human
gaacaaacgcgcgugggacaga

SEQ ID NO: 274056 - RNA, 21 nt, Human
gcccgcgcacccgucggccag

SEQ ID NO: 274057 - RNA, 19 nt, Human
ggcagaaagcggcgcugcc

SEQ ID NO: 274058 - RNA, 21 nt, Human
ggcccgggcgcccggcccugg

SEQ ID NO: 274059 - RNA, 24 nt, Human
ggcggccagaucucaggcccugcg

SEQ ID NO: 274060 - RNA, 19 nt, Human
gggagcuguugagguggga

SEQ ID NO: 274061 - RNA, 22 nt, Human
gggcagcagguagcgcugagca

SEQ ID NO: 274062 - RNA, 23 nt, Human
gggcaggagaggcgggaccaggc

SEQ ID NO: 274063 - RNA, 21 nt, Human
gggugcgugggcgggcgacgg

SEQ ID NO: 274064 - RNA, 19 nt, Human
guuccaaccgggggugccc

SEQ ID NO: 274065 - RNA, 18 nt, Human
uaaucgccgccacaaacu

SEQ ID NO: 274066 - RNA, 24 nt, Human
uacagcaauagguaaaaacauaaa

SEQ ID NO: 274067 - RNA, 27 nt, Human
uacagcaauagguaaaaacauaaauac

SEQ ID NO: 274068 - RNA, 18 nt, Human
ucaggcccugcgugcccg

SEQ ID NO: 274069 - RNA, 23 nt, Human
ucagucccaguuccaaccggggg

SEQ ID NO: 274070 - RNA, 21 nt, Human
uccaaccgggggugcccaugg

SEQ ID NO: 274071 - RNA, 22 nt, Human
ucccugcauggugccgccgccc

SEQ ID NO: 274072 - RNA, 19 nt, Human
ucgcggaaugggcggccag

SEQ ID NO: 274073 - RNA, 24 nt, Human
ucucccgugcgcaagaacaaacgc

SEQ ID NO: 274074 - RNA, 22 nt, Human
ucuuacagcaauagguaaaaac

SEQ ID NO: 274075 - RNA, 21 nt, Human
ugaaugcaaaauccaggggac

SEQ ID NO: 274076 - RNA, 21 nt, Human
ugcacgcugcauaaucgccgc

SEQ ID NO: 274077 - RNA, 19 nt, Human
ugcgcaagaacaaacgcgc

SEQ ID NO: 274078 - RNA, 18 nt, Human
ugggacagaaaaaguucc

SEQ ID NO: 274079 - RNA, 23 nt, Human
ugggaucggucagggucgcgcca

SEQ ID NO: 274080 - RNA, 19 nt, Human
uugggagccccuucucccc

SEQ ID NO: 274081 - RNA, 23 nt, Human
uugggagccccuucuccccacga

SEQ ID NO: 274082 - RNA, 20 nt, Human
aagcauaaaaucuaacucug

SEQ ID NO: 274083 - RNA, 21 nt, Human
acccuggcgcccaaggagaug

SEQ ID NO: 274084 - RNA, 22 nt, Human
acccuggcgcccaaggagaugg

SEQ ID NO: 274085 - RNA, 23 nt, Human
agggggcucuggcacacgucccu

SEQ ID NO: 274086 - RNA, 22 nt, Human
aggugagggagggggcucuggc

SEQ ID NO: 274087 - RNA, 22 nt, Human
cagggacccuggcgcccaagga

SEQ ID NO: 274088 - RNA, 20 nt, Human
cugcagggaggcggacggag

SEQ ID NO: 274089 - RNA, 22 nt, Human
gaggaggggaaggaggcggggg

SEQ ID NO: 274090 - RNA, 19 nt, Human
gaggggaaggaggcggggg

SEQ ID NO: 274091 - RNA, 19 nt, Human
gaggggcggccgggacgcc

SEQ ID NO: 274092 - RNA, 19 nt, Human
gcgcgcuccaaagucgagg

SEQ ID NO: 274093 - RNA, 21 nt, Human
ggaaggaggcgggggcagggc

SEQ ID NO: 274094 - RNA, 20 nt, Human
ggagauggggcugcagggag

SEQ ID NO: 274095 - RNA, 18 nt, Human
ggaggggaaggaggcggg

SEQ ID NO: 274096 - RNA, 23 nt, Human
ggaggggaaggaggcgggggcag

SEQ ID NO: 274097 - RNA, 18 nt, Human
ggcucuggcacacguccc

SEQ ID NO: 274098 - RNA, 20 nt, Human
gggaaggaggcgggggcagg

SEQ ID NO: 274099 - RNA, 24 nt, Human
uacucuauuuuuuaaaaaaauaac

SEQ ID NO: 274100 - RNA, 19 nt, Human
uagccccaggugccgcccu

SEQ ID NO: 274101 - RNA, 20 nt, Human
uagccccaggugccgcccug

SEQ ID NO: 274102 - RNA, 20 nt, Human
ucggcuccggcccugcucca

SEQ ID NO: 274103 - RNA, 18 nt, Human
ucucuguuuauauaaaca

SEQ ID NO: 274104 - RNA, 21 nt, Human
uggagggaaggugagggaggg

SEQ ID NO: 274105 - RNA, 19 nt, Human
uggcacacgucccucgugu

SEQ ID NO: 274106 - RNA, 19 nt, Human
uggcagccgggauauuagc

SEQ ID NO: 274107 - RNA, 18 nt, Human
ugggaacggaggggcggc

SEQ ID NO: 274108 - RNA, 25 nt, Human
uuuuuaaaaaaauaacuugcuuccu

SEQ ID NO: 274109 - RNA, 19 nt, Human
uuuuuuuuuuuuacgagga

SEQ ID NO: 274110 - RNA, 21 nt, Human
uuuuuuuuuuuuuuuacgagg

SEQ ID NO: 274111 - RNA, 19 nt, Human
aaaaaacacauagaaaaau

SEQ ID NO: 274112 - RNA, 27 nt, Human
aaaaaggaacacaaaauuuuaaaagga

SEQ ID NO: 274113 - RNA, 19 nt, Human
aacacaguucccaaagcau

SEQ ID NO: 274114 - RNA, 21 nt, Human
aacagcagaaccaccagaagg

SEQ ID NO: 274115 - RNA, 22 nt, Human
aagagacucccaggccucagcg

SEQ ID NO: 274116 - RNA, 20 nt, Human
aagcaaaaacuugacgcuac

SEQ ID NO: 274117 - RNA, 18 nt, Human
aaggacagcccagauuuc

SEQ ID NO: 274118 - RNA, 20 nt, Human
aagugcuggaaaauaccacu

SEQ ID NO: 274119 - RNA, 19 nt, Human
aauggaaggacagcccaga

SEQ ID NO: 274120 - RNA, 21 nt, Human
acaaagugcuggaaaauacca

SEQ ID NO: 274121 - RNA, 22 nt, Human
acaaagugcuggaaaauaccac

SEQ ID NO: 274122 - RNA, 22 nt, Human
acacucauauguugcaaaaaac

SEQ ID NO: 274123 - RNA, 19 nt, Human
acagagagagccuuggcca

SEQ ID NO: 274124 - RNA, 23 nt, Human
acguaacagcagaaccaccagaa

SEQ ID NO: 274125 - RNA, 18 nt, Human
acuagcucuucagauguu

SEQ ID NO: 274126 - RNA, 18 nt, Human
acugggcuccccagggcc

SEQ ID NO: 274127 - RNA, 19 nt, Human
agacccuccuuaggccccu

SEQ ID NO: 274128 - RNA, 21 nt, Human
agccaauucagaaucugcccc

SEQ ID NO: 274129 - RNA, 25 nt, Human
agccagaagcaaaaacuugacgcua

SEQ ID NO: 274130 - RNA, 19 nt, Human
agguagccagaagcaaaaa

SEQ ID NO: 274131 - RNA, 18 nt, Human
aguugauauucagugaca

SEQ ID NO: 274132 - RNA, 21 nt, Human
auaaaaaaaugcaacagcccc

SEQ ID NO: 274133 - RNA, 23 nt, Human
auggggugaaauuggccaacuuu

SEQ ID NO: 274134 - RNA, 24 nt, Human
auugcagugguuugacucauggcu

SEQ ID NO: 274135 - RNA, 22 nt, Human
auuuuaaaaggagggaaggaag

SEQ ID NO: 274136 - RNA, 22 nt, Human
caacaguagagacugggucuug

SEQ ID NO: 274137 - RNA, 22 nt, Human
cacaaaccaaguaauuuuaaac

SEQ ID NO: 274138 - RNA, 22 nt, Human
cagccagacuaaaaaucuggac

SEQ ID NO: 274139 - RNA, 21 nt, Human
caggauacaguauauaugaua

SEQ ID NO: 274140 - RNA, 19 nt, Human
caguagagacugggucuug

SEQ ID NO: 274141 - RNA, 20 nt, Human
cauccaaaaucauacaaagu

SEQ ID NO: 274142 - RNA, 20 nt, Human
ccaauaccucuuaccuccuc

SEQ ID NO: 274143 - RNA, 23 nt, Human
ccagacuaaaaaucuggacuaaa

SEQ ID NO: 274144 - RNA, 21 nt, Human
ccagggccuaggcugccuucu

SEQ ID NO: 274145 - RNA, 18 nt, Human
ccaugcaaauaugugcug

SEQ ID NO: 274146 - RNA, 19 nt, Human
ccaugcaaauaugugcuga

SEQ ID NO: 274147 - RNA, 24 nt, Human
cccaaaccacagaaaaugggguga

SEQ ID NO: 274148 - RNA, 19 nt, Human
cccaaagcauuuggacagu

SEQ ID NO: 274149 - RNA, 19 nt, Human
cccaugagcccuccacugg

SEQ ID NO: 274150 - RNA, 20 nt, Human
ccccagggccuaggcugccu

SEQ ID NO: 274151 - RNA, 24 nt, Human
ccccuagcagcaguguggagaccc

SEQ ID NO: 274152 - RNA, 18 nt, Human
cccuccacuggacagcuc

SEQ ID NO: 274153 - RNA, 18 nt, Human
ccuagcagcaguguggag

SEQ ID NO: 274154 - RNA, 25 nt, Human
ccucccacccaucucccccuuccaa

SEQ ID NO: 274155 - RNA, 24 nt, Human
ccucuuaccuccucugcaugcaaa

SEQ ID NO: 274156 - RNA, 20 nt, Human
ccugcgccuucauucugcgc

SEQ ID NO: 274157 - RNA, 20 nt, Human
ccuggcccggcccucccucu

SEQ ID NO: 274158 - RNA, 20 nt, Human
ccugguuguccuuucuccug

SEQ ID NO: 274159 - RNA, 22 nt, Human
cguaacagcagaaccaccagaa

SEQ ID NO: 274160 - RNA, 22 nt, Human
cucccaggccucagcguaccuc

SEQ ID NO: 274161 - RNA, 20 nt, Human
cuccccucuaccagcucacc

SEQ ID NO: 274162 - RNA, 23 nt, Human
cugggucuugcucguugcccagg

SEQ ID NO: 274163 - RNA, 20 nt, Human
cuugcucccugaccuuggcc

SEQ ID NO: 274164 - RNA, 20 nt, Human
cuugcucguugcccaggcug

SEQ ID NO: 274165 - RNA, 20 nt, Human
gaaccauccaauucaccugg

SEQ ID NO: 274166 - RNA, 24 nt, Human
gaguugcagaacagaauccuuggg

SEQ ID NO: 274167 - RNA, 23 nt, Human
gaucauaaugguugucaccugag

SEQ ID NO: 274168 - RNA, 18 nt, Human
gcaucuuguucuauuugg

SEQ ID NO: 274169 - RNA, 21 nt, Human
gcccggcccucccucuugcag

SEQ ID NO: 274170 - RNA, 20 nt, Human
gcugcaaaaaggaacacaaa

SEQ ID NO: 274171 - RNA, 18 nt, Human
gcuguguucuucccucug

SEQ ID NO: 274172 - RNA, 20 nt, Human
gggaaagcaagauggauuca

SEQ ID NO: 274173 - RNA, 21 nt, Human
gggucuugcucguugcccagg

SEQ ID NO: 274174 - RNA, 22 nt, Human
gucccacccaugagcccuccac

SEQ ID NO: 274175 - RNA, 24 nt, Human
gucuugcucguugcccaggcugga

SEQ ID NO: 274176 - RNA, 20 nt, Human
guguggagacccuccuuagg

SEQ ID NO: 274177 - RNA, 22 nt, Human
uaaaaaucuggacuaaaaugaa

SEQ ID NO: 274178 - RNA, 21 nt, Human
uaaauucuccagcccaaggga

SEQ ID NO: 274179 - RNA, 19 nt, Human
uaacagcagaaccaccaga

SEQ ID NO: 274180 - RNA, 19 nt, Human
uacagcuugucuuaaaauc

SEQ ID NO: 274181 - RNA, 24 nt, Human
uacagggacagagagagccuuggc

SEQ ID NO: 274182 - RNA, 24 nt, Human
uacaguauauaugauagccugaaa

SEQ ID NO: 274183 - RNA, 21 nt, Human
uagccagaagcaaaaacuuga

SEQ ID NO: 274184 - RNA, 23 nt, Human
uagccuuuuccugcaaaaggcuc

SEQ ID NO: 274185 - RNA, 20 nt, Human
uaggccccugucuuggacaa

SEQ ID NO: 274186 - RNA, 27 nt, Human
uaugauagccugaaaacuccaggaaac

SEQ ID NO: 274187 - RNA, 18 nt, Human
uauuccaaggccaacagg

SEQ ID NO: 274188 - RNA, 21 nt, Human
ucaaacagguagccagaagca

SEQ ID NO: 274189 - RNA, 19 nt, Human
ucacucagucccuugcuuu

SEQ ID NO: 274190 - RNA, 20 nt, Human
uccaauggggaaagcaagau

SEQ ID NO: 274191 - RNA, 21 nt, Human
ucccacccaucucccccuucc

SEQ ID NO: 274192 - RNA, 20 nt, Human
uccccagggccuaggcugcc

SEQ ID NO: 274193 - RNA, 23 nt, Human
ucuccuguuagguuugcucuuuc

SEQ ID NO: 274194 - RNA, 18 nt, Human
ucuggacuaaaaugaagc

SEQ ID NO: 274195 - RNA, 21 nt, Human
ucuugcucguugcccaggcug

SEQ ID NO: 274196 - RNA, 22 nt, Human
ucuugcucguugcccaggcugg

SEQ ID NO: 274197 - RNA, 23 nt, Human
ucuugcucguugcccaggcugga

SEQ ID NO: 274198 - RNA, 21 nt, Human
ugaaagaauuaaauucagagg

SEQ ID NO: 274199 - RNA, 19 nt, Human
ugaaauguguaacccuugc

SEQ ID NO: 274200 - RNA, 21 nt, Human
ugaccuuggccccuugugcuu

SEQ ID NO: 274201 - RNA, 20 nt, Human
ugacuaaacuucaagucacc

SEQ ID NO: 274202 - RNA, 26 nt, Human
ugagacacccuggggaagggggaguc

SEQ ID NO: 274203 - RNA, 21 nt, Human
ugauucuaaauucuccagccc

SEQ ID NO: 274204 - RNA, 23 nt, Human
ugauuuucccucucuccccuuca

SEQ ID NO: 274205 - RNA, 19 nt, Human
ugcaaaaaggaacacaaaa

SEQ ID NO: 274206 - RNA, 23 nt, Human
ugcagugguuugacucauggcuc

SEQ ID NO: 274207 - RNA, 18 nt, Human
ugcccaggcuggauugca

SEQ ID NO: 274208 - RNA, 24 nt, Human
ugcucccugaccuuggccccuugu

SEQ ID NO: 274209 - RNA, 23 nt, Human
ugcucguugcccaggcuggauug

SEQ ID NO: 274210 - RNA, 20 nt, Human
uggacugggcuccccagggc

SEQ ID NO: 274211 - RNA, 23 nt, Human
uggggagacggaaaaaaaaaaaa

SEQ ID NO: 274212 - RNA, 22 nt, Human
ugggucuugcucguugcccagg

SEQ ID NO: 274213 - RNA, 22 nt, Human
uggguuaaugacuaguuccaau

SEQ ID NO: 274214 - RNA, 18 nt, Human
uguagagaacccaaacua

SEQ ID NO: 274215 - RNA, 20 nt, Human
uguuguguuuuagaaugguu

SEQ ID NO: 274216 - RNA, 18 nt, Human
uuaaaaggagggaaggaa

SEQ ID NO: 274217 - RNA, 24 nt, Human
uucaaacagguagccagaagcaaa

SEQ ID NO: 274218 - RNA, 23 nt, Human
uucauuuuuuucuaaugucuccc

SEQ ID NO: 274219 - RNA, 18 nt, Human
uuccaaggccaacaggag

SEQ ID NO: 274220 - RNA, 19 nt, Human
uucuccuggcccggcccuc

SEQ ID NO: 274221 - RNA, 25 nt, Human
uugcccaggcuggauugcagugguu

SEQ ID NO: 274222 - RNA, 25 nt, Human
uugcucccugaccuuggccccuugu

SEQ ID NO: 274223 - RNA, 22 nt, Human
uuggagacuauuugccccucuc

SEQ ID NO: 274224 - RNA, 24 nt, Human
uuggugugcacaccucuugcuccc

SEQ ID NO: 274225 - RNA, 19 nt, Human
uuuccuuuuucuuagccuu

SEQ ID NO: 274226 - RNA, 23 nt, Human
aaaaaaacacagcaacuuauaga

SEQ ID NO: 274227 - RNA, 23 nt, Human
aaaaacuggugaaaauuaucuga

SEQ ID NO: 274228 - RNA, 21 nt, Human
aaaaagaguaacugaaaagaa

SEQ ID NO: 274229 - RNA, 21 nt, Human
aaaauccuccagauguugacu

SEQ ID NO: 274230 - RNA, 26 nt, Human
aacaaaaaaacacagcaacuuauaga

SEQ ID NO: 274231 - RNA, 20 nt, Human
aacauuuugucaugcagcau

SEQ ID NO: 274232 - RNA, 24 nt, Human
aacggcuccaaauaaaaacuggug

SEQ ID NO: 274233 - RNA, 20 nt, Human
aagaaagacaaaacagcaau

SEQ ID NO: 274234 - RNA, 20 nt, Human
accacgauccagaauccugg

SEQ ID NO: 274235 - RNA, 18 nt, Human
acugcaguuaguuuguca

SEQ ID NO: 274236 - RNA, 24 nt, Human
acuucaccuuaccaaaaggaacaa

SEQ ID NO: 274237 - RNA, 22 nt, Human
agaaagacaaaacagcaauaaa

SEQ ID NO: 274238 - RNA, 20 nt, Human
agaguaacaaaaaaacacag

SEQ ID NO: 274239 - RNA, 18 nt, Human
agaugcaaccacgaucca

SEQ ID NO: 274240 - RNA, 25 nt, Human
agauguugacucuccuagguucugu

SEQ ID NO: 274241 - RNA, 20 nt, Human
agcugaaaugguccaaguau

SEQ ID NO: 274242 - RNA, 26 nt, Human
aggaacaaaauacagaguaacaaaaa

SEQ ID NO: 274243 - RNA, 27 nt, Human
aggaacaaaauacagaguaacaaaaaa

SEQ ID NO: 274244 - RNA, 21 nt, Human
aguauucaccacuauaccuau

SEQ ID NO: 274245 - RNA, 20 nt, Human
auaaaaacuggugaaaauua

SEQ ID NO: 274246 - RNA, 22 nt, Human
auacagaguaacaaaaaaacac

SEQ ID NO: 274247 - RNA, 20 nt, Human
aucaaagaacucagaacuau

SEQ ID NO: 274248 - RNA, 18 nt, Human
aucugaaaaaauguaaaa

SEQ ID NO: 274249 - RNA, 20 nt, Human
augugcucuuuaaguccauc

SEQ ID NO: 274250 - RNA, 23 nt, Human
caaaaggaacaaaauacagagua

SEQ ID NO: 274251 - RNA, 18 nt, Human
cacacaaugaccagugac

SEQ ID NO: 274252 - RNA, 24 nt, Human
cacacaaugaccagugacauggcc

SEQ ID NO: 274253 - RNA, 26 nt, Human
cacacaaugaccagugacauggccaa

SEQ ID NO: 274254 - RNA, 19 nt, Human
cacccccccccuccuuuuu

SEQ ID NO: 274255 - RNA, 25 nt, Human
cagaacaauugcuucaagcaauuga

SEQ ID NO: 274256 - RNA, 21 nt, Human
cagaauccuggggacccaaag

SEQ ID NO: 274257 - RNA, 22 nt, Human
cagaguaacaaaaaaacacagc

SEQ ID NO: 274258 - RNA, 22 nt, Human
cagugagaaagauaagugaugu

SEQ ID NO: 274259 - RNA, 19 nt, Human
caucugaaaaaauguaaaa

SEQ ID NO: 274260 - RNA, 23 nt, Human
caugaaagacuguugcaaguaac

SEQ ID NO: 274261 - RNA, 18 nt, Human
ccacggacacuucuaaaa

SEQ ID NO: 274262 - RNA, 22 nt, Human
ccagaauccuggggacccaaag

SEQ ID NO: 274263 - RNA, 19 nt, Human
ccccaguuuugcacccccc

SEQ ID NO: 274264 - RNA, 18 nt, Human
ccgcaaccccaguuuugc

SEQ ID NO: 274265 - RNA, 22 nt, Human
cgagaaaagcucugaaagaucu

SEQ ID NO: 274266 - RNA, 22 nt, Human
cuaaaauccuccagauguugac

SEQ ID NO: 274267 - RNA, 19 nt, Human
cucagcaagauaaauccac

SEQ ID NO: 274268 - RNA, 18 nt, Human
cuccuagguucuguaucu

SEQ ID NO: 274269 - RNA, 21 nt, Human
cuuauaaacuaucaaaauugc

SEQ ID NO: 274270 - RNA, 22 nt, Human
gaaaaagaguaacugaaaagaa

SEQ ID NO: 274271 - RNA, 19 nt, Human
gacuguauaaugguagaau

SEQ ID NO: 274272 - RNA, 25 nt, Human
gauaaauccacagagggagcccccu

SEQ ID NO: 274273 - RNA, 21 nt, Human
gauccucuaccacauguccaa

SEQ ID NO: 274274 - RNA, 19 nt, Human
gauugauccuuuuuucucu

SEQ ID NO: 274275 - RNA, 22 nt, Human
gcauugacugcagauuucucuc

SEQ ID NO: 274276 - RNA, 22 nt, Human
gccgucaaauucaagcugaaau

SEQ ID NO: 274277 - RNA, 23 nt, Human
gcuuaaucagcagcacagccacc

SEQ ID NO: 274278 - RNA, 24 nt, Human
ggacacacuucaccuuaccaaaag

SEQ ID NO: 274279 - RNA, 21 nt, Human
ggagcccccucaucuuucccu

SEQ ID NO: 274280 - RNA, 22 nt, Human
gggcauugacugcagauuucuc

SEQ ID NO: 274281 - RNA, 23 nt, Human
gggcauugacugcagauuucucu

SEQ ID NO: 274282 - RNA, 23 nt, Human
guaaauuccagugaaugaaccuc

SEQ ID NO: 274283 - RNA, 21 nt, Human
guuguacucuacugagauugc

SEQ ID NO: 274284 - RNA, 23 nt, Human
guuuaaaaucacacauaugugua

SEQ ID NO: 274285 - RNA, 26 nt, Human
uaaaauccuccagauguugacucucc

SEQ ID NO: 274286 - RNA, 19 nt, Human
uaaaaucuucuuuagguuc

SEQ ID NO: 274287 - RNA, 20 nt, Human
uaaacauuuugucaugcagc

SEQ ID NO: 274288 - RNA, 25 nt, Human
uaaaucaaagaacucagaacuauaa

SEQ ID NO: 274289 - RNA, 19 nt, Human
uaaauccacagagggagcc

SEQ ID NO: 274290 - RNA, 19 nt, Human
uaacaaaaaaacacagcaa

SEQ ID NO: 274291 - RNA, 20 nt, Human
uaagcauccgcaaccccagu

SEQ ID NO: 274292 - RNA, 23 nt, Human
uacagaguaacaaaaaaacacag

SEQ ID NO: 274293 - RNA, 18 nt, Human
uacucuacugagauugcg

SEQ ID NO: 274294 - RNA, 21 nt, Human
uacuuuugccccuuaaaaucu

SEQ ID NO: 274295 - RNA, 18 nt, Human
ucacauaauauuccuccu

SEQ ID NO: 274296 - RNA, 19 nt, Human
ucagcaagauaaauccaca

SEQ ID NO: 274297 - RNA, 22 nt, Human
ucauuuuuuucaaaacccccaa

SEQ ID NO: 274298 - RNA, 23 nt, Human
uccacagagggagcccccucauc

SEQ ID NO: 274299 - RNA, 21 nt, Human
ucucuuauaaaucaaauccag

SEQ ID NO: 274300 - RNA, 22 nt, Human
ugaaaaaguaucauucagaaca

SEQ ID NO: 274301 - RNA, 25 nt, Human
ugaaaagaacauuaaaaacaggaaa

SEQ ID NO: 274302 - RNA, 22 nt, Human
ugagaaagacuguauaauggua

SEQ ID NO: 274303 - RNA, 23 nt, Human
ugagagagaaaguauuuaucagg

SEQ ID NO: 274304 - RNA, 22 nt, Human
ugaggcaaacguauuuauaucc

SEQ ID NO: 274305 - RNA, 22 nt, Human
ugaguaaauuccagugaaugaa

SEQ ID NO: 274306 - RNA, 18 nt, Human
ugauauguauauucacau

SEQ ID NO: 274307 - RNA, 21 nt, Human
ugcaggucuauaucccucagc

SEQ ID NO: 274308 - RNA, 23 nt, Human
ugccaauugauggaggaagcuuc

SEQ ID NO: 274309 - RNA, 21 nt, Human
ugguaaacaacagggggauga

SEQ ID NO: 274310 - RNA, 24 nt, Human
ugguguuccacaugccuaauucca

SEQ ID NO: 274311 - RNA, 23 nt, Human
uguaagaaagacuaaaauccucc

SEQ ID NO: 274312 - RNA, 18 nt, Human
uuaagcauccgcaacccc

SEQ ID NO: 274313 - RNA, 25 nt, Human
uuagcaguguggcaagagugggcau

SEQ ID NO: 274314 - RNA, 20 nt, Human
uuauauccacuugagaaaga

SEQ ID NO: 274315 - RNA, 19 nt, Human
uucagacauaguucuuucc

SEQ ID NO: 274316 - RNA, 22 nt, Human
uucauuuuuuucaaaaccccca

SEQ ID NO: 274317 - RNA, 28 nt, Human
uuccagugaaugaaccucaggguacccc

SEQ ID NO: 274318 - RNA, 22 nt, Human
uuccccggucccuuugcaauga

SEQ ID NO: 274319 - RNA, 24 nt, Human
uugcuuuaagcauccgcaacccca

SEQ ID NO: 274320 - RNA, 19 nt, Human
uuguacucuacugagauug

SEQ ID NO: 274321 - RNA, 21 nt, Human
uuguacucuacugagauugcg

SEQ ID NO: 274322 - RNA, 21 nt, Human
uuucacacaaugaccagugac

SEQ ID NO: 274323 - RNA, 24 nt, Human
uuugcacccccccccuccuuuuuu

SEQ ID NO: 274324 - RNA, 22 nt, Human
aacauguuuccgguccccucca

SEQ ID NO: 274325 - RNA, 23 nt, Human
acaccgcgcacucgcccguaggc

SEQ ID NO: 274326 - RNA, 25 nt, Human
acagcaucacaggcuucuucccagg

SEQ ID NO: 274327 - RNA, 24 nt, Human
acaggcagcaugauggcgggcagc

SEQ ID NO: 274328 - RNA, 18 nt, Human
accgcagcuccugccgcc

SEQ ID NO: 274329 - RNA, 21 nt, Human
acgagcuccagccagaaggcc

SEQ ID NO: 274330 - RNA, 21 nt, Human
acugcacgacggggcccagga

SEQ ID NO: 274331 - RNA, 19 nt, Human
agcuggaaauggcggugcc

SEQ ID NO: 274332 - RNA, 21 nt, Human
aggcacccacggccacgguga

SEQ ID NO: 274333 - RNA, 18 nt, Human
aggcagcaugauggcggg

SEQ ID NO: 274334 - RNA, 21 nt, Human
aggcaggcgcguggugguggu

SEQ ID NO: 274335 - RNA, 19 nt, Human
aggcagggcgcagagccuc

SEQ ID NO: 274336 - RNA, 23 nt, Human
aggcaggguggcaggcggcgggg

SEQ ID NO: 274337 - RNA, 24 nt, Human
aggccccugccccggaaccaaaga

SEQ ID NO: 274338 - RNA, 18 nt, Human
aggcggccagcgcguggc

SEQ ID NO: 274339 - RNA, 21 nt, Human
aggcgggcggcaggguggugg

SEQ ID NO: 274340 - RNA, 24 nt, Human
aggcgggcggcagggugguggcgu

SEQ ID NO: 274341 - RNA, 22 nt, Human
agguugacgcaggaggccccug

SEQ ID NO: 274342 - RNA, 21 nt, Human
agucgggcgggcaggcagggc

SEQ ID NO: 274343 - RNA, 21 nt, Human
caaaggccaggauguugagga

SEQ ID NO: 274344 - RNA, 23 nt, Human
caagagaggcacaucguccggug

SEQ ID NO: 274345 - RNA, 25 nt, Human
caaugacguugccauaggguacccc

SEQ ID NO: 274346 - RNA, 18 nt, Human
cacagcuucagcacuguc

SEQ ID NO: 274347 - RNA, 22 nt, Human
cacagcuucagcacuguccucu

SEQ ID NO: 274348 - RNA, 19 nt, Human
caccaccgggaagcgcucc

SEQ ID NO: 274349 - RNA, 23 nt, Human
caccgggaagcgcuccucgccga

SEQ ID NO: 274350 - RNA, 24 nt, Human
cacgacggggcccaggaucucguu

SEQ ID NO: 274351 - RNA, 23 nt, Human
cacggcccgcggcggggagcagg

SEQ ID NO: 274352 - RNA, 22 nt, Human
cacugagccagcgcagggccug

SEQ ID NO: 274353 - RNA, 18 nt, Human
cacuguccucucggucac

SEQ ID NO: 274354 - RNA, 18 nt, Human
cagagccucggcaggguc

SEQ ID NO: 274355 - RNA, 25 nt, Human
cagcgccccgugcagguucugcggg

SEQ ID NO: 274356 - RNA, 23 nt, Human
cagcuccugccgccggucccgcu

SEQ ID NO: 274357 - RNA, 24 nt, Human
caggaggccccugccccggaacca

SEQ ID NO: 274358 - RNA, 22 nt, Human
caucacaggcuucuucccaggg

SEQ ID NO: 274359 - RNA, 25 nt, Human
ccacagcuucagcacuguccucucg

SEQ ID NO: 274360 - RNA, 28 nt, Human
ccacagcuucagcacuguccucucgacc

SEQ ID NO: 274361 - RNA, 21 nt, Human
ccaccaggcacgccagagccu

SEQ ID NO: 274362 - RNA, 20 nt, Human
ccaccuuggcugccagcagc

SEQ ID NO: 274363 - RNA, 18 nt, Human
ccagcucccgggagggcu

SEQ ID NO: 274364 - RNA, 19 nt, Human
cccacggccacggugacgc

SEQ ID NO: 274365 - RNA, 21 nt, Human
cccacggccacggugacgcuc

SEQ ID NO: 274366 - RNA, 23 nt, Human
cccaggccggggccgcccggggc

SEQ ID NO: 274367 - RNA, 22 nt, Human
cccgcggcggggagcagggggc

SEQ ID NO: 274368 - RNA, 19 nt, Human
cccuugggccgggcucggg

SEQ ID NO: 274369 - RNA, 20 nt, Human
ccgaggcugccgaggcccag

SEQ ID NO: 274370 - RNA, 22 nt, Human
ccuccauguaggagccgccaug

SEQ ID NO: 274371 - RNA, 22 nt, Human
ccugcggcaccggcugguuggg

SEQ ID NO: 274372 - RNA, 23 nt, Human
ccugguccaccagcucccgggag

SEQ ID NO: 274373 - RNA, 18 nt, Human
cgaugugguagcgggcag

SEQ ID NO: 274374 - RNA, 20 nt, Human
cgccauggagaaacagcauc

SEQ ID NO: 274375 - RNA, 21 nt, Human
cgcccaagaacugcacgacgg

SEQ ID NO: 274376 - RNA, 21 nt, Human
cgcccccaaagugggcgaugu

SEQ ID NO: 274377 - RNA, 19 nt, Human
cgccccgacgccaccaccc

SEQ ID NO: 274378 - RNA, 21 nt, Human
cgcccguaggccguguucacc

SEQ ID NO: 274379 - RNA, 27 nt, Human
cgcgguaguugucacgcacgcguggug

SEQ ID NO: 274380 - RNA, 21 nt, Human
cggcuggaagcggcgggcgcc

SEQ ID NO: 274381 - RNA, 23 nt, Human
cggggccgcccggggcgccgccg

SEQ ID NO: 274382 - RNA, 18 nt, Human
cgugugcagguugugcag

SEQ ID NO: 274383 - RNA, 23 nt, Human
cucgggcucgggaggcagggugg

SEQ ID NO: 274384 - RNA, 21 nt, Human
cucggucacagcccaccuugg

SEQ ID NO: 274385 - RNA, 18 nt, Human
cugaauggugggagagga

SEQ ID NO: 274386 - RNA, 18 nt, Human
cugguggcagcucacggc

SEQ ID NO: 274387 - RNA, 21 nt, Human
cugguucugcacguagguggc

SEQ ID NO: 274388 - RNA, 20 nt, Human
cuguccucucggucacagcc

SEQ ID NO: 274389 - RNA, 19 nt, Human
gaccagcuggaaauggcgg

SEQ ID NO: 274390 - RNA, 23 nt, Human
gagcguggcuacaaugacguugc

SEQ ID NO: 274391 - RNA, 20 nt, Human
gcacuguccucucggucaca

SEQ ID NO: 274392 - RNA, 18 nt, Human
gcgauguuuucacugagc

SEQ ID NO: 274393 - RNA, 19 nt, Human
gcuggaagcggcgggcgcc

SEQ ID NO: 274394 - RNA, 21 nt, Human
ggcccuugggccgggcucggg

SEQ ID NO: 274395 - RNA, 18 nt, Human
ggcggcguggcguagggc

SEQ ID NO: 274396 - RNA, 21 nt, Human
gggagcagggggcccccacca

SEQ ID NO: 274397 - RNA, 20 nt, Human
gggaggcaggcgcguggugg

SEQ ID NO: 274398 - RNA, 19 nt, Human
gggcggcagggugguggcg

SEQ ID NO: 274399 - RNA, 19 nt, Human
gggcgggcaggcagggcgc

SEQ ID NO: 274400 - RNA, 22 nt, Human
ggugauacgcucggggucgccc

SEQ ID NO: 274401 - RNA, 21 nt, Human
gguggugaagagcuccgugug

SEQ ID NO: 274402 - RNA, 21 nt, Human
ggugguggcguugcgcacgcc

SEQ ID NO: 274403 - RNA, 19 nt, Human
gguguggaugaacuuggua

SEQ ID NO: 274404 - RNA, 23 nt, Human
gugcugagaaaaccgagcacccc

SEQ ID NO: 274405 - RNA, 18 nt, Human
guggugguggugaagagc

SEQ ID NO: 274406 - RNA, 22 nt, Human
uagagggcagcaaaggccagga

SEQ ID NO: 274407 - RNA, 20 nt, Human
uaguagagggcagcaaaggc

SEQ ID NO: 274408 - RNA, 18 nt, Human
uccaccagcucccgggag

SEQ ID NO: 274409 - RNA, 21 nt, Human
uccaccagcucccgggagggc

SEQ ID NO: 274410 - RNA, 18 nt, Human
uccccggggaagcgguca

SEQ ID NO: 274411 - RNA, 23 nt, Human
ucccgugaguccccggggaagcg

SEQ ID NO: 274412 - RNA, 24 nt, Human
ucccgugaguccccggggaagcgg

SEQ ID NO: 274413 - RNA, 21 nt, Human
uccucggugggcacguagagg

SEQ ID NO: 274414 - RNA, 23 nt, Human
ugagaaaaccgagcaccccaaga

SEQ ID NO: 274415 - RNA, 19 nt, Human
ugaggaagaggagggaggc

SEQ ID NO: 274416 - RNA, 20 nt, Human
ugauggcgggcagcgccccc

SEQ ID NO: 274417 - RNA, 20 nt, Human
ugcagguucugcgggcaggc

SEQ ID NO: 274418 - RNA, 21 nt, Human
ugcagguugugcaggugggaa

SEQ ID NO: 274419 - RNA, 18 nt, Human
ugcccggggcgccagcgg

SEQ ID NO: 274420 - RNA, 21 nt, Human
ugcccggggcgccagcggggg

SEQ ID NO: 274421 - RNA, 24 nt, Human
uggaagcggcgggcgcccagggga

SEQ ID NO: 274422 - RNA, 20 nt, Human
uggcaggcggcgggggccgg

SEQ ID NO: 274423 - RNA, 21 nt, Human
uggggcacgagcuccagccag

SEQ ID NO: 274424 - RNA, 22 nt, Human
ugguccaccagcucccgggagg

SEQ ID NO: 274425 - RNA, 23 nt, Human
ugguugggguccccagucuuggc

SEQ ID NO: 274426 - RNA, 19 nt, Human
ugugguagcgggcaggcug

SEQ ID NO: 274427 - RNA, 23 nt, Human
uguugaggaagaggagggaggca

SEQ ID NO: 274428 - RNA, 18 nt, Human
uucaccaccgggaagcgc

SEQ ID NO: 274429 - RNA, 18 nt, Human
uugcuccacaccaccucc

SEQ ID NO: 274430 - RNA, 20 nt, Human
aaaaaaaaaaaaaaaccaac

SEQ ID NO: 274431 - RNA, 33 nt, Human
aaaaaaaaaaaaaaccaacaacaacaaaaaaga

SEQ ID NO: 274432 - RNA, 18 nt, Human
aaaaaaaaaaccaacaac

SEQ ID NO: 274433 - RNA, 24 nt, Human
aaaaaaaaccaacaacaacaaaaa

SEQ ID NO: 274434 - RNA, 20 nt, Human
aaaaaaccaacaacaacaaa

SEQ ID NO: 274435 - RNA, 23 nt, Human
aaaaaaccaacaacaacaaaaaa

SEQ ID NO: 274436 - RNA, 24 nt, Human
aaaaagaaaaaucaacaaaacaag

SEQ ID NO: 274437 - RNA, 24 nt, Human
aaaacaagacccagaaaaaagacc

SEQ ID NO: 274438 - RNA, 23 nt, Human
aacaacaacaaaaaacaccgccu

SEQ ID NO: 274439 - RNA, 24 nt, Human
aagaaaaaucaacaaaacaagacc

SEQ ID NO: 274440 - RNA, 20 nt, Human
aagagaggccgaaggcgagc

SEQ ID NO: 274441 - RNA, 18 nt, Human
acaaaacaagacccagaa

SEQ ID NO: 274442 - RNA, 18 nt, Human
acaaaagacuguaaagaa

SEQ ID NO: 274443 - RNA, 19 nt, Human
acaaaagacuguaaagaaa

SEQ ID NO: 274444 - RNA, 20 nt, Human
acccgaauccccgagaucag

SEQ ID NO: 274445 - RNA, 21 nt, Human
agacaggccuguuccccgggc

SEQ ID NO: 274446 - RNA, 22 nt, Human
agacuccagggucacagcauca

SEQ ID NO: 274447 - RNA, 21 nt, Human
agagaccuucgggccugaagc

SEQ ID NO: 274448 - RNA, 21 nt, Human
agagagaccuucgggccugaa

SEQ ID NO: 274449 - RNA, 21 nt, Human
agagagcaggucguccaagca

SEQ ID NO: 274450 - RNA, 25 nt, Human
agagagcaggucguccaagcaccac

SEQ ID NO: 274451 - RNA, 24 nt, Human
agccccuuucuccuuccaccccau

SEQ ID NO: 274452 - RNA, 20 nt, Human
aggccgaaggcgagcaccaa

SEQ ID NO: 274453 - RNA, 22 nt, Human
aggccgaaggcgagcaccaagg

SEQ ID NO: 274454 - RNA, 23 nt, Human
auauaugugugugugugugugug

SEQ ID NO: 274455 - RNA, 18 nt, Human
augcuguuggccuuuggg

SEQ ID NO: 274456 - RNA, 27 nt, Human
caacaaaacaagacccagaaaaaagaa

SEQ ID NO: 274457 - RNA, 20 nt, Human
caacaacaaaaaacaccgcc

SEQ ID NO: 274458 - RNA, 21 nt, Human
caacaacaacaaaaaacaccg

SEQ ID NO: 274459 - RNA, 24 nt, Human
caacaacaacaaaaaacaccgccu

SEQ ID NO: 274460 - RNA, 20 nt, Human
caagacccagaaaaaagacc

SEQ ID NO: 274461 - RNA, 22 nt, Human
caagacccagaaaaaagaccaa

SEQ ID NO: 274462 - RNA, 24 nt, Human
caagagaggccgaaggcgagcacc

SEQ ID NO: 274463 - RNA, 19 nt, Human
cacagcaucagcccaauag

SEQ ID NO: 274464 - RNA, 23 nt, Human
caccaaaucuaaggucaccuggu

SEQ ID NO: 274465 - RNA, 21 nt, Human
cacccugcaggcucugcagcc

SEQ ID NO: 274466 - RNA, 18 nt, Human
caccuggucuggccaggc

SEQ ID NO: 274467 - RNA, 19 nt, Human
cacugacuugaaccucaaa

SEQ ID NO: 274468 - RNA, 21 nt, Human
caguuccaagagaggccgaag

SEQ ID NO: 274469 - RNA, 23 nt, Human
cauauaugugugugugugugugu

SEQ ID NO: 274470 - RNA, 26 nt, Human
ccacagcuucagaaaggggggaacgc

SEQ ID NO: 274471 - RNA, 22 nt, Human
ccagaaaaaagaccaaguccug

SEQ ID NO: 274472 - RNA, 19 nt, Human
cccagcaauguagagagca

SEQ ID NO: 274473 - RNA, 24 nt, Human
cccauggucuugcuuaaaucuguu

SEQ ID NO: 274474 - RNA, 23 nt, Human
ccccaagggcagaggcaaaaccc

SEQ ID NO: 274475 - RNA, 22 nt, Human
ccccuuucuccuuccaccccau

SEQ ID NO: 274476 - RNA, 20 nt, Human
cccuacgacccuccagcucc

SEQ ID NO: 274477 - RNA, 21 nt, Human
ccgcacccgaauccccgagau

SEQ ID NO: 274478 - RNA, 24 nt, Human
ccuacgacccuccagcuccaucca

SEQ ID NO: 274479 - RNA, 18 nt, Human
ccuagagccagagagacc

SEQ ID NO: 274480 - RNA, 27 nt, Human
ccuccagcuccauccagugcuagcccc

SEQ ID NO: 274481 - RNA, 23 nt, Human
ccugaagcccucccuuccagagg

SEQ ID NO: 274482 - RNA, 20 nt, Human
ccuuuuugaaagagaaauga

SEQ ID NO: 274483 - RNA, 22 nt, Human
cgccuuuuugaaagagaaauga

SEQ ID NO: 274484 - RNA, 24 nt, Human
cguauacauauaugugugugugug

SEQ ID NO: 274485 - RNA, 24 nt, Human
cgugcguauacauauaugugugug

SEQ ID NO: 274486 - RNA, 20 nt, Human
cuccauccagugcuagcccc

SEQ ID NO: 274487 - RNA, 24 nt, Human
cuccccuacgacccuccagcucca

SEQ ID NO: 274488 - RNA, 22 nt, Human
cuccgcacccgaauccccgaga

SEQ ID NO: 274489 - RNA, 22 nt, Human
cuuccauaguacguuguucacc

SEQ ID NO: 274490 - RNA, 18 nt, Human
gaaccgggccacggacca

SEQ ID NO: 274491 - RNA, 23 nt, Human
gacccagaaaaaagaccaagucc

SEQ ID NO: 274492 - RNA, 20 nt, Human
gagaaaugacagacacaaaa

SEQ ID NO: 274493 - RNA, 22 nt, Human
gagggacaccuacaggugccca

SEQ ID NO: 274494 - RNA, 22 nt, Human
gccaaugcuguuggccuuuggg

SEQ ID NO: 274495 - RNA, 23 nt, Human
gcgagcaccaaggggguguccag

SEQ ID NO: 274496 - RNA, 19 nt, Human
gcucccaagucuggaguug

SEQ ID NO: 274497 - RNA, 22 nt, Human
ggacaccuacaggugcccagca

SEQ ID NO: 274498 - RNA, 23 nt, Human
ggcaggagaggcagacuccaggg

SEQ ID NO: 274499 - RNA, 20 nt, Human
ggccgaaggcgagcaccaag

SEQ ID NO: 274500 - RNA, 22 nt, Human
gggcagggggacuggcaggaga

SEQ ID NO: 274501 - RNA, 20 nt, Human
gguccuagagccagagagac

SEQ ID NO: 274502 - RNA, 20 nt, Human
gguggugcaguuccaagaga

SEQ ID NO: 274503 - RNA, 19 nt, Human
ggugugggugcgugcguau

SEQ ID NO: 274504 - RNA, 19 nt, Human
guagagagcaggucgucca

SEQ ID NO: 274505 - RNA, 18 nt, Human
guauacauauaugugugu

SEQ ID NO: 274506 - RNA, 24 nt, Human
gucuauguuugugcagguggaucu

SEQ ID NO: 274507 - RNA, 30 nt, Human
gugucugcgugugugugugugugugugugg

SEQ ID NO: 274508 - RNA, 24 nt, Human
gugugugcauguguuccuggaucu

SEQ ID NO: 274509 - RNA, 19 nt, Human
uacauauaugugugugugu

SEQ ID NO: 274510 - RNA, 23 nt, Human
uagccccuuucuccuuccacccc

SEQ ID NO: 274511 - RNA, 19 nt, Human
uauaugugugugugugugu

SEQ ID NO: 274512 - RNA, 21 nt, Human
uauccugcucuuuaaagcucc

SEQ ID NO: 274513 - RNA, 18 nt, Human
uaugugugugugugugug

SEQ ID NO: 274514 - RNA, 21 nt, Human
uaugugugugugugugugugu

SEQ ID NO: 274515 - RNA, 22 nt, Human
ucaccuggucuggccaggccaa

SEQ ID NO: 274516 - RNA, 25 nt, Human
uccaaaauuaaaaaagaaaaaucaa

SEQ ID NO: 274517 - RNA, 27 nt, Human
uccaaaauuaaaaaagaaaaaucaaca

SEQ ID NO: 274518 - RNA, 19 nt, Human
uccgggcagggggacuggc

SEQ ID NO: 274519 - RNA, 21 nt, Human
uccucgguuuaccgaggacuc

SEQ ID NO: 274520 - RNA, 18 nt, Human
ucgguggugcaguuccaa

SEQ ID NO: 274521 - RNA, 22 nt, Human
ucuguggucagauucagggagc

SEQ ID NO: 274522 - RNA, 22 nt, Human
ugaaagagaaaugacagacaca

SEQ ID NO: 274523 - RNA, 22 nt, Human
ugaaccgggccacggaccaccc

SEQ ID NO: 274524 - RNA, 18 nt, Human
ugaagcccucccuuccag

SEQ ID NO: 274525 - RNA, 20 nt, Human
ugacagacacaaaagacugu

SEQ ID NO: 274526 - RNA, 28 nt, Human
ugacagacacaaaagacuguaaagaaaa

SEQ ID NO: 274527 - RNA, 25 nt, Human
ugcguauacauauaugugugugugu

SEQ ID NO: 274528 - RNA, 25 nt, Human
ugcguauacauauaugugugugugu

SEQ ID NO: 274529 - RNA, 18 nt, Human
ugcgugcguauacauaua

SEQ ID NO: 274530 - RNA, 18 nt, Human
ugcgugcguauacauaua

SEQ ID NO: 274531 - RNA, 19 nt, Human
ugcgugcguauacauauau

SEQ ID NO: 274532 - RNA, 22 nt, Human
ugcgugugugugugugugugag

SEQ ID NO: 274533 - RNA, 21 nt, Human
ugcgugugugugugugugugu

SEQ ID NO: 274534 - RNA, 21 nt, Human
ugcgugugugugugugugugu

SEQ ID NO: 274535 - RNA, 21 nt, Human
ugcgugugugugugugugugu

SEQ ID NO: 274536 - RNA, 22 nt, Human
ugcguguguguguguguguguu

SEQ ID NO: 274537 - RNA, 18 nt, Human
ugcuuucaggccccccag

SEQ ID NO: 274538 - RNA, 21 nt, Human
uggaucugggagggagggagc

SEQ ID NO: 274539 - RNA, 19 nt, Human
uggccaggccaaugcuguu

SEQ ID NO: 274540 - RNA, 24 nt, Human
uggggguccuagagccagagagac

SEQ ID NO: 274541 - RNA, 26 nt, Human
ugggugcgugcguauacauauaugug

SEQ ID NO: 274542 - RNA, 24 nt, Human
uguaaagaaaauggggcgaauuuc

SEQ ID NO: 274543 - RNA, 21 nt, Human
ugucugcgugugugugugugu

SEQ ID NO: 274544 - RNA, 25 nt, Human
ugucugcgugugugugugugugugg

SEQ ID NO: 274545 - RNA, 23 nt, Human
ugugcagguggaucugcuguagg

SEQ ID NO: 274546 - RNA, 21 nt, Human
ugugucugcgugugugugugu

SEQ ID NO: 274547 - RNA, 23 nt, Human
ugugugcauguguuccuggaucu

SEQ ID NO: 274548 - RNA, 21 nt, Human
ugugugucugcgugugugugu

SEQ ID NO: 274549 - RNA, 24 nt, Human
ugugugucugcgugugugugugug

SEQ ID NO: 274550 - RNA, 31 nt, Human
ugugugucugcgugugugugugugugugugg

SEQ ID NO: 274551 - RNA, 21 nt, Human
ugugugugucugcgugugugu

SEQ ID NO: 274552 - RNA, 21 nt, Human
ugugugugucugcgugugugu

SEQ ID NO: 274553 - RNA, 22 nt, Human
ugugugugucugcgugugugug

SEQ ID NO: 274554 - RNA, 23 nt, Human
ugugugugugugucugcgugugu

SEQ ID NO: 274555 - RNA, 20 nt, Human
ugugugugugugugcaugug

SEQ ID NO: 274556 - RNA, 18 nt, Human
ugugugugugugugucug

SEQ ID NO: 274557 - RNA, 20 nt, Human
ugugugugugugugugcaug

SEQ ID NO: 274558 - RNA, 21 nt, Human
ugugugugugugugugcaugu

SEQ ID NO: 274559 - RNA, 21 nt, Human
ugugugugugugugugcaugu

SEQ ID NO: 274560 - RNA, 21 nt, Human
ugugugugugugugugucugc

SEQ ID NO: 274561 - RNA, 24 nt, Human
ugugugugugugugugucugcgug

SEQ ID NO: 274562 - RNA, 18 nt, Human
ugugugugugugugugug

SEQ ID NO: 274563 - RNA, 18 nt, Human
ugugugugugugugugug

SEQ ID NO: 274564 - RNA, 22 nt, Human
ugugugugugugugugugucug

SEQ ID NO: 274565 - RNA, 22 nt, Human
ugugugugugugugugugugca

SEQ ID NO: 274566 - RNA, 24 nt, Human
uguucaccaaaucuaaggucaccu

SEQ ID NO: 274567 - RNA, 19 nt, Human
uucauggccacacugacuu

SEQ ID NO: 274568 - RNA, 24 nt, Human
uuccaaaauuaaaaaagaaaaauc

SEQ ID NO: 274569 - RNA, 20 nt, Human
uuguacaugcgggugcaugu

SEQ ID NO: 274570 - RNA, 27 nt, Human
uuguuccaaaauuaaaaaagaaaaauc

SEQ ID NO: 274571 - RNA, 21 nt, Human
uuuguacaugcgggugcaugg

SEQ ID NO: 274572 - RNA, 19 nt, Human
aaaccaguauuuauuaaca

SEQ ID NO: 274573 - RNA, 20 nt, Human
aagcagacuugaacccuggu

SEQ ID NO: 274574 - RNA, 21 nt, Human
ggaaagcagacuugaacccug

SEQ ID NO: 274575 - RNA, 19 nt, Human
uuaaggauagcagccugca

SEQ ID NO: 274576 - RNA, 20 nt, Human
uuaaggauagcagccugcaa

SEQ ID NO: 274577 - RNA, 20 nt, Human
uuuuuuuuuuuuuuuuuugg

SEQ ID NO: 274578 - RNA, 19 nt, Human
aagcaggaaauacagcagg

SEQ ID NO: 274579 - RNA, 24 nt, Human
acccccuuugggccgcccagagac

SEQ ID NO: 274580 - RNA, 19 nt, Human
agcagcggagccgugcccc

SEQ ID NO: 274581 - RNA, 19 nt, Human
aggcaggggcacccccuuu

SEQ ID NO: 274582 - RNA, 21 nt, Human
agggaagcaggaaauacagca

SEQ ID NO: 274583 - RNA, 20 nt, Human
aucugugucugcaucagcga

SEQ ID NO: 274584 - RNA, 19 nt, Human
cacccucccgcuagguuac

SEQ ID NO: 274585 - RNA, 19 nt, Human
cagagaccugcacacccac

SEQ ID NO: 274586 - RNA, 18 nt, Human
cagcccucugagccucuc

SEQ ID NO: 274587 - RNA, 21 nt, Human
caggaaauacagcaggaacau

SEQ ID NO: 274588 - RNA, 22 nt, Human
caggggcuucuggcggaagccc

SEQ ID NO: 274589 - RNA, 23 nt, Human
caggggcuucuggcggaagcccg

SEQ ID NO: 274590 - RNA, 23 nt, Human
ccagagaccugcacacccacacu

SEQ ID NO: 274591 - RNA, 21 nt, Human
ccccgccguccccacccuccc

SEQ ID NO: 274592 - RNA, 22 nt, Human
ccccgccguccccacccucccg

SEQ ID NO: 274593 - RNA, 23 nt, Human
ccccgcgcccgccgcccuccccg

SEQ ID NO: 274594 - RNA, 19 nt, Human
ccccuuugggccgcccaga

SEQ ID NO: 274595 - RNA, 21 nt, Human
ccgcccuccccgccgucccca

SEQ ID NO: 274596 - RNA, 21 nt, Human
ccgccgcccuccccgccgucc

SEQ ID NO: 274597 - RNA, 18 nt, Human
ccgcgcccgccgcccucc

SEQ ID NO: 274598 - RNA, 21 nt, Human
ccgcggcuucguucgggcgcg

SEQ ID NO: 274599 - RNA, 23 nt, Human
ccggcggcggagccgcuuccccu

SEQ ID NO: 274600 - RNA, 27 nt, Human
ccucccgcuagguuaccaggcaggggc

SEQ ID NO: 274601 - RNA, 19 nt, Human
ccuggcccugccuugccac

SEQ ID NO: 274602 - RNA, 23 nt, Human
ccuggcccugccuugccacucug

SEQ ID NO: 274603 - RNA, 19 nt, Human
cgcccgccgcccuccccgc

SEQ ID NO: 274604 - RNA, 19 nt, Human
cgcuucccggccgcugggc

SEQ ID NO: 274605 - RNA, 23 nt, Human
cggccaaacaggggcccggcccc

SEQ ID NO: 274606 - RNA, 22 nt, Human
cuccccgccguccccacccucc

SEQ ID NO: 274607 - RNA, 23 nt, Human
cuccccgccguccccacccuccc

SEQ ID NO: 274608 - RNA, 18 nt, Human
gcccagagaccugcacac

SEQ ID NO: 274609 - RNA, 21 nt, Human
gccccgcgcccgccgcccucc

SEQ ID NO: 274610 - RNA, 18 nt, Human
gcuuccccuggcccugcc

SEQ ID NO: 274611 - RNA, 22 nt, Human
ggcuccggggcugccuucgauc

SEQ ID NO: 274612 - RNA, 24 nt, Human
uccccuggcccugccuugccacuc

SEQ ID NO: 274613 - RNA, 20 nt, Human
uccgcgccccugggggcgga

SEQ ID NO: 274614 - RNA, 25 nt, Human
ucggccaaauaggcacuucagcccu

SEQ ID NO: 274615 - RNA, 20 nt, Human
ugcacacccacacucuggcc

SEQ ID NO: 274616 - RNA, 22 nt, Human
ugccuucgauccuuuuaaaucc

SEQ ID NO: 274617 - RNA, 18 nt, Human
ugccuugccacucugcca

SEQ ID NO: 274618 - RNA, 18 nt, Human
cuccuuuccagcagaguc

SEQ ID NO: 274619 - RNA, 18 nt, Human
gcgcucggugcccugagg

SEQ ID NO: 274620 - RNA, 24 nt, Human
uacuaaguucucuccagguaguga

SEQ ID NO: 274621 - RNA, 21 nt, Human
aagcauuuuaaucagaugguc

SEQ ID NO: 274622 - RNA, 20 nt, Human
cacccgaaacgcgcccggga

SEQ ID NO: 274623 - RNA, 25 nt, Human
cacccgaaacgcgcccgggacccac

SEQ ID NO: 274624 - RNA, 23 nt, Human
cagcacccgaaacgcgcccggga

SEQ ID NO: 274625 - RNA, 23 nt, Human
ccagcacccgaaacgcgcccggg

SEQ ID NO: 274626 - RNA, 22 nt, Human
ccuacagccugguccucugccc

SEQ ID NO: 274627 - RNA, 21 nt, Human
cgccagcacccgaaacgcgcc

SEQ ID NO: 274628 - RNA, 22 nt, Human
cgccagcacccgaaacgcgccc

SEQ ID NO: 274629 - RNA, 21 nt, Human
cgcccgggacccacgugguuc

SEQ ID NO: 274630 - RNA, 23 nt, Human
cugcagccgccagcacccgaaac

SEQ ID NO: 274631 - RNA, 21 nt, Human
cugcuuagguuugaacuccgg

SEQ ID NO: 274632 - RNA, 19 nt, Human
gggaaggaggggaaaugga

SEQ ID NO: 274633 - RNA, 24 nt, Human
uguaaauaacuagauuuccuacag

SEQ ID NO: 274634 - RNA, 21 nt, Human
uuccuacagccugguccucug

SEQ ID NO: 274635 - RNA, 19 nt, Human
auggaaugaagagcugugu

SEQ ID NO: 274636 - RNA, 21 nt, Human
ccucuaagucaauggaaugaa

SEQ ID NO: 274637 - RNA, 20 nt, Human
cgcugggagagcagaaggga

SEQ ID NO: 274638 - RNA, 20 nt, Human
cuggaggggccgggcggcgg

SEQ ID NO: 274639 - RNA, 24 nt, Human
gcgcugggagagcagaagggauuc

SEQ ID NO: 274640 - RNA, 19 nt, Human
gcuggaggggccgggcggc

SEQ ID NO: 274641 - RNA, 20 nt, Human
gggaagcuggaggggccggg

SEQ ID NO: 274642 - RNA, 22 nt, Human
ucuaagucaauggaaugaagag

SEQ ID NO: 274643 - RNA, 19 nt, Human
aggcacugaaguugguggc

SEQ ID NO: 274644 - RNA, 22 nt, Human
aggcacugaaguugguggcuca

SEQ ID NO: 274645 - RNA, 26 nt, Human
aggcacugaaguugguggcucaaacu

SEQ ID NO: 274646 - RNA, 19 nt, Human
aggcagguuuggauguggg

SEQ ID NO: 274647 - RNA, 22 nt, Human
agugaauuuuaaugccuccccu

SEQ ID NO: 274648 - RNA, 22 nt, Human
cagaaaggcacugaaguuggug

SEQ ID NO: 274649 - RNA, 21 nt, Human
cagugaauuuuaaugccuccc

SEQ ID NO: 274650 - RNA, 23 nt, Human
cagugaauuuuaaugccuccccu

SEQ ID NO: 274651 - RNA, 25 nt, Human
ccccccccaccacaaagguuguccg

SEQ ID NO: 274652 - RNA, 21 nt, Human
ggcugggguggggcagaggug

SEQ ID NO: 274653 - RNA, 22 nt, Human
ggggauggggugguaagggcag

SEQ ID NO: 274654 - RNA, 21 nt, Human
ggggcagaggugaacagggaa

SEQ ID NO: 274655 - RNA, 21 nt, Human
gguuugggacaggcagguuug

SEQ ID NO: 274656 - RNA, 24 nt, Human
gugguuugggacaggcagguuugg

SEQ ID NO: 274657 - RNA, 22 nt, Human
ucuugcugacggagguaguugg

SEQ ID NO: 274658 - RNA, 22 nt, Human
ugggggauggggugguaagggc

SEQ ID NO: 274659 - RNA, 20 nt, Human
ugugaagacccccccccacc

SEQ ID NO: 274660 - RNA, 21 nt, Human
uuggaugugggcuuggguucu

SEQ ID NO: 274661 - RNA, 21 nt, Human
uugguggcucaaacuccucug

SEQ ID NO: 274662 - RNA, 19 nt, Human
caugauuuguucuuucgag

SEQ ID NO: 274663 - RNA, 24 nt, Human
uuacuuaaacccuagaaauaauuu

SEQ ID NO: 274664 - RNA, 23 nt, Human
aaaagaaaaagacagugaaaaag

SEQ ID NO: 274665 - RNA, 24 nt, Human
aaacaugcagcaccauuugaaaca

SEQ ID NO: 274666 - RNA, 23 nt, Human
aaagaagauucagaaacauggaa

SEQ ID NO: 274667 - RNA, 21 nt, Human
aaggcccagcgcgccugcccu

SEQ ID NO: 274668 - RNA, 21 nt, Human
acaugcagcaccauuugaaac

SEQ ID NO: 274669 - RNA, 24 nt, Human
acugcuuuaacggcgauuuuucuu

SEQ ID NO: 274670 - RNA, 19 nt, Human
agcgcagcuccccaaggcc

SEQ ID NO: 274671 - RNA, 27 nt, Human
caaagaagauucagaaacauggaaaua

SEQ ID NO: 274672 - RNA, 19 nt, Human
cagcaccauuugaaacaaa

SEQ ID NO: 274673 - RNA, 24 nt, Human
cagcaccauuugaaacaaagaaga

SEQ ID NO: 274674 - RNA, 19 nt, Human
cccagcgcgccugcccuuc

SEQ ID NO: 274675 - RNA, 22 nt, Human
cccagcgcgccugcccuucccg

SEQ ID NO: 274676 - RNA, 20 nt, Human
ccgccgagcgcagcucccca

SEQ ID NO: 274677 - RNA, 21 nt, Human
ccugcccuucccggaaaacac

SEQ ID NO: 274678 - RNA, 26 nt, Human
cgaaaagaaaaagacagugaaaaaga

SEQ ID NO: 274679 - RNA, 21 nt, Human
cgccugaaacgcgaacccccg

SEQ ID NO: 274680 - RNA, 26 nt, Human
cgccugaaacgcgaacccccggaggc

SEQ ID NO: 274681 - RNA, 18 nt, Human
cgcgaacccccggaggca

SEQ ID NO: 274682 - RNA, 25 nt, Human
gaaaagaaaaagacagugaaaaaga

SEQ ID NO: 274683 - RNA, 22 nt, Human
gcacuuauuguaguugaaaaca

SEQ ID NO: 274684 - RNA, 20 nt, Human
gcgaaaagaaaaagacagug

SEQ ID NO: 274685 - RNA, 18 nt, Human
ggcccggguucucgaaac

SEQ ID NO: 274686 - RNA, 20 nt, Human
gggaggggaaggcccggguu

SEQ ID NO: 274687 - RNA, 25 nt, Human
ugaaaaagaaaacugcuuuaacggc

SEQ ID NO: 274688 - RNA, 23 nt, Human
ugaaacaaagaagauucagaaac

SEQ ID NO: 274689 - RNA, 18 nt, Human
ugggaggggaaggcccgg

SEQ ID NO: 274690 - RNA, 24 nt, Human
ugggaggggaaggcccggguucuc

SEQ ID NO: 274691 - RNA, 18 nt, Human
uucauuuuuuaaggaaaa

SEQ ID NO: 274692 - RNA, 22 nt, Human
uuccccgcgaaaagaaaaagac

SEQ ID NO: 274693 - RNA, 18 nt, Human
uuccugaggagguggccc

SEQ ID NO: 274694 - RNA, 25 nt, Human
uuguaguugaaaacaugcagcacca

SEQ ID NO: 274695 - RNA, 27 nt, Human
uuuucauuuuuuaaggaaaagcauauu

SEQ ID NO: 274696 - RNA, 18 nt, Human
gagcacugcccuccuucu

SEQ ID NO: 274697 - RNA, 26 nt, Human
aaaaaguauucucuccagauuauaaa

SEQ ID NO: 274698 - RNA, 23 nt, Human
aaacacccacacagagcuucuca

SEQ ID NO: 274699 - RNA, 20 nt, Human
aaagauaguucaaaagccuu

SEQ ID NO: 274700 - RNA, 23 nt, Human
aacacacucauuggaguauaaga

SEQ ID NO: 274701 - RNA, 28 nt, Human
aacacccacacagagcuucucaaacagc

SEQ ID NO: 274702 - RNA, 21 nt, Human
aacacgaccgacugaacauuc

SEQ ID NO: 274703 - RNA, 23 nt, Human
aacugagagaguccacagggaca

SEQ ID NO: 274704 - RNA, 24 nt, Human
acacccacacagagcuucucaaac

SEQ ID NO: 274705 - RNA, 22 nt, Human
agaaagagcuuugauuuggagg

SEQ ID NO: 274706 - RNA, 20 nt, Human
agccgacaccauguggagca

SEQ ID NO: 274707 - RNA, 23 nt, Human
agcuuucugcguggcugaagagc

SEQ ID NO: 274708 - RNA, 24 nt, Human
aggcccggagcccagucacagcgg

SEQ ID NO: 274709 - RNA, 19 nt, Human
aguaggaaagguaccgcuc

SEQ ID NO: 274710 - RNA, 24 nt, Human
caaaacuugaccaaauguucuaag

SEQ ID NO: 274711 - RNA, 24 nt, Human
caaauuccuccauggagucaaaga

SEQ ID NO: 274712 - RNA, 19 nt, Human
cacagaaacacccacacag

SEQ ID NO: 274713 - RNA, 21 nt, Human
cacagcccagccuaccugacc

SEQ ID NO: 274714 - RNA, 25 nt, Human
caccagcacuccacgugucuacccu

SEQ ID NO: 274715 - RNA, 21 nt, Human
caccucuucuagagacucugu

SEQ ID NO: 274716 - RNA, 19 nt, Human
cacucccgcugggcagagu

SEQ ID NO: 274717 - RNA, 23 nt, Human
cacucugcacaacucgggaaguc

SEQ ID NO: 274718 - RNA, 20 nt, Human
caggacgccuggacgacauc

SEQ ID NO: 274719 - RNA, 23 nt, Human
caguaggaaagguaccgcucucu

SEQ ID NO: 274720 - RNA, 21 nt, Human
ccacagaaacacccacacaga

SEQ ID NO: 274721 - RNA, 25 nt, Human
cccaggacgccuggacgacaucaaa

SEQ ID NO: 274722 - RNA, 22 nt, Human
ccccuaacgauaaaggcuucug

SEQ ID NO: 274723 - RNA, 18 nt, Human
ccccugggcgcgcggcug

SEQ ID NO: 274724 - RNA, 23 nt, Human
ccccugggcgcgcggcugaggcc

SEQ ID NO: 274725 - RNA, 25 nt, Human
cccggagcccagucacagcggugcc

SEQ ID NO: 274726 - RNA, 18 nt, Human
cccugaucccaggacgcc

SEQ ID NO: 274727 - RNA, 20 nt, Human
ccggagcccagucacagcgg

SEQ ID NO: 274728 - RNA, 19 nt, Human
ccucagccgagaagcggga

SEQ ID NO: 274729 - RNA, 22 nt, Human
ccuggccgcgcggcgccucagc

SEQ ID NO: 274730 - RNA, 22 nt, Human
cgccucagccgagaagcgggac

SEQ ID NO: 274731 - RNA, 19 nt, Human
cgggaugucugcaccucuu

SEQ ID NO: 274732 - RNA, 18 nt, Human
cgugucuacccugauccc

SEQ ID NO: 274733 - RNA, 22 nt, Human
cguuacaaauuccuccauggag

SEQ ID NO: 274734 - RNA, 23 nt, Human
cugaccacagaaacacccacacu

SEQ ID NO: 274735 - RNA, 21 nt, Human
cuggccgcgcggcgccucagc

SEQ ID NO: 274736 - RNA, 18 nt, Human
cugugagccgacaccaug

SEQ ID NO: 274737 - RNA, 19 nt, Human
cugugagccgacaccaugu

SEQ ID NO: 274738 - RNA, 24 nt, Human
cuuucaggucacaccgaucguuac

SEQ ID NO: 274739 - RNA, 23 nt, Human
gagggccccggaggccccugggc

SEQ ID NO: 274740 - RNA, 24 nt, Human
gcccggccccguuugggccucggc

SEQ ID NO: 274741 - RNA, 18 nt, Human
gcugacccgggagggccc

SEQ ID NO: 274742 - RNA, 21 nt, Human
ggagcagugcuguucacagcc

SEQ ID NO: 274743 - RNA, 22 nt, Human
ggaggccccugggcgcgcggcu

SEQ ID NO: 274744 - RNA, 21 nt, Human
gggcuggcgggggacccuuca

SEQ ID NO: 274745 - RNA, 22 nt, Human
guaccauaaaguuucccucuca

SEQ ID NO: 274746 - RNA, 30 nt, Human
uaaguauaaaaaguacagacgucacucugg

SEQ ID NO: 274747 - RNA, 24 nt, Human
uaauacaaaagaaacgaucauuuc

SEQ ID NO: 274748 - RNA, 22 nt, Human
uaauaggaacaaucuugcacaa

SEQ ID NO: 274749 - RNA, 23 nt, Human
uacaaaacuugaccaaaggacau

SEQ ID NO: 274750 - RNA, 20 nt, Human
uaccugaccacagaaacacc

SEQ ID NO: 274751 - RNA, 20 nt, Human
uauaaaaaggaaaaaaggua

SEQ ID NO: 274752 - RNA, 22 nt, Human
ucaaacaggauaaaaacucaca

SEQ ID NO: 274753 - RNA, 24 nt, Human
ucacagcccagccuaccugaccac

SEQ ID NO: 274754 - RNA, 19 nt, Human
uccacacaggcuaccagau

SEQ ID NO: 274755 - RNA, 19 nt, Human
ucucaaacagcucagcacc

SEQ ID NO: 274756 - RNA, 18 nt, Human
ucugcacaacucgggaag

SEQ ID NO: 274757 - RNA, 22 nt, Human
ucugcaccucuucuagagacuc

SEQ ID NO: 274758 - RNA, 22 nt, Human
ugaccacagaaacacccacaca

SEQ ID NO: 274759 - RNA, 19 nt, Human
ugacccgggagggccccgg

SEQ ID NO: 274760 - RNA, 23 nt, Human
ugacccgggagggccccggaggc

SEQ ID NO: 274761 - RNA, 18 nt, Human
ugagccgacaccaugugg

SEQ ID NO: 274762 - RNA, 24 nt, Human
ugugggcuuuuuuuuuuuuuuaaa

SEQ ID NO: 274763 - RNA, 27 nt, Human
uguguuaaaaacacgaccgacugaaca

SEQ ID NO: 274764 - RNA, 21 nt, Human
uguguuaagagaaaauaguga

SEQ ID NO: 274765 - RNA, 23 nt, Human
uguuaaaaacacgaccgacugaa

SEQ ID NO: 274766 - RNA, 27 nt, Human
uuccacacaggcuaccagauauuuuau

SEQ ID NO: 274767 - RNA, 18 nt, Human
uugauggcgcggccgcgg

SEQ ID NO: 274768 - RNA, 20 nt, Human
uuuccuggcccugcaggcac

SEQ ID NO: 274769 - RNA, 22 nt, Human
uuuuuuuuuuuuaaaaaaagau

SEQ ID NO: 274770 - RNA, 24 nt, Human
uuuuuuuuuuuuaaaaaaagauag

SEQ ID NO: 274771 - RNA, 18 nt, Human
uuuuuuuuuuuuuuuuug

SEQ ID NO: 274772 - RNA, 18 nt, Human
uuuuuuuuuuuuuuuuug

SEQ ID NO: 274773 - RNA, 22 nt, Human
acaguagagaaggcauccucac

SEQ ID NO: 274774 - RNA, 19 nt, Human
agaguuccaaccuggugac

SEQ ID NO: 274775 - RNA, 19 nt, Human
aggcaagaguuccaaccug

SEQ ID NO: 274776 - RNA, 23 nt, Human
aggcauccucacagaggcaagag

SEQ ID NO: 274777 - RNA, 22 nt, Human
cagugagccacccgucuaguuu

SEQ ID NO: 274778 - RNA, 25 nt, Human
ccucacagaggcaagaguuccaacc

SEQ ID NO: 274779 - RNA, 19 nt, Human
ucacagaggcaagaguucc

SEQ ID NO: 274780 - RNA, 22 nt, Human
ugacaauggcagugagccaccc

SEQ ID NO: 274781 - RNA, 19 nt, Human
uuucauggguaugcacagu

SEQ ID NO: 274782 - RNA, 18 nt, Human
acccuaaguuccugggca

SEQ ID NO: 274783 - RNA, 23 nt, Human
caagcacaggaccuggaggccaa

SEQ ID NO: 274784 - RNA, 23 nt, Human
cacccuaaguuccugggcaaaca

SEQ ID NO: 274785 - RNA, 21 nt, Human
cagaauccucacugagcuccc

SEQ ID NO: 274786 - RNA, 23 nt, Human
cagaauccucacugagcucccag

SEQ ID NO: 274787 - RNA, 26 nt, Human
cagcagcaucccagguccuauccagc

SEQ ID NO: 274788 - RNA, 21 nt, Human
caguaaugacaaugaugugug

SEQ ID NO: 274789 - RNA, 24 nt, Human
ccagcgguacugggcuggaccgag

SEQ ID NO: 274790 - RNA, 18 nt, Human
ccaguccagagagaagcc

SEQ ID NO: 274791 - RNA, 18 nt, Human
ccccucuucuagucucac

SEQ ID NO: 274792 - RNA, 21 nt, Human
cccuaaguuccugggcaaaca

SEQ ID NO: 274793 - RNA, 18 nt, Human
ccuccugccucucccucg

SEQ ID NO: 274794 - RNA, 22 nt, Human
cguggagagagcccaggucccg

SEQ ID NO: 274795 - RNA, 20 nt, Human
cucaaggucccuuucugcuc

SEQ ID NO: 274796 - RNA, 20 nt, Human
cucacugagcucccagucca

SEQ ID NO: 274797 - RNA, 20 nt, Human
cuucccaaggcugugagcuc

SEQ ID NO: 274798 - RNA, 27 nt, Human
cuuucugcuccccucuucuagucucaa

SEQ ID NO: 274799 - RNA, 22 nt, Human
gcagccuggacuccuaagggca

SEQ ID NO: 274800 - RNA, 18 nt, Human
gcgggcaggagggucagg

SEQ ID NO: 274801 - RNA, 21 nt, Human
ggaaauggguuguguaugcgg

SEQ ID NO: 274802 - RNA, 21 nt, Human
ggcaggagggucagguccuug

SEQ ID NO: 274803 - RNA, 24 nt, Human
gggcaggagggucagguccuuggu

SEQ ID NO: 274804 - RNA, 20 nt, Human
gucccuuucugcuccccucu

SEQ ID NO: 274805 - RNA, 21 nt, Human
uacugggcuggaccgagccuu

SEQ ID NO: 274806 - RNA, 22 nt, Human
ucaaggucccuuucugcucccc

SEQ ID NO: 274807 - RNA, 18 nt, Human
ucagguccuugucccacu

SEQ ID NO: 274808 - RNA, 19 nt, Human
ucccaguccagagagaagc

SEQ ID NO: 274809 - RNA, 21 nt, Human
uccgcaagcacaggaccugga

SEQ ID NO: 274810 - RNA, 25 nt, Human
uccgcaagcacaggaccuggaggcc

SEQ ID NO: 274811 - RNA, 18 nt, Human
uccggaguuuauucacuu

SEQ ID NO: 274812 - RNA, 24 nt, Human
ucuaagcccucccuauguggagag

SEQ ID NO: 274813 - RNA, 18 nt, Human
ugcgugggguugagcugg

SEQ ID NO: 274814 - RNA, 26 nt, Human
ugcuccccucuucuagucucacuucc

SEQ ID NO: 274815 - RNA, 22 nt, Human
uggagagagcccaggucccguc

SEQ ID NO: 274816 - RNA, 19 nt, Human
ugggcuugggccugcccag

SEQ ID NO: 274817 - RNA, 22 nt, Human
ugggcuugggccugcccagguc

SEQ ID NO: 274818 - RNA, 22 nt, Human
ugucggggcucgaucccagccg

SEQ ID NO: 274819 - RNA, 21 nt, Human
uuaaaacaguaaugacaauga

SEQ ID NO: 274820 - RNA, 23 nt, Human
uucacuuccagcgguacugggcu

SEQ ID NO: 274821 - RNA, 24 nt, Human
uucagcuccagcagcaucccaggu

SEQ ID NO: 274822 - RNA, 25 nt, Human
uuuauucacuuccagcgguacuggg

SEQ ID NO: 274823 - RNA, 22 nt, Human
uuuuuuuuuuuuuuuuucauuu

SEQ ID NO: 274824 - RNA, 24 nt, Human
aaaaaaaaaagccaaucacccgcg

SEQ ID NO: 274825 - RNA, 21 nt, Human
aaaaaagccaaucacccgcgg

SEQ ID NO: 274826 - RNA, 21 nt, Human
aaagaccagaaacuugaauaa

SEQ ID NO: 274827 - RNA, 24 nt, Human
aacuggugaugucugucaacuguu

SEQ ID NO: 274828 - RNA, 21 nt, Human
aagcaacacugguuccaaaac

SEQ ID NO: 274829 - RNA, 23 nt, Human
aauaacugguuugccaaaaaaaa

SEQ ID NO: 274830 - RNA, 23 nt, Human
acaagcaacacugguuccaaaac

SEQ ID NO: 274831 - RNA, 20 nt, Human
acccgcggaacaagcaacac

SEQ ID NO: 274832 - RNA, 18 nt, Human
acgcugagccguggaagu

SEQ ID NO: 274833 - RNA, 21 nt, Human
acuuguucaugcucuuuuaga

SEQ ID NO: 274834 - RNA, 19 nt, Human
agauaaccuuaaccacuaa

SEQ ID NO: 274835 - RNA, 21 nt, Human
cacccacagagugccaggcac

SEQ ID NO: 274836 - RNA, 19 nt, Human
cacccgcggaacaagcaac

SEQ ID NO: 274837 - RNA, 23 nt, Human
ccaaaaaaaaaagccaaucaccc

SEQ ID NO: 274838 - RNA, 22 nt, Human
ccauugucauaaaaugaccaag

SEQ ID NO: 274839 - RNA, 20 nt, Human
cccacagagugccaggcacu

SEQ ID NO: 274840 - RNA, 18 nt, Human
ccccucuggcccuggccu

SEQ ID NO: 274841 - RNA, 23 nt, Human
ccgcgcuggaaccuccucgguua

SEQ ID NO: 274842 - RNA, 18 nt, Human
ccucccugacgcugagcc

SEQ ID NO: 274843 - RNA, 25 nt, Human
ccuucaaaugaaaacuccuauccau

SEQ ID NO: 274844 - RNA, 21 nt, Human
ccuuuagcgcuggaaaagugg

SEQ ID NO: 274845 - RNA, 20 nt, Human
cgccgcgcuggaaccuccuc

SEQ ID NO: 274846 - RNA, 18 nt, Human
cucccggcgccacgugcc

SEQ ID NO: 274847 - RNA, 18 nt, Human
cucuccucccugacgcug

SEQ ID NO: 274848 - RNA, 27 nt, Human
cucuggcccuggccuugcgccgguucc

SEQ ID NO: 274849 - RNA, 19 nt, Human
gagcaaaauucacuauucc

SEQ ID NO: 274850 - RNA, 22 nt, Human
gaucuucaagacuuguucaaga

SEQ ID NO: 274851 - RNA, 26 nt, Human
gcccuggccuugcgcacacacccacc

SEQ ID NO: 274852 - RNA, 20 nt, Human
gcgcuggaaccuccucgguu

SEQ ID NO: 274853 - RNA, 18 nt, Human
gcucuuuuagagcaaaau

SEQ ID NO: 274854 - RNA, 24 nt, Human
gggaauaaaacacuuuauuuuaaa

SEQ ID NO: 274855 - RNA, 24 nt, Human
gggaauaaaacacuuuauuuuaaa

SEQ ID NO: 274856 - RNA, 18 nt, Human
uaaaacacuuuauuuuaa

SEQ ID NO: 274857 - RNA, 18 nt, Human
uaaaacacuuuauuuuaa

SEQ ID NO: 274858 - RNA, 20 nt, Human
uaauagauaaccuuaaccac

SEQ ID NO: 274859 - RNA, 24 nt, Human
uagagcaaaauucacuauuccguu

SEQ ID NO: 274860 - RNA, 23 nt, Human
uccauugucauaaaaugaccaag

SEQ ID NO: 274861 - RNA, 18 nt, Human
ucccggcgccacgugccc

SEQ ID NO: 274862 - RNA, 24 nt, Human
ugaccaagaucuucaagacuuguu

SEQ ID NO: 274863 - RNA, 21 nt, Human
ugagcacccacagagugccag

SEQ ID NO: 274864 - RNA, 21 nt, Human
ugccaaaaaaaaaagccaauc

SEQ ID NO: 274865 - RNA, 24 nt, Human
ugccaaaaaaaaaagccaaucacc

SEQ ID NO: 274866 - RNA, 24 nt, Human
ugccaaaaaaaaaagccaaucacc

SEQ ID NO: 274867 - RNA, 21 nt, Human
ugccaggcacuguacaaaaca

SEQ ID NO: 274868 - RNA, 20 nt, Human
ugcgcacacacccacccgcg

SEQ ID NO: 274869 - RNA, 26 nt, Human
ugcuucaaaugaaaacuccuauccau

SEQ ID NO: 274870 - RNA, 23 nt, Human
uggcaauaauagauaaccuuaac

SEQ ID NO: 274871 - RNA, 23 nt, Human
uggugaugucugucaacuguuuc

SEQ ID NO: 274872 - RNA, 23 nt, Human
uguucaagaaacaaguuuccaau

SEQ ID NO: 274873 - RNA, 22 nt, Human
uuaaagaccagaaacuugaaua

SEQ ID NO: 274874 - RNA, 26 nt, Human
uuauugagcacccagagugccaggcc

SEQ ID NO: 274875 - RNA, 18 nt, Human
uuccgccgcgcuggaacc

SEQ ID NO: 274876 - RNA, 18 nt, Human
uugucauaaaaugaccaa

SEQ ID NO: 274877 - RNA, 19 nt, Human
uuuuuuuuuuuuuaaggga

SEQ ID NO: 274878 - RNA, 20 nt, Human
aauagcuuccagcggcaggu

SEQ ID NO: 274879 - RNA, 21 nt, Human
acuuuccccaccccacauucu

SEQ ID NO: 274880 - RNA, 24 nt, Human
aggaaauggcacugauggacagaa

SEQ ID NO: 274881 - RNA, 18 nt, Human
agggcuguuagagcugcc

SEQ ID NO: 274882 - RNA, 24 nt, Human
cacgcgguccacagcuuuaggcau

SEQ ID NO: 274883 - RNA, 24 nt, Human
cagcccaauagcuuccagcggcag

SEQ ID NO: 274884 - RNA, 18 nt, Human
ccagcggcaggugcccag

SEQ ID NO: 274885 - RNA, 22 nt, Human
ccagcggcaggugcccaggugc

SEQ ID NO: 274886 - RNA, 19 nt, Human
ccugggaagaaggcgugcc

SEQ ID NO: 274887 - RNA, 20 nt, Human
ccuuggggaacugggaagau

SEQ ID NO: 274888 - RNA, 19 nt, Human
cuagucccagggaggcgag

SEQ ID NO: 274889 - RNA, 20 nt, Human
gccgcugaaaccuaguccca

SEQ ID NO: 274890 - RNA, 23 nt, Human
ggccgcugaaaccuagucccagg

SEQ ID NO: 274891 - RNA, 20 nt, Human
gggaggcgagcccacgcggu

SEQ ID NO: 274892 - RNA, 22 nt, Human
ucuuagcauuuacuuuccccac

SEQ ID NO: 274893 - RNA, 19 nt, Human
ugggaagaaggcgugccuu

SEQ ID NO: 274894 - RNA, 19 nt, Human
ugggaagaugccgucagug

SEQ ID NO: 274895 - RNA, 22 nt, Human
ugugggugggcaggaggacagc

SEQ ID NO: 274896 - RNA, 20 nt, Human
caguccgaagaguuugguua

SEQ ID NO: 274897 - RNA, 21 nt, Human
cgagagacuggaugccaaaga

SEQ ID NO: 274898 - RNA, 18 nt, Human
cuuuaugggugaugccac

SEQ ID NO: 274899 - RNA, 21 nt, Human
ggguaacagguggcagaaaag

SEQ ID NO: 274900 - RNA, 21 nt, Human
gguaacagguggcagaaaaga

SEQ ID NO: 274901 - RNA, 18 nt, Human
uuuuuuuuuuuuuguuuu

SEQ ID NO: 274902 - RNA, 21 nt, Human
aaaaaauacucaagacagucc

SEQ ID NO: 274903 - RNA, 26 nt, Human
aaacaagauggacaaaaaaaaaaaaa

SEQ ID NO: 274904 - RNA, 20 nt, Human
aaacacaguacaccaaugaa

SEQ ID NO: 274905 - RNA, 23 nt, Human
aaagcugaggagcacaacccuug

SEQ ID NO: 274906 - RNA, 21 nt, Human
aaaugaaacaagauggacaaa

SEQ ID NO: 274907 - RNA, 22 nt, Human
aagaaaagcugugaacagcaac

SEQ ID NO: 274908 - RNA, 24 nt, Human
aagaaaagcugugaacagcaacau

SEQ ID NO: 274909 - RNA, 21 nt, Human
aagcugugaacagcaacauca

SEQ ID NO: 274910 - RNA, 24 nt, Human
aagcuugaacccgggaggcagagg

SEQ ID NO: 274911 - RNA, 19 nt, Human
acaauauaccacacagaau

SEQ ID NO: 274912 - RNA, 24 nt, Human
acacuccagccugggcgacagagu

SEQ ID NO: 274913 - RNA, 20 nt, Human
acagaguaagacuccgucuc

SEQ ID NO: 274914 - RNA, 20 nt, Human
acagaguaagacuccgucuc

SEQ ID NO: 274915 - RNA, 20 nt, Human
acaguacaccaaugaaaaaa

SEQ ID NO: 274916 - RNA, 27 nt, Human
accacaauccaucaaggaccacacacu

SEQ ID NO: 274917 - RNA, 21 nt, Human
accucuccuucuuaugaauuc

SEQ ID NO: 274918 - RNA, 18 nt, Human
acuacacuccagccuggg

SEQ ID NO: 274919 - RNA, 24 nt, Human
acuacacuccagccugggcgacag

SEQ ID NO: 274920 - RNA, 19 nt, Human
acuagacacugcaacuuau

SEQ ID NO: 274921 - RNA, 27 nt, Human
acugcaacuuauuaguaucggcgacgu

SEQ ID NO: 274922 - RNA, 22 nt, Human
agaaagcugaggagcacaaccc

SEQ ID NO: 274923 - RNA, 23 nt, Human
agacacaaaagggucauuccugg

SEQ ID NO: 274924 - RNA, 23 nt, Human
agagauugcagugagccgagauc

SEQ ID NO: 274925 - RNA, 19 nt, Human
agcaacagagaggugaaag

SEQ ID NO: 274926 - RNA, 18 nt, Human
agcauuuugggaggccga

SEQ ID NO: 274927 - RNA, 24 nt, Human
agcauuuugggaggccgagguggg

SEQ ID NO: 274928 - RNA, 24 nt, Human
agccugggcgacagaguaagacuc

SEQ ID NO: 274929 - RNA, 21 nt, Human
aggauaagaagcaagugaggu

SEQ ID NO: 274930 - RNA, 21 nt, Human
aggcagagauugcagugagcc

SEQ ID NO: 274931 - RNA, 24 nt, Human
aggcagagauugcagugagccgag

SEQ ID NO: 274932 - RNA, 21 nt, Human
aggccgagguggguagaucac

SEQ ID NO: 274933 - RNA, 24 nt, Human
agguggguagaucacgaggucagg

SEQ ID NO: 274934 - RNA, 24 nt, Human
agugagguugggcacgguggcuca

SEQ ID NO: 274935 - RNA, 24 nt, Human
aucaugccacuacacuccagccug

SEQ ID NO: 274936 - RNA, 22 nt, Human
augccacuacacuccagccugg

SEQ ID NO: 274937 - RNA, 24 nt, Human
auugcagugagccgagaucaugcc

SEQ ID NO: 274938 - RNA, 22 nt, Human
caaaaaauacucaagacagucc

SEQ ID NO: 274939 - RNA, 24 nt, Human
caaaaaauacucaagacaguccaa

SEQ ID NO: 274940 - RNA, 22 nt, Human
caaacagcacugagaaagcuga

SEQ ID NO: 274941 - RNA, 21 nt, Human
caaaucaaacacaguacacca

SEQ ID NO: 274942 - RNA, 19 nt, Human
caacacgggaaaauugguc

SEQ ID NO: 274943 - RNA, 20 nt, Human
caagaaaagcugugaacagc

SEQ ID NO: 274944 - RNA, 21 nt, Human
caauugccccaauuccuucca

SEQ ID NO: 274945 - RNA, 25 nt, Human
cacagaacugauuaaacaauauacc

SEQ ID NO: 274946 - RNA, 24 nt, Human
cacagcaugacuaccuaagauagg

SEQ ID NO: 274947 - RNA, 19 nt, Human
caccccucccuugcccucu

SEQ ID NO: 274948 - RNA, 24 nt, Human
caccccuguaaucccagcauuuug

SEQ ID NO: 274949 - RNA, 19 nt, Human
caccugggagugaauggag

SEQ ID NO: 274950 - RNA, 19 nt, Human
cacggccucucccgucccg

SEQ ID NO: 274951 - RNA, 27 nt, Human
cacuacacuccagccugggcgacagag

SEQ ID NO: 274952 - RNA, 19 nt, Human
cacugagucuaaacagaau

SEQ ID NO: 274953 - RNA, 18 nt, Human
cagaauacagcagaccca

SEQ ID NO: 274954 - RNA, 22 nt, Human
cagcauuuugggaggccgaggu

SEQ ID NO: 274955 - RNA, 24 nt, Human
cagcauuuugggaggccgaggugg

SEQ ID NO: 274956 - RNA, 20 nt, Human
cagcuccaggagcugcacgg

SEQ ID NO: 274957 - RNA, 20 nt, Human
cagguccuggaggagcuggg

SEQ ID NO: 274958 - RNA, 20 nt, Human
ccaccccucccuugcccucu

SEQ ID NO: 274959 - RNA, 20 nt, Human
ccacuacacuccagccuggg

SEQ ID NO: 274960 - RNA, 21 nt, Human
ccacuacacuccagccugggc

SEQ ID NO: 274961 - RNA, 23 nt, Human
ccacuacacuccagccugggcga

SEQ ID NO: 274962 - RNA, 24 nt, Human
ccacuacacuccagccugggcgac

SEQ ID NO: 274963 - RNA, 18 nt, Human
ccauagccaucugaccca

SEQ ID NO: 274964 - RNA, 23 nt, Human
ccauuuuucagaaaaacuccaaa

SEQ ID NO: 274965 - RNA, 21 nt, Human
cccauagccaucugacccauc

SEQ ID NO: 274966 - RNA, 19 nt, Human
ccccuguaaucccagcauu

SEQ ID NO: 274967 - RNA, 22 nt, Human
cccgucccgagaaaagagcgcg

SEQ ID NO: 274968 - RNA, 21 nt, Human
ccgguaaccuagcagacaauu

SEQ ID NO: 274969 - RNA, 18 nt, Human
ccucacccaagaaaaaga

SEQ ID NO: 274970 - RNA, 21 nt, Human
ccuccagcauacucccuagag

SEQ ID NO: 274971 - RNA, 18 nt, Human
ccucccauagccaucuga

SEQ ID NO: 274972 - RNA, 22 nt, Human
ccugggcgacagaguaagacuc

SEQ ID NO: 274973 - RNA, 22 nt, Human
ccuguaaucccagcauuuuggg

SEQ ID NO: 274974 - RNA, 18 nt, Human
ccuucuuuuaaggguuuu

SEQ ID NO: 274975 - RNA, 24 nt, Human
cgagaucaugccacuacacuccag

SEQ ID NO: 274976 - RNA, 22 nt, Human
cgagguggguagaucacgaggu

SEQ ID NO: 274977 - RNA, 24 nt, Human
cgagguggguagaucacgagguca

SEQ ID NO: 274978 - RNA, 23 nt, Human
cgcuacacggccucucccguccc

SEQ ID NO: 274979 - RNA, 23 nt, Human
cguauguacgcugccugugaccu

SEQ ID NO: 274980 - RNA, 22 nt, Human
cuaagagaaaaugucuucuuua

SEQ ID NO: 274981 - RNA, 21 nt, Human
cuauagucacugagucuaaac

SEQ ID NO: 274982 - RNA, 21 nt, Human
cucaccccuguaaucccagca

SEQ ID NO: 274983 - RNA, 18 nt, Human
cugaagcuccaacuugua

SEQ ID NO: 274984 - RNA, 21 nt, Human
cugacccauccgaaucuccug

SEQ ID NO: 274985 - RNA, 22 nt, Human
cugcucucucugaaaaacaaaa

SEQ ID NO: 274986 - RNA, 22 nt, Human
cuugugaggcaagaucuccucu

SEQ ID NO: 274987 - RNA, 18 nt, Human
gaaaaaaaaaaugcacag

SEQ ID NO: 274988 - RNA, 22 nt, Human
gaaguagauagagugauaacac

SEQ ID NO: 274989 - RNA, 22 nt, Human
gacaaaucaaacacaguacacc

SEQ ID NO: 274990 - RNA, 24 nt, Human
gacagaguaagacuccgucucggg

SEQ ID NO: 274991 - RNA, 22 nt, Human
gagcgcgcgaccgccggaaacg

SEQ ID NO: 274992 - RNA, 18 nt, Human
gagcugggguaccagcug

SEQ ID NO: 274993 - RNA, 22 nt, Human
gaucacgaggucaggaguucaa

SEQ ID NO: 274994 - RNA, 24 nt, Human
gaucacgaggucaggaguucaaga

SEQ ID NO: 274995 - RNA, 22 nt, Human
gccacuacacuccagccugggc

SEQ ID NO: 274996 - RNA, 24 nt, Human
gccagagccuccuauuagcaacag

SEQ ID NO: 274997 - RNA, 22 nt, Human
gcccauagcaccucccauagcc

SEQ ID NO: 274998 - RNA, 20 nt, Human
gccgagaucaugccacuaca

SEQ ID NO: 274999 - RNA, 23 nt, Human
ggcacgguggcucaccccuguaa

SEQ ID NO: 275000 - RNA, 23 nt, Human
gguagaucacgaggucaggaguu

SEQ ID NO: 275001 - RNA, 23 nt, Human
gguggcucaccccuguaauccca

SEQ ID NO: 275002 - RNA, 24 nt, Human
gguggcucaccccuguaaucccag

SEQ ID NO: 275003 - RNA, 26 nt, Human
guaaccuagcagacaauucccucacg

SEQ ID NO: 275004 - RNA, 28 nt, Human
guaacggcgacgcuacacggccucuccc

SEQ ID NO: 275005 - RNA, 19 nt, Human
uaaaaugaaaaucucuaag

SEQ ID NO: 275006 - RNA, 19 nt, Human
uaacuggauccacuuugcc

SEQ ID NO: 275007 - RNA, 20 nt, Human
uaagagaaaaugucuucuuu

SEQ ID NO: 275008 - RNA, 24 nt, Human
uaagagaaaaugucuucuuuagga

SEQ ID NO: 275009 - RNA, 24 nt, Human
uaagagcuacugucagaccuucag

SEQ ID NO: 275010 - RNA, 22 nt, Human
uacgcugccugugaccuuugug

SEQ ID NO: 275011 - RNA, 22 nt, Human
uacucaagacaguccaagacag

SEQ ID NO: 275012 - RNA, 22 nt, Human
uagaucacgaggucaggaguuc

SEQ ID NO: 275013 - RNA, 19 nt, Human
uaucaagaaaagcugugaa

SEQ ID NO: 275014 - RNA, 22 nt, Human
ucaaacacaguacaccaaugaa

SEQ ID NO: 275015 - RNA, 22 nt, Human
ucacccaagaaaaagauggagg

SEQ ID NO: 275016 - RNA, 21 nt, Human
ucacgaggucaggaguucaag

SEQ ID NO: 275017 - RNA, 24 nt, Human
ucacgaggucaggaguucaagauc

SEQ ID NO: 275018 - RNA, 24 nt, Human
uccaaaaaggguccuucuuuuaag

SEQ ID NO: 275019 - RNA, 24 nt, Human
uccagccugggcgacagaguaaga

SEQ ID NO: 275020 - RNA, 22 nt, Human
uccccaggcccucaacagucac

SEQ ID NO: 275021 - RNA, 22 nt, Human
uccgaaucuccugcucucucug

SEQ ID NO: 275022 - RNA, 25 nt, Human
ucuccugcucucucugaaaaacaaa

SEQ ID NO: 275023 - RNA, 20 nt, Human
ucucucugaaaaacaaaaaa

SEQ ID NO: 275024 - RNA, 23 nt, Human
ugaaaaacaaaaaauacucaaga

SEQ ID NO: 275025 - RNA, 26 nt, Human
ugaaaaacaaaaaauacucaagacag

SEQ ID NO: 275026 - RNA, 19 nt, Human
ugagccgagaucaugccac

SEQ ID NO: 275027 - RNA, 19 nt, Human
uggacaaaaaaaaaaaaaa

SEQ ID NO: 275028 - RNA, 23 nt, Human
uggacaaaaaaaaaaaaaaccgg

SEQ ID NO: 275029 - RNA, 24 nt, Human
uggacaaaaaaaaaaaaaaccgga

SEQ ID NO: 275030 - RNA, 22 nt, Human
uggcaguuucucuggggcuggg

SEQ ID NO: 275031 - RNA, 21 nt, Human
uggcucaccccuguaauccca

SEQ ID NO: 275032 - RNA, 22 nt, Human
uggcucaccccuguaaucccag

SEQ ID NO: 275033 - RNA, 24 nt, Human
uggcucaccccuguaaucccagca

SEQ ID NO: 275034 - RNA, 20 nt, Human
ugggaggccgagguggguag

SEQ ID NO: 275035 - RNA, 24 nt, Human
ugggaggccgagguggguagauca

SEQ ID NO: 275036 - RNA, 20 nt, Human
ugggggauguuugguuuuug

SEQ ID NO: 275037 - RNA, 21 nt, Human
uggggucaaucccaaaguucc

SEQ ID NO: 275038 - RNA, 18 nt, Human
uggguguccucacccaag

SEQ ID NO: 275039 - RNA, 24 nt, Human
ugguguauguggcaguuucucugg

SEQ ID NO: 275040 - RNA, 18 nt, Human
uguaaggauaagaagcaa

SEQ ID NO: 275041 - RNA, 21 nt, Human
uguggcaguuucucuggggcu

SEQ ID NO: 275042 - RNA, 25 nt, Human
ugugguguauguggcaguuucucug

SEQ ID NO: 275043 - RNA, 24 nt, Human
uguuuaugcccauagcaccuccca

SEQ ID NO: 275044 - RNA, 24 nt, Human
uuaaggguuuugagaaacuagaca

SEQ ID NO: 275045 - RNA, 21 nt, Human
uucaggaaugcaccacacaga

SEQ ID NO: 275046 - RNA, 18 nt, Human
uugcagugagccgagauc

SEQ ID NO: 275047 - RNA, 20 nt, Human
uugcagugagccgagaucau

SEQ ID NO: 275048 - RNA, 21 nt, Human
uugcagugagccgagaucaug

SEQ ID NO: 275049 - RNA, 25 nt, Human
uugggaggccgagguggguagauca

SEQ ID NO: 275050 - RNA, 21 nt, Human
uuuuaaggguuuugagaaacu

SEQ ID NO: 275051 - RNA, 21 nt, Human
uuuuccaggguagaauucugg

SEQ ID NO: 275052 - RNA, 18 nt, Human
aaacucgcccuacuccua

SEQ ID NO: 275053 - RNA, 19 nt, Human
aaaggcuugcagaucgaga

SEQ ID NO: 275054 - RNA, 21 nt, Human
aacaaacacuuacacacugag

SEQ ID NO: 275055 - RNA, 21 nt, Human
aaccagcccugcuuugaaaau

SEQ ID NO: 275056 - RNA, 19 nt, Human
aacuccuugggcagcaccu

SEQ ID NO: 275057 - RNA, 21 nt, Human
aagaaagacauuuaaaaagaa

SEQ ID NO: 275058 - RNA, 19 nt, Human
aagaacacacagcucuaaa

SEQ ID NO: 275059 - RNA, 24 nt, Human
aagaaggcacuaccagcaguuacu

SEQ ID NO: 275060 - RNA, 20 nt, Human
aaggcacuaccagcaguuac

SEQ ID NO: 275061 - RNA, 22 nt, Human
aaguaagagaacucaaagagga

SEQ ID NO: 275062 - RNA, 19 nt, Human
acacaaccaaagaaggcac

SEQ ID NO: 275063 - RNA, 19 nt, Human
acacaaccaaagaaggcac

SEQ ID NO: 275064 - RNA, 21 nt, Human
acacacugagcaacacaacca

SEQ ID NO: 275065 - RNA, 24 nt, Human
acccauacugaacgcgggcucucc

SEQ ID NO: 275066 - RNA, 21 nt, Human
acucgcccuacuccuauuucu

SEQ ID NO: 275067 - RNA, 23 nt, Human
agaaagaacacacagcucuaaaa

SEQ ID NO: 275068 - RNA, 18 nt, Human
agaaagacauuuaaaaag

SEQ ID NO: 275069 - RNA, 23 nt, Human
agagaggcaacuauuugguuggu

SEQ ID NO: 275070 - RNA, 21 nt, Human
agccagggccagggcaggcug

SEQ ID NO: 275071 - RNA, 21 nt, Human
aggagaagccagcagcagagc

SEQ ID NO: 275072 - RNA, 23 nt, Human
aggcaacuauuugguuggugaaa

SEQ ID NO: 275073 - RNA, 18 nt, Human
agggagagaguuucuaaa

SEQ ID NO: 275074 - RNA, 18 nt, Human
agggagggaagugauaag

SEQ ID NO: 275075 - RNA, 18 nt, Human
agguuccaguuuggugac

SEQ ID NO: 275076 - RNA, 22 nt, Human
aguaagagaacucaaagaggaa

SEQ ID NO: 275077 - RNA, 19 nt, Human
agucgcagugggaggaggg

SEQ ID NO: 275078 - RNA, 24 nt, Human
agugcuggaggccgauggggaacc

SEQ ID NO: 275079 - RNA, 21 nt, Human
auaaacacccuuaucucuuua

SEQ ID NO: 275080 - RNA, 23 nt, Human
caaagaggaaucaaugccagaga

SEQ ID NO: 275081 - RNA, 27 nt, Human
caacacaaccaaagaaggcacuaccag

SEQ ID NO: 275082 - RNA, 21 nt, Human
caaccaaagaaggcacuacca

SEQ ID NO: 275083 - RNA, 20 nt, Human
caaugugggccagggccaga

SEQ ID NO: 275084 - RNA, 23 nt, Human
cacaaccaaagaaggcacuacca

SEQ ID NO: 275085 - RNA, 25 nt, Human
caccgccgccauuguucacuuccug

SEQ ID NO: 275086 - RNA, 19 nt, Human
cacuuacacacugagcaac

SEQ ID NO: 275087 - RNA, 21 nt, Human
cagaaucugugguggggcaca

SEQ ID NO: 275088 - RNA, 20 nt, Human
cagcagcauucacagcgguu

SEQ ID NO: 275089 - RNA, 20 nt, Human
cagcaggagccaugccuucu

SEQ ID NO: 275090 - RNA, 18 nt, Human
cagcauaggccuuggguc

SEQ ID NO: 275091 - RNA, 18 nt, Human
cagcgguugcagcaggag

SEQ ID NO: 275092 - RNA, 24 nt, Human
cagcucuaaaaccuuucuuccuuc

SEQ ID NO: 275093 - RNA, 18 nt, Human
cagcugaacccucgugca

SEQ ID NO: 275094 - RNA, 21 nt, Human
cagcugaacccucgugcaaac

SEQ ID NO: 275095 - RNA, 21 nt, Human
caggcaccuuggggccgcggg

SEQ ID NO: 275096 - RNA, 22 nt, Human
caggggcuuagcucagaccugc

SEQ ID NO: 275097 - RNA, 18 nt, Human
caguucauacgacgaggg

SEQ ID NO: 275098 - RNA, 19 nt, Human
cauaaacacccuuaucucu

SEQ ID NO: 275099 - RNA, 24 nt, Human
caugugcaaugugggccagggcca

SEQ ID NO: 275100 - RNA, 18 nt, Human
cauuacccugcuuucagg

SEQ ID NO: 275101 - RNA, 18 nt, Human
ccagcagcagagcuucag

SEQ ID NO: 275102 - RNA, 24 nt, Human
ccggcuaguggcggcagcuuuggc

SEQ ID NO: 275103 - RNA, 22 nt, Human
ccucgugcaaacacuuguccau

SEQ ID NO: 275104 - RNA, 19 nt, Human
ccugucaauguggucuggu

SEQ ID NO: 275105 - RNA, 20 nt, Human
ccuuucuuccuuccuuugcc

SEQ ID NO: 275106 - RNA, 23 nt, Human
cucuaaaaccuuucuuccuuccu

SEQ ID NO: 275107 - RNA, 21 nt, Human
cuggaaacaaacacuuacaca

SEQ ID NO: 275108 - RNA, 23 nt, Human
cuggggaaggcugaagacagcuu

SEQ ID NO: 275109 - RNA, 22 nt, Human
cuuacacacugagcaacacaac

SEQ ID NO: 275110 - RNA, 23 nt, Human
cuuuauguguauauauacaugac

SEQ ID NO: 275111 - RNA, 21 nt, Human
gaaaggcuugcagaucgagag

SEQ ID NO: 275112 - RNA, 19 nt, Human
gaacacacagcucuaaaac

SEQ ID NO: 275113 - RNA, 26 nt, Human
gagcaugagauggcuaaccagggaga

SEQ ID NO: 275114 - RNA, 19 nt, Human
gagccagccucagcuuugg

SEQ ID NO: 275115 - RNA, 20 nt, Human
gagucgcagugggaggaggg

SEQ ID NO: 275116 - RNA, 21 nt, Human
gcaaauguaagucaggaauuu

SEQ ID NO: 275117 - RNA, 24 nt, Human
gcacugaggucgacggggaggcca

SEQ ID NO: 275118 - RNA, 23 nt, Human
gcagugccgggucuggcccaugc

SEQ ID NO: 275119 - RNA, 19 nt, Human
gcagugcuggaggccgaug

SEQ ID NO: 275120 - RNA, 18 nt, Human
gccagagaaagaacacac

SEQ ID NO: 275121 - RNA, 20 nt, Human
gcuaguggcggcagcuuugg

SEQ ID NO: 275122 - RNA, 20 nt, Human
gcucuaaaaccuuucuuccu

SEQ ID NO: 275123 - RNA, 21 nt, Human
gcugaacccucgugcaaacac

SEQ ID NO: 275124 - RNA, 28 nt, Human
gcugcagcuucucuggagaucucugauc

SEQ ID NO: 275125 - RNA, 20 nt, Human
ggaaaaccagcccugcuuug

SEQ ID NO: 275126 - RNA, 20 nt, Human
ggaagugauaaggcugagca

SEQ ID NO: 275127 - RNA, 20 nt, Human
ggagggaagugauaaggcug

SEQ ID NO: 275128 - RNA, 20 nt, Human
gggaacuucugaagcuacac

SEQ ID NO: 275129 - RNA, 23 nt, Human
gggaaggcagaggauagcaaaga

SEQ ID NO: 275130 - RNA, 25 nt, Human
gggaggagggaggcagugcuggagg

SEQ ID NO: 275131 - RNA, 23 nt, Human
gggcaguauggacucagccuggg

SEQ ID NO: 275132 - RNA, 23 nt, Human
gugcuggaggccgauggggaacc

SEQ ID NO: 275133 - RNA, 20 nt, Human
guggcggcagcuuuggcagc

SEQ ID NO: 275134 - RNA, 22 nt, Human
uaaaaagaaaauauccuggaaa

SEQ ID NO: 275135 - RNA, 19 nt, Human
uaaguaccacacauacgca

SEQ ID NO: 275136 - RNA, 20 nt, Human
uaaguaccacacauacgcag

SEQ ID NO: 275137 - RNA, 21 nt, Human
uaagugugaacaacaggcacc

SEQ ID NO: 275138 - RNA, 18 nt, Human
uaauauacagcagggaga

SEQ ID NO: 275139 - RNA, 23 nt, Human
uaccacacauacgcagauauaug

SEQ ID NO: 275140 - RNA, 20 nt, Human
uaccagcaguuacucccacc

SEQ ID NO: 275141 - RNA, 22 nt, Human
uacccugcuuucaggggcuuag

SEQ ID NO: 275142 - RNA, 21 nt, Human
uagcaaagaaaugguuucuca

SEQ ID NO: 275143 - RNA, 21 nt, Human
uagcuuuauaaacuucccuua

SEQ ID NO: 275144 - RNA, 19 nt, Human
uauaugccuuuauguguau

SEQ ID NO: 275145 - RNA, 26 nt, Human
uauaugccuuuauguguauauauuac

SEQ ID NO: 275146 - RNA, 21 nt, Human
uaucacugauuggagucaaaa

SEQ ID NO: 275147 - RNA, 18 nt, Human
uauguguauauauacaug

SEQ ID NO: 275148 - RNA, 20 nt, Human
uauguguauauauacaugac

SEQ ID NO: 275149 - RNA, 20 nt, Human
ucaaaacagaaaggacucca

SEQ ID NO: 275150 - RNA, 18 nt, Human
ucacaugaguucugaucc

SEQ ID NO: 275151 - RNA, 21 nt, Human
ucagccuaaacaagaagccag

SEQ ID NO: 275152 - RNA, 21 nt, Human
ucaggcacccagaugggaggg

SEQ ID NO: 275153 - RNA, 23 nt, Human
uccaugugcaaugugggccaggg

SEQ ID NO: 275154 - RNA, 18 nt, Human
ucuccaccugcucccuuu

SEQ ID NO: 275155 - RNA, 18 nt, Human
ucucucugaaaacaaaaa

SEQ ID NO: 275156 - RNA, 21 nt, Human
ucucugagccagccucagcuu

SEQ ID NO: 275157 - RNA, 26 nt, Human
ucuguaaucaaggcaacuccuugggc

SEQ ID NO: 275158 - RNA, 24 nt, Human
ucugugguggggcacagccggggc

SEQ ID NO: 275159 - RNA, 21 nt, Human
ugaaaacaaaaaggcacugag

SEQ ID NO: 275160 - RNA, 18 nt, Human
ugaaaauuacaaguccuu

SEQ ID NO: 275161 - RNA, 23 nt, Human
ugaaaauuacaaguccuucuccc

SEQ ID NO: 275162 - RNA, 18 nt, Human
ugaacgcgggcucuccug

SEQ ID NO: 275163 - RNA, 27 nt, Human
ugacgagagaggcaacuauuugguugg

SEQ ID NO: 275164 - RNA, 18 nt, Human
ugacuaaguaccacacau

SEQ ID NO: 275165 - RNA, 20 nt, Human
ugagaaaaagugucuguugc

SEQ ID NO: 275166 - RNA, 23 nt, Human
ugagaaaaagugucuguugcaaa

SEQ ID NO: 275167 - RNA, 20 nt, Human
ugagcaugagauggcuaacc

SEQ ID NO: 275168 - RNA, 19 nt, Human
ugaggucgacggggaggcc

SEQ ID NO: 275169 - RNA, 19 nt, Human
ugcaaaaggaaugugcuac

SEQ ID NO: 275170 - RNA, 24 nt, Human
ugcacuggagugucucugcagucc

SEQ ID NO: 275171 - RNA, 18 nt, Human
ugccacagcuggaacugc

SEQ ID NO: 275172 - RNA, 19 nt, Human
ugccacagcuggaacugcu

SEQ ID NO: 275173 - RNA, 23 nt, Human
ugccagagaaagaacacacagcu

SEQ ID NO: 275174 - RNA, 19 nt, Human
ugccuuuauguguauauau

SEQ ID NO: 275175 - RNA, 18 nt, Human
uggcaggagaagccagca

SEQ ID NO: 275176 - RNA, 19 nt, Human
uggcuucccuuuggggaaa

SEQ ID NO: 275177 - RNA, 25 nt, Human
ugggaggagggaggcagugcuggag

SEQ ID NO: 275178 - RNA, 25 nt, Human
ugggcaggcacaaaugcaccugcca

SEQ ID NO: 275179 - RNA, 18 nt, Human
uggggaaacacaugacga

SEQ ID NO: 275180 - RNA, 22 nt, Human
ugguggggcacagccugggggc

SEQ ID NO: 275181 - RNA, 20 nt, Human
ugugaacaacaggcaccuug

SEQ ID NO: 275182 - RNA, 23 nt, Human
ugugggccagggccagagccagg

SEQ ID NO: 275183 - RNA, 22 nt, Human
ugugguggggcacagccugggg

SEQ ID NO: 275184 - RNA, 24 nt, Human
ugugguggggcacagccugggggc

SEQ ID NO: 275185 - RNA, 21 nt, Human
ugugguuuaaaaaaaucuuag

SEQ ID NO: 275186 - RNA, 20 nt, Human
uuauguguauauauacauga

SEQ ID NO: 275187 - RNA, 21 nt, Human
uuauguguauauauacaugac

SEQ ID NO: 275188 - RNA, 22 nt, Human
uuauguguauauauacaugacc

SEQ ID NO: 275189 - RNA, 22 nt, Human
uucaaaacagaaaggacuccaa

SEQ ID NO: 275190 - RNA, 19 nt, Human
uugaaaauuacaaguccuu

SEQ ID NO: 275191 - RNA, 21 nt, Human
uugccacagcuggaacugcug

SEQ ID NO: 275192 - RNA, 24 nt, Human
uugccacagcuggaacugcugggc

SEQ ID NO: 275193 - RNA, 20 nt, Human
uuggaauuuuuugacuaauu

SEQ ID NO: 275194 - RNA, 19 nt, Human
uugggcagcaccuggagau

SEQ ID NO: 275195 - RNA, 25 nt, Human
uuuaugagcauuacccugcuuucag

SEQ ID NO: 275196 - RNA, 19 nt, Human
uuuauguguauauauacau

SEQ ID NO: 275197 - RNA, 24 nt, Human
aaaaaaguauacaaagggaucccu

SEQ ID NO: 275198 - RNA, 23 nt, Human
aaaccagggcacagcgacaagga

SEQ ID NO: 275199 - RNA, 18 nt, Human
aaagccuuugggaggaaa

SEQ ID NO: 275200 - RNA, 18 nt, Human
aaaggaaggcaggggaga

SEQ ID NO: 275201 - RNA, 18 nt, Human
aacaggacaccggugggg

SEQ ID NO: 275202 - RNA, 23 nt, Human
aacccaggagggccgaggaaacc

SEQ ID NO: 275203 - RNA, 19 nt, Human
aaccccagagaaaaaaacc

SEQ ID NO: 275204 - RNA, 18 nt, Human
aagccuuugggaggaaag

SEQ ID NO: 275205 - RNA, 23 nt, Human
acacacacacacacacacacaca

SEQ ID NO: 275206 - RNA, 23 nt, Human
acacacacacacacacacacaca

SEQ ID NO: 275207 - RNA, 23 nt, Human
acacacacacacacacacacaca

SEQ ID NO: 275208 - RNA, 23 nt, Human
acacacacacacacacacacaca

SEQ ID NO: 275209 - RNA, 31 nt, Human
acacacacacacacacacacaggcacgcaca

SEQ ID NO: 275210 - RNA, 23 nt, Human
acacacacacacacacacacagu

SEQ ID NO: 275211 - RNA, 25 nt, Human
acacacacacacacaggcacgcagu

SEQ ID NO: 275212 - RNA, 21 nt, Human
accacugaggggcgagaagcc

SEQ ID NO: 275213 - RNA, 18 nt, Human
acccaaacugaacaacaa

SEQ ID NO: 275214 - RNA, 23 nt, Human
accccagagaaaaaaacccccac

SEQ ID NO: 275215 - RNA, 20 nt, Human
acccgugaguugcccuuguc

SEQ ID NO: 275216 - RNA, 19 nt, Human
acgucagcucagcgucacc

SEQ ID NO: 275217 - RNA, 19 nt, Human
acugguaucaaaaucuaaa

SEQ ID NO: 275218 - RNA, 18 nt, Human
agacacccaaacugaaca

SEQ ID NO: 275219 - RNA, 19 nt, Human
agagggagugggaacagag

SEQ ID NO: 275220 - RNA, 26 nt, Human
agcgucacccacucauggcugguggc

SEQ ID NO: 275221 - RNA, 22 nt, Human
agcuauaaaggauuggaaagaa

SEQ ID NO: 275222 - RNA, 25 nt, Human
aggcagagcgagggccacagggggu

SEQ ID NO: 275223 - RNA, 18 nt, Human
agggauggcagagcaagg

SEQ ID NO: 275224 - RNA, 22 nt, Human
agggcaacaagccugagggaca

SEQ ID NO: 275225 - RNA, 20 nt, Human
agggcacagcgacaaggaca

SEQ ID NO: 275226 - RNA, 23 nt, Human
agggccacagggggucccagagg

SEQ ID NO: 275227 - RNA, 22 nt, Human
aucacacacacacacacacaca

SEQ ID NO: 275228 - RNA, 20 nt, Human
auuucauccccaagggugaa

SEQ ID NO: 275229 - RNA, 25 nt, Human
caaagugggaagauccuuauugcca

SEQ ID NO: 275230 - RNA, 20 nt, Human
caacaagauaugcccacgua

SEQ ID NO: 275231 - RNA, 18 nt, Human
caagacacaacaaacagg

SEQ ID NO: 275232 - RNA, 22 nt, Human
caaggaguaaacccaggagggc

SEQ ID NO: 275233 - RNA, 23 nt, Human
caagugacccauccaaagucauc

SEQ ID NO: 275234 - RNA, 25 nt, Human
caagugacccauccaaagucaucca

SEQ ID NO: 275235 - RNA, 20 nt, Human
cacacacacacacacacaca

SEQ ID NO: 275236 - RNA, 20 nt, Human
cacacacacacacacacaca

SEQ ID NO: 275237 - RNA, 20 nt, Human
cacacacacacacacacaca

SEQ ID NO: 275238 - RNA, 20 nt, Human
cacacacacacacacacaca

SEQ ID NO: 275239 - RNA, 20 nt, Human
cacacacacacacacacaca

SEQ ID NO: 275240 - RNA, 20 nt, Human
cacacacacacacacacaca

SEQ ID NO: 275241 - RNA, 20 nt, Human
cacacacacacacacacaca

SEQ ID NO: 275242 - RNA, 22 nt, Human
cacacacacacacacacacaca

SEQ ID NO: 275243 - RNA, 22 nt, Human
cacacacacacacacacacaca

SEQ ID NO: 275244 - RNA, 26 nt, Human
cacacacacacacacacacacacaca

SEQ ID NO: 275245 - RNA, 26 nt, Human
cacacacacacacacacacacacaca

SEQ ID NO: 275246 - RNA, 26 nt, Human
cacacacacacacacacacacacaca

SEQ ID NO: 275247 - RNA, 26 nt, Human
cacacacacacacacacacacacaca

SEQ ID NO: 275248 - RNA, 28 nt, Human
cacacacacacacacacacacacaggca

SEQ ID NO: 275249 - RNA, 21 nt, Human
caccaggaggauccaggcuuc

SEQ ID NO: 275250 - RNA, 19 nt, Human
cagauuagaaaagcauugc

SEQ ID NO: 275251 - RNA, 24 nt, Human
cagcgacaaggacaggaggcagag

SEQ ID NO: 275252 - RNA, 23 nt, Human
caggagccggggugacaggugcu

SEQ ID NO: 275253 - RNA, 21 nt, Human
caggcagacgucaagagaggc

SEQ ID NO: 275254 - RNA, 23 nt, Human
caggguagaaccagcagaacauu

SEQ ID NO: 275255 - RNA, 25 nt, Human
cauaaaaaaggagaaagggggacuu

SEQ ID NO: 275256 - RNA, 21 nt, Human
cauccacuuuaaccagcuucc

SEQ ID NO: 275257 - RNA, 19 nt, Human
ccaagaugauuucaccagg

SEQ ID NO: 275258 - RNA, 20 nt, Human
ccaccaggcuucuuugaaca

SEQ ID NO: 275259 - RNA, 22 nt, Human
ccaggcuucaggcuacacggag

SEQ ID NO: 275260 - RNA, 21 nt, Human
ccauccuuggggacccugcag

SEQ ID NO: 275261 - RNA, 20 nt, Human
cccaaacugaacaacaagau

SEQ ID NO: 275262 - RNA, 22 nt, Human
cccacguacaguauauaaaaga

SEQ ID NO: 275263 - RNA, 21 nt, Human
cccagagaaaaaaacccccac

SEQ ID NO: 275264 - RNA, 21 nt, Human
cccaucacacacacacacaca

SEQ ID NO: 275265 - RNA, 19 nt, Human
ccccaagggugaagcagca

SEQ ID NO: 275266 - RNA, 20 nt, Human
ccccagagaaaaaaaccccc

SEQ ID NO: 275267 - RNA, 24 nt, Human
cccccacuguaaagcccuuucaaa

SEQ ID NO: 275268 - RNA, 21 nt, Human
cccuuggaugcuauugcugga

SEQ ID NO: 275269 - RNA, 23 nt, Human
cccuugucggcaagagagggagu

SEQ ID NO: 275270 - RNA, 24 nt, Human
ccguccgcucggccgcugcucgcu

SEQ ID NO: 275271 - RNA, 19 nt, Human
ccucuuuagcagacaccca

SEQ ID NO: 275272 - RNA, 24 nt, Human
ccuucccaccauuuacucugagag

SEQ ID NO: 275273 - RNA, 20 nt, Human
cgacaaggacaggaggcaga

SEQ ID NO: 275274 - RNA, 22 nt, Human
cgacaaggacaggaggcagagc

SEQ ID NO: 275275 - RNA, 24 nt, Human
cgagaagcccgaggagggaaacca

SEQ ID NO: 275276 - RNA, 21 nt, Human
cgaggaaaccacugaggggcg

SEQ ID NO: 275277 - RNA, 21 nt, Human
cgcugcccggccgccccucgg

SEQ ID NO: 275278 - RNA, 23 nt, Human
cuaaaugcagcaaauucugggaa

SEQ ID NO: 275279 - RNA, 23 nt, Human
cuacacggagagcaggagccggg

SEQ ID NO: 275280 - RNA, 22 nt, Human
cuccauguggcaggaacaggac

SEQ ID NO: 275281 - RNA, 18 nt, Human
cugcagucugggaggcca

SEQ ID NO: 275282 - RNA, 19 nt, Human
cugccagggauggcagagc

SEQ ID NO: 275283 - RNA, 20 nt, Human
cugggccuuuggggucuugg

SEQ ID NO: 275284 - RNA, 21 nt, Human
gaaagaaagccuuugggagga

SEQ ID NO: 275285 - RNA, 23 nt, Human
gagcaggagccggggugacaggu

SEQ ID NO: 275286 - RNA, 19 nt, Human
gagggcaacaagccugagg

SEQ ID NO: 275287 - RNA, 23 nt, Human
gagggcaacaagccugagggaca

SEQ ID NO: 275288 - RNA, 19 nt, Human
gaguaaacccaggagggcc

SEQ ID NO: 275289 - RNA, 22 nt, Human
gaugcuauugcuggaggagggg

SEQ ID NO: 275290 - RNA, 22 nt, Human
gauuugcacaauccauuggaug

SEQ ID NO: 275291 - RNA, 19 nt, Human
gcaugaagucaagcuccau

SEQ ID NO: 275292 - RNA, 31 nt, Human
gcccaucacacacacacacacacacacacag

SEQ ID NO: 275293 - RNA, 20 nt, Human
gcccugaacccuuucuaacu

SEQ ID NO: 275294 - RNA, 24 nt, Human
gccuuuggggucuuggugccccca

SEQ ID NO: 275295 - RNA, 19 nt, Human
gcucagagagcuugugccu

SEQ ID NO: 275296 - RNA, 21 nt, Human
ggaauuggggaggcgucucca

SEQ ID NO: 275297 - RNA, 19 nt, Human
ggacaggaggcagagcgag

SEQ ID NO: 275298 - RNA, 21 nt, Human
ggacaggaggcagagcgaggg

SEQ ID NO: 275299 - RNA, 22 nt, Human
ggcacagcgacaaggacaggag

SEQ ID NO: 275300 - RNA, 22 nt, Human
ggccuuuggggucuuggugccc

SEQ ID NO: 275301 - RNA, 21 nt, Human
ggcgagaagcccgaggaggga

SEQ ID NO: 275302 - RNA, 22 nt, Human
ggcuggaaacgcggcauaaaua

SEQ ID NO: 275303 - RNA, 24 nt, Human
gggauuugcacaauccauuggaug

SEQ ID NO: 275304 - RNA, 18 nt, Human
ggguggguuuggggaggg

SEQ ID NO: 275305 - RNA, 22 nt, Human
guauagcaagacacaacaaaca

SEQ ID NO: 275306 - RNA, 18 nt, Human
guccugucugaagaccuc

SEQ ID NO: 275307 - RNA, 19 nt, Human
uaacagguuuaaaacuuug

SEQ ID NO: 275308 - RNA, 23 nt, Human
uaacagguuuaaaacuuuggaga

SEQ ID NO: 275309 - RNA, 21 nt, Human
uaacuagaacaauuauggggc

SEQ ID NO: 275310 - RNA, 22 nt, Human
uaacuuccaggccccuuggaug

SEQ ID NO: 275311 - RNA, 24 nt, Human
uaaguagcuccucacccagcggcu

SEQ ID NO: 275312 - RNA, 24 nt, Human
uaaugucccuccuuuauccuauca

SEQ ID NO: 275313 - RNA, 18 nt, Human
uauaaaggauuggaaaga

SEQ ID NO: 275314 - RNA, 22 nt, Human
uaucuucauugccagccuguua

SEQ ID NO: 275315 - RNA, 24 nt, Human
uaugggccagggacacguuucuug

SEQ ID NO: 275316 - RNA, 19 nt, Human
ucaacagguugccucuuag

SEQ ID NO: 275317 - RNA, 23 nt, Human
ucaacugcagagggcaacaagcc

SEQ ID NO: 275318 - RNA, 21 nt, Human
ucaauuucccacuccucuccc

SEQ ID NO: 275319 - RNA, 21 nt, Human
ucacacacacacacacacaca

SEQ ID NO: 275320 - RNA, 21 nt, Human
ucacuuuaacagucuccuggc

SEQ ID NO: 275321 - RNA, 19 nt, Human
ucagcccucucugucuuug

SEQ ID NO: 275322 - RNA, 21 nt, Human
ucaguggcugagggacuggcu

SEQ ID NO: 275323 - RNA, 21 nt, Human
ucccaccccaaguuguggcuc

SEQ ID NO: 275324 - RNA, 21 nt, Human
ucccuggggaauuggggaggc

SEQ ID NO: 275325 - RNA, 23 nt, Human
uccuuggggacccugcagucugg

SEQ ID NO: 275326 - RNA, 18 nt, Human
ucugauggcugugucuag

SEQ ID NO: 275327 - RNA, 20 nt, Human
ugaggacaagugacccaucc

SEQ ID NO: 275328 - RNA, 18 nt, Human
ugaggcaucaugagcccg

SEQ ID NO: 275329 - RNA, 22 nt, Human
ugaggggcgagaagcccgagga

SEQ ID NO: 275330 - RNA, 20 nt, Human
ugauuucaccaggaggaucc

SEQ ID NO: 275331 - RNA, 24 nt, Human
ugccagggauggcagagcaaggug

SEQ ID NO: 275332 - RNA, 20 nt, Human
ugcccggccgccccucggag

SEQ ID NO: 275333 - RNA, 21 nt, Human
uggagaucaacugcagagggc

SEQ ID NO: 275334 - RNA, 22 nt, Human
uggaugcuauugcuggaggagg

SEQ ID NO: 275335 - RNA, 20 nt, Human
uggcagagcaaggugaguca

SEQ ID NO: 275336 - RNA, 23 nt, Human
uggcaggaacaggacaccggugg

SEQ ID NO: 275337 - RNA, 24 nt, Human
uggcaggaacaggacaccgguggg

SEQ ID NO: 275338 - RNA, 20 nt, Human
uggcaugaagucaagcucca

SEQ ID NO: 275339 - RNA, 19 nt, Human
uggcucagagagcuugugc

SEQ ID NO: 275340 - RNA, 18 nt, Human
ugggaacugccugacacu

SEQ ID NO: 275341 - RNA, 19 nt, Human
ugggaagauccuuauugcc

SEQ ID NO: 275342 - RNA, 23 nt, Human
ugggaaugccucuuucauuggga

SEQ ID NO: 275343 - RNA, 19 nt, Human
ugggacguguccuaagguc

SEQ ID NO: 275344 - RNA, 25 nt, Human
ugggaggaaagcuacuaggagcugg

SEQ ID NO: 275345 - RNA, 21 nt, Human
ugggaggccacuaggauuucu

SEQ ID NO: 275346 - RNA, 22 nt, Human
ugggccagggacacguuucuug

SEQ ID NO: 275347 - RNA, 20 nt, Human
uguggaagagugagcagggg

SEQ ID NO: 275348 - RNA, 24 nt, Human
uguuuguucuuuauaucuguggaa

SEQ ID NO: 275349 - RNA, 19 nt, Human
uuaaaggaaggcaggggag

SEQ ID NO: 275350 - RNA, 19 nt, Human
uuaacagucuccuggccug

SEQ ID NO: 275351 - RNA, 24 nt, Human
uuaaucaauuucccacuccucucc

SEQ ID NO: 275352 - RNA, 21 nt, Human
uuagaaugggcuucccuucag

SEQ ID NO: 275353 - RNA, 22 nt, Human
uucauauucuuuagguucguau

SEQ ID NO: 275354 - RNA, 22 nt, Human
uuccaaccucauccacuuuaac

SEQ ID NO: 275355 - RNA, 19 nt, Human
uuccagugguuucaugcac

SEQ ID NO: 275356 - RNA, 23 nt, Human
uuggacacaacaguuuccuuccc

SEQ ID NO: 275357 - RNA, 21 nt, Human
uuggaugcuauugcuggagga

SEQ ID NO: 275358 - RNA, 23 nt, Human
uuggaugcuauugcuggaggagg

SEQ ID NO: 275359 - RNA, 24 nt, Human
uuggugcccccacuguaaagcccu

SEQ ID NO: 275360 - RNA, 22 nt, Human
uuuauaucuguggaagagugag

SEQ ID NO: 275361 - RNA, 25 nt, Human
uuucagguacaugggcguggacccu

SEQ ID NO: 275362 - RNA, 24 nt, Human
uuuccaaccucauccacuuuaacc

SEQ ID NO: 275363 - RNA, 24 nt, Human
uuuccauccuuggggacccugcag

SEQ ID NO: 275364 - RNA, 19 nt, Human
uuucccacuccucucccca

SEQ ID NO: 275365 - RNA, 18 nt, Human
uuucuuggcauugagggu

SEQ ID NO: 275366 - RNA, 20 nt, Human
aaauaacuguacacaaggca

SEQ ID NO: 275367 - RNA, 18 nt, Human
aggaggcuccgaucaauc

SEQ ID NO: 275368 - RNA, 22 nt, Human
aggaggcuccgaucaauccagg

SEQ ID NO: 275369 - RNA, 20 nt, Human
aggaggucaaguaaagggcu

SEQ ID NO: 275370 - RNA, 21 nt, Human
aguucugugccggcagcuuua

SEQ ID NO: 275371 - RNA, 25 nt, Human
auaucacuuuccuccaucuccccag

SEQ ID NO: 275372 - RNA, 24 nt, Human
auaucuccaucaaggaaucauaca

SEQ ID NO: 275373 - RNA, 18 nt, Human
aucuccccaggcccugug

SEQ ID NO: 275374 - RNA, 24 nt, Human
cacuguggggcuugcagcuggcug

SEQ ID NO: 275375 - RNA, 21 nt, Human
cccaggcccugugaccucaga

SEQ ID NO: 275376 - RNA, 20 nt, Human
cuccgaucaauccagggugc

SEQ ID NO: 275377 - RNA, 27 nt, Human
cucuauggcuuuacaaagcaggucacu

SEQ ID NO: 275378 - RNA, 21 nt, Human
gaaauaagacuugaggcuggg

SEQ ID NO: 275379 - RNA, 22 nt, Human
gccggcagcuuuaaccccuccu

SEQ ID NO: 275380 - RNA, 21 nt, Human
ggaacagacuggguguuaguu

SEQ ID NO: 275381 - RNA, 21 nt, Human
gggaccagggaggccccaguu

SEQ ID NO: 275382 - RNA, 20 nt, Human
uaaauaacuguacacaaggc

SEQ ID NO: 275383 - RNA, 25 nt, Human
uacacaaggcaguuaaauacacagu

SEQ ID NO: 275384 - RNA, 24 nt, Human
uccuccaucuccccaggcccugug

SEQ ID NO: 275385 - RNA, 23 nt, Human
ucuccaagggaccagggaggccc

SEQ ID NO: 275386 - RNA, 20 nt, Human
ugaggaaauaagacuugagg

SEQ ID NO: 275387 - RNA, 18 nt, Human
uggcauuuaagauuuugu

SEQ ID NO: 275388 - RNA, 22 nt, Human
uggggagcaacguugaggaaau

SEQ ID NO: 275389 - RNA, 21 nt, Human
uggucacuugaaguggugcac

SEQ ID NO: 275390 - RNA, 21 nt, Human
ugguggucacuugaaguggug

SEQ ID NO: 275391 - RNA, 22 nt, Human
uucauguaaauaucuccaucaa

SEQ ID NO: 275392 - RNA, 18 nt, Human
uuuuuuuuuuuuuuuugu

SEQ ID NO: 275393 - RNA, 23 nt, Human
cucccggaacuggaagggaaagc

SEQ ID NO: 275394 - RNA, 18 nt, Human
gaacuggaagggaaagcc

SEQ ID NO: 275395 - RNA, 23 nt, Human
uggaagggaaagccaggcggcuc

SEQ ID NO: 275396 - RNA, 21 nt, Human
aagcacuuggggcuccgggac

SEQ ID NO: 275397 - RNA, 22 nt, Human
acacccugagugccccgugggc

SEQ ID NO: 275398 - RNA, 21 nt, Human
agcacuuguagguguugggga

SEQ ID NO: 275399 - RNA, 18 nt, Human
cacagcgcucacccacga

SEQ ID NO: 275400 - RNA, 18 nt, Human
cccccguucuggcagggg

SEQ ID NO: 275401 - RNA, 20 nt, Human
cccguucuggcagggguggg

SEQ ID NO: 275402 - RNA, 22 nt, Human
cgugggcaggagcacuuguagg

SEQ ID NO: 275403 - RNA, 23 nt, Human
gagugccccgugggcaggagcac

SEQ ID NO: 275404 - RNA, 19 nt, Human
gcgggcaggugcagcugua

SEQ ID NO: 275405 - RNA, 21 nt, Human
uagguguuggggaggucgagg

SEQ ID NO: 275406 - RNA, 18 nt, Human
ugcacacccugagugccc

SEQ ID NO: 275407 - RNA, 28 nt, Human
ugccccgugggcaggagcacuuguaggu

SEQ ID NO: 275408 - RNA, 19 nt, Human
uuggggaggucgaggcagg

SEQ ID NO: 275409 - RNA, 21 nt, Human
aaaaacaacaaacucacaccc

SEQ ID NO: 275410 - RNA, 21 nt, Human
aaacaaaaaaaccuaucccca

SEQ ID NO: 275411 - RNA, 24 nt, Human
aaacaaaaaaaccuauccccaaag

SEQ ID NO: 275412 - RNA, 25 nt, Human
aaacaaacaaaaaaaccuaucccca

SEQ ID NO: 275413 - RNA, 20 nt, Human
aaacaaguccaacuuuccaa

SEQ ID NO: 275414 - RNA, 20 nt, Human
aaacagauauaauaucacuu

SEQ ID NO: 275415 - RNA, 19 nt, Human
aaagaaauugccaagagca

SEQ ID NO: 275416 - RNA, 19 nt, Human
aaauuggcaaauucaauaa

SEQ ID NO: 275417 - RNA, 24 nt, Human
aagaaagucaaagaaauugccaag

SEQ ID NO: 275418 - RNA, 20 nt, Human
aagaauguccaaggaggagg

SEQ ID NO: 275419 - RNA, 21 nt, Human
aagagaaauguacacaaggaa

SEQ ID NO: 275420 - RNA, 23 nt, Human
aagcaccaaaugaagacaaaaga

SEQ ID NO: 275421 - RNA, 22 nt, Human
aaggauccaaauuaaaguaguc

SEQ ID NO: 275422 - RNA, 25 nt, Human
aaggcaccuugucccugagcaacca

SEQ ID NO: 275423 - RNA, 19 nt, Human
aauaaaaauaaaccaaaaa

SEQ ID NO: 275424 - RNA, 24 nt, Human
aaucaguagagacugaucaucuga

SEQ ID NO: 275425 - RNA, 19 nt, Human
aauucccaacaggacgcua

SEQ ID NO: 275426 - RNA, 24 nt, Human
aauuucacuuaaggaauguuacaa

SEQ ID NO: 275427 - RNA, 22 nt, Human
acaaacucacacccuucuuccu

SEQ ID NO: 275428 - RNA, 21 nt, Human
acacgcaggguuuccauaugg

SEQ ID NO: 275429 - RNA, 21 nt, Human
accaaucauuuacauaacagc

SEQ ID NO: 275430 - RNA, 21 nt, Human
accauaccaaaguaaaccuug

SEQ ID NO: 275431 - RNA, 22 nt, Human
agaaaacaaguccaacuuucca

SEQ ID NO: 275432 - RNA, 22 nt, Human
agaaaacuauucuuuaucuaca

SEQ ID NO: 275433 - RNA, 26 nt, Human
agacaggaggggaaaggagaccaaag

SEQ ID NO: 275434 - RNA, 26 nt, Human
agagaucaguaaaaaguuugaaaggc

SEQ ID NO: 275435 - RNA, 19 nt, Human
agaggaaaagaaaugguag

SEQ ID NO: 275436 - RNA, 22 nt, Human
agcagcauuuacaaaagucagu

SEQ ID NO: 275437 - RNA, 18 nt, Human
agcauccaucuuauucuc

SEQ ID NO: 275438 - RNA, 22 nt, Human
aggaagaaaaaaagaaguuugg

SEQ ID NO: 275439 - RNA, 23 nt, Human
aggcaggcagaagaggagucaaa

SEQ ID NO: 275440 - RNA, 23 nt, Human
aggcugcuauauaguuccuccuu

SEQ ID NO: 275441 - RNA, 18 nt, Human
agggcagaaaggggcagg

SEQ ID NO: 275442 - RNA, 19 nt, Human
aggggaggaucuauacaug

SEQ ID NO: 275443 - RNA, 24 nt, Human
aguuuggugcuaggcuuuguggga

SEQ ID NO: 275444 - RNA, 24 nt, Human
auaagaacaucuucucuuuccuac

SEQ ID NO: 275445 - RNA, 24 nt, Human
aucacuuuuaagagaaauguacac

SEQ ID NO: 275446 - RNA, 24 nt, Human
auggaccaauuauuaacuggccca

SEQ ID NO: 275447 - RNA, 21 nt, Human
auggagagaauaaagcagaga

SEQ ID NO: 275448 - RNA, 20 nt, Human
augucucuacacuggaggug

SEQ ID NO: 275449 - RNA, 23 nt, Human
caaaaaaaccuauccccaaaggc

SEQ ID NO: 275450 - RNA, 21 nt, Human
caaaagcaccaaaugaagaca

SEQ ID NO: 275451 - RNA, 22 nt, Human
caaaaucccuaaaccaccucuc

SEQ ID NO: 275452 - RNA, 19 nt, Human
caaccuucuuauagggcug

SEQ ID NO: 275453 - RNA, 21 nt, Human
caacuuuccaauuccugcacu

SEQ ID NO: 275454 - RNA, 20 nt, Human
caagaaaaagaaacaagcaa

SEQ ID NO: 275455 - RNA, 18 nt, Human
cacagagguccaugcaga

SEQ ID NO: 275456 - RNA, 24 nt, Human
caccucucaacaaaacauuacacc

SEQ ID NO: 275457 - RNA, 20 nt, Human
cagaaaaacaacaaacucac

SEQ ID NO: 275458 - RNA, 24 nt, Human
cagaauuccagggcauaauuccca

SEQ ID NO: 275459 - RNA, 22 nt, Human
cagccucuugaagggaucuccu

SEQ ID NO: 275460 - RNA, 21 nt, Human
cagcuuucacauucccuuucu

SEQ ID NO: 275461 - RNA, 26 nt, Human
caggcagucaauggaaugcuuggcag

SEQ ID NO: 275462 - RNA, 24 nt, Human
cauaacagcauaauuaauauuaug

SEQ ID NO: 275463 - RNA, 23 nt, Human
cauacaaacagauauaauaucac

SEQ ID NO: 275464 - RNA, 25 nt, Human
caucaugagguaacacugccaggcc

SEQ ID NO: 275465 - RNA, 27 nt, Human
caugcagauagguucuccccaucuucu

SEQ ID NO: 275466 - RNA, 19 nt, Human
ccaaauuaaaguaguccaa

SEQ ID NO: 275467 - RNA, 21 nt, Human
ccaggcccauacacagaaaaa

SEQ ID NO: 275468 - RNA, 19 nt, Human
ccaugcagauagguucucc

SEQ ID NO: 275469 - RNA, 23 nt, Human
cccauacacagaaaaacaacaaa

SEQ ID NO: 275470 - RNA, 25 nt, Human
cccauacacagaaaaacaacaaacu

SEQ ID NO: 275471 - RNA, 22 nt, Human
ccccaaaauuuguugaagaaaa

SEQ ID NO: 275472 - RNA, 20 nt, Human
cccuaaaccaccucucaaca

SEQ ID NO: 275473 - RNA, 22 nt, Human
ccucucaacaaaacauuacacc

SEQ ID NO: 275474 - RNA, 24 nt, Human
ccucucaacaaaacauuacaccuu

SEQ ID NO: 275475 - RNA, 20 nt, Human
ccugcacacagacaagaaaa

SEQ ID NO: 275476 - RNA, 24 nt, Human
cuaaaccaccucucaacaaaacau

SEQ ID NO: 275477 - RNA, 23 nt, Human
cuccaagggauaccgggaagaca

SEQ ID NO: 275478 - RNA, 19 nt, Human
cucuuggucauuccaacau

SEQ ID NO: 275479 - RNA, 19 nt, Human
cuuuacacugaccaggccc

SEQ ID NO: 275480 - RNA, 18 nt, Human
cuuucuccaaacccaaag

SEQ ID NO: 275481 - RNA, 22 nt, Human
gaaaaacaacaaacucacaccc

SEQ ID NO: 275482 - RNA, 22 nt, Human
gagaacauacuggguauaccag

SEQ ID NO: 275483 - RNA, 19 nt, Human
gauaccgggaagacaggag

SEQ ID NO: 275484 - RNA, 21 nt, Human
gaucaguaaaaaguuugaaag

SEQ ID NO: 275485 - RNA, 18 nt, Human
gcaaccaucuguuuguca

SEQ ID NO: 275486 - RNA, 23 nt, Human
gcagaagccugcagggcuuaaaa

SEQ ID NO: 275487 - RNA, 19 nt, Human
gcaguguuguccuccucau

SEQ ID NO: 275488 - RNA, 19 nt, Human
gcuagugcacagaagagug

SEQ ID NO: 275489 - RNA, 22 nt, Human
ggaagaaaaaaagaaguuuggu

SEQ ID NO: 275490 - RNA, 23 nt, Human
ggcagaagccugcagggcuuaaa

SEQ ID NO: 275491 - RNA, 20 nt, Human
ggcaggcagaagaggaguca

SEQ ID NO: 275492 - RNA, 23 nt, Human
ggcccauacacagaaaaacaaca

SEQ ID NO: 275493 - RNA, 19 nt, Human
ggcuccagagauuucuuca

SEQ ID NO: 275494 - RNA, 21 nt, Human
gggaauucaccuguuaauauc

SEQ ID NO: 275495 - RNA, 18 nt, Human
ggguccaagggcagagag

SEQ ID NO: 275496 - RNA, 21 nt, Human
gguaagugggaagcacugaug

SEQ ID NO: 275497 - RNA, 21 nt, Human
guagggcuacaaucacggaga

SEQ ID NO: 275498 - RNA, 20 nt, Human
guccaagcugcaagaauguc

SEQ ID NO: 275499 - RNA, 19 nt, Human
uaaaacaaaacagaggaag

SEQ ID NO: 275500 - RNA, 23 nt, Human
uaaaacaaaacagaggaagcaaa

SEQ ID NO: 275501 - RNA, 22 nt, Human
uaaaaugcaguccaagcugcaa

SEQ ID NO: 275502 - RNA, 21 nt, Human
uaaacaaacaaaaaaaccuau

SEQ ID NO: 275503 - RNA, 23 nt, Human
uaacuagacuaucaaggauaaaa

SEQ ID NO: 275504 - RNA, 23 nt, Human
uaaggaaaagggaggauauaaaa

SEQ ID NO: 275505 - RNA, 20 nt, Human
uaaggaauguuacaaaccaa

SEQ ID NO: 275506 - RNA, 18 nt, Human
uacaaaaugcccaggcag

SEQ ID NO: 275507 - RNA, 20 nt, Human
uacaaaaugcccaggcagaa

SEQ ID NO: 275508 - RNA, 23 nt, Human
uacaaaccaaucauuuacauaac

SEQ ID NO: 275509 - RNA, 24 nt, Human
uacaacaccacugagcuuggcaaa

SEQ ID NO: 275510 - RNA, 22 nt, Human
uacacagaaaaacaacaaacuc

SEQ ID NO: 275511 - RNA, 25 nt, Human
uacagagaguggauucaggugaggg

SEQ ID NO: 275512 - RNA, 18 nt, Human
uacaggcagucaauggaa

SEQ ID NO: 275513 - RNA, 23 nt, Human
uacauaaauguguccucccaaau

SEQ ID NO: 275514 - RNA, 21 nt, Human
uaccacacaauucaagaguuc

SEQ ID NO: 275515 - RNA, 22 nt, Human
uaccacacaauucaagaguucu

SEQ ID NO: 275516 - RNA, 23 nt, Human
uagcagaaaauagcaaaggggac

SEQ ID NO: 275517 - RNA, 22 nt, Human
uaggacugaaaaaaccauuugu

SEQ ID NO: 275518 - RNA, 24 nt, Human
uaguugccaaagggaaugucaugg

SEQ ID NO: 275519 - RNA, 20 nt, Human
uaucaaggauaaaacuuuac

SEQ ID NO: 275520 - RNA, 25 nt, Human
uauuaugccaacagacacgcagggu

SEQ ID NO: 275521 - RNA, 20 nt, Human
ucaaagaaauugccaagagc

SEQ ID NO: 275522 - RNA, 24 nt, Human
ucaggaauaugcggucauuuuauu

SEQ ID NO: 275523 - RNA, 20 nt, Human
ucaguaaaaaguuugaaagg

SEQ ID NO: 275524 - RNA, 24 nt, Human
uccaaagaaacaacauacuugaaa

SEQ ID NO: 275525 - RNA, 23 nt, Human
uccaaauuaaaguaguccaagaa

SEQ ID NO: 275526 - RNA, 18 nt, Human
uccaaccuucuuauaggg

SEQ ID NO: 275527 - RNA, 20 nt, Human
uccaagaaaaagaaacaagc

SEQ ID NO: 275528 - RNA, 22 nt, Human
uccaagaaaaagaaacaagcaa

SEQ ID NO: 275529 - RNA, 20 nt, Human
uccaagggcagagagucacc

SEQ ID NO: 275530 - RNA, 19 nt, Human
uccacagagguccaugcag

SEQ ID NO: 275531 - RNA, 26 nt, Human
ucucccggaugaccuucauuuguucc

SEQ ID NO: 275532 - RNA, 21 nt, Human
ugaaacggaaaaguaaaaaca

SEQ ID NO: 275533 - RNA, 21 nt, Human
ugaaagaggcugacagaaugu

SEQ ID NO: 275534 - RNA, 19 nt, Human
ugaaagguuugugcugaga

SEQ ID NO: 275535 - RNA, 20 nt, Human
ugaagacaaaagaaugucca

SEQ ID NO: 275536 - RNA, 21 nt, Human
ugaagacaaaagaauguccaa

SEQ ID NO: 275537 - RNA, 22 nt, Human
ugaagacaaaagaauguccaag

SEQ ID NO: 275538 - RNA, 19 nt, Human
ugacaaacggaagacaacu

SEQ ID NO: 275539 - RNA, 26 nt, Human
ugacauugugcuuaaggaaaagggag

SEQ ID NO: 275540 - RNA, 18 nt, Human
ugacuuauaucccaguuc

SEQ ID NO: 275541 - RNA, 24 nt, Human
ugaucuaauuaaaggaagaaaaaa

SEQ ID NO: 275542 - RNA, 24 nt, Human
ugcaaaaccaaaagcaccaaauga

SEQ ID NO: 275543 - RNA, 23 nt, Human
uggaaugcuuggcaggaaguagg

SEQ ID NO: 275544 - RNA, 20 nt, Human
uggagcaggagggcagaaag

SEQ ID NO: 275545 - RNA, 18 nt, Human
uggauucaggugaggggc

SEQ ID NO: 275546 - RNA, 20 nt, Human
uggcauaaaagaugugucuc

SEQ ID NO: 275547 - RNA, 18 nt, Human
uggcuggaucaguagcug

SEQ ID NO: 275548 - RNA, 23 nt, Human
ugguagggcuacaaucacggaga

SEQ ID NO: 275549 - RNA, 23 nt, Human
ugucaccagcuauggcuagugca

SEQ ID NO: 275550 - RNA, 26 nt, Human
uguccauuuuccaaagaaacaacaua

SEQ ID NO: 275551 - RNA, 18 nt, Human
ugugauaaaaaugcuuuc

SEQ ID NO: 275552 - RNA, 19 nt, Human
uucuccccuucucucucca

SEQ ID NO: 275553 - RNA, 23 nt, Human
uugcacgaguuaacuugucucuu

SEQ ID NO: 275554 - RNA, 18 nt, Human
uuggauaggacugaaaaa

SEQ ID NO: 275555 - RNA, 21 nt, Human
uuggcaaauucaauaagagga

SEQ ID NO: 275556 - RNA, 19 nt, Human
uuuagaaugauaaaauguu

SEQ ID NO: 275557 - RNA, 19 nt, Human
uuuauuagauaccacacaa

SEQ ID NO: 275558 - RNA, 21 nt, Human
uuucugguuuuaaaaaagugg

SEQ ID NO: 275559 - RNA, 19 nt, Human
aaaaaaaagaaaaagaaaa

SEQ ID NO: 275560 - RNA, 20 nt, Human
aaaauaccucuauucugcca

SEQ ID NO: 275561 - RNA, 21 nt, Human
aaggaagagacagagaaagaa

SEQ ID NO: 275562 - RNA, 25 nt, Human
aaggguggggcuggggcagagggag

SEQ ID NO: 275563 - RNA, 20 nt, Human
aagugagggagguggggugg

SEQ ID NO: 275564 - RNA, 20 nt, Human
aauaauucauucaugucaga

SEQ ID NO: 275565 - RNA, 21 nt, Human
acagggacauaaaggaaugca

SEQ ID NO: 275566 - RNA, 23 nt, Human
accagcagcccccuaguucccaa

SEQ ID NO: 275567 - RNA, 20 nt, Human
acgcugcaaggcaaggaugc

SEQ ID NO: 275568 - RNA, 20 nt, Human
acucuucacaagacugagag

SEQ ID NO: 275569 - RNA, 22 nt, Human
agaaagaaaggaggcaggacgg

SEQ ID NO: 275570 - RNA, 30 nt, Human
agaaaggaggcaggacgggggucucuuuaa

SEQ ID NO: 275571 - RNA, 22 nt, Human
agacugaagcccugggcugaug

SEQ ID NO: 275572 - RNA, 21 nt, Human
agagaaguggggaagaagggg

SEQ ID NO: 275573 - RNA, 19 nt, Human
agagacagagaaagaaagg

SEQ ID NO: 275574 - RNA, 22 nt, Human
agauggccaaggguggggcugg

SEQ ID NO: 275575 - RNA, 22 nt, Human
aggaagagaaaguaccacucag

SEQ ID NO: 275576 - RNA, 20 nt, Human
aggaagagacagagaaagaa

SEQ ID NO: 275577 - RNA, 23 nt, Human
aggaugaaaaagacuaaaaggaa

SEQ ID NO: 275578 - RNA, 25 nt, Human
aggcaaggaugcaggaggguuggug

SEQ ID NO: 275579 - RNA, 19 nt, Human
aggcagcuccucuucuugu

SEQ ID NO: 275580 - RNA, 18 nt, Human
agggagguggggugggga

SEQ ID NO: 275581 - RNA, 24 nt, Human
agggaggugggguggggaggaggc

SEQ ID NO: 275582 - RNA, 21 nt, Human
aucccagucaugccuguguac

SEQ ID NO: 275583 - RNA, 18 nt, Human
aucuggaaugcagugaag

SEQ ID NO: 275584 - RNA, 18 nt, Human
augaaaaagacuaaaagg

SEQ ID NO: 275585 - RNA, 19 nt, Human
caaggcaaggaugcaggag

SEQ ID NO: 275586 - RNA, 19 nt, Human
cacagaauccagcuuggcc

SEQ ID NO: 275587 - RNA, 21 nt, Human
cagaaggagagagaaaggaau

SEQ ID NO: 275588 - RNA, 21 nt, Human
ccaaggguggggcuggggcag

SEQ ID NO: 275589 - RNA, 20 nt, Human
ccagaaggagagagaaagga

SEQ ID NO: 275590 - RNA, 22 nt, Human
ccagcagcccccuaguucccaa

SEQ ID NO: 275591 - RNA, 23 nt, Human
cccacccauuauaaauaaaggaa

SEQ ID NO: 275592 - RNA, 20 nt, Human
cccacgggggcacugggggg

SEQ ID NO: 275593 - RNA, 22 nt, Human
ccccagugggugcgcccaaggg

SEQ ID NO: 275594 - RNA, 24 nt, Human
cccccaagaucuaagaacugacga

SEQ ID NO: 275595 - RNA, 21 nt, Human
cccccacccauuauaaauaaa

SEQ ID NO: 275596 - RNA, 22 nt, Human
cccgaccccuggccccaguggg

SEQ ID NO: 275597 - RNA, 22 nt, Human
cccuccccuccucccuccuucc

SEQ ID NO: 275598 - RNA, 18 nt, Human
cccuccucccuccuuccc

SEQ ID NO: 275599 - RNA, 22 nt, Human
cccugggcuccgggcgcguccc

SEQ ID NO: 275600 - RNA, 23 nt, Human
cccugggcugaugaccuaucucg

SEQ ID NO: 275601 - RNA, 22 nt, Human
ccuccucccuccuucccugggc

SEQ ID NO: 275602 - RNA, 20 nt, Human
ccuccuucccugggcuccgg

SEQ ID NO: 275603 - RNA, 20 nt, Human
ccuggccccagugggugcgc

SEQ ID NO: 275604 - RNA, 20 nt, Human
cucccccgaccccuggcccc

SEQ ID NO: 275605 - RNA, 20 nt, Human
cuccccuccucccuccuucc

SEQ ID NO: 275606 - RNA, 18 nt, Human
cucuucacaagacugaga

SEQ ID NO: 275607 - RNA, 18 nt, Human
cucuuuaggcccccaaga

SEQ ID NO: 275608 - RNA, 19 nt, Human
cucuuuaggcccccaagau

SEQ ID NO: 275609 - RNA, 20 nt, Human
gagaggccagaaggagagag

SEQ ID NO: 275610 - RNA, 18 nt, Human
gccaaggguggggcuggg

SEQ ID NO: 275611 - RNA, 22 nt, Human
gcgacccuccccuccucccucc

SEQ ID NO: 275612 - RNA, 24 nt, Human
ggaaagagaagaggaugaaaaaga

SEQ ID NO: 275613 - RNA, 23 nt, Human
ggaaaugagaggccagaaggaga

SEQ ID NO: 275614 - RNA, 22 nt, Human
ggaaggaagagacagagaaaga

SEQ ID NO: 275615 - RNA, 20 nt, Human
ggaaugcauacaucugcccu

SEQ ID NO: 275616 - RNA, 18 nt, Human
ggaauucagcuacacagg

SEQ ID NO: 275617 - RNA, 18 nt, Human
ggcagagggaguuggcag

SEQ ID NO: 275618 - RNA, 18 nt, Human
gggcuggggcagagggag

SEQ ID NO: 275619 - RNA, 19 nt, Human
gggcuggggcagagggagu

SEQ ID NO: 275620 - RNA, 18 nt, Human
ggggcuggggcagaggga

SEQ ID NO: 275621 - RNA, 23 nt, Human
ggggguucacagggggagggagc

SEQ ID NO: 275622 - RNA, 20 nt, Human
gguugguggaaagagaagag

SEQ ID NO: 275623 - RNA, 22 nt, Human
guaaaaaaaaaaagaaaaagaa

SEQ ID NO: 275624 - RNA, 22 nt, Human
guggggcuggggcagagggagu

SEQ ID NO: 275625 - RNA, 23 nt, Human
uaaaaaaaaaaagaaaaagaaaa

SEQ ID NO: 275626 - RNA, 23 nt, Human
uaaaaauaccucuauucugccau

SEQ ID NO: 275627 - RNA, 27 nt, Human
uacaaaauguaaaaaaaaaaagaaaaa

SEQ ID NO: 275628 - RNA, 21 nt, Human
uacacgggaucccagucaugc

SEQ ID NO: 275629 - RNA, 27 nt, Human
uagccuaaaaauaccucuauucugcca

SEQ ID NO: 275630 - RNA, 20 nt, Human
uaggcccccaagaucuaaga

SEQ ID NO: 275631 - RNA, 21 nt, Human
ucaggcagcuccucuucuugu

SEQ ID NO: 275632 - RNA, 21 nt, Human
ugaaaaagacuaaaaggaagg

SEQ ID NO: 275633 - RNA, 23 nt, Human
ugaagugagggaggugggguggg

SEQ ID NO: 275634 - RNA, 24 nt, Human
ugagagggugggugguagccccca

SEQ ID NO: 275635 - RNA, 21 nt, Human
ugagggaagagagaagugggg

SEQ ID NO: 275636 - RNA, 19 nt, Human
ugagggagguggggugggg

SEQ ID NO: 275637 - RNA, 22 nt, Human
ugaugaccuaucucggucacgc

SEQ ID NO: 275638 - RNA, 18 nt, Human
ugccauaaggcugggcca

SEQ ID NO: 275639 - RNA, 25 nt, Human
uggaaagagaagaggaugaaaaaga

SEQ ID NO: 275640 - RNA, 18 nt, Human
uggcagugggcccuuccc

SEQ ID NO: 275641 - RNA, 21 nt, Human
uggcagugggcccuuccccag

SEQ ID NO: 275642 - RNA, 20 nt, Human
uggccgaaugggcccacaga

SEQ ID NO: 275643 - RNA, 23 nt, Human
ugggcccacagacucagccccac

SEQ ID NO: 275644 - RNA, 21 nt, Human
uggggcagagggaguuggcag

SEQ ID NO: 275645 - RNA, 20 nt, Human
ugggggguucacagggggag

SEQ ID NO: 275646 - RNA, 19 nt, Human
uggugaggggagugggggg

SEQ ID NO: 275647 - RNA, 21 nt, Human
ugucagaguguaaggaaauga

SEQ ID NO: 275648 - RNA, 23 nt, Human
ugucagaguguaaggaaaugaga

SEQ ID NO: 275649 - RNA, 18 nt, Human
uuuuuuuuuuuuuuuuug

SEQ ID NO: 275650 - RNA, 19 nt, Human
agccccuucuccaagcccc

SEQ ID NO: 275651 - RNA, 21 nt, Human
aggcagggacccucagagcuc

SEQ ID NO: 275652 - RNA, 22 nt, Human
caagccccggucccugucccuc

SEQ ID NO: 275653 - RNA, 22 nt, Human
cacagccccuucuccaagcccc

SEQ ID NO: 275654 - RNA, 19 nt, Human
cagccccuucuccaagccc

SEQ ID NO: 275655 - RNA, 18 nt, Human
cccggucccugucccucu

SEQ ID NO: 275656 - RNA, 26 nt, Human
ccucuucaggcagggacccucagagc

SEQ ID NO: 275657 - RNA, 23 nt, Human
ucuccaagccccggucccugucc

SEQ ID NO: 275658 - RNA, 19 nt, Human
aaaaugcacauuugaaaca

SEQ ID NO: 275659 - RNA, 27 nt, Human
aaacagaaaaguaauagucaucucugg

SEQ ID NO: 275660 - RNA, 18 nt, Human
acaccaguccacuuagua

SEQ ID NO: 275661 - RNA, 22 nt, Human
acaggugcucuguaggugugcc

SEQ ID NO: 275662 - RNA, 23 nt, Human
agacuucacugacucauuacagu

SEQ ID NO: 275663 - RNA, 19 nt, Human
aggauucaaggaugaaauc

SEQ ID NO: 275664 - RNA, 19 nt, Human
agggagccaauagagaauc

SEQ ID NO: 275665 - RNA, 23 nt, Human
agugcacaacaaaauaugaugag

SEQ ID NO: 275666 - RNA, 19 nt, Human
auacauguauguauacaca

SEQ ID NO: 275667 - RNA, 19 nt, Human
cacuagugcacaacaaaau

SEQ ID NO: 275668 - RNA, 19 nt, Human
cagcaauaaaaucguguuu

SEQ ID NO: 275669 - RNA, 18 nt, Human
caggugcucuguaggugu

SEQ ID NO: 275670 - RNA, 19 nt, Human
cauuaggaaaauacauagg

SEQ ID NO: 275671 - RNA, 23 nt, Human
ccuuggauuuggagcuuggaagu

SEQ ID NO: 275672 - RNA, 21 nt, Human
cuuccaauauauaaaugucug

SEQ ID NO: 275673 - RNA, 22 nt, Human
gaaucuucccaaugaaccucaa

SEQ ID NO: 275674 - RNA, 20 nt, Human
gagaaucuucccaaugaacc

SEQ ID NO: 275675 - RNA, 19 nt, Human
guagauacaacacguuucc

SEQ ID NO: 275676 - RNA, 22 nt, Human
uaaaagagagaagcggaacacg

SEQ ID NO: 275677 - RNA, 18 nt, Human
uacaacacguuuccuagu

SEQ ID NO: 275678 - RNA, 24 nt, Human
uacaggugcucuguaggugugcuu

SEQ ID NO: 275679 - RNA, 21 nt, Human
uacccaaaaagggagccaaua

SEQ ID NO: 275680 - RNA, 20 nt, Human
uagagaaaucaaacauaaua

SEQ ID NO: 275681 - RNA, 23 nt, Human
ucacugacucauuacagugauau

SEQ ID NO: 275682 - RNA, 24 nt, Human
uccuaagccauauccugagcuuac

SEQ ID NO: 275683 - RNA, 21 nt, Human
ugagcuuaccuugauuccaag

SEQ ID NO: 275684 - RNA, 24 nt, Human
ugcucuauuuuucucaaaauucca

SEQ ID NO: 275685 - RNA, 23 nt, Human
uggaaaggagucaaugugucuua

SEQ ID NO: 275686 - RNA, 21 nt, Human
uggagaaaguuuaugacacca

SEQ ID NO: 275687 - RNA, 19 nt, Human
uguaaaacuaaacagaaaa

SEQ ID NO: 275688 - RNA, 18 nt, Human
uguauguauacacauaua

SEQ ID NO: 275689 - RNA, 23 nt, Human
ugucauguugaagagcugcaugu

SEQ ID NO: 275690 - RNA, 21 nt, Human
ugucuagauuuaauuuugcag

SEQ ID NO: 275691 - RNA, 20 nt, Human
ugugucuuaaauggagaaag

SEQ ID NO: 275692 - RNA, 19 nt, Human
uugaucaugaguuuucaua

SEQ ID NO: 275693 - RNA, 20 nt, Human
uugcagccuaccuuguagcc

SEQ ID NO: 275694 - RNA, 18 nt, Human
uuuuucagcaauaaaauc

SEQ ID NO: 275695 - RNA, 22 nt, Human
uuuuuuuuuuuuuuuuuuucag

SEQ ID NO: 275696 - RNA, 18 nt, Human
aaaaaaaaaaaaaaugag

SEQ ID NO: 275697 - RNA, 24 nt, Human
aaaaaacacauuuccuucugcccu

SEQ ID NO: 275698 - RNA, 22 nt, Human
aaaaacacauuuccuucugccc

SEQ ID NO: 275699 - RNA, 18 nt, Human
aaaacaaaugugcaaccu

SEQ ID NO: 275700 - RNA, 21 nt, Human
aaaagggaaaguucaugagga

SEQ ID NO: 275701 - RNA, 21 nt, Human
aaacaaaugaacaacaaaaaa

SEQ ID NO: 275702 - RNA, 18 nt, Human
aaacacauuuauaaugau

SEQ ID NO: 275703 - RNA, 18 nt, Human
aaacagcuaaaucacaga

SEQ ID NO: 275704 - RNA, 22 nt, Human
aaagccugacaaagguagauaa

SEQ ID NO: 275705 - RNA, 19 nt, Human
aacacauuuccuucugccc

SEQ ID NO: 275706 - RNA, 23 nt, Human
aagcaaaguauagagaacaaaac

SEQ ID NO: 275707 - RNA, 24 nt, Human
aagcaggaaguaagacuuacagga

SEQ ID NO: 275708 - RNA, 21 nt, Human
aagucaguauagcaaagcuaa

SEQ ID NO: 275709 - RNA, 18 nt, Human
aauaaugcugguaaaaug

SEQ ID NO: 275710 - RNA, 20 nt, Human
aauaaugcugguaaaauggc

SEQ ID NO: 275711 - RNA, 22 nt, Human
aaucugauguguaacuggggca

SEQ ID NO: 275712 - RNA, 24 nt, Human
acaacaaaaaacacauuuccuucu

SEQ ID NO: 275713 - RNA, 22 nt, Human
acaagaaacaaaugaacaacaa

SEQ ID NO: 275714 - RNA, 24 nt, Human
acaagaaacaaaugaacaacaaaa

SEQ ID NO: 275715 - RNA, 23 nt, Human
acaggacagugcuuuggccucac

SEQ ID NO: 275716 - RNA, 20 nt, Human
acagugaggauguuaaugga

SEQ ID NO: 275717 - RNA, 19 nt, Human
acagugcuuuuaugcaacu

SEQ ID NO: 275718 - RNA, 24 nt, Human
acgagauacacuauuugucaaaac

SEQ ID NO: 275719 - RNA, 23 nt, Human
acucagagguuaacagauggugu

SEQ ID NO: 275720 - RNA, 21 nt, Human
acuccaugugagaacuuuugu

SEQ ID NO: 275721 - RNA, 20 nt, Human
acuguuggggagaaaauaau

SEQ ID NO: 275722 - RNA, 20 nt, Human
agaacaaaacagaucaagaa

SEQ ID NO: 275723 - RNA, 22 nt, Human
aguauuagaaacugcauuggcu

SEQ ID NO: 275724 - RNA, 21 nt, Human
agugcugagugcacagggcua

SEQ ID NO: 275725 - RNA, 21 nt, Human
aucacaguucagagagaggcu

SEQ ID NO: 275726 - RNA, 20 nt, Human
augaaacaucugguaaaaca

SEQ ID NO: 275727 - RNA, 23 nt, Human
auuacaauuagcuuaagaugauc

SEQ ID NO: 275728 - RNA, 21 nt, Human
caaaacuuacacagcuacaga

SEQ ID NO: 275729 - RNA, 24 nt, Human
caaaagggaaaguucaugaggaca

SEQ ID NO: 275730 - RNA, 20 nt, Human
caaaguacaguacauccuuc

SEQ ID NO: 275731 - RNA, 22 nt, Human
caagaaacaaaugaacaacaaa

SEQ ID NO: 275732 - RNA, 20 nt, Human
caaguucucaauguccaaaa

SEQ ID NO: 275733 - RNA, 23 nt, Human
cacuauuugucaaaacuuacaca

SEQ ID NO: 275734 - RNA, 27 nt, Human
cagaucaagaaaaaauucuuucuauga

SEQ ID NO: 275735 - RNA, 18 nt, Human
caggacagugcuuuggcc

SEQ ID NO: 275736 - RNA, 26 nt, Human
cauauaguucaaugaacaaaagggaa

SEQ ID NO: 275737 - RNA, 18 nt, Human
caucaugggagcaaacag

SEQ ID NO: 275738 - RNA, 20 nt, Human
ccagauaucagaguagcagc

SEQ ID NO: 275739 - RNA, 25 nt, Human
ccuguaccacaguuaugugucuaaa

SEQ ID NO: 275740 - RNA, 19 nt, Human
cgccaugcugcaaagacuc

SEQ ID NO: 275741 - RNA, 19 nt, Human
cggcaaugcuaaccacuga

SEQ ID NO: 275742 - RNA, 21 nt, Human
cuaaaaaaaaaaaaaaugagu

SEQ ID NO: 275743 - RNA, 24 nt, Human
cugaaaacuauacgcauaucccug

SEQ ID NO: 275744 - RNA, 21 nt, Human
cugaauauugacaguccauua

SEQ ID NO: 275745 - RNA, 18 nt, Human
cugaccccaccauacuca

SEQ ID NO: 275746 - RNA, 25 nt, Human
cuuacacagcuacagaguaucgacg

SEQ ID NO: 275747 - RNA, 18 nt, Human
gaaauucagacauggagc

SEQ ID NO: 275748 - RNA, 23 nt, Human
gaguauuagaaacugcauuggcu

SEQ ID NO: 275749 - RNA, 19 nt, Human
gcaucacacucauuguucu

SEQ ID NO: 275750 - RNA, 21 nt, Human
gccagauaucagaguagcagc

SEQ ID NO: 275751 - RNA, 19 nt, Human
gggucuugggaacaaaggc

SEQ ID NO: 275752 - RNA, 23 nt, Human
gugacaguuguugggucuuggga

SEQ ID NO: 275753 - RNA, 23 nt, Human
guugggucuugggaacaaaggcu

SEQ ID NO: 275754 - RNA, 20 nt, Human
uaaaaaaaaaaaaaaugagg

SEQ ID NO: 275755 - RNA, 24 nt, Human
uaaaaacaaaugugcaaccucuga

SEQ ID NO: 275756 - RNA, 21 nt, Human
uaaaaaugcuccacaaaacau

SEQ ID NO: 275757 - RNA, 25 nt, Human
uaaacagugaggauguuaauggagu

SEQ ID NO: 275758 - RNA, 25 nt, Human
uaaauauaauagcggcaaugcugua

SEQ ID NO: 275759 - RNA, 18 nt, Human
uaacaaauuauacacaau

SEQ ID NO: 275760 - RNA, 23 nt, Human
uaagaugaucauauuaaaaccua

SEQ ID NO: 275761 - RNA, 20 nt, Human
uaagcaggaaguaagacuua

SEQ ID NO: 275762 - RNA, 21 nt, Human
uaagcaugcaggaaauacugu

SEQ ID NO: 275763 - RNA, 24 nt, Human
uacaggacagugcuuuggccucac

SEQ ID NO: 275764 - RNA, 21 nt, Human
uaccaauuaacacaguuuacu

SEQ ID NO: 275765 - RNA, 23 nt, Human
uaccacaguuaugugucuaaaca

SEQ ID NO: 275766 - RNA, 20 nt, Human
uacuucacugugcccuaagc

SEQ ID NO: 275767 - RNA, 19 nt, Human
uagcggcaaugcuaaccac

SEQ ID NO: 275768 - RNA, 19 nt, Human
uagucauuaccaauuaaca

SEQ ID NO: 275769 - RNA, 21 nt, Human
uaguucaaugaacaaaaggga

SEQ ID NO: 275770 - RNA, 19 nt, Human
uauacacaagcaaaguaua

SEQ ID NO: 275771 - RNA, 22 nt, Human
uaugaaaugaagaguccauaua

SEQ ID NO: 275772 - RNA, 18 nt, Human
ucacugugcccuaagcag

SEQ ID NO: 275773 - RNA, 21 nt, Human
uccacaaaacaugcaaauuac

SEQ ID NO: 275774 - RNA, 19 nt, Human
uccuucuugaaaauggggu

SEQ ID NO: 275775 - RNA, 24 nt, Human
ucuuacacuagaaacaccucugac

SEQ ID NO: 275776 - RNA, 22 nt, Human
ugaaacaucugguaaaacacau

SEQ ID NO: 275777 - RNA, 23 nt, Human
ugacaguuguugggucuugggaa

SEQ ID NO: 275778 - RNA, 24 nt, Human
ugacauaaaaaugcuccacaaaac

SEQ ID NO: 275779 - RNA, 18 nt, Human
ugaccugucaaaaagccu

SEQ ID NO: 275780 - RNA, 22 nt, Human
ugaguaaauauaauagcggcaa

SEQ ID NO: 275781 - RNA, 20 nt, Human
ugcaaagacuccaucauggg

SEQ ID NO: 275782 - RNA, 24 nt, Human
ugcaaagacuccaucaugggagca

SEQ ID NO: 275783 - RNA, 18 nt, Human
ugcaacauacuuaucaag

SEQ ID NO: 275784 - RNA, 19 nt, Human
ugcaacuauauugcuuuuu

SEQ ID NO: 275785 - RNA, 20 nt, Human
ugcaacuauauugcuuuuug

SEQ ID NO: 275786 - RNA, 19 nt, Human
ugcuccacaaaacaugcaa

SEQ ID NO: 275787 - RNA, 24 nt, Human
uggacguaaucaauggguugaaga

SEQ ID NO: 275788 - RNA, 22 nt, Human
ugggaugccauuuagcuugcua

SEQ ID NO: 275789 - RNA, 18 nt, Human
ugugcaaccucugaagag

SEQ ID NO: 275790 - RNA, 20 nt, Human
uguuuauaauuuccaauccu

SEQ ID NO: 275791 - RNA, 24 nt, Human
uuacacagcuacagaguaucgacg

SEQ ID NO: 275792 - RNA, 20 nt, Human
uuauacacaauuauaagcuc

SEQ ID NO: 275793 - RNA, 24 nt, Human
uucauuuaaacaagcauaucauuc

SEQ ID NO: 275794 - RNA, 23 nt, Human
uugacaguccauuaguucuuuuc

SEQ ID NO: 275795 - RNA, 20 nt, Human
uugaugauuacaauucuuuc

SEQ ID NO: 275796 - RNA, 21 nt, Human
uugcacagaaaggagcagcug

SEQ ID NO: 275797 - RNA, 21 nt, Human
uugcaguuccugccgcugcua

SEQ ID NO: 275798 - RNA, 21 nt, Human
uuggugacauaaaaaugcucc

SEQ ID NO: 275799 - RNA, 21 nt, Human
uuguuuauaauuuccaauccu

SEQ ID NO: 275800 - RNA, 24 nt, Human
uuuguuggcacuuucacuuuuguu

SEQ ID NO: 275801 - RNA, 19 nt, Human
uuuuaugcaacuauauugc

SEQ ID NO: 275802 - RNA, 21 nt, Human
aaagagacaaaaugcagauua

SEQ ID NO: 275803 - RNA, 21 nt, Human
aagauacaaagagacaaaaug

SEQ ID NO: 275804 - RNA, 19 nt, Human
acugaagauacaaagagac

SEQ ID NO: 275805 - RNA, 18 nt, Human
caaaccugacgagaccaa

SEQ ID NO: 275806 - RNA, 21 nt, Human
cgagaccaaguaaauuacuga

SEQ ID NO: 275807 - RNA, 22 nt, Human
cucaaaccugacgagaccaagu

SEQ ID NO: 275808 - RNA, 26 nt, Human
uacaaagagacaaaaugcagauuacc

SEQ ID NO: 275809 - RNA, 22 nt, Human
ucuuauccuaaagugacugcuc

SEQ ID NO: 275810 - RNA, 20 nt, Human
aguaaauguuuuuguucugu

SEQ ID NO: 275811 - RNA, 21 nt, Human
aguucccaacugggagcucau

SEQ ID NO: 275812 - RNA, 24 nt, Human
caggaaauuucuucucccucaccu

SEQ ID NO: 275813 - RNA, 23 nt, Human
cgucacaggaauuccugguggag

SEQ ID NO: 275814 - RNA, 19 nt, Human
gagcucauaucaacaggcc

SEQ ID NO: 275815 - RNA, 22 nt, Human
uuccugguggaguucuuuggaa

SEQ ID NO: 275816 - RNA, 22 nt, Human
aagcccgaaggcccggcgccga

SEQ ID NO: 275817 - RNA, 25 nt, Human
aagcccgaaggcccggcgccgagcc

SEQ ID NO: 275818 - RNA, 25 nt, Human
aagucuuagaaauugcacucauucc

SEQ ID NO: 275819 - RNA, 19 nt, Human
aaucagccuuagauugagc

SEQ ID NO: 275820 - RNA, 25 nt, Human
accaaaaacaauuuaaagaggaaca

SEQ ID NO: 275821 - RNA, 24 nt, Human
agggucaaagacugaguggaagcc

SEQ ID NO: 275822 - RNA, 31 nt, Human
aucaacagugugcaucuaacaguuuucuuuu

SEQ ID NO: 275823 - RNA, 24 nt, Human
ccaaaaacaauuuaaagaggaaca

SEQ ID NO: 275824 - RNA, 19 nt, Human
cccacccgcaccgggucag

SEQ ID NO: 275825 - RNA, 26 nt, Human
ccccgccgcgcugcgcucugugcccg

SEQ ID NO: 275826 - RNA, 19 nt, Human
cccggcgccgagccagccc

SEQ ID NO: 275827 - RNA, 19 nt, Human
cgagaaggagcgggcggcg

SEQ ID NO: 275828 - RNA, 23 nt, Human
cgagaaggagcgggcggcggccg

SEQ ID NO: 275829 - RNA, 22 nt, Human
cgccggccccgccgcgcugcgc

SEQ ID NO: 275830 - RNA, 26 nt, Human
cggcccgagaaggagcgggcggcggg

SEQ ID NO: 275831 - RNA, 24 nt, Human
cucccacccgcaccgggucagcuc

SEQ ID NO: 275832 - RNA, 21 nt, Human
cuuagauugagcaaguucagc

SEQ ID NO: 275833 - RNA, 23 nt, Human
gagcgaggaccgagggucaaaga

SEQ ID NO: 275834 - RNA, 22 nt, Human
gagcgggcggcggccggggcag

SEQ ID NO: 275835 - RNA, 19 nt, Human
gcccgaaggcccggcgccg

SEQ ID NO: 275836 - RNA, 20 nt, Human
gcccugacucccacccgcac

SEQ ID NO: 275837 - RNA, 19 nt, Human
gcggcggccggggcagcgg

SEQ ID NO: 275838 - RNA, 19 nt, Human
ggcgcccugacucccaccc

SEQ ID NO: 275839 - RNA, 22 nt, Human
gggaguucuugaauccaccaug

SEQ ID NO: 275840 - RNA, 19 nt, Human
uagauugagcaaguucagc

SEQ ID NO: 275841 - RNA, 20 nt, Human
ucagggucucuuugguuucc

SEQ ID NO: 275842 - RNA, 18 nt, Human
uccaccaugaaaaucaac

SEQ ID NO: 275843 - RNA, 22 nt, Human
ucuucagggucucuuugguuuc

SEQ ID NO: 275844 - RNA, 19 nt, Human
ugacucccacccgcaccgg

SEQ ID NO: 275845 - RNA, 21 nt, Human
ugagaacugaaaagugaauca

SEQ ID NO: 275846 - RNA, 22 nt, Human
ugccgggccgcugagcgaggac

SEQ ID NO: 275847 - RNA, 18 nt, Human
uggaagcccgaaggcccg

SEQ ID NO: 275848 - RNA, 24 nt, Human
uggaagcccgaaggcccggcgccg

SEQ ID NO: 275849 - RNA, 19 nt, Human
uucagcuccucacuaggga

SEQ ID NO: 275850 - RNA, 18 nt, Human
uucuuuggcauaacacag

SEQ ID NO: 275851 - RNA, 22 nt, Human
uucuuuggcauaacacagcuga

SEQ ID NO: 275852 - RNA, 23 nt, Human
uuuuuuuuuuuuuuuuucagcuu

SEQ ID NO: 275853 - RNA, 24 nt, Human
uuuuuuuuuuuuuuuuuuuuucag

SEQ ID NO: 275854 - RNA, 22 nt, Human
aaagcgcaacuagaaggacuaa

SEQ ID NO: 275855 - RNA, 19 nt, Human
accaggcugggaaccucaa

SEQ ID NO: 275856 - RNA, 22 nt, Human
accguccugccucaggcccugg

SEQ ID NO: 275857 - RNA, 18 nt, Human
acugcauaccagccuggg

SEQ ID NO: 275858 - RNA, 25 nt, Human
acugcauaccagccugggcgcaaug

SEQ ID NO: 275859 - RNA, 21 nt, Human
cagcggaguaccguccugccu

SEQ ID NO: 275860 - RNA, 21 nt, Human
cagugagaccaagaacccacc

SEQ ID NO: 275861 - RNA, 18 nt, Human
ccguccugccucaggccc

SEQ ID NO: 275862 - RNA, 18 nt, Human
ccuggggccaccaggcug

SEQ ID NO: 275863 - RNA, 26 nt, Human
ccuggggccaccaggcugggaaccuc

SEQ ID NO: 275864 - RNA, 23 nt, Human
cugcggcuucauucuugaaguca

SEQ ID NO: 275865 - RNA, 19 nt, Human
gaccggaacguccuggggc

SEQ ID NO: 275866 - RNA, 20 nt, Human
ggacuuggggcagagcuugg

SEQ ID NO: 275867 - RNA, 21 nt, Human
ggcccugggacacccagcaac

SEQ ID NO: 275868 - RNA, 18 nt, Human
uaagggcuucauaggcgu

SEQ ID NO: 275869 - RNA, 25 nt, Human
uacaacaugacugcauaccagccug

SEQ ID NO: 275870 - RNA, 21 nt, Human
uagcaaaagcgcaacuagaag

SEQ ID NO: 275871 - RNA, 18 nt, Human
ugagaccaagaacccacc

SEQ ID NO: 275872 - RNA, 19 nt, Human
ugagaccaagaacccacca

SEQ ID NO: 275873 - RNA, 21 nt, Human
ugccucaggcccugggacacc

SEQ ID NO: 275874 - RNA, 22 nt, Human
ugccucaggcccugggacaccc

SEQ ID NO: 275875 - RNA, 22 nt, Human
ugcgaccggaacguccuggggc

SEQ ID NO: 275876 - RNA, 23 nt, Human
ugcgaccggaacguccuggggcc

SEQ ID NO: 275877 - RNA, 25 nt, Human
uugaagucagugagaccaagaaccc

SEQ ID NO: 275878 - RNA, 27 nt, Human
uugaagucagugagaccaagaacccac

SEQ ID NO: 275879 - RNA, 22 nt, Human
agaaagaacaggaaugagaaca

SEQ ID NO: 275880 - RNA, 23 nt, Human
augagaacagcuuuauuuuguag

SEQ ID NO: 275881 - RNA, 19 nt, Human
caaauccugggcaucucca

SEQ ID NO: 275882 - RNA, 22 nt, Human
cacaccuguaaucccagcuuug

SEQ ID NO: 275883 - RNA, 19 nt, Human
caccagaagggucugguag

SEQ ID NO: 275884 - RNA, 20 nt, Human
caccuguaaucccagcuuug

SEQ ID NO: 275885 - RNA, 21 nt, Human
caccuguaaucccagcuuuga

SEQ ID NO: 275886 - RNA, 24 nt, Human
cuaugcucacaccuguaaucccag

SEQ ID NO: 275887 - RNA, 20 nt, Human
cucacaccuguaaucccagc

SEQ ID NO: 275888 - RNA, 20 nt, Human
cucacaccuguaaucccagc

SEQ ID NO: 275889 - RNA, 18 nt, Human
gaaagaacaggaaugaga

SEQ ID NO: 275890 - RNA, 22 nt, Human
gcagacgccuucucgaugagcc

SEQ ID NO: 275891 - RNA, 26 nt, Human
gcucuuguguaagaaagaacaggaau

SEQ ID NO: 275892 - RNA, 18 nt, Human
ggaauguauuaucucaaa

SEQ ID NO: 275893 - RNA, 23 nt, Human
ggacagaggcacaugacuccagc

SEQ ID NO: 275894 - RNA, 21 nt, Human
uaagaaagaacaggaaugaga

SEQ ID NO: 275895 - RNA, 24 nt, Human
uagcagcugcuaugcaaaguucua

SEQ ID NO: 275896 - RNA, 18 nt, Human
uccgcuccgcuaugcuga

SEQ ID NO: 275897 - RNA, 18 nt, Human
ucucaaagagcuaguagc

SEQ ID NO: 275898 - RNA, 25 nt, Human
ucugcuacaaccuaaggacagaggc

SEQ ID NO: 275899 - RNA, 25 nt, Human
ugagaagaggaucuggcaccagaag

SEQ ID NO: 275900 - RNA, 21 nt, Human
ugccagacgacuccaaggcag

SEQ ID NO: 275901 - RNA, 24 nt, Human
ugcuccggugugcuccgauccgau

SEQ ID NO: 275902 - RNA, 19 nt, Human
ugggaaaggugaaggacag

SEQ ID NO: 275903 - RNA, 18 nt, Human
ugggagaugccagacgac

SEQ ID NO: 275904 - RNA, 18 nt, Human
ugguagaagaaaguggga

SEQ ID NO: 275905 - RNA, 21 nt, Human
uugagaagaggaucuggcacc

SEQ ID NO: 275906 - RNA, 20 nt, Human
uuggucucuggugauuuaga

SEQ ID NO: 275907 - RNA, 23 nt, Human
uuucugcuacaaccuaaggacag

SEQ ID NO: 275908 - RNA, 22 nt, Human
uuugagaagaggaucuggcacc

SEQ ID NO: 275909 - RNA, 21 nt, Human
aaggagcuggggggggggggg

SEQ ID NO: 275910 - RNA, 19 nt, Human
aggagcugggggggggggg

SEQ ID NO: 275911 - RNA, 22 nt, Human
ccuacuguccugggggaccccg

SEQ ID NO: 275912 - RNA, 19 nt, Human
cggcgccggcagcucugcc

SEQ ID NO: 275913 - RNA, 18 nt, Human
cuccgagccccgagucuc

SEQ ID NO: 275914 - RNA, 20 nt, Human
gagccccgagucuccugcag

SEQ ID NO: 275915 - RNA, 22 nt, Human
ggagaccuucuagggaaacuga

SEQ ID NO: 275916 - RNA, 19 nt, Human
ggagcuggggggggggggg

SEQ ID NO: 275917 - RNA, 22 nt, Human
ggcuccgagccccgagucuccu

SEQ ID NO: 275918 - RNA, 19 nt, Human
gggcucagggucccagcaa

SEQ ID NO: 275919 - RNA, 22 nt, Human
ggucccagcaaggagcuggggg

SEQ ID NO: 275920 - RNA, 21 nt, Human
ucccagcaaggagcugggggg

SEQ ID NO: 275921 - RNA, 18 nt, Human
agccagggguuuaguuca

SEQ ID NO: 275922 - RNA, 23 nt, Human
agcggccccgcggggccgggcgc

SEQ ID NO: 275923 - RNA, 21 nt, Human
cagacuccucuccccaucucc

SEQ ID NO: 275924 - RNA, 18 nt, Human
ccgccgccgccgccgccg

SEQ ID NO: 275925 - RNA, 18 nt, Human
ccgccgccgccgccgccg

SEQ ID NO: 275926 - RNA, 21 nt, Human
ccgccgccgccgccgccgcgg

SEQ ID NO: 275927 - RNA, 24 nt, Human
ccgccgccgccgccgcggcugcgg

SEQ ID NO: 275928 - RNA, 20 nt, Human
ccgccgcggcugcgggucuc

SEQ ID NO: 275929 - RNA, 19 nt, Human
ccgccgcuccugggccgca

SEQ ID NO: 275930 - RNA, 24 nt, Human
ccgcggcugcgggucuccgggcuc

SEQ ID NO: 275931 - RNA, 18 nt, Human
ccgggcuccgcggccgcc

SEQ ID NO: 275932 - RNA, 19 nt, Human
ccucccgccgccgcuggga

SEQ ID NO: 275933 - RNA, 22 nt, Human
ccucccgccgccgcugggagac

SEQ ID NO: 275934 - RNA, 18 nt, Human
cgagcgggcgcggcgagc

SEQ ID NO: 275935 - RNA, 21 nt, Human
cgccgccgccgccgccgcggc

SEQ ID NO: 275936 - RNA, 19 nt, Human
cgcggccgccgcuccuggg

SEQ ID NO: 275937 - RNA, 22 nt, Human
cggcgggaggcgcugcucuagc

SEQ ID NO: 275938 - RNA, 21 nt, Human
cgggccggagcggccccgcgg

SEQ ID NO: 275939 - RNA, 25 nt, Human
cgggucccucggcuccugcgagagg

SEQ ID NO: 275940 - RNA, 24 nt, Human
cuccucuccccaucuccuguggcc

SEQ ID NO: 275941 - RNA, 22 nt, Human
cuccugggccgcagccgcgcgg

SEQ ID NO: 275942 - RNA, 22 nt, Human
gccgcagccgcgcgggucccuc

SEQ ID NO: 275943 - RNA, 22 nt, Human
gccgccgccgccgccgccgccg

SEQ ID NO: 275944 - RNA, 20 nt, Human
gcgcgggucccucggcuccu

SEQ ID NO: 275945 - RNA, 18 nt, Human
gcggcgggaggcgcugcu

SEQ ID NO: 275946 - RNA, 22 nt, Human
gcugccgccgccgccgccgccg

SEQ ID NO: 275947 - RNA, 23 nt, Human
gcugcugccgccgccgccgccgg

SEQ ID NO: 275948 - RNA, 18 nt, Human
ggagacgcgccucccgcc

SEQ ID NO: 275949 - RNA, 22 nt, Human
gggccgcagccgcgcggguccc

SEQ ID NO: 275950 - RNA, 26 nt, Human
uccccaucuccuguggccaccccccu

SEQ ID NO: 275951 - RNA, 24 nt, Human
ugugcacaaaagccagggguuuag

SEQ ID NO: 275952 - RNA, 26 nt, Human
uguggccaccccccucauccauuggu

SEQ ID NO: 275953 - RNA, 20 nt, Human
uucagacuccucuccccauc

SEQ ID NO: 275954 - RNA, 22 nt, Human
uucagacuccucuccccaucuc

SEQ ID NO: 275955 - RNA, 26 nt, Human
uuuaguucagacuccucuccccaucu

SEQ ID NO: 275956 - RNA, 22 nt, Human
aaaaaacacaguguaagaacau

SEQ ID NO: 275957 - RNA, 19 nt, Human
aaaaccacagcaggaacca

SEQ ID NO: 275958 - RNA, 21 nt, Human
aaacaaagagaacagagugau

SEQ ID NO: 275959 - RNA, 23 nt, Human
aagagaacagagugaucagagua

SEQ ID NO: 275960 - RNA, 20 nt, Human
aaggaccuuuugagagaaac

SEQ ID NO: 275961 - RNA, 21 nt, Human
acagagaaggcaccucucuca

SEQ ID NO: 275962 - RNA, 18 nt, Human
accuguagaaaaaaaucc

SEQ ID NO: 275963 - RNA, 20 nt, Human
agacaaugcacuauaucuaa

SEQ ID NO: 275964 - RNA, 19 nt, Human
aguacuaaagagaacauac

SEQ ID NO: 275965 - RNA, 23 nt, Human
auagaccacugccacaccauaca

SEQ ID NO: 275966 - RNA, 21 nt, Human
caaaaaacacaguguaagaac

SEQ ID NO: 275967 - RNA, 20 nt, Human
caaaaccacagcaggaacca

SEQ ID NO: 275968 - RNA, 24 nt, Human
caaaauaaaaauauaccaaguaag

SEQ ID NO: 275969 - RNA, 24 nt, Human
caacaccagaagauaauccuccac

SEQ ID NO: 275970 - RNA, 19 nt, Human
cagauuggcuuuacuuaca

SEQ ID NO: 275971 - RNA, 25 nt, Human
ccaaaacaagugagaaacuauucca

SEQ ID NO: 275972 - RNA, 23 nt, Human
ccacaccauacaaauuucuuaca

SEQ ID NO: 275973 - RNA, 20 nt, Human
ccuccacauaaacucucaca

SEQ ID NO: 275974 - RNA, 22 nt, Human
ccuccacauaaacucucacaua

SEQ ID NO: 275975 - RNA, 30 nt, Human
cuaaccacuuaaaguucuguaaaaaaucuu

SEQ ID NO: 275976 - RNA, 24 nt, Human
cucuauuucaacaagauuuacaca

SEQ ID NO: 275977 - RNA, 21 nt, Human
cucuuuaaaacaaagagaaca

SEQ ID NO: 275978 - RNA, 22 nt, Human
gcaccucucucaucucucacuc

SEQ ID NO: 275979 - RNA, 20 nt, Human
gguaaagugugaaauuccag

SEQ ID NO: 275980 - RNA, 27 nt, Human
uaaaaaaucuuaaguuauaaaugaaag

SEQ ID NO: 275981 - RNA, 19 nt, Human
uaaaacaaagagaacagag

SEQ ID NO: 275982 - RNA, 18 nt, Human
uaaauccccagcauuuag

SEQ ID NO: 275983 - RNA, 22 nt, Human
uaacuauaugauauuuaguucc

SEQ ID NO: 275984 - RNA, 25 nt, Human
uaagaagacaugauuucuacacuga

SEQ ID NO: 275985 - RNA, 26 nt, Human
uaagcaucauuuuccuccaaaacaag

SEQ ID NO: 275986 - RNA, 23 nt, Human
uacacaguauuuacaauauggaa

SEQ ID NO: 275987 - RNA, 18 nt, Human
uaggagaaacuaaaauau

SEQ ID NO: 275988 - RNA, 25 nt, Human
uaggagaaacuaaaauauaaaacua

SEQ ID NO: 275989 - RNA, 22 nt, Human
uagucuaaccacuuaaaguucu

SEQ ID NO: 275990 - RNA, 19 nt, Human
uaguuccuuaggaauagac

SEQ ID NO: 275991 - RNA, 22 nt, Human
uaugauggacacaacaccagaa

SEQ ID NO: 275992 - RNA, 23 nt, Human
uauuuuuuuaaaggcccaguaca

SEQ ID NO: 275993 - RNA, 20 nt, Human
ucaaaaaacacaguguaaga

SEQ ID NO: 275994 - RNA, 24 nt, Human
ucaacaaaauauacaccuguagaa

SEQ ID NO: 275995 - RNA, 23 nt, Human
ucuaggaaaaaaacucaucaaac

SEQ ID NO: 275996 - RNA, 23 nt, Human
ucucuacuacaaaccaaaauuuu

SEQ ID NO: 275997 - RNA, 23 nt, Human
ucucucaucucucacucuccuua

SEQ ID NO: 275998 - RNA, 26 nt, Human
ucuguucucauuuaaaaguuuaaacc

SEQ ID NO: 275999 - RNA, 22 nt, Human
ugaaauuccagaaauauaauac

SEQ ID NO: 276000 - RNA, 19 nt, Human
ugaggaaagugacucuuca

SEQ ID NO: 276001 - RNA, 23 nt, Human
ugaguuuuuaacaccuacuguuc

SEQ ID NO: 276002 - RNA, 21 nt, Human
ugauauuuaguuccuuaggaa

SEQ ID NO: 276003 - RNA, 22 nt, Human
uguaguacuuagugauugugua

SEQ ID NO: 276004 - RNA, 19 nt, Human
ugucaaagcuauacaguuu

SEQ ID NO: 276005 - RNA, 25 nt, Human
uuagugauuguguauuuaaaugucu

SEQ ID NO: 276006 - RNA, 20 nt, Human
uucuuauguguccagaaugu

SEQ ID NO: 276007 - RNA, 24 nt, Human
uuuaacauacccauuguaggagaa

SEQ ID NO: 276008 - RNA, 21 nt, Human
uuuuucccaaaauaaaaauau

SEQ ID NO: 276009 - RNA, 24 nt, Human
aacccaguagacacaccuacgaga

SEQ ID NO: 276010 - RNA, 24 nt, Human
aaccgaugguuggcaccauccggu

SEQ ID NO: 276011 - RNA, 22 nt, Human
auaaaauguuauaaaguguauc

SEQ ID NO: 276012 - RNA, 27 nt, Human
auaaagcucuuuaaacuauaaaauguu

SEQ ID NO: 276013 - RNA, 19 nt, Human
auaaaguguaucuacaacc

SEQ ID NO: 276014 - RNA, 18 nt, Human
aucacauucacagccauc

SEQ ID NO: 276015 - RNA, 21 nt, Human
caaccucaacugucacuaaaa

SEQ ID NO: 276016 - RNA, 20 nt, Human
caggaggagcggaggagcug

SEQ ID NO: 276017 - RNA, 21 nt, Human
caguagacacaccuacgagau

SEQ ID NO: 276018 - RNA, 24 nt, Human
cauucacagccaucuagugucacc

SEQ ID NO: 276019 - RNA, 22 nt, Human
ccggaggcggcucuacuucccc

SEQ ID NO: 276020 - RNA, 22 nt, Human
ccugugguugccuccagaucua

SEQ ID NO: 276021 - RNA, 23 nt, Human
cgaccgacccuuagacacaguuc

SEQ ID NO: 276022 - RNA, 26 nt, Human
cugacgccggcggcguucggcugguu

SEQ ID NO: 276023 - RNA, 25 nt, Human
cugcuugccaaagaaugagguuucu

SEQ ID NO: 276024 - RNA, 20 nt, Human
cuucccaagucaacugugca

SEQ ID NO: 276025 - RNA, 18 nt, Human
gacacaccuacgagaugc

SEQ ID NO: 276026 - RNA, 19 nt, Human
gcggaggagcaggagcaaa

SEQ ID NO: 276027 - RNA, 27 nt, Human
gggagaaguuuaguguccugugguugc

SEQ ID NO: 276028 - RNA, 18 nt, Human
guaauacugcuucccaag

SEQ ID NO: 276029 - RNA, 28 nt, Human
guugcuuuuuucaaacagauuuuuggag

SEQ ID NO: 276030 - RNA, 20 nt, Human
uaaaacccaguagacacacc

SEQ ID NO: 276031 - RNA, 22 nt, Human
uacgagaugcuuucuuuguccc

SEQ ID NO: 276032 - RNA, 21 nt, Human
ucaaagcugcugccaaacaac

SEQ ID NO: 276033 - RNA, 19 nt, Human
ugagguuucuuuccugaag

SEQ ID NO: 276034 - RNA, 22 nt, Human
ugccacaucuaacuggcaauua

SEQ ID NO: 276035 - RNA, 24 nt, Human
ugucacuaaaaauaugguauagaa

SEQ ID NO: 276036 - RNA, 26 nt, Human
uguggccgcgcaaggcugcugacgcc

SEQ ID NO: 276037 - RNA, 21 nt, Human
ugugggauggcuuacuccuaa

SEQ ID NO: 276038 - RNA, 19 nt, Human
uguugcuuuuuucaaacag

SEQ ID NO: 276039 - RNA, 26 nt, Human
aaaaaaaauuaaacaucugcuaacca

SEQ ID NO: 276040 - RNA, 20 nt, Human
aaaaagagacaugagacaac

SEQ ID NO: 276041 - RNA, 21 nt, Human
aaagagacaugagacaaccac

SEQ ID NO: 276042 - RNA, 24 nt, Human
aaagagacaugagacaaccacuga

SEQ ID NO: 276043 - RNA, 18 nt, Human
aaccaccuaagacagaaa

SEQ ID NO: 276044 - RNA, 19 nt, Human
aaccacugagaaccagcca

SEQ ID NO: 276045 - RNA, 19 nt, Human
acagaaaaagagacaugag

SEQ ID NO: 276046 - RNA, 19 nt, Human
acagagcaccuccucuuca

SEQ ID NO: 276047 - RNA, 18 nt, Human
agaaaaagagacaugaga

SEQ ID NO: 276048 - RNA, 22 nt, Human
agaaccagccacccggagcuca

SEQ ID NO: 276049 - RNA, 25 nt, Human
agacagaaaaagagacaugagacaa

SEQ ID NO: 276050 - RNA, 22 nt, Human
agaguaaauuuccagguguaga

SEQ ID NO: 276051 - RNA, 21 nt, Human
agcucgggaaagaagcagcgg

SEQ ID NO: 276052 - RNA, 20 nt, Human
caccuccucuucaacgaauc

SEQ ID NO: 276053 - RNA, 24 nt, Human
caugagacaaccacugagaaccag

SEQ ID NO: 276054 - RNA, 25 nt, Human
cccgcggucacaagacaaaccuguc

SEQ ID NO: 276055 - RNA, 19 nt, Human
cccggagcucaguuucugc

SEQ ID NO: 276056 - RNA, 24 nt, Human
cucaguuucugcuacagagcaccu

SEQ ID NO: 276057 - RNA, 19 nt, Human
cucuucaacgaaucacugg

SEQ ID NO: 276058 - RNA, 24 nt, Human
gacaaccacugagaaccagccacc

SEQ ID NO: 276059 - RNA, 19 nt, Human
gacaugagacaaccacuga

SEQ ID NO: 276060 - RNA, 18 nt, Human
gagcucaguuucugcuac

SEQ ID NO: 276061 - RNA, 21 nt, Human
gcgggcccggggaggagccca

SEQ ID NO: 276062 - RNA, 23 nt, Human
gggaaagaagcagcggccgcccg

SEQ ID NO: 276063 - RNA, 19 nt, Human
gguguagaaagaggccaca

SEQ ID NO: 276064 - RNA, 23 nt, Human
uaaaaaaaaaauuaaacaucugc

SEQ ID NO: 276065 - RNA, 24 nt, Human
uaagacagaaaaagagacaugaga

SEQ ID NO: 276066 - RNA, 21 nt, Human
ucggggcgggcccggggagga

SEQ ID NO: 276067 - RNA, 19 nt, Human
ugcaccgaacucaaugagg

SEQ ID NO: 276068 - RNA, 21 nt, Human
uggaggugcugucaagagucu

SEQ ID NO: 276069 - RNA, 23 nt, Human
uguagaaagaggccacaaguuaa

SEQ ID NO: 276070 - RNA, 21 nt, Human
uugaagcagcagagcuggagg

SEQ ID NO: 276071 - RNA, 23 nt, Human
uuuuuuuuuuuuuuuuugacaag

SEQ ID NO: 276072 - RNA, 27 nt, Human
uuuuuuuuuuuuuuuuuuuuuuugggg

SEQ ID NO: 276073 - RNA, 21 nt, Human
aaaagcacacagcaucaaaac

SEQ ID NO: 276074 - RNA, 21 nt, Human
aaagcacacagcaucaaaaca

SEQ ID NO: 276075 - RNA, 21 nt, Human
aagaagaggcggaugccaagg

SEQ ID NO: 276076 - RNA, 22 nt, Human
aagaagaggcggaugccaagga

SEQ ID NO: 276077 - RNA, 21 nt, Human
agaggugcaggggaccaggag

SEQ ID NO: 276078 - RNA, 23 nt, Human
agccaaaagcacacagcaucaaa

SEQ ID NO: 276079 - RNA, 22 nt, Human
aggaggaggaggaggaagagga

SEQ ID NO: 276080 - RNA, 21 nt, Human
aggggucccagggccuggagc

SEQ ID NO: 276081 - RNA, 19 nt, Human
caaaagcacacagcaucaa

SEQ ID NO: 276082 - RNA, 23 nt, Human
caaaagcacacagcaucaaaaca

SEQ ID NO: 276083 - RNA, 18 nt, Human
caaggggucccagggccu

SEQ ID NO: 276084 - RNA, 20 nt, Human
cagcauggcaccgcgaggcc

SEQ ID NO: 276085 - RNA, 19 nt, Human
cagccaaaagcacacagca

SEQ ID NO: 276086 - RNA, 21 nt, Human
caggcccugccccuccccggg

SEQ ID NO: 276087 - RNA, 22 nt, Human
caugcccccuccaguuuggggg

SEQ ID NO: 276088 - RNA, 23 nt, Human
caugcccccuccaguuugggggu

SEQ ID NO: 276089 - RNA, 24 nt, Human
ccaaaagcacacagcaucaaaaca

SEQ ID NO: 276090 - RNA, 19 nt, Human
ccaggcccugccccucccc

SEQ ID NO: 276091 - RNA, 21 nt, Human
ccagggccuggagcccgaggc

SEQ ID NO: 276092 - RNA, 20 nt, Human
ccucgaggucggggagcagg

SEQ ID NO: 276093 - RNA, 19 nt, Human
ccuucagcgccgccgccgg

SEQ ID NO: 276094 - RNA, 21 nt, Human
cggaggcagcgggggaggacg

SEQ ID NO: 276095 - RNA, 20 nt, Human
cgggagcagcggaggcagcg

SEQ ID NO: 276096 - RNA, 21 nt, Human
cucccuggcaaggggucccag

SEQ ID NO: 276097 - RNA, 20 nt, Human
cucuacgguucuccaugccc

SEQ ID NO: 276098 - RNA, 23 nt, Human
gaagaagaggcggaugccaagga

SEQ ID NO: 276099 - RNA, 24 nt, Human
gaagaagaggcggaugccaaggag

SEQ ID NO: 276100 - RNA, 20 nt, Human
gaggaaaggcacgggcggcg

SEQ ID NO: 276101 - RNA, 18 nt, Human
gaggcccagccaaaagca

SEQ ID NO: 276102 - RNA, 19 nt, Human
gaugccaaggaggaggagg

SEQ ID NO: 276103 - RNA, 24 nt, Human
gaugccaaggaggaggaggaggaa

SEQ ID NO: 276104 - RNA, 19 nt, Human
gcagcgggggaggacgcag

SEQ ID NO: 276105 - RNA, 25 nt, Human
ggaagaagaggcggaugccaaggag

SEQ ID NO: 276106 - RNA, 23 nt, Human
ggagcagcggaggcagcggggga

SEQ ID NO: 276107 - RNA, 23 nt, Human
ggcaaggggucccagggccugga

SEQ ID NO: 276108 - RNA, 26 nt, Human
ggcagcgggggaggacgcaggaggaa

SEQ ID NO: 276109 - RNA, 19 nt, Human
ggccaggggcucggcgcgg

SEQ ID NO: 276110 - RNA, 19 nt, Human
gggaagcuccaggcccugc

SEQ ID NO: 276111 - RNA, 19 nt, Human
gggagcagcggaggcagcc

SEQ ID NO: 276112 - RNA, 21 nt, Human
gucggggagcaggugggcguc

SEQ ID NO: 276113 - RNA, 19 nt, Human
uaaaccgaacaggagaggu

SEQ ID NO: 276114 - RNA, 24 nt, Human
uacgguucuccaugcccccuccag

SEQ ID NO: 276115 - RNA, 18 nt, Human
ucccagggccuggagccc

SEQ ID NO: 276116 - RNA, 20 nt, Human
ucggcgcgggcuccgggcuc

SEQ ID NO: 276117 - RNA, 21 nt, Human
ucuaaaccgaacaggagaggu

SEQ ID NO: 276118 - RNA, 24 nt, Human
ucuaaaccgaacaggagaggugca

SEQ ID NO: 276119 - RNA, 20 nt, Human
ucuccaugcccccuccaguu

SEQ ID NO: 276120 - RNA, 24 nt, Human
uuagugggaagcuccaggcccugc

SEQ ID NO: 276121 - RNA, 21 nt, Human
uucuccaugcccccuccaguu

SEQ ID NO: 276122 - RNA, 18 nt, Human
uuuuuuuuuuuuuuucug

SEQ ID NO: 276123 - RNA, 19 nt, Human
aaaaaaaagccacuuggaa

SEQ ID NO: 276124 - RNA, 30 nt, Human
aaaaaaagaaaaaaaagguagggaaagaag

SEQ ID NO: 276125 - RNA, 18 nt, Human
aaaaccagaacaggguag

SEQ ID NO: 276126 - RNA, 23 nt, Human
aaacaauagcacaaaaauguuuc

SEQ ID NO: 276127 - RNA, 23 nt, Human
aaagaaaaaaaagguagggaaag

SEQ ID NO: 276128 - RNA, 21 nt, Human
aacacagcuucaaauaaggcu

SEQ ID NO: 276129 - RNA, 18 nt, Human
aagaagacuccaaauucu

SEQ ID NO: 276130 - RNA, 24 nt, Human
aauaacacaaaauauuuuuuuaag

SEQ ID NO: 276131 - RNA, 25 nt, Human
acacagcuucaaauaagggggaacc

SEQ ID NO: 276132 - RNA, 22 nt, Human
accauucccagaaauggacacc

SEQ ID NO: 276133 - RNA, 24 nt, Human
acugacuccaacuaugugauacca

SEQ ID NO: 276134 - RNA, 21 nt, Human
agaaggaggaggggaggaggc

SEQ ID NO: 276135 - RNA, 19 nt, Human
agagcuggcuuuucagaca

SEQ ID NO: 276136 - RNA, 21 nt, Human
agcgcuaggggcugggaagga

SEQ ID NO: 276137 - RNA, 23 nt, Human
aggaggaaaacuaaacuacaauc

SEQ ID NO: 276138 - RNA, 18 nt, Human
aggaggggaggaggcgga

SEQ ID NO: 276139 - RNA, 19 nt, Human
aggcggcggcgagaggagc

SEQ ID NO: 276140 - RNA, 23 nt, Human
aggcuucagaaaguuucacaguu

SEQ ID NO: 276141 - RNA, 19 nt, Human
agggaauggggguuggggg

SEQ ID NO: 276142 - RNA, 27 nt, Human
agguagggaaagaagaagggaaugaga

SEQ ID NO: 276143 - RNA, 24 nt, Human
auuaugcacugacuccaacuaugu

SEQ ID NO: 276144 - RNA, 23 nt, Human
caaauucuuggcauaugaaucaa

SEQ ID NO: 276145 - RNA, 29 nt, Human
caaauucuuggcauaugaaucagcuguuc

SEQ ID NO: 276146 - RNA, 21 nt, Human
cacccuuggcuuuauaggcuc

SEQ ID NO: 276147 - RNA, 23 nt, Human
cacugacuccaacuaugugauac

SEQ ID NO: 276148 - RNA, 19 nt, Human
cagaaaggccuggcugaag

SEQ ID NO: 276149 - RNA, 19 nt, Human
cagaaccgccaauggcggc

SEQ ID NO: 276150 - RNA, 21 nt, Human
ccagccuggauagagugacaa

SEQ ID NO: 276151 - RNA, 24 nt, Human
cccgugccaaaaaaaaaaaaagcc

SEQ ID NO: 276152 - RNA, 18 nt, Human
cgagaggagcggcugaag

SEQ ID NO: 276153 - RNA, 19 nt, Human
cgaggaagagcaggcggcg

SEQ ID NO: 276154 - RNA, 18 nt, Human
cgcggcgaggcccaggcu

SEQ ID NO: 276155 - RNA, 18 nt, Human
cggggaagggggcggagg

SEQ ID NO: 276156 - RNA, 24 nt, Human
cuaaagggaggaaaaaaaccagaa

SEQ ID NO: 276157 - RNA, 22 nt, Human
cucacaaucugaugaccuucug

SEQ ID NO: 276158 - RNA, 28 nt, Human
cugaagacgagaaggaggaggggaggag

SEQ ID NO: 276159 - RNA, 19 nt, Human
cuucagaaaggccuggcug

SEQ ID NO: 276160 - RNA, 21 nt, Human
cuuuaaaaagaaaaaaauaau

SEQ ID NO: 276161 - RNA, 22 nt, Human
gaaggaggaggggaggaggcgg

SEQ ID NO: 276162 - RNA, 18 nt, Human
gacuccaaauucuuggca

SEQ ID NO: 276163 - RNA, 18 nt, Human
gagccuggggggcggggg

SEQ ID NO: 276164 - RNA, 18 nt, Human
gagccuggggggcggggg

SEQ ID NO: 276165 - RNA, 20 nt, Human
gaggggaggaggcggagggc

SEQ ID NO: 276166 - RNA, 18 nt, Human
gagggggcggcagcugcc

SEQ ID NO: 276167 - RNA, 18 nt, Human
gccaaaaaaaaaaaaagc

SEQ ID NO: 276168 - RNA, 20 nt, Human
gccggagcgcuaggggcugg

SEQ ID NO: 276169 - RNA, 22 nt, Human
gcgaagcagcagaaccgccaag

SEQ ID NO: 276170 - RNA, 19 nt, Human
gcgcgggcgaccgccggag

SEQ ID NO: 276171 - RNA, 19 nt, Human
gcgcgggcgaccgccggag

SEQ ID NO: 276172 - RNA, 21 nt, Human
gcggcgagcgagggagggggc

SEQ ID NO: 276173 - RNA, 18 nt, Human
gcggcgaggcccaggcug

SEQ ID NO: 276174 - RNA, 19 nt, Human
gcggcggcgagaggagcgg

SEQ ID NO: 276175 - RNA, 20 nt, Human
gcugaagaucuuuuuauuuc

SEQ ID NO: 276176 - RNA, 19 nt, Human
gcuguucgguagcuccacc

SEQ ID NO: 276177 - RNA, 21 nt, Human
ggaggaaaaaaaccagaacag

SEQ ID NO: 276178 - RNA, 19 nt, Human
ggcgagcgagggagggggc

SEQ ID NO: 276179 - RNA, 24 nt, Human
ggcggcgagcgagggagggggcgg

SEQ ID NO: 276180 - RNA, 18 nt, Human
ggcuccuugcagaaccca

SEQ ID NO: 276181 - RNA, 18 nt, Human
ggcugggaaggaggcggu

SEQ ID NO: 276182 - RNA, 22 nt, Human
gggaaagaagaagggaaugaga

SEQ ID NO: 276183 - RNA, 18 nt, Human
gggaauggggguuggggg

SEQ ID NO: 276184 - RNA, 21 nt, Human
gggaauggggguugggggugg

SEQ ID NO: 276185 - RNA, 20 nt, Human
gggagaagccaguguugaua

SEQ ID NO: 276186 - RNA, 19 nt, Human
gggcugggaaggaggcggu

SEQ ID NO: 276187 - RNA, 24 nt, Human
guggaggcggcggcgagaggagcg

SEQ ID NO: 276188 - RNA, 21 nt, Human
guuuuuuuuuuggccaagggg

SEQ ID NO: 276189 - RNA, 20 nt, Human
uaaacuacaauccuugguuc

SEQ ID NO: 276190 - RNA, 25 nt, Human
uaacuacauucauuguccaaccccc

SEQ ID NO: 276191 - RNA, 23 nt, Human
uaccguuaagccacaccaaauau

SEQ ID NO: 276192 - RNA, 20 nt, Human
uagaguguuaaauacuuuua

SEQ ID NO: 276193 - RNA, 20 nt, Human
uauuuuuuuaaaacaauagc

SEQ ID NO: 276194 - RNA, 24 nt, Human
ucacaaaaaugcucuucaccaaga

SEQ ID NO: 276195 - RNA, 24 nt, Human
ucagaacaaaaauaaaauguccca

SEQ ID NO: 276196 - RNA, 24 nt, Human
ucauuguccaacccccacugguuu

SEQ ID NO: 276197 - RNA, 20 nt, Human
ucccagaaauggacaccacc

SEQ ID NO: 276198 - RNA, 18 nt, Human
ucccagaaauggacaccu

SEQ ID NO: 276199 - RNA, 19 nt, Human
uccuugguucagauugagu

SEQ ID NO: 276200 - RNA, 20 nt, Human
ugaagagguucaagagcugg

SEQ ID NO: 276201 - RNA, 20 nt, Human
ugaagcaaacaguggcacac

SEQ ID NO: 276202 - RNA, 19 nt, Human
ugaauugcugauuuuccuu

SEQ ID NO: 276203 - RNA, 18 nt, Human
ugauaccagcuaucagcc

SEQ ID NO: 276204 - RNA, 18 nt, Human
ugaucaguccccgugcca

SEQ ID NO: 276205 - RNA, 19 nt, Human
ugccaaaaaaaaaaaaagc

SEQ ID NO: 276206 - RNA, 19 nt, Human
uggcgggcgagcugccuac

SEQ ID NO: 276207 - RNA, 20 nt, Human
uggggguggaacuaaaggga

SEQ ID NO: 276208 - RNA, 19 nt, Human
uggggguuggggguggaac

SEQ ID NO: 276209 - RNA, 21 nt, Human
uguugauacuguugugaagag

SEQ ID NO: 276210 - RNA, 26 nt, Human
uguuuuuugcuuuuuguuuuuuuuuu

SEQ ID NO: 276211 - RNA, 18 nt, Human
uuacauuuuuauuuuuua

SEQ ID NO: 276212 - RNA, 21 nt, Human
uucaagagcuggcuuuucaga

SEQ ID NO: 276213 - RNA, 20 nt, Human
uucauuguccaacccccacu

SEQ ID NO: 276214 - RNA, 22 nt, Human
uugcugaauugcugauuuuccu

SEQ ID NO: 276215 - RNA, 20 nt, Human
uuggccaaggggucggucac

SEQ ID NO: 276216 - RNA, 18 nt, Human
uugguagguuauaaaaac

SEQ ID NO: 276217 - RNA, 20 nt, Human
uuucacaguuucguuaugcu

SEQ ID NO: 276218 - RNA, 23 nt, Human
uuuuaaccacugacaaggcuuca

SEQ ID NO: 276219 - RNA, 22 nt, Human
uuuuguguuuaaccauucccag

SEQ ID NO: 276220 - RNA, 30 nt, Human
uuuuuguuuuuugcuuuuuguuuuuuuuuu

SEQ ID NO: 276221 - RNA, 25 nt, Human
uuuuuguuuuuuuuuuggccaaggg

SEQ ID NO: 276222 - RNA, 18 nt, Human
uuuuuugcuuuuuguuuu

SEQ ID NO: 276223 - RNA, 26 nt, Human
aaaaggcaaaagcgacucugguggga

SEQ ID NO: 276224 - RNA, 24 nt, Human
aaaguguugggauuacaggcguga

SEQ ID NO: 276225 - RNA, 19 nt, Human
aaguagcugggauuacagg

SEQ ID NO: 276226 - RNA, 24 nt, Human
aaguagcugggauuacaggcacgc

SEQ ID NO: 276227 - RNA, 21 nt, Human
aaguguugggauuacaggcgu

SEQ ID NO: 276228 - RNA, 26 nt, Human
aaguguugggauuacaggcgugagcc

SEQ ID NO: 276229 - RNA, 24 nt, Human
aauuuuguguuuuuaguacagaua

SEQ ID NO: 276230 - RNA, 23 nt, Human
agaaagaaaagaguaaaaccuaa

SEQ ID NO: 276231 - RNA, 19 nt, Human
agggcuagaggcugccacu

SEQ ID NO: 276232 - RNA, 24 nt, Human
aggugauccacccaccucggccuc

SEQ ID NO: 276233 - RNA, 21 nt, Human
agugacagugauuuuugguuc

SEQ ID NO: 276234 - RNA, 24 nt, Human
agugcaauggcacgaucuuggcuc

SEQ ID NO: 276235 - RNA, 22 nt, Human
aucuggccuguuucuucggcgg

SEQ ID NO: 276236 - RNA, 20 nt, Human
augcaacaaggccugaaagg

SEQ ID NO: 276237 - RNA, 18 nt, Human
auuuuauuuucacaugga

SEQ ID NO: 276238 - RNA, 27 nt, Human
caaacaauucuucuaccucagccuccc

SEQ ID NO: 276239 - RNA, 24 nt, Human
caaaguguugggauuacaggcgug

SEQ ID NO: 276240 - RNA, 22 nt, Human
caacaguaccuaucuccuacag

SEQ ID NO: 276241 - RNA, 23 nt, Human
caaccuccaccucccagguucaa

SEQ ID NO: 276242 - RNA, 22 nt, Human
cacccaccucggccucccaaag

SEQ ID NO: 276243 - RNA, 23 nt, Human
cacccaccucggccucccaaagu

SEQ ID NO: 276244 - RNA, 24 nt, Human
caccucggccucccaaaguguugg

SEQ ID NO: 276245 - RNA, 22 nt, Human
cacuaccacgcccagcuaauuu

SEQ ID NO: 276246 - RNA, 24 nt, Human
cacucuuguugccuaggcuggagu

SEQ ID NO: 276247 - RNA, 21 nt, Human
cacugcaaccuccaccuccca

SEQ ID NO: 276248 - RNA, 23 nt, Human
cagaacuuucauaauaugacaga

SEQ ID NO: 276249 - RNA, 18 nt, Human
cagagcacuuauuuucuu

SEQ ID NO: 276250 - RNA, 22 nt, Human
ccaaaguguugggauuacaggc

SEQ ID NO: 276251 - RNA, 22 nt, Human
ccaaaguguugggauuacaggc

SEQ ID NO: 276252 - RNA, 24 nt, Human
ccaaaguguugggauuacaggcgu

SEQ ID NO: 276253 - RNA, 23 nt, Human
ccaaguagcugggauuacaggca

SEQ ID NO: 276254 - RNA, 26 nt, Human
ccaccucccagguucaaacaauucuu

SEQ ID NO: 276255 - RNA, 23 nt, Human
cccaaguagcugggauuacaggc

SEQ ID NO: 276256 - RNA, 24 nt, Human
cccaaguagcugggauuacaggca

SEQ ID NO: 276257 - RNA, 19 nt, Human
ccuaggcuggagugcaaug

SEQ ID NO: 276258 - RNA, 24 nt, Human
ccucccagguucaaacaauucuuc

SEQ ID NO: 276259 - RNA, 24 nt, Human
ccugaccucaggugauccacccac

SEQ ID NO: 276260 - RNA, 24 nt, Human
cucacugcaaccuccaccucccag

SEQ ID NO: 276261 - RNA, 24 nt, Human
cucagccucccaaguagcugggau

SEQ ID NO: 276262 - RNA, 18 nt, Human
cucuuguugccuaggcug

SEQ ID NO: 276263 - RNA, 21 nt, Human
cugaaaguuucuuuuugugcu

SEQ ID NO: 276264 - RNA, 19 nt, Human
cugaauuaagugauacaac

SEQ ID NO: 276265 - RNA, 23 nt, Human
cugcaaccuccaccucccagguu

SEQ ID NO: 276266 - RNA, 24 nt, Human
cugcaaccuccaccucccagguuc

SEQ ID NO: 276267 - RNA, 22 nt, Human
cuuguugccuaggcuggagugc

SEQ ID NO: 276268 - RNA, 24 nt, Human
cuuguugccuaggcuggagugcaa

SEQ ID NO: 276269 - RNA, 24 nt, Human
gaccucaggugauccacccaccuc

SEQ ID NO: 276270 - RNA, 18 nt, Human
gauuacaggcgugagcca

SEQ ID NO: 276271 - RNA, 22 nt, Human
gauuacaggcgugagccaccgc

SEQ ID NO: 276272 - RNA, 22 nt, Human
gauuacaggcgugagccaccgc

SEQ ID NO: 276273 - RNA, 22 nt, Human
gcaaccuccaccucccagguuc

SEQ ID NO: 276274 - RNA, 19 nt, Human
gccuaggcuggagugcaau

SEQ ID NO: 276275 - RNA, 19 nt, Human
gcuggagugcaauggcacg

SEQ ID NO: 276276 - RNA, 23 nt, Human
gcuggucucaaacuccugaccuc

SEQ ID NO: 276277 - RNA, 19 nt, Human
ggaaacaccuucauaccau

SEQ ID NO: 276278 - RNA, 18 nt, Human
ggauuaacugggcuaaug

SEQ ID NO: 276279 - RNA, 24 nt, Human
ggcuggucucaaacuccugaccuc

SEQ ID NO: 276280 - RNA, 18 nt, Human
guagcugggauuacaggc

SEQ ID NO: 276281 - RNA, 24 nt, Human
gugauccacccaccucggccuccc

SEQ ID NO: 276282 - RNA, 22 nt, Human
uaaaaggaaaggcuugggacau

SEQ ID NO: 276283 - RNA, 26 nt, Human
uaaggcagaacaucuuagguuguaga

SEQ ID NO: 276284 - RNA, 23 nt, Human
uaaguuguaaagugacagugauu

SEQ ID NO: 276285 - RNA, 23 nt, Human
uaauuuuguguuuuuaguacaga

SEQ ID NO: 276286 - RNA, 22 nt, Human
uacaggcgugagccaccgcgcc

SEQ ID NO: 276287 - RNA, 22 nt, Human
uacaggcgugagccaccgcgcc

SEQ ID NO: 276288 - RNA, 23 nt, Human
uacaggcgugagccaccgcgccu

SEQ ID NO: 276289 - RNA, 24 nt, Human
uaccucagccucccaaguagcugg

SEQ ID NO: 276290 - RNA, 21 nt, Human
uagaaagaaaagaguaaaacc

SEQ ID NO: 276291 - RNA, 23 nt, Human
ucacagguuuaucugagaugcaa

SEQ ID NO: 276292 - RNA, 21 nt, Human
ucacucuuguugccuaggcug

SEQ ID NO: 276293 - RNA, 23 nt, Human
ucacucuuguugccuaggcugga

SEQ ID NO: 276294 - RNA, 24 nt, Human
ucacugcaaccuccaccucccagg

SEQ ID NO: 276295 - RNA, 25 nt, Human
ucacugcaaccuccaccucccaggu

SEQ ID NO: 276296 - RNA, 27 nt, Human
ucacugcaaccuccaccucccagguuc

SEQ ID NO: 276297 - RNA, 18 nt, Human
ucagccucccaaguagcu

SEQ ID NO: 276298 - RNA, 20 nt, Human
ucagccucccaaguagcugg

SEQ ID NO: 276299 - RNA, 24 nt, Human
ucccaaaguguugggauuacaggc

SEQ ID NO: 276300 - RNA, 24 nt, Human
ucccaaguagcugggauuacaggc

SEQ ID NO: 276301 - RNA, 19 nt, Human
ucccagguucaaacaauuc

SEQ ID NO: 276302 - RNA, 20 nt, Human
ucccagguucaaacaauucu

SEQ ID NO: 276303 - RNA, 21 nt, Human
uccgugggaagcugagggcua

SEQ ID NO: 276304 - RNA, 23 nt, Human
ucuccagugccugaaaguuucuu

SEQ ID NO: 276305 - RNA, 23 nt, Human
ucuccuacaguaggugugaggau

SEQ ID NO: 276306 - RNA, 19 nt, Human
ucuuguugccuaggcugga

SEQ ID NO: 276307 - RNA, 21 nt, Human
ugaccucaggugauccaccca

SEQ ID NO: 276308 - RNA, 24 nt, Human
ugaccucaggugauccacccaccu

SEQ ID NO: 276309 - RNA, 19 nt, Human
ugagaaaugcucagacaca

SEQ ID NO: 276310 - RNA, 22 nt, Human
ugagaugcaacaaggccugaaa

SEQ ID NO: 276311 - RNA, 24 nt, Human
ugauccacccaccucggccuccca

SEQ ID NO: 276312 - RNA, 18 nt, Human
ugauuccgugggaagcug

SEQ ID NO: 276313 - RNA, 20 nt, Human
ugccuaggcuggagugcaau

SEQ ID NO: 276314 - RNA, 21 nt, Human
ugccuaggcuggagugcaaug

SEQ ID NO: 276315 - RNA, 24 nt, Human
ugccuaggcuggagugcaauggca

SEQ ID NO: 276316 - RNA, 23 nt, Human
ugccugaaaguuucuuuuugugc

SEQ ID NO: 276317 - RNA, 27 nt, Human
ugcucagacacacaguaggugcucaau

SEQ ID NO: 276318 - RNA, 23 nt, Human
uggagugcaauggcacgaucuug

SEQ ID NO: 276319 - RNA, 24 nt, Human
uggagugcaauggcacgaucuugg

SEQ ID NO: 276320 - RNA, 24 nt, Human
uggccaggcuggucucaaacuccu

SEQ ID NO: 276321 - RNA, 19 nt, Human
ugggauuacaggcacgcac

SEQ ID NO: 276322 - RNA, 21 nt, Human
ugggauuacaggcacgcacua

SEQ ID NO: 276323 - RNA, 24 nt, Human
ugggauuacaggcacgcacuacca

SEQ ID NO: 276324 - RNA, 18 nt, Human
ugggauuacaggcgugag

SEQ ID NO: 276325 - RNA, 19 nt, Human
ugggauuacaggcgugagc

SEQ ID NO: 276326 - RNA, 21 nt, Human
ugggauuacaggcgugagcca

SEQ ID NO: 276327 - RNA, 22 nt, Human
ugggauuacaggcgugagccac

SEQ ID NO: 276328 - RNA, 23 nt, Human
ugggauuacaggcgugagccacc

SEQ ID NO: 276329 - RNA, 24 nt, Human
ugggauuacaggcgugagccaccg

SEQ ID NO: 276330 - RNA, 20 nt, Human
ugggcuaaugagaaaugcuc

SEQ ID NO: 276331 - RNA, 19 nt, Human
uguuggccaggcuggucuc

SEQ ID NO: 276332 - RNA, 19 nt, Human
uuaucacuaaaaggaaagg

SEQ ID NO: 276333 - RNA, 24 nt, Human
uucaaacaauucuucuaccucagc

SEQ ID NO: 276334 - RNA, 24 nt, Human
uucacucuuguugccuaggcugga

SEQ ID NO: 276335 - RNA, 24 nt, Human
uucuugauuugaaaaggcaaaagc

SEQ ID NO: 276336 - RNA, 18 nt, Human
uugcaaauauguuuuccc

SEQ ID NO: 276337 - RNA, 18 nt, Human
uugccuaggcuggagugc

SEQ ID NO: 276338 - RNA, 24 nt, Human
uuucacucuuguugccuaggcugg

SEQ ID NO: 276339 - RNA, 29 nt, Human
uuucugagacuggggcucaaggguacccc

SEQ ID NO: 276340 - RNA, 20 nt, Human
uuuuguguuuuuaguacaga

SEQ ID NO: 276341 - RNA, 20 nt, Human
uuuuugguuccaucauuuua

SEQ ID NO: 276342 - RNA, 24 nt, Human
aaagugcugggauuauaggcguga

SEQ ID NO: 276343 - RNA, 20 nt, Human
aaguagcugggacuacaggc

SEQ ID NO: 276344 - RNA, 22 nt, Human
aaguagcugggacuacaggcau

SEQ ID NO: 276345 - RNA, 24 nt, Human
aaguagcugggacuacaggcaugc

SEQ ID NO: 276346 - RNA, 19 nt, Human
aagugcugggauuauaggc

SEQ ID NO: 276347 - RNA, 19 nt, Human
aagugcugggauuauaggc

SEQ ID NO: 276348 - RNA, 20 nt, Human
accauguuggccaggcuggu

SEQ ID NO: 276349 - RNA, 23 nt, Human
accauguuggccaggcuggucuc

SEQ ID NO: 276350 - RNA, 24 nt, Human
accauguuggccaggcuggucucg

SEQ ID NO: 276351 - RNA, 23 nt, Human
aggcgugagucaccgcacccggc

SEQ ID NO: 276352 - RNA, 25 nt, Human
aggcuggagugcaguggcgugaucu

SEQ ID NO: 276353 - RNA, 24 nt, Human
aggugauccacccgccucagccuc

SEQ ID NO: 276354 - RNA, 19 nt, Human
agugcaguggcgugaucuc

SEQ ID NO: 276355 - RNA, 21 nt, Human
agugcaguggcgugaucucag

SEQ ID NO: 276356 - RNA, 23 nt, Human
agugcaguggcgugaucucagcu

SEQ ID NO: 276357 - RNA, 24 nt, Human
agugcaguggcgugaucucagcuc

SEQ ID NO: 276358 - RNA, 24 nt, Human
aguggcgugaucucagcucacugc

SEQ ID NO: 276359 - RNA, 18 nt, Human
auggaguuuuaccauguu

SEQ ID NO: 276360 - RNA, 24 nt, Human
auggaguuuuaccauguuggccag

SEQ ID NO: 276361 - RNA, 24 nt, Human
caaagugcugggauuauaggcgug

SEQ ID NO: 276362 - RNA, 20 nt, Human
caaccuccgccuccuggguu

SEQ ID NO: 276363 - RNA, 27 nt, Human
caagcaauucucaugcaucagccuccc

SEQ ID NO: 276364 - RNA, 23 nt, Human
cacccgccucagccucccaaagu

SEQ ID NO: 276365 - RNA, 21 nt, Human
cacugcaaccuccgccuccug

SEQ ID NO: 276366 - RNA, 23 nt, Human
cacugcaaccuccgccuccuggg

SEQ ID NO: 276367 - RNA, 24 nt, Human
cauguuggccaggcuggucucgaa

SEQ ID NO: 276368 - RNA, 20 nt, Human
ccaaagugcugggauuauag

SEQ ID NO: 276369 - RNA, 22 nt, Human
ccaaagugcugggauuauaggc

SEQ ID NO: 276370 - RNA, 24 nt, Human
ccaaagugcugggauuauaggcgu

SEQ ID NO: 276371 - RNA, 26 nt, Human
ccacccgccucagccucccaaagugc

SEQ ID NO: 276372 - RNA, 24 nt, Human
ccaguggaguguaaauuccugcag

SEQ ID NO: 276373 - RNA, 23 nt, Human
cccaaguagcugggacuacaggc

SEQ ID NO: 276374 - RNA, 24 nt, Human
cccaaguagcugggacuacaggca

SEQ ID NO: 276375 - RNA, 20 nt, Human
ccgcacccggcagcauuuca

SEQ ID NO: 276376 - RNA, 24 nt, Human
ccgccucagccucccaaagugcug

SEQ ID NO: 276377 - RNA, 27 nt, Human
ccgccuccuggguucaagcaauucuuu

SEQ ID NO: 276378 - RNA, 23 nt, Human
ccuccauguccucuccugacacc

SEQ ID NO: 276379 - RNA, 19 nt, Human
ccuccgccuccuggguuca

SEQ ID NO: 276380 - RNA, 22 nt, Human
ccuccuggguucaagcaauucu

SEQ ID NO: 276381 - RNA, 22 nt, Human
ccugaccucaggugauccaccc

SEQ ID NO: 276382 - RNA, 23 nt, Human
ccugaccucaggugauccacccg

SEQ ID NO: 276383 - RNA, 22 nt, Human
ccuggcuaauuuuuuauauuuu

SEQ ID NO: 276384 - RNA, 23 nt, Human
ccuggguucaagcaauucucaug

SEQ ID NO: 276385 - RNA, 24 nt, Human
cgcccaggcuggagugcaguggcg

SEQ ID NO: 276386 - RNA, 24 nt, Human
cgccucagccucccaaagugcugg

SEQ ID NO: 276387 - RNA, 24 nt, Human
cgcucugucgcccaggcuggagug

SEQ ID NO: 276388 - RNA, 22 nt, Human
cguuuacaaucugcccuguccu

SEQ ID NO: 276389 - RNA, 24 nt, Human
cucacugcaaccuccgccuccugg

SEQ ID NO: 276390 - RNA, 18 nt, Human
cucaugcaucagccuccc

SEQ ID NO: 276391 - RNA, 21 nt, Human
cuccuggguucaagcaauucu

SEQ ID NO: 276392 - RNA, 24 nt, Human
cucgcucugucgcccaggcuggag

SEQ ID NO: 276393 - RNA, 26 nt, Human
cugcccuguccuuuuggagaaguuua

SEQ ID NO: 276394 - RNA, 24 nt, Human
cuggagugcaguggcgugaucuca

SEQ ID NO: 276395 - RNA, 24 nt, Human
gaccucaggugauccacccgccuc

SEQ ID NO: 276396 - RNA, 22 nt, Human
gauuauaggcgugagucaccgc

SEQ ID NO: 276397 - RNA, 22 nt, Human
gcaaccuccgccuccuggguuc

SEQ ID NO: 276398 - RNA, 20 nt, Human
gcaucagccucccaaguagc

SEQ ID NO: 276399 - RNA, 20 nt, Human
gcccaggcuggagugcagug

SEQ ID NO: 276400 - RNA, 24 nt, Human
gcccaggcuggagugcaguggcgu

SEQ ID NO: 276401 - RNA, 25 nt, Human
gcucugucgcccaggcuggagugca

SEQ ID NO: 276402 - RNA, 19 nt, Human
gcuggagugcaguggcgug

SEQ ID NO: 276403 - RNA, 23 nt, Human
gcuggucucgaacuccugaccuc

SEQ ID NO: 276404 - RNA, 19 nt, Human
ggacuacaggcaugcgcca

SEQ ID NO: 276405 - RNA, 22 nt, Human
ggaguuuuaccauguuggccag

SEQ ID NO: 276406 - RNA, 22 nt, Human
ggcuggagugcaguggcgugau

SEQ ID NO: 276407 - RNA, 24 nt, Human
ggcuggucucgaacuccugaccuc

SEQ ID NO: 276408 - RNA, 19 nt, Human
ggucucgaacuccugaccu

SEQ ID NO: 276409 - RNA, 24 nt, Human
gugauccacccgccucagccuccc

SEQ ID NO: 276410 - RNA, 18 nt, Human
guuucuaaagccaacccc

SEQ ID NO: 276411 - RNA, 22 nt, Human
uaauuuuuuauauuuuuaguag

SEQ ID NO: 276412 - RNA, 21 nt, Human
uaccauguuggccaggcuggu

SEQ ID NO: 276413 - RNA, 24 nt, Human
uaccauguuggccaggcuggucuc

SEQ ID NO: 276414 - RNA, 27 nt, Human
uaccauguuggccaggcuggucucgaa

SEQ ID NO: 276415 - RNA, 24 nt, Human
uaguagaaauggaguuuuaccaug

SEQ ID NO: 276416 - RNA, 23 nt, Human
ucacugcaaccuccgccuccugg

SEQ ID NO: 276417 - RNA, 24 nt, Human
ucacugcaaccuccgccuccuggg

SEQ ID NO: 276418 - RNA, 25 nt, Human
ucacugcaaccuccgccuccugggu

SEQ ID NO: 276419 - RNA, 26 nt, Human
ucacugcaaccuccgccuccuggguu

SEQ ID NO: 276420 - RNA, 22 nt, Human
ucagcccccuccauguccucuc

SEQ ID NO: 276421 - RNA, 20 nt, Human
ucagccucccaaguagcugg

SEQ ID NO: 276422 - RNA, 21 nt, Human
uccacccgccucagccuccca

SEQ ID NO: 276423 - RNA, 24 nt, Human
ucccaaagugcugggauuauaggc

SEQ ID NO: 276424 - RNA, 24 nt, Human
ucccaaguagcugggacuacaggc

SEQ ID NO: 276425 - RNA, 24 nt, Human
uccgccuccuggguucaagcaauu

SEQ ID NO: 276426 - RNA, 21 nt, Human
uccuggguucaagcaauucuc

SEQ ID NO: 276427 - RNA, 24 nt, Human
uccuggguucaagcaauucucaug

SEQ ID NO: 276428 - RNA, 24 nt, Human
ucgcccaggcuggagugcaguggc

SEQ ID NO: 276429 - RNA, 24 nt, Human
ucgcucugucgcccaggcuggagu

SEQ ID NO: 276430 - RNA, 23 nt, Human
ucucgaacuccugaccucaggug

SEQ ID NO: 276431 - RNA, 19 nt, Human
ucucgcucugucgcccagg

SEQ ID NO: 276432 - RNA, 23 nt, Human
ucucgcucugucgcccaggcugg

SEQ ID NO: 276433 - RNA, 24 nt, Human
ucucgcucugucgcccaggcugga

SEQ ID NO: 276434 - RNA, 26 nt, Human
ucucgcucugucgcccaggcuggagu

SEQ ID NO: 276435 - RNA, 24 nt, Human
ucugucgcccaggcuggagugcag

SEQ ID NO: 276436 - RNA, 21 nt, Human
ugaccucaggugauccacccg

SEQ ID NO: 276437 - RNA, 24 nt, Human
ugaccucaggugauccacccgccu

SEQ ID NO: 276438 - RNA, 18 nt, Human
ugagacagaaucucgcuc

SEQ ID NO: 276439 - RNA, 22 nt, Human
ugagacagaaucucgcucuguc

SEQ ID NO: 276440 - RNA, 23 nt, Human
ugagacgacguuuacaaucugcc

SEQ ID NO: 276441 - RNA, 22 nt, Human
ugcaguggcgugaucucagcuc

SEQ ID NO: 276442 - RNA, 24 nt, Human
ugcaucagccucccaaguagcugg

SEQ ID NO: 276443 - RNA, 19 nt, Human
uggagugcaguggcgugau

SEQ ID NO: 276444 - RNA, 24 nt, Human
uggagugcaguggcgugaucucag

SEQ ID NO: 276445 - RNA, 24 nt, Human
uggaguuuuaccauguuggccagg

SEQ ID NO: 276446 - RNA, 24 nt, Human
uggccaggcuggucucgaacuccu

SEQ ID NO: 276447 - RNA, 24 nt, Human
uggcgugaucucagcucacugcaa

SEQ ID NO: 276448 - RNA, 21 nt, Human
ugggacuacaggcaugcgcca

SEQ ID NO: 276449 - RNA, 22 nt, Human
ugggacuacaggcaugcgccac

SEQ ID NO: 276450 - RNA, 22 nt, Human
ugggacuacaggcaugcgccac

SEQ ID NO: 276451 - RNA, 23 nt, Human
ugggacuacaggcaugcgccacu

SEQ ID NO: 276452 - RNA, 24 nt, Human
ugggacuacaggcaugcgccacua

SEQ ID NO: 276453 - RNA, 18 nt, Human
ugggauuauaggcgugag

SEQ ID NO: 276454 - RNA, 18 nt, Human
ugggauuauaggcgugag

SEQ ID NO: 276455 - RNA, 21 nt, Human
ugggauuauaggcgugaguca

SEQ ID NO: 276456 - RNA, 22 nt, Human
ugggauuauaggcgugagucac

SEQ ID NO: 276457 - RNA, 23 nt, Human
ugggauuauaggcgugagucacc

SEQ ID NO: 276458 - RNA, 24 nt, Human
ugggauuauaggcgugagucaccg

SEQ ID NO: 276459 - RNA, 21 nt, Human
uuacaaucugcccuguccuuu

SEQ ID NO: 276460 - RNA, 18 nt, Human
uuaguagaaauggaguuu

SEQ ID NO: 276461 - RNA, 18 nt, Human
uuaguagaaauggaguuu

SEQ ID NO: 276462 - RNA, 24 nt, Human
uuaguagaaauggaguuuuaccau

SEQ ID NO: 276463 - RNA, 21 nt, Human
uuuuuaguagaaauggaguuu

SEQ ID NO: 276464 - RNA, 18 nt, Human
aaccaaguucccagaagu

SEQ ID NO: 276465 - RNA, 21 nt, Human
aagggcagggaaugaggacag

SEQ ID NO: 276466 - RNA, 18 nt, Human
acggaaacauguugucug

SEQ ID NO: 276467 - RNA, 22 nt, Human
aggacauacagugaaagggaca

SEQ ID NO: 276468 - RNA, 18 nt, Human
aggggcaagggagcgcag

SEQ ID NO: 276469 - RNA, 18 nt, Human
auagagugugacaagccc

SEQ ID NO: 276470 - RNA, 20 nt, Human
cagaggacauacagugaaag

SEQ ID NO: 276471 - RNA, 25 nt, Human
caucugaaccaaguucccagaaguc

SEQ ID NO: 276472 - RNA, 18 nt, Human
cgacuccaaguacaucuc

SEQ ID NO: 276473 - RNA, 20 nt, Human
cuuuacagucacauuaugcc

SEQ ID NO: 276474 - RNA, 22 nt, Human
cuuuacagucacauuaugcccc

SEQ ID NO: 276475 - RNA, 19 nt, Human
gagcagcagcgcgggagcg

SEQ ID NO: 276476 - RNA, 20 nt, Human
gagcagcagcgcgggagcgc

SEQ ID NO: 276477 - RNA, 23 nt, Human
gcugccgggcggcuggagcagca

SEQ ID NO: 276478 - RNA, 20 nt, Human
gcuguuucccauaauugcuc

SEQ ID NO: 276479 - RNA, 19 nt, Human
ggacagagugucucccuca

SEQ ID NO: 276480 - RNA, 19 nt, Human
ggcagggaaugaggacaga

SEQ ID NO: 276481 - RNA, 19 nt, Human
gucacggaaacauguuguc

SEQ ID NO: 276482 - RNA, 19 nt, Human
gugcauugugacuucgugc

SEQ ID NO: 276483 - RNA, 19 nt, Human
uauccgacuccaaguacau

SEQ ID NO: 276484 - RNA, 24 nt, Human
uccaaguacaucucucuuuuuugc

SEQ ID NO: 276485 - RNA, 25 nt, Human
ucccagaagucaaaauuuaaccucg

SEQ ID NO: 276486 - RNA, 18 nt, Human
ugaggaaaacuaagacuu

SEQ ID NO: 276487 - RNA, 24 nt, Human
ugaggaaaacuaagacuugguagu

SEQ ID NO: 276488 - RNA, 21 nt, Human
ugaggacagagugucucccuc

SEQ ID NO: 276489 - RNA, 19 nt, Human
uggagcagcagcgcgggag

SEQ ID NO: 276490 - RNA, 21 nt, Human
uuccaaaguagaauguugacc

SEQ ID NO: 276491 - RNA, 22 nt, Human
uucgggacagaagagcaauaga

SEQ ID NO: 276492 - RNA, 24 nt, Human
uucgggacagaagagcaauagagu

SEQ ID NO: 276493 - RNA, 24 nt, Human
uuguaggaagggcugugggagcug

SEQ ID NO: 276494 - RNA, 21 nt, Human
uugucugccuucucugucauu

SEQ ID NO: 276495 - RNA, 26 nt, Human
aaaaacuaaacaggcauuuuggacaa

SEQ ID NO: 276496 - RNA, 28 nt, Human
aaacaggcauuuuggacaacacauucuu

SEQ ID NO: 276497 - RNA, 19 nt, Human
agaacgcugcuccagagaa

SEQ ID NO: 276498 - RNA, 24 nt, Human
aggcauuuuggacaacacauucuu

SEQ ID NO: 276499 - RNA, 21 nt, Human
auucuuggcaauagaaccugg

SEQ ID NO: 276500 - RNA, 23 nt, Human
caggacggaaucacaccaggccc

SEQ ID NO: 276501 - RNA, 22 nt, Human
ccagauaucaacuguuacagaa

SEQ ID NO: 276502 - RNA, 19 nt, Human
ccccaccauuuccaugucu

SEQ ID NO: 276503 - RNA, 19 nt, Human
cgguagggaaaguucucac

SEQ ID NO: 276504 - RNA, 27 nt, Human
cucacucugcauuauaaaaaggacaac

SEQ ID NO: 276505 - RNA, 23 nt, Human
cugcauuauaaaaaggacagcca

SEQ ID NO: 276506 - RNA, 19 nt, Human
gacggaaucacaccaggcc

SEQ ID NO: 276507 - RNA, 20 nt, Human
gcauuuuggacaacacauuc

SEQ ID NO: 276508 - RNA, 21 nt, Human
uacuuuauuaaaauacugagu

SEQ ID NO: 276509 - RNA, 23 nt, Human
uagaaccuggacaacauuuauca

SEQ ID NO: 276510 - RNA, 24 nt, Human
uagaaccuggacaacauuuaucaa

SEQ ID NO: 276511 - RNA, 21 nt, Human
uagggaaaguucucacucugc

SEQ ID NO: 276512 - RNA, 19 nt, Human
uauuuuugucuccccacca

SEQ ID NO: 276513 - RNA, 20 nt, Human
uccauacauacuuaaaacca

SEQ ID NO: 276514 - RNA, 25 nt, Human
ugucugaccaccgcuacuacuaugu

SEQ ID NO: 276515 - RNA, 19 nt, Human
uucacauguguauuuuugu

SEQ ID NO: 276516 - RNA, 26 nt, Human
uucacauguguauuuuugucucccuc

SEQ ID NO: 276517 - RNA, 20 nt, Human
uuugucuccccaccauuucc

SEQ ID NO: 276518 - RNA, 26 nt, Human
uuuuuuuuuuuuuuuuuuugguuuuu

SEQ ID NO: 276519 - RNA, 28 nt, Human
uuuuuuuuuuuuuuuuuuuuuuuggggg

SEQ ID NO: 276520 - RNA, 23 nt, Human
aaaaauguguagcucugagcuuc

SEQ ID NO: 276521 - RNA, 24 nt, Human
acaggcccucuccuagcaccaaag

SEQ ID NO: 276522 - RNA, 26 nt, Human
accaaagacccaagucccucccaccc

SEQ ID NO: 276523 - RNA, 22 nt, Human
acccaagucccucccacccaac

SEQ ID NO: 276524 - RNA, 18 nt, Human
aggcaggugggaagggag

SEQ ID NO: 276525 - RNA, 28 nt, Human
caaagacccaagucccucccacccaacc

SEQ ID NO: 276526 - RNA, 21 nt, Human
caaggaagaaauauuuacaau

SEQ ID NO: 276527 - RNA, 23 nt, Human
caagucccucccacccaaccccc

SEQ ID NO: 276528 - RNA, 23 nt, Human
cacaggcccucuccuagcaccaa

SEQ ID NO: 276529 - RNA, 21 nt, Human
cacccaacccccacccaagcu

SEQ ID NO: 276530 - RNA, 23 nt, Human
caggcccucuccuagcaccaaag

SEQ ID NO: 276531 - RNA, 25 nt, Human
ccaacccccacccaagcucuccucu

SEQ ID NO: 276532 - RNA, 22 nt, Human
ccaagucccucccacccaaccc

SEQ ID NO: 276533 - RNA, 20 nt, Human
ccacccaacccccacccaag

SEQ ID NO: 276534 - RNA, 21 nt, Human
ccacccaacccccacccaagc

SEQ ID NO: 276535 - RNA, 20 nt, Human
cccucccacccaacccccac

SEQ ID NO: 276536 - RNA, 25 nt, Human
ccucccacccaacccccacccaagc

SEQ ID NO: 276537 - RNA, 18 nt, Human
cucuccucuucaaggaag

SEQ ID NO: 276538 - RNA, 21 nt, Human
gagcacaggcccucuccuagc

SEQ ID NO: 276539 - RNA, 18 nt, Human
ggaagggaggccccgggc

SEQ ID NO: 276540 - RNA, 18 nt, Human
gggaagggaggccccggg

SEQ ID NO: 276541 - RNA, 24 nt, Human
ggugaaaaucagaaaaccacggcu

SEQ ID NO: 276542 - RNA, 18 nt, Human
uagcaccaaagacccaag

SEQ ID NO: 276543 - RNA, 19 nt, Human
uagcaccaaagacccaagu

SEQ ID NO: 276544 - RNA, 21 nt, Human
ucagggaacagggugcauggc

SEQ ID NO: 276545 - RNA, 18 nt, Human
ucccucccacccaacccc

SEQ ID NO: 276546 - RNA, 19 nt, Human
ucccucccacccaaccccc

SEQ ID NO: 276547 - RNA, 18 nt, Human
uccuagcaccaaagaccc

SEQ ID NO: 276548 - RNA, 18 nt, Human
ugagcuucaggcacuaac

SEQ ID NO: 276549 - RNA, 23 nt, Human
ugcaaaaacuccacaccacuuua

SEQ ID NO: 276550 - RNA, 18 nt, Human
uguguagcucugagcuuc

SEQ ID NO: 276551 - RNA, 19 nt, Human
uuugcaaaaacuccacacc

SEQ ID NO: 276552 - RNA, 21 nt, Human
uuugcaaaaacuccacaccac

SEQ ID NO: 276553 - RNA, 21 nt, Human
uuuuuuuuuugcaaaaacucc

SEQ ID NO: 276554 - RNA, 21 nt, Human
uuuuuuuuuuuuuuuuugcaa

SEQ ID NO: 276555 - RNA, 21 nt, Human
uuuuuuuuuuuuuuuuuuugg

SEQ ID NO: 276556 - RNA, 23 nt, Human
aaagccccuuguggaaucagaag

SEQ ID NO: 276557 - RNA, 23 nt, Human
acugcggaggcugcugcugcugc

SEQ ID NO: 276558 - RNA, 21 nt, Human
ccccuuguggaaucagaagcu

SEQ ID NO: 276559 - RNA, 19 nt, Human
gagggacugcggaggcugc

SEQ ID NO: 276560 - RNA, 24 nt, Human
gccacaggguugaggaaaaagccc

SEQ ID NO: 276561 - RNA, 21 nt, Human
ggccacaggguugaggaaaaa

SEQ ID NO: 276562 - RNA, 19 nt, Human
ucucuggagggacugcggg

SEQ ID NO: 276563 - RNA, 19 nt, Human
ugcucaaagguaagaaacc

SEQ ID NO: 276564 - RNA, 21 nt, Human
ugcugcugcugcugcugcugc

SEQ ID NO: 276565 - RNA, 21 nt, Human
ugcugcugcugcuucugcugc

SEQ ID NO: 276566 - RNA, 28 nt, Human
ugcugcuucugcugcugcugcugcugcc

SEQ ID NO: 276567 - RNA, 18 nt, Human
ugcuucccaccugcccuc

SEQ ID NO: 276568 - RNA, 21 nt, Human
ugcuucugcugcugcugcugc

SEQ ID NO: 276569 - RNA, 24 nt, Human
uucugcugcugcugcugcugcugc

SEQ ID NO: 276570 - RNA, 20 nt, Human
aagcaaggcauacaggcccc

SEQ ID NO: 276571 - RNA, 18 nt, Human
aagcucugagaucccccc

SEQ ID NO: 276572 - RNA, 23 nt, Human
aaggcauacaggcccccaacccu

SEQ ID NO: 276573 - RNA, 23 nt, Human
acccgagugugaacaacugggag

SEQ ID NO: 276574 - RNA, 18 nt, Human
agaaggaugagagagggc

SEQ ID NO: 276575 - RNA, 19 nt, Human
aggaauccacagcccagcc

SEQ ID NO: 276576 - RNA, 23 nt, Human
aggagaacgucgggcuggagagg

SEQ ID NO: 276577 - RNA, 24 nt, Human
aggcugagggaggagagcaugggg

SEQ ID NO: 276578 - RNA, 18 nt, Human
agguccuaucuggugucu

SEQ ID NO: 276579 - RNA, 19 nt, Human
auggccuccucgguccccu

SEQ ID NO: 276580 - RNA, 25 nt, Human
auucaaauuacuuccauccuuuggc

SEQ ID NO: 276581 - RNA, 19 nt, Human
caacccuucugcgccaccc

SEQ ID NO: 276582 - RNA, 21 nt, Human
caacccuucugcgccaccccu

SEQ ID NO: 276583 - RNA, 18 nt, Human
cacagcccagcccggccu

SEQ ID NO: 276584 - RNA, 22 nt, Human
cacaggguagggagguguggag

SEQ ID NO: 276585 - RNA, 23 nt, Human
cagccccagaugugggcuccccu

SEQ ID NO: 276586 - RNA, 23 nt, Human
caggcccccaacccuucugcgcc

SEQ ID NO: 276587 - RNA, 23 nt, Human
cagggcgccgcggagcagguggg

SEQ ID NO: 276588 - RNA, 24 nt, Human
ccaacccuucugcgccaccccucu

SEQ ID NO: 276589 - RNA, 23 nt, Human
ccagcccggccugaguccaggug

SEQ ID NO: 276590 - RNA, 23 nt, Human
ccccaacccuucugcgccacccc

SEQ ID NO: 276591 - RNA, 25 nt, Human
ccccccaugccaguccccucucaga

SEQ ID NO: 276592 - RNA, 20 nt, Human
cccgagugugaacaacuggg

SEQ ID NO: 276593 - RNA, 19 nt, Human
ccugcccucucuucaccua

SEQ ID NO: 276594 - RNA, 19 nt, Human
ccuguaagcucugagaucc

SEQ ID NO: 276595 - RNA, 18 nt, Human
ccuucugcgccaccccuc

SEQ ID NO: 276596 - RNA, 24 nt, Human
ccuugggcucagcggccgguccca

SEQ ID NO: 276597 - RNA, 21 nt, Human
cuccccugcccucucuucacc

SEQ ID NO: 276598 - RNA, 20 nt, Human
gagagcauggggaggggagg

SEQ ID NO: 276599 - RNA, 21 nt, Human
gagauccccccaugccagucc

SEQ ID NO: 276600 - RNA, 22 nt, Human
gagcauggggaggggaggggau

SEQ ID NO: 276601 - RNA, 19 nt, Human
gcauacaggcccccaaccc

SEQ ID NO: 276602 - RNA, 24 nt, Human
ggagagcaggugcgugugccugug

SEQ ID NO: 276603 - RNA, 25 nt, Human
ggaggagagcauggggaggggaggg

SEQ ID NO: 276604 - RNA, 24 nt, Human
ggccgugggcuuggcucagccugu

SEQ ID NO: 276605 - RNA, 23 nt, Human
ggcuccccugcccucucuucacc

SEQ ID NO: 276606 - RNA, 21 nt, Human
ggguagggagguguggaggga

SEQ ID NO: 276607 - RNA, 26 nt, Human
gucacaggguagcaaggcugagggag

SEQ ID NO: 276608 - RNA, 21 nt, Human
ucagcggccggucccaggcau

SEQ ID NO: 276609 - RNA, 23 nt, Human
ucccuaugggaaggagcaggagc

SEQ ID NO: 276610 - RNA, 24 nt, Human
ugagauccccccaugccagucccc

SEQ ID NO: 276611 - RNA, 22 nt, Human
ugaggccuggcaccucuguugc

SEQ ID NO: 276612 - RNA, 20 nt, Human
ugagggaggagagcaugggg

SEQ ID NO: 276613 - RNA, 21 nt, Human
ugcugugggugaggcugaggc

SEQ ID NO: 276614 - RNA, 20 nt, Human
uggaauaaagauuuuaauug

SEQ ID NO: 276615 - RNA, 19 nt, Human
uggagggauaggagaggag

SEQ ID NO: 276616 - RNA, 22 nt, Human
ugggaaggagcaggagcgggac

SEQ ID NO: 276617 - RNA, 18 nt, Human
ugggccagccccagaugu

SEQ ID NO: 276618 - RNA, 19 nt, Human
ugggcuuggcucagccugu

SEQ ID NO: 276619 - RNA, 20 nt, Human
uggggaggggaggggaucag

SEQ ID NO: 276620 - RNA, 21 nt, Human
uggggaggggaggggaucagg

SEQ ID NO: 276621 - RNA, 19 nt, Human
uggggcugcugugggugag

SEQ ID NO: 276622 - RNA, 22 nt, Human
ugggugaggcugaggccuggca

SEQ ID NO: 276623 - RNA, 22 nt, Human
ugugucuacugcuggguggagg

SEQ ID NO: 276624 - RNA, 24 nt, Human
uuggcgauggggcugcugugggug

SEQ ID NO: 276625 - RNA, 19 nt, Human
acagggcugagcugcagag

SEQ ID NO: 276626 - RNA, 20 nt, Human
agaggagacauggaucuuca

SEQ ID NO: 276627 - RNA, 23 nt, Human
agauacagauauuuacagaaagu

SEQ ID NO: 276628 - RNA, 23 nt, Human
agggaggaaggggaccaagccag

SEQ ID NO: 276629 - RNA, 22 nt, Human
auccuuggugguagaggagaca

SEQ ID NO: 276630 - RNA, 21 nt, Human
caaaaagacaauaacggggca

SEQ ID NO: 276631 - RNA, 18 nt, Human
caagccagagagggacag

SEQ ID NO: 276632 - RNA, 24 nt, Human
cacauccccccgaagcucuagcug

SEQ ID NO: 276633 - RNA, 20 nt, Human
cacccagguaccagcagcag

SEQ ID NO: 276634 - RNA, 20 nt, Human
ccacauccccccgaagcucu

SEQ ID NO: 276635 - RNA, 20 nt, Human
cccccgaagcucuagcugga

SEQ ID NO: 276636 - RNA, 26 nt, Human
ccgaagcucuagcuggaagcauccua

SEQ ID NO: 276637 - RNA, 22 nt, Human
ccuuuccgcucuccuaagagcc

SEQ ID NO: 276638 - RNA, 22 nt, Human
cuuuccgcucuccuaagagcca

SEQ ID NO: 276639 - RNA, 20 nt, Human
gaaaguagggaggaagggga

SEQ ID NO: 276640 - RNA, 23 nt, Human
ggggguuuacaggaguccaggag

SEQ ID NO: 276641 - RNA, 22 nt, Human
ggucuuuuuguggcuguuuucc

SEQ ID NO: 276642 - RNA, 21 nt, Human
gucuuuuuguggcuguuuucc

SEQ ID NO: 276643 - RNA, 18 nt, Human
guggccauugcccaccca

SEQ ID NO: 276644 - RNA, 22 nt, Human
uacaacuuccauauaagguagg

SEQ ID NO: 276645 - RNA, 19 nt, Human
ucacugugucuccaaaaag

SEQ ID NO: 276646 - RNA, 19 nt, Human
ucuccaaaaagacaauaac

SEQ ID NO: 276647 - RNA, 21 nt, Human
uggugugugcagacauggugg

SEQ ID NO: 276648 - RNA, 21 nt, Human
ugucuccaaaaagacaauaac

SEQ ID NO: 276649 - RNA, 21 nt, Human
ugugugcagacaugguggcca

SEQ ID NO: 276650 - RNA, 23 nt, Human
uuacagaaaguagggaggaaggg

SEQ ID NO: 276651 - RNA, 24 nt, Human
uuuccuuuucccuucauuuccaca

SEQ ID NO: 276652 - RNA, 23 nt, Human
aaaaaagcaaaauacaaaaugua

SEQ ID NO: 276653 - RNA, 29 nt, Human
aaaaaagcaaaauacaaaauguaaugcgg

SEQ ID NO: 276654 - RNA, 23 nt, Human
aaacaaaaaacuaaaaccuaaaa

SEQ ID NO: 276655 - RNA, 25 nt, Human
aaaccuaaaaaacuugaaaaggugg

SEQ ID NO: 276656 - RNA, 20 nt, Human
aacagagugagaccccgucu

SEQ ID NO: 276657 - RNA, 24 nt, Human
aacagagugagaccccgucucaaa

SEQ ID NO: 276658 - RNA, 20 nt, Human
acaacagcugaccacggagg

SEQ ID NO: 276659 - RNA, 24 nt, Human
acagagugagaccccgucucaaaa

SEQ ID NO: 276660 - RNA, 26 nt, Human
accccgucucaaaaaagcaaaauaca

SEQ ID NO: 276661 - RNA, 22 nt, Human
accugagcccaggagauagagc

SEQ ID NO: 276662 - RNA, 19 nt, Human
acuacauggaagucacugu

SEQ ID NO: 276663 - RNA, 24 nt, Human
acuguauuccagccuggguaacag

SEQ ID NO: 276664 - RNA, 26 nt, Human
acuguauuccagccuggguaacagag

SEQ ID NO: 276665 - RNA, 21 nt, Human
acuugucagagacagccucga

SEQ ID NO: 276666 - RNA, 18 nt, Human
agaggcguccccaccucc

SEQ ID NO: 276667 - RNA, 20 nt, Human
agauagagccuacagugagc

SEQ ID NO: 276668 - RNA, 24 nt, Human
agccugggcaacauagggaaaccc

SEQ ID NO: 276669 - RNA, 22 nt, Human
agccuggguaacagagugagac

SEQ ID NO: 276670 - RNA, 19 nt, Human
aggugaauccuucauggag

SEQ ID NO: 276671 - RNA, 19 nt, Human
augccuguaaucccagcac

SEQ ID NO: 276672 - RNA, 24 nt, Human
auugugccacuguauuccagccug

SEQ ID NO: 276673 - RNA, 22 nt, Human
caaaaaacuaaaaccuaaaaaa

SEQ ID NO: 276674 - RNA, 22 nt, Human
caacauagggaaacccugucuc

SEQ ID NO: 276675 - RNA, 24 nt, Human
caacauagggaaacccugucucua

SEQ ID NO: 276676 - RNA, 21 nt, Human
caaccucuagacaguaugaca

SEQ ID NO: 276677 - RNA, 19 nt, Human
cacuguauuccagccuggg

SEQ ID NO: 276678 - RNA, 22 nt, Human
cacuguauuccagccuggguaa

SEQ ID NO: 276679 - RNA, 23 nt, Human
cacuguauuccagccuggguaac

SEQ ID NO: 276680 - RNA, 24 nt, Human
cacuguauuccagccuggguaaca

SEQ ID NO: 276681 - RNA, 19 nt, Human
cagaggcguccccaccucc

SEQ ID NO: 276682 - RNA, 24 nt, Human
cagaggcguccccaccuccuguga

SEQ ID NO: 276683 - RNA, 19 nt, Human
cagcacucugggaggcuug

SEQ ID NO: 276684 - RNA, 21 nt, Human
cagcacucugggaggcuugag

SEQ ID NO: 276685 - RNA, 20 nt, Human
cagccuggguaacagaguga

SEQ ID NO: 276686 - RNA, 18 nt, Human
cagcuguggcagcgacag

SEQ ID NO: 276687 - RNA, 20 nt, Human
caugccuguaaucccagcac

SEQ ID NO: 276688 - RNA, 20 nt, Human
cauggagacugaacacaggu

SEQ ID NO: 276689 - RNA, 20 nt, Human
ccacuguauuccagccuggg

SEQ ID NO: 276690 - RNA, 20 nt, Human
ccacuguauuccagccuggg

SEQ ID NO: 276691 - RNA, 21 nt, Human
ccacuguauuccagccugggu

SEQ ID NO: 276692 - RNA, 22 nt, Human
ccacuguauuccagccugggua

SEQ ID NO: 276693 - RNA, 24 nt, Human
ccacuguauuccagccuggguaac

SEQ ID NO: 276694 - RNA, 18 nt, Human
ccaugccuguaaucccag

SEQ ID NO: 276695 - RNA, 24 nt, Human
cccaggacuauaagaccagaccag

SEQ ID NO: 276696 - RNA, 23 nt, Human
cccaugccuguaaucccagcacu

SEQ ID NO: 276697 - RNA, 25 nt, Human
ccuccugugaacacuugucagagac

SEQ ID NO: 276698 - RNA, 19 nt, Human
ccucgcgcagaggcguccc

SEQ ID NO: 276699 - RNA, 20 nt, Human
ccucgcgcagaggcgucccc

SEQ ID NO: 276700 - RNA, 23 nt, Human
ccugcacauuuguguagccaagg

SEQ ID NO: 276701 - RNA, 22 nt, Human
ccugggcaacauagggaaaccc

SEQ ID NO: 276702 - RNA, 18 nt, Human
ccuguaaucccagcacuc

SEQ ID NO: 276703 - RNA, 20 nt, Human
ccuguaaucccagcacucug

SEQ ID NO: 276704 - RNA, 19 nt, Human
cucgaggccugugucgccc

SEQ ID NO: 276705 - RNA, 20 nt, Human
cucucggguuuccugaaugu

SEQ ID NO: 276706 - RNA, 19 nt, Human
cugaacacagguggccagc

SEQ ID NO: 276707 - RNA, 21 nt, Human
cugcugcuacuccaccauuua

SEQ ID NO: 276708 - RNA, 26 nt, Human
cugggaggcugaguuugggaggauca

SEQ ID NO: 276709 - RNA, 22 nt, Human
cuuuaagucugguggagagccu

SEQ ID NO: 276710 - RNA, 22 nt, Human
gaccagaccagccugggcaaca

SEQ ID NO: 276711 - RNA, 21 nt, Human
gacccaugccuguaaucccag

SEQ ID NO: 276712 - RNA, 20 nt, Human
gaguuugggaggaucaccug

SEQ ID NO: 276713 - RNA, 20 nt, Human
gaguuuuuuuuuuuuuuuuu

SEQ ID NO: 276714 - RNA, 20 nt, Human
gaucaccugagcccaggaga

SEQ ID NO: 276715 - RNA, 22 nt, Human
gaugcuucacagaugaugauca

SEQ ID NO: 276716 - RNA, 23 nt, Human
gccacuguauuccagccugggua

SEQ ID NO: 276717 - RNA, 24 nt, Human
gccacuguauuccagccuggguaa

SEQ ID NO: 276718 - RNA, 19 nt, Human
gcuuggugcggugacccau

SEQ ID NO: 276719 - RNA, 23 nt, Human
ggcccguagcuccucguuccucg

SEQ ID NO: 276720 - RNA, 18 nt, Human
gggaggcugaguuuggga

SEQ ID NO: 276721 - RNA, 23 nt, Human
ggugacccaugccuguaauccca

SEQ ID NO: 276722 - RNA, 24 nt, Human
ggugacccaugccuguaaucccag

SEQ ID NO: 276723 - RNA, 24 nt, Human
guauuccagccuggguaacagagu

SEQ ID NO: 276724 - RNA, 20 nt, Human
gugaauccuucauggagacu

SEQ ID NO: 276725 - RNA, 23 nt, Human
gugacccaugccuguaaucccag

SEQ ID NO: 276726 - RNA, 21 nt, Human
guuuuuuuuuuuuuuuuuugg

SEQ ID NO: 276727 - RNA, 20 nt, Human
uaaaaacaaaaaacuaaaac

SEQ ID NO: 276728 - RNA, 25 nt, Human
uaaaaacaaaaaacuaaaaccuaaa

SEQ ID NO: 276729 - RNA, 23 nt, Human
uaaaccaagcaucuagcagugcc

SEQ ID NO: 276730 - RNA, 23 nt, Human
uaacagagugagaccccgucuca

SEQ ID NO: 276731 - RNA, 22 nt, Human
uaagaccagaccagccugggca

SEQ ID NO: 276732 - RNA, 24 nt, Human
uaagaccagaccagccugggcaac

SEQ ID NO: 276733 - RNA, 18 nt, Human
uacagugagcugugauug

SEQ ID NO: 276734 - RNA, 21 nt, Human
uaccaugaugcuucacagaug

SEQ ID NO: 276735 - RNA, 21 nt, Human
uagcagcaccuggagaauuca

SEQ ID NO: 276736 - RNA, 21 nt, Human
uaggagggacuacccacagca

SEQ ID NO: 276737 - RNA, 21 nt, Human
uaggccacacaugugcaacuu

SEQ ID NO: 276738 - RNA, 19 nt, Human
uauacaguaguucgccugg

SEQ ID NO: 276739 - RNA, 24 nt, Human
uauuccagccuggguaacagagug

SEQ ID NO: 276740 - RNA, 19 nt, Human
uccagccuggguaacagag

SEQ ID NO: 276741 - RNA, 23 nt, Human
uccagccuggguaacagagugag

SEQ ID NO: 276742 - RNA, 24 nt, Human
uccagccuggguaacagagugaga

SEQ ID NO: 276743 - RNA, 18 nt, Human
ucccuagcagcaccugga

SEQ ID NO: 276744 - RNA, 21 nt, Human
uccucguuccucgcgcagagg

SEQ ID NO: 276745 - RNA, 20 nt, Human
uccuggugagaugcugcugc

SEQ ID NO: 276746 - RNA, 18 nt, Human
ucgccuggagccacagcu

SEQ ID NO: 276747 - RNA, 23 nt, Human
ucucuauauacaguaguucgccu

SEQ ID NO: 276748 - RNA, 18 nt, Human
ugaacacaugucaguguc

SEQ ID NO: 276749 - RNA, 21 nt, Human
ugacaagagacaccugcacau

SEQ ID NO: 276750 - RNA, 24 nt, Human
ugacccaugccuguaaucccagca

SEQ ID NO: 276751 - RNA, 24 nt, Human
ugagaccccgucucaaaaaagcaa

SEQ ID NO: 276752 - RNA, 23 nt, Human
ugagcccaggacuauaagaccag

SEQ ID NO: 276753 - RNA, 22 nt, Human
ugagcugugauugugccacugu

SEQ ID NO: 276754 - RNA, 23 nt, Human
ugaguuugggaggaucaccugag

SEQ ID NO: 276755 - RNA, 23 nt, Human
ugaugcuucacagaugaugauca

SEQ ID NO: 276756 - RNA, 23 nt, Human
ugccuguaaucccagcacucugg

SEQ ID NO: 276757 - RNA, 24 nt, Human
ugccuguaaucccagcacucuggg

SEQ ID NO: 276758 - RNA, 22 nt, Human
uggaugucuuuauuuacagaac

SEQ ID NO: 276759 - RNA, 23 nt, Human
uggccagugggccgcaaaugcuu

SEQ ID NO: 276760 - RNA, 19 nt, Human
ugggaggcugaguuuggga

SEQ ID NO: 276761 - RNA, 25 nt, Human
ugggaggcugaguuugggaggauca

SEQ ID NO: 276762 - RNA, 24 nt, Human
ugggcaacauagggaaacccuguc

SEQ ID NO: 276763 - RNA, 19 nt, Human
uggggaugggaggguuacu

SEQ ID NO: 276764 - RNA, 24 nt, Human
uggugcggugacccaugccuguaa

SEQ ID NO: 276765 - RNA, 19 nt, Human
uguaggccacacaugugca

SEQ ID NO: 276766 - RNA, 23 nt, Human
ugucacaacagcugaccacggag

SEQ ID NO: 276767 - RNA, 19 nt, Human
ugucagugagagcagaaaa

SEQ ID NO: 276768 - RNA, 22 nt, Human
ugugccacuguauuccagccug

SEQ ID NO: 276769 - RNA, 21 nt, Human
uguuuuggaugcacuggccag

SEQ ID NO: 276770 - RNA, 25 nt, Human
uuaugcuaaaaacaaaaaacuaaaa

SEQ ID NO: 276771 - RNA, 20 nt, Human
uuuaaaccaagcaucuagca

SEQ ID NO: 276772 - RNA, 20 nt, Human
uuuuggaugcacuggccagu

SEQ ID NO: 276773 - RNA, 23 nt, Human
uuuuuuguauuaaaggauguuua

SEQ ID NO: 276774 - RNA, 22 nt, Human
uuuuuuuuuuuuuugaaaugga

SEQ ID NO: 276775 - RNA, 18 nt, Human
uuuuuuuuuuuuuuuuug

SEQ ID NO: 276776 - RNA, 19 nt, Human
uuuuuuuuuuuuuuuuugu

SEQ ID NO: 276777 - RNA, 29 nt, Human
aggcagaaaaaaaaaaguggggggacccc

SEQ ID NO: 276778 - RNA, 19 nt, Human
ccgacucgcccucugcccc

SEQ ID NO: 276779 - RNA, 19 nt, Human
ccuuaaagaaucucaggca

SEQ ID NO: 276780 - RNA, 24 nt, Human
ccuuaaagaaucucaggcagaaaa

SEQ ID NO: 276781 - RNA, 21 nt, Human
gagcuugcccucgccgccgcc

SEQ ID NO: 276782 - RNA, 19 nt, Human
gcccucgccgccgccgacu

SEQ ID NO: 276783 - RNA, 23 nt, Human
uaaagaaucucaggcagaaaaaa

SEQ ID NO: 276784 - RNA, 18 nt, Human
ugcccucgccgccgccga

SEQ ID NO: 276785 - RNA, 20 nt, Human
aaaaaggaccuucccaccga

SEQ ID NO: 276786 - RNA, 18 nt, Human
aaaaaugcuucuuggugu

SEQ ID NO: 276787 - RNA, 27 nt, Human
aaaaggcaaaaagguucuggacacugc

SEQ ID NO: 276788 - RNA, 22 nt, Human
aaaaugcuucuugguguguuug

SEQ ID NO: 276789 - RNA, 19 nt, Human
aaacaaagacaaaugcgug

SEQ ID NO: 276790 - RNA, 24 nt, Human
aaacagaucaucgccgcacaagca

SEQ ID NO: 276791 - RNA, 23 nt, Human
aaacagcagggauggaugcuguu

SEQ ID NO: 276792 - RNA, 20 nt, Human
aaaggcaaaaagguucugga

SEQ ID NO: 276793 - RNA, 19 nt, Human
aacagaagacagaaacagg

SEQ ID NO: 276794 - RNA, 20 nt, Human
aagucagcuccaagacacag

SEQ ID NO: 276795 - RNA, 21 nt, Human
acaaaugcacauacacuucuc

SEQ ID NO: 276796 - RNA, 27 nt, Human
acaacacacacacacacacacaaaugc

SEQ ID NO: 276797 - RNA, 23 nt, Human
acacaaaugcacauacacuucuc

SEQ ID NO: 276798 - RNA, 25 nt, Human
acacacacacacaaaugcacauaca

SEQ ID NO: 276799 - RNA, 24 nt, Human
acacacacacacaacacacacaca

SEQ ID NO: 276800 - RNA, 20 nt, Human
acacagaugcacuagguucu

SEQ ID NO: 276801 - RNA, 21 nt, Human
acacagaugcacuagguucuu

SEQ ID NO: 276802 - RNA, 21 nt, Human
acacaggccgaccucccaggc

SEQ ID NO: 276803 - RNA, 22 nt, Human
acacaggccgaccucccaggcc

SEQ ID NO: 276804 - RNA, 19 nt, Human
acagaugcacuagguucuu

SEQ ID NO: 276805 - RNA, 22 nt, Human
accaaccccaaagcacgcacgc

SEQ ID NO: 276806 - RNA, 19 nt, Human
accacauguaacccaaggu

SEQ ID NO: 276807 - RNA, 24 nt, Human
accagcucggcaaaagcaaacacu

SEQ ID NO: 276808 - RNA, 23 nt, Human
acgcacacacguagacacacaca

SEQ ID NO: 276809 - RNA, 22 nt, Human
acguggauuagauuugcggcug

SEQ ID NO: 276810 - RNA, 22 nt, Human
acguugcagcacccacuucagc

SEQ ID NO: 276811 - RNA, 20 nt, Human
acuccgaggacaugcaaacg

SEQ ID NO: 276812 - RNA, 20 nt, Human
acuugucagcgguuugcuga

SEQ ID NO: 276813 - RNA, 24 nt, Human
agaaagcauacaaaauguaucucu

SEQ ID NO: 276814 - RNA, 20 nt, Human
agaagggaggggcagaccca

SEQ ID NO: 276815 - RNA, 21 nt, Human
agacacccacgagaacacuga

SEQ ID NO: 276816 - RNA, 20 nt, Human
agacacgcacacacagaucc

SEQ ID NO: 276817 - RNA, 22 nt, Human
agacacgcacacacagauccuc

SEQ ID NO: 276818 - RNA, 22 nt, Human
agagucggggugcccuccaggg

SEQ ID NO: 276819 - RNA, 24 nt, Human
agauccucucaccaacuucugccu

SEQ ID NO: 276820 - RNA, 24 nt, Human
agaugcacuagguucuugacacaa

SEQ ID NO: 276821 - RNA, 19 nt, Human
agaugggagcaggggcugc

SEQ ID NO: 276822 - RNA, 21 nt, Human
agcgggccaggaggcugcagg

SEQ ID NO: 276823 - RNA, 22 nt, Human
aggaagcuccuccuacccuggg

SEQ ID NO: 276824 - RNA, 21 nt, Human
aggaggcugcagggguggagg

SEQ ID NO: 276825 - RNA, 18 nt, Human
aggccccugccuggccag

SEQ ID NO: 276826 - RNA, 20 nt, Human
agggauggaugcuguucgcc

SEQ ID NO: 276827 - RNA, 20 nt, Human
aggggcggggcuggccggag

SEQ ID NO: 276828 - RNA, 23 nt, Human
aggggcugcuucgugugcaugag

SEQ ID NO: 276829 - RNA, 19 nt, Human
aggggugcuggggcccggc

SEQ ID NO: 276830 - RNA, 18 nt, Human
aggguaccaucccaggac

SEQ ID NO: 276831 - RNA, 21 nt, Human
augagacuccuggagacagag

SEQ ID NO: 276832 - RNA, 19 nt, Human
auggccaguuuuaccuccu

SEQ ID NO: 276833 - RNA, 24 nt, Human
augggcuggguugaagucccagug

SEQ ID NO: 276834 - RNA, 19 nt, Human
caaaagcaagaaggcuuac

SEQ ID NO: 276835 - RNA, 25 nt, Human
caaaccacuaaaagacauuuauuac

SEQ ID NO: 276836 - RNA, 19 nt, Human
caaagcacgcacgcagcua

SEQ ID NO: 276837 - RNA, 23 nt, Human
caaaggagaggggugcuggggcc

SEQ ID NO: 276838 - RNA, 25 nt, Human
caaagucccccaaaaaggaccuucc

SEQ ID NO: 276839 - RNA, 19 nt, Human
caaagugccaagugucaac

SEQ ID NO: 276840 - RNA, 22 nt, Human
caaagugccaagugucaacaca

SEQ ID NO: 276841 - RNA, 22 nt, Human
caaaugcacauacacuucucuc

SEQ ID NO: 276842 - RNA, 20 nt, Human
cacaacacagaaccggggca

SEQ ID NO: 276843 - RNA, 20 nt, Human
cacacaacacacacacacac

SEQ ID NO: 276844 - RNA, 20 nt, Human
cacacacaaaugcacauaca

SEQ ID NO: 276845 - RNA, 21 nt, Human
cacacacaacacacacacaca

SEQ ID NO: 276846 - RNA, 24 nt, Human
cacacacacacaacacacacacac

SEQ ID NO: 276847 - RNA, 25 nt, Human
cacacacacacacaacacacacaca

SEQ ID NO: 276848 - RNA, 18 nt, Human
cacacacacacacacaca

SEQ ID NO: 276849 - RNA, 18 nt, Human
caccaaccccaaagcacg

SEQ ID NO: 276850 - RNA, 18 nt, Human
caccccacacagccgcgc

SEQ ID NO: 276851 - RNA, 19 nt, Human
caccuggcgccuggugugc

SEQ ID NO: 276852 - RNA, 18 nt, Human
cacuucucuccccuccuu

SEQ ID NO: 276853 - RNA, 24 nt, Human
cagaaacaccugcuccuccugcag

SEQ ID NO: 276854 - RNA, 20 nt, Human
cagaagaaagaaggaaauga

SEQ ID NO: 276855 - RNA, 20 nt, Human
cagaagacagaaacaccugc

SEQ ID NO: 276856 - RNA, 19 nt, Human
cagagucggggugcccucc

SEQ ID NO: 276857 - RNA, 25 nt, Human
cagcacggcgccugaucugcacccc

SEQ ID NO: 276858 - RNA, 18 nt, Human
cagccucuccucaccccc

SEQ ID NO: 276859 - RNA, 24 nt, Human
cagcucggcaaaagcaaacacugc

SEQ ID NO: 276860 - RNA, 23 nt, Human
cagcucucccaccccggacaccc

SEQ ID NO: 276861 - RNA, 23 nt, Human
caggccccugccuggccaggccu

SEQ ID NO: 276862 - RNA, 19 nt, Human
cagggacagaugggagcag

SEQ ID NO: 276863 - RNA, 23 nt, Human
ccaaagcacgcacgcagcuaaca

SEQ ID NO: 276864 - RNA, 24 nt, Human
ccaaccccaaagcacgcacgcagc

SEQ ID NO: 276865 - RNA, 18 nt, Human
ccaagcucucuugcuggc

SEQ ID NO: 276866 - RNA, 24 nt, Human
ccacgcacgcacacacguagacac

SEQ ID NO: 276867 - RNA, 21 nt, Human
ccagccucuccucacccccuc

SEQ ID NO: 276868 - RNA, 22 nt, Human
ccagcucaccuggcgccuggug

SEQ ID NO: 276869 - RNA, 19 nt, Human
cccacacagccgcgcaccg

SEQ ID NO: 276870 - RNA, 24 nt, Human
cccacgagaacacugacacagaga

SEQ ID NO: 276871 - RNA, 24 nt, Human
cccaggccccaugcugcucucaag

SEQ ID NO: 276872 - RNA, 18 nt, Human
cccagggagcugucggac

SEQ ID NO: 276873 - RNA, 22 nt, Human
cccagugccccauguggccagg

SEQ ID NO: 276874 - RNA, 18 nt, Human
ccccacacagccgcgcac

SEQ ID NO: 276875 - RNA, 19 nt, Human
ccccacacagccgcgcacc

SEQ ID NO: 276876 - RNA, 21 nt, Human
ccccacacagccgcgcaccgg

SEQ ID NO: 276877 - RNA, 23 nt, Human
ccccacacagccgcgcaccggcg

SEQ ID NO: 276878 - RNA, 19 nt, Human
ccccggacacccagggagc

SEQ ID NO: 276879 - RNA, 20 nt, Human
cccgcccccggccuuugacc

SEQ ID NO: 276880 - RNA, 18 nt, Human
cccugaggcccggagagc

SEQ ID NO: 276881 - RNA, 23 nt, Human
ccgguaccgugcagacacccacg

SEQ ID NO: 276882 - RNA, 20 nt, Human
ccucaugccagccucuccuc

SEQ ID NO: 276883 - RNA, 30 nt, Human
ccuccuacccugggcagggccucccgagcc

SEQ ID NO: 276884 - RNA, 20 nt, Human
cgagaacacugacacagaga

SEQ ID NO: 276885 - RNA, 23 nt, Human
cgagaacacugacacagagacac

SEQ ID NO: 276886 - RNA, 22 nt, Human
cgcacaaacagaucaucgccgc

SEQ ID NO: 276887 - RNA, 23 nt, Human
cgcgcaccggcguugccuacaca

SEQ ID NO: 276888 - RNA, 19 nt, Human
cggcaggggcggggcuggc

SEQ ID NO: 276889 - RNA, 21 nt, Human
cggccgguccacacgccgcgc

SEQ ID NO: 276890 - RNA, 22 nt, Human
cggggaacaaaaaaaggcaaaa

SEQ ID NO: 276891 - RNA, 26 nt, Human
cgugcagacacccacgagaacacuga

SEQ ID NO: 276892 - RNA, 19 nt, Human
cuaagcccugaggcccgga

SEQ ID NO: 276893 - RNA, 20 nt, Human
cucacugcccacaagacacc

SEQ ID NO: 276894 - RNA, 19 nt, Human
cucagggcccucucuggga

SEQ ID NO: 276895 - RNA, 23 nt, Human
cucaugguccugaacggacagcu

SEQ ID NO: 276896 - RNA, 20 nt, Human
cuccuacagagaaguggggc

SEQ ID NO: 276897 - RNA, 24 nt, Human
cuccucacccccucacugcccaca

SEQ ID NO: 276898 - RNA, 19 nt, Human
cucucccaccccggacacc

SEQ ID NO: 276899 - RNA, 23 nt, Human
cucuggucugcacuccgggaggc

SEQ ID NO: 276900 - RNA, 19 nt, Human
cugacacagagacacugac

SEQ ID NO: 276901 - RNA, 18 nt, Human
cuugcuggcucccagcug

SEQ ID NO: 276902 - RNA, 18 nt, Human
cuuggcucagacccuagc

SEQ ID NO: 276903 - RNA, 20 nt, Human
cuugguguguuuggggaggg

SEQ ID NO: 276904 - RNA, 19 nt, Human
gaacacugacacagagaca

SEQ ID NO: 276905 - RNA, 21 nt, Human
gaagcuccuccuacccugggc

SEQ ID NO: 276906 - RNA, 20 nt, Human
gacacagagacacugacaga

SEQ ID NO: 276907 - RNA, 21 nt, Human
gagaacacugacacagagaca

SEQ ID NO: 276908 - RNA, 18 nt, Human
gaggaggggugaggaagg

SEQ ID NO: 276909 - RNA, 23 nt, Human
gaggguggggcuagaucuggucc

SEQ ID NO: 276910 - RNA, 22 nt, Human
gaguaaaugggaacuacgugga

SEQ ID NO: 276911 - RNA, 23 nt, Human
gcaaaagcaaacacugccucaac

SEQ ID NO: 276912 - RNA, 24 nt, Human
gcacagcuccagaggugagaaggg

SEQ ID NO: 276913 - RNA, 18 nt, Human
gccuggcuccacacguga

SEQ ID NO: 276914 - RNA, 19 nt, Human
gcgcucuucggccggucca

SEQ ID NO: 276915 - RNA, 22 nt, Human
gcggcucagccuggccugccgu

SEQ ID NO: 276916 - RNA, 20 nt, Human
gcucguguaggccgugagcc

SEQ ID NO: 276917 - RNA, 19 nt, Human
ggaacaaaaaaaggcaaaa

SEQ ID NO: 276918 - RNA, 19 nt, Human
ggaaggucgagggcagggc

SEQ ID NO: 276919 - RNA, 19 nt, Human
ggagcuaaaggucagcuuc

SEQ ID NO: 276920 - RNA, 23 nt, Human
ggagggggagagggaaacugagc

SEQ ID NO: 276921 - RNA, 21 nt, Human
ggcagcuugugggcucgugua

SEQ ID NO: 276922 - RNA, 18 nt, Human
ggcggcucagccuggccu

SEQ ID NO: 276923 - RNA, 18 nt, Human
ggcuggggcucggcucgg

SEQ ID NO: 276924 - RNA, 19 nt, Human
ggcuggggcucggcucggc

SEQ ID NO: 276925 - RNA, 18 nt, Human
gggaaaagggagagaaga

SEQ ID NO: 276926 - RNA, 18 nt, Human
gggagcuaaaggucagcu

SEQ ID NO: 276927 - RNA, 18 nt, Human
gggcagaagguggucugc

SEQ ID NO: 276928 - RNA, 19 nt, Human
gggcagagcuagcugagcu

SEQ ID NO: 276929 - RNA, 22 nt, Human
gggcagagcuagcugagcuggg

SEQ ID NO: 276930 - RNA, 23 nt, Human
gggcagagcuagcugagcugggc

SEQ ID NO: 276931 - RNA, 23 nt, Human
gggcagggccucccgagccugcu

SEQ ID NO: 276932 - RNA, 22 nt, Human
gggcuagaucuggucuagagag

SEQ ID NO: 276933 - RNA, 25 nt, Human
ggggcgagggcgggcggcucagccu

SEQ ID NO: 276934 - RNA, 20 nt, Human
gguaccaucccaggacggcc

SEQ ID NO: 276935 - RNA, 21 nt, Human
guaaaugggaacuacguggau

SEQ ID NO: 276936 - RNA, 18 nt, Human
gugggucagaggaggggu

SEQ ID NO: 276937 - RNA, 21 nt, Human
guucacuucuauuacaaaaua

SEQ ID NO: 276938 - RNA, 19 nt, Human
guuucaggccccugccugg

SEQ ID NO: 276939 - RNA, 21 nt, Human
uaagaaaaagcacuguugaac

SEQ ID NO: 276940 - RNA, 21 nt, Human
uaagaaaaagcacuguugaac

SEQ ID NO: 276941 - RNA, 20 nt, Human
uaauuuauagguuuguccuu

SEQ ID NO: 276942 - RNA, 21 nt, Human
uacccagccauuuucaguagc

SEQ ID NO: 276943 - RNA, 20 nt, Human
uagaaagacuugucagcggu

SEQ ID NO: 276944 - RNA, 22 nt, Human
uagaaggaacagaagacagaaa

SEQ ID NO: 276945 - RNA, 21 nt, Human
uagucagggcagaggauggcu

SEQ ID NO: 276946 - RNA, 18 nt, Human
uaucuaagaaaaagcacu

SEQ ID NO: 276947 - RNA, 24 nt, Human
uauggcugucaaagucccccaaaa

SEQ ID NO: 276948 - RNA, 21 nt, Human
ucacccccucacugcccacaa

SEQ ID NO: 276949 - RNA, 19 nt, Human
ucagacccuagcaagggca

SEQ ID NO: 276950 - RNA, 24 nt, Human
ucagccauccccucuccuccacgg

SEQ ID NO: 276951 - RNA, 22 nt, Human
ucagggcagaggauggcucaug

SEQ ID NO: 276952 - RNA, 22 nt, Human
ucaugccagccucuccucaccc

SEQ ID NO: 276953 - RNA, 22 nt, Human
uccaaagccagaagaaagaagg

SEQ ID NO: 276954 - RNA, 23 nt, Human
uccacacgugaggucucuggagu

SEQ ID NO: 276955 - RNA, 22 nt, Human
ucccaccccggacacccaggga

SEQ ID NO: 276956 - RNA, 20 nt, Human
ucccaggacggccugccuuc

SEQ ID NO: 276957 - RNA, 22 nt, Human
ucccagggcuggugacaaagug

SEQ ID NO: 276958 - RNA, 22 nt, Human
ucccccaaaaaggaccuuccca

SEQ ID NO: 276959 - RNA, 26 nt, Human
ucccccaaaaaggaccuucccaccga

SEQ ID NO: 276960 - RNA, 22 nt, Human
ucccugagaucaaggaugccuc

SEQ ID NO: 276961 - RNA, 19 nt, Human
uccuggggaaaagggagag

SEQ ID NO: 276962 - RNA, 20 nt, Human
uccuuggaaggacuagaagg

SEQ ID NO: 276963 - RNA, 24 nt, Human
ucgggccggcucggcucggcuggg

SEQ ID NO: 276964 - RNA, 21 nt, Human
ucggggccagcaaagugccaa

SEQ ID NO: 276965 - RNA, 26 nt, Human
ucuccucacccccucacugcccacaa

SEQ ID NO: 276966 - RNA, 21 nt, Human
ucugcacuccgggaggccaaa

SEQ ID NO: 276967 - RNA, 23 nt, Human
ucugcacuccgggaggccaaagg

SEQ ID NO: 276968 - RNA, 23 nt, Human
ucugcagcgugcagcugagccag

SEQ ID NO: 276969 - RNA, 22 nt, Human
ucuguagagagcccccgccccc

SEQ ID NO: 276970 - RNA, 22 nt, Human
ugaaaccacgacuucgucaagc

SEQ ID NO: 276971 - RNA, 27 nt, Human
ugaauaaauuuacacacuguguuuaag

SEQ ID NO: 276972 - RNA, 18 nt, Human
ugaccuccuccaacaccc

SEQ ID NO: 276973 - RNA, 21 nt, Human
ugacugaaccucaugccagcc

SEQ ID NO: 276974 - RNA, 22 nt, Human
ugacugaaccucaugccagccu

SEQ ID NO: 276975 - RNA, 24 nt, Human
ugagaaagguuugcaaacaaagac

SEQ ID NO: 276976 - RNA, 21 nt, Human
ugagaacagguggccccucuu

SEQ ID NO: 276977 - RNA, 21 nt, Human
ugagaagggaggggcagaccc

SEQ ID NO: 276978 - RNA, 22 nt, Human
ugagauggaggaguggguuuca

SEQ ID NO: 276979 - RNA, 23 nt, Human
ugagauggaggaguggguuucag

SEQ ID NO: 276980 - RNA, 22 nt, Human
ugagauuuuuccaaagccagaa

SEQ ID NO: 276981 - RNA, 18 nt, Human
ugagcugggcacacaggc

SEQ ID NO: 276982 - RNA, 18 nt, Human
ugcaaagcaggaagcucc

SEQ ID NO: 276983 - RNA, 19 nt, Human
ugccauaagauuccaaagg

SEQ ID NO: 276984 - RNA, 21 nt, Human
ugccuucaccuucagagacag

SEQ ID NO: 276985 - RNA, 19 nt, Human
uggaaugacugaaccucau

SEQ ID NO: 276986 - RNA, 19 nt, Human
uggcagggagcaccccaca

SEQ ID NO: 276987 - RNA, 26 nt, Human
ugggaacuacguggauuagauuugcg

SEQ ID NO: 276988 - RNA, 22 nt, Human
uggggcccggcuucccuggugg

SEQ ID NO: 276989 - RNA, 18 nt, Human
ugguccugaacggacagc

SEQ ID NO: 276990 - RNA, 21 nt, Human
uguagagagcccccgcccccg

SEQ ID NO: 276991 - RNA, 19 nt, Human
ugugaaccacauguaaccc

SEQ ID NO: 276992 - RNA, 19 nt, Human
uguggccaggucuucaucg

SEQ ID NO: 276993 - RNA, 25 nt, Human
uuagcgcacacacacacacaacaca

SEQ ID NO: 276994 - RNA, 22 nt, Human
uucaguagcuacacgggugguc

SEQ ID NO: 276995 - RNA, 20 nt, Human
uugaacaacaaccgcagcac

SEQ ID NO: 276996 - RNA, 20 nt, Human
uugguguguuuggggagggg

SEQ ID NO: 276997 - RNA, 22 nt, Human
uuugacaaaccacuaaaagaca

SEQ ID NO: 276998 - RNA, 23 nt, Human
uuugacaaaccacuaaaagacau

SEQ ID NO: 276999 - RNA, 19 nt, Human
aaaaaaaaacaaauccucc

SEQ ID NO: 277000 - RNA, 22 nt, Human
aaaaaaaaacaaauccuccaaa

SEQ ID NO: 277001 - RNA, 23 nt, Human
aaaaaaacaaauccuccaaacca

SEQ ID NO: 277002 - RNA, 18 nt, Human
aaaacaaauccuccaaac

SEQ ID NO: 277003 - RNA, 19 nt, Human
aaaacgagcacacucuuca

SEQ ID NO: 277004 - RNA, 21 nt, Human
aaacaaauccuccaaaccaca

SEQ ID NO: 277005 - RNA, 18 nt, Human
aagagaggccuuuuaaug

SEQ ID NO: 277006 - RNA, 22 nt, Human
aaggaaggaugaugggggaagg

SEQ ID NO: 277007 - RNA, 18 nt, Human
aaggcggggcuuugucug

SEQ ID NO: 277008 - RNA, 21 nt, Human
aagggacauggccacuccagc

SEQ ID NO: 277009 - RNA, 19 nt, Human
aagggaccggagaucacag

SEQ ID NO: 277010 - RNA, 21 nt, Human
aaucucuagccaaaugaucuc

SEQ ID NO: 277011 - RNA, 18 nt, Human
acaaauccuccaaaccac

SEQ ID NO: 277012 - RNA, 18 nt, Human
acuugaugaagacagucc

SEQ ID NO: 277013 - RNA, 23 nt, Human
agaagucuccugccgucucacag

SEQ ID NO: 277014 - RNA, 25 nt, Human
agccccccucccccccgaugucccc

SEQ ID NO: 277015 - RNA, 18 nt, Human
agcccuucuccuuucuga

SEQ ID NO: 277016 - RNA, 25 nt, Human
agcccuucuccuuucugagcccccc

SEQ ID NO: 277017 - RNA, 23 nt, Human
aggaacuggaaggcggcaggacu

SEQ ID NO: 277018 - RNA, 23 nt, Human
aggaaggaugaugggggaaggga

SEQ ID NO: 277019 - RNA, 18 nt, Human
aggaguucuguagggaaa

SEQ ID NO: 277020 - RNA, 19 nt, Human
agggaccggagaucacagc

SEQ ID NO: 277021 - RNA, 25 nt, Human
agggaccggagaucacagcccuucu

SEQ ID NO: 277022 - RNA, 22 nt, Human
aggggcucugaagaggggcugc

SEQ ID NO: 277023 - RNA, 18 nt, Human
aucucuguuuucuugagg

SEQ ID NO: 277024 - RNA, 21 nt, Human
caaacaagccagugacagaca

SEQ ID NO: 277025 - RNA, 22 nt, Human
caaacaagccagugacagacac

SEQ ID NO: 277026 - RNA, 23 nt, Human
caagccagugacagacacugccc

SEQ ID NO: 277027 - RNA, 22 nt, Human
cacagccaugaaaggggacaga

SEQ ID NO: 277028 - RNA, 21 nt, Human
caccagcggggaugcacucaa

SEQ ID NO: 277029 - RNA, 23 nt, Human
cacucagacaaucucuagccaaa

SEQ ID NO: 277030 - RNA, 18 nt, Human
cacuugcagcaggaaggc

SEQ ID NO: 277031 - RNA, 18 nt, Human
ccacuuggggcagguguc

SEQ ID NO: 277032 - RNA, 22 nt, Human
ccccccucccccccgauguccc

SEQ ID NO: 277033 - RNA, 18 nt, Human
ccgccgccgcugccgcgc

SEQ ID NO: 277034 - RNA, 22 nt, Human
ccugaacuuccauggcaacagc

SEQ ID NO: 277035 - RNA, 21 nt, Human
ccugaucccggccuccuggac

SEQ ID NO: 277036 - RNA, 19 nt, Human
ccuggggaaugagcucugg

SEQ ID NO: 277037 - RNA, 26 nt, Human
cggcugcacagccaugaaaggggaca

SEQ ID NO: 277038 - RNA, 23 nt, Human
cgggacaccaaggaacuggaagg

SEQ ID NO: 277039 - RNA, 19 nt, Human
cggggcagaagucuccugc

SEQ ID NO: 277040 - RNA, 19 nt, Human
cucugcuuuggggaaggcg

SEQ ID NO: 277041 - RNA, 18 nt, Human
cugcuggcaguagccgcg

SEQ ID NO: 277042 - RNA, 20 nt, Human
cugggaacccugagcccaga

SEQ ID NO: 277043 - RNA, 19 nt, Human
gacuugguccuacaaaugg

SEQ ID NO: 277044 - RNA, 23 nt, Human
gagaucacagcccuucuccuuuc

SEQ ID NO: 277045 - RNA, 23 nt, Human
gagcccagacugacaagaguuua

SEQ ID NO: 277046 - RNA, 18 nt, Human
gagcuuagucaccagcgg

SEQ ID NO: 277047 - RNA, 21 nt, Human
gaucucuguuuucuugaggag

SEQ ID NO: 277048 - RNA, 21 nt, Human
gcaacggaaccuuuggcacca

SEQ ID NO: 277049 - RNA, 23 nt, Human
gcaggugucuugggggcaucuuc

SEQ ID NO: 277050 - RNA, 22 nt, Human
gcggaacaucagaaaaugggag

SEQ ID NO: 277051 - RNA, 23 nt, Human
ggacccuggcacuacuucaaaca

SEQ ID NO: 277052 - RNA, 19 nt, Human
gggaaaaaaaaaaaacaaa

SEQ ID NO: 277053 - RNA, 26 nt, Human
ggggcaggugucuugggggcaucuuc

SEQ ID NO: 277054 - RNA, 20 nt, Human
gggguagccgcuugcugcga

SEQ ID NO: 277055 - RNA, 18 nt, Human
guaaaaagcugcaacgga

SEQ ID NO: 277056 - RNA, 18 nt, Human
uacagugaguagcuugga

SEQ ID NO: 277057 - RNA, 19 nt, Human
uacuugaugaagacagucc

SEQ ID NO: 277058 - RNA, 20 nt, Human
uagaacacaaagggagaggc

SEQ ID NO: 277059 - RNA, 19 nt, Human
uagccgcgcugucgucucg

SEQ ID NO: 277060 - RNA, 20 nt, Human
uauagaacacaaagggagag

SEQ ID NO: 277061 - RNA, 20 nt, Human
ucagucuaaggaaggaugau

SEQ ID NO: 277062 - RNA, 23 nt, Human
uccacagauuugcacuucaaaca

SEQ ID NO: 277063 - RNA, 26 nt, Human
uccuccaaaccacaccggaugguugu

SEQ ID NO: 277064 - RNA, 18 nt, Human
uccuuucugagccccccu

SEQ ID NO: 277065 - RNA, 27 nt, Human
ucucacagccgcacccaccgcgcugcu

SEQ ID NO: 277066 - RNA, 25 nt, Human
ugagcccagacugacaagaguuuaa

SEQ ID NO: 277067 - RNA, 21 nt, Human
ugaggaguucuguagggaaau

SEQ ID NO: 277068 - RNA, 19 nt, Human
ugaguagcuuggagucacu

SEQ ID NO: 277069 - RNA, 22 nt, Human
ugcacagccaugaaaggggaca

SEQ ID NO: 277070 - RNA, 21 nt, Human
uggcaacagccugaucccggc

SEQ ID NO: 277071 - RNA, 21 nt, Human
uggcacuacuucaaacagcaa

SEQ ID NO: 277072 - RNA, 21 nt, Human
uggcuguucuuuucuguuggg

SEQ ID NO: 277073 - RNA, 22 nt, Human
ugggagccuucuucuaauggcu

SEQ ID NO: 277074 - RNA, 18 nt, Human
ugggcaggcugggcguuc

SEQ ID NO: 277075 - RNA, 18 nt, Human
ugucaggaugggcauguc

SEQ ID NO: 277076 - RNA, 25 nt, Human
uuccauggcaacagccugaucccgg

SEQ ID NO: 277077 - RNA, 21 nt, Human
uuccuggggaaugagcucugg

SEQ ID NO: 277078 - RNA, 21 nt, Human
uuggggcaggugucuuggggg

SEQ ID NO: 277079 - RNA, 22 nt, Human
uuggggcaggugucuugggggc

SEQ ID NO: 277080 - RNA, 26 nt, Human
uugguagggaacaaacaagccaguga

SEQ ID NO: 277081 - RNA, 18 nt, Human
uugguccuacaaauggaa

SEQ ID NO: 277082 - RNA, 22 nt, Human
aguggcugcaugcauugguagg

SEQ ID NO: 277083 - RNA, 22 nt, Human
cugcaugcauugguaggauggg

SEQ ID NO: 277084 - RNA, 19 nt, Human
uaggaaaggccagagagca

SEQ ID NO: 277085 - RNA, 21 nt, Human
ugcauugguaggaugggugga

SEQ ID NO: 277086 - RNA, 29 nt, Human
aaaaaaaaaaaaaacaaacaaaaaccacc

SEQ ID NO: 277087 - RNA, 26 nt, Human
aaaaaaaaaaaacaaacaaaaaccac

SEQ ID NO: 277088 - RNA, 27 nt, Human
aaaaaaaacaaacaaaaaccaccaaaa

SEQ ID NO: 277089 - RNA, 24 nt, Human
aaaaaaacaaacaaaaaccaccaa

SEQ ID NO: 277090 - RNA, 25 nt, Human
aaaaaaacaaacaaaaaccaccaaa

SEQ ID NO: 277091 - RNA, 19 nt, Human
aaaaaacagaaaccucaaa

SEQ ID NO: 277092 - RNA, 18 nt, Human
aaaaagcaaaaacaauau

SEQ ID NO: 277093 - RNA, 18 nt, Human
aaaacagaaaccucaaac

SEQ ID NO: 277094 - RNA, 24 nt, Human
aaaacuauuuccagaagaccccaa

SEQ ID NO: 277095 - RNA, 26 nt, Human
aaacaaaaaccaccaaaaaacagaaa

SEQ ID NO: 277096 - RNA, 27 nt, Human
aaacaaacaaaaaccaccaaaaaacag

SEQ ID NO: 277097 - RNA, 20 nt, Human
aaacagaaaccucaaaccac

SEQ ID NO: 277098 - RNA, 20 nt, Human
aaagucuuucgaguacauau

SEQ ID NO: 277099 - RNA, 19 nt, Human
aacaaaaaccaccaaaaaa

SEQ ID NO: 277100 - RNA, 21 nt, Human
aaccaccaaaaaacagaaacc

SEQ ID NO: 277101 - RNA, 22 nt, Human
aaccaccaaaaaacagaaaccu

SEQ ID NO: 277102 - RNA, 21 nt, Human
aaucaagaugacccaaucuag

SEQ ID NO: 277103 - RNA, 24 nt, Human
aauccauuuaccaaaauuauucug

SEQ ID NO: 277104 - RNA, 25 nt, Human
aaugacuucaagacuaucuuucggc

SEQ ID NO: 277105 - RNA, 20 nt, Human
aauggaaaaucucuugacca

SEQ ID NO: 277106 - RNA, 20 nt, Human
acaaaaaccaccaaaaaaca

SEQ ID NO: 277107 - RNA, 21 nt, Human
acaaaaagcacuucaaagaug

SEQ ID NO: 277108 - RNA, 23 nt, Human
acaacaaaagcaguaaaaagcaa

SEQ ID NO: 277109 - RNA, 20 nt, Human
acacuaaaaugaugccuauc

SEQ ID NO: 277110 - RNA, 24 nt, Human
acaguuuauacaaguuaaaauggg

SEQ ID NO: 277111 - RNA, 20 nt, Human
acauuaacaugacacaacua

SEQ ID NO: 277112 - RNA, 22 nt, Human
accaaaaaacagaaaccucaaa

SEQ ID NO: 277113 - RNA, 25 nt, Human
accaaaaaacagaaaccucaaacca

SEQ ID NO: 277114 - RNA, 19 nt, Human
accaccaaaaaacagaaac

SEQ ID NO: 277115 - RNA, 22 nt, Human
agaagaccccaaagcccacacc

SEQ ID NO: 277116 - RNA, 25 nt, Human
agaagaccccaaagcccacaccuuu

SEQ ID NO: 277117 - RNA, 24 nt, Human
agacaaauggacaguauguuucuu

SEQ ID NO: 277118 - RNA, 21 nt, Human
agacaagaaaaucuuagucau

SEQ ID NO: 277119 - RNA, 22 nt, Human
agagacuccucagaaaaagcaa

SEQ ID NO: 277120 - RNA, 23 nt, Human
agcugcuuucucucuucauuccu

SEQ ID NO: 277121 - RNA, 18 nt, Human
aggcacugcuguauggaa

SEQ ID NO: 277122 - RNA, 18 nt, Human
agucaugggaugagaaaa

SEQ ID NO: 277123 - RNA, 22 nt, Human
agugacaaucagucgggaggaa

SEQ ID NO: 277124 - RNA, 23 nt, Human
caaaaaacagaaaccucaaacca

SEQ ID NO: 277125 - RNA, 21 nt, Human
caaacaaaaaccaccaaaaaa

SEQ ID NO: 277126 - RNA, 23 nt, Human
caaacaaaaaccaccaaaaaaca

SEQ ID NO: 277127 - RNA, 25 nt, Human
caaacaaaaaccaccaaaaaacaga

SEQ ID NO: 277128 - RNA, 24 nt, Human
caaauguaauuaugacaacuacaa

SEQ ID NO: 277129 - RNA, 24 nt, Human
caacaaaagcaguaaaaagcaaga

SEQ ID NO: 277130 - RNA, 18 nt, Human
caagacaagaaaaucuua

SEQ ID NO: 277131 - RNA, 22 nt, Human
caagacaagaaaaucuuaguca

SEQ ID NO: 277132 - RNA, 21 nt, Human
cacacaguuuauacaaguuaa

SEQ ID NO: 277133 - RNA, 19 nt, Human
caccaaaaaacagaaaccu

SEQ ID NO: 277134 - RNA, 23 nt, Human
cagaaaccucaaaccacuucuga

SEQ ID NO: 277135 - RNA, 23 nt, Human
cagguaccaaaaugguuuugaag

SEQ ID NO: 277136 - RNA, 20 nt, Human
caugacacaacuauucagua

SEQ ID NO: 277137 - RNA, 21 nt, Human
cuccucagaaaaagcaaaaac

SEQ ID NO: 277138 - RNA, 21 nt, Human
cuccugcuuauuaaagaagga

SEQ ID NO: 277139 - RNA, 23 nt, Human
cuuaaggugaaaaaaaaaaaaaa

SEQ ID NO: 277140 - RNA, 25 nt, Human
gaaaaaaaaaaaaaacaaacaaaaa

SEQ ID NO: 277141 - RNA, 25 nt, Human
gaaaccucaaaccacuucugaauga

SEQ ID NO: 277142 - RNA, 23 nt, Human
gaaagccucccuuaaggugaaaa

SEQ ID NO: 277143 - RNA, 21 nt, Human
ggagaacagguaaucaaagua

SEQ ID NO: 277144 - RNA, 19 nt, Human
guuggggagcugcuuucuc

SEQ ID NO: 277145 - RNA, 22 nt, Human
guugugcuuguuuuuaaacaga

SEQ ID NO: 277146 - RNA, 20 nt, Human
uaaaaagcaagacaagaaaa

SEQ ID NO: 277147 - RNA, 23 nt, Human
uaaaguaaggauggcccaaucug

SEQ ID NO: 277148 - RNA, 22 nt, Human
uaggcacauuaacaugacacaa

SEQ ID NO: 277149 - RNA, 20 nt, Human
ucaagaugacccaaucuaau

SEQ ID NO: 277150 - RNA, 21 nt, Human
ucaugggaugagaaaaaauga

SEQ ID NO: 277151 - RNA, 22 nt, Human
uccagaagaccccaaagcccac

SEQ ID NO: 277152 - RNA, 24 nt, Human
uccagaagaccccaaagcccacac

SEQ ID NO: 277153 - RNA, 20 nt, Human
ucuccaaaugauucugaggc

SEQ ID NO: 277154 - RNA, 25 nt, Human
ucuuucggcuccugaaugcugcuuu

SEQ ID NO: 277155 - RNA, 19 nt, Human
ugaaguaugucuuguucuu

SEQ ID NO: 277156 - RNA, 22 nt, Human
ugagaaaaaaugaaacugaaag

SEQ ID NO: 277157 - RNA, 22 nt, Human
ugcuagguaaagugaauauucc

SEQ ID NO: 277158 - RNA, 21 nt, Human
uggcagguacuucugaaguca

SEQ ID NO: 277159 - RNA, 23 nt, Human
ugggagaacagguaaucaaagua

SEQ ID NO: 277160 - RNA, 20 nt, Human
ugucuuguucuuuaaaauaa

SEQ ID NO: 277161 - RNA, 22 nt, Human
ugucuuuuucgcuccugcuuau

SEQ ID NO: 277162 - RNA, 24 nt, Human
uuauuaaagaaggaagggugggaa

SEQ ID NO: 277163 - RNA, 23 nt, Human
uucaaaugauuucaaccccauuc

SEQ ID NO: 277164 - RNA, 19 nt, Human
uugugcuuguuuuuaaaca

SEQ ID NO: 277165 - RNA, 22 nt, Human
uuuccagaagaccccaaagccc

SEQ ID NO: 277166 - RNA, 24 nt, Human
uuucuccaaaugauucugaggcuc

SEQ ID NO: 277167 - RNA, 23 nt, Human
aaagcgccagcaggauugcaccg

SEQ ID NO: 277168 - RNA, 21 nt, Human
aaaggcggggcggacagaccc

SEQ ID NO: 277169 - RNA, 21 nt, Human
aaaggcggggcggacagaccc

SEQ ID NO: 277170 - RNA, 18 nt, Human
aaaguacuucucucugcu

SEQ ID NO: 277171 - RNA, 18 nt, Human
aacacaaucucucucucu

SEQ ID NO: 277172 - RNA, 23 nt, Human
aaccccggaaaagcgccagcagg

SEQ ID NO: 277173 - RNA, 23 nt, Human
aaccccggaaaagcgccagcagg

SEQ ID NO: 277174 - RNA, 19 nt, Human
aagcggauguaacuugaaa

SEQ ID NO: 277175 - RNA, 19 nt, Human
aaggcggggcggacagacc

SEQ ID NO: 277176 - RNA, 19 nt, Human
aaggcggggcggacagacc

SEQ ID NO: 277177 - RNA, 20 nt, Human
aaggcggggcggacagaccc

SEQ ID NO: 277178 - RNA, 20 nt, Human
aaggcggggcggacagaccc

SEQ ID NO: 277179 - RNA, 23 nt, Human
aagguaaauaacaacagaaauca

SEQ ID NO: 277180 - RNA, 20 nt, Human
aauuucagcuuuugauucag

SEQ ID NO: 277181 - RNA, 22 nt, Human
acagguccacuuggccugcaac

SEQ ID NO: 277182 - RNA, 18 nt, Human
accugcagcugcugcugu

SEQ ID NO: 277183 - RNA, 19 nt, Human
accugcagcugcugcuguc

SEQ ID NO: 277184 - RNA, 18 nt, Human
acuacccaaccaacuguu

SEQ ID NO: 277185 - RNA, 18 nt, Human
acucgauagccaggaacu

SEQ ID NO: 277186 - RNA, 24 nt, Human
agaaaacaggugcagaggcugcgg

SEQ ID NO: 277187 - RNA, 22 nt, Human
agaaugaacaaaaaaaucaaaa

SEQ ID NO: 277188 - RNA, 20 nt, Human
agagggcccuggaaggugcc

SEQ ID NO: 277189 - RNA, 18 nt, Human
agccaggaaccuguguag

SEQ ID NO: 277190 - RNA, 18 nt, Human
agccaggaaccuguguag

SEQ ID NO: 277191 - RNA, 20 nt, Human
agccggagcagucagagcgg

SEQ ID NO: 277192 - RNA, 21 nt, Human
agcgaaggagaccucaggcug

SEQ ID NO: 277193 - RNA, 24 nt, Human
aggauaguggagacaaucagccgg

SEQ ID NO: 277194 - RNA, 19 nt, Human
aggcgagggcaaaggcggg

SEQ ID NO: 277195 - RNA, 19 nt, Human
aggcgagggcaaaggcggg

SEQ ID NO: 277196 - RNA, 18 nt, Human
agggucucucagccgccu

SEQ ID NO: 277197 - RNA, 21 nt, Human
aggugcagaggcugcgggcga

SEQ ID NO: 277198 - RNA, 19 nt, Human
agucagagcggcugggcgg

SEQ ID NO: 277199 - RNA, 19 nt, Human
agugcagauucagacucga

SEQ ID NO: 277200 - RNA, 19 nt, Human
agugcagauucagacucga

SEQ ID NO: 277201 - RNA, 18 nt, Human
aguuguauucuuguuauc

SEQ ID NO: 277202 - RNA, 19 nt, Human
auuccgcuacucuaaaaug

SEQ ID NO: 277203 - RNA, 18 nt, Human
caaauccgccccgggaaa

SEQ ID NO: 277204 - RNA, 22 nt, Human
caaccagcacaagagucuacaa

SEQ ID NO: 277205 - RNA, 24 nt, Human
caagaagguaaagcgaguucagau

SEQ ID NO: 277206 - RNA, 22 nt, Human
cacacaggcucugcccagccag

SEQ ID NO: 277207 - RNA, 26 nt, Human
cacaggcucugcccagccaguuuucc

SEQ ID NO: 277208 - RNA, 23 nt, Human
caccccuaccucccuucccuucc

SEQ ID NO: 277209 - RNA, 22 nt, Human
cacuugugagccgccaucaacc

SEQ ID NO: 277210 - RNA, 21 nt, Human
cagaaccccggaaaagcgcca

SEQ ID NO: 277211 - RNA, 22 nt, Human
cagaaccccggaaaagcgccag

SEQ ID NO: 277212 - RNA, 22 nt, Human
cagaauucauccauacauuuuc

SEQ ID NO: 277213 - RNA, 22 nt, Human
cagacucgauagccaggaaccu

SEQ ID NO: 277214 - RNA, 24 nt, Human
cagaugcuuccauuuagauccacu

SEQ ID NO: 277215 - RNA, 18 nt, Human
cagcagcgucuauuuccu

SEQ ID NO: 277216 - RNA, 18 nt, Human
cagccaccaccugcagcu

SEQ ID NO: 277217 - RNA, 20 nt, Human
cagccaccaccugcagcugc

SEQ ID NO: 277218 - RNA, 19 nt, Human
cagcugcggcugagggacu

SEQ ID NO: 277219 - RNA, 19 nt, Human
cagcugcggcugagggacu

SEQ ID NO: 277220 - RNA, 21 nt, Human
cagcugcugcugucaccuacu

SEQ ID NO: 277221 - RNA, 20 nt, Human
caggaaccuguguagugagc

SEQ ID NO: 277222 - RNA, 20 nt, Human
caggaaccuguguagugagc

SEQ ID NO: 277223 - RNA, 24 nt, Human
cagugguguuuucauaagccaagc

SEQ ID NO: 277224 - RNA, 18 nt, Human
cauacaaaaacgaaagcc

SEQ ID NO: 277225 - RNA, 23 nt, Human
ccagggucucucagccgccuccc

SEQ ID NO: 277226 - RNA, 19 nt, Human
ccauacauuuucacaccac

SEQ ID NO: 277227 - RNA, 18 nt, Human
cccagcugcggcugaggg

SEQ ID NO: 277228 - RNA, 18 nt, Human
cccagcugcggcugaggg

SEQ ID NO: 277229 - RNA, 22 nt, Human
cccccucgcggguccccagcca

SEQ ID NO: 277230 - RNA, 25 nt, Human
cccgcgccgcgcgggcgggcagccg

SEQ ID NO: 277231 - RNA, 22 nt, Human
cccgcucagccagacccuaccc

SEQ ID NO: 277232 - RNA, 24 nt, Human
cccggcgaagacagaccuccugga

SEQ ID NO: 277233 - RNA, 24 nt, Human
cccggcgaagacagaccuccugga

SEQ ID NO: 277234 - RNA, 22 nt, Human
cccuaccucccuucccuuccaa

SEQ ID NO: 277235 - RNA, 22 nt, Human
cccuaccucccuucccuuccac

SEQ ID NO: 277236 - RNA, 23 nt, Human
ccgccccgggaaaaggcgagggc

SEQ ID NO: 277237 - RNA, 20 nt, Human
ccuacugugccacccccaag

SEQ ID NO: 277238 - RNA, 19 nt, Human
ccucccgggcuugcaagcc

SEQ ID NO: 277239 - RNA, 25 nt, Human
ccucgcccagggcuggggcgcagug

SEQ ID NO: 277240 - RNA, 25 nt, Human
ccucgcccagggcuggggcgcagug

SEQ ID NO: 277241 - RNA, 22 nt, Human
ccugcagcugcugcugucaccu

SEQ ID NO: 277242 - RNA, 20 nt, Human
ccuggagaaauuucuguuca

SEQ ID NO: 277243 - RNA, 18 nt, Human
ccugugcuccaaacaaga

SEQ ID NO: 277244 - RNA, 18 nt, Human
ccugugcuccaaacaaga

SEQ ID NO: 277245 - RNA, 24 nt, Human
cgagaacaaauccuccgcacccuc

SEQ ID NO: 277246 - RNA, 24 nt, Human
cgagaacaaauccuccgcacccuc

SEQ ID NO: 277247 - RNA, 19 nt, Human
cgaguucagauccugccgc

SEQ ID NO: 277248 - RNA, 19 nt, Human
cgaguucagauccugccgc

SEQ ID NO: 277249 - RNA, 22 nt, Human
cgccucccgggcuugcaagccc

SEQ ID NO: 277250 - RNA, 22 nt, Human
cgccugggcaccgcacucacuc

SEQ ID NO: 277251 - RNA, 21 nt, Human
cgcgcagaaccccggaaaagc

SEQ ID NO: 277252 - RNA, 21 nt, Human
cgcgcagaaccccggaaaagc

SEQ ID NO: 277253 - RNA, 24 nt, Human
cgcuacucuaaaaugaaaaaaaaa

SEQ ID NO: 277254 - RNA, 18 nt, Human
cgggaaaaggcgagggca

SEQ ID NO: 277255 - RNA, 19 nt, Human
cggggugggcgggugaagg

SEQ ID NO: 277256 - RNA, 18 nt, Human
cuacuacccaaccaacug

SEQ ID NO: 277257 - RNA, 26 nt, Human
cuagagaaugaacaaaaaaaucaaaa

SEQ ID NO: 277258 - RNA, 24 nt, Human
cuaggagcgcaugccuauggaaua

SEQ ID NO: 277259 - RNA, 21 nt, Human
cucucagccgccucccgggcu

SEQ ID NO: 277260 - RNA, 22 nt, Human
cucucuuuccuuuguugguuuu

SEQ ID NO: 277261 - RNA, 22 nt, Human
cugcugcugucaccuacugugc

SEQ ID NO: 277262 - RNA, 18 nt, Human
cuugcaagcccgcucagc

SEQ ID NO: 277263 - RNA, 20 nt, Human
cuuggaauuucucugaaaua

SEQ ID NO: 277264 - RNA, 21 nt, Human
gaaaaaaaaauauuuaucugu

SEQ ID NO: 277265 - RNA, 25 nt, Human
gaaaagcgccagcaggauugcaccg

SEQ ID NO: 277266 - RNA, 18 nt, Human
gaaaucauacauguucaa

SEQ ID NO: 277267 - RNA, 19 nt, Human
gaaccccggaaaagcgccg

SEQ ID NO: 277268 - RNA, 18 nt, Human
gacuggaggagaaguuuu

SEQ ID NO: 277269 - RNA, 22 nt, Human
gagagcuggcccggcgaagaca

SEQ ID NO: 277270 - RNA, 19 nt, Human
gagcgaaggagaccucagg

SEQ ID NO: 277271 - RNA, 19 nt, Human
gagcgaaggagaccucagg

SEQ ID NO: 277272 - RNA, 23 nt, Human
gaggagggccggggcuggagaau

SEQ ID NO: 277273 - RNA, 23 nt, Human
gaggagggccggggcuggagaau

SEQ ID NO: 277274 - RNA, 22 nt, Human
gcacaccuccucaauccagguc

SEQ ID NO: 277275 - RNA, 27 nt, Human
gcagaaccccggaaaagccgggacgcu

SEQ ID NO: 277276 - RNA, 27 nt, Human
gcagaaccccggaaaagccgggacgcu

SEQ ID NO: 277277 - RNA, 22 nt, Human
gcagaaccccggaaaagcgcca

SEQ ID NO: 277278 - RNA, 27 nt, Human
gcagugcgcuggugcuccucuagcugg

SEQ ID NO: 277279 - RNA, 27 nt, Human
gcagugcgcuggugcuccucuagcugg

SEQ ID NO: 277280 - RNA, 21 nt, Human
gcccccucgcggguccccagc

SEQ ID NO: 277281 - RNA, 19 nt, Human
gcccggcgaagacagaccu

SEQ ID NO: 277282 - RNA, 19 nt, Human
gcccggcgaagacagaccu

SEQ ID NO: 277283 - RNA, 19 nt, Human
gccugcaaccagcacaaga

SEQ ID NO: 277284 - RNA, 20 nt, Human
gcgaaggagaccucaggcug

SEQ ID NO: 277285 - RNA, 18 nt, Human
gcgagggagcaggaacag

SEQ ID NO: 277286 - RNA, 19 nt, Human
gcgcugccgggucugcugc

SEQ ID NO: 277287 - RNA, 22 nt, Human
gcgggaggagggccggggcugg

SEQ ID NO: 277288 - RNA, 23 nt, Human
gcugggcgguuggcgcugccggg

SEQ ID NO: 277289 - RNA, 21 nt, Human
gcuggugcuccucuagcuggg

SEQ ID NO: 277290 - RNA, 21 nt, Human
gcuggugcuccucuagcuggg

SEQ ID NO: 277291 - RNA, 18 nt, Human
ggagcagagauggggagc

SEQ ID NO: 277292 - RNA, 18 nt, Human
ggagcagagauggggagc

SEQ ID NO: 277293 - RNA, 21 nt, Human
ggccaagcgcgccugggcacc

SEQ ID NO: 277294 - RNA, 20 nt, Human
ggcgggaggagggccggggc

SEQ ID NO: 277295 - RNA, 20 nt, Human
ggcgggaggagggccggggc

SEQ ID NO: 277296 - RNA, 20 nt, Human
gggaggagggccggggcugg

SEQ ID NO: 277297 - RNA, 24 nt, Human
gggaggggacuggaggagaaguuu

SEQ ID NO: 277298 - RNA, 18 nt, Human
gggcaaaccccacccuua

SEQ ID NO: 277299 - RNA, 19 nt, Human
gggcugagaaaauuccaca

SEQ ID NO: 277300 - RNA, 19 nt, Human
gggcugagaaaauuccaca

SEQ ID NO: 277301 - RNA, 25 nt, Human
gggcuggggcgcagugcgcuggugc

SEQ ID NO: 277302 - RNA, 25 nt, Human
gggcuggggcgcagugcgcuggugc

SEQ ID NO: 277303 - RNA, 23 nt, Human
gucuccuuguggugaagccuucc

SEQ ID NO: 277304 - RNA, 24 nt, Human
gugcuuggaauuucucugaaauau

SEQ ID NO: 277305 - RNA, 22 nt, Human
guggcucccuggagaaauuucu

SEQ ID NO: 277306 - RNA, 22 nt, Human
uaaaaugggaaaucaguuuuca

SEQ ID NO: 277307 - RNA, 21 nt, Human
uaaacacaagaaaacaggugc

SEQ ID NO: 277308 - RNA, 18 nt, Human
uaagucuuuacuuaacca

SEQ ID NO: 277309 - RNA, 21 nt, Human
uaaugcccagagccucccagg

SEQ ID NO: 277310 - RNA, 25 nt, Human
uagcaaggcaggcgagcgaaggaga

SEQ ID NO: 277311 - RNA, 25 nt, Human
uagcaaggcaggcgagcgaaggaga

SEQ ID NO: 277312 - RNA, 23 nt, Human
uagcugacuuccgaauccuucac

SEQ ID NO: 277313 - RNA, 19 nt, Human
uaggguccaggacagcccg

SEQ ID NO: 277314 - RNA, 21 nt, Human
uaucaucugccaaaauauuaa

SEQ ID NO: 277315 - RNA, 21 nt, Human
ucaacuuauuuucccaccguc

SEQ ID NO: 277316 - RNA, 27 nt, Human
ucacucgcggggugggcgggugaaggu

SEQ ID NO: 277317 - RNA, 20 nt, Human
ucagugguguuuucauaagc

SEQ ID NO: 277318 - RNA, 21 nt, Human
uccccgcgccucguaggggcu

SEQ ID NO: 277319 - RNA, 21 nt, Human
uccccgcgccucguaggggcu

SEQ ID NO: 277320 - RNA, 18 nt, Human
ucccuucccuuccacgaa

SEQ ID NO: 277321 - RNA, 23 nt, Human
uccuaggguccaggacagcccgc

SEQ ID NO: 277322 - RNA, 21 nt, Human
uccugcaggggaggggacugg

SEQ ID NO: 277323 - RNA, 21 nt, Human
ucgcggguccccagccaccac

SEQ ID NO: 277324 - RNA, 22 nt, Human
ucuagagaaugaacaaaaaaau

SEQ ID NO: 277325 - RNA, 19 nt, Human
ucucucagccgccucccgg

SEQ ID NO: 277326 - RNA, 23 nt, Human
ucucucuuuccuuuguugguuuu

SEQ ID NO: 277327 - RNA, 21 nt, Human
ucuuugauccugacccaagcc

SEQ ID NO: 277328 - RNA, 24 nt, Human
ucuuugauccugacccaagccacu

SEQ ID NO: 277329 - RNA, 26 nt, Human
ucuuuuguguguguaggagcagagau

SEQ ID NO: 277330 - RNA, 19 nt, Human
ugaagccuuccgcuaaugc

SEQ ID NO: 277331 - RNA, 20 nt, Human
ugacccaagccacucgugcc

SEQ ID NO: 277332 - RNA, 20 nt, Human
ugacuuccgaauccuucacu

SEQ ID NO: 277333 - RNA, 22 nt, Human
ugaggccgacuucaccaaaucc

SEQ ID NO: 277334 - RNA, 22 nt, Human
ugaggccgacuucaccaaaucc

SEQ ID NO: 277335 - RNA, 19 nt, Human
ugagggacugcggucccuc

SEQ ID NO: 277336 - RNA, 19 nt, Human
ugagggacugcggucccuc

SEQ ID NO: 277337 - RNA, 19 nt, Human
ugauacucugggcguuugc

SEQ ID NO: 277338 - RNA, 24 nt, Human
ugcaagcccgcucagccagacccu

SEQ ID NO: 277339 - RNA, 28 nt, Human
ugcaccgagaacaaauccuccgcacccu

SEQ ID NO: 277340 - RNA, 28 nt, Human
ugcaccgagaacaaauccuccgcacccu

SEQ ID NO: 277341 - RNA, 18 nt, Human
ugcccagagccucccagg

SEQ ID NO: 277342 - RNA, 22 nt, Human
uggaauacucgcuccugucucc

SEQ ID NO: 277343 - RNA, 18 nt, Human
uggcccacugaguguuga

SEQ ID NO: 277344 - RNA, 21 nt, Human
ugggacacgaauaaaacacaa

SEQ ID NO: 277345 - RNA, 18 nt, Human
ugggaggaucagagaugg

SEQ ID NO: 277346 - RNA, 22 nt, Human
ugggaggaucagagaugggagc

SEQ ID NO: 277347 - RNA, 20 nt, Human
ugggcggucccugugcucca

SEQ ID NO: 277348 - RNA, 20 nt, Human
ugggcggucccugugcucca

SEQ ID NO: 277349 - RNA, 18 nt, Human
ugggcgguuggcgcugcc

SEQ ID NO: 277350 - RNA, 18 nt, Human
uggggaggggggcaaacc

SEQ ID NO: 277351 - RNA, 23 nt, Human
uucauccauacauuuucacacca

SEQ ID NO: 277352 - RNA, 25 nt, Human
uuugauucagaguugaagaaacuuu

SEQ ID NO: 277353 - RNA, 23 nt, Human
uuuguguguguaggagcagagau

SEQ ID NO: 277354 - RNA, 23 nt, Human
uuuguguguguaggagcagagau

SEQ ID NO: 277355 - RNA, 19 nt, Human
ucaauccuuucuucuaacu

SEQ ID NO: 277356 - RNA, 30 nt, Human
aaaaaaguagaugacugcagcaaagaagaa

SEQ ID NO: 277357 - RNA, 24 nt, Human
aaaaagaaaaacacaaaucuuaaa

SEQ ID NO: 277358 - RNA, 22 nt, Human
aaaaaguagaugacugcagcaa

SEQ ID NO: 277359 - RNA, 25 nt, Human
aaaaguagaugacugcagcaaagaa

SEQ ID NO: 277360 - RNA, 22 nt, Human
aaacaacaaaagcugaccaaga

SEQ ID NO: 277361 - RNA, 24 nt, Human
aacaaaagcugaccaagaguggua

SEQ ID NO: 277362 - RNA, 21 nt, Human
aacaaaauauuuugcaaacug

SEQ ID NO: 277363 - RNA, 21 nt, Human
aacaacaaaagcugaccaaga

SEQ ID NO: 277364 - RNA, 20 nt, Human
aacauggugaaacgccgucu

SEQ ID NO: 277365 - RNA, 21 nt, Human
aacauggugaaacgccgucuc

SEQ ID NO: 277366 - RNA, 20 nt, Human
aacuguacccuaaacuuuga

SEQ ID NO: 277367 - RNA, 21 nt, Human
aagcaagaaauaucauaaaca

SEQ ID NO: 277368 - RNA, 19 nt, Human
aagcauuagauggcuaacu

SEQ ID NO: 277369 - RNA, 20 nt, Human
aaguauugaagguacuauuu

SEQ ID NO: 277370 - RNA, 18 nt, Human
aaguggccucuugagccc

SEQ ID NO: 277371 - RNA, 22 nt, Human
aaucaguuaaaaaugcauccaa

SEQ ID NO: 277372 - RNA, 18 nt, Human
aauugcuggaaccuggga

SEQ ID NO: 277373 - RNA, 20 nt, Human
aauuuacacaaaauugcagu

SEQ ID NO: 277374 - RNA, 24 nt, Human
acaaaucuuaaaaacuaaagcaag

SEQ ID NO: 277375 - RNA, 25 nt, Human
acacaaaucuuaaaaacuaaagcaa

SEQ ID NO: 277376 - RNA, 18 nt, Human
acaccacugcacuccagc

SEQ ID NO: 277377 - RNA, 20 nt, Human
acaccacugcacuccagccu

SEQ ID NO: 277378 - RNA, 22 nt, Human
acagagcaagacugcuucaaaa

SEQ ID NO: 277379 - RNA, 25 nt, Human
acaguggaaugagaugacuuccaga

SEQ ID NO: 277380 - RNA, 19 nt, Human
accaccagugccagucagc

SEQ ID NO: 277381 - RNA, 19 nt, Human
accacugcacuccagccug

SEQ ID NO: 277382 - RNA, 24 nt, Human
accugaggucaggaguuugagacc

SEQ ID NO: 277383 - RNA, 24 nt, Human
acgccgucucuacuaaaaauacaa

SEQ ID NO: 277384 - RNA, 24 nt, Human
acugcacuccagccuggguaacag

SEQ ID NO: 277385 - RNA, 26 nt, Human
acugcacuccagccuggguaacagag

SEQ ID NO: 277386 - RNA, 24 nt, Human
acuguauauaaacaacaaaagcug

SEQ ID NO: 277387 - RNA, 20 nt, Human
agaagauugcaagggccagg

SEQ ID NO: 277388 - RNA, 22 nt, Human
agaauugcuggaaccugggagg

SEQ ID NO: 277389 - RNA, 18 nt, Human
agagguugcagugagccg

SEQ ID NO: 277390 - RNA, 23 nt, Human
agagguugcagugagccgagauc

SEQ ID NO: 277391 - RNA, 24 nt, Human
agagguugcagugagccgagauca

SEQ ID NO: 277392 - RNA, 24 nt, Human
agcacuuugggaggcugagguagg

SEQ ID NO: 277393 - RNA, 19 nt, Human
agccuggccaacaugguga

SEQ ID NO: 277394 - RNA, 20 nt, Human
aggaguuugagaccagccug

SEQ ID NO: 277395 - RNA, 24 nt, Human
aggcaacaaaauauuuugcaaacu

SEQ ID NO: 277396 - RNA, 21 nt, Human
aggcagagguugcagugagcc

SEQ ID NO: 277397 - RNA, 24 nt, Human
aggcagagguugcagugagccgag

SEQ ID NO: 277398 - RNA, 22 nt, Human
aggcaggagaauugcuggaacc

SEQ ID NO: 277399 - RNA, 24 nt, Human
aggcaggagaauugcuggaaccug

SEQ ID NO: 277400 - RNA, 22 nt, Human
aggcggaucaccugaggucagg

SEQ ID NO: 277401 - RNA, 18 nt, Human
aggcugaggcaggagaau

SEQ ID NO: 277402 - RNA, 21 nt, Human
aggcugaggcaggagaauugc

SEQ ID NO: 277403 - RNA, 24 nt, Human
aggcugagguaggcggaucaccug

SEQ ID NO: 277404 - RNA, 22 nt, Human
agguaggcggaucaccugaggu

SEQ ID NO: 277405 - RNA, 26 nt, Human
agguaggcggaucaccugaggucagg

SEQ ID NO: 277406 - RNA, 24 nt, Human
aggugugguggaucacgccuguaa

SEQ ID NO: 277407 - RNA, 21 nt, Human
aguagaagauugcaagggcca

SEQ ID NO: 277408 - RNA, 23 nt, Human
agucaggcaugauggcaggcgcc

SEQ ID NO: 277409 - RNA, 19 nt, Human
aguggccucuugagcccag

SEQ ID NO: 277410 - RNA, 23 nt, Human
auaaacaacaaaagcugaccaag

SEQ ID NO: 277411 - RNA, 24 nt, Human
aucacaccacugcacuccagccug

SEQ ID NO: 277412 - RNA, 24 nt, Human
aucaccugaggucaggaguuugag

SEQ ID NO: 277413 - RNA, 23 nt, Human
caaaaaugcacgaauacggucga

SEQ ID NO: 277414 - RNA, 22 nt, Human
caaaaauuagucaggcaugaug

SEQ ID NO: 277415 - RNA, 23 nt, Human
caaaucuuaaaaacuaaagcaag

SEQ ID NO: 277416 - RNA, 24 nt, Human
caacauggugaaacgccgucucua

SEQ ID NO: 277417 - RNA, 23 nt, Human
caacuguacccuaaacuuugacc

SEQ ID NO: 277418 - RNA, 24 nt, Human
caacuguacccuaaacuuugaccc

SEQ ID NO: 277419 - RNA, 21 nt, Human
cacaccacugcacuccagccu

SEQ ID NO: 277420 - RNA, 26 nt, Human
caccacugcacuccagccuggguaac

SEQ ID NO: 277421 - RNA, 23 nt, Human
caccugaggucaggaguuugaga

SEQ ID NO: 277422 - RNA, 24 nt, Human
cacgccuguaaucccagcacuuug

SEQ ID NO: 277423 - RNA, 19 nt, Human
cacugcacuccagccuggg

SEQ ID NO: 277424 - RNA, 19 nt, Human
cacugcacuccagccuggg

SEQ ID NO: 277425 - RNA, 22 nt, Human
cacugcacuccagccuggguaa

SEQ ID NO: 277426 - RNA, 23 nt, Human
cacugcacuccagccuggguaac

SEQ ID NO: 277427 - RNA, 24 nt, Human
cacugcacuccagccuggguaaca

SEQ ID NO: 277428 - RNA, 21 nt, Human
cagcaaagaagagauuuauua

SEQ ID NO: 277429 - RNA, 24 nt, Human
cagcacuuugggaggcugagguag

SEQ ID NO: 277430 - RNA, 28 nt, Human
cagcacuuugggaggcugagguaggcgg

SEQ ID NO: 277431 - RNA, 21 nt, Human
caggcgccugucaucccagcu

SEQ ID NO: 277432 - RNA, 20 nt, Human
ccacugcacuccagccuggg

SEQ ID NO: 277433 - RNA, 20 nt, Human
ccacugcacuccagccuggg

SEQ ID NO: 277434 - RNA, 21 nt, Human
ccacugcacuccagccugggu

SEQ ID NO: 277435 - RNA, 22 nt, Human
ccacugcacuccagccugggua

SEQ ID NO: 277436 - RNA, 24 nt, Human
ccacugcacuccagccuggguaac

SEQ ID NO: 277437 - RNA, 25 nt, Human
ccacugcacuccagccuggguaaca

SEQ ID NO: 277438 - RNA, 22 nt, Human
ccugaggucaggaguuugagac

SEQ ID NO: 277439 - RNA, 23 nt, Human
ccuggccaacauggugaaacgcc

SEQ ID NO: 277440 - RNA, 24 nt, Human
ccuggccaacauggugaaacgccg

SEQ ID NO: 277441 - RNA, 25 nt, Human
ccugggaggcagagguugcagugag

SEQ ID NO: 277442 - RNA, 22 nt, Human
ccugucaucccagcuacuaggg

SEQ ID NO: 277443 - RNA, 23 nt, Human
cgccuguaaucccagcacuuugg

SEQ ID NO: 277444 - RNA, 24 nt, Human
cgccuguaaucccagcacuuuggg

SEQ ID NO: 277445 - RNA, 24 nt, Human
cggaucaccugaggucaggaguuu

SEQ ID NO: 277446 - RNA, 21 nt, Human
cuaaagcaagucagggaagcc

SEQ ID NO: 277447 - RNA, 23 nt, Human
cuagcaucuuucuacaucuuucc

SEQ ID NO: 277448 - RNA, 21 nt, Human
cucuuccuuucaagguaucug

SEQ ID NO: 277449 - RNA, 22 nt, Human
cucuuccuuucaagguaucugu

SEQ ID NO: 277450 - RNA, 23 nt, Human
gagaccagccuggccaacauggu

SEQ ID NO: 277451 - RNA, 23 nt, Human
gagaucacaccacugcacuccag

SEQ ID NO: 277452 - RNA, 24 nt, Human
gaucaccugaggucaggaguuuga

SEQ ID NO: 277453 - RNA, 24 nt, Human
gauggcuaacuaccaaacaaguua

SEQ ID NO: 277454 - RNA, 19 nt, Human
gauuuauuagcucuuccuu

SEQ ID NO: 277455 - RNA, 24 nt, Human
gcacuccagccuggguaacagagc

SEQ ID NO: 277456 - RNA, 19 nt, Human
gccaacauggugaaacgcc

SEQ ID NO: 277457 - RNA, 24 nt, Human
gccaacauggugaaacgccgucuc

SEQ ID NO: 277458 - RNA, 20 nt, Human
gccgagaucacaccacugca

SEQ ID NO: 277459 - RNA, 20 nt, Human
gcuaggcauauuaguaacug

SEQ ID NO: 277460 - RNA, 18 nt, Human
gcugggcucgugguugcc

SEQ ID NO: 277461 - RNA, 21 nt, Human
ggagaauugcuggaaccuggg

SEQ ID NO: 277462 - RNA, 22 nt, Human
ggaucaccugaggucaggaguu

SEQ ID NO: 277463 - RNA, 22 nt, Human
ggaucaccugaggucaggaguu

SEQ ID NO: 277464 - RNA, 25 nt, Human
ggaucaccugaggucaggaguuuga

SEQ ID NO: 277465 - RNA, 19 nt, Human
gggaagccuggaaagauac

SEQ ID NO: 277466 - RNA, 21 nt, Human
gggaggcugaggcaggagaau

SEQ ID NO: 277467 - RNA, 23 nt, Human
gguacuugugcuaggcauauuag

SEQ ID NO: 277468 - RNA, 19 nt, Human
ggucaggaguuugagacca

SEQ ID NO: 277469 - RNA, 24 nt, Human
gguggaucacgccuguaaucccag

SEQ ID NO: 277470 - RNA, 22 nt, Human
gugguacuugugcuaggcauau

SEQ ID NO: 277471 - RNA, 19 nt, Human
guugcagugagccgagauc

SEQ ID NO: 277472 - RNA, 21 nt, Human
uaaaaaaaaaguagaugacug

SEQ ID NO: 277473 - RNA, 20 nt, Human
uaaguggccucuugagccca

SEQ ID NO: 277474 - RNA, 21 nt, Human
uaauaccaacaguggaaugag

SEQ ID NO: 277475 - RNA, 18 nt, Human
uacuagggaggcugaggc

SEQ ID NO: 277476 - RNA, 19 nt, Human
uacuagggaggcugaggca

SEQ ID NO: 277477 - RNA, 21 nt, Human
uacuguauauaaacaacaaaa

SEQ ID NO: 277478 - RNA, 18 nt, Human
uagaaggaaauccaggcu

SEQ ID NO: 277479 - RNA, 24 nt, Human
uaggcggaucaccugaggucagga

SEQ ID NO: 277480 - RNA, 26 nt, Human
uauauaaacaacaaaagcugaccaag

SEQ ID NO: 277481 - RNA, 22 nt, Human
uauuaugccaaaacuguucacc

SEQ ID NO: 277482 - RNA, 18 nt, Human
ucaaugcaccacaagagg

SEQ ID NO: 277483 - RNA, 23 nt, Human
ucacaccacugcacuccagccug

SEQ ID NO: 277484 - RNA, 23 nt, Human
ucacgccuguaaucccagcacuu

SEQ ID NO: 277485 - RNA, 23 nt, Human
ucaguuaaaaaugcauccaaaaa

SEQ ID NO: 277486 - RNA, 23 nt, Human
ucccuaaguggccucuugagccc

SEQ ID NO: 277487 - RNA, 19 nt, Human
ucucccauuuuucaggcaa

SEQ ID NO: 277488 - RNA, 21 nt, Human
ucucuacuaaaaauacaaaaa

SEQ ID NO: 277489 - RNA, 21 nt, Human
ucucugagcaauucccuucug

SEQ ID NO: 277490 - RNA, 23 nt, Human
ugaaacacccagccgucagcuau

SEQ ID NO: 277491 - RNA, 23 nt, Human
ugaccaagagugguacuugugcu

SEQ ID NO: 277492 - RNA, 23 nt, Human
ugagaccagccuggccaacaugg

SEQ ID NO: 277493 - RNA, 19 nt, Human
ugaggcaggagaauugcug

SEQ ID NO: 277494 - RNA, 24 nt, Human
ugaggcaggagaauugcuggaacc

SEQ ID NO: 277495 - RNA, 24 nt, Human
ugaggcaggagaauugcuggaacc

SEQ ID NO: 277496 - RNA, 20 nt, Human
ugagguaggcggaucaccug

SEQ ID NO: 277497 - RNA, 24 nt, Human
ugagguaggcggaucaccugaggu

SEQ ID NO: 277498 - RNA, 26 nt, Human
ugagguaggcggaucaccugagguca

SEQ ID NO: 277499 - RNA, 18 nt, Human
ugaggucaggaguuugag

SEQ ID NO: 277500 - RNA, 18 nt, Human
ugcaguccggggcgcuga

SEQ ID NO: 277501 - RNA, 22 nt, Human
ugccaugauaguaaucauaaga

SEQ ID NO: 277502 - RNA, 25 nt, Human
uggaaaaagaaaaacacaaaucuua

SEQ ID NO: 277503 - RNA, 22 nt, Human
uggaucacgccuguaaucccag

SEQ ID NO: 277504 - RNA, 24 nt, Human
uggaucacgccuguaaucccagca

SEQ ID NO: 277505 - RNA, 18 nt, Human
uggccaacauggugaaac

SEQ ID NO: 277506 - RNA, 18 nt, Human
uggccucuugagcccagu

SEQ ID NO: 277507 - RNA, 25 nt, Human
uggcuaacuaccaaacaaguuaagu

SEQ ID NO: 277508 - RNA, 24 nt, Human
ugggaggcagagguugcagugagc

SEQ ID NO: 277509 - RNA, 18 nt, Human
ugggaggcugagguaggc

SEQ ID NO: 277510 - RNA, 19 nt, Human
ugggaggcugagguaggcg

SEQ ID NO: 277511 - RNA, 24 nt, Human
ugggaggcugagguaggcggauca

SEQ ID NO: 277512 - RNA, 21 nt, Human
uggugcaguccggggcgcuga

SEQ ID NO: 277513 - RNA, 24 nt, Human
ugguggaucacgccuguaauccca

SEQ ID NO: 277514 - RNA, 23 nt, Human
uucucugagcaauucccuucuga

SEQ ID NO: 277515 - RNA, 20 nt, Human
uugaaugauaccuagccaac

SEQ ID NO: 277516 - RNA, 21 nt, Human
uugauaacauguuagaaggaa

SEQ ID NO: 277517 - RNA, 21 nt, Human
uugcaagggccagguguggug

SEQ ID NO: 277518 - RNA, 18 nt, Human
uugcagugagccgagauc

SEQ ID NO: 277519 - RNA, 19 nt, Human
uugcagugagccgagauca

SEQ ID NO: 277520 - RNA, 20 nt, Human
uugcagugagccgagaucac

SEQ ID NO: 277521 - RNA, 18 nt, Human
uugcuggaaccugggagg

SEQ ID NO: 277522 - RNA, 23 nt, Human
uuggcugggcucgugguugccgg

SEQ ID NO: 277523 - RNA, 25 nt, Human
uugggaggcugagguaggcggauca

SEQ ID NO: 277524 - RNA, 18 nt, Human
uuucuagcaucuuucuac

SEQ ID NO: 277525 - RNA, 25 nt, Human
uuuguaauugaaagcaagaaauauc

SEQ ID NO: 277526 - RNA, 18 nt, Human
accagcgcacuccccagu

SEQ ID NO: 277527 - RNA, 19 nt, Human
accgcucuaggaguugcgc

SEQ ID NO: 277528 - RNA, 23 nt, Human
acugggacccgcgucuccccaag

SEQ ID NO: 277529 - RNA, 21 nt, Human
caguaggagccgcaggacugg

SEQ ID NO: 277530 - RNA, 29 nt, Human
ccagcaaucuuccgaccagcgcacucccc

SEQ ID NO: 277531 - RNA, 25 nt, Human
gacccgcgucuccccaaggaccgcu

SEQ ID NO: 277532 - RNA, 21 nt, Human
uccgaccagcgcacuccccag

SEQ ID NO: 277533 - RNA, 22 nt, Human
uccuucucucugauuugauggg

SEQ ID NO: 277534 - RNA, 21 nt, Human
ucucucugauuugaugggugg

SEQ ID NO: 277535 - RNA, 21 nt, Human
ucucuuugccugcgccugggc

SEQ ID NO: 277536 - RNA, 23 nt, Human
ucugauuugauggguggcugggg

SEQ ID NO: 277537 - RNA, 19 nt, Human
ugugcugcuuacgugaugc

SEQ ID NO: 277538 - RNA, 18 nt, Human
aagugcugucuauacagg

SEQ ID NO: 277539 - RNA, 20 nt, Human
aggcugaaucagcacugcca

SEQ ID NO: 277540 - RNA, 22 nt, Human
aucucugccugggcuggaacag

SEQ ID NO: 277541 - RNA, 21 nt, Human
caagaagggacaggagucuug

SEQ ID NO: 277542 - RNA, 21 nt, Human
caccaaaagccucccaggcag

SEQ ID NO: 277543 - RNA, 20 nt, Human
caccugaucucugccugggc

SEQ ID NO: 277544 - RNA, 20 nt, Human
cagcuggagcacugugucca

SEQ ID NO: 277545 - RNA, 23 nt, Human
cauucucaucccaagaagggaca

SEQ ID NO: 277546 - RNA, 24 nt, Human
ccaccaaaagccucccaggcagcu

SEQ ID NO: 277547 - RNA, 22 nt, Human
ccagccucugcccaccugaucu

SEQ ID NO: 277548 - RNA, 19 nt, Human
ccucugcccaccugaucuc

SEQ ID NO: 277549 - RNA, 23 nt, Human
gaagggacaggagucuuggccca

SEQ ID NO: 277550 - RNA, 22 nt, Human
ggcccagaggcuguggggacca

SEQ ID NO: 277551 - RNA, 24 nt, Human
ggggauggccaggcugaaucagca

SEQ ID NO: 277552 - RNA, 23 nt, Human
ucauaccuuuuauuacaaaaauc

SEQ ID NO: 277553 - RNA, 20 nt, Human
ucccaagaagggacaggagu

SEQ ID NO: 277554 - RNA, 20 nt, Human
uccuaaggagccaagugcug

SEQ ID NO: 277555 - RNA, 22 nt, Human
ucugcccaccugaucucugccu

SEQ ID NO: 277556 - RNA, 24 nt, Human
uggggaccaccaaaagccucccag

SEQ ID NO: 277557 - RNA, 19 nt, Human
uguauaaagucgauaggac

SEQ ID NO: 277558 - RNA, 18 nt, Human
uguccaaaccaaggaagu

SEQ ID NO: 277559 - RNA, 20 nt, Human
aagauucugguuugcuuuuc

SEQ ID NO: 277560 - RNA, 18 nt, Human
aagcacccugcagcaagg

SEQ ID NO: 277561 - RNA, 23 nt, Human
aagcacccugcagcaaggucuug

SEQ ID NO: 277562 - RNA, 20 nt, Human
agacaggaacagaacaaauc

SEQ ID NO: 277563 - RNA, 24 nt, Human
agacaggaacagaacaaaucagag

SEQ ID NO: 277564 - RNA, 23 nt, Human
agagagaagugcagaguucgauu

SEQ ID NO: 277565 - RNA, 24 nt, Human
agagagaguguguagggggaauca

SEQ ID NO: 277566 - RNA, 21 nt, Human
agaggaagagagguugcaacc

SEQ ID NO: 277567 - RNA, 27 nt, Human
aggaaguaaguaggugauggggagaaa

SEQ ID NO: 277568 - RNA, 27 nt, Human
aggggaggaggggaaguucggugaugg

SEQ ID NO: 277569 - RNA, 18 nt, Human
aggguugugggggagaca

SEQ ID NO: 277570 - RNA, 23 nt, Human
agguauuuacaagaaggcucagg

SEQ ID NO: 277571 - RNA, 23 nt, Human
aggucuugggguggccggacugc

SEQ ID NO: 277572 - RNA, 22 nt, Human
cacgaucaggauccgaagcacc

SEQ ID NO: 277573 - RNA, 19 nt, Human
cacucugccaaucucagcc

SEQ ID NO: 277574 - RNA, 20 nt, Human
cagcccaggguucccgggcc

SEQ ID NO: 277575 - RNA, 21 nt, Human
cauucaaacuggaccuugacu

SEQ ID NO: 277576 - RNA, 18 nt, Human
cccugggacagagggcuc

SEQ ID NO: 277577 - RNA, 21 nt, Human
cgaagcacccugcagcaaggu

SEQ ID NO: 277578 - RNA, 21 nt, Human
cucagggggccagaggcucau

SEQ ID NO: 277579 - RNA, 22 nt, Human
gacagagugguuuaaauagggg

SEQ ID NO: 277580 - RNA, 19 nt, Human
gaccccgcgacucacgauc

SEQ ID NO: 277581 - RNA, 19 nt, Human
gaggguugugggggagaca

SEQ ID NO: 277582 - RNA, 18 nt, Human
gaucaggauccgaagcac

SEQ ID NO: 277583 - RNA, 24 nt, Human
gcaugggaagagcagagagagugu

SEQ ID NO: 277584 - RNA, 22 nt, Human
gcccaggguucccgggccgcac

SEQ ID NO: 277585 - RNA, 19 nt, Human
gcggcacuggagcagguac

SEQ ID NO: 277586 - RNA, 21 nt, Human
gggcagcggcagaaggccggc

SEQ ID NO: 277587 - RNA, 21 nt, Human
ggggaaguucggugauggggg

SEQ ID NO: 277588 - RNA, 20 nt, Human
ggggcaccgagucgcaaaga

SEQ ID NO: 277589 - RNA, 23 nt, Human
ggugauggggagaaacggggcac

SEQ ID NO: 277590 - RNA, 18 nt, Human
gguuuaaauaggggagga

SEQ ID NO: 277591 - RNA, 19 nt, Human
gguuuaaauaggggaggag

SEQ ID NO: 277592 - RNA, 22 nt, Human
gugguuuaaauaggggaggagg

SEQ ID NO: 277593 - RNA, 20 nt, Human
uauaacaauauaaauaagaa

SEQ ID NO: 277594 - RNA, 22 nt, Human
ucaaacuggaccuugacucaaa

SEQ ID NO: 277595 - RNA, 24 nt, Human
ucaucuuggaauauuuuauaacaa

SEQ ID NO: 277596 - RNA, 24 nt, Human
ucccucggcaguaauauuucacuc

SEQ ID NO: 277597 - RNA, 19 nt, Human
ucccugggacagagggcuc

SEQ ID NO: 277598 - RNA, 18 nt, Human
uccgaagcacccugcagc

SEQ ID NO: 277599 - RNA, 21 nt, Human
ucuuggaauauuuuauaacaa

SEQ ID NO: 277600 - RNA, 19 nt, Human
ugcccugcuacguucccuc

SEQ ID NO: 277601 - RNA, 27 nt, Human
ugcuacguucccucggcaguaauauuu

SEQ ID NO: 277602 - RNA, 20 nt, Human
ugggaagagcagagagagug

SEQ ID NO: 277603 - RNA, 20 nt, Human
ugggaagagcagagagaguu

SEQ ID NO: 277604 - RNA, 19 nt, Human
uguacaagggggcagcggc

SEQ ID NO: 277605 - RNA, 18 nt, Human
ugugggggagacagagug

SEQ ID NO: 277606 - RNA, 24 nt, Human
uguguagggggaaucagccugcag

SEQ ID NO: 277607 - RNA, 22 nt, Human
uuugcccgagccuuucccuggg

SEQ ID NO: 277608 - RNA, 23 nt, Human
aaagcagaggaagaggaaggccc

SEQ ID NO: 277609 - RNA, 21 nt, Human
agaggaagaggaaggcccugg

SEQ ID NO: 277610 - RNA, 19 nt, Human
aggaagaggaaggggugcc

SEQ ID NO: 277611 - RNA, 20 nt, Human
aggcaaggcuguggggcugg

SEQ ID NO: 277612 - RNA, 24 nt, Human
agggcagccgggaagggucagugg

SEQ ID NO: 277613 - RNA, 22 nt, Human
ccauggguccuccccucccucu

SEQ ID NO: 277614 - RNA, 19 nt, Human
cccgggcuaggggggagag

SEQ ID NO: 277615 - RNA, 23 nt, Human
ccugcaacccuuucaccccuucu

SEQ ID NO: 277616 - RNA, 20 nt, Human
cgccccucuccaagcaacag

SEQ ID NO: 277617 - RNA, 24 nt, Human
cgggaccugcaacccuuucacccc

SEQ ID NO: 277618 - RNA, 23 nt, Human
cucuccaggucccgccccucucc

SEQ ID NO: 277619 - RNA, 18 nt, Human
gaggaaggcccuggucuc

SEQ ID NO: 277620 - RNA, 18 nt, Human
gcccagggccccuuccac

SEQ ID NO: 277621 - RNA, 18 nt, Human
gcccagggccccuuccac

SEQ ID NO: 277622 - RNA, 19 nt, Human
ggcagccgggaagggucag

SEQ ID NO: 277623 - RNA, 24 nt, Human
ggcuaggggggagagccauggguc

SEQ ID NO: 277624 - RNA, 22 nt, Human
ggucuacaggcucggcccaggg

SEQ ID NO: 277625 - RNA, 18 nt, Human
gguggucaggcaaggcug

SEQ ID NO: 277626 - RNA, 24 nt, Human
guaagcuggggagggagggcagcc

SEQ ID NO: 277627 - RNA, 20 nt, Human
guggucaggcaaggcugugg

SEQ ID NO: 277628 - RNA, 18 nt, Human
uacaggcucggcccaggg

SEQ ID NO: 277629 - RNA, 23 nt, Human
uauuaaauaaaagcagaggaaga

SEQ ID NO: 277630 - RNA, 21 nt, Human
ucuccaggucccgccccucuc

SEQ ID NO: 277631 - RNA, 21 nt, Human
ugcgugcugggcuugaggugu

SEQ ID NO: 277632 - RNA, 18 nt, Human
ugggcagggagggagccu

SEQ ID NO: 277633 - RNA, 20 nt, Human
ugggcagggagggagccucc

SEQ ID NO: 277634 - RNA, 22 nt, Human
uggucgggaccugcaacccuuu

SEQ ID NO: 277635 - RNA, 19 nt, Human
uucaccccuucuggaagac

SEQ ID NO: 277636 - RNA, 21 nt, Human
aaaagccagaauaucuaagua

SEQ ID NO: 277637 - RNA, 23 nt, Human
aaacaaggcaggcacuuucauac

SEQ ID NO: 277638 - RNA, 20 nt, Human
aaacaaguacaagccucugg

SEQ ID NO: 277639 - RNA, 18 nt, Human
aaacccaggccccaucaa

SEQ ID NO: 277640 - RNA, 19 nt, Human
aaagccaaagaggguggga

SEQ ID NO: 277641 - RNA, 20 nt, Human
aacaaaagccgaauguggug

SEQ ID NO: 277642 - RNA, 18 nt, Human
aacaagagagggagaggg

SEQ ID NO: 277643 - RNA, 22 nt, Human
aacacaggaaaaggggaagaga

SEQ ID NO: 277644 - RNA, 20 nt, Human
aacucugugagcucaggauc

SEQ ID NO: 277645 - RNA, 20 nt, Human
aagugaaauauugaauguca

SEQ ID NO: 277646 - RNA, 20 nt, Human
acagaaaguugacuugggcc

SEQ ID NO: 277647 - RNA, 21 nt, Human
acagaaucaacaaaagccgaa

SEQ ID NO: 277648 - RNA, 20 nt, Human
acauuaaacccagggcuaca

SEQ ID NO: 277649 - RNA, 18 nt, Human
acccagugcccgccauca

SEQ ID NO: 277650 - RNA, 19 nt, Human
accccaccacuuugaucuc

SEQ ID NO: 277651 - RNA, 23 nt, Human
accuaccuacaccaaaucacaca

SEQ ID NO: 277652 - RNA, 21 nt, Human
acucugugagcucaggaucua

SEQ ID NO: 277653 - RNA, 23 nt, Human
acucuucagccucaaccuucuua

SEQ ID NO: 277654 - RNA, 23 nt, Human
acuuuagugggaucugagggauu

SEQ ID NO: 277655 - RNA, 18 nt, Human
agaaagacuugaggcugg

SEQ ID NO: 277656 - RNA, 21 nt, Human
agagacacagaaugauguggc

SEQ ID NO: 277657 - RNA, 22 nt, Human
agagcauacccagcauuccagc

SEQ ID NO: 277658 - RNA, 19 nt, Human
agaggaggggaacgagugg

SEQ ID NO: 277659 - RNA, 19 nt, Human
agagggagagggagaccac

SEQ ID NO: 277660 - RNA, 21 nt, Human
agcaaugaaaagacucaggaa

SEQ ID NO: 277661 - RNA, 20 nt, Human
agcauccacacagggaaauu

SEQ ID NO: 277662 - RNA, 21 nt, Human
aggauggaccagcugagggcu

SEQ ID NO: 277663 - RNA, 21 nt, Human
aggcagggaggaccuagagua

SEQ ID NO: 277664 - RNA, 18 nt, Human
agggagacaggccagcag

SEQ ID NO: 277665 - RNA, 24 nt, Human
agggagagggaaagggugugagau

SEQ ID NO: 277666 - RNA, 23 nt, Human
aggggaagagaguggcaaauauc

SEQ ID NO: 277667 - RNA, 19 nt, Human
agguagcaaugaaaagacu

SEQ ID NO: 277668 - RNA, 20 nt, Human
aggugucacccaagggcagc

SEQ ID NO: 277669 - RNA, 18 nt, Human
aguguccaucugucuugg

SEQ ID NO: 277670 - RNA, 19 nt, Human
auuacaaaucccacuggac

SEQ ID NO: 277671 - RNA, 24 nt, Human
cacacacacgcacucacagcugca

SEQ ID NO: 277672 - RNA, 23 nt, Human
cacacacgcacucacagcugcag

SEQ ID NO: 277673 - RNA, 21 nt, Human
cacagccauagagcucugucc

SEQ ID NO: 277674 - RNA, 21 nt, Human
cacagggaaauuccuugugcu

SEQ ID NO: 277675 - RNA, 22 nt, Human
cacuacaaaaacacaggaaaag

SEQ ID NO: 277676 - RNA, 24 nt, Human
cacuacaaaaacacaggaaaaggg

SEQ ID NO: 277677 - RNA, 25 nt, Human
cacucccuacagacugaacuggggg

SEQ ID NO: 277678 - RNA, 18 nt, Human
cacucuucagccucaacc

SEQ ID NO: 277679 - RNA, 19 nt, Human
cacuggacagaaaguugac

SEQ ID NO: 277680 - RNA, 22 nt, Human
cacuuggcuugcaggcugaggc

SEQ ID NO: 277681 - RNA, 23 nt, Human
cagacugaacugggggugggggg

SEQ ID NO: 277682 - RNA, 18 nt, Human
cagcaguggggacuggga

SEQ ID NO: 277683 - RNA, 19 nt, Human
cagcaguggggacugggac

SEQ ID NO: 277684 - RNA, 25 nt, Human
cagcaguggggacugggacccacag

SEQ ID NO: 277685 - RNA, 19 nt, Human
caguaaagcaggggcaugg

SEQ ID NO: 277686 - RNA, 19 nt, Human
cauagaccccagauggccu

SEQ ID NO: 277687 - RNA, 18 nt, Human
ccacaaagcagcucggaa

SEQ ID NO: 277688 - RNA, 23 nt, Human
ccacaaagcagcucggaagagga

SEQ ID NO: 277689 - RNA, 21 nt, Human
ccaccacuuugaucucagaac

SEQ ID NO: 277690 - RNA, 20 nt, Human
ccagugcccgccaucacagc

SEQ ID NO: 277691 - RNA, 19 nt, Human
cccaagggaugagaaagac

SEQ ID NO: 277692 - RNA, 22 nt, Human
cccacagccauagagcucuguc

SEQ ID NO: 277693 - RNA, 24 nt, Human
cccagaccacagggccuuuuaaaa

SEQ ID NO: 277694 - RNA, 26 nt, Human
ccccugagaaacacagaucagaaggc

SEQ ID NO: 277695 - RNA, 21 nt, Human
ccgggaguggcggcucagagg

SEQ ID NO: 277696 - RNA, 27 nt, Human
ccuacagacugaacugggggugggggg

SEQ ID NO: 277697 - RNA, 20 nt, Human
ccucacucuucagccucaac

SEQ ID NO: 277698 - RNA, 21 nt, Human
ccuggagcccacaaagcagcu

SEQ ID NO: 277699 - RNA, 23 nt, Human
ccuuccacaccuugacacuuuag

SEQ ID NO: 277700 - RNA, 20 nt, Human
cggaggugucacccaagggc

SEQ ID NO: 277701 - RNA, 21 nt, Human
cggugcaaaggaucgaucaag

SEQ ID NO: 277702 - RNA, 19 nt, Human
cuagcagcaggugcuccca

SEQ ID NO: 277703 - RNA, 23 nt, Human
cuauccaauuugcacuucccaag

SEQ ID NO: 277704 - RNA, 20 nt, Human
cuccccagaccacagggccu

SEQ ID NO: 277705 - RNA, 22 nt, Human
cucggaggugucacccaagggc

SEQ ID NO: 277706 - RNA, 19 nt, Human
cucugggucuggcugccuc

SEQ ID NO: 277707 - RNA, 22 nt, Human
cugcaguuugugcccuugcucc

SEQ ID NO: 277708 - RNA, 21 nt, Human
cugggauugccaaaaaaugac

SEQ ID NO: 277709 - RNA, 21 nt, Human
cuuacauuuauuuauugacuu

SEQ ID NO: 277710 - RNA, 21 nt, Human
cuucacucccuacagacugaa

SEQ ID NO: 277711 - RNA, 30 nt, Human
cuucagccucaaccuucuuauucccuagcc

SEQ ID NO: 277712 - RNA, 25 nt, Human
cuuccuccuuuguugaaaccaccuc

SEQ ID NO: 277713 - RNA, 18 nt, Human
cuuggguacccagugccc

SEQ ID NO: 277714 - RNA, 23 nt, Human
cuuuugucacuuaucauuucucc

SEQ ID NO: 277715 - RNA, 18 nt, Human
gaacacuuggcuugcagg

SEQ ID NO: 277716 - RNA, 20 nt, Human
gaagaggaggggaacgagug

SEQ ID NO: 277717 - RNA, 18 nt, Human
gaauucccuagggagaca

SEQ ID NO: 277718 - RNA, 20 nt, Human
gaccccaccacuuugaucuc

SEQ ID NO: 277719 - RNA, 21 nt, Human
gacuugaggcugggauuuccu

SEQ ID NO: 277720 - RNA, 20 nt, Human
gagagggagagggagaccac

SEQ ID NO: 277721 - RNA, 19 nt, Human
gagcucuguccuuuuucca

SEQ ID NO: 277722 - RNA, 19 nt, Human
gagggugggaaagcuggaa

SEQ ID NO: 277723 - RNA, 18 nt, Human
gauauuggaaaggaaaag

SEQ ID NO: 277724 - RNA, 24 nt, Human
gcaacaguaaagcaggggcauggg

SEQ ID NO: 277725 - RNA, 19 nt, Human
gcaaugaaaagacucagga

SEQ ID NO: 277726 - RNA, 18 nt, Human
gcggcuccauugccccuc

SEQ ID NO: 277727 - RNA, 21 nt, Human
gcucugggucuggcugccucu

SEQ ID NO: 277728 - RNA, 18 nt, Human
gcugcaguuugugcccuu

SEQ ID NO: 277729 - RNA, 23 nt, Human
gcugcuuuugucacuuaucauuu

SEQ ID NO: 277730 - RNA, 22 nt, Human
gcuugccuugcuguuuucaacc

SEQ ID NO: 277731 - RNA, 24 nt, Human
ggaaagggcaaccuugccucucug

SEQ ID NO: 277732 - RNA, 19 nt, Human
ggaauucccuagggagaca

SEQ ID NO: 277733 - RNA, 19 nt, Human
ggacagaaaguugacuugg

SEQ ID NO: 277734 - RNA, 23 nt, Human
ggcaaacaaguacaagccucugg

SEQ ID NO: 277735 - RNA, 19 nt, Human
ggcaaccuugccucucuga

SEQ ID NO: 277736 - RNA, 21 nt, Human
gggaaccuucacuuggguacc

SEQ ID NO: 277737 - RNA, 18 nt, Human
gggaagugggagacagga

SEQ ID NO: 277738 - RNA, 26 nt, Human
ggguaggaggacagcauggggcuaua

SEQ ID NO: 277739 - RNA, 22 nt, Human
guggcaaacagaccuaccuaca

SEQ ID NO: 277740 - RNA, 22 nt, Human
uaaaaggcaaacaaguacaagc

SEQ ID NO: 277741 - RNA, 19 nt, Human
uaccaaggagccgcugccu

SEQ ID NO: 277742 - RNA, 23 nt, Human
uaccacuaggggcaacauuaauu

SEQ ID NO: 277743 - RNA, 19 nt, Human
uacccagugcccgccauca

SEQ ID NO: 277744 - RNA, 23 nt, Human
uagcuuauucucuugcuuuucuc

SEQ ID NO: 277745 - RNA, 23 nt, Human
uauaaacucugugagcucaggau

SEQ ID NO: 277746 - RNA, 21 nt, Human
ucaaccaagcgcagaauguaa

SEQ ID NO: 277747 - RNA, 20 nt, Human
ucaaguggcaaacagaccua

SEQ ID NO: 277748 - RNA, 23 nt, Human
ucacacacacgcacucacagcug

SEQ ID NO: 277749 - RNA, 19 nt, Human
ucacucccuacagacugaa

SEQ ID NO: 277750 - RNA, 23 nt, Human
ucauagguuaugauuuccccgga

SEQ ID NO: 277751 - RNA, 23 nt, Human
uccacaugggauucugcuagggc

SEQ ID NO: 277752 - RNA, 21 nt, Human
uccagucacauuucugauuau

SEQ ID NO: 277753 - RNA, 18 nt, Human
uccccugggguccacuuu

SEQ ID NO: 277754 - RNA, 21 nt, Human
uccugaggaaugcuagccagc

SEQ ID NO: 277755 - RNA, 18 nt, Human
uccuugugcugcuuuugu

SEQ ID NO: 277756 - RNA, 21 nt, Human
ucggaagaggaggggaacgag

SEQ ID NO: 277757 - RNA, 18 nt, Human
ucucauuauguucucccu

SEQ ID NO: 277758 - RNA, 20 nt, Human
ucuccacguaagagucugug

SEQ ID NO: 277759 - RNA, 19 nt, Human
ucucucaccuauauuucag

SEQ ID NO: 277760 - RNA, 19 nt, Human
ucucugaugguccugaccu

SEQ ID NO: 277761 - RNA, 25 nt, Human
ucugggguaggaggacagcaugggg

SEQ ID NO: 277762 - RNA, 21 nt, Human
ucuucagccucaaccuucuua

SEQ ID NO: 277763 - RNA, 25 nt, Human
ucuucagccucaaccuucuuauucc

SEQ ID NO: 277764 - RNA, 21 nt, Human
ugaaaagacucaggaagcgaa

SEQ ID NO: 277765 - RNA, 24 nt, Human
ugaacacuuggcuugcaggcugag

SEQ ID NO: 277766 - RNA, 22 nt, Human
ugaacagaaucaacaaaagccg

SEQ ID NO: 277767 - RNA, 19 nt, Human
ugaacuggggguggggggc

SEQ ID NO: 277768 - RNA, 20 nt, Human
ugaagaguccucacucuuca

SEQ ID NO: 277769 - RNA, 23 nt, Human
ugacuugggccuuaggcagggag

SEQ ID NO: 277770 - RNA, 24 nt, Human
ugagaaaagccagaauaucuaagu

SEQ ID NO: 277771 - RNA, 18 nt, Human
ugagaaacacagaucaga

SEQ ID NO: 277772 - RNA, 24 nt, Human
ugaguacaggccuggagcccacaa

SEQ ID NO: 277773 - RNA, 24 nt, Human
ugagucaaugcuguauaccccaca

SEQ ID NO: 277774 - RNA, 19 nt, Human
ugauugucagcguagccuu

SEQ ID NO: 277775 - RNA, 19 nt, Human
ugauuugacauuaaaccca

SEQ ID NO: 277776 - RNA, 19 nt, Human
ugcagguccccugagaaac

SEQ ID NO: 277777 - RNA, 24 nt, Human
ugcuccuaccuaaaaggcaaacaa

SEQ ID NO: 277778 - RNA, 23 nt, Human
ugcuuuguuuauaaagaugcuuu

SEQ ID NO: 277779 - RNA, 28 nt, Human
uggacagaaaguugacuugggccuuagg

SEQ ID NO: 277780 - RNA, 18 nt, Human
uggauuacaaaucccacu

SEQ ID NO: 277781 - RNA, 18 nt, Human
uggccucagggggcugcc

SEQ ID NO: 277782 - RNA, 21 nt, Human
ugggaucugagggauuucucc

SEQ ID NO: 277783 - RNA, 21 nt, Human
ugggauucugcuagggcuagg

SEQ ID NO: 277784 - RNA, 22 nt, Human
ugggauugccaaaaaaugacca

SEQ ID NO: 277785 - RNA, 23 nt, Human
ugggauuuccuagggguugacau

SEQ ID NO: 277786 - RNA, 22 nt, Human
ugggcauagaccccagauggcc

SEQ ID NO: 277787 - RNA, 20 nt, Human
uggggguggggggcacccau

SEQ ID NO: 277788 - RNA, 24 nt, Human
ugggguaggaggacagcauggggc

SEQ ID NO: 277789 - RNA, 19 nt, Human
ugucacuuaucauuucucc

SEQ ID NO: 277790 - RNA, 24 nt, Human
ugugaaaaugcaaaaaaauuuuua

SEQ ID NO: 277791 - RNA, 25 nt, Human
uguguacacagaaauauaaggugca

SEQ ID NO: 277792 - RNA, 18 nt, Human
uuacacagcucacugcug

SEQ ID NO: 277793 - RNA, 25 nt, Human
uuagcuuauucucuugcuuuucuca

SEQ ID NO: 277794 - RNA, 27 nt, Human
uuccagccccaggaacaaacccaggcc

SEQ ID NO: 277795 - RNA, 22 nt, Human
uuccugaggaaugcuagccagc

SEQ ID NO: 277796 - RNA, 18 nt, Human
uucucauuauguucuccc

SEQ ID NO: 277797 - RNA, 19 nt, Human
uucuuagguguggaaugcc

SEQ ID NO: 277798 - RNA, 20 nt, Human
uugucucucaccuauauuuc

SEQ ID NO: 277799 - RNA, 18 nt, Human
uuguuuuguuuuuaauug

SEQ ID NO: 277800 - RNA, 28 nt, Human
uuucccaaaacuaguucuucccuugccg

SEQ ID NO: 277801 - RNA, 21 nt, Human
uuucucacugugaacacuugg

SEQ ID NO: 277802 - RNA, 19 nt, Human
uuuuuacucacaaguggcu

SEQ ID NO: 277803 - RNA, 21 nt, Human
uuuuuuaacuauaaacucugu

SEQ ID NO: 277804 - RNA, 22 nt, Human
uuuuuuaacuauaaacucugug

SEQ ID NO: 277805 - RNA, 21 nt, Human
aacagauaaggagaaaccaga

SEQ ID NO: 277806 - RNA, 19 nt, Human
aagcggccucgaagcgggu

SEQ ID NO: 277807 - RNA, 19 nt, Human
acgccgaggugggagcggc

SEQ ID NO: 277808 - RNA, 24 nt, Human
ccggcgcggagggcagggcgcggg

SEQ ID NO: 277809 - RNA, 23 nt, Human
ccuacuagucuuuuaauugcuau

SEQ ID NO: 277810 - RNA, 20 nt, Human
cgccgaggugggagcggcga

SEQ ID NO: 277811 - RNA, 23 nt, Human
cuguguacguguuaccucaggau

SEQ ID NO: 277812 - RNA, 26 nt, Human
cuuuuaauugcuauugucugggauua

SEQ ID NO: 277813 - RNA, 24 nt, Human
gaaauauuugcacauaccaaaaua

SEQ ID NO: 277814 - RNA, 24 nt, Human
gcacauaccaaaauaccacuacuu

SEQ ID NO: 277815 - RNA, 19 nt, Human
gcgccaaagcggccucgaa

SEQ ID NO: 277816 - RNA, 20 nt, Human
gcgcggagggcagggcgcgg

SEQ ID NO: 277817 - RNA, 20 nt, Human
ggagccgggggccgcgggcu

SEQ ID NO: 277818 - RNA, 19 nt, Human
uaaggagaaaccagacagg

SEQ ID NO: 277819 - RNA, 18 nt, Human
ucccgugucugcggcggg

SEQ ID NO: 277820 - RNA, 21 nt, Human
ucugggauuaacagauaagga

SEQ ID NO: 277821 - RNA, 20 nt, Human
ugaacgguccuggaaggauu

SEQ ID NO: 277822 - RNA, 20 nt, Human
uggaaggauucuguugcucc

SEQ ID NO: 277823 - RNA, 20 nt, Human
aaaaaagaagauagagaaaa

SEQ ID NO: 277824 - RNA, 23 nt, Human
aaaaagaagaagaaagaacaaaa

SEQ ID NO: 277825 - RNA, 25 nt, Human
aaaaagaagaagaaagaacaaaaga

SEQ ID NO: 277826 - RNA, 26 nt, Human
aaaaagaagaagaaagaacaaaagaa

SEQ ID NO: 277827 - RNA, 19 nt, Human
aaaaagaagauagagaaaa

SEQ ID NO: 277828 - RNA, 20 nt, Human
aaaaagaagauagagaaaaa

SEQ ID NO: 277829 - RNA, 18 nt, Human
aaaauaaaugcuccaaca

SEQ ID NO: 277830 - RNA, 21 nt, Human
aaagaaagagaaagaaaagaa

SEQ ID NO: 277831 - RNA, 18 nt, Human
aaagaacaaaagaaagag

SEQ ID NO: 277832 - RNA, 18 nt, Human
aagaaagaacaaaagaaa

SEQ ID NO: 277833 - RNA, 23 nt, Human
aagaaagaacaaaagaaagagaa

SEQ ID NO: 277834 - RNA, 20 nt, Human
aagaaagagaaagaaaagaa

SEQ ID NO: 277835 - RNA, 20 nt, Human
aagaacccuuuuagcauuca

SEQ ID NO: 277836 - RNA, 23 nt, Human
aagaagaagaaagaacaaaagaa

SEQ ID NO: 277837 - RNA, 22 nt, Human
aagcauccuuaaguuucuuccc

SEQ ID NO: 277838 - RNA, 26 nt, Human
acacuaccgcagucucagaggcagac

SEQ ID NO: 277839 - RNA, 20 nt, Human
agaaaaaagaagauagagaa

SEQ ID NO: 277840 - RNA, 21 nt, Human
agaaaaagcaaaucacauggc

SEQ ID NO: 277841 - RNA, 22 nt, Human
agaaaaagcaaaucacauggca

SEQ ID NO: 277842 - RNA, 25 nt, Human
agaaaagaaaaaagaagauagagaa

SEQ ID NO: 277843 - RNA, 19 nt, Human
agaaagaaaagaaaaaaga

SEQ ID NO: 277844 - RNA, 23 nt, Human
agaagaagaaagaacaaaagaaa

SEQ ID NO: 277845 - RNA, 26 nt, Human
agaagaagaaagaacaaaagaaagag

SEQ ID NO: 277846 - RNA, 18 nt, Human
agagauggacaggaagac

SEQ ID NO: 277847 - RNA, 21 nt, Human
agcugcugggaaugcugcuug

SEQ ID NO: 277848 - RNA, 23 nt, Human
aggaaagaaggaaaacacuaccg

SEQ ID NO: 277849 - RNA, 23 nt, Human
aggaagaaggaagaacagcaaga

SEQ ID NO: 277850 - RNA, 22 nt, Human
agggaagaggcggccagguccg

SEQ ID NO: 277851 - RNA, 24 nt, Human
augaguacaaccuuuuaacuucac

SEQ ID NO: 277852 - RNA, 24 nt, Human
auucaaggcuuuacuagaaaccag

SEQ ID NO: 277853 - RNA, 23 nt, Human
caaaagaaagagaaagaaaagaa

SEQ ID NO: 277854 - RNA, 21 nt, Human
caaacuuuguaugcuaaaaag

SEQ ID NO: 277855 - RNA, 23 nt, Human
caagcgcagagugggaaaacuag

SEQ ID NO: 277856 - RNA, 20 nt, Human
caccccucuccuucccaccc

SEQ ID NO: 277857 - RNA, 18 nt, Human
ccaaggaaagaaggaaaa

SEQ ID NO: 277858 - RNA, 20 nt, Human
ccagggcauggcagcaguga

SEQ ID NO: 277859 - RNA, 24 nt, Human
cccccacugccuuugguuucagca

SEQ ID NO: 277860 - RNA, 22 nt, Human
ccccucuccuucccacccgccc

SEQ ID NO: 277861 - RNA, 22 nt, Human
cccggccggcagcgcccgccuc

SEQ ID NO: 277862 - RNA, 19 nt, Human
cccggggcggagcgguugg

SEQ ID NO: 277863 - RNA, 22 nt, Human
cccuccagccugcaaggcuccc

SEQ ID NO: 277864 - RNA, 18 nt, Human
ccgccgcucuccagccgc

SEQ ID NO: 277865 - RNA, 19 nt, Human
ccgccgcucuccagccgcc

SEQ ID NO: 277866 - RNA, 20 nt, Human
ccgccgcucuccagccgccc

SEQ ID NO: 277867 - RNA, 21 nt, Human
ccgccgcucuccagccgcccu

SEQ ID NO: 277868 - RNA, 24 nt, Human
ccgccucgccgccggcgccgccgc

SEQ ID NO: 277869 - RNA, 26 nt, Human
ccgccucgccgccggcgccgccgcuc

SEQ ID NO: 277870 - RNA, 27 nt, Human
ccgccucgccgccggcgccgccgcucu

SEQ ID NO: 277871 - RNA, 27 nt, Human
ccuaugguauuaaaaaagaagaagaaa

SEQ ID NO: 277872 - RNA, 21 nt, Human
ccuggucagggcggcagguca

SEQ ID NO: 277873 - RNA, 26 nt, Human
ccuguggcaacccccaguuugccccc

SEQ ID NO: 277874 - RNA, 23 nt, Human
cgagggaagaggcggccaggucc

SEQ ID NO: 277875 - RNA, 21 nt, Human
cgccucgccgccggcgccgcc

SEQ ID NO: 277876 - RNA, 21 nt, Human
cgcucagaauucguccaacag

SEQ ID NO: 277877 - RNA, 22 nt, Human
cggcaggucauagcuacugggg

SEQ ID NO: 277878 - RNA, 24 nt, Human
cguccauauucguuuccugucugg

SEQ ID NO: 277879 - RNA, 21 nt, Human
cugccggaacccaagcgcaga

SEQ ID NO: 277880 - RNA, 19 nt, Human
cuggccuaugguauuaaaa

SEQ ID NO: 277881 - RNA, 20 nt, Human
cuguugcaccccucuccuuc

SEQ ID NO: 277882 - RNA, 22 nt, Human
cuugaaguuccuucugcaauua

SEQ ID NO: 277883 - RNA, 19 nt, Human
cuugcaaaaccgcagcugc

SEQ ID NO: 277884 - RNA, 20 nt, Human
gaaaagaaaaaagaagauag

SEQ ID NO: 277885 - RNA, 22 nt, Human
gaagaaggaagaacagcaagag

SEQ ID NO: 277886 - RNA, 20 nt, Human
gaagauagagaaaaagcaaa

SEQ ID NO: 277887 - RNA, 18 nt, Human
gacauguuauccaaccug

SEQ ID NO: 277888 - RNA, 18 nt, Human
gacggugugugugugugu

SEQ ID NO: 277889 - RNA, 25 nt, Human
gauggacaggaagacugaggaagaa

SEQ ID NO: 277890 - RNA, 23 nt, Human
gcagcggcgaaggguccccgaag

SEQ ID NO: 277891 - RNA, 24 nt, Human
gcaugcagagugugggcaaucucu

SEQ ID NO: 277892 - RNA, 19 nt, Human
gccugucgcugcgggcugg

SEQ ID NO: 277893 - RNA, 18 nt, Human
gcggcgaaggguccccga

SEQ ID NO: 277894 - RNA, 18 nt, Human
ggaaaacacuaccgcagu

SEQ ID NO: 277895 - RNA, 23 nt, Human
ggaagaaggaagaacagcaagag

SEQ ID NO: 277896 - RNA, 21 nt, Human
ggagacacgaaaauggccuuc

SEQ ID NO: 277897 - RNA, 21 nt, Human
ggcgggacaggugggugucag

SEQ ID NO: 277898 - RNA, 20 nt, Human
gguaagaggcagaauggcac

SEQ ID NO: 277899 - RNA, 21 nt, Human
ggugugugugugugugugugu

SEQ ID NO: 277900 - RNA, 23 nt, Human
guaaauacaaugaguacaaccuu

SEQ ID NO: 277901 - RNA, 33 nt, Human
guguaggacgguguguguguguguguguguggu

SEQ ID NO: 277902 - RNA, 21 nt, Human
gugugugugugugugugugag

SEQ ID NO: 277903 - RNA, 20 nt, Human
gugugugugugugugugugu

SEQ ID NO: 277904 - RNA, 21 nt, Human
gugugugugugugugugugug

SEQ ID NO: 277905 - RNA, 21 nt, Human
gugugugugugugugugugug

SEQ ID NO: 277906 - RNA, 21 nt, Human
gugugugugugugugugugug

SEQ ID NO: 277907 - RNA, 29 nt, Human
guguguguguguguucauucaaggcuuua

SEQ ID NO: 277908 - RNA, 24 nt, Human
uaaaaaagaagaagaaagaacaaa

SEQ ID NO: 277909 - RNA, 22 nt, Human
uaacguaguuuugaaggccgca

SEQ ID NO: 277910 - RNA, 19 nt, Human
uaacucaguucugaaggcc

SEQ ID NO: 277911 - RNA, 18 nt, Human
uaaguauagagucauacc

SEQ ID NO: 277912 - RNA, 19 nt, Human
uacagcagcuauuuaaaaa

SEQ ID NO: 277913 - RNA, 24 nt, Human
uaugcuaaaaaggaagagaaagca

SEQ ID NO: 277914 - RNA, 23 nt, Human
ucacucaucuccacuuuauuugg

SEQ ID NO: 277915 - RNA, 23 nt, Human
ucacuuuguacaagaaaaguuuu

SEQ ID NO: 277916 - RNA, 20 nt, Human
ucagcuuuugaucguucagc

SEQ ID NO: 277917 - RNA, 23 nt, Human
ucccacccgcccuauccugguca

SEQ ID NO: 277918 - RNA, 20 nt, Human
ucccagggcauggcagcagu

SEQ ID NO: 277919 - RNA, 19 nt, Human
ucccucuacauaggcaugc

SEQ ID NO: 277920 - RNA, 21 nt, Human
uccuuugacaagguugccugg

SEQ ID NO: 277921 - RNA, 22 nt, Human
ucuccauggguugaaguucauc

SEQ ID NO: 277922 - RNA, 26 nt, Human
ucugauacugucccauccugaaaagu

SEQ ID NO: 277923 - RNA, 21 nt, Human
ugaaagacagagauggagaca

SEQ ID NO: 277924 - RNA, 22 nt, Human
ugaaguccuggugagaaucuca

SEQ ID NO: 277925 - RNA, 20 nt, Human
ugagaaucucauuuugucca

SEQ ID NO: 277926 - RNA, 22 nt, Human
ugcccgagucccggccggcagc

SEQ ID NO: 277927 - RNA, 20 nt, Human
ugccggaacccaagcgcaga

SEQ ID NO: 277928 - RNA, 18 nt, Human
ugcuguuuuuauucaucc

SEQ ID NO: 277929 - RNA, 22 nt, Human
uggacagacagauggagagaug

SEQ ID NO: 277930 - RNA, 21 nt, Human
ugggcgggacagguggguguc

SEQ ID NO: 277931 - RNA, 24 nt, Human
uguaggacggugugugugugugug

SEQ ID NO: 277932 - RNA, 18 nt, Human
ugucccggggcggagcgg

SEQ ID NO: 277933 - RNA, 18 nt, Human
ugugugugugugugugug

SEQ ID NO: 277934 - RNA, 18 nt, Human
ugugugugugugugugug

SEQ ID NO: 277935 - RNA, 18 nt, Human
ugugugugugugugugug

SEQ ID NO: 277936 - RNA, 18 nt, Human
ugugugugugugugugug

SEQ ID NO: 277937 - RNA, 18 nt, Human
ugugugugugugugugug

SEQ ID NO: 277938 - RNA, 18 nt, Human
ugugugugugugugugug

SEQ ID NO: 277939 - RNA, 18 nt, Human
ugugugugugugugugug

SEQ ID NO: 277940 - RNA, 18 nt, Human
ugugugugugugugugug

SEQ ID NO: 277941 - RNA, 18 nt, Human
ugugugugugugugugug

SEQ ID NO: 277942 - RNA, 18 nt, Human
ugugugugugugugugug

SEQ ID NO: 277943 - RNA, 18 nt, Human
ugugugugugugugugug

SEQ ID NO: 277944 - RNA, 18 nt, Human
ugugugugugugugugug

SEQ ID NO: 277945 - RNA, 18 nt, Human
ugugugugugugugugug

SEQ ID NO: 277946 - RNA, 18 nt, Human
ugugugugugugugugug

SEQ ID NO: 277947 - RNA, 18 nt, Human
ugugugugugugugugug

SEQ ID NO: 277948 - RNA, 18 nt, Human
ugugugugugugugugug

SEQ ID NO: 277949 - RNA, 18 nt, Human
ugugugugugugugugug

SEQ ID NO: 277950 - RNA, 21 nt, Human
ugugugugugugugugugugu

SEQ ID NO: 277951 - RNA, 21 nt, Human
ugugugugugugugugugugu

SEQ ID NO: 277952 - RNA, 21 nt, Human
ugugugugugugugugugugu

SEQ ID NO: 277953 - RNA, 21 nt, Human
ugugugugugugugugugugu

SEQ ID NO: 277954 - RNA, 21 nt, Human
ugugugugugugugugugugu

SEQ ID NO: 277955 - RNA, 21 nt, Human
ugugugugugugugugugugu

SEQ ID NO: 277956 - RNA, 21 nt, Human
ugugugugugugugugugugu

SEQ ID NO: 277957 - RNA, 21 nt, Human
ugugugugugugugugugugu

SEQ ID NO: 277958 - RNA, 21 nt, Human
ugugugugugugugugugugu

SEQ ID NO: 277959 - RNA, 21 nt, Human
ugugugugugugugugugugu

SEQ ID NO: 277960 - RNA, 21 nt, Human
ugugugugugugugugugugu

SEQ ID NO: 277961 - RNA, 21 nt, Human
ugugugugugugugugugugu

SEQ ID NO: 277962 - RNA, 21 nt, Human
ugugugugugugugugugugu

SEQ ID NO: 277963 - RNA, 21 nt, Human
ugugugugugugugugugugu

SEQ ID NO: 277964 - RNA, 21 nt, Human
ugugugugugugugugugugu

SEQ ID NO: 277965 - RNA, 21 nt, Human
ugugugugugugugugugugu

SEQ ID NO: 277966 - RNA, 21 nt, Human
ugugugugugugugugugugu

SEQ ID NO: 277967 - RNA, 21 nt, Human
ugugugugugugugugugugu

SEQ ID NO: 277968 - RNA, 21 nt, Human
ugugugugugugugugugugu

SEQ ID NO: 277969 - RNA, 21 nt, Human
ugugugugugugugugugugu

SEQ ID NO: 277970 - RNA, 21 nt, Human
ugugugugugugugugugugu

SEQ ID NO: 277971 - RNA, 21 nt, Human
ugugugugugugugugugugu

SEQ ID NO: 277972 - RNA, 21 nt, Human
ugugugugugugugugugugu

SEQ ID NO: 277973 - RNA, 21 nt, Human
ugugugugugugugugugugu

SEQ ID NO: 277974 - RNA, 21 nt, Human
ugugugugugugugugugugu

SEQ ID NO: 277975 - RNA, 21 nt, Human
ugugugugugugugugugugu

SEQ ID NO: 277976 - RNA, 21 nt, Human
ugugugugugugugugugugu

SEQ ID NO: 277977 - RNA, 21 nt, Human
ugugugugugugugugugugu

SEQ ID NO: 277978 - RNA, 21 nt, Human
ugugugugugugugugugugu

SEQ ID NO: 277979 - RNA, 21 nt, Human
ugugugugugugugugugugu

SEQ ID NO: 277980 - RNA, 21 nt, Human
ugugugugugugugugugugu

SEQ ID NO: 277981 - RNA, 21 nt, Human
ugugugugugugugugugugu

SEQ ID NO: 277982 - RNA, 22 nt, Human
ugugugugugugugugugugug

SEQ ID NO: 277983 - RNA, 22 nt, Human
ugugugugugugugugugugug

SEQ ID NO: 277984 - RNA, 22 nt, Human
ugugugugugugugugugugug

SEQ ID NO: 277985 - RNA, 22 nt, Human
ugugugugugugugugugugug

SEQ ID NO: 277986 - RNA, 22 nt, Human
ugugugugugugugugugugug

SEQ ID NO: 277987 - RNA, 22 nt, Human
ugugugugugugugugugugug

SEQ ID NO: 277988 - RNA, 22 nt, Human
ugugugugugugugugugugug

SEQ ID NO: 277989 - RNA, 22 nt, Human
ugugugugugugugugugugug

SEQ ID NO: 277990 - RNA, 22 nt, Human
ugugugugugugugugugugug

SEQ ID NO: 277991 - RNA, 22 nt, Human
ugugugugugugugugugugug

SEQ ID NO: 277992 - RNA, 22 nt, Human
ugugugugugugugugugugug

SEQ ID NO: 277993 - RNA, 22 nt, Human
ugugugugugugugugugugug

SEQ ID NO: 277994 - RNA, 23 nt, Human
uguugaaagacagagauggagac

SEQ ID NO: 277995 - RNA, 30 nt, Human
uuccccauuccugucacucagucuucgauu

SEQ ID NO: 277996 - RNA, 20 nt, Human
uuccucagugcuaguaccua

SEQ ID NO: 277997 - RNA, 23 nt, Human
uugcaccccucuccuucccaccc

SEQ ID NO: 277998 - RNA, 23 nt, Human
uuucacuuauuaacucaguucug

SEQ ID NO: 277999 - RNA, 20 nt, Human
uuuuauucauccucccuuga

SEQ ID NO: 278000 - RNA, 21 nt, Human
uuuuccucagugcuaguaccu

SEQ ID NO: 278001 - RNA, 20 nt, Human
aaagaucagaacuccaugga

SEQ ID NO: 278002 - RNA, 22 nt, Human
aaagucccucccaauucugcuu

SEQ ID NO: 278003 - RNA, 25 nt, Human
aaccuguuauaccuucaaagugggc

SEQ ID NO: 278004 - RNA, 19 nt, Human
aacuccuagagucucccuu

SEQ ID NO: 278005 - RNA, 23 nt, Human
acccauuucaacuccuagagucu

SEQ ID NO: 278006 - RNA, 20 nt, Human
agaaagguuagaggucaggg

SEQ ID NO: 278007 - RNA, 19 nt, Human
agaugagugggugggcgca

SEQ ID NO: 278008 - RNA, 19 nt, Human
agcuccucuucccucauuc

SEQ ID NO: 278009 - RNA, 20 nt, Human
aggcagagaaagguuagagg

SEQ ID NO: 278010 - RNA, 21 nt, Human
agugggugggcgcaugcucag

SEQ ID NO: 278011 - RNA, 22 nt, Human
caacauaucaugcuugccccuc

SEQ ID NO: 278012 - RNA, 18 nt, Human
caacuccuagagucuccc

SEQ ID NO: 278013 - RNA, 23 nt, Human
caaguccagcccugucuccacaa

SEQ ID NO: 278014 - RNA, 19 nt, Human
caccgggucugacccauuu

SEQ ID NO: 278015 - RNA, 19 nt, Human
caggagcugccccaagguc

SEQ ID NO: 278016 - RNA, 19 nt, Human
caucuugguccccacuccc

SEQ ID NO: 278017 - RNA, 24 nt, Human
caucuugguccccacucccggggc

SEQ ID NO: 278018 - RNA, 19 nt, Human
ccacucccggggccuggca

SEQ ID NO: 278019 - RNA, 19 nt, Human
ccccucucucccuuugcaa

SEQ ID NO: 278020 - RNA, 19 nt, Human
cccucugcucggaaaccug

SEQ ID NO: 278021 - RNA, 18 nt, Human
ccugcaguagcugcccuc

SEQ ID NO: 278022 - RNA, 18 nt, Human
ccugcaguagcugcccuc

SEQ ID NO: 278023 - RNA, 23 nt, Human
ccugcaguagcugcccucugccu

SEQ ID NO: 278024 - RNA, 23 nt, Human
cuagagucucccuucugcuuccc

SEQ ID NO: 278025 - RNA, 21 nt, Human
cuggacccauggccaugccag

SEQ ID NO: 278026 - RNA, 20 nt, Human
cuuuuagacuucuucuuccu

SEQ ID NO: 278027 - RNA, 24 nt, Human
gagugugggagaggcagagaaagg

SEQ ID NO: 278028 - RNA, 21 nt, Human
guggccuuuggcuggcauuca

SEQ ID NO: 278029 - RNA, 18 nt, Human
guugcugagccuggccca

SEQ ID NO: 278030 - RNA, 21 nt, Human
uagagucucccuucugcuucc

SEQ ID NO: 278031 - RNA, 21 nt, Human
uagggcaguuuuugucuucag

SEQ ID NO: 278032 - RNA, 18 nt, Human
ucaguaccuggcuagggc

SEQ ID NO: 278033 - RNA, 19 nt, Human
uccccuggccaugcccaaa

SEQ ID NO: 278034 - RNA, 25 nt, Human
ucccucauuccuuaccuucacccaa

SEQ ID NO: 278035 - RNA, 20 nt, Human
ucucuagaaggcaguagcuu

SEQ ID NO: 278036 - RNA, 22 nt, Human
ucucucugugccccugucuccc

SEQ ID NO: 278037 - RNA, 19 nt, Human
ucugaacucaggagcugcc

SEQ ID NO: 278038 - RNA, 23 nt, Human
ugaacugagacccuugugcuguc

SEQ ID NO: 278039 - RNA, 19 nt, Human
ugaggucacugccgguugu

SEQ ID NO: 278040 - RNA, 21 nt, Human
ugcccaaagaucagaacucca

SEQ ID NO: 278041 - RNA, 24 nt, Human
uggcaggaaccuguuauaccuucc

SEQ ID NO: 278042 - RNA, 20 nt, Human
ugggacaccauagauguugg

SEQ ID NO: 278043 - RNA, 21 nt, Human
ugucugaacucaggagcugcc

SEQ ID NO: 278044 - RNA, 21 nt, Human
uucugcuuuauguuucccaug

SEQ ID NO: 278045 - RNA, 21 nt, Human
uuggcuggcauucaaaguccu

SEQ ID NO: 278046 - RNA, 22 nt, Human
uuucuggcuuauucuccccauu

SEQ ID NO: 278047 - RNA, 19 nt, Human
ccgggaggggaggggaagg

SEQ ID NO: 278048 - RNA, 19 nt, Human
cgggagggcgccccgggug

SEQ ID NO: 278049 - RNA, 18 nt, Human
cucccccuucuuauuuua

SEQ ID NO: 278050 - RNA, 21 nt, Human
gaaggggacaggagagcgagu

SEQ ID NO: 278051 - RNA, 22 nt, Human
gaggggaaggggacaggagagc

SEQ ID NO: 278052 - RNA, 19 nt, Human
gcaaacuuguaacauccuu

SEQ ID NO: 278053 - RNA, 19 nt, Human
gcggcggcggcuccccggg

SEQ ID NO: 278054 - RNA, 19 nt, Human
gcggcggcggggcggcggc

SEQ ID NO: 278055 - RNA, 22 nt, Human
gcggcggcggggcggcggcggc

SEQ ID NO: 278056 - RNA, 22 nt, Human
gcucagcuuuguugguuucggg

SEQ ID NO: 278057 - RNA, 23 nt, Human
gcucgggggcugguugguugagg

SEQ ID NO: 278058 - RNA, 23 nt, Human
ggaggggaggggaaggggacagg

SEQ ID NO: 278059 - RNA, 19 nt, Human
ggcggcggcggcuccccgg

SEQ ID NO: 278060 - RNA, 18 nt, Human
ggcuccggcgcgccgccu

SEQ ID NO: 278061 - RNA, 18 nt, Human
gggaggggaaggggacag

SEQ ID NO: 278062 - RNA, 23 nt, Human
gggcggcggcggggcggcggcgg

SEQ ID NO: 278063 - RNA, 23 nt, Human
gucuuuugccuuuucuuucucug

SEQ ID NO: 278064 - RNA, 19 nt, Human
guuuuuccuuuuuuguuuu

SEQ ID NO: 278065 - RNA, 24 nt, Human
guuuuuccuuuuuuguuuuugcuu

SEQ ID NO: 278066 - RNA, 21 nt, Human
uccggcgcgccgccuuuugug

SEQ ID NO: 278067 - RNA, 23 nt, Human
ucuggcccgguguguuuguuuug

SEQ ID NO: 278068 - RNA, 19 nt, Human
ugugugcgagggugcaaga

SEQ ID NO: 278069 - RNA, 25 nt, Human
uguuucacucccccuucuuauuuua

SEQ ID NO: 278070 - RNA, 22 nt, Human
uugagguugguuaguuuuuccu

SEQ ID NO: 278071 - RNA, 19 nt, Human
uuuugcuuuugcaaaguuu

SEQ ID NO: 278072 - RNA, 20 nt, Human
aauagaagucugaggagaga

SEQ ID NO: 278073 - RNA, 24 nt, Human
aggccuuuguccaucaugccaggg

SEQ ID NO: 278074 - RNA, 20 nt, Human
aggggugcugaggaacaagg

SEQ ID NO: 278075 - RNA, 21 nt, Human
caccccucucggcccggggga

SEQ ID NO: 278076 - RNA, 18 nt, Human
cagggguccuggggagga

SEQ ID NO: 278077 - RNA, 21 nt, Human
ccccaccaucccacaaguuca

SEQ ID NO: 278078 - RNA, 22 nt, Human
ccccaccgcgcucuucccuccg

SEQ ID NO: 278079 - RNA, 26 nt, Human
ccccaccgcgcucuucccuccgggca

SEQ ID NO: 278080 - RNA, 18 nt, Human
cccgggaggccccucgag

SEQ ID NO: 278081 - RNA, 23 nt, Human
cccuccauccuggacagggguug

SEQ ID NO: 278082 - RNA, 20 nt, Human
cccuccgggcaccccucucg

SEQ ID NO: 278083 - RNA, 23 nt, Human
ccuccgggcaccccucucggccc

SEQ ID NO: 278084 - RNA, 19 nt, Human
ccucuggccgacgccaggc

SEQ ID NO: 278085 - RNA, 22 nt, Human
ccucuggccgacgccaggccuu

SEQ ID NO: 278086 - RNA, 25 nt, Human
ccugggccccgggaggccccucgag

SEQ ID NO: 278087 - RNA, 22 nt, Human
cgcucuucccuccgggcacccc

SEQ ID NO: 278088 - RNA, 18 nt, Human
cggcgcgcggggggcacg

SEQ ID NO: 278089 - RNA, 19 nt, Human
cgggggacccuacgcggcg

SEQ ID NO: 278090 - RNA, 20 nt, Human
cucagcauucccugucccuu

SEQ ID NO: 278091 - RNA, 22 nt, Human
cucucggcccgggggacccuac

SEQ ID NO: 278092 - RNA, 19 nt, Human
cuggaugaucagucucuuu

SEQ ID NO: 278093 - RNA, 23 nt, Human
gaggagagaagccagaguccugg

SEQ ID NO: 278094 - RNA, 19 nt, Human
gaggccccucgaggccuca

SEQ ID NO: 278095 - RNA, 18 nt, Human
gaggucugucugcaggcc

SEQ ID NO: 278096 - RNA, 19 nt, Human
gccacagcacacguggccc

SEQ ID NO: 278097 - RNA, 18 nt, Human
gcccacuggagcagcccc

SEQ ID NO: 278098 - RNA, 19 nt, Human
gcccgggggacccuacgcg

SEQ ID NO: 278099 - RNA, 20 nt, Human
gccggggcgcccccaccgcg

SEQ ID NO: 278100 - RNA, 22 nt, Human
ggacagggguccuggggaggau

SEQ ID NO: 278101 - RNA, 23 nt, Human
ggaggaugaggcugaggccugga

SEQ ID NO: 278102 - RNA, 18 nt, Human
gggggcacgggcugcacc

SEQ ID NO: 278103 - RNA, 21 nt, Human
ggguccuggggaggaugaggc

SEQ ID NO: 278104 - RNA, 18 nt, Human
uaggauuggacccuccau

SEQ ID NO: 278105 - RNA, 20 nt, Human
uccugggccccgggaggccc

SEQ ID NO: 278106 - RNA, 21 nt, Human
uccugggccccgggaggcccc

SEQ ID NO: 278107 - RNA, 24 nt, Human
ucugacauagguuacguguccaga

SEQ ID NO: 278108 - RNA, 19 nt, Human
ucugcaggccuggccacag

SEQ ID NO: 278109 - RNA, 23 nt, Human
ugaggucugucugcaggccuggc

SEQ ID NO: 278110 - RNA, 24 nt, Human
ugaucauuuaaaaaacagaaaaga

SEQ ID NO: 278111 - RNA, 18 nt, Human
ugcugaggaacaaggcug

SEQ ID NO: 278112 - RNA, 19 nt, Human
uggacccuccauccuggac

SEQ ID NO: 278113 - RNA, 25 nt, Human
uguccagaggaucugccuggcacac

SEQ ID NO: 278114 - RNA, 19 nt, Human
uucccugucccuugagguc

SEQ ID NO: 278115 - RNA, 20 nt, Human
uuuuugguuucaugaucauu

SEQ ID NO: 278116 - RNA, 21 nt, Human
uuuuuuuuuuuuuugcaggua

SEQ ID NO: 278117 - RNA, 21 nt, Human
uuuuuuuuuuuuuuuuugcag

SEQ ID NO: 278118 - RNA, 23 nt, Human
uuuuuuuuuuuuuuuuugcaggu

SEQ ID NO: 278119 - RNA, 23 nt, Human
uuuuuuuuuuuuuuuuuugcagg

SEQ ID NO: 278120 - RNA, 20 nt, Human
aaaaaugcuauccuaacuau

SEQ ID NO: 278121 - RNA, 22 nt, Human
aaaacaacaaaaccucuacagg

SEQ ID NO: 278122 - RNA, 24 nt, Human
aaacaaaacaacagaugaaaacaa

SEQ ID NO: 278123 - RNA, 20 nt, Human
aaacaacaaaaccucuacag

SEQ ID NO: 278124 - RNA, 28 nt, Human
aaacaacaaaaccucuacaggacaaacu

SEQ ID NO: 278125 - RNA, 21 nt, Human
aaacaaucucaucuaaaaauc

SEQ ID NO: 278126 - RNA, 22 nt, Human
aaacagcuguacaauaacuuuu

SEQ ID NO: 278127 - RNA, 23 nt, Human
aaagaaaacaaaaacauguccuc

SEQ ID NO: 278128 - RNA, 20 nt, Human
aacugugaaaaaaaguauga

SEQ ID NO: 278129 - RNA, 22 nt, Human
aagaaaacaaaaacauguccuc

SEQ ID NO: 278130 - RNA, 23 nt, Human
aagaaaacaaaaacauguccuca

SEQ ID NO: 278131 - RNA, 22 nt, Human
aagcaccaacccauuuucacac

SEQ ID NO: 278132 - RNA, 24 nt, Human
aauagcuauaaaaggcacaacuuc

SEQ ID NO: 278133 - RNA, 23 nt, Human
acagacuuugggcacuggugguu

SEQ ID NO: 278134 - RNA, 19 nt, Human
accaucuacucucccauca

SEQ ID NO: 278135 - RNA, 22 nt, Human
agggaaauauauuuuuuuuuuc

SEQ ID NO: 278136 - RNA, 23 nt, Human
auaaaacaacaaaaccucuacag

SEQ ID NO: 278137 - RNA, 22 nt, Human
caaaaagcauucaaagaaaaca

SEQ ID NO: 278138 - RNA, 24 nt, Human
caaaacaacagaugaaaacaauaa

SEQ ID NO: 278139 - RNA, 25 nt, Human
cacacaggaccagucuccaucuccc

SEQ ID NO: 278140 - RNA, 24 nt, Human
cacaggaccagucuccaucucccu

SEQ ID NO: 278141 - RNA, 21 nt, Human
cagaaggagcaggagggaaau

SEQ ID NO: 278142 - RNA, 18 nt, Human
cagguuagaagcaccaac

SEQ ID NO: 278143 - RNA, 25 nt, Human
cauacaguucuaaaucacaaaaauc

SEQ ID NO: 278144 - RNA, 18 nt, Human
ccaagucuuggcccucua

SEQ ID NO: 278145 - RNA, 24 nt, Human
ccaucuacucucccaucacugaaa

SEQ ID NO: 278146 - RNA, 18 nt, Human
ccauugcaaaaauagggc

SEQ ID NO: 278147 - RNA, 22 nt, Human
cccaucuuaaacagcuguacaa

SEQ ID NO: 278148 - RNA, 19 nt, Human
cgcagccgagauaaacaac

SEQ ID NO: 278149 - RNA, 22 nt, Human
cuaauuucugggauauauuaac

SEQ ID NO: 278150 - RNA, 19 nt, Human
cuagccauuuuugccauau

SEQ ID NO: 278151 - RNA, 20 nt, Human
cuagcugcccaucuuaaaca

SEQ ID NO: 278152 - RNA, 20 nt, Human
cucgcccgccaccguccgca

SEQ ID NO: 278153 - RNA, 20 nt, Human
cucuaugcaaacuauugcca

SEQ ID NO: 278154 - RNA, 25 nt, Human
cuuccugucuccuguuuacauacuu

SEQ ID NO: 278155 - RNA, 26 nt, Human
cuuccugucuccuguuuacauacuuu

SEQ ID NO: 278156 - RNA, 19 nt, Human
gacaguaauagcuauaaaa

SEQ ID NO: 278157 - RNA, 24 nt, Human
gagcaggagggaaauauauuuuuu

SEQ ID NO: 278158 - RNA, 18 nt, Human
ggguaaaguuuagugaga

SEQ ID NO: 278159 - RNA, 18 nt, Human
gguccugaaagacaaaua

SEQ ID NO: 278160 - RNA, 18 nt, Human
guagcccuucccuuccca

SEQ ID NO: 278161 - RNA, 24 nt, Human
gugaauaccaauaugauauauauc

SEQ ID NO: 278162 - RNA, 19 nt, Human
uaaaacaaaacaacagaug

SEQ ID NO: 278163 - RNA, 24 nt, Human
uaaaacaaaacaacagaugaaaac

SEQ ID NO: 278164 - RNA, 24 nt, Human
uaaaacaacaaaaccucuacagga

SEQ ID NO: 278165 - RNA, 21 nt, Human
uaaaaccagacaguaauagcu

SEQ ID NO: 278166 - RNA, 19 nt, Human
uaaacagcuguacaauaac

SEQ ID NO: 278167 - RNA, 24 nt, Human
uaaaucacaaaaaucaguagcuga

SEQ ID NO: 278168 - RNA, 19 nt, Human
uaaggcaaccauucuuauu

SEQ ID NO: 278169 - RNA, 21 nt, Human
uacaguucuaaaucacaaaaa

SEQ ID NO: 278170 - RNA, 19 nt, Human
uagcccuucccuucccaga

SEQ ID NO: 278171 - RNA, 24 nt, Human
uauggcacacauuagggaugugua

SEQ ID NO: 278172 - RNA, 19 nt, Human
uauuagauggugccuuuaa

SEQ ID NO: 278173 - RNA, 22 nt, Human
ucaaaagguccugaaagacaaa

SEQ ID NO: 278174 - RNA, 21 nt, Human
ucacuguuggaaugagaaggg

SEQ ID NO: 278175 - RNA, 23 nt, Human
ucagcauuucuuugaccccuaca

SEQ ID NO: 278176 - RNA, 27 nt, Human
ucaucuaaaaaucauucuuauuuuaca

SEQ ID NO: 278177 - RNA, 22 nt, Human
uccgcaguucccgccgcagccg

SEQ ID NO: 278178 - RNA, 23 nt, Human
ucucccucuuccccuagagcaaa

SEQ ID NO: 278179 - RNA, 21 nt, Human
ucuuccccuagagcaaacugu

SEQ ID NO: 278180 - RNA, 21 nt, Human
ugaaaaaaaguaugaagagaa

SEQ ID NO: 278181 - RNA, 22 nt, Human
ugaaaacaauaaaaaauaaaac

SEQ ID NO: 278182 - RNA, 30 nt, Human
ugaaaacaauaaaaaauaaaacaacaaaag

SEQ ID NO: 278183 - RNA, 19 nt, Human
ugacuguggagauuacguc

SEQ ID NO: 278184 - RNA, 24 nt, Human
ugagaaggguggucagaaugggag

SEQ ID NO: 278185 - RNA, 23 nt, Human
ugcacacagaaagggcuacuaca

SEQ ID NO: 278186 - RNA, 22 nt, Human
ugcauaaaucaaaaaugcuauc

SEQ ID NO: 278187 - RNA, 20 nt, Human
ugcugggggagggcuguaug

SEQ ID NO: 278188 - RNA, 20 nt, Human
ugcugggggagggcuguaug

SEQ ID NO: 278189 - RNA, 19 nt, Human
uggaaauaaacucuuguug

SEQ ID NO: 278190 - RNA, 20 nt, Human
ugggaaagcuacgaacuagc

SEQ ID NO: 278191 - RNA, 19 nt, Human
ugggcacuggugguuuagg

SEQ ID NO: 278192 - RNA, 19 nt, Human
uguuuagaguuuauuuggg

SEQ ID NO: 278193 - RNA, 21 nt, Human
uuaagguuucuaauuucuggg

SEQ ID NO: 278194 - RNA, 22 nt, Human
uuacagaaaguugguaaggugc

SEQ ID NO: 278195 - RNA, 25 nt, Human
uucccgccgcagccgagauaaacaa

SEQ ID NO: 278196 - RNA, 21 nt, Human
uuguggcuuaguaaauauguu

SEQ ID NO: 278197 - RNA, 23 nt, Human
uuuccaugcauaaaucaaaaaug

SEQ ID NO: 278198 - RNA, 18 nt, Human
uuuugcaaccaucaucca

SEQ ID NO: 278199 - RNA, 20 nt, Human
uuuuuugacaagaauacugg

SEQ ID NO: 278200 - RNA, 22 nt, Human
uuuuuuuugacaagaauacugg

SEQ ID NO: 278201 - RNA, 26 nt, Human
uuuuuuuuuuuuugacaagaauacug

SEQ ID NO: 278202 - RNA, 18 nt, Human
uuuuuuuuuuuuuuuuug

SEQ ID NO: 278203 - RNA, 23 nt, Human
uuuuuuuuuuuuuuuuugacaag

SEQ ID NO: 278204 - RNA, 20 nt, Human
aaaacuucuuccaucuguga

SEQ ID NO: 278205 - RNA, 22 nt, Human
aaacaaaaaguacagaaaaagu

SEQ ID NO: 278206 - RNA, 21 nt, Human
aaacaagcgaacgauaccaga

SEQ ID NO: 278207 - RNA, 22 nt, Human
aaaguacagaaaaaguagaaag

SEQ ID NO: 278208 - RNA, 26 nt, Human
aaaguacagaaaaaguagaaagguuu

SEQ ID NO: 278209 - RNA, 24 nt, Human
aaauuaccuuguuuagacaaagau

SEQ ID NO: 278210 - RNA, 21 nt, Human
aagcagaagccagaaaacgug

SEQ ID NO: 278211 - RNA, 21 nt, Human
acaaaacaaaaaguacagaaa

SEQ ID NO: 278212 - RNA, 20 nt, Human
accccucuaucucccggucu

SEQ ID NO: 278213 - RNA, 25 nt, Human
acuuaaggcaaaguucuucugggca

SEQ ID NO: 278214 - RNA, 22 nt, Human
acuuuguuaauacaaaaagcug

SEQ ID NO: 278215 - RNA, 23 nt, Human
agaacaaaacaaaaaguacagaa

SEQ ID NO: 278216 - RNA, 21 nt, Human
agaauucuuucaaaaauacuu

SEQ ID NO: 278217 - RNA, 21 nt, Human
agacaccgcagugugucauuc

SEQ ID NO: 278218 - RNA, 22 nt, Human
agagcugguucugcuucuagag

SEQ ID NO: 278219 - RNA, 24 nt, Human
agauacuagaaaucaaaccaaggc

SEQ ID NO: 278220 - RNA, 24 nt, Human
agcacagcaaaagacugcaaaaaa

SEQ ID NO: 278221 - RNA, 23 nt, Human
agcgcugggggauuggagguggg

SEQ ID NO: 278222 - RNA, 18 nt, Human
agcgcuugccaccgccac

SEQ ID NO: 278223 - RNA, 21 nt, Human
aggaugaagcagaagccagaa

SEQ ID NO: 278224 - RNA, 18 nt, Human
aucccgaggaacaggaac

SEQ ID NO: 278225 - RNA, 19 nt, Human
aucuaaaaccccucuaucu

SEQ ID NO: 278226 - RNA, 18 nt, Human
augaagcagaagccagaa

SEQ ID NO: 278227 - RNA, 19 nt, Human
augaagcuaaaaaaggcac

SEQ ID NO: 278228 - RNA, 21 nt, Human
augaagcuaaaaaaggcacag

SEQ ID NO: 278229 - RNA, 26 nt, Human
auggacgcuaacgaguguguauacca

SEQ ID NO: 278230 - RNA, 20 nt, Human
auggagcaggaugaagcaga

SEQ ID NO: 278231 - RNA, 23 nt, Human
caaaaauaagagcagacagacaa

SEQ ID NO: 278232 - RNA, 23 nt, Human
caaaaauacuuucccauucaucc

SEQ ID NO: 278233 - RNA, 25 nt, Human
caaaagauccuuauaccuuauuuca

SEQ ID NO: 278234 - RNA, 18 nt, Human
caaaauagaauucuuucc

SEQ ID NO: 278235 - RNA, 22 nt, Human
caaaaucagaguuauugacuag

SEQ ID NO: 278236 - RNA, 24 nt, Human
caagaacaaaacaaaaaguacaga

SEQ ID NO: 278237 - RNA, 18 nt, Human
caagcgaacgauaccaga

SEQ ID NO: 278238 - RNA, 22 nt, Human
cacagcaaaagacugcaaaaaa

SEQ ID NO: 278239 - RNA, 20 nt, Human
cacaggagaaaaucugauuu

SEQ ID NO: 278240 - RNA, 20 nt, Human
caccgcagugugucauuccc

SEQ ID NO: 278241 - RNA, 23 nt, Human
cagaaccucuuuccaagaucaga

SEQ ID NO: 278242 - RNA, 24 nt, Human
cagaaccucuuuccaagaucagaa

SEQ ID NO: 278243 - RNA, 24 nt, Human
cagcgagugccgcucucccugcag

SEQ ID NO: 278244 - RNA, 26 nt, Human
cagugccaaacaaacagauuaaugaa

SEQ ID NO: 278245 - RNA, 21 nt, Human
ccaaacaaacagauuaaugaa

SEQ ID NO: 278246 - RNA, 21 nt, Human
ccacggaaaaacagcuuuccc

SEQ ID NO: 278247 - RNA, 21 nt, Human
ccagcgagugccgcucucccu

SEQ ID NO: 278248 - RNA, 22 nt, Human
ccaucccaaaccugguuaagua

SEQ ID NO: 278249 - RNA, 18 nt, Human
cccacaaaugccccaagc

SEQ ID NO: 278250 - RNA, 19 nt, Human
cccacauguguugucaaau

SEQ ID NO: 278251 - RNA, 24 nt, Human
ccccugcugcggagccccccuaaa

SEQ ID NO: 278252 - RNA, 18 nt, Human
cccugccucggccggggu

SEQ ID NO: 278253 - RNA, 23 nt, Human
cccugcugcggagccccccuaaa

SEQ ID NO: 278254 - RNA, 22 nt, Human
ccgccacgaaaccccugcugcg

SEQ ID NO: 278255 - RNA, 20 nt, Human
ccgucccagcgcauccugcc

SEQ ID NO: 278256 - RNA, 20 nt, Human
ccguggacgagcgagggcuc

SEQ ID NO: 278257 - RNA, 27 nt, Human
ccuauaaauuaaauuccugaaauugcc

SEQ ID NO: 278258 - RNA, 25 nt, Human
ccucugagcagccugaaguuggcuc

SEQ ID NO: 278259 - RNA, 23 nt, Human
ccugcagcgggagagcccgaggc

SEQ ID NO: 278260 - RNA, 23 nt, Human
ccugcauggugaacccuggagaa

SEQ ID NO: 278261 - RNA, 23 nt, Human
cgaggcaggcuuucccaaagcug

SEQ ID NO: 278262 - RNA, 24 nt, Human
cgccacgaaaccccugcugcggag

SEQ ID NO: 278263 - RNA, 22 nt, Human
cgcuugccaccgccacgaaacu

SEQ ID NO: 278264 - RNA, 24 nt, Human
cggagccccccuaaauccaaccac

SEQ ID NO: 278265 - RNA, 21 nt, Human
cgggagaccaagaacaaaaca

SEQ ID NO: 278266 - RNA, 20 nt, Human
cgggagagcccgaggcagca

SEQ ID NO: 278267 - RNA, 19 nt, Human
cuaagucugaacuaaaagc

SEQ ID NO: 278268 - RNA, 20 nt, Human
cuccaaaccucugacaugac

SEQ ID NO: 278269 - RNA, 18 nt, Human
cuccaaggaccuccucuc

SEQ ID NO: 278270 - RNA, 23 nt, Human
cuccaugccauucagacugaacc

SEQ ID NO: 278271 - RNA, 22 nt, Human
cugcagcacuccaaggaccucc

SEQ ID NO: 278272 - RNA, 19 nt, Human
cugcggagccccccuaaau

SEQ ID NO: 278273 - RNA, 21 nt, Human
cuuccaggagcugcagacacc

SEQ ID NO: 278274 - RNA, 23 nt, Human
gaaaaaguagaaagguuucaaga

SEQ ID NO: 278275 - RNA, 24 nt, Human
gaacaagugugaaucaaccaucac

SEQ ID NO: 278276 - RNA, 23 nt, Human
gaacuguaccaaaccaagauuuu

SEQ ID NO: 278277 - RNA, 21 nt, Human
gaggaaaagaugcucucugag

SEQ ID NO: 278278 - RNA, 18 nt, Human
gcugcagacaccgcagug

SEQ ID NO: 278279 - RNA, 20 nt, Human
gcuugccaccgccacgaaac

SEQ ID NO: 278280 - RNA, 23 nt, Human
ggaacaacacagggaaacuuaag

SEQ ID NO: 278281 - RNA, 18 nt, Human
ggaauccuucagacugcu

SEQ ID NO: 278282 - RNA, 24 nt, Human
ggaauuuuuuuuucccacaggaga

SEQ ID NO: 278283 - RNA, 25 nt, Human
ggagccccccuaaauccaaccacau

SEQ ID NO: 278284 - RNA, 19 nt, Human
ggggauuggagguggggaa

SEQ ID NO: 278285 - RNA, 24 nt, Human
guaaguaagccauuuguuugcuag

SEQ ID NO: 278286 - RNA, 20 nt, Human
guguggaacaacacagggaa

SEQ ID NO: 278287 - RNA, 21 nt, Human
uaaaaaucuaaaaccccucua

SEQ ID NO: 278288 - RNA, 27 nt, Human
uaaaacaagcgaacgauaccagaaacc

SEQ ID NO: 278289 - RNA, 21 nt, Human
uaaacgguucauuaugcaugc

SEQ ID NO: 278290 - RNA, 18 nt, Human
uaaagccaacacaauaga

SEQ ID NO: 278291 - RNA, 19 nt, Human
uaagaaagacuccucccuc

SEQ ID NO: 278292 - RNA, 25 nt, Human
uaauuaauaugauuucacugaguaa

SEQ ID NO: 278293 - RNA, 21 nt, Human
uacacaacaggaaucuguaua

SEQ ID NO: 278294 - RNA, 22 nt, Human
uacaguccuuugcaaagacaga

SEQ ID NO: 278295 - RNA, 24 nt, Human
uaccaaaccaagauuuuuaagagc

SEQ ID NO: 278296 - RNA, 19 nt, Human
uaccagugaugcagaagac

SEQ ID NO: 278297 - RNA, 22 nt, Human
uaccuggagacacacaaagagc

SEQ ID NO: 278298 - RNA, 20 nt, Human
uaccuucaaaguguggcuuu

SEQ ID NO: 278299 - RNA, 25 nt, Human
uagaauucuuucaaaaauacuuucc

SEQ ID NO: 278300 - RNA, 22 nt, Human
uauacauacaguaauguacagc

SEQ ID NO: 278301 - RNA, 25 nt, Human
uauuuuuaaaaccuaccuuuuaaaa

SEQ ID NO: 278302 - RNA, 25 nt, Human
uccaaaacuguuuauguauaaaacu

SEQ ID NO: 278303 - RNA, 18 nt, Human
uccaagaucagaagggaa

SEQ ID NO: 278304 - RNA, 22 nt, Human
uccauucuaauuaaauaagaaa

SEQ ID NO: 278305 - RNA, 19 nt, Human
ucccggcuccaaaccucug

SEQ ID NO: 278306 - RNA, 20 nt, Human
ucccugcagcgggagagccc

SEQ ID NO: 278307 - RNA, 24 nt, Human
ucuaaaaugggaggaaaagaugcu

SEQ ID NO: 278308 - RNA, 22 nt, Human
ucucugagccaucaaguuccca

SEQ ID NO: 278309 - RNA, 25 nt, Human
ucuguaauuuuucuccaaaacuguu

SEQ ID NO: 278310 - RNA, 18 nt, Human
ugaaaauaucaaaaucag

SEQ ID NO: 278311 - RNA, 21 nt, Human
ugaaaauaucaaaaucagagu

SEQ ID NO: 278312 - RNA, 20 nt, Human
ugaagcagaagccagaaaac

SEQ ID NO: 278313 - RNA, 23 nt, Human
ugaagcagaagccagaaaacgug

SEQ ID NO: 278314 - RNA, 25 nt, Human
ugaagcagaagccagaaaacgugcu

SEQ ID NO: 278315 - RNA, 25 nt, Human
ugacaugacuuuaaacuugagaaac

SEQ ID NO: 278316 - RNA, 23 nt, Human
ugacugcacgggcuuccucugag

SEQ ID NO: 278317 - RNA, 19 nt, Human
ugaguaaaccugaugauua

SEQ ID NO: 278318 - RNA, 18 nt, Human
ugauuuggggcaagagaa

SEQ ID NO: 278319 - RNA, 22 nt, Human
ugcggagccccccuaaauccaa

SEQ ID NO: 278320 - RNA, 19 nt, Human
uggagaaaaguguugaucu

SEQ ID NO: 278321 - RNA, 21 nt, Human
uggagacacacaaagagccag

SEQ ID NO: 278322 - RNA, 22 nt, Human
uggguguggaacaacacaggga

SEQ ID NO: 278323 - RNA, 24 nt, Human
uguacagcacagcaaaagacugca

SEQ ID NO: 278324 - RNA, 25 nt, Human
uguguauuuauuaccuucaaagugg

SEQ ID NO: 278325 - RNA, 18 nt, Human
uuguaaagccaacacaau

SEQ ID NO: 278326 - RNA, 22 nt, Human
uuuaaaaaucuaaaaccccucu

SEQ ID NO: 278327 - RNA, 19 nt, Human
uuuaaucaagcaaaguuac

SEQ ID NO: 278328 - RNA, 24 nt, Human
uuuagugcaaucauauuguuaguu

SEQ ID NO: 278329 - RNA, 18 nt, Human
uuuuaugugcaaaccaag

SEQ ID NO: 278330 - RNA, 20 nt, Human
aagaggcgggguugaaggag

SEQ ID NO: 278331 - RNA, 25 nt, Human
aaggccggggccaggcuggggggga

SEQ ID NO: 278332 - RNA, 22 nt, Human
acccggccggcucccgcugccc

SEQ ID NO: 278333 - RNA, 22 nt, Human
aggaagaggcgggguugaagga

SEQ ID NO: 278334 - RNA, 19 nt, Human
aggcaucccccuccccaag

SEQ ID NO: 278335 - RNA, 21 nt, Human
aggcaucccccuccccaaggg

SEQ ID NO: 278336 - RNA, 20 nt, Human
agugcgcaugugcacacgug

SEQ ID NO: 278337 - RNA, 21 nt, Human
auaugagagugcgcaugugca

SEQ ID NO: 278338 - RNA, 22 nt, Human
caaaaaacauaaaggccggggc

SEQ ID NO: 278339 - RNA, 23 nt, Human
caaaaaacauaaaggccggggcc

SEQ ID NO: 278340 - RNA, 19 nt, Human
cagccccgcucccaccuca

SEQ ID NO: 278341 - RNA, 23 nt, Human
caggaaggcggggcccaucccuu

SEQ ID NO: 278342 - RNA, 22 nt, Human
caggaggaggaagaggcggggu

SEQ ID NO: 278343 - RNA, 23 nt, Human
caggcaggucuuggcaacaaugu

SEQ ID NO: 278344 - RNA, 27 nt, Human
caucccuuccucccagccccgcuccca

SEQ ID NO: 278345 - RNA, 23 nt, Human
cccaugaaggcaucccccucccc

SEQ ID NO: 278346 - RNA, 20 nt, Human
ccccaagggcuugagcuccc

SEQ ID NO: 278347 - RNA, 21 nt, Human
ccccaagggcuugagcucccu

SEQ ID NO: 278348 - RNA, 21 nt, Human
ccccgagucucagccuggucc

SEQ ID NO: 278349 - RNA, 19 nt, Human
cccgcugccccugcccgga

SEQ ID NO: 278350 - RNA, 19 nt, Human
cccgcugccccugcccgga

SEQ ID NO: 278351 - RNA, 21 nt, Human
cccugcccggacuggcgcccc

SEQ ID NO: 278352 - RNA, 22 nt, Human
ccguggacuaaaggcacauggg

SEQ ID NO: 278353 - RNA, 20 nt, Human
ccucaagcucuuucuuccug

SEQ ID NO: 278354 - RNA, 18 nt, Human
ccucccagccccgcuccc

SEQ ID NO: 278355 - RNA, 23 nt, Human
ccuccuggagcaggugagaaggu

SEQ ID NO: 278356 - RNA, 21 nt, Human
cggcucccgcugccccugccc

SEQ ID NO: 278357 - RNA, 25 nt, Human
cggggccaggcuggggggucugucg

SEQ ID NO: 278358 - RNA, 21 nt, Human
cucccagccccgcucccaccu

SEQ ID NO: 278359 - RNA, 22 nt, Human
cucccagccccgcucccaccuc

SEQ ID NO: 278360 - RNA, 19 nt, Human
cuccuggagcaggugagaa

SEQ ID NO: 278361 - RNA, 18 nt, Human
cuggagcaggugagaagg

SEQ ID NO: 278362 - RNA, 21 nt, Human
gaggcuggaaaggcugcccag

SEQ ID NO: 278363 - RNA, 21 nt, Human
gaggggggagcagucccacag

SEQ ID NO: 278364 - RNA, 20 nt, Human
gcaucccccuccccaagggc

SEQ ID NO: 278365 - RNA, 23 nt, Human
gcccaucccuuccucccagcccc

SEQ ID NO: 278366 - RNA, 23 nt, Human
ggaggguaggaagagagagccag

SEQ ID NO: 278367 - RNA, 19 nt, Human
ggggagcagucccacagga

SEQ ID NO: 278368 - RNA, 20 nt, Human
ggggccaggcugggggggau

SEQ ID NO: 278369 - RNA, 19 nt, Human
uaaaggcacaugggguggc

SEQ ID NO: 278370 - RNA, 19 nt, Human
uacaaaaaacauaaaggcc

SEQ ID NO: 278371 - RNA, 20 nt, Human
uacaaaaaacauaaaggccg

SEQ ID NO: 278372 - RNA, 22 nt, Human
ucacauacuauaaauccaggaa

SEQ ID NO: 278373 - RNA, 19 nt, Human
uccaggaaaauacacaaau

SEQ ID NO: 278374 - RNA, 18 nt, Human
ucccuuccucccagcccc

SEQ ID NO: 278375 - RNA, 23 nt, Human
ucuuggcaacaauguggcuugca

SEQ ID NO: 278376 - RNA, 24 nt, Human
ugaaggaggcaguggggagaaucc

SEQ ID NO: 278377 - RNA, 20 nt, Human
ugaaggcaucccccucccca

SEQ ID NO: 278378 - RNA, 18 nt, Human
ugcccaggaaggcggggc

SEQ ID NO: 278379 - RNA, 21 nt, Human
ugcccggacuggcgccccgag

SEQ ID NO: 278380 - RNA, 20 nt, Human
uggaaggaggguaggaagag

SEQ ID NO: 278381 - RNA, 18 nt, Human
uggcgccccgagucucag

SEQ ID NO: 278382 - RNA, 21 nt, Human
uggcgccccgagucucagccu

SEQ ID NO: 278383 - RNA, 23 nt, Human
uguguuaaaaacgguuuaucuua

SEQ ID NO: 278384 - RNA, 19 nt, Human
uuccucccagccccgcucc

SEQ ID NO: 278385 - RNA, 23 nt, Human
aaaaagccaaacugcauugggua

SEQ ID NO: 278386 - RNA, 23 nt, Human
aaacaaaauaauaaauuaacuga

SEQ ID NO: 278387 - RNA, 21 nt, Human
aacgguacauacaacacuuac

SEQ ID NO: 278388 - RNA, 24 nt, Human
aagaaagaauuuaucagaaaaaaa

SEQ ID NO: 278389 - RNA, 21 nt, Human
acaaacaaggaauguuggacg

SEQ ID NO: 278390 - RNA, 20 nt, Human
acaccauagaaaaaaaggca

SEQ ID NO: 278391 - RNA, 23 nt, Human
accauagaaaaaaaggcagugac

SEQ ID NO: 278392 - RNA, 23 nt, Human
acugucauacaccauagaaaaaa

SEQ ID NO: 278393 - RNA, 23 nt, Human
agaaagaauuuaucagaaaaaaa

SEQ ID NO: 278394 - RNA, 21 nt, Human
agagcugggcgaagggaaccc

SEQ ID NO: 278395 - RNA, 24 nt, Human
agauaacuaccaaucuuuauaaaa

SEQ ID NO: 278396 - RNA, 20 nt, Human
aggaugccccggagccaaaa

SEQ ID NO: 278397 - RNA, 25 nt, Human
auggccaaacauuucccauuauacc

SEQ ID NO: 278398 - RNA, 18 nt, Human
auggggggcagcuugagc

SEQ ID NO: 278399 - RNA, 20 nt, Human
auggggggcagcuugagcug

SEQ ID NO: 278400 - RNA, 30 nt, Human
augugucucuguguguguguguguguggug

SEQ ID NO: 278401 - RNA, 18 nt, Human
auuuuuagaaaagcaaug

SEQ ID NO: 278402 - RNA, 23 nt, Human
caacaaacugauuuuuaaacuga

SEQ ID NO: 278403 - RNA, 23 nt, Human
cacaaaauaauuuaaaaagccaa

SEQ ID NO: 278404 - RNA, 24 nt, Human
cacccacgcaacauuuaguuuuac

SEQ ID NO: 278405 - RNA, 22 nt, Human
cacuuacaaacaaggaauguug

SEQ ID NO: 278406 - RNA, 22 nt, Human
cagcagaaaacuuugaagucuu

SEQ ID NO: 278407 - RNA, 21 nt, Human
cagccuguccaaucuccuccu

SEQ ID NO: 278408 - RNA, 18 nt, Human
cauggccaaacauuuccc

SEQ ID NO: 278409 - RNA, 18 nt, Human
cauuaucauuccaguucc

SEQ ID NO: 278410 - RNA, 19 nt, Human
ccaguuccuuugaagugcu

SEQ ID NO: 278411 - RNA, 21 nt, Human
cggcuggacaggcaaaaggga

SEQ ID NO: 278412 - RNA, 21 nt, Human
cggggucggguagggguggga

SEQ ID NO: 278413 - RNA, 19 nt, Human
cugaacugcaacaaccaag

SEQ ID NO: 278414 - RNA, 18 nt, Human
cugauguguaauacuugu

SEQ ID NO: 278415 - RNA, 22 nt, Human
cugccgaagugcaguucccucu

SEQ ID NO: 278416 - RNA, 20 nt, Human
cuucaacucaugccacccac

SEQ ID NO: 278417 - RNA, 22 nt, Human
gaaaagcaauggggaguccagc

SEQ ID NO: 278418 - RNA, 18 nt, Human
gagacugcucacacggcu

SEQ ID NO: 278419 - RNA, 23 nt, Human
gcacaaaauaauuuaaaaagcca

SEQ ID NO: 278420 - RNA, 19 nt, Human
gcccuuucagguucugccu

SEQ ID NO: 278421 - RNA, 22 nt, Human
gccggggucggguagggguggg

SEQ ID NO: 278422 - RNA, 22 nt, Human
gggcgccggggucggguagggg

SEQ ID NO: 278423 - RNA, 23 nt, Human
guacauacaacacuuacaaacaa

SEQ ID NO: 278424 - RNA, 23 nt, Human
gucucucuucauucauucaacuc

SEQ ID NO: 278425 - RNA, 22 nt, Human
gugucucugugugugugugugu

SEQ ID NO: 278426 - RNA, 18 nt, Human
uaaauaggcacaaaauaa

SEQ ID NO: 278427 - RNA, 19 nt, Human
uaaauaggcacaaaauaau

SEQ ID NO: 278428 - RNA, 18 nt, Human
uacaaagaaaaauacuac

SEQ ID NO: 278429 - RNA, 21 nt, Human
uacuacagaauauggcaauau

SEQ ID NO: 278430 - RNA, 23 nt, Human
uagaaaaaaaggcagugacucau

SEQ ID NO: 278431 - RNA, 24 nt, Human
uaucagaaaaaaaaucagcaucuc

SEQ ID NO: 278432 - RNA, 22 nt, Human
uauggcaauauuaaaauucuua

SEQ ID NO: 278433 - RNA, 21 nt, Human
ucaacaucaacgguacauaca

SEQ ID NO: 278434 - RNA, 21 nt, Human
uccuuugaagugcuugggagg

SEQ ID NO: 278435 - RNA, 24 nt, Human
ucuccgcgucucucuucauucauu

SEQ ID NO: 278436 - RNA, 20 nt, Human
ucugaacaacaaacugauuu

SEQ ID NO: 278437 - RNA, 22 nt, Human
ucugaacugcaacaaccaagca

SEQ ID NO: 278438 - RNA, 21 nt, Human
ucuuuuuuuuugcaaacacac

SEQ ID NO: 278439 - RNA, 21 nt, Human
ugaaggacaaaguuuccaaga

SEQ ID NO: 278440 - RNA, 22 nt, Human
uggacgguguuacaaacacuau

SEQ ID NO: 278441 - RNA, 20 nt, Human
uguaguccauguucuaaauc

SEQ ID NO: 278442 - RNA, 21 nt, Human
uguauuguguguaguccaugu

SEQ ID NO: 278443 - RNA, 21 nt, Human
ugucauacaccauagaaaaaa

SEQ ID NO: 278444 - RNA, 26 nt, Human
ugucauacaccauagaaaaaaaggca

SEQ ID NO: 278445 - RNA, 19 nt, Human
uguguguaugugugugugu

SEQ ID NO: 278446 - RNA, 21 nt, Human
uguguguguaugugugugugu

SEQ ID NO: 278447 - RNA, 21 nt, Human
uguguguguaugugugugugu

SEQ ID NO: 278448 - RNA, 20 nt, Human
uguguguguguaugugugug

SEQ ID NO: 278449 - RNA, 21 nt, Human
uguguguguguaugugugugu

SEQ ID NO: 278450 - RNA, 21 nt, Human
uguguguguguguaugugugu

SEQ ID NO: 278451 - RNA, 21 nt, Human
uguguguguguguguaugugu

SEQ ID NO: 278452 - RNA, 23 nt, Human
uguguguguguguguaugugugu

SEQ ID NO: 278453 - RNA, 21 nt, Human
uguguguguguguguguaugu

SEQ ID NO: 278454 - RNA, 21 nt, Human
uguguguguguguguguaugu

SEQ ID NO: 278455 - RNA, 30 nt, Human
uguguguguguguguguaugugugugugug

SEQ ID NO: 278456 - RNA, 18 nt, Human
ugugugugugugugugug

SEQ ID NO: 278457 - RNA, 21 nt, Human
uguguguguguguguguguaa

SEQ ID NO: 278458 - RNA, 18 nt, Human
uguguguguuacauuugu

SEQ ID NO: 278459 - RNA, 19 nt, Human
uugcccccucuugacaguu

SEQ ID NO: 278460 - RNA, 22 nt, Human
uugcccccucuugacaguuucc

SEQ ID NO: 278461 - RNA, 20 nt, Human
uuucagguucugccugcagg

SEQ ID NO: 278462 - RNA, 18 nt, Human
aaaggaagagggaggggc

SEQ ID NO: 278463 - RNA, 18 nt, Human
aaaugaacuacaaacuug

SEQ ID NO: 278464 - RNA, 22 nt, Human
aagaaaaagcaaaggaaaaaaa

SEQ ID NO: 278465 - RNA, 20 nt, Human
aagccuuugauucacaguuu

SEQ ID NO: 278466 - RNA, 21 nt, Human
aaggaagagggaggggcuauu

SEQ ID NO: 278467 - RNA, 24 nt, Human
aaguuaagaaaaagcaaaggaaaa

SEQ ID NO: 278468 - RNA, 27 nt, Human
aauccuguaagcucaaaucccccgcug

SEQ ID NO: 278469 - RNA, 21 nt, Human
acaaaacaacccucagaacau

SEQ ID NO: 278470 - RNA, 22 nt, Human
acaaugccaaagccacauuuca

SEQ ID NO: 278471 - RNA, 19 nt, Human
accacagggcagaggugcu

SEQ ID NO: 278472 - RNA, 22 nt, Human
acccucagaacauauuuaaaau

SEQ ID NO: 278473 - RNA, 23 nt, Human
accucauccuuuccuuucucuuu

SEQ ID NO: 278474 - RNA, 19 nt, Human
acucaaaauuaggcuguuc

SEQ ID NO: 278475 - RNA, 22 nt, Human
agcaaaggaaaaaaaaaaaucc

SEQ ID NO: 278476 - RNA, 20 nt, Human
aggaaaaaaaaaaauccaga

SEQ ID NO: 278477 - RNA, 21 nt, Human
agggaggggcuauuguaggua

SEQ ID NO: 278478 - RNA, 21 nt, Human
auauggaauccucuggggcug

SEQ ID NO: 278479 - RNA, 18 nt, Human
auccagaauucauaaagu

SEQ ID NO: 278480 - RNA, 22 nt, Human
auccucuggggcugugaagccu

SEQ ID NO: 278481 - RNA, 23 nt, Human
caacaaugccaaagccacauuuc

SEQ ID NO: 278482 - RNA, 24 nt, Human
caagcaagucuuuucccuggacuc

SEQ ID NO: 278483 - RNA, 23 nt, Human
cacgagacaaaacaacccucaga

SEQ ID NO: 278484 - RNA, 23 nt, Human
cagaaaucauugagcaaaagaaa

SEQ ID NO: 278485 - RNA, 20 nt, Human
cagcuuuaccauggaggaau

SEQ ID NO: 278486 - RNA, 24 nt, Human
cauuuccaucccaacucuugagga

SEQ ID NO: 278487 - RNA, 22 nt, Human
ccacuggguguggcugaacaca

SEQ ID NO: 278488 - RNA, 23 nt, Human
ccccuccccacucccccaaucuc

SEQ ID NO: 278489 - RNA, 20 nt, Human
ccuccccacucccccaaucu

SEQ ID NO: 278490 - RNA, 20 nt, Human
ccucuggggcugugaagccu

SEQ ID NO: 278491 - RNA, 18 nt, Human
cgagacaaaacaacccuc

SEQ ID NO: 278492 - RNA, 20 nt, Human
cucuuccuuuccccuuuggg

SEQ ID NO: 278493 - RNA, 21 nt, Human
cugcauuuucuuaacaucaug

SEQ ID NO: 278494 - RNA, 19 nt, Human
cuucccccuccccacuccc

SEQ ID NO: 278495 - RNA, 23 nt, Human
gaacacgagacaaaacaacccuc

SEQ ID NO: 278496 - RNA, 19 nt, Human
gaagccuuugauucacagu

SEQ ID NO: 278497 - RNA, 18 nt, Human
gacuuaaaaaggucagua

SEQ ID NO: 278498 - RNA, 20 nt, Human
gagacaaaacaacccucaga

SEQ ID NO: 278499 - RNA, 19 nt, Human
gagcauuugcuuugaaagu

SEQ ID NO: 278500 - RNA, 18 nt, Human
gauuugguggagcuacca

SEQ ID NO: 278501 - RNA, 24 nt, Human
gcaaaggaaaaaaaaaaauccaga

SEQ ID NO: 278502 - RNA, 19 nt, Human
gcaauacaaauacccugau

SEQ ID NO: 278503 - RNA, 22 nt, Human
gccuugggaaggacacaucaga

SEQ ID NO: 278504 - RNA, 18 nt, Human
ggagaucaguuuaaauau

SEQ ID NO: 278505 - RNA, 21 nt, Human
ggaugaugaaaaagacugaug

SEQ ID NO: 278506 - RNA, 25 nt, Human
guucuucuucccccuccccacuccc

SEQ ID NO: 278507 - RNA, 23 nt, Human
uaagacacagacacucaaaauua

SEQ ID NO: 278508 - RNA, 19 nt, Human
uaaguugcuuuagcuaugg

SEQ ID NO: 278509 - RNA, 23 nt, Human
uacaguaacccuuagugaaaguu

SEQ ID NO: 278510 - RNA, 21 nt, Human
uacuuuuuuucuuccuguucu

SEQ ID NO: 278511 - RNA, 23 nt, Human
uagcagaaauaaggucuaaguug

SEQ ID NO: 278512 - RNA, 25 nt, Human
uauuuguucuacagcagacuuuggu

SEQ ID NO: 278513 - RNA, 20 nt, Human
ucaaaggaagagggaggggc

SEQ ID NO: 278514 - RNA, 22 nt, Human
ucaccauuuccaucccaacucu

SEQ ID NO: 278515 - RNA, 23 nt, Human
ucagaacauauuuaaaauggcaa

SEQ ID NO: 278516 - RNA, 18 nt, Human
ucaguaucacucucuucc

SEQ ID NO: 278517 - RNA, 18 nt, Human
uccaggacacauguaaaa

SEQ ID NO: 278518 - RNA, 23 nt, Human
uccguuuuucuucugaccguguu

SEQ ID NO: 278519 - RNA, 21 nt, Human
uccuguaagcucaaauccccc

SEQ ID NO: 278520 - RNA, 26 nt, Human
uccuguucuucuucccccuccccacu

SEQ ID NO: 278521 - RNA, 24 nt, Human
ucuuuuuguuuugaaagcagagcu

SEQ ID NO: 278522 - RNA, 22 nt, Human
ugaaaaagacugauguauacua

SEQ ID NO: 278523 - RNA, 24 nt, Human
ugaaauccaacaaugccaaagcca

SEQ ID NO: 278524 - RNA, 20 nt, Human
ugaagaauuugcgauucuuu

SEQ ID NO: 278525 - RNA, 21 nt, Human
ugaagccuuugauucacaguu

SEQ ID NO: 278526 - RNA, 20 nt, Human
ugacuauuugacauccuagc

SEQ ID NO: 278527 - RNA, 18 nt, Human
ugagcaaaagaaaagugc

SEQ ID NO: 278528 - RNA, 19 nt, Human
ugauccacaucugcacagc

SEQ ID NO: 278529 - RNA, 20 nt, Human
ugcaauacaaauacccugau

SEQ ID NO: 278530 - RNA, 18 nt, Human
ugcgauucuuuguccucc

SEQ ID NO: 278531 - RNA, 27 nt, Human
ugggaaggacacaucagacuacaguag

SEQ ID NO: 278532 - RNA, 24 nt, Human
uuaaaugaacuacaaacuuggaug

SEQ ID NO: 278533 - RNA, 23 nt, Human
uuccuuuccccuuuggggaagau

SEQ ID NO: 278534 - RNA, 26 nt, Human
uucuuuguccucccauauuuguucua

SEQ ID NO: 278535 - RNA, 19 nt, Human
uugacauccuagcaaaaug

SEQ ID NO: 278536 - RNA, 21 nt, Human
uugcaauacaaauacccugau

SEQ ID NO: 278537 - RNA, 20 nt, Human
uuuaaaauggcaagcuaaca

SEQ ID NO: 278538 - RNA, 22 nt, Human
uuugcgauucuuuguccuccca

SEQ ID NO: 278539 - RNA, 21 nt, Human
uuugguggagcuaccacuggg

SEQ ID NO: 278540 - RNA, 23 nt, Human
uuuuuuuuuuuuuuugacuuuaa

SEQ ID NO: 278541 - RNA, 23 nt, Human
aaacagccagaauuacaggaagc

SEQ ID NO: 278542 - RNA, 19 nt, Human
aaggagacagagccucucc

SEQ ID NO: 278543 - RNA, 22 nt, Human
aaggagacagagccucucccag

SEQ ID NO: 278544 - RNA, 21 nt, Human
aaguguugggauuacaagcau

SEQ ID NO: 278545 - RNA, 23 nt, Human
aaguguugggauuacaagcauga

SEQ ID NO: 278546 - RNA, 26 nt, Human
aaguguugggauuacaagcaugagcc

SEQ ID NO: 278547 - RNA, 23 nt, Human
aaugcuggagcaucagagagaaa

SEQ ID NO: 278548 - RNA, 18 nt, Human
aauuccugugggcaccuc

SEQ ID NO: 278549 - RNA, 18 nt, Human
acacugcagugaagggca

SEQ ID NO: 278550 - RNA, 19 nt, Human
acagagccucucccaggca

SEQ ID NO: 278551 - RNA, 21 nt, Human
accccgcucuguagcuccugg

SEQ ID NO: 278552 - RNA, 21 nt, Human
accucuggucagguucaaguc

SEQ ID NO: 278553 - RNA, 21 nt, Human
acucaggguccagcacucucc

SEQ ID NO: 278554 - RNA, 21 nt, Human
acucugaugaucuccagccuc

SEQ ID NO: 278555 - RNA, 20 nt, Human
acucugcagcuggugggccu

SEQ ID NO: 278556 - RNA, 21 nt, Human
agaaaguggguguagaccaga

SEQ ID NO: 278557 - RNA, 24 nt, Human
agaaaugcaaggagaaccgguacc

SEQ ID NO: 278558 - RNA, 21 nt, Human
agaauuacaggaagcagagag

SEQ ID NO: 278559 - RNA, 27 nt, Human
agacagagccucucccaggcacacagu

SEQ ID NO: 278560 - RNA, 19 nt, Human
agagauggggucucucugu

SEQ ID NO: 278561 - RNA, 20 nt, Human
agagccucucccaggcacac

SEQ ID NO: 278562 - RNA, 19 nt, Human
agcaggaaggagacagagc

SEQ ID NO: 278563 - RNA, 18 nt, Human
agcugagucuggaaaaac

SEQ ID NO: 278564 - RNA, 24 nt, Human
aggaaaugcuucauccuuggguca

SEQ ID NO: 278565 - RNA, 20 nt, Human
aggaagcagagaggcuacca

SEQ ID NO: 278566 - RNA, 20 nt, Human
aggaaggagacagagccucu

SEQ ID NO: 278567 - RNA, 20 nt, Human
aggccccuugcguuggccag

SEQ ID NO: 278568 - RNA, 18 nt, Human
agggagguccaggcccag

SEQ ID NO: 278569 - RNA, 19 nt, Human
aguucagaggagggaaaga

SEQ ID NO: 278570 - RNA, 23 nt, Human
augcgcucauugcagugcauaua

SEQ ID NO: 278571 - RNA, 21 nt, Human
auuacaagcaugagccaccac

SEQ ID NO: 278572 - RNA, 20 nt, Human
cacuuuguaggagccaggag

SEQ ID NO: 278573 - RNA, 18 nt, Human
cagcaggaaggagacaga

SEQ ID NO: 278574 - RNA, 21 nt, Human
cagcaggaaggagacagagcc

SEQ ID NO: 278575 - RNA, 23 nt, Human
cagcaggaaggagacagagccuc

SEQ ID NO: 278576 - RNA, 23 nt, Human
cagcaggcccuccauggaggauu

SEQ ID NO: 278577 - RNA, 23 nt, Human
cagcagggccuucuucuuuuuga

SEQ ID NO: 278578 - RNA, 20 nt, Human
cagccagaauuacaggaagc

SEQ ID NO: 278579 - RNA, 21 nt, Human
cagccagcaggcccuccaugg

SEQ ID NO: 278580 - RNA, 18 nt, Human
cagccagggcagaugcag

SEQ ID NO: 278581 - RNA, 19 nt, Human
cagcugcuccgggucgcag

SEQ ID NO: 278582 - RNA, 22 nt, Human
caggaaggagacagagccucuc

SEQ ID NO: 278583 - RNA, 18 nt, Human
cagggagguccaggccca

SEQ ID NO: 278584 - RNA, 23 nt, Human
caucugggagcugucggucacgg

SEQ ID NO: 278585 - RNA, 18 nt, Human
cauugcagugcauauagc

SEQ ID NO: 278586 - RNA, 25 nt, Human
cauugugcuccuucaauguggucua

SEQ ID NO: 278587 - RNA, 26 nt, Human
cauuuccacuuuguaggagccaggag

SEQ ID NO: 278588 - RNA, 18 nt, Human
ccaccacgcccagcugca

SEQ ID NO: 278589 - RNA, 18 nt, Human
ccaccaugccccugcccc

SEQ ID NO: 278590 - RNA, 24 nt, Human
ccacugucuccacccugggaagug

SEQ ID NO: 278591 - RNA, 18 nt, Human
ccagaaaguggguguagc

SEQ ID NO: 278592 - RNA, 21 nt, Human
ccagggcagaugcagcuaacg

SEQ ID NO: 278593 - RNA, 19 nt, Human
ccaguuccgcagcccgccg

SEQ ID NO: 278594 - RNA, 22 nt, Human
ccaucugggagcugucggucac

SEQ ID NO: 278595 - RNA, 23 nt, Human
ccaugggcagauggaacugggcu

SEQ ID NO: 278596 - RNA, 24 nt, Human
cccaauccuuuccuguccucgguu

SEQ ID NO: 278597 - RNA, 27 nt, Human
ccccaaugcuggagcaucagagagaaa

SEQ ID NO: 278598 - RNA, 19 nt, Human
ccccagugcuuuuugcacc

SEQ ID NO: 278599 - RNA, 24 nt, Human
ccccagugcuuuuugcaccucucc

SEQ ID NO: 278600 - RNA, 26 nt, Human
cccccaucucugcaaccccacugcag

SEQ ID NO: 278601 - RNA, 23 nt, Human
ccccugaccccuucaccuaccca

SEQ ID NO: 278602 - RNA, 24 nt, Human
cccgcucuguagcuccuggcucuu

SEQ ID NO: 278603 - RNA, 22 nt, Human
cccuccuguacugaagcucgcu

SEQ ID NO: 278604 - RNA, 18 nt, Human
cccugggagcuccugggg

SEQ ID NO: 278605 - RNA, 23 nt, Human
ccgccgagccauuuccacuuugu

SEQ ID NO: 278606 - RNA, 19 nt, Human
ccgggcuggucugugcugc

SEQ ID NO: 278607 - RNA, 20 nt, Human
ccgguaagcucccuggagac

SEQ ID NO: 278608 - RNA, 18 nt, Human
ccuaaguguugggauuac

SEQ ID NO: 278609 - RNA, 19 nt, Human
ccuaaguguugggauuaca

SEQ ID NO: 278610 - RNA, 24 nt, Human
ccuaaguguugggauuacaagcau

SEQ ID NO: 278611 - RNA, 22 nt, Human
ccuacugacaucuugcucuaga

SEQ ID NO: 278612 - RNA, 18 nt, Human
ccugaaggaggccgggcu

SEQ ID NO: 278613 - RNA, 20 nt, Human
ccugagcucaagugauucuc

SEQ ID NO: 278614 - RNA, 23 nt, Human
ccugagcucaagugauucuccug

SEQ ID NO: 278615 - RNA, 20 nt, Human
ccugccaacguugaggaaau

SEQ ID NO: 278616 - RNA, 19 nt, Human
cgaaaucaaagccaucuga

SEQ ID NO: 278617 - RNA, 22 nt, Human
cgaacugaacagacaguaacug

SEQ ID NO: 278618 - RNA, 23 nt, Human
cgguaagcucccuggagacccag

SEQ ID NO: 278619 - RNA, 24 nt, Human
cgugcagaaucucaguggcaucug

SEQ ID NO: 278620 - RNA, 26 nt, Human
cgugcagaaucucaguggcaucuggg

SEQ ID NO: 278621 - RNA, 23 nt, Human
cuaaguguugggauuacaagcau

SEQ ID NO: 278622 - RNA, 21 nt, Human
cucaagugauucuccugacuc

SEQ ID NO: 278623 - RNA, 20 nt, Human
cuccacugcuucugcccccc

SEQ ID NO: 278624 - RNA, 21 nt, Human
cucccccaucucugcaacccc

SEQ ID NO: 278625 - RNA, 23 nt, Human
cucccgcacuucagccucgugcc

SEQ ID NO: 278626 - RNA, 19 nt, Human
cuccugagcucaagugauu

SEQ ID NO: 278627 - RNA, 21 nt, Human
cucgugccgaauucuuggccu

SEQ ID NO: 278628 - RNA, 19 nt, Human
cucucccaggcacacaucc

SEQ ID NO: 278629 - RNA, 21 nt, Human
cucucccaggcacacaucccu

SEQ ID NO: 278630 - RNA, 25 nt, Human
cucucuggccucucaggggagagau

SEQ ID NO: 278631 - RNA, 23 nt, Human
cucugcagcuggugggccuuccu

SEQ ID NO: 278632 - RNA, 18 nt, Human
cucuggugaacaaacuuc

SEQ ID NO: 278633 - RNA, 21 nt, Human
cucuguagcuccuggcucuuc

SEQ ID NO: 278634 - RNA, 22 nt, Human
cucuuacacucuggggcccuau

SEQ ID NO: 278635 - RNA, 18 nt, Human
cugcuggucgccccccuc

SEQ ID NO: 278636 - RNA, 18 nt, Human
cuggccucucaggaauca

SEQ ID NO: 278637 - RNA, 24 nt, Human
cuguagugcacaucacuggccagc

SEQ ID NO: 278638 - RNA, 19 nt, Human
cuguggggaucucagcgcc

SEQ ID NO: 278639 - RNA, 24 nt, Human
cuucugagcaugccugaggcccag

SEQ ID NO: 278640 - RNA, 20 nt, Human
gaaaaacagccagaauuaca

SEQ ID NO: 278641 - RNA, 19 nt, Human
gaacuugauacugucuggu

SEQ ID NO: 278642 - RNA, 19 nt, Human
gaccccuucaccuacccaa

SEQ ID NO: 278643 - RNA, 19 nt, Human
gaguucaaaacaauagaau

SEQ ID NO: 278644 - RNA, 18 nt, Human
gaugaguucuccagccuu

SEQ ID NO: 278645 - RNA, 18 nt, Human
gauuacaagcaugagcca

SEQ ID NO: 278646 - RNA, 18 nt, Human
gcagcauucuccuccuug

SEQ ID NO: 278647 - RNA, 19 nt, Human
gccugaggcccagcugcuc

SEQ ID NO: 278648 - RNA, 21 nt, Human
gcucauuuccugccuuguagg

SEQ ID NO: 278649 - RNA, 18 nt, Human
gcuccuggcucuucuugg

SEQ ID NO: 278650 - RNA, 18 nt, Human
gcucuucuuggcgugcuc

SEQ ID NO: 278651 - RNA, 23 nt, Human
ggaaaaacagccagaauuacagg

SEQ ID NO: 278652 - RNA, 23 nt, Human
ggaaaucgcagggagguccaggc

SEQ ID NO: 278653 - RNA, 19 nt, Human
ggauggucggggaucaggg

SEQ ID NO: 278654 - RNA, 19 nt, Human
ggauuacaagcaugagcca

SEQ ID NO: 278655 - RNA, 19 nt, Human
ggcaugaaccaggucuggg

SEQ ID NO: 278656 - RNA, 20 nt, Human
gggcagaugcagcuaacggg

SEQ ID NO: 278657 - RNA, 19 nt, Human
gggcuggggcaggggcugc

SEQ ID NO: 278658 - RNA, 28 nt, Human
gggcuggucugugcugcugugaaacugg

SEQ ID NO: 278659 - RNA, 19 nt, Human
gugcaccauguccaugggc

SEQ ID NO: 278660 - RNA, 20 nt, Human
gugcugugaacuugugauac

SEQ ID NO: 278661 - RNA, 19 nt, Human
guguugggauuacaagcau

SEQ ID NO: 278662 - RNA, 23 nt, Human
guucaguuccuucucugagcugg

SEQ ID NO: 278663 - RNA, 22 nt, Human
uaaaagagauggggucucucug

SEQ ID NO: 278664 - RNA, 24 nt, Human
uaaaauuccugugggcaccucgau

SEQ ID NO: 278665 - RNA, 20 nt, Human
uaagcucccuggagacccag

SEQ ID NO: 278666 - RNA, 24 nt, Human
uacaagcaugagccaccacgccca

SEQ ID NO: 278667 - RNA, 20 nt, Human
uacucauugucacucuggag

SEQ ID NO: 278668 - RNA, 18 nt, Human
ucacugagauuugcagca

SEQ ID NO: 278669 - RNA, 19 nt, Human
ucagcauguucagccagca

SEQ ID NO: 278670 - RNA, 22 nt, Human
ucagccagcaggcccuccaugg

SEQ ID NO: 278671 - RNA, 20 nt, Human
uccaaggaggguggagguca

SEQ ID NO: 278672 - RNA, 22 nt, Human
uccaaggaggguggaggucauc

SEQ ID NO: 278673 - RNA, 23 nt, Human
uccccacucugaugaucuccagc

SEQ ID NO: 278674 - RNA, 18 nt, Human
ucccuaaguguugggauu

SEQ ID NO: 278675 - RNA, 19 nt, Human
ucccuggagacccaggccc

SEQ ID NO: 278676 - RNA, 20 nt, Human
ucccuggagacccaggcccc

SEQ ID NO: 278677 - RNA, 21 nt, Human
uccugagcucaagugauucuc

SEQ ID NO: 278678 - RNA, 24 nt, Human
uccugagcucaagugauucuccug

SEQ ID NO: 278679 - RNA, 26 nt, Human
uccuggcucuucuuggcgugcuccau

SEQ ID NO: 278680 - RNA, 22 nt, Human
uccuugggcccugggagcuccu

SEQ ID NO: 278681 - RNA, 23 nt, Human
uccuugggcccugggagcuccug

SEQ ID NO: 278682 - RNA, 23 nt, Human
ucgguucuuuuccacugucucca

SEQ ID NO: 278683 - RNA, 21 nt, Human
ucuagaacuccugagcucaag

SEQ ID NO: 278684 - RNA, 22 nt, Human
ucucaguggcaucuggguucac

SEQ ID NO: 278685 - RNA, 19 nt, Human
ucucccaggcacacauccc

SEQ ID NO: 278686 - RNA, 19 nt, Human
ucucuguugcccagauugg

SEQ ID NO: 278687 - RNA, 20 nt, Human
ucugcagcuggugggccuuc

SEQ ID NO: 278688 - RNA, 23 nt, Human
ucugcaggccucggucccgcagg

SEQ ID NO: 278689 - RNA, 21 nt, Human
ucuuacacucuggggcccuau

SEQ ID NO: 278690 - RNA, 23 nt, Human
ugacaugaacgggcaaacagcca

SEQ ID NO: 278691 - RNA, 18 nt, Human
ugacuuguagcgcaacuc

SEQ ID NO: 278692 - RNA, 18 nt, Human
ugagcucaagugauucuc

SEQ ID NO: 278693 - RNA, 22 nt, Human
ugagcugagucuggaaaaacag

SEQ ID NO: 278694 - RNA, 29 nt, Human
ugaggaaaugcuucauccuugggucaacc

SEQ ID NO: 278695 - RNA, 18 nt, Human
ugcuccgggucgcaggug

SEQ ID NO: 278696 - RNA, 21 nt, Human
uggaagaagacuaagaaagga

SEQ ID NO: 278697 - RNA, 22 nt, Human
uggacagacugcucauuuccug

SEQ ID NO: 278698 - RNA, 18 nt, Human
uggagccugccaacguug

SEQ ID NO: 278699 - RNA, 22 nt, Human
uggcagcaggaaggagacagag

SEQ ID NO: 278700 - RNA, 22 nt, Human
uggcaucaacacaggagggcau

SEQ ID NO: 278701 - RNA, 21 nt, Human
uggcaucuggguucaccuccc

SEQ ID NO: 278702 - RNA, 18 nt, Human
uggcauggaccaggugca

SEQ ID NO: 278703 - RNA, 18 nt, Human
ugggaaaucgcagggagg

SEQ ID NO: 278704 - RNA, 19 nt, Human
ugggauuacaagcaugagc

SEQ ID NO: 278705 - RNA, 22 nt, Human
ugggauuacaagcaugagccac

SEQ ID NO: 278706 - RNA, 23 nt, Human
ugggauuacaagcaugagccacc

SEQ ID NO: 278707 - RNA, 24 nt, Human
ugggauuacaagcaugagccacca

SEQ ID NO: 278708 - RNA, 24 nt, Human
ugggauuacaagcaugagccacca

SEQ ID NO: 278709 - RNA, 21 nt, Human
ugggcuggugggccauuccag

SEQ ID NO: 278710 - RNA, 24 nt, Human
ugggucaucgucgacacugcggua

SEQ ID NO: 278711 - RNA, 19 nt, Human
uguccucgguucuuuucca

SEQ ID NO: 278712 - RNA, 21 nt, Human
uguuggagaugauucagcaug

SEQ ID NO: 278713 - RNA, 24 nt, Human
uguugggauuacaagcaugagcca

SEQ ID NO: 278714 - RNA, 19 nt, Human
uucagccucgugccgaauu

SEQ ID NO: 278715 - RNA, 22 nt, Human
uucugggauggugaggcccagg

SEQ ID NO: 278716 - RNA, 18 nt, Human
uugccgaaaucaaagcca

SEQ ID NO: 278717 - RNA, 20 nt, Human
uugggauuacaagcaugagc

SEQ ID NO: 278718 - RNA, 20 nt, Human
uugggcccugggagcuccug

SEQ ID NO: 278719 - RNA, 22 nt, Human
uugggcccugggagcuccuggg

SEQ ID NO: 278720 - RNA, 21 nt, Human
uuuccuguccucgguucuuuu

SEQ ID NO: 278721 - RNA, 20 nt, Human
uuuguaggagccaggagggg

SEQ ID NO: 278722 - RNA, 25 nt, Human
uuuuuauuuaaaagagauggggucu

SEQ ID NO: 278723 - RNA, 25 nt, Human
uuuuuugcuccuucaauguggucua

SEQ ID NO: 278724 - RNA, 19 nt, Human
uuuuuuuuuuuuacggggg

SEQ ID NO: 278725 - RNA, 21 nt, Human
uuuuuuuuuuuuuugcuuuca

SEQ ID NO: 278726 - RNA, 21 nt, Human
uuuuuuuuuuuuuuuuacggg

SEQ ID NO: 278727 - RNA, 19 nt, Human
uuuuuuuuuuuuuuuugcu

SEQ ID NO: 278728 - RNA, 19 nt, Human
uuuuuuuuuuuuuuuugcu

SEQ ID NO: 278729 - RNA, 22 nt, Human
uuuuuuuuuuuuuuuugcuccu

SEQ ID NO: 278730 - RNA, 22 nt, Human
uuuuuuuuuuuuuuuugcuccu

SEQ ID NO: 278731 - RNA, 18 nt, Human
uuuuuuuuuuuuuuuuug

SEQ ID NO: 278732 - RNA, 20 nt, Human
uuuuuuuuuuuuuuuuugcu

SEQ ID NO: 278733 - RNA, 20 nt, Human
uuuuuuuuuuuuuuuuugcu

SEQ ID NO: 278734 - RNA, 24 nt, Human
uuuuuuuuuuuuuuuuuuacgggg

SEQ ID NO: 278735 - RNA, 25 nt, Human
uuuuuuuuuuuuuuuuuugcuccuu

SEQ ID NO: 278736 - RNA, 23 nt, Human
uuuuuuuuuuuuuuuuuugcuuu

SEQ ID NO: 278737 - RNA, 20 nt, Human
uuuuuuuuuuuuuuuuuugg

SEQ ID NO: 278738 - RNA, 20 nt, Human
uuuuuuuuuuuuuuuuuugg

SEQ ID NO: 278739 - RNA, 21 nt, Human
aaaaaggcacuucacugugaa

SEQ ID NO: 278740 - RNA, 22 nt, Human
aaauguuggagaccccggaacc

SEQ ID NO: 278741 - RNA, 22 nt, Human
aacugcuuuucagaugaaaaac

SEQ ID NO: 278742 - RNA, 18 nt, Human
aaguagcaggagcuucuc

SEQ ID NO: 278743 - RNA, 19 nt, Human
acaggaauacuucuccucc

SEQ ID NO: 278744 - RNA, 26 nt, Human
accccggaaccgccaugaacagcccc

SEQ ID NO: 278745 - RNA, 22 nt, Human
acugagagcuggggaaguagca

SEQ ID NO: 278746 - RNA, 19 nt, Human
acugcuuuucagaugaaaa

SEQ ID NO: 278747 - RNA, 21 nt, Human
agacugaagacagcaacagga

SEQ ID NO: 278748 - RNA, 21 nt, Human
agagguguguugagguguguu

SEQ ID NO: 278749 - RNA, 21 nt, Human
aggccucuggaaaaccaauuu

SEQ ID NO: 278750 - RNA, 22 nt, Human
agggugucagugcagcuugaaa

SEQ ID NO: 278751 - RNA, 20 nt, Human
auaacagggaguaacaagag

SEQ ID NO: 278752 - RNA, 25 nt, Human
caacaguaaaaagaaaaaaaaaauc

SEQ ID NO: 278753 - RNA, 26 nt, Human
cacagaccgggaaaaauguuggagac

SEQ ID NO: 278754 - RNA, 23 nt, Human
caccagcaagaaccucaagcucc

SEQ ID NO: 278755 - RNA, 22 nt, Human
cagaaaaauaacagggaguaaa

SEQ ID NO: 278756 - RNA, 22 nt, Human
cagcaacaggaauacuucuccu

SEQ ID NO: 278757 - RNA, 26 nt, Human
cagcaacaggaauacuucuccuccag

SEQ ID NO: 278758 - RNA, 24 nt, Human
cagccgcacccagacccgccccuc

SEQ ID NO: 278759 - RNA, 20 nt, Human
caggagcuucucugugagac

SEQ ID NO: 278760 - RNA, 18 nt, Human
ccacugccucugcuuugg

SEQ ID NO: 278761 - RNA, 20 nt, Human
ccagacccgccccucccacc

SEQ ID NO: 278762 - RNA, 23 nt, Human
ccagggcagaaaaauaacaggga

SEQ ID NO: 278763 - RNA, 23 nt, Human
ccccaaaacaggccucuggaaaa

SEQ ID NO: 278764 - RNA, 20 nt, Human
ccccggccacgugggccucc

SEQ ID NO: 278765 - RNA, 24 nt, Human
cccggaaccgccaugaacagcccc

SEQ ID NO: 278766 - RNA, 19 nt, Human
ccgcacccagacccgcccc

SEQ ID NO: 278767 - RNA, 20 nt, Human
cgcacccagacccgccccuc

SEQ ID NO: 278768 - RNA, 22 nt, Human
cgccaugaacagcccccaccaa

SEQ ID NO: 278769 - RNA, 23 nt, Human
cgccccggccacgugggccuccg

SEQ ID NO: 278770 - RNA, 26 nt, Human
cggaaccgccaugaacagcccccccu

SEQ ID NO: 278771 - RNA, 28 nt, Human
gaaaaauaacagggaguaaccgguaccc

SEQ ID NO: 278772 - RNA, 20 nt, Human
gaacagcccccaccaaggag

SEQ ID NO: 278773 - RNA, 18 nt, Human
gagaacuucucaaauaga

SEQ ID NO: 278774 - RNA, 22 nt, Human
gccgcacccagacccgccccuc

SEQ ID NO: 278775 - RNA, 23 nt, Human
gccgcacccagacccgccccucc

SEQ ID NO: 278776 - RNA, 21 nt, Human
gcucaagacacuguuuucaau

SEQ ID NO: 278777 - RNA, 20 nt, Human
gcuguggaagaacccagggc

SEQ ID NO: 278778 - RNA, 19 nt, Human
gggaaagccccaaaacagg

SEQ ID NO: 278779 - RNA, 22 nt, Human
gguguguuugugcuguggaaga

SEQ ID NO: 278780 - RNA, 24 nt, Human
guacaaaauggcaucugcucucaa

SEQ ID NO: 278781 - RNA, 19 nt, Human
guguugagguguguuugug

SEQ ID NO: 278782 - RNA, 22 nt, Human
guuugaaaaucacugaucacag

SEQ ID NO: 278783 - RNA, 19 nt, Human
uaacaaugcaccaaaguuu

SEQ ID NO: 278784 - RNA, 18 nt, Human
uaacagggaguaacaaga

SEQ ID NO: 278785 - RNA, 23 nt, Human
uaaccuaugaaaaaaguggagau

SEQ ID NO: 278786 - RNA, 20 nt, Human
ucaaaauucaguauucauuu

SEQ ID NO: 278787 - RNA, 21 nt, Human
ucaacaguaaaaagaaaaaaa

SEQ ID NO: 278788 - RNA, 25 nt, Human
ucaacaguaaaaagaaaaaaaaaau

SEQ ID NO: 278789 - RNA, 23 nt, Human
uccgaaccacgagucaugcggca

SEQ ID NO: 278790 - RNA, 18 nt, Human
ucuagagcagaugccagu

SEQ ID NO: 278791 - RNA, 18 nt, Human
ugaaaaaccugggguggc

SEQ ID NO: 278792 - RNA, 18 nt, Human
ugaaaaaccugggguggc

SEQ ID NO: 278793 - RNA, 18 nt, Human
ugaaaguggcucuuuucu

SEQ ID NO: 278794 - RNA, 24 nt, Human
ugacauuucuccaaaaauuaggca

SEQ ID NO: 278795 - RNA, 22 nt, Human
ugagguguguuugugcugugga

SEQ ID NO: 278796 - RNA, 25 nt, Human
ugccaggcgccugaguccccgcccc

SEQ ID NO: 278797 - RNA, 22 nt, Human
ugccucugcuuuggacagauuu

SEQ ID NO: 278798 - RNA, 19 nt, Human
ugcuacuuuagagcucaag

SEQ ID NO: 278799 - RNA, 20 nt, Human
ugggguggcagagguguguu

SEQ ID NO: 278800 - RNA, 19 nt, Human
uguggaagaacccagggca

SEQ ID NO: 278801 - RNA, 18 nt, Human
uuagagcucaagacacug

SEQ ID NO: 278802 - RNA, 23 nt, Human
uucaacaguaaaaagaaaaaaaa

SEQ ID NO: 278803 - RNA, 21 nt, Human
uucuccugggaaagccccaaa

SEQ ID NO: 278804 - RNA, 22 nt, Human
uuuacaauauuugaacaucugc

SEQ ID NO: 278805 - RNA, 22 nt, Human
uuucaguuucaucuuucuccug

SEQ ID NO: 278806 - RNA, 21 nt, Human
aaaacaaguaaacaaagugca

SEQ ID NO: 278807 - RNA, 20 nt, Human
aaaaguagacuuuuauuaca

SEQ ID NO: 278808 - RNA, 22 nt, Human
aaacaaguaaacaaagugcaga

SEQ ID NO: 278809 - RNA, 24 nt, Human
aaaggaugaugcucagaaccaggg

SEQ ID NO: 278810 - RNA, 20 nt, Human
aaggcggcugcugagaaggc

SEQ ID NO: 278811 - RNA, 22 nt, Human
accuuucucucccgccccggcc

SEQ ID NO: 278812 - RNA, 21 nt, Human
agagaggggaggggaaaggau

SEQ ID NO: 278813 - RNA, 21 nt, Human
agaggggaggaagagagggga

SEQ ID NO: 278814 - RNA, 24 nt, Human
agaggggaggaagagaggggaggg

SEQ ID NO: 278815 - RNA, 23 nt, Human
agggccaccacugcagcaccacc

SEQ ID NO: 278816 - RNA, 21 nt, Human
agugcagaggggaggaagaga

SEQ ID NO: 278817 - RNA, 20 nt, Human
aucacagcgacucccucaca

SEQ ID NO: 278818 - RNA, 21 nt, Human
augcucagaaccagggagccc

SEQ ID NO: 278819 - RNA, 19 nt, Human
caaaacaaguaaacaaagu

SEQ ID NO: 278820 - RNA, 19 nt, Human
caccuuucucucccgcccc

SEQ ID NO: 278821 - RNA, 18 nt, Human
cagaggggaggaagagag

SEQ ID NO: 278822 - RNA, 28 nt, Human
caggcccacgucugugcaaaacaaguaa

SEQ ID NO: 278823 - RNA, 19 nt, Human
ccccggaucacagcgacuc

SEQ ID NO: 278824 - RNA, 18 nt, Human
ccgcgccccgcagccugc

SEQ ID NO: 278825 - RNA, 19 nt, Human
ccgugggccuccuuuccac

SEQ ID NO: 278826 - RNA, 20 nt, Human
cgcuucagcuccagcucggg

SEQ ID NO: 278827 - RNA, 22 nt, Human
cuagugcccgugggccuccuuu

SEQ ID NO: 278828 - RNA, 19 nt, Human
cugcagcaccaccuuucuc

SEQ ID NO: 278829 - RNA, 20 nt, Human
cugcagcaccaccuuucucu

SEQ ID NO: 278830 - RNA, 18 nt, Human
cuggaaggaacacucagg

SEQ ID NO: 278831 - RNA, 24 nt, Human
cuggggggaagggacaggagggcu

SEQ ID NO: 278832 - RNA, 18 nt, Human
gaauggccccccagggcc

SEQ ID NO: 278833 - RNA, 19 nt, Human
gagaggggaggggaaagga

SEQ ID NO: 278834 - RNA, 18 nt, Human
gaggaagagaggggaggg

SEQ ID NO: 278835 - RNA, 19 nt, Human
gcuucagcuccagcucggg

SEQ ID NO: 278836 - RNA, 20 nt, Human
ggagcccccccagcccuccu

SEQ ID NO: 278837 - RNA, 24 nt, Human
ggagggcugcagcacguccaggga

SEQ ID NO: 278838 - RNA, 20 nt, Human
uacagcagcaacugaggcga

SEQ ID NO: 278839 - RNA, 21 nt, Human
uacagcagcaacugaggcgaa

SEQ ID NO: 278840 - RNA, 18 nt, Human
ucacagcgacucccucac

SEQ ID NO: 278841 - RNA, 22 nt, Human
ucagcgacuagcccccaacuag

SEQ ID NO: 278842 - RNA, 24 nt, Human
ucagcuccagcucggguuccgggg

SEQ ID NO: 278843 - RNA, 22 nt, Human
ucaggccucccgacuccgcgcc

SEQ ID NO: 278844 - RNA, 24 nt, Human
uccacacaggcugggcgggagccg

SEQ ID NO: 278845 - RNA, 23 nt, Human
ugaauaauaaaggagggaagggg

SEQ ID NO: 278846 - RNA, 23 nt, Human
ugaggcgaaucgaauggcccccc

SEQ ID NO: 278847 - RNA, 24 nt, Human
uggggggaagggacaggagggcug

SEQ ID NO: 278848 - RNA, 19 nt, Human
aaaaagacuaacgacagcu

SEQ ID NO: 278849 - RNA, 23 nt, Human
aaacugucuuauuuuuauuuuca

SEQ ID NO: 278850 - RNA, 24 nt, Human
aaagguggggggaggggggaaccc

SEQ ID NO: 278851 - RNA, 20 nt, Human
aaaugccgaaaugcacugca

SEQ ID NO: 278852 - RNA, 22 nt, Human
aaccauaaaggaccacaaaauc

SEQ ID NO: 278853 - RNA, 24 nt, Human
aaugacaguaaucuaggacccaga

SEQ ID NO: 278854 - RNA, 26 nt, Human
acaccucccaaauguuuuucugauuu

SEQ ID NO: 278855 - RNA, 18 nt, Human
acauaaauuacaaaagag

SEQ ID NO: 278856 - RNA, 21 nt, Human
acccagaauggacuggaccag

SEQ ID NO: 278857 - RNA, 19 nt, Human
acuaggccuacugugcccc

SEQ ID NO: 278858 - RNA, 20 nt, Human
acucuugacaaugaaaacgg

SEQ ID NO: 278859 - RNA, 20 nt, Human
acuuugaagaagcucuuaag

SEQ ID NO: 278860 - RNA, 20 nt, Human
agaaaauauacucucuaccc

SEQ ID NO: 278861 - RNA, 24 nt, Human
agagaaugucacaaagauucguuc

SEQ ID NO: 278862 - RNA, 22 nt, Human
agauuuugugaaacguugugug

SEQ ID NO: 278863 - RNA, 19 nt, Human
agcaaguauauacuguaca

SEQ ID NO: 278864 - RNA, 22 nt, Human
aggaaaucaagaauacccauuu

SEQ ID NO: 278865 - RNA, 22 nt, Human
aggaacuuuuaaaaccacauuu

SEQ ID NO: 278866 - RNA, 18 nt, Human
agguggggggagggggga

SEQ ID NO: 278867 - RNA, 19 nt, Human
agguggggggaggggggaa

SEQ ID NO: 278868 - RNA, 20 nt, Human
auauacucucuacccauaug

SEQ ID NO: 278869 - RNA, 21 nt, Human
augccaacagcuaagaccagc

SEQ ID NO: 278870 - RNA, 19 nt, Human
auuucacaacaauguccac

SEQ ID NO: 278871 - RNA, 22 nt, Human
caaacaagugcuuaggauaaac

SEQ ID NO: 278872 - RNA, 20 nt, Human
caacaaaauaucuacauaua

SEQ ID NO: 278873 - RNA, 19 nt, Human
caagagacagguggaucug

SEQ ID NO: 278874 - RNA, 24 nt, Human
cacauuguuuaugccuaaaaacaa

SEQ ID NO: 278875 - RNA, 24 nt, Human
cagaagguccacugggcuagacac

SEQ ID NO: 278876 - RNA, 21 nt, Human
ccaagaguagguaauaguucu

SEQ ID NO: 278877 - RNA, 19 nt, Human
ccaaggcaaaccuguuuug

SEQ ID NO: 278878 - RNA, 20 nt, Human
ccaggacccuggaccgccgg

SEQ ID NO: 278879 - RNA, 24 nt, Human
ccagguuacuaggccuacugugcc

SEQ ID NO: 278880 - RNA, 21 nt, Human
cccaggacccuggaccgccgg

SEQ ID NO: 278881 - RNA, 20 nt, Human
cccauaggcaaagcucugaa

SEQ ID NO: 278882 - RNA, 20 nt, Human
ccgccgguguccuccguucu

SEQ ID NO: 278883 - RNA, 18 nt, Human
ccgcgcccuccgcucagc

SEQ ID NO: 278884 - RNA, 19 nt, Human
cucuugacaaugaaaacgg

SEQ ID NO: 278885 - RNA, 21 nt, Human
cugaaauguauccauaacaau

SEQ ID NO: 278886 - RNA, 29 nt, Human
cugaauuuccuuuucuucuuucacaaaaa

SEQ ID NO: 278887 - RNA, 25 nt, Human
cuuuuagacaaugacaguaaucuag

SEQ ID NO: 278888 - RNA, 21 nt, Human
gaaaccauaaaggaccacaaa

SEQ ID NO: 278889 - RNA, 22 nt, Human
gacagcuauacauagucaccaa

SEQ ID NO: 278890 - RNA, 18 nt, Human
gacaguaaucuaggaccc

SEQ ID NO: 278891 - RNA, 20 nt, Human
gaccagcuuuggucgaaguc

SEQ ID NO: 278892 - RNA, 24 nt, Human
ggggauaaagaaugcugagagaga

SEQ ID NO: 278893 - RNA, 22 nt, Human
gggggaggggggaacccaauag

SEQ ID NO: 278894 - RNA, 21 nt, Human
guaagcaucagcaaugugacu

SEQ ID NO: 278895 - RNA, 24 nt, Human
guauauacuguacaaacuguuccu

SEQ ID NO: 278896 - RNA, 22 nt, Human
gugaaaaaugaauauagagaca

SEQ ID NO: 278897 - RNA, 23 nt, Human
gugauguugcauuauuuuuuauc

SEQ ID NO: 278898 - RNA, 22 nt, Human
uaaaaacaaccgaacauagaaa

SEQ ID NO: 278899 - RNA, 23 nt, Human
uaaaaacaaccgaacauagaaau

SEQ ID NO: 278900 - RNA, 21 nt, Human
uaaaaguuacuuuuagacaau

SEQ ID NO: 278901 - RNA, 28 nt, Human
uaaacaaaguaucaaaccaaucaacggg

SEQ ID NO: 278902 - RNA, 22 nt, Human
uaacaccuauaagcauauagca

SEQ ID NO: 278903 - RNA, 25 nt, Human
uacaguaacacucuugacaaugaaa

SEQ ID NO: 278904 - RNA, 19 nt, Human
uacauacaccauuacuugg

SEQ ID NO: 278905 - RNA, 24 nt, Human
uacuguacaaacuguuccuaacag

SEQ ID NO: 278906 - RNA, 18 nt, Human
uagaacacugugcugcug

SEQ ID NO: 278907 - RNA, 21 nt, Human
uagagaauacuacaguaacac

SEQ ID NO: 278908 - RNA, 22 nt, Human
uaguauaaacaaaguaucaaac

SEQ ID NO: 278909 - RNA, 26 nt, Human
uaguauaaacaaaguaucaaaccaug

SEQ ID NO: 278910 - RNA, 25 nt, Human
uauaaaaagcuuuacuuaaaauuaa

SEQ ID NO: 278911 - RNA, 21 nt, Human
uaugcuuuuaguguuggaaua

SEQ ID NO: 278912 - RNA, 19 nt, Human
uauuacagaagugacccuu

SEQ ID NO: 278913 - RNA, 19 nt, Human
ucacaaagauucguucucg

SEQ ID NO: 278914 - RNA, 23 nt, Human
ucacaacaauguccacaaagaca

SEQ ID NO: 278915 - RNA, 19 nt, Human
ucaguaagcaucagcaaug

SEQ ID NO: 278916 - RNA, 22 nt, Human
ucaguucugaggaaaucaagaa

SEQ ID NO: 278917 - RNA, 22 nt, Human
ucauguuuccuucuuuucccag

SEQ ID NO: 278918 - RNA, 19 nt, Human
uccacaaagacauugaagu

SEQ ID NO: 278919 - RNA, 20 nt, Human
uccugcagaggaaauaacag

SEQ ID NO: 278920 - RNA, 27 nt, Human
ucucccaaaaagacuaacgacagcuuu

SEQ ID NO: 278921 - RNA, 22 nt, Human
ucuucagaagguccacugggcu

SEQ ID NO: 278922 - RNA, 26 nt, Human
ugaaaaaugaauauagagacaugaaa

SEQ ID NO: 278923 - RNA, 19 nt, Human
ugacaaacaagugcuuagg

SEQ ID NO: 278924 - RNA, 19 nt, Human
ugauuuguuuuugauucuu

SEQ ID NO: 278925 - RNA, 21 nt, Human
ugcacagauaaauuucgcauc

SEQ ID NO: 278926 - RNA, 19 nt, Human
ugcagaguuuugaacacuu

SEQ ID NO: 278927 - RNA, 26 nt, Human
ugccuaaaaacaaccgaacauagaag

SEQ ID NO: 278928 - RNA, 19 nt, Human
ugcugagagagaaugucac

SEQ ID NO: 278929 - RNA, 18 nt, Human
uggaccgccgguguccuc

SEQ ID NO: 278930 - RNA, 24 nt, Human
uggcaaaugaaacugagcauuccu

SEQ ID NO: 278931 - RNA, 19 nt, Human
uggcacaaaugccgaaaug

SEQ ID NO: 278932 - RNA, 23 nt, Human
uggcacaaaugccgaaaugcacu

SEQ ID NO: 278933 - RNA, 22 nt, Human
uggggggaggggggaacccaau

SEQ ID NO: 278934 - RNA, 20 nt, Human
uguaaaaaguagaacacugu

SEQ ID NO: 278935 - RNA, 21 nt, Human
uguaauagaaaccauaaagga

SEQ ID NO: 278936 - RNA, 26 nt, Human
uguacaaacuguuccuaacagucucc

SEQ ID NO: 278937 - RNA, 18 nt, Human
uguccuuuaaauguggag

SEQ ID NO: 278938 - RNA, 24 nt, Human
uguuauagauuuucauauuuggag

SEQ ID NO: 278939 - RNA, 19 nt, Human
uguucuuccuuuuaauucu

SEQ ID NO: 278940 - RNA, 19 nt, Human
uguuuugucuuuuuauauu

SEQ ID NO: 278941 - RNA, 19 nt, Human
uuacauagguaaagucuug

SEQ ID NO: 278942 - RNA, 21 nt, Human
uucaagagacagguggaucug

SEQ ID NO: 278943 - RNA, 25 nt, Human
uucacugcauuaauuagcuuaccuc

SEQ ID NO: 278944 - RNA, 20 nt, Human
uuuccaaucccauucacugc

SEQ ID NO: 278945 - RNA, 20 nt, Human
uuucugauuucugaagcuau

SEQ ID NO: 278946 - RNA, 22 nt, Human
uuugauagauauuguuuaugaa

SEQ ID NO: 278947 - RNA, 21 nt, Human
aggcgguggcggccggcccug

SEQ ID NO: 278948 - RNA, 21 nt, Human
aucccgcuucccaggacccac

SEQ ID NO: 278949 - RNA, 18 nt, Human
caccaagcuggagcgaug

SEQ ID NO: 278950 - RNA, 26 nt, Human
caccaagcuggagcgauggacauccc

SEQ ID NO: 278951 - RNA, 18 nt, Human
caggccaacgugacugca

SEQ ID NO: 278952 - RNA, 20 nt, Human
cccuggugcugccgcagccg

SEQ ID NO: 278953 - RNA, 22 nt, Human
cccuggugcugccgcagccgcg

SEQ ID NO: 278954 - RNA, 19 nt, Human
ccugaaccccucccccacc

SEQ ID NO: 278955 - RNA, 19 nt, Human
cgauggacaucccgcuucc

SEQ ID NO: 278956 - RNA, 25 nt, Human
cuagaggcgguggcggccggcccuu

SEQ ID NO: 278957 - RNA, 22 nt, Human
gaacaggccugaaccccucccc

SEQ ID NO: 278958 - RNA, 24 nt, Human
gaacaggccugaaccccuccccca

SEQ ID NO: 278959 - RNA, 22 nt, Human
gacccaccuccuccgcguucua

SEQ ID NO: 278960 - RNA, 23 nt, Human
gcccuggugcugccgcagccgcg

SEQ ID NO: 278961 - RNA, 21 nt, Human
gccugaaccccucccccaccc

SEQ ID NO: 278962 - RNA, 21 nt, Human
ggcccuggugcugccgcagcc

SEQ ID NO: 278963 - RNA, 20 nt, Human
ugccgcagccgcggggaaca

SEQ ID NO: 278964 - RNA, 20 nt, Human
uuuuuuuucaggccaacgug

SEQ ID NO: 278965 - RNA, 23 nt, Human
uuuuuuuuuuuuuuuuuuucagg

SEQ ID NO: 278966 - RNA, 22 nt, Human
aaaaaaaaaaagguuaacaaaa

SEQ ID NO: 278967 - RNA, 26 nt, Human
aaacuuuccuuccaaagucgagagac

SEQ ID NO: 278968 - RNA, 22 nt, Human
aacugggugaauuauuguuucc

SEQ ID NO: 278969 - RNA, 23 nt, Human
acacauacacacacauaaguaua

SEQ ID NO: 278970 - RNA, 19 nt, Human
accccaugcuggagccucu

SEQ ID NO: 278971 - RNA, 20 nt, Human
acccugguaugaacaaaaac

SEQ ID NO: 278972 - RNA, 22 nt, Human
acccugguaugaacaaaaacug

SEQ ID NO: 278973 - RNA, 21 nt, Human
acugggugaauuauuguuucc

SEQ ID NO: 278974 - RNA, 19 nt, Human
agaugggaggcugaggccc

SEQ ID NO: 278975 - RNA, 22 nt, Human
auauauguauauauauacuuua

SEQ ID NO: 278976 - RNA, 24 nt, Human
augcggguuucauacauauauaua

SEQ ID NO: 278977 - RNA, 19 nt, Human
auguaaauguguaugucca

SEQ ID NO: 278978 - RNA, 21 nt, Human
auguguauguccauauguaca

SEQ ID NO: 278979 - RNA, 24 nt, Human
cacacacauaaguauacacacaca

SEQ ID NO: 278980 - RNA, 18 nt, Human
cagcaccugggccagccc

SEQ ID NO: 278981 - RNA, 19 nt, Human
cagucccuggaccuugcaa

SEQ ID NO: 278982 - RNA, 18 nt, Human
cauacauauauauauaua

SEQ ID NO: 278983 - RNA, 18 nt, Human
cauacauauauauauaua

SEQ ID NO: 278984 - RNA, 22 nt, Human
cauacauauauauauauauaua

SEQ ID NO: 278985 - RNA, 22 nt, Human
cauacauauauauauauauaua

SEQ ID NO: 278986 - RNA, 22 nt, Human
cauauguacacauauacauaua

SEQ ID NO: 278987 - RNA, 21 nt, Human
caugacccugguaugaacaaa

SEQ ID NO: 278988 - RNA, 18 nt, Human
caugagaucaaggauucc

SEQ ID NO: 278989 - RNA, 24 nt, Human
ccacgcagucccuggaccuugcaa

SEQ ID NO: 278990 - RNA, 22 nt, Human
ccauuugauugcaccucugcaa

SEQ ID NO: 278991 - RNA, 24 nt, Human
ccccaugcuggagccucuuuccuc

SEQ ID NO: 278992 - RNA, 28 nt, Human
cccugguaugaacaaaaacugggugacu

SEQ ID NO: 278993 - RNA, 19 nt, Human
ccuaccacccacuaaacug

SEQ ID NO: 278994 - RNA, 18 nt, Human
ccugggccagcccgagga

SEQ ID NO: 278995 - RNA, 19 nt, Human
cgccugaguuugucaguag

SEQ ID NO: 278996 - RNA, 20 nt, Human
cgccugaguuugucaguagc

SEQ ID NO: 278997 - RNA, 20 nt, Human
cucacacauacacacacaua

SEQ ID NO: 278998 - RNA, 20 nt, Human
cucugcaaacguguaaaaaa

SEQ ID NO: 278999 - RNA, 23 nt, Human
gaaguccugccacaauuuggcuu

SEQ ID NO: 279000 - RNA, 22 nt, Human
gcaaacguguaaaaaauuuuga

SEQ ID NO: 279001 - RNA, 21 nt, Human
gcaugacccugguaugaacaa

SEQ ID NO: 279002 - RNA, 20 nt, Human
gcgcaccuugauuucauaca

SEQ ID NO: 279003 - RNA, 19 nt, Human
gcuuuggugaagggcaugg

SEQ ID NO: 279004 - RNA, 24 nt, Human
ggagaugggaggcugaggcccggg

SEQ ID NO: 279005 - RNA, 18 nt, Human
gucaccuccgccugaguu

SEQ ID NO: 279006 - RNA, 18 nt, Human
guccauauguacacauau

SEQ ID NO: 279007 - RNA, 23 nt, Human
guggccacugggaggcagcuuug

SEQ ID NO: 279008 - RNA, 24 nt, Human
uaacaaaacuuuccuuccaaaguc

SEQ ID NO: 279009 - RNA, 25 nt, Human
uacacacacauuuccgcagaaagaa

SEQ ID NO: 279010 - RNA, 25 nt, Human
uacauauauauauauauauauguaa

SEQ ID NO: 279011 - RNA, 20 nt, Human
uacccuaccacccacuaaac

SEQ ID NO: 279012 - RNA, 23 nt, Human
uagacuagaaaacgaugccauaa

SEQ ID NO: 279013 - RNA, 23 nt, Human
uauauauauauguauauauauac

SEQ ID NO: 279014 - RNA, 21 nt, Human
uauauauauguaaauguguau

SEQ ID NO: 279015 - RNA, 18 nt, Human
uauauauauguauauaua

SEQ ID NO: 279016 - RNA, 18 nt, Human
uauauauguauauauaua

SEQ ID NO: 279017 - RNA, 24 nt, Human
uauguaaauguguauguccauaug

SEQ ID NO: 279018 - RNA, 18 nt, Human
uauguacacauauacaua

SEQ ID NO: 279019 - RNA, 25 nt, Human
uauguacacauauacauauauucac

SEQ ID NO: 279020 - RNA, 25 nt, Human
uauguauauauauacuuuauauaua

SEQ ID NO: 279021 - RNA, 25 nt, Human
uauguauauauauacuuuauauaua

SEQ ID NO: 279022 - RNA, 30 nt, Human
uauguauauauauacuuuauauauauguaa

SEQ ID NO: 279023 - RNA, 30 nt, Human
uauguccauauguacacauauacauagugu

SEQ ID NO: 279024 - RNA, 24 nt, Human
ucccagaaaaucaagaguggugcu

SEQ ID NO: 279025 - RNA, 21 nt, Human
ucucagcuggcagaccacgca

SEQ ID NO: 279026 - RNA, 24 nt, Human
ugaguccagcagggagaguucugu

SEQ ID NO: 279027 - RNA, 23 nt, Human
ugcaagcacaucucugacccacc

SEQ ID NO: 279028 - RNA, 21 nt, Human
uggcagaccacgcagucccug

SEQ ID NO: 279029 - RNA, 24 nt, Human
ugggaaggagaggagaugggaggc

SEQ ID NO: 279030 - RNA, 18 nt, Human
ugggaggcugaggcccgg

SEQ ID NO: 279031 - RNA, 22 nt, Human
ugggaggcugaggcccgggagc

SEQ ID NO: 279032 - RNA, 18 nt, Human
ugggugacugugucuggc

SEQ ID NO: 279033 - RNA, 21 nt, Human
uguauauauauacuuuauaua

SEQ ID NO: 279034 - RNA, 20 nt, Human
uguggccacugggaggcagc

SEQ ID NO: 279035 - RNA, 24 nt, Human
uguguauguccauauguacacaua

SEQ ID NO: 279036 - RNA, 26 nt, Human
uuaaaaaaaaaaagguuaacaaaacu

SEQ ID NO: 279037 - RNA, 19 nt, Human
uucauacauauauauauau

SEQ ID NO: 279038 - RNA, 23 nt, Human
uucauacauauauauauauauau

SEQ ID NO: 279039 - RNA, 25 nt, Human
uucauacauauauauauauauauau

SEQ ID NO: 279040 - RNA, 24 nt, Human
uugcaagcacaucucugacccacc

SEQ ID NO: 279041 - RNA, 26 nt, Human
uugcaagcacaucucugacccacccc

SEQ ID NO: 279042 - RNA, 20 nt, Human
uuuggcuuuuuugggacagu

SEQ ID NO: 279043 - RNA, 19 nt, Human
aaaaagcaacaaucaauca

SEQ ID NO: 279044 - RNA, 22 nt, Human
aaaacaaaaacaaaaacaaaaa

SEQ ID NO: 279045 - RNA, 23 nt, Human
aaaacaaaaacaaaaacaaaaaa

SEQ ID NO: 279046 - RNA, 21 nt, Human
aaaacuaaacuccguuuaaaa

SEQ ID NO: 279047 - RNA, 21 nt, Human
aaacaaaaacaaaaaacaccu

SEQ ID NO: 279048 - RNA, 23 nt, Human
aaacaaaaacaaaaaacaccuca

SEQ ID NO: 279049 - RNA, 28 nt, Human
aaacaaaaacaaaaacaaaaaacaccuc

SEQ ID NO: 279050 - RNA, 20 nt, Human
aaaguuugucccucgagggg

SEQ ID NO: 279051 - RNA, 31 nt, Human
aacauggcaaaaaaacaaaaacaaaaacaaa

SEQ ID NO: 279052 - RNA, 18 nt, Human
aagaaaaccacaaggaaa

SEQ ID NO: 279053 - RNA, 22 nt, Human
aagaaaaccacaaggaaagcac

SEQ ID NO: 279054 - RNA, 21 nt, Human
aagaaaagcuccuagcaacua

SEQ ID NO: 279055 - RNA, 22 nt, Human
aagcagaaggaggaccagccgg

SEQ ID NO: 279056 - RNA, 27 nt, Human
aagcagcaccaacugagccccaguagg

SEQ ID NO: 279057 - RNA, 24 nt, Human
aagcuggugucugcucgugacaca

SEQ ID NO: 279058 - RNA, 25 nt, Human
aaggagcugaacugcugagggugau

SEQ ID NO: 279059 - RNA, 22 nt, Human
aaguguaauagauauaugucag

SEQ ID NO: 279060 - RNA, 25 nt, Human
aaugauacagcaucuuacaggggga

SEQ ID NO: 279061 - RNA, 21 nt, Human
aauuguuuaauuuaaggugga

SEQ ID NO: 279062 - RNA, 21 nt, Human
acaaaaaacaccucacacaca

SEQ ID NO: 279063 - RNA, 22 nt, Human
acaaauaacacauucugaauca

SEQ ID NO: 279064 - RNA, 24 nt, Human
acacaccuauuaguaucucagagc

SEQ ID NO: 279065 - RNA, 19 nt, Human
acauaagcgacacacagga

SEQ ID NO: 279066 - RNA, 19 nt, Human
accaaccaagaaaaccaca

SEQ ID NO: 279067 - RNA, 23 nt, Human
accaaccaagaaaaccacaagga

SEQ ID NO: 279068 - RNA, 18 nt, Human
acgcggcgggcgguccgg

SEQ ID NO: 279069 - RNA, 18 nt, Human
acgcggcgggcgguccgg

SEQ ID NO: 279070 - RNA, 18 nt, Human
acgcggcgggcgguccgg

SEQ ID NO: 279071 - RNA, 18 nt, Human
acgcggcgggcgguccgg

SEQ ID NO: 279072 - RNA, 24 nt, Human
agaaaagcuccuagcaacuacaaa

SEQ ID NO: 279073 - RNA, 23 nt, Human
agaaagcagcaccaacuccaguc

SEQ ID NO: 279074 - RNA, 19 nt, Human
agauaccaaaaggcuauag

SEQ ID NO: 279075 - RNA, 24 nt, Human
agcagcagcggcggcaggagaggc

SEQ ID NO: 279076 - RNA, 18 nt, Human
agccggcgguggcggcgg

SEQ ID NO: 279077 - RNA, 26 nt, Human
agccggcgguggcggcggcggcagca

SEQ ID NO: 279078 - RNA, 18 nt, Human
aggaaagcacaaggaaag

SEQ ID NO: 279079 - RNA, 22 nt, Human
aggaaagcacaaggaaagcaag

SEQ ID NO: 279080 - RNA, 24 nt, Human
aggagaaguaaaagcagaaggagg

SEQ ID NO: 279081 - RNA, 31 nt, Human
aggaggaccagccggcgguggcggcggcggg

SEQ ID NO: 279082 - RNA, 20 nt, Human
aguaagcacaaucccaagug

SEQ ID NO: 279083 - RNA, 18 nt, Human
aucugaggggagaugcag

SEQ ID NO: 279084 - RNA, 19 nt, Human
augaugcaacaaaauugga

SEQ ID NO: 279085 - RNA, 21 nt, Human
auugcuuuuguuaauguucuc

SEQ ID NO: 279086 - RNA, 19 nt, Human
caaaaacaaaaaacaccuc

SEQ ID NO: 279087 - RNA, 29 nt, Human
caaaaacaaaaaacaccucacacacauug

SEQ ID NO: 279088 - RNA, 26 nt, Human
caaaaacaaaaacaaaaaacaccuca

SEQ ID NO: 279089 - RNA, 18 nt, Human
caaacuucuucucccgca

SEQ ID NO: 279090 - RNA, 24 nt, Human
caacaaaauuggaaaaaaagcaac

SEQ ID NO: 279091 - RNA, 22 nt, Human
caacacuauaaauaacauggca

SEQ ID NO: 279092 - RNA, 21 nt, Human
caacaguaagcacaaucccaa

SEQ ID NO: 279093 - RNA, 22 nt, Human
caacaguaagcacaaucccaag

SEQ ID NO: 279094 - RNA, 23 nt, Human
caacccgaucggggagagguuau

SEQ ID NO: 279095 - RNA, 23 nt, Human
caacccgaucggggagagguuau

SEQ ID NO: 279096 - RNA, 23 nt, Human
caacccgaucggggagagguuau

SEQ ID NO: 279097 - RNA, 23 nt, Human
caacccgaucggggagagguuau

SEQ ID NO: 279098 - RNA, 23 nt, Human
caaggccauuauuaaaaucaaga

SEQ ID NO: 279099 - RNA, 24 nt, Human
caaggccauuauuaaaaucaagaa

SEQ ID NO: 279100 - RNA, 21 nt, Human
cacaaggaaagcacaaggaaa

SEQ ID NO: 279101 - RNA, 25 nt, Human
cacacaccuauuaguaucucagagc

SEQ ID NO: 279102 - RNA, 22 nt, Human
cacaucuagcucuagguggaau

SEQ ID NO: 279103 - RNA, 22 nt, Human
cacaucuuuucugaauaaccaa

SEQ ID NO: 279104 - RNA, 21 nt, Human
caccuauuaguaucucagagc

SEQ ID NO: 279105 - RNA, 24 nt, Human
caccucccgcccgcagguuggagg

SEQ ID NO: 279106 - RNA, 22 nt, Human
cacgcagaggcccccccaacca

SEQ ID NO: 279107 - RNA, 24 nt, Human
cacgcagaggcccccccaaccaaa

SEQ ID NO: 279108 - RNA, 21 nt, Human
cagcaacaagaaagcagcacc

SEQ ID NO: 279109 - RNA, 23 nt, Human
cagcagcagcggcggcaggagag

SEQ ID NO: 279110 - RNA, 18 nt, Human
cagcagcggcggcaggag

SEQ ID NO: 279111 - RNA, 24 nt, Human
cagcagcggcggcaggagaggcuu

SEQ ID NO: 279112 - RNA, 19 nt, Human
cagccacccaccucccgcc

SEQ ID NO: 279113 - RNA, 20 nt, Human
cagccacccaccucccgccc

SEQ ID NO: 279114 - RNA, 20 nt, Human
cagccacccaccucccgccc

SEQ ID NO: 279115 - RNA, 24 nt, Human
cagccggcgguggcggcggcggca

SEQ ID NO: 279116 - RNA, 19 nt, Human
cauggcaaaaaaacaaaaa

SEQ ID NO: 279117 - RNA, 21 nt, Human
ccacccaccucccgcccgcug

SEQ ID NO: 279118 - RNA, 18 nt, Human
ccagccggcgguggcggc

SEQ ID NO: 279119 - RNA, 24 nt, Human
ccagccggcgguggcggcggcuuu

SEQ ID NO: 279120 - RNA, 19 nt, Human
cccgcccgcagguuggagg

SEQ ID NO: 279121 - RNA, 20 nt, Human
cccucgagggggagagcgag

SEQ ID NO: 279122 - RNA, 20 nt, Human
cccucgauggggagagcgag

SEQ ID NO: 279123 - RNA, 20 nt, Human
cccucgauggggagagcgag

SEQ ID NO: 279124 - RNA, 20 nt, Human
ccggagccucacacaccuau

SEQ ID NO: 279125 - RNA, 22 nt, Human
ccggagccucacacaccuauua

SEQ ID NO: 279126 - RNA, 23 nt, Human
ccuccagaagaaggccuggccgc

SEQ ID NO: 279127 - RNA, 19 nt, Human
ccucgauggggagagcgag

SEQ ID NO: 279128 - RNA, 19 nt, Human
ccucgauggggagagcgag

SEQ ID NO: 279129 - RNA, 23 nt, Human
cggacgcgugggcgcgugggguu

SEQ ID NO: 279130 - RNA, 25 nt, Human
cggcggcagcagcagcggcggcagg

SEQ ID NO: 279131 - RNA, 20 nt, Human
cguccggcagccgccgccgc

SEQ ID NO: 279132 - RNA, 20 nt, Human
cguccggcagccgccgccgc

SEQ ID NO: 279133 - RNA, 20 nt, Human
cguccggcagccgccgccgc

SEQ ID NO: 279134 - RNA, 20 nt, Human
cguccggcagccgccgccgc

SEQ ID NO: 279135 - RNA, 21 nt, Human
cuacuccaaaccaucccgggc

SEQ ID NO: 279136 - RNA, 21 nt, Human
cuccgcgcgagcccggaguuc

SEQ ID NO: 279137 - RNA, 18 nt, Human
cucuuuguugucuuauuc

SEQ ID NO: 279138 - RNA, 26 nt, Human
cugagggugauggucaaacuucuucu

SEQ ID NO: 279139 - RNA, 21 nt, Human
cugcuguuucugggccacuuu

SEQ ID NO: 279140 - RNA, 23 nt, Human
cuuuuguuaauguucucaugcga

SEQ ID NO: 279141 - RNA, 19 nt, Human
gaaggagcugaacugcuga

SEQ ID NO: 279142 - RNA, 24 nt, Human
gacaccgucaugcuggacacgggu

SEQ ID NO: 279143 - RNA, 18 nt, Human
gacacggguggagacauu

SEQ ID NO: 279144 - RNA, 22 nt, Human
gagaaguaaaagcagaaggagg

SEQ ID NO: 279145 - RNA, 19 nt, Human
gagcccggaguuccaacaa

SEQ ID NO: 279146 - RNA, 19 nt, Human
gagcccggaguuccaacaa

SEQ ID NO: 279147 - RNA, 19 nt, Human
gagcccggaguuccaacaa

SEQ ID NO: 279148 - RNA, 21 nt, Human
gagcggccgcgcugaggcgcu

SEQ ID NO: 279149 - RNA, 21 nt, Human
gagcggccgcgcugaggcgcu

SEQ ID NO: 279150 - RNA, 21 nt, Human
gagcggccgcgcugaggcgcu

SEQ ID NO: 279151 - RNA, 26 nt, Human
gcaaaaaaacaaaaacaaaaacaaaa

SEQ ID NO: 279152 - RNA, 18 nt, Human
gcagaggcccccccaacc

SEQ ID NO: 279153 - RNA, 21 nt, Human
gcagaggcccccccaaccaaa

SEQ ID NO: 279154 - RNA, 20 nt, Human
gcagcagcagcggcggcagg

SEQ ID NO: 279155 - RNA, 20 nt, Human
gccccgcagccacccaccuc

SEQ ID NO: 279156 - RNA, 24 nt, Human
gcccuggcucucggggcugcuccu

SEQ ID NO: 279157 - RNA, 24 nt, Human
gcccuggcucucggggcugcuccu

SEQ ID NO: 279158 - RNA, 24 nt, Human
gcccuggcucucggggcugcuccu

SEQ ID NO: 279159 - RNA, 24 nt, Human
gcccuggcucucggggcugcuccu

SEQ ID NO: 279160 - RNA, 26 nt, Human
gcccuggcucucggggcugcuccuga

SEQ ID NO: 279161 - RNA, 26 nt, Human
gcccuggcucucggggcugcuccuga

SEQ ID NO: 279162 - RNA, 26 nt, Human
gcccuggcucucggggcugcuccuga

SEQ ID NO: 279163 - RNA, 26 nt, Human
gcccuggcucucggggcugcuccuga

SEQ ID NO: 279164 - RNA, 21 nt, Human
gccggcgguggcggcggcggc

SEQ ID NO: 279165 - RNA, 22 nt, Human
gcggcgcggacgcggcgggcgg

SEQ ID NO: 279166 - RNA, 22 nt, Human
gcggcgcggacgcggcgggcgg

SEQ ID NO: 279167 - RNA, 22 nt, Human
gcggcgcggacgcggcgggcgg

SEQ ID NO: 279168 - RNA, 23 nt, Human
gcggcgcggacgcggcgggcggu

SEQ ID NO: 279169 - RNA, 24 nt, Human
gcgggcgguccggccaccuggaac

SEQ ID NO: 279170 - RNA, 24 nt, Human
gcgggcgguccggccaccuggaac

SEQ ID NO: 279171 - RNA, 24 nt, Human
gcgggcgguccggccaccuggaac

SEQ ID NO: 279172 - RNA, 24 nt, Human
gcgggcgguccggccaccuggaac

SEQ ID NO: 279173 - RNA, 21 nt, Human
ggagcgcggcgcggacgcggc

SEQ ID NO: 279174 - RNA, 21 nt, Human
ggagcgcggcgcggacgcggc

SEQ ID NO: 279175 - RNA, 21 nt, Human
ggagcgcggcgcggacgcggc

SEQ ID NO: 279176 - RNA, 21 nt, Human
ggagcgcggcgcggacgcggc

SEQ ID NO: 279177 - RNA, 24 nt, Human
ggcgcggacgcggcgggcgguccg

SEQ ID NO: 279178 - RNA, 24 nt, Human
ggcgcggacgcggcgggcgguccg

SEQ ID NO: 279179 - RNA, 24 nt, Human
ggcgcggacgcggcgggcgguccg

SEQ ID NO: 279180 - RNA, 24 nt, Human
ggcgcggacgcggcgggcgguccg

SEQ ID NO: 279181 - RNA, 22 nt, Human
guggaaggagcugaacugcuga

SEQ ID NO: 279182 - RNA, 19 nt, Human
gugggcgcgugggguugug

SEQ ID NO: 279183 - RNA, 20 nt, Human
uaaaacagcauuauucaaca

SEQ ID NO: 279184 - RNA, 19 nt, Human
uaaaagugagacuuugaaa

SEQ ID NO: 279185 - RNA, 20 nt, Human
uaaagaagauggacuguuca

SEQ ID NO: 279186 - RNA, 23 nt, Human
uaacauggcaaaaaaacaaaaac

SEQ ID NO: 279187 - RNA, 18 nt, Human
uaaccaaccaagaaaacc

SEQ ID NO: 279188 - RNA, 18 nt, Human
uacagcuuagcaacaccc

SEQ ID NO: 279189 - RNA, 21 nt, Human
uacagcuuagcaacacccuuu

SEQ ID NO: 279190 - RNA, 18 nt, Human
uagaggucucucuucuuc

SEQ ID NO: 279191 - RNA, 19 nt, Human
uagaggucucucuucuucc

SEQ ID NO: 279192 - RNA, 22 nt, Human
uagcaauauaaaacuaaacucc

SEQ ID NO: 279193 - RNA, 19 nt, Human
uaucucagagccaacuagu

SEQ ID NO: 279194 - RNA, 21 nt, Human
ucaucugaaacaaggaguuau

SEQ ID NO: 279195 - RNA, 20 nt, Human
ucauuuuuacauacauauau

SEQ ID NO: 279196 - RNA, 26 nt, Human
uccaaggccauuauuaaaaucaagaa

SEQ ID NO: 279197 - RNA, 22 nt, Human
ucgccggcucuuuuucaauugc

SEQ ID NO: 279198 - RNA, 22 nt, Human
ucgccggcucuuuuucaauugc

SEQ ID NO: 279199 - RNA, 25 nt, Human
ucgucaagaggacagggacgaaaau

SEQ ID NO: 279200 - RNA, 23 nt, Human
ucguccggcagccgccgccgcuc

SEQ ID NO: 279201 - RNA, 23 nt, Human
ucguccggcagccgccgccgcuc

SEQ ID NO: 279202 - RNA, 23 nt, Human
ucguccggcagccgccgccgcuc

SEQ ID NO: 279203 - RNA, 23 nt, Human
ucguccggcagccgccgccgcuc

SEQ ID NO: 279204 - RNA, 21 nt, Human
ucucaugcgacaggcagaggc

SEQ ID NO: 279205 - RNA, 23 nt, Human
ugaaaagagcaaaaaacaaaacu

SEQ ID NO: 279206 - RNA, 24 nt, Human
ugaaaugccuuuauuaucauauuu

SEQ ID NO: 279207 - RNA, 20 nt, Human
ugaaggggcugaccgccaug

SEQ ID NO: 279208 - RNA, 24 nt, Human
ugaauaaccaaccaagaaaaccac

SEQ ID NO: 279209 - RNA, 27 nt, Human
ugacaaauaacacauucugaaucaaaa

SEQ ID NO: 279210 - RNA, 22 nt, Human
ugcagcaacaagaaagcagcac

SEQ ID NO: 279211 - RNA, 18 nt, Human
ugcuggacacggguggag

SEQ ID NO: 279212 - RNA, 25 nt, Human
uggaaaaaaagcaacaaucaaucau

SEQ ID NO: 279213 - RNA, 18 nt, Human
uggaaaucuacaggugac

SEQ ID NO: 279214 - RNA, 22 nt, Human
uggaaggagcugaacugcugag

SEQ ID NO: 279215 - RNA, 27 nt, Human
uggaaggagcugaacugcugagggugg

SEQ ID NO: 279216 - RNA, 20 nt, Human
uggauguagaaguagauacc

SEQ ID NO: 279217 - RNA, 26 nt, Human
uggcaaaaaaacaaaaacaaaaacaa

SEQ ID NO: 279218 - RNA, 26 nt, Human
uggcaaaaaaacaaaaacaaaaacaa

SEQ ID NO: 279219 - RNA, 21 nt, Human
uggccucugcccggcgcccuc

SEQ ID NO: 279220 - RNA, 21 nt, Human
uggccucugcccggcgcccuc

SEQ ID NO: 279221 - RNA, 21 nt, Human
uggccucugcccggcgcccuc

SEQ ID NO: 279222 - RNA, 21 nt, Human
uggccucugcccggcgcccuc

SEQ ID NO: 279223 - RNA, 18 nt, Human
uggcugacacauaccuuc

SEQ ID NO: 279224 - RNA, 21 nt, Human
ugggucccgccgcuggcggcu

SEQ ID NO: 279225 - RNA, 21 nt, Human
ugggucccgccgcuggcggcu

SEQ ID NO: 279226 - RNA, 21 nt, Human
ugggucccgccgcuggcggcu

SEQ ID NO: 279227 - RNA, 21 nt, Human
ugggucccgccgcuggcggcu

SEQ ID NO: 279228 - RNA, 25 nt, Human
ugucuuauucauuuggcaggugauc

SEQ ID NO: 279229 - RNA, 21 nt, Human
uucaauugccccgcagccacc

SEQ ID NO: 279230 - RNA, 20 nt, Human
uugcuuuuguuaauguucuc

SEQ ID NO: 279231 - RNA, 19 nt, Human
uuugucccucgagggggag

SEQ ID NO: 279232 - RNA, 20 nt, Human
uuugucccucgauggggaga

SEQ ID NO: 279233 - RNA, 20 nt, Human
uuugucccucgauggggaga

SEQ ID NO: 279234 - RNA, 20 nt, Human
uuugucccucgauggggaga

SEQ ID NO: 279235 - RNA, 20 nt, Human
uuugucccucgauggggaga

SEQ ID NO: 279236 - RNA, 20 nt, Human
uuugucccucgauggggaga

SEQ ID NO: 279237 - RNA, 22 nt, Human
uuuuaaaugcuacuccaaacca

SEQ ID NO: 279238 - RNA, 27 nt, Human
uuuucaauugccccgcagccacccacc

SEQ ID NO: 279239 - RNA, 23 nt, Human
uuuuuuuuuuuuuuuucauuuuu

SEQ ID NO: 279240 - RNA, 23 nt, Human
uuuuuuuuuuuuuuuuuuacuag

SEQ ID NO: 279241 - RNA, 18 nt, Human
acagagcccgcuggaaaa

SEQ ID NO: 279242 - RNA, 20 nt, Human
acagagcccgcuggaaaacc

SEQ ID NO: 279243 - RNA, 20 nt, Human
agguggcccagcuagggcag

SEQ ID NO: 279244 - RNA, 23 nt, Human
agguggcccagcuagggcagggg

SEQ ID NO: 279245 - RNA, 23 nt, Human
auacuuuuuuccuuuuauagaaa

SEQ ID NO: 279246 - RNA, 23 nt, Human
auacuuuuuuccuuuuauagaaa

SEQ ID NO: 279247 - RNA, 24 nt, Human
auuuuguuauacuuuuuuccuuuu

SEQ ID NO: 279248 - RNA, 24 nt, Human
cacacagacgaugcccacgaccag

SEQ ID NO: 279249 - RNA, 21 nt, Human
caccacacagacgaugcccac

SEQ ID NO: 279250 - RNA, 19 nt, Human
caccggcagcccggggagg

SEQ ID NO: 279251 - RNA, 20 nt, Human
caccggcagcccggggaggu

SEQ ID NO: 279252 - RNA, 24 nt, Human
cagagcccgcuggaaaaccggaaa

SEQ ID NO: 279253 - RNA, 19 nt, Human
cagccgccgccgccuuggg

SEQ ID NO: 279254 - RNA, 21 nt, Human
cagcgcagcgcucccacccug

SEQ ID NO: 279255 - RNA, 19 nt, Human
cagcgcggcgcagcgcagc

SEQ ID NO: 279256 - RNA, 19 nt, Human
cagcuagggcagggggcag

SEQ ID NO: 279257 - RNA, 23 nt, Human
cagcuagggcagggggcaggcgg

SEQ ID NO: 279258 - RNA, 25 nt, Human
caguaggccaccacacagacgaugc

SEQ ID NO: 279259 - RNA, 21 nt, Human
ccacacagacgaugcccacga

SEQ ID NO: 279260 - RNA, 19 nt, Human
ccaccacacagacgaugcc

SEQ ID NO: 279261 - RNA, 19 nt, Human
ccacgaccagcagagccac

SEQ ID NO: 279262 - RNA, 18 nt, Human
ccgaagcuguaaaucagg

SEQ ID NO: 279263 - RNA, 18 nt, Human
ccgaagcuguaaaucagg

SEQ ID NO: 279264 - RNA, 20 nt, Human
ccgccgcucagccgccgccg

SEQ ID NO: 279265 - RNA, 22 nt, Human
ccgccgcucagccgccgccgcc

SEQ ID NO: 279266 - RNA, 22 nt, Human
ccgccgcucagccgccgccgcc

SEQ ID NO: 279267 - RNA, 21 nt, Human
ccucuuagcccuccaccggca

SEQ ID NO: 279268 - RNA, 25 nt, Human
cggcgcagcgcagcgcucccacccu

SEQ ID NO: 279269 - RNA, 24 nt, Human
gacgaugcccacgaccagcagagc

SEQ ID NO: 279270 - RNA, 20 nt, Human
gaugcgcagcgcggcgcagc

SEQ ID NO: 279271 - RNA, 21 nt, Human
gcagcccggggagguggccca

SEQ ID NO: 279272 - RNA, 20 nt, Human
gcagcgcggcgcagcgcagc

SEQ ID NO: 279273 - RNA, 21 nt, Human
gccauuuggggggcuccgccg

SEQ ID NO: 279274 - RNA, 19 nt, Human
gccgcucagccgccgccgc

SEQ ID NO: 279275 - RNA, 20 nt, Human
gccuugggaggggaaacaga

SEQ ID NO: 279276 - RNA, 18 nt, Human
gcuaguauuauaagacaa

SEQ ID NO: 279277 - RNA, 18 nt, Human
gcuaguauuauaagacaa

SEQ ID NO: 279278 - RNA, 24 nt, Human
ggaggggaaacagagcccgcugga

SEQ ID NO: 279279 - RNA, 24 nt, Human
ggcgcagcgcagcgcucccacccu

SEQ ID NO: 279280 - RNA, 25 nt, Human
ggggcggaggggcgcgcggcggggc

SEQ ID NO: 279281 - RNA, 25 nt, Human
ggggcggaggggcgcgcggcggggc

SEQ ID NO: 279282 - RNA, 25 nt, Human
uacuuuuuuccuuuuauagaaaaua

SEQ ID NO: 279283 - RNA, 25 nt, Human
uacuuuuuuccuuuuauagaaaaua

SEQ ID NO: 279284 - RNA, 18 nt, Human
uagcgccucuuagcccuc

SEQ ID NO: 279285 - RNA, 26 nt, Human
ucccacccugugcgccaggaccugga

SEQ ID NO: 279286 - RNA, 24 nt, Human
uccgccgcucagccgccgccgccu

SEQ ID NO: 279287 - RNA, 21 nt, Human
ucuuuuuuccuccuuucucuc

SEQ ID NO: 279288 - RNA, 18 nt, Human
uggccaggccauuugggg

SEQ ID NO: 279289 - RNA, 20 nt, Human
uggggcgggcggggcggagg

SEQ ID NO: 279290 - RNA, 20 nt, Human
uggggcgggcggggcggagg

SEQ ID NO: 279291 - RNA, 18 nt, Human
uguuacauauaaauaguu

SEQ ID NO: 279292 - RNA, 19 nt, Human
uucuuuuuuccuccuuucu

SEQ ID NO: 279293 - RNA, 19 nt, Human
uucuuuuuuccuccuuucu

SEQ ID NO: 279294 - RNA, 18 nt, Human
uuuccuccuuucucucca

SEQ ID NO: 279295 - RNA, 24 nt, Human
uuucuuuuuuccuccuuucucucc

SEQ ID NO: 279296 - RNA, 24 nt, Human
uuucuuuuuuccuccuuucucucc

SEQ ID NO: 279297 - RNA, 19 nt, Human
uuuuccuccuuucucucca

SEQ ID NO: 279298 - RNA, 19 nt, Human
uuuuccuccuuucucucca

SEQ ID NO: 279299 - RNA, 23 nt, Human
uuuuguuauacuuuuuuccuuuu

SEQ ID NO: 279300 - RNA, 19 nt, Human
uuuuuuccuccuuucucuc

SEQ ID NO: 279301 - RNA, 19 nt, Human
uuuuuuccuccuuucucuc

SEQ ID NO: 279302 - RNA, 25 nt, Human
aaacaagagagcuggagaggcugcc

SEQ ID NO: 279303 - RNA, 21 nt, Human
aaccaaaacaacccucuuccc

SEQ ID NO: 279304 - RNA, 25 nt, Human
aaccugagccccgcggccgggaagc

SEQ ID NO: 279305 - RNA, 22 nt, Human
aagcaaaagaaggaagauuggg

SEQ ID NO: 279306 - RNA, 25 nt, Human
accaaaacaacccucuucccuucau

SEQ ID NO: 279307 - RNA, 22 nt, Human
acuccuccuaccgagccuccca

SEQ ID NO: 279308 - RNA, 19 nt, Human
agccaaucaggagcagccu

SEQ ID NO: 279309 - RNA, 25 nt, Human
agggagucucugggacgcagggggc

SEQ ID NO: 279310 - RNA, 19 nt, Human
auaaacaagagagcuggag

SEQ ID NO: 279311 - RNA, 20 nt, Human
caaaacaacccucuucccuu

SEQ ID NO: 279312 - RNA, 18 nt, Human
caaagucuuggggcuagg

SEQ ID NO: 279313 - RNA, 22 nt, Human
caagggucguccgaaaccaaaa

SEQ ID NO: 279314 - RNA, 23 nt, Human
cagccccaggagcccggcggggg

SEQ ID NO: 279315 - RNA, 21 nt, Human
caggagcagccuccggcaggg

SEQ ID NO: 279316 - RNA, 24 nt, Human
caggagggggucacaaacacggca

SEQ ID NO: 279317 - RNA, 20 nt, Human
caucucgccccggauccaaa

SEQ ID NO: 279318 - RNA, 24 nt, Human
ccacagccccaggagcccggcggg

SEQ ID NO: 279319 - RNA, 20 nt, Human
ccagccgacccgcgccgaaa

SEQ ID NO: 279320 - RNA, 23 nt, Human
ccccaggagcccggcgggggggg

SEQ ID NO: 279321 - RNA, 27 nt, Human
cccgcggccgggaagccaaucaggagc

SEQ ID NO: 279322 - RNA, 18 nt, Human
cccucuucccuucaucuc

SEQ ID NO: 279323 - RNA, 19 nt, Human
cccucuucccuucaucucg

SEQ ID NO: 279324 - RNA, 18 nt, Human
ccucugcggggacgaagg

SEQ ID NO: 279325 - RNA, 21 nt, Human
ccugggugagggagucucugg

SEQ ID NO: 279326 - RNA, 24 nt, Human
cgaaaccaaaacaacccucuuccc

SEQ ID NO: 279327 - RNA, 18 nt, Human
cgccagccgacccgcgcc

SEQ ID NO: 279328 - RNA, 19 nt, Human
cgccgaaacagcagcucug

SEQ ID NO: 279329 - RNA, 19 nt, Human
cgcucggcuccgcucgcga

SEQ ID NO: 279330 - RNA, 21 nt, Human
cggccacagccccaggagccc

SEQ ID NO: 279331 - RNA, 22 nt, Human
cggccgccagccgacccgcgcc

SEQ ID NO: 279332 - RNA, 22 nt, Human
cgggaguggcacggagauguag

SEQ ID NO: 279333 - RNA, 21 nt, Human
cggggacgaagguggcgcagg

SEQ ID NO: 279334 - RNA, 18 nt, Human
cggggguccucugcgggg

SEQ ID NO: 279335 - RNA, 23 nt, Human
cucuggggcaucggccgccagcc

SEQ ID NO: 279336 - RNA, 21 nt, Human
cuggggaaaggggagggaacg

SEQ ID NO: 279337 - RNA, 18 nt, Human
gacccgcgccgaaacagc

SEQ ID NO: 279338 - RNA, 20 nt, Human
gacccgcgccgaaacagcag

SEQ ID NO: 279339 - RNA, 21 nt, Human
gagcagccuccggcagggugg

SEQ ID NO: 279340 - RNA, 22 nt, Human
gagcccggcggggggggagggc

SEQ ID NO: 279341 - RNA, 26 nt, Human
gagggcgggaccgacagggcggggcg

SEQ ID NO: 279342 - RNA, 18 nt, Human
gccacagccccaggagcc

SEQ ID NO: 279343 - RNA, 21 nt, Human
gccagccgacccgcgccgaaa

SEQ ID NO: 279344 - RNA, 22 nt, Human
gcgaauguaaccugagccccgc

SEQ ID NO: 279345 - RNA, 19 nt, Human
gcgagaagcaaaagaagga

SEQ ID NO: 279346 - RNA, 18 nt, Human
ggaagacuccuccuaccg

SEQ ID NO: 279347 - RNA, 21 nt, Human
ggaggcagagcugcaugcugg

SEQ ID NO: 279348 - RNA, 22 nt, Human
ggauccaaagucuuggggcuag

SEQ ID NO: 279349 - RNA, 22 nt, Human
ggcuccuguagcuggcagguug

SEQ ID NO: 279350 - RNA, 22 nt, Human
gggagggaacgugacaggcagg

SEQ ID NO: 279351 - RNA, 22 nt, Human
gggcgcccuccgcagugcgcgc

SEQ ID NO: 279352 - RNA, 23 nt, Human
gggcgggaccgacagggcggggc

SEQ ID NO: 279353 - RNA, 19 nt, Human
gggcuccuguagcuggcag

SEQ ID NO: 279354 - RNA, 24 nt, Human
ggggaaaggggagggaacgugaca

SEQ ID NO: 279355 - RNA, 20 nt, Human
ggggacgaagguggcgcagg

SEQ ID NO: 279356 - RNA, 19 nt, Human
ggggauggggucugugugg

SEQ ID NO: 279357 - RNA, 18 nt, Human
ggggcggggccguggaag

SEQ ID NO: 279358 - RNA, 25 nt, Human
ggggggagggcgggaccgacagggc

SEQ ID NO: 279359 - RNA, 18 nt, Human
uaccgagccucccaggcg

SEQ ID NO: 279360 - RNA, 20 nt, Human
uagacugcagaacuaacuaa

SEQ ID NO: 279361 - RNA, 18 nt, Human
uagggugggguggagugg

SEQ ID NO: 279362 - RNA, 27 nt, Human
uccaaagucuuggggcuaggcuggggc

SEQ ID NO: 279363 - RNA, 18 nt, Human
ucccgcgcucggcuccgc

SEQ ID NO: 279364 - RNA, 21 nt, Human
uccgaaaccaaaacaacccuc

SEQ ID NO: 279365 - RNA, 23 nt, Human
uccuccuaccgagccucccaggc

SEQ ID NO: 279366 - RNA, 22 nt, Human
ucgccccggauccaaagucuug

SEQ ID NO: 279367 - RNA, 23 nt, Human
ucucuuccggucagagcaagggu

SEQ ID NO: 279368 - RNA, 18 nt, Human
ugacaggcagguguggga

SEQ ID NO: 279369 - RNA, 24 nt, Human
ugcacacacggagaucagaaaccu

SEQ ID NO: 279370 - RNA, 23 nt, Human
ugcagaacuaacuaaaagggcac

SEQ ID NO: 279371 - RNA, 18 nt, Human
ugcaugcugggugcggga

SEQ ID NO: 279372 - RNA, 22 nt, Human
ugcccucaacagugcgcugggg

SEQ ID NO: 279373 - RNA, 22 nt, Human
ugcgcacagaacgaaagaacuc

SEQ ID NO: 279374 - RNA, 19 nt, Human
ugcugggcaggaggggguc

SEQ ID NO: 279375 - RNA, 23 nt, Human
uggcgcagggcggggaugggguu

SEQ ID NO: 279376 - RNA, 21 nt, Human
uggggaccauacuagacugca

SEQ ID NO: 279377 - RNA, 22 nt, Human
ugggggcucuggggcaucggcc

SEQ ID NO: 279378 - RNA, 18 nt, Human
ugggguggaguggaaggg

SEQ ID NO: 279379 - RNA, 21 nt, Human
uuagggcgcccuccgcagugc

SEQ ID NO: 279380 - RNA, 22 nt, Human
uuagggugggguggaguggaag

SEQ ID NO: 279381 - RNA, 24 nt, Human
aaaaaaauucacacugcaguaugu

SEQ ID NO: 279382 - RNA, 24 nt, Human
aaaaaacaaaacaaaaaaauucac

SEQ ID NO: 279383 - RNA, 22 nt, Human
aaaaacaaaacaaaaaaauuca

SEQ ID NO: 279384 - RNA, 23 nt, Human
aaaaauaaccauuuaggguuuua

SEQ ID NO: 279385 - RNA, 26 nt, Human
aaaacaaaacccacacacacacacac

SEQ ID NO: 279386 - RNA, 19 nt, Human
aaaacaaccagccaaccaa

SEQ ID NO: 279387 - RNA, 22 nt, Human
aaaaggaucagggugggacaga

SEQ ID NO: 279388 - RNA, 20 nt, Human
aaaauauauacucucaccag

SEQ ID NO: 279389 - RNA, 22 nt, Human
aaaaugcauuaauccacuauga

SEQ ID NO: 279390 - RNA, 18 nt, Human
aaaauggaaaucugccuu

SEQ ID NO: 279391 - RNA, 20 nt, Human
aaagcaaaauaaaguacccu

SEQ ID NO: 279392 - RNA, 18 nt, Human
aaaguuauccccuccacc

SEQ ID NO: 279393 - RNA, 18 nt, Human
aaccaaaaaaacaaaaca

SEQ ID NO: 279394 - RNA, 23 nt, Human
aaccagccaaccaaaaaaacaaa

SEQ ID NO: 279395 - RNA, 18 nt, Human
aacugaaaccccaugugg

SEQ ID NO: 279396 - RNA, 21 nt, Human
aagauccaauggagugauugu

SEQ ID NO: 279397 - RNA, 19 nt, Human
aagcagauagaauccuuag

SEQ ID NO: 279398 - RNA, 23 nt, Human
aaggcgccugccgccccguccug

SEQ ID NO: 279399 - RNA, 20 nt, Human
accaaaaaaacaaaacaaaa

SEQ ID NO: 279400 - RNA, 21 nt, Human
acccacacacacacacacaaa

SEQ ID NO: 279401 - RNA, 18 nt, Human
agaacacacaaauaauca

SEQ ID NO: 279402 - RNA, 22 nt, Human
agagauggugaaaacuguccaa

SEQ ID NO: 279403 - RNA, 19 nt, Human
agaguuaaaaauaaacacc

SEQ ID NO: 279404 - RNA, 19 nt, Human
agcaaaagugaaaaaugua

SEQ ID NO: 279405 - RNA, 24 nt, Human
agcucacaauccaaacacuucccc

SEQ ID NO: 279406 - RNA, 21 nt, Human
aggaggaggagaagaauuccu

SEQ ID NO: 279407 - RNA, 19 nt, Human
agugcugaucaacuucuac

SEQ ID NO: 279408 - RNA, 20 nt, Human
auaaaaaucuuagaaaccac

SEQ ID NO: 279409 - RNA, 19 nt, Human
auauauauauauauauaua

SEQ ID NO: 279410 - RNA, 19 nt, Human
auauauauauauauauaua

SEQ ID NO: 279411 - RNA, 19 nt, Human
auauauauauauauauaua

SEQ ID NO: 279412 - RNA, 19 nt, Human
auauauauauauauauaua

SEQ ID NO: 279413 - RNA, 19 nt, Human
auauauauauauauauaua

SEQ ID NO: 279414 - RNA, 19 nt, Human
auauauauauauauauaua

SEQ ID NO: 279415 - RNA, 19 nt, Human
auauauauauauauauaua

SEQ ID NO: 279416 - RNA, 19 nt, Human
auauauauauauauauaua

SEQ ID NO: 279417 - RNA, 19 nt, Human
auauauauauauauauaua

SEQ ID NO: 279418 - RNA, 21 nt, Human
auauugcaaauuuugagcuga

SEQ ID NO: 279419 - RNA, 23 nt, Human
auauugcaaauuuugagcugaug

SEQ ID NO: 279420 - RNA, 23 nt, Human
aucacccuaaauucaaauuggga

SEQ ID NO: 279421 - RNA, 19 nt, Human
augacaucacaugaagaaa

SEQ ID NO: 279422 - RNA, 19 nt, Human
caaaaaauggaaaucugcc

SEQ ID NO: 279423 - RNA, 24 nt, Human
caaaacaaaaaaauucacacugca

SEQ ID NO: 279424 - RNA, 21 nt, Human
caaaacaaaacccacacacac

SEQ ID NO: 279425 - RNA, 19 nt, Human
caaaauaaaguacccuaau

SEQ ID NO: 279426 - RNA, 22 nt, Human
caaaauaaaguacccuaauaaa

SEQ ID NO: 279427 - RNA, 18 nt, Human
caacaucaccaguaacca

SEQ ID NO: 279428 - RNA, 21 nt, Human
caacaucaccaguaaccaaua

SEQ ID NO: 279429 - RNA, 23 nt, Human
caaccaaaaaaacaaaacaaaac

SEQ ID NO: 279430 - RNA, 31 nt, Human
caaccaaaaaaacaaaacaaaacccacacaa

SEQ ID NO: 279431 - RNA, 21 nt, Human
caagaaacaccuagagagcau

SEQ ID NO: 279432 - RNA, 22 nt, Human
cacacacacacaaaaguagcaa

SEQ ID NO: 279433 - RNA, 19 nt, Human
cagccuccggcuccgucag

SEQ ID NO: 279434 - RNA, 23 nt, Human
cagccuccggcuccgucaggcuc

SEQ ID NO: 279435 - RNA, 22 nt, Human
cagggucccccaugcacuuuuc

SEQ ID NO: 279436 - RNA, 23 nt, Human
cauacagaaguguuaaacaacca

SEQ ID NO: 279437 - RNA, 22 nt, Human
cauauuauauauauauauauau

SEQ ID NO: 279438 - RNA, 25 nt, Human
cauauuauauauauauauauauaaa

SEQ ID NO: 279439 - RNA, 21 nt, Human
cauggaauagaauauauucaa

SEQ ID NO: 279440 - RNA, 22 nt, Human
ccaaaccauccuggaaucaccu

SEQ ID NO: 279441 - RNA, 21 nt, Human
ccaagaguuaaaaauaaacac

SEQ ID NO: 279442 - RNA, 20 nt, Human
ccagccaaccaaaaaaacaa

SEQ ID NO: 279443 - RNA, 21 nt, Human
cccacacacacacacacaaaa

SEQ ID NO: 279444 - RNA, 19 nt, Human
ccccaggccgccgcggcuc

SEQ ID NO: 279445 - RNA, 18 nt, Human
ccgccgcggcucccagcc

SEQ ID NO: 279446 - RNA, 20 nt, Human
ccgccgcggcucccagccuc

SEQ ID NO: 279447 - RNA, 20 nt, Human
ccgccgcggcucccagccuc

SEQ ID NO: 279448 - RNA, 18 nt, Human
ccucaugacaucuaaugu

SEQ ID NO: 279449 - RNA, 20 nt, Human
ccugccgccccguccuggcc

SEQ ID NO: 279450 - RNA, 21 nt, Human
ccuggaaucaccugaguuugg

SEQ ID NO: 279451 - RNA, 18 nt, Human
cgcgcggguggcgggcgg

SEQ ID NO: 279452 - RNA, 22 nt, Human
cguccuggcccggcgccccggg

SEQ ID NO: 279453 - RNA, 25 nt, Human
cuaaggcuccaaaccuuccacaacg

SEQ ID NO: 279454 - RNA, 21 nt, Human
cucacaauccaaacacuuccc

SEQ ID NO: 279455 - RNA, 20 nt, Human
cucucaccaguuuacucuuc

SEQ ID NO: 279456 - RNA, 19 nt, Human
cugacuucugaaaagcaaa

SEQ ID NO: 279457 - RNA, 18 nt, Human
gaaaacaaccagccaacc

SEQ ID NO: 279458 - RNA, 19 nt, Human
gaaacaccuagagagcaug

SEQ ID NO: 279459 - RNA, 18 nt, Human
gaugucaauaagcuguag

SEQ ID NO: 279460 - RNA, 21 nt, Human
gcacagaugcacagggucccc

SEQ ID NO: 279461 - RNA, 21 nt, Human
gcaggaaguaaacacuaaaag

SEQ ID NO: 279462 - RNA, 22 nt, Human
gccaaccaaaaaaacaaaacaa

SEQ ID NO: 279463 - RNA, 19 nt, Human
gccacgggcggacgggcgc

SEQ ID NO: 279464 - RNA, 22 nt, Human
gcgcagcggcggacgcgaggcc

SEQ ID NO: 279465 - RNA, 22 nt, Human
gcuguaguacccuuucacaaau

SEQ ID NO: 279466 - RNA, 22 nt, Human
gcuguguuucucccaaauguua

SEQ ID NO: 279467 - RNA, 19 nt, Human
ggaauccuggucauaacac

SEQ ID NO: 279468 - RNA, 22 nt, Human
ggcccuguuuuuccaucccuaa

SEQ ID NO: 279469 - RNA, 19 nt, Human
ggcgcagcggcggacgcga

SEQ ID NO: 279470 - RNA, 18 nt, Human
gguggcgggcgggcgugg

SEQ ID NO: 279471 - RNA, 20 nt, Human
gucauguccagaaauggaau

SEQ ID NO: 279472 - RNA, 20 nt, Human
guggcccuguuuuuccaucc

SEQ ID NO: 279473 - RNA, 23 nt, Human
guuguaagcuuuguuggcauugu

SEQ ID NO: 279474 - RNA, 24 nt, Human
uaaaaaacaaaacaaaaaaauuca

SEQ ID NO: 279475 - RNA, 19 nt, Human
uaaaaagauccaaaacugg

SEQ ID NO: 279476 - RNA, 24 nt, Human
uaaaagauuaaaaaacaaaacaaa

SEQ ID NO: 279477 - RNA, 20 nt, Human
uaaaguacccuaauaaaggc

SEQ ID NO: 279478 - RNA, 19 nt, Human
uaaaucaauauccuaacua

SEQ ID NO: 279479 - RNA, 20 nt, Human
uaaaucaauauccuaacuag

SEQ ID NO: 279480 - RNA, 19 nt, Human
uaaaugcaaauaucagugu

SEQ ID NO: 279481 - RNA, 21 nt, Human
uaaucacaacuuaaauaaaag

SEQ ID NO: 279482 - RNA, 21 nt, Human
uacaaaaaauggaaaucugcc

SEQ ID NO: 279483 - RNA, 19 nt, Human
uagaacacacaaauaauca

SEQ ID NO: 279484 - RNA, 23 nt, Human
uaggcugacuucugaaaagcaaa

SEQ ID NO: 279485 - RNA, 22 nt, Human
uaguaaaucagaacagcauucu

SEQ ID NO: 279486 - RNA, 21 nt, Human
uauacauauuauauauauaua

SEQ ID NO: 279487 - RNA, 21 nt, Human
uauauacauauuauauauaua

SEQ ID NO: 279488 - RNA, 22 nt, Human
uauauacauauuauauauauau

SEQ ID NO: 279489 - RNA, 21 nt, Human
uauauauacauauuauauaua

SEQ ID NO: 279490 - RNA, 24 nt, Human
uauauauacauauuauauauauau

SEQ ID NO: 279491 - RNA, 25 nt, Human
uauauauauauauauauaaaauaua

SEQ ID NO: 279492 - RNA, 19 nt, Human
uauauauauauauauauau

SEQ ID NO: 279493 - RNA, 19 nt, Human
uauauauauauauauauau

SEQ ID NO: 279494 - RNA, 19 nt, Human
uauauauauauauauauau

SEQ ID NO: 279495 - RNA, 19 nt, Human
uauauauauauauauauau

SEQ ID NO: 279496 - RNA, 19 nt, Human
uauauauauauauauauau

SEQ ID NO: 279497 - RNA, 22 nt, Human
uaucaccuuccaucgcaaucag

SEQ ID NO: 279498 - RNA, 21 nt, Human
uaugcauaaacaaagugaauc

SEQ ID NO: 279499 - RNA, 27 nt, Human
ucaauauauauauauauacauauuaua

SEQ ID NO: 279500 - RNA, 20 nt, Human
ucaccugaguuugguaaguu

SEQ ID NO: 279501 - RNA, 19 nt, Human
ucacuacuuuaaaguaaaa

SEQ ID NO: 279502 - RNA, 21 nt, Human
ucaggcucgguccgcgaaggc

SEQ ID NO: 279503 - RNA, 19 nt, Human
uccaaaccuuccacaacga

SEQ ID NO: 279504 - RNA, 23 nt, Human
uccaagaguuaaaaauaaacacc

SEQ ID NO: 279505 - RNA, 18 nt, Human
uccccaggccgccgcggc

SEQ ID NO: 279506 - RNA, 23 nt, Human
uccccaggccgccgcggcuccca

SEQ ID NO: 279507 - RNA, 27 nt, Human
uccccaggccgccgcggcucccagccu

SEQ ID NO: 279508 - RNA, 22 nt, Human
uccgcgaaggcgccugccgccc

SEQ ID NO: 279509 - RNA, 23 nt, Human
uccgcgaaggcgccugccgcccc

SEQ ID NO: 279510 - RNA, 24 nt, Human
uccuggaaucaccugaguuuggua

SEQ ID NO: 279511 - RNA, 22 nt, Human
ucgguccgcgaaggcgccugcc

SEQ ID NO: 279512 - RNA, 24 nt, Human
ugaaaacuguccaaagaaaagcca

SEQ ID NO: 279513 - RNA, 24 nt, Human
ugaaaagcaaaauaaaguacccua

SEQ ID NO: 279514 - RNA, 18 nt, Human
ugaacauaaaaacagacc

SEQ ID NO: 279515 - RNA, 18 nt, Human
ugaguccugagaacaguu

SEQ ID NO: 279516 - RNA, 22 nt, Human
ugaguccugagaacaguucuga

SEQ ID NO: 279517 - RNA, 22 nt, Human
uggaauaauguuugcaauggga

SEQ ID NO: 279518 - RNA, 23 nt, Human
uggaauauacaggaaccaaagag

SEQ ID NO: 279519 - RNA, 18 nt, Human
uggagugauuguguacaa

SEQ ID NO: 279520 - RNA, 23 nt, Human
uggauuguacaaacugaacauaa

SEQ ID NO: 279521 - RNA, 24 nt, Human
ugggaaccacaaaaccucuuccaa

SEQ ID NO: 279522 - RNA, 22 nt, Human
ugguaaguggcccuguuuuucc

SEQ ID NO: 279523 - RNA, 21 nt, Human
uguaaacaccagaauucuuac

SEQ ID NO: 279524 - RNA, 28 nt, Human
uguaacaagucaauauauauauauauua

SEQ ID NO: 279525 - RNA, 22 nt, Human
uguguaaacaccagaauucuua

SEQ ID NO: 279526 - RNA, 18 nt, Human
uguuaaaauaaugagucc

SEQ ID NO: 279527 - RNA, 18 nt, Human
uguuguaagcuuuguugg

SEQ ID NO: 279528 - RNA, 19 nt, Human
uuaaaaagauccaaaacug

SEQ ID NO: 279529 - RNA, 24 nt, Human
uucacaaagcuuaaaccacagacg

SEQ ID NO: 279530 - RNA, 25 nt, Human
uucacaauuaagaacaaaauaucug

SEQ ID NO: 279531 - RNA, 21 nt, Human
uucacacugcaguauguacag

SEQ ID NO: 279532 - RNA, 23 nt, Human
uuccuuuuccuucuucaucuuuu

SEQ ID NO: 279533 - RNA, 21 nt, Human
uuguaagcuuuguuggcauug

SEQ ID NO: 279534 - RNA, 20 nt, Human
uuuaaacuaaauguuguaag

SEQ ID NO: 279535 - RNA, 25 nt, Human
uuuaaaggaucuaucaaacuucccu

SEQ ID NO: 279536 - RNA, 23 nt, Human
aaacugaggugggagcugcaacc

SEQ ID NO: 279537 - RNA, 19 nt, Human
aacccuccuccaccuccca

SEQ ID NO: 279538 - RNA, 20 nt, Human
acaaaagcugcacucucuca

SEQ ID NO: 279539 - RNA, 20 nt, Human
acacagcucucucccaaccc

SEQ ID NO: 279540 - RNA, 19 nt, Human
acaggcacagcuucccagg

SEQ ID NO: 279541 - RNA, 19 nt, Human
accacacuuccacccccca

SEQ ID NO: 279542 - RNA, 23 nt, Human
acccagcccccacuacaccacaa

SEQ ID NO: 279543 - RNA, 18 nt, Human
acccccagagcucacucu

SEQ ID NO: 279544 - RNA, 18 nt, Human
acuaggacccagguuucc

SEQ ID NO: 279545 - RNA, 21 nt, Human
acuucagaaauggccgagagg

SEQ ID NO: 279546 - RNA, 18 nt, Human
agacagccuggagggagc

SEQ ID NO: 279547 - RNA, 26 nt, Human
agagaagccaggcuuccucgccuggg

SEQ ID NO: 279548 - RNA, 19 nt, Human
agagguccuaaucuaucua

SEQ ID NO: 279549 - RNA, 21 nt, Human
agaggugggagguggcaggag

SEQ ID NO: 279550 - RNA, 18 nt, Human
aggaccagaaggcgcucu

SEQ ID NO: 279551 - RNA, 23 nt, Human
aggccacaggguugggcagggaa

SEQ ID NO: 279552 - RNA, 22 nt, Human
aggucuggaggcccagacagcc

SEQ ID NO: 279553 - RNA, 22 nt, Human
aggugccuuuggcgagauuguc

SEQ ID NO: 279554 - RNA, 21 nt, Human
agucucaccucagcccucaga

SEQ ID NO: 279555 - RNA, 22 nt, Human
agugccagagccagacaggcaa

SEQ ID NO: 279556 - RNA, 18 nt, Human
auggaagagcugggacua

SEQ ID NO: 279557 - RNA, 18 nt, Human
caacaacccccagagcuc

SEQ ID NO: 279558 - RNA, 22 nt, Human
cacacagcucucucccaaccca

SEQ ID NO: 279559 - RNA, 19 nt, Human
caccaacaacccccagagc

SEQ ID NO: 279560 - RNA, 21 nt, Human
caccacacuuccaccccccag

SEQ ID NO: 279561 - RNA, 22 nt, Human
cacccagcccccacuacaccac

SEQ ID NO: 279562 - RNA, 25 nt, Human
caccccacccagcccccacuacacc

SEQ ID NO: 279563 - RNA, 21 nt, Human
cacuacaccacaaggugcucu

SEQ ID NO: 279564 - RNA, 19 nt, Human
cacuggucccugcagagcu

SEQ ID NO: 279565 - RNA, 20 nt, Human
cagaaauggccgagaggaug

SEQ ID NO: 279566 - RNA, 19 nt, Human
cagcgugcuagucaugugg

SEQ ID NO: 279567 - RNA, 21 nt, Human
cagggcguggcuaggaccaga

SEQ ID NO: 279568 - RNA, 20 nt, Human
cagugccagagccagacagg

SEQ ID NO: 279569 - RNA, 21 nt, Human
ccaacccacaccaacaacccc

SEQ ID NO: 279570 - RNA, 23 nt, Human
ccacaccaacaacccccagagcu

SEQ ID NO: 279571 - RNA, 26 nt, Human
ccacccagcccccacuacaccacaag

SEQ ID NO: 279572 - RNA, 19 nt, Human
ccagagccagacaggcaca

SEQ ID NO: 279573 - RNA, 25 nt, Human
ccagcaucuaaauucgggcaugacu

SEQ ID NO: 279574 - RNA, 24 nt, Human
ccaggcuuccucgccugggcugug

SEQ ID NO: 279575 - RNA, 22 nt, Human
cccaacccacaccaacaacccc

SEQ ID NO: 279576 - RNA, 26 nt, Human
cccagagcucacucuucaggccuuug

SEQ ID NO: 279577 - RNA, 25 nt, Human
cccaggagacugaaggcuccaugga

SEQ ID NO: 279578 - RNA, 20 nt, Human
ccccagagcucacucuucag

SEQ ID NO: 279579 - RNA, 23 nt, Human
ccugggcugugcauccccugccu

SEQ ID NO: 279580 - RNA, 21 nt, Human
cggagccaccccacccagccc

SEQ ID NO: 279581 - RNA, 18 nt, Human
cucagggugacaggggga

SEQ ID NO: 279582 - RNA, 21 nt, Human
cucagggugacagggggaucc

SEQ ID NO: 279583 - RNA, 25 nt, Human
cucucccaacccacaccaacaaccc

SEQ ID NO: 279584 - RNA, 24 nt, Human
cucucucagcaaauugucauccca

SEQ ID NO: 279585 - RNA, 19 nt, Human
cucucucccaacccacacc

SEQ ID NO: 279586 - RNA, 20 nt, Human
cugugcauccccugccuagg

SEQ ID NO: 279587 - RNA, 19 nt, Human
cugugucaccacacuucca

SEQ ID NO: 279588 - RNA, 21 nt, Human
cuucagaaauggccgagagga

SEQ ID NO: 279589 - RNA, 20 nt, Human
cuuuggggauauuugcgcgg

SEQ ID NO: 279590 - RNA, 25 nt, Human
gagccagacaggcacagcuucccag

SEQ ID NO: 279591 - RNA, 22 nt, Human
gaggacccaaaagcuuugggga

SEQ ID NO: 279592 - RNA, 19 nt, Human
gaugccagaacuggaaagg

SEQ ID NO: 279593 - RNA, 21 nt, Human
gcagggaaaaagcaucucgga

SEQ ID NO: 279594 - RNA, 19 nt, Human
gcccugaaggccacagggu

SEQ ID NO: 279595 - RNA, 20 nt, Human
gcucacagagaagccaggcu

SEQ ID NO: 279596 - RNA, 25 nt, Human
ggaagagcugggacuaggacccagg

SEQ ID NO: 279597 - RNA, 21 nt, Human
ggaccagaaggcgcucuggua

SEQ ID NO: 279598 - RNA, 24 nt, Human
ggacuucuuggggagaccaccggg

SEQ ID NO: 279599 - RNA, 23 nt, Human
ggagaagucucaccucagcccuc

SEQ ID NO: 279600 - RNA, 18 nt, Human
ggagcacccugugcaggu

SEQ ID NO: 279601 - RNA, 20 nt, Human
ggagcugcaacccuccucca

SEQ ID NO: 279602 - RNA, 18 nt, Human
ggagggagcugccgagga

SEQ ID NO: 279603 - RNA, 24 nt, Human
gggaaaaagcaucucggauagagg

SEQ ID NO: 279604 - RNA, 22 nt, Human
gggcaugacuugaggacccaaa

SEQ ID NO: 279605 - RNA, 21 nt, Human
ggggagaccaccgggacuucc

SEQ ID NO: 279606 - RNA, 21 nt, Human
guaacacaaguccaggaagca

SEQ ID NO: 279607 - RNA, 18 nt, Human
uaggaggugccuuuggcg

SEQ ID NO: 279608 - RNA, 23 nt, Human
ucaccacacuuccaccccccagu

SEQ ID NO: 279609 - RNA, 22 nt, Human
ucacugugucaccacacuucca

SEQ ID NO: 279610 - RNA, 21 nt, Human
ucagaaauggccgagaggaug

SEQ ID NO: 279611 - RNA, 22 nt, Human
ucagagaggugggagguggcag

SEQ ID NO: 279612 - RNA, 24 nt, Human
ucaucccaggagaagucucaccuc

SEQ ID NO: 279613 - RNA, 23 nt, Human
uccacaugagaauuagaugaagu

SEQ ID NO: 279614 - RNA, 24 nt, Human
uccauacuggggagaugccagaac

SEQ ID NO: 279615 - RNA, 23 nt, Human
ucggauagagguccuaaucuauc

SEQ ID NO: 279616 - RNA, 22 nt, Human
ucucggauagagguccuaaucu

SEQ ID NO: 279617 - RNA, 24 nt, Human
ucucucagcaaauugucaucccag

SEQ ID NO: 279618 - RNA, 19 nt, Human
ucuggaggcccagacagcc

SEQ ID NO: 279619 - RNA, 24 nt, Human
ugaaaacccugaauuaaaaacuaa

SEQ ID NO: 279620 - RNA, 18 nt, Human
ugaaggccacaggguugg

SEQ ID NO: 279621 - RNA, 20 nt, Human
ugacagggggaucccaugga

SEQ ID NO: 279622 - RNA, 21 nt, Human
ugacuugaggacccaaaagcu

SEQ ID NO: 279623 - RNA, 24 nt, Human
ugagaauuagaugaaguaacacaa

SEQ ID NO: 279624 - RNA, 19 nt, Human
ugaggugggagcugcaacc

SEQ ID NO: 279625 - RNA, 19 nt, Human
ugcagcugggaaacugcag

SEQ ID NO: 279626 - RNA, 21 nt, Human
ugccuaggcugcagcugggaa

SEQ ID NO: 279627 - RNA, 22 nt, Human
ugccuaggcugcagcugggaaa

SEQ ID NO: 279628 - RNA, 20 nt, Human
ugccuggcacuggucccugc

SEQ ID NO: 279629 - RNA, 23 nt, Human
uggaagagcugggacuaggaccc

SEQ ID NO: 279630 - RNA, 20 nt, Human
uggagcugggcugggaggag

SEQ ID NO: 279631 - RNA, 22 nt, Human
uggcaggagcacccugugcagg

SEQ ID NO: 279632 - RNA, 24 nt, Human
uggcaggagcacccugugcagguc

SEQ ID NO: 279633 - RNA, 19 nt, Human
ugggcagggaaaaagcauc

SEQ ID NO: 279634 - RNA, 19 nt, Human
ugucaccacacuuccaccc

SEQ ID NO: 279635 - RNA, 21 nt, Human
ugucuuggggacuucuugggg

SEQ ID NO: 279636 - RNA, 19 nt, Human
ugugcucacagagaagcca

SEQ ID NO: 279637 - RNA, 20 nt, Human
uguggucagugccagagcca

SEQ ID NO: 279638 - RNA, 21 nt, Human
uucccaggagacugaaggcuc

SEQ ID NO: 279639 - RNA, 24 nt, Human
uucccaggagacugaaggcuccau

SEQ ID NO: 279640 - RNA, 22 nt, Human
aaaaaaaaagaaaaacccaacu

SEQ ID NO: 279641 - RNA, 22 nt, Human
aaaaaagaaaaacccaacugaa

SEQ ID NO: 279642 - RNA, 20 nt, Human
aaaaaagccagcacuuuguu

SEQ ID NO: 279643 - RNA, 19 nt, Human
aaaacgucacuuaucacag

SEQ ID NO: 279644 - RNA, 23 nt, Human
aaaagaaaaagaaaaagaaaaaa

SEQ ID NO: 279645 - RNA, 24 nt, Human
aaacagaaaaagaaaaagaaaaag

SEQ ID NO: 279646 - RNA, 25 nt, Human
aaacagaaaaagaaaaagaaaaaga

SEQ ID NO: 279647 - RNA, 21 nt, Human
aaacauauguaauaacauaau

SEQ ID NO: 279648 - RNA, 21 nt, Human
aaacgucacuuaucacagucc

SEQ ID NO: 279649 - RNA, 20 nt, Human
aacaauccgaaacauagccc

SEQ ID NO: 279650 - RNA, 24 nt, Human
aagacagaagcagaccccauggaa

SEQ ID NO: 279651 - RNA, 20 nt, Human
aagcagaccccauggaaucc

SEQ ID NO: 279652 - RNA, 21 nt, Human
aagcagaccccauggaaucca

SEQ ID NO: 279653 - RNA, 21 nt, Human
aagcuccuccuggaagguccc

SEQ ID NO: 279654 - RNA, 24 nt, Human
aagggucccgagagacagaaaggu

SEQ ID NO: 279655 - RNA, 21 nt, Human
aaguacuaaaacuuaauugca

SEQ ID NO: 279656 - RNA, 21 nt, Human
acagaaaaagaaaaagaaaaa

SEQ ID NO: 279657 - RNA, 23 nt, Human
accgcgaauccacuagguaaauc

SEQ ID NO: 279658 - RNA, 21 nt, Human
agaaaaagaaaaagaaaaaaa

SEQ ID NO: 279659 - RNA, 21 nt, Human
agaaaaagaaaaagaaaaaga

SEQ ID NO: 279660 - RNA, 22 nt, Human
agaaaaagaaaaagaaaaagaa

SEQ ID NO: 279661 - RNA, 21 nt, Human
agaaacagaaaaagaaaaaga

SEQ ID NO: 279662 - RNA, 18 nt, Human
agaaagcacacagagaug

SEQ ID NO: 279663 - RNA, 19 nt, Human
agagauacucccaaagagu

SEQ ID NO: 279664 - RNA, 23 nt, Human
agcgccagccucccccgggcagc

SEQ ID NO: 279665 - RNA, 19 nt, Human
aggcaaaguuuggggcgcg

SEQ ID NO: 279666 - RNA, 19 nt, Human
agggaggccacuucgccgg

SEQ ID NO: 279667 - RNA, 19 nt, Human
augcagcuggagaggggcu

SEQ ID NO: 279668 - RNA, 23 nt, Human
caaaaugguccuggacaccguga

SEQ ID NO: 279669 - RNA, 20 nt, Human
caagacagaagcagacccca

SEQ ID NO: 279670 - RNA, 22 nt, Human
caaguacuaaaacuuaauugca

SEQ ID NO: 279671 - RNA, 21 nt, Human
cacaguccagaaagcacacag

SEQ ID NO: 279672 - RNA, 20 nt, Human
cacauuuuugaaaauaaggc

SEQ ID NO: 279673 - RNA, 23 nt, Human
caccgcgccagggcacccauccu

SEQ ID NO: 279674 - RNA, 21 nt, Human
cacuagguaaauccauuuagc

SEQ ID NO: 279675 - RNA, 18 nt, Human
cagcgcgcggagcagcgg

SEQ ID NO: 279676 - RNA, 24 nt, Human
caggggagcgggcggcgcggagug

SEQ ID NO: 279677 - RNA, 21 nt, Human
cauauaagaaaagaaguagcu

SEQ ID NO: 279678 - RNA, 22 nt, Human
ccaaccacugcuccaguugcac

SEQ ID NO: 279679 - RNA, 19 nt, Human
ccaauaaccccgcccucuc

SEQ ID NO: 279680 - RNA, 22 nt, Human
ccacuagguaaauccauuuagc

SEQ ID NO: 279681 - RNA, 18 nt, Human
ccagggcuccagguucuc

SEQ ID NO: 279682 - RNA, 19 nt, Human
cccaaccuccuuucaagac

SEQ ID NO: 279683 - RNA, 21 nt, Human
cccaaugauugcaucuaugcc

SEQ ID NO: 279684 - RNA, 22 nt, Human
cccauccucucccuccuucgga

SEQ ID NO: 279685 - RNA, 21 nt, Human
ccccuguuuuuuguuuuuugu

SEQ ID NO: 279686 - RNA, 21 nt, Human
ccccuucccuccauucagccc

SEQ ID NO: 279687 - RNA, 18 nt, Human
cccgggcagcgcgcggag

SEQ ID NO: 279688 - RNA, 19 nt, Human
cccucuuccuuccugcuuu

SEQ ID NO: 279689 - RNA, 19 nt, Human
cccucuuccuuccugcuuu

SEQ ID NO: 279690 - RNA, 20 nt, Human
cccucuuccuuccugcuuuu

SEQ ID NO: 279691 - RNA, 18 nt, Human
ccgaaacauagccgaggc

SEQ ID NO: 279692 - RNA, 24 nt, Human
ccgccgugccuagcaccccaaaca

SEQ ID NO: 279693 - RNA, 18 nt, Human
ccgcguccgccgccuccu

SEQ ID NO: 279694 - RNA, 24 nt, Human
ccggccggcucgcccgcuagcgcc

SEQ ID NO: 279695 - RNA, 23 nt, Human
ccuagcaccccaaacaauccgaa

SEQ ID NO: 279696 - RNA, 21 nt, Human
ccuccuuucaagacagaagcu

SEQ ID NO: 279697 - RNA, 19 nt, Human
ccucuuguuuuuguuuuga

SEQ ID NO: 279698 - RNA, 19 nt, Human
ccuggacaccgugacgaag

SEQ ID NO: 279699 - RNA, 21 nt, Human
ccuucugaaggaagugggaau

SEQ ID NO: 279700 - RNA, 24 nt, Human
cgccccuucccuccauucagcccc

SEQ ID NO: 279701 - RNA, 22 nt, Human
cggaaaggcagccccgggaaca

SEQ ID NO: 279702 - RNA, 23 nt, Human
cggaaaggcagcugagaagaaga

SEQ ID NO: 279703 - RNA, 23 nt, Human
cggccggcucgcccgcuagcgcc

SEQ ID NO: 279704 - RNA, 18 nt, Human
cggcgcgcaucgccugcu

SEQ ID NO: 279705 - RNA, 22 nt, Human
cggcucgcccgcuagcgccagc

SEQ ID NO: 279706 - RNA, 23 nt, Human
cgugugugugugugugugugugu

SEQ ID NO: 279707 - RNA, 20 nt, Human
cuaugcccucuuguuuuugu

SEQ ID NO: 279708 - RNA, 19 nt, Human
cucaaugaagcaaaucacc

SEQ ID NO: 279709 - RNA, 23 nt, Human
cuccagguucucgagagauacuc

SEQ ID NO: 279710 - RNA, 26 nt, Human
cuuuaugaaugcgugcggucaucacu

SEQ ID NO: 279711 - RNA, 20 nt, Human
gaaaggcagccccgggaaca

SEQ ID NO: 279712 - RNA, 21 nt, Human
gacgaaggaguaagggagaga

SEQ ID NO: 279713 - RNA, 20 nt, Human
gaggggcagccgccgcggga

SEQ ID NO: 279714 - RNA, 20 nt, Human
gcaaaaaaaaagaaaaaccc

SEQ ID NO: 279715 - RNA, 21 nt, Human
gcaaaucaccccauuugucau

SEQ ID NO: 279716 - RNA, 19 nt, Human
gcagccccgggaacagcaa

SEQ ID NO: 279717 - RNA, 19 nt, Human
gcgcaggggagcgggcggc

SEQ ID NO: 279718 - RNA, 21 nt, Human
gcgcggagugggcugaggggc

SEQ ID NO: 279719 - RNA, 20 nt, Human
gcggagugggcugaggggcc

SEQ ID NO: 279720 - RNA, 21 nt, Human
ggacaccgugacgaagaaaua

SEQ ID NO: 279721 - RNA, 23 nt, Human
ggcaaaaaaaaagaaaaacccaa

SEQ ID NO: 279722 - RNA, 19 nt, Human
ggcagcgcgcggagcagcg

SEQ ID NO: 279723 - RNA, 18 nt, Human
gggaacagcaagcgcgga

SEQ ID NO: 279724 - RNA, 22 nt, Human
gggaaugugaguauuucaggga

SEQ ID NO: 279725 - RNA, 22 nt, Human
ggggcuggggugcggcgggggg

SEQ ID NO: 279726 - RNA, 20 nt, Human
ggggugccggggccgacagg

SEQ ID NO: 279727 - RNA, 22 nt, Human
guaauuucuuuaaaaaauaaaa

SEQ ID NO: 279728 - RNA, 30 nt, Human
guggauucgugugugugugugugugugugg

SEQ ID NO: 279729 - RNA, 23 nt, Human
guggcaaaaaaaaagaaaaaccc

SEQ ID NO: 279730 - RNA, 24 nt, Human
gugugugugugugugaaaauagug

SEQ ID NO: 279731 - RNA, 21 nt, Human
gugugugugugugugugugug

SEQ ID NO: 279732 - RNA, 21 nt, Human
gugugugugugugugugugug

SEQ ID NO: 279733 - RNA, 21 nt, Human
gugugugugugugugugugug

SEQ ID NO: 279734 - RNA, 20 nt, Human
uaaaacgucacuuaucacag

SEQ ID NO: 279735 - RNA, 18 nt, Human
uaacauaauaagcgugca

SEQ ID NO: 279736 - RNA, 22 nt, Human
uaaccugcccacauaaugguuc

SEQ ID NO: 279737 - RNA, 23 nt, Human
uaagggagagaaacagaaaaaga

SEQ ID NO: 279738 - RNA, 24 nt, Human
uaagggagagaaacagaaaaagaa

SEQ ID NO: 279739 - RNA, 22 nt, Human
uaccaaaaauggcugaagagca

SEQ ID NO: 279740 - RNA, 22 nt, Human
uagcaacacuuauaacauugaa

SEQ ID NO: 279741 - RNA, 18 nt, Human
uagccgaggcgaaugcag

SEQ ID NO: 279742 - RNA, 18 nt, Human
uauauacauucauacaua

SEQ ID NO: 279743 - RNA, 20 nt, Human
uauauacauucauacauauc

SEQ ID NO: 279744 - RNA, 20 nt, Human
uaugcccucuuguuuuuguu

SEQ ID NO: 279745 - RNA, 22 nt, Human
ucaagacagaagcagaccccau

SEQ ID NO: 279746 - RNA, 19 nt, Human
ucaaugaagcaaaucaccc

SEQ ID NO: 279747 - RNA, 18 nt, Human
ucaggaaagcgcuagcac

SEQ ID NO: 279748 - RNA, 22 nt, Human
ucauaaaacucccuauacuuag

SEQ ID NO: 279749 - RNA, 21 nt, Human
uccaauaaccccgcccucucu

SEQ ID NO: 279750 - RNA, 19 nt, Human
uccagcauaucugauggau

SEQ ID NO: 279751 - RNA, 19 nt, Human
ucccagauuuccagggcuc

SEQ ID NO: 279752 - RNA, 24 nt, Human
ucccugucuucuuuuguaugugcu

SEQ ID NO: 279753 - RNA, 24 nt, Human
uccuuucaagacagaagcagaccc

SEQ ID NO: 279754 - RNA, 24 nt, Human
ucuaguucuuuuuuucuuuuucuu

SEQ ID NO: 279755 - RNA, 21 nt, Human
ucuaugcccucuuguuuuugu

SEQ ID NO: 279756 - RNA, 22 nt, Human
ucucucacaaccagaaaggggc

SEQ ID NO: 279757 - RNA, 24 nt, Human
ucuuuuguaugugcuucauaaaaa

SEQ ID NO: 279758 - RNA, 24 nt, Human
ugagauacuuguuuuuauuuuuua

SEQ ID NO: 279759 - RNA, 23 nt, Human
ugagucacucaaaaggacagucu

SEQ ID NO: 279760 - RNA, 21 nt, Human
uggauucgugugugugugugu

SEQ ID NO: 279761 - RNA, 21 nt, Human
uggauucgugugugugugugu

SEQ ID NO: 279762 - RNA, 29 nt, Human
uggauucgugugugugugugugugugugg

SEQ ID NO: 279763 - RNA, 21 nt, Human
uggcaaaaaaaaagaaaaacc

SEQ ID NO: 279764 - RNA, 23 nt, Human
ugggcugaggggccggccgccuc

SEQ ID NO: 279765 - RNA, 23 nt, Human
uguaauuucuuuaaaaaauaaaa

SEQ ID NO: 279766 - RNA, 21 nt, Human
uguauauacauucauacauag

SEQ ID NO: 279767 - RNA, 22 nt, Human
uguauauacauucauacauauc

SEQ ID NO: 279768 - RNA, 23 nt, Human
uguauauacauucauacauaucu

SEQ ID NO: 279769 - RNA, 21 nt, Human
ugugaaaauagugaauguaug

SEQ ID NO: 279770 - RNA, 22 nt, Human
ugugugaaaauagugaauguau

SEQ ID NO: 279771 - RNA, 25 nt, Human
ugugugugugugugugaaaauagug

SEQ ID NO: 279772 - RNA, 18 nt, Human
ugugugugugugugugug

SEQ ID NO: 279773 - RNA, 18 nt, Human
ugugugugugugugugug

SEQ ID NO: 279774 - RNA, 18 nt, Human
ugugugugugugugugug

SEQ ID NO: 279775 - RNA, 18 nt, Human
ugugugugugugugugug

SEQ ID NO: 279776 - RNA, 18 nt, Human
ugugugugugugugugug

SEQ ID NO: 279777 - RNA, 21 nt, Human
ugugugugugugugugugugu

SEQ ID NO: 279778 - RNA, 21 nt, Human
ugugugugugugugugugugu

SEQ ID NO: 279779 - RNA, 21 nt, Human
ugugugugugugugugugugu

SEQ ID NO: 279780 - RNA, 21 nt, Human
ugugugugugugugugugugu

SEQ ID NO: 279781 - RNA, 21 nt, Human
ugugugugugugugugugugu

SEQ ID NO: 279782 - RNA, 21 nt, Human
ugugugugugugugugugugu

SEQ ID NO: 279783 - RNA, 21 nt, Human
ugugugugugugugugugugu

SEQ ID NO: 279784 - RNA, 21 nt, Human
ugugugugugugugugugugu

SEQ ID NO: 279785 - RNA, 22 nt, Human
ugugugugugugugugugugug

SEQ ID NO: 279786 - RNA, 22 nt, Human
ugugugugugugugugugugug

SEQ ID NO: 279787 - RNA, 22 nt, Human
ugugugugugugugugugugug

SEQ ID NO: 279788 - RNA, 22 nt, Human
ugugugugugugugugugugug

SEQ ID NO: 279789 - RNA, 20 nt, Human
uguguugugccuugaugcug

SEQ ID NO: 279790 - RNA, 20 nt, Human
uguuauguuuuguguugguu

SEQ ID NO: 279791 - RNA, 21 nt, Human
uuaaagguuugcagguugagu

SEQ ID NO: 279792 - RNA, 18 nt, Human
uuaauugcaacagaauga

SEQ ID NO: 279793 - RNA, 23 nt, Human
uuagggaauuuauuggccccugu

SEQ ID NO: 279794 - RNA, 19 nt, Human
uucaagacagaagcagacc

SEQ ID NO: 279795 - RNA, 24 nt, Human
uuccaaccacugcuccaguugcac

SEQ ID NO: 279796 - RNA, 21 nt, Human
uuccagggcuccagguucucg

SEQ ID NO: 279797 - RNA, 20 nt, Human
uucucuggcaauuggacuga

SEQ ID NO: 279798 - RNA, 22 nt, Human
uucuuuuuuucuuuuucuucuu

SEQ ID NO: 279799 - RNA, 22 nt, Human
uuguguuauguuuuguguuggu

SEQ ID NO: 279800 - RNA, 21 nt, Human
uuuaaaaagucuuuccuuccu

SEQ ID NO: 279801 - RNA, 22 nt, Human
uuucaaaugcaaguuccaacca

SEQ ID NO: 279802 - RNA, 22 nt, Human
uuucaagacagaagcagacccc

SEQ ID NO: 279803 - RNA, 21 nt, Human
aaaaaauaaaucaacccaggg

SEQ ID NO: 279804 - RNA, 18 nt, Human
aaaccagacacacaaaaa

SEQ ID NO: 279805 - RNA, 24 nt, Human
aaacccccagccuuccuucccacc

SEQ ID NO: 279806 - RNA, 18 nt, Human
aacaaagagagaaaaaaa

SEQ ID NO: 279807 - RNA, 21 nt, Human
aacaggccuuccgucaggccu

SEQ ID NO: 279808 - RNA, 22 nt, Human
aacuggaucccgccgggaaauc

SEQ ID NO: 279809 - RNA, 27 nt, Human
aagagaaggaaggcaggagggacagaa

SEQ ID NO: 279810 - RNA, 20 nt, Human
aagccucgguccggagccaa

SEQ ID NO: 279811 - RNA, 24 nt, Human
aagccugggauggggauuggaggg

SEQ ID NO: 279812 - RNA, 22 nt, Human
acagaaggaagaagaagaaaaa

SEQ ID NO: 279813 - RNA, 19 nt, Human
acccaaccccaccaaaaua

SEQ ID NO: 279814 - RNA, 20 nt, Human
accccaccccacccacccac

SEQ ID NO: 279815 - RNA, 22 nt, Human
accccugcuccuccagcagcuu

SEQ ID NO: 279816 - RNA, 20 nt, Human
acccucccgcccuucuccca

SEQ ID NO: 279817 - RNA, 21 nt, Human
acccucccgcccuucucccac

SEQ ID NO: 279818 - RNA, 20 nt, Human
acccuccucccgggcccucc

SEQ ID NO: 279819 - RNA, 22 nt, Human
accugguucccccgaaggcggg

SEQ ID NO: 279820 - RNA, 19 nt, Human
acuugccccaccccacccc

SEQ ID NO: 279821 - RNA, 25 nt, Human
acuugccccaccccaccccacccac

SEQ ID NO: 279822 - RNA, 18 nt, Human
agaagaagaaaaauugag

SEQ ID NO: 279823 - RNA, 23 nt, Human
agaagaagaaaaauugaggaaaa

SEQ ID NO: 279824 - RNA, 18 nt, Human
agaagagggacggagacc

SEQ ID NO: 279825 - RNA, 24 nt, Human
agaaggaaggcaggagggacagaa

SEQ ID NO: 279826 - RNA, 25 nt, Human
agacacagcaagccugggaugggga

SEQ ID NO: 279827 - RNA, 18 nt, Human
agagagaaaaaaaacugg

SEQ ID NO: 279828 - RNA, 20 nt, Human
agagagaaaaaaaacugggg

SEQ ID NO: 279829 - RNA, 19 nt, Human
agagggacagucagccccg

SEQ ID NO: 279830 - RNA, 18 nt, Human
agagggacggagaccugg

SEQ ID NO: 279831 - RNA, 27 nt, Human
agccaacaaaaucaacuggaucccgcc

SEQ ID NO: 279832 - RNA, 18 nt, Human
agccccuucccugggcgg

SEQ ID NO: 279833 - RNA, 19 nt, Human
agccuuccuucccacccaa

SEQ ID NO: 279834 - RNA, 21 nt, Human
aggccccuggcagggagaggg

SEQ ID NO: 279835 - RNA, 20 nt, Human
agggaggggagcgcgggggc

SEQ ID NO: 279836 - RNA, 21 nt, Human
auggugccgaguggagaggga

SEQ ID NO: 279837 - RNA, 26 nt, Human
auuugccuuuccccucccucccaccc

SEQ ID NO: 279838 - RNA, 21 nt, Human
caaccccaccaaaauaaaacu

SEQ ID NO: 279839 - RNA, 26 nt, Human
cacagugccaugggcccggccgcggg

SEQ ID NO: 279840 - RNA, 21 nt, Human
cacccacccacugggccacuc

SEQ ID NO: 279841 - RNA, 21 nt, Human
caccccaccccacccacccac

SEQ ID NO: 279842 - RNA, 23 nt, Human
caccccugcuccuccagcagcuu

SEQ ID NO: 279843 - RNA, 27 nt, Human
caccccugcuccuccagcagcuucccc

SEQ ID NO: 279844 - RNA, 21 nt, Human
cacccuccucccgggcccucc

SEQ ID NO: 279845 - RNA, 25 nt, Human
cacccuccucccgggcccucccagg

SEQ ID NO: 279846 - RNA, 21 nt, Human
cacgggguuuuuccuuuucuu

SEQ ID NO: 279847 - RNA, 21 nt, Human
cacuuuacaaaacccccagcc

SEQ ID NO: 279848 - RNA, 20 nt, Human
cagaaggaagaagaagaaaa

SEQ ID NO: 279849 - RNA, 21 nt, Human
cagaaggaagaagaagaaaaa

SEQ ID NO: 279850 - RNA, 22 nt, Human
cagacacacaaaaaaagaagua

SEQ ID NO: 279851 - RNA, 18 nt, Human
cagagcuacagggccgcc

SEQ ID NO: 279852 - RNA, 19 nt, Human
cagcagucuguggacaaug

SEQ ID NO: 279853 - RNA, 21 nt, Human
cagcgggugccacaggcugcu

SEQ ID NO: 279854 - RNA, 23 nt, Human
caggccccuggcagggagagggu

SEQ ID NO: 279855 - RNA, 23 nt, Human
ccaaaauaaaacuacccccuuaa

SEQ ID NO: 279856 - RNA, 21 nt, Human
ccaaagggaggaaaggaaggg

SEQ ID NO: 279857 - RNA, 22 nt, Human
ccaacaaaaucaacuggauccc

SEQ ID NO: 279858 - RNA, 27 nt, Human
ccacccaaccccaccaaaauaaaacua

SEQ ID NO: 279859 - RNA, 20 nt, Human
ccaccccaccccacccaccc

SEQ ID NO: 279860 - RNA, 22 nt, Human
ccaccccugcuccuccagcagc

SEQ ID NO: 279861 - RNA, 24 nt, Human
ccagacacacaaaaaaagaaguag

SEQ ID NO: 279862 - RNA, 18 nt, Human
cccacacauuuccggggu

SEQ ID NO: 279863 - RNA, 19 nt, Human
cccaccccaccccacccac

SEQ ID NO: 279864 - RNA, 24 nt, Human
cccaccccaccccacccacccacu

SEQ ID NO: 279865 - RNA, 21 nt, Human
cccauggccgggggcggggac

SEQ ID NO: 279866 - RNA, 26 nt, Human
ccccaccaaaauaaaacuacccccuu

SEQ ID NO: 279867 - RNA, 19 nt, Human
ccccaccccaccccaccca

SEQ ID NO: 279868 - RNA, 20 nt, Human
ccccaccccaccccacccaa

SEQ ID NO: 279869 - RNA, 20 nt, Human
ccccaccccaccccacccac

SEQ ID NO: 279870 - RNA, 24 nt, Human
ccccaccccaccccacccacccac

SEQ ID NO: 279871 - RNA, 20 nt, Human
ccccaccccugcuccuccag

SEQ ID NO: 279872 - RNA, 18 nt, Human
ccccagccuuccuuccca

SEQ ID NO: 279873 - RNA, 19 nt, Human
ccccauggccgggggcggg

SEQ ID NO: 279874 - RNA, 21 nt, Human
ccccauggccgggggcgggga

SEQ ID NO: 279875 - RNA, 20 nt, Human
cccccaccccugcuccucca

SEQ ID NO: 279876 - RNA, 19 nt, Human
ccccccaccccugcuccuc

SEQ ID NO: 279877 - RNA, 23 nt, Human
ccccccaccccugcuccuccagc

SEQ ID NO: 279878 - RNA, 19 nt, Human
ccccgcgaagccccccucc

SEQ ID NO: 279879 - RNA, 20 nt, Human
ccccgcgcugagcggggcuc

SEQ ID NO: 279880 - RNA, 21 nt, Human
ccccgcgcugagcggggcucc

SEQ ID NO: 279881 - RNA, 19 nt, Human
ccccggccccgcccggccc

SEQ ID NO: 279882 - RNA, 19 nt, Human
ccccucccucccacccccc

SEQ ID NO: 279883 - RNA, 20 nt, Human
ccccuccggcuccgagcucc

SEQ ID NO: 279884 - RNA, 27 nt, Human
ccccuuaaaaaaauaaaucaacccagg

SEQ ID NO: 279885 - RNA, 20 nt, Human
cccgcccggcccccggcccc

SEQ ID NO: 279886 - RNA, 18 nt, Human
cccgccgggaaaucgggg

SEQ ID NO: 279887 - RNA, 23 nt, Human
cccggccccgcccggcccccggc

SEQ ID NO: 279888 - RNA, 19 nt, Human
cccgggggagcgcccgggg

SEQ ID NO: 279889 - RNA, 23 nt, Human
cccugcuccuccagcagcuuccc

SEQ ID NO: 279890 - RNA, 20 nt, Human
ccgccccgccgcggugccuc

SEQ ID NO: 279891 - RNA, 21 nt, Human
ccgcgcccagcgggugccaca

SEQ ID NO: 279892 - RNA, 20 nt, Human
ccggccccgcccggcccccg

SEQ ID NO: 279893 - RNA, 20 nt, Human
ccggcggcacacacagaaca

SEQ ID NO: 279894 - RNA, 18 nt, Human
ccucccaccccccacccc

SEQ ID NO: 279895 - RNA, 18 nt, Human
ccucccgcccuucuccca

SEQ ID NO: 279896 - RNA, 22 nt, Human
ccucccgcccuucucccaccga

SEQ ID NO: 279897 - RNA, 22 nt, Human
ccucccucccaccccccacccc

SEQ ID NO: 279898 - RNA, 18 nt, Human
ccucgcgccucucucccc

SEQ ID NO: 279899 - RNA, 20 nt, Human
ccucgcgccucucuccccgc

SEQ ID NO: 279900 - RNA, 24 nt, Human
ccuuaaaaaaauaaaucaacccag

SEQ ID NO: 279901 - RNA, 19 nt, Human
ccuucccacccaaccccac

SEQ ID NO: 279902 - RNA, 22 nt, Human
cgaagccccccuccggcuccga

SEQ ID NO: 279903 - RNA, 21 nt, Human
cgacagaagagcagggaggga

SEQ ID NO: 279904 - RNA, 18 nt, Human
cgagcuggggagcggggc

SEQ ID NO: 279905 - RNA, 21 nt, Human
cgcaccccgcgaagccccccu

SEQ ID NO: 279906 - RNA, 22 nt, Human
cgccucgcgccucucuccccgc

SEQ ID NO: 279907 - RNA, 24 nt, Human
cggcaggaggaagggggcgagcac

SEQ ID NO: 279908 - RNA, 18 nt, Human
cggcccccggcccccgcu

SEQ ID NO: 279909 - RNA, 22 nt, Human
cggccccggccccgcccggccc

SEQ ID NO: 279910 - RNA, 23 nt, Human
cguggaaucuagaguauuugucu

SEQ ID NO: 279911 - RNA, 21 nt, Human
cuaggggucucucugcauccc

SEQ ID NO: 279912 - RNA, 18 nt, Human
cucacagugccaugggcc

SEQ ID NO: 279913 - RNA, 22 nt, Human
cucccaggaggggcagcuggca

SEQ ID NO: 279914 - RNA, 19 nt, Human
cucccccgccgcgggcucc

SEQ ID NO: 279915 - RNA, 25 nt, Human
cucccgggcccucccaggaggggca

SEQ ID NO: 279916 - RNA, 20 nt, Human
cucccucccaccccccaccc

SEQ ID NO: 279917 - RNA, 20 nt, Human
cucccucccaccccccaccc

SEQ ID NO: 279918 - RNA, 22 nt, Human
cucccucccaccccccaccccu

SEQ ID NO: 279919 - RNA, 23 nt, Human
cucccucccaccccccaccccug

SEQ ID NO: 279920 - RNA, 21 nt, Human
cucccucccaccccccacccu

SEQ ID NO: 279921 - RNA, 20 nt, Human
cuccgagcuccgggagcggg

SEQ ID NO: 279922 - RNA, 18 nt, Human
cucuccccgcccgccccg

SEQ ID NO: 279923 - RNA, 23 nt, Human
cugcucccgccgccgcaucccuc

SEQ ID NO: 279924 - RNA, 18 nt, Human
cugcugcccgcgcccagc

SEQ ID NO: 279925 - RNA, 23 nt, Human
cuggaggagagaagagggacgga

SEQ ID NO: 279926 - RNA, 21 nt, Human
cugguucucggggcgccagaa

SEQ ID NO: 279927 - RNA, 21 nt, Human
cuguggacaaugccuugcucc

SEQ ID NO: 279928 - RNA, 20 nt, Human
cuucccacccaaccccacca

SEQ ID NO: 279929 - RNA, 19 nt, Human
cuugccccaccccaccccc

SEQ ID NO: 279930 - RNA, 22 nt, Human
gaacaggccuuccgucaggccu

SEQ ID NO: 279931 - RNA, 20 nt, Human
gaagagaaggaaggcaggag

SEQ ID NO: 279932 - RNA, 23 nt, Human
gaagagggacggagaccugguuc

SEQ ID NO: 279933 - RNA, 19 nt, Human
gacagucagccccgggacu

SEQ ID NO: 279934 - RNA, 19 nt, Human
gagcagggagggaugccug

SEQ ID NO: 279935 - RNA, 19 nt, Human
gagcuggggagcggggcgg

SEQ ID NO: 279936 - RNA, 25 nt, Human
gagcuggggagcggggcggugcggg

SEQ ID NO: 279937 - RNA, 23 nt, Human
gaggaaaggaagggagaaaccag

SEQ ID NO: 279938 - RNA, 19 nt, Human
gagggaggggagcgcgggg

SEQ ID NO: 279939 - RNA, 23 nt, Human
gagggccgucagaaacccggggg

SEQ ID NO: 279940 - RNA, 22 nt, Human
gauuggagggcuugggaagaga

SEQ ID NO: 279941 - RNA, 25 nt, Human
gcacgggguuuuuccuuuucuuuuu

SEQ ID NO: 279942 - RNA, 21 nt, Human
gcaguggacggcaggaggaag

SEQ ID NO: 279943 - RNA, 18 nt, Human
gccaagcagggaggggag

SEQ ID NO: 279944 - RNA, 19 nt, Human
gccaagcagggaggggaga

SEQ ID NO: 279945 - RNA, 21 nt, Human
gccccaccccaccccacccac

SEQ ID NO: 279946 - RNA, 21 nt, Human
gcgcaccccgcgaagcccccc

SEQ ID NO: 279947 - RNA, 21 nt, Human
gcgcagaggcccagaugccgg

SEQ ID NO: 279948 - RNA, 19 nt, Human
gcucccgccgccgcauccc

SEQ ID NO: 279949 - RNA, 19 nt, Human
gcucccgccgccgcauccc

SEQ ID NO: 279950 - RNA, 19 nt, Human
ggaaggaggguggggacag

SEQ ID NO: 279951 - RNA, 22 nt, Human
ggaaggaggguggggacaguga

SEQ ID NO: 279952 - RNA, 19 nt, Human
ggacagaaggaagaagaag

SEQ ID NO: 279953 - RNA, 18 nt, Human
ggagaaaccagacacaca

SEQ ID NO: 279954 - RNA, 18 nt, Human
ggagagggaggggagcgc

SEQ ID NO: 279955 - RNA, 19 nt, Human
ggagcagggagcccguggg

SEQ ID NO: 279956 - RNA, 20 nt, Human
ggcccccggcccccgcucag

SEQ ID NO: 279957 - RNA, 24 nt, Human
ggccgggggcggggacgcggggcu

SEQ ID NO: 279958 - RNA, 20 nt, Human
ggcgaccgccucacagcccc

SEQ ID NO: 279959 - RNA, 21 nt, Human
ggcgcagagcugagagggaca

SEQ ID NO: 279960 - RNA, 18 nt, Human
ggcgccagaagcuggagg

SEQ ID NO: 279961 - RNA, 22 nt, Human
gggaagagaaggaaggcaggag

SEQ ID NO: 279962 - RNA, 23 nt, Human
gggaaggaggguggggacaguga

SEQ ID NO: 279963 - RNA, 24 nt, Human
gggaaggaggguggggacagugag

SEQ ID NO: 279964 - RNA, 20 nt, Human
gggagcggggcggugcgggc

SEQ ID NO: 279965 - RNA, 23 nt, Human
gggcaaagaagugaccccagcag

SEQ ID NO: 279966 - RNA, 19 nt, Human
gggcagcuggcaguggggc

SEQ ID NO: 279967 - RNA, 22 nt, Human
gggccgucagaaacccggggga

SEQ ID NO: 279968 - RNA, 24 nt, Human
gggcggcugcucccgccgccgcau

SEQ ID NO: 279969 - RNA, 19 nt, Human
gggcgggagggggccgggc

SEQ ID NO: 279970 - RNA, 25 nt, Human
ggggcagcuggcaguggggcgcagu

SEQ ID NO: 279971 - RNA, 21 nt, Human
gggggcggggacgcggggcug

SEQ ID NO: 279972 - RNA, 22 nt, Human
guggaaucuagaguauuugucu

SEQ ID NO: 279973 - RNA, 24 nt, Human
uaaaccagggcccaagccucgguc

SEQ ID NO: 279974 - RNA, 19 nt, Human
uaacaaagagagaaaaaaa

SEQ ID NO: 279975 - RNA, 24 nt, Human
uaacaaagagagaaaaaaaacugg

SEQ ID NO: 279976 - RNA, 18 nt, Human
uaacaggacgagcagugg

SEQ ID NO: 279977 - RNA, 18 nt, Human
uaagagaagccugaggca

SEQ ID NO: 279978 - RNA, 25 nt, Human
uacaaaacccccagccuuccuuccc

SEQ ID NO: 279979 - RNA, 25 nt, Human
uagaguauuugucuguaauauauau

SEQ ID NO: 279980 - RNA, 18 nt, Human
uaggggucucucugcauc

SEQ ID NO: 279981 - RNA, 20 nt, Human
ucaaugcacgucgcccggcg

SEQ ID NO: 279982 - RNA, 27 nt, Human
ucaggcggcggcggcggcgccccuccc

SEQ ID NO: 279983 - RNA, 22 nt, Human
ucccacacauuuccgggguugg

SEQ ID NO: 279984 - RNA, 18 nt, Human
ucccacccaaccccacca

SEQ ID NO: 279985 - RNA, 19 nt, Human
ucccacccaaccccaccaa

SEQ ID NO: 279986 - RNA, 21 nt, Human
uccccgcgcugagcggggcuc

SEQ ID NO: 279987 - RNA, 21 nt, Human
uccccucccucccacccccca

SEQ ID NO: 279988 - RNA, 23 nt, Human
ucccucaggcggcggcggcggcg

SEQ ID NO: 279989 - RNA, 21 nt, Human
ucccugggcggcaccaagcag

SEQ ID NO: 279990 - RNA, 18 nt, Human
ucccuugcaggcucacag

SEQ ID NO: 279991 - RNA, 20 nt, Human
uccgacagaagagcagggag

SEQ ID NO: 279992 - RNA, 26 nt, Human
uccgggguugggguguuuuccaagac

SEQ ID NO: 279993 - RNA, 21 nt, Human
uccuccagcagcuuccccauc

SEQ ID NO: 279994 - RNA, 21 nt, Human
ucgggcccacccucccgcccu

SEQ ID NO: 279995 - RNA, 19 nt, Human
ucggggcgccagaagcugg

SEQ ID NO: 279996 - RNA, 22 nt, Human
ucuccccgcccgccccgccgcg

SEQ ID NO: 279997 - RNA, 20 nt, Human
ugaagcggagguaaaccaac

SEQ ID NO: 279998 - RNA, 26 nt, Human
ugcauuugccuuuccccucccuccca

SEQ ID NO: 279999 - RNA, 22 nt, Human
ugccaugggcccggccgcgggg

SEQ ID NO: 280000 - RNA, 22 nt, Human
ugccccaccccaccccacccac

SEQ ID NO: 280001 - RNA, 18 nt, Human
ugccuggcaggcgcagag

SEQ ID NO: 280002 - RNA, 20 nt, Human
ugcucccgccgccgcauccc

SEQ ID NO: 280003 - RNA, 18 nt, Human
uggaaacccaaagggagg

SEQ ID NO: 280004 - RNA, 24 nt, Human
uggaaaguuuuuguuuucuuuuuc

SEQ ID NO: 280005 - RNA, 21 nt, Human
uggaauuuggaaaguuuuugu

SEQ ID NO: 280006 - RNA, 20 nt, Human
uggacggcaggaggaagggg

SEQ ID NO: 280007 - RNA, 23 nt, Human
uggacggcaggaggaagggggcg

SEQ ID NO: 280008 - RNA, 24 nt, Human
uggaucccgccgggaaaucggggg

SEQ ID NO: 280009 - RNA, 28 nt, Human
uggcagggagaggguggcacccuccucu

SEQ ID NO: 280010 - RNA, 29 nt, Human
uggcagggagaggguggcacccuccucuu

SEQ ID NO: 280011 - RNA, 20 nt, Human
ugggauggggauuggagggc

SEQ ID NO: 280012 - RNA, 21 nt, Human
ugggauggggauuggagggcu

SEQ ID NO: 280013 - RNA, 25 nt, Human
ugggauggggauuggagggcuuggg

SEQ ID NO: 280014 - RNA, 22 nt, Human
uggggcgggagggggccgggcg

SEQ ID NO: 280015 - RNA, 22 nt, Human
ugggggagcagggagcccgugg

SEQ ID NO: 280016 - RNA, 23 nt, Human
ugggggagcagggagcccguggg

SEQ ID NO: 280017 - RNA, 22 nt, Human
uuccaagacucagacacauuug

SEQ ID NO: 280018 - RNA, 19 nt, Human
uuccuucccacccaacccc

SEQ ID NO: 280019 - RNA, 19 nt, Human
uugccccaccccaccccac

SEQ ID NO: 280020 - RNA, 20 nt, Human
uuugccuuuccccucccucc

SEQ ID NO: 280021 - RNA, 25 nt, Human
uuugccuuuccccucccucccaccc

SEQ ID NO: 280022 - RNA, 24 nt, Human
uuuuuuuuuuuuuuggaauuugga

SEQ ID NO: 280023 - RNA, 21 nt, Human
uuuuuuuuuuuuuuuggaauu

SEQ ID NO: 280024 - RNA, 23 nt, Human
uuuuuuuuuuuuuuuuggaauuu

SEQ ID NO: 280025 - RNA, 23 nt, Human
uuuuuuuuuuuuuuuuuggaauu

SEQ ID NO: 280026 - RNA, 20 nt, Human
uuuuuuuuuuuuuuuuuugg

SEQ ID NO: 280027 - RNA, 25 nt, Human
aaacaugguuacagucaagcuucac

SEQ ID NO: 280028 - RNA, 21 nt, Human
aaaccuccuacggagccccgg

SEQ ID NO: 280029 - RNA, 23 nt, Human
aaagaaaaaaaaaagauaaaagg

SEQ ID NO: 280030 - RNA, 19 nt, Human
aaauaacugugaaaacucu

SEQ ID NO: 280031 - RNA, 26 nt, Human
aaccagcagcagcagcagccaccgca

SEQ ID NO: 280032 - RNA, 30 nt, Human
aaccagcagcagcagcagccaccgcagccc

SEQ ID NO: 280033 - RNA, 20 nt, Human
aagaaugccauccacagaga

SEQ ID NO: 280034 - RNA, 20 nt, Human
aaggaagagaaggaggcagc

SEQ ID NO: 280035 - RNA, 18 nt, Human
aaggcaaaaagccccuuc

SEQ ID NO: 280036 - RNA, 20 nt, Human
aauaagaaggacuggaggga

SEQ ID NO: 280037 - RNA, 24 nt, Human
acauuccucaagcccuccaguccu

SEQ ID NO: 280038 - RNA, 23 nt, Human
accacauuccucaagcccuccag

SEQ ID NO: 280039 - RNA, 26 nt, Human
acgcaugucaggggaagaccggcgcg

SEQ ID NO: 280040 - RNA, 22 nt, Human
acggagccccggcaugccacgc

SEQ ID NO: 280041 - RNA, 20 nt, Human
acugcugcucuggaucgggu

SEQ ID NO: 280042 - RNA, 20 nt, Human
acuuuuuucuuuuuuuguug

SEQ ID NO: 280043 - RNA, 23 nt, Human
agaaaaaaaaaagauaaaaggca

SEQ ID NO: 280044 - RNA, 19 nt, Human
agaaggaaguuuccaggcc

SEQ ID NO: 280045 - RNA, 21 nt, Human
agaaggaaguuuccaggccug

SEQ ID NO: 280046 - RNA, 23 nt, Human
agaaggaggcagcccgaacccaa

SEQ ID NO: 280047 - RNA, 18 nt, Human
agcacaaccucagggggc

SEQ ID NO: 280048 - RNA, 19 nt, Human
agcacagauacucugagcc

SEQ ID NO: 280049 - RNA, 19 nt, Human
agccagguugacauaguca

SEQ ID NO: 280050 - RNA, 18 nt, Human
aggagaggaggaggaacc

SEQ ID NO: 280051 - RNA, 19 nt, Human
aggccugcggaaguggugg

SEQ ID NO: 280052 - RNA, 23 nt, Human
aggcugcagagguggccgagagg

SEQ ID NO: 280053 - RNA, 24 nt, Human
agggaccaccacauuccucaagcc

SEQ ID NO: 280054 - RNA, 20 nt, Human
auagcaggaggaagaguugc

SEQ ID NO: 280055 - RNA, 18 nt, Human
cacaaccucagggggcag

SEQ ID NO: 280056 - RNA, 19 nt, Human
cacacagaggaaagguggc

SEQ ID NO: 280057 - RNA, 20 nt, Human
cacccaaaccaacguggcac

SEQ ID NO: 280058 - RNA, 18 nt, Human
caccguccggcuccagag

SEQ ID NO: 280059 - RNA, 21 nt, Human
cagcagcagcagcagccaccg

SEQ ID NO: 280060 - RNA, 26 nt, Human
cagcagcagcagcagccaccgcagcc

SEQ ID NO: 280061 - RNA, 21 nt, Human
cagcagcagcagccaccgcag

SEQ ID NO: 280062 - RNA, 25 nt, Human
cagcagcagcagccaccgcagccag

SEQ ID NO: 280063 - RNA, 22 nt, Human
cagcagcagccaccgcagccag

SEQ ID NO: 280064 - RNA, 19 nt, Human
cagcagccaccgcagccag

SEQ ID NO: 280065 - RNA, 20 nt, Human
caggcugcagagguggccga

SEQ ID NO: 280066 - RNA, 21 nt, Human
caggucuuaaaggagagggaa

SEQ ID NO: 280067 - RNA, 23 nt, Human
caggucuuaaaggagagggugau

SEQ ID NO: 280068 - RNA, 20 nt, Human
cauaauuaaacagaaaaaac

SEQ ID NO: 280069 - RNA, 18 nt, Human
caugccacgcaugucagg

SEQ ID NO: 280070 - RNA, 19 nt, Human
caugccacgcaugucaggg

SEQ ID NO: 280071 - RNA, 18 nt, Human
caugccaggcguugucgu

SEQ ID NO: 280072 - RNA, 20 nt, Human
cauucacuggcuccacaaug

SEQ ID NO: 280073 - RNA, 23 nt, Human
cccaacauccaaggaguuugaac

SEQ ID NO: 280074 - RNA, 18 nt, Human
ccgcagccguggcugagc

SEQ ID NO: 280075 - RNA, 22 nt, Human
ccgcagccguggcugagcuuua

SEQ ID NO: 280076 - RNA, 20 nt, Human
ccucaaaggccccggacccc

SEQ ID NO: 280077 - RNA, 22 nt, Human
ccucaaaggccccggaccccag

SEQ ID NO: 280078 - RNA, 19 nt, Human
cggaccagggaggcacagg

SEQ ID NO: 280079 - RNA, 20 nt, Human
cggagcagccgccggcuucc

SEQ ID NO: 280080 - RNA, 21 nt, Human
cgggguggagggaggugggug

SEQ ID NO: 280081 - RNA, 23 nt, Human
cguagcacagauacucugagccu

SEQ ID NO: 280082 - RNA, 24 nt, Human
cugccaggcaaaagggggcugcag

SEQ ID NO: 280083 - RNA, 19 nt, Human
cuguguguguguguguccu

SEQ ID NO: 280084 - RNA, 22 nt, Human
cuuccuggguuucccaacugga

SEQ ID NO: 280085 - RNA, 20 nt, Human
cuuggaguuauggaacaagu

SEQ ID NO: 280086 - RNA, 22 nt, Human
cuuggaguuauggaacaaguua

SEQ ID NO: 280087 - RNA, 24 nt, Human
cuuuccaaacaaugaaucaguuaa

SEQ ID NO: 280088 - RNA, 24 nt, Human
gaagugcagagugcauaucccuga

SEQ ID NO: 280089 - RNA, 19 nt, Human
gacauagucagccgacuug

SEQ ID NO: 280090 - RNA, 22 nt, Human
gacaucugugagaucucaccgu

SEQ ID NO: 280091 - RNA, 22 nt, Human
gaggaagaguugccagaauucg

SEQ ID NO: 280092 - RNA, 22 nt, Human
gaggagaggaggaggaacccgg

SEQ ID NO: 280093 - RNA, 21 nt, Human
gaggcuuuuaacccugggcgu

SEQ ID NO: 280094 - RNA, 20 nt, Human
gagguggccgagaggcgggc

SEQ ID NO: 280095 - RNA, 19 nt, Human
gaguuggggagccaaauuc

SEQ ID NO: 280096 - RNA, 20 nt, Human
gcacaaaaccuucugucucc

SEQ ID NO: 280097 - RNA, 18 nt, Human
gcagggcacaaaaccuuc

SEQ ID NO: 280098 - RNA, 26 nt, Human
gcaguucugacaucuguggucccaug

SEQ ID NO: 280099 - RNA, 25 nt, Human
gcgagagcgcaagaggaggugccug

SEQ ID NO: 280100 - RNA, 18 nt, Human
gcugaaauuuagaaugcc

SEQ ID NO: 280101 - RNA, 18 nt, Human
ggaaaguggccacauucu

SEQ ID NO: 280102 - RNA, 18 nt, Human
ggaccagggaggcacagg

SEQ ID NO: 280103 - RNA, 21 nt, Human
ggaccccagguuaaugaccaa

SEQ ID NO: 280104 - RNA, 18 nt, Human
ggagaggaggaggaaccc

SEQ ID NO: 280105 - RNA, 19 nt, Human
ggagggaaagaggagagga

SEQ ID NO: 280106 - RNA, 21 nt, Human
ggagggaaagaggagaggagg

SEQ ID NO: 280107 - RNA, 21 nt, Human
ggaggugggugggcgaaauca

SEQ ID NO: 280108 - RNA, 23 nt, Human
ggaucucuaggcacuucgagucu

SEQ ID NO: 280109 - RNA, 21 nt, Human
ggcaaugaaggaagagaagga

SEQ ID NO: 280110 - RNA, 19 nt, Human
gggaaagaggagaggagga

SEQ ID NO: 280111 - RNA, 18 nt, Human
gggaagagggaagcaaua

SEQ ID NO: 280112 - RNA, 23 nt, Human
gggggcagaaacaacgaagagag

SEQ ID NO: 280113 - RNA, 23 nt, Human
gucaagcuucacaaacauuacag

SEQ ID NO: 280114 - RNA, 19 nt, Human
gugguaagaaugccaucca

SEQ ID NO: 280115 - RNA, 21 nt, Human
gugguaagaaugccauccaca

SEQ ID NO: 280116 - RNA, 25 nt, Human
uaagaaugccauccacagagauugu

SEQ ID NO: 280117 - RNA, 22 nt, Human
uacagucaagcuucacaaacau

SEQ ID NO: 280118 - RNA, 22 nt, Human
uaugauacagcagggcacaaaa

SEQ ID NO: 280119 - RNA, 21 nt, Human
uauggaacaaguaagccauga

SEQ ID NO: 280120 - RNA, 20 nt, Human
ucccagguauagcaaaccuc

SEQ ID NO: 280121 - RNA, 23 nt, Human
uccuccggaucucuaggcacuuc

SEQ ID NO: 280122 - RNA, 18 nt, Human
ucucgagcugccaagcuc

SEQ ID NO: 280123 - RNA, 18 nt, Human
ucucuaggcacuucgagu

SEQ ID NO: 280124 - RNA, 21 nt, Human
ucugugagaucucaccgucca

SEQ ID NO: 280125 - RNA, 25 nt, Human
ugagaaagcacaaccucagggggca

SEQ ID NO: 280126 - RNA, 20 nt, Human
ugagcuuuagagagagaugc

SEQ ID NO: 280127 - RNA, 24 nt, Human
ugccaggcaaaagggggcugcagg

SEQ ID NO: 280128 - RNA, 18 nt, Human
ugcggagcagccacccaa

SEQ ID NO: 280129 - RNA, 24 nt, Human
uggagggaaagaggagaggaggaa

SEQ ID NO: 280130 - RNA, 19 nt, Human
uggcaggcugcagaggugg

SEQ ID NO: 280131 - RNA, 24 nt, Human
uggcaggcugcagagguggccgag

SEQ ID NO: 280132 - RNA, 18 nt, Human
uggguucaggugaguuua

SEQ ID NO: 280133 - RNA, 18 nt, Human
ugguguuuuuuucuuuuu

SEQ ID NO: 280134 - RNA, 21 nt, Human
ugugagaucucaccguccaaa

SEQ ID NO: 280135 - RNA, 22 nt, Human
uucacaaaugggcaagucauau

SEQ ID NO: 280136 - RNA, 21 nt, Human
uuccauucacuggcuccacaa

SEQ ID NO: 280137 - RNA, 21 nt, Human
uucggguguuccugggagucu

SEQ ID NO: 280138 - RNA, 22 nt, Human
uugaacauuuuuauuuuccugu

SEQ ID NO: 280139 - RNA, 26 nt, Human
uuuauuuuccuguuuccaaccuucag

SEQ ID NO: 280140 - RNA, 21 nt, Human
uuucacugcaggaauggaagu

SEQ ID NO: 280141 - RNA, 22 nt, Human
uuuuuuguuguuguaguuuugu

SEQ ID NO: 280142 - RNA, 27 nt, Human
acgaugaccauguggaaaaguuggggg

SEQ ID NO: 280143 - RNA, 22 nt, Human
aguguugggauaugaggaaaga

SEQ ID NO: 280144 - RNA, 22 nt, Human
caaccauaagcccccacuggcu

SEQ ID NO: 280145 - RNA, 19 nt, Human
cacacaaccauaagccccc

SEQ ID NO: 280146 - RNA, 22 nt, Human
cugucugucuccuugguugggg

SEQ ID NO: 280147 - RNA, 19 nt, Human
gggaaaguguucggggcag

SEQ ID NO: 280148 - RNA, 23 nt, Human
uccccaaaugguacccugggggc

SEQ ID NO: 280149 - RNA, 19 nt, Human
uccuugguuggggcccacu

SEQ ID NO: 280150 - RNA, 22 nt, Human
ucggggcagauguguuuuuuuu

SEQ ID NO: 280151 - RNA, 20 nt, Human
ugaggaaagaauaccagugg

SEQ ID NO: 280152 - RNA, 28 nt, Human
ugggaaaguguucggggcagauguguuu

SEQ ID NO: 280153 - RNA, 21 nt, Human
ugggggaaagagacccaaguc

SEQ ID NO: 280154 - RNA, 26 nt, Human
ugucacaagaguucugaguguuggga

SEQ ID NO: 280155 - RNA, 19 nt, Human
uguuuuuuuuuaaggggga

SEQ ID NO: 280156 - RNA, 21 nt, Human
uucacacaaccauaagccccc

SEQ ID NO: 280157 - RNA, 21 nt, Human
uucacacaaccauaagccccc

SEQ ID NO: 280158 - RNA, 23 nt, Human
uucacacaaccauaagcccccac

SEQ ID NO: 280159 - RNA, 20 nt, Human
uuuaagggggaaagaaagaa

SEQ ID NO: 280160 - RNA, 18 nt, Human
uuuuuuuuuuuuuuuuug

SEQ ID NO: 280161 - RNA, 23 nt, Human
aaaaauaauaaaaaccccaugcu

SEQ ID NO: 280162 - RNA, 19 nt, Human
agacgucuuuagguaaaaa

SEQ ID NO: 280163 - RNA, 19 nt, Human
aggccggcggcggcggugg

SEQ ID NO: 280164 - RNA, 21 nt, Human
aguucuauuuaucuggucaac

SEQ ID NO: 280165 - RNA, 21 nt, Human
caacgggcaaaaagcaagcac

SEQ ID NO: 280166 - RNA, 18 nt, Human
cagggcucucuggggucc

SEQ ID NO: 280167 - RNA, 21 nt, Human
cggcugcggcagcugcggcuu

SEQ ID NO: 280168 - RNA, 18 nt, Human
cuaggccggcggcggcgg

SEQ ID NO: 280169 - RNA, 21 nt, Human
gcggcagcugcggcuccuccc

SEQ ID NO: 280170 - RNA, 19 nt, Human
gcggcggcgguggggcugc

SEQ ID NO: 280171 - RNA, 21 nt, Human
gcgguggggcugcucagggcu

SEQ ID NO: 280172 - RNA, 19 nt, Human
ggugauggugacuggggcc

SEQ ID NO: 280173 - RNA, 24 nt, Human
uaaaggcguauugagaaaaaccag

SEQ ID NO: 280174 - RNA, 24 nt, Human
uagguaaaaauaauaaaaacccca

SEQ ID NO: 280175 - RNA, 19 nt, Human
uaggucuucagcuccaauc

SEQ ID NO: 280176 - RNA, 22 nt, Human
uauuaccaaaaagagacgucuu

SEQ ID NO: 280177 - RNA, 18 nt, Human
uauugagaaaaaccaggc

SEQ ID NO: 280178 - RNA, 20 nt, Human
uauugagaaaaaccaggcuu

SEQ ID NO: 280179 - RNA, 21 nt, Human
ucugggguccgcucuccgcuc

SEQ ID NO: 280180 - RNA, 20 nt, Human
ucuuauugcuggaauuucau

SEQ ID NO: 280181 - RNA, 18 nt, Human
ucuuuuguucauuucuua

SEQ ID NO: 280182 - RNA, 22 nt, Human
uggugacuggggccggcugcgg

SEQ ID NO: 280183 - RNA, 26 nt, Human
uuaaaaaacacguuuguuauuaccaa

SEQ ID NO: 280184 - RNA, 19 nt, Human
aaaacacaaagacauuaag

SEQ ID NO: 280185 - RNA, 20 nt, Human
aaaacccaaaacaaagaaga

SEQ ID NO: 280186 - RNA, 24 nt, Human
aaaggacucaacgggugcuuccuu

SEQ ID NO: 280187 - RNA, 23 nt, Human
aacagaggagccacacccaagug

SEQ ID NO: 280188 - RNA, 25 nt, Human
aaccaaauugacaccuuccacgaga

SEQ ID NO: 280189 - RNA, 23 nt, Human
aagaaguguguggaggguaaagg

SEQ ID NO: 280190 - RNA, 18 nt, Human
aagccagauuugcaugua

SEQ ID NO: 280191 - RNA, 18 nt, Human
aaguauauuuacucuuua

SEQ ID NO: 280192 - RNA, 23 nt, Human
aauaacagaggagccacacccaa

SEQ ID NO: 280193 - RNA, 26 nt, Human
aaugauugagaacagcauuuuagaga

SEQ ID NO: 280194 - RNA, 21 nt, Human
aauggacaauaaaggacugag

SEQ ID NO: 280195 - RNA, 22 nt, Human
acaaaacacaaagacauuaagc

SEQ ID NO: 280196 - RNA, 19 nt, Human
agccacaaaauaagcuagg

SEQ ID NO: 280197 - RNA, 23 nt, Human
agcuagggaagaaaacccaaaac

SEQ ID NO: 280198 - RNA, 22 nt, Human
aggaaauguguucaauguauug

SEQ ID NO: 280199 - RNA, 19 nt, Human
aggaauccaggauacuggc

SEQ ID NO: 280200 - RNA, 22 nt, Human
aggagacuucuauuucuugccc

SEQ ID NO: 280201 - RNA, 25 nt, Human
agggaagaaaacccaaaacaaagaa

SEQ ID NO: 280202 - RNA, 27 nt, Human
agggaagaaaacccaaaacaaagaaga

SEQ ID NO: 280203 - RNA, 19 nt, Human
agggagagggcuagaaaau

SEQ ID NO: 280204 - RNA, 23 nt, Human
aguaagccuuaauauuauacuaa

SEQ ID NO: 280205 - RNA, 19 nt, Human
caaaacacaaagacauuaa

SEQ ID NO: 280206 - RNA, 23 nt, Human
caaagacauuaagcucauuuaac

SEQ ID NO: 280207 - RNA, 22 nt, Human
caaauacccagugacuuuuagu

SEQ ID NO: 280208 - RNA, 25 nt, Human
cacaaagacauuaagcucauuuaac

SEQ ID NO: 280209 - RNA, 18 nt, Human
cacccucaaaaggacuca

SEQ ID NO: 280210 - RNA, 22 nt, Human
cacuccauaagucucaucacca

SEQ ID NO: 280211 - RNA, 29 nt, Human
cacuccauaagucucaucaccaaauauga

SEQ ID NO: 280212 - RNA, 24 nt, Human
cacuguggccacaagccucauggg

SEQ ID NO: 280213 - RNA, 25 nt, Human
cagcaguugggagagagaggcacac

SEQ ID NO: 280214 - RNA, 25 nt, Human
caugacacugacugagaguuuucaa

SEQ ID NO: 280215 - RNA, 22 nt, Human
ccacaaaauaagcuagggaaga

SEQ ID NO: 280216 - RNA, 20 nt, Human
ccauaagucucaucaccaaa

SEQ ID NO: 280217 - RNA, 18 nt, Human
ccuuggucacuucccuug

SEQ ID NO: 280218 - RNA, 23 nt, Human
cuaaaccaaauugacaccuucca

SEQ ID NO: 280219 - RNA, 19 nt, Human
cucaaaaggacucaacggg

SEQ ID NO: 280220 - RNA, 23 nt, Human
cucaacgggugcuuccuuuugga

SEQ ID NO: 280221 - RNA, 22 nt, Human
cugacugcaacuugaaaacauc

SEQ ID NO: 280222 - RNA, 21 nt, Human
gaaaacccaaaacaaagaaga

SEQ ID NO: 280223 - RNA, 23 nt, Human
gaagauaugacauccaagucucc

SEQ ID NO: 280224 - RNA, 19 nt, Human
gacugagggagagggcuag

SEQ ID NO: 280225 - RNA, 22 nt, Human
gaucauuuaaaauaaaggauaa

SEQ ID NO: 280226 - RNA, 19 nt, Human
gaucucuggcccacaccuc

SEQ ID NO: 280227 - RNA, 23 nt, Human
gaugaucugcuuucucacaugag

SEQ ID NO: 280228 - RNA, 20 nt, Human
gccacacccaagugccacug

SEQ ID NO: 280229 - RNA, 25 nt, Human
ggaagaaaacccaaaacaaagaaga

SEQ ID NO: 280230 - RNA, 22 nt, Human
guaguguccacaaguacuggaa

SEQ ID NO: 280231 - RNA, 21 nt, Human
gucaaauguauauaaggagac

SEQ ID NO: 280232 - RNA, 19 nt, Human
guccuugcauuuuaagcag

SEQ ID NO: 280233 - RNA, 21 nt, Human
guuuuuaacaacaucuucuaa

SEQ ID NO: 280234 - RNA, 21 nt, Human
uaacaacaucuucuaaguggu

SEQ ID NO: 280235 - RNA, 25 nt, Human
uaagacaaaucacccucaaaaggac

SEQ ID NO: 280236 - RNA, 21 nt, Human
uaagccagauuugcauguaga

SEQ ID NO: 280237 - RNA, 20 nt, Human
uaagcgcagcauucuaaacc

SEQ ID NO: 280238 - RNA, 26 nt, Human
uaagcuagggaagaaaacccaaaaca

SEQ ID NO: 280239 - RNA, 24 nt, Human
uaaggaauugacccacuuggaguu

SEQ ID NO: 280240 - RNA, 23 nt, Human
uaaguuaacacaaugugugcugc

SEQ ID NO: 280241 - RNA, 19 nt, Human
uacaauccacuucuuuaaa

SEQ ID NO: 280242 - RNA, 20 nt, Human
uacaguuuuggacaaaacac

SEQ ID NO: 280243 - RNA, 21 nt, Human
uagaggaauccaggauacugg

SEQ ID NO: 280244 - RNA, 20 nt, Human
uagauaguacagaucauuua

SEQ ID NO: 280245 - RNA, 24 nt, Human
uagauaguacagaucauuuaaaau

SEQ ID NO: 280246 - RNA, 20 nt, Human
uagcucaggacagcugucag

SEQ ID NO: 280247 - RNA, 24 nt, Human
uaguagagagguugaaacguguag

SEQ ID NO: 280248 - RNA, 18 nt, Human
uauuuuuucaauacaguu

SEQ ID NO: 280249 - RNA, 24 nt, Human
ucaagggugauggugcuaguagag

SEQ ID NO: 280250 - RNA, 23 nt, Human
uccacuucuuuaaaagccacaaa

SEQ ID NO: 280251 - RNA, 20 nt, Human
ucugacugcaacuugaaaac

SEQ ID NO: 280252 - RNA, 19 nt, Human
ugagcaagaaggaaucacu

SEQ ID NO: 280253 - RNA, 21 nt, Human
ugaggacaaauaacagaggag

SEQ ID NO: 280254 - RNA, 21 nt, Human
ugauggugcuaguagagaggu

SEQ ID NO: 280255 - RNA, 20 nt, Human
ugcugcuuucaugaggagga

SEQ ID NO: 280256 - RNA, 19 nt, Human
uggagaauaguguuuuaga

SEQ ID NO: 280257 - RNA, 21 nt, Human
uggcaagauuuggagaugauc

SEQ ID NO: 280258 - RNA, 19 nt, Human
uggccacaagccucauggg

SEQ ID NO: 280259 - RNA, 19 nt, Human
uggcuucuaauugcuuguc

SEQ ID NO: 280260 - RNA, 19 nt, Human
ugggaagguaagcgcagca

SEQ ID NO: 280261 - RNA, 22 nt, Human
ugggagagagaggcacacucca

SEQ ID NO: 280262 - RNA, 24 nt, Human
ugggagagagaggcacacuccaua

SEQ ID NO: 280263 - RNA, 19 nt, Human
ugguaauaaugagcauauc

SEQ ID NO: 280264 - RNA, 19 nt, Human
uguagaaagucugccuucu

SEQ ID NO: 280265 - RNA, 24 nt, Human
uguuuggcuuugucaaauguauau

SEQ ID NO: 280266 - RNA, 22 nt, Human
uucaccuuggucacuucccuug

SEQ ID NO: 280267 - RNA, 21 nt, Human
uuccugcuaagucagucaguu

SEQ ID NO: 280268 - RNA, 21 nt, Human
uugcauuuuaagcagcaguug

SEQ ID NO: 280269 - RNA, 21 nt, Human
uuuuaagcagcaguugggaga

SEQ ID NO: 280270 - RNA, 22 nt, Human
aaaacacacacccaaaacccga

SEQ ID NO: 280271 - RNA, 19 nt, Human
aaacacacacccaaaaccc

SEQ ID NO: 280272 - RNA, 20 nt, Human
aagacaaaacagauucagaa

SEQ ID NO: 280273 - RNA, 20 nt, Human
aaguaaccacgcuaugaaac

SEQ ID NO: 280274 - RNA, 18 nt, Human
acaaaacagauucagaag

SEQ ID NO: 280275 - RNA, 18 nt, Human
aguaaacuuacuaagaac

SEQ ID NO: 280276 - RNA, 18 nt, Human
caccaugauuuagaaagu

SEQ ID NO: 280277 - RNA, 18 nt, Human
cagcauuauagaaaguaa

SEQ ID NO: 280278 - RNA, 21 nt, Human
cagcauuauagaaaguaacca

SEQ ID NO: 280279 - RNA, 22 nt, Human
cagcccaauuuaucucuuagcu

SEQ ID NO: 280280 - RNA, 24 nt, Human
ccacgcuaugaaaacacacaccca

SEQ ID NO: 280281 - RNA, 22 nt, Human
cuaugaaaacacacacccaaaa

SEQ ID NO: 280282 - RNA, 30 nt, Human
cuucuaauuacuaacauugcacauucaccu

SEQ ID NO: 280283 - RNA, 21 nt, Human
gaaaacacacacccaaaaccc

SEQ ID NO: 280284 - RNA, 23 nt, Human
gaaaguaaccacgcuaugaaaac

SEQ ID NO: 280285 - RNA, 22 nt, Human
gauggguggcaauugugauaga

SEQ ID NO: 280286 - RNA, 22 nt, Human
gcuaugaaaacacacacccaaa

SEQ ID NO: 280287 - RNA, 22 nt, Human
gguacagcauuauagaaaguaa

SEQ ID NO: 280288 - RNA, 24 nt, Human
uagaaaagaugaauagcuguaaug

SEQ ID NO: 280289 - RNA, 21 nt, Human
uccagguucuuagaaucuggg

SEQ ID NO: 280290 - RNA, 23 nt, Human
uccagguucuuagaaucugggua

SEQ ID NO: 280291 - RNA, 21 nt, Human
ucuccagguucuuagaaucug

SEQ ID NO: 280292 - RNA, 22 nt, Human
ucuuggaaaauuucuuaauugu

SEQ ID NO: 280293 - RNA, 21 nt, Human
ugaaaacacacacccaaaacc

SEQ ID NO: 280294 - RNA, 20 nt, Human
uggcaauugugauagauuag

SEQ ID NO: 280295 - RNA, 24 nt, Human
uguucagugcuuucugacaaguuc

SEQ ID NO: 280296 - RNA, 21 nt, Human
uuuaaaaguuugguuuaaaaa

SEQ ID NO: 280297 - RNA, 20 nt, Human
accggguggcugggccuggg

SEQ ID NO: 280298 - RNA, 21 nt, Human
ccccugugggccugcccuucc

SEQ ID NO: 280299 - RNA, 22 nt, Human
ccuuuagcuccagcugcugccc

SEQ ID NO: 280300 - RNA, 18 nt, Human
cggcucugcgguggcccc

SEQ ID NO: 280301 - RNA, 20 nt, Human
cucggcucugcgguggcccc

SEQ ID NO: 280302 - RNA, 23 nt, Human
cucucgggagguaccggguggcu

SEQ ID NO: 280303 - RNA, 19 nt, Human
gaagcggagggagcgcugc

SEQ ID NO: 280304 - RNA, 19 nt, Human
uccaugccagccagggucc

SEQ ID NO: 280305 - RNA, 24 nt, Human
uccaugccagccaggguccaggga

SEQ ID NO: 280306 - RNA, 23 nt, Human
ucggcucugcgguggccccugug

SEQ ID NO: 280307 - RNA, 22 nt, Human
ucgggagguaccggguggcugg

SEQ ID NO: 280308 - RNA, 18 nt, Human
ugcccuuccuuuagcucc

SEQ ID NO: 280309 - RNA, 21 nt, Human
ugcccuuccuuuagcuccagc

SEQ ID NO: 280310 - RNA, 23 nt, Human
uuaaaggucccgacugguuuucc

SEQ ID NO: 280311 - RNA, 26 nt, Human
aaacaaaagguaauaaggagggaccc

SEQ ID NO: 280312 - RNA, 24 nt, Human
aaagugcugggauuacaggcguga

SEQ ID NO: 280313 - RNA, 18 nt, Human
aagaaagagucuauaacc

SEQ ID NO: 280314 - RNA, 21 nt, Human
aagcagccuugccagagucac

SEQ ID NO: 280315 - RNA, 24 nt, Human
aaguagagcauacuucugugcaaa

SEQ ID NO: 280316 - RNA, 19 nt, Human
aagugcugggauuacaggc

SEQ ID NO: 280317 - RNA, 19 nt, Human
aagugcugggauuacaggc

SEQ ID NO: 280318 - RNA, 26 nt, Human
aagugcugggauuacaggcgugagcc

SEQ ID NO: 280319 - RNA, 18 nt, Human
aagugucacaagccacag

SEQ ID NO: 280320 - RNA, 25 nt, Human
aagugucacaagccacaguggagcc

SEQ ID NO: 280321 - RNA, 19 nt, Human
aaugacaagaauggaagaa

SEQ ID NO: 280322 - RNA, 24 nt, Human
aauuuuguauuuuuaguagagaug

SEQ ID NO: 280323 - RNA, 23 nt, Human
acaaacaaaagguaauaaggaua

SEQ ID NO: 280324 - RNA, 27 nt, Human
acaucacuguacuccagccugggcagc

SEQ ID NO: 280325 - RNA, 19 nt, Human
acuccagccugggcagcag

SEQ ID NO: 280326 - RNA, 24 nt, Human
acuguacuccagccugggcagcag

SEQ ID NO: 280327 - RNA, 26 nt, Human
acuguacuccagccugggcagcagag

SEQ ID NO: 280328 - RNA, 18 nt, Human
acuugcagcuaaauucuu

SEQ ID NO: 280329 - RNA, 18 nt, Human
acuuguaaucccagaacu

SEQ ID NO: 280330 - RNA, 21 nt, Human
acuuguaaucccagaacuuug

SEQ ID NO: 280331 - RNA, 20 nt, Human
agagaagcagccuugccaga

SEQ ID NO: 280332 - RNA, 18 nt, Human
agaggacaaagaaaucug

SEQ ID NO: 280333 - RNA, 21 nt, Human
agaugaugggauuacaggcau

SEQ ID NO: 280334 - RNA, 20 nt, Human
agcagcuaaucuacccuccc

SEQ ID NO: 280335 - RNA, 24 nt, Human
agccagugauagagaagcagccuu

SEQ ID NO: 280336 - RNA, 22 nt, Human
agccugggcagcagagcgaaac

SEQ ID NO: 280337 - RNA, 24 nt, Human
agccugggcagcagagcgaaacuc

SEQ ID NO: 280338 - RNA, 18 nt, Human
agcuaaucuacccucccc

SEQ ID NO: 280339 - RNA, 18 nt, Human
aggcaguucuucccuuuc

SEQ ID NO: 280340 - RNA, 21 nt, Human
aggcaguucuucccuuucuuu

SEQ ID NO: 280341 - RNA, 22 nt, Human
aggcaguucuucccuuucuuuu

SEQ ID NO: 280342 - RNA, 20 nt, Human
aggcaugcaccaccacgccc

SEQ ID NO: 280343 - RNA, 21 nt, Human
aggccgaggcgaauggaucac

SEQ ID NO: 280344 - RNA, 26 nt, Human
aggcgaauggaucacuugacgucagg

SEQ ID NO: 280345 - RNA, 24 nt, Human
aggugauccgccugucucggccuc

SEQ ID NO: 280346 - RNA, 22 nt, Human
aguacagauacacaaaaccaaa

SEQ ID NO: 280347 - RNA, 23 nt, Human
aguacagauacacaaaaccaaaa

SEQ ID NO: 280348 - RNA, 22 nt, Human
aguagagaugggguuucuccau

SEQ ID NO: 280349 - RNA, 18 nt, Human
agugcugggauuacaggc

SEQ ID NO: 280350 - RNA, 22 nt, Human
auagaauccugcccuaaagcaa

SEQ ID NO: 280351 - RNA, 24 nt, Human
auagagaagcagccuugccagagu

SEQ ID NO: 280352 - RNA, 21 nt, Human
aucaacucuuagaggacaaag

SEQ ID NO: 280353 - RNA, 24 nt, Human
aucacaucacuguacuccagccug

SEQ ID NO: 280354 - RNA, 23 nt, Human
aucacuguacuccagccugggca

SEQ ID NO: 280355 - RNA, 24 nt, Human
aucacuguacuccagccugggcag

SEQ ID NO: 280356 - RNA, 19 nt, Human
augaugggauuacaggcau

SEQ ID NO: 280357 - RNA, 20 nt, Human
augggguuucuccauguugg

SEQ ID NO: 280358 - RNA, 21 nt, Human
augggguuucuccauguuggu

SEQ ID NO: 280359 - RNA, 21 nt, Human
auucacacugauugugcccuc

SEQ ID NO: 280360 - RNA, 22 nt, Human
caaaaccaaaacaaguaucuau

SEQ ID NO: 280361 - RNA, 24 nt, Human
caaagugcugggauuacaggcgug

SEQ ID NO: 280362 - RNA, 22 nt, Human
caagcaauucuccugccucagc

SEQ ID NO: 280363 - RNA, 22 nt, Human
caccaccacgcccagguaauuu

SEQ ID NO: 280364 - RNA, 21 nt, Human
cacugcaaccuccgccuccug

SEQ ID NO: 280365 - RNA, 23 nt, Human
cacugcaaccuccgccuccuggg

SEQ ID NO: 280366 - RNA, 19 nt, Human
cacuguacuccagccuggg

SEQ ID NO: 280367 - RNA, 20 nt, Human
cacuguacuccagccugggc

SEQ ID NO: 280368 - RNA, 21 nt, Human
cacuguacuccagccugggca

SEQ ID NO: 280369 - RNA, 21 nt, Human
cacuguacuccagccugggca

SEQ ID NO: 280370 - RNA, 21 nt, Human
cacuguacuccagccugggca

SEQ ID NO: 280371 - RNA, 22 nt, Human
cacuguacuccagccugggcag

SEQ ID NO: 280372 - RNA, 22 nt, Human
cacuguacuccagccugggcag

SEQ ID NO: 280373 - RNA, 23 nt, Human
cacuguacuccagccugggcagc

SEQ ID NO: 280374 - RNA, 24 nt, Human
cacuguacuccagccugggcagca

SEQ ID NO: 280375 - RNA, 18 nt, Human
cagaacuuugggaggccg

SEQ ID NO: 280376 - RNA, 20 nt, Human
cagaacuuugggaggccgag

SEQ ID NO: 280377 - RNA, 25 nt, Human
cagcagagcgaaacucggcuccagu

SEQ ID NO: 280378 - RNA, 22 nt, Human
caguaaugauucauucuuguuu

SEQ ID NO: 280379 - RNA, 25 nt, Human
caguucuucccuuucuuuucugggg

SEQ ID NO: 280380 - RNA, 24 nt, Human
cauucuuguuuaaaacaagagggg

SEQ ID NO: 280381 - RNA, 22 nt, Human
ccaaagugcugggauuacaggc

SEQ ID NO: 280382 - RNA, 22 nt, Human
ccaaagugcugggauuacaggc

SEQ ID NO: 280383 - RNA, 24 nt, Human
ccaaagugcugggauuacaggcgu

SEQ ID NO: 280384 - RNA, 21 nt, Human
ccauccucugauguucaauuu

SEQ ID NO: 280385 - RNA, 22 nt, Human
ccauguugguaaggcuggucuc

SEQ ID NO: 280386 - RNA, 23 nt, Human
ccauguugguaaggcuggucucg

SEQ ID NO: 280387 - RNA, 18 nt, Human
cccgaccucaggugaucc

SEQ ID NO: 280388 - RNA, 21 nt, Human
cccgaccucaggugauccgcc

SEQ ID NO: 280389 - RNA, 23 nt, Human
cccgaccucaggugauccgccug

SEQ ID NO: 280390 - RNA, 19 nt, Human
cccucccccgaguagaacc

SEQ ID NO: 280391 - RNA, 27 nt, Human
ccgaggcgaauggaucacuugacguca

SEQ ID NO: 280392 - RNA, 26 nt, Human
ccgccuccuggguucaagcaauucuu

SEQ ID NO: 280393 - RNA, 23 nt, Human
ccucccccgaguagaacccuaac

SEQ ID NO: 280394 - RNA, 19 nt, Human
ccuccgccuccuggguuca

SEQ ID NO: 280395 - RNA, 24 nt, Human
ccuccuggguucaagcaauucucc

SEQ ID NO: 280396 - RNA, 21 nt, Human
ccucuucccacucuuuguucc

SEQ ID NO: 280397 - RNA, 23 nt, Human
ccuggguucaagcaauucuccug

SEQ ID NO: 280398 - RNA, 22 nt, Human
ccugucucggccucccaaagug

SEQ ID NO: 280399 - RNA, 20 nt, Human
cgaccucaggugauccgccu

SEQ ID NO: 280400 - RNA, 19 nt, Human
cggcuccagcgcacggcaa

SEQ ID NO: 280401 - RNA, 24 nt, Human
cucacugcaaccuccgccuccugg

SEQ ID NO: 280402 - RNA, 26 nt, Human
cucccgaccucaggugauccgccugu

SEQ ID NO: 280403 - RNA, 21 nt, Human
cuccuggguucaagcaauucu

SEQ ID NO: 280404 - RNA, 23 nt, Human
cugcaaccuccgccuccuggguu

SEQ ID NO: 280405 - RNA, 21 nt, Human
cugccucagccuccugaguag

SEQ ID NO: 280406 - RNA, 20 nt, Human
cuguaguauaagaaggcagu

SEQ ID NO: 280407 - RNA, 23 nt, Human
cugucucggccucccaaagugcu

SEQ ID NO: 280408 - RNA, 19 nt, Human
cuuacagagcccucuuccc

SEQ ID NO: 280409 - RNA, 23 nt, Human
cuuacagagcccucuucccaucc

SEQ ID NO: 280410 - RNA, 24 nt, Human
cuucccuuucuuuucugggggcuu

SEQ ID NO: 280411 - RNA, 24 nt, Human
cuuguugcccaggcuggagugcaa

SEQ ID NO: 280412 - RNA, 22 nt, Human
cuuucacuguacuggugaaaca

SEQ ID NO: 280413 - RNA, 23 nt, Human
gaauggaucacuugacgucagga

SEQ ID NO: 280414 - RNA, 24 nt, Human
gaauuuauucacacugauugugcc

SEQ ID NO: 280415 - RNA, 19 nt, Human
gaccucaggugauccgccu

SEQ ID NO: 280416 - RNA, 24 nt, Human
gaccucaggugauccgccugucuc

SEQ ID NO: 280417 - RNA, 24 nt, Human
gagaugggguuucuccauguuggu

SEQ ID NO: 280418 - RNA, 24 nt, Human
gagccacagcuauauagcccacac

SEQ ID NO: 280419 - RNA, 19 nt, Human
gagccgccgugccuggccu

SEQ ID NO: 280420 - RNA, 18 nt, Human
gaucacuugacgucagga

SEQ ID NO: 280421 - RNA, 18 nt, Human
gauuacaggcgugagccg

SEQ ID NO: 280422 - RNA, 21 nt, Human
gauuacaggcgugagccgccg

SEQ ID NO: 280423 - RNA, 24 nt, Human
gauuacaggcgugagccgccgugc

SEQ ID NO: 280424 - RNA, 22 nt, Human
gcaaccuccgccuccuggguuc

SEQ ID NO: 280425 - RNA, 18 nt, Human
gcaguucuucccuuucuu

SEQ ID NO: 280426 - RNA, 19 nt, Human
gcccaggcuggagugcaau

SEQ ID NO: 280427 - RNA, 25 nt, Human
gcuggagugcaauggcacaauccug

SEQ ID NO: 280428 - RNA, 23 nt, Human
gcuggucucgaacucccgaccuc

SEQ ID NO: 280429 - RNA, 24 nt, Human
ggagaucacaucacuguacuccag

SEQ ID NO: 280430 - RNA, 18 nt, Human
ggccgaggcgaauggauc

SEQ ID NO: 280431 - RNA, 18 nt, Human
gggguuucuccauguugg

SEQ ID NO: 280432 - RNA, 24 nt, Human
guaauuuuguauuuuuaguagaga

SEQ ID NO: 280433 - RNA, 24 nt, Human
guacuccagccugggcagcagagc

SEQ ID NO: 280434 - RNA, 23 nt, Human
guagagcauacuucugugcaaag

SEQ ID NO: 280435 - RNA, 23 nt, Human
guagaugaugggauuacaggcau

SEQ ID NO: 280436 - RNA, 19 nt, Human
guaguauaagaaggcaguu

SEQ ID NO: 280437 - RNA, 24 nt, Human
guucuuguugcccaggcuggagug

SEQ ID NO: 280438 - RNA, 19 nt, Human
uaaacaaacaaaagguaau

SEQ ID NO: 280439 - RNA, 20 nt, Human
uaaagcaacgcaaguagagc

SEQ ID NO: 280440 - RNA, 22 nt, Human
uaacauacacaguaaugauuca

SEQ ID NO: 280441 - RNA, 25 nt, Human
uacaauaccauguaaugcacuggaa

SEQ ID NO: 280442 - RNA, 23 nt, Human
uacacaaaaccaaaacaaguauc

SEQ ID NO: 280443 - RNA, 18 nt, Human
uacacugacauacggaug

SEQ ID NO: 280444 - RNA, 24 nt, Human
uacagauacacaaaaccaaaacaa

SEQ ID NO: 280445 - RNA, 24 nt, Human
uacaggcaugcaccaccacgccca

SEQ ID NO: 280446 - RNA, 23 nt, Human
uacuccagccugggcagcagagc

SEQ ID NO: 280447 - RNA, 24 nt, Human
uacuccagccugggcagcagagcg

SEQ ID NO: 280448 - RNA, 24 nt, Human
uacuuguaaucccagaacuuuggg

SEQ ID NO: 280449 - RNA, 24 nt, Human
uagaugaugggauuacaggcaugc

SEQ ID NO: 280450 - RNA, 22 nt, Human
uagcacaauuuguaacauuaca

SEQ ID NO: 280451 - RNA, 24 nt, Human
uaguagagaugggguuucuccaug

SEQ ID NO: 280452 - RNA, 19 nt, Human
uauacaaugguuaaagaaa

SEQ ID NO: 280453 - RNA, 19 nt, Human
ucaagcaauucuccugccu

SEQ ID NO: 280454 - RNA, 21 nt, Human
ucacagauaagaaggagguug

SEQ ID NO: 280455 - RNA, 23 nt, Human
ucacaucacuguacuccagccug

SEQ ID NO: 280456 - RNA, 23 nt, Human
ucacugcaaccuccgccuccugg

SEQ ID NO: 280457 - RNA, 24 nt, Human
ucacugcaaccuccgccuccuggg

SEQ ID NO: 280458 - RNA, 25 nt, Human
ucacugcaaccuccgccuccugggu

SEQ ID NO: 280459 - RNA, 27 nt, Human
ucacugcaaccuccgccuccuggguuc

SEQ ID NO: 280460 - RNA, 21 nt, Human
ucacuguacuccagccugggc

SEQ ID NO: 280461 - RNA, 22 nt, Human
ucacuguacuccagccugggca

SEQ ID NO: 280462 - RNA, 23 nt, Human
ucacuguacuccagccugggcag

SEQ ID NO: 280463 - RNA, 24 nt, Human
ucacuguacuccagccugggcagc

SEQ ID NO: 280464 - RNA, 24 nt, Human
ucccaaagugcugggauuacaggc

SEQ ID NO: 280465 - RNA, 25 nt, Human
uccccuauugaccaaugacaagaau

SEQ ID NO: 280466 - RNA, 25 nt, Human
ucccucaaaauagaauccugcccua

SEQ ID NO: 280467 - RNA, 24 nt, Human
uccgccuccuggguucaagcaauu

SEQ ID NO: 280468 - RNA, 21 nt, Human
uccuggguucaagcaauucuc

SEQ ID NO: 280469 - RNA, 24 nt, Human
uccuggguucaagcaauucuccug

SEQ ID NO: 280470 - RNA, 28 nt, Human
ucuacccuccccuauugaccaaugacaa

SEQ ID NO: 280471 - RNA, 23 nt, Human
ucuaugauaauaaaaucuucaga

SEQ ID NO: 280472 - RNA, 18 nt, Human
ucuccugccucagccucc

SEQ ID NO: 280473 - RNA, 20 nt, Human
ucucggccucccaaagugcu

SEQ ID NO: 280474 - RNA, 21 nt, Human
ucuguaguauaagaaggcagu

SEQ ID NO: 280475 - RNA, 18 nt, Human
ucuuguugcccaggcugg

SEQ ID NO: 280476 - RNA, 19 nt, Human
ucuuguugcccaggcugga

SEQ ID NO: 280477 - RNA, 21 nt, Human
ucuuguugcccaggcuggagu

SEQ ID NO: 280478 - RNA, 22 nt, Human
ucuuguugcccaggcuggagug

SEQ ID NO: 280479 - RNA, 25 nt, Human
ugaaacaguuuuaauacccuaacau

SEQ ID NO: 280480 - RNA, 18 nt, Human
ugacaagaauggaagaaa

SEQ ID NO: 280481 - RNA, 26 nt, Human
ugacaagaauggaagaaaauauacaa

SEQ ID NO: 280482 - RNA, 22 nt, Human
ugauaauaaaaucuucagaaac

SEQ ID NO: 280483 - RNA, 23 nt, Human
ugauaauaaaaucuucagaaacu

SEQ ID NO: 280484 - RNA, 18 nt, Human
ugcccaggcuggagugca

SEQ ID NO: 280485 - RNA, 21 nt, Human
ugcccaggcuggagugcaaug

SEQ ID NO: 280486 - RNA, 24 nt, Human
ugcccaggcuggagugcaauggca

SEQ ID NO: 280487 - RNA, 24 nt, Human
ugccucagccuccugaguagauga

SEQ ID NO: 280488 - RNA, 19 nt, Human
ugccuggccuugacuugag

SEQ ID NO: 280489 - RNA, 20 nt, Human
ugcugggauuacaggcguga

SEQ ID NO: 280490 - RNA, 22 nt, Human
uggaaaaguuggaccuuggagu

SEQ ID NO: 280491 - RNA, 24 nt, Human
uggagugcaauggcacaauccugg

SEQ ID NO: 280492 - RNA, 19 nt, Human
uggaucacuugacgucagg

SEQ ID NO: 280493 - RNA, 27 nt, Human
uggaucacuugacgucaggagaucaca

SEQ ID NO: 280494 - RNA, 24 nt, Human
uggcacaauccuggcucacugcaa

SEQ ID NO: 280495 - RNA, 24 nt, Human
ugggaggccgaggcgaauggauca

SEQ ID NO: 280496 - RNA, 21 nt, Human
ugggauuacaggcaugcacca

SEQ ID NO: 280497 - RNA, 24 nt, Human
ugggauuacaggcaugcaccacca

SEQ ID NO: 280498 - RNA, 18 nt, Human
ugggauuacaggcgugag

SEQ ID NO: 280499 - RNA, 20 nt, Human
ugggauuacaggcgugagcc

SEQ ID NO: 280500 - RNA, 21 nt, Human
ugggauuacaggcgugagccg

SEQ ID NO: 280501 - RNA, 22 nt, Human
ugggauuacaggcgugagccgc

SEQ ID NO: 280502 - RNA, 23 nt, Human
ugggauuacaggcgugagccgcc

SEQ ID NO: 280503 - RNA, 23 nt, Human
ugggauuacaggcgugagccgcc

SEQ ID NO: 280504 - RNA, 24 nt, Human
ugggauuacaggcgugagccgccg

SEQ ID NO: 280505 - RNA, 19 nt, Human
ugggguuucuccauguugg

SEQ ID NO: 280506 - RNA, 22 nt, Human
ugggugcuugggguuuuggucg

SEQ ID NO: 280507 - RNA, 21 nt, Human
uggguucaagcaauucuccug

SEQ ID NO: 280508 - RNA, 23 nt, Human
uggguucaagcaauucuccugcc

SEQ ID NO: 280509 - RNA, 24 nt, Human
uggguucaagcaauucuccugccu

SEQ ID NO: 280510 - RNA, 21 nt, Human
ugguaaggcuggucucgaacu

SEQ ID NO: 280511 - RNA, 19 nt, Human
uggucucgaacucccgacc

SEQ ID NO: 280512 - RNA, 21 nt, Human
uguauuuuuaguagagauggg

SEQ ID NO: 280513 - RNA, 22 nt, Human
ugugaguccugccaggacuugu

SEQ ID NO: 280514 - RNA, 20 nt, Human
uguugcccaggcuggagugc

SEQ ID NO: 280515 - RNA, 23 nt, Human
uuaaugggugcuugggguuuugg

SEQ ID NO: 280516 - RNA, 18 nt, Human
uuacaggcgugagccgcc

SEQ ID NO: 280517 - RNA, 18 nt, Human
uuaguagagaugggguuu

SEQ ID NO: 280518 - RNA, 24 nt, Human
uuaguagagaugggguuucuccau

SEQ ID NO: 280519 - RNA, 21 nt, Human
uucaagcaauucuccugccuc

SEQ ID NO: 280520 - RNA, 24 nt, Human
uucaagcaauucuccugccucagc

SEQ ID NO: 280521 - RNA, 24 nt, Human
uucauggagcccccucccuccccc

SEQ ID NO: 280522 - RNA, 20 nt, Human
uucugggggcuuguuccuuu

SEQ ID NO: 280523 - RNA, 25 nt, Human
uugggaggccgaggcgaauggauca

SEQ ID NO: 280524 - RNA, 23 nt, Human
uuguauuuuuaguagagaugggg

SEQ ID NO: 280525 - RNA, 23 nt, Human
uuguucuuguugcccaggcugga

SEQ ID NO: 280526 - RNA, 24 nt, Human
uuguucuuguugcccaggcuggag

SEQ ID NO: 280527 - RNA, 24 nt, Human
uuuguucuuguugcccaggcugga

SEQ ID NO: 280528 - RNA, 20 nt, Human
uuuugagauggaguuuuguu

SEQ ID NO: 280529 - RNA, 19 nt, Human
uuuuguauuuuuaguagag

SEQ ID NO: 280530 - RNA, 20 nt, Human
uuuuguauuuuuaguagaga

SEQ ID NO: 280531 - RNA, 24 nt, Human
uuuuguucuuguugcccaggcugg

SEQ ID NO: 280532 - RNA, 22 nt, Human
uuuuuaguagagaugggguuuc

SEQ ID NO: 280533 - RNA, 24 nt, Human
uuuuuauuuuuugagauggaguuu

SEQ ID NO: 280534 - RNA, 23 nt, Human
aaagacuccucaaaagcugcaug

SEQ ID NO: 280535 - RNA, 27 nt, Human
accaaaccuaacacaauuucaagagau

SEQ ID NO: 280536 - RNA, 18 nt, Human
acugagccagcaccaccc

SEQ ID NO: 280537 - RNA, 20 nt, Human
agauacggugaggagugugu

SEQ ID NO: 280538 - RNA, 25 nt, Human
agcauaauaacccaaauuacaaaaa

SEQ ID NO: 280539 - RNA, 21 nt, Human
aucugaaaauacuucaguuau

SEQ ID NO: 280540 - RNA, 25 nt, Human
auggguuaaaagauacggugaggag

SEQ ID NO: 280541 - RNA, 19 nt, Human
caagagauggugauaccau

SEQ ID NO: 280542 - RNA, 24 nt, Human
caagaugaacggaugaacaguuca

SEQ ID NO: 280543 - RNA, 26 nt, Human
cagcauaauaacccaaauuacaaaaa

SEQ ID NO: 280544 - RNA, 24 nt, Human
caugauaacauuaaacuacaaaau

SEQ ID NO: 280545 - RNA, 25 nt, Human
cccaaauuacaaaaauggcaaaaaa

SEQ ID NO: 280546 - RNA, 21 nt, Human
cccgucuuccucuucaaggug

SEQ ID NO: 280547 - RNA, 22 nt, Human
cgcucgcuaccgcgcccaccuc

SEQ ID NO: 280548 - RNA, 22 nt, Human
cugagccagcaccacccccgcc

SEQ ID NO: 280549 - RNA, 18 nt, Human
gagagagguggagaaaag

SEQ ID NO: 280550 - RNA, 21 nt, Human
gauauauuauaaauaagucuc

SEQ ID NO: 280551 - RNA, 21 nt, Human
gcaacauuguaaacaccacca

SEQ ID NO: 280552 - RNA, 24 nt, Human
guaaacaccaccagguuuuuccaa

SEQ ID NO: 280553 - RNA, 23 nt, Human
uaaauaagucucucagcaagaug

SEQ ID NO: 280554 - RNA, 21 nt, Human
uaacugcuagucuuuuccagu

SEQ ID NO: 280555 - RNA, 27 nt, Human
uaauaacccaaauuacaaaaauggccg

SEQ ID NO: 280556 - RNA, 21 nt, Human
uacggugaggaguguguugag

SEQ ID NO: 280557 - RNA, 20 nt, Human
uacuucaguuauacaaaggg

SEQ ID NO: 280558 - RNA, 18 nt, Human
ugagccagcaccaccccc

SEQ ID NO: 280559 - RNA, 19 nt, Human
uucaagagauggugauacc

SEQ ID NO: 280560 - RNA, 24 nt, Human
uuccccagacaaaauaaccaaacc

SEQ ID NO: 280561 - RNA, 20 nt, Human
uuucaagagauggugauacc

SEQ ID NO: 280562 - RNA, 19 nt, Human
uuuuuuuuuuuuuuuugca

SEQ ID NO: 280563 - RNA, 24 nt, Human
uuuuuuuuuuuuuuuuuugcauuu

SEQ ID NO: 280564 - RNA, 20 nt, Human
uuuuuuuuuuuuuuuuuugg

SEQ ID NO: 280565 - RNA, 19 nt, Human
aaaaauguauaccucuucc

SEQ ID NO: 280566 - RNA, 22 nt, Human
aaacauacuuccuaucaaaacc

SEQ ID NO: 280567 - RNA, 21 nt, Human
aaacaucucucuuuccuacca

SEQ ID NO: 280568 - RNA, 23 nt, Human
aagaugguuuuugcugucacaaa

SEQ ID NO: 280569 - RNA, 18 nt, Human
aagugaaaaaauagagac

SEQ ID NO: 280570 - RNA, 20 nt, Human
acacuaagaaacaaacauac

SEQ ID NO: 280571 - RNA, 19 nt, Human
agaaauggauaugaagaag

SEQ ID NO: 280572 - RNA, 20 nt, Human
agacaagaaauaaagcagag

SEQ ID NO: 280573 - RNA, 21 nt, Human
agagaggaugguauccugugu

SEQ ID NO: 280574 - RNA, 20 nt, Human
agaggacagaggcagagcug

SEQ ID NO: 280575 - RNA, 22 nt, Human
agauauuaaguauucugaacag

SEQ ID NO: 280576 - RNA, 23 nt, Human
agcuguauggucaagucaacccu

SEQ ID NO: 280577 - RNA, 22 nt, Human
auauaugcauagaaccgaggcu

SEQ ID NO: 280578 - RNA, 22 nt, Human
auuguugggaaucuacaauugc

SEQ ID NO: 280579 - RNA, 22 nt, Human
cacagauuuaggaaacuuaaaa

SEQ ID NO: 280580 - RNA, 20 nt, Human
caggagcuauaaagugaaaa

SEQ ID NO: 280581 - RNA, 22 nt, Human
ccccuuccuuucucucgugucc

SEQ ID NO: 280582 - RNA, 20 nt, Human
cucaugugguuccacuccca

SEQ ID NO: 280583 - RNA, 22 nt, Human
cuggccaaguguaaaaaauaaa

SEQ ID NO: 280584 - RNA, 19 nt, Human
cuuccccuuccuuucucuc

SEQ ID NO: 280585 - RNA, 18 nt, Human
gaacucuggacauuccau

SEQ ID NO: 280586 - RNA, 18 nt, Human
gacagaggcagagcugau

SEQ ID NO: 280587 - RNA, 21 nt, Human
gagacaagaaauaaagcagag

SEQ ID NO: 280588 - RNA, 21 nt, Human
gagcaggcucaugugguucca

SEQ ID NO: 280589 - RNA, 23 nt, Human
gagcuucaguuuuuucaucugac

SEQ ID NO: 280590 - RNA, 18 nt, Human
gaguccuguucuuccccu

SEQ ID NO: 280591 - RNA, 19 nt, Human
gcaagagaggaugguaucc

SEQ ID NO: 280592 - RNA, 18 nt, Human
ggacagaggcagagcuga

SEQ ID NO: 280593 - RNA, 21 nt, Human
ggcucaugugguuccacuccc

SEQ ID NO: 280594 - RNA, 19 nt, Human
gguccuaaaaggcagauuu

SEQ ID NO: 280595 - RNA, 20 nt, Human
gugcuuaaaacuuccuugug

SEQ ID NO: 280596 - RNA, 19 nt, Human
uaacaggagcuauaaagug

SEQ ID NO: 280597 - RNA, 23 nt, Human
uaauuuuuuuucuaacucacuag

SEQ ID NO: 280598 - RNA, 23 nt, Human
uagggcccuauguuaauuuuuuu

SEQ ID NO: 280599 - RNA, 19 nt, Human
uauaaagugaaaaaauaga

SEQ ID NO: 280600 - RNA, 26 nt, Human
uauaaagugaaaaaauagagacaaga

SEQ ID NO: 280601 - RNA, 21 nt, Human
uaucaaaaccucuagcugcca

SEQ ID NO: 280602 - RNA, 20 nt, Human
ucuacuacagcuugcuaccu

SEQ ID NO: 280603 - RNA, 18 nt, Human
ucuuccccuuccuuucuc

SEQ ID NO: 280604 - RNA, 23 nt, Human
ugaaaaaauagagacaagaaaua

SEQ ID NO: 280605 - RNA, 26 nt, Human
ugaaaaaaugcaguuucacacauuaa

SEQ ID NO: 280606 - RNA, 21 nt, Human
ugaacaguaacuugauauagu

SEQ ID NO: 280607 - RNA, 21 nt, Human
ugacuuucucuaauuuuccuu

SEQ ID NO: 280608 - RNA, 21 nt, Human
ugcagagcugagcaggcucau

SEQ ID NO: 280609 - RNA, 19 nt, Human
ugcucuuuagcucuugcuu

SEQ ID NO: 280610 - RNA, 19 nt, Human
uggaaucucauaaaauaac

SEQ ID NO: 280611 - RNA, 21 nt, Human
uggaggcagagcgacuuaaaa

SEQ ID NO: 280612 - RNA, 18 nt, Human
uguaaacacuaagaaaca

SEQ ID NO: 280613 - RNA, 19 nt, Human
uguaaagaugguuuuugcu

SEQ ID NO: 280614 - RNA, 22 nt, Human
uguaaagaugguuuuugcuguc

SEQ ID NO: 280615 - RNA, 24 nt, Human
uuaaaaaauguauaccucuuccua

SEQ ID NO: 280616 - RNA, 23 nt, Human
uucacacauuaaaggcaaggaga

SEQ ID NO: 280617 - RNA, 19 nt, Human
uucuucgagaacucuggac

SEQ ID NO: 280618 - RNA, 23 nt, Human
uugcugacccugaguaaucaugu

SEQ ID NO: 280619 - RNA, 23 nt, Human
uugcugucacaaagccagguccu

SEQ ID NO: 280620 - RNA, 19 nt, Human
uuuguaaacacuaagaaac

SEQ ID NO: 280621 - RNA, 22 nt, Human
accuggaagcaccucagucgcc

SEQ ID NO: 280622 - RNA, 21 nt, Human
aggucagagccccacagagga

SEQ ID NO: 280623 - RNA, 20 nt, Human
cagaggagcccgaagcacag

SEQ ID NO: 280624 - RNA, 20 nt, Human
cagcccccugaacaguggcc

SEQ ID NO: 280625 - RNA, 24 nt, Human
ccacaggccccgagcugggagccc

SEQ ID NO: 280626 - RNA, 23 nt, Human
ccaccuggaagcaccucagucgc

SEQ ID NO: 280627 - RNA, 23 nt, Human
ccagaccagcauacuggccccac

SEQ ID NO: 280628 - RNA, 22 nt, Human
ccagcgcgcuggcccgucgugg

SEQ ID NO: 280629 - RNA, 21 nt, Human
cccaccccugccccgugauca

SEQ ID NO: 280630 - RNA, 19 nt, Human
ccccacagaggagcccgaa

SEQ ID NO: 280631 - RNA, 21 nt, Human
ccccacaggccccgagcuggg

SEQ ID NO: 280632 - RNA, 22 nt, Human
ccccugaacaguggccucaacu

SEQ ID NO: 280633 - RNA, 24 nt, Human
ccccugaacaguggccucaacucu

SEQ ID NO: 280634 - RNA, 18 nt, Human
cccgucgugggcgcgggg

SEQ ID NO: 280635 - RNA, 18 nt, Human
cccgugaucagguuaagg

SEQ ID NO: 280636 - RNA, 24 nt, Human
cccuguccugagccccugggcuuc

SEQ ID NO: 280637 - RNA, 24 nt, Human
ccucccuguccugagccccugggc

SEQ ID NO: 280638 - RNA, 20 nt, Human
ccugagccccugggcuucug

SEQ ID NO: 280639 - RNA, 21 nt, Human
ccugagcggggcccugggaac

SEQ ID NO: 280640 - RNA, 23 nt, Human
ccuggaagcaccucagucgccgg

SEQ ID NO: 280641 - RNA, 20 nt, Human
ccugguggccgcugucaccu

SEQ ID NO: 280642 - RNA, 21 nt, Human
cggggagcggggcggggagcg

SEQ ID NO: 280643 - RNA, 27 nt, Human
cucaacacauguucaagccuacggacu

SEQ ID NO: 280644 - RNA, 21 nt, Human
cucucugcugggcccugagcc

SEQ ID NO: 280645 - RNA, 22 nt, Human
cugcugccugaggucaggcuga

SEQ ID NO: 280646 - RNA, 23 nt, Human
cuguggcugagaccaagaggggc

SEQ ID NO: 280647 - RNA, 20 nt, Human
gacucugggaacagggaacc

SEQ ID NO: 280648 - RNA, 20 nt, Human
gccaccagcccccugaacag

SEQ ID NO: 280649 - RNA, 25 nt, Human
gcccccugaacaguggccucaacuc

SEQ ID NO: 280650 - RNA, 24 nt, Human
gccccugggcuucuggcagcuugg

SEQ ID NO: 280651 - RNA, 19 nt, Human
gcccgucgugggcgcgggg

SEQ ID NO: 280652 - RNA, 19 nt, Human
gcccugggaacagaggugu

SEQ ID NO: 280653 - RNA, 24 nt, Human
gcggcgcgcgcggucccuaaagga

SEQ ID NO: 280654 - RNA, 21 nt, Human
gcugcagacucugggaacagg

SEQ ID NO: 280655 - RNA, 18 nt, Human
gcugccugaggucaggcu

SEQ ID NO: 280656 - RNA, 18 nt, Human
gcuggggcgcgcguggag

SEQ ID NO: 280657 - RNA, 18 nt, Human
ggacucucugcugggccc

SEQ ID NO: 280658 - RNA, 19 nt, Human
ggagacggccaccagcccc

SEQ ID NO: 280659 - RNA, 23 nt, Human
uauguccaagcgcccagagggcc

SEQ ID NO: 280660 - RNA, 18 nt, Human
ucauguggggugagcagg

SEQ ID NO: 280661 - RNA, 23 nt, Human
ucauguggggugagcagguuggg

SEQ ID NO: 280662 - RNA, 25 nt, Human
ucauguggggugagcagguugggca

SEQ ID NO: 280663 - RNA, 20 nt, Human
uccaagcgcccagagggccc

SEQ ID NO: 280664 - RNA, 23 nt, Human
ucccagaccagcauacuggcccc

SEQ ID NO: 280665 - RNA, 24 nt, Human
ucccagaccagcauacuggcccca

SEQ ID NO: 280666 - RNA, 20 nt, Human
ucccccagcacagagccugg

SEQ ID NO: 280667 - RNA, 22 nt, Human
ucuauguccaagcgcccagagg

SEQ ID NO: 280668 - RNA, 23 nt, Human
ucucugcugggcccugagcgggg

SEQ ID NO: 280669 - RNA, 23 nt, Human
ucugccucagagaacuugccuag

SEQ ID NO: 280670 - RNA, 21 nt, Human
uggcagggcuggggaagggaa

SEQ ID NO: 280671 - RNA, 21 nt, Human
uggccccacaggccccgagcu

SEQ ID NO: 280672 - RNA, 21 nt, Human
uggcugcagacucugggaaca

SEQ ID NO: 280673 - RNA, 24 nt, Human
ugggcuucuggcagcuuggugccu

SEQ ID NO: 280674 - RNA, 19 nt, Human
uguccaagcgcccagaggg

SEQ ID NO: 280675 - RNA, 22 nt, Human
uguggcugagaccaagaggggc

SEQ ID NO: 280676 - RNA, 25 nt, Human
uucugccucagagaacuugccuagg

SEQ ID NO: 280677 - RNA, 28 nt, Human
agaggcgaguuuauugggggaggggcug

SEQ ID NO: 280678 - RNA, 22 nt, Human
agcccggagucugucagcagcc

SEQ ID NO: 280679 - RNA, 20 nt, Human
cagcaggagggggagugagc

SEQ ID NO: 280680 - RNA, 20 nt, Human
caggucaguccagugugugg

SEQ ID NO: 280681 - RNA, 20 nt, Human
ccagcccaguccaggggugg

SEQ ID NO: 280682 - RNA, 21 nt, Human
ccaggggugggagggaggggg

SEQ ID NO: 280683 - RNA, 19 nt, Human
cccuguuucagaagagucc

SEQ ID NO: 280684 - RNA, 18 nt, Human
ccgcucagggcaggucag

SEQ ID NO: 280685 - RNA, 18 nt, Human
ccucccgggucacugccc

SEQ ID NO: 280686 - RNA, 22 nt, Human
cucugcaccuggugacuuccuc

SEQ ID NO: 280687 - RNA, 21 nt, Human
gcauagcagcaggagggggag

SEQ ID NO: 280688 - RNA, 20 nt, Human
gcccggagucugucagcagc

SEQ ID NO: 280689 - RNA, 18 nt, Human
ggagggagggggugaccc

SEQ ID NO: 280690 - RNA, 21 nt, Human
gggaugcuugggguggcgugg

SEQ ID NO: 280691 - RNA, 18 nt, Human
ggggaggggcuggucaag

SEQ ID NO: 280692 - RNA, 21 nt, Human
ggggccacccccagcccaguc

SEQ ID NO: 280693 - RNA, 21 nt, Human
uacccccacggggccaccccc

SEQ ID NO: 280694 - RNA, 18 nt, Human
uagcagcaggagggggag

SEQ ID NO: 280695 - RNA, 24 nt, Human
uagcagcaggagggggagugagcu

SEQ ID NO: 280696 - RNA, 21 nt, Human
uagcccggagucugucagcag

SEQ ID NO: 280697 - RNA, 19 nt, Human
uccaggggugggagggagg

SEQ ID NO: 280698 - RNA, 21 nt, Human
ucugcaccuggugacuuccuc

SEQ ID NO: 280699 - RNA, 23 nt, Human
ugcccuguuucagaagaguccug

SEQ ID NO: 280700 - RNA, 20 nt, Human
ugggagggagggggugaccc

SEQ ID NO: 280701 - RNA, 20 nt, Human
ugggaugcuugggguggcgu

SEQ ID NO: 280702 - RNA, 21 nt, Human
ugucagcagccugcaggcagg

SEQ ID NO: 280703 - RNA, 24 nt, Human
uuuuuuuuuuuuuuuuuuuccaag

SEQ ID NO: 280704 - RNA, 24 nt, Human
aaguugcuccaggagaacuccuau

SEQ ID NO: 280705 - RNA, 20 nt, Human
accuccaaaaccccaugugg

SEQ ID NO: 280706 - RNA, 21 nt, Human
agggagggggcaaccaccugg

SEQ ID NO: 280707 - RNA, 22 nt, Human
aguugcuccaggagaacuccua

SEQ ID NO: 280708 - RNA, 23 nt, Human
cagcugggccaucccugaggucu

SEQ ID NO: 280709 - RNA, 25 nt, Human
ccaaaaccccaugugguuucaccca

SEQ ID NO: 280710 - RNA, 19 nt, Human
ccuauucaaccuccaaaac

SEQ ID NO: 280711 - RNA, 21 nt, Human
ccucaaguugcuccaggagaa

SEQ ID NO: 280712 - RNA, 22 nt, Human
ccugucagcaccuccuccgccu

SEQ ID NO: 280713 - RNA, 19 nt, Human
ccuuagaucagcugggcca

SEQ ID NO: 280714 - RNA, 24 nt, Human
cgccucggagcucuggggcuggga

SEQ ID NO: 280715 - RNA, 22 nt, Human
cucaggagagggagggggcaac

SEQ ID NO: 280716 - RNA, 24 nt, Human
cuggggcgcccucuucggcucccg

SEQ ID NO: 280717 - RNA, 18 nt, Human
gcagagauugagcucaaa

SEQ ID NO: 280718 - RNA, 23 nt, Human
ggagagggagggggcaaccaccu

SEQ ID NO: 280719 - RNA, 24 nt, Human
ggagcaccugucagcaccuccucc

SEQ ID NO: 280720 - RNA, 19 nt, Human
gggagggggcaaccaccug

SEQ ID NO: 280721 - RNA, 19 nt, Human
gggggccccuguggaggac

SEQ ID NO: 280722 - RNA, 19 nt, Human
ucagcugggccaucccuga

SEQ ID NO: 280723 - RNA, 23 nt, Human
ucagcugggccaucccugagguc

SEQ ID NO: 280724 - RNA, 19 nt, Human
ucuguuauuuuccugggca

SEQ ID NO: 280725 - RNA, 24 nt, Human
uggaggacacagguggcccccucc

SEQ ID NO: 280726 - RNA, 18 nt, Human
agcagcggcgggcacgcc

SEQ ID NO: 280727 - RNA, 20 nt, Human
caaugccgaggaacagggcc

SEQ ID NO: 280728 - RNA, 21 nt, Human
cagccaguggccgggccccaa

SEQ ID NO: 280729 - RNA, 19 nt, Human
caggcccgcaaugccgagg

SEQ ID NO: 280730 - RNA, 22 nt, Human
ccaccaggcccgcaaugccgag

SEQ ID NO: 280731 - RNA, 18 nt, Human
ccagaggugggagcagcg

SEQ ID NO: 280732 - RNA, 20 nt, Human
ccagaggugggagcagcggc

SEQ ID NO: 280733 - RNA, 18 nt, Human
cccccgggcggccccagc

SEQ ID NO: 280734 - RNA, 25 nt, Human
cccccgggcggccccagcccggccc

SEQ ID NO: 280735 - RNA, 25 nt, Human
cgcaaugccgaggaacagggccccc

SEQ ID NO: 280736 - RNA, 23 nt, Human
cggcccagaggugggagcagcgg

SEQ ID NO: 280737 - RNA, 20 nt, Human
cgggcccagcacagcagcgg

SEQ ID NO: 280738 - RNA, 21 nt, Human
cgggcccagcacagcagcggg

SEQ ID NO: 280739 - RNA, 24 nt, Human
gaagcccucuccgcgguucugccc

SEQ ID NO: 280740 - RNA, 19 nt, Human
gcccagaggugggagcagc

SEQ ID NO: 280741 - RNA, 22 nt, Human
gccccgggcccagcacagcagc

SEQ ID NO: 280742 - RNA, 23 nt, Human
gccccgggcccagcacagcagcg

SEQ ID NO: 280743 - RNA, 22 nt, Human
ggagccgcugcgggucagccag

SEQ ID NO: 280744 - RNA, 18 nt, Human
gggcccccgggcggcccc

SEQ ID NO: 280745 - RNA, 19 nt, Human
gggcggccccagcccggcc

SEQ ID NO: 280746 - RNA, 18 nt, Human
guggccgggccccaagac

SEQ ID NO: 280747 - RNA, 19 nt, Human
ugccgaggaacagggcccc

SEQ ID NO: 280748 - RNA, 20 nt, Human
ugggagcagcggcgggcacg

SEQ ID NO: 280749 - RNA, 24 nt, Human
aaaaaagaaaaaggaacaaccaag

SEQ ID NO: 280750 - RNA, 27 nt, Human
aaaaagaaaauuuaaaaaaagaaaaag

SEQ ID NO: 280751 - RNA, 28 nt, Human
aaaaagaaaauuuaaaaaaagaaaaagg

SEQ ID NO: 280752 - RNA, 22 nt, Human
aaaagaaaaaggaacaaccaag

SEQ ID NO: 280753 - RNA, 22 nt, Human
aaaagaaaaaggaacaaccaag

SEQ ID NO: 280754 - RNA, 27 nt, Human
aaaagaagaaaaagaaaauuuaaaaaa

SEQ ID NO: 280755 - RNA, 22 nt, Human
aaaagaaucauccauggcacag

SEQ ID NO: 280756 - RNA, 23 nt, Human
aaagauguucauccucucagccc

SEQ ID NO: 280757 - RNA, 23 nt, Human
aaaggguaagaaucgugaagcag

SEQ ID NO: 280758 - RNA, 26 nt, Human
aaaggguaagaaucgugaagcaggga

SEQ ID NO: 280759 - RNA, 21 nt, Human
aaagguccucaggggaaggug

SEQ ID NO: 280760 - RNA, 20 nt, Human
aaccagugcuaucaucacaa

SEQ ID NO: 280761 - RNA, 22 nt, Human
aagaaaaagaaaauuuaaaaaa

SEQ ID NO: 280762 - RNA, 23 nt, Human
aagaaaaagaaaauuuaaaaaaa

SEQ ID NO: 280763 - RNA, 25 nt, Human
aagaaaaagaaaauuuaaaaaaaga

SEQ ID NO: 280764 - RNA, 21 nt, Human
aagaaguacacacugcuuccc

SEQ ID NO: 280765 - RNA, 21 nt, Human
aagacaaaacuguguccgagc

SEQ ID NO: 280766 - RNA, 22 nt, Human
aagcagccagcgaggcuccugc

SEQ ID NO: 280767 - RNA, 24 nt, Human
aaggugccgaauacauucuuccca

SEQ ID NO: 280768 - RNA, 19 nt, Human
acaucaaaggcaggaauac

SEQ ID NO: 280769 - RNA, 23 nt, Human
acgaaaaaaaagaagaaaaagaa

SEQ ID NO: 280770 - RNA, 20 nt, Human
acugacaccagcugauccca

SEQ ID NO: 280771 - RNA, 25 nt, Human
agaaaaaggaacaaccaagggagau

SEQ ID NO: 280772 - RNA, 23 nt, Human
agaaagagauaaugccaaaaaga

SEQ ID NO: 280773 - RNA, 21 nt, Human
agaaaggguaagaaucgugaa

SEQ ID NO: 280774 - RNA, 21 nt, Human
agacaaaacuguguccgagca

SEQ ID NO: 280775 - RNA, 23 nt, Human
agagaaagagauaaugccaaaaa

SEQ ID NO: 280776 - RNA, 26 nt, Human
agagaaagagauaaugccaaaaagaa

SEQ ID NO: 280777 - RNA, 20 nt, Human
agagugaaggagagcagcuu

SEQ ID NO: 280778 - RNA, 18 nt, Human
agcagccagugccagccc

SEQ ID NO: 280779 - RNA, 24 nt, Human
agcagggaagacgaaaaaaaagaa

SEQ ID NO: 280780 - RNA, 18 nt, Human
agccauccaaaaacaaua

SEQ ID NO: 280781 - RNA, 20 nt, Human
aggcaggaauacaacaaggc

SEQ ID NO: 280782 - RNA, 27 nt, Human
aggcggcaggguucacaguggucccgg

SEQ ID NO: 280783 - RNA, 18 nt, Human
aggguucacagugguccc

SEQ ID NO: 280784 - RNA, 19 nt, Human
aucauccauggcacagagg

SEQ ID NO: 280785 - RNA, 20 nt, Human
aucccagugguugucuuugu

SEQ ID NO: 280786 - RNA, 20 nt, Human
caaccuacgaagacaaaacu

SEQ ID NO: 280787 - RNA, 26 nt, Human
caaccuacgaagacaaaacugugucc

SEQ ID NO: 280788 - RNA, 18 nt, Human
cacgcccgccgccggcgc

SEQ ID NO: 280789 - RNA, 18 nt, Human
cagcuugguggccuccag

SEQ ID NO: 280790 - RNA, 23 nt, Human
cauuucuggugaugggaaaagaa

SEQ ID NO: 280791 - RNA, 21 nt, Human
ccacaucaaaggcaggaauac

SEQ ID NO: 280792 - RNA, 21 nt, Human
ccagcccgagugccugucccc

SEQ ID NO: 280793 - RNA, 18 nt, Human
ccccgcgcugcaccggcc

SEQ ID NO: 280794 - RNA, 23 nt, Human
cccggcgcgccgggcaccgaccg

SEQ ID NO: 280795 - RNA, 18 nt, Human
ccgccggggacugagcgc

SEQ ID NO: 280796 - RNA, 21 nt, Human
ccgcugcucggagcuccgcgg

SEQ ID NO: 280797 - RNA, 23 nt, Human
ccugaccccgaaaugagcucugg

SEQ ID NO: 280798 - RNA, 18 nt, Human
ccuguccccgcgcugcac

SEQ ID NO: 280799 - RNA, 19 nt, Human
cgaggccgggcuccggcgc

SEQ ID NO: 280800 - RNA, 20 nt, Human
cgccuggguccaggcuccug

SEQ ID NO: 280801 - RNA, 18 nt, Human
cggccgcuuucccccacc

SEQ ID NO: 280802 - RNA, 23 nt, Human
cggcggccgucgcugcauggccc

SEQ ID NO: 280803 - RNA, 22 nt, Human
cggcggcguccgggacucucug

SEQ ID NO: 280804 - RNA, 24 nt, Human
cucggagcuccgcggcggccgucg

SEQ ID NO: 280805 - RNA, 23 nt, Human
cugaccccgaaaugagcucugga

SEQ ID NO: 280806 - RNA, 27 nt, Human
cugaccccgaaaugagcucuggacaug

SEQ ID NO: 280807 - RNA, 21 nt, Human
cugcucggagcuccgcggcgg

SEQ ID NO: 280808 - RNA, 21 nt, Human
cuggacaugaauccaccucuu

SEQ ID NO: 280809 - RNA, 22 nt, Human
gaagaaguacacacugcuuccc

SEQ ID NO: 280810 - RNA, 23 nt, Human
gaguccagcuuaucagaggcuga

SEQ ID NO: 280811 - RNA, 19 nt, Human
gcagaagccagauugauuc

SEQ ID NO: 280812 - RNA, 24 nt, Human
gcugagcugguccggagcgaagag

SEQ ID NO: 280813 - RNA, 24 nt, Human
gcuucucggagucuuugauguuaa

SEQ ID NO: 280814 - RNA, 21 nt, Human
ggacaugaauccaccucuuuu

SEQ ID NO: 280815 - RNA, 21 nt, Human
ggcgccuggguccaggcuccu

SEQ ID NO: 280816 - RNA, 20 nt, Human
gguucacaguggucccggca

SEQ ID NO: 280817 - RNA, 23 nt, Human
guagagcgcgagcgaagcagcca

SEQ ID NO: 280818 - RNA, 19 nt, Human
gucuauggaugaagaagua

SEQ ID NO: 280819 - RNA, 19 nt, Human
gugaagcagggaagacgaa

SEQ ID NO: 280820 - RNA, 26 nt, Human
uaauaaaucuucuuucucucugguuu

SEQ ID NO: 280821 - RNA, 21 nt, Human
uaguuguggugggcaaacugg

SEQ ID NO: 280822 - RNA, 18 nt, Human
uccaaaaacaauaagaac

SEQ ID NO: 280823 - RNA, 22 nt, Human
ucccagugguugucuuuguucc

SEQ ID NO: 280824 - RNA, 21 nt, Human
uccccgcgcugcaccggccgc

SEQ ID NO: 280825 - RNA, 19 nt, Human
ucccuuuuuuucauccaca

SEQ ID NO: 280826 - RNA, 18 nt, Human
uccgggacucucuggggc

SEQ ID NO: 280827 - RNA, 23 nt, Human
ucucccauagauaaaggcuucac

SEQ ID NO: 280828 - RNA, 27 nt, Human
ucucccauagauaaaggcuucacagau

SEQ ID NO: 280829 - RNA, 20 nt, Human
ucuucuuucucucugguuuu

SEQ ID NO: 280830 - RNA, 25 nt, Human
ucuuucucucugguuuucggacuuc

SEQ ID NO: 280831 - RNA, 20 nt, Human
ugaaggagagcagcuuggug

SEQ ID NO: 280832 - RNA, 22 nt, Human
ugagaaacaaaccagugcuauc

SEQ ID NO: 280833 - RNA, 18 nt, Human
ugagcugguccggagcga

SEQ ID NO: 280834 - RNA, 18 nt, Human
ugauauaacaaauuacgu

SEQ ID NO: 280835 - RNA, 20 nt, Human
ugcagaagccagauugauuc

SEQ ID NO: 280836 - RNA, 23 nt, Human
uggugggcaaacuggagugucug

SEQ ID NO: 280837 - RNA, 23 nt, Human
uguguccgagcacacuaugcgcc

SEQ ID NO: 280838 - RNA, 22 nt, Human
uucacaguggucccggcauagc

SEQ ID NO: 280839 - RNA, 21 nt, Human
uucccaccugaccccgaaaug

SEQ ID NO: 280840 - RNA, 19 nt, Human
uugcucucuacugcacgcu

SEQ ID NO: 280841 - RNA, 24 nt, Human
agaguaugaauucaugaccaccag

SEQ ID NO: 280842 - RNA, 19 nt, Human
aggcagggagagaggaggc

SEQ ID NO: 280843 - RNA, 19 nt, Human
augaagauguucgcuucag

SEQ ID NO: 280844 - RNA, 18 nt, Human
ccgccgccgccgccgccg

SEQ ID NO: 280845 - RNA, 18 nt, Human
ccgccgccgccgccgccg

SEQ ID NO: 280846 - RNA, 24 nt, Human
ccgccgccgccgccgccgccgccg

SEQ ID NO: 280847 - RNA, 25 nt, Human
ccgccgccgccgccgccgccgccgg

SEQ ID NO: 280848 - RNA, 24 nt, Human
ccgccgccgccgccgccgccgggu

SEQ ID NO: 280849 - RNA, 20 nt, Human
cgagaggcccuaguggcucu

SEQ ID NO: 280850 - RNA, 25 nt, Human
cgccgccgccgccgccgccgccggc

SEQ ID NO: 280851 - RNA, 19 nt, Human
gaggcagggagagaggagg

SEQ ID NO: 280852 - RNA, 18 nt, Human
gaguaugaauucaugacc

SEQ ID NO: 280853 - RNA, 20 nt, Human
ggagagaggaggcaacagag

SEQ ID NO: 280854 - RNA, 19 nt, Human
guucgcuucagucaaggcu

SEQ ID NO: 280855 - RNA, 24 nt, Human
ugagguggaagggagaugugaggc

SEQ ID NO: 280856 - RNA, 19 nt, Human
uggaaggaguugugaggug

SEQ ID NO: 280857 - RNA, 21 nt, Human
uggaagggagaugugaggcag

SEQ ID NO: 280858 - RNA, 18 nt, Human
uucaugaccaccagccac

SEQ ID NO: 280859 - RNA, 21 nt, Human
aaaagucagaagcacacugaa

SEQ ID NO: 280860 - RNA, 18 nt, Human
aagccaaguccguaaaag

SEQ ID NO: 280861 - RNA, 20 nt, Human
aauuugauauuuaauuaagg

SEQ ID NO: 280862 - RNA, 25 nt, Human
agaaaaacacauucaauaaaccaca

SEQ ID NO: 280863 - RNA, 22 nt, Human
agccuucuaacaagccaagucc

SEQ ID NO: 280864 - RNA, 21 nt, Human
auuuuuuuuuuuuuuuuuugg

SEQ ID NO: 280865 - RNA, 21 nt, Human
caaguccguaaaagucagaag

SEQ ID NO: 280866 - RNA, 24 nt, Human
caaguccguaaaagucagaagcac

SEQ ID NO: 280867 - RNA, 20 nt, Human
cacuuccucuuuccuucagc

SEQ ID NO: 280868 - RNA, 20 nt, Human
cagccuucuaacaagccaag

SEQ ID NO: 280869 - RNA, 20 nt, Human
gaagauuuagauuuauuuga

SEQ ID NO: 280870 - RNA, 21 nt, Human
gaagggggcucucucuagcac

SEQ ID NO: 280871 - RNA, 19 nt, Human
gcacuuccucuuuccuuca

SEQ ID NO: 280872 - RNA, 18 nt, Human
gcggccccauuuuuuuuu

SEQ ID NO: 280873 - RNA, 22 nt, Human
gcggccccauuuuuuuuuuuuu

SEQ ID NO: 280874 - RNA, 19 nt, Human
uagaagagacagauaagug

SEQ ID NO: 280875 - RNA, 23 nt, Human
ugcagaaaaacacauucaauaaa

SEQ ID NO: 280876 - RNA, 26 nt, Human
ugcggccccauuuuuuuuuuuuuuuu

SEQ ID NO: 280877 - RNA, 24 nt, Human
uugucacauuuucacacaaauaua

SEQ ID NO: 280878 - RNA, 28 nt, Human
aaacauggguuagggggugggagggggg

SEQ ID NO: 280879 - RNA, 19 nt, Human
aaagaggagaugggggagg

SEQ ID NO: 280880 - RNA, 18 nt, Human
aacucaacagccagaucc

SEQ ID NO: 280881 - RNA, 22 nt, Human
aagcuagugauacgagaucagg

SEQ ID NO: 280882 - RNA, 23 nt, Human
acaagcaaagcacacggaaugcg

SEQ ID NO: 280883 - RNA, 23 nt, Human
accaccugcagauggugggagug

SEQ ID NO: 280884 - RNA, 21 nt, Human
accagguguccggguccuggg

SEQ ID NO: 280885 - RNA, 22 nt, Human
accagguguccggguccugggu

SEQ ID NO: 280886 - RNA, 23 nt, Human
acggagccugcgggacuggggcu

SEQ ID NO: 280887 - RNA, 18 nt, Human
agaccucagccugcacag

SEQ ID NO: 280888 - RNA, 20 nt, Human
agagaccaggcaccaucgcc

SEQ ID NO: 280889 - RNA, 22 nt, Human
agagcccagccugaggggccuu

SEQ ID NO: 280890 - RNA, 19 nt, Human
agaggagaugggggagggg

SEQ ID NO: 280891 - RNA, 22 nt, Human
agccaggggccuggcuagucau

SEQ ID NO: 280892 - RNA, 23 nt, Human
agccgaaggguccugugguugga

SEQ ID NO: 280893 - RNA, 21 nt, Human
agccgggccgccggaggcccg

SEQ ID NO: 280894 - RNA, 23 nt, Human
agccugaggggccuuagcauuug

SEQ ID NO: 280895 - RNA, 21 nt, Human
agccugcgggacuggggcugg

SEQ ID NO: 280896 - RNA, 24 nt, Human
agccugcgggacuggggcuggacu

SEQ ID NO: 280897 - RNA, 18 nt, Human
aggacagucucauccagc

SEQ ID NO: 280898 - RNA, 20 nt, Human
aggagaugggggaggggugg

SEQ ID NO: 280899 - RNA, 24 nt, Human
aggaguuggggacaggcccgggag

SEQ ID NO: 280900 - RNA, 23 nt, Human
aggaugggagggaggaggggagg

SEQ ID NO: 280901 - RNA, 21 nt, Human
aggcagccagcccagagccca

SEQ ID NO: 280902 - RNA, 23 nt, Human
aggcccccgaggacagcgcccag

SEQ ID NO: 280903 - RNA, 18 nt, Human
aggcccggccccacccag

SEQ ID NO: 280904 - RNA, 25 nt, Human
agggaggaggggaggcuggggucug

SEQ ID NO: 280905 - RNA, 18 nt, Human
aggugcuggagaccaggc

SEQ ID NO: 280906 - RNA, 18 nt, Human
aggugcuggagaccaggc

SEQ ID NO: 280907 - RNA, 23 nt, Human
agguguccggguccugggucgac

SEQ ID NO: 280908 - RNA, 24 nt, Human
agguguccggguccugggucgaca

SEQ ID NO: 280909 - RNA, 20 nt, Human
auccacucugcccucucuca

SEQ ID NO: 280910 - RNA, 26 nt, Human
auccacucugcccucucucagagcac

SEQ ID NO: 280911 - RNA, 20 nt, Human
augagucugugccucagccc

SEQ ID NO: 280912 - RNA, 21 nt, Human
caaagcacacggaaugcgcag

SEQ ID NO: 280913 - RNA, 28 nt, Human
caaaguggcugaacacagcccaagacca

SEQ ID NO: 280914 - RNA, 22 nt, Human
cacagcccaagaccaggugucc

SEQ ID NO: 280915 - RNA, 19 nt, Human
caccaggggccggcucagg

SEQ ID NO: 280916 - RNA, 19 nt, Human
cacgugaggcccaaagcca

SEQ ID NO: 280917 - RNA, 19 nt, Human
cacucauggcacgcagggc

SEQ ID NO: 280918 - RNA, 22 nt, Human
cagaccucagccugcacagcua

SEQ ID NO: 280919 - RNA, 18 nt, Human
cagagcaccauccugaga

SEQ ID NO: 280920 - RNA, 20 nt, Human
cagccacagaccccgcccca

SEQ ID NO: 280921 - RNA, 22 nt, Human
cagcccaagaccagguguccgg

SEQ ID NO: 280922 - RNA, 23 nt, Human
cagccugcacagcuacaagcaaa

SEQ ID NO: 280923 - RNA, 22 nt, Human
cagcgaauaggccugacucccc

SEQ ID NO: 280924 - RNA, 22 nt, Human
caggcagccagcccagagccca

SEQ ID NO: 280925 - RNA, 21 nt, Human
caggggccuggcuagucaugu

SEQ ID NO: 280926 - RNA, 27 nt, Human
caugaccgacgcacucauggcacgcag

SEQ ID NO: 280927 - RNA, 20 nt, Human
caugggaacagcagccgggc

SEQ ID NO: 280928 - RNA, 18 nt, Human
ccacagcugaagaucuug

SEQ ID NO: 280929 - RNA, 22 nt, Human
ccacagcugaagaucuugaggc

SEQ ID NO: 280930 - RNA, 20 nt, Human
ccagcccauuuuuguccuuu

SEQ ID NO: 280931 - RNA, 22 nt, Human
ccaugugguguccuggcagagc

SEQ ID NO: 280932 - RNA, 18 nt, Human
cccaagguccaggagccc

SEQ ID NO: 280933 - RNA, 18 nt, Human
cccagacgcgccgccccg

SEQ ID NO: 280934 - RNA, 20 nt, Human
cccagagaagggucugaggc

SEQ ID NO: 280935 - RNA, 21 nt, Human
cccagagcccauuucccuggg

SEQ ID NO: 280936 - RNA, 21 nt, Human
cccagccugaggggccuuagc

SEQ ID NO: 280937 - RNA, 22 nt, Human
cccauggccaggcuccuccugg

SEQ ID NO: 280938 - RNA, 19 nt, Human
ccccagagaccccacgucu

SEQ ID NO: 280939 - RNA, 25 nt, Human
ccccaggcccccgaggacagcgccc

SEQ ID NO: 280940 - RNA, 23 nt, Human
cccccgaggacagcgcccagccc

SEQ ID NO: 280941 - RNA, 24 nt, Human
ccccgggcuccgggcuccgggcuc

SEQ ID NO: 280942 - RNA, 18 nt, Human
ccccugucccacauuccc

SEQ ID NO: 280943 - RNA, 33 nt, Human
cccuugaagaaaaggcugacuuuugcuuccuuc

SEQ ID NO: 280944 - RNA, 18 nt, Human
ccgaggacagcgcccagc

SEQ ID NO: 280945 - RNA, 22 nt, Human
ccgaggacagcgcccagcccgg

SEQ ID NO: 280946 - RNA, 20 nt, Human
ccgcggcucuguccggcgcc

SEQ ID NO: 280947 - RNA, 20 nt, Human
ccggggccacaucaugaccu

SEQ ID NO: 280948 - RNA, 23 nt, Human
ccugcacagcuacaagcaaagca

SEQ ID NO: 280949 - RNA, 18 nt, Human
ccuggacacguuccgggg

SEQ ID NO: 280950 - RNA, 20 nt, Human
ccuggcuccagaccucagcc

SEQ ID NO: 280951 - RNA, 21 nt, Human
ccuggcuggcagcaaagcucu

SEQ ID NO: 280952 - RNA, 18 nt, Human
ccugggugaggaugggag

SEQ ID NO: 280953 - RNA, 23 nt, Human
ccuucugccgagcccgagaggcc

SEQ ID NO: 280954 - RNA, 18 nt, Human
cgaccucuggacaucccu

SEQ ID NO: 280955 - RNA, 19 nt, Human
cgagggucuagggcagugg

SEQ ID NO: 280956 - RNA, 23 nt, Human
cgcuggaguccgcggcucugucc

SEQ ID NO: 280957 - RNA, 19 nt, Human
cggcgaugggcccccagcu

SEQ ID NO: 280958 - RNA, 21 nt, Human
cggcuccuagcuccagaaccc

SEQ ID NO: 280959 - RNA, 26 nt, Human
cgggcuccgcucuccuccggacuccu

SEQ ID NO: 280960 - RNA, 20 nt, Human
cggggccagggcugccgccg

SEQ ID NO: 280961 - RNA, 22 nt, Human
cuccaggacagucucauccagc

SEQ ID NO: 280962 - RNA, 18 nt, Human
cuccugggacugucuucu

SEQ ID NO: 280963 - RNA, 20 nt, Human
cucugugcuggcccuguuuc

SEQ ID NO: 280964 - RNA, 18 nt, Human
cucugugggggaggaagg

SEQ ID NO: 280965 - RNA, 21 nt, Human
cugaagaucuugaggcugagg

SEQ ID NO: 280966 - RNA, 22 nt, Human
cugaagccugaguuccugggac

SEQ ID NO: 280967 - RNA, 21 nt, Human
cugaguccagagaaggcaaag

SEQ ID NO: 280968 - RNA, 21 nt, Human
cugcacagcuacaagcaaagc

SEQ ID NO: 280969 - RNA, 24 nt, Human
cugcauggcagggucugcacgugg

SEQ ID NO: 280970 - RNA, 18 nt, Human
cugccuggcugaugacca

SEQ ID NO: 280971 - RNA, 21 nt, Human
cugccuggcugaugaccaggc

SEQ ID NO: 280972 - RNA, 20 nt, Human
cugcgggacuggggcuggac

SEQ ID NO: 280973 - RNA, 19 nt, Human
cugcucugagacagggaaa

SEQ ID NO: 280974 - RNA, 21 nt, Human
cuggaguccgcggcucugucc

SEQ ID NO: 280975 - RNA, 18 nt, Human
cuggcccuguuucccugg

SEQ ID NO: 280976 - RNA, 21 nt, Human
cuggcuuucaaagaggagaug

SEQ ID NO: 280977 - RNA, 25 nt, Human
cuguggcucccagcuccuggcuggu

SEQ ID NO: 280978 - RNA, 22 nt, Human
cuucuccugggacugucuucuc

SEQ ID NO: 280979 - RNA, 26 nt, Human
cuucugccgagcccgagaggccacag

SEQ ID NO: 280980 - RNA, 21 nt, Human
gaaggccccucugugcuggcc

SEQ ID NO: 280981 - RNA, 22 nt, Human
gacacaccgcuccuucucaccu

SEQ ID NO: 280982 - RNA, 20 nt, Human
gacccauggccaggcuccuc

SEQ ID NO: 280983 - RNA, 18 nt, Human
gaccucagccugcacagc

SEQ ID NO: 280984 - RNA, 18 nt, Human
gaccucuggacaucccug

SEQ ID NO: 280985 - RNA, 25 nt, Human
gaccuggcaucuuacucagagacca

SEQ ID NO: 280986 - RNA, 24 nt, Human
gacuaugucaugggagcucugugg

SEQ ID NO: 280987 - RNA, 20 nt, Human
gagccccugggccuuggccu

SEQ ID NO: 280988 - RNA, 23 nt, Human
gaggccacagcugaagaucuuga

SEQ ID NO: 280989 - RNA, 19 nt, Human
gaggccugagcccccuccc

SEQ ID NO: 280990 - RNA, 21 nt, Human
gagggaggaggggaggcuggg

SEQ ID NO: 280991 - RNA, 18 nt, Human
gaguccagagaaggcaaa

SEQ ID NO: 280992 - RNA, 21 nt, Human
gagugggggugggcguuugag

SEQ ID NO: 280993 - RNA, 20 nt, Human
gauccuagagaccaaggagg

SEQ ID NO: 280994 - RNA, 21 nt, Human
gcaaaguggcugaacacagcc

SEQ ID NO: 280995 - RNA, 23 nt, Human
gcacugggagggcugccuggcug

SEQ ID NO: 280996 - RNA, 18 nt, Human
gcagccagcccagagccc

SEQ ID NO: 280997 - RNA, 19 nt, Human
gcaggcagccagcccagag

SEQ ID NO: 280998 - RNA, 25 nt, Human
gccccgggcuccgggcuccgggcuc

SEQ ID NO: 280999 - RNA, 21 nt, Human
gccuggcuccagaccucagcc

SEQ ID NO: 281000 - RNA, 18 nt, Human
gccugggggaggggggca

SEQ ID NO: 281001 - RNA, 21 nt, Human
gcuccgcucuccuccggacuc

SEQ ID NO: 281002 - RNA, 18 nt, Human
gcuccuggcuggucccgg

SEQ ID NO: 281003 - RNA, 22 nt, Human
gcugcaccgaccucuggacauc

SEQ ID NO: 281004 - RNA, 20 nt, Human
gcuggccucugccugacccc

SEQ ID NO: 281005 - RNA, 24 nt, Human
ggaaagccgacuucagucacagcc

SEQ ID NO: 281006 - RNA, 18 nt, Human
ggaaugcgcaccccaucc

SEQ ID NO: 281007 - RNA, 22 nt, Human
ggacaugggaacagcagccggg

SEQ ID NO: 281008 - RNA, 18 nt, Human
ggacuggggcuggacucc

SEQ ID NO: 281009 - RNA, 19 nt, Human
ggagaugggggaggggugg

SEQ ID NO: 281010 - RNA, 23 nt, Human
ggagcuuucuuggagcugccugg

SEQ ID NO: 281011 - RNA, 21 nt, Human
ggaggccggggccagggcugc

SEQ ID NO: 281012 - RNA, 18 nt, Human
ggcacugggagggcugcc

SEQ ID NO: 281013 - RNA, 18 nt, Human
ggcaggagugggcgcguc

SEQ ID NO: 281014 - RNA, 18 nt, Human
ggccggggccagggcugc

SEQ ID NO: 281015 - RNA, 21 nt, Human
ggccugaaggggcgagucagg

SEQ ID NO: 281016 - RNA, 22 nt, Human
ggccuuggccugggugaggaug

SEQ ID NO: 281017 - RNA, 25 nt, Human
ggcuccgcucuccuccggacuccca

SEQ ID NO: 281018 - RNA, 21 nt, Human
ggcuccgggcuccgcucuccu

SEQ ID NO: 281019 - RNA, 19 nt, Human
ggcucggcgcuugccacgg

SEQ ID NO: 281020 - RNA, 23 nt, Human
gggaaacugaguccagagaaggc

SEQ ID NO: 281021 - RNA, 18 nt, Human
gggagaggagcgcucucu

SEQ ID NO: 281022 - RNA, 19 nt, Human
gggaggaguuggggacagg

SEQ ID NO: 281023 - RNA, 20 nt, Human
gggaggcuggggucugggcc

SEQ ID NO: 281024 - RNA, 18 nt, Human
gggagggaggaggggagg

SEQ ID NO: 281025 - RNA, 19 nt, Human
gggcacugggagggcugcc

SEQ ID NO: 281026 - RNA, 19 nt, Human
gggcaggagugggcgcguc

SEQ ID NO: 281027 - RNA, 21 nt, Human
gggcaggugcuggagaccagg

SEQ ID NO: 281028 - RNA, 24 nt, Human
gggcgcguggcgaagaccagcggg

SEQ ID NO: 281029 - RNA, 20 nt, Human
gggcgcuggaguccgcggcu

SEQ ID NO: 281030 - RNA, 19 nt, Human
ggggaggaguuggggacag

SEQ ID NO: 281031 - RNA, 24 nt, Human
ggggagggguggggaggaguuggg

SEQ ID NO: 281032 - RNA, 18 nt, Human
gggggaggggggcauggg

SEQ ID NO: 281033 - RNA, 19 nt, Human
ggggucugggccauuccag

SEQ ID NO: 281034 - RNA, 24 nt, Human
gggugggaggggggggucccaggc

SEQ ID NO: 281035 - RNA, 26 nt, Human
ggguggggaggaguuggggacaggcc

SEQ ID NO: 281036 - RNA, 23 nt, Human
gggugugucuguggugcauggac

SEQ ID NO: 281037 - RNA, 25 nt, Human
gguggggaggaguuggggacaggcc

SEQ ID NO: 281038 - RNA, 22 nt, Human
guccagagaaggcaaaguggcu

SEQ ID NO: 281039 - RNA, 23 nt, Human
gucugagaacaaagaaaacugcc

SEQ ID NO: 281040 - RNA, 23 nt, Human
guuagggggugggaggggggggu

SEQ ID NO: 281041 - RNA, 20 nt, Human
guucagagcccagccugagg

SEQ ID NO: 281042 - RNA, 18 nt, Human
uagacagagggggugcag

SEQ ID NO: 281043 - RNA, 19 nt, Human
uagacagagggggugcagg

SEQ ID NO: 281044 - RNA, 26 nt, Human
uagcuccagaacccgugguuccuucc

SEQ ID NO: 281045 - RNA, 18 nt, Human
uauggcccaagguccagg

SEQ ID NO: 281046 - RNA, 20 nt, Human
ucacagccacagaccccgcc

SEQ ID NO: 281047 - RNA, 21 nt, Human
ucacagccacagaccccgccc

SEQ ID NO: 281048 - RNA, 22 nt, Human
ucaccugaagccugaguuccug

SEQ ID NO: 281049 - RNA, 21 nt, Human
ucagagcccagccugaggggc

SEQ ID NO: 281050 - RNA, 22 nt, Human
uccagguccucguucagagccc

SEQ ID NO: 281051 - RNA, 22 nt, Human
uccccacggcgaugggccccca

SEQ ID NO: 281052 - RNA, 24 nt, Human
uccccaggcccccgaggacagcgc

SEQ ID NO: 281053 - RNA, 23 nt, Human
ucccggccagcuucuccugggac

SEQ ID NO: 281054 - RNA, 21 nt, Human
ucccgggugggggcugcucug

SEQ ID NO: 281055 - RNA, 20 nt, Human
ucccugggguugguggcccu

SEQ ID NO: 281056 - RNA, 22 nt, Human
uccuagagaccaaggaggcgcc

SEQ ID NO: 281057 - RNA, 22 nt, Human
uccuccggacucccagcuuccg

SEQ ID NO: 281058 - RNA, 21 nt, Human
uccugugguuggagagggauu

SEQ ID NO: 281059 - RNA, 25 nt, Human
ucucaaggccccacccugaagccag

SEQ ID NO: 281060 - RNA, 18 nt, Human
ucuccaaaccgcgcgguu

SEQ ID NO: 281061 - RNA, 20 nt, Human
ucugcccucucucagagcac

SEQ ID NO: 281062 - RNA, 21 nt, Human
ucugccgagcccgagaggcca

SEQ ID NO: 281063 - RNA, 19 nt, Human
ucugugccucagcccaggg

SEQ ID NO: 281064 - RNA, 18 nt, Human
ucugugcuggcccuguuu

SEQ ID NO: 281065 - RNA, 23 nt, Human
ucugugcuggcccuguuucccug

SEQ ID NO: 281066 - RNA, 18 nt, Human
ucuguggugcauggacac

SEQ ID NO: 281067 - RNA, 24 nt, Human
ucuugaggcugaggccugagcccc

SEQ ID NO: 281068 - RNA, 18 nt, Human
ugaacacagcccaagacc

SEQ ID NO: 281069 - RNA, 20 nt, Human
ugacaaaugagucugugccu

SEQ ID NO: 281070 - RNA, 20 nt, Human
ugacccccaucaaggcuccc

SEQ ID NO: 281071 - RNA, 22 nt, Human
ugaccuggccgcaagcuaguga

SEQ ID NO: 281072 - RNA, 26 nt, Human
ugagaacaaagaaaacugccuuuugc

SEQ ID NO: 281073 - RNA, 18 nt, Human
ugagcccccucccaugug

SEQ ID NO: 281074 - RNA, 19 nt, Human
ugaggcugcccugucuggc

SEQ ID NO: 281075 - RNA, 19 nt, Human
ugcacagcuacaagcaaag

SEQ ID NO: 281076 - RNA, 21 nt, Human
ugcacagcuacaagcaaagca

SEQ ID NO: 281077 - RNA, 21 nt, Human
ugcacgugaggcccaaagcca

SEQ ID NO: 281078 - RNA, 18 nt, Human
ugccacggguuccaggug

SEQ ID NO: 281079 - RNA, 28 nt, Human
ugccuccgaucuccaaaccgcgcgguuc

SEQ ID NO: 281080 - RNA, 22 nt, Human
uggagaccaggccccugauccg

SEQ ID NO: 281081 - RNA, 24 nt, Human
uggagccuggauccuagagaccaa

SEQ ID NO: 281082 - RNA, 18 nt, Human
uggagcugccugggggag

SEQ ID NO: 281083 - RNA, 24 nt, Human
uggccaggcuccuccuggacacgu

SEQ ID NO: 281084 - RNA, 19 nt, Human
uggccucugccugaccccc

SEQ ID NO: 281085 - RNA, 18 nt, Human
uggccugggugaggaugg

SEQ ID NO: 281086 - RNA, 19 nt, Human
uggcuccagaccucagccu

SEQ ID NO: 281087 - RNA, 20 nt, Human
uggcucugaguccagguccu

SEQ ID NO: 281088 - RNA, 20 nt, Human
uggcugaacacagcccaaga

SEQ ID NO: 281089 - RNA, 24 nt, Human
ugggaacagcagccgggccgccgg

SEQ ID NO: 281090 - RNA, 18 nt, Human
ugggggagggguggggag

SEQ ID NO: 281091 - RNA, 24 nt, Human
ugggggagggguggggaggaguug

SEQ ID NO: 281092 - RNA, 19 nt, Human
ugggggugggcguuugagc

SEQ ID NO: 281093 - RNA, 18 nt, Human
ugggguugguggcccuug

SEQ ID NO: 281094 - RNA, 23 nt, Human
uggguuagggggugggagggggg

SEQ ID NO: 281095 - RNA, 22 nt, Human
uggucccggccagcuucuccug

SEQ ID NO: 281096 - RNA, 23 nt, Human
uggugcauggacacgugucccca

SEQ ID NO: 281097 - RNA, 21 nt, Human
ugucaugggagcucugugggg

SEQ ID NO: 281098 - RNA, 25 nt, Human
uguccggguccugggucgacauggc

SEQ ID NO: 281099 - RNA, 20 nt, Human
uguccuggcagagccccugg

SEQ ID NO: 281100 - RNA, 21 nt, Human
ugugcucuguggagccuggau

SEQ ID NO: 281101 - RNA, 19 nt, Human
uuccccaggcccccgagga

SEQ ID NO: 281102 - RNA, 21 nt, Human
uucccugggguugguggcccu

SEQ ID NO: 281103 - RNA, 21 nt, Human
uucccugggguugguggcccu

SEQ ID NO: 281104 - RNA, 20 nt, Human
uuccucgggcugucucccgg

SEQ ID NO: 281105 - RNA, 18 nt, Human
uugaagaaaaggcugacu

SEQ ID NO: 281106 - RNA, 24 nt, Human
uugaggcugaggccugagcccccu

SEQ ID NO: 281107 - RNA, 24 nt, Human
uugccacggguuccaggugccucc

SEQ ID NO: 281108 - RNA, 24 nt, Human
uugccgcacacuaauuucuccuug

SEQ ID NO: 281109 - RNA, 18 nt, Human
uuucuccuuguuagaggc

SEQ ID NO: 281110 - RNA, 21 nt, Human
uuugccgcacacuaauuucuc

SEQ ID NO: 281111 - RNA, 20 nt, Human
uuugcuagacucugagccca

SEQ ID NO: 281112 - RNA, 22 nt, Human
aagcugacugugccacuucauc

SEQ ID NO: 281113 - RNA, 20 nt, Human
acacgagagaaggcaagccc

SEQ ID NO: 281114 - RNA, 20 nt, Human
acccagcuguggaggggaca

SEQ ID NO: 281115 - RNA, 25 nt, Human
agaaggcaagccccucggaggacag

SEQ ID NO: 281116 - RNA, 30 nt, Human
agagaaggcaagccccucggaggacagaaa

SEQ ID NO: 281117 - RNA, 20 nt, Human
agcagcagcggggauuccag

SEQ ID NO: 281118 - RNA, 21 nt, Human
aggcuccugguaucaggguuc

SEQ ID NO: 281119 - RNA, 19 nt, Human
agggaggcccaggcuccug

SEQ ID NO: 281120 - RNA, 21 nt, Human
agggguucagggaggcccagg

SEQ ID NO: 281121 - RNA, 19 nt, Human
auggaacaggacacacagc

SEQ ID NO: 281122 - RNA, 23 nt, Human
caaccagaagcuuggcccggagc

SEQ ID NO: 281123 - RNA, 19 nt, Human
cacacagcaggaugcggag

SEQ ID NO: 281124 - RNA, 22 nt, Human
cacugagcaccucacuggacac

SEQ ID NO: 281125 - RNA, 22 nt, Human
cagaagcuuggcccggagcagc

SEQ ID NO: 281126 - RNA, 19 nt, Human
caggagcccaacaugacac

SEQ ID NO: 281127 - RNA, 24 nt, Human
caguguggucucuccccucgugcc

SEQ ID NO: 281128 - RNA, 20 nt, Human
caucaggaauccugagggcu

SEQ ID NO: 281129 - RNA, 24 nt, Human
caucaggaauccugagggcugggg

SEQ ID NO: 281130 - RNA, 20 nt, Human
ccaggcagcugaggccgagc

SEQ ID NO: 281131 - RNA, 21 nt, Human
cccaggagcccaacaugacac

SEQ ID NO: 281132 - RNA, 21 nt, Human
cccggagcagcagcggggauu

SEQ ID NO: 281133 - RNA, 18 nt, Human
ccgugcccccgccccagg

SEQ ID NO: 281134 - RNA, 22 nt, Human
ccugagggcuggggucccggag

SEQ ID NO: 281135 - RNA, 26 nt, Human
cggcuauacugaggauccccugcccc

SEQ ID NO: 281136 - RNA, 22 nt, Human
cuaggaacgcaggcucagagca

SEQ ID NO: 281137 - RNA, 19 nt, Human
cugaggauccccugccccu

SEQ ID NO: 281138 - RNA, 19 nt, Human
cuggcacccagcuguggag

SEQ ID NO: 281139 - RNA, 23 nt, Human
cuugagggaccaccccaugcccu

SEQ ID NO: 281140 - RNA, 18 nt, Human
gaaggggcugggggccaa

SEQ ID NO: 281141 - RNA, 18 nt, Human
gagcagcagcggggauuc

SEQ ID NO: 281142 - RNA, 20 nt, Human
gagcagcagcggggauucca

SEQ ID NO: 281143 - RNA, 21 nt, Human
gagcagcagcggggauuccag

SEQ ID NO: 281144 - RNA, 20 nt, Human
gaggauccccugccccuggc

SEQ ID NO: 281145 - RNA, 22 nt, Human
gcaagccccucggaggacagaa

SEQ ID NO: 281146 - RNA, 27 nt, Human
gcagcagcggggauuccaguagcugug

SEQ ID NO: 281147 - RNA, 27 nt, Human
gcaggaugcggagcagugucagaugag

SEQ ID NO: 281148 - RNA, 22 nt, Human
gcugggccuagguccuggagug

SEQ ID NO: 281149 - RNA, 21 nt, Human
gcuguguggggaaggggcugg

SEQ ID NO: 281150 - RNA, 19 nt, Human
ggaagagccacagacuugg

SEQ ID NO: 281151 - RNA, 23 nt, Human
ggaaggggcugggggccaagagg

SEQ ID NO: 281152 - RNA, 19 nt, Human
ggacagacggagaagggga

SEQ ID NO: 281153 - RNA, 24 nt, Human
ggaccugggguggcagcaaugcgu

SEQ ID NO: 281154 - RNA, 22 nt, Human
ggcugggccuagguccuggagu

SEQ ID NO: 281155 - RNA, 22 nt, Human
gugaaaugccaggccgugcccc

SEQ ID NO: 281156 - RNA, 20 nt, Human
uacaggaugcuagggcggcc

SEQ ID NO: 281157 - RNA, 20 nt, Human
ucagggaggcccaggcuccu

SEQ ID NO: 281158 - RNA, 19 nt, Human
ucauuaaucaaccagaagc

SEQ ID NO: 281159 - RNA, 23 nt, Human
uccacaaaagguaggggaagguc

SEQ ID NO: 281160 - RNA, 23 nt, Human
uccugagggcuggggucccggag

SEQ ID NO: 281161 - RNA, 22 nt, Human
ugaaaugccaggccgugccccc

SEQ ID NO: 281162 - RNA, 20 nt, Human
ugaggggcugggccuagguc

SEQ ID NO: 281163 - RNA, 19 nt, Human
ugccaggccgugcccccgc

SEQ ID NO: 281164 - RNA, 20 nt, Human
uggaagccagggguucaggg

SEQ ID NO: 281165 - RNA, 20 nt, Human
uggagacagguggaccuggg

SEQ ID NO: 281166 - RNA, 20 nt, Human
ugggacuggucuucaggggc

SEQ ID NO: 281167 - RNA, 20 nt, Human
uggggcuguguggggaaggg

SEQ ID NO: 281168 - RNA, 22 nt, Human
uggggcuguguggggaaggggc

SEQ ID NO: 281169 - RNA, 20 nt, Human
uggggucagcucugggaccc

SEQ ID NO: 281170 - RNA, 24 nt, Human
ugugaaaguggagacagguggacc

SEQ ID NO: 281171 - RNA, 21 nt, Human
uguggggaaggggcugggggc

SEQ ID NO: 281172 - RNA, 20 nt, Human
uuccagaaaguguauuugga

SEQ ID NO: 281173 - RNA, 23 nt, Human
uuguuccagaaaguguauuugga

SEQ ID NO: 281174 - RNA, 20 nt, Human
uuuuuuuuuuuuuuguucca

SEQ ID NO: 281175 - RNA, 22 nt, Human
uuuuuuuuuuuuuuuguuccag

SEQ ID NO: 281176 - RNA, 23 nt, Human
uuuuuuuuuuuuuuuuguuccag

SEQ ID NO: 281177 - RNA, 18 nt, Human
uuuuuuuuuuuuuuuuug

SEQ ID NO: 281178 - RNA, 20 nt, Human
uuuuuuuuuuuuuuuuuguu

SEQ ID NO: 281179 - RNA, 24 nt, Human
accuugcacucacucuccaagccg

SEQ ID NO: 281180 - RNA, 23 nt, Human
augcccccaggugaagaugguuu

SEQ ID NO: 281181 - RNA, 22 nt, Human
caaggcaagaaaccacgacucc

SEQ ID NO: 281182 - RNA, 23 nt, Human
caucaaggcaagaaaccacgacu

SEQ ID NO: 281183 - RNA, 20 nt, Human
cccaggggcugcccugggcu

SEQ ID NO: 281184 - RNA, 23 nt, Human
cccaggggcugcccugggcuccu

SEQ ID NO: 281185 - RNA, 20 nt, Human
cuagauagcuuuauuuuccc

SEQ ID NO: 281186 - RNA, 18 nt, Human
cuccugcccaggggcugc

SEQ ID NO: 281187 - RNA, 21 nt, Human
gaauccccgcgcgcgcuuuuc

SEQ ID NO: 281188 - RNA, 20 nt, Human
gugaagaugguuugcagcug

SEQ ID NO: 281189 - RNA, 18 nt, Human
uccagaugaaacccggcu

SEQ ID NO: 281190 - RNA, 22 nt, Human
ucuccaagccgccgugugaucu

SEQ ID NO: 281191 - RNA, 19 nt, Human
ugaagaugguuugcagcug

SEQ ID NO: 281192 - RNA, 21 nt, Human
ugcccaggggcugcccugggc

SEQ ID NO: 281193 - RNA, 22 nt, Human
aacgcaccgaagcagaaggagg

SEQ ID NO: 281194 - RNA, 20 nt, Human
acucuuuugccuuccuuucc

SEQ ID NO: 281195 - RNA, 18 nt, Human
aggacccuggcaacuacc

SEQ ID NO: 281196 - RNA, 19 nt, Human
auguguuuguugugacacu

SEQ ID NO: 281197 - RNA, 22 nt, Human
cacaaggauccugcugaagcaa

SEQ ID NO: 281198 - RNA, 21 nt, Human
cuccuccagggcucccuguaa

SEQ ID NO: 281199 - RNA, 22 nt, Human
cugcaggacccuggcaacuacc

SEQ ID NO: 281200 - RNA, 20 nt, Human
uacaagguacacuuacuugg

SEQ ID NO: 281201 - RNA, 20 nt, Human
ucccuggaccugaggguggc

SEQ ID NO: 281202 - RNA, 26 nt, Human
ugaagcaaaugacucugcuccaguca

SEQ ID NO: 281203 - RNA, 21 nt, Human
uggccucuaucccaacuccuc

SEQ ID NO: 281204 - RNA, 19 nt, Human
ugucaugagccaaauacca

SEQ ID NO: 281205 - RNA, 19 nt, Human
uucacaaaucugcucuugg

SEQ ID NO: 281206 - RNA, 20 nt, Human
uuuuacucuuuugccuuccu

SEQ ID NO: 281207 - RNA, 24 nt, Human
aaaaaaccuguacccaaaacaggc

SEQ ID NO: 281208 - RNA, 20 nt, Human
aaaaggacagaccaauaggg

SEQ ID NO: 281209 - RNA, 18 nt, Human
aaaggcacaacucaccaa

SEQ ID NO: 281210 - RNA, 20 nt, Human
aacauaaagaggccccaucu

SEQ ID NO: 281211 - RNA, 22 nt, Human
aacugaguuccuugaagucaga

SEQ ID NO: 281212 - RNA, 19 nt, Human
aagcaccccucuacccacc

SEQ ID NO: 281213 - RNA, 24 nt, Human
aagcaccccucuacccacccaaaa

SEQ ID NO: 281214 - RNA, 18 nt, Human
aagcacucaacaguguua

SEQ ID NO: 281215 - RNA, 20 nt, Human
aaggcagaaaguuugaacaa

SEQ ID NO: 281216 - RNA, 22 nt, Human
aauaaacaauagucaccauagc

SEQ ID NO: 281217 - RNA, 23 nt, Human
aauuauagaggauaugagaaaaa

SEQ ID NO: 281218 - RNA, 22 nt, Human
acaagcuaaauccaaaaaaacc

SEQ ID NO: 281219 - RNA, 22 nt, Human
acccaaaacaggcaaagcaccc

SEQ ID NO: 281220 - RNA, 21 nt, Human
acccauuaaaaauaaacaaua

SEQ ID NO: 281221 - RNA, 21 nt, Human
agaaaaaauucucccagcaaa

SEQ ID NO: 281222 - RNA, 21 nt, Human
agaaacugauuaaacgaacaa

SEQ ID NO: 281223 - RNA, 23 nt, Human
agaauaaacagaucuguauggug

SEQ ID NO: 281224 - RNA, 22 nt, Human
agcaagauucaugaacuucaau

SEQ ID NO: 281225 - RNA, 21 nt, Human
agcuaaauccaaaaaaaccug

SEQ ID NO: 281226 - RNA, 24 nt, Human
aggaaaauagaagucaauuauaga

SEQ ID NO: 281227 - RNA, 24 nt, Human
aggcagaaaguuugaacaauuaac

SEQ ID NO: 281228 - RNA, 19 nt, Human
aggcagauaauuucccaaa

SEQ ID NO: 281229 - RNA, 19 nt, Human
aggguuuugguuuuccucu

SEQ ID NO: 281230 - RNA, 22 nt, Human
aguguuacaugaauugaauuag

SEQ ID NO: 281231 - RNA, 29 nt, Human
auaaauguauuaaauuucccagagcuggu

SEQ ID NO: 281232 - RNA, 18 nt, Human
auagaaccaaaggaaaga

SEQ ID NO: 281233 - RNA, 21 nt, Human
aucagcuuucuuaccuuucuu

SEQ ID NO: 281234 - RNA, 24 nt, Human
aucccaacaauacagacacagucu

SEQ ID NO: 281235 - RNA, 19 nt, Human
auggggcucacuggaggag

SEQ ID NO: 281236 - RNA, 20 nt, Human
auuacaaauccaauuuugac

SEQ ID NO: 281237 - RNA, 20 nt, Human
caaaaaaaccuguacccaaa

SEQ ID NO: 281238 - RNA, 20 nt, Human
caccccucuacccacccaaa

SEQ ID NO: 281239 - RNA, 20 nt, Human
caccccucuacccacccaaa

SEQ ID NO: 281240 - RNA, 22 nt, Human
ccaaaaaaaccuguacccaaaa

SEQ ID NO: 281241 - RNA, 26 nt, Human
ccaaaaaaaccuguacccaaaacagg

SEQ ID NO: 281242 - RNA, 20 nt, Human
ccaacaauacagacacaguc

SEQ ID NO: 281243 - RNA, 26 nt, Human
ccauagcuaaagacugucagacauac

SEQ ID NO: 281244 - RNA, 26 nt, Human
cccaacaauacagacacagucuuaaa

SEQ ID NO: 281245 - RNA, 18 nt, Human
ccccuugcuacagaacau

SEQ ID NO: 281246 - RNA, 21 nt, Human
ccucuacccacccaaaacuca

SEQ ID NO: 281247 - RNA, 21 nt, Human
ccucuacuaacgaggaugaua

SEQ ID NO: 281248 - RNA, 23 nt, Human
ccuguacccaaaacaggcaaagc

SEQ ID NO: 281249 - RNA, 20 nt, Human
cuaaaccuaucuucaauucu

SEQ ID NO: 281250 - RNA, 21 nt, Human
cuaaauccaaaaaaaccugua

SEQ ID NO: 281251 - RNA, 24 nt, Human
cuaaauccaaaaaaaccuguaccc

SEQ ID NO: 281252 - RNA, 18 nt, Human
cuacagcuaguacaauga

SEQ ID NO: 281253 - RNA, 18 nt, Human
cucugcccaacuuugcuu

SEQ ID NO: 281254 - RNA, 21 nt, Human
cuuacaauuuaauuacaaauc

SEQ ID NO: 281255 - RNA, 19 nt, Human
cuucaguuauguaugcuga

SEQ ID NO: 281256 - RNA, 22 nt, Human
gagaggauuuuaccaacaugga

SEQ ID NO: 281257 - RNA, 25 nt, Human
gcaaagcaccccucuacccacccaa

SEQ ID NO: 281258 - RNA, 18 nt, Human
gcaccccucuacccaccc

SEQ ID NO: 281259 - RNA, 19 nt, Human
gcuacagaacaucuuccuu

SEQ ID NO: 281260 - RNA, 22 nt, Human
guaaaguauuucaguuauaaaa

SEQ ID NO: 281261 - RNA, 24 nt, Human
uaaaaauaaacaauagucaccaua

SEQ ID NO: 281262 - RNA, 22 nt, Human
uaaaaggcacaacucaccaaua

SEQ ID NO: 281263 - RNA, 20 nt, Human
uaaacaauagucaccauagc

SEQ ID NO: 281264 - RNA, 23 nt, Human
uaaacaauagucaccauagcuaa

SEQ ID NO: 281265 - RNA, 23 nt, Human
uacaaagaaaaaauucucccagc

SEQ ID NO: 281266 - RNA, 27 nt, Human
uacaaagaaaaaauucucccagcaaau

SEQ ID NO: 281267 - RNA, 24 nt, Human
uacaaagaguaagcacucaacagu

SEQ ID NO: 281268 - RNA, 21 nt, Human
uagcuaaagacugucagacau

SEQ ID NO: 281269 - RNA, 24 nt, Human
uaugguggguacaaggcuggaaaa

SEQ ID NO: 281270 - RNA, 19 nt, Human
uauuauaggagacaaaaag

SEQ ID NO: 281271 - RNA, 26 nt, Human
uauuaucaggaaacaagaaaaaugga

SEQ ID NO: 281272 - RNA, 24 nt, Human
uauuuuagaauaucaacucaguug

SEQ ID NO: 281273 - RNA, 18 nt, Human
ucaauccuuuuaaaagcu

SEQ ID NO: 281274 - RNA, 20 nt, Human
uccaagauucuggagaggau

SEQ ID NO: 281275 - RNA, 26 nt, Human
ucugaaauacccauuaaaaauaaaca

SEQ ID NO: 281276 - RNA, 24 nt, Human
ucuuuacugcuaaaccuaucuuca

SEQ ID NO: 281277 - RNA, 18 nt, Human
ugccagguguuccaagau

SEQ ID NO: 281278 - RNA, 25 nt, Human
ugccagguguuccaagauucuggag

SEQ ID NO: 281279 - RNA, 21 nt, Human
ugcccaacuuugcuuagcuga

SEQ ID NO: 281280 - RNA, 22 nt, Human
ugcuuagcugaaucaauccuuu

SEQ ID NO: 281281 - RNA, 20 nt, Human
uggaaucugaaauacccauu

SEQ ID NO: 281282 - RNA, 18 nt, Human
uggaggagcuaucagcuu

SEQ ID NO: 281283 - RNA, 26 nt, Human
uggcuaaacaugaaucuucaucucag

SEQ ID NO: 281284 - RNA, 19 nt, Human
ugguugggaaucacaucuu

SEQ ID NO: 281285 - RNA, 21 nt, Human
uguacccaaaacaggcaaagc

SEQ ID NO: 281286 - RNA, 20 nt, Human
uguauuaauauuuuaaacau

SEQ ID NO: 281287 - RNA, 23 nt, Human
uuaaaagcuuucuucuuuacugc

SEQ ID NO: 281288 - RNA, 24 nt, Human
uuauagaggauaugagaaaaagua

SEQ ID NO: 281289 - RNA, 22 nt, Human
uucaaucccaacaauacagaca

SEQ ID NO: 281290 - RNA, 21 nt, Human
uuuacaauuuuuaaaaagcuu

SEQ ID NO: 281291 - RNA, 23 nt, Human
uuuacuuuacaauuuuuaaaaag

SEQ ID NO: 281292 - RNA, 24 nt, Human
uuuuuuuuuuuaauaguccaaaug

SEQ ID NO: 281293 - RNA, 20 nt, Human
uuuuuuuuuuuuaauagucc

SEQ ID NO: 281294 - RNA, 23 nt, Human
uuuuuuuuuuuuuuuuuuaauag

SEQ ID NO: 281295 - RNA, 21 nt, Human
aaaaauagacuuuauuuacaa

SEQ ID NO: 281296 - RNA, 19 nt, Human
aaaccagccucaaaucugg

SEQ ID NO: 281297 - RNA, 25 nt, Human
aaaccagccucaaaucugguuguga

SEQ ID NO: 281298 - RNA, 22 nt, Human
aagaaaaaaggaggcaagguag

SEQ ID NO: 281299 - RNA, 21 nt, Human
aaggaccagggaccaggccag

SEQ ID NO: 281300 - RNA, 20 nt, Human
aauuaguuuccaccuggcug

SEQ ID NO: 281301 - RNA, 20 nt, Human
accccacuccugagacauag

SEQ ID NO: 281302 - RNA, 24 nt, Human
acuccaaaucccaccccagugcaa

SEQ ID NO: 281303 - RNA, 23 nt, Human
agcgcccacacuguccaugcucc

SEQ ID NO: 281304 - RNA, 21 nt, Human
agggauguuuucgauuuucug

SEQ ID NO: 281305 - RNA, 21 nt, Human
agggguuuggcuacuguuggc

SEQ ID NO: 281306 - RNA, 21 nt, Human
aguaauaacauuuagaaaaga

SEQ ID NO: 281307 - RNA, 19 nt, Human
agugcagccccccgggugg

SEQ ID NO: 281308 - RNA, 18 nt, Human
augaagaugcugcagucc

SEQ ID NO: 281309 - RNA, 23 nt, Human
caaggacccagccaucaaaacca

SEQ ID NO: 281310 - RNA, 25 nt, Human
cacaaaguccagucucucugacacc

SEQ ID NO: 281311 - RNA, 18 nt, Human
cacacuagaacaggguga

SEQ ID NO: 281312 - RNA, 21 nt, Human
caccaggacagcaggaaccag

SEQ ID NO: 281313 - RNA, 19 nt, Human
cacccaagagaggagugca

SEQ ID NO: 281314 - RNA, 19 nt, Human
cacuguccaugcuccaggc

SEQ ID NO: 281315 - RNA, 18 nt, Human
cagacagucacuccaaug

SEQ ID NO: 281316 - RNA, 18 nt, Human
cagcaucggggacacagg

SEQ ID NO: 281317 - RNA, 21 nt, Human
cagccccccggguggcgugga

SEQ ID NO: 281318 - RNA, 22 nt, Human
ccaaaucccaccccagugcaag

SEQ ID NO: 281319 - RNA, 21 nt, Human
ccacacuguccaugcuccagg

SEQ ID NO: 281320 - RNA, 21 nt, Human
ccaccaggucagacccagucc

SEQ ID NO: 281321 - RNA, 19 nt, Human
ccaggacagcaggaaccag

SEQ ID NO: 281322 - RNA, 21 nt, Human
cccaucacuccaaaucccacc

SEQ ID NO: 281323 - RNA, 22 nt, Human
cccccaaccccacuccugagac

SEQ ID NO: 281324 - RNA, 18 nt, Human
ccugggccagcuccgaga

SEQ ID NO: 281325 - RNA, 20 nt, Human
cuagauccagaggcuaagag

SEQ ID NO: 281326 - RNA, 22 nt, Human
cuccugagacauagggcccauc

SEQ ID NO: 281327 - RNA, 25 nt, Human
cuuaaaaaccuucccaucacuccuu

SEQ ID NO: 281328 - RNA, 18 nt, Human
cuucaagauuugcugucc

SEQ ID NO: 281329 - RNA, 20 nt, Human
gacccagccaucaaaaccag

SEQ ID NO: 281330 - RNA, 20 nt, Human
gagcugagagaaggcacuga

SEQ ID NO: 281331 - RNA, 19 nt, Human
gggccccugcugggcccag

SEQ ID NO: 281332 - RNA, 24 nt, Human
gucccucuucagugccauggauuc

SEQ ID NO: 281333 - RNA, 21 nt, Human
uaaaaaccuucccaucacucc

SEQ ID NO: 281334 - RNA, 18 nt, Human
uagaacagggugaucucc

SEQ ID NO: 281335 - RNA, 19 nt, Human
uagauccagaggcuaagag

SEQ ID NO: 281336 - RNA, 18 nt, Human
uaggcggaggaccaggug

SEQ ID NO: 281337 - RNA, 22 nt, Human
uagggagagcgcccacacuguc

SEQ ID NO: 281338 - RNA, 18 nt, Human
uaguuuccaccuggcugc

SEQ ID NO: 281339 - RNA, 21 nt, Human
ucaaugaucuugaugaagaug

SEQ ID NO: 281340 - RNA, 23 nt, Human
ucaaugaucuugaugaagaugcu

SEQ ID NO: 281341 - RNA, 21 nt, Human
ucacuccaaugcgccuccugg

SEQ ID NO: 281342 - RNA, 20 nt, Human
uccacacacuagaacagggu

SEQ ID NO: 281343 - RNA, 18 nt, Human
uccacagggucagccacg

SEQ ID NO: 281344 - RNA, 20 nt, Human
ucccuucuagauccagaggc

SEQ ID NO: 281345 - RNA, 21 nt, Human
ugaaggcugucccccaacccc

SEQ ID NO: 281346 - RNA, 23 nt, Human
ugacuuugcuuuaagaaaaaagg

SEQ ID NO: 281347 - RNA, 19 nt, Human
ugagagggacaguaggcgg

SEQ ID NO: 281348 - RNA, 21 nt, Human
ugagggccccugcugggccca

SEQ ID NO: 281349 - RNA, 23 nt, Human
ugcgggcaggcaucacugggucg

SEQ ID NO: 281350 - RNA, 23 nt, Human
ugcuccaggcccccugggccagc

SEQ ID NO: 281351 - RNA, 20 nt, Human
ugcugcugaaggcugucccc

SEQ ID NO: 281352 - RNA, 23 nt, Human
ugcuuuaagaaaaaaggaggcaa

SEQ ID NO: 281353 - RNA, 22 nt, Human
uggagcugcagcacagccucca

SEQ ID NO: 281354 - RNA, 22 nt, Human
uggcaggugcucccaccagguc

SEQ ID NO: 281355 - RNA, 21 nt, Human
uggcguggagugucaucuugg

SEQ ID NO: 281356 - RNA, 21 nt, Human
ugggaaagagcauccucuggc

SEQ ID NO: 281357 - RNA, 22 nt, Human
ugggaaagagcauccucuggca

SEQ ID NO: 281358 - RNA, 23 nt, Human
uguccaugcuccaggcccccugg

SEQ ID NO: 281359 - RNA, 20 nt, Human
ugucccccaaccccacuccu

SEQ ID NO: 281360 - RNA, 18 nt, Human
ugugagcugcugcugaag

SEQ ID NO: 281361 - RNA, 21 nt, Human
ugugauggagaagugacuuug

SEQ ID NO: 281362 - RNA, 24 nt, Human
uguucacccaagagaggagugcag

SEQ ID NO: 281363 - RNA, 30 nt, Human
uuaaaaaccuucccaucacuccaaaucccu

SEQ ID NO: 281364 - RNA, 18 nt, Human
uucuggggaagagggaug

SEQ ID NO: 281365 - RNA, 27 nt, Human
aaaaacaaagggagauugccgguaccc

SEQ ID NO: 281366 - RNA, 21 nt, Human
aaacaaaacccaccaagaccc

SEQ ID NO: 281367 - RNA, 24 nt, Human
aaaccacucuucuugaucucuaau

SEQ ID NO: 281368 - RNA, 22 nt, Human
aaacccaccaagacccauauua

SEQ ID NO: 281369 - RNA, 21 nt, Human
aaacuacaaccuagugacugu

SEQ ID NO: 281370 - RNA, 22 nt, Human
aaaggauaaaacaaaacccacc

SEQ ID NO: 281371 - RNA, 21 nt, Human
aacaaaacccaccaagaccca

SEQ ID NO: 281372 - RNA, 23 nt, Human
aaccaggacaauacugcuuuucc

SEQ ID NO: 281373 - RNA, 27 nt, Human
aacuucucccccaaaauauagcucugg

SEQ ID NO: 281374 - RNA, 19 nt, Human
aagaggacacacacaaagc

SEQ ID NO: 281375 - RNA, 21 nt, Human
aagccucaguuuccucauuug

SEQ ID NO: 281376 - RNA, 22 nt, Human
aauccccauccccacaaaacuc

SEQ ID NO: 281377 - RNA, 21 nt, Human
accaagacccauauuacaaac

SEQ ID NO: 281378 - RNA, 22 nt, Human
acuacaaccuagugacuguauu

SEQ ID NO: 281379 - RNA, 22 nt, Human
agaaaacaagcuagggauccug

SEQ ID NO: 281380 - RNA, 23 nt, Human
agauauauucucuauagagcaua

SEQ ID NO: 281381 - RNA, 18 nt, Human
agauugcuuugcuuccug

SEQ ID NO: 281382 - RNA, 21 nt, Human
agcgugccucucuguucccca

SEQ ID NO: 281383 - RNA, 22 nt, Human
agcuuccagccuuuccucuuuu

SEQ ID NO: 281384 - RNA, 25 nt, Human
aggcagcuuuucucuaggaaugcuu

SEQ ID NO: 281385 - RNA, 18 nt, Human
aggcaggugaauggccug

SEQ ID NO: 281386 - RNA, 23 nt, Human
auaaaacaaaacccaccaagacc

SEQ ID NO: 281387 - RNA, 19 nt, Human
auaugcccuccugggaauu

SEQ ID NO: 281388 - RNA, 22 nt, Human
auccccacaaaacucaugggaa

SEQ ID NO: 281389 - RNA, 19 nt, Human
auucuguuacucaaaaugg

SEQ ID NO: 281390 - RNA, 18 nt, Human
caaaacccaccaagaccc

SEQ ID NO: 281391 - RNA, 24 nt, Human
caaaauggaagcucaacuucuccc

SEQ ID NO: 281392 - RNA, 19 nt, Human
caagauacauagccauaau

SEQ ID NO: 281393 - RNA, 21 nt, Human
caauaugguaaccuguguucc

SEQ ID NO: 281394 - RNA, 25 nt, Human
caauaugguaaccuguguucccuuc

SEQ ID NO: 281395 - RNA, 23 nt, Human
cacacaaagcuaauaaaaccaga

SEQ ID NO: 281396 - RNA, 21 nt, Human
cacacacaaagcuaauaaaac

SEQ ID NO: 281397 - RNA, 25 nt, Human
caccaagacccauauuacaaaccaa

SEQ ID NO: 281398 - RNA, 23 nt, Human
caccaagccucaguuuccucauu

SEQ ID NO: 281399 - RNA, 19 nt, Human
cacucuuccccggaagaag

SEQ ID NO: 281400 - RNA, 21 nt, Human
cagccuuuccucuuuuuauuu

SEQ ID NO: 281401 - RNA, 24 nt, Human
cagcuuccagccuuuccucuuuuu

SEQ ID NO: 281402 - RNA, 18 nt, Human
caggagacaaagucuguu

SEQ ID NO: 281403 - RNA, 24 nt, Human
ccaccaagacccauauuacaaacc

SEQ ID NO: 281404 - RNA, 20 nt, Human
cccacaaaacucaugggaac

SEQ ID NO: 281405 - RNA, 23 nt, Human
cccacaaaacucaugggaacaaa

SEQ ID NO: 281406 - RNA, 27 nt, Human
cccaccaagacccauauuacaaaccaa

SEQ ID NO: 281407 - RNA, 21 nt, Human
cccgaccaacucaagcgcccu

SEQ ID NO: 281408 - RNA, 24 nt, Human
ccggaagaaguugcuuaagccuca

SEQ ID NO: 281409 - RNA, 24 nt, Human
ccugagcacaaaccacucuucuug

SEQ ID NO: 281410 - RNA, 24 nt, Human
cucacaguacucugggccuggacu

SEQ ID NO: 281411 - RNA, 18 nt, Human
cugccgcugcccccgacc

SEQ ID NO: 281412 - RNA, 21 nt, Human
ggccugaaaaacaaagggaga

SEQ ID NO: 281413 - RNA, 28 nt, Human
gggauuagugaaaagaguaccgguaccc

SEQ ID NO: 281414 - RNA, 20 nt, Human
gggguuugggggaagaggac

SEQ ID NO: 281415 - RNA, 23 nt, Human
ggugaauggccugaaaaacaaag

SEQ ID NO: 281416 - RNA, 20 nt, Human
gucaaggggauguucucacc

SEQ ID NO: 281417 - RNA, 21 nt, Human
gugcuacuuacaaugaaugac

SEQ ID NO: 281418 - RNA, 22 nt, Human
uaaaaaaaacuacaaccuagug

SEQ ID NO: 281419 - RNA, 25 nt, Human
uaaaaaaaacuacaaccuagugacu

SEQ ID NO: 281420 - RNA, 18 nt, Human
uaaaacaaaacccaccaa

SEQ ID NO: 281421 - RNA, 21 nt, Human
uaaaacaaaacccaccaagac

SEQ ID NO: 281422 - RNA, 22 nt, Human
uaaaacaaaacccaccaagacc

SEQ ID NO: 281423 - RNA, 21 nt, Human
uaaaaccagaauccccauccc

SEQ ID NO: 281424 - RNA, 20 nt, Human
uaaaaccaggacaauacugc

SEQ ID NO: 281425 - RNA, 25 nt, Human
uaaaggauaaaacaaaacccaccaa

SEQ ID NO: 281426 - RNA, 24 nt, Human
uaacuucaccaagccucaguuucc

SEQ ID NO: 281427 - RNA, 19 nt, Human
uaaggaaacugcagcaaua

SEQ ID NO: 281428 - RNA, 24 nt, Human
uaauaaaaccagaauccccauccc

SEQ ID NO: 281429 - RNA, 22 nt, Human
uacaacuagccccuuuaccuuu

SEQ ID NO: 281430 - RNA, 22 nt, Human
uacaggccacuacugacaggag

SEQ ID NO: 281431 - RNA, 19 nt, Human
uacccccugcucccugucu

SEQ ID NO: 281432 - RNA, 18 nt, Human
uagugaaaagaguacuaa

SEQ ID NO: 281433 - RNA, 24 nt, Human
uaguguuaaaggauuaacauaagg

SEQ ID NO: 281434 - RNA, 22 nt, Human
uccccacaaaacucaugggaac

SEQ ID NO: 281435 - RNA, 21 nt, Human
uccccauccccacaaaacuca

SEQ ID NO: 281436 - RNA, 26 nt, Human
ucccccaaaauauagcucugcugggc

SEQ ID NO: 281437 - RNA, 22 nt, Human
uccuaagugaggcgucugagga

SEQ ID NO: 281438 - RNA, 25 nt, Human
ucuaggaaugcuuuuucccaugucu

SEQ ID NO: 281439 - RNA, 26 nt, Human
ucucuaauacaggccacuacugacag

SEQ ID NO: 281440 - RNA, 23 nt, Human
ucucuaggaaugcuuuuucccau

SEQ ID NO: 281441 - RNA, 21 nt, Human
ucuguuacucaaaauggaagc

SEQ ID NO: 281442 - RNA, 19 nt, Human
ugaaaaacaaagggagauu

SEQ ID NO: 281443 - RNA, 23 nt, Human
ugaaaagaguacuaaucaggaga

SEQ ID NO: 281444 - RNA, 19 nt, Human
ugaaucuuggcugugcccu

SEQ ID NO: 281445 - RNA, 21 nt, Human
ugacagaaaacaagcuaggga

SEQ ID NO: 281446 - RNA, 19 nt, Human
ugacaggaggcaggugaaa

SEQ ID NO: 281447 - RNA, 21 nt, Human
ugaccgcuacccccugcuccc

SEQ ID NO: 281448 - RNA, 19 nt, Human
ugagcacaaaccacucuuc

SEQ ID NO: 281449 - RNA, 22 nt, Human
ugcccccgaccaacucaagcgc

SEQ ID NO: 281450 - RNA, 24 nt, Human
ugcuuugcuuccuguuguguuuua

SEQ ID NO: 281451 - RNA, 24 nt, Human
uggaagcucaacuucucccccaaa

SEQ ID NO: 281452 - RNA, 21 nt, Human
uggacuuguuccuugggaccu

SEQ ID NO: 281453 - RNA, 18 nt, Human
ugggcaguugcugauaug

SEQ ID NO: 281454 - RNA, 20 nt, Human
ugguaugauuaugucauguu

SEQ ID NO: 281455 - RNA, 23 nt, Human
ugucugcagcuuccagccuuucc

SEQ ID NO: 281456 - RNA, 22 nt, Human
uguuuugcuccuuugaccgcua

SEQ ID NO: 281457 - RNA, 20 nt, Human
uucaaaaguaaaaaugagau

SEQ ID NO: 281458 - RNA, 18 nt, Human
uuccuugggaccuuuggg

SEQ ID NO: 281459 - RNA, 18 nt, Human
uucuaugguaugauuaug

SEQ ID NO: 281460 - RNA, 26 nt, Human
uucucccccaaaauauagcucugcug

SEQ ID NO: 281461 - RNA, 25 nt, Human
uuuaaaggauaaaacaaaacccacc

SEQ ID NO: 281462 - RNA, 24 nt, Human
uuuuuuuuuuuuuuuucuaccaug

SEQ ID NO: 281463 - RNA, 29 nt, Human
aaacaacaaaaaaaucucuaacacaaaaa

SEQ ID NO: 281464 - RNA, 22 nt, Human
aaagagguucuauacaaagcca

SEQ ID NO: 281465 - RNA, 19 nt, Human
aacgaaagagaaaggagga

SEQ ID NO: 281466 - RNA, 19 nt, Human
aagacuaaacaaacaacaa

SEQ ID NO: 281467 - RNA, 19 nt, Human
aagauuuccaaauggauuu

SEQ ID NO: 281468 - RNA, 22 nt, Human
aaguccuuagcacggaccauuc

SEQ ID NO: 281469 - RNA, 20 nt, Human
aauaaugaaaaaggcaagac

SEQ ID NO: 281470 - RNA, 25 nt, Human
acaacaaaaaaaucucuaacacaaa

SEQ ID NO: 281471 - RNA, 21 nt, Human
acaagacuaaacaaacaacaa

SEQ ID NO: 281472 - RNA, 19 nt, Human
acaccagcacaaacucagc

SEQ ID NO: 281473 - RNA, 22 nt, Human
agaauuccucagauauaauuac

SEQ ID NO: 281474 - RNA, 22 nt, Human
agacuaaacaaacaacaaaaaa

SEQ ID NO: 281475 - RNA, 24 nt, Human
agacuaaacaaacaacaaaaaaau

SEQ ID NO: 281476 - RNA, 22 nt, Human
agggcaccagcuguuguuaaaa

SEQ ID NO: 281477 - RNA, 24 nt, Human
auaaaauaaugaaaaaggcaagac

SEQ ID NO: 281478 - RNA, 23 nt, Human
caaaacuggaucagaaaagccaa

SEQ ID NO: 281479 - RNA, 20 nt, Human
caaaagucaccacagaccau

SEQ ID NO: 281480 - RNA, 23 nt, Human
caacuuuaagaauccccaauuuu

SEQ ID NO: 281481 - RNA, 20 nt, Human
caagacaggugauaggagaa

SEQ ID NO: 281482 - RNA, 19 nt, Human
caaguccuuagcacggacc

SEQ ID NO: 281483 - RNA, 23 nt, Human
cacacauacaccagcacaaacuc

SEQ ID NO: 281484 - RNA, 22 nt, Human
cagauaaccccagcacaaagua

SEQ ID NO: 281485 - RNA, 24 nt, Human
cagcacaaacucagcauagaaauc

SEQ ID NO: 281486 - RNA, 18 nt, Human
ccaaaaaguacagaaaca

SEQ ID NO: 281487 - RNA, 19 nt, Human
ccagcacaaacucagcaua

SEQ ID NO: 281488 - RNA, 20 nt, Human
ccaguaucugaaagcagggc

SEQ ID NO: 281489 - RNA, 19 nt, Human
ccccaauuuuuuuuuuaaa

SEQ ID NO: 281490 - RNA, 18 nt, Human
cuucacacauacaccagc

SEQ ID NO: 281491 - RNA, 24 nt, Human
gacaagacuaaacaaacaacaaaa

SEQ ID NO: 281492 - RNA, 19 nt, Human
gcacaaaguacaauccagu

SEQ ID NO: 281493 - RNA, 23 nt, Human
ggaaaauuccaaaauuaaagaag

SEQ ID NO: 281494 - RNA, 18 nt, Human
ggugaggcaggguggggc

SEQ ID NO: 281495 - RNA, 18 nt, Human
uaaccccagcacaaagua

SEQ ID NO: 281496 - RNA, 23 nt, Human
uaauaaaauaaugaaaaaggcaa

SEQ ID NO: 281497 - RNA, 30 nt, Human
uaaucaggcuuccucuaucagaaaaguuuu

SEQ ID NO: 281498 - RNA, 23 nt, Human
uacagaauucuaaucuauacaga

SEQ ID NO: 281499 - RNA, 24 nt, Human
uacauaauaaaaucugagacaaga

SEQ ID NO: 281500 - RNA, 19 nt, Human
uauacagaauuccucagau

SEQ ID NO: 281501 - RNA, 22 nt, Human
uaugccaaaaaguacagaaaca

SEQ ID NO: 281502 - RNA, 22 nt, Human
ucaacacucucuaaucuauaca

SEQ ID NO: 281503 - RNA, 21 nt, Human
ucauccguuucaacacucucu

SEQ ID NO: 281504 - RNA, 23 nt, Human
ugaaaaaggcaagacaggugaua

SEQ ID NO: 281505 - RNA, 24 nt, Human
ugaacuagaucuaacaaguccuua

SEQ ID NO: 281506 - RNA, 22 nt, Human
ugacuucagauaaccccagcac

SEQ ID NO: 281507 - RNA, 27 nt, Human
ugauaggagaaugaaaauauagaaaua

SEQ ID NO: 281508 - RNA, 21 nt, Human
ugccaaaaaguacagaaacaa

SEQ ID NO: 281509 - RNA, 22 nt, Human
ugccaaaaaguacagaaacaaa

SEQ ID NO: 281510 - RNA, 18 nt, Human
ugggugaggcaggguggg

SEQ ID NO: 281511 - RNA, 18 nt, Human
uguaacgaaagagaaagg

SEQ ID NO: 281512 - RNA, 28 nt, Human
uucaacacucucuaaucuauacagaauu

SEQ ID NO: 281513 - RNA, 26 nt, Human
uugguccaaacaaaacuggaucagaa

SEQ ID NO: 281514 - RNA, 21 nt, Human
uuuuuuuuaaagauuuccaaa

SEQ ID NO: 281515 - RNA, 23 nt, Human
aaaaaugcagccaacagugccau

SEQ ID NO: 281516 - RNA, 21 nt, Human
aaaaugcagccaacagugcca

SEQ ID NO: 281517 - RNA, 22 nt, Human
auaaaacggaugaaaguauauc

SEQ ID NO: 281518 - RNA, 24 nt, Human
ccaaaaaugcagccaacagugcca

SEQ ID NO: 281519 - RNA, 22 nt, Human
uacagaucauaaaacggaugaa

SEQ ID NO: 281520 - RNA, 22 nt, Human
ugaaaagaagcugcuugcuggu

SEQ ID NO: 281521 - RNA, 18 nt, Human
aacgcugccacccacgcc

SEQ ID NO: 281522 - RNA, 22 nt, Human
acgcugccacccacgccuugcc

SEQ ID NO: 281523 - RNA, 20 nt, Human
agccaacgcugccacccacg

SEQ ID NO: 281524 - RNA, 19 nt, Human
caacgcugccacccacgcc

SEQ ID NO: 281525 - RNA, 24 nt, Human
cccacgccuugcccacggaaccca

SEQ ID NO: 281526 - RNA, 20 nt, Human
cccacggaacccaggccgcu

SEQ ID NO: 281527 - RNA, 25 nt, Human
cccacggaacccaggccgcucgaca

SEQ ID NO: 281528 - RNA, 23 nt, Human
gaacagccugcuccagcauuucu

SEQ ID NO: 281529 - RNA, 20 nt, Human
gaacccaggccgcucgacag

SEQ ID NO: 281530 - RNA, 20 nt, Human
ggaagaagcugaggaugcgg

SEQ ID NO: 281531 - RNA, 18 nt, Human
gggaagaagcugaggaug

SEQ ID NO: 281532 - RNA, 20 nt, Human
gggaucgaaaggccugcuga

SEQ ID NO: 281533 - RNA, 23 nt, Human
ucccagggaucgaaaggccugcu

SEQ ID NO: 281534 - RNA, 19 nt, Human
ugggagggaaaacccaaca

SEQ ID NO: 281535 - RNA, 26 nt, Human
uugauggcaacgucggucugaacagc

SEQ ID NO: 281536 - RNA, 21 nt, Human
uugguuucuguuguuucuuuc

SEQ ID NO: 281537 - RNA, 20 nt, Human
uuuuuuuuuuuuuuguacgg

SEQ ID NO: 281538 - RNA, 21 nt, Human
uuuuuuuuuuuuuuguacgga

SEQ ID NO: 281539 - RNA, 23 nt, Human
acuuuaaggggcgguggaagcag

SEQ ID NO: 281540 - RNA, 21 nt, Human
agcggcgcaggggucuggagc

SEQ ID NO: 281541 - RNA, 22 nt, Human
cagcggcgcaggggucuggagc

SEQ ID NO: 281542 - RNA, 19 nt, Human
ccacauuaaucuuccucac

SEQ ID NO: 281543 - RNA, 18 nt, Human
ccgcugcacucgcugggu

SEQ ID NO: 281544 - RNA, 21 nt, Human
cugcgcugcggaacucagagg

SEQ ID NO: 281545 - RNA, 19 nt, Human
cuggagcccgcaggggucg

SEQ ID NO: 281546 - RNA, 19 nt, Human
gaacucagaggacuuagug

SEQ ID NO: 281547 - RNA, 20 nt, Human
gagaagaaaaacugacuaac

SEQ ID NO: 281548 - RNA, 23 nt, Human
gcgcagcggcgcaggggucugga

SEQ ID NO: 281549 - RNA, 24 nt, Human
uaaggggcgguggaagcagcagca

SEQ ID NO: 281550 - RNA, 20 nt, Human
ucaaagaagagaagaaaaac

SEQ ID NO: 281551 - RNA, 20 nt, Human
ucggccgcuuccggugcugc

SEQ ID NO: 281552 - RNA, 22 nt, Human
uucuuagaaugucaaagaagag

SEQ ID NO: 281553 - RNA, 20 nt, Human
aaaaacgcaaagcacacagc

SEQ ID NO: 281554 - RNA, 24 nt, Human
aaacaaacaaacaaguaucuugcc

SEQ ID NO: 281555 - RNA, 28 nt, Human
aaacaaguaucuugccacaaccccaaac

SEQ ID NO: 281556 - RNA, 22 nt, Human
aaacgcaaagcacacagcgauc

SEQ ID NO: 281557 - RNA, 21 nt, Human
aaacggcuagcacaggauagc

SEQ ID NO: 281558 - RNA, 22 nt, Human
aaagaaagaaacaaacaaacaa

SEQ ID NO: 281559 - RNA, 19 nt, Human
aaagugcugagauuacagg

SEQ ID NO: 281560 - RNA, 20 nt, Human
aaagugcugagauuacaggg

SEQ ID NO: 281561 - RNA, 24 nt, Human
aaagugcugagauuacagggguga

SEQ ID NO: 281562 - RNA, 21 nt, Human
aagaaagaaacaaacaaacaa

SEQ ID NO: 281563 - RNA, 20 nt, Human
aagugccacccaagguacag

SEQ ID NO: 281564 - RNA, 21 nt, Human
aagugcugagauuacaggggu

SEQ ID NO: 281565 - RNA, 26 nt, Human
aagugcugagauuacaggggugagcc

SEQ ID NO: 281566 - RNA, 20 nt, Human
acacugggcuucauuguucu

SEQ ID NO: 281567 - RNA, 22 nt, Human
acaggcguccaccacaccugac

SEQ ID NO: 281568 - RNA, 24 nt, Human
accauguuggccaggcuggucucg

SEQ ID NO: 281569 - RNA, 18 nt, Human
acgggguuucaccauguu

SEQ ID NO: 281570 - RNA, 23 nt, Human
acgggguuucaccauguuggcca

SEQ ID NO: 281571 - RNA, 24 nt, Human
acgggguuucaccauguuggccag

SEQ ID NO: 281572 - RNA, 25 nt, Human
agaauucagcaaaguauaaagacaa

SEQ ID NO: 281573 - RNA, 20 nt, Human
agacaaauacaaaagaugcu

SEQ ID NO: 281574 - RNA, 21 nt, Human
agacaaauacaaaagaugcuu

SEQ ID NO: 281575 - RNA, 19 nt, Human
agaggaggugaggcccaag

SEQ ID NO: 281576 - RNA, 24 nt, Human
agagucucuguugccuaggcugga

SEQ ID NO: 281577 - RNA, 23 nt, Human
agauuacaggggugagccacugc

SEQ ID NO: 281578 - RNA, 19 nt, Human
agcaaaguauaaagacaaa

SEQ ID NO: 281579 - RNA, 22 nt, Human
aggcugcugccugggcagaagg

SEQ ID NO: 281580 - RNA, 25 nt, Human
aggcuggagugcaguggugugaucu

SEQ ID NO: 281581 - RNA, 21 nt, Human
agggaccugcgggccccaggg

SEQ ID NO: 281582 - RNA, 23 nt, Human
aguauaaagacaaauacaaaaga

SEQ ID NO: 281583 - RNA, 24 nt, Human
agucucuguugccuaggcuggagu

SEQ ID NO: 281584 - RNA, 24 nt, Human
agugauucuccugccucagccucc

SEQ ID NO: 281585 - RNA, 23 nt, Human
agugcaguggugugaucuugguu

SEQ ID NO: 281586 - RNA, 24 nt, Human
agugcaguggugugaucuugguuc

SEQ ID NO: 281587 - RNA, 20 nt, Human
aguuucuuuuuuuuuuuuuu

SEQ ID NO: 281588 - RNA, 23 nt, Human
auccgucggugucugcagccuug

SEQ ID NO: 281589 - RNA, 23 nt, Human
auccgucggugucugcagccuug

SEQ ID NO: 281590 - RNA, 23 nt, Human
augaaagccacagaagccacacc

SEQ ID NO: 281591 - RNA, 19 nt, Human
augacacccaugacuaugc

SEQ ID NO: 281592 - RNA, 20 nt, Human
augcuuuggagagaguggcu

SEQ ID NO: 281593 - RNA, 24 nt, Human
auuuuuguauuuuuaguagagacg

SEQ ID NO: 281594 - RNA, 21 nt, Human
caaaagaugcuugggauacaa

SEQ ID NO: 281595 - RNA, 23 nt, Human
caaagauacucaaaugaaagcca

SEQ ID NO: 281596 - RNA, 24 nt, Human
caaagugcugagauuacaggggug

SEQ ID NO: 281597 - RNA, 18 nt, Human
caacagggcgcauucccc

SEQ ID NO: 281598 - RNA, 21 nt, Human
caacugccuuucccgcccuuu

SEQ ID NO: 281599 - RNA, 22 nt, Human
caagaccaucagcacuucucca

SEQ ID NO: 281600 - RNA, 22 nt, Human
caagcucacacucgaaaacuag

SEQ ID NO: 281601 - RNA, 20 nt, Human
caagugauucuccugccuca

SEQ ID NO: 281602 - RNA, 22 nt, Human
caagugauucuccugccucagc

SEQ ID NO: 281603 - RNA, 26 nt, Human
cacaaccccaaacuacagacaacagg

SEQ ID NO: 281604 - RNA, 19 nt, Human
cacaggcguccaccacacc

SEQ ID NO: 281605 - RNA, 22 nt, Human
cacaguggauuuuacuguaacu

SEQ ID NO: 281606 - RNA, 21 nt, Human
caccauguuggccaggcuggu

SEQ ID NO: 281607 - RNA, 24 nt, Human
caccauguuggccaggcuggucuc

SEQ ID NO: 281608 - RNA, 27 nt, Human
caccauguuggccaggcuggucucgaa

SEQ ID NO: 281609 - RNA, 23 nt, Human
cacccugugugugcaggccccuc

SEQ ID NO: 281610 - RNA, 18 nt, Human
caccugacuaauuuuugu

SEQ ID NO: 281611 - RNA, 18 nt, Human
cacugcaacaccuccugg

SEQ ID NO: 281612 - RNA, 21 nt, Human
cagaaggcccagaauacccuc

SEQ ID NO: 281613 - RNA, 24 nt, Human
cagacaacagggcgcauuccccuc

SEQ ID NO: 281614 - RNA, 19 nt, Human
caggcucagggugcuacgg

SEQ ID NO: 281615 - RNA, 20 nt, Human
cagucaugugaaagaaagaa

SEQ ID NO: 281616 - RNA, 23 nt, Human
caugaacucccuagggaccugcg

SEQ ID NO: 281617 - RNA, 20 nt, Human
caugaggcugcugccugggc

SEQ ID NO: 281618 - RNA, 24 nt, Human
cauguuggccaggcuggucucgaa

SEQ ID NO: 281619 - RNA, 24 nt, Human
ccaaagugcugagauuacaggggu

SEQ ID NO: 281620 - RNA, 22 nt, Human
ccacacccaugaggcugcugcc

SEQ ID NO: 281621 - RNA, 18 nt, Human
ccacugcgcccugacuug

SEQ ID NO: 281622 - RNA, 19 nt, Human
ccacugcgcccugacuugg

SEQ ID NO: 281623 - RNA, 22 nt, Human
cccaaacuacagacaacagggc

SEQ ID NO: 281624 - RNA, 18 nt, Human
cccacgacccuggcuggg

SEQ ID NO: 281625 - RNA, 19 nt, Human
ccccucagcugaccugucu

SEQ ID NO: 281626 - RNA, 23 nt, Human
ccccucaugaacucccuagggac

SEQ ID NO: 281627 - RNA, 19 nt, Human
cccgaguagcugagauuga

SEQ ID NO: 281628 - RNA, 22 nt, Human
cccgccuuggccacccaaagug

SEQ ID NO: 281629 - RNA, 22 nt, Human
cccuccuaaauggaaaaacgca

SEQ ID NO: 281630 - RNA, 18 nt, Human
cccuggcugggaccaaga

SEQ ID NO: 281631 - RNA, 22 nt, Human
ccgccucuccuugcugcagcca

SEQ ID NO: 281632 - RNA, 22 nt, Human
ccgccucuccuugcugcagcca

SEQ ID NO: 281633 - RNA, 24 nt, Human
ccgccucuccuugcugcagccaug

SEQ ID NO: 281634 - RNA, 24 nt, Human
ccgccucuccuugcugcagccaug

SEQ ID NO: 281635 - RNA, 19 nt, Human
ccuaggcuggagugcagug

SEQ ID NO: 281636 - RNA, 24 nt, Human
ccuccuggguucaagugauucucc

SEQ ID NO: 281637 - RNA, 18 nt, Human
ccugagcuucggguagcu

SEQ ID NO: 281638 - RNA, 23 nt, Human
ccugccucagccucccgaguagc

SEQ ID NO: 281639 - RNA, 19 nt, Human
ccugcgcucuccgcuccca

SEQ ID NO: 281640 - RNA, 22 nt, Human
ccugggccaggcaaaaggcagg

SEQ ID NO: 281641 - RNA, 23 nt, Human
ccuggguucaagugauucuccuc

SEQ ID NO: 281642 - RNA, 23 nt, Human
ccuggguucaagugauucuccug

SEQ ID NO: 281643 - RNA, 21 nt, Human
ccuucuuucuucagccgaggc

SEQ ID NO: 281644 - RNA, 22 nt, Human
cgcaguaggugaaaaggggcca

SEQ ID NO: 281645 - RNA, 24 nt, Human
cgggguuucaccauguuggccagg

SEQ ID NO: 281646 - RNA, 23 nt, Human
cuaauuuuuguauuuuuaguaga

SEQ ID NO: 281647 - RNA, 26 nt, Human
cuccugaccucaagucaucugcccgc

SEQ ID NO: 281648 - RNA, 20 nt, Human
cuccuggguucaagugauuc

SEQ ID NO: 281649 - RNA, 21 nt, Human
cuccuggguucaagugauucu

SEQ ID NO: 281650 - RNA, 19 nt, Human
cucuguugccuaggcugga

SEQ ID NO: 281651 - RNA, 23 nt, Human
cugcccaugggaacucacaaucu

SEQ ID NO: 281652 - RNA, 23 nt, Human
cugccucagccucccgaguagcu

SEQ ID NO: 281653 - RNA, 20 nt, Human
cugggaccaagaccaucagc

SEQ ID NO: 281654 - RNA, 20 nt, Human
cugguggcggcagcuacucu

SEQ ID NO: 281655 - RNA, 20 nt, Human
cugguggcggcagcuacucu

SEQ ID NO: 281656 - RNA, 28 nt, Human
cugguggcggcagcuacucuggcucccu

SEQ ID NO: 281657 - RNA, 29 nt, Human
cugguggcggcagcuacucuggcucccuu

SEQ ID NO: 281658 - RNA, 21 nt, Human
cuucuccaacugccuuucccg

SEQ ID NO: 281659 - RNA, 24 nt, Human
gaccucaagucaucugcccgccuu

SEQ ID NO: 281660 - RNA, 24 nt, Human
gagacgggguuucaccauguuggc

SEQ ID NO: 281661 - RNA, 19 nt, Human
gagccugggccaggcaaaa

SEQ ID NO: 281662 - RNA, 19 nt, Human
gaggcugcugccugggcag

SEQ ID NO: 281663 - RNA, 20 nt, Human
gaggugaggcccaagguggg

SEQ ID NO: 281664 - RNA, 20 nt, Human
gaguuucuuuuuuuuuuuuu

SEQ ID NO: 281665 - RNA, 18 nt, Human
gauuacaggggugagcca

SEQ ID NO: 281666 - RNA, 22 nt, Human
gauuacaggggugagccacugc

SEQ ID NO: 281667 - RNA, 23 nt, Human
gcagucaugugaaagaaagaaac

SEQ ID NO: 281668 - RNA, 18 nt, Human
gccgaggccgccgccgcc

SEQ ID NO: 281669 - RNA, 18 nt, Human
gccgaggccgccgccgcc

SEQ ID NO: 281670 - RNA, 24 nt, Human
gccuaggcuggagugcaguggugu

SEQ ID NO: 281671 - RNA, 23 nt, Human
gcuggucucgaacuccugaccuc

SEQ ID NO: 281672 - RNA, 19 nt, Human
ggcgcccaucugugguucc

SEQ ID NO: 281673 - RNA, 22 nt, Human
ggcuggagugcaguggugugau

SEQ ID NO: 281674 - RNA, 24 nt, Human
ggcuggucucgaacuccugaccuc

SEQ ID NO: 281675 - RNA, 18 nt, Human
gggaagauuucuucuuuc

SEQ ID NO: 281676 - RNA, 24 nt, Human
gggcagucaugugaaagaaagaaa

SEQ ID NO: 281677 - RNA, 23 nt, Human
gggguuucaccauguuggccagg

SEQ ID NO: 281678 - RNA, 19 nt, Human
ggucucgaacuccugaccu

SEQ ID NO: 281679 - RNA, 20 nt, Human
gguggguggucgcaguaggu

SEQ ID NO: 281680 - RNA, 23 nt, Human
guagagacgggguuucaccaugu

SEQ ID NO: 281681 - RNA, 21 nt, Human
gucucuguugccuaggcugga

SEQ ID NO: 281682 - RNA, 24 nt, Human
gugauucuccugccucagccuccc

SEQ ID NO: 281683 - RNA, 23 nt, Human
guggcugcccccacgacccuggc

SEQ ID NO: 281684 - RNA, 27 nt, Human
guuucuuuuuuuuuuuuuuuuuuuuga

SEQ ID NO: 281685 - RNA, 24 nt, Human
uaacagcgagacgaggcacaaacg

SEQ ID NO: 281686 - RNA, 24 nt, Human
uaauuuuuguauuuuuaguagaga

SEQ ID NO: 281687 - RNA, 23 nt, Human
uacaggggugagccacugcgccc

SEQ ID NO: 281688 - RNA, 24 nt, Human
uacaggggugagccacugcgcccu

SEQ ID NO: 281689 - RNA, 25 nt, Human
uacaguaauagguauuucagagaag

SEQ ID NO: 281690 - RNA, 22 nt, Human
uagagacgggguuucaccaugu

SEQ ID NO: 281691 - RNA, 19 nt, Human
uagaggaggugaggcccaa

SEQ ID NO: 281692 - RNA, 21 nt, Human
uagcauaacaagugccaccca

SEQ ID NO: 281693 - RNA, 24 nt, Human
uaguagagacgggguuucaccaug

SEQ ID NO: 281694 - RNA, 26 nt, Human
uaguagagacgggguuucaccauguu

SEQ ID NO: 281695 - RNA, 19 nt, Human
uaucuugccacaaccccaa

SEQ ID NO: 281696 - RNA, 19 nt, Human
ucaagugauucuccugccu

SEQ ID NO: 281697 - RNA, 19 nt, Human
ucacugcaacaccuccugg

SEQ ID NO: 281698 - RNA, 21 nt, Human
ucacugcaacaccuccugggu

SEQ ID NO: 281699 - RNA, 18 nt, Human
ucagcaaaguauaaagac

SEQ ID NO: 281700 - RNA, 22 nt, Human
ucagccgaggccgccgccgccu

SEQ ID NO: 281701 - RNA, 22 nt, Human
ucagccgaggccgccgccgccu

SEQ ID NO: 281702 - RNA, 21 nt, Human
ucaucugcccgccuuggccac

SEQ ID NO: 281703 - RNA, 23 nt, Human
uccccucaugaacucccuaggga

SEQ ID NO: 281704 - RNA, 21 nt, Human
ucccuagggaccugcgggccc

SEQ ID NO: 281705 - RNA, 21 nt, Human
uccgagccaagucuacggcca

SEQ ID NO: 281706 - RNA, 23 nt, Human
uccgagccaagucuacggccacc

SEQ ID NO: 281707 - RNA, 18 nt, Human
uccggacucugguggcgg

SEQ ID NO: 281708 - RNA, 18 nt, Human
uccggacucugguggcgg

SEQ ID NO: 281709 - RNA, 21 nt, Human
uccuggguucaagugauucuc

SEQ ID NO: 281710 - RNA, 24 nt, Human
uccuggguucaagugauucuccug

SEQ ID NO: 281711 - RNA, 25 nt, Human
ucuauucacacugugcugcuuugcc

SEQ ID NO: 281712 - RNA, 24 nt, Human
ucuccugccucagccucccgagua

SEQ ID NO: 281713 - RNA, 21 nt, Human
ucucgaacuccugaccucaag

SEQ ID NO: 281714 - RNA, 18 nt, Human
ucucuguugccuaggcug

SEQ ID NO: 281715 - RNA, 25 nt, Human
ucugcagccuugggaagauuucacg

SEQ ID NO: 281716 - RNA, 22 nt, Human
ucuguugccuaggcuggagugc

SEQ ID NO: 281717 - RNA, 24 nt, Human
ucuguugccuaggcuggagugcag

SEQ ID NO: 281718 - RNA, 24 nt, Human
ucuugccacaaccccaaacuacag

SEQ ID NO: 281719 - RNA, 18 nt, Human
ugaccucaagucaucugc

SEQ ID NO: 281720 - RNA, 20 nt, Human
ugaccucaagucaucugccc

SEQ ID NO: 281721 - RNA, 22 nt, Human
ugacuagaguuacucuggugcc

SEQ ID NO: 281722 - RNA, 21 nt, Human
ugagaucacaggcguccacca

SEQ ID NO: 281723 - RNA, 22 nt, Human
ugagauuacaggggugagccac

SEQ ID NO: 281724 - RNA, 22 nt, Human
ugagauuacaggggugagccac

SEQ ID NO: 281725 - RNA, 24 nt, Human
ugagauuacaggggugagccacug

SEQ ID NO: 281726 - RNA, 23 nt, Human
ugagguggguggucgcaguaggu

SEQ ID NO: 281727 - RNA, 20 nt, Human
ugauucuccugccucagccu

SEQ ID NO: 281728 - RNA, 21 nt, Human
ugccacaaccccaaacuacag

SEQ ID NO: 281729 - RNA, 26 nt, Human
ugccacaaccccaaacuacagacaac

SEQ ID NO: 281730 - RNA, 24 nt, Human
ugccacccaagguacaggcucagg

SEQ ID NO: 281731 - RNA, 19 nt, Human
ugccuaggcuggagugcag

SEQ ID NO: 281732 - RNA, 20 nt, Human
ugccuaggcuggagugcagu

SEQ ID NO: 281733 - RNA, 24 nt, Human
ugccuaggcuggagugcaguggug

SEQ ID NO: 281734 - RNA, 24 nt, Human
ugccucagccucccgaguagcuga

SEQ ID NO: 281735 - RNA, 24 nt, Human
uggaaaaacgcaaagcacacagcg

SEQ ID NO: 281736 - RNA, 19 nt, Human
uggagugcaguggugugau

SEQ ID NO: 281737 - RNA, 23 nt, Human
uggagugcaguggugugaucuug

SEQ ID NO: 281738 - RNA, 24 nt, Human
uggagugcaguggugugaucuugg

SEQ ID NO: 281739 - RNA, 21 nt, Human
uggauuuuacuguaacugacu

SEQ ID NO: 281740 - RNA, 24 nt, Human
uggccaggcuggucucgaacuccu

SEQ ID NO: 281741 - RNA, 20 nt, Human
ugggaccaagaccaucagcu

SEQ ID NO: 281742 - RNA, 26 nt, Human
ugggaguuucuuuuuuuuuuuuuuuu

SEQ ID NO: 281743 - RNA, 27 nt, Human
ugggaguuucuuuuuuuuuuuuuuuuu

SEQ ID NO: 281744 - RNA, 21 nt, Human
ugggccaggcaaaaggcaggc

SEQ ID NO: 281745 - RNA, 22 nt, Human
ugggggugagccugggccaggc

SEQ ID NO: 281746 - RNA, 18 nt, Human
ugggucucugcccauggg

SEQ ID NO: 281747 - RNA, 23 nt, Human
uggguucaagugauucuccugcc

SEQ ID NO: 281748 - RNA, 24 nt, Human
uggguucaagugauucuccugccu

SEQ ID NO: 281749 - RNA, 24 nt, Human
ugguuagcaugguuagcuuucaca

SEQ ID NO: 281750 - RNA, 19 nt, Human
ugucaagggcagucaugug

SEQ ID NO: 281751 - RNA, 21 nt, Human
ugugugcaggccccucagcug

SEQ ID NO: 281752 - RNA, 21 nt, Human
uuagaaaagccacauacagua

SEQ ID NO: 281753 - RNA, 18 nt, Human
uuaguagagacgggguuu

SEQ ID NO: 281754 - RNA, 22 nt, Human
uuaguagagacgggguuucacc

SEQ ID NO: 281755 - RNA, 24 nt, Human
uuaguagagacgggguuucaccau

SEQ ID NO: 281756 - RNA, 21 nt, Human
uucaagugauucuccugccuc

SEQ ID NO: 281757 - RNA, 23 nt, Human
uucaagugauucuccugccucag

SEQ ID NO: 281758 - RNA, 24 nt, Human
uucaagugauucuccugccucagc

SEQ ID NO: 281759 - RNA, 18 nt, Human
uucacgccugcgcucucc

SEQ ID NO: 281760 - RNA, 20 nt, Human
uucccgcccuuucgcagcuc

SEQ ID NO: 281761 - RNA, 20 nt, Human
uucuugaucccgcucuguuc

SEQ ID NO: 281762 - RNA, 18 nt, Human
uugagacagagucucugu

SEQ ID NO: 281763 - RNA, 24 nt, Human
uugccuaggcuggagugcaguggu

SEQ ID NO: 281764 - RNA, 22 nt, Human
uuggagguucucuuacauuugg

SEQ ID NO: 281765 - RNA, 23 nt, Human
uuguauuuuuaguagagacgggg

SEQ ID NO: 281766 - RNA, 24 nt, Human
uuucaccauguuggccaggcuggu

SEQ ID NO: 281767 - RNA, 23 nt, Human
uuugagacagagucucuguugcc

SEQ ID NO: 281768 - RNA, 24 nt, Human
uuuuuaguagagacgggguuucac

SEQ ID NO: 281769 - RNA, 20 nt, Human
uuuuuguauuuuuaguagag

SEQ ID NO: 281770 - RNA, 18 nt, Human
uuuuuuuuuuuuuuuuug

SEQ ID NO: 281771 - RNA, 24 nt, Human
uacaauauggguuuaagccuucaa

SEQ ID NO: 281772 - RNA, 23 nt, Human
aaacagcccugaagaucaauccc

SEQ ID NO: 281773 - RNA, 20 nt, Human
aaaccagggaccaaaccaaa

SEQ ID NO: 281774 - RNA, 23 nt, Human
aaaggcccucugccugccccuaa

SEQ ID NO: 281775 - RNA, 21 nt, Human
aacaugggaugaacagggagg

SEQ ID NO: 281776 - RNA, 26 nt, Human
aaccugccauuuuuuauccaaacucu

SEQ ID NO: 281777 - RNA, 22 nt, Human
aagacugaaaaccagggaccaa

SEQ ID NO: 281778 - RNA, 19 nt, Human
aagcgcgguucggugggga

SEQ ID NO: 281779 - RNA, 19 nt, Human
aaggaaaaacacugaauga

SEQ ID NO: 281780 - RNA, 25 nt, Human
aaggcaggaacaaaaacagcccuga

SEQ ID NO: 281781 - RNA, 22 nt, Human
aauggcuagggauggaaaaaga

SEQ ID NO: 281782 - RNA, 20 nt, Human
acagagcagcgcgcggcccc

SEQ ID NO: 281783 - RNA, 18 nt, Human
agcccugaagaucaaucc

SEQ ID NO: 281784 - RNA, 23 nt, Human
aggaacaaaaacagcccugaaga

SEQ ID NO: 281785 - RNA, 21 nt, Human
aggaguagggaagcugguugg

SEQ ID NO: 281786 - RNA, 22 nt, Human
aggaguccuaguauaaaagggc

SEQ ID NO: 281787 - RNA, 21 nt, Human
aggcaggaacaaaaacagccc

SEQ ID NO: 281788 - RNA, 24 nt, Human
aggcaggaacaaaaacagcccuga

SEQ ID NO: 281789 - RNA, 22 nt, Human
aggcaggaacaaaaacagggga

SEQ ID NO: 281790 - RNA, 20 nt, Human
agggauggaaaaagaauacc

SEQ ID NO: 281791 - RNA, 19 nt, Human
agggguagauggagggugg

SEQ ID NO: 281792 - RNA, 18 nt, Human
agguguggccauauugcc

SEQ ID NO: 281793 - RNA, 24 nt, Human
aguauuaagaaaagcccugaacaa

SEQ ID NO: 281794 - RNA, 18 nt, Human
auaguaguagcaaaggua

SEQ ID NO: 281795 - RNA, 24 nt, Human
aucccauuuuguuuccuaacucag

SEQ ID NO: 281796 - RNA, 24 nt, Human
caaaccaaacucugggagcuuccc

SEQ ID NO: 281797 - RNA, 18 nt, Human
caacccagagaauggcaa

SEQ ID NO: 281798 - RNA, 24 nt, Human
caagacugaaaaccagggaccaaa

SEQ ID NO: 281799 - RNA, 23 nt, Human
cacagagcagcgcgcggccccca

SEQ ID NO: 281800 - RNA, 21 nt, Human
cagcaguguagcaaaggcccu

SEQ ID NO: 281801 - RNA, 23 nt, Human
cagggaggguuacccaaccugcc

SEQ ID NO: 281802 - RNA, 26 nt, Human
cagugccaauccaaacaaggcaggga

SEQ ID NO: 281803 - RNA, 18 nt, Human
ccaaacucugcaggcaaa

SEQ ID NO: 281804 - RNA, 23 nt, Human
ccaacccuccuuugccuccaaaa

SEQ ID NO: 281805 - RNA, 18 nt, Human
ccccuaacgcccaacucc

SEQ ID NO: 281806 - RNA, 22 nt, Human
ccccugccaccgaccgccgcuu

SEQ ID NO: 281807 - RNA, 22 nt, Human
ccccugcugccacccgccgcuc

SEQ ID NO: 281808 - RNA, 23 nt, Human
ccuaacaccagcuaucucaugcc

SEQ ID NO: 281809 - RNA, 22 nt, Human
ccuccgugacaggcauucacuu

SEQ ID NO: 281810 - RNA, 25 nt, Human
ccugccccuaacgcccaacuccaug

SEQ ID NO: 281811 - RNA, 20 nt, Human
cgaaaccgucgccgccgccg

SEQ ID NO: 281812 - RNA, 23 nt, Human
cgugacaggcauucacuucugcc

SEQ ID NO: 281813 - RNA, 26 nt, Human
cucacagagcagcgcgcggcccccac

SEQ ID NO: 281814 - RNA, 22 nt, Human
cucuaaaggcaggaacaaaaac

SEQ ID NO: 281815 - RNA, 23 nt, Human
cugccccuaacgcccaacuccuu

SEQ ID NO: 281816 - RNA, 20 nt, Human
gaauacccugguucuuuggg

SEQ ID NO: 281817 - RNA, 21 nt, Human
gagacggaucccucuuccuuc

SEQ ID NO: 281818 - RNA, 19 nt, Human
gcaaaggcccucugccugc

SEQ ID NO: 281819 - RNA, 24 nt, Human
gcaggaacaaaaacagcccugaag

SEQ ID NO: 281820 - RNA, 21 nt, Human
gcccugaagaucaaucccucc

SEQ ID NO: 281821 - RNA, 21 nt, Human
ggaccaaaccaaacucuggga

SEQ ID NO: 281822 - RNA, 18 nt, Human
ggccaacccuccuuugcc

SEQ ID NO: 281823 - RNA, 20 nt, Human
gggaagcugguuggcaugga

SEQ ID NO: 281824 - RNA, 20 nt, Human
ggguagaugccacagccaac

SEQ ID NO: 281825 - RNA, 22 nt, Human
gugacaggcauucacuucugcc

SEQ ID NO: 281826 - RNA, 21 nt, Human
gugucagaaagaucccauuuu

SEQ ID NO: 281827 - RNA, 27 nt, Human
guuuguuuuugcuucuggaagggguag

SEQ ID NO: 281828 - RNA, 22 nt, Human
uaaaagggccaggguaggagua

SEQ ID NO: 281829 - RNA, 19 nt, Human
uaacaccagcuaucucaug

SEQ ID NO: 281830 - RNA, 20 nt, Human
uaccaggaaugcuauaaaca

SEQ ID NO: 281831 - RNA, 25 nt, Human
uagauggagggugggaaaugcuuug

SEQ ID NO: 281832 - RNA, 18 nt, Human
ucacaugugaccaagggu

SEQ ID NO: 281833 - RNA, 27 nt, Human
ucacuucugcccuaagugugucagaaa

SEQ ID NO: 281834 - RNA, 18 nt, Human
ucagaaaaagaggaaaaa

SEQ ID NO: 281835 - RNA, 22 nt, Human
ucagaaaaagaggaaaauaucu

SEQ ID NO: 281836 - RNA, 21 nt, Human
ucauggaacucuaaaggcagg

SEQ ID NO: 281837 - RNA, 20 nt, Human
uccaaacaaggcagggaacc

SEQ ID NO: 281838 - RNA, 26 nt, Human
uccccugcugccacccgccgcucacu

SEQ ID NO: 281839 - RNA, 22 nt, Human
ucgccgccgccgcuaccacccc

SEQ ID NO: 281840 - RNA, 21 nt, Human
ucucaugccauuaccuggggc

SEQ ID NO: 281841 - RNA, 19 nt, Human
ucugcaggcaaauccagac

SEQ ID NO: 281842 - RNA, 21 nt, Human
ucugcccuaagugugucagaa

SEQ ID NO: 281843 - RNA, 18 nt, Human
ugacaggcauucacuucu

SEQ ID NO: 281844 - RNA, 20 nt, Human
ugaccaaggguuccugcaca

SEQ ID NO: 281845 - RNA, 21 nt, Human
ugaccaaggguuccugcacau

SEQ ID NO: 281846 - RNA, 22 nt, Human
ugcaggcaaauccagacagagu

SEQ ID NO: 281847 - RNA, 20 nt, Human
ugcauaaagacccaggugug

SEQ ID NO: 281848 - RNA, 22 nt, Human
ugccccuaacgcccaacuccau

SEQ ID NO: 281849 - RNA, 26 nt, Human
ugccccuaacgcccaacuccaugccu

SEQ ID NO: 281850 - RNA, 31 nt, Human
ugccucagucaugguuuguuuuugcuucugg

SEQ ID NO: 281851 - RNA, 21 nt, Human
uggcagcagggagggagggua

SEQ ID NO: 281852 - RNA, 22 nt, Human
uggcagcagggagggaggguag

SEQ ID NO: 281853 - RNA, 18 nt, Human
uggcauggagggucacaa

SEQ ID NO: 281854 - RNA, 18 nt, Human
ugucagcaguguagcaaa

SEQ ID NO: 281855 - RNA, 26 nt, Human
ugucucacuccuccuaaggaguccua

SEQ ID NO: 281856 - RNA, 20 nt, Human
uguggccauauugccugaga

SEQ ID NO: 281857 - RNA, 22 nt, Human
uuaccuggggcucccuauagcu

SEQ ID NO: 281858 - RNA, 24 nt, Human
uuaucaccugucucacuccuccua

SEQ ID NO: 281859 - RNA, 18 nt, Human
uucagaaaaagaggaaaa

SEQ ID NO: 281860 - RNA, 21 nt, Human
uuuauuuauacauauauauau

SEQ ID NO: 281861 - RNA, 24 nt, Human
aagaaggcauuuucacacaaggcu

SEQ ID NO: 281862 - RNA, 25 nt, Human
aagaaggcauuuucacacaaggcug

SEQ ID NO: 281863 - RNA, 20 nt, Human
aagaggaagaaggcauuuuc

SEQ ID NO: 281864 - RNA, 23 nt, Human
accuugucuugcccuuuuugcca

SEQ ID NO: 281865 - RNA, 22 nt, Human
agcuccucuaagccggcugcug

SEQ ID NO: 281866 - RNA, 23 nt, Human
auccuaaaagcauuucuuuuucu

SEQ ID NO: 281867 - RNA, 20 nt, Human
cacagcucggaccgccagcu

SEQ ID NO: 281868 - RNA, 24 nt, Human
cacgaacccugcaggucugggcuu

SEQ ID NO: 281869 - RNA, 24 nt, Human
caugaggccgcgccuguguccagc

SEQ ID NO: 281870 - RNA, 20 nt, Human
cuugcccuuuuugccaaaug

SEQ ID NO: 281871 - RNA, 26 nt, Human
cuugucuugcccuuuuugccaaaugu

SEQ ID NO: 281872 - RNA, 21 nt, Human
gcuucagcuucagcuuggccu

SEQ ID NO: 281873 - RNA, 23 nt, Human
gcuucagcuuggccucauucauu

SEQ ID NO: 281874 - RNA, 20 nt, Human
ggucuuucaagccacagcuc

SEQ ID NO: 281875 - RNA, 19 nt, Human
uaaaagcauuucuuuuucu

SEQ ID NO: 281876 - RNA, 21 nt, Human
uaaaagcauuucuuuuucuuc

SEQ ID NO: 281877 - RNA, 21 nt, Human
uaaaagcauuucuuuuucuuc

SEQ ID NO: 281878 - RNA, 20 nt, Human
uaccugaauccuaaaagcau

SEQ ID NO: 281879 - RNA, 18 nt, Human
uacuggaugacucgcugc

SEQ ID NO: 281880 - RNA, 23 nt, Human
uccuaaaagcauuucuuuuucuu

SEQ ID NO: 281881 - RNA, 24 nt, Human
ucgcgucggucuuucaagccacag

SEQ ID NO: 281882 - RNA, 20 nt, Human
ucggaccgccagcuccuaga

SEQ ID NO: 281883 - RNA, 25 nt, Human
ugccaaauguucaucuucuaauucu

SEQ ID NO: 281884 - RNA, 22 nt, Human
ugggaagaaucuucagcuucag

SEQ ID NO: 281885 - RNA, 18 nt, Human
uguccagcugaaaguggg

SEQ ID NO: 281886 - RNA, 24 nt, Human
uugucuugcccuuuuugccaaaug

SEQ ID NO: 281887 - RNA, 20 nt, Human
uuuaaaaauuguccuuuuuc

SEQ ID NO: 281888 - RNA, 22 nt, Human
aggagagggaucaggcagcccu

SEQ ID NO: 281889 - RNA, 18 nt, Human
caccagugaggcucaauc

SEQ ID NO: 281890 - RNA, 18 nt, Human
caggaggagaugacagac

SEQ ID NO: 281891 - RNA, 26 nt, Human
cagugaggcucaaucuucugaagucu

SEQ ID NO: 281892 - RNA, 18 nt, Human
ccgcuacgccggcaaaca

SEQ ID NO: 281893 - RNA, 18 nt, Human
ccgcuacgccggcaaaca

SEQ ID NO: 281894 - RNA, 25 nt, Human
gaugacagacgacaaccagacggua

SEQ ID NO: 281895 - RNA, 20 nt, Human
gcaccuaaguccuucgggua

SEQ ID NO: 281896 - RNA, 18 nt, Human
uaacucccaagcgcuccc

SEQ ID NO: 281897 - RNA, 21 nt, Human
ucaggcagcccucccucccuc

SEQ ID NO: 281898 - RNA, 24 nt, Human
uuaaguacacaaagcaccuaaguc

SEQ ID NO: 281899 - RNA, 25 nt, Human
aaaacuccuucuuccagcucuacuu

SEQ ID NO: 281900 - RNA, 27 nt, Human
aaacaaagaggaugugaacgaagacaa

SEQ ID NO: 281901 - RNA, 23 nt, Human
aaagauugaggaaaugucagccu

SEQ ID NO: 281902 - RNA, 23 nt, Human
aaagauugaggaaaugucagccu

SEQ ID NO: 281903 - RNA, 20 nt, Human
aacuccuucuuccagcucua

SEQ ID NO: 281904 - RNA, 20 nt, Human
aacuccuuuucaaugagaau

SEQ ID NO: 281905 - RNA, 22 nt, Human
aagaccaauaaagauugaggaa

SEQ ID NO: 281906 - RNA, 22 nt, Human
aagaccaauaaagauugaggaa

SEQ ID NO: 281907 - RNA, 19 nt, Human
aagcguccuggauaagauc

SEQ ID NO: 281908 - RNA, 19 nt, Human
aagcguccuggauaagauc

SEQ ID NO: 281909 - RNA, 28 nt, Human
aaggagaaaugaagaccaaaugcaaugg

SEQ ID NO: 281910 - RNA, 28 nt, Human
aaggagaaaugaagaccaaaugcaaugg

SEQ ID NO: 281911 - RNA, 22 nt, Human
acguggccugcaaguuaacguu

SEQ ID NO: 281912 - RNA, 24 nt, Human
acuggaaugccaguuccuggagcc

SEQ ID NO: 281913 - RNA, 23 nt, Human
agugguuuugaaacaguccucaa

SEQ ID NO: 281914 - RNA, 19 nt, Human
augaagaccaaaugcaaug

SEQ ID NO: 281915 - RNA, 19 nt, Human
augaagaccaaaugcaaug

SEQ ID NO: 281916 - RNA, 24 nt, Human
augaggccuccaggaaaguguagc

SEQ ID NO: 281917 - RNA, 22 nt, Human
auguccuuaaggccuugaugga

SEQ ID NO: 281918 - RNA, 24 nt, Human
caacaaugcuacgaaugcaguucu

SEQ ID NO: 281919 - RNA, 21 nt, Human
cacucuuuauuaugaaaauaa

SEQ ID NO: 281920 - RNA, 24 nt, Human
cacuuccccucagaaucuugccac

SEQ ID NO: 281921 - RNA, 18 nt, Human
cagccuggaggagacuaa

SEQ ID NO: 281922 - RNA, 18 nt, Human
cagccuggaggagacuaa

SEQ ID NO: 281923 - RNA, 26 nt, Human
ccucaaaacuccuucuuccagcucua

SEQ ID NO: 281924 - RNA, 19 nt, Human
ccugggagcuacacuuccc

SEQ ID NO: 281925 - RNA, 21 nt, Human
cguuggcuuccuggucagcca

SEQ ID NO: 281926 - RNA, 21 nt, Human
cuagcaagacugaggccagga

SEQ ID NO: 281927 - RNA, 25 nt, Human
cucaaaacuccuucuuccagcucua

SEQ ID NO: 281928 - RNA, 21 nt, Human
cucuucaggccuggagauaaa

SEQ ID NO: 281929 - RNA, 21 nt, Human
gaaaagaggaaacaaagagga

SEQ ID NO: 281930 - RNA, 18 nt, Human
gaagaagacuuggaacca

SEQ ID NO: 281931 - RNA, 21 nt, Human
gaagagaugcuguguuuucac

SEQ ID NO: 281932 - RNA, 23 nt, Human
gacuaaggagaaaugaagaccaa

SEQ ID NO: 281933 - RNA, 23 nt, Human
gacuaaggagaaaugaagaccaa

SEQ ID NO: 281934 - RNA, 23 nt, Human
gacuuggaaccaaccugggagcu

SEQ ID NO: 281935 - RNA, 21 nt, Human
gaggcccauguccuuaaggcc

SEQ ID NO: 281936 - RNA, 22 nt, Human
gaggcccauguccuuaaggccu

SEQ ID NO: 281937 - RNA, 19 nt, Human
gaucuucuggaaagauuuc

SEQ ID NO: 281938 - RNA, 21 nt, Human
gccaggccuuaggcuggugaa

SEQ ID NO: 281939 - RNA, 22 nt, Human
gugguuuugaaacaguccucaa

SEQ ID NO: 281940 - RNA, 20 nt, Human
guuggcuuccuggucagcca

SEQ ID NO: 281941 - RNA, 22 nt, Human
uaaaacuucaccagagaagcuu

SEQ ID NO: 281942 - RNA, 23 nt, Human
uagcaagacugaggccaggacag

SEQ ID NO: 281943 - RNA, 23 nt, Human
uaggcuggugaaaagaggaaaca

SEQ ID NO: 281944 - RNA, 23 nt, Human
ucaccagagaagcuucuggccac

SEQ ID NO: 281945 - RNA, 24 nt, Human
ucacguggccugcaaguuaacguu

SEQ ID NO: 281946 - RNA, 19 nt, Human
ucagucuauccacaaauuc

SEQ ID NO: 281947 - RNA, 22 nt, Human
ucugaauaaaacuucaccagag

SEQ ID NO: 281948 - RNA, 23 nt, Human
ucuuggugauguucuggaguugg

SEQ ID NO: 281949 - RNA, 22 nt, Human
ugaaaagaggaaacaaagagga

SEQ ID NO: 281950 - RNA, 23 nt, Human
ugaaaagaggaaacaaagaggau

SEQ ID NO: 281951 - RNA, 23 nt, Human
ugaauaaaacuucaccagagaag

SEQ ID NO: 281952 - RNA, 22 nt, Human
ugacacuacagucucacagaac

SEQ ID NO: 281953 - RNA, 22 nt, Human
ugacacuacagucucacagaac

SEQ ID NO: 281954 - RNA, 24 nt, Human
ugacugguaucuccaaaaguguca

SEQ ID NO: 281955 - RNA, 24 nt, Human
ugacugguaucuccaaaaguguca

SEQ ID NO: 281956 - RNA, 20 nt, Human
ugaggccaggacaguuaacu

SEQ ID NO: 281957 - RNA, 20 nt, Human
ugaguggggcgaauacacag

SEQ ID NO: 281958 - RNA, 24 nt, Human
uggaaagauuucguuuugugaaaa

SEQ ID NO: 281959 - RNA, 21 nt, Human
uggaagaagacuuggaaccaa

SEQ ID NO: 281960 - RNA, 25 nt, Human
uggacuuccugagacaccuguucac

SEQ ID NO: 281961 - RNA, 19 nt, Human
uggaggagacuaaggagaa

SEQ ID NO: 281962 - RNA, 19 nt, Human
uggaggagacuaaggagaa

SEQ ID NO: 281963 - RNA, 21 nt, Human
uggccuagaagagaugcuggc

SEQ ID NO: 281964 - RNA, 18 nt, Human
uuagagaucaucuagucc

SEQ ID NO: 281965 - RNA, 22 nt, Human
uucacucacacucagcauaguc

SEQ ID NO: 281966 - RNA, 19 nt, Human
uuccagcucuacuucaacu

SEQ ID NO: 281967 - RNA, 19 nt, Human
uucuuccagcucuacuuca

SEQ ID NO: 281968 - RNA, 27 nt, Human
uugcuuuguccugacacuacagucuca

SEQ ID NO: 281969 - RNA, 27 nt, Human
uugcuuuguccugacacuacagucuca

SEQ ID NO: 281970 - RNA, 19 nt, Human
uuguugcuuuguccugaca

SEQ ID NO: 281971 - RNA, 19 nt, Human
uuguugcuuuguccugaca

SEQ ID NO: 281972 - RNA, 25 nt, Human
uuguugcuuuguccugacacuacag

SEQ ID NO: 281973 - RNA, 25 nt, Human
uuguugcuuuguccugacacuacag

SEQ ID NO: 281974 - RNA, 22 nt, Human
uuuguuguugcuuuguccugac

SEQ ID NO: 281975 - RNA, 22 nt, Human
uuuguuguugcuuuguccugac

SEQ ID NO: 281976 - RNA, 20 nt, Human
uuuuuuuuuuuuuuuuuaac

SEQ ID NO: 281977 - RNA, 21 nt, Human
aagaacaugaggagcucugac

SEQ ID NO: 281978 - RNA, 22 nt, Human
aagacaccauacuuuauuguga

SEQ ID NO: 281979 - RNA, 20 nt, Human
aagugcacagaacaacuggc

SEQ ID NO: 281980 - RNA, 19 nt, Human
acagaacaacuggccccuu

SEQ ID NO: 281981 - RNA, 22 nt, Human
cagcccugugaguugggcuucg

SEQ ID NO: 281982 - RNA, 23 nt, Human
ccaauguccuuauagggcucucu

SEQ ID NO: 281983 - RNA, 21 nt, Human
ccccuuuggaaggaugagagu

SEQ ID NO: 281984 - RNA, 20 nt, Human
ccuggggguaacaggggugg

SEQ ID NO: 281985 - RNA, 19 nt, Human
cggcuucuuagccccagcc

SEQ ID NO: 281986 - RNA, 23 nt, Human
cucuugaggagaaucuguguggc

SEQ ID NO: 281987 - RNA, 22 nt, Human
cugugaguugggcuucggcuuc

SEQ ID NO: 281988 - RNA, 23 nt, Human
cuucggcuucuuagccccagccg

SEQ ID NO: 281989 - RNA, 21 nt, Human
gaacaacuggccccuuuggaa

SEQ ID NO: 281990 - RNA, 28 nt, Human
ggacaagugcacagaacaacuggccccu

SEQ ID NO: 281991 - RNA, 18 nt, Human
ggggacgggaguuuggag

SEQ ID NO: 281992 - RNA, 22 nt, Human
guugggcuucggcuucuuagcc

SEQ ID NO: 281993 - RNA, 21 nt, Human
uccuggggguaacaggggugg

SEQ ID NO: 281994 - RNA, 19 nt, Human
ucuguguggccuggggacg

SEQ ID NO: 281995 - RNA, 21 nt, Human
ugaaaaggaacagagauccug

SEQ ID NO: 281996 - RNA, 23 nt, Human
ugcaagaacaugaggagcucuga

SEQ ID NO: 281997 - RNA, 22 nt, Human
ugcacagaacaacuggccccuu

SEQ ID NO: 281998 - RNA, 19 nt, Human
uggggguaacaggggugga

SEQ ID NO: 281999 - RNA, 18 nt, Human
uuuuuuuuuuuuuuuuug

SEQ ID NO: 282000 - RNA, 20 nt, Human
aaauacacagaacaacuggc

SEQ ID NO: 282001 - RNA, 20 nt, Human
aaauacacagaacaacuggc

SEQ ID NO: 282002 - RNA, 20 nt, Human
aacaaacaccaccaccuucc

SEQ ID NO: 282003 - RNA, 26 nt, Human
aacaaacaccaccaccuuccuugaac

SEQ ID NO: 282004 - RNA, 21 nt, Human
aaguacuugcacaaguugcuc

SEQ ID NO: 282005 - RNA, 22 nt, Human
aaguacuugcacaaguugcucu

SEQ ID NO: 282006 - RNA, 27 nt, Human
accauguucauaaugacaguuccucuu

SEQ ID NO: 282007 - RNA, 22 nt, Human
accuuccuugaacacuccguug

SEQ ID NO: 282008 - RNA, 20 nt, Human
acucuggcucucugggccug

SEQ ID NO: 282009 - RNA, 20 nt, Human
acuguuuauuaugaaaauaa

SEQ ID NO: 282010 - RNA, 20 nt, Human
acuguuuauuaugaaaauaa

SEQ ID NO: 282011 - RNA, 19 nt, Human
agagcauccuuuccugaaa

SEQ ID NO: 282012 - RNA, 18 nt, Human
agaggaugagaaggaaga

SEQ ID NO: 282013 - RNA, 18 nt, Human
agaggaugagaaggaaga

SEQ ID NO: 282014 - RNA, 18 nt, Human
agaggaugagaaggaaga

SEQ ID NO: 282015 - RNA, 18 nt, Human
agaggaugagaaggaaga

SEQ ID NO: 282016 - RNA, 24 nt, Human
agaguggucuuaggcuggugaaaa

SEQ ID NO: 282017 - RNA, 24 nt, Human
agaguggucuuaggcuggugaaaa

SEQ ID NO: 282018 - RNA, 24 nt, Human
agaguggucuuaggcuggugaaaa

SEQ ID NO: 282019 - RNA, 24 nt, Human
agaguggucuuaggcuggugaaaa

SEQ ID NO: 282020 - RNA, 24 nt, Human
aggaagacaaagaugacaucaaag

SEQ ID NO: 282021 - RNA, 24 nt, Human
aggaagacaaagaugacaucaaag

SEQ ID NO: 282022 - RNA, 24 nt, Human
aggaagacaaagaugacaucaaag

SEQ ID NO: 282023 - RNA, 24 nt, Human
aggaagacaaagaugacaucaaag

SEQ ID NO: 282024 - RNA, 21 nt, Human
aggagagggagggcucagagc

SEQ ID NO: 282025 - RNA, 21 nt, Human
aggagagggagggcucagagc

SEQ ID NO: 282026 - RNA, 21 nt, Human
aggagagggagggcucagagc

SEQ ID NO: 282027 - RNA, 21 nt, Human
aggagagggagggcucagagc

SEQ ID NO: 282028 - RNA, 24 nt, Human
agggagggcucagagcuggaggag

SEQ ID NO: 282029 - RNA, 24 nt, Human
agggagggcucagagcuggaggag

SEQ ID NO: 282030 - RNA, 24 nt, Human
agggagggcucagagcuggaggag

SEQ ID NO: 282031 - RNA, 24 nt, Human
agggagggcucagagcuggaggag

SEQ ID NO: 282032 - RNA, 20 nt, Human
aggguuucauugucucagaa

SEQ ID NO: 282033 - RNA, 19 nt, Human
agguagugaugaaggucca

SEQ ID NO: 282034 - RNA, 19 nt, Human
agguagugaugaaggucca

SEQ ID NO: 282035 - RNA, 19 nt, Human
agguagugaugaaggucca

SEQ ID NO: 282036 - RNA, 20 nt, Human
augaguggggcaaauacaca

SEQ ID NO: 282037 - RNA, 20 nt, Human
augaguggggcaaauacaca

SEQ ID NO: 282038 - RNA, 20 nt, Human
augaguggggcaaauacaca

SEQ ID NO: 282039 - RNA, 23 nt, Human
augaguggggcaaauacacagaa

SEQ ID NO: 282040 - RNA, 19 nt, Human
caaacaccaccaccuuccu

SEQ ID NO: 282041 - RNA, 24 nt, Human
caaacaccaccaccuuccuugaac

SEQ ID NO: 282042 - RNA, 26 nt, Human
caacaaacaccaccaccuuccuugaa

SEQ ID NO: 282043 - RNA, 22 nt, Human
cacagacuggaauugcggccag

SEQ ID NO: 282044 - RNA, 22 nt, Human
cacagacuggaauugcggccag

SEQ ID NO: 282045 - RNA, 22 nt, Human
cacagacuggaauugcggccag

SEQ ID NO: 282046 - RNA, 21 nt, Human
cacucugagucucuugggggc

SEQ ID NO: 282047 - RNA, 21 nt, Human
cacucugagucucuugggggc

SEQ ID NO: 282048 - RNA, 21 nt, Human
cacucugagucucuugggggc

SEQ ID NO: 282049 - RNA, 21 nt, Human
cacucugagucucuugggggc

SEQ ID NO: 282050 - RNA, 21 nt, Human
cacuguuuauuaugaaaauaa

SEQ ID NO: 282051 - RNA, 21 nt, Human
cacuguuuauuaugaaaauaa

SEQ ID NO: 282052 - RNA, 21 nt, Human
cacuguuuauuaugaaaauaa

SEQ ID NO: 282053 - RNA, 21 nt, Human
cagagacaacaaacaccacca

SEQ ID NO: 282054 - RNA, 21 nt, Human
cagagcauccuuuccugaaaa

SEQ ID NO: 282055 - RNA, 19 nt, Human
cagcccuuucaccuugccc

SEQ ID NO: 282056 - RNA, 19 nt, Human
caggaauugcaggacuaaa

SEQ ID NO: 282057 - RNA, 23 nt, Human
caggcaaugcacugagggagucc

SEQ ID NO: 282058 - RNA, 25 nt, Human
caguaaaguuuuccuugcaggguuu

SEQ ID NO: 282059 - RNA, 24 nt, Human
cauuggauucuauaaggagugugu

SEQ ID NO: 282060 - RNA, 19 nt, Human
cauuucacuagcuuccugu

SEQ ID NO: 282061 - RNA, 21 nt, Human
ccacauguccaccaggaugga

SEQ ID NO: 282062 - RNA, 19 nt, Human
ccaccaggauggaggugaa

SEQ ID NO: 282063 - RNA, 18 nt, Human
cccaacucccacgccgac

SEQ ID NO: 282064 - RNA, 20 nt, Human
cccaccuuucuuccuucuuc

SEQ ID NO: 282065 - RNA, 25 nt, Human
cccucagaaacagcuuaucauucau

SEQ ID NO: 282066 - RNA, 25 nt, Human
cccucagaaacagcuuaucauucau

SEQ ID NO: 282067 - RNA, 25 nt, Human
cccucagaaacagcuuaucauucau

SEQ ID NO: 282068 - RNA, 26 nt, Human
ccuccaaccccaguccuuagaguggu

SEQ ID NO: 282069 - RNA, 19 nt, Human
ccugaaaaggaagcgcuca

SEQ ID NO: 282070 - RNA, 21 nt, Human
ccugagaccauccuuccacuc

SEQ ID NO: 282071 - RNA, 21 nt, Human
ccugagaccauccuuccacuu

SEQ ID NO: 282072 - RNA, 24 nt, Human
cggguucccuucuagccauagcuc

SEQ ID NO: 282073 - RNA, 24 nt, Human
cucagagcuggaggagagugugga

SEQ ID NO: 282074 - RNA, 24 nt, Human
cucagagcuggaggagagugugga

SEQ ID NO: 282075 - RNA, 24 nt, Human
cucagagcuggaggagagugugga

SEQ ID NO: 282076 - RNA, 24 nt, Human
cucagagcuggaggagagugugga

SEQ ID NO: 282077 - RNA, 24 nt, Human
cuccaaccccaguccuuagagugg

SEQ ID NO: 282078 - RNA, 24 nt, Human
cuccaaccccaguccuuagagugg

SEQ ID NO: 282079 - RNA, 24 nt, Human
cuccaaccccaguccuuagagugg

SEQ ID NO: 282080 - RNA, 21 nt, Human
cuccuaggagagggagggcuc

SEQ ID NO: 282081 - RNA, 21 nt, Human
cuccuaggagagggagggcuc

SEQ ID NO: 282082 - RNA, 21 nt, Human
cuccuaggagagggagggcuc

SEQ ID NO: 282083 - RNA, 20 nt, Human
cucuggagguuuucuauuuc

SEQ ID NO: 282084 - RNA, 23 nt, Human
cuggagguuuucuauuucuccaa

SEQ ID NO: 282085 - RNA, 23 nt, Human
cuucagagacaacaaacaccacc

SEQ ID NO: 282086 - RNA, 19 nt, Human
cuugcacaaguugcucugc

SEQ ID NO: 282087 - RNA, 18 nt, Human
cuugcccaacucccacgc

SEQ ID NO: 282088 - RNA, 21 nt, Human
gaaaagaggaaacaaagagga

SEQ ID NO: 282089 - RNA, 21 nt, Human
gaaaagaggaaacaaagagga

SEQ ID NO: 282090 - RNA, 21 nt, Human
gaaaagaggaaacaaagagga

SEQ ID NO: 282091 - RNA, 21 nt, Human
gaaaagaggaaacaaagagga

SEQ ID NO: 282092 - RNA, 22 nt, Human
gaaggcacucugagucucuugg

SEQ ID NO: 282093 - RNA, 22 nt, Human
gaaggcacucugagucucuugg

SEQ ID NO: 282094 - RNA, 22 nt, Human
gaaggcacucugagucucuugg

SEQ ID NO: 282095 - RNA, 22 nt, Human
gaaggcacucugagucucuugg

SEQ ID NO: 282096 - RNA, 23 nt, Human
gaggaugagaaggaagacaaaga

SEQ ID NO: 282097 - RNA, 23 nt, Human
gaggaugagaaggaagacaaaga

SEQ ID NO: 282098 - RNA, 21 nt, Human
gagguagugaugaagguccac

SEQ ID NO: 282099 - RNA, 21 nt, Human
gagguagugaugaagguccac

SEQ ID NO: 282100 - RNA, 20 nt, Human
gaugagaaggaagacaaaga

SEQ ID NO: 282101 - RNA, 20 nt, Human
gaugagaaggaagacaaaga

SEQ ID NO: 282102 - RNA, 20 nt, Human
gaugagaaggaagacaaaga

SEQ ID NO: 282103 - RNA, 18 nt, Human
gauucuauaaggagugug

SEQ ID NO: 282104 - RNA, 25 nt, Human
gcagcgugaaggcagaaguucauac

SEQ ID NO: 282105 - RNA, 19 nt, Human
gcaggguuucauugucuca

SEQ ID NO: 282106 - RNA, 18 nt, Human
gccuccacugggaucuug

SEQ ID NO: 282107 - RNA, 18 nt, Human
gccuccacugggaucuug

SEQ ID NO: 282108 - RNA, 18 nt, Human
gccuccacugggaucuug

SEQ ID NO: 282109 - RNA, 18 nt, Human
gccuccacugggaucuug

SEQ ID NO: 282110 - RNA, 26 nt, Human
gcucuucagguggcuauguccugugg

SEQ ID NO: 282111 - RNA, 26 nt, Human
gcucuucagguggcuauguccugugg

SEQ ID NO: 282112 - RNA, 26 nt, Human
gcucuucagguggcuauguccugugg

SEQ ID NO: 282113 - RNA, 26 nt, Human
gcucuucagguggcuauguccugugg

SEQ ID NO: 282114 - RNA, 21 nt, Human
ggaggaagcagguguucacgg

SEQ ID NO: 282115 - RNA, 21 nt, Human
ggaguccacguuucguggaca

SEQ ID NO: 282116 - RNA, 21 nt, Human
ggcgguccuuguggacauccc

SEQ ID NO: 282117 - RNA, 22 nt, Human
ggcuucuuggucagccaggccu

SEQ ID NO: 282118 - RNA, 22 nt, Human
ggcuucuuggucagccaggccu

SEQ ID NO: 282119 - RNA, 22 nt, Human
ggcuucuuggucagccaggccu

SEQ ID NO: 282120 - RNA, 22 nt, Human
ggcuucuuggucagccaggccu

SEQ ID NO: 282121 - RNA, 22 nt, Human
gggaggaagcagguguucacgg

SEQ ID NO: 282122 - RNA, 18 nt, Human
gggauggagaaggcacuc

SEQ ID NO: 282123 - RNA, 18 nt, Human
gggauggagaaggcacuc

SEQ ID NO: 282124 - RNA, 18 nt, Human
gggauggagaaggcacuc

SEQ ID NO: 282125 - RNA, 22 nt, Human
gggccugcccgagggaggaagc

SEQ ID NO: 282126 - RNA, 18 nt, Human
guaaaguuuuccuugcag

SEQ ID NO: 282127 - RNA, 18 nt, Human
gucuggagcauagugaag

SEQ ID NO: 282128 - RNA, 18 nt, Human
gucuggagcauagugaag

SEQ ID NO: 282129 - RNA, 18 nt, Human
gucuggagcauagugaag

SEQ ID NO: 282130 - RNA, 18 nt, Human
gucuggagcauagugaag

SEQ ID NO: 282131 - RNA, 22 nt, Human
guucauaaugacaguuccucuu

SEQ ID NO: 282132 - RNA, 19 nt, Human
uaacucucggccguccagg

SEQ ID NO: 282133 - RNA, 27 nt, Human
uacuuuuguuguugcugucucucagac

SEQ ID NO: 282134 - RNA, 18 nt, Human
uagaguggucuuaggcug

SEQ ID NO: 282135 - RNA, 18 nt, Human
uagaguggucuuaggcug

SEQ ID NO: 282136 - RNA, 18 nt, Human
uagaguggucuuaggcug

SEQ ID NO: 282137 - RNA, 18 nt, Human
uagaguggucuuaggcug

SEQ ID NO: 282138 - RNA, 25 nt, Human
uagcuuccuguugcauuggauucua

SEQ ID NO: 282139 - RNA, 23 nt, Human
uaggcuggugaaaagaggaaaca

SEQ ID NO: 282140 - RNA, 23 nt, Human
uaggcuggugaaaagaggaaaca

SEQ ID NO: 282141 - RNA, 23 nt, Human
uaggcuggugaaaagaggaaaca

SEQ ID NO: 282142 - RNA, 23 nt, Human
uaggcuggugaaaagaggaaaca

SEQ ID NO: 282143 - RNA, 24 nt, Human
uaggggauuugcuugaaggccucc

SEQ ID NO: 282144 - RNA, 24 nt, Human
uaggggauuugcuugaaggccucc

SEQ ID NO: 282145 - RNA, 24 nt, Human
uaggggauuugcuugaaggccucc

SEQ ID NO: 282146 - RNA, 24 nt, Human
uaggggauuugcuugaaggccucc

SEQ ID NO: 282147 - RNA, 24 nt, Human
uaugucauuucacuagcuuccugu

SEQ ID NO: 282148 - RNA, 20 nt, Human
ucagagcugucaaugucaac

SEQ ID NO: 282149 - RNA, 18 nt, Human
uccacaugaaggcaagau

SEQ ID NO: 282150 - RNA, 18 nt, Human
uccacucuggcucucugg

SEQ ID NO: 282151 - RNA, 21 nt, Human
uccacugggaucuugcccuca

SEQ ID NO: 282152 - RNA, 21 nt, Human
uccacugggaucuugcccuca

SEQ ID NO: 282153 - RNA, 21 nt, Human
uccacugggaucuugcccuca

SEQ ID NO: 282154 - RNA, 21 nt, Human
uccacugggaucuugcccuca

SEQ ID NO: 282155 - RNA, 25 nt, Human
uccacugggaucuugcccucagucu

SEQ ID NO: 282156 - RNA, 25 nt, Human
uccacugggaucuugcccucagucu

SEQ ID NO: 282157 - RNA, 25 nt, Human
uccacugggaucuugcccucagucu

SEQ ID NO: 282158 - RNA, 25 nt, Human
uccacugggaucuugcccucagucu

SEQ ID NO: 282159 - RNA, 20 nt, Human
uccuaggagagggagggcuc

SEQ ID NO: 282160 - RNA, 20 nt, Human
uccuaggagagggagggcuc

SEQ ID NO: 282161 - RNA, 20 nt, Human
uccuaggagagggagggcuc

SEQ ID NO: 282162 - RNA, 20 nt, Human
uccuaggagagggagggcuc

SEQ ID NO: 282163 - RNA, 23 nt, Human
uccuugaaguacuugcacaaguu

SEQ ID NO: 282164 - RNA, 26 nt, Human
ucuccuggcagcgugaaggcagaagu

SEQ ID NO: 282165 - RNA, 23 nt, Human
ucucuggagguuuucuauuucuc

SEQ ID NO: 282166 - RNA, 24 nt, Human
ucucuugggggcuggcaucccuca

SEQ ID NO: 282167 - RNA, 24 nt, Human
ucucuugggggcuggcaucccuca

SEQ ID NO: 282168 - RNA, 24 nt, Human
ucucuugggggcuggcaucccuca

SEQ ID NO: 282169 - RNA, 24 nt, Human
ucucuugggggcuggcaucccuca

SEQ ID NO: 282170 - RNA, 22 nt, Human
ugaaaagaggaaacaaagagga

SEQ ID NO: 282171 - RNA, 22 nt, Human
ugaaaagaggaaacaaagagga

SEQ ID NO: 282172 - RNA, 22 nt, Human
ugaaaagaggaaacaaagagga

SEQ ID NO: 282173 - RNA, 22 nt, Human
ugaaaagaggaaacaaagagga

SEQ ID NO: 282174 - RNA, 23 nt, Human
ugaaaagaggaaacaaagaggau

SEQ ID NO: 282175 - RNA, 23 nt, Human
ugaaaagaggaaacaaagaggau

SEQ ID NO: 282176 - RNA, 23 nt, Human
ugaaaagaggaaacaaagaggau

SEQ ID NO: 282177 - RNA, 23 nt, Human
ugaaaagaggaaacaaagaggau

SEQ ID NO: 282178 - RNA, 19 nt, Human
ugaagguccacaugaaggc

SEQ ID NO: 282179 - RNA, 19 nt, Human
ugaagguccacaugaaggc

SEQ ID NO: 282180 - RNA, 19 nt, Human
ugaagguccacaugaaggc

SEQ ID NO: 282181 - RNA, 22 nt, Human
ugacucccaccuuucuuccuuc

SEQ ID NO: 282182 - RNA, 19 nt, Human
ugagaccauccuuccacuc

SEQ ID NO: 282183 - RNA, 20 nt, Human
ugaguggggcaaauacacag

SEQ ID NO: 282184 - RNA, 20 nt, Human
ugaguggggcaaauacacag

SEQ ID NO: 282185 - RNA, 20 nt, Human
ugaguggggcaaauacacag

SEQ ID NO: 282186 - RNA, 18 nt, Human
ugcccaacucccacgccg

SEQ ID NO: 282187 - RNA, 25 nt, Human
uggacaucccucaucuccaugcuuc

SEQ ID NO: 282188 - RNA, 23 nt, Human
uggagaaggcacucugagucucu

SEQ ID NO: 282189 - RNA, 23 nt, Human
uggagaaggcacucugagucucu

SEQ ID NO: 282190 - RNA, 23 nt, Human
uggagaaggcacucugagucucu

SEQ ID NO: 282191 - RNA, 23 nt, Human
uggagaaggcacucugagucucu

SEQ ID NO: 282192 - RNA, 19 nt, Human
uggcacuuacauaggcaga

SEQ ID NO: 282193 - RNA, 22 nt, Human
uggcgguccuuguggacauccc

SEQ ID NO: 282194 - RNA, 20 nt, Human
uggcucucugggccugccuc

SEQ ID NO: 282195 - RNA, 19 nt, Human
ugggauggagaaggcacuc

SEQ ID NO: 282196 - RNA, 19 nt, Human
ugggauggagaaggcacuc

SEQ ID NO: 282197 - RNA, 21 nt, Human
ugggcagagaaagccugcacc

SEQ ID NO: 282198 - RNA, 21 nt, Human
ugggcagagaaagccugcacc

SEQ ID NO: 282199 - RNA, 21 nt, Human
ugggcagagaaagccugcacc

SEQ ID NO: 282200 - RNA, 21 nt, Human
ugggcagagaaagccugcacc

SEQ ID NO: 282201 - RNA, 21 nt, Human
ugguagaguauacuuuuguug

SEQ ID NO: 282202 - RNA, 22 nt, Human
ugucauuucacuagcuuccugu

SEQ ID NO: 282203 - RNA, 19 nt, Human
ugucuuaguuggcgguccu

SEQ ID NO: 282204 - RNA, 21 nt, Human
uuaaugguagaguauacuuuu

SEQ ID NO: 282205 - RNA, 18 nt, Human
uucaccuugcccaacucc

SEQ ID NO: 282206 - RNA, 19 nt, Human
uucagagacaacaaacacc

SEQ ID NO: 282207 - RNA, 20 nt, Human
uucagagacaacaaacacca

SEQ ID NO: 282208 - RNA, 21 nt, Human
uucagagacaacaaacaccac

SEQ ID NO: 282209 - RNA, 24 nt, Human
uuccaucauucuccuggcagcgug

SEQ ID NO: 282210 - RNA, 27 nt, Human
uugcccaacucccacgccgacuccagc

SEQ ID NO: 282211 - RNA, 22 nt, Human
uugugugcuuuagcagcuuccu

SEQ ID NO: 282212 - RNA, 24 nt, Human
uuuugugugcuuuagcagcuuccu

SEQ ID NO: 282213 - RNA, 22 nt, Human
aacuuguguuccucacauccuu

SEQ ID NO: 282214 - RNA, 25 nt, Human
agcaaagagaccucugccaccccca

SEQ ID NO: 282215 - RNA, 19 nt, Human
caacaaaaaagaguucaac

SEQ ID NO: 282216 - RNA, 19 nt, Human
caacaacagaaaugaacuu

SEQ ID NO: 282217 - RNA, 20 nt, Human
caccggggccccagagccgg

SEQ ID NO: 282218 - RNA, 20 nt, Human
cacgcagacgcgagcgcccc

SEQ ID NO: 282219 - RNA, 21 nt, Human
ccacgcagacgcgagcgcccc

SEQ ID NO: 282220 - RNA, 23 nt, Human
cccacggucgggacgccccccgc

SEQ ID NO: 282221 - RNA, 21 nt, Human
ccccagagccgggggacuuuc

SEQ ID NO: 282222 - RNA, 24 nt, Human
cccccgcgugggacgcaguuccac

SEQ ID NO: 282223 - RNA, 22 nt, Human
ccccggcgccgcccucucccgc

SEQ ID NO: 282224 - RNA, 19 nt, Human
ccucugguaggggcacggg

SEQ ID NO: 282225 - RNA, 20 nt, Human
ccuuucucuccuccuccucc

SEQ ID NO: 282226 - RNA, 19 nt, Human
cgagcgccccggcgccgcc

SEQ ID NO: 282227 - RNA, 21 nt, Human
cgccccggcgccgcccucucc

SEQ ID NO: 282228 - RNA, 19 nt, Human
cucugccuuggggaaccag

SEQ ID NO: 282229 - RNA, 21 nt, Human
cuucuuggaggcuuacucugg

SEQ ID NO: 282230 - RNA, 18 nt, Human
gacguccagggucagcgc

SEQ ID NO: 282231 - RNA, 19 nt, Human
gagaccucugccaccccca

SEQ ID NO: 282232 - RNA, 20 nt, Human
gcaaguagaaaaauagaaaa

SEQ ID NO: 282233 - RNA, 24 nt, Human
ggaaagggacuccuagaacuugag

SEQ ID NO: 282234 - RNA, 19 nt, Human
gggccggccgcggagguca

SEQ ID NO: 282235 - RNA, 22 nt, Human
uccacgcagacgcgagcgcccc

SEQ ID NO: 282236 - RNA, 20 nt, Human
uccacugaggggccggccgc

SEQ ID NO: 282237 - RNA, 22 nt, Human
ucuccgcaacaacagaaaugaa

SEQ ID NO: 282238 - RNA, 25 nt, Human
ucuccgcaacaacagaaaugaacuu

SEQ ID NO: 282239 - RNA, 18 nt, Human
ucuccuccuccuccuucu

SEQ ID NO: 282240 - RNA, 20 nt, Human
ucucuacagagcuagggcuu

SEQ ID NO: 282241 - RNA, 21 nt, Human
ugaaaaggaaacuaugacaaa

SEQ ID NO: 282242 - RNA, 22 nt, Human
ugaagcaaagagaccucugcca

SEQ ID NO: 282243 - RNA, 18 nt, Human
ugucagaauuuccagaau

SEQ ID NO: 282244 - RNA, 20 nt, Human
uugucagaauuuccagaauc

SEQ ID NO: 282245 - RNA, 20 nt, Human
uuuuuuuuuuuuuaagaagc

SEQ ID NO: 282246 - RNA, 19 nt, Human
uuuuuuuuuuuuuuuuuaa

SEQ ID NO: 282247 - RNA, 26 nt, Human
aaaccgguuuaaccuuuuuuuuuuuu

SEQ ID NO: 282248 - RNA, 23 nt, Human
aaacgguuccuuccacccuccac

SEQ ID NO: 282249 - RNA, 19 nt, Human
aauccauaccauccucccc

SEQ ID NO: 282250 - RNA, 21 nt, Human
accacaaacacacucaagccc

SEQ ID NO: 282251 - RNA, 21 nt, Human
acccagugcccaggagggccc

SEQ ID NO: 282252 - RNA, 25 nt, Human
acccagugcccaggagggccccaug

SEQ ID NO: 282253 - RNA, 22 nt, Human
accccaggaaccaccgccaccc

SEQ ID NO: 282254 - RNA, 23 nt, Human
accucugcccuccauuccggcuc

SEQ ID NO: 282255 - RNA, 27 nt, Human
acucugaaaaguccagcaguagagaaa

SEQ ID NO: 282256 - RNA, 22 nt, Human
acuucuuccugaaugcccugcc

SEQ ID NO: 282257 - RNA, 24 nt, Human
agaaaaucagaagcuccccacaaa

SEQ ID NO: 282258 - RNA, 19 nt, Human
agaacccucccaugccucc

SEQ ID NO: 282259 - RNA, 23 nt, Human
agaacccucccaugccuccacac

SEQ ID NO: 282260 - RNA, 24 nt, Human
agaacccucccaugccuccacacu

SEQ ID NO: 282261 - RNA, 19 nt, Human
agaggaaaccccugcagag

SEQ ID NO: 282262 - RNA, 24 nt, Human
agaugaggggaaggggaggggagg

SEQ ID NO: 282263 - RNA, 24 nt, Human
aggaggaggaggauugugguagaa

SEQ ID NO: 282264 - RNA, 19 nt, Human
aggcaaacgguuccuucca

SEQ ID NO: 282265 - RNA, 21 nt, Human
aggccccuggagaggaggagg

SEQ ID NO: 282266 - RNA, 28 nt, Human
aggggaaggggaggggaggggaagggau

SEQ ID NO: 282267 - RNA, 19 nt, Human
auuaggaaacccuuuguca

SEQ ID NO: 282268 - RNA, 22 nt, Human
caaggaaauggauggagaggaa

SEQ ID NO: 282269 - RNA, 20 nt, Human
cacacccccugcugccccuu

SEQ ID NO: 282270 - RNA, 23 nt, Human
cacccgagggcccacguucauuc

SEQ ID NO: 282271 - RNA, 20 nt, Human
cacccuuugucuuaaaucuc

SEQ ID NO: 282272 - RNA, 18 nt, Human
cagcaacucagauggcau

SEQ ID NO: 282273 - RNA, 24 nt, Human
cagcaaggaaauggauggagagga

SEQ ID NO: 282274 - RNA, 21 nt, Human
caggaaccaccgccacccuuu

SEQ ID NO: 282275 - RNA, 20 nt, Human
caucucagaccccaggaacc

SEQ ID NO: 282276 - RNA, 22 nt, Human
caucucuggaggcaaacgguuc

SEQ ID NO: 282277 - RNA, 20 nt, Human
caugagaacccucccaugcc

SEQ ID NO: 282278 - RNA, 24 nt, Human
cauuccggcuccucuccccuuacc

SEQ ID NO: 282279 - RNA, 21 nt, Human
ccauccucccccucgaguggc

SEQ ID NO: 282280 - RNA, 20 nt, Human
cccauccaucucccaaguca

SEQ ID NO: 282281 - RNA, 19 nt, Human
ccccaggaaccaccgccac

SEQ ID NO: 282282 - RNA, 26 nt, Human
ccccaggaaccaccgccacccuuugu

SEQ ID NO: 282283 - RNA, 18 nt, Human
cccccugcugccccuuuu

SEQ ID NO: 282284 - RNA, 20 nt, Human
ccccuccacucccucagccc

SEQ ID NO: 282285 - RNA, 21 nt, Human
ccccugcugccccuuuuuucc

SEQ ID NO: 282286 - RNA, 25 nt, Human
cccucagcccauccaucucccaagu

SEQ ID NO: 282287 - RNA, 24 nt, Human
cccuccacucccucagcccaucca

SEQ ID NO: 282288 - RNA, 20 nt, Human
cccugccuuucuuucuuccu

SEQ ID NO: 282289 - RNA, 21 nt, Human
ccuaaaguuccuuuguggcua

SEQ ID NO: 282290 - RNA, 22 nt, Human
ccucugaggucccccuccacuc

SEQ ID NO: 282291 - RNA, 25 nt, Human
ccuuaccacaaacacacucaagccc

SEQ ID NO: 282292 - RNA, 19 nt, Human
ccuuucuuucuuccucaca

SEQ ID NO: 282293 - RNA, 18 nt, Human
cuagaagcuuccgauucc

SEQ ID NO: 282294 - RNA, 24 nt, Human
cucacauuccuuccuucuuaauga

SEQ ID NO: 282295 - RNA, 22 nt, Human
cucccugguccugcuccucuga

SEQ ID NO: 282296 - RNA, 18 nt, Human
cucccuucucucacgucc

SEQ ID NO: 282297 - RNA, 28 nt, Human
cuuccgauuccuagucuucccaccuuac

SEQ ID NO: 282298 - RNA, 23 nt, Human
cuuugucuuaaaucucucuccca

SEQ ID NO: 282299 - RNA, 21 nt, Human
gaaaccaguaacaacagaaaa

SEQ ID NO: 282300 - RNA, 23 nt, Human
gaacccucccaugccuccacacu

SEQ ID NO: 282301 - RNA, 22 nt, Human
gacaguuuggaucuauuaggaa

SEQ ID NO: 282302 - RNA, 21 nt, Human
gagaacccucccaugccucca

SEQ ID NO: 282303 - RNA, 19 nt, Human
gaggaggaggauuguggua

SEQ ID NO: 282304 - RNA, 20 nt, Human
gccaggagaaaugggacggc

SEQ ID NO: 282305 - RNA, 28 nt, Human
gcccuagaagcuuccgauuccuagucuu

SEQ ID NO: 282306 - RNA, 22 nt, Human
gcuuaggaccacccagccgugg

SEQ ID NO: 282307 - RNA, 22 nt, Human
ggaaggggaggggaggggaagg

SEQ ID NO: 282308 - RNA, 20 nt, Human
gggaggggaggggaagggau

SEQ ID NO: 282309 - RNA, 18 nt, Human
ggggaaggggaggggagg

SEQ ID NO: 282310 - RNA, 22 nt, Human
guuaagcaaacuuuccccccuc

SEQ ID NO: 282311 - RNA, 23 nt, Human
uaacaacagaaaaucagaagcuc

SEQ ID NO: 282312 - RNA, 23 nt, Human
uacagcccugacagcaacucaga

SEQ ID NO: 282313 - RNA, 23 nt, Human
uaccacaaacacacucaagccca

SEQ ID NO: 282314 - RNA, 21 nt, Human
ucagaagcuccccacaaaugg

SEQ ID NO: 282315 - RNA, 19 nt, Human
uccaauggaugcccgugug

SEQ ID NO: 282316 - RNA, 25 nt, Human
uccacaaacacacccccugcugccc

SEQ ID NO: 282317 - RNA, 20 nt, Human
ucccuggggccaucucugga

SEQ ID NO: 282318 - RNA, 18 nt, Human
ucccuguguucucccugg

SEQ ID NO: 282319 - RNA, 20 nt, Human
uccucugaggucccccucca

SEQ ID NO: 282320 - RNA, 21 nt, Human
ucucccaucucccuucucuca

SEQ ID NO: 282321 - RNA, 20 nt, Human
ucucccugguccugcuccuc

SEQ ID NO: 282322 - RNA, 23 nt, Human
ucucucuaauucaggccuugcag

SEQ ID NO: 282323 - RNA, 19 nt, Human
ucucuggaggcaaacgguu

SEQ ID NO: 282324 - RNA, 21 nt, Human
ucuuucuuccucacauuccuu

SEQ ID NO: 282325 - RNA, 21 nt, Human
ugaaagacucugaaaagucca

SEQ ID NO: 282326 - RNA, 21 nt, Human
ugaggggaaggggaggggagg

SEQ ID NO: 282327 - RNA, 20 nt, Human
ugaggggagaaaggacaggg

SEQ ID NO: 282328 - RNA, 24 nt, Human
ugcccgugugacaaaagcagaaau

SEQ ID NO: 282329 - RNA, 24 nt, Human
ugcccugccuuucuuucuuccuca

SEQ ID NO: 282330 - RNA, 21 nt, Human
uggaagaugaggggaagggga

SEQ ID NO: 282331 - RNA, 24 nt, Human
uggagaggaggaggaggauugugg

SEQ ID NO: 282332 - RNA, 25 nt, Human
uggagaggaggaggaggauuguggu

SEQ ID NO: 282333 - RNA, 21 nt, Human
uggaggcaaacgguuccuucc

SEQ ID NO: 282334 - RNA, 22 nt, Human
uggcaucacugacaacccagca

SEQ ID NO: 282335 - RNA, 25 nt, Human
uggcuuaggaccacccagccguggg

SEQ ID NO: 282336 - RNA, 18 nt, Human
ugggaccccuaccugagg

SEQ ID NO: 282337 - RNA, 19 nt, Human
ugggaccccuaccugaggg

SEQ ID NO: 282338 - RNA, 22 nt, Human
ugguccugcuccucugaggucc

SEQ ID NO: 282339 - RNA, 19 nt, Human
ugucaggcuacagcccuga

SEQ ID NO: 282340 - RNA, 19 nt, Human
uugccuggaagaugagggg

SEQ ID NO: 282341 - RNA, 22 nt, Human
uugggagauucacaaugaaugu

SEQ ID NO: 282342 - RNA, 19 nt, Human
uuucaccucugcccuccau

SEQ ID NO: 282343 - RNA, 20 nt, Human
aacaagaauuguugagucug

SEQ ID NO: 282344 - RNA, 26 nt, Human
aacccuuucuccuauccuaaaggccc

SEQ ID NO: 282345 - RNA, 20 nt, Human
aagaauuguugagucugagg

SEQ ID NO: 282346 - RNA, 23 nt, Human
aauauggggucuggacccccagc

SEQ ID NO: 282347 - RNA, 22 nt, Human
agaauuguugagucugaggaau

SEQ ID NO: 282348 - RNA, 22 nt, Human
cuggugaugagagcaagguuuu

SEQ ID NO: 282349 - RNA, 23 nt, Human
gaaaacuuccuaguggcaacuaa

SEQ ID NO: 282350 - RNA, 18 nt, Human
gaacaagaauuguugagu

SEQ ID NO: 282351 - RNA, 20 nt, Human
gaccuuacacuuacuuuaca

SEQ ID NO: 282352 - RNA, 24 nt, Human
gagagcaagguuugggggggaagc

SEQ ID NO: 282353 - RNA, 20 nt, Human
ggcaacuaaggcuagagcag

SEQ ID NO: 282354 - RNA, 24 nt, Human
ggcccuucgggaagaagcucuagc

SEQ ID NO: 282355 - RNA, 21 nt, Human
gggaagaagcucuagcuggug

SEQ ID NO: 282356 - RNA, 24 nt, Human
uaaaggcccuucgggaagaagcuc

SEQ ID NO: 282357 - RNA, 23 nt, Human
uauggggucuggacccccagcac

SEQ ID NO: 282358 - RNA, 23 nt, Human
uauuuuauuuaacuacuucccca

SEQ ID NO: 282359 - RNA, 23 nt, Human
ucacacgugugugcaugaacccu

SEQ ID NO: 282360 - RNA, 22 nt, Human
uccauucucacacgugugugca

SEQ ID NO: 282361 - RNA, 23 nt, Human
ugagaacacaguucuaaagaaca

SEQ ID NO: 282362 - RNA, 24 nt, Human
ugagaacacaguucuaaagaacaa

SEQ ID NO: 282363 - RNA, 26 nt, Human
ugagagcaagguuugggggggaaguc

SEQ ID NO: 282364 - RNA, 18 nt, Human
ugaugagagcaagguuug

SEQ ID NO: 282365 - RNA, 24 nt, Human
ugcaguguugggaaggugagaaca

SEQ ID NO: 282366 - RNA, 27 nt, Human
uggugaugagagcaagguuugggggcc

SEQ ID NO: 282367 - RNA, 20 nt, Human
aaggaacugguccagauaac

SEQ ID NO: 282368 - RNA, 20 nt, Human
aaugaaggaacugguccaga

SEQ ID NO: 282369 - RNA, 21 nt, Human
aauuccagaaacccucgauug

SEQ ID NO: 282370 - RNA, 20 nt, Human
acacuggagcccuuuccccc

SEQ ID NO: 282371 - RNA, 19 nt, Human
agguggaaugaagugaggc

SEQ ID NO: 282372 - RNA, 19 nt, Human
agucccaccugaaaaugaa

SEQ ID NO: 282373 - RNA, 21 nt, Human
cacagaagaaagucaaggcug

SEQ ID NO: 282374 - RNA, 19 nt, Human
cauuagacauuacccuccc

SEQ ID NO: 282375 - RNA, 24 nt, Human
ccagauaacacuggagcccuuucc

SEQ ID NO: 282376 - RNA, 25 nt, Human
cugguccagauaacacuggagcccu

SEQ ID NO: 282377 - RNA, 18 nt, Human
cuuggauuauacaccagc

SEQ ID NO: 282378 - RNA, 21 nt, Human
cuuuggaaagaauggucucca

SEQ ID NO: 282379 - RNA, 22 nt, Human
gggaaugaauucuggacaaggg

SEQ ID NO: 282380 - RNA, 22 nt, Human
uauuuuuauuguuauugauaau

SEQ ID NO: 282381 - RNA, 19 nt, Human
ucacugaggagcuuugucu

SEQ ID NO: 282382 - RNA, 20 nt, Human
ucacugaggagcuuugucuu

SEQ ID NO: 282383 - RNA, 24 nt, Human
ucagggaauauuuucagagaauag

SEQ ID NO: 282384 - RNA, 19 nt, Human
ucuaugauaggauagaggg

SEQ ID NO: 282385 - RNA, 20 nt, Human
ucucuguucucucucaggga

SEQ ID NO: 282386 - RNA, 24 nt, Human
ucucuuaucuaaaucucucuguuc

SEQ ID NO: 282387 - RNA, 20 nt, Human
ucuggacaagggaugugaaa

SEQ ID NO: 282388 - RNA, 18 nt, Human
ugacaggagagagagugg

SEQ ID NO: 282389 - RNA, 18 nt, Human
ugacaggagagagagugg

SEQ ID NO: 282390 - RNA, 19 nt, Human
ugacaggagagagaguggc

SEQ ID NO: 282391 - RNA, 19 nt, Human
ugacaggagagagaguggc

SEQ ID NO: 282392 - RNA, 20 nt, Human
ugacuguaaaauauggagca

SEQ ID NO: 282393 - RNA, 18 nt, Human
ugcacagaagaaagucaa

SEQ ID NO: 282394 - RNA, 18 nt, Human
uggaaagaauggucucca

SEQ ID NO: 282395 - RNA, 18 nt, Human
uggaucaagagucccacc

SEQ ID NO: 282396 - RNA, 22 nt, Human
ugugaaaauuccagaaacccuc

SEQ ID NO: 282397 - RNA, 22 nt, Human
uucucuggaucaagagucccac

SEQ ID NO: 282398 - RNA, 22 nt, Human
uucuggacaagggaugugaaaa

SEQ ID NO: 282399 - RNA, 22 nt, Human
aaacagacaggacguggaugag

SEQ ID NO: 282400 - RNA, 18 nt, Human
aaagccaaggaaaaaguc

SEQ ID NO: 282401 - RNA, 22 nt, Human
aaccacaugacauucugagcaa

SEQ ID NO: 282402 - RNA, 19 nt, Human
aaccugguggagagaacca

SEQ ID NO: 282403 - RNA, 23 nt, Human
aagaaccugguggagagaaccaa

SEQ ID NO: 282404 - RNA, 23 nt, Human
aagccaaaggcagaaagagggac

SEQ ID NO: 282405 - RNA, 20 nt, Human
aagugcaaccaccuccacag

SEQ ID NO: 282406 - RNA, 21 nt, Human
aauaauuagagcuaaccccac

SEQ ID NO: 282407 - RNA, 21 nt, Human
acacaugcugcucaacauccu

SEQ ID NO: 282408 - RNA, 18 nt, Human
acagugcaugaaucuggg

SEQ ID NO: 282409 - RNA, 23 nt, Human
accucuucccuacauucccccca

SEQ ID NO: 282410 - RNA, 19 nt, Human
acuggguggcauguacugg

SEQ ID NO: 282411 - RNA, 19 nt, Human
agaaggaaaagacaacagc

SEQ ID NO: 282412 - RNA, 24 nt, Human
agaaggcaagggaaggaggaauag

SEQ ID NO: 282413 - RNA, 21 nt, Human
agaaguccaagaaggcaaggg

SEQ ID NO: 282414 - RNA, 21 nt, Human
agcaaggcagcuuuaugaaag

SEQ ID NO: 282415 - RNA, 21 nt, Human
agccuuuggagagcuugaagu

SEQ ID NO: 282416 - RNA, 19 nt, Human
aggaaaaaggaggagcuaa

SEQ ID NO: 282417 - RNA, 24 nt, Human
aggcagaaagaucugugaacccag

SEQ ID NO: 282418 - RNA, 19 nt, Human
auagaggaugucuguguca

SEQ ID NO: 282419 - RNA, 19 nt, Human
aucacuguguucuugaccu

SEQ ID NO: 282420 - RNA, 24 nt, Human
auuugugucugaguuaauuucagg

SEQ ID NO: 282421 - RNA, 26 nt, Human
caaacaaagaacugucuagcccaaug

SEQ ID NO: 282422 - RNA, 21 nt, Human
caaagaacugucuagcccaau

SEQ ID NO: 282423 - RNA, 24 nt, Human
caaagaacugucuagcccaaugug

SEQ ID NO: 282424 - RNA, 20 nt, Human
caagaggauacuccugggug

SEQ ID NO: 282425 - RNA, 22 nt, Human
caagaggauacuccuggguggg

SEQ ID NO: 282426 - RNA, 23 nt, Human
caagggaaggaggaauagggacc

SEQ ID NO: 282427 - RNA, 25 nt, Human
cacuuuuaauugucacaacugggug

SEQ ID NO: 282428 - RNA, 20 nt, Human
cagcaggggcagaaaggguu

SEQ ID NO: 282429 - RNA, 23 nt, Human
cagccucauauaaauaugacaac

SEQ ID NO: 282430 - RNA, 23 nt, Human
caggcucagaaggaaaagacaac

SEQ ID NO: 282431 - RNA, 23 nt, Human
cagguaaccacaugacauucuga

SEQ ID NO: 282432 - RNA, 18 nt, Human
cagugcaugaaucugggg

SEQ ID NO: 282433 - RNA, 21 nt, Human
ccaaacaaagaacugucuagc

SEQ ID NO: 282434 - RNA, 19 nt, Human
ccaagaaggcaagggaagg

SEQ ID NO: 282435 - RNA, 23 nt, Human
ccaucuggaggcaccguggccgc

SEQ ID NO: 282436 - RNA, 18 nt, Human
cccagguuggguguaggg

SEQ ID NO: 282437 - RNA, 21 nt, Human
ccccacgguuggcuuggcacc

SEQ ID NO: 282438 - RNA, 20 nt, Human
ccuacagugcaugaaucugg

SEQ ID NO: 282439 - RNA, 19 nt, Human
ccuacauuccccccagguu

SEQ ID NO: 282440 - RNA, 30 nt, Human
ccuguagugcaaggguucucaccuagggcc

SEQ ID NO: 282441 - RNA, 18 nt, Human
ccuuggguggcaagugca

SEQ ID NO: 282442 - RNA, 22 nt, Human
cuaaagaggguggagccaaaag

SEQ ID NO: 282443 - RNA, 25 nt, Human
cuccacagucaucuuuguagccacc

SEQ ID NO: 282444 - RNA, 20 nt, Human
cugaccagcuguuuaagcuc

SEQ ID NO: 282445 - RNA, 20 nt, Human
cuuugcuuugaagacacaga

SEQ ID NO: 282446 - RNA, 21 nt, Human
gaaacagacaggacguggaug

SEQ ID NO: 282447 - RNA, 20 nt, Human
gaaccugguggagagaacca

SEQ ID NO: 282448 - RNA, 25 nt, Human
gagccaaaagccaaaggcagaaaga

SEQ ID NO: 282449 - RNA, 22 nt, Human
gagccuccaaacaaagaacugu

SEQ ID NO: 282450 - RNA, 20 nt, Human
gcaaggguucucaccuaggg

SEQ ID NO: 282451 - RNA, 21 nt, Human
gcugaccagcuguuuaagcuc

SEQ ID NO: 282452 - RNA, 18 nt, Human
gcugcgcccagcccuaca

SEQ ID NO: 282453 - RNA, 25 nt, Human
ggaauagggaccaucaagggaagaa

SEQ ID NO: 282454 - RNA, 23 nt, Human
ggacguggaugaguuggaagcac

SEQ ID NO: 282455 - RNA, 19 nt, Human
ggagggcuuggagaggugu

SEQ ID NO: 282456 - RNA, 21 nt, Human
ggcaagugcaaccaccuccac

SEQ ID NO: 282457 - RNA, 21 nt, Human
gggaaggaggaauagggacca

SEQ ID NO: 282458 - RNA, 26 nt, Human
ggggauaaaggcaggcucagaaggaa

SEQ ID NO: 282459 - RNA, 24 nt, Human
gguggagagaaccaaguauaucug

SEQ ID NO: 282460 - RNA, 21 nt, Human
gguguggcagacauccuuggg

SEQ ID NO: 282461 - RNA, 22 nt, Human
gucucaagacacuuuuaauugu

SEQ ID NO: 282462 - RNA, 21 nt, Human
guggagccaaaagccaaaggc

SEQ ID NO: 282463 - RNA, 22 nt, Human
guggcagacauccuuggguggc

SEQ ID NO: 282464 - RNA, 19 nt, Human
uaaaggcaggcucagaagg

SEQ ID NO: 282465 - RNA, 21 nt, Human
uaaccacaugacauucugagc

SEQ ID NO: 282466 - RNA, 23 nt, Human
uaaccccacgguuggcuuggcac

SEQ ID NO: 282467 - RNA, 20 nt, Human
uaagcuccugugagcugggu

SEQ ID NO: 282468 - RNA, 20 nt, Human
uacaagaaaaaaaaauacaa

SEQ ID NO: 282469 - RNA, 18 nt, Human
uauacagaggaaacagac

SEQ ID NO: 282470 - RNA, 24 nt, Human
uaucuuuaaggcuaaagccaagga

SEQ ID NO: 282471 - RNA, 20 nt, Human
ucaacauccuacaugcacaa

SEQ ID NO: 282472 - RNA, 19 nt, Human
ucacagaguuaugagaacc

SEQ ID NO: 282473 - RNA, 19 nt, Human
ucagaaggaaaagacaaca

SEQ ID NO: 282474 - RNA, 19 nt, Human
ucagcaggggcagaaaggg

SEQ ID NO: 282475 - RNA, 24 nt, Human
ucagguugcuacaguaggagaagu

SEQ ID NO: 282476 - RNA, 20 nt, Human
uccuggguggggggauaaag

SEQ ID NO: 282477 - RNA, 20 nt, Human
uccugugagcuggguuuccu

SEQ ID NO: 282478 - RNA, 23 nt, Human
ugaaauggaagaaaauuugcgga

SEQ ID NO: 282479 - RNA, 20 nt, Human
ugacagaaauaagaugcaca

SEQ ID NO: 282480 - RNA, 24 nt, Human
ugacagaaauaagaugcacauaaa

SEQ ID NO: 282481 - RNA, 24 nt, Human
ugagaaccaaggggaaaguaaaga

SEQ ID NO: 282482 - RNA, 22 nt, Human
ugaguuggaagcaccgagagca

SEQ ID NO: 282483 - RNA, 23 nt, Human
ugcacaagagagccuccaaacaa

SEQ ID NO: 282484 - RNA, 22 nt, Human
ugccaucuggaggcaccguggc

SEQ ID NO: 282485 - RNA, 24 nt, Human
uggagagguguggcagacauccuu

SEQ ID NO: 282486 - RNA, 19 nt, Human
uggcaagugcaaccaccuc

SEQ ID NO: 282487 - RNA, 19 nt, Human
uggcagacauccuugggug

SEQ ID NO: 282488 - RNA, 18 nt, Human
uggguggggggauaaagg

SEQ ID NO: 282489 - RNA, 21 nt, Human
uggguggggggauaaaggcaa

SEQ ID NO: 282490 - RNA, 22 nt, Human
ugguagguaggagggcuuggag

SEQ ID NO: 282491 - RNA, 25 nt, Human
ugguagguaggagggcuuggagagg

SEQ ID NO: 282492 - RNA, 22 nt, Human
uguaucacaacugguauaugca

SEQ ID NO: 282493 - RNA, 29 nt, Human
uguucuugaccuuuggguaucccguuggg

SEQ ID NO: 282494 - RNA, 24 nt, Human
uuaaggcuaaagccaaggaaaaag

SEQ ID NO: 282495 - RNA, 21 nt, Human
uucaagaaguccaagaaggca

SEQ ID NO: 282496 - RNA, 20 nt, Human
uuccuucuuccugcuuggau

SEQ ID NO: 282497 - RNA, 19 nt, Human
uugaaguucuaaugaaagg

SEQ ID NO: 282498 - RNA, 24 nt, Human
uuggguaucuuuuccuucuuccug

SEQ ID NO: 282499 - RNA, 19 nt, Human
uuucaagaaguccaagaag

SEQ ID NO: 282500 - RNA, 24 nt, Human
uuuguagccaccuucaaguuacag

SEQ ID NO: 282501 - RNA, 22 nt, Human
uuuuaagcagggcuccugcaga

SEQ ID NO: 282502 - RNA, 18 nt, Human
aaagagccaccuaacugc

SEQ ID NO: 282503 - RNA, 20 nt, Human
aacccucuuuuaccaccaag

SEQ ID NO: 282504 - RNA, 23 nt, Human
aagaaaaggaggccucucaugaa

SEQ ID NO: 282505 - RNA, 19 nt, Human
aagccaugggaggcagggg

SEQ ID NO: 282506 - RNA, 21 nt, Human
aagccaugggaggcaggggag

SEQ ID NO: 282507 - RNA, 19 nt, Human
aagcccccaaaaguuacag

SEQ ID NO: 282508 - RNA, 18 nt, Human
aaggaggcccucuggcuc

SEQ ID NO: 282509 - RNA, 23 nt, Human
aaggcucuucccaucccauucaa

SEQ ID NO: 282510 - RNA, 19 nt, Human
aaggugcccuuagcguugg

SEQ ID NO: 282511 - RNA, 18 nt, Human
aaguuuuaacagugguuu

SEQ ID NO: 282512 - RNA, 30 nt, Human
aauuaaacacacacacacacacacacacag

SEQ ID NO: 282513 - RNA, 18 nt, Human
acacaaucucucucaucu

SEQ ID NO: 282514 - RNA, 23 nt, Human
acacacacacacacacacacaca

SEQ ID NO: 282515 - RNA, 23 nt, Human
acacacacacacacacacacaca

SEQ ID NO: 282516 - RNA, 23 nt, Human
acacacacacacacacacacaca

SEQ ID NO: 282517 - RNA, 23 nt, Human
acacacacacacacacacacaca

SEQ ID NO: 282518 - RNA, 23 nt, Human
acacacacacacacacacacaca

SEQ ID NO: 282519 - RNA, 22 nt, Human
acacacacacacacacacacag

SEQ ID NO: 282520 - RNA, 25 nt, Human
acacacaugcacacaugugcucaca

SEQ ID NO: 282521 - RNA, 27 nt, Human
acacacaugcacacgugugcacacaca

SEQ ID NO: 282522 - RNA, 25 nt, Human
acacaugcacacaugugcucacaca

SEQ ID NO: 282523 - RNA, 21 nt, Human
acacaugcacacgugugcaca

SEQ ID NO: 282524 - RNA, 21 nt, Human
accacuuuccucuacugcauc

SEQ ID NO: 282525 - RNA, 20 nt, Human
acuggcuugugaugcccagg

SEQ ID NO: 282526 - RNA, 22 nt, Human
agaaaugcaacccucuuuuacc

SEQ ID NO: 282527 - RNA, 20 nt, Human
agacaaaguaagccaauaug

SEQ ID NO: 282528 - RNA, 21 nt, Human
agaggagucagggaggagggg

SEQ ID NO: 282529 - RNA, 18 nt, Human
agagggcagagagaaaca

SEQ ID NO: 282530 - RNA, 26 nt, Human
aggagaggccaaugggaggaagggau

SEQ ID NO: 282531 - RNA, 24 nt, Human
aggcaggggagugugugagcuggg

SEQ ID NO: 282532 - RNA, 25 nt, Human
aggcugagccaaagacggcagagaa

SEQ ID NO: 282533 - RNA, 18 nt, Human
agucagggaggagggggc

SEQ ID NO: 282534 - RNA, 21 nt, Human
auaauuacucuaauucuggag

SEQ ID NO: 282535 - RNA, 19 nt, Human
auaguccagugguggccuc

SEQ ID NO: 282536 - RNA, 21 nt, Human
aucauggcacuuguaccacca

SEQ ID NO: 282537 - RNA, 19 nt, Human
augagcaagcccuccucuc

SEQ ID NO: 282538 - RNA, 22 nt, Human
augucucagacuccucugcagc

SEQ ID NO: 282539 - RNA, 31 nt, Human
auuaaacacacacacacacacacacacacag

SEQ ID NO: 282540 - RNA, 20 nt, Human
caaaguaagccaauaugggc

SEQ ID NO: 282541 - RNA, 19 nt, Human
caacucccucugucugugu

SEQ ID NO: 282542 - RNA, 18 nt, Human
caaggagaggccaauggg

SEQ ID NO: 282543 - RNA, 20 nt, Human
cacacacacacacacacaca

SEQ ID NO: 282544 - RNA, 20 nt, Human
cacacacacacacacacaca

SEQ ID NO: 282545 - RNA, 20 nt, Human
cacacacacacacacacaca

SEQ ID NO: 282546 - RNA, 20 nt, Human
cacacacacacacacacaca

SEQ ID NO: 282547 - RNA, 20 nt, Human
cacacacacacacacacaca

SEQ ID NO: 282548 - RNA, 20 nt, Human
cacacacacacacacacaca

SEQ ID NO: 282549 - RNA, 22 nt, Human
cacacacacacacacacacaca

SEQ ID NO: 282550 - RNA, 26 nt, Human
cacacacacacacacacacacacaca

SEQ ID NO: 282551 - RNA, 27 nt, Human
cacacacacacacacacacacacacca

SEQ ID NO: 282552 - RNA, 24 nt, Human
cacacacaugcacacaugugcuca

SEQ ID NO: 282553 - RNA, 25 nt, Human
cacacacaugcacacgugugcacac

SEQ ID NO: 282554 - RNA, 21 nt, Human
cacagcaucaagauguguaaa

SEQ ID NO: 282555 - RNA, 20 nt, Human
cacaugugcucacacacaca

SEQ ID NO: 282556 - RNA, 20 nt, Human
caccaagaugggggacaggg

SEQ ID NO: 282557 - RNA, 19 nt, Human
caccaggguggccauugcc

SEQ ID NO: 282558 - RNA, 19 nt, Human
caccuggucuucccaggag

SEQ ID NO: 282559 - RNA, 23 nt, Human
cagagagaaacaggcugagcacg

SEQ ID NO: 282560 - RNA, 18 nt, Human
cagagaggagucagggag

SEQ ID NO: 282561 - RNA, 21 nt, Human
cagcagccagggccaauccaa

SEQ ID NO: 282562 - RNA, 22 nt, Human
cagcaggaggaaagaugugagc

SEQ ID NO: 282563 - RNA, 20 nt, Human
cagcauaaaaggugaagaaa

SEQ ID NO: 282564 - RNA, 21 nt, Human
caguagcaguggcugcucucu

SEQ ID NO: 282565 - RNA, 24 nt, Human
cauuaagccuaucaaucaacucag

SEQ ID NO: 282566 - RNA, 20 nt, Human
cccacauauacacuguaaac

SEQ ID NO: 282567 - RNA, 25 nt, Human
ccccaaaaguuacaguggggccucg

SEQ ID NO: 282568 - RNA, 18 nt, Human
cccgcagcucuggcagcu

SEQ ID NO: 282569 - RNA, 19 nt, Human
ccucugccuucugcuccuc

SEQ ID NO: 282570 - RNA, 23 nt, Human
ccucuggcucucucacuuagcuu

SEQ ID NO: 282571 - RNA, 22 nt, Human
ccucugucccuucaccuacucu

SEQ ID NO: 282572 - RNA, 24 nt, Human
ccucuuuuaccaccaaggaggccc

SEQ ID NO: 282573 - RNA, 21 nt, Human
ccuggugggccuugcucuaga

SEQ ID NO: 282574 - RNA, 20 nt, Human
cgcccggcgcaggugcaagg

SEQ ID NO: 282575 - RNA, 31 nt, Human
cuaaaacacacacaugcacacgugugcacag

SEQ ID NO: 282576 - RNA, 25 nt, Human
cucagcauguuaggagagaaaacag

SEQ ID NO: 282577 - RNA, 18 nt, Human
cucucugcccuacccaga

SEQ ID NO: 282578 - RNA, 19 nt, Human
cucugguucccaccaucuc

SEQ ID NO: 282579 - RNA, 22 nt, Human
cucuucauccaguaggaccgcu

SEQ ID NO: 282580 - RNA, 19 nt, Human
cucuucccaucccauucaa

SEQ ID NO: 282581 - RNA, 21 nt, Human
cugcagccagaggucuggcug

SEQ ID NO: 282582 - RNA, 21 nt, Human
cugccuucugcuccuccagcc

SEQ ID NO: 282583 - RNA, 19 nt, Human
cuggcccugagcucuugga

SEQ ID NO: 282584 - RNA, 18 nt, Human
cuguaaaccugcaagcac

SEQ ID NO: 282585 - RNA, 20 nt, Human
cuucacuuucucugccuucu

SEQ ID NO: 282586 - RNA, 20 nt, Human
cuuggcacccauucaaucau

SEQ ID NO: 282587 - RNA, 24 nt, Human
cuuggcagagcaggucucugcugc

SEQ ID NO: 282588 - RNA, 24 nt, Human
cuugugaugcccaggccagggcca

SEQ ID NO: 282589 - RNA, 18 nt, Human
gacccacucccucaucca

SEQ ID NO: 282590 - RNA, 24 nt, Human
gagaagcugcaaacgcaggcuggu

SEQ ID NO: 282591 - RNA, 20 nt, Human
gagaagggauguucaguggc

SEQ ID NO: 282592 - RNA, 20 nt, Human
gagaggagucagggaggagg

SEQ ID NO: 282593 - RNA, 18 nt, Human
gaggaagggauggauugc

SEQ ID NO: 282594 - RNA, 26 nt, Human
gauccuaguguguaagccaugggagg

SEQ ID NO: 282595 - RNA, 23 nt, Human
gcaacagauggccaggaugcauc

SEQ ID NO: 282596 - RNA, 19 nt, Human
gcaagcccuccucucugcc

SEQ ID NO: 282597 - RNA, 18 nt, Human
gcaaggagaggccaaugg

SEQ ID NO: 282598 - RNA, 28 nt, Human
gcacacacaugcacacaugugcucacac

SEQ ID NO: 282599 - RNA, 18 nt, Human
gcagcaggaggaaagaug

SEQ ID NO: 282600 - RNA, 21 nt, Human
gcaggggagugugugagcugg

SEQ ID NO: 282601 - RNA, 22 nt, Human
gccaugggaggcaggggagugu

SEQ ID NO: 282602 - RNA, 19 nt, Human
gccauucuuuaaaacccuu

SEQ ID NO: 282603 - RNA, 21 nt, Human
gccuucugcuccuccagccuu

SEQ ID NO: 282604 - RNA, 24 nt, Human
gcuaagaaagggaggugggauccg

SEQ ID NO: 282605 - RNA, 20 nt, Human
gcuuccuuucuuuguuuccu

SEQ ID NO: 282606 - RNA, 23 nt, Human
ggaggcaggggagugugugagcu

SEQ ID NO: 282607 - RNA, 20 nt, Human
ggcugguguccaucuucucu

SEQ ID NO: 282608 - RNA, 23 nt, Human
gggggcauucucagcuggguggg

SEQ ID NO: 282609 - RNA, 23 nt, Human
ggucuucccaggagcaucacugg

SEQ ID NO: 282610 - RNA, 23 nt, Human
gucaagucuuuccauccgagggu

SEQ ID NO: 282611 - RNA, 20 nt, Human
gugagcuaauuugcaugggc

SEQ ID NO: 282612 - RNA, 18 nt, Human
gugagcugggagagcaga

SEQ ID NO: 282613 - RNA, 18 nt, Human
guguaaacuaggggagga

SEQ ID NO: 282614 - RNA, 20 nt, Human
guguguggcagcagccaggg

SEQ ID NO: 282615 - RNA, 18 nt, Human
guugcucaccucucucca

SEQ ID NO: 282616 - RNA, 18 nt, Human
uaaaaggugaagaaaagg

SEQ ID NO: 282617 - RNA, 23 nt, Human
uaaacuaggggaggagugcagca

SEQ ID NO: 282618 - RNA, 18 nt, Human
uaacagugguuuguggag

SEQ ID NO: 282619 - RNA, 22 nt, Human
uacacuguaaaccugcaagcac

SEQ ID NO: 282620 - RNA, 18 nt, Human
uacccaacugcgaccugc

SEQ ID NO: 282621 - RNA, 22 nt, Human
uacuuuuuuccccagagucuug

SEQ ID NO: 282622 - RNA, 27 nt, Human
uagagugcuuucuguuuucugggcuga

SEQ ID NO: 282623 - RNA, 22 nt, Human
uagcaugcaugucccaacuccc

SEQ ID NO: 282624 - RNA, 22 nt, Human
uaggggacccugaauuuccuca

SEQ ID NO: 282625 - RNA, 23 nt, Human
uauggcacagguauuagaagccc

SEQ ID NO: 282626 - RNA, 23 nt, Human
ucaccucucuccaagaaugacaa

SEQ ID NO: 282627 - RNA, 26 nt, Human
ucaguggcuuccuuucuuuguuuccu

SEQ ID NO: 282628 - RNA, 24 nt, Human
uccaagagguggaguuuggggucc

SEQ ID NO: 282629 - RNA, 22 nt, Human
uccccagagucuuggaaagagc

SEQ ID NO: 282630 - RNA, 19 nt, Human
uccuguggagcagagaagg

SEQ ID NO: 282631 - RNA, 23 nt, Human
ucugcccuacccagaugacaacc

SEQ ID NO: 282632 - RNA, 23 nt, Human
ucugccuucuggcugcaagaaau

SEQ ID NO: 282633 - RNA, 23 nt, Human
ucuuaggauucaguucuggacuu

SEQ ID NO: 282634 - RNA, 18 nt, Human
ugacagaugagaugggaa

SEQ ID NO: 282635 - RNA, 24 nt, Human
ugacagaugagaugggaacucucu

SEQ ID NO: 282636 - RNA, 19 nt, Human
ugagaugggaacucucugc

SEQ ID NO: 282637 - RNA, 23 nt, Human
ugaggucaggagagccuccugga

SEQ ID NO: 282638 - RNA, 18 nt, Human
ugauugcauuuagcuuuu

SEQ ID NO: 282639 - RNA, 23 nt, Human
ugcccaggccagggccacucugc

SEQ ID NO: 282640 - RNA, 21 nt, Human
ugccuaagauuccuagagugc

SEQ ID NO: 282641 - RNA, 25 nt, Human
ugcuaagaaagggaggugggauccg

SEQ ID NO: 282642 - RNA, 18 nt, Human
uggaagguacccaacugc

SEQ ID NO: 282643 - RNA, 22 nt, Human
uggaaugaaauacaccccuguu

SEQ ID NO: 282644 - RNA, 19 nt, Human
uggacacuguuguuggacu

SEQ ID NO: 282645 - RNA, 20 nt, Human
uggcaaggagaggccaaugg

SEQ ID NO: 282646 - RNA, 21 nt, Human
uggcaaggagaggccaauggg

SEQ ID NO: 282647 - RNA, 24 nt, Human
uggcaaggagaggccaaugggagg

SEQ ID NO: 282648 - RNA, 19 nt, Human
uggcacagguauuagaagc

SEQ ID NO: 282649 - RNA, 22 nt, Human
uggcacagguauuagaagcccu

SEQ ID NO: 282650 - RNA, 18 nt, Human
uggcagcuggccaucccu

SEQ ID NO: 282651 - RNA, 24 nt, Human
uggccaggaugcaucugcugggga

SEQ ID NO: 282652 - RNA, 22 nt, Human
uggcuagaccgggaagccccca

SEQ ID NO: 282653 - RNA, 24 nt, Human
uggcuagaccgggaagcccccaag

SEQ ID NO: 282654 - RNA, 20 nt, Human
uggcugcucucuggccucug

SEQ ID NO: 282655 - RNA, 21 nt, Human
uggcuuccuuucuuuguuucc

SEQ ID NO: 282656 - RNA, 21 nt, Human
uggugguaugaggauagaguc

SEQ ID NO: 282657 - RNA, 22 nt, Human
ugucccaacucccucugucugu

SEQ ID NO: 282658 - RNA, 21 nt, Human
ugucucagacuccucugcagc

SEQ ID NO: 282659 - RNA, 23 nt, Human
ugucucagacuccucugcagcca

SEQ ID NO: 282660 - RNA, 26 nt, Human
ugugcacacacaugcacacaugugcu

SEQ ID NO: 282661 - RNA, 25 nt, Human
ugugcacacacaugcacacaugugg

SEQ ID NO: 282662 - RNA, 26 nt, Human
ugugcucacacacacauguacacagu

SEQ ID NO: 282663 - RNA, 19 nt, Human
uguggagagucaggcuguc

SEQ ID NO: 282664 - RNA, 23 nt, Human
uguuguuggacuugaggucagga

SEQ ID NO: 282665 - RNA, 24 nt, Human
uguuuccuguuccuuccucugaga

SEQ ID NO: 282666 - RNA, 20 nt, Human
uuacguaccagcgccaugcu

SEQ ID NO: 282667 - RNA, 22 nt, Human
uuagauaaaaucccuuucugcc

SEQ ID NO: 282668 - RNA, 31 nt, Human
uucacuaaaacacacacaugcacacgugugg

SEQ ID NO: 282669 - RNA, 19 nt, Human
uuccucaugcugagggcug

SEQ ID NO: 282670 - RNA, 26 nt, Human
uugcguguguauuuuuccauaagaac

SEQ ID NO: 282671 - RNA, 26 nt, Human
uuugugguugcaggaaucuaaccuag

SEQ ID NO: 282672 - RNA, 26 nt, Human
uuuuccuagcuauugcguguguauuu

SEQ ID NO: 282673 - RNA, 19 nt, Human
aaaacuggugaagaccugg

SEQ ID NO: 282674 - RNA, 24 nt, Human
aaaguucugggauuacagguguga

SEQ ID NO: 282675 - RNA, 25 nt, Human
aagcgcuccucccaccucggccucc

SEQ ID NO: 282676 - RNA, 18 nt, Human
acauggcagaaauguaca

SEQ ID NO: 282677 - RNA, 24 nt, Human
caaaguucugggauuacaggugug

SEQ ID NO: 282678 - RNA, 24 nt, Human
caccucggccucccaaaguucugg

SEQ ID NO: 282679 - RNA, 22 nt, Human
cacgucuggccugggauaacuc

SEQ ID NO: 282680 - RNA, 23 nt, Human
cauggcagaaauguacagagaag

SEQ ID NO: 282681 - RNA, 21 nt, Human
ccaaaguucugggauuacagg

SEQ ID NO: 282682 - RNA, 24 nt, Human
ccaaaguucugggauuacaggugu

SEQ ID NO: 282683 - RNA, 24 nt, Human
cccuaugauacccaggcuggucuu

SEQ ID NO: 282684 - RNA, 22 nt, Human
ccuaugauacccaggcuggucu

SEQ ID NO: 282685 - RNA, 19 nt, Human
ccucccaccucggccuccc

SEQ ID NO: 282686 - RNA, 20 nt, Human
ccucccaccucggccuccca

SEQ ID NO: 282687 - RNA, 19 nt, Human
ccucggcucaagcgcuccu

SEQ ID NO: 282688 - RNA, 20 nt, Human
ccucggcucaagcgcuccuc

SEQ ID NO: 282689 - RNA, 24 nt, Human
cucaagcgcuccucccaccucggc

SEQ ID NO: 282690 - RNA, 24 nt, Human
cuccucccaccucggccucccaaa

SEQ ID NO: 282691 - RNA, 20 nt, Human
cuccucggcucaagcgcucc

SEQ ID NO: 282692 - RNA, 23 nt, Human
gaguacauggcagaaauguacag

SEQ ID NO: 282693 - RNA, 19 nt, Human
gauuacaggugugagcuac

SEQ ID NO: 282694 - RNA, 21 nt, Human
gauuacaggugugagcuacca

SEQ ID NO: 282695 - RNA, 23 nt, Human
gcuccucccaccucggccuccca

SEQ ID NO: 282696 - RNA, 18 nt, Human
ggcuggucuugaacuccu

SEQ ID NO: 282697 - RNA, 18 nt, Human
guagagacggggucuccc

SEQ ID NO: 282698 - RNA, 18 nt, Human
guagagacggggucuccc

SEQ ID NO: 282699 - RNA, 24 nt, Human
uacccaggcuggucuugaacuccu

SEQ ID NO: 282700 - RNA, 23 nt, Human
uaugauacccaggcuggucuuga

SEQ ID NO: 282701 - RNA, 24 nt, Human
uaugauacccaggcuggucuugaa

SEQ ID NO: 282702 - RNA, 23 nt, Human
ucccaaaguucugggauuacagg

SEQ ID NO: 282703 - RNA, 20 nt, Human
uccucggcucaagcgcuccu

SEQ ID NO: 282704 - RNA, 24 nt, Human
uccucggcucaagcgcuccuccca

SEQ ID NO: 282705 - RNA, 23 nt, Human
ucuugaacuccucggcucaagcg

SEQ ID NO: 282706 - RNA, 18 nt, Human
ugaguucuggaguacaug

SEQ ID NO: 282707 - RNA, 18 nt, Human
ugauacccaggcuggucu

SEQ ID NO: 282708 - RNA, 22 nt, Human
ugauacccaggcuggucuugaa

SEQ ID NO: 282709 - RNA, 24 nt, Human
ugauugacaggaugaguucuggag

SEQ ID NO: 282710 - RNA, 23 nt, Human
uggccugggauaacucauuguaa

SEQ ID NO: 282711 - RNA, 28 nt, Human
ugggauaacucauuguaaaaggucaucc

SEQ ID NO: 282712 - RNA, 18 nt, Human
ugggauuacaggugugag

SEQ ID NO: 282713 - RNA, 19 nt, Human
ugggauuacaggugugagc

SEQ ID NO: 282714 - RNA, 22 nt, Human
ugggauuacaggugugagcuac

SEQ ID NO: 282715 - RNA, 23 nt, Human
ugggauuacaggugugagcuacc

SEQ ID NO: 282716 - RNA, 24 nt, Human
ugggauuacaggugugagcuacca

SEQ ID NO: 282717 - RNA, 19 nt, Human
uguagagacggggucuccc

SEQ ID NO: 282718 - RNA, 23 nt, Human
uuguagagacggggucucccuau

SEQ ID NO: 282719 - RNA, 18 nt, Human
uuuguagagacggggucu

SEQ ID NO: 282720 - RNA, 23 nt, Human
uuuguagagacggggucucccua

SEQ ID NO: 282721 - RNA, 20 nt, Human
aaagcaaacggcagguucau

SEQ ID NO: 282722 - RNA, 22 nt, Human
aaccacagaucugacagcgccu

SEQ ID NO: 282723 - RNA, 23 nt, Human
aaguuuuugaagacucaugggag

SEQ ID NO: 282724 - RNA, 19 nt, Human
acguuacaaagcaaacggc

SEQ ID NO: 282725 - RNA, 19 nt, Human
aguuuuugaagacucaugg

SEQ ID NO: 282726 - RNA, 20 nt, Human
ccacugaaaacagcuggcua

SEQ ID NO: 282727 - RNA, 19 nt, Human
cccacauuaggaauaaagc

SEQ ID NO: 282728 - RNA, 20 nt, Human
cguuacaaagcaaacggcag

SEQ ID NO: 282729 - RNA, 23 nt, Human
gaaaaaaauauauucaaaaaaaa

SEQ ID NO: 282730 - RNA, 19 nt, Human
uaauccuuccuaaaauuca

SEQ ID NO: 282731 - RNA, 22 nt, Human
uacacuuaaccauuaauccuuc

SEQ ID NO: 282732 - RNA, 20 nt, Human
uauaaucaagcacucaaaac

SEQ ID NO: 282733 - RNA, 23 nt, Human
uauauacacuuaaccauuaaucc

SEQ ID NO: 282734 - RNA, 20 nt, Human
uaugaaacacuuauaccagu

SEQ ID NO: 282735 - RNA, 23 nt, Human
ucaaaauaaugacauccauagaa

SEQ ID NO: 282736 - RNA, 24 nt, Human
ugaaaaaaauauauucaaaaaaaa

SEQ ID NO: 282737 - RNA, 19 nt, Human
ugaauauagaugccauuac

SEQ ID NO: 282738 - RNA, 23 nt, Human
ugacauccauagaauacaacccu

SEQ ID NO: 282739 - RNA, 19 nt, Human
uggaaugugcccacauuag

SEQ ID NO: 282740 - RNA, 23 nt, Human
uucaaaauaaugacauccauaga

SEQ ID NO: 282741 - RNA, 19 nt, Human
agguccaggugguccgggc

SEQ ID NO: 282742 - RNA, 21 nt, Human
ccagagcucugugcugccgac

SEQ ID NO: 282743 - RNA, 23 nt, Human
cuggaggguagguccaggugguc

SEQ ID NO: 282744 - RNA, 20 nt, Human
cuggugguagggugggcucu

SEQ ID NO: 282745 - RNA, 20 nt, Human
gaggugcagacccgggggcu

SEQ ID NO: 282746 - RNA, 18 nt, Human
ggugggcucuggaggugc

SEQ ID NO: 282747 - RNA, 18 nt, Human
uggcuggaggguaggucc

SEQ ID NO: 282748 - RNA, 24 nt, Human
uggcuggaggguagguccaggugg

SEQ ID NO: 282749 - RNA, 20 nt, Human
ugguagggugggcucuggag

SEQ ID NO: 282750 - RNA, 23 nt, Human
uuuggagucaggugggugggagc

SEQ ID NO: 282751 - RNA, 21 nt, Human
ccagagcucugugcugccgac

SEQ ID NO: 282752 - RNA, 23 nt, Human
cuggaggguagguccaggugguc

SEQ ID NO: 282753 - RNA, 20 nt, Human
cuggugguagggugggcucu

SEQ ID NO: 282754 - RNA, 20 nt, Human
gaggugcagacccgggggcu

SEQ ID NO: 282755 - RNA, 18 nt, Human
ggugggcucuggaggugc

SEQ ID NO: 282756 - RNA, 23 nt, Human
guagguccaggugguccgggcuc

SEQ ID NO: 282757 - RNA, 24 nt, Human
ucuggaggugcagacccgggggcu

SEQ ID NO: 282758 - RNA, 18 nt, Human
uggcuggaggguaggucc

SEQ ID NO: 282759 - RNA, 24 nt, Human
uggcuggaggguagguccaggugg

SEQ ID NO: 282760 - RNA, 20 nt, Human
ugguagggugggcucuggag

SEQ ID NO: 282761 - RNA, 23 nt, Human
uuuggagucaggugggugggagc

SEQ ID NO: 282762 - RNA, 22 nt, Human
aggaggucaugguguuccaaca

SEQ ID NO: 282763 - RNA, 20 nt, Human
caggguaagcaccuuuucuu

SEQ ID NO: 282764 - RNA, 25 nt, Human
caguaaaccuuuucccagaaagucu

SEQ ID NO: 282765 - RNA, 18 nt, Human
cuacauuuuguccuuggg

SEQ ID NO: 282766 - RNA, 18 nt, Human
gggagaaaggacacacag

SEQ ID NO: 282767 - RNA, 25 nt, Human
uaauggguugugauggaugaaguuu

SEQ ID NO: 282768 - RNA, 22 nt, Human
uacaagaaaaacaaacuguguu

SEQ ID NO: 282769 - RNA, 21 nt, Human
uagcaucuccaggguaagcac

SEQ ID NO: 282770 - RNA, 18 nt, Human
ucuccaggguaagcaccu

SEQ ID NO: 282771 - RNA, 18 nt, Human
ugaaaagugauuacaaga

SEQ ID NO: 282772 - RNA, 24 nt, Human
uggggucaggguaguuuuaugacu

SEQ ID NO: 282773 - RNA, 23 nt, Human
uguagcaucuccaggguaagcac

SEQ ID NO: 282774 - RNA, 24 nt, Human
uguauagcaggaaggguuuuuaaa

SEQ ID NO: 282775 - RNA, 24 nt, Human
ugucaaggucuauuccaaccuagg

SEQ ID NO: 282776 - RNA, 21 nt, Human
ugucaaggucuauuccacugu

SEQ ID NO: 282777 - RNA, 22 nt, Human
ugucaaggucuauuccacugug

SEQ ID NO: 282778 - RNA, 22 nt, Human
ugucucuguagcaucuccaggg

SEQ ID NO: 282779 - RNA, 23 nt, Human
uugugauggaugaaguuuccuuu

SEQ ID NO: 282780 - RNA, 21 nt, Human
aacaguuaucugaaagguggu

SEQ ID NO: 282781 - RNA, 19 nt, Human
aaccaaaacuuugugaugc

SEQ ID NO: 282782 - RNA, 21 nt, Human
aagcaguuucacuucagagac

SEQ ID NO: 282783 - RNA, 21 nt, Human
aauaacaguuaucugaaaggu

SEQ ID NO: 282784 - RNA, 23 nt, Human
acaguuaucugaaaggugguuga

SEQ ID NO: 282785 - RNA, 18 nt, Human
agaaaaaaaauagggagg

SEQ ID NO: 282786 - RNA, 27 nt, Human
agaaaaaccucuuuuaaccauuuauau

SEQ ID NO: 282787 - RNA, 27 nt, Human
agauaaaccaaucugcugcguccuaga

SEQ ID NO: 282788 - RNA, 20 nt, Human
auaguagcuaaaauaugaaa

SEQ ID NO: 282789 - RNA, 22 nt, Human
caaccaaaacuuugugaugcuc

SEQ ID NO: 282790 - RNA, 18 nt, Human
cacagagguuuggcuucc

SEQ ID NO: 282791 - RNA, 20 nt, Human
cacagagguuuggcuuccgg

SEQ ID NO: 282792 - RNA, 25 nt, Human
cagaaccuuccuuuaaggcuuaaaa

SEQ ID NO: 282793 - RNA, 22 nt, Human
cagcacggaugggggucccuga

SEQ ID NO: 282794 - RNA, 18 nt, Human
cagcccaguugauuauca

SEQ ID NO: 282795 - RNA, 26 nt, Human
ccagaaccuuccuuuaaggcuuaaaa

SEQ ID NO: 282796 - RNA, 21 nt, Human
ccugccgccuccgccagagga

SEQ ID NO: 282797 - RNA, 19 nt, Human
cgccagaggaagcagggag

SEQ ID NO: 282798 - RNA, 19 nt, Human
cggauggaaccuuggggug

SEQ ID NO: 282799 - RNA, 28 nt, Human
cuaaaauaugaaaggccagggaauuuau

SEQ ID NO: 282800 - RNA, 21 nt, Human
cugaucuucaggaugagcaau

SEQ ID NO: 282801 - RNA, 24 nt, Human
cuuaaaaaccucaaacaguauuuc

SEQ ID NO: 282802 - RNA, 20 nt, Human
gaccuggcucucgguuccug

SEQ ID NO: 282803 - RNA, 19 nt, Human
gaguguagguguggugugu

SEQ ID NO: 282804 - RNA, 21 nt, Human
gccuucugagaagauugcaga

SEQ ID NO: 282805 - RNA, 20 nt, Human
gcgggaggacgcgguccugc

SEQ ID NO: 282806 - RNA, 21 nt, Human
gcggggcgcagaggagaggcg

SEQ ID NO: 282807 - RNA, 19 nt, Human
gggcagcacggaugggggu

SEQ ID NO: 282808 - RNA, 21 nt, Human
ggugaccaauucaccugaaac

SEQ ID NO: 282809 - RNA, 22 nt, Human
guagcuaaaauaugaaaggcca

SEQ ID NO: 282810 - RNA, 21 nt, Human
uaaaaaccucaaacaguauuu

SEQ ID NO: 282811 - RNA, 22 nt, Human
uaaaugagaucaccuaugcaaa

SEQ ID NO: 282812 - RNA, 19 nt, Human
uaggaaacaagcaguuuca

SEQ ID NO: 282813 - RNA, 24 nt, Human
uauauaacagaaaaaaaauaggga

SEQ ID NO: 282814 - RNA, 20 nt, Human
uaugcaaacaaauacaugua

SEQ ID NO: 282815 - RNA, 18 nt, Human
ucggaugggagggggcgg

SEQ ID NO: 282816 - RNA, 23 nt, Human
ucggugaccaauucaccugaaac

SEQ ID NO: 282817 - RNA, 24 nt, Human
ucucaaacaacuuggcaucagccu

SEQ ID NO: 282818 - RNA, 20 nt, Human
ucugaaaggugguugagagg

SEQ ID NO: 282819 - RNA, 22 nt, Human
ugauugucaauggucagcugau

SEQ ID NO: 282820 - RNA, 22 nt, Human
ugcaaacaaauacauguaggua

SEQ ID NO: 282821 - RNA, 21 nt, Human
ugcaggaacccaguuuccuua

SEQ ID NO: 282822 - RNA, 23 nt, Human
ugggagggggcgggaggacgcgg

SEQ ID NO: 282823 - RNA, 26 nt, Human
uguagguaugaagacaucgucugggg

SEQ ID NO: 282824 - RNA, 18 nt, Human
uuccaagauaaaccaagg

SEQ ID NO: 282825 - RNA, 20 nt, Human
aaaacaaugagcaaacugca

SEQ ID NO: 282826 - RNA, 22 nt, Human
accaagaaagucaugaagugac

SEQ ID NO: 282827 - RNA, 21 nt, Human
aucccuuucucucuuuucucc

SEQ ID NO: 282828 - RNA, 23 nt, Human
aucccuuucucucuuuucuccag

SEQ ID NO: 282829 - RNA, 24 nt, Human
caaugagcaaacugcagaagguuu

SEQ ID NO: 282830 - RNA, 18 nt, Human
ccugugggggaagggggg

SEQ ID NO: 282831 - RNA, 22 nt, Human
cuuucucucuuuucuccagaga

SEQ ID NO: 282832 - RNA, 21 nt, Human
gggcauauacccacacaccaa

SEQ ID NO: 282833 - RNA, 19 nt, Human
ucccagggcuuuggaaucu

SEQ ID NO: 282834 - RNA, 20 nt, Human
ucucucuuuucuccagagac

SEQ ID NO: 282835 - RNA, 25 nt, Human
ugggugauuuuuagaggcauugccc

SEQ ID NO: 282836 - RNA, 18 nt, Human
uuuuuagaggcauugccu

SEQ ID NO: 282837 - RNA, 22 nt, Human
aaaaacaccaaaauaugguaac

SEQ ID NO: 282838 - RNA, 24 nt, Human
aaagagaaaacacaaaaacaccaa

SEQ ID NO: 282839 - RNA, 18 nt, Human
aacaggaaaaggauagug

SEQ ID NO: 282840 - RNA, 20 nt, Human
aaccacacccuugaucaccc

SEQ ID NO: 282841 - RNA, 22 nt, Human
aaccauuucuucccuaagacag

SEQ ID NO: 282842 - RNA, 23 nt, Human
aacuaaguucaacaccuagcccc

SEQ ID NO: 282843 - RNA, 18 nt, Human
aagaaacaggagaaauca

SEQ ID NO: 282844 - RNA, 21 nt, Human
aagaugccauuguaguagaaa

SEQ ID NO: 282845 - RNA, 22 nt, Human
aauaagaaaacagugaaaggga

SEQ ID NO: 282846 - RNA, 23 nt, Human
aaugugaucuaagagaauauggu

SEQ ID NO: 282847 - RNA, 18 nt, Human
acagagccuccacuaacc

SEQ ID NO: 282848 - RNA, 21 nt, Human
accccagugucuaucaucugc

SEQ ID NO: 282849 - RNA, 19 nt, Human
accuucccccccaccccca

SEQ ID NO: 282850 - RNA, 21 nt, Human
accuucccccccacccccacc

SEQ ID NO: 282851 - RNA, 21 nt, Human
acguaccuucccccccacccc

SEQ ID NO: 282852 - RNA, 21 nt, Human
acuaaccacacccuugaucac

SEQ ID NO: 282853 - RNA, 18 nt, Human
agaacgaggggaguggag

SEQ ID NO: 282854 - RNA, 22 nt, Human
agaauaagaaaacagugaaagg

SEQ ID NO: 282855 - RNA, 19 nt, Human
agagccuccacuaaccaca

SEQ ID NO: 282856 - RNA, 24 nt, Human
agccaugguagggaagcagauuuc

SEQ ID NO: 282857 - RNA, 23 nt, Human
agccccugaccuaucauaccucc

SEQ ID NO: 282858 - RNA, 19 nt, Human
agccgggagcggggagcug

SEQ ID NO: 282859 - RNA, 21 nt, Human
aggauagugggaagcaggacc

SEQ ID NO: 282860 - RNA, 22 nt, Human
aggcaggagaugggucucagag

SEQ ID NO: 282861 - RNA, 20 nt, Human
agggaagcagauuucuucug

SEQ ID NO: 282862 - RNA, 19 nt, Human
aggguuuagccauauugca

SEQ ID NO: 282863 - RNA, 25 nt, Human
aggugacaucugcccuugguauuuc

SEQ ID NO: 282864 - RNA, 21 nt, Human
agguuggggugcuggaauagc

SEQ ID NO: 282865 - RNA, 20 nt, Human
aguagugcuuguaggccuag

SEQ ID NO: 282866 - RNA, 20 nt, Human
agucacuagccucacucaga

SEQ ID NO: 282867 - RNA, 18 nt, Human
agugcaaaacaaaggacu

SEQ ID NO: 282868 - RNA, 24 nt, Human
aguggagugcaaaggagugaucca

SEQ ID NO: 282869 - RNA, 19 nt, Human
aucccacuagcagcuuugc

SEQ ID NO: 282870 - RNA, 23 nt, Human
auucugauugugauucucucuca

SEQ ID NO: 282871 - RNA, 20 nt, Human
caaaacaaaggacucuagac

SEQ ID NO: 282872 - RNA, 21 nt, Human
caaaacaaaggacucuagaca

SEQ ID NO: 282873 - RNA, 20 nt, Human
caaaauaugguaacuuuggc

SEQ ID NO: 282874 - RNA, 21 nt, Human
caacaaacacaucccuaggug

SEQ ID NO: 282875 - RNA, 18 nt, Human
caaggggagucucuaaac

SEQ ID NO: 282876 - RNA, 23 nt, Human
caccaagaaacaggagaaaucac

SEQ ID NO: 282877 - RNA, 22 nt, Human
cacuaaccacacccuugaucac

SEQ ID NO: 282878 - RNA, 20 nt, Human
cagaauaagaaaacagugaa

SEQ ID NO: 282879 - RNA, 22 nt, Human
cagaaucuaggccuaggguacu

SEQ ID NO: 282880 - RNA, 24 nt, Human
cagcaggacagcggacugcgggcc

SEQ ID NO: 282881 - RNA, 20 nt, Human
cagcaggugcagagucuuuc

SEQ ID NO: 282882 - RNA, 19 nt, Human
ccacaauaccuuugcugug

SEQ ID NO: 282883 - RNA, 25 nt, Human
ccacacccuugaucacccaaagauc

SEQ ID NO: 282884 - RNA, 19 nt, Human
ccaccucggcugcgugucg

SEQ ID NO: 282885 - RNA, 22 nt, Human
ccaccucggcugcgugucguuu

SEQ ID NO: 282886 - RNA, 23 nt, Human
ccacuaaccacacccuugaucac

SEQ ID NO: 282887 - RNA, 19 nt, Human
cccacacccacccaccucg

SEQ ID NO: 282888 - RNA, 24 nt, Human
cccaccaagaaacaggagaaauca

SEQ ID NO: 282889 - RNA, 25 nt, Human
cccaccaagaaacaggagaaaucac

SEQ ID NO: 282890 - RNA, 19 nt, Human
ccccacacccacccaccuc

SEQ ID NO: 282891 - RNA, 22 nt, Human
ccccacacccacccaccucggc

SEQ ID NO: 282892 - RNA, 23 nt, Human
ccccccacccccaccaagaaaca

SEQ ID NO: 282893 - RNA, 21 nt, Human
cccccccacccccaccaagaa

SEQ ID NO: 282894 - RNA, 21 nt, Human
cccgcguccccacacccaccc

SEQ ID NO: 282895 - RNA, 22 nt, Human
cccgcguccccacacccaccca

SEQ ID NO: 282896 - RNA, 23 nt, Human
ccgacgacacuggcucccgcguc

SEQ ID NO: 282897 - RNA, 18 nt, Human
ccgggcgccgggcgccgg

SEQ ID NO: 282898 - RNA, 24 nt, Human
ccgggcucagcaggacagcggacu

SEQ ID NO: 282899 - RNA, 26 nt, Human
ccuccacuaaccacacccuugaucac

SEQ ID NO: 282900 - RNA, 18 nt, Human
ccuuacuucagagcagcu

SEQ ID NO: 282901 - RNA, 21 nt, Human
ccuugcggagaugacaaaccu

SEQ ID NO: 282902 - RNA, 19 nt, Human
cgcgccgggcgccgggcgc

SEQ ID NO: 282903 - RNA, 20 nt, Human
cgggccgauccgacgacacu

SEQ ID NO: 282904 - RNA, 21 nt, Human
cguaccuucccccccaccccc

SEQ ID NO: 282905 - RNA, 21 nt, Human
cuaaaaguauuuuucugugua

SEQ ID NO: 282906 - RNA, 22 nt, Human
cuaaccacacccuugaucaccc

SEQ ID NO: 282907 - RNA, 23 nt, Human
cuaaccacacccuugaucaccca

SEQ ID NO: 282908 - RNA, 19 nt, Human
cuaagacagcaggugcaga

SEQ ID NO: 282909 - RNA, 19 nt, Human
cucaaagugcuuccauucu

SEQ ID NO: 282910 - RNA, 27 nt, Human
cuccacuaaccacacccuugaucaccc

SEQ ID NO: 282911 - RNA, 26 nt, Human
cucccgcguccccacacccacccacc

SEQ ID NO: 282912 - RNA, 23 nt, Human
cuccgcgccgggcgccgggcgcc

SEQ ID NO: 282913 - RNA, 19 nt, Human
cucuagacaagucucagcu

SEQ ID NO: 282914 - RNA, 21 nt, Human
cucuagacaagucucagcuac

SEQ ID NO: 282915 - RNA, 19 nt, Human
gacagaacgaggggagugg

SEQ ID NO: 282916 - RNA, 22 nt, Human
gacucuagacaagucucagcua

SEQ ID NO: 282917 - RNA, 23 nt, Human
gagaaaacacaaaaacaccaaaa

SEQ ID NO: 282918 - RNA, 21 nt, Human
gaucccaggucagugauaugc

SEQ ID NO: 282919 - RNA, 21 nt, Human
gcacagagccuccacuaacca

SEQ ID NO: 282920 - RNA, 24 nt, Human
gccuccgggcucagcaggacagcg

SEQ ID NO: 282921 - RNA, 18 nt, Human
gcgccgggcgccgggcgc

SEQ ID NO: 282922 - RNA, 20 nt, Human
ggccaguguugcucuggagg

SEQ ID NO: 282923 - RNA, 19 nt, Human
gggccgauccgacgacacu

SEQ ID NO: 282924 - RNA, 20 nt, Human
ggggugcuggaauagccaug

SEQ ID NO: 282925 - RNA, 26 nt, Human
ggggugcuggaauagccaugguaggg

SEQ ID NO: 282926 - RNA, 20 nt, Human
ggugacugggagccaagggg

SEQ ID NO: 282927 - RNA, 21 nt, Human
guccccacacccacccaccuc

SEQ ID NO: 282928 - RNA, 22 nt, Human
gugcuggaauagccaugguagg

SEQ ID NO: 282929 - RNA, 22 nt, Human
uaaguucaacaccuagccccug

SEQ ID NO: 282930 - RNA, 22 nt, Human
uacagguuggggugcuggaaua

SEQ ID NO: 282931 - RNA, 19 nt, Human
uaccuucccccccaccccc

SEQ ID NO: 282932 - RNA, 22 nt, Human
uagccccugaccuaucauaccu

SEQ ID NO: 282933 - RNA, 25 nt, Human
uagccucacucagacuucguucaaa

SEQ ID NO: 282934 - RNA, 24 nt, Human
uaugcuagaaaugucacagaguca

SEQ ID NO: 282935 - RNA, 23 nt, Human
ucaaagugacagaacgaggggag

SEQ ID NO: 282936 - RNA, 21 nt, Human
ucacccaaagaucccagguca

SEQ ID NO: 282937 - RNA, 23 nt, Human
ucagcaggacagcggacugcggg

SEQ ID NO: 282938 - RNA, 19 nt, Human
ucauucugaaauacuugga

SEQ ID NO: 282939 - RNA, 20 nt, Human
uccacaauaccuuugcugug

SEQ ID NO: 282940 - RNA, 26 nt, Human
uccacuaaccacacccuugaucaccc

SEQ ID NO: 282941 - RNA, 24 nt, Human
ucccccccacccccaccaagaaac

SEQ ID NO: 282942 - RNA, 19 nt, Human
uccgcgccgggcgccgggc

SEQ ID NO: 282943 - RNA, 21 nt, Human
ucuagaauaucagagaacagu

SEQ ID NO: 282944 - RNA, 22 nt, Human
ucucaaucaggaaaggguuuag

SEQ ID NO: 282945 - RNA, 25 nt, Human
ucugccucuuuuugugaucacuuuc

SEQ ID NO: 282946 - RNA, 27 nt, Human
ucugccucuuuuugugaucacuuuccc

SEQ ID NO: 282947 - RNA, 25 nt, Human
ugaaaaggccaauguuacagagaca

SEQ ID NO: 282948 - RNA, 18 nt, Human
ugaaugcucucacucuuc

SEQ ID NO: 282949 - RNA, 23 nt, Human
ugcaucaggcaguuuugcaguca

SEQ ID NO: 282950 - RNA, 26 nt, Human
ugcuagaaaacaagcccaggaaaggu

SEQ ID NO: 282951 - RNA, 25 nt, Human
ugcugugggaaggagcaauagcucu

SEQ ID NO: 282952 - RNA, 24 nt, Human
uggaauagccaugguagggaagca

SEQ ID NO: 282953 - RNA, 22 nt, Human
uggcucccgcguccccacaccc

SEQ ID NO: 282954 - RNA, 19 nt, Human
ugguaugacccuaccccag

SEQ ID NO: 282955 - RNA, 23 nt, Human
ugguauuucagaagaccagagaa

SEQ ID NO: 282956 - RNA, 21 nt, Human
uggugacugggagccaagggg

SEQ ID NO: 282957 - RNA, 25 nt, Human
uguaacaaaagaaaaccaggaggaa

SEQ ID NO: 282958 - RNA, 19 nt, Human
uguacauacagccuguacg

SEQ ID NO: 282959 - RNA, 21 nt, Human
uguucugcucucagucuucca

SEQ ID NO: 282960 - RNA, 22 nt, Human
uuaaaucauucugaaauacuug

SEQ ID NO: 282961 - RNA, 18 nt, Human
uuaggaaacgcucuuccu

SEQ ID NO: 282962 - RNA, 22 nt, Human
uuaggaaacgcucuuccuuuuu

SEQ ID NO: 282963 - RNA, 18 nt, Human
uucugaaauacuuggagc

SEQ ID NO: 282964 - RNA, 21 nt, Human
uuggggugcuggaauagccau

SEQ ID NO: 282965 - RNA, 19 nt, Human
uuggguaggagggcaacaa

SEQ ID NO: 282966 - RNA, 20 nt, Human
uuguacauacagccuguacg

SEQ ID NO: 282967 - RNA, 21 nt, Human
uuuuugugaucacuuucuggc

SEQ ID NO: 282968 - RNA, 24 nt, Human
aaacuugcaguuaacagcuaccag

SEQ ID NO: 282969 - RNA, 22 nt, Human
aacagcagugacaaucucagag

SEQ ID NO: 282970 - RNA, 25 nt, Human
agacgccggagccugagucgcagcc

SEQ ID NO: 282971 - RNA, 24 nt, Human
agcugaggggcacucuugaguagc

SEQ ID NO: 282972 - RNA, 19 nt, Human
aggcgccgcaggccagccu

SEQ ID NO: 282973 - RNA, 24 nt, Human
aggggcggcgggcggcggcggcgg

SEQ ID NO: 282974 - RNA, 24 nt, Human
aggggcggcgggcggcggcggcgg

SEQ ID NO: 282975 - RNA, 18 nt, Human
aggucacaacacuaagcu

SEQ ID NO: 282976 - RNA, 27 nt, Human
aucccuuaauucaagcuaaacuugcag

SEQ ID NO: 282977 - RNA, 21 nt, Human
cagcagugacaaucucagagc

SEQ ID NO: 282978 - RNA, 23 nt, Human
cagccccauggggaagcgcagac

SEQ ID NO: 282979 - RNA, 20 nt, Human
cagcuucucacaaaggcaac

SEQ ID NO: 282980 - RNA, 21 nt, Human
caguaauuaaguuacaugguc

SEQ ID NO: 282981 - RNA, 22 nt, Human
caguuaacagcuaccagagugc

SEQ ID NO: 282982 - RNA, 21 nt, Human
ccagccccauggggaagcgca

SEQ ID NO: 282983 - RNA, 21 nt, Human
cccaggcgccgcaggccagcc

SEQ ID NO: 282984 - RNA, 26 nt, Human
ccccaaaucccuuaauucaagcuaaa

SEQ ID NO: 282985 - RNA, 24 nt, Human
ccccgccgcgcccgucagcgccug

SEQ ID NO: 282986 - RNA, 20 nt, Human
ccgccgcgcccgucagcgcc

SEQ ID NO: 282987 - RNA, 21 nt, Human
ccgccgcgcccgucagcgccu

SEQ ID NO: 282988 - RNA, 19 nt, Human
ccgcgcccgucagcgccug

SEQ ID NO: 282989 - RNA, 19 nt, Human
cggcccgagguggcgccgg

SEQ ID NO: 282990 - RNA, 23 nt, Human
cgggcggcggcggcggcggcuuu

SEQ ID NO: 282991 - RNA, 20 nt, Human
gcggcggcggcggcggcuac

SEQ ID NO: 282992 - RNA, 19 nt, Human
gcggcggcggcuacaggag

SEQ ID NO: 282993 - RNA, 21 nt, Human
gcggcgggcggcggcggcggc

SEQ ID NO: 282994 - RNA, 18 nt, Human
gcgggcggcggcggcggc

SEQ ID NO: 282995 - RNA, 21 nt, Human
gggcggcggcggcggcggcua

SEQ ID NO: 282996 - RNA, 19 nt, Human
uaaaacaaauauucaaaua

SEQ ID NO: 282997 - RNA, 23 nt, Human
uaagcuuuuggcccauucugcca

SEQ ID NO: 282998 - RNA, 20 nt, Human
uagucuuccauauggcugca

SEQ ID NO: 282999 - RNA, 26 nt, Human
uauaaaacaaauauucaaauaguuuc

SEQ ID NO: 283000 - RNA, 25 nt, Human
uauuucaagauacuuuauuuuaaaa

SEQ ID NO: 283001 - RNA, 24 nt, Human
ugaguagcgugucugaagagugaa

SEQ ID NO: 283002 - RNA, 25 nt, Human
uggaacagcagugacaaucucagag

SEQ ID NO: 283003 - RNA, 21 nt, Human
uggcgccggagcugcuggcag

SEQ ID NO: 283004 - RNA, 22 nt, Human
ugugacccauauccuagucuuc

SEQ ID NO: 283005 - RNA, 23 nt, Human
uuacaugguccccccaaaucccu

SEQ ID NO: 283006 - RNA, 22 nt, Human
uucaaauaguuuccauaggaac

SEQ ID NO: 283007 - RNA, 23 nt, Human
uucugccauuguacaagcuacaa

SEQ ID NO: 283008 - RNA, 22 nt, Human
uuggaacagcagugacaaucuc

SEQ ID NO: 283009 - RNA, 18 nt, Human
aaaaaucaaugaaauugg

SEQ ID NO: 283010 - RNA, 18 nt, Human
aaaacaccacacuuguga

SEQ ID NO: 283011 - RNA, 21 nt, Human
aacugauuacaaaagcuuuuu

SEQ ID NO: 283012 - RNA, 28 nt, Human
aagcacagcggaaagcaggccgguaccc

SEQ ID NO: 283013 - RNA, 18 nt, Human
acagcggaaagcaggcgg

SEQ ID NO: 283014 - RNA, 18 nt, Human
acccagaggggcaggcuu

SEQ ID NO: 283015 - RNA, 19 nt, Human
agaaaaaaaaaaaagcaag

SEQ ID NO: 283016 - RNA, 20 nt, Human
agaucccagacgccggcccc

SEQ ID NO: 283017 - RNA, 21 nt, Human
agcuugggaagggagccuugg

SEQ ID NO: 283018 - RNA, 22 nt, Human
agggagccuugggaaaacacca

SEQ ID NO: 283019 - RNA, 23 nt, Human
agggagccuugggaaaacaccac

SEQ ID NO: 283020 - RNA, 23 nt, Human
aggugacuauaucaggaaggaga

SEQ ID NO: 283021 - RNA, 19 nt, Human
caaauggacacaagcccuc

SEQ ID NO: 283022 - RNA, 18 nt, Human
caacuguccaggagcgac

SEQ ID NO: 283023 - RNA, 19 nt, Human
caagugauggugcuuacag

SEQ ID NO: 283024 - RNA, 22 nt, Human
caagugauggugcuuacagccc

SEQ ID NO: 283025 - RNA, 22 nt, Human
caaugagccucucaaggggccc

SEQ ID NO: 283026 - RNA, 21 nt, Human
cacaagcccucgagggucuau

SEQ ID NO: 283027 - RNA, 22 nt, Human
cagaacagaucccagacgccgg

SEQ ID NO: 283028 - RNA, 21 nt, Human
cagcggaaagcaggcggaucc

SEQ ID NO: 283029 - RNA, 27 nt, Human
caggccaaaagaaacaaaaaucaauga

SEQ ID NO: 283030 - RNA, 26 nt, Human
cccacacgauggaaaccugggggagc

SEQ ID NO: 283031 - RNA, 19 nt, Human
ccccaggguccuuagggcu

SEQ ID NO: 283032 - RNA, 20 nt, Human
ccuaaaacaaugagggcugu

SEQ ID NO: 283033 - RNA, 19 nt, Human
ccugggggagccgccugag

SEQ ID NO: 283034 - RNA, 19 nt, Human
cuccuuggauuuagugaag

SEQ ID NO: 283035 - RNA, 23 nt, Human
cucucugaggggagaagggugga

SEQ ID NO: 283036 - RNA, 20 nt, Human
cucugaggggagaagggugg

SEQ ID NO: 283037 - RNA, 21 nt, Human
cucugcucagggggacccaga

SEQ ID NO: 283038 - RNA, 24 nt, Human
cugcuucaccuucugcugcuuuug

SEQ ID NO: 283039 - RNA, 22 nt, Human
gagcgacacggcugcgcccaga

SEQ ID NO: 283040 - RNA, 18 nt, Human
gaggaaaaccaccaggcu

SEQ ID NO: 283041 - RNA, 23 nt, Human
gauacaaaucaggccaaaagaaa

SEQ ID NO: 283042 - RNA, 19 nt, Human
gccaaaagaaacaaaaauc

SEQ ID NO: 283043 - RNA, 21 nt, Human
ggaaggagcaaagucauggua

SEQ ID NO: 283044 - RNA, 20 nt, Human
ggcuccaggcccugauaagu

SEQ ID NO: 283045 - RNA, 19 nt, Human
ggcuguaaggggacuggug

SEQ ID NO: 283046 - RNA, 24 nt, Human
ggggagaaggguggaagcuuuggg

SEQ ID NO: 283047 - RNA, 20 nt, Human
guaaaaggccaaauggacac

SEQ ID NO: 283048 - RNA, 22 nt, Human
gucuauugugaagugcuugggg

SEQ ID NO: 283049 - RNA, 23 nt, Human
gugaagcacagcggaaagcaggc

SEQ ID NO: 283050 - RNA, 21 nt, Human
gugacuauaucaggaaggaga

SEQ ID NO: 283051 - RNA, 24 nt, Human
uaaaccugcuggaaugcacagcuc

SEQ ID NO: 283052 - RNA, 19 nt, Human
uaaaugcauuccagagaua

SEQ ID NO: 283053 - RNA, 19 nt, Human
uaaggacaagacccugaac

SEQ ID NO: 283054 - RNA, 24 nt, Human
uaaggacaagacccugaacccauu

SEQ ID NO: 283055 - RNA, 25 nt, Human
uacacugggugcgccacaaggugcu

SEQ ID NO: 283056 - RNA, 21 nt, Human
uacuccguucuucccacacga

SEQ ID NO: 283057 - RNA, 20 nt, Human
uagagcuaguagcuaaggac

SEQ ID NO: 283058 - RNA, 18 nt, Human
uagcuaaggacaagaccc

SEQ ID NO: 283059 - RNA, 28 nt, Human
uaucaggaaggagaaaaccaagugcuuc

SEQ ID NO: 283060 - RNA, 19 nt, Human
uauguggacguggacaggg

SEQ ID NO: 283061 - RNA, 25 nt, Human
uauguggacguggacagggguguuc

SEQ ID NO: 283062 - RNA, 19 nt, Human
ucagaaaaaaaaaaaagca

SEQ ID NO: 283063 - RNA, 22 nt, Human
ucagaaaaaaaaaaaagcaagu

SEQ ID NO: 283064 - RNA, 23 nt, Human
ucagaaaaaaaccugagagagau

SEQ ID NO: 283065 - RNA, 21 nt, Human
uccuauggcuuccaucagggc

SEQ ID NO: 283066 - RNA, 20 nt, Human
uccuucuacacagugaucuc

SEQ ID NO: 283067 - RNA, 23 nt, Human
ucgcuugugagauuucuggcugc

SEQ ID NO: 283068 - RNA, 21 nt, Human
ucugcgugagacucguuacuc

SEQ ID NO: 283069 - RNA, 24 nt, Human
ugaaaucagaaaaaaaaaaaagcc

SEQ ID NO: 283070 - RNA, 24 nt, Human
ugaagagcgguccuucaugguugg

SEQ ID NO: 283071 - RNA, 18 nt, Human
ugagacucguuacuccgu

SEQ ID NO: 283072 - RNA, 23 nt, Human
ugagagagauuccuaaaacaaug

SEQ ID NO: 283073 - RNA, 25 nt, Human
uggaaaccugggggagccgccugac

SEQ ID NO: 283074 - RNA, 27 nt, Human
uggaaauauuuucucaggaaaggaagg

SEQ ID NO: 283075 - RNA, 23 nt, Human
ugggagaggaaaaccaccaggcu

SEQ ID NO: 283076 - RNA, 18 nt, Human
uguccaggagcgacacgg

SEQ ID NO: 283077 - RNA, 25 nt, Human
ugugaaaucagaaaaaaaaaaaagc

SEQ ID NO: 283078 - RNA, 22 nt, Human
ugugagauuucuggcugcuggu

SEQ ID NO: 283079 - RNA, 18 nt, Human
uguggacguggacagggg

SEQ ID NO: 283080 - RNA, 24 nt, Human
uuacuccguucuucccacacgaug

SEQ ID NO: 283081 - RNA, 24 nt, Human
uuaggucagaaaaaaaccugagag

SEQ ID NO: 283082 - RNA, 23 nt, Human
uugggaggcgcuccucuacuguc

SEQ ID NO: 283083 - RNA, 19 nt, Human
uuuaacacuuccaacaggu

SEQ ID NO: 283084 - RNA, 23 nt, Human
uuuuuuuuuuuuuuuuuuaacug

SEQ ID NO: 283085 - RNA, 18 nt, Human
aacccugccucugucccg

SEQ ID NO: 283086 - RNA, 24 nt, Human
aggcggcuggagggcggggaccca

SEQ ID NO: 283087 - RNA, 22 nt, Human
aggcgucagcucccuccggagc

SEQ ID NO: 283088 - RNA, 24 nt, Human
caagacgagggggaaucccugccc

SEQ ID NO: 283089 - RNA, 27 nt, Human
cacgcgagcuuccuuucuucgcgguuc

SEQ ID NO: 283090 - RNA, 19 nt, Human
ccaagacgagggggaaucc

SEQ ID NO: 283091 - RNA, 20 nt, Human
ccuccggagcccgccucgcu

SEQ ID NO: 283092 - RNA, 21 nt, Human
ccuccggagcccgccucgcuc

SEQ ID NO: 283093 - RNA, 24 nt, Human
cuagcaaacacgcgagcuuccuuu

SEQ ID NO: 283094 - RNA, 25 nt, Human
cucagaacccugccucugucccgag

SEQ ID NO: 283095 - RNA, 26 nt, Human
cugaacguucucugccucgcacuccc

SEQ ID NO: 283096 - RNA, 23 nt, Human
cugaaggcagcgaggcaggaccc

SEQ ID NO: 283097 - RNA, 21 nt, Human
gaaaaaaaaacccacauugga

SEQ ID NO: 283098 - RNA, 23 nt, Human
gaacaaaggugcugaacguucuc

SEQ ID NO: 283099 - RNA, 22 nt, Human
gacccaggcacgacucaaaggc

SEQ ID NO: 283100 - RNA, 18 nt, Human
gaguuuagugcccagccc

SEQ ID NO: 283101 - RNA, 26 nt, Human
gaugauagggaaacauuuacaaagga

SEQ ID NO: 283102 - RNA, 23 nt, Human
ggcgguggggccaagacgagggg

SEQ ID NO: 283103 - RNA, 19 nt, Human
gggacccagacacuaggga

SEQ ID NO: 283104 - RNA, 18 nt, Human
gggaggaacaaaggugcu

SEQ ID NO: 283105 - RNA, 21 nt, Human
uaauuauggaaaaaaaaaccc

SEQ ID NO: 283106 - RNA, 24 nt, Human
uacacacauuuuuauugaguuuug

SEQ ID NO: 283107 - RNA, 21 nt, Human
uagcaaacacgcgagcuuccu

SEQ ID NO: 283108 - RNA, 22 nt, Human
uauggaaaaaaaaacccacauu

SEQ ID NO: 283109 - RNA, 18 nt, Human
ucugaggcaagggcgagg

SEQ ID NO: 283110 - RNA, 22 nt, Human
ucugucccgaggguucgggagg

SEQ ID NO: 283111 - RNA, 24 nt, Human
ucuucgcgguucugaggcaagggc

SEQ ID NO: 283112 - RNA, 22 nt, Human
ugaaggcagcgaggcaggaccg

SEQ ID NO: 283113 - RNA, 19 nt, Human
ugacuagauuauucuuggu

SEQ ID NO: 283114 - RNA, 21 nt, Human
ugacuagauuauucuugguuc

SEQ ID NO: 283115 - RNA, 22 nt, Human
ugagaaauacuaugacuggaga

SEQ ID NO: 283116 - RNA, 28 nt, Human
ugccucgcacucccaacuagguuuucua

SEQ ID NO: 283117 - RNA, 21 nt, Human
uuuacaaaggaguaaauguua

SEQ ID NO: 283118 - RNA, 24 nt, Human
uuuuuuuuuaaaagccaguuacuu

SEQ ID NO: 283119 - RNA, 22 nt, Human
uuuuuuuuuuuuaaaagccagu

SEQ ID NO: 283120 - RNA, 23 nt, Human
uuuuuuuuuuuuuuuuuuaaaag

SEQ ID NO: 283121 - RNA, 25 nt, Human
aaccaaaauaaauaaaucagaucug

SEQ ID NO: 283122 - RNA, 19 nt, Human
aagcugcccuuucugugcc

SEQ ID NO: 283123 - RNA, 22 nt, Human
aagcugcccuuucugugccagg

SEQ ID NO: 283124 - RNA, 21 nt, Human
aaggacaucccucgggggcca

SEQ ID NO: 283125 - RNA, 18 nt, Human
aaggggcagucaugggug

SEQ ID NO: 283126 - RNA, 19 nt, Human
acagagcagccagugcccc

SEQ ID NO: 283127 - RNA, 19 nt, Human
accaagacagagcagccag

SEQ ID NO: 283128 - RNA, 21 nt, Human
acccuagaaaccucugccagc

SEQ ID NO: 283129 - RNA, 21 nt, Human
accugagcggggcuuccuggc

SEQ ID NO: 283130 - RNA, 24 nt, Human
agagaggagguggaggguuaacag

SEQ ID NO: 283131 - RNA, 19 nt, Human
agagggcaguggcccaagc

SEQ ID NO: 283132 - RNA, 21 nt, Human
agccugggcagcguguggccu

SEQ ID NO: 283133 - RNA, 19 nt, Human
aggagguggaggguuaaca

SEQ ID NO: 283134 - RNA, 19 nt, Human
aggagguggaggguuaaca

SEQ ID NO: 283135 - RNA, 19 nt, Human
agggaguccaagagaggag

SEQ ID NO: 283136 - RNA, 21 nt, Human
aggugcugccugggcccagga

SEQ ID NO: 283137 - RNA, 25 nt, Human
aguggcccaagcaacccuaggcagc

SEQ ID NO: 283138 - RNA, 19 nt, Human
augaagcuauccuagucuc

SEQ ID NO: 283139 - RNA, 21 nt, Human
caaggcucucuccugccagcu

SEQ ID NO: 283140 - RNA, 23 nt, Human
cacagcaaagaaaacgaugcauc

SEQ ID NO: 283141 - RNA, 18 nt, Human
cacccuagaaaccucugc

SEQ ID NO: 283142 - RNA, 20 nt, Human
cagcgaggagggcgguggug

SEQ ID NO: 283143 - RNA, 25 nt, Human
cagcggaagccagcacacaaggccc

SEQ ID NO: 283144 - RNA, 21 nt, Human
cagcguguggccuguggggca

SEQ ID NO: 283145 - RNA, 20 nt, Human
caggaccaagacagagcagc

SEQ ID NO: 283146 - RNA, 18 nt, Human
caggagccugugccuugc

SEQ ID NO: 283147 - RNA, 24 nt, Human
caucagaaagucuccauuggguua

SEQ ID NO: 283148 - RNA, 21 nt, Human
ccagcacacaaggcccaguuc

SEQ ID NO: 283149 - RNA, 20 nt, Human
cccagccccuccucucccuc

SEQ ID NO: 283150 - RNA, 19 nt, Human
ccccucacccccagccccu

SEQ ID NO: 283151 - RNA, 19 nt, Human
ccccuccucucccucuucu

SEQ ID NO: 283152 - RNA, 19 nt, Human
ccccuuggccauggccugg

SEQ ID NO: 283153 - RNA, 22 nt, Human
ccccuuggccauggccuggccc

SEQ ID NO: 283154 - RNA, 22 nt, Human
ccuccugcuccccccggccucc

SEQ ID NO: 283155 - RNA, 19 nt, Human
ccucgggggcuaccuuucc

SEQ ID NO: 283156 - RNA, 22 nt, Human
ccucgggggcuaccuuuccucc

SEQ ID NO: 283157 - RNA, 30 nt, Human
ccucgggggcuaccuuuccuccuccugcuu

SEQ ID NO: 283158 - RNA, 18 nt, Human
ccucuacagauucuaagg

SEQ ID NO: 283159 - RNA, 26 nt, Human
ccuggccccucacccccagccccucc

SEQ ID NO: 283160 - RNA, 23 nt, Human
ccuggcuacacacagacucugug

SEQ ID NO: 283161 - RNA, 19 nt, Human
ccuuuccuccuccugcucc

SEQ ID NO: 283162 - RNA, 24 nt, Human
ccuuuccuccuccugcuccccccg

SEQ ID NO: 283163 - RNA, 24 nt, Human
cggcuggggcccacccuagaaacc

SEQ ID NO: 283164 - RNA, 20 nt, Human
cgggggcuaccuuuccuccu

SEQ ID NO: 283165 - RNA, 23 nt, Human
cuagaaaccucugccagccaugg

SEQ ID NO: 283166 - RNA, 31 nt, Human
cuaugagagcagagggaggggugguggcacc

SEQ ID NO: 283167 - RNA, 24 nt, Human
cuauucuuuaguugagaagcaagg

SEQ ID NO: 283168 - RNA, 22 nt, Human
cucaaauacaggagccugugcc

SEQ ID NO: 283169 - RNA, 22 nt, Human
cugaagcugcccuuucugugcc

SEQ ID NO: 283170 - RNA, 18 nt, Human
cugccccgggucauccuc

SEQ ID NO: 283171 - RNA, 24 nt, Human
cugccugggcccaggagggguggg

SEQ ID NO: 283172 - RNA, 20 nt, Human
cugggcccaggagggguggg

SEQ ID NO: 283173 - RNA, 20 nt, Human
cuuuccuccuccugcucccc

SEQ ID NO: 283174 - RNA, 20 nt, Human
gagggguggguggggcaugc

SEQ ID NO: 283175 - RNA, 20 nt, Human
gcaucagaaagucuccauug

SEQ ID NO: 283176 - RNA, 20 nt, Human
ggaccaagacagagcagcca

SEQ ID NO: 283177 - RNA, 20 nt, Human
ggagggguggguggggcaug

SEQ ID NO: 283178 - RNA, 26 nt, Human
gggcagcguguggccuggcccggcgg

SEQ ID NO: 283179 - RNA, 24 nt, Human
gggcuuccuggcuacacacagacu

SEQ ID NO: 283180 - RNA, 19 nt, Human
ggggaggauuguggccaga

SEQ ID NO: 283181 - RNA, 18 nt, Human
ggggagggaguccaagag

SEQ ID NO: 283182 - RNA, 19 nt, Human
ggguggggagggaguccaa

SEQ ID NO: 283183 - RNA, 22 nt, Human
ggucagagugauaaaugagggg

SEQ ID NO: 283184 - RNA, 18 nt, Human
gguggggaggauuguggc

SEQ ID NO: 283185 - RNA, 18 nt, Human
ggugguggcacagcgagg

SEQ ID NO: 283186 - RNA, 21 nt, Human
gucagagugauaaaugagggg

SEQ ID NO: 283187 - RNA, 20 nt, Human
gucuccggcucagcuccacc

SEQ ID NO: 283188 - RNA, 20 nt, Human
gugacagcggaagccagcac

SEQ ID NO: 283189 - RNA, 19 nt, Human
gugcugccugggcccagga

SEQ ID NO: 283190 - RNA, 25 nt, Human
guggccagagcugaccccuccccaa

SEQ ID NO: 283191 - RNA, 23 nt, Human
guggggcagccaagcacuggagg

SEQ ID NO: 283192 - RNA, 26 nt, Human
guucacgccacggcuggggcccacca

SEQ ID NO: 283193 - RNA, 21 nt, Human
ucaaauacaggagccugugcc

SEQ ID NO: 283194 - RNA, 19 nt, Human
ucgaaggaacagcagauaa

SEQ ID NO: 283195 - RNA, 23 nt, Human
ucuuuaguugagaagcaaggggc

SEQ ID NO: 283196 - RNA, 23 nt, Human
ugaccccuccccaaggacauccc

SEQ ID NO: 283197 - RNA, 24 nt, Human
ugaccugcuuuggcacagcaaaga

SEQ ID NO: 283198 - RNA, 20 nt, Human
ugagaagcaaggggcaguca

SEQ ID NO: 283199 - RNA, 23 nt, Human
ugagaagcaaggggcagucaugg

SEQ ID NO: 283200 - RNA, 18 nt, Human
ugagagcagagggagggg

SEQ ID NO: 283201 - RNA, 19 nt, Human
ugagagcagagggaggggu

SEQ ID NO: 283202 - RNA, 23 nt, Human
ugcccuuucugugccaggucagg

SEQ ID NO: 283203 - RNA, 19 nt, Human
ugccugggcccaggagggg

SEQ ID NO: 283204 - RNA, 21 nt, Human
ugcuugggccccacacacagc

SEQ ID NO: 283205 - RNA, 25 nt, Human
ugcuuuggcacagcaaagaaaacga

SEQ ID NO: 283206 - RNA, 22 nt, Human
uggagagggcaguggcccaagc

SEQ ID NO: 283207 - RNA, 22 nt, Human
uggcccaagcaacccuaggcag

SEQ ID NO: 283208 - RNA, 24 nt, Human
uggccccucacccccagccccucc

SEQ ID NO: 283209 - RNA, 20 nt, Human
ugggugagacugguggggag

SEQ ID NO: 283210 - RNA, 23 nt, Human
uggguuaaaggagaaagaaagag

SEQ ID NO: 283211 - RNA, 19 nt, Human
ugguggggaggauuguggc

SEQ ID NO: 283212 - RNA, 24 nt, Human
ugguggggaggauuguggccagag

SEQ ID NO: 283213 - RNA, 18 nt, Human
ugugccaggucaggccaa

SEQ ID NO: 283214 - RNA, 18 nt, Human
ugugggcagcgcugaggc

SEQ ID NO: 283215 - RNA, 18 nt, Human
uugagaagcaaggggcag

SEQ ID NO: 283216 - RNA, 20 nt, Human
aacccugucuucaccaagaa

SEQ ID NO: 283217 - RNA, 21 nt, Human
aagaccccgcccagacaagga

SEQ ID NO: 283218 - RNA, 21 nt, Human
aagaccccgcccagacaagga

SEQ ID NO: 283219 - RNA, 21 nt, Human
aagaccccgcccagacaagga

SEQ ID NO: 283220 - RNA, 19 nt, Human
aagccccgcuucguacccc

SEQ ID NO: 283221 - RNA, 19 nt, Human
aagccccgcuucgugcccc

SEQ ID NO: 283222 - RNA, 19 nt, Human
aagccccgcuucgugcccc

SEQ ID NO: 283223 - RNA, 18 nt, Human
aagugcuaguaagcuggc

SEQ ID NO: 283224 - RNA, 21 nt, Human
aagugcuaguaagcuggcuuc

SEQ ID NO: 283225 - RNA, 18 nt, Human
aauggaggagaggcugga

SEQ ID NO: 283226 - RNA, 18 nt, Human
aauggaggagaggcugga

SEQ ID NO: 283227 - RNA, 24 nt, Human
acacagcuccggccccagagcccu

SEQ ID NO: 283228 - RNA, 27 nt, Human
acucugucgccuaggcuggagugugau

SEQ ID NO: 283229 - RNA, 18 nt, Human
acugcaagcuccgccucc

SEQ ID NO: 283230 - RNA, 20 nt, Human
acugcaagcuccgccucccg

SEQ ID NO: 283231 - RNA, 24 nt, Human
agacuacuuugacuggccaggccu

SEQ ID NO: 283232 - RNA, 24 nt, Human
agacuacuuugacuggccaggccu

SEQ ID NO: 283233 - RNA, 20 nt, Human
agagaaguggggaauggagg

SEQ ID NO: 283234 - RNA, 20 nt, Human
agagaaguggggaauggagg

SEQ ID NO: 283235 - RNA, 20 nt, Human
agaguccuuuagggccaccu

SEQ ID NO: 283236 - RNA, 22 nt, Human
agcuccaggcuuacauccuacc

SEQ ID NO: 283237 - RNA, 22 nt, Human
agcuccaggcuuacauccuacc

SEQ ID NO: 283238 - RNA, 22 nt, Human
agcuccaggcuuacauccuacc

SEQ ID NO: 283239 - RNA, 22 nt, Human
agcugcucgccuuucccccucc

SEQ ID NO: 283240 - RNA, 21 nt, Human
agcugcugccugccgucuugg

SEQ ID NO: 283241 - RNA, 20 nt, Human
aggaccacgacccuuaaggc

SEQ ID NO: 283242 - RNA, 20 nt, Human
aggaccacgacccuuaaggc

SEQ ID NO: 283243 - RNA, 20 nt, Human
aggaccacgacccuuaaggc

SEQ ID NO: 283244 - RNA, 19 nt, Human
aggccucgucgacgcccaa

SEQ ID NO: 283245 - RNA, 19 nt, Human
aggccucgucgacgcccaa

SEQ ID NO: 283246 - RNA, 19 nt, Human
aggccucgucgacgcccaa

SEQ ID NO: 283247 - RNA, 18 nt, Human
aggcgcucgcgcgguugg

SEQ ID NO: 283248 - RNA, 22 nt, Human
aggcgguggcaaagaugaucgc

SEQ ID NO: 283249 - RNA, 25 nt, Human
aggcguccucugagaccucaggacc

SEQ ID NO: 283250 - RNA, 22 nt, Human
agggccacauaauguuaucagg

SEQ ID NO: 283251 - RNA, 18 nt, Human
aggggaaggugcuugggg

SEQ ID NO: 283252 - RNA, 18 nt, Human
aggggaaggugcuugggg

SEQ ID NO: 283253 - RNA, 22 nt, Human
aggugguggcaaagaugaucgc

SEQ ID NO: 283254 - RNA, 22 nt, Human
aggugguggcaaagaugaucgc

SEQ ID NO: 283255 - RNA, 21 nt, Human
aggugguggcaaagaugaugc

SEQ ID NO: 283256 - RNA, 20 nt, Human
agugugauggcgcgaucucg

SEQ ID NO: 283257 - RNA, 24 nt, Human
agugugauggcgcgaucucggcuc

SEQ ID NO: 283258 - RNA, 19 nt, Human
aguguugggagguggaaga

SEQ ID NO: 283259 - RNA, 19 nt, Human
aucugcucaugcuuuccuc

SEQ ID NO: 283260 - RNA, 24 nt, Human
augagacuggguggggauggggag

SEQ ID NO: 283261 - RNA, 24 nt, Human
augagacuggguggggauggggag

SEQ ID NO: 283262 - RNA, 21 nt, Human
caacaugagacugggugggga

SEQ ID NO: 283263 - RNA, 21 nt, Human
caacaugagacugggugggga

SEQ ID NO: 283264 - RNA, 21 nt, Human
cacagcaccaccggaaguagg

SEQ ID NO: 283265 - RNA, 18 nt, Human
caccaccggaaguagggc

SEQ ID NO: 283266 - RNA, 18 nt, Human
cacucggggcgcuaacga

SEQ ID NO: 283267 - RNA, 22 nt, Human
cacucugucgccuaggcuggag

SEQ ID NO: 283268 - RNA, 24 nt, Human
cacucugucgccuaggcuggagug

SEQ ID NO: 283269 - RNA, 18 nt, Human
cacugcuucuuaaaguuc

SEQ ID NO: 283270 - RNA, 18 nt, Human
cacugcuucuuaaaguuc

SEQ ID NO: 283271 - RNA, 18 nt, Human
cacugcuucuuaaaguuc

SEQ ID NO: 283272 - RNA, 18 nt, Human
cacugcuucuuaaaguuc

SEQ ID NO: 283273 - RNA, 20 nt, Human
cacugggguugggacagggg

SEQ ID NO: 283274 - RNA, 19 nt, Human
cagcaccaccggaaguagg

SEQ ID NO: 283275 - RNA, 18 nt, Human
cagccugccuucuagucg

SEQ ID NO: 283276 - RNA, 21 nt, Human
cagcugcugccugccgucuug

SEQ ID NO: 283277 - RNA, 23 nt, Human
cagcugcugccugccgucuuggg

SEQ ID NO: 283278 - RNA, 20 nt, Human
caggaaauauauuuggccau

SEQ ID NO: 283279 - RNA, 20 nt, Human
caggaaauauauuuggccau

SEQ ID NO: 283280 - RNA, 20 nt, Human
caggaaauauauuuggccau

SEQ ID NO: 283281 - RNA, 21 nt, Human
caggcucuccccaggcggugg

SEQ ID NO: 283282 - RNA, 27 nt, Human
cagggccgaaggcaaugagaauccacu

SEQ ID NO: 283283 - RNA, 20 nt, Human
cagggugccccaucuagccu

SEQ ID NO: 283284 - RNA, 19 nt, Human
caggugguggcaaagauga

SEQ ID NO: 283285 - RNA, 19 nt, Human
caggugguggcaaagauga

SEQ ID NO: 283286 - RNA, 19 nt, Human
caggugguggcaaagauga

SEQ ID NO: 283287 - RNA, 21 nt, Human
caucugggcgccccgcgguuc

SEQ ID NO: 283288 - RNA, 19 nt, Human
ccaacuguacacauaaucc

SEQ ID NO: 283289 - RNA, 19 nt, Human
ccaacuguacacauaaucc

SEQ ID NO: 283290 - RNA, 19 nt, Human
ccaacuguacacauaaucc

SEQ ID NO: 283291 - RNA, 22 nt, Human
ccacagcaccaccggaaguagg

SEQ ID NO: 283292 - RNA, 19 nt, Human
ccacugggucugggcugga

SEQ ID NO: 283293 - RNA, 20 nt, Human
ccagaagcccaucagguuga

SEQ ID NO: 283294 - RNA, 24 nt, Human
ccagcugcucgccuuucccccucc

SEQ ID NO: 283295 - RNA, 21 nt, Human
ccaggggagagacuacuuuga

SEQ ID NO: 283296 - RNA, 21 nt, Human
ccaggggagagacuacuuuga

SEQ ID NO: 283297 - RNA, 18 nt, Human
ccagggugccccaucuag

SEQ ID NO: 283298 - RNA, 18 nt, Human
ccaucucuggagccaggg

SEQ ID NO: 283299 - RNA, 18 nt, Human
cccaaagaccccgcccag

SEQ ID NO: 283300 - RNA, 18 nt, Human
cccaaagaccccgcccag

SEQ ID NO: 283301 - RNA, 19 nt, Human
cccaaagaccccgcccaga

SEQ ID NO: 283302 - RNA, 19 nt, Human
cccaaagaccccgcccaga

SEQ ID NO: 283303 - RNA, 19 nt, Human
cccaaagaccccgcccaga

SEQ ID NO: 283304 - RNA, 21 nt, Human
cccaccccaucuuguugugca

SEQ ID NO: 283305 - RNA, 21 nt, Human
cccaccccaucuuguugugca

SEQ ID NO: 283306 - RNA, 20 nt, Human
ccccagagccugugggcgcg

SEQ ID NO: 283307 - RNA, 20 nt, Human
ccccagagccugugggcgcg

SEQ ID NO: 283308 - RNA, 20 nt, Human
ccccagagccugugggcgcg

SEQ ID NO: 283309 - RNA, 18 nt, Human
cccgauaggggggccuuc

SEQ ID NO: 283310 - RNA, 18 nt, Human
cccgauaggggggccuuc

SEQ ID NO: 283311 - RNA, 20 nt, Human
cccgcccccuccuugcgacu

SEQ ID NO: 283312 - RNA, 20 nt, Human
cccgcccccuccuugcgacu

SEQ ID NO: 283313 - RNA, 20 nt, Human
cccgcccccuccuugcgacu

SEQ ID NO: 283314 - RNA, 18 nt, Human
cccgcuaagcuuguccca

SEQ ID NO: 283315 - RNA, 25 nt, Human
cccuccuugcgacuuaucuucuccc

SEQ ID NO: 283316 - RNA, 25 nt, Human
cccuccuugcgacuuaucuucuccc

SEQ ID NO: 283317 - RNA, 18 nt, Human
cccugaggcagccugccu

SEQ ID NO: 283318 - RNA, 19 nt, Human
ccgaaggcaaugagaaucc

SEQ ID NO: 283319 - RNA, 20 nt, Human
ccgccggccgccacagcugc

SEQ ID NO: 283320 - RNA, 24 nt, Human
ccgccggccgccacagcugcugcc

SEQ ID NO: 283321 - RNA, 25 nt, Human
ccgccggccgccacagcugcugccu

SEQ ID NO: 283322 - RNA, 22 nt, Human
ccuaccagcucaacaggagacu

SEQ ID NO: 283323 - RNA, 22 nt, Human
ccuaccagcucaacaggagacu

SEQ ID NO: 283324 - RNA, 19 nt, Human
ccucccggguucaagcgau

SEQ ID NO: 283325 - RNA, 20 nt, Human
ccucgcccacacggugcugu

SEQ ID NO: 283326 - RNA, 20 nt, Human
ccucgcccacacggugcugu

SEQ ID NO: 283327 - RNA, 20 nt, Human
ccucgcccacacggugcugu

SEQ ID NO: 283328 - RNA, 21 nt, Human
ccucugagaccucaggacauc

SEQ ID NO: 283329 - RNA, 21 nt, Human
ccucugagaccucaggacauc

SEQ ID NO: 283330 - RNA, 22 nt, Human
ccucugagaccucaggacauca

SEQ ID NO: 283331 - RNA, 21 nt, Human
ccuucucggaggugauccugg

SEQ ID NO: 283332 - RNA, 22 nt, Human
ccuugcgacuuaucuucucccg

SEQ ID NO: 283333 - RNA, 22 nt, Human
ccuugcgacuuaucuucucccg

SEQ ID NO: 283334 - RNA, 22 nt, Human
ccuugcgacuuaucuucucccg

SEQ ID NO: 283335 - RNA, 25 nt, Human
ccuugggccgccucccacgaacccu

SEQ ID NO: 283336 - RNA, 22 nt, Human
cgaaggcaaugagaauccacug

SEQ ID NO: 283337 - RNA, 21 nt, Human
cgacuuaucuucucccgcccc

SEQ ID NO: 283338 - RNA, 21 nt, Human
cgacuuaucuucucccgcccc

SEQ ID NO: 283339 - RNA, 21 nt, Human
cgacuuaucuucucccgcccc

SEQ ID NO: 283340 - RNA, 21 nt, Human
cgccacagcugcugccugccg

SEQ ID NO: 283341 - RNA, 20 nt, Human
cgcccccuccuugcgacuua

SEQ ID NO: 283342 - RNA, 20 nt, Human
cgcccccuccuugcgacuua

SEQ ID NO: 283343 - RNA, 20 nt, Human
cgcccccuccuugcgacuua

SEQ ID NO: 283344 - RNA, 24 nt, Human
cggugcuguuuaacaaccuucccu

SEQ ID NO: 283345 - RNA, 24 nt, Human
cggugcuguuuaacaaccuucccu

SEQ ID NO: 283346 - RNA, 20 nt, Human
cuaaaaaaguucccggguga

SEQ ID NO: 283347 - RNA, 20 nt, Human
cuaaaaaaguucccggguga

SEQ ID NO: 283348 - RNA, 20 nt, Human
cuaaaaaaguucccggguga

SEQ ID NO: 283349 - RNA, 24 nt, Human
cucacucugucgccuaggcuggag

SEQ ID NO: 283350 - RNA, 19 nt, Human
cuccccaacaugagacugg

SEQ ID NO: 283351 - RNA, 19 nt, Human
cuccccaacaugagacugg

SEQ ID NO: 283352 - RNA, 20 nt, Human
cucgaauuagcagaaaaagg

SEQ ID NO: 283353 - RNA, 20 nt, Human
cucgaauuagcagaaaaagg

SEQ ID NO: 283354 - RNA, 20 nt, Human
cucgaauuagcagaaaaagg

SEQ ID NO: 283355 - RNA, 23 nt, Human
cucugucgccuaggcuggagugu

SEQ ID NO: 283356 - RNA, 19 nt, Human
cugaacagcaccuguagga

SEQ ID NO: 283357 - RNA, 20 nt, Human
cugcgcuuugcugguggcuc

SEQ ID NO: 283358 - RNA, 23 nt, Human
cuggggcggugguggaagagucc

SEQ ID NO: 283359 - RNA, 19 nt, Human
cuguggccaggggagagac

SEQ ID NO: 283360 - RNA, 19 nt, Human
cuguggccaggggagagac

SEQ ID NO: 283361 - RNA, 18 nt, Human
cuguguggggaggagggu

SEQ ID NO: 283362 - RNA, 20 nt, Human
cuucucggaggugauccugg

SEQ ID NO: 283363 - RNA, 22 nt, Human
cuuugcugguggcuccucccgg

SEQ ID NO: 283364 - RNA, 19 nt, Human
gaaugggacguuugccggg

SEQ ID NO: 283365 - RNA, 30 nt, Human
gaaugggacguuugccggggguuugucuuc

SEQ ID NO: 283366 - RNA, 20 nt, Human
gacuuaucuucucccgcccc

SEQ ID NO: 283367 - RNA, 20 nt, Human
gacuuaucuucucccgcccc

SEQ ID NO: 283368 - RNA, 20 nt, Human
gacuuaucuucucccgcccc

SEQ ID NO: 283369 - RNA, 19 nt, Human
gagaauccacugggguugg

SEQ ID NO: 283370 - RNA, 18 nt, Human
gagccacguccuucccca

SEQ ID NO: 283371 - RNA, 23 nt, Human
gagggccacauaauguuaucagg

SEQ ID NO: 283372 - RNA, 23 nt, Human
gagggccacauaauguuaucagg

SEQ ID NO: 283373 - RNA, 19 nt, Human
gauggcaugaaaaagcagg

SEQ ID NO: 283374 - RNA, 24 nt, Human
gcaggcucuccccaggcgguggca

SEQ ID NO: 283375 - RNA, 25 nt, Human
gcaggcucuccccaggcgguggcaa

SEQ ID NO: 283376 - RNA, 25 nt, Human
gcaggcucuccccaggugguggcaa

SEQ ID NO: 283377 - RNA, 25 nt, Human
gcaggcucuccccaggugguggcaa

SEQ ID NO: 283378 - RNA, 19 nt, Human
gcauuucuuuuuuuuucuu

SEQ ID NO: 283379 - RNA, 19 nt, Human
gcauuucuuuuuuuuucuu

SEQ ID NO: 283380 - RNA, 19 nt, Human
gcauuucuuuuuuuuucuu

SEQ ID NO: 283381 - RNA, 20 nt, Human
gcauuucuuuuuuuuuucuu

SEQ ID NO: 283382 - RNA, 19 nt, Human
gcccaaagaccccgcccag

SEQ ID NO: 283383 - RNA, 19 nt, Human
gcccaaagaccccgcccag

SEQ ID NO: 283384 - RNA, 23 nt, Human
gcccagacaaggaccacgacccu

SEQ ID NO: 283385 - RNA, 23 nt, Human
gcccagacaaggaccacgacccu

SEQ ID NO: 283386 - RNA, 23 nt, Human
gcccagacaaggaccacgacccu

SEQ ID NO: 283387 - RNA, 18 nt, Human
gccccgccuacccagaac

SEQ ID NO: 283388 - RNA, 18 nt, Human
gccccgccuacccagaac

SEQ ID NO: 283389 - RNA, 18 nt, Human
gccccgccuacccagaac

SEQ ID NO: 283390 - RNA, 19 nt, Human
gcccugaggcagccugccu

SEQ ID NO: 283391 - RNA, 18 nt, Human
gccuaggcuggaguguga

SEQ ID NO: 283392 - RNA, 20 nt, Human
gccucccacgaacccugucu

SEQ ID NO: 283393 - RNA, 18 nt, Human
gcuaacgaguuccaucug

SEQ ID NO: 283394 - RNA, 18 nt, Human
gcuggagugugauggcgc

SEQ ID NO: 283395 - RNA, 20 nt, Human
ggaagcugggguuccaguuc

SEQ ID NO: 283396 - RNA, 18 nt, Human
ggaauggaggagaggcug

SEQ ID NO: 283397 - RNA, 22 nt, Human
ggagaggcuggagggaagcugg

SEQ ID NO: 283398 - RNA, 22 nt, Human
ggagaggcuggagggaagcugg

SEQ ID NO: 283399 - RNA, 21 nt, Human
ggagguggaagaauccuuggg

SEQ ID NO: 283400 - RNA, 21 nt, Human
gggaagauaaaaccauccuua

SEQ ID NO: 283401 - RNA, 21 nt, Human
gggaagauaaaaccauccuua

SEQ ID NO: 283402 - RNA, 21 nt, Human
gggaagauaaaaccauccuua

SEQ ID NO: 283403 - RNA, 18 nt, Human
gggaagcugggguuccag

SEQ ID NO: 283404 - RNA, 18 nt, Human
gggaagcugggguuccag

SEQ ID NO: 283405 - RNA, 21 nt, Human
gggaagcugggguuccaguuc

SEQ ID NO: 283406 - RNA, 20 nt, Human
gggaauggaggagaggcugg

SEQ ID NO: 283407 - RNA, 19 nt, Human
ggggaaggugcuuggggaa

SEQ ID NO: 283408 - RNA, 19 nt, Human
ggggaaggugcuuggggaa

SEQ ID NO: 283409 - RNA, 22 nt, Human
ggggauggggagagagaagugg

SEQ ID NO: 283410 - RNA, 22 nt, Human
ggggauggggagagagaagugg

SEQ ID NO: 283411 - RNA, 22 nt, Human
ggggcggugguggaagagucca

SEQ ID NO: 283412 - RNA, 19 nt, Human
gggguugggacaggggugg

SEQ ID NO: 283413 - RNA, 20 nt, Human
ggguggagucugugugggga

SEQ ID NO: 283414 - RNA, 21 nt, Human
ggguggggauggggagagaga

SEQ ID NO: 283415 - RNA, 21 nt, Human
ggguggggauggggagagaga

SEQ ID NO: 283416 - RNA, 18 nt, Human
ggucacagaacccauagg

SEQ ID NO: 283417 - RNA, 18 nt, Human
ggucacagaacccauagg

SEQ ID NO: 283418 - RNA, 20 nt, Human
ggucugggcuggaggagagg

SEQ ID NO: 283419 - RNA, 20 nt, Human
guccuuuagggccaccuggg

SEQ ID NO: 283420 - RNA, 25 nt, Human
guggggaggaggguacacugggguc

SEQ ID NO: 283421 - RNA, 24 nt, Human
guuaauuucauucccaagcaggcu

SEQ ID NO: 283422 - RNA, 24 nt, Human
guuaauuucauucccaagcaggcu

SEQ ID NO: 283423 - RNA, 21 nt, Human
guuccuuuuuaagaaccuguu

SEQ ID NO: 283424 - RNA, 25 nt, Human
uaaaaaaguucccgggugaugcuga

SEQ ID NO: 283425 - RNA, 25 nt, Human
uaaaaaaguucccgggugaugcuga

SEQ ID NO: 283426 - RNA, 25 nt, Human
uaaaaaaguucccgggugaugcuga

SEQ ID NO: 283427 - RNA, 19 nt, Human
uaaaaccauccuuagcgcu

SEQ ID NO: 283428 - RNA, 19 nt, Human
uaaaaccauccuuagcgcu

SEQ ID NO: 283429 - RNA, 19 nt, Human
uaaaaccauccuuagcgcu

SEQ ID NO: 283430 - RNA, 26 nt, Human
uaaagggaagauaaaaccauccuuag

SEQ ID NO: 283431 - RNA, 26 nt, Human
uaaagggaagauaaaaccauccuuag

SEQ ID NO: 283432 - RNA, 26 nt, Human
uaaagggaagauaaaaccauccuuag

SEQ ID NO: 283433 - RNA, 24 nt, Human
uaagaaccuguucuaaaacacugc

SEQ ID NO: 283434 - RNA, 24 nt, Human
uaagaaccuguucuaaaacacugc

SEQ ID NO: 283435 - RNA, 24 nt, Human
uaagaaccuguucuaaaacacugc

SEQ ID NO: 283436 - RNA, 24 nt, Human
uaagaaccuguucuaaaacacugc

SEQ ID NO: 283437 - RNA, 19 nt, Human
uaagaggacgcagaagcug

SEQ ID NO: 283438 - RNA, 19 nt, Human
uaagaggacgcagaagcug

SEQ ID NO: 283439 - RNA, 23 nt, Human
uacuuugacuggccaggccuggg

SEQ ID NO: 283440 - RNA, 19 nt, Human
uagcauagggauuuggggu

SEQ ID NO: 283441 - RNA, 20 nt, Human
uagcuccaggcuuacauccu

SEQ ID NO: 283442 - RNA, 20 nt, Human
uagcuccaggcuuacauccu

SEQ ID NO: 283443 - RNA, 20 nt, Human
uagcuccaggcuuacauccu

SEQ ID NO: 283444 - RNA, 23 nt, Human
uaggaggguggagucuguguggg

SEQ ID NO: 283445 - RNA, 22 nt, Human
ucaaggccuuuaggcguccucu

SEQ ID NO: 283446 - RNA, 24 nt, Human
ucacucugucgccuaggcuggagu

SEQ ID NO: 283447 - RNA, 18 nt, Human
ucacugcaagcuccgccu

SEQ ID NO: 283448 - RNA, 19 nt, Human
ucacugcaagcuccgccuc

SEQ ID NO: 283449 - RNA, 24 nt, Human
ucacugcaagcuccgccucccggg

SEQ ID NO: 283450 - RNA, 19 nt, Human
ucagggugggcgggccguu

SEQ ID NO: 283451 - RNA, 22 nt, Human
uccaaaagcccagggguagacc

SEQ ID NO: 283452 - RNA, 22 nt, Human
uccaaaagcccagggguagacc

SEQ ID NO: 283453 - RNA, 22 nt, Human
uccaaaagcccagggguagacc

SEQ ID NO: 283454 - RNA, 18 nt, Human
uccacagcaggcaccgcc

SEQ ID NO: 283455 - RNA, 18 nt, Human
uccacagcaggcaccgcc

SEQ ID NO: 283456 - RNA, 18 nt, Human
uccacagcaggcaccgcc

SEQ ID NO: 283457 - RNA, 21 nt, Human
uccacugggguugggacaggg

SEQ ID NO: 283458 - RNA, 19 nt, Human
uccagggugccccaucuag

SEQ ID NO: 283459 - RNA, 21 nt, Human
ucccaagcaggaucuccccag

SEQ ID NO: 283460 - RNA, 24 nt, Human
ucccacgaacccugucuucaccaa

SEQ ID NO: 283461 - RNA, 22 nt, Human
ucccgccggccgccacagcugc

SEQ ID NO: 283462 - RNA, 22 nt, Human
uccuuggggaacagggccgaag

SEQ ID NO: 283463 - RNA, 23 nt, Human
uccuuggggaacagggccgaagg

SEQ ID NO: 283464 - RNA, 18 nt, Human
ucgccuaggcuggagugu

SEQ ID NO: 283465 - RNA, 22 nt, Human
ucuaaaacacugcuucuuaaag

SEQ ID NO: 283466 - RNA, 22 nt, Human
ucuaaaacacugcuucuuaaag

SEQ ID NO: 283467 - RNA, 22 nt, Human
ucuaaaacacugcuucuuaaag

SEQ ID NO: 283468 - RNA, 22 nt, Human
ucuaaaacacugcuucuuaaag

SEQ ID NO: 283469 - RNA, 23 nt, Human
ucucacucugucgccuaggcugg

SEQ ID NO: 283470 - RNA, 24 nt, Human
ucucacucugucgccuaggcugga

SEQ ID NO: 283471 - RNA, 19 nt, Human
ucucagguuggacuuccuu

SEQ ID NO: 283472 - RNA, 19 nt, Human
ucucagguuggacuuccuu

SEQ ID NO: 283473 - RNA, 23 nt, Human
ucuccccaggcgguggcaaagau

SEQ ID NO: 283474 - RNA, 20 nt, Human
ucuccccaggugguggcaaa

SEQ ID NO: 283475 - RNA, 20 nt, Human
ucuccccaggugguggcaaa

SEQ ID NO: 283476 - RNA, 20 nt, Human
ucuccccaggugguggcaaa

SEQ ID NO: 283477 - RNA, 21 nt, Human
ucugccagcugcucgccuuuc

SEQ ID NO: 283478 - RNA, 24 nt, Human
ucugucgccuaggcuggaguguga

SEQ ID NO: 283479 - RNA, 18 nt, Human
ucuucuggguucuccagg

SEQ ID NO: 283480 - RNA, 18 nt, Human
ucuucuggguucuccagg

SEQ ID NO: 283481 - RNA, 22 nt, Human
ugaccaucucuggagccagggg

SEQ ID NO: 283482 - RNA, 22 nt, Human
ugaccaucucuggagccagggg

SEQ ID NO: 283483 - RNA, 20 nt, Human
ugacccaggauccaaagcag

SEQ ID NO: 283484 - RNA, 20 nt, Human
ugacccaggauccaaagcag

SEQ ID NO: 283485 - RNA, 20 nt, Human
ugacccaggauccaaagcag

SEQ ID NO: 283486 - RNA, 18 nt, Human
ugacuggccaggccuggg

SEQ ID NO: 283487 - RNA, 22 nt, Human
ugagacggagucucacucuguc

SEQ ID NO: 283488 - RNA, 19 nt, Human
ugagcauacaaaucaccug

SEQ ID NO: 283489 - RNA, 19 nt, Human
ugagcauacaaaucaccug

SEQ ID NO: 283490 - RNA, 19 nt, Human
ugagcauacaaaucaccug

SEQ ID NO: 283491 - RNA, 19 nt, Human
ugagcauacaaaucaccug

SEQ ID NO: 283492 - RNA, 19 nt, Human
ugagguagucacagggagg

SEQ ID NO: 283493 - RNA, 19 nt, Human
ugagguagucacagggagg

SEQ ID NO: 283494 - RNA, 18 nt, Human
ugagugacuaggggaggg

SEQ ID NO: 283495 - RNA, 18 nt, Human
ugagugacuaggggaggg

SEQ ID NO: 283496 - RNA, 23 nt, Human
ugcauuucuuuuuuuuucuuuuu

SEQ ID NO: 283497 - RNA, 23 nt, Human
ugcauuucuuuuuuuuucuuuuu

SEQ ID NO: 283498 - RNA, 18 nt, Human
ugccccaucuagccuucc

SEQ ID NO: 283499 - RNA, 21 nt, Human
ugccucgcccuuugcggguca

SEQ ID NO: 283500 - RNA, 21 nt, Human
ugccucgcccuuugcggguca

SEQ ID NO: 283501 - RNA, 21 nt, Human
ugccucgcccuuugcggguca

SEQ ID NO: 283502 - RNA, 24 nt, Human
uggagugugauggcgcgaucucgg

SEQ ID NO: 283503 - RNA, 24 nt, Human
uggauccagagggccacauaaugu

SEQ ID NO: 283504 - RNA, 24 nt, Human
uggauccagagggccacauaaugu

SEQ ID NO: 283505 - RNA, 24 nt, Human
uggauccagagggccacauaaugu

SEQ ID NO: 283506 - RNA, 24 nt, Human
uggcagaagauaagaggacgcaga

SEQ ID NO: 283507 - RNA, 24 nt, Human
uggcagaagauaagaggacgcaga

SEQ ID NO: 283508 - RNA, 21 nt, Human
uggcaugaaaaagcagggagc

SEQ ID NO: 283509 - RNA, 18 nt, Human
ugggagguggaagaaucc

SEQ ID NO: 283510 - RNA, 24 nt, Human
ugggagguggaagaauccuugggg

SEQ ID NO: 283511 - RNA, 25 nt, Human
ugggagguggaagaauccuugggga

SEQ ID NO: 283512 - RNA, 20 nt, Human
ugggcccagaagcccaucag

SEQ ID NO: 283513 - RNA, 18 nt, Human
ugggcgcgcacagcugug

SEQ ID NO: 283514 - RNA, 18 nt, Human
ugggcgcgcacagcugug

SEQ ID NO: 283515 - RNA, 18 nt, Human
ugggcgcgcacagcugug

SEQ ID NO: 283516 - RNA, 18 nt, Human
uggggcugggcccagaag

SEQ ID NO: 283517 - RNA, 24 nt, Human
uggggcugggcccagaagcccauc

SEQ ID NO: 283518 - RNA, 19 nt, Human
ugggguugggacaggggug

SEQ ID NO: 283519 - RNA, 25 nt, Human
ugggguugggacagggguggcugga

SEQ ID NO: 283520 - RNA, 20 nt, Human
ugggucugggcuggaggaga

SEQ ID NO: 283521 - RNA, 18 nt, Human
uggguggggauggggaga

SEQ ID NO: 283522 - RNA, 18 nt, Human
uggguggggauggggaga

SEQ ID NO: 283523 - RNA, 20 nt, Human
uguaauaaagggaagauaaa

SEQ ID NO: 283524 - RNA, 20 nt, Human
uguaauaaagggaagauaaa

SEQ ID NO: 283525 - RNA, 20 nt, Human
uguaauaaagggaagauaaa

SEQ ID NO: 283526 - RNA, 20 nt, Human
uguccagggugccccaucua

SEQ ID NO: 283527 - RNA, 19 nt, Human
ugucgccuaggcuggagug

SEQ ID NO: 283528 - RNA, 20 nt, Human
ugucucccucaauauccccc

SEQ ID NO: 283529 - RNA, 20 nt, Human
ugucucccucaauauccccc

SEQ ID NO: 283530 - RNA, 19 nt, Human
uguuucacuuaauuccucc

SEQ ID NO: 283531 - RNA, 19 nt, Human
uguuucacuuaauuccucc

SEQ ID NO: 283532 - RNA, 19 nt, Human
uguuucacuuaauuccucc

SEQ ID NO: 283533 - RNA, 22 nt, Human
uuagcgcugucucccucaauau

SEQ ID NO: 283534 - RNA, 22 nt, Human
uuagcgcugucucccucaauau

SEQ ID NO: 283535 - RNA, 27 nt, Human
uuagcgcugucucccucaauauccccc

SEQ ID NO: 283536 - RNA, 27 nt, Human
uuagcgcugucucccucaauauccccc

SEQ ID NO: 283537 - RNA, 20 nt, Human
uucucagguuggacuuccuu

SEQ ID NO: 283538 - RNA, 20 nt, Human
uucucagguuggacuuccuu

SEQ ID NO: 283539 - RNA, 18 nt, Human
uucuggguucuccagggg

SEQ ID NO: 283540 - RNA, 22 nt, Human
uucuuuguccagggugccccau

SEQ ID NO: 283541 - RNA, 22 nt, Human
uucuuuguccagggugccccau

SEQ ID NO: 283542 - RNA, 24 nt, Human
uuguaauaaagggaagauaaaacc

SEQ ID NO: 283543 - RNA, 24 nt, Human
uuguaauaaagggaagauaaaacc

SEQ ID NO: 283544 - RNA, 24 nt, Human
uuguaauaaagggaagauaaaacc

SEQ ID NO: 283545 - RNA, 18 nt, Human
uugugaauccccucuccc

SEQ ID NO: 283546 - RNA, 23 nt, Human
uuucugcgcuuugcugguggcuc

SEQ ID NO: 283547 - RNA, 18 nt, Human
uuuucuuuuuuuugaccc

SEQ ID NO: 283548 - RNA, 18 nt, Human
uuuucuuuuuuuugaccc

SEQ ID NO: 283549 - RNA, 18 nt, Human
uuuucuuuuuuuugaccc

SEQ ID NO: 283550 - RNA, 26 nt, Human
uuuuuuuucuuugagacggagucuca

SEQ ID NO: 283551 - RNA, 18 nt, Human
uuuuuuuucuuuuuuuug

SEQ ID NO: 283552 - RNA, 20 nt, Human
uuuuuuuuucuuuuuuuugg

SEQ ID NO: 283553 - RNA, 20 nt, Human
uuuuuuuuucuuuuuuuugg

SEQ ID NO: 283554 - RNA, 20 nt, Human
uuuuuuuuucuuuuuuuugg

SEQ ID NO: 283555 - RNA, 18 nt, Human
uuuuuuuuuuuuuuuuug

SEQ ID NO: 283556 - RNA, 18 nt, Human
uuuuuuuuuuuuuuuuug

SEQ ID NO: 283557 - RNA, 26 nt, Human
uuuuuuuuuuuuuuuuugauccuuuu

SEQ ID NO: 283558 - RNA, 26 nt, Human
uuuuuuuuuuuuuuuuugauccuuuu

SEQ ID NO: 283559 - RNA, 26 nt, Human
uuuuuuuuuuuuuuuuugauccuuuu

SEQ ID NO: 283560 - RNA, 27 nt, Human
uuuuuuuuuuuuuuuuuuuuuuugggg

SEQ ID NO: 283561 - RNA, 24 nt, Human
aaaacagaagcaaaugcuuaaaaa

SEQ ID NO: 283562 - RNA, 18 nt, Human
aaacaucugacauucuag

SEQ ID NO: 283563 - RNA, 18 nt, Human
aaacaucugacauucuag

SEQ ID NO: 283564 - RNA, 20 nt, Human
aaagacuuugccauagagaa

SEQ ID NO: 283565 - RNA, 20 nt, Human
aaagacuuugccauagagaa

SEQ ID NO: 283566 - RNA, 19 nt, Human
aaagaguugaaaguuucuu

SEQ ID NO: 283567 - RNA, 19 nt, Human
aaagaguugaaaguuucuu

SEQ ID NO: 283568 - RNA, 20 nt, Human
aaagaguugaaaguuucuug

SEQ ID NO: 283569 - RNA, 20 nt, Human
aaagaguugaaaguuucuug

SEQ ID NO: 283570 - RNA, 21 nt, Human
aaauuccuucaaaaugagaua

SEQ ID NO: 283571 - RNA, 21 nt, Human
aagguuaauauuaaaccaaua

SEQ ID NO: 283572 - RNA, 20 nt, Human
acaacuugauuucaauacau

SEQ ID NO: 283573 - RNA, 20 nt, Human
acaacuugauuucaauacau

SEQ ID NO: 283574 - RNA, 24 nt, Human
acaugauuuuuaaaugguagucua

SEQ ID NO: 283575 - RNA, 24 nt, Human
acucucuuuuucccuggaaauaaa

SEQ ID NO: 283576 - RNA, 18 nt, Human
agacuuagaauguuaaua

SEQ ID NO: 283577 - RNA, 18 nt, Human
agacuuagaauguuaaua

SEQ ID NO: 283578 - RNA, 23 nt, Human
aggugacuggaaguuaauaaacu

SEQ ID NO: 283579 - RNA, 23 nt, Human
aggugacuggaaguuaauaaacu

SEQ ID NO: 283580 - RNA, 23 nt, Human
aggugacuggaaguuaauaaacu

SEQ ID NO: 283581 - RNA, 21 nt, Human
aguaagggccagagaacagua

SEQ ID NO: 283582 - RNA, 23 nt, Human
auugugaauauucaguuuguuac

SEQ ID NO: 283583 - RNA, 23 nt, Human
auugugaauauucaguuuguuac

SEQ ID NO: 283584 - RNA, 18 nt, Human
caaaaaucaaggugacug

SEQ ID NO: 283585 - RNA, 18 nt, Human
caaaaaucaaggugacug

SEQ ID NO: 283586 - RNA, 18 nt, Human
caaaaaucaaggugacug

SEQ ID NO: 283587 - RNA, 18 nt, Human
cacaaaauaacgagaaag

SEQ ID NO: 283588 - RNA, 18 nt, Human
cacaaaauaacgagaaag

SEQ ID NO: 283589 - RNA, 18 nt, Human
cacaguccggacucaugu

SEQ ID NO: 283590 - RNA, 21 nt, Human
cagaaaguguuacucagaagc

SEQ ID NO: 283591 - RNA, 21 nt, Human
cagaaaguguuacucagaagc

SEQ ID NO: 283592 - RNA, 22 nt, Human
caguaagggccagagaacagua

SEQ ID NO: 283593 - RNA, 18 nt, Human
caguauuuaacccuuagu

SEQ ID NO: 283594 - RNA, 23 nt, Human
caguccggacucauguuucuaaa

SEQ ID NO: 283595 - RNA, 23 nt, Human
caguccggacucauguuucuaaa

SEQ ID NO: 283596 - RNA, 18 nt, Human
cauaaaagaagaaugagc

SEQ ID NO: 283597 - RNA, 26 nt, Human
cauuaccagaaaguaaaauaacuuga

SEQ ID NO: 283598 - RNA, 26 nt, Human
cauuaccagaaaguaaaauaacuuga

SEQ ID NO: 283599 - RNA, 18 nt, Human
ccagaaaguaaaauaacu

SEQ ID NO: 283600 - RNA, 18 nt, Human
ccagaaaguaaaauaacu

SEQ ID NO: 283601 - RNA, 24 nt, Human
ccagaaaguaaaauaacuugaaca

SEQ ID NO: 283602 - RNA, 24 nt, Human
ccagaaaguaaaauaacuugaaca

SEQ ID NO: 283603 - RNA, 22 nt, Human
cgcaguaagggccagagaacag

SEQ ID NO: 283604 - RNA, 22 nt, Human
cgcaguaagggccagagaacag

SEQ ID NO: 283605 - RNA, 21 nt, Human
cucuuuuucccuggaaauaaa

SEQ ID NO: 283606 - RNA, 22 nt, Human
cugaaaaacaucugacauucua

SEQ ID NO: 283607 - RNA, 22 nt, Human
cugaaaaacaucugacauucua

SEQ ID NO: 283608 - RNA, 24 nt, Human
cugacugugggacaaaacucucuu

SEQ ID NO: 283609 - RNA, 24 nt, Human
cugacugugggacaaaacucucuu

SEQ ID NO: 283610 - RNA, 24 nt, Human
cugacugugggacaaaacucucuu

SEQ ID NO: 283611 - RNA, 20 nt, Human
cuguuuugaaguuuuuugug

SEQ ID NO: 283612 - RNA, 21 nt, Human
gcuguuuugaaguuuuuugug

SEQ ID NO: 283613 - RNA, 18 nt, Human
gggcauuuauauaaaaac

SEQ ID NO: 283614 - RNA, 18 nt, Human
gggcauuuauauaaaaac

SEQ ID NO: 283615 - RNA, 23 nt, Human
uaaaaacaugauauuuaaauggu

SEQ ID NO: 283616 - RNA, 22 nt, Human
uaaaagaagaaugagcgaucau

SEQ ID NO: 283617 - RNA, 22 nt, Human
uaaaagaagaaugagcgaucau

SEQ ID NO: 283618 - RNA, 23 nt, Human
uaaacuaguggccugcugacugu

SEQ ID NO: 283619 - RNA, 23 nt, Human
uaaacuaguggccugcugacugu

SEQ ID NO: 283620 - RNA, 23 nt, Human
uaaacuaguggccugcugacugu

SEQ ID NO: 283621 - RNA, 21 nt, Human
uaacugaaaaacaucugacau

SEQ ID NO: 283622 - RNA, 21 nt, Human
uaacugaaaaacaucugacau

SEQ ID NO: 283623 - RNA, 19 nt, Human
uacacagagacaacuugau

SEQ ID NO: 283624 - RNA, 18 nt, Human
uacucauuguugagacag

SEQ ID NO: 283625 - RNA, 24 nt, Human
uagauaaagaaaauauuuuacuga

SEQ ID NO: 283626 - RNA, 24 nt, Human
uagauaaagaaaauauuuuacuga

SEQ ID NO: 283627 - RNA, 19 nt, Human
uagcaguuuuuauguauca

SEQ ID NO: 283628 - RNA, 19 nt, Human
uaucuugaggucaacuuug

SEQ ID NO: 283629 - RNA, 19 nt, Human
uaucuugaggucaacuuug

SEQ ID NO: 283630 - RNA, 22 nt, Human
uauugguuuuggccugcuugag

SEQ ID NO: 283631 - RNA, 22 nt, Human
uauugguuuuggccugcuugag

SEQ ID NO: 283632 - RNA, 24 nt, Human
ucagagaauaacauuuauuuuauu

SEQ ID NO: 283633 - RNA, 24 nt, Human
ucagagaauaacauuuauuuuauu

SEQ ID NO: 283634 - RNA, 20 nt, Human
uccuucaaaaugagauacaa

SEQ ID NO: 283635 - RNA, 20 nt, Human
ugaaauauucuuaggauacc

SEQ ID NO: 283636 - RNA, 23 nt, Human
ugaaucauaaaagaagaaugagc

SEQ ID NO: 283637 - RNA, 22 nt, Human
ugagaggaauguuauuuuagaa

SEQ ID NO: 283638 - RNA, 22 nt, Human
ugagaggaauguuauuuuagaa

SEQ ID NO: 283639 - RNA, 23 nt, Human
uggcaccacugagucaucauaaa

SEQ ID NO: 283640 - RNA, 23 nt, Human
uggcaccacugagucaucauaaa

SEQ ID NO: 283641 - RNA, 21 nt, Human
ugguuuuggccugcuugaguu

SEQ ID NO: 283642 - RNA, 21 nt, Human
ugguuuuggccugcuugaguu

SEQ ID NO: 283643 - RNA, 21 nt, Human
uguaagauuuugaacauccuu

SEQ ID NO: 283644 - RNA, 18 nt, Human
uguaugggugggaaggua

SEQ ID NO: 283645 - RNA, 18 nt, Human
uguaugggugggaaggua

SEQ ID NO: 283646 - RNA, 21 nt, Human
uuacacaguccggacucaugu

SEQ ID NO: 283647 - RNA, 21 nt, Human
uuacacaguccggacucaugu

SEQ ID NO: 283648 - RNA, 24 nt, Human
uugaaguuuuuugugguuuuccuc

SEQ ID NO: 283649 - RNA, 18 nt, Human
uuuagcaaaaaucaaggu

SEQ ID NO: 283650 - RNA, 18 nt, Human
uuuagcaaaaaucaaggu

SEQ ID NO: 283651 - RNA, 18 nt, Human
uuuagcaaaaaucaaggu

SEQ ID NO: 283652 - RNA, 24 nt, Human
uuucccguuguagcuguuuugaag

SEQ ID NO: 283653 - RNA, 20 nt, Human
uuuguuacagugaacaugga

SEQ ID NO: 283654 - RNA, 20 nt, Human
uuuguuacagugaacaugga

SEQ ID NO: 283655 - RNA, 18 nt, Human
uuuuuuuuuuuuuuuuug

SEQ ID NO: 283656 - RNA, 19 nt, Human
uuuuuuuuuuuuuuuuugg

SEQ ID NO: 283657 - RNA, 19 nt, Human
uuuuuuuuuuuuuuuuugg

SEQ ID NO: 283658 - RNA, 24 nt, Human
aaaaaaaaggaguucaugaucaaa

SEQ ID NO: 283659 - RNA, 21 nt, Human
aaaagcaguuucccaucuuuu

SEQ ID NO: 283660 - RNA, 20 nt, Human
aaaauaccugaaaccaaaca

SEQ ID NO: 283661 - RNA, 24 nt, Human
aaacaagagagaaaauaaaaacaa

SEQ ID NO: 283662 - RNA, 26 nt, Human
aaacaagagagaaaauaaaaacaaga

SEQ ID NO: 283663 - RNA, 22 nt, Human
aaaccuauaaaaagacuacacc

SEQ ID NO: 283664 - RNA, 22 nt, Human
aaagaaaaaaaaauccagaaga

SEQ ID NO: 283665 - RNA, 22 nt, Human
aaagaagaaaaaaggaaaaaaa

SEQ ID NO: 283666 - RNA, 19 nt, Human
aaagaagucagcaaccuaa

SEQ ID NO: 283667 - RNA, 27 nt, Human
aaaugaacaacaagaagaguuagaagc

SEQ ID NO: 283668 - RNA, 19 nt, Human
aacacauuuugggaaaugc

SEQ ID NO: 283669 - RNA, 23 nt, Human
aacggccaaccagauccauuaau

SEQ ID NO: 283670 - RNA, 20 nt, Human
aacugcugcgcuacauagaa

SEQ ID NO: 283671 - RNA, 23 nt, Human
aagaaaaaaaaauccagaagacu

SEQ ID NO: 283672 - RNA, 24 nt, Human
aagaaauacauugcauuucacuca

SEQ ID NO: 283673 - RNA, 28 nt, Human
aagaagaaaaaaggaaaaaaaaugaaac

SEQ ID NO: 283674 - RNA, 24 nt, Human
aauaugggaaacaugcagaaggga

SEQ ID NO: 283675 - RNA, 22 nt, Human
aaugcacugauuacaaaagaaa

SEQ ID NO: 283676 - RNA, 24 nt, Human
aaugcugcucuucaacaauguucc

SEQ ID NO: 283677 - RNA, 19 nt, Human
acaaagcacugauagcucc

SEQ ID NO: 283678 - RNA, 23 nt, Human
acccaaaauauaaagaaaaaaaa

SEQ ID NO: 283679 - RNA, 20 nt, Human
accugaaaccaaacauuuuu

SEQ ID NO: 283680 - RNA, 20 nt, Human
acgcaaugcgcauuaacgcu

SEQ ID NO: 283681 - RNA, 22 nt, Human
agaacccaagugcaaaccacca

SEQ ID NO: 283682 - RNA, 18 nt, Human
agaagagcagaaugcugc

SEQ ID NO: 283683 - RNA, 24 nt, Human
agaagggagaggguuaaucagggc

SEQ ID NO: 283684 - RNA, 19 nt, Human
agaauaacauuuuucaaac

SEQ ID NO: 283685 - RNA, 26 nt, Human
agacaaguaagaaguauguuaucuag

SEQ ID NO: 283686 - RNA, 24 nt, Human
agagguauggcugaaaaaaaagga

SEQ ID NO: 283687 - RNA, 19 nt, Human
agauucaggcauggaggca

SEQ ID NO: 283688 - RNA, 18 nt, Human
agcuggcugcuccugcgc

SEQ ID NO: 283689 - RNA, 21 nt, Human
agcuggcugcuccugcgccuu

SEQ ID NO: 283690 - RNA, 19 nt, Human
agcuuaaaaccuuaucuca

SEQ ID NO: 283691 - RNA, 19 nt, Human
aggaaaaaaaaaaaaacua

SEQ ID NO: 283692 - RNA, 19 nt, Human
aggauguuuugaaucaggc

SEQ ID NO: 283693 - RNA, 20 nt, Human
aggcuacagaauaggacuga

SEQ ID NO: 283694 - RNA, 23 nt, Human
aguaggauaucauaaagccaggc

SEQ ID NO: 283695 - RNA, 19 nt, Human
auaaaaccuauaaaaagac

SEQ ID NO: 283696 - RNA, 25 nt, Human
auaaaaccuauaaaaagacuacacc

SEQ ID NO: 283697 - RNA, 24 nt, Human
auagaacaccccuagacgcagcaa

SEQ ID NO: 283698 - RNA, 21 nt, Human
aucaucuaaaucaacaaagca

SEQ ID NO: 283699 - RNA, 18 nt, Human
aucuauaucuccccucca

SEQ ID NO: 283700 - RNA, 23 nt, Human
augaacaacaagaagaguuagaa

SEQ ID NO: 283701 - RNA, 23 nt, Human
caaacaaagaagaaaaaaggaaa

SEQ ID NO: 283702 - RNA, 22 nt, Human
caacaaagcaauugaaauucuu

SEQ ID NO: 283703 - RNA, 26 nt, Human
caacaaagcaauugaaauucuuugga

SEQ ID NO: 283704 - RNA, 20 nt, Human
caacuacgggcccuugucau

SEQ ID NO: 283705 - RNA, 25 nt, Human
caauggugaaaaaccaaaaacaaga

SEQ ID NO: 283706 - RNA, 24 nt, Human
caccagaacccaagugcaaaccac

SEQ ID NO: 283707 - RNA, 19 nt, Human
cacccaucugcaacaaggu

SEQ ID NO: 283708 - RNA, 18 nt, Human
caccuagguugagguccc

SEQ ID NO: 283709 - RNA, 18 nt, Human
caccugaaaccuucuaaa

SEQ ID NO: 283710 - RNA, 18 nt, Human
cacugauagcuccaaaua

SEQ ID NO: 283711 - RNA, 20 nt, Human
cagaacccaagugcaaaccc

SEQ ID NO: 283712 - RNA, 23 nt, Human
cagaguucagaaacuaaaacagg

SEQ ID NO: 283713 - RNA, 20 nt, Human
cagccuaaaccgaucucuaa

SEQ ID NO: 283714 - RNA, 21 nt, Human
caggcgcaaugucucagccua

SEQ ID NO: 283715 - RNA, 19 nt, Human
caucgcacugcgcaaucgc

SEQ ID NO: 283716 - RNA, 19 nt, Human
cauggaacucuucuuucau

SEQ ID NO: 283717 - RNA, 21 nt, Human
ccaaccaaagaccaacccuua

SEQ ID NO: 283718 - RNA, 23 nt, Human
ccaccagaacccaagugcaaacc

SEQ ID NO: 283719 - RNA, 25 nt, Human
cccaaaauauaaagaaaaaaaaauc

SEQ ID NO: 283720 - RNA, 23 nt, Human
cccuagauccaggccucgagcuc

SEQ ID NO: 283721 - RNA, 20 nt, Human
ccgcccuuuuuuuuuuuuuc

SEQ ID NO: 283722 - RNA, 18 nt, Human
ccuuuuuuuuuuuuuuuu

SEQ ID NO: 283723 - RNA, 18 nt, Human
cgcaaccuaacagcaucg

SEQ ID NO: 283724 - RNA, 24 nt, Human
cgcagcaaacggccaaccagaucc

SEQ ID NO: 283725 - RNA, 23 nt, Human
cgccaaaacuaaugcgcugccac

SEQ ID NO: 283726 - RNA, 27 nt, Human
cgcccuuuuuuuuuuuuuuuuuuaggg

SEQ ID NO: 283727 - RNA, 25 nt, Human
cggccgcccuuuuuuuuuuuuuuuu

SEQ ID NO: 283728 - RNA, 18 nt, Human
cggccggacaaucuauau

SEQ ID NO: 283729 - RNA, 20 nt, Human
cuagacgcagcaaacggcca

SEQ ID NO: 283730 - RNA, 25 nt, Human
cuaggauguuuugaaucaggcuuga

SEQ ID NO: 283731 - RNA, 23 nt, Human
cuauaucuccccuccacacuaac

SEQ ID NO: 283732 - RNA, 26 nt, Human
cucaagugguuuauaaaaccuauaaa

SEQ ID NO: 283733 - RNA, 26 nt, Human
cucacaaugccccgucucuugacggc

SEQ ID NO: 283734 - RNA, 22 nt, Human
cuccccuccacacuaaccaucc

SEQ ID NO: 283735 - RNA, 23 nt, Human
cuccccuccacacuaaccauccc

SEQ ID NO: 283736 - RNA, 27 nt, Human
cugaaaccucacaugacaggauugcac

SEQ ID NO: 283737 - RNA, 23 nt, Human
cugaagcugaaaccucacaugac

SEQ ID NO: 283738 - RNA, 19 nt, Human
cugccaaccaaagaccaac

SEQ ID NO: 283739 - RNA, 22 nt, Human
cugcgccugcgccaccagaacc

SEQ ID NO: 283740 - RNA, 21 nt, Human
cuuccagaccuaugcaccauc

SEQ ID NO: 283741 - RNA, 23 nt, Human
cuuuuuuuuuuuuuuuuuuaggg

SEQ ID NO: 283742 - RNA, 21 nt, Human
gcaaccuaacagcaucgcacu

SEQ ID NO: 283743 - RNA, 21 nt, Human
gccgaguuuuccuacccccac

SEQ ID NO: 283744 - RNA, 18 nt, Human
gccgcccuuuuuuuuuuu

SEQ ID NO: 283745 - RNA, 24 nt, Human
gccgcccuuuuuuuuuuuuuuuuu

SEQ ID NO: 283746 - RNA, 26 nt, Human
ggaaaugggaaauggaccagaaaaaa

SEQ ID NO: 283747 - RNA, 18 nt, Human
ggaagaaaaggaaauggg

SEQ ID NO: 283748 - RNA, 24 nt, Human
ggaauaugcuggcuugaauuuuca

SEQ ID NO: 283749 - RNA, 21 nt, Human
ggacaaucuauaucuccccuc

SEQ ID NO: 283750 - RNA, 18 nt, Human
gggaagaaaaggaaaugg

SEQ ID NO: 283751 - RNA, 21 nt, Human
gguaugggggucagggaagaa

SEQ ID NO: 283752 - RNA, 22 nt, Human
guaggauaucauaaagccaggc

SEQ ID NO: 283753 - RNA, 23 nt, Human
uaacagcaucgcacugcgcaauu

SEQ ID NO: 283754 - RNA, 19 nt, Human
uaauucuccugugcagucu

SEQ ID NO: 283755 - RNA, 18 nt, Human
uacaauaucaauggugaa

SEQ ID NO: 283756 - RNA, 19 nt, Human
uacauagaacaccccuaga

SEQ ID NO: 283757 - RNA, 20 nt, Human
uacauagaacaccccuagac

SEQ ID NO: 283758 - RNA, 19 nt, Human
uaccacaacugugcccuug

SEQ ID NO: 283759 - RNA, 22 nt, Human
uaccuagagggcgcaacuugag

SEQ ID NO: 283760 - RNA, 18 nt, Human
uaccugaaaccaaacauu

SEQ ID NO: 283761 - RNA, 27 nt, Human
uaccugaaaccaaacauuuuuaaaagc

SEQ ID NO: 283762 - RNA, 20 nt, Human
uacuagacaggcccauggag

SEQ ID NO: 283763 - RNA, 18 nt, Human
uaggugucuccagagcuc

SEQ ID NO: 283764 - RNA, 25 nt, Human
uauaucuccccuccacacuaaccau

SEQ ID NO: 283765 - RNA, 18 nt, Human
uauccaaacaacuacggg

SEQ ID NO: 283766 - RNA, 20 nt, Human
uaucuccccuccacacuaac

SEQ ID NO: 283767 - RNA, 19 nt, Human
ucauauacacuucacauga

SEQ ID NO: 283768 - RNA, 18 nt, Human
uccaaacaaagaagaaaa

SEQ ID NO: 283769 - RNA, 21 nt, Human
uccaaacaaagaagaaaaaag

SEQ ID NO: 283770 - RNA, 26 nt, Human
uccagaagacugaaucaauccaugga

SEQ ID NO: 283771 - RNA, 20 nt, Human
ucucacaaaaaaacagaaua

SEQ ID NO: 283772 - RNA, 26 nt, Human
ucuccagagcucugaaauaaagaagu

SEQ ID NO: 283773 - RNA, 22 nt, Human
ucugccaaccaaagaccaaccc

SEQ ID NO: 283774 - RNA, 21 nt, Human
ugaaaaaccaaaaacaagaga

SEQ ID NO: 283775 - RNA, 24 nt, Human
ugaaaaaccaaaaacaagagagaa

SEQ ID NO: 283776 - RNA, 22 nt, Human
ugaagugcaauucauguuagcu

SEQ ID NO: 283777 - RNA, 23 nt, Human
ugccacagcuggcugcuccugcg

SEQ ID NO: 283778 - RNA, 23 nt, Human
ugcgcaaccuaacagcaucgcac

SEQ ID NO: 283779 - RNA, 22 nt, Human
ugcgcuacugcagggucacagc

SEQ ID NO: 283780 - RNA, 23 nt, Human
ugcuauaaggcucuaugcuggag

SEQ ID NO: 283781 - RNA, 23 nt, Human
ugcuggaagaggaggaggagguu

SEQ ID NO: 283782 - RNA, 23 nt, Human
uggaagaaaggcucuucauuuuc

SEQ ID NO: 283783 - RNA, 19 nt, Human
uggaagaccaagggagauc

SEQ ID NO: 283784 - RNA, 19 nt, Human
uggaagaggaggaggaggu

SEQ ID NO: 283785 - RNA, 21 nt, Human
uggaagaggaggaggagguug

SEQ ID NO: 283786 - RNA, 18 nt, Human
uggaaucacaaagcggcc

SEQ ID NO: 283787 - RNA, 24 nt, Human
uggaaucacaaagcggccggacaa

SEQ ID NO: 283788 - RNA, 21 nt, Human
ugggaaugaggacagucucaa

SEQ ID NO: 283789 - RNA, 21 nt, Human
uuaucuaguucccucggccgc

SEQ ID NO: 283790 - RNA, 21 nt, Human
uuccggaaguguguucuauga

SEQ ID NO: 283791 - RNA, 19 nt, Human
uugaguuacaggagaauuu

SEQ ID NO: 283792 - RNA, 22 nt, Human
uuggacucgagguauguuaaaa

SEQ ID NO: 283793 - RNA, 18 nt, Human
uugggaaaugcugcucuu

SEQ ID NO: 283794 - RNA, 21 nt, Human
uuugcuggaagaaaggcucuu

SEQ ID NO: 283795 - RNA, 19 nt, Human
uuuugugucucucccuacc

SEQ ID NO: 283796 - RNA, 18 nt, Human
uuuuuuuuuuuuaggggu

SEQ ID NO: 283797 - RNA, 25 nt, Human
uuuuuuuuuuuuuuuuuuuauuuuu

SEQ ID NO: 283798 - RNA, 23 nt, Human
uuuuuuuuuuuuuuuuuuuuagg

SEQ ID NO: 283799 - RNA, 18 nt, Human
aaaugccaagguggggac

SEQ ID NO: 283800 - RNA, 20 nt, Human
agacgccuuucuagguuucc

SEQ ID NO: 283801 - RNA, 24 nt, Human
aguauaaaacguuugugcacagug

SEQ ID NO: 283802 - RNA, 20 nt, Human
cacaguguuaacaaauacaa

SEQ ID NO: 283803 - RNA, 18 nt, Human
cacgccacgggaaaugcc

SEQ ID NO: 283804 - RNA, 18 nt, Human
ccgcgcgucugcgccugc

SEQ ID NO: 283805 - RNA, 23 nt, Human
cugcgccgcuccucuccugcgcg

SEQ ID NO: 283806 - RNA, 18 nt, Human
gcgccgcuccucuccugc

SEQ ID NO: 283807 - RNA, 22 nt, Human
gucugcgccugcgccgcuccuc

SEQ ID NO: 283808 - RNA, 22 nt, Human
ugugcacaguguuaacaaauac

SEQ ID NO: 283809 - RNA, 21 nt, Human
uuccgccgccgcacuuucgac

SEQ ID NO: 283810 - RNA, 22 nt, Human
acaugaacuugacuaugucucu

SEQ ID NO: 283811 - RNA, 22 nt, Human
agcauugaaaaaacucuuuuaa

SEQ ID NO: 283812 - RNA, 21 nt, Human
aggaccacccagaaucagcca

SEQ ID NO: 283813 - RNA, 19 nt, Human
agggacagggcggggagga

SEQ ID NO: 283814 - RNA, 22 nt, Human
agggagaaacacggagguaaug

SEQ ID NO: 283815 - RNA, 20 nt, Human
agggcugggcagggcugggc

SEQ ID NO: 283816 - RNA, 23 nt, Human
auaagacacaggcauagcccuuu

SEQ ID NO: 283817 - RNA, 21 nt, Human
augucucuauaagggugaaca

SEQ ID NO: 283818 - RNA, 22 nt, Human
caaacaaugugggcacagcaac

SEQ ID NO: 283819 - RNA, 18 nt, Human
caagaagagaguaauucc

SEQ ID NO: 283820 - RNA, 24 nt, Human
cacagcaacuucacucuacacacu

SEQ ID NO: 283821 - RNA, 26 nt, Human
cacccggagcgggcggcgcgcggggg

SEQ ID NO: 283822 - RNA, 20 nt, Human
cacucuacacacucugacca

SEQ ID NO: 283823 - RNA, 20 nt, Human
cacugcagcauugaaaaaac

SEQ ID NO: 283824 - RNA, 19 nt, Human
cagcaacacagucaagaaa

SEQ ID NO: 283825 - RNA, 27 nt, Human
cagcaacacagucaagaaacggccggc

SEQ ID NO: 283826 - RNA, 19 nt, Human
cagcugcaaauacgggagu

SEQ ID NO: 283827 - RNA, 22 nt, Human
cagcugcaaauacgggaguuuc

SEQ ID NO: 283828 - RNA, 19 nt, Human
caguggguuuuuccccggu

SEQ ID NO: 283829 - RNA, 18 nt, Human
cauagcccuuuguggggc

SEQ ID NO: 283830 - RNA, 19 nt, Human
caugcaaaggaggauccug

SEQ ID NO: 283831 - RNA, 18 nt, Human
ccaaggugucucaauaag

SEQ ID NO: 283832 - RNA, 25 nt, Human
ccccaggugagcccuuccuaucugc

SEQ ID NO: 283833 - RNA, 21 nt, Human
cccuccucucuccucgccucc

SEQ ID NO: 283834 - RNA, 23 nt, Human
ccgacgucuguggcccgccggcu

SEQ ID NO: 283835 - RNA, 21 nt, Human
ccggccggcggcugcguggac

SEQ ID NO: 283836 - RNA, 19 nt, Human
ccggugagaacuggccaac

SEQ ID NO: 283837 - RNA, 25 nt, Human
ccuacggccgggugcagcccauggc

SEQ ID NO: 283838 - RNA, 24 nt, Human
ccucaagggaauaacagaagaacg

SEQ ID NO: 283839 - RNA, 19 nt, Human
ccugggugcuggccggccg

SEQ ID NO: 283840 - RNA, 21 nt, Human
ccuuagugaaauggugcuaag

SEQ ID NO: 283841 - RNA, 24 nt, Human
cgcccuccucucuccucgccuccu

SEQ ID NO: 283842 - RNA, 21 nt, Human
cgccgugggcugcaguuccag

SEQ ID NO: 283843 - RNA, 23 nt, Human
cgcuccggcucuggccccggcuc

SEQ ID NO: 283844 - RNA, 18 nt, Human
cggcgcgcgggcucugcu

SEQ ID NO: 283845 - RNA, 21 nt, Human
cggcggcgccuggcucguguc

SEQ ID NO: 283846 - RNA, 27 nt, Human
cggcucuggccccggcuccgcuggcuc

SEQ ID NO: 283847 - RNA, 24 nt, Human
cgugggcccuuggcuuccaggagg

SEQ ID NO: 283848 - RNA, 20 nt, Human
cguugcacaauguaucuacg

SEQ ID NO: 283849 - RNA, 22 nt, Human
cuaauuuaacaagaagagagua

SEQ ID NO: 283850 - RNA, 19 nt, Human
cuacacacucugaccaucg

SEQ ID NO: 283851 - RNA, 24 nt, Human
cucguguccccacgccuggauuca

SEQ ID NO: 283852 - RNA, 21 nt, Human
cugggcagggcugggcugggc

SEQ ID NO: 283853 - RNA, 21 nt, Human
gaaaagcaucuuuuggccugg

SEQ ID NO: 283854 - RNA, 18 nt, Human
gacacaggcauagcccuu

SEQ ID NO: 283855 - RNA, 24 nt, Human
gacgugggcccuuggcuuccagga

SEQ ID NO: 283856 - RNA, 18 nt, Human
gcauacuguugcccguau

SEQ ID NO: 283857 - RNA, 23 nt, Human
gccaucccucgaugucagaaucc

SEQ ID NO: 283858 - RNA, 21 nt, Human
gcccauggcucucaaagagcc

SEQ ID NO: 283859 - RNA, 20 nt, Human
gccuccgggcagggcugggc

SEQ ID NO: 283860 - RNA, 18 nt, Human
gcgaguuacacuagccua

SEQ ID NO: 283861 - RNA, 18 nt, Human
ggaguuucuuccgacguc

SEQ ID NO: 283862 - RNA, 20 nt, Human
ggcccuuggcuuccaggagg

SEQ ID NO: 283863 - RNA, 21 nt, Human
ggcccuuggcuuccaggagga

SEQ ID NO: 283864 - RNA, 22 nt, Human
ggcccuugggugcggccauguc

SEQ ID NO: 283865 - RNA, 19 nt, Human
ggcggggaggaaaaccggg

SEQ ID NO: 283866 - RNA, 18 nt, Human
ggcugggcagggcugggc

SEQ ID NO: 283867 - RNA, 23 nt, Human
ggcugggcagggcugggcugggc

SEQ ID NO: 283868 - RNA, 19 nt, Human
ggcugggcugggcgggagc

SEQ ID NO: 283869 - RNA, 18 nt, Human
gggaauaacagaagaacg

SEQ ID NO: 283870 - RNA, 22 nt, Human
gggaauaacagaagaacguugc

SEQ ID NO: 283871 - RNA, 20 nt, Human
gggcagggcugggcagggcu

SEQ ID NO: 283872 - RNA, 22 nt, Human
gggcagggcugggcagggcugg

SEQ ID NO: 283873 - RNA, 19 nt, Human
gggcugggcagggcugggc

SEQ ID NO: 283874 - RNA, 22 nt, Human
gggcugggcagggcugggcugg

SEQ ID NO: 283875 - RNA, 23 nt, Human
gggcugggcugggcgggagcugc

SEQ ID NO: 283876 - RNA, 21 nt, Human
ggucuuuauugucaguuuaga

SEQ ID NO: 283877 - RNA, 19 nt, Human
guccaggagcuauguggag

SEQ ID NO: 283878 - RNA, 20 nt, Human
gucccuuuguggugaggacg

SEQ ID NO: 283879 - RNA, 21 nt, Human
gugggcccuuggcuuccagga

SEQ ID NO: 283880 - RNA, 18 nt, Human
uaaggaaauguucaugcc

SEQ ID NO: 283881 - RNA, 21 nt, Human
uaaucuaagagacagcaacac

SEQ ID NO: 283882 - RNA, 20 nt, Human
uacacacucugaccaucgcu

SEQ ID NO: 283883 - RNA, 22 nt, Human
uagaaugcaacaucuuaagguu

SEQ ID NO: 283884 - RNA, 24 nt, Human
uaguacaaaguuugccuuuguuuu

SEQ ID NO: 283885 - RNA, 20 nt, Human
uaucugcgguuacaugauuu

SEQ ID NO: 283886 - RNA, 22 nt, Human
ucaaacuauucaugaaaugcag

SEQ ID NO: 283887 - RNA, 19 nt, Human
ucagcacccggagcgggcg

SEQ ID NO: 283888 - RNA, 19 nt, Human
uccagcugcaaauacggga

SEQ ID NO: 283889 - RNA, 21 nt, Human
uccccaggugagcccuuccua

SEQ ID NO: 283890 - RNA, 19 nt, Human
uccgcuggcuccggcggcg

SEQ ID NO: 283891 - RNA, 24 nt, Human
ucgaaagggagaaacacggaggua

SEQ ID NO: 283892 - RNA, 19 nt, Human
ugcaaaggaggauccuggu

SEQ ID NO: 283893 - RNA, 19 nt, Human
ugccaaggugucucaauaa

SEQ ID NO: 283894 - RNA, 18 nt, Human
ugccucgccucuuuagua

SEQ ID NO: 283895 - RNA, 19 nt, Human
ugggcagggcugggcuggg

SEQ ID NO: 283896 - RNA, 20 nt, Human
ugggcagggcugggcugggc

SEQ ID NO: 283897 - RNA, 18 nt, Human
ugggcugggcgggagcug

SEQ ID NO: 283898 - RNA, 18 nt, Human
uguuaguguuauugguau

SEQ ID NO: 283899 - RNA, 22 nt, Human
uuaaucuaagagacagcaacac

SEQ ID NO: 283900 - RNA, 25 nt, Human
uucaugccauccuaacaguggguuu

SEQ ID NO: 283901 - RNA, 18 nt, Human
uuuaacaagaagagagua

SEQ ID NO: 283902 - RNA, 20 nt, Human
uuuaacaagaagagaguaau

SEQ ID NO: 283903 - RNA, 19 nt, Human
uuuggccugggcauggagg

SEQ ID NO: 283904 - RNA, 25 nt, Human
uuuuucuuucuuuuucaaaaaaugc

SEQ ID NO: 283905 - RNA, 24 nt, Human
uuuuuuuuuucuccuaauguuuuu

SEQ ID NO: 283906 - RNA, 24 nt, Human
uuuuuuuuuuuuuuuuucuccuaa

SEQ ID NO: 283907 - RNA, 23 nt, Human
uuuuuuuuuuuuuuuuuuuaggg

SEQ ID NO: 283908 - RNA, 22 nt, Human
aaaaauaaaccaaaauagagga

SEQ ID NO: 283909 - RNA, 22 nt, Human
aaaauagaggaaagccggcuua

SEQ ID NO: 283910 - RNA, 18 nt, Human
aaacagaugauacacucu

SEQ ID NO: 283911 - RNA, 19 nt, Human
aaacagaugauacacucuc

SEQ ID NO: 283912 - RNA, 22 nt, Human
aacagaacccccaaauaaccca

SEQ ID NO: 283913 - RNA, 25 nt, Human
aacagaacccccaaauaacccaaac

SEQ ID NO: 283914 - RNA, 23 nt, Human
aaccauauucucccaaaucaacg

SEQ ID NO: 283915 - RNA, 19 nt, Human
aacgagagacagggaggaa

SEQ ID NO: 283916 - RNA, 19 nt, Human
aacuuguggccccuggccu

SEQ ID NO: 283917 - RNA, 23 nt, Human
aaguuuuuagaaucuuuucccgg

SEQ ID NO: 283918 - RNA, 23 nt, Human
aaugucuauaaacuugcucauac

SEQ ID NO: 283919 - RNA, 24 nt, Human
acagaacccccaaauaacccaaac

SEQ ID NO: 283920 - RNA, 21 nt, Human
acauccccucacuccccacug

SEQ ID NO: 283921 - RNA, 18 nt, Human
acccaaacuguuuccaca

SEQ ID NO: 283922 - RNA, 21 nt, Human
acuccgauggggcuggcaguc

SEQ ID NO: 283923 - RNA, 18 nt, Human
agaacauccccucacucc

SEQ ID NO: 283924 - RNA, 18 nt, Human
aggaagcacguggaggag

SEQ ID NO: 283925 - RNA, 20 nt, Human
aggcagcgccgaggcggcuu

SEQ ID NO: 283926 - RNA, 24 nt, Human
auccacaagugguucuacucugaa

SEQ ID NO: 283927 - RNA, 20 nt, Human
augaccaucagcgcuucuga

SEQ ID NO: 283928 - RNA, 24 nt, Human
augugucccccucccauaacaccc

SEQ ID NO: 283929 - RNA, 25 nt, Human
caaagcccaguuugcaacgcaggca

SEQ ID NO: 283930 - RNA, 22 nt, Human
caaugugucccccucccauaac

SEQ ID NO: 283931 - RNA, 19 nt, Human
cacuuugugcuuagagaag

SEQ ID NO: 283932 - RNA, 19 nt, Human
cagaacccccaaauaaccc

SEQ ID NO: 283933 - RNA, 20 nt, Human
cagaacccccaaauaaccca

SEQ ID NO: 283934 - RNA, 21 nt, Human
cagaacccccaaauaacccaa

SEQ ID NO: 283935 - RNA, 20 nt, Human
cagcucagguuaaagccaga

SEQ ID NO: 283936 - RNA, 20 nt, Human
cauaacacccccuccccccc

SEQ ID NO: 283937 - RNA, 23 nt, Human
cauaacacccccuccccccccga

SEQ ID NO: 283938 - RNA, 31 nt, Human
ccaaugugucccccucccauaacacccccuu

SEQ ID NO: 283939 - RNA, 18 nt, Human
ccagaacgcgccggcgcc

SEQ ID NO: 283940 - RNA, 24 nt, Human
ccagauauugagauuggauaugac

SEQ ID NO: 283941 - RNA, 19 nt, Human
ccaguccaugguccugcgc

SEQ ID NO: 283942 - RNA, 23 nt, Human
ccaucagcgcuucugauaccgaa

SEQ ID NO: 283943 - RNA, 23 nt, Human
cccaaauaacccaaacuguuucc

SEQ ID NO: 283944 - RNA, 21 nt, Human
cccaaaucaacgagagacagg

SEQ ID NO: 283945 - RNA, 21 nt, Human
cccaccaugccccacccccaa

SEQ ID NO: 283946 - RNA, 23 nt, Human
cccaccaugccccacccccaguc

SEQ ID NO: 283947 - RNA, 26 nt, Human
cccauaacacccccuccccccccgaa

SEQ ID NO: 283948 - RNA, 19 nt, Human
ccccaaugugucccccucc

SEQ ID NO: 283949 - RNA, 26 nt, Human
ccccaccaugccccacccccagucca

SEQ ID NO: 283950 - RNA, 21 nt, Human
ccccacccccaguccaugguc

SEQ ID NO: 283951 - RNA, 22 nt, Human
ccccaguccaugguccugcgcc

SEQ ID NO: 283952 - RNA, 23 nt, Human
cccccaaauaacccaaacuguuu

SEQ ID NO: 283953 - RNA, 19 nt, Human
ccccgaagugcugcccaag

SEQ ID NO: 283954 - RNA, 21 nt, Human
ccccgaagugcugcccaagcc

SEQ ID NO: 283955 - RNA, 18 nt, Human
cccgaaaaucuggaugcg

SEQ ID NO: 283956 - RNA, 25 nt, Human
ccgagcccagcgcaggccaguccuc

SEQ ID NO: 283957 - RNA, 20 nt, Human
ccgauggggcuggcagucac

SEQ ID NO: 283958 - RNA, 20 nt, Human
ccggagucucccacccgcca

SEQ ID NO: 283959 - RNA, 26 nt, Human
ccucccauaacacccccucccccccc

SEQ ID NO: 283960 - RNA, 22 nt, Human
ccuucccucggacccgaaaauc

SEQ ID NO: 283961 - RNA, 19 nt, Human
cgcaggguccuccuucccu

SEQ ID NO: 283962 - RNA, 22 nt, Human
cgccagaacgcgccggcgccag

SEQ ID NO: 283963 - RNA, 23 nt, Human
cggcuacccggagucucccaccc

SEQ ID NO: 283964 - RNA, 23 nt, Human
cucaacacucagucauuuauucc

SEQ ID NO: 283965 - RNA, 21 nt, Human
cucagguuaaagccagacagc

SEQ ID NO: 283966 - RNA, 23 nt, Human
cucugugggcgcccccauugcuu

SEQ ID NO: 283967 - RNA, 22 nt, Human
cugcgccccuccucgcgacaga

SEQ ID NO: 283968 - RNA, 21 nt, Human
cuggcuccccugucgccagaa

SEQ ID NO: 283969 - RNA, 19 nt, Human
cuuccccgcggccccuggc

SEQ ID NO: 283970 - RNA, 21 nt, Human
cuuguggccccuggccuuggg

SEQ ID NO: 283971 - RNA, 23 nt, Human
gaaaaccauauucucccaaauca

SEQ ID NO: 283972 - RNA, 25 nt, Human
gaacccccaaauaacccaaacuguu

SEQ ID NO: 283973 - RNA, 22 nt, Human
gaccagcucagguuaaagccag

SEQ ID NO: 283974 - RNA, 18 nt, Human
gagcaaggccccaaugug

SEQ ID NO: 283975 - RNA, 18 nt, Human
gaggaagaggagcaaggc

SEQ ID NO: 283976 - RNA, 21 nt, Human
gaggaaggguguuacacggca

SEQ ID NO: 283977 - RNA, 21 nt, Human
gcaggccaguccucgcuuccc

SEQ ID NO: 283978 - RNA, 22 nt, Human
gccaacagaacccccaaauaac

SEQ ID NO: 283979 - RNA, 18 nt, Human
gcgacagagcucccgagc

SEQ ID NO: 283980 - RNA, 19 nt, Human
ggaauccccaccaugcccc

SEQ ID NO: 283981 - RNA, 20 nt, Human
ggaauccccaccaugcccca

SEQ ID NO: 283982 - RNA, 20 nt, Human
ggccccuggccuugggccag

SEQ ID NO: 283983 - RNA, 20 nt, Human
ggccccuggccuugggccag

SEQ ID NO: 283984 - RNA, 21 nt, Human
ggggaagauagucgucgcagc

SEQ ID NO: 283985 - RNA, 22 nt, Human
uaaaaagccaacagaaccccca

SEQ ID NO: 283986 - RNA, 19 nt, Human
uaacacccccucccccccc

SEQ ID NO: 283987 - RNA, 21 nt, Human
uaacuacaaugcacccgcccc

SEQ ID NO: 283988 - RNA, 20 nt, Human
uaccaaaauaaccaaaucac

SEQ ID NO: 283989 - RNA, 23 nt, Human
uagaaucuuuucccggagguggu

SEQ ID NO: 283990 - RNA, 21 nt, Human
uagugaggaaugcacacagcg

SEQ ID NO: 283991 - RNA, 24 nt, Human
uccccaccaugccccacccccagu

SEQ ID NO: 283992 - RNA, 24 nt, Human
ucccccucccauaacacccccucc

SEQ ID NO: 283993 - RNA, 21 nt, Human
uccccucacuccccacugcuc

SEQ ID NO: 283994 - RNA, 19 nt, Human
ucggaugaguucuagugag

SEQ ID NO: 283995 - RNA, 20 nt, Human
ucuacuggaccagcucaggu

SEQ ID NO: 283996 - RNA, 22 nt, Human
ugaccaucagcgcuucugauac

SEQ ID NO: 283997 - RNA, 26 nt, Human
ugagauuggauaugaccaucagcgcu

SEQ ID NO: 283998 - RNA, 23 nt, Human
ugccccacccccaguccaugguc

SEQ ID NO: 283999 - RNA, 20 nt, Human
uggaauccccaccaugcccc

SEQ ID NO: 284000 - RNA, 24 nt, Human
ugguggucgggggucggaugaguu

SEQ ID NO: 284001 - RNA, 23 nt, Human
ugucgccagaacgcgccggcgcc

SEQ ID NO: 284002 - RNA, 21 nt, Human
ugugucccccucccauaacac

SEQ ID NO: 284003 - RNA, 21 nt, Human
uguuacacggcagacgcuaca

SEQ ID NO: 284004 - RNA, 21 nt, Human
uucccggaggugguggucggg

SEQ ID NO: 284005 - RNA, 23 nt, Human
uucgcagaugcuggaauccccac

SEQ ID NO: 284006 - RNA, 24 nt, Human
uugcuuggguucgcagaugcugga

SEQ ID NO: 284007 - RNA, 24 nt, Human
uuucccggaggugguggucggggg

SEQ ID NO: 284008 - RNA, 23 nt, Human
aaaaaggcuuccuuuaaaguaga

SEQ ID NO: 284009 - RNA, 24 nt, Human
aaaagcaaacaucucuugccuaca

SEQ ID NO: 284010 - RNA, 24 nt, Human
aaacaacccaaaugucaucaacaa

SEQ ID NO: 284011 - RNA, 23 nt, Human
aaagaaauucuauucuuaccucu

SEQ ID NO: 284012 - RNA, 21 nt, Human
aagaggagucaaauuuuaaaa

SEQ ID NO: 284013 - RNA, 19 nt, Human
aaggaguucugcagccagc

SEQ ID NO: 284014 - RNA, 19 nt, Human
aauagccugugaagagugg

SEQ ID NO: 284015 - RNA, 21 nt, Human
aauagccugugaagagugggu

SEQ ID NO: 284016 - RNA, 24 nt, Human
aauagcuuaaauuccagaauaaaa

SEQ ID NO: 284017 - RNA, 23 nt, Human
aaugugugugugugugugugugu

SEQ ID NO: 284018 - RNA, 23 nt, Human
aauuacuuucuugggcuccccac

SEQ ID NO: 284019 - RNA, 21 nt, Human
acaacccaaaugucaucaaca

SEQ ID NO: 284020 - RNA, 20 nt, Human
accucugggccacacauccc

SEQ ID NO: 284021 - RNA, 20 nt, Human
agcauugugacacuuugagg

SEQ ID NO: 284022 - RNA, 22 nt, Human
aggaagugguaacagguugugg

SEQ ID NO: 284023 - RNA, 23 nt, Human
agggaagcuugggacaagcuagg

SEQ ID NO: 284024 - RNA, 22 nt, Human
augugugugugugugugugugu

SEQ ID NO: 284025 - RNA, 24 nt, Human
augugugugugugugugugugugu

SEQ ID NO: 284026 - RNA, 23 nt, Human
auguucacucucuuaauuguagu

SEQ ID NO: 284027 - RNA, 18 nt, Human
auucacauaaaacuacaa

SEQ ID NO: 284028 - RNA, 23 nt, Human
auuccauucacauaaaacuacaa

SEQ ID NO: 284029 - RNA, 22 nt, Human
caaaaugcaaaaugaaagccga

SEQ ID NO: 284030 - RNA, 24 nt, Human
caagauggagacauaugaaucuca

SEQ ID NO: 284031 - RNA, 18 nt, Human
cacaguuuaaaaaccaag

SEQ ID NO: 284032 - RNA, 19 nt, Human
cagcaaaauaaaaaggcuu

SEQ ID NO: 284033 - RNA, 20 nt, Human
cagcagcuuuauuuguaaua

SEQ ID NO: 284034 - RNA, 26 nt, Human
caucaagauggagacauaugaaucuc

SEQ ID NO: 284035 - RNA, 21 nt, Human
caucaggaggagcauugugac

SEQ ID NO: 284036 - RNA, 26 nt, Human
ccaaaaugugugugugugugugugug

SEQ ID NO: 284037 - RNA, 20 nt, Human
ccauucacauaaaacuacaa

SEQ ID NO: 284038 - RNA, 25 nt, Human
cccaaaacuaaaacaacccaaaugu

SEQ ID NO: 284039 - RNA, 20 nt, Human
ccccaguuucugcaaaggag

SEQ ID NO: 284040 - RNA, 19 nt, Human
cucuguccuucuuuguuuc

SEQ ID NO: 284041 - RNA, 19 nt, Human
cugggccacacaucccaug

SEQ ID NO: 284042 - RNA, 22 nt, Human
gaaaagaccacucacuuacuaa

SEQ ID NO: 284043 - RNA, 22 nt, Human
gaaagaagccagacaaaaaaaa

SEQ ID NO: 284044 - RNA, 18 nt, Human
gagaagaguucaucuaca

SEQ ID NO: 284045 - RNA, 21 nt, Human
gagcauugugacacuuugagg

SEQ ID NO: 284046 - RNA, 24 nt, Human
gaggagucaucaggaggagcauug

SEQ ID NO: 284047 - RNA, 18 nt, Human
gaggguuuucaagcuuaa

SEQ ID NO: 284048 - RNA, 19 nt, Human
gaggguuuucaagcuugaa

SEQ ID NO: 284049 - RNA, 19 nt, Human
gcaaagugaaagaagccag

SEQ ID NO: 284050 - RNA, 20 nt, Human
gcaaagugaaagaagccaga

SEQ ID NO: 284051 - RNA, 20 nt, Human
gcauugugacacuuugaggg

SEQ ID NO: 284052 - RNA, 19 nt, Human
ggcacccaagugacaaaga

SEQ ID NO: 284053 - RNA, 19 nt, Human
gguaaagaagacugaguuc

SEQ ID NO: 284054 - RNA, 24 nt, Human
gguauguucuuuagggaaagaaau

SEQ ID NO: 284055 - RNA, 22 nt, Human
gucccaaaaugugugugugugu

SEQ ID NO: 284056 - RNA, 18 nt, Human
gugguuuucuggggagga

SEQ ID NO: 284057 - RNA, 21 nt, Human
gugugugugugugugugugug

SEQ ID NO: 284058 - RNA, 21 nt, Human
gugugugugugugugugugug

SEQ ID NO: 284059 - RNA, 19 nt, Human
uaaaacuacaaaaugcaaa

SEQ ID NO: 284060 - RNA, 18 nt, Human
uaaagaagacugaguuca

SEQ ID NO: 284061 - RNA, 19 nt, Human
uaacugauucaggaagugg

SEQ ID NO: 284062 - RNA, 21 nt, Human
uagaagccuaaaaauagaaga

SEQ ID NO: 284063 - RNA, 22 nt, Human
uagcaaaacagaguugagaaga

SEQ ID NO: 284064 - RNA, 23 nt, Human
uaucccaaaacuaaaacaaccca

SEQ ID NO: 284065 - RNA, 19 nt, Human
ucccaaaacuaaaacaacc

SEQ ID NO: 284066 - RNA, 22 nt, Human
ucccaaaacuaaaacaacccaa

SEQ ID NO: 284067 - RNA, 18 nt, Human
ucuccacaaggugugaaa

SEQ ID NO: 284068 - RNA, 19 nt, Human
ucuccauguucugucuuuc

SEQ ID NO: 284069 - RNA, 19 nt, Human
ucuguccucugguagaaaa

SEQ ID NO: 284070 - RNA, 19 nt, Human
ucuguccuucuuuguuucu

SEQ ID NO: 284071 - RNA, 23 nt, Human
ugaaagaagccagacaaaaaaaa

SEQ ID NO: 284072 - RNA, 29 nt, Human
ugaaagaagccagacaaaaaaaaaagaag

SEQ ID NO: 284073 - RNA, 23 nt, Human
ugaaagccgauuggugguuuucu

SEQ ID NO: 284074 - RNA, 25 nt, Human
ugacacagcucuuaaaaaaaaaaaa

SEQ ID NO: 284075 - RNA, 24 nt, Human
ugagugucuucauuuuuuuugucu

SEQ ID NO: 284076 - RNA, 21 nt, Human
ugauggauauguucacucucu

SEQ ID NO: 284077 - RNA, 19 nt, Human
ugcaaagugaaagaagcca

SEQ ID NO: 284078 - RNA, 23 nt, Human
ugcauguucuccacaagguguga

SEQ ID NO: 284079 - RNA, 18 nt, Human
ugccaggcaccuggaacc

SEQ ID NO: 284080 - RNA, 20 nt, Human
uggaaaggaaauagaagccu

SEQ ID NO: 284081 - RNA, 23 nt, Human
ugucugucuguccguaaguggua

SEQ ID NO: 284082 - RNA, 20 nt, Human
ugucuucauuuuuuuugucu

SEQ ID NO: 284083 - RNA, 19 nt, Human
ugugugugugugucugucu

SEQ ID NO: 284084 - RNA, 20 nt, Human
ugugugugugugucugucug

SEQ ID NO: 284085 - RNA, 21 nt, Human
ugugugugugugugugucugu

SEQ ID NO: 284086 - RNA, 18 nt, Human
ugugugugugugugugug

SEQ ID NO: 284087 - RNA, 18 nt, Human
ugugugugugugugugug

SEQ ID NO: 284088 - RNA, 18 nt, Human
ugugugugugugugugug

SEQ ID NO: 284089 - RNA, 18 nt, Human
ugugugugugugugugug

SEQ ID NO: 284090 - RNA, 18 nt, Human
ugugugugugugugugug

SEQ ID NO: 284091 - RNA, 18 nt, Human
ugugugugugugugugug

SEQ ID NO: 284092 - RNA, 18 nt, Human
ugugugugugugugugug

SEQ ID NO: 284093 - RNA, 18 nt, Human
ugugugugugugugugug

SEQ ID NO: 284094 - RNA, 22 nt, Human
ugugugugugugugugugucug

SEQ ID NO: 284095 - RNA, 21 nt, Human
ugugugugugugugugugugu

SEQ ID NO: 284096 - RNA, 21 nt, Human
ugugugugugugugugugugu

SEQ ID NO: 284097 - RNA, 21 nt, Human
ugugugugugugugugugugu

SEQ ID NO: 284098 - RNA, 21 nt, Human
ugugugugugugugugugugu

SEQ ID NO: 284099 - RNA, 21 nt, Human
ugugugugugugugugugugu

SEQ ID NO: 284100 - RNA, 21 nt, Human
ugugugugugugugugugugu

SEQ ID NO: 284101 - RNA, 21 nt, Human
ugugugugugugugugugugu

SEQ ID NO: 284102 - RNA, 21 nt, Human
ugugugugugugugugugugu

SEQ ID NO: 284103 - RNA, 21 nt, Human
ugugugugugugugugugugu

SEQ ID NO: 284104 - RNA, 21 nt, Human
ugugugugugugugugugugu

SEQ ID NO: 284105 - RNA, 21 nt, Human
ugugugugugugugugugugu

SEQ ID NO: 284106 - RNA, 22 nt, Human
ugugugugugugugugugugug

SEQ ID NO: 284107 - RNA, 22 nt, Human
ugugugugugugugugugugug

SEQ ID NO: 284108 - RNA, 22 nt, Human
ugugugugugugugugugugug

SEQ ID NO: 284109 - RNA, 22 nt, Human
ugugugugugugugugugugug

SEQ ID NO: 284110 - RNA, 24 nt, Human
uguucugucuuucaugcaauuuua

SEQ ID NO: 284111 - RNA, 18 nt, Human
uuaaaauaaaaaggggaa

SEQ ID NO: 284112 - RNA, 22 nt, Human
uuaccucugggccacacauccc

SEQ ID NO: 284113 - RNA, 19 nt, Human
uucuuccagagccuucaaa

SEQ ID NO: 284114 - RNA, 20 nt, Human
uucuugauuucggaauggcc

SEQ ID NO: 284115 - RNA, 21 nt, Human
uuuauuuguaauaucccaaaa

SEQ ID NO: 284116 - RNA, 23 nt, Human
uuuuccuuuucuuccagagccuu

SEQ ID NO: 284117 - RNA, 25 nt, Human
aaaaucacuaugcuccaaaccacua

SEQ ID NO: 284118 - RNA, 21 nt, Human
acacaacaucgauguggccag

SEQ ID NO: 284119 - RNA, 19 nt, Human
acacuccuaauccaaugaa

SEQ ID NO: 284120 - RNA, 18 nt, Human
accauguugguugcacuc

SEQ ID NO: 284121 - RNA, 20 nt, Human
aggcagaggcggcgaggggc

SEQ ID NO: 284122 - RNA, 24 nt, Human
aggugagcuaagucuuugguuucu

SEQ ID NO: 284123 - RNA, 23 nt, Human
agucagaaugcaggugagcuaag

SEQ ID NO: 284124 - RNA, 21 nt, Human
caaaaucacuaugcuccaaac

SEQ ID NO: 284125 - RNA, 24 nt, Human
caaugaacucagacaaccccauac

SEQ ID NO: 284126 - RNA, 25 nt, Human
cacaacaucgauguggccaggcaga

SEQ ID NO: 284127 - RNA, 21 nt, Human
cacuaaacagccaagcacagc

SEQ ID NO: 284128 - RNA, 18 nt, Human
cagugguguuuuccugcu

SEQ ID NO: 284129 - RNA, 21 nt, Human
ccaaacaaagucagaaugcag

SEQ ID NO: 284130 - RNA, 21 nt, Human
ccaaaccacuaaacagccaag

SEQ ID NO: 284131 - RNA, 19 nt, Human
ccacuaaacagccaagcac

SEQ ID NO: 284132 - RNA, 24 nt, Human
cugcuggcgacuguugccuuccuu

SEQ ID NO: 284133 - RNA, 20 nt, Human
cuuugguuucuuuggacuau

SEQ ID NO: 284134 - RNA, 22 nt, Human
gagcaggcggcggacacaacau

SEQ ID NO: 284135 - RNA, 24 nt, Human
gccaagucgccgcccugcugaagu

SEQ ID NO: 284136 - RNA, 23 nt, Human
gguguuuuccugcucaucauuug

SEQ ID NO: 284137 - RNA, 18 nt, Human
uaccauguugguugcacu

SEQ ID NO: 284138 - RNA, 28 nt, Human
uagaacaaccauuucugaaaggucaucc

SEQ ID NO: 284139 - RNA, 23 nt, Human
uagaacaaccauuucugaagacc

SEQ ID NO: 284140 - RNA, 19 nt, Human
uaguacugagacaccauac

SEQ ID NO: 284141 - RNA, 24 nt, Human
uaucuugagguccuggucuuuuaa

SEQ ID NO: 284142 - RNA, 23 nt, Human
ugagacaccauacaccuucgugg

SEQ ID NO: 284143 - RNA, 18 nt, Human
ugagauccagugguguuu

SEQ ID NO: 284144 - RNA, 24 nt, Human
ugcuccaaaccacuaaacagccaa

SEQ ID NO: 284145 - RNA, 22 nt, Human
ugcuggcgacuguugccuuccu

SEQ ID NO: 284146 - RNA, 19 nt, Human
ugugugucuccaaacaaag

SEQ ID NO: 284147 - RNA, 23 nt, Human
uucaaauauuucuaaguauaaac

SEQ ID NO: 284148 - RNA, 18 nt, Human
uucacaucggcugcuggc

SEQ ID NO: 284149 - RNA, 20 nt, Human
uuuccugcucaucauuuguc

SEQ ID NO: 284150 - RNA, 20 nt, Human
acuugugcccaagugagagu

SEQ ID NO: 284151 - RNA, 23 nt, Human
cagccuucauucaguccaucagg

SEQ ID NO: 284152 - RNA, 20 nt, Human
ggugacuugugcccaaguga

SEQ ID NO: 284153 - RNA, 21 nt, Human
uaggcagccuucauucagucc

SEQ ID NO: 284154 - RNA, 23 nt, Human
ucaguccaucagggcccggggcg

SEQ ID NO: 284155 - RNA, 21 nt, Human
ucauuuggaggugacuugugc

SEQ ID NO: 284156 - RNA, 18 nt, Human
uggaggugacuugugccc

SEQ ID NO: 284157 - RNA, 19 nt, Human
uguccucauuuggagguga

SEQ ID NO: 284158 - RNA, 19 nt, Human
uuggaggugacuugugccc

SEQ ID NO: 284159 - RNA, 22 nt, Human
uuuuccuuuguuuucuuuuggu

SEQ ID NO: 284160 - RNA, 21 nt, Human
aaaaaacccaugaaagaagcc

SEQ ID NO: 284161 - RNA, 18 nt, Human
aaaaacaucacacaaugg

SEQ ID NO: 284162 - RNA, 24 nt, Human
aaaacaaacauacacugaauuccu

SEQ ID NO: 284163 - RNA, 30 nt, Human
aaaagaagaaaaaaaaacccaugaaagaag

SEQ ID NO: 284164 - RNA, 23 nt, Human
aaacaaacauacacugaauuccu

SEQ ID NO: 284165 - RNA, 21 nt, Human
aaacugaauuaucauggucaa

SEQ ID NO: 284166 - RNA, 19 nt, Human
aaaguuccugacuaugcau

SEQ ID NO: 284167 - RNA, 25 nt, Human
aaaugaccuuugaucaagcacaggc

SEQ ID NO: 284168 - RNA, 24 nt, Human
aacaauaaaauggggaguagcaau

SEQ ID NO: 284169 - RNA, 21 nt, Human
aacagaaagccuaacguaagu

SEQ ID NO: 284170 - RNA, 21 nt, Human
aacugaacauugagcaaccuc

SEQ ID NO: 284171 - RNA, 24 nt, Human
aagaaaaaaaaacccaugaaagaa

SEQ ID NO: 284172 - RNA, 20 nt, Human
aagaagaaaaaaaaacccau

SEQ ID NO: 284173 - RNA, 22 nt, Human
aagaagaaaaaaaaacccauga

SEQ ID NO: 284174 - RNA, 18 nt, Human
aagcaaaaauaccagauu

SEQ ID NO: 284175 - RNA, 20 nt, Human
aagcaaaaauaccagauuuc

SEQ ID NO: 284176 - RNA, 24 nt, Human
aauccauuaccacuguucuuccau

SEQ ID NO: 284177 - RNA, 24 nt, Human
acagcagaagaaaaagaggcugga

SEQ ID NO: 284178 - RNA, 26 nt, Human
acaggagaaaaaccacuauuaacaga

SEQ ID NO: 284179 - RNA, 19 nt, Human
accaaaaagcaacuccaag

SEQ ID NO: 284180 - RNA, 22 nt, Human
accaaaaagcaacuccaagaaa

SEQ ID NO: 284181 - RNA, 23 nt, Human
accacaaauaagacaacaaacag

SEQ ID NO: 284182 - RNA, 25 nt, Human
acccaguaaggucaucuccuaaucu

SEQ ID NO: 284183 - RNA, 24 nt, Human
agaagaaaaagaggcuggacaaaa

SEQ ID NO: 284184 - RNA, 19 nt, Human
agacaacaaacagagaaca

SEQ ID NO: 284185 - RNA, 23 nt, Human
agacaacaaacagagaacaagcu

SEQ ID NO: 284186 - RNA, 25 nt, Human
agacaacaaacagagaacaagcuuc

SEQ ID NO: 284187 - RNA, 22 nt, Human
agagaacaagcuucuuaucuuc

SEQ ID NO: 284188 - RNA, 19 nt, Human
agagugagaaaacagcaac

SEQ ID NO: 284189 - RNA, 24 nt, Human
agagugagaaaacagcaacugaau

SEQ ID NO: 284190 - RNA, 19 nt, Human
aggcgccgagacggccacg

SEQ ID NO: 284191 - RNA, 21 nt, Human
aggcgccgagacggccacgcg

SEQ ID NO: 284192 - RNA, 21 nt, Human
aguagcaauggggcuguuacc

SEQ ID NO: 284193 - RNA, 18 nt, Human
auucagcugagaggggga

SEQ ID NO: 284194 - RNA, 23 nt, Human
caaaaacaucacacaauggacac

SEQ ID NO: 284195 - RNA, 19 nt, Human
caaauagguaagcugguac

SEQ ID NO: 284196 - RNA, 24 nt, Human
caagacacaggguuuacucuugag

SEQ ID NO: 284197 - RNA, 23 nt, Human
caagggccacuuauuucgugcug

SEQ ID NO: 284198 - RNA, 18 nt, Human
cacaagugaaaacaaggu

SEQ ID NO: 284199 - RNA, 23 nt, Human
caccacaaauaagacaacaaaca

SEQ ID NO: 284200 - RNA, 21 nt, Human
cacuauuaacagaaagccuaa

SEQ ID NO: 284201 - RNA, 18 nt, Human
cacugaacguuacaaucc

SEQ ID NO: 284202 - RNA, 22 nt, Human
cacugauuuuuaaaauugaagu

SEQ ID NO: 284203 - RNA, 21 nt, Human
cagaaagaagucugcggaaaa

SEQ ID NO: 284204 - RNA, 25 nt, Human
cagcagaagaaaaagaggcuggaca

SEQ ID NO: 284205 - RNA, 20 nt, Human
cagcgcaucugugcugcuua

SEQ ID NO: 284206 - RNA, 25 nt, Human
caggcgccgagacggccacgcggga

SEQ ID NO: 284207 - RNA, 18 nt, Human
cauaauccgguggcucug

SEQ ID NO: 284208 - RNA, 18 nt, Human
cauauagccaugaucauu

SEQ ID NO: 284209 - RNA, 19 nt, Human
caucacacaauggacacuu

SEQ ID NO: 284210 - RNA, 19 nt, Human
caugaaagaagccacauua

SEQ ID NO: 284211 - RNA, 18 nt, Human
ccagcgcaucugugcugc

SEQ ID NO: 284212 - RNA, 22 nt, Human
ccauuaaacgagugccaccaca

SEQ ID NO: 284213 - RNA, 18 nt, Human
ccauuaccacuguucuuc

SEQ ID NO: 284214 - RNA, 21 nt, Human
ccauuaccacuguucuuccau

SEQ ID NO: 284215 - RNA, 26 nt, Human
ccucccuuucuauucacuccuguccc

SEQ ID NO: 284216 - RNA, 19 nt, Human
ccugucccuagaccuaaaa

SEQ ID NO: 284217 - RNA, 23 nt, Human
cuaauauuagccuuuuccuuggg

SEQ ID NO: 284218 - RNA, 23 nt, Human
cuaauggccauaccaauuauauu

SEQ ID NO: 284219 - RNA, 19 nt, Human
cucugccauguucccuacu

SEQ ID NO: 284220 - RNA, 21 nt, Human
cuguuacccauuuuucuuuca

SEQ ID NO: 284221 - RNA, 19 nt, Human
gaacuacagacacaagaca

SEQ ID NO: 284222 - RNA, 21 nt, Human
gaagcaugcauugauguaaaa

SEQ ID NO: 284223 - RNA, 22 nt, Human
gaaguauuuuuucauauccuca

SEQ ID NO: 284224 - RNA, 22 nt, Human
gaaucaaauagguaagcuggua

SEQ ID NO: 284225 - RNA, 24 nt, Human
gacaacaaacagagaacaagcuuc

SEQ ID NO: 284226 - RNA, 18 nt, Human
gagcugauuaugaguacc

SEQ ID NO: 284227 - RNA, 18 nt, Human
ggaguagcaauggggcug

SEQ ID NO: 284228 - RNA, 18 nt, Human
gguccuguuuuauucuuu

SEQ ID NO: 284229 - RNA, 18 nt, Human
guacccaguaaggucauc

SEQ ID NO: 284230 - RNA, 19 nt, Human
guggaacagcagaagaaaa

SEQ ID NO: 284231 - RNA, 22 nt, Human
uaaaaagaagaaaaaaaaaccc

SEQ ID NO: 284232 - RNA, 21 nt, Human
uaaacugaauuaucaugguca

SEQ ID NO: 284233 - RNA, 25 nt, Human
uaaagcaugcuuaggaugagaucag

SEQ ID NO: 284234 - RNA, 22 nt, Human
uaacagaaagccuaacguaagu

SEQ ID NO: 284235 - RNA, 18 nt, Human
uaacaguagugacuaaua

SEQ ID NO: 284236 - RNA, 20 nt, Human
uaagauuuagcaaacuguaa

SEQ ID NO: 284237 - RNA, 23 nt, Human
uacacaaaugaccuuugaucaag

SEQ ID NO: 284238 - RNA, 24 nt, Human
uagaaagguggaacagcagaagaa

SEQ ID NO: 284239 - RNA, 22 nt, Human
uagaauaaauaaauacaaaauu

SEQ ID NO: 284240 - RNA, 22 nt, Human
uagagaacugagagaaaaacca

SEQ ID NO: 284241 - RNA, 19 nt, Human
uagagcucuccucccuuuc

SEQ ID NO: 284242 - RNA, 23 nt, Human
uaugaaagaaagccuuuuucuga

SEQ ID NO: 284243 - RNA, 24 nt, Human
uaugguccuguuuuauucuuuaga

SEQ ID NO: 284244 - RNA, 21 nt, Human
ucauauccucaaccgagcaua

SEQ ID NO: 284245 - RNA, 20 nt, Human
uccucccuuucuauucacuc

SEQ ID NO: 284246 - RNA, 20 nt, Human
ucuacacguaaugugaaggu

SEQ ID NO: 284247 - RNA, 18 nt, Human
ucuagaauaaauaaauac

SEQ ID NO: 284248 - RNA, 21 nt, Human
ucuagaauaaauaaauacaaa

SEQ ID NO: 284249 - RNA, 23 nt, Human
ugaaucaaauagguaagcuggua

SEQ ID NO: 284250 - RNA, 18 nt, Human
ugacuguuccacccgcaa

SEQ ID NO: 284251 - RNA, 20 nt, Human
ugcacaagugaaaacaaggu

SEQ ID NO: 284252 - RNA, 25 nt, Human
ugcuuuacaacugcaaaaauauuca

SEQ ID NO: 284253 - RNA, 21 nt, Human
uggaacagcagaagaaaaaga

SEQ ID NO: 284254 - RNA, 22 nt, Human
uggggaguagcaauggggcugu

SEQ ID NO: 284255 - RNA, 21 nt, Human
uguaaaacaauaaaaugggga

SEQ ID NO: 284256 - RNA, 25 nt, Human
uuaccaaaaagcaacuccaagaaaa

SEQ ID NO: 284257 - RNA, 21 nt, Human
uuaccacuguucuuccauucg

SEQ ID NO: 284258 - RNA, 24 nt, Human
uucaaaagguaagcauauuuuaaa

SEQ ID NO: 284259 - RNA, 20 nt, Human
uucaauaacaucugcaguug

SEQ ID NO: 284260 - RNA, 19 nt, Human
uuccugguuucggaaguau

SEQ ID NO: 284261 - RNA, 18 nt, Human
uuuacaguuguucagucu

SEQ ID NO: 284262 - RNA, 21 nt, Human
uuucugacuuuugaacuacag

SEQ ID NO: 284263 - RNA, 24 nt, Human
aaggugcuaggauuacaggcguga

SEQ ID NO: 284264 - RNA, 19 nt, Human
aaguagcuaggauuacagg

SEQ ID NO: 284265 - RNA, 25 nt, Human
aaguagcuaggauuacaggcaccca

SEQ ID NO: 284266 - RNA, 24 nt, Human
aagugauccgcccgccucggccuc

SEQ ID NO: 284267 - RNA, 23 nt, Human
acaggcacccaccaccacgcccg

SEQ ID NO: 284268 - RNA, 18 nt, Human
accauguuggccaggcug

SEQ ID NO: 284269 - RNA, 18 nt, Human
acggaguuucaccauguu

SEQ ID NO: 284270 - RNA, 24 nt, Human
acggaguuucaccauguuggccag

SEQ ID NO: 284271 - RNA, 22 nt, Human
acugcaacacacugcauuuccu

SEQ ID NO: 284272 - RNA, 26 nt, Human
acugcaacacacugcauuuugcgugc

SEQ ID NO: 284273 - RNA, 19 nt, Human
agaaaaggccacugcaaca

SEQ ID NO: 284274 - RNA, 24 nt, Human
agcugggauuacaagcgcacccca

SEQ ID NO: 284275 - RNA, 23 nt, Human
aggaggugaaggaugauggaggg

SEQ ID NO: 284276 - RNA, 20 nt, Human
aggcacccaccaccacgccc

SEQ ID NO: 284277 - RNA, 26 nt, Human
aggugcuaggauuacaggcgugagcc

SEQ ID NO: 284278 - RNA, 19 nt, Human
aguagcugggauuacaagc

SEQ ID NO: 284279 - RNA, 24 nt, Human
auuuuuguauuuuuaguagagacg

SEQ ID NO: 284280 - RNA, 22 nt, Human
caagcaauucuccugccucagc

SEQ ID NO: 284281 - RNA, 22 nt, Human
caagcaauucuccugccucagc

SEQ ID NO: 284282 - RNA, 27 nt, Human
caagcaauucuccugccucagccuccc

SEQ ID NO: 284283 - RNA, 24 nt, Human
caaggugcuaggauuacaggcgug

SEQ ID NO: 284284 - RNA, 24 nt, Human
caccacacccggcuaauuuuugua

SEQ ID NO: 284285 - RNA, 21 nt, Human
caccauguuggccaggcuggu

SEQ ID NO: 284286 - RNA, 22 nt, Human
caccauguuggccaggcugguc

SEQ ID NO: 284287 - RNA, 27 nt, Human
caccauguuggccaggcuggucuggaa

SEQ ID NO: 284288 - RNA, 18 nt, Human
cacccaccaccacgcccg

SEQ ID NO: 284289 - RNA, 19 nt, Human
caccccaccacacccggcu

SEQ ID NO: 284290 - RNA, 22 nt, Human
caccgcaaccuccaccucaugg

SEQ ID NO: 284291 - RNA, 24 nt, Human
caccucccaaguucaagcaauucu

SEQ ID NO: 284292 - RNA, 25 nt, Human
cacugcaacacacugcauuuccuua

SEQ ID NO: 284293 - RNA, 21 nt, Human
caggcacccaccaccacgccc

SEQ ID NO: 284294 - RNA, 24 nt, Human
cauguuggccaggcuggucuggaa

SEQ ID NO: 284295 - RNA, 22 nt, Human
ccaaggugcuaggauuacaggc

SEQ ID NO: 284296 - RNA, 24 nt, Human
ccaaggugcuaggauuacaggcgu

SEQ ID NO: 284297 - RNA, 26 nt, Human
ccaccucccaaguucaagcaauucuu

SEQ ID NO: 284298 - RNA, 20 nt, Human
ccacgcccgguuaacuuuug

SEQ ID NO: 284299 - RNA, 23 nt, Human
cccaaguagcuaggauuacaggc

SEQ ID NO: 284300 - RNA, 24 nt, Human
cccaaguagcuaggauuacaggca

SEQ ID NO: 284301 - RNA, 19 nt, Human
cccgaguagcugggauuac

SEQ ID NO: 284302 - RNA, 20 nt, Human
ccgauugacaaaaagaagaa

SEQ ID NO: 284303 - RNA, 18 nt, Human
ccgcaaccuccaccucau

SEQ ID NO: 284304 - RNA, 24 nt, Human
ccgcaaccuccaccucauggguuc

SEQ ID NO: 284305 - RNA, 24 nt, Human
ccucauggguucaagcaauucucc

SEQ ID NO: 284306 - RNA, 18 nt, Human
ccuccaccucccaaguuc

SEQ ID NO: 284307 - RNA, 24 nt, Human
ccucccaaguucaagcaauucucc

SEQ ID NO: 284308 - RNA, 18 nt, Human
ccugaccucaagugaucc

SEQ ID NO: 284309 - RNA, 19 nt, Human
ccugaccucaagugauccg

SEQ ID NO: 284310 - RNA, 22 nt, Human
ccugaccucaagugauccgccc

SEQ ID NO: 284311 - RNA, 23 nt, Human
ccugccucagccucccaaguagc

SEQ ID NO: 284312 - RNA, 23 nt, Human
ccugccucagccucccgaguagc

SEQ ID NO: 284313 - RNA, 24 nt, Human
ccugccucagccucccgaguagcu

SEQ ID NO: 284314 - RNA, 21 nt, Human
cgauugacaaaaagaagaagg

SEQ ID NO: 284315 - RNA, 21 nt, Human
cgcaaccuugcugacugggcg

SEQ ID NO: 284316 - RNA, 23 nt, Human
cgccucggccucccaaggugcua

SEQ ID NO: 284317 - RNA, 24 nt, Human
cgccucggccucccaaggugcuag

SEQ ID NO: 284318 - RNA, 24 nt, Human
cggugucuugcucuguugcccagg

SEQ ID NO: 284319 - RNA, 23 nt, Human
cuaauuuuuguauuuuuaguaga

SEQ ID NO: 284320 - RNA, 24 nt, Human
cucaccgcaaccuccaccucaugg

SEQ ID NO: 284321 - RNA, 23 nt, Human
cucagccucccgaguagcuggga

SEQ ID NO: 284322 - RNA, 24 nt, Human
cucccaaguagcuaggauuacagg

SEQ ID NO: 284323 - RNA, 26 nt, Human
cuccugaccucaagugauccgcccgc

SEQ ID NO: 284324 - RNA, 29 nt, Human
cucuguugcccaggcuagggugcaauggg

SEQ ID NO: 284325 - RNA, 23 nt, Human
cugccucagccucccaaguagcu

SEQ ID NO: 284326 - RNA, 21 nt, Human
cuugcucugucacccgggcug

SEQ ID NO: 284327 - RNA, 24 nt, Human
gacaaaaagaagaagguguuccag

SEQ ID NO: 284328 - RNA, 24 nt, Human
gaccucaagugauccgcccgccuc

SEQ ID NO: 284329 - RNA, 24 nt, Human
gaguagcugggauuacaagcgcac

SEQ ID NO: 284330 - RNA, 21 nt, Human
gaugagugucccaguaaaggu

SEQ ID NO: 284331 - RNA, 18 nt, Human
gauuacaggcgugagcca

SEQ ID NO: 284332 - RNA, 20 nt, Human
gauuacaggcgugagccacc

SEQ ID NO: 284333 - RNA, 21 nt, Human
gauuacaggcgugagccaccg

SEQ ID NO: 284334 - RNA, 23 nt, Human
gcuggucuggaacuccugaccuc

SEQ ID NO: 284335 - RNA, 23 nt, Human
ggaguuucaccauguuggccagg

SEQ ID NO: 284336 - RNA, 22 nt, Human
ggauuacaggcacccaccacca

SEQ ID NO: 284337 - RNA, 22 nt, Human
ggauuacaggcgugagccaccg

SEQ ID NO: 284338 - RNA, 22 nt, Human
ggcaaggguggugcgggaagaa

SEQ ID NO: 284339 - RNA, 24 nt, Human
ggcuggucuggaacuccugaccuc

SEQ ID NO: 284340 - RNA, 23 nt, Human
gggccagcgcaggcaaggguggu

SEQ ID NO: 284341 - RNA, 20 nt, Human
ggguucaagcaauucuccug

SEQ ID NO: 284342 - RNA, 24 nt, Human
ggugcaauggugccaucuuggcuc

SEQ ID NO: 284343 - RNA, 18 nt, Human
guagcugggauuacaagc

SEQ ID NO: 284344 - RNA, 24 nt, Human
gugauccgcccgccucggccuccc

SEQ ID NO: 284345 - RNA, 20 nt, Human
gugccgauugacaaaaagaa

SEQ ID NO: 284346 - RNA, 21 nt, Human
guuccaguguaacagaugagu

SEQ ID NO: 284347 - RNA, 19 nt, Human
uaaaccgggggugggggua

SEQ ID NO: 284348 - RNA, 22 nt, Human
uaagacggugucuugcucuguu

SEQ ID NO: 284349 - RNA, 24 nt, Human
uaauuuuuguauuuuuaguagaga

SEQ ID NO: 284350 - RNA, 19 nt, Human
uacaggcgugagccaccgc

SEQ ID NO: 284351 - RNA, 20 nt, Human
uacaggcgugagccaccgcu

SEQ ID NO: 284352 - RNA, 24 nt, Human
uacaggcgugagccaccgcuccca

SEQ ID NO: 284353 - RNA, 19 nt, Human
uacagugguacaaucuugg

SEQ ID NO: 284354 - RNA, 22 nt, Human
uagagacggaguuucaccaugu

SEQ ID NO: 284355 - RNA, 20 nt, Human
uaggaggugaaggaugauga

SEQ ID NO: 284356 - RNA, 20 nt, Human
uaggaggugaaggaugaugg

SEQ ID NO: 284357 - RNA, 19 nt, Human
uaggauuacaggcacccac

SEQ ID NO: 284358 - RNA, 21 nt, Human
uaggauuacaggcacccacca

SEQ ID NO: 284359 - RNA, 24 nt, Human
uaggauuacaggcacccaccacca

SEQ ID NO: 284360 - RNA, 18 nt, Human
uaggauuacaggcgugag

SEQ ID NO: 284361 - RNA, 19 nt, Human
uaggauuacaggcgugagc

SEQ ID NO: 284362 - RNA, 21 nt, Human
uaggauuacaggcgugagcca

SEQ ID NO: 284363 - RNA, 22 nt, Human
uaggauuacaggcgugagccac

SEQ ID NO: 284364 - RNA, 23 nt, Human
uaggauuacaggcgugagccacc

SEQ ID NO: 284365 - RNA, 24 nt, Human
uaggauuacaggcgugagccaccg

SEQ ID NO: 284366 - RNA, 24 nt, Human
uaguagagacggaguuucaccaug

SEQ ID NO: 284367 - RNA, 25 nt, Human
uaguagagacggaguuucaccaugu

SEQ ID NO: 284368 - RNA, 19 nt, Human
ucaagcaauucuccugccu

SEQ ID NO: 284369 - RNA, 24 nt, Human
ucaccgcaaccuccaccucauggg

SEQ ID NO: 284370 - RNA, 22 nt, Human
ucagcagggguaaccaaaugcc

SEQ ID NO: 284371 - RNA, 24 nt, Human
ucagcagggguaaccaaaugccaa

SEQ ID NO: 284372 - RNA, 20 nt, Human
ucagccucccaaguagcuag

SEQ ID NO: 284373 - RNA, 20 nt, Human
ucagccucccgaguagcugg

SEQ ID NO: 284374 - RNA, 24 nt, Human
ucauggguucaagcaauucuccug

SEQ ID NO: 284375 - RNA, 24 nt, Human
ucccaaggugcuaggauuacaggc

SEQ ID NO: 284376 - RNA, 24 nt, Human
ucccaaguagcuaggauuacaggc

SEQ ID NO: 284377 - RNA, 21 nt, Human
ucccaaguucaagcaauucuc

SEQ ID NO: 284378 - RNA, 24 nt, Human
ucccaaguucaagcaauucuccug

SEQ ID NO: 284379 - RNA, 25 nt, Human
ucccagccgcaccguuuuuuuccuc

SEQ ID NO: 284380 - RNA, 18 nt, Human
ucccgaguagcugggauu

SEQ ID NO: 284381 - RNA, 21 nt, Human
uccugcuggcugggaccuugc

SEQ ID NO: 284382 - RNA, 18 nt, Human
ucggccucccaaggugcu

SEQ ID NO: 284383 - RNA, 26 nt, Human
ucuccugccucagccucccaaguagc

SEQ ID NO: 284384 - RNA, 24 nt, Human
ucuccugccucagccucccgagua

SEQ ID NO: 284385 - RNA, 18 nt, Human
ucugucacccgggcugga

SEQ ID NO: 284386 - RNA, 24 nt, Human
ucuguugcccaggcuagggugcaa

SEQ ID NO: 284387 - RNA, 23 nt, Human
ucuugcucugucacccgggcugg

SEQ ID NO: 284388 - RNA, 24 nt, Human
ucuugcucugucacccgggcugga

SEQ ID NO: 284389 - RNA, 18 nt, Human
ucuugcucuguugcccag

SEQ ID NO: 284390 - RNA, 19 nt, Human
ucuugcucuguugcccagg

SEQ ID NO: 284391 - RNA, 23 nt, Human
ucuugcucuguugcccaggcuag

SEQ ID NO: 284392 - RNA, 23 nt, Human
ucuugcucuguugcccaggcuag

SEQ ID NO: 284393 - RNA, 24 nt, Human
ucuugcucuguugcccaggcuagg

SEQ ID NO: 284394 - RNA, 25 nt, Human
ucuugcucuguugcccaggcuaggg

SEQ ID NO: 284395 - RNA, 27 nt, Human
ucuugcucuguugcccaggcuagggug

SEQ ID NO: 284396 - RNA, 24 nt, Human
ucuuggccuccaccucccaaguuc

SEQ ID NO: 284397 - RNA, 23 nt, Human
ugacaaaaagaagaagguguucc

SEQ ID NO: 284398 - RNA, 18 nt, Human
ugaccucaagugauccgc

SEQ ID NO: 284399 - RNA, 24 nt, Human
ugaccucaagugauccgcccgccu

SEQ ID NO: 284400 - RNA, 18 nt, Human
ugauggagggggcuaugu

SEQ ID NO: 284401 - RNA, 19 nt, Human
ugcaacgcuucaccugcug

SEQ ID NO: 284402 - RNA, 18 nt, Human
ugcccaggcuagggugca

SEQ ID NO: 284403 - RNA, 23 nt, Human
ugccucagccucccaaguagcua

SEQ ID NO: 284404 - RNA, 24 nt, Human
ugccucagccucccaaguagcuag

SEQ ID NO: 284405 - RNA, 24 nt, Human
ugccucagccucccgaguagcugg

SEQ ID NO: 284406 - RNA, 24 nt, Human
ugcuaggauuacaggcgugagcca

SEQ ID NO: 284407 - RNA, 19 nt, Human
ugcucugucacccgggcug

SEQ ID NO: 284408 - RNA, 24 nt, Human
ugcucuguugcccaggcuagggug

SEQ ID NO: 284409 - RNA, 23 nt, Human
uggaauacagugguacaaucuug

SEQ ID NO: 284410 - RNA, 24 nt, Human
uggaauacagugguacaaucuugg

SEQ ID NO: 284411 - RNA, 20 nt, Human
uggagugggggauaggaggu

SEQ ID NO: 284412 - RNA, 24 nt, Human
uggccaggcuggucuggaacuccu

SEQ ID NO: 284413 - RNA, 19 nt, Human
ugggauuacaagcgcaccc

SEQ ID NO: 284414 - RNA, 24 nt, Human
ugggauuacaagcgcaccccacca

SEQ ID NO: 284415 - RNA, 21 nt, Human
uggguucaagcaauucuccug

SEQ ID NO: 284416 - RNA, 23 nt, Human
uggguucaagcaauucuccugcc

SEQ ID NO: 284417 - RNA, 24 nt, Human
uggguucaagcaauucuccugccu

SEQ ID NO: 284418 - RNA, 21 nt, Human
uguauuuuuaguagagacgga

SEQ ID NO: 284419 - RNA, 24 nt, Human
uguccugcuggcugggaccuugca

SEQ ID NO: 284420 - RNA, 21 nt, Human
ugucuugcucuguugcccagg

SEQ ID NO: 284421 - RNA, 22 nt, Human
uuaagagagcacugaugcucag

SEQ ID NO: 284422 - RNA, 18 nt, Human
uuaguagagacggaguuu

SEQ ID NO: 284423 - RNA, 24 nt, Human
uuaguagagacggaguuucaccau

SEQ ID NO: 284424 - RNA, 21 nt, Human
uucaagcaauucuccugccuc

SEQ ID NO: 284425 - RNA, 21 nt, Human
uucaagcaauucuccugccuc

SEQ ID NO: 284426 - RNA, 24 nt, Human
uucaagcaauucuccugccucagc

SEQ ID NO: 284427 - RNA, 24 nt, Human
uucaagcaauucuccugccucagc

SEQ ID NO: 284428 - RNA, 25 nt, Human
uucaccugcuggucccaguggcagg

SEQ ID NO: 284429 - RNA, 21 nt, Human
uuccuuacaguggucugugcc

SEQ ID NO: 284430 - RNA, 18 nt, Human
uugcccaggcuagggugc

SEQ ID NO: 284431 - RNA, 23 nt, Human
uuguauuuuuaguagagacggag

SEQ ID NO: 284432 - RNA, 24 nt, Human
uuucaccauguuggccaggcuggu

SEQ ID NO: 284433 - RNA, 24 nt, Human
uuuuuaguagagacggaguuucac

SEQ ID NO: 284434 - RNA, 20 nt, Human
uuuuuguauuuuuaguagag

SEQ ID NO: 284435 - RNA, 18 nt, Human
uuuuuuuuuuuuuuuuug

SEQ ID NO: 284436 - RNA, 21 nt, Human
aaaaaaacaaaaagaagccca

SEQ ID NO: 284437 - RNA, 23 nt, Human
aaaaacaaaaagaaaacaaaucu

SEQ ID NO: 284438 - RNA, 30 nt, Human
aaaaagaaaacaaaucuagaauaacagaaa

SEQ ID NO: 284439 - RNA, 24 nt, Human
aaaacaaaaagaaaacaaaucuag

SEQ ID NO: 284440 - RNA, 23 nt, Human
aaaaccacagugcuaaucaaaac

SEQ ID NO: 284441 - RNA, 26 nt, Human
aaaagcaaacaaacaaauaaacaaaa

SEQ ID NO: 284442 - RNA, 19 nt, Human
aaacacaggcucuuccggg

SEQ ID NO: 284443 - RNA, 22 nt, Human
aaacagauuaaaccagaacugg

SEQ ID NO: 284444 - RNA, 24 nt, Human
aaaccagaacuggagcagaaagga

SEQ ID NO: 284445 - RNA, 25 nt, Human
aaauaaacaaaaacaaaaagaaaac

SEQ ID NO: 284446 - RNA, 22 nt, Human
aaaucucugcagaugguggaag

SEQ ID NO: 284447 - RNA, 22 nt, Human
aacaaacaaauaaacaaaaaca

SEQ ID NO: 284448 - RNA, 22 nt, Human
aacagaaaaaaacaaaaagaag

SEQ ID NO: 284449 - RNA, 25 nt, Human
aacccugcccaccccgcccccaacc

SEQ ID NO: 284450 - RNA, 25 nt, Human
aagaugccaaugucugcugauggug

SEQ ID NO: 284451 - RNA, 21 nt, Human
aagcaaacaaacaaauaaaca

SEQ ID NO: 284452 - RNA, 28 nt, Human
aagcaaacaaacaaauaaacaaaaacaa

SEQ ID NO: 284453 - RNA, 19 nt, Human
aagcauaaaggcuggcacc

SEQ ID NO: 284454 - RNA, 27 nt, Human
aagcuggaaauaaaagcaaagggaccc

SEQ ID NO: 284455 - RNA, 23 nt, Human
aagcugguuugcucuccgcagug

SEQ ID NO: 284456 - RNA, 24 nt, Human
aauaacagaaaaaaacaaaaagaa

SEQ ID NO: 284457 - RNA, 18 nt, Human
aaugaaugauuauccuac

SEQ ID NO: 284458 - RNA, 22 nt, Human
acaaaaagaaaacaaaucuaga

SEQ ID NO: 284459 - RNA, 21 nt, Human
acccugcccaccccgccccca

SEQ ID NO: 284460 - RNA, 20 nt, Human
acugacacuuucucccuucu

SEQ ID NO: 284461 - RNA, 23 nt, Human
acuggagcagaaaggagacucua

SEQ ID NO: 284462 - RNA, 22 nt, Human
agaaaacaaaucuagaauaaca

SEQ ID NO: 284463 - RNA, 28 nt, Human
agaaaacaaaucuagaauaacagaaaag

SEQ ID NO: 284464 - RNA, 19 nt, Human
agaaaggaguguuagacaa

SEQ ID NO: 284465 - RNA, 21 nt, Human
agaacccugcccaccccgccc

SEQ ID NO: 284466 - RNA, 18 nt, Human
agagaagcagaggaaagg

SEQ ID NO: 284467 - RNA, 20 nt, Human
agagaggaagacaggugggu

SEQ ID NO: 284468 - RNA, 24 nt, Human
aggacuccggcagccgcacagucc

SEQ ID NO: 284469 - RNA, 24 nt, Human
aggagacucuagcugaagucaucc

SEQ ID NO: 284470 - RNA, 21 nt, Human
aggauagugucccagaaagaa

SEQ ID NO: 284471 - RNA, 23 nt, Human
agucccugcagcacaccugugcg

SEQ ID NO: 284472 - RNA, 20 nt, Human
auaaaugaauacagugggag

SEQ ID NO: 284473 - RNA, 23 nt, Human
aucagcuuuuuacuggauaguuu

SEQ ID NO: 284474 - RNA, 19 nt, Human
aucuguuagugucucccuu

SEQ ID NO: 284475 - RNA, 20 nt, Human
caaaaacaaaaagaaaacaa

SEQ ID NO: 284476 - RNA, 22 nt, Human
caaaaagaaaacaaaucuagaa

SEQ ID NO: 284477 - RNA, 24 nt, Human
caaacaaacaaauaaacaaaaaca

SEQ ID NO: 284478 - RNA, 27 nt, Human
caaacaaauaaacaaaaacaaaaagaa

SEQ ID NO: 284479 - RNA, 18 nt, Human
caagcuggaaauaaaagc

SEQ ID NO: 284480 - RNA, 21 nt, Human
caagguagcaggagcagaccc

SEQ ID NO: 284481 - RNA, 18 nt, Human
cacagugcuaaucaaaac

SEQ ID NO: 284482 - RNA, 22 nt, Human
caccccgcccccaaccccacuc

SEQ ID NO: 284483 - RNA, 22 nt, Human
cacuuggauguagcucuugcug

SEQ ID NO: 284484 - RNA, 20 nt, Human
cagaaaaaaacaaaaagaaa

SEQ ID NO: 284485 - RNA, 22 nt, Human
cccaaacuucaaaucucugcag

SEQ ID NO: 284486 - RNA, 27 nt, Human
cccaaccccacucauucaagcuggaaa

SEQ ID NO: 284487 - RNA, 22 nt, Human
ccccaaagccauuggagaagca

SEQ ID NO: 284488 - RNA, 21 nt, Human
ccccaaccccacucauucaag

SEQ ID NO: 284489 - RNA, 23 nt, Human
ccccaaccccacucauucaagcu

SEQ ID NO: 284490 - RNA, 26 nt, Human
ccccaaccccacucauucaagcugga

SEQ ID NO: 284491 - RNA, 23 nt, Human
cccccaaccccacucauucaagc

SEQ ID NO: 284492 - RNA, 19 nt, Human
cccugcccaccccgccccc

SEQ ID NO: 284493 - RNA, 19 nt, Human
ccgcccccaaccccacuca

SEQ ID NO: 284494 - RNA, 21 nt, Human
ccuuuguccuucaagugcaaa

SEQ ID NO: 284495 - RNA, 19 nt, Human
cgacagccacaacuuccca

SEQ ID NO: 284496 - RNA, 21 nt, Human
cgacagccacaacuucccagg

SEQ ID NO: 284497 - RNA, 23 nt, Human
cuacagaagauggcacaaucauc

SEQ ID NO: 284498 - RNA, 18 nt, Human
cucaagugcccucagcuu

SEQ ID NO: 284499 - RNA, 19 nt, Human
cugcaaugccuuuauuuug

SEQ ID NO: 284500 - RNA, 22 nt, Human
cugcccaccccgcccccaaccc

SEQ ID NO: 284501 - RNA, 24 nt, Human
gaaaaaaacaaaaagaagcccaag

SEQ ID NO: 284502 - RNA, 18 nt, Human
gaaucccaggcaacuuug

SEQ ID NO: 284503 - RNA, 22 nt, Human
gacucuucacuuugcauugcag

SEQ ID NO: 284504 - RNA, 19 nt, Human
gagcagaaaggagacucua

SEQ ID NO: 284505 - RNA, 23 nt, Human
gagcuggugaaguucuuccccaa

SEQ ID NO: 284506 - RNA, 20 nt, Human
gauaauaggacacuuggaug

SEQ ID NO: 284507 - RNA, 25 nt, Human
gaugaugaggagagaagcagaggaa

SEQ ID NO: 284508 - RNA, 23 nt, Human
gcaaacaaacaaauaaacaaaaa

SEQ ID NO: 284509 - RNA, 21 nt, Human
gcccaccccgcccccaacccc

SEQ ID NO: 284510 - RNA, 19 nt, Human
gcucuuguuuguaugcugg

SEQ ID NO: 284511 - RNA, 22 nt, Human
gcugaagucaucccacucaggc

SEQ ID NO: 284512 - RNA, 20 nt, Human
ggcaggucugcgauugaugc

SEQ ID NO: 284513 - RNA, 26 nt, Human
gucaucccacucaggcggguggacuc

SEQ ID NO: 284514 - RNA, 21 nt, Human
gucccaggagacaagacagca

SEQ ID NO: 284515 - RNA, 24 nt, Human
guuuuccaacugaggcagggcagg

SEQ ID NO: 284516 - RNA, 30 nt, Human
uaaaagcaaacaaacaaauaaacaaaaacc

SEQ ID NO: 284517 - RNA, 18 nt, Human
uaaagaguccacaacaca

SEQ ID NO: 284518 - RNA, 21 nt, Human
uaacuguaccauuacuuugau

SEQ ID NO: 284519 - RNA, 21 nt, Human
uaagaaaauaaucacagauaa

SEQ ID NO: 284520 - RNA, 20 nt, Human
uaaggaaagccagccauagg

SEQ ID NO: 284521 - RNA, 25 nt, Human
uagaauaacagaaaaaaacaaaaag

SEQ ID NO: 284522 - RNA, 18 nt, Human
uagacugagggccugaaa

SEQ ID NO: 284523 - RNA, 21 nt, Human
uagagaggaagacaggugggu

SEQ ID NO: 284524 - RNA, 19 nt, Human
uagcaggagcagaccccau

SEQ ID NO: 284525 - RNA, 20 nt, Human
uagcaggagcagaccccauu

SEQ ID NO: 284526 - RNA, 18 nt, Human
uagcuugcuacuuuggcc

SEQ ID NO: 284527 - RNA, 18 nt, Human
ucaaaucucugcagaugg

SEQ ID NO: 284528 - RNA, 23 nt, Human
ucaaguucuugcugcuaaggaaa

SEQ ID NO: 284529 - RNA, 22 nt, Human
uccaucagcuuuuuacuggaua

SEQ ID NO: 284530 - RNA, 21 nt, Human
ucccugcagcacaccugugcg

SEQ ID NO: 284531 - RNA, 21 nt, Human
ucccugcagcacaccugugcg

SEQ ID NO: 284532 - RNA, 20 nt, Human
ucccuucuguuugcaguguu

SEQ ID NO: 284533 - RNA, 24 nt, Human
uccgcaguguagauuaaagucugu

SEQ ID NO: 284534 - RNA, 21 nt, Human
ucuagaauaacagaaaaaaac

SEQ ID NO: 284535 - RNA, 22 nt, Human
ucucuuuuuaaaauagagguuc

SEQ ID NO: 284536 - RNA, 20 nt, Human
ucugcuucccaagaaagugu

SEQ ID NO: 284537 - RNA, 21 nt, Human
ucuucaaaaugccucccccuu

SEQ ID NO: 284538 - RNA, 20 nt, Human
ugaauacagugggagagaua

SEQ ID NO: 284539 - RNA, 22 nt, Human
ugaaugauuauccuacacgugg

SEQ ID NO: 284540 - RNA, 21 nt, Human
ugacaaaaccuaaauaaauca

SEQ ID NO: 284541 - RNA, 20 nt, Human
ugacauguacuuucuugaag

SEQ ID NO: 284542 - RNA, 21 nt, Human
ugagagaagcauaaaggcugg

SEQ ID NO: 284543 - RNA, 22 nt, Human
ugaggagagaagcagaggaaag

SEQ ID NO: 284544 - RNA, 24 nt, Human
ugaggagagaagcagaggaaaggg

SEQ ID NO: 284545 - RNA, 18 nt, Human
ugaggcagggcaggucug

SEQ ID NO: 284546 - RNA, 18 nt, Human
ugaguagagcggaggggc

SEQ ID NO: 284547 - RNA, 19 nt, Human
ugcaaaaggaaaaccacag

SEQ ID NO: 284548 - RNA, 22 nt, Human
ugcccaccccgcccccaacccc

SEQ ID NO: 284549 - RNA, 21 nt, Human
uggaaauaaaagcaaacaaac

SEQ ID NO: 284550 - RNA, 21 nt, Human
uggagaagcagcugcaucaga

SEQ ID NO: 284551 - RNA, 21 nt, Human
uggucacuugacuugcaaaau

SEQ ID NO: 284552 - RNA, 23 nt, Human
uggucacuugacuugcaaaauuu

SEQ ID NO: 284553 - RNA, 22 nt, Human
ugguggaaggaaugaguagagc

SEQ ID NO: 284554 - RNA, 18 nt, Human
uguugggaaugaugauga

SEQ ID NO: 284555 - RNA, 22 nt, Human
uguugggaaugaugaugaggag

SEQ ID NO: 284556 - RNA, 23 nt, Human
uucaagcuggaaauaaaagcaaa

SEQ ID NO: 284557 - RNA, 22 nt, Human
uucaggguguuuauugugaggc

SEQ ID NO: 284558 - RNA, 18 nt, Human
uucucauccucucugugg

SEQ ID NO: 284559 - RNA, 20 nt, Human
uuuuuuuuuuuuuuuuuugg

SEQ ID NO: 284560 - RNA, 22 nt, Human
aaaaaaaagaaaaaaaaaagaa

SEQ ID NO: 284561 - RNA, 21 nt, Human
aaaaaacaaaaacuucaaaaa

SEQ ID NO: 284562 - RNA, 18 nt, Human
aaaaaaccaaacaccgca

SEQ ID NO: 284563 - RNA, 22 nt, Human
aaaaaucacuuccuaggugagg

SEQ ID NO: 284564 - RNA, 18 nt, Human
aaaacuugcauaggagcc

SEQ ID NO: 284565 - RNA, 18 nt, Human
aaaagaaaaaaaaaggua

SEQ ID NO: 284566 - RNA, 26 nt, Human
aaaagccaacccccagaaaugauggc

SEQ ID NO: 284567 - RNA, 20 nt, Human
aaacaaguacugaugcucuu

SEQ ID NO: 284568 - RNA, 20 nt, Human
aaacauuaccaaaugugcaa

SEQ ID NO: 284569 - RNA, 19 nt, Human
aaacugcccaugcuacaac

SEQ ID NO: 284570 - RNA, 24 nt, Human
aaacugggcaguuguuagacuaaa

SEQ ID NO: 284571 - RNA, 21 nt, Human
aaagaguauuuuaacucaagu

SEQ ID NO: 284572 - RNA, 20 nt, Human
aaccggagcgcucuggcucc

SEQ ID NO: 284573 - RNA, 19 nt, Human
aaccugcacaaugugcaca

SEQ ID NO: 284574 - RNA, 18 nt, Human
aaccugcacccccucccu

SEQ ID NO: 284575 - RNA, 25 nt, Human
aagaaagacucuuucagaaccugga

SEQ ID NO: 284576 - RNA, 21 nt, Human
aagaacaaaaaaccaaacacc

SEQ ID NO: 284577 - RNA, 26 nt, Human
aagaacaaaaaaccaaacaccgcaua

SEQ ID NO: 284578 - RNA, 19 nt, Human
aagcagcaaaaaccgcagc

SEQ ID NO: 284579 - RNA, 20 nt, Human
aagcagcaaaaaccgcagcc

SEQ ID NO: 284580 - RNA, 18 nt, Human
aagcagcagugacagcug

SEQ ID NO: 284581 - RNA, 21 nt, Human
aagcagcagugacagcugccu

SEQ ID NO: 284582 - RNA, 18 nt, Human
aaggccaccuuccuaagu

SEQ ID NO: 284583 - RNA, 18 nt, Human
acacagucuccuuuuuuu

SEQ ID NO: 284584 - RNA, 20 nt, Human
acaguggagugaguucaaac

SEQ ID NO: 284585 - RNA, 18 nt, Human
accaaacaccgcauauuc

SEQ ID NO: 284586 - RNA, 23 nt, Human
accagagcgcugacauggcacca

SEQ ID NO: 284587 - RNA, 20 nt, Human
accuuuuaaaaaacaaaaac

SEQ ID NO: 284588 - RNA, 18 nt, Human
acgcuacagacaagcuac

SEQ ID NO: 284589 - RNA, 24 nt, Human
agaaauguccauuccucagauuuc

SEQ ID NO: 284590 - RNA, 19 nt, Human
agacaagcuacggcccagg

SEQ ID NO: 284591 - RNA, 22 nt, Human
agacuccugaggagcgcuggcu

SEQ ID NO: 284592 - RNA, 20 nt, Human
agacugcugguccccagcuc

SEQ ID NO: 284593 - RNA, 21 nt, Human
agagucaaaccauguuucuuu

SEQ ID NO: 284594 - RNA, 21 nt, Human
agauaagcagcaaaaaccgca

SEQ ID NO: 284595 - RNA, 23 nt, Human
agauaagcagcaaaaaccgcagc

SEQ ID NO: 284596 - RNA, 18 nt, Human
agcccgaggaccaaaccg

SEQ ID NO: 284597 - RNA, 24 nt, Human
agcugccuggccucaauccaccuu

SEQ ID NO: 284598 - RNA, 18 nt, Human
aggaacucaaaacagacc

SEQ ID NO: 284599 - RNA, 19 nt, Human
aggagccugggaccugaaa

SEQ ID NO: 284600 - RNA, 18 nt, Human
aggcaggcaagagucaag

SEQ ID NO: 284601 - RNA, 21 nt, Human
aggcgccggaaggguuaagcc

SEQ ID NO: 284602 - RNA, 19 nt, Human
aggggcaucauggaguuuc

SEQ ID NO: 284603 - RNA, 18 nt, Human
agucacagaacuauuucu

SEQ ID NO: 284604 - RNA, 20 nt, Human
auaagcagcaaaaaccgcag

SEQ ID NO: 284605 - RNA, 21 nt, Human
aucaccacagaaaaauuugua

SEQ ID NO: 284606 - RNA, 20 nt, Human
augaaacguagccucgcucc

SEQ ID NO: 284607 - RNA, 28 nt, Human
caaaaaaaaggagaaagaauaauccaaa

SEQ ID NO: 284608 - RNA, 24 nt, Human
caaaaugacuccgcacacaaaggu

SEQ ID NO: 284609 - RNA, 22 nt, Human
caagaacaaaaaaccaaacacc

SEQ ID NO: 284610 - RNA, 24 nt, Human
caagaacaaaaaaccaaacaccgc

SEQ ID NO: 284611 - RNA, 19 nt, Human
caagguaagcaauggcccc

SEQ ID NO: 284612 - RNA, 24 nt, Human
caagguaagcaauggccccaacuc

SEQ ID NO: 284613 - RNA, 22 nt, Human
caauagcaaagacuuggaacca

SEQ ID NO: 284614 - RNA, 24 nt, Human
cacaugagugugcauguacucacu

SEQ ID NO: 284615 - RNA, 20 nt, Human
cacauggaggugcugugggg

SEQ ID NO: 284616 - RNA, 20 nt, Human
cacccccucccuccuucaaa

SEQ ID NO: 284617 - RNA, 19 nt, Human
cacucuucuauuaucaccc

SEQ ID NO: 284618 - RNA, 19 nt, Human
cagaaccuggaaagggucc

SEQ ID NO: 284619 - RNA, 26 nt, Human
cagaauacaaaggagauauaaacacc

SEQ ID NO: 284620 - RNA, 21 nt, Human
cagcaaacauuucuauucccu

SEQ ID NO: 284621 - RNA, 20 nt, Human
cagcccaguuugcauuucca

SEQ ID NO: 284622 - RNA, 21 nt, Human
cagggagagcuaacuaucgca

SEQ ID NO: 284623 - RNA, 21 nt, Human
cagggccuugguagaagagug

SEQ ID NO: 284624 - RNA, 23 nt, Human
caguucauccauugccagauucu

SEQ ID NO: 284625 - RNA, 21 nt, Human
cauggccaaaaucugcacacc

SEQ ID NO: 284626 - RNA, 20 nt, Human
cauugggcccgcccaaggug

SEQ ID NO: 284627 - RNA, 21 nt, Human
cauuuguggaugucaccaguc

SEQ ID NO: 284628 - RNA, 22 nt, Human
ccaaacaccgcauauucucacu

SEQ ID NO: 284629 - RNA, 18 nt, Human
ccaacgccugcgccccgc

SEQ ID NO: 284630 - RNA, 19 nt, Human
ccaaggacuuaacaacugc

SEQ ID NO: 284631 - RNA, 22 nt, Human
ccaauacaucaaguacugcaga

SEQ ID NO: 284632 - RNA, 23 nt, Human
ccacugcucccuggccuccaggc

SEQ ID NO: 284633 - RNA, 24 nt, Human
ccagcaacuucccuucaacaaaca

SEQ ID NO: 284634 - RNA, 22 nt, Human
ccauauaaacugaaccugcacc

SEQ ID NO: 284635 - RNA, 25 nt, Human
cccauagccucugcaaaaugacugc

SEQ ID NO: 284636 - RNA, 19 nt, Human
cccaugcuacaaccuuggc

SEQ ID NO: 284637 - RNA, 18 nt, Human
ccccaauacaucaaguac

SEQ ID NO: 284638 - RNA, 19 nt, Human
cccccagaaaugauggcca

SEQ ID NO: 284639 - RNA, 22 nt, Human
cccugaaacaagggcucaaaaa

SEQ ID NO: 284640 - RNA, 19 nt, Human
ccgaauccgcgggcaaccc

SEQ ID NO: 284641 - RNA, 22 nt, Human
ccuccaggcagacugcuggucc

SEQ ID NO: 284642 - RNA, 18 nt, Human
ccuccggagacgggccgg

SEQ ID NO: 284643 - RNA, 24 nt, Human
cgccccgccccagcgaagcccgag

SEQ ID NO: 284644 - RNA, 22 nt, Human
cggagacgggccggauccuucc

SEQ ID NO: 284645 - RNA, 19 nt, Human
cuaaagccacaaaccacaa

SEQ ID NO: 284646 - RNA, 20 nt, Human
cuaccacaguguggcaaagg

SEQ ID NO: 284647 - RNA, 18 nt, Human
cuacugccuuucaguagc

SEQ ID NO: 284648 - RNA, 24 nt, Human
cuacugccuuucaguagcacuguu

SEQ ID NO: 284649 - RNA, 19 nt, Human
cucacucucuaucucucuc

SEQ ID NO: 284650 - RNA, 18 nt, Human
cucaugacauuucuggga

SEQ ID NO: 284651 - RNA, 18 nt, Human
cucucaauaaucuuccaa

SEQ ID NO: 284652 - RNA, 24 nt, Human
cucucagaguucaauggcccucug

SEQ ID NO: 284653 - RNA, 23 nt, Human
cugcauagaaacaaguacugaug

SEQ ID NO: 284654 - RNA, 21 nt, Human
cugcgccccgccccagcgaag

SEQ ID NO: 284655 - RNA, 23 nt, Human
cuggccuccaggcagacugcugg

SEQ ID NO: 284656 - RNA, 21 nt, Human
cuuaggcaucgccuucccaga

SEQ ID NO: 284657 - RNA, 23 nt, Human
cuucaacacaaaaugacuccgca

SEQ ID NO: 284658 - RNA, 19 nt, Human
cuuucaguucauccauugc

SEQ ID NO: 284659 - RNA, 21 nt, Human
gaaacaaguacugaugcucuu

SEQ ID NO: 284660 - RNA, 31 nt, Human
gaacacccccaaccuuuuaaaaaacaaaaag

SEQ ID NO: 284661 - RNA, 18 nt, Human
gaccagggcccgcuggcu

SEQ ID NO: 284662 - RNA, 23 nt, Human
gaccggccggccggccguccuuu

SEQ ID NO: 284663 - RNA, 20 nt, Human
gagcuacucagccacugcuc

SEQ ID NO: 284664 - RNA, 23 nt, Human
gagcuggagcugggaacagccuc

SEQ ID NO: 284665 - RNA, 19 nt, Human
gaguugaaaacugagcucc

SEQ ID NO: 284666 - RNA, 22 nt, Human
gcaagaacaaaaaaccaaacac

SEQ ID NO: 284667 - RNA, 22 nt, Human
gcaggagcagacgggcucuugg

SEQ ID NO: 284668 - RNA, 20 nt, Human
gcccaugcuacaaccuuggc

SEQ ID NO: 284669 - RNA, 18 nt, Human
gcccugaaacaagggcuc

SEQ ID NO: 284670 - RNA, 20 nt, Human
gccuccaggcagacugcugg

SEQ ID NO: 284671 - RNA, 18 nt, Human
gccugcgccccgccccag

SEQ ID NO: 284672 - RNA, 23 nt, Human
gcgggcaacccggauugcacugu

SEQ ID NO: 284673 - RNA, 25 nt, Human
gcuaaguuuugucccucaguggcug

SEQ ID NO: 284674 - RNA, 19 nt, Human
ggacauggaugaaauugga

SEQ ID NO: 284675 - RNA, 24 nt, Human
ggaccugaaaucuuguacuggugg

SEQ ID NO: 284676 - RNA, 22 nt, Human
ggagcgcucuggcuccuuccuc

SEQ ID NO: 284677 - RNA, 20 nt, Human
ggcagagucuggcuugaggg

SEQ ID NO: 284678 - RNA, 19 nt, Human
ggcgagguuagagcuggag

SEQ ID NO: 284679 - RNA, 18 nt, Human
gggagggauagcacuggg

SEQ ID NO: 284680 - RNA, 23 nt, Human
gguauuuucccccaagaaaacca

SEQ ID NO: 284681 - RNA, 19 nt, Human
guaggagacauguugagau

SEQ ID NO: 284682 - RNA, 21 nt, Human
uaaaagccaacccccagaaau

SEQ ID NO: 284683 - RNA, 18 nt, Human
uaacuaaccugcacaaug

SEQ ID NO: 284684 - RNA, 24 nt, Human
uaagcagcaaaaaccgcagcccga

SEQ ID NO: 284685 - RNA, 24 nt, Human
uacaucaaguacugcagaggcacc

SEQ ID NO: 284686 - RNA, 21 nt, Human
uaccuuagaaguaguauaauu

SEQ ID NO: 284687 - RNA, 19 nt, Human
uaccuuagaguuuccugac

SEQ ID NO: 284688 - RNA, 24 nt, Human
uaccuuagaguuuccugaccaggg

SEQ ID NO: 284689 - RNA, 19 nt, Human
uacugcagcaccagagcgc

SEQ ID NO: 284690 - RNA, 19 nt, Human
uagaccagagcaaaggcag

SEQ ID NO: 284691 - RNA, 22 nt, Human
uagcccccugggccauaauuuc

SEQ ID NO: 284692 - RNA, 22 nt, Human
uaggcugaaacugaaacugccc

SEQ ID NO: 284693 - RNA, 23 nt, Human
uauccucaguaggagacauguug

SEQ ID NO: 284694 - RNA, 19 nt, Human
ucaaaacagaccuucugag

SEQ ID NO: 284695 - RNA, 21 nt, Human
ucaaaacagaccuucugaggg

SEQ ID NO: 284696 - RNA, 20 nt, Human
ucaaguacugcagaggcacc

SEQ ID NO: 284697 - RNA, 20 nt, Human
ucacagagacuacuauuggg

SEQ ID NO: 284698 - RNA, 20 nt, Human
ucagaaccuggaaagggucc

SEQ ID NO: 284699 - RNA, 21 nt, Human
ucccccaagaaaaccagaguc

SEQ ID NO: 284700 - RNA, 22 nt, Human
ucccucaguggcugaacacccc

SEQ ID NO: 284701 - RNA, 23 nt, Human
ucccuuaggcaucgccuucccag

SEQ ID NO: 284702 - RNA, 23 nt, Human
uccggacagagaacaggcgcccc

SEQ ID NO: 284703 - RNA, 25 nt, Human
ucgcaagaacaaaaaaccaaacacc

SEQ ID NO: 284704 - RNA, 22 nt, Human
ucgggggaggggggagggauag

SEQ ID NO: 284705 - RNA, 18 nt, Human
ucucaggggcaucaugga

SEQ ID NO: 284706 - RNA, 19 nt, Human
ucugcaaaaugacugccca

SEQ ID NO: 284707 - RNA, 18 nt, Human
ucuugguuuuggcagagu

SEQ ID NO: 284708 - RNA, 22 nt, Human
ucuugguuuuggcagagucugg

SEQ ID NO: 284709 - RNA, 20 nt, Human
ucuuuagccccaaaucucuc

SEQ ID NO: 284710 - RNA, 22 nt, Human
ugaaaagagaauacuuucccau

SEQ ID NO: 284711 - RNA, 22 nt, Human
ugaaacaagggcucaaaaauca

SEQ ID NO: 284712 - RNA, 23 nt, Human
ugaagacagaauacaaaggagau

SEQ ID NO: 284713 - RNA, 19 nt, Human
ugaccagggcccgcuggcu

SEQ ID NO: 284714 - RNA, 22 nt, Human
ugaccagggcccgcuggcugcu

SEQ ID NO: 284715 - RNA, 21 nt, Human
ugaccccaauacaucaaguac

SEQ ID NO: 284716 - RNA, 21 nt, Human
ugagcaauugcaaacgugaca

SEQ ID NO: 284717 - RNA, 19 nt, Human
ugauugugguauuuucccc

SEQ ID NO: 284718 - RNA, 21 nt, Human
ugcacccccucccuccuucaa

SEQ ID NO: 284719 - RNA, 21 nt, Human
ugccucaguucccccgacugg

SEQ ID NO: 284720 - RNA, 20 nt, Human
ugccuggccucaauccaccu

SEQ ID NO: 284721 - RNA, 20 nt, Human
uggaauacuaugcagccaua

SEQ ID NO: 284722 - RNA, 20 nt, Human
uggauuaagaaaauguggcc

SEQ ID NO: 284723 - RNA, 24 nt, Human
uggcaacauacugcagcaccagag

SEQ ID NO: 284724 - RNA, 22 nt, Human
uggccuccaggcagacugcugg

SEQ ID NO: 284725 - RNA, 19 nt, Human
uggcugcauguaacagcag

SEQ ID NO: 284726 - RNA, 24 nt, Human
uggcugcuaagacuucuuccuggu

SEQ ID NO: 284727 - RNA, 18 nt, Human
uggggacugugguggggu

SEQ ID NO: 284728 - RNA, 20 nt, Human
uggggucgggggagggggga

SEQ ID NO: 284729 - RNA, 20 nt, Human
uggggucgggggagggggga

SEQ ID NO: 284730 - RNA, 19 nt, Human
ugguggcaaauauucaaga

SEQ ID NO: 284731 - RNA, 24 nt, Human
uguaaaaagaguauuuuaacucaa

SEQ ID NO: 284732 - RNA, 21 nt, Human
uguaaaaugagaauacuugca

SEQ ID NO: 284733 - RNA, 24 nt, Human
uuaaagggacuguggcccuauuag

SEQ ID NO: 284734 - RNA, 19 nt, Human
uuaagucagagugccaaag

SEQ ID NO: 284735 - RNA, 21 nt, Human
uuaagucagagugccaaaggc

SEQ ID NO: 284736 - RNA, 24 nt, Human
uuagaguauaauaaaaaaaagaaa

SEQ ID NO: 284737 - RNA, 24 nt, Human
uucaauauuuuguuaggcaggcaa

SEQ ID NO: 284738 - RNA, 21 nt, Human
uucagggccagggagagcuaa

SEQ ID NO: 284739 - RNA, 19 nt, Human
uucauccauugccagauuc

SEQ ID NO: 284740 - RNA, 21 nt, Human
uucccagauaagcagcaaaaa

SEQ ID NO: 284741 - RNA, 20 nt, Human
uuccugaccagggcccgcug

SEQ ID NO: 284742 - RNA, 19 nt, Human
uugaaaacugagcuccccu

SEQ ID NO: 284743 - RNA, 19 nt, Human
uuguccuaaguggcugcau

SEQ ID NO: 284744 - RNA, 18 nt, Human
uuuagcccccugggccau

SEQ ID NO: 284745 - RNA, 23 nt, Human
uuuccauauaaacugaaccugca

SEQ ID NO: 284746 - RNA, 21 nt, Human
uuugaaaaauggcaagccaag

SEQ ID NO: 284747 - RNA, 24 nt, Human
uuugcauuuccauauaaacugaac

SEQ ID NO: 284748 - RNA, 25 nt, Human
uuuguaagccaucucuugauuuugc

SEQ ID NO: 284749 - RNA, 20 nt, Human
aaacagaggccccaucuggc

SEQ ID NO: 284750 - RNA, 18 nt, Human
augcccaucuagcggccc

SEQ ID NO: 284751 - RNA, 19 nt, Human
caccccaugcccaucuagc

SEQ ID NO: 284752 - RNA, 23 nt, Human
caccuagagccguggacgggggc

SEQ ID NO: 284753 - RNA, 21 nt, Human
caucuggcggucccaaagccc

SEQ ID NO: 284754 - RNA, 18 nt, Human
ccaaagcccuccgaccua

SEQ ID NO: 284755 - RNA, 22 nt, Human
ccagaggcccaccccaugccca

SEQ ID NO: 284756 - RNA, 19 nt, Human
ccagccccccgguccgccc

SEQ ID NO: 284757 - RNA, 22 nt, Human
cccacuccacaucauggcucgc

SEQ ID NO: 284758 - RNA, 21 nt, Human
cccaucuggcggucccaaagc

SEQ ID NO: 284759 - RNA, 21 nt, Human
ccccccaacuccgaaaguccg

SEQ ID NO: 284760 - RNA, 25 nt, Human
ccccccaacuccgaaaguccggcuc

SEQ ID NO: 284761 - RNA, 22 nt, Human
ccccccgguccgcccgcucucc

SEQ ID NO: 284762 - RNA, 25 nt, Human
ccccgcugucucugcgccucguccg

SEQ ID NO: 284763 - RNA, 21 nt, Human
cccgcaccggcccagcccccc

SEQ ID NO: 284764 - RNA, 23 nt, Human
cccgccccaccuagagccgugga

SEQ ID NO: 284765 - RNA, 23 nt, Human
cccggaccccccaacuccgaaag

SEQ ID NO: 284766 - RNA, 19 nt, Human
ccgaaaguccggcuccaag

SEQ ID NO: 284767 - RNA, 23 nt, Human
ccgaccuaucuacuggccccacu

SEQ ID NO: 284768 - RNA, 18 nt, Human
ccgccccgcugucucugc

SEQ ID NO: 284769 - RNA, 23 nt, Human
ccgccccgcugucucugcgccuc

SEQ ID NO: 284770 - RNA, 22 nt, Human
ccgcgugccgcgccccggccgc

SEQ ID NO: 284771 - RNA, 25 nt, Human
ccgcgugccgcgccccggccgcccc

SEQ ID NO: 284772 - RNA, 18 nt, Human
ccucugccucgccccaaa

SEQ ID NO: 284773 - RNA, 23 nt, Human
ccucugccucgccccaaaccaga

SEQ ID NO: 284774 - RNA, 20 nt, Human
cgacgcgaggggagcggcaa

SEQ ID NO: 284775 - RNA, 21 nt, Human
cgcccgcucuccucgcccgga

SEQ ID NO: 284776 - RNA, 18 nt, Human
cgccgcgugccgcgcccc

SEQ ID NO: 284777 - RNA, 21 nt, Human
cgcgccucccacugggacuca

SEQ ID NO: 284778 - RNA, 21 nt, Human
cgugccgcgccccggccgccc

SEQ ID NO: 284779 - RNA, 22 nt, Human
cucugccucgccccaaaccaga

SEQ ID NO: 284780 - RNA, 21 nt, Human
cuggcggucccaaagcccucc

SEQ ID NO: 284781 - RNA, 23 nt, Human
gccccaaaccagaggcccacccc

SEQ ID NO: 284782 - RNA, 18 nt, Human
gccccacuccacaucaug

SEQ ID NO: 284783 - RNA, 19 nt, Human
gccccccgguccgcccgcu

SEQ ID NO: 284784 - RNA, 19 nt, Human
gccccggaccccccaacuc

SEQ ID NO: 284785 - RNA, 20 nt, Human
gccccggaccccccaacucc

SEQ ID NO: 284786 - RNA, 23 nt, Human
gccucgccgcccgcaccggccca

SEQ ID NO: 284787 - RNA, 21 nt, Human
gcuccaaguuagaaaccgaag

SEQ ID NO: 284788 - RNA, 18 nt, Human
ggcaaggcagaggccggc

SEQ ID NO: 284789 - RNA, 21 nt, Human
gggcacccagaccagaggcac

SEQ ID NO: 284790 - RNA, 21 nt, Human
gggcgcggggauccgacgcga

SEQ ID NO: 284791 - RNA, 20 nt, Human
guccgccgcgucccucucca

SEQ ID NO: 284792 - RNA, 19 nt, Human
uccgcccgcucuccucgcc

SEQ ID NO: 284793 - RNA, 22 nt, Human
ucguccgccugccucgccgccc

SEQ ID NO: 284794 - RNA, 22 nt, Human
ugccucgccccaaaccagaggc

SEQ ID NO: 284795 - RNA, 26 nt, Human
ugccucgccgcccgcaccggcccagc

SEQ ID NO: 284796 - RNA, 18 nt, Human
uggccuccggguacaacu

SEQ ID NO: 284797 - RNA, 21 nt, Human
ugggacucauguggccuccgg

SEQ ID NO: 284798 - RNA, 18 nt, Human
aagcgccucagccgcuuc

SEQ ID NO: 284799 - RNA, 22 nt, Human
acagaaaccaguccuggcugag

SEQ ID NO: 284800 - RNA, 19 nt, Human
ccaagcgccucagccgcuu

SEQ ID NO: 284801 - RNA, 21 nt, Human
cggaggggaccgagcugagca

SEQ ID NO: 284802 - RNA, 22 nt, Human
cuuuucggguuccaagcgccuc

SEQ ID NO: 284803 - RNA, 21 nt, Human
uacugacggccgggcgggcac

SEQ ID NO: 284804 - RNA, 23 nt, Human
uccuggcugagacagagaggagc

SEQ ID NO: 284805 - RNA, 21 nt, Human
ucgccgcugccacagcuccug

SEQ ID NO: 284806 - RNA, 18 nt, Human
ugacggccgggcgggcac

SEQ ID NO: 284807 - RNA, 21 nt, Human
ugagcaucugacauucuccuc

SEQ ID NO: 284808 - RNA, 23 nt, Human
uuccuuucgccgcugccacagcu

SEQ ID NO: 284809 - RNA, 20 nt, Human
aaaacaaauaacacaaaagc

SEQ ID NO: 284810 - RNA, 19 nt, Human
aaacaagaauaaugaggca

SEQ ID NO: 284811 - RNA, 24 nt, Human
aaagugcugggauuacaggcauga

SEQ ID NO: 284812 - RNA, 23 nt, Human
aacacaaaagcacaacucuugga

SEQ ID NO: 284813 - RNA, 19 nt, Human
aagugcugggauuacaggc

SEQ ID NO: 284814 - RNA, 21 nt, Human
aagugcugggauuacaggcau

SEQ ID NO: 284815 - RNA, 26 nt, Human
aagugcugggauuacaggcaugagcc

SEQ ID NO: 284816 - RNA, 24 nt, Human
acaggguuccgccauguuggccag

SEQ ID NO: 284817 - RNA, 23 nt, Human
acccaggcuggagugcaguggug

SEQ ID NO: 284818 - RNA, 24 nt, Human
acccaggcuggagugcaguggugu

SEQ ID NO: 284819 - RNA, 23 nt, Human
accucgaccucccaaagugcugg

SEQ ID NO: 284820 - RNA, 20 nt, Human
agacaggguuccgccauguu

SEQ ID NO: 284821 - RNA, 25 nt, Human
aggaaaaaaucugacauuuaccaac

SEQ ID NO: 284822 - RNA, 23 nt, Human
aggcaugagccacugugcccggc

SEQ ID NO: 284823 - RNA, 19 nt, Human
agugauccacccaccucga

SEQ ID NO: 284824 - RNA, 20 nt, Human
agugcaguggugucgucucg

SEQ ID NO: 284825 - RNA, 23 nt, Human
agugcaguggugucgucucggcu

SEQ ID NO: 284826 - RNA, 24 nt, Human
agugcaguggugucgucucggcuc

SEQ ID NO: 284827 - RNA, 18 nt, Human
agugcugggauuacaggc

SEQ ID NO: 284828 - RNA, 24 nt, Human
auuuuuguaauuuugguagagaca

SEQ ID NO: 284829 - RNA, 24 nt, Human
caaagugcugggauuacaggcaug

SEQ ID NO: 284830 - RNA, 23 nt, Human
caagugauccacccaccucgacc

SEQ ID NO: 284831 - RNA, 24 nt, Human
caccaugcucggcuaauuuuugua

SEQ ID NO: 284832 - RNA, 22 nt, Human
cacccaccucgaccucccaaag

SEQ ID NO: 284833 - RNA, 23 nt, Human
cacccaccucgaccucccaaagu

SEQ ID NO: 284834 - RNA, 24 nt, Human
cacccaggcuggagugcaguggug

SEQ ID NO: 284835 - RNA, 23 nt, Human
cacugcaacugccacuuccuggg

SEQ ID NO: 284836 - RNA, 24 nt, Human
caggguuccgccauguuggccagg

SEQ ID NO: 284837 - RNA, 24 nt, Human
cauguuggccaggcuggucucaaa

SEQ ID NO: 284838 - RNA, 23 nt, Human
ccaaagugcugggauuacaggca

SEQ ID NO: 284839 - RNA, 24 nt, Human
ccaaagugcugggauuacaggcau

SEQ ID NO: 284840 - RNA, 20 nt, Human
ccaagugauccacccaccuc

SEQ ID NO: 284841 - RNA, 22 nt, Human
ccaagugauccacccaccucga

SEQ ID NO: 284842 - RNA, 19 nt, Human
ccauguuggccaggcuggu

SEQ ID NO: 284843 - RNA, 22 nt, Human
ccauguuggccaggcuggucuc

SEQ ID NO: 284844 - RNA, 24 nt, Human
cccaaagugcugggauuacaggca

SEQ ID NO: 284845 - RNA, 19 nt, Human
cccaccucgaccucccaaa

SEQ ID NO: 284846 - RNA, 24 nt, Human
cccucugucacccaggcuggagug

SEQ ID NO: 284847 - RNA, 20 nt, Human
ccgccuggagagaacucccg

SEQ ID NO: 284848 - RNA, 24 nt, Human
ccugaccccaagugauccacccac

SEQ ID NO: 284849 - RNA, 23 nt, Human
ccuggguucaagcaauucuccug

SEQ ID NO: 284850 - RNA, 22 nt, Human
cgagacagagucucccucuguc

SEQ ID NO: 284851 - RNA, 18 nt, Human
cgcugaccagggaaccug

SEQ ID NO: 284852 - RNA, 24 nt, Human
cggcggcgguggcggagggggcag

SEQ ID NO: 284853 - RNA, 24 nt, Human
cucaaacccugaccccaagugauc

SEQ ID NO: 284854 - RNA, 24 nt, Human
cucacugcaacugccacuuccugg

SEQ ID NO: 284855 - RNA, 24 nt, Human
cucccucugucacccaggcuggag

SEQ ID NO: 284856 - RNA, 23 nt, Human
cucugucacccaggcuggagugc

SEQ ID NO: 284857 - RNA, 21 nt, Human
cugcaacugccacuuccuggg

SEQ ID NO: 284858 - RNA, 24 nt, Human
cuuccuggguucaagcaauucucc

SEQ ID NO: 284859 - RNA, 24 nt, Human
gaccccaagugauccacccaccuc

SEQ ID NO: 284860 - RNA, 24 nt, Human
gacuacaggcaugcgccaccaugc

SEQ ID NO: 284861 - RNA, 22 nt, Human
gagacagagucucccucuguca

SEQ ID NO: 284862 - RNA, 24 nt, Human
gaguagcugcgacuacaggcaugc

SEQ ID NO: 284863 - RNA, 18 nt, Human
gauuacaggcaugagcca

SEQ ID NO: 284864 - RNA, 21 nt, Human
gauuacaggcaugagccacug

SEQ ID NO: 284865 - RNA, 24 nt, Human
gauuacaggcaugagccacugugc

SEQ ID NO: 284866 - RNA, 25 nt, Human
gccauguuggccaggcuggucucaa

SEQ ID NO: 284867 - RNA, 24 nt, Human
gcggcggcgguggcggagggggca

SEQ ID NO: 284868 - RNA, 24 nt, Human
ggauuacaggcaugagccacugug

SEQ ID NO: 284869 - RNA, 23 nt, Human
ggcggcgguggcggagggggcag

SEQ ID NO: 284870 - RNA, 21 nt, Human
ggcgggcggcggcgguggcgg

SEQ ID NO: 284871 - RNA, 22 nt, Human
ggguuccgccauguuggccagg

SEQ ID NO: 284872 - RNA, 21 nt, Human
guagagacaggguuccgccau

SEQ ID NO: 284873 - RNA, 22 nt, Human
guagagacaggguuccgccaug

SEQ ID NO: 284874 - RNA, 24 nt, Human
gugauccacccaccucgaccuccc

SEQ ID NO: 284875 - RNA, 18 nt, Human
uaacacaaaagcacaacu

SEQ ID NO: 284876 - RNA, 24 nt, Human
uaauuuuuguaauuuugguagaga

SEQ ID NO: 284877 - RNA, 23 nt, Human
uacaggcaugagccacugugccc

SEQ ID NO: 284878 - RNA, 18 nt, Human
uacaggcaugcgccacca

SEQ ID NO: 284879 - RNA, 22 nt, Human
uagagacaggguuccgccaugu

SEQ ID NO: 284880 - RNA, 19 nt, Human
ucaaacccugaccccaagu

SEQ ID NO: 284881 - RNA, 19 nt, Human
ucaagcaauucuccugccu

SEQ ID NO: 284882 - RNA, 24 nt, Human
ucacccaggcuggagugcaguggu

SEQ ID NO: 284883 - RNA, 24 nt, Human
ucacugcaacugccacuuccuggg

SEQ ID NO: 284884 - RNA, 24 nt, Human
ucccaaagugcugggauuacaggc

SEQ ID NO: 284885 - RNA, 21 nt, Human
ucccgaccgggaugggacgcu

SEQ ID NO: 284886 - RNA, 20 nt, Human
ucccucugucacccaggcug

SEQ ID NO: 284887 - RNA, 24 nt, Human
ucccucugucacccaggcuggagu

SEQ ID NO: 284888 - RNA, 18 nt, Human
uccugccucaaccucgcg

SEQ ID NO: 284889 - RNA, 20 nt, Human
uccuggguucaagcaauucu

SEQ ID NO: 284890 - RNA, 21 nt, Human
uccuggguucaagcaauucuc

SEQ ID NO: 284891 - RNA, 24 nt, Human
uccuggguucaagcaauucuccug

SEQ ID NO: 284892 - RNA, 22 nt, Human
ucgagacagagucucccucugu

SEQ ID NO: 284893 - RNA, 24 nt, Human
ucgcgaguagcugcgacuacaggc

SEQ ID NO: 284894 - RNA, 23 nt, Human
ucucccucugucacccaggcugg

SEQ ID NO: 284895 - RNA, 24 nt, Human
ucucccucugucacccaggcugga

SEQ ID NO: 284896 - RNA, 24 nt, Human
ucuccugccucaaccucgcgagua

SEQ ID NO: 284897 - RNA, 24 nt, Human
ucugucacccaggcuggagugcag

SEQ ID NO: 284898 - RNA, 22 nt, Human
ugagugaaaacaaauaacacaa

SEQ ID NO: 284899 - RNA, 24 nt, Human
ugauccacccaccucgaccuccca

SEQ ID NO: 284900 - RNA, 22 nt, Human
ugcaguggugucgucucggcuc

SEQ ID NO: 284901 - RNA, 19 nt, Human
ugccgccuggagagaacuc

SEQ ID NO: 284902 - RNA, 20 nt, Human
ugccucaaccucgcgaguag

SEQ ID NO: 284903 - RNA, 24 nt, Human
ugcgacuacaggcaugcgccacca

SEQ ID NO: 284904 - RNA, 18 nt, Human
uggaggaaaaaaucugac

SEQ ID NO: 284905 - RNA, 23 nt, Human
uggagugcaguggugucgucucg

SEQ ID NO: 284906 - RNA, 24 nt, Human
uggagugcaguggugucgucucgg

SEQ ID NO: 284907 - RNA, 23 nt, Human
uggccaggcuggucucaaacccu

SEQ ID NO: 284908 - RNA, 18 nt, Human
ugggauuacaggcaugag

SEQ ID NO: 284909 - RNA, 21 nt, Human
ugggauuacaggcaugagcca

SEQ ID NO: 284910 - RNA, 22 nt, Human
ugggauuacaggcaugagccac

SEQ ID NO: 284911 - RNA, 22 nt, Human
ugggauuacaggcaugagccac

SEQ ID NO: 284912 - RNA, 22 nt, Human
ugggauuacaggcaugagccac

SEQ ID NO: 284913 - RNA, 23 nt, Human
ugggauuacaggcaugagccacu

SEQ ID NO: 284914 - RNA, 24 nt, Human
ugggauuacaggcaugagccacug

SEQ ID NO: 284915 - RNA, 26 nt, Human
ugggauuacaggcaugagccacugug

SEQ ID NO: 284916 - RNA, 21 nt, Human
uggguucaagcaauucuccug

SEQ ID NO: 284917 - RNA, 23 nt, Human
uggguucaagcaauucuccugcc

SEQ ID NO: 284918 - RNA, 24 nt, Human
uggguucaagcaauucuccugccu

SEQ ID NO: 284919 - RNA, 24 nt, Human
ugguagagacaggguuccgccaug

SEQ ID NO: 284920 - RNA, 21 nt, Human
uucaagcaauucuccugccuc

SEQ ID NO: 284921 - RNA, 26 nt, Human
uucaagcaauucuccugccucaaccu

SEQ ID NO: 284922 - RNA, 21 nt, Human
uuccgccauguuggccaggcu

SEQ ID NO: 284923 - RNA, 23 nt, Human
uuccucggcaucgugccgccugg

SEQ ID NO: 284924 - RNA, 24 nt, Human
uugguagagacaggguuccgccau

SEQ ID NO: 284925 - RNA, 20 nt, Human
uuuuuguaauuuugguagag

SEQ ID NO: 284926 - RNA, 27 nt, Human
uuuuuuuuuuuuuuuuuucuuucgggg

SEQ ID NO: 284927 - RNA, 19 nt, Human
aaaaaacaaaacccagcaa

SEQ ID NO: 284928 - RNA, 21 nt, Human
aacauggugaagcccugucuc

SEQ ID NO: 284929 - RNA, 22 nt, Human
aaugaaaagaagguggaaggag

SEQ ID NO: 284930 - RNA, 24 nt, Human
acagagcaagacccugucucaaaa

SEQ ID NO: 284931 - RNA, 20 nt, Human
acccagcaagaccccagucu

SEQ ID NO: 284932 - RNA, 24 nt, Human
acccugucucaaaaaacaaaaccc

SEQ ID NO: 284933 - RNA, 23 nt, Human
accuaagccugagaagucaaggc

SEQ ID NO: 284934 - RNA, 24 nt, Human
acugcacuccagccugggcgacag

SEQ ID NO: 284935 - RNA, 26 nt, Human
acugcacuccagccugggcgacagag

SEQ ID NO: 284936 - RNA, 21 nt, Human
agaaaugaaaagaagguggaa

SEQ ID NO: 284937 - RNA, 23 nt, Human
agaaaugaaaagaagguggaagg

SEQ ID NO: 284938 - RNA, 23 nt, Human
agcugggcaugguggcaugugcc

SEQ ID NO: 284939 - RNA, 21 nt, Human
agcuuggcaacauggugaagc

SEQ ID NO: 284940 - RNA, 23 nt, Human
agcuuggcaacauggugaagccc

SEQ ID NO: 284941 - RNA, 24 nt, Human
agguuggggggucaccuaagccug

SEQ ID NO: 284942 - RNA, 24 nt, Human
aucgugccacugcacuccagccug

SEQ ID NO: 284943 - RNA, 18 nt, Human
caaaaaacaaaacccagc

SEQ ID NO: 284944 - RNA, 20 nt, Human
caaaacccagcaagacccca

SEQ ID NO: 284945 - RNA, 20 nt, Human
caacauggugaagcccuguc

SEQ ID NO: 284946 - RNA, 22 nt, Human
caacauggugaagcccugucuc

SEQ ID NO: 284947 - RNA, 24 nt, Human
caacauggugaagcccugucucua

SEQ ID NO: 284948 - RNA, 24 nt, Human
caagacccugucucaaaaaacaaa

SEQ ID NO: 284949 - RNA, 21 nt, Human
caccucuaaccugcaccagca

SEQ ID NO: 284950 - RNA, 23 nt, Human
cacuccagccugggcgacagagc

SEQ ID NO: 284951 - RNA, 19 nt, Human
cacugcacuccagccuggg

SEQ ID NO: 284952 - RNA, 20 nt, Human
cacugcacuccagccugggc

SEQ ID NO: 284953 - RNA, 20 nt, Human
cacugcacuccagccugggc

SEQ ID NO: 284954 - RNA, 22 nt, Human
cacugcacuccagccugggcga

SEQ ID NO: 284955 - RNA, 24 nt, Human
cacugcacuccagccugggcgaca

SEQ ID NO: 284956 - RNA, 27 nt, Human
cacugcacuccagccugggcgacagag

SEQ ID NO: 284957 - RNA, 26 nt, Human
cagagcaagacccugucucaaaaaac

SEQ ID NO: 284958 - RNA, 22 nt, Human
cagcaagaccccagucuuuuaa

SEQ ID NO: 284959 - RNA, 26 nt, Human
caggaccaaagcgugugucucacuag

SEQ ID NO: 284960 - RNA, 24 nt, Human
caugaucgugccacugcacuccag

SEQ ID NO: 284961 - RNA, 20 nt, Human
ccacugcacuccagccuggg

SEQ ID NO: 284962 - RNA, 20 nt, Human
ccacugcacuccagccuggg

SEQ ID NO: 284963 - RNA, 21 nt, Human
ccacugcacuccagccugggc

SEQ ID NO: 284964 - RNA, 21 nt, Human
ccacugcacuccagccugggc

SEQ ID NO: 284965 - RNA, 24 nt, Human
ccacugcacuccagccugggcgac

SEQ ID NO: 284966 - RNA, 21 nt, Human
ccauguacuuccaaaaucaga

SEQ ID NO: 284967 - RNA, 23 nt, Human
cccugucucaaaaaacaaaaccc

SEQ ID NO: 284968 - RNA, 22 nt, Human
ccuccggcuagccgcaagcccu

SEQ ID NO: 284969 - RNA, 21 nt, Human
ccugggaggaugagguugggg

SEQ ID NO: 284970 - RNA, 26 nt, Human
ccuucuacaacuacgggccgaaagcc

SEQ ID NO: 284971 - RNA, 22 nt, Human
cugcagugagccaugaucgugc

SEQ ID NO: 284972 - RNA, 23 nt, Human
cuucgcgccaaucgcguggcccc

SEQ ID NO: 284973 - RNA, 21 nt, Human
gacagagcaagacccugucuc

SEQ ID NO: 284974 - RNA, 18 nt, Human
gcaacauggugaagcccu

SEQ ID NO: 284975 - RNA, 24 nt, Human
gcacuccagccugggcgacagagc

SEQ ID NO: 284976 - RNA, 22 nt, Human
gccacugcacuccagccugggc

SEQ ID NO: 284977 - RNA, 24 nt, Human
gccacugcacuccagccugggcga

SEQ ID NO: 284978 - RNA, 19 nt, Human
gccaugaucgugccacugc

SEQ ID NO: 284979 - RNA, 24 nt, Human
gccugagaagucaaggcugcagug

SEQ ID NO: 284980 - RNA, 23 nt, Human
gcgacagagcaagacccugucuc

SEQ ID NO: 284981 - RNA, 21 nt, Human
ggaaaauuccaaaauacauga

SEQ ID NO: 284982 - RNA, 23 nt, Human
uagcuuggcaacauggugaagcc

SEQ ID NO: 284983 - RNA, 24 nt, Human
ucagcugggcaugguggcaugugc

SEQ ID NO: 284984 - RNA, 24 nt, Human
uccagccugggcgacagagcaaga

SEQ ID NO: 284985 - RNA, 23 nt, Human
ucgugccacugcacuccagccug

SEQ ID NO: 284986 - RNA, 22 nt, Human
ucuacaacuacgggccgaaagc

SEQ ID NO: 284987 - RNA, 24 nt, Human
ucucaaaaaacaaaacccagcaag

SEQ ID NO: 284988 - RNA, 18 nt, Human
ugaaaagaagguggaagg

SEQ ID NO: 284989 - RNA, 20 nt, Human
ugaaaagaagguggaaggag

SEQ ID NO: 284990 - RNA, 22 nt, Human
ugcagugagccaugaucgugcc

SEQ ID NO: 284991 - RNA, 21 nt, Human
ugccuguaguuucagccaccu

SEQ ID NO: 284992 - RNA, 24 nt, Human
ugccuguaguuucagccaccuggg

SEQ ID NO: 284993 - RNA, 25 nt, Human
uggaaaauuccaaaauacaugagag

SEQ ID NO: 284994 - RNA, 19 nt, Human
uggcaacauggugaagccc

SEQ ID NO: 284995 - RNA, 18 nt, Human
ugguggcaugugccugua

SEQ ID NO: 284996 - RNA, 20 nt, Human
ugguggcaugugccuguagu

SEQ ID NO: 284997 - RNA, 23 nt, Human
ugucucacuagaaaugaaaagaa

SEQ ID NO: 284998 - RNA, 21 nt, Human
uuggcaacauggugaagcccu

SEQ ID NO: 284999 - RNA, 21 nt, Human
aaaaaguucuaauugaggaca

SEQ ID NO: 285000 - RNA, 21 nt, Human
aaaauucagauacagucaccg

SEQ ID NO: 285001 - RNA, 24 nt, Human
aaaggagaaagcuggaucccgucg

SEQ ID NO: 285002 - RNA, 20 nt, Human
aacaaacacacuugcaaaca

SEQ ID NO: 285003 - RNA, 24 nt, Human
aagccaauuuccaguaauucgcgc

SEQ ID NO: 285004 - RNA, 20 nt, Human
aagguaccuucggccccaac

SEQ ID NO: 285005 - RNA, 22 nt, Human
aauccaaaaggagaaagcugga

SEQ ID NO: 285006 - RNA, 19 nt, Human
acaaacacacuugcaaaca

SEQ ID NO: 285007 - RNA, 23 nt, Human
accaaguacauagccucaaucca

SEQ ID NO: 285008 - RNA, 21 nt, Human
acuacacauucugcagcugca

SEQ ID NO: 285009 - RNA, 27 nt, Human
agaaacaauaagagaugaccgguaccc

SEQ ID NO: 285010 - RNA, 18 nt, Human
agguaaugaaugaaaggc

SEQ ID NO: 285011 - RNA, 19 nt, Human
aguggcagcugggguacaa

SEQ ID NO: 285012 - RNA, 26 nt, Human
auggcacagacaauaacuguuccaaa

SEQ ID NO: 285013 - RNA, 25 nt, Human
auuucucuagccuggcuucucacug

SEQ ID NO: 285014 - RNA, 19 nt, Human
cacacagaauagcaaacaa
